United States Patent Application Publication US 2007/0061916 A1 - sequence listing, part 5

SEQ ID NO: 16078 - DNA, 338 bp, Gossypium hirsutum
  unsure (1)..(338): unsure at all n locations
  Clone ID: LIB3148-017-Q1-K1-E2
gtttaataaagtttttttttttactttttcttttggttgtgtatagaggcattacgtttggcccttcacatcacattcttttcaactgttccccctctaataccactgtggtatagtggggtttgatacagagaatttacagaaaagaatagccttctttagcagcnnaaaaaaaaaaaaaaaaaaaaaaaaaaaaaaaaaaaaaaaaaaaaaaaaaaaaaaaaaaaaaaaaaaaaaaaaaaaaaaaaaaaagggnggnggntttaaaggataaaaaattaaaaacgcgtgcttgcaaaggaataaattttttttagttgtccttaaattaaattaaa

SEQ ID NO: 16079 - DNA, 242 bp, Gossypium hirsutum
  Clone ID: LIB3145-033-Q1-K1-D9
gtatttttagccaagagtgaattttagtatagctgaggttgtagaggctgatagggtggacttgttataaataatttggtttctcctcattatccatcagagatgcatttgaattggatgtcttttttgttatcttgattgttaatgataaaattgcagtagtgcttgttctattaaaaaattataaatattaaaaataatataaacaaaattattatttttttttattaatattttattaa

SEQ ID NO: 16080 - DNA, 424 bp, Gossypium hirsutum
  unsure (1)..(424): unsure at all n locations
  Clone ID: LIB3146-027-Q1-K1-E12
ggagaaacgtctggtgtagacggccaactgtgggttttatgtccaattctttttgctatgcaggggtttgaggcatatgttggactcctattgctcaagacagcattcgttggagttgttaccgaatggcaggtaatttgttgtgggatacttttggttttgatggctgttgggaactttataaacacaatacagacactcatgacaaaatcaaggtttaaagcaaagatgaaaagatcaaagagcaagccggagttggattagaatgtccttgattgttaggtaaatcttacataagcaacgcctagatattctttctccattttgaactctntaagaaaatggcaagtccaagactaggcttctttttttttttctttgaaatgtatttttgtaaggtatttttatttatataaattttgat

SEQ ID NO: 16081 - DNA, 408 bp, Gossypium hirsutum
  Clone ID: LIB3272-037-P1-K1-A5
ctctcttgcgtgtcgttttcatttcaacctctgccttcttttccattatttttcacccttgtttccatcttctttccgctgacttctcgggtaaatcggtactagatctctgtggtctattgccggaattttcgttcggattccggcgaccccagtcttcgatcctattttctcttcaatccagaatgaatcccgagtatgactatctgttcaaacttttgcttattggagattctggtgttggaaagtcttgtctccttttgagatttgctgatgattcatacatagatagttacataagcaccattggggtagattttaaaatacgcactgtggagcaggatgggaagaccattaaacttcaaatttgggacactgctggacaagaacgatttaggacaatcacta

SEQ ID NO: 16082 - DNA, 400 bp, Gossypium hirsutum
  Clone ID: LIB3145-042-Q1-K1-E7
cccacgcgtccgatcttgaagttttttattttagctaaaattttattagctttttatataatttttacaatttcttttttgtataaagtttggtcttctaaaaatctttcctgtctcaaactcaacaggtagtcaataagcactaaaactgatttttcacagttttcttcttctatttcagcattttcaacagctacgtacaatggttttcaacagagcgttggggacttgaaagaagctgatttgaaaggaaagaaagtgtttgttagagtcgatctgaacgttccattggatgataacttcaacataactgatgacacaaggatccgtgctgctgttcccaccaccaaatgatcaatcctgttgcatcaatccttggaattctacaagaaaacatttt

SEQ ID NO: 16083 - DNA, 376 bp, Gossypium hirsutum
  Clone ID: LIB3166-022-P1-K1-C10
attttcttattgattttgcttatcttttctctaatccttttttcaagtggagaggtgtttatacgtttggttgttgttgaagaagtgctactaccatggctacaaagaagagcgttggggacttaaaggaagctgatttgaagggaaagaaagtatttgatgggtcatggttctaaagtcatcctctctagtcatttgggaccgagcttggttatcgagaagttttgctcctgagttttggtcttgcagctttagcactggccagtgtcatctcaaatcttgatatggaaatggaccctaaaacaggagattacaaagcactaactgaactgcttcccctaatattggtcacacttgcacttgttatattaatctt

SEQ ID NO: 16084 - DNA, 183 bp, Gossypium hirsutum
  Clone ID: LIB3120-028-Q1-K1-C5
tcggttctctaatccttttttcgggtgtagcgttgtttatacgtttggttgttgttgaagaagtgctactaccatggctacaaagaagagcgttggggacttgaaggaagctgatttgaagggaaagaaagtgtttgttagagtcgatctgaacgttccattggatgataacttcaacataac

SEQ ID NO: 16085 - DNA, 186 bp, Gossypium hirsutum
  unsure (1)..(186): unsure at all n locations
  Clone ID: LIB3493-043-P1-M1-D10
attttcttattgattttgcagatcggttctctaatccttttttcgggtgtagccgtggttatacctttggggtggggtgaaaaaaanctactaccattgctacaaaaaaaaagtggggactttaaagaagcttattttaaaagaaaaaaaaagggggggggaggtcaattcaatcttttcttttta

SEQ ID NO: 16086 - DNA, 407 bp, Gossypium hirsutum
  Clone ID: GOSHI-09MAY01-C256_3
cggacgcgtgggaaaatacaaaacatccagtttttctttttctttttccttcagttttctggttttccgacatggggtttgaagatccagacagggtttcaagacatataaagataagggaagtttggtctgataatttagattcggagttcgagttgatcagtcaagcaatcgatgagtaccctttcatctccatggacactgaatttccgggtcttgttttcagacccaaagtggatccaacccggccttacggcgcccagttccggccgtccgatcattacaagatcctcaaatccaacgttgatgctttgaacttgatccaagtgggcctcaccctcaccgattcttcaggtaatttgcccaccctaggaaccgacgacgagcagttcatctgggaattcaat

SEQ ID NO: 16087 - DNA, 643 bp, Gossypium hirsutum
  Clone ID: GOSHI-09MAY01-C256_1
atcaatttttgttttctcagtttctttgcgatttcccgacatggggtttttaagatctgtgaagataagggaagtttggtcggataatttagaatcagagttcgagctgatcagtcgggtaattgatgacttccctttcgtttccatggacactgaatttcccggtcttgttttcagaccaaaagtggacctcactaggccttaccatgagcaactcctccgaccctccgatcattacaagatcctcaaatctaacgttgatgctctcaacttgatccaagtgggcctcactctctccgattcttcaggtaacctgccggttctcggaaccgacgactctcagttcatctggcaattcaatttctgcgacttcgatgtggagcgtgacgctcacgcccctgattccatcgagcttttgaggaggcaaggggttgattttgagaagaacaaggaaaacgggatcgactcggttcgattcgctgagttgaccatgtcctctggactcgtattcaatgactcagtgagttgggtgaccttccacagcgcatatgatttcgggtacctggttaagatcctaacgcgacgagacttgcccgagggcttggatgagttttcgagaattctgagggtgtttttcgggaac

SEQ ID NO: 16088 - DNA, 522 bp, Gossypium hirsutum
  unsure (1)..(522): unsure at all n locations
  Clone ID: LIB3543-029-Q1-K6-G11
gatctgtgaanataaggggaagtttggntcggataattttagaatcagagttcgaggctgatcagtcgggtaattgatgactttcttttcgtttccatggacactnaatttgggggggggggggtgtttctccttttggaccncactangccnnaccatgagcaacgggggccgaggttcgacccccccacgctcctctaatnnaacgttgatgctctcaacttgatccaagtgggcctcactctatacaattcttcaggtaacctgccggttctcggaaccgacgacactcagttcatctggcaattcaatttctgcgacttcgatgtggagcgtgacgctcacgcccctgattccattgagcttttgaggaggcaaggggttgattttgagaagaacaaggaaaacgggatcgactcggttcgattcgctgagttgaccatgtcctctggactcgtatgcaacgacttcatgagttgggtgaccttccacagcgcgtatgatttcgggtacctggttaag

SEQ ID NO: 16089 - DNA, 1060 bp, Gossypium hirsutum
  Clone ID: GOSHI-09MAY01-C246_1
gccacgcgtccgcccggatcggccgcggcggtgataattcttctgaagaaaatgatggttcagaggaaggtgaaattcaacctggggttatgaagtttactgacggtgttagagctttcaggttggcatttaagaacattataaagaggaatgttgctgatgattcattgggtccagtattcccacgcgtccggggcataagcagcttgtggcaaagaagttagctgaggaggagagctgaaaggaaagttaagggagaggctaaaaaagaaaaacatttggttgcagagaaggggcatttcaagcctgctaattacttggattcacatgaaaagtttctcattggtattgctacaaaaggagtggtgaagttattcaatgctgtgaacaaagcacaaaaggctcagaaaggactggacccttcaaggtctaaagatgcaaaagtgataaggaggcgaaggaaggaagccttcttttcagagctaggcaagacatcattgcccgcacgcgattcttccagtaagggtaatacatctgattctaggaatgatgaaggacctgcttgggccccattgcgtgataattacatgctaacaaatcctaaattgaaggactgggataaaatggcggactcggcaatagttgatgatgttggaatgatgtctgaagatagtggttcagatgatgattgatgtcctttgaggttaaggagattaagtagtagtgttcttgcgggccatggtataacagctgaacctgaatttttttttcctttttctttacttcttcccaattttgtgtagtggtctatttattatttataaatgaattaaaccaagaggaatgattgttctccatactgccttaatttgcactctgatcgttcactgctccattgttgatgcatggaaggaaaatattggagcatagtgagcctatggatttataggttcttttatagctgatgatgatgtgttcatcccggtagttattgtaatcaaaccagatttccaatatgtattttgttttagttgttgaaaataattaacgaattttttat

SEQ ID NO: 16090 - DNA, 353 bp, Gossypium hirsutum
  Clone ID: LIB3148-023-Q1-K1-D8
gccttcttttcagaactaggcaagacatcacgcgactcttccagtaagggtaatacatcttctgatcctaggaacgaggaagaacctgcttgggcaccattgcgtgataattacatgctaacaaatcctaagttgaagaactgggataaaacagctgaagcaggcatagctgatgatgctggaaggatgtctgaagatagtgggtcagatgatgattaatttcatccgaatttaagaagcttaaaggttatctcttatagttcggtcatagatataatggtctatttatcatctaacattataaatgagttaaaatcagaggcaaatggttctatttggctgatgatgcgttt

SEQ ID NO: 16091 - DNA, 636 bp, Gossypium hirsutum
  Clone ID: GOSHI-09MAY01-C276_1
ggcccacgcgtccggtcgagctctctcagttgaaaaaataaccaacccaaaaaaagaggtctgagatttgcccagattcaaaagctattaaatggatctttttttttccatcattttcttaaaaaagtttcagttttggtccattttggtgttggtttcatggatgagtggctagatttttttttcattataatccgggcccaaatcctcaaaactcttaaagtttcaattttggttcggttggggctttattgggatggcatcttcatcatcactggtaagtccactatgtaatcagtcacagtctccactgctccattggattggtgatagaaggaaagcttttatttctcctccatgcaacggcggctcagccaccagcaaagatggtggtgcttttgagccatgtaatgagtattattcctccaaaaatggcagcttttcttctttctttgggtccaaaaatgtttccttcaatattaatcacaagcacccaaggctcaatcgaggtgttgcccgatctggacaagccatggctgtagccgtggaaccggcgagagagatcaggacaaaacagaaacctcctacgaagcaaagacgtgttgttgtgactgggatgggagtagtaactccgct

SEQ ID NO: 16092 - DNA, 551 bp, Gossypium hirsutum
  Clone ID: GOSHI-09MAY01-C216_1
acgcggaaagatgaagcagttctaagaacagctgacaacagcccccaagtgcattctgcatcatctagacctggaagtagtgctaggagaagcccttttacacccacaaggagtgagtgctccgcccgcgcgtccggtggatattccggttacccaaattacatggcgaatactgaatcatcccgggctaagtatcgatcccagagtgctccaaggcagaggctggagttagacaaatatggttcaacccgaagaacttatcaggggttgtgggattcaggtaccaactcagaaagagattttcctcatcatgttgattttaggtacagggcacatccgacttccgattgcttgaattggcctagtagtgctaaccgaggggaatgatcgacgatcctcccttcgcctctcctattttccttttcttgtgtgtgatagcaaccttgtctgctggagttgtaattagtttaccatgatgtgaaaaactttgatcctgcttgatcaaatttagcattattaatattgaaaaaagaaaatctagtatgattgcc

SEQ ID NO: 16093 - DNA, 1879 bp, Gossypium hirsutum
  Clone ID: GOSHI-09MAY01-C206_1
ttcacccccttataaaaaaagttaaagttggtgctcagcacataaacgtaaggccggttcgaaaccgtctctcacaccagctttcgtctttcagcaatggccgccaccactacaaccacttcctttaaagccgcactcctttctacaccgtcgatatcttcatcgaccaaatcaaccgtcctcaaaccacgctttacatcatcatcgtcctcacggtattcgccgattccaaaatcactgatagctcatcatgtctctacaaagaccaacgccatcgtcgccaagatggggacagtcccttcgccagtttctgagacgacatcgcttgacttccatacctccgttttccagaaagaaaagatctctcttgctggtcacgaagagtacattgtgagaggaggacggcatttattccctttattggatgatgcttttaagggaatcaaacagattggtgttattggttggggttctcagggccccgctccaccaccggagctgcggggctcgcttgctgaggcaaaatctgatgttgttgtgaagattgggttgaggaaaggctctcgctcctttgctgaagcccgtgctgcaggatttactgaagagaacggaactctgggggacatatgggaaactgttgctgggagtgatctcgtgttattgttgatctctgattctgcacaggcggataattatgaaaaggtcttctcccacatgaagccaaatagcatccttgggctttcccatggatttcttcttggccatttacaatcgttggggcttgattttcctaagaacatcagtgtaattgctgtctgcccgaagggaatgggaccttctgtgaggagactttatgttcagggaaaagagataaatggcgctggaattaatgctagttttgctgtccatcaggatgttgatggtagagctacagatgtggccttgggatggtcggttgcccttggttctccttttacattcgccaccacattagagcaggaatacaaaagtgacatttttggggagagaggcatcttgctaggtgctgttcatggggttgttgaatgcttgtttagaaggtatgtggaggatggaatgagtgaagaattggcttacaaaaacactgttgagtgcataacaggaattgtgtcaaagaccatttcaacaaagggtatgctagctgtatacaactcattgtccgaggaaggaaaaaaacgatttgaggccgcttacagtgcctcatattatccttgcatggaaatcctatatgagtgttacgaagatgttgcaagtggaagcgagattcgcagtgttgttttggctgggcgtcggttttatgaaaaggagggtctacctgccttccctatgggtaaaattgatcagacacggatgtggaaagttggtgagcgtgtccgagcaactagagcgaaagatgatttaggtccactgtgccctttcacttctggggtttttgtggcgctaatgatggcacagatcgaggtcttgagaaagaagggccactcgtactcagaaatcatcaatgagagtttgattgaagctgttgattccttgaaccccttcatgcatgctcgaggagtttctttcatggttgataactgttccacaaccgcacgattgggatcaagaaaatgggctccacgttttgattacaaccttactcaacaagcattcgtagcagtggattcaggtgctcccatcaaccaggacctgataagcaacttcttatctgatcctgttcatgaagctatcgaagtctgtgcaaagctaagacctactgttgatatatcagtgcccccagatgcagatgatgctcggcctgaattgcgccaatctagctagactggaagagaatattttc

SEQ ID NO: 16094 - DNA, 877 bp, Gossypium hirsutum
  Clone ID: GOSHI-09MAY01-C236_6
tgtacgcgtgggcggacgcgtgggcggacgcgtgggcggacgcgtgggcggacgcgtgggctcttttgcttgcgcggctgggcttagtttaagcggagagggtgtgcaggattaaagggtcaccattgtttccaacatgatgcttaataacaagtttttgttcttatcagctttgttttgcattgctgtagctggcgctttaggccaagctcctcctactcctagtaatcctccgacatccacgccggtgccgtcgaccccacccgcttccacacctccgcctactacccaaccaccttcaacacccacaactacttctccgccaccagcttccactcctcctcctacatcatcaccacctccagtgacagcttctccaccaccagtttccactcctcctccagcgactcccccgcccgttagctccccaccaccagcttctcctccaccggctactcctcccccagctaccccacctaccgcaactcccccaccggcttctccaccgcaggctaccccaccacctgcttctccccctcctgctactcctcctccagctaccccaccaccagctcctttggcttctcctcctgccacggctccagctccggcccctagcaagaccaaagctaagtctccagcgctatcaccttcggcctccagcccaccgtctccatcaactgcggcccctactcccagcctcggcgcttcttcaccaggccccgctggaaccgataccagtggagctgagaaaacatgctccataagaaagatggccctggagcttggggattggatcgcgtatcctcactctaatgctctacaccatgaagtcttcccttcaccattagcgcctctagctatggttcccgtttca

SEQ ID NO: 16095 - DNA, 1713 bp, Gossypium hirsutum
  Clone ID: GOSHI-09MAY01-C236_2
gaggtgtttgcaggattaaagggtcaccattgtttccaacatgatgcttaataacaagtttttgttcctatgcttagccttattattgggtttgaggcaaaatcatcccccgctatttcgaaatgtatgatcatgggtgcagcagcttcaactgtttactacaaccttaagctaaggcatcctacactggatatgcctatcattgattatgatttggctcttcttatccagccaatgctcatgatgggaattagcattggagtcacttttaatgtgctctttgcagattggatggtcacagttttacttattattctctttctaggaacatcaacaaaggcattcttcaagggtgtagaaacgtggaaaaaggaaaccatattgaaaaaggaggccgctaggcgcttggaaccaactgaaactggtagtggagatgtggcatacaagcctcttcctagtggcccaagcagtgatcctcctaaggatgactcagataaagaagtctctattttggagaatgtttgttggaaagaacttggactcctttgtttcgtttggattgcattccttgtactgcagattaccaagaataatacaactacttgttcagcattgtattgggtgttgaacttgctgcagatcccagtttcacttggggtatctctatatgaggcagttagtctctataaaggatatagagttattgcatccaagggagaacatggccccacgcgtccggtagcccagcttgttacctactgtgcttttggagtactagctggagtgggcggccgtctgcttggcctaggaggaggatttatcatgggtccactattcttggagttgggtgtccctcctcaagtatcaagtgctacagctacctttgccatgacagtccccccatccatgtctgttgtagaatattaccttctgaagcgttttccagtaccttacgctctgtacttcactggggtagctacagttgctgcctttatcggacagcatgttgtcccaaacgcttgttaattttatttggaagggcatctttgatcatcttcattctagcctccacaatatttgtcagtgcaatatcactaggtggtgttggcatatcaaacatgatcgggaaaatcgagcgccacgagtacatgggattcgagaacctgtgcaagtacgaaagctgatatctcaggttattttatctctcaattgatccacctccttaagtctcctgtaagttaggctagattgcgttttggggaagaaagaagatggtcaataattttccattctttacacaatccccatttttcactttccgttccgttttatatttatgagatacatttattgacaatattcagaaattgtctagatgaatggaattatagcttcctgttatttggttgtttaaaaaaaaaaaaaaaaaaaaaaaaaaaaaaaaaaaaaaaaaaaaaaaaaaaaaaaaaaaaaaaaaaaaaaaaaaaaaaaaaaaaaaaaaaaaaaaaaaaaaaaaaaggggggggccgttttaggggtcccaagtttacgtccccgggcttgcaacgtaatagcttttttttggggccccctaaattaatttcacgggccggggttttacaccggggggccgggaaaaaccctgggtttccccactttaatcccttgggagcaaacccccttttcgccagtgggggtaatagcaaaagggcc

SEQ ID NO: 16096 - DNA, 1102 bp, Gossypium hirsutum
  Clone ID: GOSHI-09MAY01-C236_1
ttcacgcgtccgcccacgcgtccgcttctccctcatttgcttgcacggctgggcgtagtttaagcggagagggtgtgcaggattaaagggtcaccattgtttccaatatgatgcttaataataagtttttgttcttatcagctttgttttgcattgctgtagctggcgttttaggccaagctcctcctactcctagtaatcctccgacatccacgccggcgccgccgactccacccgcttccacacctccacctactactcaaccacctccaacacccacaactacttctccgccaccagcttcctctcctcctcctacttcatcaccaccaccagtttccactcctcctccagcgactcccccgcccgttagctccccaccaccagcttctcctcccccggctactccacctcccgcaactcccccaccggcttctccacctccggctaccccaccacctgcttctccccctcctgctactcctcctccagctaccccaccaccagctcctttggcttctcctcctgccacggttccagctccggcccctagcaagaccaaagctaagtctccagcactatcaccttcggcctccagcccaccgtctccatcaaatgaggcccctactcccagcctcggcgcttcttcaccaggccctgctggaaccgatacgagtggagtagagaaaacatggtccataagaaagatggtgtggagcttggtgattggatggggtatcctcagtttaatgctttaaaccaagaagtcttttcttcaccatttgtgtcttagctatggtttttgttttcagtgttttaatttccattatatattgttactggcttaagtctctttgatggggctttttactatgcatatttgagcttacatttatttatatatatttgtattctttgggagattttttttgaggggagcttttatatttttcatttgtattgtagggacttctattgtttctttttgtcaaaaaaaaaaaaacaaaatcataaaaaaaaaacaaaataaagaaaaaaaaaagataaaaaaaaataaaaattaaaatgatagcaaaatatagaaaaaaaaaatgggggcggc

SEQ ID NO: 16097 - DNA, 511 bp, Gossypium hirsutum
  Clone ID: uC-gsronu33B109e07b1
ttcttttgcttgcgcggctgggcttagtttaagcggagagggtgtgcaggattaaagggtcaccattgtttccaacatgatgcttaataacaagtttttgttcttatcagctttgttttgcattgctgtagctggcgctttaggccaagctcctcctactcctagtaatcctccgacatccacgccggtgccgccgaccccacccgcttccacacctccgcctactacccaaccacctccaacacccaccaccagcttctcctccaccggctactcctcccccagctaccccacctcccgcaactcccccaccggcttctccaccgcaggctaccccaccacctgcttctccccctcctgctactcctcctccagctaccccaccaccagctcctttggcttctcctcctgccacggttccagctccggcccctagcaagaccaaagctaagtctccagcgctatcaccttcggtctgcagcccaccgtctccatcaactgaggcccctac

SEQ ID NO: 16098 - DNA, 492 bp, Gossypium hirsutum
  Clone ID: uC-gsronu33B178e07b1
tttgagcttagatattcctccaattgttttgacagacttttgttttttttggcttcaaacttgtcaaaaaacaattcttggcttacttttggtaggtggtgttggcatatcaaacatgatcgggaaaatcgagcggcacgagtacatgggattcgagaacctgtgcaagtacgaaagctgatatctcaggttattttatctctcaattgatccacctccttaagtctcctgtaagttaggctagattgcgttttggggaagaaagaagatggtcaataattttccattctttacacaatccccatttttcactttccgttccgttttatatttatgagatacatttattgacaatattcagaaattgtctagatgaatggaattatagcttcctgttaaaaaaaaaaataaaaaaacacataaaaaaactaaaaaaaaaacaacaatatacaataaaaatatcaaataactactcatctcttaaaataaaaa

SEQ ID NO: 16099 - DNA, 629 bp, Gossypium hirsutum
  unsure (1)..(629): unsure at all n locations
  Clone ID: LIB3582-058-P1-K1-C2
ggccgctaggcgcttgngaccaactggtcagttgtttactttgttttttttcctttagttggttcttaagatcatttggtgatcctttcctcatgcttttcgttctgacctgagcccatatacttgtcatatgatatcagaaactggtagtggagatgtggcatacaagcctcttcctagtggcccaagcagtgatcctcctaaggatgactcagataaagaagtctctattttggagaatgtttgttggaaagaacttggactcctttgtttcgtttggattgcattccttgtactgcagattaccaagaataatacaactacttgttcagcattgtattgggtgttgaacttgctgcagatcccagtttcacttggggtatctctatacgaggcagttagtctctataaagggtatagagtaattgcatccaagggagaagatggcacaagttttcgagtagcccagcttgttacctactgtgcttttggagtactagctggagttgtcggcggtctacttggcctaggaggaggatttatcatgggtccactattcttggagttgggtgtcccttcttagtattaagtgctacagctacctttgccatgacattttccttgtacat

SEQ ID NO: 16100 - DNA, 546 bp, Gossypium hirsutum
  Clone ID: uC-gsflnu33B112h02b1
gcggcaatgtacactcggcgtgcggatcgcaccgcagtgccggctttacttcgtagcggcgtagagcggccaccactagcgtgatccatgcctcggctactccagcttgcgaaactacccccaccggtatagtcgacctccggctaccccaccagctgcgtgttccacaactgctactactggtacagctaccccatcaccagattcaatggctttgcctcatgtcacggtttcagctgctggcgttataaagaccaaagctaaacctacagcactatcacataggggctccagcccaacggctacatgaaatgagcgcctgtactcccagtctaggcgcttcttcaccaggccctgctggaaccgatacgagtggagtagagaaaacatggtgcataagaaagatggtgtggagcttggtgattggatggcgtatccctagtttaatgctaaaaaccaagaagtcttttcttcaccatttgtgtcttagctatggttttttgtttcagtgtttaaattccattatatattgatactggcttaagg

SEQ ID NO: 16101 - DNA, 317 bp, Gossypium hirsutum
  Clone ID: LIB3585-018-P1-K1-F2
tgtagctggcgttttaggccaagctcctcctactcctagtaatcctccgacatccacgccggcgccgccgactccacccgcttccacacctccacctactactcaaccacctccaacacccacaactacttctccgccaccagcttcctctcctcctcctacttcatcaccaccaccagtttccactcctcctccagcgacttccccgcccgttagctcctcaccaccatcttctccttctccggctacttcaccttttgtaaccctcctattgttttctataaatcgcgttatgtgaggaggttacttcttctctt

SEQ ID NO: 16102 - DNA, 507 bp, Gossypium hirsutum
  Clone ID: GOSHI-09MAY01-C38965_1
cccacgcgtccgaagaaatctacttcctctttttttttgctatttttccatcgtattctgttattgctacttctcgtgtattctgttgctgctacttctcgtgtattctgctgcaagtgtggccgtacggaggaataggccctggtgacgtggaggtcgtacgtgggaaaccactcatgggagcccgatcctggctagctgcagcgctagtgtattccagaaacctctaaggtttctggtgctttcacaatattgggctcatttgcgccatgtgcaaattgagctaggaattaaattaggggttttggttgcaggcttattaggtttaatgtttgggctattatttttgggttaaatgaattgtaaatggactttggacccataaataatgcggcttattatttattatttgtggtttgttatgggcccgggcaaattgggcctattacaataatgctttttatgaactaataactcaagtaatgatgaagtaaatcggctggtagg

SEQ ID NO: 16103 - DNA, 838 bp, Gossypium hirsutum
  Clone ID: GOSHI-09MAY01-C38825_1
cccacgcgtccgcccacgcgtccgggagctttgaaaatgtggatgttatagggaagcctgataggttttcttctatgggttctacacatattgctgccacgttgcatgctgctgctatgttgatgaagcttgatcgtggctgggattggtttattgctttgagtgctttggactatcccttagttactcaagatgatttgtcccacgtgttctcctctgttaggagggacctcaatttcattgatcatactagtgaccttgggtggaaagaagatcaacgggtcctgcctattgtggttgacccagggatttacctagctaggaggactaaaatttttcacgctacgcagaaacggctaatgcctgatgcttttaaagtgttcacaggttcgccatgggttgtcttaagcagatcctttctggaattttgccttttcggagttcaagaacactactgtaaacggtgatttaagatatatgatctgggacagtcctccgaagacagaaccccactttctcaatggttctgattatgatcaaatggctcaaagtggagcagcatttgcaagacagtttcagaaagatgatcctgtgttggacatgattgatgaaaagatcctcaagtgtgggcgaaaccgagctgtcccaggggcatggtgcactggccggcgaagctggtgggtagatccttgctcacaatggggtgatgttaatgtcttgaagcctggaccacaggcaaagaagttagaggaaactatactaaaccttcttgatgactggaattcaccgtccaatcagtgcacatgaaggggtgtgaagtgcgagcttaaaagtgaat

SEQ ID NO: 16104 - DNA, 567 bp, Gossypium hirsutum
  Clone ID: GOSHI-09MAY01-C38505_2
gaggaaatccacaagagctgaaatggaacgccagaagctggaggagatggccaagaaagggtaaggacaggtagattgataaaggaaggcttattggactgggagaaagaaatgtagtatagctcgtgtttgggttgaacctggtgatgggaagttcattatcaatgacaaagaatttgatgtctatttcccaatgcttgatcaccgtgctgctcttcttcggccattctcagagaccaagaccttgggcctttgggacatcaaatgcacagtttaaggaggtggtctttctggtcaagtaggagcaattcagctgggaatcagtctggccttgcaaaattttgagccggagctacgtgctccccttagagccgctggtttcttgacaagggattcacgtgtggttgaaaggaaaaagccagggattgcaaaagcatggaagagcttccaatgggtcaagcgttgatggtcagcttcttgctgctcagatttttcctcaaagggacatcttttctttcctcggtttctttgcattggatgaaaagctgacctttattttgacaatgc

SEQ ID NO: 16105 - DNA, 410 bp, Gossypium hirsutum
  Clone ID: GOSHI-09MAY01-C38505_1
attgctttgggtgttgatgaggttgaggaccgggttgaagcttgtagaagaagagaaacaacgcactgccgggctcaaaggcccgaatcgtgcatttggtgaccttattgcagcatccggtatcacagatgcgatgcttgacagtttgatcgctctcaaggatctggaaggggttgaggggttgccacctttaagtgttatagaagacatgcgttatgaaaagaatacgaggaaatccacatgagctgaaatggaacgccagaagctggaggagatggcctaagaaagggtaagacaagttgatgataaaggaagggcttatgggactgggaagaaggaaatgtagcccagctccgggttgggtggttcctcctggtgggttgggcattatcaatgacaaagaatttgat

SEQ ID NO: 16106 - DNA, 479 bp, Gossypium hirsutum
  Clone ID: GOSHI-09MAY01-C38415_1
tttttatttctctcctaatttctctccttagccgactttaatccctccctttgaatgccgatccgccaccataaacgacgtccaacagattcaggcttcgagggtcaacattcttggctattcgtacatgattgagcacgtcactgacgtggcgtggtggagcagcgcacgttgcggagaagtggcattcggcgctcgagggaggtgtgagcagccgacctaggtgcggcgcacctaaggttttctgcttttttgatggttgtcggttagtgctaagtgggctggggttttgggcctaggttttttagtttttgtgttgggtgttttgggctgtaatttagactttgtttttatttgtttttttggtttatgggccccgagctaaattgggctctacacttgaaatttgtggtcgaaccaattgattctattttcaaaaacataaaaaattccatggaagagcaatacaattgatttgt

SEQ ID NO: 16107 - DNA, 1017 bp, Gossypium hirsutum
  Clone ID: GOSHI-09MAY01-C38405_1
attttcttttacctgattttggtttttaatcctttttttctctctctctatctgtttctcctcggtttctacgctgtctcaaccaccacctttgctttccctttctcaggccacaggcacaaggatagatgcaaaggacgatcaattaagccatcgttcactgagtaaaaggttgccaacatggtgagcttacgcagacgcaagcttttgggactctgctctgggaagaattctgttttgactccacttcatagattttttggtaatggaaatgcccttgaaacttcaagccagaatgcaaaatcagttagtgtgcatcctattcccttagattccatcaaccatgtgcatgggaaaagcattcctatggttagctgtggatccccaaatgtttctggctctggatcatcaaaagagcatcataatcaaccttttccagggcaactgatcaaacggagaaagcggcaccgaaggaagcatgttcaaaaccaagaaccttgtctgatgaggggtgtatacttcaaaaatatgaaatggcaagctgcaataaaagtcgacaagaaacagattcacttaggcactgttggttcacaagaagaagctgcccgcttatatgacagagctgctttcatgtgtggaagggagcctaacttcgagctttcagaggaggaaaaacaagagcttaggaatttcaagtgggatgagtttttggcatatactcgccattcaattaccaataaaaaatccaagcgaaggctcggcatcagaccacagaaaagctttgaaccagcaatagagaatggtcagtgacagggcaaagcagacaaaagagtcaatagtttttcagcttcaaaacaggcggcactagactcttgagcctcatgaaaagatgatggttccagaggaaggctgaataatctggttttagttattaaactctagttgctgagtctccatttttgggtgtataaagggcccctattagggcaagaagcaatgataaatcccattattatc

SEQ ID NO: 16108 - DNA, 352 bp, Gossypium hirsutum
  Clone ID: LIB3147-001-Q1-K2-E6
cccacgcgtccgagataaacagcaaagatgttttagaagaggggcaagtcagcaatttccctcgcgatttgtgaggatgattgatccagagatgctgaagatattcgtgtaccacctttcctttttcttttaactctcagaaacttcatctcacaatttgtagtgatatagactggtaatgcaatctttttgtttcaaatcttgtaaccgtgggggaacataagattttgttggggtttgtgttgtgttgtgttgattcttcaaaatttttctcatcttaggtgattttatgtatattatcatcttcattattatttcactcgtcatccaaatattagtgtgaaaaaaataa

SEQ ID NO: 16109 - DNA, 343 bp, Gossypium hirsutum
  Clone ID: LIB3147-001-Q1-K1-E6
cccacgcgtccgagataaacagcaaagatgttttagaagaggggcaagtcagcaatttccctcgcgatttgtgaggatgattgatccagagatgctgaagatattcgtgtaccacctttcctttttcttttaactctcaaaaacctcatctcacaatttgtagtgatataaactggtaatgcaatctttttggttcaaaacttggtaccgggggggaacctaagaatttggtggggcttagggtggggtgcggtgaatctttaaaacttttctgaatttaagtgaatttatggattataacattctcattaatgatttaattcgtaatccaatatatattgtg

SEQ ID NO: 16110 - DNA, 981 bp, Gossypium hirsutum
  Clone ID: GOSHI-09MAY01-C38765_1
cccacgcgtccgaaagaaacgtaaaaaggacaatgttgtatgggatgaacagactggtgcatggaaacgtcgctttggttatgatcgtgtcaatgatgataaagacatacccatcattgaggccaagatgactgatgagccaggagaggatccttttgctaaaagacaagatgataaaaagaaacgggttgagaagcaagagaagaatcgcctccagaacttgaaacaagctgcaaaacttggtgctttgccaagccatgttcagcttgctgctacggctttgcccataacaggaacccaagctccacctaagaaagtgaccaaagatgaattggggaatgtagctgggatggctgctacatctacagccagtggtgggaaattcgataggaaattgccaggagaaaagcctgctaaaaagcaaggaaagcatcgcaagttcttaccagttgttgaagggtcagggataggctcaagggagaaggagcaaactgagaatgttctaaacaagctaatctctaagcattcacatgagatactcaacgttgacaaggctgttacgatgtataatgtgaaaaaagagaagaaagctagaaatagaaagaatcaagaagggaggtcatcatcaacctcaaacgagttgaaacccaaaaagcaacttcataagaagggtgcaaagagaggaccaggatcttcaaggaaaggcaaggcctaataaaattattaggttcaaaaattctggtaagcttgtagagatttgggatatcaattttgttaacaagagagttatttgtaccaaaggttctatttgttgagacaggtttaagttattacattatttgatctgcttatatttgttcaaggaggtttagatagaaaacgaaagggtctgtttgaaaaatgggttttggagcatagttgttttgtttcggctccttctgttttatcattaccaataggataattattctgtacccccac

SEQ ID NO: 16111 - DNA, 492 bp, Gossypium hirsutum
  Clone ID: GOSHI-09MAY01-C38725_1
cccacgcgtccgaaataagttaaaaaattacaacatacatcatatactataataaattatcataaattaaaagtgaattagaagtcactaatgtaattttaaaagtcatatactcttttgctcttatttaaagagtcatcatgatgctgatcctgatcatgatgctgatcctgatcatgatgctgatcctgtaagttttggcgtgtatatattttttaaattcaatttgcttagatttggggtcagatctgattgtcttctggatataggttgctctgtatatgaatttgaaagactatggtggtggttttgagttctgtaatctgtcagatgacaagatatacgatgatttaggtgaaggcaccagtggtgctagaacaaatctacacaatatggaactgtcacaagagaacacctttgccgttgatcctgttcttctgtctctgccggttctctgatatggaaaactttgggattttggacttgtgatct

SEQ ID NO: 16112 - DNA, 419 bp, Gossypium hirsutum
  Clone ID: GOSHI-09MAY01-C38655_1
ctcacatgctgcaataggtattccggggtgggggcgctgaatcgctattcaacaccaaaggtaaaaaaaatttccccaaaataacctgctttcttctcctttgctccagatttcttccaatgtttttccccaaatcaacagcacattcacccttcattttcatctccggtactctgtcatgttgttccatccttagtgaaagttgaggaaggaggggttggatggtcacgagaagattaagagttatatgtgtgtcgagtttttcatctcaagcagtgagaagagcccttgctacatgtatagttcttgataataataattggacgcttacaaagcatgttattttttctttctattgcaaatggtggatttcacttggctttgcaatagtagaagcttgtataagtgcttattattct

SEQ ID NO: 16113 - DNA, 408 bp, Gossypium hirsutum
  Clone ID: uC-gsronu33B039b03b1
ccttcgctctaaatcagtagttgagcaaacctctttcacaatgagcagatccggccagcctccagatctcaaaaattaagctgaatgcaaatcggttggttgttggtacacttcgcggatttgatcagtttatgaacctagtagttgccaacaccgttgaggtgattgtttatgtgtaatttgttatagtcatgtttgatttcttatctttatccttcttcttctcttttctatttttttttcttttttaatttatttcttctcttttatttttttttttatttttttatatattcattctccctgcttttcttttttcattttctctttttttttattctctcttcttcccttccttttttctcttgtttcctttgtatctctatttttatcttttccttatcattt

SEQ ID NO: 16114 - DNA, 366 bp, Gossypium hirsutum
  unsure (1)..(366): unsure at all n locations
  Clone ID: LIB3145-051-Q1-K1-D8
cccacgcgtccgctctttcacaatgagcagatccggccagcctccagatctcaaaaagtacatggacaagaagctccagattaagctgaatgcaaatcggttggttgttggaacacttcgcggatttgatcagtttatgaacctagtagttgacaacaccgttgaggtgaatggcaatgagaaaactgacataggcatggtggtgatcagaggaaatagcgttgttactgttgaagcacttgagcccgtaggccggatgcagtaatttaggtttttcgttccaaaacttggatttcactttctgtatctctttcactctttgngtctagcctgctagcttcgggcttcatatgttacatgatcgag

SEQ ID NO: 16115 - DNA, 684 bp, Gossypium hirsutum
  Clone ID: GOSHI-09MAY01-C38165_1
gccatgttagatctccttctacatgtataatttctggcttgaaatttctatgcagggaggtgctattcggcaagaactttattaccttctcaaagacgagaaagatgtacactttgcattcggcacaattcaagggaatggagtcaaccaggctgggcatgggatggcgtcatccaaattctgcctcaacattgccggtgatacaccgtcttcgaaccgtctctttgatgctattgtcagccattgtgttcctgtgattgtaagtgatgagatagagctaccatttgaagatgtcatcgactactcgcaaattgcattttcgttcgtgcatcagatgctgtgaagaagggatatctactgaaccttctcagaggaatatcgagagaccagtggaccaagatgtgggaaaaattgaaggaaaccgttcggcactttcagtatcagtacccgtcccagctttgcgatgcggtggatatgatttgggaggcggttgcacgtaaggtccctatggtacaattaaaaactcatagggagaatagatatcgcagatcggagcggataaaataagcaacgactcgaaaggttgagatgatgtaaccttccattctatggagatcaacagatttacagcttgttgtacattttttttaaatattaaaatgaaaaaaaaacatggttttgttg

SEQ ID NO: 16116 - DNA, 577 bp, Gossypium hirsutum
  Clone ID: GOSHI-09MAY01-C38115_2
cccacgcgtccgtctcacattgcttgcatagagtccaccgacatttggaagcgtgtacaacatctttgtttcctgttagtaagttttggacgctcaaggttctttgtgaataaagtagttgatctttcaatttgtgaggtctccatttgtttcgttgtttcctctctgtcctgttctttgtttgcaagtgttgcagcacagctaaaggacttcagagtctgcaagtgctttcgttatcatgtagcgtgcaagtaaggcatcaactccatattgaataactcggtgcattatcgactaattccctaacaataaccagttatcaatttatatgttatcgtataatgtgacattgacgtacaggcagaagttttatgattagcatgcggatgttactggagaaaagataaatagaaccaccgactatttgctgaggcttcttgttcttttgccctgtcttctattttttttatttctcgggtcttccagtaatgtagttcttacagtttaccttgttgggtttctgcaagatacattttaactgattacaagcggatatctcaatacagaacttagagat

SEQ ID NO: 16117 - DNA, 546 bp, Gossypium hirsutum
  Clone ID: LIB3828-027-Q6-N6-C4
ggatatactagcattaagaagtggatgagaagaggcattgttttaaaccatgcatgacaaaagctataatcttatatttctaaataccaaccgttttgagccatctcctaagttcggtattgagatatccgcttgtaatcagttaaagtgtatcttgcagaaacccaacaaggtaaactgtaagaaccacattcatggaagaaccgagaaataaaaaaaatagaagacagggtgaaagaacaagaagcctcagcaaatagtcggtggttctattatcttttctccagtaacatctgcatgctcctgtgcgtcaatgtcacaatatacgataacatataaattgataactggttattgttagggaattagtcgataatgcaccgagttactctatatggagttgatgccttacttggacgctacatgataacgaaagcacttgcagactctgaagtcctttagctgtgctgcaacacttgcaaacaaagaacaaaacagagaggaaacaacgaaacaaatggagacctcacaaattgaaagatcaac

SEQ ID NO: 16118 - DNA, 893 bp, Gossypium hirsutum
  Clone ID: GOSHI-09MAY01-C38045_1
ggaagaaacaagatggggtcattggagctaatgagaaagtggttcagcaattcttggcttctgtatctgaatccaggtcttcaatcaggcttttaagtagatcactcaccatgcaattaaggcacatgggtagcaaagtttatgagagaatatctgtgcttttacagccttatgatatgaagatttctcactcgaaaaaccccaaaagccttctcctttacctcgaagctttgttgaacaaagctttctttgaagattttgaatcaaccgggtttcaaaagaacgcggtgaaccaaatattgaaccccattgatcgttgtgaagctaattacaagtcattcaatgaattacaaggtctaacatgggaggaagttctgaataagggaacaaggcatttcagtcaggagttcagccagttttgtgacaggaaaatgaatgaaattgtggctatgttgggttggaaccgagcttggcctgaaccattgctacaagcctttttcggtgcctcaaagagtgtgtggttggttcaccttttggccaactcggtgcatcctggtttaccaatcttcagggtggaataaaggggtaaggtttgattcagtatacatggaggaacatggagggagaaagagccaagaatttggttccagcctggtaccggtcatgaatcacccagggttctatttctatggccatgtaattcaatttcaagtcatttgcccggtactcccaaccatgtggaaaattagtttaaactataaagggtttaacctcctccatctcccttattgtttaaaatttaaattaggtattgaataaaaactcccaagttaaatccccttgaattaattttggccctttgtaaaaattttgggtgccaattaaatggttct

SEQ ID NO: 16119 - DNA, 699 bp, Gossypium hirsutum
  Clone ID: GOSHI-09MAY01-C38395_1
cagaagtctgcaacattatccatggggtgggggctatttgacagcagagggtcaggccaaactgagggaagagaacccaggaaatgctcttttggagttacgtggaaatgctgggagccatgatcttccattctctgttgaaacactgacagctctaaccaagttgactaaagagagggggggggtgaagcttccccgatatgataaatctgcatatagaggtaagggtgacagagctgatccttcagtatggccagaagttgaagggccgttaacggttattttatatgaaggctggatgcttgggtttaagtcgcttcctgctgaagttgttaaagctgttgacccacagctggaaacagtaaataaaaatcttgaagcatattatgatgcatgggacaagttcattaaggcatggattgttatcaaaattcaggacccaagttgtgtctaccggtggcgtctgcaggctgaggttgccatgagggaggctgggaaacctggaatgtctgatgaagaggtggaagattttgtgtcacgttatttgccggcttacaaagcttaccttccaaccctgtactcggaaggaccaaatggatcagatccaaaccatctcctcgtaattgaaattgatgaagggaggaatcccatcttattttagtatttgatccttaacatgtttagtgcgtctacctgtac

SEQ ID NO: 16120 - DNA, 522 bp, Gossypium hirsutum
  Clone ID: GOSHI-09MAY01-C38345_1
aaaaagacgaggaagaagaagcggaattcaaagctcaaacaaaggagcttgtaaatgccccgcaagatttacctccgcaacttctttttgttcatcagggacaaaaggacttgaaagaacttcattggcatgctcagattcctggaatgattgtgtcaactgccgcggatggtttcaacatcttaatgccttcaaatatacagagcactctcccctccaatggctcttgaaaagaatagtgtcttttttggctccttgctgggaacaaatgaatcaccagctaatgcaaagctcataggaattcatgcatggaatatgggggtttttttttttccttaaattattatttttgcatggggatgtcaatgtgttatttgttacgaagggactcaaatttggacccttaaagcatttgtgtgaatgtagacaattgaatttatttaccaattcccctatagatcccccccctgtgataaaggaacaataattttttgaagccaataataaatttagccctttgtt

SEQ ID NO: 16121 - DNA, 553 bp, Gossypium hirsutum
  Clone ID: GOSHI-09MAY01-C38305_1
caccggacaccaccacaaactcatttaaaccagccccccccaaatctctttgctcagtttcctccaaccccaacatggcatttgcatcccaggcaatgatatcaacgaacagctgtgccttcacttccccaaacttgttgtttttgaagaaatgttccaaaattaacaacaagaccaggcaattccatttcttcactgttagagcatcttctgatgaatccgatgactgtaatgaagaggaatgtgcacccgataaagaggttgggaaggtgagtgtgcaatggttagccggggataagacaaaagtggtcgggacatttccgcctcgccgacggggctggactggctatgtcgaaaaggacaccgcggggcagaccaacatttattcaatagagcctgcagtttacgtagctgaaagtgcgataagctcgggaaccgccggttcttcagcggacggagctgagaatactgctgcagttgctgccggatttgcccttatcttttgtgctgcagcttcatctataggcctttaagttggtcaagaactcacctt

SEQ ID NO: 16122 - DNA, 388 bp, Gossypium hirsutum
  Clone ID: GOSHI-09MAY01-C38265_1
agtttccctactcaggtcacctttgatgccccaatggcggtctctacaccatccccagtctcttaccttacaagaatcgagcacaccaatctgtttccttccaaaaaactccaatttaaccccttttctcccgccaaaaagccattaacagtcgtctccatggctcccaaaaagaaggtaaacaaatacgactcagaatgggaaaaacaatggttcggagctgggattttttacgaaggaagtgaagaaattgaagtggatgtgttcaagaaacttgagaagagaaaagttctaagcaacgttgaaaaagctgggcttttatcgaaggctgaggagcttggtttcaccctttcatcgatagagaaactcggtgttttctctaaagcag

SEQ ID NO: 16123 - DNA, 606 bp, Gossypium hirsutum
  Clone ID: GOSHI-09MAY01-C39545_1
attacattgattcatggtgtgttcactttataagctgttatgtgaacgttacccagctgtcaatctccctctcactaggccccacgcgctgttcactctccctataaagcaccaccctttcccagccctagtctccattcagatttctaatatctcaccatttttagaagaaaaatcccaaaattttcagcttttcttctcttctagaaatggcccaagttagcatgttgaaggcttttttattggcttttgtaatggcaatcctaaccgttgcctcggcgcaggttagtgaggcgccgtcaccgtcgccagacgctggagctggattctcagtcggagtttctaccgccgccattggcttctctttgatcgtttcccttcttgctttcttcaagcattaaattgaagggcttgtttggctctcctctctgtgtggctttcttttatatatatatatatgtatgtgtatgtatgtatttatgataccattctttcttcgttaaatttattgtaatgaagttgattttttgaataaaatgcttccgttatgatttaaaacaaacaaaaactaacatatatcaaacatcactcttaacctcactacag

SEQ ID NO: 16124 - DNA, 355 bp, Gossypium hirsutum
  Clone ID: LIB3147-020-Q1-K1-C2
cagcttttgtgtcttctttcaatgacgcaagttggcatgttgaagccatttttgttggccttggtaatggctatcttaaccgttgcctcggcgcaggttagtgaggcgccgtcgccatcgccagacgctggagctggattctccgccggcgtttccaccgccaccgtcggcttatctttgattgtttctcttattgctttcttcaaacattaaattcacgggctttgactcaatgtgtggttttctttttttctctttgtatatgataccattcatttgattattgtaaggaagtcgattctttgaatcgaatgcttccactgtggtttattaataaaattaaaatttttttaat

SEQ ID NO: 16125 - DNA, 309 bp, Gossypium hirsutum
  Clone ID: uC-gsflnu33B146g09b1
ccttgcgtccggccacgcgtccggttttccttcttgctttcttcaagcattaaattgaagggcttgtttggctctcctctctgtgtggctgtctttcatatatatgtatatgtatgtatgtatgtatttatgacaccattctttcttagtaaaatgaattgtgatgaacttgattttatgaataaaacgcttcacgtttgttttctagagcgtgaggagcatcttgatgctgcattccgatactttgatggggatggcagctggagtattccagctgacgagctccaacatgctagtgctgagcttttc

SEQ ID NO: 16126 - DNA, 731 bp, Gossypium hirsutum
  Clone ID: GOSHI-09MAY01-C39565_1
agcggctactgttgctgccgactccattagagcttcaagctttggcctcaagattgccaatgcgtggcgtggcttgggttggcctgatgaggccgtggttttcactcttgcaacgcttcctattcttgagcttcggggagctattcctcttggttactggatgcaactcaagcctacactcctgacaatattatctattcttgggaatatggttccagtgccattcattgtactttacctgaaaagatttactacatttcttgctgggaaaaaccaggttgcatctcagttacttaacagtctctttgagagagccagacagaaggctgggccagtggaagaatttcaatggcttggcctaatgctttttggggctgttcctttccccggaactggagcatggactggagccattgtagcttccattcttgaaatacccttctggtcagctgtatcacccaatttcgttggtgttgtgtttgccgggcttctcgtaaacttgctggtgaacctcggtctcaagtacgccattgttaccggtatctttctcttctttatatcgacttttatgtggcaaatccttcggaattttaagaatgtttcttcgagcgcatcaaactaatgttgaattacttattgaaattgcccctttttcttttagcatgtctggattgtatgattcatctttcaaaatcttaagggcatctctgttatatttttttttttttctc

SEQ ID NO: 16127 - DNA, 438 bp, Gossypium hirsutum
  Clone ID: LIB3147-055-Q1-K1-F10
cggacgcgtggggtttttttttgtattctatgtgtataatatgcatctgtaaacttacgaactgaagaaataccttggctttatagccgaagggattaaaatgatagaactaaataaaaagaaaatacaatattctttgtttttgtctttgttttgctgtgctttcgtcctttttgcaggtacggagtatgcgtggctcgtgtacatggctgtgctggggcttggcgtgaggcgtacggaggcgcgcgtggtggtcgtacggtgctggaggcgcatggaggctgtggcttggctgcggcgcaaagtgggagaagccctagggtttctattagggtttaaatttttggggcttgctggcctgtgaatctttgggtctagacttgcttgggcctatattgtaatggactgggtttgagtttagtaacaataaatttaaag

SEQ ID NO: 16128 - DNA, 343 bp, Gossypium hirsutum
  unsure (1)..(343): unsure at all n locations
  Clone ID: LIB3147-006-Q1-K1-B10
cccacgcgtccgcccacgcgtccggctttcgtcctttttgcaggtacggagtatgcgtggtggtcgtacggtgctggaggcgcatggaggctggggcttggctgcggcgcaaagtgggagaagccctagggtttctattagggttttaattttttgggcttgctgggctgtgaattcttgggtctagacttgtttgggcttgtattgggtttgtattgggtctgggacttgggttatgtaattggacattttaatggactgttaacgtttgatttanaaaaaaaaagactaaactttttatttcctcataaatataataaaagaaaatagggggggggcgttt

SEQ ID NO: 16129 - DNA, 881 bp, Gossypium hirsutum
  Clone ID: GOSHI-09MAY01-C39155_1
gtcaagggcaaggaagcatgtctatacagatgatggttcaaaggaatccaaattagctcagattaagagtggatatgagtgggcgcagaaagaatatgtattggcagcaaagcggtatgaggaagcattaaatattaaaccagattttcatgaagctcttcttgcattgggacaacagcagtttgagcaagcgaaactttgttggtaccatgcagctgggagcaagttggatttagctgctgggccttcccaggaggtcctacaactttataacaaggcagaggatacatggaaaagggtatgcagctgtgggaggaaatgaaggagaaacgactgaatgggctctccaaattcgacaagtataaggcccatctgcagaaaatgagtttagacgggctgtttcaagatgtctcttccgaagaagctgctgagcaagctgcgaatatgtgttcgcaaatataccttttgtggggaactttgctttatgagcgctctgttgtggaatacaagcttgagctgccaacttgggaagaatgtttggaagtttcgattgagaaattcgaacttgctggagcttctcctacagatatagctgttatgataaagaaccactgctccaacgtgactgcatcggacggtgtaggattcaagattgatgagattgtacaggcatggaatgaaatgtatgatgtgaaaaggtggcagattggtgttccatcattccggctggaaccattgttccgtcgccgggctccaaagcttcaatctgccttggagcaagtctgagtttttcatgattggatattctttggaggcatttgacaagtacaagtgcttcagttttgtttaattctttttcaagatcagttttgtgtgctact

SEQ ID NO: 16130 - DNA, 367 bp, Gossypium hirsutum
  Clone ID: GOSHI-09MAY01-C39165_1
gccagttccgagaagaacagaaatgggtttgcaaaatttttcactcggagtaagaacgggatacaactagaaatttaagaacaagttgtaaaacaaagatatagtttgtcatattaaagacggtgattaaatgttgtttgatcacctgttattattattgttacttcactcttaggttgtctcatgtaatgctattattatacatgaatggttgtgttcaaattgaaatatcaacattcaagttgttacttcactcttaggttgtctcatgtaatgctattattatacatgaatggttgagttcaaattgcaatcttcagccccaacaactgatccccatcacgaaagggagtcaaaggaaaagaaa

SEQ ID NO: 16131 - DNA, 481 bp, Gossypium hirsutum
  Clone ID: GOSHI-09MAY01-C39105_1
cccacgcgtccggttcttcatcatcatctaccctttcttgaattatatatagcagaactcatagcaacatttccaaatatatacatatcaaccacagttcaatacatcgatctatcgaccaatcaatcagctatcaaccttcaatcaatcatggtgtttgagaaagatcttaaccttgatgcaacggagctccgattaggcctaccaggctcatcggaggagtctcttaggatcagtaacaaaagagccttgcctgatatgaatgatgattctggtgtcgcagctgctaaaaaatgtgaccaagaaactgctccacccaccaaggcacaagttgtagggtggccaccgatccgatcatacagaaaaaacagccttcaaacaaagaaaactgaggctgaaacaagtggaatgtatgtcaaagttagcatggatggagctccttatcttagaaaagatgatttaaaggtttataaggataccc

SEQ ID NO: 16132 - DNA, 417 bp, Gossypium hirsutum
  Clone ID: GOSHI-09MAY01-C39045_1
caagtaatcccttctcttggtagccagggcaaatcagaggatggtaaacctccatgggaaggggttagaacgaggtgcaaaaaagaatggtcgatgtttcagaaccgactcgcaaatgcagacaaggcgtaccttgctcagcttggaaaggaataattatttactgtctatttttattttattgatttcttttaccccaatccctccctgattttcaaccccgtttgtacatgtataatatctcacctgacgtttgttagggttcagtttgggtgacattttattttatttttgctgaacgagggtggactcatttacctgagccacatttttttgtacattaagatttccacagctatagaaaagggggagtaattttttttataaaaaaaaaacatctaataaaaaataaagggc

SEQ ID NO: 16133 - DNA, 553 bp, Gossypium hirsutum
  Clone ID: GOSHI-09MAY01-C39365_1
cactgtctcaatcgtttcacgattttccttttcttttttcttttaattatcacattattatttacacaatcatcagttggtttttccttttaaattttaatttacctcgccggaaaggtcgtcgcctttttcaccggggaaatttcatctccttaactatcttttctacctcagacatagtttgactgaaattgcaatgaacaagaatttgctctgaatttcatttttcgggctttgaagattggtgagcttttgtgctttagaagaatagcagaatgggatgtgttggatcgacgccggccaaaggagacgggaatgcgaaaaagattcgagagccaaaaccatggaaacatcctcagccgataacaaagtctgaactcgagcagatgcgtgatgagttttgggacactgcacctcattacggtggccaaaaagaaatctgggatgcacttcgggctgctgctgctgaacctgatttaagccaggctcaagttattgtggactgtgcggggtcatagtccaaaatactgatctaactatctgctatgatgaa

SEQ ID NO: 16134 - DNA, 318 bp, Gossypium hirsutum
  Clone ID: LIB3147-008-Q1-K1-D12
aaaaagattcgaaagccaaaaccatggttacatcctcagccgataacaaagtctgaacgcgagcagatgcgtgatgagttttgggacactgcgcctcattacggtggccaaaaaggtggatttctctgtaacttattgccatttaggttaacatgcctaagattatgaacaccttcgcatgtagataaacatgcctaagattatgaacatcttcgcatgtagatattctcgatttccgcaagtgtgaaggaatgctgttgatcttgagttgaccaaatatagaaaatcttcttttctgtatgagctgaaaaacttagt

SEQ ID NO: 16135 - DNA, 656 bp, Gossypium hirsutum
  Clone ID: GOSHI-09MAY01-C39325_1
cgagactatagtaaaccaagtgaaatgtcgaaggaagagatgaagatcggtagaagatttgagggaaaagtcgcaattgtgacggcttctactcaaggcatcggcttcagcatcgccgagcgtctcggcttggaaggcgccgccgtcgtcgtttcttctcgcaaacagaaaaatgtggatgaagcagttgaaaagcttaaaaataaaggaattcaagtgttgggagttgtttgccaggtctcaaatgcgcaacaaaggaaagatcttattaacaagactgttgagaaatatggaaaaatagatgtggttgtatcaaatgctgctgcaaatcctactgtcagtctattgttagaaacaccagaatctgtccttgacaaagtatgggaaataaacgttaaagcaagtgtacttcttctacaggaggcagctccttacttgcagaagggttcatcagttgttcttatttcctcaattatgggttaccaccctcagattgctatggctatgtatgggataactaagacagctcttcttggattgacaaaggctctggcaaaggagatggcacctgatactcgagtaaattgtgttgctcctggtttggttcctaccaactttgcggcattcctaacaaaagatgaagtcctgaaaaaacg

SEQ ID NO: 16136 - DNA, 765 bp, Gossypium hirsutum
  Clone ID: GOSHI-09MAY01-C39245_1
gtcgccggcgcccatcaccgttgcgtcgtcccgctcgttcctccatcaaaacactttcgtcattccggtcaagctgctgtttcctctgttgccggcgttcatcactgccgtcgtcttcttccgctgcagcattcagtcgtcgccgtcccgctgtgccgccggtcaatctcatccaattccgggtgattctagatgggagaggctcgggatggggtgaaggtaaagagagtggttttcgttacagtgggaacaacatgttttgatgcacttgttaaagtggcggattctcaggaagttaaggatgagttatatagaagagggtatactgatcttctcattcaaatgggtcgagggtcatatcttcctataaagtctactggtgatgatggatctttggctgtagactacttcacattttcatcgagcattgcggactatctgagatctgcatcgcttgtgatcagtcatgcaggttctgggagcatatttgagaccttgcagcttggcaaacctctaattgttgttgtcaatgaagatttgatggataatcatcagagtgagttagcagaagaactggcagagagaaaacatttatattgtgctcgtcctctgacactccaccaaactatagccggtatggatttgaattctcttgttccgtactctccgggagatgccacaccagtggccaaactgataaataggtttcttggctttccagaagagtcatgagcttgaatataatataaaaaaaaaaaaaaaaaa

SEQ ID NO: 16137 - DNA, 456 bp, Gossypium hirsutum
  Clone ID: GOSHI-09MAY01-C39215_1
gatccaaaatcaaacatcatttcatcaatttgcagcgagatttggtctccgttgccttctgattcaaggaataaaccgaccgacataaatgtatctttgcctggaagctaatctaaatttcccaaccttaaggttccaatactgacaccacaggcaatcaaagtatatttgatgaatcccattctcaccttcttcttgttctacgtgtaagcttatttagcttctcaccagcaccagcatgttcatgttccttggggtttatttaccctatttatttgtcaccattagtttagtctagtcaggtgattagatagccttatccagctgttgtgtcaagtagaatgttttgaatgtaatgtttactgagagagtgggcctttcctcgaagtgatgatggatttcggtcgcgcgggtttatgtagcttcaactcagttctatttctgacccattcaagt

SEQ ID NO: 16138 - DNA, 497 bp, Gossypium hirsutum
  Clone ID: GOSHI-09MAY01-C34865_1
accggccggaataacccgggggcgaccgcacgcgtaccgcccacgcgtaccgcttggctcgtaccccttcaaggtaatttcggtatctttgaataagccaggtgtctcctccaagggcaagttgaagaactcctgtgtatcggtcttcattttctcaatcacttcatctgctatcccatggttgattaactgttgcacccaacagtaagaatgaactactgaatccatagacgtaaaaaaagtataattgtgtttcaattaggtacctggaagaaaccccagtctttgcaagcctggtggagttttttctgttcagcatcatggtctagtttgctcatgtcaattacaggaatctgctgggattcatctatggaaaccacatcgaattcgacctctggtctgatgtatctggatgggattctgttgaggttcttggatgcaagagcttggacattctcaactggtaaagaatataacatatctgtgctctgcacttt

SEQ ID NO: 16139 - DNA, 423 bp, Gossypium hirsutum
  Clone ID: LIB3145-046-Q1-K1-H3
cccacgcgtccgataaattacctagcgcattaacaccataatttgagggtagtgtttaacttgagagagctttacagcaatggaaacaaaagtgcagagcacagatatgttatattctttaccagttgagaatgtccaagctcttgcatccaagaacctcaacagaatcccatccagatacatcagaccagaggtcgaattcgatgtggtttccatagatgaatcccagcagattcctgtaattgacatgagcaaactagaccatgatgctgaacagaaaaaactccaccaggcttgcaaagactggggtttcttccagttaatcaaccatgggatagcagatgaagtgattgagaaaatgaagaccgatacacaggagttcttcaactttgcctttgaggagaaaatggcttattcaagata

SEQ ID NO: 16140 - DNA, 803 bp, Gossypium hirsutum
  Clone ID: GOSHI-09MAY01-C34805_1
cccacgcgtccggtggaagtggctgtgtgtttgacaaatatgcttcattttctgattgtgtgtgggggcctgaaaaggaaatcaggatcattcaatatccttatgtcaaaagaagggataacctgccagaaccaaaggagaaagagaagccagttggcttgtggtctattatcaaggataatatcggaaaggatttatctggtgtctgtcttcctgtgtactttaatgaaccactctcttcactgcagaaatgctttgaggatttggagtattcatacttggttgatcgagccttggaatggggaaagcaggaaaatgacttgatgagaattctaaatgttgcggcatttgctgtatctggttatgcatcgacagaaggtcggcagtgcaaacctttcaatccacttcttggagagacctatgaggctgactatccagataaaggacttcgtttcttctctgaaaaggtgagtcaccacccaatgattgtcgcctgtcactgtgaaggtaaaagctggaaattctgggccgattcccatcttcaaaggaaattttgggggacgatctatccactccatcctgttggtattctactttgcattttgaggatggagagacttttcagtggagcagagttaccacgtccatatacaacattatccttggtaaaatctattgtgatcactatggtaccatgcgcataaaaaggcatgggcaattactcttgcaagctcaagttcaagagcagtctatcataaaccgaatccccatccggtttcatggatttgtgccaaaacataacc

SEQ ID NO: 16141 - DNA, 709 bp, Gossypium hirsutum
  Clone ID: GOSHI-09MAY01-C34555_1
atgaggtccagggtggtaacggccttggtgtggcagctcctaagaaatgaaagactgggatttaataatttctattccgggtatgaagattcaaagtataggatggctgcatcaggggatctatataacagaacatttgggttgtgatagttgtcggaaccatgtttgttgcttctttgccaatattattgcattatgctaagaagtagaatgaatgcttttgcgcaatcttggttggcacgttgttgaggatgggcatgttgacttgtaactggtctcgttggcattggccttggcaccccctcaaccgtggtagcttgccctaaaaggataggcggtgtgtgtggaacgagcatgagctggtaaataaggaaatattttagtaatattagttctatactgtgcctgcttaattgtgtgtggagctgctcgtttgggcggaaaagctggtggaacctatcaaaatacaaggggtaggctttggaggttcgagtttgggtaaaaaaatgccgctgaaatggttacagctataatttaaaatgtacattttactctgcattgcgtgtgtttaggggatttgggattataggggaatatgaaaacatttttctttctttaatttatttcttggatttctgtctgctacccatttgtctttgtgcattttccccgtatcatataattaagttattatttatcgctttttttt

SEQ ID NO: 16142 - DNA, 871 bp, Gossypium hirsutum
  Clone ID: GOSHI-09MAY01-C34545_1
aaataaaaccatcagagagaaagaagaagaaaactgtacgttttggaaaaagaaccaaaattgggtgagacaaaatttggaaaatacacaaagtcaggaagctgagtgggaaggggtctgtttggttgcgctgctggtgagcgcgatgatggagaaaggcaaagagcccgccgcagccaacgaggatggcgaagttggtaaggccgagagcgaggagattcaggaagccttagaaattgtcctctttcaagtctctgaatgttatgtttatttgatacctccaaggaaaactgcagcatcttacagggctgatgaatggaatgtcaacaaatgggcatgggagggaactttgaaagtcattagcaagggagaagaatgcattatcaggcttgaagacaagaatacaggtgaattgtatgctcgagcatttctgagagatggagagccacatccagtggaatctgtaattgatagcagtagatattttgttcttcggattgaggagaatattgggtggtcgccttcggcatgctttcattggcattgggtttcgagagagaacagaggcttatgatttccaagcagcgctgcatgaccatatgaaatacttgaacaaaaagaaaactgcggaagagatggagcagcaattccagaaatcttcctcagttgattacagtttaaaggatggggagaccattgtacttcaattaaaaattaagggtggctcttctctgatgtcaaacgctccggagctgggcattgacaaaatgtttggttgccatgcattcggaaaaaccttttttatttaaccaccatttccctcgatccgtttaacttgtttatgccttattctcctccatatccaaaattt

SEQ ID NO: 16143 - DNA, 408 bp, Gossypium hirsutum
  Clone ID: GOSHI-09MAY01-C34505_1
cccacgcgtccgcccacgcgtccgcttttcttcctcacttatactacccacttcgagcatcagagattggaagctcttcatatacttactctctagcggaacccgtttgtttgcctcaaacgccttaatcagtctcttgctagccattggacattacacggcaaaaacatctttctcagctcttgtttcatctctggccaatcggtgataggttggcgtgaagaatcctcaactctgggtttccaccatagttttttcatcacccacaagatacatggaagtaatgctaactttatctgcttccggtatatgagccactctgaaaaactgttagacatcgaacacgttggcctaaggaccttccttggaactccgagcaccattgaaaggcctaagcttcagggttcc

SEQ ID NO: 16144 - DNA, 429 bp, Gossypium hirsutum
  Clone ID: GOSHI-09MAY01-C34495_1
cccacgcgtccgtttgctggaacttcttgctcctactgtctagtgtcggctttatgagccgtgagtttatttttcattagcctaaaggatgttgggttacaggaggtacagaaagtggtgggtttacaagtatgcatagcaagcttggcatttgccacattaagtacatcatacagcaatttaccatctgctccttcaagccaagctaatattgatcttccatattttacaactgagataacaaaggaatcacgtccttttgcgctttctcttgcaaggcatctacattctatatgagctaagatgtatggggctttttggtgttctcactgtctagaacaaaaagagatgtttggacgtgaggcagcaaagttgttggactacattgaatgctttcctgatggatataagacgggaacaaaaatgatc

SEQ ID NO: 16145 - DNA, 676 bp, Gossypium hirsutum
  Clone ID: GOSHI-09MAY01-C34445_1
ggaaaaaccctaaaactcccctaaaaccaccacggtcaatacttcggagtctctttctagttcgttctcactgtcaaagcaagcggtggtaccggcaccggcgcctcattcacctcagttctcaccgctcagattccttgtagtctccccgttcattctcatttcggtctcaccgttctgccttcctctttcagattcactaagtttttgcagatagtgattttgaccttttataagcagtcaaagtgaatacagaaaagaaacaagatgaaatcggttgtgggcattgttgtatcaaataagatgcacaaatcagtggtagtagcggtggacaggctcttccacaacaagatttacaaccgctatgtcaagcgcacctccaagttcatggcccatgacgaaaaagatgaatgcaacatccgtgacagggttaaattagatccttctacgcccgtgagcaagcgtaagcattgcgttgtggctgaaattctcaagaaagctagaatctatacacccccatctgtggatactgctgcaaatgcaagtgccaagaatgaagcaccactttcttcaacctcataaggttcatttgatttcgttgcacttggttgtaaaaatcaagtttttgatttgcatttaaaaaacccccattactgtctttgtcgtgcttttgagc

SEQ ID NO: 16146 - DNA, 597 bp, Gossypium hirsutum
  Clone ID: AW187640.1
cgatcggatctgtcaagaacgagctgacgactacaggggaagcggctgactgcagtccctgagcccagcttgtagcaagccaaaagtttgacttgaacctactttgctaagagaagagagagaagggaaagacagacggcagaaagcaatcccttccaaccagccaacccgcggagttgaattgaacacaacactgacttcggccaggttcttctatcaatctcctggcccttgcttaactccttgttccgtaaaccggtcgctggttgatctgatcggaccccggacacgcgagagcccagcccgtgaggaatgcgtggttccctggcgcttcatgggacgggcgctcacagtccccctccctctaatctaaccctaccttgctcgcccaggcctgccggcacaataagagaatgagggagctaatctgcttgcttgtggcggcgatgaccactcggctagagctcgcctgtagagcttcgactgacttgttgtggctgtcgatcagcgatgaatcggttcgctccatgctctttgatagacatctttctgttctcggtctcttctgacgattatctttgggtccttattctgtgt

SEQ ID NO: 16147 - DNA, 411 bp, Gossypium hirsutum
  Clone ID: LIB3135-021-Q1-K1-G11
acgcgcacgcgtacgcgttcgacaaggcgtccgtgcgctcgtacgaccacgcgtacggcaatcctgggccagccagtcaagcctgggaggtgaattgaacacaacactgacttgggccaggttcttctatcaatctcctggcccttgcttaactccgtggtccgtgaaccggtcgctggttgatctgatcggaccccggacacgcgagagcccatcccgtgaggaatgcgtggttccctggcgcttcatgggacggtcgctcacagtccccctccctctaatctaaccctaccttgctcgcccaggcctgccggcacaataagagaatgagggagctaatctgcttgcttgtgcatgcgaggaccactctgctagagcgcgcctgaggagcttctagtgacttgttatggc

SEQ ID NO: 16148 - DNA, 823 bp, Gossypium hirsutum
  Clone ID: GOSHI-09MAY01-C34435_1
cccacgcgtccgctccactataaaatcctcaacgctctccctctttaaatccaaaaaaaaaaaaaaagaagtcattttttcagggctaagaaagagaaaaaaaaatggctttgcaaaaggcgaaggacatcgtatctaccaatcctgtcgtcgttttcagcaagtcctactgtccgttctgtgtggatgtgaagcaattgcttcaacaacttggagcttctttcaaggccattgagctcgacagagaaagtgatggatctgatattcaagcagctctggctgagtggaccggccagcggactgtgccaaacgttttcattggtgggaaacacattggtggctgtgattctacaatggccttgcacaaggaaggtaagctggttcctctgctaactgaagctggagctattacaaaatcatctgtttagaatagagttaagctgcttgtctcccctaaaattaataaacgaataccaagttcgatttcatgttgattctgtactttaagttgaatccatagtatagcatatagatatcgaactgaattgctgttgaacttcctagtaatattttcatgttcaagtttctttttacagaaatgttttagctggatctaattagagatttgtcatgtttgtcctatgtgattgcagctgttttgcctgtgacttttttcttcaacaatgagaaaggacatctaattgggagcttagctttaattagatttgacagatagaaacaacaatttgaaagagggttctgatcaaatatgaaaaagaaactctctacttgaaaggggggccccttctgaaatgtcaacgtt

SEQ ID NO: 16149 - DNA, 247 bp, Gossypium hirsutum
  unsure (1)..(247): unsure at all n locations
  Clone ID: LIB3146-008-Q1-K1-H12
acgcgtgggctgattcgtgggcggacgcgagggnggcagggggaatttaaagaaaaaaatggcccccccaaaggctaaggacattatatgtatcaaaacccgagaacgttttcagaaagataaaaagaaccgagctgagaggaagtaaagcaatagctataaaaacttggagcttctttcaaggccatagaacttgacaaagaaagtgatggaactgatattcaagcagctctggctgagtggaccg

SEQ ID NO: 16150 - DNA, 583 bp, Gossypium hirsutum
  Clone ID: GOSHI-09MAY01-C34755_1
gcgttcgaaaataccaataaaagagcaaacttctgttctgttggtggctaaaattggtggaatttattggtggtaccagactctatcacaaccctcctgaacttactgctggttcctgcgccactgctctgagagatggttatgatccagttgtctcagtgttgtctcgacatggagctgctttgcatattccctgcttagagatgatggacagtgaaaccccaccaacctatctttgcagtcctgaaggattactgaaacagatgcagtctgtttcaaagaaaaggatcgttaacttgattggaagaaatacaaccgaacgacttgacaagactggactatggaaaattcgttcaaactgttacaatccccaagcagaagttgtaagatcatttacttatttcagaatgaatgatagtatatttagggttgaaaattggaataactttgtaccttttgtcagaatgatgagcaccgatttgtaatatactgtttcaactgtctaccactttactaagctcattaagataaccctgcccctactttatttttttttcctgactgggggacggggcaattgcag

SEQ ID NO: 16151 - DNA, 323 bp, Gossypium hirsutum
  Clone ID: GOSHI-09MAY01-C34715_6
cccacgcgtccgatcatcaatggccaaggcgtgtagaaggcatggaactctgtatgcgatggttgccgtcgacagtctgctagtgtgaagctaatcaagttgaacgacgtgctcattagtggcattacctccgtcaactctaaagggttccatatgatgatcagcgtttgcagcaacttcgtgatcaccaacgttaatatatcggctccggatgaaagccccaacacggacggcattcacatgagcaaaacaaataaggtcagaattagcgacagtttcatcggcactggcgacgattgtgtctcaatgatccatggaaccac

SEQ ID NO: 16152 - DNA, 538 bp, Gossypium hirsutum
  Clone ID: GOSHI-09MAY01-C34715_2
caagaatatgcaacgattaaaggcagtgtggactcaaaagtgctcatctccgacgttgaattctcaaacatcagaggaacaacaataagcaaaattgctatagtcctagcttgcagcccaacatttccatgccaaggcattaccctcaaggacattcacttagagtattccggtcctcccgatcataatgaagacactcccttcagttctaactgcaccaacgtcaaagttaactacatcggcgagcagatgccaccgccctgcgcttaactcttatctcttcatggcggtccaacaaactccggtttattattttttattgcggtgtatcaactttatttgtgtctgagccaaatgtaattgaaggggctacttcaatgcataatatagcgggcgttggatgttctaaaaaaaatcggattagtgcttgatggtatttttttattatcggatgtatagaaaaaaatatttattattaatactacatatctatatgttaatgtattcattatttggttacatgatatgattttttttt

SEQ ID NO: 16153 - DNA, 1665 bp, Gossypium hirsutum
  Clone ID: GOSHI-09MAY01-C34715_1
ccccgcgtccgctttatctgaggctaataaacaataaagaaaaaaaatgaaggcctcagtttcaaaatggcttcaatgaggccccgcgtccggcctctttatctgaggctaataaacaataaagaaaaaaaaattgaaggcctcagtttcaaaatggcttcaatgaggctccttgcaataattgccattctggttcagggcttagttaatggtgattctcacgaattgcctagtttcgatccggaactagccgtagccaaagtttgggaagttgctgaaggcaaggtcggccctgatgttaaagtttttaatgtggtggatttcggtgccaagcccgatggaaccaccattagcactatcaattttattagggcattcaaagcagcttgcaatcacaatggccgtgcaatgctggtgatccctgagggaaatttcttattaggatcgatgttattgtccggaccttgcacttttcaacctccgttgatggttcaattcaacggaaaccttttgccgcaaggttcaacgtccacggccgaaaatgcagactggatcacattcataaactttaatggcttgttcataagtggaaaaggtaccatcaatggcctaggcgagaaggaggcatggaaggctgtatgcgatggttgccgtcgaaaggctgctaatttgaagttaatcaagttgaacgacgtgctcattagtggcattacctccgtcaacgctaaagggttccatatgatgatcagcgtttgcagcaacttcgtgatcaccaacgttaatatatcggctccggatgaaagccccaacacggacggcattcacatgagcaaaacaaataaggtcagaataagcaacagtaccatcggcactggcgacgattgtgtctcaatgatccatggaaccaccaacgtcaccattgagaacgtcaaatgtggccccggacacggtttcagtattggtagtcttggacactacgaagctgagttcgatgtttttggaatcaccgtgaggaattgctcactagcccacacagaaaatggtgcaagaatcaaaacatacagaaatgaaagtccatctaaagcttcgggcattattttccaagatctcactatggaccatgttaagaaccctattctcatcgatcaagaatatgcaacgattccaggcagtgtggactcaaaagtgctcatctccgacgttgaattctcaaacatcagaggaacaacaataagcaaaattgctgtagtcctagcttgcagccaatcatttccatgcaaaggcattaccctcaaggacattcacttagagtataccggtgatcccgatcataatgaagacactcccttcagttctaactgcaccaacgtcaaagttaactacatcggcgagcagctgccaccgccctgcgcttaactcttatctcttcatggcggtccaacaactccggtttattattttttattgtgtctgagccaaatgtaattgaaggagctacttcaatggaataatatagcgggcgttgggtgttctaaaaaaagtcggattagtgcttaaattgatggttttttttattatcggatgtatagaaaaaaaatttattattaatattacatatatatgttaatgtattcattatttggttacatgatatgattttttttt

SEQ ID NO: 16154 - DNA, 783 bp, Gossypium hirsutum
  unsure (1)..(783): unsure at all n locations
  Clone ID: LIB3828-003-Q1-K6-D11
naaanaaaaaaaaatgaaggcctcagtttcaaaatggcttcaatgaggctccttgcaataattgccattctggttnnnnnnnnnnnnnnnnnnnnnnnnnnnnnnnnnnnnnnnnnnnnnnnnnnnnnnnnnnnnnnnnnnnnnnnnnnnnnnnnnnnnnnnnnnnnnnnnnnnnnnnnnnnnnnnnnnnnnnnnnnnnnnnnnnnnnnnnnnnnnnnnnnnnnnnnnnnnnnnnnnnnnnnnnnnnnnnnnnnnnnnnnnnnnnnnnntcagggcttagttaatggtgattctcacgaattgcctagtttcgatccggaactagccgtagccaagtttgggaagttgctgaaggcaaggtcggccctgatgttaaagtttttaatgtggtggatttcggtgccaagcccgatggaaccaccattagcactatcaattttattagggcattcaaagcagcttgcaatcacaatggccgtgcaatgctggtgatccctgagggaaatttcttattaggatcgatgttattgtccggaccttgcacttttcaacctccgttgatggttcaattcaacggaaaccttttgccgcaggttcaacgtccacgccgaaaatgcagactggatcacattcataaactttaatggcttgttcataagtggaaaagtaccatcaatggcctaggcgagaaggaggcatggnaaggctgtatgcgatggttgccgtcgaaagctgctaattgaagttaatcaattgaacgacgtgctcattagtggcattacc

SEQ ID NO: 16155 - DNA, 585 bp, Gossypium hirsutum
  Clone ID: LIB3584-010-P1-K1-G1
ttttccacgcgtccgcccacgcgtccgcccacgcgtccgcggacgcgtgggttttgccacaaggttcaacgtccacggccgacaatgcagactggatcacattcatgaactttaatggcttgttcataagtggaaaaggtaccatcaatggcttaggcgagaaggaggcatggaaggctgtatgcgacgggtgccgtcgaaaggctgctaatttgaagttaatcaagttgaacgacgtgctcattagtggcattacctccgtcaacgctaaagggttccatatgatgatcagcgtttgcaacaacttcgtgatcaccaacgttaatatatcggctccggatgaaagccccaacacggacggcattcacatgagcaaaacaaataaggtcagaataagcaacagtaccatcggcactggcgacgattgtgtctcaatgatccatggaaccaccaacgtcaccgttgagaacgtcaaatgtggccccggacacggattcagtattggtagtcttggacactacgatgctgagttcgatgtttttgggatcaccgtgaggaattgctcacttgcctacacagaaaatg

SEQ ID NO: 16156 - DNA, 341 bp, Gossypium hirsutum
  Clone ID: LIB3145-012-Q1-K1-D7
gaggctaataaacaataaagaaaaaaaaattgaaggcctcagtttcaaaatggcttcaatgaggctccttgcaataattgccattctggttcagggcttagttaatggtgattctcacgaattgcctagtttcgatccggaactagccgtagccaaagtttgggaagttgctgttggcaaggtcggccctgatgtttaaggtgttaatgtggcggattccggggccattcctgatagaaccaccattgacaccttcattgctattttgtcattttatgccacttgcgatcgcggttgcctcaccattgatgaacttcaacaagctttgcaagagtttggtc

SEQ ID NO: 16157 - DNA, 496 bp, Gossypium hirsutum
  Clone ID: GOSHI-09MAY01-C34095_1
ttctcattcaatcaagtaacatcaactgtgaacataatcataagatcaagatggtgggtcaatggacggcgactaaaccaagccggagcgatgaagctttggactcggatcaacaacaacgaatcaccaaccaggtcagagctcagttcgattcgagggtcccaaaacgacccaccaaacccaaccggagtgaaccggatttgacatcctccaatcccccttcagatgtggaccaaaacatacccgagcttgacaagtgacggtcccttcaatctcaatctcaggcgaagatctcagaggggggagctacagtggaacaagaggagtttgtggagacacagtattacagggagatgaattccattgacaaactgcatcccacgacaggaagtgggttcataagagtgatgataggaggaggtgaaggaaatggatatgatattcaactggaaagtgggcaggatgcaatcaagaagcctatcttcaaaagcaaccc

SEQ ID NO: 16158 - DNA, 653 bp, Gossypium hirsutum
  Clone ID: GOSHI-09MAY01-C34315_1
caagttagtagcgatgaaccccatgaatcttagccgatgcagatctccccttgcccttccctttaataaactccattctcgctcttccctcagaaatcatctacagagacgaaagtccaaaaacattcggaagcgcatgaaaagactacgatcagatatgcaagaaataagtagggaacaagggaagatcaaagaagggcaaagacaagtacgagaaaaatttgaagccgttgaatccgaatgcgaattgcttcggaaggagactaacatcataatgcagcagagtatgagcacacaactccgccttgctttcatgttacaaatcttgaaagcaagagaaaaccacgacctcgaccaggctgccaaactcacttccgctcttcgggagctgatagcgagagagaatcagcaaaaggaaactatgtgattaagaagagctgctgtttgtatcttagcattaatatattatatgttggtgagagtgatcaaccacggtgcttctattcttctggtcttcatcttttatgcagtgtttgctgtgtggtgttatcttcggtctttggtttgttaagcaggtggattcttaaattgtcccctcaggttttgcttgaccatctttttttttcattaaaatttgcttagatttccctttt

SEQ ID NO: 16159 - DNA, 374 bp, Gossypium hirsutum
  Clone ID: GOSHI-09MAY01-C34295_2
aagcataaaaagcacaaggaccgagataaggacaaggataaagagcataagaagcacaagcaccggccttaagataaagatcggagttaagattaagacacgggaaaaaagaaggatagtagtgggcatcatgattctggtgctgatcactcaagaaagcaccatgaaaagaaaaggaagcatgatggagatgaagatcttagtgatgttcacagacacaaaaaaagtaagcataaaagctcaaaaattgatgaagttggtgcaattaaagtagcaggctgaaagggtggctctctagttcatattgtctcagatggttttcagagtatgggagggtttgcttaatgctctctacattggttgagagtaacctt

SEQ ID NO: 16160 - DNA, 553 bp, Gossypium hirsutum
  Clone ID: LIB3829-024-Q6-N6-G1
aaagggtaaaaaagggattgacattgatgtgataacatgtgccttacaattacaacttttcaggaacccattagaatatgttaagacattattctttcctacgtacaaaatactccgaatccctaaatcacaatgattaaaataaatcacgctaagactacaatcatcatgttgtaaatgaagagtcatcccatcgtgaactatatattaaaaaaaaaaatccaaagttttccatgctatcttaattatattacccactattataatacaagaaaagggtccattttcagccacttataccttgcatgaaatatccgtcagagaattcactttctacgcattcttcagtcaatttacaagcttactcttactttttttgtgtctgttaatgtcattacgatcttcatctccatcatgcttccttttcttttcatggtgcttttttaagtgatcagcaccagaatcataatgcccacttctatccttcttcttttccttgtctttatctttacttcgatctttatctttatgacggtgcttgtgcttcttatgc

SEQ ID NO: 16161 - DNA, 812 bp, Gossypium hirsutum
  Clone ID: GOSHI-09MAY01-C34285_1
gcgttcggaatttttctttcatttttggggggggggggggggagacggagagggagtatcgacggtgatggagatgcgagacatcgacgaccttccaaagaacgccgccaactacatggctttgacgccgttgtggttcttggaacgagccgccacggttcatcccaccagaaaagcggggggccatggagcgcggaacgtacacctggctccaaacttaccagcgttgccgtcgcttggcttcagctctttcgaaacgctccatcggcgttggtagctcggtagccataattgcaccaaacgttcctgctttgtatgaagctcattttgggattccgatgtctggtgctgttgtaaacaccatcaatattcgcctaaatgcatcaaccattgctttccttttgggtcattcacaatccaccgtcgtcattgtggaccaagagtttttcaatttggcagaggatgctttgagaatcatgaaggagaaaagccaaggcaatttcacacctccgcttgttattgtcattgctgacgaaagctgcaacccggaaacacttaagtatgctttggggcaaggagccattgagtatgagaagttcttagaaagtggtgaccctgactttgcttggaagcctcctcaagatgagtggcaaagcattgctttaggctatacttccggtacgacagccagcccaaaaggggtggtattacatcaccgaggggcatatctaatggctttgagtaatcctattatatgggaaatgaatgaaggagctgtatatttatggactctgcccatgttccattgtaat

SEQ ID NO: 16162 - DNA, 717 bp, Gossypium hirsutum
  Clone ID: GOSHI-09MAY01-C35995_1
cccagcgtccgcccagcgtccgcaagatctttctcagattccatttctggttttccttttggtattagtttcacttcaacagaagagagcaaaagctttttatgcctctttgattaaactacttgagctatccttgaaaaaaaaaaccagaaaggaaaaatgggtgttttgagctctgtaatgggtgtttttggattcggaattggaacttcggttgggatcgtcattgggtattacatgttcatctacttccttcccactgatgttaaggatcctaaaatccgtcctttggttgaggaagactctaaaactttgcagcagttgcttccagagatccctttgtgggtcaaaaatccagattttgaccgtgttgactggcttaacaaatttatcgagaccatgtggccttatctagatacggcgatttgcacaactgctaagaatatagcaaagcccattattggtgagcaaattccaaaatacaaaattcaatcagttgaatttgaaacacttactttgggtaccctgccaccaacttttcaaggaatgaaagtctatgtcactgatgagaaggaaattattatggaaccatcacttaagtgggcaggcaatcctaacatcattatcgcagttaaagctttgggattaaaagccactgttcaggttgtcgatttgcaagtttttgccgttcctcgaattactctgaagcctttgctc

SEQ ID NO: 16163 - DNA, 1330 bp, Gossypium hirsutum
  Clone ID: GOSHI-09MAY01-C35965_1
cgttcggggacccttcacaaggtgatggggcggggtgccggggaggtcgggtgcgtgaaacctatgattcaagggaaacccacagttgaagtttctcatgagaagcagaaacttgctgcttcactgtttggaggttcattcaaaaaccggaaaagagccctgcttctggtcataaggctgcaaaggcaagcggggagggggtggagaagtctcatgtgccaaagtctagtttggaagttgcatcagaaaaggccactcctgctcagcaacctccggacttgcttgatttgggggaaccaactgccacaagtactgctcttcaactagatccatttaaacaattggagggccttcttgacgcaactgaagttgcttcagctgtaaatggtgcacctgctgcttccagatcacctgatataatggcattgtatgctgacacagccgctggtgtacacaataaaaatgatgctgatcttttatctggcttgtcaaatccttcagtgacaaacatgcctggcactactgcaatgcctcaagtaacacaaagcagcagtaaacggccaaaccctaaagattccttggaaaaggatgcattggtgaggcagatgggtgtgaatccatcgagtcagaatccaaacttgtttaaagatttacttgggtgaactggaaacatgaatatgatttaagggattttaacagctaccaaatttacagtgccagtgcggttttgcatgcagctgggcagttgataggacaatcatacaggctatattggtatttatttatcattaccagatatatgccagggattgtcatataaatgtgatccagccatatagaattttggggtcaggtactgttctggagtttcttttttcctttttttttttgggaagcattactggtctggagggtttagtgtttattctaataccttttattttaataggaaagagcagaaacaatgatgttgtgttcgttcttttgagtgatttgccagcggaggttttagtggtggtgtattgtactgtaggtcatgcccatgcctatgcctaaagagttagatgggcgagggttttgcttttgcctactttagcagtgaccgatgtttgagtcccttgttataataatgatgtacaaatactggtaagttaattaattaatctgaaatatggagtttaagtaatctacctcaattagaatcacaaaaaaaaaaaacaaaaaaaaaaaaaaacatattttaaataagaaataaattaataattttaacatataaaaaaaataaataaaaataaaccccctaaaaaaaaaaaagggggggcctttttaa

SEQ ID NO: 16164 - DNA, 526 bp, Gossypium hirsutum
  Clone ID: GOSHI-09MAY01-C35575_1
ataattttttatagaagtttcttgttttgggctgtaataaataaatattaggattgaagctagaataatgtaatagtttataggcgcttcttactgagaactcctctgaaggttcctctttccacacctgaaaatcagcatgttctgtctcggctaaaggaatctttagaattttttacgctatgtttgattgaaaggaatccaacaatcagtccagacatcaatctcagtccctcattcgaccctctaacacaactcatcctgaataagccctcgcgctgcccagatgctcttccaggtatatgaagtgttaagagctcggaggtcggatttggtcggagacacatcacactgtcaacctcaggatttcggtatataaagaaactttattttggaaatcaatggcatgtataagctaacaaagtaaatgttaacgtgaaatgaatgtaaagttagccattagtatggttaacaaacctggttttagatatgtgatgacgttatcttataaatatgcatgaattta

SEQ ID NO: 16165 - DNA, 457 bp, Gossypium hirsutum
  Clone ID: uC-gsronu33B149f08b1
ttttacgcgtgggcttgaatgttgagtttgtgcatgttagggtaataatgcattgaatggatatatgaatgtttattatattgtattgaaaatattaggtaagtataattcttgttacatgagcttactaagcacgaagtgcttacctcgtttcctttttccctgttttgtagtgttaagagctcggaggtcggatttggtcggagacacatcacactgtcaacctcacgattccggtatataaagaaactttattttggaaatcaatggcatgtataagctaacaaagtaaatgttaacgtgaaatgaatgtaaagctagccattagtatggttaacaaacctggttatagataagtgatgacgttatcttatataaatgcatgaatctatcatgaaaatatgttgaattgaaaaaaataattaattcgtaaacttccgtaatgcctcgtacccta

SEQ ID NO: 16166 - DNA, 1319 bp, Gossypium hirsutum
  Clone ID: GOSHI-09MAY01-C35565_1
aagggtaaaatccctgataagctttcaaatagcctcagtgcatttaatgtgtccaataatgatttgtcgggtcctgttccagaaaatttgagaggcttccctaggtctgcattttctccaggaaactcattacttattttccccaagggcatgccaccgacaggcttgagtcaggatcatacccttgatcatgtgagacatcacagttcaaagggtagtattagagtagcaattattgttgcctcagttgtagcagctgtaatgattgtttttgtatttttggcatgtcaccgagcccaacttaaagaatttcgtggaagatgtggatttagtgacacaactactggaggcaatgcaaagtcaggtgggcttgcacgaccctcccgtttcaagtttcactcaactgctcaggcaccacaaacttcattaagtttttcaaatgatcacttgcttacttcaaattctaggtcagtttctggacagcaagaatttgctgctgaaattgttgagcatggtgcagccgagagagtgacaacctcttcagcatctgtgaatcctaatctactagataatgacccagtatcatctgggaggaaatcctccccaggctctccattagcatcttcaccacgtgttatagaaacatttgaacagcctgtgacatgggatgtttactcaccagatcgtttggctggagaattattctttcttgatacttcattatcattcactattgaagagttatctcgagctagcaagaagttcttgggaagaggcagccatggaactctttataaagctactctgcgtaatggcatatgtgcggtgaaagtggtggcgtgtaggaactggttaaacataagaaaagaattgtagggaagttaaaagatagggtccgtgaggcattctaactttgttccaagtccgagcatactatttggggaccaagggaacaagaaaggcttcttctatcagattatatcccagtgtgatagcttggcttttgcatctctatgagactactcctcgaaggtaccacccattatctttcagccaaagactgaaagtacctgtggaagttgccaagtgtctggtacaccttcatgatagagggctgccacatggaaacctgaaccccacttttctccccctcgcggaccctgattaccatgcttgcctcaccgattattgtctgcaccggctgatgacaccaactggaatcgctgagcagatattgaatctgggagcccttggatatcgtgctcccgaacttgccttcacatccaaaccagtcccatcttttaaagccgatgtgtatg

SEQ ID NO: 16167 - DNA, 307 bp, Gossypium hirsutum
  Clone ID: LIB3145-016-Q1-K1-C11
aaaatgatagggtcccgtgtggcattttaactttgctccagaccgagcatactattggggaggatggtaacaagaaaggctccttctatcaaattatatccagtgtgatagcttggcttttcatctctatgagactactcctcaaaggtaccacccattatctttcatccaaagactgaatgtacctgctgaagtcgccaagtgttatgttactacctttatgatataacggcttacacatgtcaaaccttgaaaccctacaaaatataactcctctgctgacccatgactatccattgcttagctc

SEQ ID NO: 16168 - DNA, 564 bp, Gossypium hirsutum
  Clone ID: GOSHI-09MAY01-C35515_1
ctcatttttcccagcttccatttgctcaagaaaaaaagagaaaagctcgaattttggttgaaacatatagaaagcaaagcatgatgattttatgaaagtggtattccaacgtagaaaagcatagaatctctcttttaaaagattcattcactcaccaaaaaaaaaagaaaaaaaaaagaaagttttctcttcggttttctctttactaagataagatagaatgtgaagaagacgacgaagaagaagaagaagcaaagctgtataagttaagggtttttcaaagatttttgttgccataatgtgaacctgatttccatccacctaggattgccaaattaggcaaccttaactacaagctaaatcatcaaacaccacctcggctggttctctccggaaacagtagttactcttcttgtcgtgcacaaagattgaagatatcgtctatcattgtaatttacagctcctttgcttgctcctcaactacaagccgtttgatatagaacttgtgaagctaggcttttcagtttgtttgttcatattagaaagagaaacacatttggatta

SEQ ID NO: 16169 - DNA, 323 bp, Gossypium hirsutum
  Clone ID: GOSHI-09MAY01-C35495_1
cccacgcgtccgcccacgcgttcgggaaggtctcggtgatcaacatagttgtgcttatcctactcgtcatcttctatgtcatcggctgtgccgccgcccgcgcctccgagagcatcgataatgatgaaccttatggcgaggcaaggatgacaaaagcacaacctagcaggattcagttatagaaacctaatggtaatggaggccatcgcttttattcagaagatatgtttgtatgtatgttctaggttttggatccatattttatggtcgggttgacatatgaactcgaatttggtcttggtttaagagtgtgggtttctgta

SEQ ID NO: 16170 - DNA, 763 bp, Gossypium hirsutum
  Clone ID: GOSHI-09MAY01-C35725_1
ccccgcgtccgcggccgcgtgggtaaaatcccagtttctcttcttgatttgctgttttgctgtgttcttgagatatggcagggagagaagttcgtgagtacaccaatctgagcgaccccaaagataaaaggtggggcaaaggaaaggacaaactggacgatgaagatattgctttccagcgtatggttgccaagatgcaagaggtcgctggagaacgtggaggctacctacatgggcgaggcgctttggacagtgatgatttactctatctcaaggagcagatggaagcagaggaggatgctgaacgcctcctgcgccgtaccgagaagcgggcatttgctgcatttaagaaagctgcaagtttagcagattcctcacctgcatcctttcctcttcctcttcgagttgaacccaagccaaagagtggaatcagacagcaagatttgctgaaaaaagttgttgaagttaaacccaaacgccccaaaatttcatccccctccagctctgagcctgaagggaatcaatccaatttacaatctcaggggcaggagtccaaccatgagaagaagattggccattgtgtttcggaatcaaatacagcagaaaagcagaataaggtggaaaagtctaccaaatccttactaggcttagcctatgcaagttctgatgatgatgatgatgattgactgatatatacatgcatttgacttgtaatctacatgaacatgactgtttttgttttctccctccataacaaacgctc

SEQ ID NO: 16171 - DNA, 406 bp, Gossypium hirsutum
  Clone ID: GOSHI-09MAY01-C35685_1
ttctcgtctctgcatcaggctagggttcaacgaataaccgagaaggcggcatcaagtttccttttatcctatcgccatgagagccaagtggaagaagaagcgcatgagaagactgaagcggaagcgccgaaagatgagacagagatccaagtagacagaaccaccagcccctctgttatacgaggtttctcaatgtcttagctaatatcggtgtacttttagggtccacttagttatctgccatttttatttcagttttaagttttttttttctcttgggtttctattgtctttcaagttggtgctaacccggcagtgggatgatgtatcatcgttgagaacagtgaattgcaaaaaaaaaaaaagcagattttaagattggagtttaatttgatttttctttttt

SEQ ID NO: 16172 - DNA, 839 bp, Gossypium hirsutum
  Clone ID: GOSHI-09MAY01-C35645_1
cccacgcgtccgcccacgcgtccggagcgttccgccttagggggaagcacccgcgtgagcgggagtggacgaagcggaagcgagaatgtcggcttgagtaacgcaaacattggtgaacaagtgggatcagctgaggcacatgatgagatctctgagccaatctccaatatcggcaaaacagctttaagcccaaacctgagttttcagggaacttctctgatgcaaagtgatcatttcctcttgcctagttcaatagaatactatgaaggtagagattttgggtctgtgcaagatgaacaaaaggaaagcctaatccgtttgcctcaaccctcgagcattgatgtcaatggggttcttggtcaaatactttttgatgtctgtgtccccaaggatgtcgaaggttgggatatgaagtcatcagattcctcgagccgacacccttatacttcttctctgtggcggaattcccatttcaatccaatcaaatgcattcgtcggtccagactatagcataccttgctgactactttcagcacaggcttgttcctgaatttgcggaacccgtaatcttaccggcatgagaattaaatggagcccaacccatagcaaaatgggaccgccaaaggttcaagaaggggcaatgtgaatggatggcgagatgtgatctctaattctgtttcgtaggccactaatgattacttgccatgatttgagctgataagacctctgttccaagttccaacataaacaataaacagtcactttactattcatgctctaaatttgatgtggagtttcttagaatcaccatcataatgaaaataaaacgttattgcgct

SEQ ID NO: 16173 - DNA, 1723 bp, Gossypium hirsutum
  Clone ID: GOSHI-09MAY01-C35165_1
ccccgcgtccggttttatgtaagatttgtggtgatggtgggcatccaacaatcgattgtccaatgaagggaactacagggaagaaaatggatgatgaatatcagaatttcttggctgagctaggtggtactgtccctgattcagctaacaagcaaaactcttcgtcagtcagttctggaagcaatcctccttgggctagcagcactggaggtgctggaagtgcacaccctggcttaggttccaatgctgttaagccccccaaagaatatgatgatactaatttgtacattggatacttgcctcccagtcttgatgatgatggtttgattagtttgttttcagcttatggtgatattgtgatggcaaaggtaatcaaggaccgggttactggactgagtaaagggtatggttttgtgaagtatgctagtgttgacatggcaaacaatgctattaagggaatgaatggtagtcttctagagggaagaaccattgctgtgagagttgctggcaagccaccacaacctgcagtgcctcctggtccacccacattgtcaatgcccagttaccctgtctctagtcagccagttggtgcctatccatcacgacaatttacaactggaggtcctattcctaatgctgcttctgctagttatgcaggaaatccagttccatggggaccaccagttcctcctccccccccttatgccccttatgcccctcctccccctcctcctcctggctcaaccatttatcctcctgttcatggtcagcctatgccaccttatggtttgcaatatcccccacaaatgcagacggttcctcctggtgttgcacctccacctccacctgtgacttctagtgaaacagcacaaagttttccaccaggagtgcaatctgaaaatagcacgtctgccccagctatgcctgctaatatctacgggaactcaatgactgcaatgcctccaaattcacaatctgcatatcctacatcttctttaggttactcttcttattacaatgcagttccccccccctccccctcctccactacctacatcttccacagataattctcagagccttagtaatgtcccttgggctccaaaccctcttttgactccggcagcatcctctggagagaaaacaacctatggtgcagatactgagtatgagaagttcatggcagagatgaagtgatgcaaatttaccccgttggtggttatatgcggagaggactgatgtttcttggagctcttgtgaacctgatttcttacctcttgccatgactttgttggaagtttgggactcacatctttaaccttcctgtactgttatgatatttgcagagacttggatacaagttcagttcatgaggttgcattctgaaaaggccgttcaaattttattaatatgaaatattcaatcaacctgtaggacttggttttatgttctatgaattcacattgggtttctgtttttcgtctgattgctagtgttactatggttccattttgtcaagctgttttccacaaatggttcctgacatttcttgttattatgtttacttctctcggggattgtttaacagctttttcaattagtttagcatattatgctatttcctggttaaaaaaaaaaaaaaaaaaacaaaaaaaaaaaaaaaaaaaaaaaaaaaaaaaaaataaaaaaaaaaaaaaaaaaacaaaaaaaaataaaaaaaata

SEQ ID NO: 16174 - DNA, 594 bp, Gossypium hirsutum
  Clone ID: GOSHI-09MAY01-C35105_1
catcgacagttttagttataattcaccgaatcgtacggtgagagagagaataataaggcgttttgtccggtgagatggcatcgttgataacgaatccagtgacgaacacaaattctgatcgtagcaaaaggaaaaagaagaagaattctatggtgaaacagaatcttcaacggagccaaaaggaagatcatgccagacgcgggtcagaggcgcagcagcaaatctattcctcaaaacttcttcaagctttgagtcaggtcagtctcggtactccctctccttcggctccacgcggtggtcgagctgtccgtgaagccgctgatagagtgttggcggttgctgctaaagggagaaccaggtggagccgggccattttgacgagccggcttaaactgaaatttagaaagcagaagagatcacagagaggatccgctgctgccgttgctgccgcaacaaggactagccggtcgaagaaaccgagagttagcgttttgaaattgaaagccgaaagtgtaccgaatgttcacagaaaagtataggtcctaggcagattggttcccggttgccggaagcaaccgttaccggtaattcttt

SEQ ID NO: 16175 - DNA, 422 bp, Gossypium hirsutum
  Clone ID: GOSHI-09MAY01-C35015_1
atggtttttaattgtcccaatttgaaagaggtatccttagaattttctcgccaagaaacccgccctaccgatcttacaaccatggttgatgcaatgggtagaagttgcccaaggttgcaaaacatacacattgtatcagttcgactttcacatgctgtagtgctttctcttacagctgctaatttgaggggcttgcggatgctttcgcttgttcttggctcagaaatcacagatgcatctgttgctgctattgcttcaagttattcaaaattagaattgcttgatctcagcgggtctagcatcagtgatagtggcattggaatgatctgcaatgtgttaccaaacacactgtcaagactcctccttgctctttgtcctaacataacttcaagtggaattcagtttgccacagctcaactacc

SEQ ID NO: 16176 - DNA, 447 bp, Gossypium hirsutum
  Clone ID: GOSHI-09MAY01-C35395_1
gttgcccattattcctcagtcctatgttacacatgcgcttagagtggaaggtcttcgaggtataataacagtgccagccaagctggaatcgacaaccctcgtctttgcacatggagttgacctatttttcacgcagcttgcaccttcaaggacatatgattcactcacggaagattttagttatgccttgctactcattacaatcgtggcactcgtagcagccatctttgtaacatggaggttgtccgagaggaaagaactgcaagagaaatggaggtaaagtttcttctcattacgtttgtgtattaacacatttgcttagatgacacacacccttaattatttatttgaattagattagaaggggtctccttatgacttgtaattcttccaagttttgtagcattcaatctttaatgtctattttcattgctctgttttacaaaa

SEQ ID NO: 16177 - DNA, 906 bp, Gossypium hirsutum
  Clone ID: GOSHI-09MAY01-C35385_1
acgaccaagccttgtctcaacaaaatggttctttaaccaaagtagatcctcaacatccttcagcgaaccttctaagtgatcttttgggcccacttgccattgaaggccctcctggtgctactgtccaatctgagcacaatgcagtctctggattggaaggtggtccagatgcagttgatggttcagccatagtgcctgtcgaagagcagagaaatacagttcatccgataggaaatattgctgaaagattccatgctttatgcctgaaagatagtggtgttctatatgaggatccttacattcagattggcattaaagcagagtggcgagctcatcatggacgtcttgttcttttcttgggaaacaagaatacagctcctcttgtttcagtccaggctctaatgctgccccctgctcatctgaagatggagctttcattagtgcctgacactatacctcctcgagcacaggtgcaatgcccacttgaggttgtaaatcttcggccaagccgggatgtagctgttcttgacttctcctacaagtttgggaccaatatggttaatgtgaagcttcgccttcctgctgtgttgaataaatttcttcagcctattccagtgcctgctgaggagtttttccctcaatggagatcactttcaggacctccattgaagcttcaagaagtggttagaggtgtaagaaccatgcctcttccagaaatgggcaatctactccacaatttccgggtaaatgatttgtcctgggcttgatccaaatcctataatctagttggcaacactaccttctactcggagagtacgcttggcatgctatgtttgatccgaaatggaacagattctgcagaacgaacccatttgcgaatgaaccttgcttcaggcaatcctacct

SEQ ID NO: 16178 - DNA, 534 bp, Gossypium hirsutum
  Clone ID: GOSHI-09MAY01-C35225_8
tcctcgcgtccgaaaaaagttaatttataaattatatagtaacataataaataatgacgtcgttgttttggagaggtcttattatattacctcttctttttgtatatgtcaacggcgagcattttttgtaccctaaacgtcatactggcaaagccgagttagccggttacaaggggccagactctcttgccgtcgacggtggtggtttctatagcggtcccttgattgccgatgacgatggatctactgctgacggcaatcctggtggaactaccgaggtgaaggttgaaaaccttggaaaggccgacggtgataatactaatggcagtgcaaatagtgtcgaatcgactcaagttgctgccaaaaatggaattggcaacggaaatatttttgaggctaaaactacgtttaaagggagttgggaattgtttgttgagaacgccggtgtttccgccatgcatttgatattgctttctaagatcaacccagctttgatgttcgatgccacagtgtggaaaaatctcacagatgaaa

SEQ ID NO: 16179 - DNA, 561 bp, Gossypium hirsutum
  Clone ID: GOSHI-09MAY01-C35225_7
acgcattatttcccaccgaagttcgggttgagaagttctcgccaccttacttggaccctaacttggccatgttccgacaagagatcatcaccgaaaagtccgatatccaattaaagtatggccagatattctcagtgcaaatccgtggaaatggtgtaatcgacccacaaaagcttcaagtgacgatcttctcgccgccgtttgtgacccacgggatctgcatgaatcagagattgattcaattgggaattttggaatttaataaagatgtagccccgaattcggacaacattgttcttcaagctcccatgaatggcaacattgcgcaacctggttattacatgctcttcgtgaactacaatggggtgccttgccttcgatcgatgtgggtacaaattttgccataaatatttcaccggaagcatttaatcgtcgaatacactatatataattattttatttcttatatatataaaaatatatgaagtactctatttacatgtttgttgcacccactattgttttgaagatcatatgaagaattgaatttacttatttgcg

SEQ ID NO: 16180 - DNA, 647 bp, Gossypium hirsutum
  Clone ID: GOSHI-09MAY01-C35225_5
atgtaccactcctcgttcgctgtccttcctgatgcaaaagtcctcatcgccggaagcaacacgaaccctggttacctcgatgatgcattgttccccaccgaagtccgggttgagaaattctcaccacattacttggaccctaacttggccatgttccgacaagagatcattgtcgacaagtccaatagccaagtgaagtacggcaaaaaattcacagtacaaatccgtggaaatggcgaaattgaccaacaaaagcttcaagtgacgatttactcacctccgtttgtgacccatgggatctccatgaatcagagattgattcaattgggaattgtggaatttaacaaaaatgttacctcaaatacaaacaacattattcttcaagctcccatgaatggcaacattgcgccacctggttattacatgctcttcgtaaactacaatggggtgccttgccgccaatcgatgtgggttcaatttttgccatagatatttcactggaagcattgaatcgcaaagtcgttatatgaaattattatattctcttataaagaaaaattaatgaatcactttgttcacgttttgttgcacacattattcttttaaagatcatatacaatacaaaatgtggactattggatttattt

SEQ ID NO: 16181 - DNA, 618 bp, Gossypium hirsutum
  Clone ID: GOSHI-09MAY01-C35225_4
gcggtccttggttgttgaaaagatgcaactgctactcccagcaaccaaggtggaactaccgaggtgacggttgggaagcccggagaccataccctcgatgcgtctgtaggcaatgatgaaaattaaagatgcaagtatgattgaggctgcaactacatttaaagggagttgggaattattccttgagaatggcggtgtttccgcaatgcatttgcaattacttcctaagatcaatcaagctttgatgtttgacgccacagtgtggaagatctcgaagataaaattaccaccgccatgccgacacgtcgagggaaccaatgaagaagattgctttgctcattcggttcttatggacattgaaacaggaaagcttaggccacttaggttgcactatgacacttggtgctcatcgggtgcccttgatatcaatggccgattggtaagcactggcggttttaacaatggctccgacactgtgagaatcctcgacttatgcgatacttgtggctgggaagaatatcccggtgcacttgcaaatgggaagatggtatgccacacaagtaaccttaggcgacggtagattcatggtgttcggcggtcgagatttcccaacatacg

SEQ ID NO: 16182 - DNA, 928 bp, Gossypium hirsutum
  Clone ID: GOSHI-09MAY01-C35225_3
cccacgcgtccgcccacgcgtccgccctctcgtccgggaagatcataaacatgccgtgagctcgtctgttgggagacatggccgttttaccaacaggagatgtgcttattgttaacggtgccaagactggttcagctggttgggatgacgctagggagccgaatttgaaccctgttttgtacaaatatcaaaccgatggaactggttccaaattcactgtgcttaacccatccaacatcccccgcatgtaccactcctcattcgctctccttcccgatgcaaaaatcctcattgctggaagcaacacaaacccaggttaccttgatgacgcattgttccccaccgaagttcgggttgagaagttctcgccacattacttggacccgaacttgggtatgttccaacaagagatcattgttgaaaattccaataaccaggtgaaatacggtcagaaatttacagtgcaaatccgtggaaatgtcgaaattgaccaacaaaagcttcaagtgacgatttactcaccgccatttgtgacgcacggggttgctatgaatcaaagattgattcaattgggaattgtggaatttaacaaaaatgttgccataaatacaaacaacattgttcttcaagctcccgttaatagcaacattgcaccacctggttattacatgctctttgtgaactacaatggagtaccttgccgtcgatcaatgtgggttcgaattttaccttagatctttcacaacaagcattgaattgtcagagccactatatgtaatacgaatcattgttcacgttttgtttcacaagttgttatttgaagatcttatataaaatgtggataattagatttattttaaaaaaaaaaccacccatttctctttataaattcttaagtttataatattttataacaaatatttggttt

SEQ ID NO: 16183 - DNA, 1638 bp, Gossypium hirsutum
  Clone ID: GOSHI-09MAY01-C35225_2
cagctttgtttttgagcccgggtggaagggtcaaactgaattaccgggaccaccatgccgacatgtcgagggaaccaatgaagaagattgctttgcacattcaatcctcttagaggtggaaacagcacatattaggccacttaggttgaactatgacacttggtgttcatcgggtgctcttgatatcaatggtcgattggtaagtaccggtggttacaacaatggctctgacaccgtgagaatccttgacttatgtgatacttgtgggtgggaagaatttcctggtgcacttggaaacggaagatggtatgccacacaagtaacattagctgatggtaaattcatggtgttcggcggtcgggatttcccgacatacgaatttgttcctccagaaggacaaaaaaacaccattaatgaagtgatcaatttcccattcttgaaggaaacacacgatcccgttgagaacaatttataccctttcgttttcctttcaactgatggcaacctcttcatttttgccaataatcgttcggttcttttgaacactcaaacccacacgattatccacgagttcccagtgctccctggtggtgctcgtaattatccgtcatcgggatgcgcttctctccttccaatcatgcttaaacctaatgaagataggaaatcaatccccgccgaggttttggtgtgcggtggaacgccgcatgatgcatatacaaaggccgatttgcaacgccctaaggtgtttttgccagggaacaccgattgtgctcgcattgacatcaccaaaaggaatggcaagtggaagatccaaaacatgccatcagctcgtctcttgggagacatggtggtgcttccgacgggagatgtgcttcttgtcaacggtgccaagaccggttcagccggttgggatgacgctagggacccgaatttacaccctgttttgtacaaattccaaactgatggaactggttccaagttcaccgtgcttaacccatccaacatcccccgcatgtaccactcctcatttgcactccttcctgacgcaaaaatcctcattgctggaagcaacacgaaccccggttacctcgatgatgcattgttccccactgaagtccgggtcgagaaattctcaccacattacttggacccgaacttggccatgttccgacaagagatcattgtcgagaagtccaataaccaagtgaagtacggccagaaactcacagtacagatccgtggaaatggcgaaatcgaccaacaaaaacttcaagtgacggtttactcaccaccatttgtgacccatgggatctccatgaatcagagattgattcaattgggaattgtggaatttaacaaaaatgttgctccaaatacaaacaacattgttcttcaagctcccatgaatggcaacattgcgccacctggttattacatgctcttcgtaaactataatggggtgccttgccgccaatcaatgtgggttcaatttttgccatagatatttcactgaaagcattgaatcgtcgaagtcgttatatgtaattattatattttttataaataaaaatatttgaatccccttggtccaaaaaaaaaaaaaaaaaaaaaaaaaaaaaaaaaaaaaaaaaaaaaaaa

SEQ ID NO: 16184 - DNA, 742 bp, Gossypium hirsutum
  Clone ID: uC-gsflmaxxa076d08b1
cccacgcgtccgatagaataaaaaaagttaatttataaattatatagtaacataataaataatgacgtcgttgttttggagaggtcttattatattacctcttctttttgtatatgtcaacggcgagcattttttgtaccctaaacgtcatactggcaaagccgagttagccggttacaaggggccagactctcttgccgtcgacggtggtggtttctatagcggccccttgattgccgatgacgatggatctactgctgacggcaatcctggtggaactaccgtggcgaaggttgaaaaccttggattgctccactgctttttattacttatgtttgcgcgaatttgtgcttttatctatttaggtttcttgcttccttgttcttgtccttttttatatttttagctgtttatctcttacttttaaaggatatttttctctttctgatgttcccttatttttcttttcttttttttttatctcttctctctattctctttttctttttattccttatccctttttttttctttttattcttatttttcctctctattatctttttttcctattcttcttcctttttttttatcttctctttcttactttcttctttttcattcttttccccttttcttctttcctttttttcctttcttttctttctttcttttcttcctttctcttttttcctcttttctctatctttcttcttttttttcatctttttcttttctctct

SEQ ID NO: 16185 - DNA, 594 bp, Gossypium hirsutum
  unsure (1)..(594): unsure at all n locations
  Clone ID: LIB3828-007-Q1-K6-C11
gccgagttagctggtttcaagggccagnaactcttgctaccgatggtggcggtttctttagcggtcccttggttgttgataatgatgcaactgctactatcggcaaccaaggtggaactaccgaggtgacggttgggaagcccgaagatgataccctcgttgcgtctctagacaatgatggaattagatatgcaaatttgattgaggctgcaactacgtttaaaggaagttgggaattgttccttgagaatggcggtgtttctgccatgcatttgatattgcttcctaagatcaatcaagctttggtgtttgacgccacagtatggaagatctcgaagataaaattaccgggaccgccatgccgacacgtcgagggaaccaatgaagaagattgctttgctcattcggttctcatggacattgaaacaggaaagcttaggccacttaggttgaactatgacacttggtgttcatcgggtggtcttgatatcaatggtcgattggtaagcactggtggttttaacaatggctccgacactgtgagaatcctcgacttatgcgatacttgtgattggaaagaatatcccggtgcaa

SEQ ID NO: 16186 - DNA, 514 bp, Gossypium hirsutum
  unsure (1)..(514): unsure at all n locations
  Clone ID: uC-gsflmaxxa045e06b1
ttaaaacaagttaggttttgcattatttatctaaataataaaagatgggattgttttggagagttcttattatattacctctcttttttgcatatgtcaactgtgaatactttacgtacccttcccgtcatactggcaaagccgagttagccggtttcaaggggccggactctcttgctaccgatggtggcggtttctttagcggtcccttggttgtcaatgatgatgtaactgctactcccggcaaccaaggtggaactactgaggtgacagttgaaaagcccggagacgatatcctcgatgcgtctctagctgatggcaatgatggagttggcaaggcaaatatgattgaggctgcaactacgtttaaagggagctgggaattgttccttgagactggcggtgtttccgccatgcatttgatattactntctaagatcaatcaagctttgatgtttgacgccacagtgtggaagatctcgaagataaaattaccaggaccgccatgccgaca

SEQ ID NO: 16187 - DNA, 428 bp, Gossypium hirsutum
  Clone ID: uC-gsflmaxxa012b01b1
ttgaataaaaaaaagttaaattttacattatatatctaaataataaaagatgggattgttttggagagttcttgttgcattacctttcttttttgcatatgtgaatggtgaacattttacgtacccttctcgtcatcctggcaaagccgagttagccggtttcaaggggccggactctcttgctaccgatgggggcggtttctttagcggtccctcgattgttgatgatagatgtagctgctactacaggcaacctaggcggaactaccgtggactctgatggaacgtcagttgataacgcccttaaactcatctttagccaatgatggaattggcaatgctaatatgattgaggctgcaactacgtttaaagggagtcgggaattgcttcctgagaaatggtgggcctccccacagtctttctcttt

SEQ ID NO: 16188 - DNA, 436 bp, Gossypium hirsutum
  Clone ID: LIB3145-023-Q1-K1-D5
cggagatgataccctcgaaacctctctagccaatgatggaattggcaatgcaaatatgattgaggctgcaactacgtttaaagggagttgggaattgttccttgagaatggcggtgtttccgccatgcatttgatattgcttcctaagatcaatcaagctttgatgtttgacgccacagtgtggaagatctcgaagataaaattaccgggaccgccatgccgacacgttgagggaaccaatgaagaagattgctttgctcattcggttctcatggacattgatacaggaaagcttaggccacttaggttgaaatatgacacttggtgttcatcgggtggtcttgatatcaatggtcgattggtaagcactggcgggtataacaatggctccgacaccgtgagaatcctcgacttatgcgatacttgtgattggaaa

SEQ ID NO: 16189 - DNA, 277 bp, Gossypium hirsutum
  Clone ID: LIB3828-032-Q6-K6-H4
ccgggtcgacctcgcgtccggtgcaatgttgccattcatgggagcttgaagaacctggttattacatgctctttgtgaactacaatggggtgccttgccttcgatcgatgtgggtacaaattttgccataaatatttcattggaagcattgaatcgtcgaagacactatatataattattttattttttatatatatataaatatatgaagtactctgtttacattttttttgcacccactattgttttgaagatcatttgaagaattgaatttatt

SEQ ID NO: 16190 - DNA, 519 bp, Gossypium hirsutum
  Clone ID: GOSHI-09MAY01-C36815_1
cacgtttgggatcaattgtccacaagaaaattttcctattcctgaattcccatcaaatgaagaggtagtcggtgttattaccatggaggatgttatcgaagaacttcttcaagaggagatattagatgagacggatgagtatgttaatatccacaacaggataaagatcaacatgcatgcaccttacgaaaatgctagcatcccaacccctgcatcttcgtcacccttggccgctccaggtcctacaccaaccctttcggtgtccaccagtacttcaaatacaggttcacctgccgcaacccttttcccgatatgatgtgatagtcaaatacggacaaagaaaaatatgttaatagtccgttacttggtaagaatcaatgactgaccctacttagttttaggtcggaattgccggtaagatgcatgcttttatagagaaccggtacttgttgaaaaactcatatatggacctcatcctatatagaattaaagatggatcatggattgttttgcctctct

SEQ ID NO: 16191 - DNA, 1073 bp, Gossypium hirsutum
  Clone ID: GOSHI-09MAY01-C36555_1
acgcaccacttcgatgcctgtgttcatggatatccaaatgccagaaatggatggatttgaggcggcgaggagaattcgggatgtggaacagaatatcaataatcatattaaatttggagaaatttcagtggatgattacaacaatgtttcaaactggcatgtacccattttggccatgacagcagatgttattcaagctacacacgaggaatgcctacggtgtggaatggatggatatgtgtcaaaaccattcgaagctgagcagttatacccggaagtttcacgatttttccattaggcattattagatcagaaactgttggaagaacatctgctcatgacttggcatgggcactaatgggactgcctgtactttggcattctttgcgatacctcaataaattcagattattcccaacaggaaacatttgtttttgttgcagagtgtacatagaatcatgcttgaatatagggattgagttttcttgtagttttacaattaagatggccccgcctgttgatccttttgttttgatttgtaaagttggtcattccaattccaagtccttttcagcagggttggtaaattgagatgtctgtgcagtaagaactaattgactttggggttaaaaagcagtttgctaatggaaatggagggaagaaacccattccaagtcctggagtgtgttcatagaaaattgcagcaatcctcgttgtgttagtaatgaaaactcctgcaaaattaaagctgtttttttctgaacattatttattgtatcatagtgaccaaattgaattgaaagaattgaagattgattgcttctcagctattgaaggggaagattgcacccttgtacattaaccttgtattcgtaatgattgattactcctttacctttttgttaagcttatcttcatacaatgtttagtagttaattatatttttaacgcagctcaaaaatttgcttgaattatattatttttttttttataatttatttctatatttattaggtcgtccgctctagatgttcttactttattactcttcattctgcgttttattttttttt

SEQ ID NO: 16192 - DNA, 853 bp, Gossypium hirsutum
  Clone ID: GOSHI-09MAY01-C36535_1
gcgttcgcccagcgtccggctgatcaagaggccaatcctctagttggagtcaggctggtggctggagcaaagagggggggaatggtggaacaagtggaggtggagccaagacttggattcaatccactgctgatcaaggaggccaatcctctagttggagccagtctggtgggtggaacaaaggctctagctcaactaatgaaggaggtgggagtcaagataacaaccggaagtcttcgaattcatctgatggtgacaaatggtctagctggaaccagtcaagtggcagcaaggaagttactggaagtaacaatcaaggaaatgggtggggaaagagttcaactacttctgctggagggtggggtaaccaaggatcaggctcgggagatcaatctcagtcaaaaactgctgatgaagccacatcttctggttggaacaagttaaaggatggaggtgaaaatagcggaaaccaagatccatggggtaaggcatcatcaacaagtacttggggacaagggagtggtggtagcaagggaggatggtaattttaacctttgcttactgaacaaggtttttagtgctgtagatacttctattttgggtctgttctgcagtttctacagtgtagagagccggaatggaacaaggtagtgtttccgggcagactggtagtagtgaagacatttgctgtttagtgtttactagaacagctttatgtttgttaatattcctttccgagttagtaatgctaccatattatgtagggcttcctcattgggcatagtaatgcatagatgttgctcaaaactacatcaactgataatattatgactactgtttcaagctcactgca

SEQ ID NO: 16193 - DNA, 393 bp, Gossypium hirsutum
  Clone ID: GOSHI-09MAY01-C36475_1
gtacagcatcaatgcaacagttgaaagaacgacttgagaaagacttgcttgaggaatctcctcaagctgctagagttaaagtactggcaagtggaaatgcaacagaaagaagattcagtggttggataggagggagtatattggcatctcttaggttcattccagcaaatgtggctctccaagtcacagtatgaagaacatggagcttcatatatacaaagaaaatgcccttaagatgaggatgacaggcttttgcatttatcctcatgggtcaagatctttttcggatccgaagtatgcccatttgtgctataacaaatttcaaattgacatcgcttggaggtcaatggacgatatattcttattaaaggaaaaggcattattagcttttat

SEQ ID NO: 16194 - DNA, 608 bp, Gossypium hirsutum
  Clone ID: GOSHI-09MAY01-C36465_1
cattaatggggatcggtactgcaactgttaaaacacgggcaagagatgctgcgctaaatgctatccagtcacctttgttagatcttggtatagaaagggctaccggaattgtttggaacataactggtggaagtgatttaaccttgtttgaggttaatactgcagctgaggttatatatgatcttgtggatccaactgccaatttaatatttggagcagtgatcgatccgtcaattagtggccaagtaagtataaccctaatggccgcaggatttaagcggcgggttgttaccgtaggaaggcaccttcaggcaggtcagctagcacagggagataccggtcttggaatcaatcagcgaccttctttcaaccaaggcagttcatttgacatcccggagttcttgaagaagaaaggacgttcacgctatccgagagcttaaatacttctctgcatagcgtctcggttcctgcttggttcccttgtggttctcttttacgtttcttccgttctgggctattaacgtgtacagaatatagcatgttagtaagtgggtccataacaactattcgttgccttctttcaataagttgggagtacaatttcttga

SEQ ID NO: 16195 - DNA, 492 bp, Gossypium hirsutum
  Clone ID: GOSHI-09MAY01-C36795_1
gttgtgatggggaacataggcaaaataaagaggacagcaaaggaattggattttgcaataggaagctgggtaaacgagcatcgcgaacggaggctcgacaaaggcatcgaagggaaccaagatttcattgatgccatgttgtctatcatggatgaaaacaatgtaccaattcaagaggctgatgttaccattaaagctaattgcctgactcttgccttgggtggcatcgatacaaacgtgtccacactttcatgggcgatctccttgctattgaataaccgccatgttctaaagacggctcaagaagaacttgacatccatgtcgggaagcaacgacaagtggaagaatcagacatagctaacttggtatacctacaagccattatcaaggaaactttgcggttatacccagcgacgccagtatcggtagcaagagaagctatggatgactgcaccgtagccggtttccacattccggcaggcactcaactg

SEQ ID NO: 16196 - DNA, 926 bp, Gossypium hirsutum
  Clone ID: GOSHI-09MAY01-C36715_1
cagcagttcccaattgtgcttttttcatgggtttgcagaggaaagagggagtgagtggtctagaaggtcaacaatttgacatacgtggaacagttgatgagttcagacaagagataagcatgtacatgtactgggaaaccaggaatggatatttatgtttctcatgttcgtaggaggcagctcccagcgtttgttttccctgatggatatagacggcctcgatcattgaggcatccaagccagcagactggaaaaacttgtgaagatgtcacgacgtccccccccggcccccccgcgtccccaattaagagaaaacgtgatgatgagacagttgatgaaaaattgaacaagcctgagaagcgagcctcaattagccccctgagaatggagtcggtttctccagatattattacaagcaagtctgttggaacatctcataatagcaatggtcaagcagttaaagtagagcatcgaggaactgtggatcttgatagcttacgagggcagacttctttagacatagatgattcatcagtagttagaagtgtagagttagctgagcagataggcttaccgtttaggcaggagttgctttctccatgtgaagtttctgattttgaaacaagagaagcatgcaaggctggcttgaatcaagagaaaactgcagattcgacatcagctttcatcaatgatcctgaaattggatcttctaggagaattttgaactggaaaggagtgggtgccgaggtcgatcgagaggtggtcaaagcatgtaattaaacagcagcggtagaaattgctgaaagtgtatttgggtcaagttccaatgcgcagaacctcaattgcaagggcagtgtctgcggtgctgatttggattcgctttctggaaaaggacaccctgatgctagtgctgttttccaaacagc

SEQ ID NO: 16197 - DNA, 1211 bp, Gossypium hirsutum
  Clone ID: GOSHI-09MAY01-C36705_1
cccacgcgtccgcagcaaacttgggtattcctttgtctacaccacctactggtcccccacctagaagcaagttacatttcaacctccactacctccacctcctacccttccacagtctgcacagccacttccacctggcactagtggaaacatgccacatgactcgacctccaaggagctggctcaggtgccaactgtactccctccccctcctcctggaatgccccctaaattggctactaatcaaggtgaaggtgctccgtcagaagctgataccaataaccatacagcaatttctaaaatggttccaccacctccacctcctcccagacaacctccggtgcctggacctgccatggtcccagctttaaagccagatgtattaccccctggaataccaggtttccctccaccgccgcttccagatatgcgggcagcactatctgccactggacttcctagtcaaactgctcctccaggaatgatggttccacttattccaaaaccacctttaggccctccacctggacctcctccaatgatgagaccaccacttccgcctggtccaccacccgccgcgctggatgattataatcttgcaaaccgaccacccttaccacagaaaccatcatatgttaaatctgctgcatctactgttgttaagcggccactggctcagcaccagccggagcttacggctatggtgcctgcatctgttcgagtaaggagggagattactgccccaaaagcaagaccaaagccttcacacttaatcatgacatcgaccaccaagcctgtagctactaccattgtgaagcctgaatcagctagcacatcatcagctccgaaggcacagagtatagatgactcgtacacagcattcctcgaggatatgaaggcacttggtgcacttgatagctgatattgccatagctagatttcaaggaaaagtggctcccatgcaatctgaatgaagcagaggtataagctaattttatggatgtatgggtttggggataattgttattctttggtccagtttttccatatagctgttttatgatcaactgattgccgcatttttctgttggcaaacttacaaactttctcagttgatgcgataggtgtaatggagggcaattttcctcaagtgaatgataaaatgtatctgctctgatcatcatatcaattttacatgcattttgcgtttg

SEQ ID NO: 16198 - DNA, 414 bp, Gossypium hirsutum
  Clone ID: LIB3145-031-Q1-K1-C5
gttttctagtttatatcttttgatggttggccatttcttttttggatctgaataaaaagaattagatctataagatatatgctttgaaataaaaattcaaaaatggacaatgatgagaccaccacttccgcctggtccaccacccgccgcgctggatgattataatcttgcaaaccgaccacccttaccacagaaaccatcatatgttaaatctgctgcatctactgttgttaagcggccactggctcagcaccagccggagcttacggctatggtgcctgcatctgttcgagtaaggagggagattactgccccaaaagcaagaccaaagccttcacacttaatcatgacatcgaccaccaagcctgtagctactaccattgtgaagcctgaatcagctagcacatcatcagc

SEQ ID NO: 16199 - DNA, 780 bp, Gossypium hirsutum
  Clone ID: GOSHI-09MAY01-C36655_1
cggacgcgtgggtctcaacaaagcctgccaatccgtaccacttatatatcgttcacgctgttcccagctttaacctatcactcttttaacaatgcctcgccgaagctctggaggaaggtcagccccaaggcctgctgctcgtgcgccatcgagcaacgttccttcgaaacccgctagttctgcccctcctccagcacctgtgcaaagtggaaatggactcggtgctgccattgtagatggtattggatggggtgccggaactgctatggctcacagggctgttgatgccgtcattggccctcgcgtcatcaaacacgagactgttgcttcatcagaaccagctgcggctgcttctgctcccgcaccaaacacaaatagcatgaacatggatgcatgtggtgttcaatccaaagtactgagtgattgtctgaccaacttcggaagtgatatcagcaaatgccaattctatatggatatgctgcaagaatgccgcaagagctccggtgcgttgggcgcttaatgttgaaaatctaatatcccccattaaggtcattgcaatttaggagtttgagtaggcgtgtcctttttagtttgtctatattgatgcaaacaatgggtttgctggtgggaaaatggcactatttaggataactcactgctgtaaacttaacatcgcatatctaaattaataaataatattttttattgcgatgtttcttttgagctgagattggtgaattaggtgagggtaggtgaataatattttcgatcactcgtttc

SEQ ID NO: 16200 - DNA, 551 bp, Gossypium hirsutum
  Clone ID: GOSHI-09MAY01-C36155_1
atatgacctaagaaagtttcatatggagtagaaacatgttccttcgcattcagtccttgttcacgttgaagcacttcttgcatccttctatccttttactaaaaatatcgcctatgcaattggtcttcagtggattctgatggaaccatttgtgatataatgcagcattcaagagattatctcgactggagggcataatcccaatgttggagacgtcgtgtgcgctggcatacttagagaaactgtgtccaactttaccaaatggtaccaaatttgtggttaactgcagtggcagaggtgataaggatgttcaaacagcaaataagcatttgcaggtataattagtctgatgatgatgatgtttttggccattaatttttcttcatcccccttgaccattgttgctttgtcccatgttttactgaaatactttcatggtgtttcttattgttcctcaataagtattattacttgctttgttataatatgtatcaacacatttacaaaagttttcaaggaaaattatcctcttttttatctgatttactttt

SEQ ID NO: 16201 - DNA, 1000 bp, Gossypium hirsutum
  Clone ID: GOSHI-09MAY01-C36145_1
tgaaaagaaggggaaaaaaaacttgttcgtcactgaaaaacagttgattttcttttttttcttctttaaaaaagaattagtaatcaaatcgaatggcgggaatttgctgtgaagttgttggagaaagtgaagcagcggctccggttgaaccaacttcaagagcttctcgtcgccggataatggagcttctaccgtttaaattagtggccgaagctgctgttcgaccgccgttagagaacggccggaaacgtcagaagctcgatctcgttcgcccgacttctcgtgattgtgataacgctgttcaaaactcggatactgataagcttgagaaagatcaagaacttaatggaagtctaaagtttaatggagcagtaaaatcagaagccgtagaagaagaaaaggaatcgccgaagttcggcctgacatccgtttgcggaaggcgacgagatatggaagacgccgtttcgattcacccttcgttttgcaaacaaagccggcaagttcaaatgtcgtcggatattcacttttacggcgtcttcgacggccatggctgctctcatgttgctatgaagtgtaaagatcgatttcatgagatgttgaaagaagaaatcgaagcgtgcggcggagagaaggcggtggactggaggcggacgatggagaggagctttgagagaatggacaaggaagttcaaaaatggacggtggacgctaaggagcgttcaagttgccgatgcgaacttcaaactccacagtgcgacgccgttggctccaccgcagtggttgctgtcgttacgcctgatgagatcatcgtgctaactgtggtgattcgcgcgctgttttatgccggaacggcgtcgctttacctcttttcgacgatcacaagccggaccgacccgacgaaatgctccgaattcaagaagccggtggccgagtaatttactgggatggtcctcgtgttctttgcgtgttagccatgtccagagcaaatggggataattat

SEQ ID NO: 16202 - DNA, 1321 bp, Gossypium hirsutum
  Clone ID: GOSHI-09MAY01-C36115_1
ttcacataaagtataagttgaagagttttcaatcgatgaatacatctcagttcatggacaagcaaataatggacttaactttatcttcttcttcacctccccataattcccacaaagatttcatcgatctgatgagtcacccacaaaacgaagataatcactatcaattctctgggtttagcgctagcagtaacggggctagcaaggtggagatgtttaccgactatgatttccaaccgatcagacccgtttcaaccagtcttgatgctgctggagtttttagtaatcccaggtcttggagttcgatcgattctaaagctaagaattatggttctcttgattcccttgaacctgcaaaaggcattttggacaaggaccaaagcgccttcgacacatcaattttggctgagatcgatcgaaccatgaagaaacataccgataatctgatgcacatgatggaaaaagtaagtgatcggttgactcagctggagagtagaactcgtcacctcgagaattctttggatgatttgaaggtgtctgtagtaaacaatcacggcagcaccgataggaaaatgaaacagctggaaaatatcttgaccgaggtgcaaaccggggttcatgatttaaaagaaaagcaagagataatggaagctcagttgcagcttgcaaagctgcaggtgagcaaggtagaccagccatctgaaacccagaatactgtgcggacagaatccgttcagcaagttgcatctgctccttttcaatctcaccaacagcttcccctggctgcctctttcccacaatcacttccttctgttcctcctctagctcttccccagccgagtttgccaccaccggttcagcatgcgaaccagttccctcagagccatgttccttctgttcctcagcaagacccttactatccaccgcctggtcaaactcaagagactcctagtcagcaatttccaatgccacctactcagcaaccacagctccctcctgcaacaccacctcatcaaccatatcaaccagcacctccaccgcaatattctcaacctccgcagccccttcaactacaaccttctgtaggccaccatccggaagaggcaccttaccccctttctcagatctatccaccgaatctgcgccagccaccttctcaaccacccagtggtggtcctccctctcaacaatattatggggctccgccccagtgcgtgagccatcaccatccagcaggcctggtccaggcttttctaccggatatatcccacaatctggtccaagtgaaccctatgcttatggtggatcaccttcacaatat

SEQ ID NO: 16203 - DNA, 526 bp, Gossypium hirsutum
  Clone ID: GOSHI-09MAY01-C36305_2
cctttaagagcattttattactccaaagatgaaaaattgctcgtttccgacttcatgcgcgacggtagcttgtctgccctgcttcacggtagtagaggctcaggccgaactccgttaggttgggacaacaggatgagaatagcgttgagcacggctaggggtttagcccaccgccgcgtggccgggaaggtggtgcacggcaacatcaaggcctccaacgtccttctccgaccagaccaagatgcttgcatctctgacttcggtctcaatcctttgttcggcaactccaccccacctagtcgtgttgcaggctaccgagcacctgaagtgcttgaaacccgaaaagttactttcaagtctgatgtgtatagctgtggagtgttgttgctagagttattaaccggcaaagcacctaatcaagcatcgttaggcgaagaagggatcgatcggccgcgtgggcgcccgcccgggcggccgcgtgggtggacggccgaagtttttgacgtggaattgatgagatatcaca

SEQ ID NO: 16204 - DNA, 668 bp, Gossypium hirsutum
  Clone ID: GOSHI-09MAY01-C36305_1
ctttccaccggcgccagcattggtattgccgtggggtcggcattcgcagcgttactattactgttattcctcattctttgcctccggaagcggcaacggcagcccgtcgaagcagcagaagccggttgcggccggcgcaagggcggttccgccggcggaggcgggaacctcctcgtcgaaagatgatatcaccggagcatcaacagaaggggaaaggaataagctggtgttcttcgaaggtggggtttatagcttcgatctggaggatttgttaagggcttcagctgaagtattgggaaaaggtagtgtcggaacatcgtacaaggcggtgctagaagaagggacgacggtggtcgttaaacggttaaaagacgttgccgtgagtaaaaaggagttcgaaatgcaaatggaaacattgggcaaaatcaggcatgaaaacgtggttcctttaagagcattttattactccaaagatgaaaaattgctcgtttccgatttcatgcgcgacggtagcttgtctgccctgcttcacggtaacttttctcggttcatttcattatttcattcttttatttacttgactttttctgggtttcccttccttaaacaacctaataattcattcaaatttatgcttaatattatttttgtggggacattttggaatg

SEQ ID NO: 16205 - DNA, 371 bp, Gossypium hirsutum
  Clone ID: LIB3145-025-Q1-K1-D11
tccaccccacctatcggttgcaggctaccgagcacctgaagtgcttgaaacccaaaaagttctttcaagtctgatgtgatagctttggagtgttgttgctagagtcaaccggcaaagcacctaatcaagcatcgtaggcgaagaagggattatcttcctcgtgggtccaatccgggttcgggaagaatggacggcaagttttcgacgtggaattgatgagatatcacagcatcgaagaggaaatggtgcaactattacaaatcgcgatgacttgtgtgtcaacggtgccagatcaaagaccctccatgcaagaagtggtacgcatgattgaagaaatgaatagagtggaaacagacgacggattacgacaa

SEQ ID NO: 16206 - DNA, 1284 bp, Gossypium hirsutum
  Clone ID: GOSHI-09MAY01-C36325_1
ccccgcgtccgggtatgatggaattagaatcattgaatggcagtggcttttgagagaggtcacagtatcaggtttcagtgtggtggcagtagcttatacagggagaggatattagcaagcaaagaacaactacaacccataacataaaaaagtatcctccattaaaagctggaacagcaaaagcaccagagcctgactctggatcctcaaaggcatcatcatcatcagcagcagcagcagcaacatcagaatccatctcatatagaaggaggagaagaagaagaaattccgaggaaccaacagcaaatcttgtttctccatcatcaacaacagcaagagcaacagttgtatgcaagactggaaactcaagtactacgagagcagcaagggcaacaacaacagcaagagtacccacaaccacccaagaaacgctcttatctgccgtcggcttctacttcaacttttggttccaaatcaacccaacatgcaagaaaaatgggagatagccaccaccaagctgcaacatcgtcaagattggggttaaggcactctggaggcgagatcgttgaggtccaaggaggtcacattgttcggtcaactggaagaaaagaccgtcacagcaaagtttgcaccgctaaaggtcctcgagaccgtcgtgttcgtctctccgctcacaccgccatccagttctacgacgttcaggaccgccttggttacgaccgtcctagcaaagctgtggattggcttatcaaaaaagccaaatccgccattgacgagctcgctgaactacctccttggaacccacaaaccttgaaaacaacgacttcaaccacgaaacagaataatcaacaagatcaaaacataatcacagcagtagacaatgaaaagcccagaagaacggctacattaatgggaaatcaagttcaaattcttcagcaacaaggaacgggagataacccgaatagtaattcgggttttcttccatcttctttagtttctgatgagattgcagatactatgaagtcttcttttccattgggagcttccagtgaggcaccgtcttcttctattcagtttcagaattatccaccggattttttgtccaaaaccagcagccacagtcaagatctgaggctctcgcttcagtcatttccggagccggttcttctccaccaccatcaccaagctgctgcagctcaggcacatcaaactgaatctggtttgttctctgcaggaaccaaccctttaacttgttttgaaggatcttcagctggatgggaaaaa

SEQ ID NO: 16207 - DNA, 582 bp, Gossypium hirsutum
  Clone ID: GOSHI-09MAY01-C36295_1
catatgttcgtgattaaagatctggtggtggatgtgaccaacttttataatcagtataagagtattgaaccgtggttgaagaggaaaaacccgccgccgacggcgggaaaagagattccgcagagtaaaaaggatagagctaagctagatgggatgtatgagtgtattttgtgtgcttgttgtagcactagctgtcccagctattggtggaatcccgagtcttatctaggtcctgctgctttgctccatgcaaacagatggataagcgacagccgtgatgaatacacaaaggagagattggaggccataaatgatgagtttaagctgtatcgttgccatacaatattgaactgtgctcgtgcttgtccaaaggggctgaacccgggaaagcagatcgcacacatcaagcatcttgagcttactgcttgaagtcttaatctccacaaataagatgttaaaaccaggcaatctggatttttttttcttgtgaggattccttgaacaatttgctttgatttaataactgtattctccctcaccaattgtacttaatcttgttgttcaaagtgctgattttggttc

SEQ ID NO: 16208 - DNA, 381 bp, Gossypium hirsutum
  Clone ID: uC-gsflmaxxa043c01b1
ttatcatgcagtcagatggataagcaacgggggggatgaagacacaaaggagagattggaggccatagatgatgagtttaagctgtatcgttgccatacagtattgaactgagctcgagcttggacacaggggctaaacccgagcaagccgaacactcacatgaagcattttgagcttactgctggtaggataaatctgcacatatataacgttcaaaccagtgaacttaaatgggccattatctgcgatgataacttgagcaatctgcaacgattcaataattggatcatatctcacaatcgtgcttagtgttgttgttcaagcgccgattttggttcagtcgatccttattgctatgtgctgtatatgattgaacatta

SEQ ID NO: 16209 - DNA, 537 bp, Gossypium hirsutum
  Clone ID: GOSHI-09MAY01-C36275_2
gaaacatggagtaaagttaggactgatgtcgggatttgtaaaggcagctgttagcgctcttcagaatcaaccaattgtcaatgctgtaattgatggggacgacataatatatagagattacattgatatcagtattgctgttggtactccaaagggccttgtagttccagtaatccgaaatgctgacagaatgaactttgctgaaatcgagaaagggataaacatccttgctaagaaggcaaatgatgggtctttatcaattgatgagatggctgggggctcattcacaatatccaatggtggtgtttatggaagcctcttaagtactccaattattaatccccctcagtcggctattctgggaatgcactccatagttagccgtccaatggttgtcagtggagaaggtgtttccaaggccaatgatgtacattgcactgacatatgaccatcgactgattgatggaagggaagccgtattcttcttgcgtcgcattaaagatgtcgtggaggatccacggagactgctgcttgatg

SEQ ID NO: 16210 - DNA, 530 bp, Gossypium hirsutum
  Clone ID: LIB3493-048-P1-M1-F2
tgtcaatgctgtaattgatggggacgacataatatatagagattacattgatatcagtattgctgttggtactccaaaggtctgtcagtttctctcactctatgtaaagtgatttggcaatgtagttatcagacgccatttattccttcaaaattccatttattccttcaaaattccatctgaagataatatctagcttctttggggcatctgaagcctttaaatgtggtaaaagaaatacttgtttaaggaatcgattattgtgatagctgaattctatacaaactaataagaactttgagtttgtagattcatggtttacttagcactcaccttaaaggtcaaactggggctagattgcttgaggttgtaatatatgcattgggatcattcactttcattctaaattgatatgccattgctaattgatgccattttgtgcttgtgttttcagataaaaatagtagctagattccaaagtacaccattttctgttatttacgtctgtatgtactaatgcaaatgtgatt

SEQ ID NO: 16211 - DNA, 886 bp, Gossypium hirsutum
  Clone ID: GOSHI-09MAY01-C36215_1
tctacgcgtccgcggacgcgtggggaaggaaccagatgaggttgtaatatttcgaggtgggacgtacctgaccctgaaagaagtttttgagagcctggatttaactgggtatgatttaaatgtggaccttcttgatgttcatgctgacaaaagtaccttccaatcggtttgataaatttaacctcaagtataatccttgcggtcaaggggggctcagggagattttcctcaagcaagacaatcttatccaaggtcgattccttggtgagttgacaaaggaagtgttttctgatcttgctgcaagcaaatatcaaatggctgaatacagaatatcaatatatggtaggaagcaaagtgagtgggaccaactggctagttggattgttaacaatgatttgtacagtgagaatgttgtttggttaattcagatccctcgactctacaatgtttacaaagagatggggattgttacttcatttcagaacattcttgacaacatttttatacctctgtttgaggttacctgtggttccagattcacttcctcagctacctgttttcttgatcccggtcgtttgtctggattctgtagatgatgagagtaagcctgaaagacgccccaccaaacacatgccatcgccagatcaatggactaatgtatttaatcctgcattctcctactatgcgtattatagctactcatacctctataccttaaacaagcttcgtgaatccaagggcatgacatccatcaaattccgaccacattctggggaggcttgtgatattgaccaccttgctgcaacatttctaactgctcattattttgctcatggaatcaattaaaggatatctactgatctactagatctatatttatttggca

SEQ ID NO: 16212 - DNA, 604 bp, Gossypium hirsutum
  Clone ID: GOSHI-09MAY01-C36205_1
ttccaacgaccactgctatggaagtagatgatcctccaagggcccagcagcctactgccattggctctcttgaaaggattgaagcatttaaagctatatttggtcagcatatgcgtgtgaaccataaggataccatatctatttctgaagtagagaatgttgtcaatgccggagctgatggccattactcaagggcagagatctttgctatattagagaagctgcaagatgataatatattgatgatagctggtgaaacagtgcatatgatagtatgagatgtaaggaaagacctggatggcttctttcatgcaatcactttacagcattgtgggattggggatggatctattggcatgaaattcttggtttgtacagctccatgatttatcctaaaattgtcttaaaagtgactgttggctgtactctgtagcagatgaaaggtgaactggggatggatcccctcttgctctgcaagtgaagatgcaaaaatttggatgacatatgataattcactaatgctttatttatttacttggaaagtattgttttttttggactttatgttttcaatggttaatatactgtggatctaattctaagc

SEQ ID NO: 16213 - DNA, 548 bp, Gossypium hirsutum
  Clone ID: LIB3582-032-P1-K1-C10
gccttatctatcgaaatccctaattattagtcagagccagagagatcactggtttgttgattgcttacccccaattcctcgattgctttttttacttacaaggaaaaggttcagtgtttaggtttcttgcaaacttacataacccacacagagaagacgaaaaaggtggcattcgattctggtttttggtgaattcgacttttaaggttcgatttccttattttgcgtattaaaagtttggattttcttgtttttgtttatttttttgtttgtaatttgttgaagacccgttgaatgaagtgaaatcgtcttcacataacccacacagagaagacgaagaaggtggcatttggtttctgtttttactactgtcggtattcaaggttcaatttctttattttgcgtatttaatctttgggttttcttgtttttccatccccaattttcaaccccaatacaaaaaccatgtcttggtcttctaccaaatgcactttcctcaacttcccatcccaaaccgccgcttgcaaagtctgtctctcacctccgtc

SEQ ID NO: 16214 - DNA, 385 bp, Gossypium hirsutum
  Clone ID: LIB3145-048-Q1-K1-E10
cccacgcgtccgcaaatgccttatctatcgaaatccctaattattagtcagagccagagagatcactggtttgttgatttcttacccccaattcctcgattgctttttttacttacaaggaaaaggttcagtgtttaggtttcttgcaaacttacataacccacacagagaagacgaaaaaggtggcattcgattctggtttttggtgaattcgacttttaagacccgttgaatgaagtgaaatcgtcttcacataacccacacagagaagaccaagaaggtggcatttggtttcttgttttactactggcggtattcaagggtcaatttcttttattttgcggatttaatctttgggttttctttgtttttccatccccaattt

SEQ ID NO: 16215 - DNA, 1199 bp, Gossypium hirsutum
  Clone ID: GOSHI-09MAY01-C37975_1
cggcgcttgggcggacgcgtgggtgcgcagcggtgtcttttcttgcctttgtgcctctgggcgaactgttctttttccatataattttgattagaaagggcatcacaacatatgaatatgttgttgcaatgagaacacaaagtgaaccacctggacagtctgcagatggtggagggcggcagagtatgccatcatcacctaccagttcagctgtgactgccataagtggaagaagctctcttggaaagagcttgcaatacaaaggggcttggtgtaccccaccaagaatcttcatggagcaccaggatgaaattgtcccacatttggacccgggccgcttaccatccacagtagatccagatgctgtacagccaccagacaagggtaaaagattaccccaacgtcctgtccgaattagtgcatggaaacttgcaaaattggattctaatgaggcagttaaagctgctaccaaagctagagcaagttcatccgtccttcgtcctataggcgctaggcaacatccttgcagcgctgatcaagtgtctagtagtactattagtggaagaagcagtcccattagtactgatcacgggtttcggacaaaaactgctagagcagggatattgaattcttatccttcaagccatgctagcagagaagacgccgaatcatgtgctcgaagtgttgatgaaattagcagtgctcatctctccagcataaccccctctccaatggcacagcaacattcaaatagagaacatttcaaccccatgtatgaaacgtcaggcaatcaatcccctctgtcaacaaaacaaagtgaagggattgaacatgctgctggatatcccatcaggaaaaattctagctcgatagaaagctccaaaacttcagttttttgggatccagaagctggacgctttgtctcttcctcatccagaaatgcaggctctttgcaggctcctggatcagagcttttgtatagtggtcaatcgatattttttggcagtcctcttatgaatgaactggctaaccgaggaacgaggagtactagttcaatgtctgtccggttgggtaggggttctacattgagtcatcattatcatcagcagggtagattgcagagaggagcccaactacctgtgtttgttcctactgattctcctctcaaccaaagcaattttcatgagcaccaaaataag

SEQ ID NO: 16216 - DNA, 877 bp, Gossypium hirsutum
  Clone ID: GOSHI-09MAY01-C37965_1
agctccgggacgcgtgggtgaaattgaagaacttcagaaggtgtaacaacagcaatgagtgaggacaaccacacttttttttacaagacaggttgcaaaaacaaagcaaaagttgctcttgaagagtcttttggtattgtgagtgagaggctccggaagacaatggaggagaacaggattgtaagacaaagaaccaaaatgcagcatgaacagaacaaagaagagatggatttccaagagcaattcttcaaggaacgaatcaaatttatccatgaagccagggatgagaaggaagagagttttgagaagctgcagcagcaacagcgtgagaaggtcaagcagtctaaccccaatccttcaaatacagaggaatacaggcgcagggcggatgaaattgcaaaattcataaagttccaggatgaagagatgcaggcttttgtggcagagagggacaagctgatcaaagcacacgaagagaagatggttggcatgagagagaggcattggcaggaagaagttgagcttgaaaaggagtttgatgctgaattgagccacctcatggagaagtacactccggatggctcaaaagtcaaccccggcaatacctgattgtggaattgtaggggaatacgatggtatgtacacaagtggtaaaaaagactttaatctctctgttccctgaggaaacttctgtgatgacactgaatatttctccaccttgagttacaactcttaaaatggtatgttaaaagattggaatatatgggtaaaaaaaaagttaaatctaaagttgcatctatggttgccttattatgcttgtgttgtttgctaagacatggttcaaataagaacttggaatgaatctacgtttctttcc

SEQ ID NO: 16217 - DNA, 482 bp, Gossypium hirsutum
  Clone ID: uC-gsronu33B130g11b1
tttcccacgcgtgcgcccacgcgtccgaaaaaattgtaattgaaatgttagtaaacgcatggttgtttggaaagcattgttcaatactttgaaaatacatttcacctcactggaggcttaattccagactggagctttttgctcgggggaaaatttagcaactccagttgctttttcttttcctcttttacccatatattcttcaggcttttctgtatgtttggttaccgttgttctctcctttccccttccccttcccttgggttgcaaatcagtttggtcaaggacctcttccggttcctccttcatccagatggatttccaagagcaattcttcaaggaacgaatcaaatttatccatgaagcgagggctgagaaagaagagagttttgagaagctgcaacagcagagcgtgagaaggtaaagcagtctaaccccaatccttcaatgcagaggaatacaggcgcagatgaaattgaaaa

SEQ ID NO: 16218 - DNA, 410 bp, Gossypium hirsutum
  Clone ID: LIB3083-061-Q1-L1-E8
agatgagatcctatcaagagatggttgttaaggagatggggcaaatgagtgaggacaaccagcagcttattttttacaagaacaaggttgcaaaagaacaaaggcaaaaagttgctcttgaagagtcttttggtattgcgagtgagaggctccggaagacaatggacgagaacaggattgtaagacaaagaaccaaaatgcagtatgaacagaacaaagaagagatggatttccaagagcaattcttcaaggaacgaatcaaatttatccatgaagccagggatgagaaggaagagagttttgagaagctgcagcagcaacagcgtgagaaggtcaagcagtctaaccccaatcctttaaatacagaggaatacatgcgcagggcggattaaattgcagaattcataaag

SEQ ID NO: 16219 - DNA, 283 bp, Gossypium hirsutum
  Clone ID: LIB3196-037-P1-M1-F7
gtggaattgtaggggaatgcgatggtatgtacacatgtggtaaaaaagactttaatctctctgtttcctgaggaaacttctgtgatgacagtgaaaatttctccatcttgacaactcttaaaatagtatgttaaaagattggaatatatgggtaaaaaaaagttaaatctaaaaaaaaaaaaaaaaaaaaaaaaaaaaaaaaaaaaaacgacgaaaaaaaaaaaaaaaaaaaaaggggcctcacaaaaaacgcccagcgaagcagacggctacaaaggaaaaa

SEQ ID NO: 16220 - DNA, 1189 bp, Gossypium hirsutum
  Clone ID: GOSHI-09MAY01-C37925_1
gtgggaacataagagtaaggttcctggaaagatgcatgcttgtggacatgatgctcatggtgctatgcttcttggtgctgcaaagatgcttcaagaacatcgaaatgacttacagggaacagttgttcttatttttcaaccggctgaagaagggggtgggggagccaaaaaaatgttagatgctggggcagtagataacgttgatgccatctttgcactccatgtatctattaaattcccgattggtgttgtagcgtcccgtcccggcccgaccttgcctccgtccggtttctttgaggctgtaattcatggaaaggggggacatgccgcacttcctcagcatacaggagaccccattttagctgcttccaatgtgattgttagcttgcaacatctagtttcacgtgaagctgatcccttggattctcaggtggtcagcattgcgaaattccaagggggtggtgcattcaatgtcattccggattctgtcaccattggtggcactttcagggcattttcaaaagaaagctttcttcaactcagacaaaggattgaggaggttatatcgaaacaagcaagcgtgcaaagatgcaatgcgacagtgatcttcgacgaaaggtccatgtaccctgtgaactcaaacaacaaagagttgcatgagcatttcagaaaggttgcaggggagattttgggctttgagaacattatagaaatgcagccgcagatgggaggagaggattttgcattcttttctgagtcgatccctggactttttttctttcttgggatgaaggagacggaaggagcagttcactcgggacattcaccctacttcagagtaaatgaagatgtttttccatacggtgcagctttacatgcatcgttggcgacaacatacctcttgcaaaatccgaccaaacatatttcacctccagaagtaagttatcgtgatgaactctaatagtatgtagttgcatatctcatccaaactattatgaataatgccgagattttttagtttgtgttttcctaaaagagaactcctttattgtaactaaactaactagttgtaacttcaattcatagataaaattcatctataaagaacttttgaaaagtttagtttaagatttgagtgtctagtattgctgtaaaaaaatgtgtttttgagaaataaaatatatatttt

SEQ ID NO: 16221 - DNA, 525 bp, Gossypium hirsutum
  Clone ID: GOSHI-09MAY01-C37855_1
gttttctcaagccatcgttaccgcaacttgacctcatctggacagacgtatccaaaggagtatgcaaagcgaattcaagaggagtggaaaattctggagagtggcttaccagaaacaatatatgtgagagctggtgaagcaaatatgggtctgcgaaggagctgtcattatgggaccttctggcactccataccatgatggcctttccttctttgattgtcttcttccctcgcaaaatatgcctaatagagccatccgatggccttattgtctatgtccggcggtcgtccggttataatccaaatctgtttagctgcggtaaagcatgcctaagccttttgggcacttggcatggtgaagagactgagatgtggggttcaggccaatcaaccatgcttcagagctttgggtgccatacaagccctgaatctgaatgctaaacccttctttaacgaacctggatttgagacgccacatgtcggagctgcaggtgaaaagaggtgcatgaagtccaatgaggatgca

SEQ ID NO: 16222 - DNA, 377 bp, Gossypium hirsutum
  Clone ID: LIB3145-048-Q1-K1-G3
cccacgcgtccgcccacgcgtccggtgaggttgcatcttgtttctctgtcatgctaaattgtcactacttatataatttgatctttgcacttattgaatagtatccaaaggagtatgcaaagcgaattcaagaggagtggaaaattctggagagtggcttaccagaaacaatatatgtgagagtttgtgaagcaaatatgggtcttttaagagctgtcattatgggaccttctggtactccataccatgatggccttttcttctttgattgtttcttccctccaaaatatcctaatgagccaccgatggtttatttctattccggcggtctccggttaaatccaaatttgatagctgtggtaaagatgcctaacctt

SEQ ID NO: 16223 - DNA, 432 bp, Gossypium hirsutum
  Clone ID: GOSHI-09MAY01-C37825_2
cagcagacccaattcttagggtttcaacacagcaaattttggggttttcccatccccctatttgaccattcgactgccccattccgccattgaaattgatggacggtggctccccatggagttgtttcattctcctattctaagcctcacctcgaaaggtaagatttttagcccgaaaacccatctcaagcttcaatttcgacgaagaagagatggtcctcgatggctcgtttgaaggtatgcttccttttttattatattatgcataaaacatatgaaacacgaaaggaagatgaaacagatgcgaaaaaaaaaagaaacacaaggcgttcaaaaaaaaatcaccttctagttctattctgatttctctctattgcggattgcgtaaatgtctggttttttatgtaaccgattacaaggattaaaatttca

SEQ ID NO: 16224 - DNA, 757 bp, Gossypium hirsutum
  Clone ID: GOSHI-09MAY01-C37825_1
caattcttaaggtttcaacacagcaaattttagggttttcccatccccccatttgaccattcgactgccccattccaccattgaaattgatggacggtggctccccatagagtcgtttcattctcctctctaagcctcacctcgaaggtaagatttttagcccgaaaacccatctcaagcttcgatttcgacaaagaagagatggtccccgatggctcgtttgaaggtatgcttccttttttattatattatgcagaaaacatatgaaccccgaaaggaaaatgaaccagatgcgaaaaaaaaaagaaagagcacaaggcgttcgaaaaaaatcaccttctttgctttgtattgtttttgtattctctttttcgtattcgttttttgttgccttcgtcagtaaccattacaaagattgaatcattggatttatagccggaaagaaaacccaaaagagaaaaatacaaaataatttcctattagctgccattctcgttgctgtcttttgtttcttttcgcaggtacagatgcgtggcatgtgtacgaagctgtactggcgtgcaagggctgttgacatggaggcatgagcggcgttggggctgtacggcgactgagggcggcggcgcgaagagagagacctagggttccaaagttgtaaaaaattttgggcctatcgggcctgtatttgggtttgaaattaggttatgtaacttggactgatggacttttattggactgttaatatattttgtttatt

SEQ ID NO: 16225 - DNA, 360 bp, Gossypium hirsutum
  Clone ID: GOSHI-09MAY01-C37475_1
ccgggtgcgacccacgcgtacggcgtactccattgaggcgacctgcctcgcgccgaaactggaagaagtgtacgcggagggggtccgggtgctgaaaccgggatctctatacgtgtcttacgagtgggtgacgactgacaggtacagaggtgataaccctgaacacgtggaggttattcaaggtatcgaaagaggcgatgctttgcccggtctcaggaactacaaggacatatcggaggttgcaaaaaaggttggctttcgaggttgttaaagagaaggatctagccaagccacccgccttaccctgggggaccaggcttaagatggggagaatcgcctactggaggaaccacttttttg

SEQ ID NO: 16226 - DNA, 367 bp, Gossypium hirsutum
  Clone ID: GOSHI-09MAY01-C37755_1
ctacaatgaaatggaaggtgtcatgtgaagaacatgggttttgtttttaagcatattatcacaacagctgtttcaaactttttatagcttttgagcatgcatgtacttcccttctagttgcagttgcagtgttgtctgatactgagagtggaagctggattggggaccatgagtgaagacaaagtcagtgagacttaagcttagactaagatttgtatatatgacgttgcaaaattatatatattatcaataatcataatcataatcataatacttaatcactcactgtttattttctactatgcccgtttggcatgtatgattgcgtattgcaagtggtagcctaaattaatcaaaccttattttg

SEQ ID NO: 16227 - DNA, 1523 bp, Gossypium hirsutum
  Clone ID: GOSHI-09MAY01-C37775_1
gggtgcatcacctcaacctccaactgctaatggtagtgggcttgctatgcctatgtattggcaaggatactatgcctccccaaatgcgcttccacatttgcaccagcaaactttgcttcggccatcaccaggactgtcagtgcctccttcaatgccgcaaccaatgcaatatcctaattttaatgcttctttgcctgctggctctgctaacttacatagttcaagcttgcctgaaattcctccttctttacttcctgccagtacgagttcccacatgttcacatcttcttctttatcatctgccacttcatcttctctgcctcctgcaccctcagctacgctggcatcagaaaccttgtctgcttccttgcctaacaaagctccaagtcccgcacctcctccagctacactcagtgccagctcgccagcacttgctcctttgacgagttctagtccagaattaaattccattgcaccaccaattgccaacaaacgaagtgaaattcctactttgccatatcaaagtgcttctcaggttgcatcctctgtcatcggggtttcaaattctattcatgtggaaacatctacacaatcattggtaacccctggtcagctcttgcagtcaggatctactgttgttccttcatctcagcctgcagtaactgcacataaagatgtggaagtggttcaagtgtcctcatcattatcgcctgaaccatcagtacctgttgtctcagaagctcagcctccattattgtcattacctgtttcttcacatgttgccccaaagccaaatggagcttcctttcaacctcgccatggttatagaggatatgaaagaggaagaggaagaggaagaggaagaggaactgggagttcacgtccagtgacaaaatttactgaagactttgatttcgtggcaatgaatgagaaattcaagaaagatgaagtatggggtcatcttggtaacagtagcaaatctcatactaaggataaagaagcagatgccgttgatgaatatggttctcaagatgaagatgatgctgaaatacctaagattcaaacgaagcctgtttacaataaggatgacttttttgatactctctcctgcaatgcacttgataatgactcgcaaaacggaaggccgagattctctgagcaaatgaagttagacacagagacttttggtgatttttcaagacatcgaggtggacgtgggcgtggaactggacgtggacgtggtggtcgttatcgtggtgggtattatggaagagggtatggatatgtggggaggggtcgtgggtaagacatgcatttgcatgccccatagttgtgcttgatttttgaaaatctttacggctgttagcgggccatgtgaaattgttctcttttatttgaaatgttaaaatgcacagtcaaaaccatccggcctggcaaacatcagactgaaatagggctatgctcggaatttgttctctttcttatttctccagaaataaaaaaaagtaggcaatatttttact

SEQ ID NO: 16228 - DNA, 531 bp, Gossypium hirsutum
  Clone ID: LIB3825-012-Q1-N6-C4
attgatacaaattccgtagcatagccctattccacccaagaagaatgccagccccgctggttttgactgaacaccccaacatttaaaataaaaaagacaattccacaaggaccgataacagccggcaagaggaaaaaaagtcaagcacagctagggggcactgcaaatgcatgaccctacaacacgaccctttcccacatagggataccctcttgcataatacccaaagggataacgaccaccaccttccaggcccacctccacgcccacgttcaccttgttgtgtagaaaaatcaccaaaggtctaaaaccctaacttcattgggtaaaaaaatcacggcctttcgttttgcaagaaaatatcaagtgcattgcaggagagaggctcaaaaaagccatccttattgtaaacaggctcccgtttgaatcttaggtattacaccatcatcttcatcttgagaaccatattcatcaacggcatctgctgctttatccttagaaagaaatcccctactgaaaccaagatgaccc

SEQ ID NO: 16229 - DNA, 631 bp, Gossypium hirsutum
  unsure (1)..(631): unsure at all n locations
  Clone ID: LIB3583-034-P1-K1-E10
cccacgcgtccgcccacgcgtccgcccacgcgtccgccccgttcttatgaaccctagcattgctatctccccagatagcccatagtgcgcagcagaagatccggcactgggatgtcgaactcttcgagaaaactcaggtaagccattgagagaattaattaatagcatataaaacttcacattctttacaatttatttattattttcatgaaaatcaatattcattaaattatcacttttatttcacttagaactaatttcacaatcataaactattcattcaaactctcaattcaagtatttttatttcacacttttaatttttatgctatttgcaaattagttctctttacattaatttcgcgacacttaacttttgaacttttgcaatctttccaatttaattattgctaacatataattcaataatcagtttatcaataactataaaaaaattagagtagcttccccaacccattagcaattgatggaactatgcatcaaagtttttaggcttttatcgccgtctttctgcttctatatctctcgcaaccatcggttccatttcccatatttgttggaaaactcactggatgcgacgaaccgatgacgaacggncaccagaggcggg

SEQ ID NO: 16230 - DNA, 437 bp, Gossypium hirsutum
  Clone ID: LIB3145-045-Q1-K1-C8
acgagttggagagctttccgacatgcgactgcttccgcctcaaaagctgatgatattcggtggtgattctcctcaaatgagagaagaactgtaccctctctatctctggccactatacccactgccgatctattttgtctatcgtcataagctccatcgaagttaatcttaacaatccagtcaggtggcttcctccattttttgacagttatgatttacccctgttcttatgaaccctagcattcctatctccccagatagcccatagtgcgcagcagaagatccggcactgagatgtcgaactcttcgagaaaacccagggcacttacgaaaaagatgatccgtattctcttcacctaaaccacaacgggggcacacagttgtattcgaatagttcttaattaccatattagctcgtgtagctagaaaattccatg

SEQ ID NO: 16231 - DNA, 631 bp, Gossypium hirsutum
  Clone ID: GOSHI-09MAY01-C37665_1
caggcaccagttccggaatcgacctacgcgtccggtgttaaagaactactatattacttcagtagctggggcaaatatcgggagttccttggttgttatgtcgaaagggactccttacacccagcaatcctacaaggtgagcgaatcttttccgttcaagtggataaataagaagtggaaagaaggcttttatgtaacatcgatgacaactgctgggactcgctggggtgtggtaatgtcaaggaacgctggattctctgatcaggttgtggagctcgacttcttatatccaagtgaaggaatacaccggcgatgggagtagcggttacagaataacatcagtggctgcaactgtggatcaagctgccttcatacttagcattccaaaacgaaaaacaacagatgatactcaggaaacgctccgtacaactgccttccccagcacccatgtaaaggaaaaatgggcaaaaaacctatacattgcatcgatttgttatggtcggacagttcgctaatcccggtctgtacattctgacttaaaccaaaaaaagaaaaaagaaaatgagttcatggtttgaaagccaccgagtatctttcgtcttcgagttcggttaactcttctatataatct

SEQ ID NO: 16232 - DNA, 666 bp, Gossypium hirsutum
  Clone ID: GOSHI-09MAY01-C37615_1
cagtaagtttgtaagagatgtcttcttcacttgcaatttcctcaagctcccttaggctcacccatgtcttcccaactaatggaaatgcaatcctctttaacgccatatccagttgcagaatctcctctttgaagtcaccgtctttgaacagtatcttcattagaatcccatacgggtccttcaagaaggcctcttttttcacttcctccaggcccttttctcctgtcatggaatggcaggattgcacggcaaagatggaaattgatgtacctgcatcggtcgcttacaaatgttactctgatcgtgaagcaattcccaattggatgccattcatttcatctgtccaggtattggaagacaagcctgatttgtcacggtggtcgttgaaatataagcgcatttggtcgtgatcttgaatactcctggcttgctagaaatatgcaacccatcccaaatcagaaaattcactggagatctctggaaggtcttcctaaccaggggtgctgttcgattttatccaaaagggccttcatcatgtctaatagaagtgagactgctctatacaatactttgagttgatgcttttctggtttattgctattgtttcctcgaaactgacagtttcatatgaagttcctcaacttttggctcggtggcatctgcact

SEQ ID NO: 16233 - DNA, 621 bp, Gossypium hirsutum
  Clone ID: GOSHI-09MAY01-C37605_1
ttccgctcgtccgcctcttctctcccgaaggaaggaaatcggggaaaaatgaaaatggaaggaatcgaaggcgacgcctcggtgggaggagcagggcgttacattttgaatccgacgcgaataaacagcgaggacataatattttgcgttgatgtggacgcagagtcgcttgttgaaatgaaaacagcaggagtcaccagattggattccataaagcaagctatccttctctttgtcaattccaagctctctatcaaccccgaccaccgcttcgctttcgccactctctccaaaaccgcctcttggcttagaaaagagtttagtagtgatgttgagtctaccattggtgctgttcgagcactctcggctaccactgtctctactgggcaagcagacctcaccaatttattccgcttagctgctcatgaagccaagaaatctcgtgcccagaaccgcattttaagagtgattcttatatactgcagatcatcaatacgaccccatcatcaatggcctgtaaaccagaagctctccccccggggtgtggtgtacctcatgacaagcctggacctgataatgtccccaggcaagttacgatgcactggttgatgcactgaacat

SEQ ID NO: 16234 - DNA, 544 bp, Gossypium hirsutum
  Clone ID: LIB3582-015-P1-K1-C7
cccacgcgtccgtgtaaatttaaagatactttcttttttgattgtttttctctcccatcgaagccgaagatttgaagctgaaaaaagaagagaggaaaattgtggcaatttgttggtgagaaagtcgaagattcacgtgggtaaagctccataaacagtgaaacattggattttctttttcctttttgttttcttaagctttctcttcgaatttactcgtctctttgaaactgtccgttgtttttttctttttggttcaataaaatcgcaaattatttgctaatttagagaagaaaattgaacggagctgaaacaaggatgatttgttgctgcatgatgttgattctccaaaacgattcgactatgcgtctgtggtctccatgaacatattttgtagcgcttctttgtgcttgcattgtgattggtcatcttttggaggagaatagatggatgaacgaatcaattaccgcccttatcattggtgttttcactggggtcattattttgttgacaagtgggggtaaaagctctcatcttttagtct

SEQ ID NO: 16235 - DNA, 596 bp, Gossypium hirsutum
  Clone ID: LIB3829-020-Q6-K6-G1
tttccatttgttttgttttttataacttagaaaagatttagtagtgatgttgagtctaccattgctgttattcgagcactctcggctaccataatctctactgtgcaagcatacctcaccaatttattctgcttagcttctcaattttaaaagtgagaataacttttttgttattcataaaagtgggaataactttttgttcaattttaaagttattgatttcatgttgtttaaaaggaatttgttgtttcagttagaagcaattggttgtttaataaaatttgattaaaaaagagatcaataaggtggcgccgcagttaactactgtctttactaagttgcagacactatctacttcaaaccatgcgtctgtggtctctataaacatgtttgtagcgcttctttgtgcttgcattgtgattggtcatcttttggaggagaatagatggatgaacgaatcaattactgcccttatcattggtgtttttactggggtcattattttgttgacaaagctctcatcttttagtcttcggtgaagatctgttctttatctatcttctgccccctattatattcaatgctaggtttcagga

SEQ ID NO: 16236 - DNA, 558 bp, Gossypium hirsutum
  unsure (1)..(558): unsure at all n locations
  Clone ID: LIB3585-025-P1-K1-H12
gcgcccacgcgtgcgcccacgcgtccgcccacgcgtccgcataaacagtgaaacattggattttctttttcctttttgttttcttaagctttctcttcgaatttactcgtctctttgaaactgtccgttgtttttttctttttggttcaataaaatcgcaaattatttgctaatttagagaagaaaattgaacggagctgaaacaaggatganttgttgctgcatgatgttgattctccaaaacgattcgagtgcttaaggattgtaagattagaaagttcttgaaatggacagttcagagacataaaaatattcgaagatttacattgtggaaggagagcttaaatctgaagccttggacaacaactgtttcagttagaagcaattggttgtttaataaaatttgattaaaaaaagaggtcaatatggtggcgccgcatttagctgctgtctttactaagttgcagactctatctatttcagactatgcgtctgtggtctccatgaacatattttgtagcgcttctttgtgcttgcattgtgattggtcatcttttg

SEQ ID NO: 16237 - DNA, 564 bp, Gossypium hirsutum
  Clone ID: GOSHI-09MAY01-C37635_1
aaagtttttgccattgacccaaatacccaacaggttgtggtggttgatccaaaggggtatacctatgacgatgaggtgctaaagaaagtttaagctatgggcaagccaggtcttgtggagatatatgccaaaaaagatagtttcatttttacagttgaatcccctggtgcgatcaaagcttctcagttggtttttaatgctatagaaatcctgaaacagaagctggatgcagttcgcctgtctgaggatactgtggaagctgatgatcagtttggtgaactaggggcccatatgcgaggaggatgatcctgcttgtaattaagaactagccattgccatttgtaggtttcagaaaaggcgtgtttacatctaactaacttccttttgtttaaaactcttgagatattttgggtagaacagactacttgttttccctcgatgaaaattgtcagccatatcccatctgttttaaacttaaaagccagcaaagcatggactgccgaatcttacttgttttgaaccaaaaaaaaaaaaaaaaaaaaaaaaaaaaaaagggcggcgctc

SEQ ID NO: 16238 - DNA, 524 bp, Gossypium hirsutum
  Clone ID: GOSHI-09MAY01-C37195_1
aaacatcttagggtgatcatagagagagaggagagatatggcggctgtttggagagttggggttgctgtggatttctctccaagcagcaagaatgcgttgaaatgggctgtggataacattatgcggaaaggggattatcttatccttgttgccgttcaacctgaaggtcattatgaggaaggcgagatgcagctttgggcaatcagcggtggttcaccacttatccctttaagtgagttttctgatcctgctaccatgaagaaatatggagtaaagcctgacccagaaactctggatattgctaacactgctgctaagcaaaaagaagtcatggtggtgatgaagatatactggggtgatccacgtgagaagttatgcgaggccattgatagcatccctcctagctgcatggctgtaggaaatagagggcttggcacgcttacgagggctataatgggcagtgtgagcaacctatgtggtgaacaatggttctctgccggttactgtagtgaagcaccatggc

SEQ ID NO: 16239 - DNA, 640 bp, Gossypium hirsutum
  Clone ID: GOSHI-09MAY01-C37175_1
tcgcctggggctgataacgacttgcctgatgcctcgttgctgaaatctaatgcgtgaagtatggacaatgctgaggtcccagagaataattccagccaaaatcctgcaagcatgcaaagagatatcgaagcttctggccattctgtaagatccaataatgctgaacatcagaaccattcattgttgcatcaagtgcaggctgttagaaacatagaggttgatccaagtaataggagtattaaaagattcaaaggtccacctgcagactctagtttcgattctcagcaggtaagttccccaggtgcggaacaattatcttatggatcaaatagtctgatgagagatggcctgggtaataatcctttagttccttctggagactctaaaatgctaagctgtttatcaaacatcggagataatcatgagacacagttatctgctaatacactggcatttcttcgggataattcccagcatttctccaattctaataattcagctgctaacatcaggggtgaacactctcaaatcagtctccaaatggttctgtcctggtttgatccggattgggcaattaaaaatgggaaaatggtccccatacatgatgccccaaaaactggcttggatggtacggaaaaag

SEQ ID NO: 16240 - DNA, 401 bp, Gossypium hirsutum
  Clone ID: GOSHI-09MAY01-C37125_1
gtaaaagccaaaccaacaaatctgcgaccagccgcctgatcgtcagacccccagacctaccgccggccgaggagctcatcttgagtgtcgcttcttctcctccgacgtctttggaactggaacttgttaacctttaacaataaagacgaagagagagatgccaaacttgtctaaggaaatagaaaaacatgacactaactctgggcatcatccgagagaagatagtgaatacgttaggctggttatttctaatgaacctactgcagctggagtggacatcttacaacctcaaccacccacaaggagtgaaacttttagctggtggatcaaagccttcatcttctgcatttttgcaggtatattgattcttgtttttttgaaatggggagttccggttcttt

SEQ ID NO: 16241 - DNA, 508 bp, Gossypium hirsutum
  Clone ID: GOSHI-09MAY01-C37025_1
tcaaggggatcctaaatgatttttataatgcctttggtcgatattattttaataacttttctgatggaacaaaacaggatgcgatcgatctcctgcaaggacattacattgtttctgtcagccgggatatgatacctccatcacaaaaaggaggccttgaggctgtagctcacttcccagcagctttttgtttggtctcactagggttattcttcacaatattgtcactgagtcaagctcgatacgatcttcgacacttatttttctcagctttgtgggctaccataagcattggtattgctacagttgtgaaggctaatggcaggattttctgcaaccgtcctcgtttgcataaaccacgacgttgattatatacatagcatattctgaaatgctatgacaaataaaaaaacttccatcttgctgaatcatagttattctttcatacatattttttgtagtccatttagtttcaatacctcgattatatttttattttgccattatc

SEQ ID NO: 16242 - DNA, 548 bp, Gossypium hirsutum
  Clone ID: GOSHI-09MAY01-C37315_1
cattttcaagtttcaacccgagtacagcgatcagctctcgattccttactttaaacttactgattagctgaaattctacaagtttcgatcttatcttgattgaggctgcgaatagcaagatggtgtatgaaataactgagcaacaaaaggttggcttgggtcttattggcttcggtatctccttcacatttctaggtgtatctctcttctttgacaggggtctgcttgctttaggaaatattttgtggttagcaggggtcgtaatattgatcggttggtattctactttgcagcttttcagaaaaaactacaagggtactgcttgttttattctggggctctttttcttattcgtgcgttggccaatagttggtataatcttggaaatatatggttgctttgtggttttcagtggcttttggccttcggtcagtgggttcctctgtcacattccggttgttggatgggttatacagtatccggtcacgttccttgaatcggttgagaaggggttaggatcatccgaatacaggatgaagtatgcgatg

SEQ ID NO: 16243 - DNA, 526 bp, Gossypium hirsutum
  Clone ID: GOSHI-09MAY01-C37305_1
gcttctcacacttcaccttgaaaaagtcaaatttcccagaaaataaaaaactttccagcaaaatgtcaggaagaggaaaaggaggtaaaggtctcggaaaaggaggagccaagaggcatcgtaaggtcctaagggataacatccaaggtatcactaagccggccatccgtcgtttggctcgtcgtggaggagttaagagaatcagtggcttgatctatgaagaaaccagaggagtgttgaagattttcttggagaacgtcattcgcgatgcagtgacttacactgagcacgctagaaggaagaccgtgacggccatggatgttgtttatgctttgaaaaggcaaggccgtactctctatggatttggtggttaagttttcggtttcttgttcgtgttatattgtactatgtaatctttgattatcatcaatggatttcgttaagaaaaatctattctcgcttattttgagctttttattttctcgtttccgacgaaatggttttttacttcgaagtgaaaccatga

SEQ ID NO: 16244 - DNA, 338 bp, Gossypium hirsutum
  Clone ID: LIB3145-040-Q1-K1-G1
cctactcacactttgctttataaaagtttatttgaccagaatggaaaaaactttccggcggaccgtggggaacaggaaagggaggtgaatgtctatcataaggtcgtgcctgaaggcatcgtacggtcctaacggttctcttccaaggtatcactaagccggccatccgtcgtttggctcgtcgtggaggagttaagagaatcagtggcttgatctatgaagaaaccagaggagtgttgaagattgtcttggagaacgtaattcgcgatgcagtgacttacactgagcacgctaaaatgaagaccgtgacggccatggatgttgtttatgctttgaaa

SEQ ID NO: 16245 - DNA, 442 bp, Gossypium hirsutum
  Clone ID: GOSHI-09MAY01-C37295_1
ggcgtggcttcgcttctcccctgtttttcacagtcaacgctgcctcccaaaacgaaatcgctgtctcatttcacgatccaaagtttccaaattcctctccgggttttgctcttcaccacttaagtctcaaatggttcgtaggccaaacgacccggaacactcccgtttcgcctctctcgtcctcctcttggtgtctctgttctcctgtcttctggtctatgcggttgtttccacactattgaaccccaccgtaaatcctcaggattccagctttgagtctttggaatcggtggcgggtattgattttggggaaaagaagggcgagtgttgcagaggaattgagaatttggagctgtggggtgcagctgtgaagtgggggtctgacttcaagtttaattcctctgtggaatgttgccaggcttgtaaggccatgtgtagtggc

SEQ ID NO: 16246 - DNA, 346 bp, Gossypium hirsutum
  Clone ID: GOSHI-09MAY01-C30935_1
cccactcgtccgcaccaacctgcattttattatatttttagctggaggaactttactggccagggaaacctccaatctcgttcatcattcacctcacatgttcccacattttctttccctttctgtctttaattttgagtgacaaagaccagcgtccccagatttctcttcttaggtaaaagaaaacgtcactgtgcctatctttcaatgccttcactgttcactcaccaaagtcccgaactcacaaaacacgtttcagttctcagttcatcaatcaaatccagggtaaaccagctagttgtacttcaaaatcaatcccctttaatgtaaaaagggttaaacttgt

SEQ ID NO: 16247 - DNA, 754 bp, Gossypium hirsutum
  Clone ID: GOSHI-09MAY01-C30865_1
tgcatatgttatgattggagttggctgcaatgacgaattaagggaatcatccactggagctattgatttaattgattcatttgataaacagcctatggccacctttgcaatttctagcttaagtgatggtgcaaaaaagttagaattttctccacagttggagctttctttaagaagaccttgttcaaggagcgcaaagagtcaaggtaccaatgaaaagcatatactaaaccattctgatgcatcgcctttttcatggtataacagtaggaagtcattactgcctattttccttacactagatggcaaccgcgaagagggtaacagcaaccccagacaagacctagaaaggatgaggatggatgacgtgcatgctggatgtaatgatgtttccccacacttttatcatgcataaccttgtttaccccccgcatgtggtccggaacaaggtggaaagcaagaaggttctccccttcctgtgagcacctcagtgcattcagaccctgatgttgatgactcagaacagcgttaccgctggtgtgatgaagctaccaattcttctaatgttcaaactcttcaagggcagaacaagcaggagcctattgaggaattaaggtgcagttctcttatagatgatcagagtgcttgcaggcatttattgtatgatgttgaaaatcatgaaaagagctgcacacatggagctgttccaagttggagcaatgcaagctctgttgttactcttgctgcatcaatt

SEQ ID NO: 16248 - DNA, 466 bp, Gossypium hirsutum
  Clone ID: GOSHI-09MAY01-C30495_1
ttggcctccagaatcgacggcgattcctcccgaaaaatcatccccgacccgacccgaataaccaatccctcgataactcttcggatcctcaatccttgctccattccaggtttttaaaagtctaagcgcaatggatgatgtaactgatttgactggtgatggaggtgttattaagaagatcgtagcaagagccaaagtgggtgcgctcgccccttccgaggatcttccgatggttgatgttcattatgaaggtaccctagctgaaactggtgaagtttttgatacaacacatgaagataactctgttttctcctttgagcttggaaagggcacggttattcaggcttgggacattgctttaaaaactatgaaggttggtgaagttgcgaaaataacttgcaagccagagtatgcctatggtgctgccggatcttcccccgatatcccacccaatgctacccttatt

SEQ ID NO: 16249 - DNA, 440 bp, Gossypium hirsutum
  Clone ID: GOSHI-09MAY01-C30455_1
tccacgcgttcgcccacgcgtccgcccacgctttcgtaaaaccttttcaatgtctatcttaaaacaacatatgtgcccgtcgaggtctctaacgcatatttctactagcccacggctgcaccttgttgcaaggttgacatgttcggccactaccaccacaaccaagcctaagtccagtcagaaccagttggttatcgagccacggcttgagacaaaaccggactctatcactcccattatccctagtgttggccctcccttgtccaatgatccaagtttacaatcaacatggtcccaccgagcatgggtggccagtggttgcaccaacgcttttcttttccctacccaagactggaacgggtgccgctgatacacatatgggggtcgaacctattaatagaagcttttgtgggtattgtttaacttaccctttgtctggg

SEQ ID NO: 16250 - DNA, 492 bp, Gossypium hirsutum
  Clone ID: GOSHI-09MAY01-C30415_1
cccacgcgtccgctcttgtgtttttgtttttgttttttaattgttttctcttcatcttcctcttacggtcttacttacagatgaaagagtgaaaaatgagattgagatttgttgtgttttttatggtattattattataatgaaaggagaattccttttcctcttctttgaaagctatggctctgcaagcagaagggactcagcagattcaaagccctccattgatgaatcttgatggcctgttatgtgaagaagaagatttaggagtttatagttttgaagaaaatggaagtgaaattcctgctgaaaaggagaattttgtacctttatttcttaacgaacatgatttgttctgggaagacgatgagttaatctctttaatgtctaaagagaaacaaacccatcagggctacgttgatggttgtccagatgagtctttagttttagctcgtaaagaagctttggattgggttttcaaggttaaggcacact

SEQ ID NO: 16251 - DNA, 389 bp, Gossypium hirsutum
  Clone ID: GOSHI-09MAY01-C30735_1
cccacgcgtccgcccacgcgtccgattttcccacgctttctttctcaagtaagctaaaaaccgccacggaaatggagatggagctttctccacctgtttcattcactgctcctattattcttctcacacttgctattgttttcgctggcacctttgcactaagacccaaacccaaatcgagtctcgccaaagagcctccaccagggagcttagggtggccaatcgccggcgaaactctcgagttcctgtttgggaacccggaaaatttcgtgtttaatcggatgagaaaatatgctcctcgtattttcaaaacaaggattctcggcgaagaaaccgtcgtcatatgtggtccggaaggacacaaatttttgttctcaaacgaacaaaag

SEQ ID NO: 16252 - DNA, 951 bp, Gossypium hirsutum
  Clone ID: GOSHI-09MAY01-C30695_1
cccacgcgtccggagacttatttactttaggaattttctagaaccttctcgaaggcaatggctgaggcgaccagcaccgagagatccactggcacagtcaaatggttcagcgcccagaaatgttttggtttcatagctcccgacgacggaggcgacgaccttttcgtccaccaaacctctattctttcccaaggctttcgtacactctccgataaccaacccgtcgagttcttcgttgatgtcggtgaagatggccgagctaaggccgttgatgtaactcctatgcctcgacctcggccgtccttcccgcggcggtggaagaggaggatattttggcggcagaggtagaggaggtggtggttacaggagaggaggttatggtggtggcggtggcggtggcggaggtagtggcgcttgttataattgtgggaggacggggcatatagccagggattgttatcaaggtggtggaagtggaagtacgagatacagtggcggccgtggagatggtggtggaaatagaagatacggtggcgatagcggtgatggacgaggagctgggggacgatgttttaattgtggagatgaaggccattttgcaagggattgccctaacaaataattcagaaaacaaaaccggacatttcctataatattttgtgagtataagtttttcttttacggtgttttggaaaggggtttatcagcaaaagaagaagaaaccggaaagttgtctattctttccgatcaggcttacttttcccgattccgattgatctggtaacatctttaaaaaaaaggtccattgttttgtataatgtgttgtaattgttgttattctcttaattcttatcgattcttctttctttaatcctctattcttagtctttgcattgacagtatgaacgggcaatcatttgtcttccttgaagcagatttcttttatttttc

SEQ ID NO: 16253 - DNA, 810 bp, Gossypium hirsutum
  unsure (1)..(810): unsure at all n locations
  Clone ID: AI054623.1
tctctatcttttatgttatattaatattattatttaagatatatatatttttgtgttgttgatgtaaatgtattactatgacttgatccattggaacnnctctgctgctagaattcggcacgagacaaaattgagcggtttggtcgagttatggtttgattggaattccttgactggtccaataccagattttaccggatgtgtggacctaaggatcattcatcttgaaaacaatcacttgacgggtgagctaccttcatctttgatgaacctaccaaacttgagggaactgtatgtgcagaataatatgttaactggaagggtgccatcaggccttctgagtaaaaacttggctttgaactatgctggaaatattaaccttcatgaggggggtggaagagcaaagcaccttagtactattattgttggttcttccgttggagctgcttttctgcttatatctacgattttgtcttgcattattttgcgcaaggggaagaaaaatcatgaacaataacaatttcatcattcctttgcctattcaaggtcaaagaattgcttcttcattaagtaacgctcccactggaactgctaattgctttacattaccggagatatatatgctacatacaattttgaaaaaaaattggttctggaggctttggattgtatactatgggaaatgaagtatggaagaaattgcgtaaaagtcttactatatccttactagaagaggaattacagagagagatttattttaggttcatttttgacctttacgttttttgatttgtattaaatgtaaaattt

SEQ ID NO: 16254 - DNA, 642 bp, Gossypium hirsutum
  unsure (1)..(642): unsure at all n locations
  Clone ID: LIB3543-065-Q6-K6-H8
cccagcgtccggcttttctggtgggatgtancgggggtgtcttgcattattttgcgcaggggaagaaaaaaacatgaacaagaacaatttcatcatcctttgcctattcaaggtcaaagaattgcttcttcattaagtaacgctcccactgaagctgctaattgctttacattgcgggggggtggaagatgctacaaacaattttgagaaaaaaattggttctggaggctttggagttgtatactatgggaaaatgaaagatgggaaggaaattgcggtaaaagttctcactagtaattccttccaaggaaagagggaatttacaaatgaggtgagtcttctttcaaggatacatcataggaacctggtacagtttcttggatattgtcaagaagatgggagaagtatgcttgtttacgagttcatgcacaatggaactcttaaagaacatctttatggccctttaacacgggaacgtggtatcggttggataaaacgccttgagattgcagaagatgctgcaaaagggattgaataccttcacacaggctgtattcccgccattatccatagggatctaaaaactagcaatattcttctcgacaagcacatgagggcaaaggtttcagattttgggctttc

SEQ ID NO: 16255 - DNA, 389 bp, Gossypium hirsutum
  Clone ID: LIB3120-009-Q1-K1-F11
actaaattgtagtttctctgtgcagaagtttcttgcgttgttcaagtattgaaagtttgattctttcaattcctttattcagggattgaataccttcacacaggctgtattcccgccattatacatagggatctaaaaactagcaatattcttcttgacaagcacatgagggcaaaggtttctgattttgggctttcaaagcttgccgtagatggagcatcacatgtgtcaagcatagttcggggaactgtggggaacttggatcctgagtaaggccttgcttctactaaatcctcctttcttttgttgaaatcatttaaacgactgtttgcactgatttatacataggaaacaaatgggagggattagtcttttagattacgtgtatc

SEQ ID NO: 16256 - DNA, 952 bp, Gossypium hirsutum
  Clone ID: GOSHI-09MAY01-C30395_1
ttcacgcgccccgcagtatttcgcccgcgcgaacggagcgaacatggcgataggagttaaggccttgcacttgtcctttgtgcctcatgccctcgcgattgccggcgctgttatggtattggtttggtgcattcacttcaggggtggattagcttgggaatcttctaacaaaaatctcatctttaatctccatcctgtattgatgttgattggcttcattatcttaggaggtgaagccattatgagctacaagtcattgccactgaagaaggaagttaagaaagtcatacatcttgtgctccatgccactgctctgattctaggcattattggaatctatacggcattcaagaatcataatgagagttcaatacctaatctctacagcgtgcattcttggcttgggattggaatcattaccctttatggcattcagtggatatatgggtttctcatattcttctaccctggagggtcgaccggattaagaagcgaatcacttccatggcatgtactgttggggctgtttgtatacatcttggcagttggcaatgccaccttagggttcctggagaagcttacattccttgagaactcagggcttgataaatatggtgccgaggcataccttgtaaacttcacagctattgtcacaatattgtatggagccttcgtcatatttacagttctctcccagggtcctcaggaagatgactacagctattcagctatataatttcatgtaatatatctgtacctatgtattgctgaatgtctggtgtatgatctattattatcggtatttgtagacatcaaattgtgtagtaatcaataatattggcaatggcaatgtattggaccagtgctatgattctttcttttctccatggcattgtaatcaagggtgctatttatggttttcttaaaaaaaagaaattataatttcgtattc

SEQ ID NO: 16257 - DNA, 555 bp, Gossypium hirsutum
  Clone ID: LIB3543-038-Q1-K1-B3
ctaatctctacggggggggtgggggcttgcgattggaatcattacgcgtgtatggcattcagtggatatatgggtttctcatattcttctaccctggggggtcgtccgggttaagaagcgaatcacttccatggcttgttctgttggggctgtttgtatacatggttgccggggcactgccaccttagggttcctggagaagcttacattccttgagaactcagggcttgttcaatatggtgccgaggcataccttgtaaacttcacagctattgtcacaatattgtatggagccttcgtcatatttacagttctctcccagggtcctcaggaagatgactacagctgttcagctgtataattccatgtaatatatctggtcctatgtatttgctgaatgtctgggtgttttgatcctatttttattgggggttttgggtggccctccaaattcggggttggtttcccccccgtgttttttgggggccttttggggcccgttttttttttgggcccccccggggggcgctttttttgttctttttttttttttta

SEQ ID NO: 16258 - DNA, 478 bp, Gossypium hirsutum
  Clone ID: LIB3493-003-P1-M1-E9
cccacgcgttcggcgaacatggcgataggagttaaggccttgcacttgtcctttgagcctcatgccctcgcgattgccggcgctgttatggtattggtttggtgcattcacttcaggggtggattagcttgggaatcttctaacaaaaatctcatctttaatctccatcctgtattgatgttgattggcttcattatcttaggaggtgaaggtaaatcaaatccaacattccttgatacaaacaaacagcttgctttctagtttgattgacaaaaacaaatctaaaacatgttcccaacattgcaaaaaatgcagccattatgagctacaagtcattgccactgaagaaggaagttaagaaagtcatacatcttgtgctccatgccactgctctgattctaggcattattggaatctatacggcattcaagaatcataatgagagttcaatacctaatctctacagcgtgcattcttg

SEQ ID NO: 16259 - DNA, 939 bp, Gossypium hirsutum
  Clone ID: GOSHI-09MAY01-C30315_1
gtttttctttgtcatcagcacagggactttgatggcagtcacagtgcttgtttaccccccgcgtccggttggtcgaagttggggttatggaatctggttccgcttcaatgttcattgcactcttgatattcttttcgggaacaaaacgataccgatacaagaaatgttcgggaagccccattgtacatatttgccaagttgtttctgctgcatctgggaaaaagacggctaaactcccttctgatatttccttgttgtatgaagatctccctgaggcatcacgaatccatcacacggatcagtttcgcttcctggacaaggcatctgttgtgacagaagatgattacagacaaggttccttcatgatgaacccttggaagctttgtgcagttacaagggtagaggaggtaaagaagatgatcaggctactcccgatttgggcaacaacgattatattttggacgacatatgcacagatgatcactttctcggtggaacaagcaaccaccatggagagaaccataggacatttccaaattccagctggttcacttactgtcttttttgtgggagccatattgatcagtttagctgtttatgatcgttttattattccactttgtaaaaaatggagaggtgaaccagggtttacaaatctgcaactgataggcataggtctgttcctgtcagccatgggaatggcagctgcagcagtggtagaggtgaaacggctatcggtggcaaagaaatacaatgaaacaaccacactaccgataaccgttttctacctgattccgcaattcttcttggtgggtgctggagaaggatttatatacactggtcaactggatttcttcatcactcaatccccaaaaggaatgaaaacaatgagcactggcctcttcctcaccactctttcactcggttcttctttagtag

SEQ ID NO: 16260 - DNA, 738 bp, Gossypium hirsutum
  Clone ID: GOSHI-09MAY01-C31595_1
cccacgcgtccgccagccctagccaccgccctagaagattttatattcatcgtcgaaattactgttcgacgctcaaaagcttctctttttccggggaattttatatggttagtttgttttagtatcgatggcaaacagaccagacccagatatcgatgatgatttcagtgaaatttacaaggagtacactggcccgctagggtccgcagtttccaaggcagaagatagggtgaaagagaataaacgttctcatgctgcttcaaatgaggaagaggaacagcgtgaccccaatgctgtccccactgacttcactagccgggaagccaaggtctgggaggctaaatccaaggctactgagaggaattggaagaagaggaaagaagaagaaatgatttgcaaaatatgtggagaatcgggtcactctactcagggttgcccctccactcttggagcaaatcgcaagtctcaagatttttttgaaagggtacccgctaaagacccacatgccagagaacttttcaccgagaaagttattcagaggatcgagaaagatattggttgcaaatcaaaatggacgagaagtttataattgttagtggtaaggataggttaatattgaaaaaaggtgtggatgctgtacaccaaataaaagatgaaagtgatccaaagggctcttctaattctccaatgagcagatcaaggtctcctgagcgaagtcctgttggtgcaccggtgcgg

SEQ ID NO: 16261 - DNA, 331 bp, Gossypium hirsutum
  Clone ID: LIB3120-021-Q1-K1-C7
atttgagtggaacaaaaataacaaacagttgagtggtgggaataaagatggcggctgccacggttcttcatgttgtggcggcggcttttctccgaccgccgcattcgctgccgcggacgaaggctaaagaacccatactgaaaccaggacttgctttacctcacctttacgataacaagcttcccgttctcggtcgtggctatggcgctggtaaccgtacattcatcacttgctatgtagacccatccactgagtctcgtgtcagcgtgttatgggtgagtcagataaaggagaaatgcagtaagtggcaatggaaagggcggtacttcat

SEQ ID NO: 16262 - DNA, 305 bp, Gossypium hirsutum
  Clone ID: LIB3120-021-Q1-K1-C3
tcgattcaaacgtaccaccttatattgaatggttaccttgtgtggacttgaacaaagcatttcgggggactttctggggggggggggggtttttttcgacccccccattttcattgttctcagccaaaggttaaaaacccatactgaaaccaagacttgcttttcctcacactatatacaacaaacttaccgatctccgccgtggctattgggttggtaaccggagcttcatcacttgctatgttgacccatccactgagtctcgtgtcaacgtgttaggggtgagtcagataaaggagaaatgc

SEQ ID NO: 16263 - DNA, 380 bp, Gossypium hirsutum
  Clone ID: GOSHI-09MAY01-C31785_1
cggacgcgtgggcaaggtcctcaacattggcctcctgtgtactagtccactcccaatcaaccgaccatcagtgagaagggtggttaaaatgttgcaagaagctggcgctgatagcctgccaaaaactgctgctaaaagggatgggaaattgactccttactactacgaagatggctcagatcaaggaagtgtagcttgagaaaaacgaaaagaaaaagaaaaggttttcctcgtagatttgtcccataaacaaagagcaatagaaggattgtgcgagtgtgttacgcctctagtttttttttttcttgccctcaagttttggttttcaatcattgatcccacttgctgttttgctttacaggttggtttagtgggggact

SEQ ID NO: 16264 - DNA, 363 bp, Gossypium hirsutum
  Clone ID: GOSHI-09MAY01-C31745_1
cgactcctcacccaaaagccattgctgatttgaaagaaggaattttgaagttattgggattccaagccgatgatgttgagctatcagggttagattcgagggatgcacttgtgggtcattcagtggcatatgaattcgacgttgaaatcgacagaaaggtgattcctgttaaacttttggaggatgtgaatcgatgggagtacgttgatttgccctttttgagggttgaagagctagctagacccggtgttgataacgggttggtagagcagaagaggatattcgacgatgggctacccgttttggccccctttcagttggctggtcccatggagctctggattcgggatgccaaggatatac

SEQ ID NO: 16265 - DNA, 451 bp, Gossypium hirsutum
  Clone ID: LIB3135-019-Q1-K1-E9
acgcgtgcgcccacgcgtccgcccacgcgtccgggcatggctaaagctacatcttttactgctttcctttggatggcttctctatttctttcttctcacttttctgtctcaaaagcagacaactccgctcccatagtgagtgggctctcatggactttctacaaaacttcatgtcccaaagtagaatccattattagaaaacaactgcagaaggttttcaagaaggacatatgccaagctgctggcttgctccgtcttcatttccatgactgctttgttcaaggatgtgatgcatcggtgctgctggatggatcagcgagtggaccaagcgagcaggatgctccgccgaacctgaccttgagaggattcgaaatcatcaatgacctgcgtgcgcgtgtccacaaggagtgtggaagagtcgtctcttgtgctgatatcgctgctcttgctg

SEQ ID NO: 16266 - DNA, 272 bp, Gossypium hirsutum
  Clone ID: LIB3120-023-Q1-K1-H6
gaccgcccgacggcccacgccacccactcttaccattgatataaatacctactgtactgctgtccttacgatgacataaacaacgcgtccatctcacttttctggcgcgaaaccagacaactccactcccataatgagtggtctctcatggactttctacaaaacttcatgttccaaagtagaatccattattagaaaacaactgcagaaggttttcaagaaagacataagccaagctgttggcttgctccgtcttcattttcatgactgct

SEQ ID NO: 16267 - DNA, 415 bp, Gossypium hirsutum
  Clone ID: GOSHI-09MAY01-C31685_1
atccgtccacgcgttcgggaagtgaaaaaaaccagagttggcatccatggcgacgttggctactgtgggaagtagtgcagttctgcggttcaacaaaacagagcctctgtagacgaacccatcttcaccatttcttggtttcgttacttcccaactcagcggcatcaaaatctcttgcaacctccctgtcgtggtggcgcctttaaaacccatatctgcccctttcactcctgctctccagcctgttgctcgtaggatatgccctttcaccggcaagaaagcgaacaaagccaacgaagtttcggtctccaatcacaagacgaagaaattacagtttgtcaacctccaatacaagaaggtttggtgggaagccggtaaacgctatgtaaaattgcgtttatcgaccaaggcgttg

SEQ ID NO: 16268 - DNA, 463 bp, Gossypium hirsutum
  Clone ID: GOSHI-09MAY01-C31615_1
cccacgcgtccgctacaaccccattttcagtctttcactccattcaccaaaaaccaatggctggcttatcggtcaacctgtgctggctgcagcacacctccatcaaccctcttatcctacgctgcacccctctgaacctacgcaccccatcccagaaaccattctccattaggtcccaagccgccccagtgctttcccaagatgatcttaaaaagcttgcagctgacaaagcagttgagtcagtcaaatcaggcatgatcctaggcctaggaacaggatcaacagcagcttttgtggtcgacaaaataggccaactcctttccacgggccaactttctaacatcgtaggtatcccaacttcgaaaagaacacaagaacaagctgcatcacttaacattcccttatctacccttgacttgcatcctcgtattgaccttgctattgatggtgctgatgaaggtga

SEQ ID NO: 16269 - DNA, 1001 bp, Gossypium hirsutum
  Clone ID: GOSHI-09MAY01-C31175_1
gtgatttgggacagacgtataactcgctgtccacacttgagcattacatggagagtggagcacagagtgtgttgtttgtaggagatctttcttatgccgatagatacaagtacaatgatgttggtatacggtgggattcatggggtagattcgtggagaaaagtactgcttatcagccatggatatggtctgctgggaatcatgaaataaaggacatgccttatatgaatgaagttactccattcaaatcgtatctacatcgatatcctacgccttatttggcttctaaaagcagtagtcctatgtggtatgctattaggcgtgcatctgctcatataatcgtgctatcaagttactctccgtttgtgaaatatacacctcaatgcaaatggctcgaggaagaattaaacagggttgacaggaagaagaccccatggctcattgtgcttgtgcatgttccgatctacaacagtaacgaagcacatttcatggaaggtgaaagtatgcgagcagtgttcgaagaatggttcatccatcacaaagttgatgtaatctttgctggtcatgtccatgcttacgaaagatcctatcgaatctcaaatataaggtacaatgtatcaagtggtgaacgtttccctgtaccggacgaatcagctcctgtttacatcactgttggagatggtggaaatcaagaaggtttagcaggaaagtttagagatccccaaccggattattcagcattccgggaagccagttacggccattcgacactggagatcatgaacagaacacatgcagtctatcactggaaccgaaatgatgatgggaaaaaagtggcaattgactcatttgtattgaacaatcagtactggtcaagtaacgttcgagaaaggaaactgaagaggcattatttgaatgggatgaggatgattgcttcttaatgaaaagaaaatatgaaaaatatcatctctggtagtgcttgatgaagtttcattgcaaga

SEQ ID NO: 16270 - DNA, 437 bp, Gossypium hirsutum
  Clone ID: LIB3145-046-Q1-K1-B10
atttcggttccagtgatagactgcatgtgttctgttcatgatctccagtgtcgaatggccgtaactggcttcccggaatgatgatgggaaaaaagtggcaattgactcatttgtattgaacaatcagtactggtcaagtaacgttcgagaaaggaaactgaagaggcattatttgaatgggatgaggatgattgcttcttaatgaaaagataatatgaagatatatcatctctggtagtgcttgatgaagtttcattgcaagagatgaaaatgccaacaatgataagaataagaataagaatatatatatatatatcctacaccttgtttggcttctcttgcagtcatctttttgttggcatatatatatatatatcctacaccttgtttgcaagagatgaagtttcattgcttggaaatgcaatatctcgaagtga

SEQ ID NO: 16271 - DNA, 677 bp, Gossypium hirsutum
  Clone ID: GOSHI-09MAY01-C31395_1
ctactcctttttctacttaaaaatacataaaataattagtaaaataacataataaacaacaaatcacccaaaggccaaaaccttcccatcccagagcaaattttgatgtaagaacatcatccatctcttcttttttttgaatgcaaatatagcatgtcccgtttgcaactgggggatttctattacatggctgaagatatcattgatgatatggatgaagacgactatggtagagctggtggagacatggatgcccatgaatatgacatgctgaccaaggtgactgatacatcttctggtcaagcacggaaggggaaggacattcagggaattccatgggaaagattgaacataaccagggaagattatagattgacaaggcttgaacagtataagaattatgagaatatcccggcctctggtgatgctgttgacaaggaatgcaaacagatggaaaaaggtgggaactactatgagttcttccccaacactagattagttgagccgacaatcctccattttcagcttcgagacttggtttgggctacttccaagcacgatgtgtaccttatgttcaattattcatttatgcatctggtcagcattgtcatgtcgtctctcggagatgcttaagttctccgggggcgttggcgctactgagaaacatccggggaacg

SEQ ID NO: 16272 - DNA, 1067 bp, Gossypium hirsutum
  Clone ID: GOSHI-09MAY01-C31355_1
gaaaattctggaaactagttaaccacaacacctcacaaagtaaaattacccaattccctttctccctcgcgcccgataagcaataattttggcctgcactttgctgacaaaatccatctccgcttctgtaataaaacccttgcctatgaactaaccgtaattttaatttttctttttttaatgttttaaggggtgggtatttcaatgcattccttttcctctcatccattaccaacaagattttatattctttaaaaggattacccttgtttatcttaaaatacagggtagggtttggtttctcttttttgattttttcctcttccatatttgcttactccaaatggatgtttcgcttcgatagccaatagtagcaaatatgctctatttaagggatctttggagaaggcataggaggaaggttttggttacagcaggtgttttaggaagtgggtatttgttgtataaactatatgatgctcacaaacgtaggcttattgatttggaaaggcaactggctaacgaacgggaaaacgatgaattcattaaagctcaaattcaactccattttgagaacattcaaagaattgctgatacaacaacattacctcatgcaatgccctatttaagttgccggatagctgaagatttgaacctttcacatcttatggagagactagtgaaagggaaggatcagcccaacagtttgtcttcttcagagaaacttgagttatgggacaggctcaaaattttgagttttacaagattggtggtgtcaatatgggcagtaaccattcttagcttatatattagagttcaagtcaacattctaggaagacatttatatattgatactgcacgtggtcttggaagctcttatttacttgaggaagctgatctcattgacagggatgaccagcaaaaattcctggcaagtgctgactttcttgccaatcatggcttgccaaaattgatctccagtatgcagacagctgcaacagaagttttgaaggcaaagcagttgagagacttcttcaatactgcaatacttcatgaaactatcatgc

SEQ ID NO: 16273 - DNA, 626 bp, Gossypium hirsutum
  Clone ID: GOSHI-09MAY01-C31375_1
cccacgcgtcgcccacgcgttcgcccacgcgttcgcccacgcgtccgcccacgcgttcgcagattctctgaacatcaattccccacattaccccatcaatcataccattcattttcattctttctctaagaaacaagctctcagagaagacaatggtgggttttgaacaatgaagaagaagagaaagtgtgggttatgcttgttccatggcctgccattatgcttactatgcttccttttcaccttcagtaacattgagaggctttggtgccaagaacagagaacccaggccttttcaagtacatctttcttccattagcagtcctgttagagcctcctacaatacccttgtctctgaggctgcaaggcttttggttcctacagcaattttcgaagcttcaaaactcaaagttgtcttcatgggagaggcgctaaaaagttattctgcaataatcccaagaacctacatcctctcccactgtgacttcactgcttacttaaccttgaccatctcaaatgtcatcaaccttgatcagttgaaagggtggtataacaatgatgatgtggttgctgagtggaagaaagtgaaagaaaccatgtttctgaatgtgcattgttttgtaagc

SEQ ID NO: 16274 - DNA, 418 bp, Gossypium hirsutum
  Clone ID: LIB3120-019-Q1-K1-H6
cccacgcgtccgcccacgcgttcgcccacgcgttcgcccacgcgtgcgcattcattttcattctttctgtaagaaacaagctctgagagaagacaatggtgggttttgaacaatgaagaagaagagaaagtgtgggttatgcttgttccatggcctgccattatgcttactatgcttccttttcaccttcagtaacattgagaggctttggtgccaagaacagagaatccaggccttttcaagtacatctttctttcattagcaagcctgctagagccttctacaataaccttggtctttgaggtggcagggtttttggttctccagcatttttggaagcttaaaacttaaaagtggctttatgggaaaaaaggttaaaaggtatttttgcattattccaaaaaccttccttcttttc

SEQ ID NO: 16275 - DNA, 342 bp, Gossypium hirsutum
  unsure (1)..(342): unsure at all n locations
  Clone ID: LIB3493-007-P1-M1-E5
ctttctctaagaaacaagctctcagagaagacaatggtgggttttgaacaatgaagaagaagagaaagtgtgggttatgcttgttccatggcctgccattatgcttactatgcttccttttcaccttcagtaacattgagaggctttggtgccaagaacagagaacccaggccttttcaagtacatctttcttncattagcagcctgttagagcctctacatacccttgcttgaggctgaggctttggtctacacatttcgagctcaaactcaagtgctcatggaagggctaaagtatttgcatatccaagactacatcttccatggactactgtactacat

SEQ ID NO: 16276 - DNA, 423 bp, Gossypium hirsutum
  Clone ID: GOSHI-09MAY01-C31275_1
cccacgcgtccgagaaaattaatgaacatcttctgggcatagtaaaatgcggggaactgggcatcaatgaactgctggctgccaaacttagtagaagtggtaacgatgcacgccatgcagttgaagaaagggatttatgcgagaagttactaaaacagattgaagcgaaggcctctgagttggtagctgagaagaagaaaataagacatctccttgatgcttacaaaaggctaaaatctcagtacaactacctctgcagaaagaatggccttactaccgagaacatgtctttttcaaataaactggaagatgaaagtgactcagccaggcatcatgacaaatccaaaccttctcttgatgctgaaaacagcattctgaagactcctatggttgtttttggcacaaaaagcatgaaagatgtaa

SEQ ID NO: 16277 - DNA, 547 bp, Gossypium hirsutum
  Clone ID: GOSHI-09MAY01-C31235_1
agcaacattcgccattaattctccatatttcattgcaaagaacatcaccttcaagaacagaagcaccattaccgccgtcaggtgcattaggaaagcaagcagtggcactgaggatatcagcagatgcagcagcctttatcggttgcaagtttattggagcacaagatactctttacgatcacattggcaggcactacttcaaacgctgctacatccaaggttcagtagatttcatattcggaaatgggctttccctctataaacactgccacttgcatgccgtaaccaacagctatggagccttgacagcccagaaaagggaaagcatgcttgaggaaacaggcttctccttcgttaaatgcaaggtcacggggtcgggcgccctctacctcggtcgggcttggggcgttttctctaggggtggtctttgtttatacttacatggacaagatcatcacccctagaggatggtatgactggggagacaaaaatagagaaatgactggtgtttacggacagtataagtgctcaagacctggagctgaat

SEQ ID NO: 16278 - DNA, 285 bp, Gossypium hirsutum
  Clone ID: GOSHI-09MAY01-C32985_1
ctcgaagcccacaccctttctattggacgctcgctctgtttcctctttcgcatcaaagctcagcagccatgtctcagcagccggatacgaagcctttgactgaagaagagctcgaacgaaggaaaaagaaagaagaaaaggcgaaggagaaggaactgaagaaacagaaggccttagaaaaagctgagttagccaaacttaaggcacaacaaggatcgaatgctccaaaaaagagtgcaaagaagagtgccaagcgagaggcagatgatgagaatccagaggatt

SEQ ID NO: 16279 - DNA, 1484 bp, Gossypium hirsutum
  Clone ID: GOSHI-09MAY01-C32975_1
caaatacgcgaaagcaaagaagagaaacagtagtgtgaaataccaccaaatggcttcaagacctattgttcctcaacaacccagaggcgaggccgtagttcacaagcagacgaagaaaaacgtggcggccggagatggaaagagtcgccgtgcgttgggggatatcgggaatgtggtgaacgtaagagcagtggccgatggtaaaccggctcagattcagactcatcgtcccctcactaggtccttttgcgcacagttactcgccaatgcacaagccgccgccgtggctgagaacaacaagaaaaacgtatgtgttaatgtggaaaaagctccggccgccgtggccgtgccgcctaaaagaagtggtcccgcgcctgctgctgcaccaccaaaggctgttcaaaagaaaccgaccgccaaacccgccgccccgccggtggaagtgatcgaaatcagccccgatgtcgaagaaattctggaagtgaaggagaaaaaggagaagaaagacaaggctgaagtgattaacaacaataagaaagtaactcaaaaagagggttcacccaagaaaaaacatactttttcttcagcccttactgcaagaagcaaggctgctgctcatggaatagctaacaagccaaaggaagacattgttgatatcgatggagcagatactgataatcatttggctggtgttgaatatgttgatgaaatctacaagttctataaatcagctgagcatgagagcatgccaaatgattatatgcacttgcaaactgatatcaatgagaaaatgagagctattctcattgattggctaattgacgttcatcaaaaattcgagctttcgcccgaagctctttatcttacgatcaacttgatcgatcgcttcctttcagtgaaagtcgtcccgaggagagaactacaacttttaggcatgagtgctatgcttattgctaccaaatatgaagaaatttggccacctgaggtcaacggtcttgtatgcggtgcggacagggcttacacacatgaacagatcctcataatggagaaaacgatattgggacgattggaatggactttaacggtgcctacacattacgtgttcttagcacggttcatcaaagcatcgatccctgacccgaagatggaaaacatggtgtatttcttagctgagttggggataatgcattacgagaccattaggtattgtccgtcgatggtggctgcttcggctgtgtatgccgcacggtgcaccttgaagaagacaccagcttggacagacaccctcaagttccacaccgggtataacgaacagcagctgatggaatgtgctaagttgctggcttgtttccattcaaaggctattgatagtaggcttcaagttgtgtataggaagtactcgagttcgctacgtggagcggtcgcgttgattccggcatgccagaatctattatccggtgttgtttcttcagcttaggaagaac

SEQ ID NO: 16280 - DNA, 312 bp, Gossypium hirsutum
  Clone ID: GOSHI-09MAY01-C32865_2
cccacgcgtccgcccacgcgtccgccttttctggatgaactttcagacttactcatcgacaaagaggctatttcctagatgcatgctatgctgccattagtgccgcaatgttcttcttctattcatatgttgcgatctctggagggaacccacccccaaagaagatgaagctttctgctgctcattaatcatggccatcttaattatatgaatgttgggtccctttgtgtaatgatgtagtttgacttgacctgagattacaggctaatgggcattgtgttattatcaaacaaactggtggctagctacaag

SEQ ID NO: 16281 - DNA, 660 bp, Gossypium hirsutum
  unsure (1)..(660): unsure at all n locations
  Clone ID: LIB3825-002-Q1-K6-E4
ctttgtgttatttatcaaacaaactgcccatttacctgtaatctcaggtcaagtcaaactacaacattacacaaagggacccaacattcatataattaagatggccatgattaatgagcagcagaaagcttcatcttctttgggggtgggttccctccagagatcacaacatatgaatagaagaagaacattgtggcattaanttcagcataaaatgcattaggaaatagcttctttgtcgcggacgccccccccaaaatctcacgcacccagagagaaaggaactttgattcatacggtaatcgaggattcaagaactaatatagttaataacaagcatttggaagttttagattgtcttgagttaaaagttcgagtcttggaattctgcttatcgtcaatcaaatggaggctgaaaggttgaattctccaagtacatccgtaattacttttgaattattgggtcatcaactacacttctctcaggatcctaattccaaacatttaggaacaacagtttgggacacatcaatggtgtttgccaaatttctggaaaagaatgcagaagggaaggttttgcccgtctaaacttaaagaaagcgcgttattgaacttggagcangntgtggagtagcgggggtttggaatggcattgctggg

SEQ ID NO: 16282 - DNA, 642 bp, Gossypium hirsutum
  Clone ID: GOSHI-09MAY01-C32525_1
tacaatccagcggtctcatccacgcactgccaaaatcctcaaaacccaccctaaccctctctctctctctctcctttttctattatcatatttttgtttctttcccattcaaatttctagggcctgaccgccgcaccatggcttctcacgccgccaatctatgggtgctgctcggcttgggtttagctggaatttttctgatgactaaaaggcttaagaaaactattaaagccgactttggggcttttattcagaagttagagttgcttcctccgcctcagcctgctcctcctaaagctccccatcctctcaccggtctcaatttcgccgcttctgatgtatttgacattgaagggtatgtgactgggtttggccatccagactggttgaggacacatgaaccatctactcgcacatcacctgtgcgtttggccccttgtagaaggaggtgctaccctgtataggggaaactggttgtggatgaactggcattacagtatccatgggagagaataaacactatagcaccaccaaccaatccctgctgcacccgcccccgctccccctggatcctttagtggagcagctgttgctgttgctgctgattttgtggacttctctttatgcatcgatactcttggt

SEQ ID NO: 16283 - DNA, 519 bp, Gossypium hirsutum
  Clone ID: LIB3585-033-P1-K1-G9
cccacgcgtccgcccacgcgtccgcccacgcgtccgcccacgcgtccgaatttctagggcctgaccgccgcagacatggcttctcacgccgccaatctatgggtgctgctcggcttgggtttagctggaatttttctgatgactaaaaggcttaagaaaactattaaagccgactttggggcttttattcagaagttagagttgcttcctccgcctcagcctgctcctcctaaagctccccatcctctcaccggtctcaatttcgccgtttctgatgtatttgacattgaagggtatgtgactgggtttggccatccagactggttgaggacacatgaaccatctactcgcacatcacctgtggttttggcccttgtagaaggaggtgctacctgtatagggaaaactgttgtggatgaactggcatacagtatccatggagagaataaacactatagcacaccaaccaatcctgctgcacctgcacgcattcccggtggatcctctagtggagcagct

SEQ ID NO: 16284 - DNA, 616 bp, Gossypium hirsutum
  Clone ID: GOSHI-09MAY01-C32455_1
cctgaaacctaaggaaaaatcataaaagaaaaaaatgcacccattgtcttcaattcgacagcttcgccattcttctacttcagtattgcttcaacgctttagcatcttcaattgggtgtttcgagcttcttccaaccgccctgcttttctcggaggttcaaagagtttcagtgctggtgcacattcttctgagaatgttggaactccggagaagaattttgatcaacagacaatgaaggataatgtctctgctacacgtgcttcaactttccagaaattttttggtcctttaggtgcacaatctactggtcaaacagatttcaggtcaggcgggaattacaggtctatggatgttttgagggaagcaatagatgcagatagaatggcaaactttaggggttctcaatttcggcaagaccatatcgagcaaaacaaacattttgcacacataaagatcatgcgcaacaatacctttgtcaccgtgacggattccgatggaaataaaaaatgtggggcctcggctggaatgtcaggacttttaggaggcacgaaagtatctaagtatgctactgaagcagtggcagaatatgctggcgcaaggcaaggaaaatgggga

SEQ ID NO: 16285 - DNA, 632 bp, Gossypium hirsutum
  Clone ID: AI729047.1
gtttaatgtttgctgagcaaaaaacctgaaacctaaggaaaaatcatagaagaaaaaaaatgcacccattgtcttcaattcgacagcttcgccattcctctacttcagccttgcttcaacgctttagcaacttcaattgggtgtgtcgagcttcttccaaccgccctgcttttctcggaggtttaaagagtttcagtgccggtgcacattcttctgagaatgttggaactccggagaagaattttgatcaacagacaatgaaggataatgtctctgctacatatgcttcgactttccagaatttttttcgtcctttaggtgaacaatctactgagaatgttggaaatctagggaggaatttggatcaacaggcagtgaaagagaatgtctccgctagatatgcttcggctttccgggattttactcgtccttcaggtcaaacaaaattcaggtcaggcgggaattacaggtccatggatgttgtgatggaagcaatagatggagatagaagggcaaactataggggttctcaatttcggcaagaccatatcgagcaaaacgaacattttgcgcacataaagatcatgcgcaacaataccttcgtcaccgtgacagattccaatggaaataat

SEQ ID NO: 16286 - DNA, 615 bp, Gossypium hirsutum
  Clone ID: GOSHI-09MAY01-C32165_1
atcaaaacaaactaccctctctttttttttatgtcctttctccatctttaagctaattggctgcttaagcttcagtagttaagtttttttagcataaaatgggggaaagaagcattaaatccaccattttttttgttgaattagcagtcacctgctcaaacagtgatattgttgaagtgaaactcctgccatggctactagcagcaacaactccatagattcatcactgtccagccaaagattagtggggaaagtggcattggtcactggtggagcaaccggcattggtgagagcattgtgcgtctatttcacaagcatggtgccaaagtctgcattgttgatgtgcaagacaaccttggcctccaagtttgtcaatccctcagcaacggccctaacgtatgttttttccattgcgacgtgacaatagaagaacaagttcgggccgcggttgactacgcagttgaaaagtttggtacactcgatatcatggtcaacaacgccggattatcaggtccaccgtataacgatatccgcaactatgacttatctgatttcgataaagtaatgaatgtgaatgtaaaaggtgttttccttggaatgaagcatgctgctag

SEQ ID NO: 16287 - DNA, 529 bp, Gossypium hirsutum
  Clone ID: GOSHI-09MAY01-C33995_2
ttgaacgttgcaaggaggatccaaagcccctcgcctccgccctcgcgtccgcccccgcggccgatttatgaaaggtatacatggaaaatttattctgaaaggctgatgacattggctggagtatatggtttctggaagtacgtctcaaaactcgagaggcgtgagacccgaagatatcttgaaatgttctacatcctcaagttccgtgaattggtaaaatctgttcccttggccagtgatgattaaaagcttaatccctggttgcgctcgtagggtactggcagtatacatttaagggtctggtcgattgcgtggatgacccctttcatatataaataaagcagactaggtctccttgctatggagcattttaattcggctttgtgttggaagtaaaaatcaaatatgtgatgggttttgtaaataaatgcagtgttctggctttggactgcctcttgaaatctggttgaagatttgtatgtaaagctaacagtgtgcctgtatgagaggtggtaagaattgcaatcgt

SEQ ID NO: 16288 - DNA, 960 bp, Gossypium hirsutum
  Clone ID: GOSHI-09MAY01-C33995_1
agagttgtatgctaagaataacaagctgagggaattagcaaacctcgttgttgttgctggttacattgatgtaaagaagtccaaagacagagaagagatagcagaaattgaaaagatgccccacccgtccgcccacgcgtccgtagatgggcaatttcgttggatagcagcccaaacaaatcgagcacgcaatggtgagctctatcgctatatagctgactcaaagggtatatttgttcagcctgcattctacgaagcctttggacttacggtggtggaagccatgacatgtggccttcctacgtttgccacattgcatggtggtcctgcagagattatcgaacatggtatatcagggttccatattgatccataccaccctgaccagaccgctgaactcctggcaactttctttgaacgttgcaaggaggacccaagccactggactaaaatatctgatggagggcttaagaggatttatgaaaggtatacatggaaaatttattctgaaaggctgatgacattggctggagtatatggtttctggaagtacgtttcaaaactcgagagacgtgagacccgaagatatcttgaaatgttctacatcctcaagttccgtgaattggtaaaatctgttcccttggccagtgatgattaaagcttaatccctggttgcgctcgtagggtactggtagtatacatacacggttctggttgattgcgaggatgaacaatataatatataaataaagcagattaggtctccttgctatggagcattttaattcggctttgtgttggaagtaaaaaatcaaatatgtgatgggtgttgtaaataaatgcagtgttctggctttggactgcctcttgaaatctggaagatttgtatgtaaagctaacaatgtacctgtatgagaactggtaagaactgcaatcataaattcggtctcgcttgctgtt

SEQ ID NO: 16289 - DNA, 383 bp, Gossypium hirsutum
  unsure (1)..(383): unsure at all n locations
  Clone ID: LIB3135-020-Q1-K1-F1
cggttcgacccacgcgntgcgccacgcgtnncgccacgcgtncgtgatccataccaccctgaccagaccgctgaactcctggcaactttctgtgaacgttgcaaggaggacccaaaccactggactaaaatatctgatggagggcttaagaggatttatgaaaggtatacatggaaaatttattctgaaaggctgatgacattggctggagtatatggtttctggaagtacgtttcaaaactcgagagacgtgagacccgaagatatcttgaaatngtctacatcctcaagttccgtgaattggtaaaatctgttcccttggccagtgatgattaaagcttaatccctgcgtgcgctcgtaaggtactggtagtatacataca

SEQ ID NO: 16290 - DNA, 358 bp, Gossypium hirsutum
  unsure (1)..(358): unsure at all n locations
  Clone ID: LIB3148-016-Q1-K1-D11
actacgcgtactgtttcgtatgaagggcttttgatggaaagataaacgctgccatcactggtggggtaatgaatagtctacatgagacaccatcctaatgtctattgccaagggatganacacatataagtactatcaagtcagagcatcataacgatctccttgctatggagcattttaattctggtttgtgttggaagtaaaaaatcaataatgtgatggatgttgtaaataaatgcagtgttctggctttggactgcctcttgaaatctggaagatttgtatgtaaagctaacaatgtacctgtatgagaactggtaaaaactgcaatcataaattcggtcttgcttgcttgtta

SEQ ID NO: 16291 - DNA, 346 bp, Gossypium hirsutum
  Clone ID: LIB3083-005-Q1-L1-A10
gttgtatgctaagaataacaagctgagggaattagcaaacctcgttgttgttgctggttacattgatgtaaagaagtccaaagacagagaagagatagcagaaattgaaaagatgcatgaccttatgaaagagtataaattagatggtcaatttcgttggatagcagcccaaacaaatcgagcacgcaatggtgagctctatcgctatatagctgactcaaagggtatatttgttcagcctgcattctacgaagcctttggacttacggtggtggaagccatgacatgtggccttcctacgtttgccacattgcatggtggtcctgcatagattatcgcacatggt

SEQ ID NO: 16292 - DNA, 790 bp, Gossypium hirsutum
  Clone ID: GOSHI-09MAY01-C33885_1
ctatcctaaacccctccaaatcttcttcttaactatctaaaagcgaaaaacccaaaacaaatgtcccagaaaacaatggaagtggtgaagaatttggacatcaaaagatcatgggaaggtggtacgagatagcttcattcccatcaaggtttcagccaaggaatggggtgaatacaagggctaccgtgatactttgaatgaagacggaacagtgcatgtgcttaacgagactttcactgatggcaaaagagggtttatagaaggcactgcgtacaaggcggatccccagagtgatgaggcaaagctgaaggtgaaattctatgttcctcctttcttgcccatcattcccatcgttggagattactgggttttgcaccttgatgatgattatcagtatgctctcattggtcagcctagcaggaattatctttgggtattgtgcaggcaaacacatatggatgatgaaatctacaatcagctggtgcagaaggctaaagatgagggctatgatgtgagtaaattgcacaagaccccacaaagcgatcctccacctgaaggagatgacactcccaaggacaccaaaggcatttggtggatcaaatcccttttaggcatgtaggaaattaagaaaatgtttgtattcatggtcccctgggacgcatgaaaatatatattccatatcttgtctttgctttggaaagatataggtcggttttcatgctttatccatttaaaaggtcacctaattccatatcttattcaagcgtaacactttgttctggcatggatc

SEQ ID NO: 16293 - DNA, 501 bp, Gossypium hirsutum
  Clone ID: GOSHI-09MAY01-C33875_1
actaactccaccaccatcgccaccacctccacctccaccaacctttccgtttcctcttccggcattccagttcccacctgtaccgcctttccctggtatcccccctgcctctgcctctacttcaccaaagaaatcctctccttaattgtgtactataagtaatgattctccactaaaacctgtcacaatctagccactcttctggtgattatcaattacatatgtatatcttttttgttcattacgattataaattatatatacagttaaataatctacctaaacagtgtgggctttctcttggttgtttgttgtgtgattgactgtgccattgtcaataagaagctcccgtgaatgtgacacaattattgtactatataataaatccaatcctggggtcatctctgattccaacaggtttattctctttaaaaaaaaaaagaaaacaaaaaaacaagtaaaaaaaacccccaaaaaaaaaaaaaaaaacaaaacaagcaa

SEQ ID NO: 16294 - DNA, 1272 bp, Gossypium hirsutum
  Clone ID: GOSHI-09MAY01-C33515_1
cccacgcgtccgcccacgcgtccgcttggttattcagctatgatgaatcaatacaaagttttgcaaaggtgttgggccgcaatggagtcgaataatagatacgcaatggctgagatttacaccattggaactggcacatggagaagcattgggagtgcacctattgatactgttgctttgcctttcaatgctttcttgaatggcgctcttcactggtttccttgtactcctaatggtagtgaattcatacacactttcgactttgattctgagaagtttgggacgctcccaccgcctgatcatttccgagaaaccgataagaagttcactaattactcaaggattggagtgctaggagggtgtctgtttatgatttactttacgaactcgacgcgattcgatatttgggttatgaaggattatggtgtgaaggagtccttggaccaagcagtttgtgattgaagaatttggtatccaaaacaaggcagttggtgatttctatgaacccatggtgtgttttgaacaatggggaaatcttgatgttattcaataatgatgcagtgggcgggcgccctcgcgtccgcaaaaatcttcgtcgaactaagtttttccggactcgttcccggtttgatgcaactgctttcaccccttcacttctttctcttaacaatgttgctaaaggagagcaaatttctaggatgcaaggaaccaaagactatgacaaactatgtactgaagaattccaagattgtgctgattgtggagcgctacttgttaaccctagctgtacttttccggcttttggggttccctacggagctgtaacttatcttgcaaatttatatgcaagaaactcggagaacagatgtacggcttgtatcaatcgtggagttgctcctccgaaatcgtttctgaccctgtggaatatgtgaagaaaacagtgatcgaggaaatcgtttcgacttgaaatatgaacttagtccatcggaaatatcattatccgatacctcaactgaactttttttatgcctgatttgtggatgttattgctcttttgtgcttgtaaatattggaaacaccttcctgttgaacttgggaaaattagtatgctaattagtagaatagcttactctttcgtataaaccaagaaccggcactggcatgctttgatttgtgtaactagaccttttgagctatgttatttagactcttcattttcttcgacattcatgttggaaaatataatataatcctttgaagactttacaagag

SEQ ID NO: 16295 - DNA, 550 bp, Gossypium hirsutum
  Clone ID: LIB3829-027-Q6-N6-D8
attacatatacacacatacattatgtattcccaatttgaattcatctgaaacaaagcaaatgtgtgaatacttactatatacatacatatatacacataaatacatatatgcatataatatatacaaatacatgtacctagaaatttgctctcctttagcaacattgttaagagaaacaagtgaaggggtgaaagcagttgcatcaaactgggaacgagtccggaaaaacttagttccacgaagatttttgcgcttctgattgtaacaaaccactgcatcattattgaataacatcaagatttccccattgttcaaaacaaccatgggttcatagaaatcccaactgccttgttttggatacaaattctcaatcacaaactgcttggtccaggactccttcacaccataatccttcataacccaaatatcgaatcgcgtcgagttcgtaaagtaaatcataaacagacaccctcctagcactccaatccttgagtaattagtgaacttcttatcggtttctcggaaatgatcaggcggtgggagcgtccc

SEQ ID NO: 16296 - DNA, 398 bp, Gossypium hirsutum
  Clone ID: GOSHI-09MAY01-C33665_1
cgcgtgcgcggacgcttggagaagatcgaaagctcgtgcttagaaaaaatatgccagagctgatgaactgtgccacaggagtatcgaatcaggataccacttacctacattcaacttctcaaatttgtagtactactgtgattcgagattgttaaccattgtgtatctgcagggtcatagaccttcaaaacgaagagattcttgctcaaaagtatcagattcgactaacgtgatgaagaggcgtaagcaaaggtgaatcaagttttgcctcgggaacgtacatggttgacaccatgtcaatcctactccaagtcaggcgatgtttactttcatgccttggagcaagcgtactcacaccggcggtaggctcaacctcaaaactagaagtaggtgcaaga

SEQ ID NO: 16297 - DNA, 619 bp, Gossypium hirsutum
  Clone ID: GOSHI-09MAY01-C33635_1
ttcaaagctttattaccagtaccaagaaactgagaataaattgtgtgttggctatgggggtggtgttagggtcttattcggcttcgttggggttacatttattacttgtattgatttgttagcttcaatttatggaatgttggtgactgagagagggacacaggaggggggaaagaaagaatttagggcatttacttcaactactgctaagctgtttatggagaggccccaaggacccattaatccttatgaaaatacttacatctgctactgcactactgcttcttcttactctttcaacattctaccctcattctgctttcattctctctttatctgctgagagagactgaaccatgtggcctccacccaattaaatgatatttttctttttcaaatatctttagatagttagcatttgagccaagttaaaaattttgcttatttccttttgtttttgttttctcccttcaaattactcattgcagttcctaggagagcattcggaggtggaatgcttagaacaaggttttattagctgtgagagattaaagcttggagaagaagaagaagaagcacacttttcaataccaagctttgaagagaaaatgccattcct

SEQ ID NO: 16298 - DNA, 846 bp, Gossypium hirsutum
  Clone ID: GOSHI-09MAY01-C33125_1
aatttttctcttttgataaagctgacaaccctgaaagcaacccaaaagaaaaaaaaagaaagaaattatatccgttttgatcacaattcacacagcgcgagccccgttatagaatttgtcttaaaaatacaaaagggtttgagaattttcagttttgtttatatgtttgaaaaatgggggtcttgtgttttttttagtaaagatttgaagagagattcatttccaattccagggacaaacaatctggaataaacccatgttgtgttatgaacacaacaagacattattctatacaaaaacataccacaatatgattcacatttttgttgctttccttcttgtttccacttcgcttggccctgtcttgtctttacaaccagtaccggattccggtcaccggcaactacagaactgtactttaaaccctcacaaagatattcagaagctaagaagagtccaagcttatctcaagaagataaataagcctgctgttaagaccattcagagtccagatggtgatgttatagactgtgttccgtctcatcttcaacctgcttttgatcatcctcagcttaaagggcagaaaccattgaaaccggctgtgaggccaaaaggacataacttaacagaagcagtctctgaaagcttccagctatggagagatacaggtgaatcatgtcctaaagggacagttccaattagaagaacaactgaacaggacattcttagagcaagttctcttagaagatatggaagaataagaagacatgtacggagagattcgaccggttatggccatgagcatgcagttgtcttcgagaatggtgatcaatattatggagcaag

SEQ ID NO: 16299 - DNA, 528 bp, Gossypium hirsutum
  Clone ID: AI725930.1
cttgtctttacaaccagtaccggattccggtcaccggcaactacagaactgtactttaaaccctcacaaagatattcagaagctaagaagagtccaagcttatctcaagaagataaataagcctgctgttaagaccattcaggcaggttctttgaaactttgtgctaattatatgataattatatgatgcttggttcttggtttcttgttgcagagtccagatggtgatgttatagactgtgttccatctcatcttcaaccagcttttgatcatcctcagcttaaagggcagaaaccattgaaaccggctgtgaggccaaaaggacataacttaacagaagcagtctctgaaagtttccagctatggagagatacaggtgaatcatgtcctaaagggacagttccaattagaagaacaactgaacaggacattcttagagcaagttctcttagaagatatggaagaataagaagacatgtacggagagattcgaccggttatggccatgagcatgcagttgtgtttgt

SEQ ID NO: 16300 - DNA, 798 bp, Gossypium hirsutum
  Clone ID: GOSHI-09MAY01-C33365_1
gctgggcttagtaaccaaatcaaagtttcaaccgccatcgacaccatcacccttgcagaatcttcccctccatccaaagggtcattcaagcctgaatcccgagaggttctgcgcccccgcgggggcttcttggctaacaaccaagccccattgcttgtcaacttgtacccctatttcagctacgatgacaacaacgttatcgatctaccatacgcactcttcactgctccaaaccctgttgtggaggatccccccttgcggtacagtaacctgttcgatgccatcttggatgcagtttactccgccctggagaaggctggtgggggttctttggagattgtaatatcggaaagtggatggcctaccgctggaggtaggaaaagggcagcaacaagtattgaaaattcaagaacctataaccagaacttgatcaaccacgtgaaaaaagggacgcctaagaagcctggaaagcctatagaaacgtatatttttgccatgtttgatgagaataccaaaacgggcgaagaaatcgaaaaacactggggactttttcttccaaataggcagcctaaataccaaataaattttaactaaatagctgcacagaatctgtagatgaagggcatttcaaccatgctagctattctacttgccctagacgagcctctccctgctcccgtggcaggctgggtaaacaatgcatctatcaatttcaaaatactattcaaaataagatgatgaaaatcagtcccatatgttaaagtattcaaaataataagattatctcctatttagatt

SEQ ID NO: 16301 - DNA, 633 bp, Gossypium hirsutum
  Clone ID: AI054507.1
cccatatctcttactacccgaagagagatccccatcgaccataactataaatacataatgattcgtttattcaccctaacaagaatgtatggttactgacatttgaataacaaaaatgaagctctactctaagttagataaggtcagcacaagtaatgataaacaagaacctataccagaattgaacgccacgtaaataaggtacgcttaaaagcctggaaaccttatagaaacgtatattatgccatgtttaattagaatccgaaaccgggaaaagcaatcgaaaaacactggggactttttcttccaaataggcagcctaaataccaaatctattttaactaaatagctgcacagaatctatagatgaagggcattccaaccatgctagctattctactttgccaataagagcgtatcacttcttcctaggaagggagggtaaccaatgcatctatcaatttcaaaatactattcaaaataagatgatgaaaatcagtcccatatgttaaagtattcaaaataataagattatctcctatttagattacttgcatatgtatggtgtaacatcattaaaatcgttatactataataacagtaataaatttgttaataaaaaaaaacaaaaaa

SEQ ID NO: 16302 - DNA, 1012 bp, Gossypium hirsutum
  Clone ID: GOSHI-09MAY01-C33295_1
caaaagcctctgaagcccctctcagccgcataaataagtgctctttcacaagcccatgcctcagctacaaacgcatcagcaacatcctcgaccagataagtttctgcccctacgatatctcctgtagaatctctgactataactgcagttgtagcgattttgacatctttttggaaggatgcatcaaagtttaacttgataacatcatctgggggtcttcacagatccttcaccataattttaatgggaggacggagattctcttggtttaggcagatctctagttcataccctcgaataaaccctaaaaattcttgcataaaaaatttgacccctttgtggattagcttatttctgcgatgccaaagtccccaaactgacaaagtaatgattcatctctgtttgctcatctgttgcagaaacattctaacaaaacgcctcttacagcacaacgaagcttctagtggaggaacctttacttgtaatgaagcccaaacacgctattgagtatcacaagaccataccaaatgagctgtatcctccagatctgtcttacacagagggcaagcaacatccacactcaacttccgtcgtgccagattaccaaaatggggcagcagatcgttaatcagtctccagcaatggatttttatttttttttggaatgtttagtgcccataaggctttatagaaatctttgtaatcattattcatagaggaaatatatgtatggtcttgtaaatgagctgtagataggattctgtacccactcttaactgtatactcccctgatctttcgtattttcaaaccatcatatcctccgagcaactctcagaaatcgaaatagagaagattcgatatgctgtttcataattaaaaaaaaaaaaaaaaaaaaaaaaaaaaaaaaaaaaaaaaaaaaaaaaaaaaaaaaaaaaaaaaaaaaaaaagaaataaaaaacaaaaaaaaaaaataaatgataaaaattattgtataaaaaaaaaaaggggggc

SEQ ID NO: 16303 - DNA, 341 bp, Gossypium hirsutum
  Clone ID: LIB3145-047-Q1-K1-G7
gggcaagcaacatccacactcaacttccgtcgtgccagattaccaaaatggggcagcagatcgttaatcagtctctgactataactgcagttgtagcgattttgacatctttttggaaggatgcatcaaagtttaacttgataacatcatctgggggtcttcacagatccttcaccataattttaatgggaggacggagattctcttggtttaggcagatctctagttcataccctcgaataaaccctaaaaattcttgcataaaaaatttgacccctttgtggattagcttatttctgcgatgccaaagtccccaaactgacaaaggaatgattcatctc

SEQ ID NO: 16304 - DNA, 618 bp, Gossypium hirsutum
  Clone ID: GOSHI-09MAY01-C33285_1
acggcttgcaagtttacagaatctggtgcttataatgtttgaggacgatacagttttgataccaaaagaaacagcctggttcagttattttccagacggtgctttcgaacctgtattgcctgtacaagcggtaaacatatacataactgttctataagcaaagtaaaactaaaacctttcgttttggtattgtccggatttgtttgcttttctgcaggccaagctctataaggaagattggatcggtttgaaaactttggatgaagctggaaaagttaaattcgtaaatgtctcgggtaatcacctacaaatctcaacaagcgacatgaagaagtacatggtaccatatttggaggaccaaacacctgcaccaacagggcagacaccgacagaagcttcatcgtatcaatggttttcaaaagtcgggcacttttttaaagacttaattggtctgagcgaagatcaacctttgctgcatattgtgtactaaaactgtaactttcttggggtacaatccacgttattattggttttaagccactattattaccatatatgtgaaagattttgacgttcttatcattttatgattatgataataatgactttcgtacaaaa

SEQ ID NO: 16305 - DNA, 418 bp, Gossypium hirsutum
  Clone ID: LIB3149-017-Q1-K1-B10
gattcctcccaaaactcaacaatgaaatcaatggtatgagaaatttacttacaaggaacggcttgcaagtttacagaatctggtgcttataatgtttgaggacgatacagttttgataccaaaagaaacagcctggttcagttattttccagacggtgctttcgaacctgtattgcctgtacaagcggccaagctctataaggaagattggatcggtttgaaaactttggatgaagctggaaaagttaaattcgtaaatgtctcgggtaatcacctacaaatctcaacaagcgacatgaagaagtacatggtaccatatttggagtaccaaacacctgcaccaacagggcagacaccgacagaagcttcatcgtatcaatggttttcaaaagttgggcacttttttaaagatttaatt

SEQ ID NO: 16306 - DNA, 450 bp, Gossypium hirsutum
  Clone ID: GOSHI-09MAY01-C33205_1
caaaccctttaattcaaatgaaccaaaattttgatttttgctagggcttcatttagcagccgccaaaccatcatctaacttgatgatcgatggtgcactagcagtgtccagatcttgccaacgaaggccacgcccatagagatctggtaagctattctttctttttaaaaaaaaacctttaaatccaacattattcttaaaaaacgtagcaaaattcgaagggaaatgcttcaacaccattcgaccctcgcccgtatctccatacttctgagatatttgggcttgcataggtatcgtttcaggtatttttccatttttctcatgcgaaatattgcaaacaaatcgaaaaaaaggaaagaatccaaaaaggaatatgaaaacacctcttaaaaattgctttcgaaatgctcttttttgatatcttgtgtgcgtaaccttacaaagatgaaa

SEQ ID NO: 16307 - DNA, 824 bp, Gossypium hirsutum
  Clone ID: GOSHI-09MAY01-C33225_1
tctatttgtttggaatttggttagctctgctttggggacagggaaaagtaatagtaattctaatgttcctttgaaaaatgcaaatccaactcctaattcttcgagtaaaaacacatattcaatggggaatttggttgattcattgcccaaaatagtggaaattggggaaattctagtggatataataataatagcaatggtattggtggtagtagtaatattaatgtcaatattaacaatagtaagaatcagaatcttgggggagcttccatgaaaagttggctggaggagcaggaggtggaggtaaaagtgggattggttctaaggatccttttggttctttggttgatttttcatcaaaaccgtcagggacccttaattcaggaagtaataaaggaaataaggcaaatgttgcacacgatgcatttggggattttcagaatgcttcaaaaccgagcacaactgcatttccttctagcagtttcagtgcatttgaggattttcagaatgcttcaaaaccaagcacaatggcgtttccttctagcggttttggttcaacttcgaataagaaggattctggtttgaatatggataattttgggatgcctgcaaagaatgttggatctcaaagtcaaacatctgttcaaagctcgggcggtgatcctctcgatatgttcttctcgtcatcttcagcttctggaggttctgctcaagcatctggtggaggtggaggtggagggcatcaattttctgaagttgatgattggggatcggattctgagtttggaggagcaggaggaggaaataatggtggctcaacaaca

SEQ ID NO: 16308 - DNA, 374 bp, Gossypium hirsutum
  unsure (1)..(374): unsure at all n locations
  Clone ID: LIB3120-060-Q1-K1-C5
cccacgcgtccgcccacgcgtccgcaaaacctagcacaactgcatttccttctagcggtttgggtgcatttggggattttcaggatgcttcaaaaccaagcacaatggcgtttccttctagcggttttggttcaacttcgaatacgaatgattctggtatgcctgcaaagaatgttggatctcaaagtcaaccatctgttcaaagctcgggcggtgatcctctcgatatgttcttctcgtcatcttcagcttctggaggttctgctcaagcatctggtggaggtggagggcagcaattttctgaagttgatgattggggattggattctgagtttggaggagcangaggaggaaatgatggtggctcgacaaca

SEQ ID NO: 16309 - DNA, 406 bp, Gossypium hirsutum
  Clone ID: GOSHI-09MAY01-C28845_1
taaaaatctatttatggataagcttgtttcaagctggtacaaggatcaatctttgcctgaatcttacatattcccaccccatgaaagacctggcaagctacttgttcctaggtgcaacaccgtgccggtaatcgatctcggcgatacccgaaccaatttagttcaccaaatcttgaaggctagccaagagttcggattatttcaggttgttaaccatggagttcctccaaatatcatgagtgaaaccatgagtgttttccacaagttcttcgagttacctgcagaagacaaggcgagcctcaccgtacacacaaacgatccatagagatgcaagcttgtaaccagcactttggattacgatcgcgaaaagatccacctgtggcgcgatgttttaagacacccttgt

SEQ ID NO: 16310 - DNA, 433 bp, Gossypium hirsutum
  Clone ID: GOSHI-09MAY01-C28525_1
acctcagtgcaatttctggtgatccaaagtatagcacagaagggatgaaggttttggcgcatttgaaaactcttcccaagacagaaggactagttcctatctacatcaggtatttttattctcttcaatcattccatcactcctaagttacggctactttaaacagctatatcctttgttatgtctttctaaggttttctagcctgtcgatttaggtcaatgaaaatttccgtttgcttgggtaaagtgatgtcagccatcaaacagagtagaaaataatgtcataactaggtttttcatctatatcattggagttttatttcatttattacctttctttggatggttaaaacatactggattgcttttgaccgttggctgtcacacacctttctttatttatttatttaatgtaccctccaattactatgcc

SEQ ID NO: 16311 - DNA, 404 bp, Gossypium hirsutum
  Clone ID: GOSHI-09MAY01-C28465_1
ccgacatcacttttcttcttcaccaatcactccaagcattagtggtaatggttgccatttttgtcatttcattaccacactcaatggtgtttaaccagtgcccccttacctttttacttaactttaatcatttccctaatgtgctaccatgtttatctgcaaaccataacatattcttcctccccctatatccccatatctaaccaacctataccattcctacacactgcaaccccagtatctatcttgtctggtttctttttttaatgatgtctgaacttgaagaagattctttaaagcttccagtacttgatctaacccaacctgataatattgaatcctctttcttgtcttctctcttaaaagcttgtcaagaatggggtttcttttatgttaccaaccat

SEQ ID NO: 16312 - DNA, 559 bp, Gossypium hirsutum
  Clone ID: GOSHI-09MAY01-C28705_1
gagataacaaagctcatttggcagtcagccatgtaacgtatcagatttctttatatctgacatgataattgcaagcataccttttgatggaaatgctgttgatgataacatctctggaaccgatgcatttcctgatttcaagtgttctgagccaagcatgttgtttgacgtggctgagcaatacatgatattacctttcctcgaggacactgtcaaagccaatgaaataaattatgttaacttgcatgaggaagccgtgatggctcaagataatactggtatacacctagcaattggtcagatgagatcgtgcgcagaggactctgatgttaactctgactctgataaagcagatgactttgacccacaatcgtttataaaaagtttacccgacactatctgatgtagtgtcaagtttccggcctgctgcaactgccatggaagctcggagaaggaagcccataactcttgtgcttgatttggatgaaactcttgtccactctactcttgaaccttgtgatgatgctgacttcacctttacagtctttttcaacatgaa

SEQ ID NO: 16313 - DNA, 387 bp, Gossypium hirsutum
  Clone ID: LIB3048-054-Q1-L1-H7
actcatagctagtttactcccccaattaaactatgtttgttctcttttcttttcttttgttactttgctttgggtctacttttcctctcaaattcctcattttcagccatgatttcacttaaaccttgatcgattcttctcatatcagccattttccgtgtgggtttaatcctatttggtgaatggcaagatacccatgtggcagttcgatacacagatgtggattatctcgtcttctccgatgctgcttctttaatggcttccggtcaatctccttataaaagaaccacttatcgctattcacctttacttgctttcttattaatccccaattcttttacttctcgatgttggggcaaatttctcttctcagcttcacatttgttc

SEQ ID NO: 16314 - DNA, 381 bp, Gossypium hirsutum
  Clone ID: LIB3048-037-Q1-L1-D1
aattctccactagattcatagcttttttactccaggaattaaactatttaattgtgtattctttactgggattactgtgatttgagtctacttttcctctcaaattcctcattttcagccatgatttcacttaaacctcgttcgattcttctcatatcagccattttccgtgtgggtttaatcctatttggcgaatggcaagatacccatgtggaagttcgatacacagatgtggattatctcgtcttctccgatgctgcttctttaatggcttccggtcaatctccttataaaagaaccacttatcgttattcacctttacttgctttcttattaatccccaattcttttacttctcgttgtttgggcaaatttctcttc

SEQ ID NO: 16315 - DNA, 509 bp, Gossypium hirsutum
  Clone ID: GOSHI-09MAY01-C28185_1
gaagaaaatagacagagagttattaaagaagagagttcagataagagtgatgagggtggttggactggttggtcagaaccattatccaaatgtaaggaatctagcacaagtcttgaaaatgttgcccatgatgatgcagcagttgaggatttccatgagaaaatcgagaatgaagatattaagcaagaagatgatacagaatcattgctaaaacagctaggaattgatgttgatgccggggttgatggcgaggttaaagacactttgacatgggctaggtggtcagaagaagagtcctcaagagactctgctcaatggatgcctgttcgtgcaaaatctggtgcagtcactaatttttatgaggaacctaatgaagaagtggatgagcaatttatgagagagatattatatgaagatgtatgcgaatacttgttctcattgagctcgactgaggctcgcttatctctagtattccagttcattgacttttatggtgggaaaatatccct

SEQ ID NO: 16316 - DNA, 914 bp, Gossypium hirsutum
  Clone ID: GOSHI-09MAY01-C28115_1
cacaagagcattaaatataatgtctggtctgccacaccccatggcaacaggaggctggacagtgcttttgaagatgcacagagaatagctgcagggaaacctaggggctgccccatcttcctcttcttttctgttaatgccagtggacaattctgcggcgttgcggagatgattggcccagttgacttccagaaggctatggatttttggcagcaagataagtggagcggaagcttccctgtcaagtggcacatcattaaagatgttcccaacagccattttagacacatcatattaggcaataatgaaaacaagccagtgactaatagcagggatacgcaagagataatgtacaagcaaggtatggagatgctgaaagtattcaaaaatcatgcgatgaagacctctctacttgatgacttcatgttctatgaaaatcgtcagcgaatcatgcaggcggagaaagccatgcagctaataaaaagcattgagagtccagtcctagcacctgctttcgatcctgtcaataagctaaaccgtgttgagctactcctgaatgaacatgagagaagttccaagcaaagtgatcctgaactattgagaacaattgttccttcatctaatcagcctgtttctacagattgtgataggactaatgctaggaggatgaatgaaagttcagggaaaattgcagttgaagctaaagatgatgcatctactttaaagattagttcactcagcataaatccgaagcaggatgagtctaaaatctctacagatgctgctactaaaagtgatgctgttgaggtggtaaacataggatcagtgacggtaaaagtcaataaatttactgactcacctggttttttaacagtaggcactattcctcttaatcccaagaccccacagcttgg

SEQ ID NO: 16317 - DNA, 418 bp, Gossypium hirsutum
  Clone ID: GOSHI-09MAY01-C28075_1
ttcgatgattatatcctttaaaatcacttgatggcgcgcgtcttattgcaggatttactcccagttgctttacggtactgcttgtcaaaaaatgtgacgtcctgtttaattgaactatccaatttaacgaaggctatttgtggcaaagttttggatgttgaagaacttatgaaagtgcaggatcgagctgttttgactttatgcaatttggagaagatctttccaccttccttcttcactattatagtgcacttggttcctaagcaaattgaaatcttattgtcgcactaagcgttatccagaacgatcaattgctgaaggctacttggcagaggagtgcatgacattctggtctagatatttagaagatgttgaaacacgattgaatagaccaaatagaaatgctgggctcaatgat

SEQ ID NO: 16318 - DNA, 386 bp, Gossypium hirsutum
  Clone ID: GOSHI-09MAY01-C28365_1
atagggccatcttttcccttgtggcttcgttctcaaaagcatctagaatatctagacatctcaaattcaagaatttcagacgtcattcctaggtggttttgggggctgtcgacccaatttagagatgtaaatctctctagaaaccaaatttctggccagattccgtatctacctaagggtcctaatattttcacttttgtcgaccttagtttcaataattttagcggtccattgcctcaaatctcaatgggttccaatcagtacatgatagacctttctaataattatttctcgggatctcttttccattttctgtgctatcagttgaatggtaccatcacaacaaggtttcttggtatggctaacaatcctttatctggagagat

SEQ ID NO: 16319 - DNA, 409 bp, Gossypium hirsutum
  Clone ID: GOSHI-09MAY01-C28245_1
gagagaactagtctcgagttttttttttttttgtttttttttggcttctgaaattgttggggattttaatttttacctttacattaagcatagaacaaggtagaaaaaataaacacaatgtttaaaccattacaaaccatatccaatttctgtgttattccaggactacaacatttactacaatataagcaaagttggtcaacatcacgtgttgatctaacaaccttcacttcgatttggcttggatgaaacaaacacctgatcatcttccagggtcggaatccagtcattagttgctgggttgcttttgaagataggcttgctgattgcaccctgcccactttccaggtggatatcatatccatttccttcacctacttatttcatcactcttatgaatccactttct

SEQ ID NO: 16320 - DNA, 873 bp, Gossypium hirsutum
  Clone ID: GOSHI-09MAY01-C28225_1
gcccacgcaaccttgctctcttctgcacctgcaatacaaaaacaaatcgaaagggcatccccgtgcttttgctcccttacttggcagccatgattattccagagaagaatcgcagagaaatctgcaaatacctatttcaagagggagtttgctatgcaaagaaggattacaatcttgcaaagcaccccgagatcgatgtacccaatttgcaggtcattaaactgatgcagagcttcaagtccaaggaatatgtccgcgagacttttgcttggatgcactactactggtaccttactaatgatggaattgagtttctcagaacttaccttaatcttccatccgaaattgttcctgctactttaaagaaatctgcaaggccaccgggtaggctaggcggcccacctggtgatcgcgctcggggtcctcctcgctttgaaggagaccgaccaaggtttggtgacagagatgggtaccgtggaggtcctcgtgggggtgactttgttggtgataagggaggtgccccagcagatttccaaccatcattcaggggccctggtggaaggcctgcctttggtcgtggaggtggaggttacagtgcagctccatctggttcgggttcgggttttgcttgaagccaatgcttatctttgcctggttctttttaaagcatagtatttaaaaatcttagagctaattcctattttgtagccgggttcaatgttgggcttgtgaaatctataattttgcttggagttttgtggaaatggaacccttgttgcccccttttttccgttaatttagctattatatagatattgtgacccttgttcaagcgtaaattttatatatcaacctttgccattttctattgat

SEQ ID NO: 16321 - DNA, 407 bp, Gossypium hirsutum
  Clone ID: LIB3146-058-Q1-K1-G7
ctagattaattctcatttcattgtgactagttttattatgtacacacttgttgatgacaaaatgaagttagtttttatttttatctttaaatttatgctgttaagaagcacttaacagagttaggatttttagttttagttttagttttgcccatgtttattttgatacctcaaagcagatctcagcagattattgtctcgtgtttctcattgtaaattgcttgtgactttatagagggagtttgctatgcaaagaaggattacaatcttgcgaagcaccccgagatcgatgtacccaatttgcaggtcattaaactgatgcagagcttcaagtccaaggaatatgttcgcgagacttttgcttggatgcactactactggtaccttactaatgatggaattgagtt

SEQ ID NO: 16322 - DNA, 458 bp, Gossypium hirsutum
  Clone ID: uC-gsronu33B106h06b2
acatattctttatgaccagaaaaacaaaaaacaaaaaagggggggcctaaaaaagcttttgctaggttactagaaaaaacaagataattacagagaagaaccggagaggaatctgctaatacccatttcaagagggcgcttgctatgcaccagaaagattgcgatcttgcgaagcacccctagatcgatgtacccaatttgcaggtcattaaactgatgcacagctccaagtccaaggaatatgtccgcgagacttttgcttggatgcactactactggtaccttactaacgatggaattgagtttctcagaacttaccttaatctttcatccgaaattgttcctgctactctaaagaaatctgcacggcccccggggaggctaggtaggccacctggggatcgccctcggggtcctcctcactacgaaggagaccgaccaatgcttggcgacagaca

SEQ ID NO: 16323 - DNA, 375 bp, Gossypium hirsutum
  Clone ID: LIB3165-031-P1-K1-C10
ccgctgttccggctcctgcatgaaaaccgtaaaaggacttatttcacctttgctgttcacttcgtacccatgattattccggagaagaaccgtatagaaatctgcaaatactttttccaagagggagtttgccatgcaaagaaagattacaatcttgcaaaacacccggagatcggtttgccgaatttgcaggtgattaagctgatgcaaagcttcaagtccaaggaatatgtccgcgagacatttgcttggatgcactattactggtaccttactaatgatgggattgagtttctaagaacttacctcaatcttccatcagaaattgtgcctgctactttgaagaaatcaacaaaaccccctggtaggctaggc

SEQ ID NO: 16324 - DNA, 689 bp, Gossypium hirsutum
  Clone ID: GOSHI-09MAY01-C29595_1
ttttgtattgtaaaccctttgccaacgccgtcgcagtactctctgaaccgatggcggaccaatctcctgcggatcagaccccaccgttctccggcatgcagtctctctccgtcgattctcaacctccctcctcctcttcaactccacagatgagtttagaagaaaagtttaagattataagaagtgtacgggaagaatgtattcaagaggatgaactgctaaatcttctaaatcacaaacctgaacccatttgctatgatggcttcgagccttctggcagaatgcacattgctcagggagttatgaaggcaataaatgttaacaaactgacctccgctgggtgtagagtaaaaatctggattgcagattggtttgcacagctaaacaataaaatgggtggtgacttgaagaaaatcaaagtagttggacagtatttgattgaaatctggaaggcagttggcatggacctgaatgaaaaggttgaattcttgtggtcttcagatgaaattaactccagggcatcagagtattggccacttgtgatggatatagctcgcagaaacaagctgcccaggataatgaggtgttgtcaaattatgggccgtagtgagcaagatgagttgtcagctgcccaaattctttacccatgcatgcagtgtgctgacatatttttcctcaaggcggacatt

SEQ ID NO: 16325 - DNA, 507 bp, Gossypium hirsutum
  Clone ID: GOSHI-09MAY01-C29105_1
gatagattttcctcccgttctgatcgagaatcaagaattagcaatcattctgatcatccaagactagcaagtgaccttagtaggtcaaaagactattcacagaatgctgaaaaatattctcgtgatagatatgatggttctggacataggagcagggacaaggggaaagaatcaccatttctagagcgttataaggataaggatttgtcttttgacagggttggctctggtaggagacatggcaaatctctttctgaagagatggatagagatcgaaggaggtgggacagagatggtcgagatgaaaaagtggactaccatagaagctggagagataaaaaagccgatcacacttcttatgaagaatccaggggccattggaatgattcatcttctgtgagggagagggacaatgataaacgtccctctaaagatggttacaggagtgggcacgaggatatggatggcctgaagccttcaaagaaggagagaatgaaatatgatgaa

SEQ ID NO: 16326 - DNA, 328 bp, Gossypium hirsutum
  Clone ID: LIB3048-043-Q1-L1-E7
gaccttagatggtcaaaagactattcacagaatgctcagaaatattctcgtgatagatatgatggttctggacataggagcatggacaagggcaaagaatcaccatttctagagccttataaggataagcatttgtctattgacaggaatggctctgataggatacatggcaaaactatatctgaagagatggattgcgatcctacgaagtgggacagagatggttctcatgaaaaagtgctctaccacataagctctaaacataactaagcacgatcacactatctcatggagattctcatcaacacattgaattaccaattttcta

SEQ ID NO: 16327 - DNA, 1176 bp, Gossypium hirsutum
  Clone ID: GOSHI-09MAY01-C29085_1
attgtatttacgatcggtgggtataaatgactggcatgaagtccatgtgaaaagggtcgtagatgagcctatctttgatgtgcaagagtgcaaacccgggaatctgaatagggtcatccagcaaccatcttttcctgttaatttggatttcttacgaaagaggaaaccgtctgatgatataaacatcgaacacaggatctacacttgtgagttcctccaatgtccttatagtgaactccaattgggttttcttgaccggactgccagggacaatcatcaactaacttgtccacatagaaactcgtctgcagagttcggtggttcgaattttaacataaatgatgtgaaaccggtcattttccctccaccatttgcgcaaccgaagccggcagcaccgtctattacttctgtctcaacaccattcgatctatcagggctcggagttccggaagatggacagaaaatgatcagtgacctcatgtcgatatacgacaacaatgttcaagccaacaagaatgcgagtcccattaaaaatccagtcacggaaggtcaaaatcttcttcagccgaaaacccaacagcaacaggacgagttcttccgtggtcaaggcctttccttcttcaatgagtccaacataccggctaataaccagattttaccacaaggggaagctcaattcgaccggttgaagacctcgaattctccattcgagaccacctacaacaacaacaacaacggtttcaaactgatgttcggctctccattcgatttgtcttcatttgattacaatgatgatctccaagctgttggagtggacgccatgccaaaacaagatgtctcaatctggttctagtaacaatctcaaggctgaaactgaaaccgtacccgactcaaccctactgagccccgtgtcgtgtgtttcatcgttatcgtattttttcaagcttgtccgtgtagtaatagaagttttaacaagttttagcaggtttatcatatatggggaactgattttatacatagaatgtgactttgtcttataaataagttaggtgtctggttttttgttctttcatgttcactgtttttttatcagttttctaccattattattacatgttggggtaggaatctgataatgagtgttgttttgtcttgtaatgaagtcattgggggggg

SEQ ID NO: 16328 - DNA, 405 bp, Gossypium hirsutum
  unsure (1)..(405): unsure at all n locations
  Clone ID: uC-gsronu33B170a11b1
cgcggacattattgctgggtcgtcctacgcgtccggggtanatagcgaactccaactggcgaagcatgacggggctgtctggggcaaacattggcgaacttgatgacataaaaacttggctgtacagggcggtggttcgaattttaacataaacgacgtcgaaacggccagatgccctgcaccatgtgcgcaactgaagcccgcagcaccgtttactacttctgtctagacaccggtcgatctatcaagactcggatgtccagaagatggacagaaaatgatcagtaacctcatggcgatatacgacaacaatgttcaagccaacaagaatgcgagtcccattaaaaatccagttacggaaggtcaaaattttctttaagcgaaaacccaacagtaacaggacga

SEQ ID NO: 16329 - DNA, 675 bp, Gossypium hirsutum
  Clone ID: GOSHI-09MAY01-C29075_1
gaagcctcaaaaagaaagggtgttcaaagaccagagaagagaagagaaatggtgggtccagttaggccacagttcgtcctctttggttcatccattgttcaacttagtttcagcaatggtggatggggtgctattcttgctgacgtctatgcccgcaaagccgacatacttttacgaggatatttcggatggaattcacgacgtgccatacaggttctcgatcatgttttcccaaaggatgctgctacacagcctgaattgataataacttactcttggcggtaatgactcgatgggggctcatccatctggccctggcccccatgttccactttctgaattttccgggccctggacgcttttgtatttttgtcggggtttccaatttaaccgtttcaattctttcatgaccttcgtctatgaataaagatcttataatctcctatgtacttttacctaccttttactacaaccgtttattcacaactatactcttctattcaataattctcctcatcttgctctaatgttcttactttcttttttttatatccataataaattcacaaccttttttttaataagctttcttcatcttattgggcaccatttgttgtcatttattatatcacctaatactttgtcttacttttatgtttaatcctccctattccc

SEQ ID NO: 16330 - DNA, 594 bp, Gossypium hirsutum
  unsure (1)..(594): unsure at all n locations
  Clone ID: uC-gsronu33b112e10b1
tcccacgcgtccgatagtctccaatttgatctccattgacattctaagggattgtcaaagagaaacctcaaaaagaaagggtgttcaaagagaagagaagagaaatggtgggtccagttaggccacagttcgtcctctttggttcatccattgttcaacttagtttcagcaatggtggatggggtgctattcttgctgacgtctatgcccgcaaagccgacatacttttacgaggatatttcggatggaattcacgacgtgccatacaggttctcgatcatgttttcccaaaggatgcttctagacagcctgaattgataataacttattttggcggtaatgactcgatgggggctcatccatctggccttggcccccatgttccacttcctgaatatatcgagaacatgaagcaaatagtgaattatctgaagggcctttcagattcgacgcgtgtcatatttcttactagtcctccggtcaatgaagaaagagtaaataaataccgcagtgaacattntagccaccttgtttcgacatacgagttatgccagacatatgctgatgcttgtgtaaagctctgccaggaactgg

SEQ ID NO: 16331 - DNA, 745 bp, Gossypium hirsutum
  Clone ID: GOSHI-09MAY01-C29255_1
ttcttcattgcaatattcttatagaatcaaacttcaaaatggagtttactttagtagctcttacttctctcatagccttagccttggtccatccttcccatgcccaaaactcaccacaagactacctagtccttccctcccaagcccaagactcacaacaagactacctagccttgggaggggactcaccacaagactacctcaatgctcacaatgcagctcgagcagccgtcggtgttggccctatgatttgggacaagaccgtggctgcctatgcacagaactacgctaatcaacgctattacgactgcaaccttattcactccggtggaccttatggtgagaatcttgcctggagtagcgctgacttttcaggcactagtgctgtaagaatgtgggttagtgagagggtaaactacaattacaacttcaacaggtgtgcagcagcgcaggggggcgggctttatactagatggtttggcgcactcgattcgtctggggtgtgctaggtgagtgcaacactggtggaactttcattacttgcaactatgctcttgcaggcattatcatcggtcaaagacctttacaaaaagttaatttgctaaacatcttcaaatcactaatatctccataaaatggctaattatgtagctataactcatggcatattaggagaaatgatgttattgtcatactgataatattatgaattttattatgtttttaggacgatactaatgccgcc

SEQ ID NO: 16332 - DNA, 575 bp, Gossypium hirsutum
  unsure (1)..(575): unsure at all n locations
  Clone ID: AI054678.1
attgcaatattcttatagaatcaaacttcaaatggagtttactttagtagctcttacttctctcatagccttagtcttggtccatccttcccatgcccaaaactcaccataagactacttagtccttccctcccaagcccaagactcacaacaagactacctagccttgggagggggactcaccacaagactacctcaatgctcacaatgcagctcagcaccgnnnngngtgttggccctatgatttgnggataacaccgtggctgcctatgcacagaactacgctaatcaacgctattacgactgcaacctatatttcccggtggccttatggtgagaatcttgctggagnncgctgctttttcggcactttgctgaaaaatgtggttagganaaggggtaaactccaatacaattcacaggtgtgccacagcaagtttggggcatattnaagtgggttggccactcgatccggggggtctagtaagggcacactgggactttatactgcactatctctgaggcattcatggcaagacctctaaagtatttgtaaatctccaatactaattttg

SEQ ID NO: 16333 - DNA, 613 bp, Gossypium hirsutum
  Clone ID: GOSHI-09MAY01-C29235_1
cttcactcttcctctcttccatatattctccctttcattttgtcctttgcttttcacgaaatcttttgggttcttccttttttgttgtttcagttccttaatcttttgggtttccaaaaaaaaaaagaaaaaaaagcagagtcctctgtaaattcctctggttggaattttgaactctctcctcttacattaacattaacaaccaaacacttgttgggttttgagattttcttttaattaccttaatttccaaaaatggtgagtttcattgaagaaagaccaaagaacatcgccgccggtcaaaacatggtctctgatccaaaatcagcacagaaaccaccggcaccacctggttttatatccatttccagaaagaaattgcttcaaaaccttgaaatcaatgccggagctagagttaattcatgggtcgattccatgagagcttcttcttcaactcatatgaaatcagcaccgtccattgctgatgatcaaggttcctggaatctaaaccatccatcagcactagatatgttcgaacagatattcgatgcatcaaaagggaaacaaatcgtaatgtttctttgataccaatggcctctttcaccaatcgtag

SEQ ID NO: 16334 - DNA, 616 bp, Gossypium hirsutum
  Clone ID: GOSHI-09MAY01-C24845_1
cgtccgaataaaaaaaacggggggggggggggggggcctataaaaaaaaaaccaaaatctaagtttctttttctacaagtttcgtaatgtctacttttggtgccgccgctgccaatcataaccctaataaatcgtttgaggttgctcaaccacccagtgattctatttcagggggggggtgagttttttttcaatttcttgattgctacttcatgggataatcaggtgagatgttgggaaaccccccggaatggtacagctgttgctagtacgccaaaggcatcaattactcatgatcagccggttttgtgctcaacctggaaggatgatgggatgacagtcttttctggaggctgtgacaagcaggtcaaaatgtggcctttattatctggtggtcaaccaatgacagttgccatgcatgatgcccctattaaagaagttgcttggatcccagaaatgaacctgttagctacaggaagctgggacaagacattaaaatattgggatacaaggcaggcaaacccagtgcatactcaacaacttcctgatcgctgctatgcactcacagtgaaatatccattgatggttgttggtactgcagataggaatctgatag

SEQ ID NO: 16335 - DNA, 862 bp, Gossypium hirsutum
  Clone ID: GOSHI-09MAY01-C24875_1
cagagaagttgtggtttgagatgatgaagactggttgcgaattagatgttgcttcttataacgttaggatttcgaattttcaaggcggagagccggagaaagtgaaggagttgattgacgatatgagcaccctggggttgaaaccggataccattagttataattatctgatgacttgtttttgtaagagaggcatgttggatgaagctaagaaggtatatgaaggattggaaggtaatgggtgtaatccaaatgcggctacttttcggacgctggtgttttatttatgtttaaatggattgtatgagcaaggttataaggtgttcaaagagagtgtgaggttgcataagattcctgattttaacactttgaagcatttggtggagggattggtgatgaaaaagaagatcaaggatgcgaaagggttaatcaggacggtaaaagaagacgtttcctcccaactttttgatagcatggaagaagctcgaggaagaacttggtttggtttctggtaatgctgaagctcgtgaggctaaagaatcaacaggttagaattgagattttagctgttattttgctggtggtttgagttagctgctttatattcttttgcagctaagaatgattagatgaactatgcaatccaccatagaagtttgaatgatgataatattttttttcttagatagttttacaaaaggtcaattctgcttaattgtaaggattaatttgtgttactcttttgctatgtttttgtttcattgttctacttgttttggaatgaaaagaaaattctttttaaaatcaaaattattttccatttaatttgttaaaaatttttatttttttctcaattcctttt

SEQ ID NO: 16336 - DNA, 612 bp, Gossypium hirsutum
  Clone ID: GOSHI-09MAY01-C24865_1
ggaaaaaagaaccaaaatcctctgctagggtttcttcaaccccaaccctatgcgccgccgatcaaacctagcgcccatgccccgatttcgacggagagggctcctatttgacgattccgacgaccaggtaagctttccctctttcttttatgttattttaaacaaaataaaatgaaaataaaagaaaataaaacatatgaaaataaaaatggatactgaaaaacgaaaagaaaaacctttgtaaaaaaaacacttcgatatatgtattttctattcccttttacaccgaaaaaaccccgatttgcactcgtattgaattttctctctgatttttcctctcccccattacagtacttgaaatcggtcttttatagccgaaatagaaaagagaaaaaaaaaagaaaaaaaatctaaaaaaaatctgttctgttgtttgttggcccgatttttgctcttctgtttgtgtgtgttgctgcaggtacaaggcgaggcacgcgtggaggcgcaactcgcgcgaatggcggctactgttgcggtgggggtggtgcgcatggttgctgtgcacgcaaggaaaactgctaggtttttcaatttttgggatgatttgggtct

SEQ ID NO: 16337 - DNA, 409 bp, Gossypium hirsutum
  Clone ID: GOSHI-09MAY01-C24805_1
cgcctaactaatgcccagtcagaaaatactgaaacctaatctggcatctggatatcatttctttttttcttttgatgggtcagtttattgggaaagttgttctttcaaaaactgggtcatctttttttcttatactttcctcttagttcttttcttccccattcctttctcaatctggttcatgtctcctttcaatcctttgttgagtttcagcataccccgggacactcattaccaggtacatctcttcctttctttttagagtttttgttgccaaaatatgcacaagagcgtttgcggatcttggtgtgtgtttgaacatgaaacttttggatctgcttcgtttcttgtgaaaatcatatatatatgctccaatatgtgatcgatcttgactttttgttgtacattt

SEQ ID NO: 16338 - DNA, 759 bp, Gossypium hirsutum
  Clone ID: GOSHI-09MAY01-C24825_1
ggcgattgatttggaggacataaagttccatcagtgtgtacgtctggcccgatttgaaaatgaccgaactatatctttcatacctcctgatggttcctttgatctcatgacatacagactcagcactcaggtaaaaccgctcatctgggtggaagctcaagttgaaaaacattcaagaagccgtgttgagattatggtaaaggccaggagtcagttcaaggagcgtagtactgctacgaatgttgagattgcggtgcctgtgcctgctgatgcttccagtccaaatgttcggacatcaatgggatctgcagcttatgcacctgaaaatgatgcattaatgtggaaaataagatcttttcctggtggaaaggagtatatgttgagggccgagtttactcttcctagcataacagatgaagaggcaactccagagagaaaagctcctattcgtgtgaagtttgagattccatattttaccgtttctgggatacaggttcgatatctgaagatcattgagaaaagtggctaccaggctcttccatgggtacgatatattacaatggctggcgagtatgaactaagacttatttaatgccaattcctttaatattgagagatccagttcaccgcatttttcgagagttagaatggacataaggatacaaggaaagcggttgataaacaaaagcccttgtgaagagcatgaaagagtggttcctctaaaaaaaaaaaagcacttttctgcttcgtatttataat

SEQ ID NO: 16339 - DNA, 657 bp, Gossypium hirsutum
  Clone ID: GOSHI-09MAY01-C24585_1
caattgacgtgtgtaatgaagttcggtggatcctcagtggcttccgctgagcgaatgagagaggttgctgaccttatactcagtttccccaatgaaagaccagtcattgtcctttctgccatgggaaagactaccaataaacttttgctggcccggagaaaaagctgttagctgtggtgtcactaacgtagatgctatagaagagttgaactttataaaagacctgcattataggacggctgatgagcttggagtggaaaggtcgattgttgatggtcacctagaagtattggagcagctcttaaagggaattgctatgatgaaagagttaacattacgaacaaaagactatttagtttcgtttggagagtgcatgtctacaaggatttttgcagcatatttgaataaaattggtgttaaggcccgtcaatatgacgcctttgaaatcggtttcattaccactgatgacttcacaaatgctgatattttggaagcaacttacccagctgttgcaaaaagattaaatgatgattggatcagtgatcctgcaatcccaattgtcactggattccttggaaaggggtggagatcttctgcaattaccactttaggaaggggtggtagtgatttgacagccacaaccatcggaaaagcatt

SEQ ID NO: 16340 - DNA, 791 bp, Gossypium hirsutum
  Clone ID: GOSHI-09MAY01-C24545_1
caattatcatcttccatggaatcccagaatctcaaacaccgttccagggatgaccctcgttttgccaccaccacctccaacgaaaagaacagagcaaacaggcgagaaaaaagaatggcaatggccaaacgtgggctaagatcactagtcatagcagtttccttccctttgtctctcaccttgttaaacatatacttgtttggttcaggtcgtggttacgcctctttagccaaacctttctggttccctcctttgtggcttttacatacaggttgcttggcttcgagcttcgtgatggggctgtcggcttggtttgtttgggttgaaggtgggttccacgttaaaccgacggctttgtctctttatttgggttacttaggattgagtatggcttggcatccgactgtgctttggatgggagctagctgggctgggttgcttgtgagtttggcgatggttgggaccttggtcgggtgttcaagagattttggaaaggtgaatccgattgctggtaactcggttatgccttgtttggcttgggctgcgtttttggcgactgtaaatctaaaacttgtcttcctttgaagcatataccaccatcttttgttctgcaagaaatagtattgttttttttttccctcttatgaataagatcaagttgttggtttgttcattagacagcttagaaagaaacacatggccttttgattttcctgttgcttcttacattatcatggttttgttgtacatattgtccttttagcatgtttttcaatggaatgttttgtagt

SEQ ID NO: 16341 - DNA, 452 bp, Gossypium hirsutum
  Clone ID: GOSHI-09MAY01-C24465_1
tcgtccacgcgttcgtccacgcgttcgtccacgcgttcgcaaataccatggtctaataaggaaccggtcggattcgttgataattttttgaaagatttcttcgaaaaggtttcattaactcctcatttatatcgagtagaccttgttgttgcgagaattcttaattcatgagttgtagggagggacttatgtcaccacaaacagagactaaagcaagtgttggattcaaagctggtgttaaagagtataaattgacttattatactcctgaatatgaagtcaaagatactgatatcttggcagccttccgagtaactcctcaacccggagttccgcctgaggaagcaggggccgcggtagctgctgaatcttctactggtacatggacaaccgtgtggaccgatgggcttaccagccttgatcgttacaaagggcgatgctacgacattgag

SEQ ID NO: 16342 - DNA, 763 bp, Gossypium hirsutum
  Clone ID: GOSHI-09MAY01-C24785_1
aaatggacctaaaaacgatgagattatagttgatcacagggtctcttttgaattgagcggcgaagatgttgcacgctgtctgaaaaacaaatcattggtatcaagcagaaccatgccggattatgaatatccaaaggacttggtggcgcaaggcaggatagaaaaagatgaaaaggtttcaggagaagctgaagaggaccattgttatcaaaagcatcgttcagttactcttgggtcaattaaagaattcaactttgactccggaaaaggagaagcttccgagaagcccaccgtcaggtccgagtggtgggctaacgaaaaggttgccggaaaggaagctaggccaggtaacaattggactttcttccctatgttacagccggaggtcagttgattttgtaactatgcaacttagtttcacctccatgcataaaagtcataaaacttgtttaataggtttgcaacactaaaccctgtagcgtttcagttgttttatctgaagttcgtactttctctcaatagtctttggtataattagatggtgaagtgaactaaaagactagttttcagaggtcgaaagagtctttattccttatgacctaaaaggtgattccagtgagggaatatttcatagggatcaaactatgttggtactgatagagcattcttttaatattcatttacctaatgttataccatataaaaaaaaccagtatttacatgtaggttgattattattttcttcttttaaatatgtaatagt

SEQ ID NO: 16343 - DNA, 708 bp, Gossypium hirsutum
  Clone ID: GOSHI-09MAY01-C24755_1
cccttgtattcggaactgcaaaaaccgagttatacaaactggtttgaaagctcacttagaagttttcaagacaagagatcgtggttggggtctacggtcatgggaccctattcgagcaggtacatttatttgtgaatatgcaggtgaagttattgatgaaaccaaggcaaggcaagaaagtggagatggtgaaagcgagtatgtttttcatacgaaccgtctctacgaatccttcaagtataatttcggggccgaaagtagcgaagatttcgatatcccatctcccgtaatcataagttcaaagaacagtggaaatgtagctagatttatgaaccatagttgcaccccaaatgttttctggcagccagtgatgtatgaacataaccacgaagcgtttctccatattgctttcttcgcaaagaaacacatccctcctatgacagagttgactttcaattacggtattccgcaatcagaggagacccaacctgacaaccccccggaaaacggaaggaagaaatgcttatgcggatcgctgaaatgccgaggttatttctattgagcttcggttgcgaactttttggcctctggaaggaggtatcggatctagcacagctttgtctaaaaatcatgcaactctcaatagtgcattatatatttaaatgtttatagcttgttgtcatgctatatggctgccattaaattgca

SEQ ID NO: 16344 - DNA, 1061 bp, Gossypium hirsutum
  Clone ID: GOSHI-09MAY01-C24725_1
aacaaattgtcaaaagttattcaaccttctacagggcgagtgaaaggtggagctgatggcactcccggaatgcgacagagtcgttcagatggttctctcgatacaatgcctcgaagacctgttgatcctgaagaagaacttcgatggatgtctcaagaagttcgtggttatgtcgaagctgtattgaacagtttagctgccaatgtccccaaggctgttgttctttgccaagtagagaaagctaaagcccacgcgcccgcccacgcgtccagctccgtcagtgctcaaagcacgaataggattgaggagctacttcaagaggatcaaaatgtaaagcgtagaagggagcgtttccagaagcagtcatcacttctttcaaaattaacgcgccaacttagcatacacgacaatcgagctgcttctgcttctgattggtctgacagtggcgctggggcagaaagtagcccgagaacaagtggtggctcagttggtgacgactggaggactgcatttgatgcagctgctgctaacggccctgtggattacaggaggtctggctctaacggtccaacacaaaacggtgacgtgaattctcgatcagggtccaacagtcgtcgtacccctaaccgtatgccacccgcaccaccacaatctggctccggttacaaatattaatggtcataattcttaattatgaaaagcctacttcatgatttaagcattttatcttttttcaaaattctctacaaatagcccattaaaacaggagacttgaccgagacgagacagacgtgtgtgtgtaaataggaccatagttgctatatttttcaagttcaacggctgtgtcctaactttggatctaatttttctactcaagttttgtcttatttttattaatgttatgttttttttttcatttttattcttggttataattttcctattttaaaatccatccttccacggatttatttgattgtattgactattattgatgctaaaaaattgtattcggatttaaagaccgttcattgggtggaggatattctattgtatttctc

SEQ ID NO: 16345 - DNA, 463 bp, Gossypium hirsutum
  unsure (1)..(463): unsure at all n locations
  Clone ID: LIB3146-004-P1-K1-C3
cccacgcgtncgtnttaattatgaaaagcctacttcatgatttaagcattttatcttttgtgagagagattctctacaaatagcccattaaaacaggagacttgaccgagacgagacagacgtgtgtgtgtaaataggaccatagttgctatatttttcaagttcaacggctgtgtcctaactttggatctaatttttctactcaagttttgtcttatttttattaaaaaaaaagtatgataggctaaaggctttgtaatagagagaggaatcggtagtatcaaatatttgaattcatataccgtgtatttttttctcatttttagtttcttctcttataggatactcttatatttttttttgtgtttaattattttatggtggatgtctttttattctctttttgttattatttttttatattattttcttggtggggggtgctttttattatttttttttt

SEQ ID NO: 16346 - DNA, 803 bp, Gossypium hirsutum
  Clone ID: GOSHI-09MAY01-C24695_1
cccacgcgtccgcccacgcgtccgcccacgcgtccgttttctcttttggccttggaattgatctcaatagttcagagcaatatctacccgtatcaatggcggagcaagcggtgcaaaagccacttaacagttcatctgagtctgaaaatggtggaatattggagaaaaccccgccactccaggaccagaaagttgatgagaatattcaagaagattcaggcaaagatttgaaaaaggcgtgcacccctgataggcttaaagtccccaaggcattcaagttccctgaaaggtatagaagtccaaccgattctatgatgtcgcctgttacaaaaggtcttcttgcaagaaacaggaaagctggaggttcactcttaccacctagtataaatcaaactaagatccatgaattgcgtgttcaagatgttggtctttctcacaactgaacaagctaaaaccagatggatttgtctgaaatgaaatggtgttaatgtcgatataaattacaagcaaaaagaatgctgtttatgggatgtaatctctcttttttttttggatgcgaaatcttgttctaataataacatatttttggtagctgattatccatcaaaaaaaaaaaaaagagagaactatggaagataagattgaaaaaattaacaatgagaacatgttagagacagctgttggtggaagttgtatatccaagagcaaaacgaaaatttacactgggtttgaaaatgtgggggctgcttttttaatggatcatttttattatagggggttatgggaattaacaagctttttta

SEQ ID NO: 16347 - DNA, 449 bp, Gossypium hirsutum
  Clone ID: LIB3146-003-P1-K1-C6
agcagatctcagcatcagttgtctccaattcctggaggtagcagcagtcgcccatgaccagttgatgtggataatcatcaaggaggcttcaatgctacttattctactgacatcattagatcaaacaatgctccaggtcaaggtgttcgcatgcaatttaaaccaacaacaggaaagaacttgatttctgagactactattgataaaaatatttttgaccctcacacaccctcatcttcatttgcacctgctggcacctcaaaaagaaatggtcagaaatcaacagcgccccctgacgctgctaattctggccatggacagggaaacaaaatcagatcttctagtagtttgttttcatcattgcagcgcatttcttctgccaaatgatgaaaatgtgctgtggtgagggaagattagggaaatgataattcagggtgcaattgaagacc

SEQ ID NO: 16348 - DNA, 410 bp, Gossypium hirsutum
  unsure (1)..(410): unsure at all n locations
  Clone ID: LIB3829-024-Q6-K6-F1
cctgctggcacctcaaaagggggggggggggggtgagacagcgcaacactaacgctgcgtaatgtctggccatggnacaggggagacagggtcagatcttctagtagtttgttttcatcattgcagcgcatttcttctgccaaatgattttttttttctgnggngagggaagattagggggggggggggggggggtgcatttgaagaccatacgacntatatttatctacatgttaactaaggccagatctagtaaaggctgcttaatgctgaaggctgaacactgaacacactagttttggtgatatcttgcctagtgcttggtcctgcaactgtgtacagtgtatgtgatgtgaagttgagtggtacgttgggtttggacttggttttggggattgagtgagtatgcc

SEQ ID NO: 16349 - DNA, 762 bp, Gossypium hirsutum
  Clone ID: GOSHI-09MAY01-C24025_1
cggacgcgtggtgaaaatatcactttttggtacccgaaggctcgatttttgctatttttgccaattaaaccctagaactctttggttccaacaatgatccgattcgttttgttgcaaaacaggcaaggcaagactcgtttagccaaatactatgttcccctcgaagattccgagaaacacaaggtcgaatacgaggttcatcgattggtggttaatagagatccaaaatttaccaatttcgttgagtttcgtacgcataaggtaatttacaggcggtatgccggattgttcttctccttgtgtgttgacataaccgataacgagttggcatacttggaatgcatccatttatttgtggagatattggatcatttcttcagcaatgtttgtgagcttgacttggttttcaattttcacaaggtctatctgatactcgatgaattcattcttgctggagagcttcaagaaacaagcaaaaaggctataatagagagaatgggagagctggagaagctagagtaaagatgattctgcatgaaacagagattagtgcaatttgtgttgaattttctccatttgttgcttttctttttctgtgtgtgatattattaatttgtgtgcaatttgaaaactgaatacatggtgtccctttactcctgttttcctttgctacaatattgactaccaaaaatagagctgtgggacagtttttttaaggattgttgatatatatttgaagttaaaagtatatcaacaatcctt

SEQ ID NO: 16350 - DNA, 411 bp, Gossypium hirsutum
  Clone ID: uC-gsronu33B144b03b1
cctactcgtccgccggaatgtcctcaatgtgggagacgccaccccggagagtgtagagcaggtgaaaatgtttgtttcagatgtggagcatccgatcactttattcgggattgtcctgaaacaactaaaagagaagaaataatgagtgcgagatcaggtaatgcttctaccagaggtagaccgcagagaaacccaggagtgggggcaagtaataggggtgcattcaaagattcagcggttagatcagatgttagagcacctgcaagatcatatgctattcgagcacgtgaagaggcgtcctctcctgatgtaattgtggatcaagaagtacgaaactcgaggttagacaaagggaagaataacagttgaagactaagttggtgaatttggctataattggtaccgagtatt

SEQ ID NO: 16351 - DNA, 274 bp, Gossypium hirsutum
  Clone ID: LIB3083-119-Q1-L1-E2
aacaaatgctaattttgtgcatatatatgaatgtgtagagccaggatcaattaatgcaataacagtagtatcatagagagaaaatgtacccgcaattacatcaggagaggacgcctcttcacgagctcgagtagcatatgatcttgcaggtgctctaacatctgatctaaccgctgaatctttgaatgcacccctattacttgcccccactcctgggtttctctgcggtctacctctggtaggagcattacctgatctcgcactcgttatttct

SEQ ID NO: 16352 - DNA, 619 bp, Gossypium hirsutum
  Clone ID: GOSHI-09MAY01-C24335_1
gtacgaattccaatttcccgatgtatcttcaacaactgacttcaacgtcgtcgtgtctggccgtccgatgtacagaccttcatatacccgaacgttggtcaacctggtcaccccgtagtccctcccgcaccccggacctcctcttccccttcctcttccgccggattgggcattagagttgttttgaaaccagattatcgaattactcctctgcctcagttttcgccgcaagttggggatattcgtcgaagcaatttccagtttgatttccagtttgagaggaaaatcttggctcaaccagatgcggaattcatgaatttgagccaacttgacttggaaaatcatccttcggaacctacccaatcaactccttcctccggtgcaaattcggattctgtgttaaacaaatacattgcctctggtctcagccaagacgctgtcatcatcgctgttgcaaattatggagacagtccaaccaaggttcgggaatttgtcaatggttacaacctactgcgagaaatggggttctcagcaaacaacgtcgctgatgctttgctcgtgtatgacaatgatactgacaaagcattggcacatttcctgaacagctcatcacgaggat

SEQ ID NO: 16353 - DNA, 651 bp, Gossypium hirsutum
  Clone ID: GOSHI-09MAY01-C24325_1
aaagaaacaaaccccttttattttgaaaaaaaaaatccgaagcccctttttccaaagacaagggggaaatgtgcaaatccaaccctagggcctgcctgaaaactttgtttgcaaaagccagcgccctctatttccagctccgtttctccaacagttccgttcccaccgccgcaccgtcgatttccacctcagtttctccgtccatggctgcaacggactctcctctaacgaccaaggtttgtatcattgggagtggccccgccgctcacacggccgctatctacgctgctcgtgctgagctcaagcctattctttttgagggatggatggctaacgatattgcgcctggtggtcagcttaccaccacttccgacgtcgagaacttccctggattcccggatggtatcatgggttcggagcttatggagcggtgccggaaccagtcgcttcggtttggtactactatctttaccgaaactgttgacaaggttgatttttcttcgtctccgtataagatcttcgccgattcgaaaactgttttggctgactcggttattgtggccactggagccgtagcaaagcggcttaatttccccggttcaggggatgggttagggggggtttggaacaggggaatctcggcgtgcgctg

SEQ ID NO: 16354 - DNA, 476 bp, Gossypium hirsutum
  Clone ID: uC-gsronu33B016a03b1
cccactcgttcgcggacgcgtgggtttttttttttttgaaacaaatataaattaacttattttttcatccaattatttcactgatttgtaaggtacataatttatggattggaaggcgagaaggatatactaaagggtagagggtggttgtattatgataaattggcgaaatcagggtggaaaggtaaggcagagattatggagacggaaggtgaggatcatgtgttccatatctttaatcctgattgcgacaacgccaaccgcttgatcaaacgtttggcttctttcttcaaccaagggaagcttccttttcaatggaaatgtgaaagcgaggtgcttggttagtaagtaaactaaaaaaagaagggtgagattgagatataacctattgtcaacatgccctgcatctgttggtatttcctttccattatacaatttgtcttaactgaatgctgccttaagaaattttcatttta

SEQ ID NO: 16355 - DNA, 404 bp, Gossypium hirsutum
  unsure (1)..(404): unsure at all n locations
  Clone ID: LIB3083-114-Q1-L1-F8
tctgccttacctttccaccctgatttcaccaatttatcataatacaaccaccctctaccctttagtatatccttctctgcaacaattataaggattctatcacatgccaagcctgcaagatcagcactctcaccatccacaaacggattgataagcggatcatcgcaccctttgtcggtgggacaaacgtataaccaccacttatccactaattctttcctggaccgatcattaagctccggtccaatcgggctcgttccccaaaagttaggatggatcataccgataccaagaatcttcagctnttgacccaaattcgattccttgattcgtaaagccaagtgatgtgcaatattgcccccagcactatcaccagccaaaaacacctgttcgaacccaacata

SEQ ID NO: 16356 - DNA, 630 bp, Gossypium hirsutum
  Clone ID: AW187827.1
ataacacaaaacccctctcaactttgaatcaacttcttttttagaacaaaataaattgatttcttttttttgaaaaaaaaatgcagacaatgttaaaccttaatgcaacatatggtcttcctcttgctatttcaaccataactcaacattttatcttctccaaagagatggcagatcatgaacggaggacagaagccatgaaaaagcgaagatcgagcagcggtgtagccggcggtagcgatcggaggtttgaaaaagtgcttgaagagatcatggaaggcgaggctgatgatgatggaggcagtgcttttcagtatctgtcgtgtagttgcctggtttgtactacagccaaagctgcatagtttttctttttaacgaagtaaaaacaaaaataaataaatacgaaaactactatttgtttttgcatgatttggctttgaattttctttttaagtgtttgtactttttatagatttgtaatttagtatttctacttttatttttacttgagattaaaatatgtttaagtccctcaaacttttataaatttgaaatttaatcctttctattttttagatttcaaaatttaaattctcctatttgaaagctaaaataatatttatttggaat

SEQ ID NO: 16357 - DNA, 317 bp, Gossypium hirsutum
  Clone ID: LIB3083-116-Q1-L1-A5
attttcttctcttctttttctgtttttttcttcttttcaaggcactgttcttatgatacttttttttttgagaaaaggatggcagatcatgaacggaggacagaagccatgaaaaagcgaagatcgagcagcggtgtagccggcggtagcgatcggaggtttgaaaaagtgcttgaagagatcatggaaggcgaggctgatgatgatggaggcagtgcttttcagtatctgtcgtgtagttgcctggtttgtactacagccaaagctgcatagtttttctttttaacgaagtaaaaacaaaaataaataaatacatg

SEQ ID NO: 16358 - DNA, 411 bp, Gossypium hirsutum
  Clone ID: GOSHI-09MAY01-C24225_1
gtaatgttcagcatttcccggggggggcattaagaaaaattgggatttagggtttagggatttcacataatttggattctggaaaatgtctcagactggaaaattgatgccgaatatcgaccaacaaagcacgaagatgctcaatctcactgttctccaaagaattgatgctttcattgaagagattttgatcactgctgctcacgtcaccttctacgaattcaacctcgatagtaatcaatggagtcgaaaagatgttgaaggatctctctttgttgttaagaggaatacacaaccttcggttccaggtcattgtaatgaatcgtcgttacacagataattttgtggagaatctattgggggatttcgagtacgaggttcaaggtccgtatttgttgtatcgaaatgctg

SEQ ID NO: 16359 - DNA, 394 bp, Gossypium hirsutum
  Clone ID: GOSHI-09MAY01-C25995_1
cagatatctcccttttgcagtactatttattcaagtgcgtcttaaattctgaaggctttgctcattattataaatttgttcatacaatgtctctaggcgtggaccctgcatgaaaataaccaacttttgagccttcttgatccaaaattagtggagtttgatgaagatgaagctctccgagtgataagagtagcacttttatgcattcaagcatcaccatcaatgcggccacccatgtcccgtgtcgttggtatgcttgcaggagatattgaagtgaccaatgttacaacaaaaccaagttatataactgactgggattttaaggatgtcacaggcacctttatggatgaatcgcaaacatccattccatctgaccattagcggcagcgacatc

SEQ ID NO: 16360 - DNA, 436 bp, Gossypium hirsutum
  Clone ID: GOSHI-09MAY01-C25925_1
ccgtttcgagaaaccacaagcatgatgtaccacccaaggggaatgtgggtgatggctttgagatgaaacctgttgatgtggaaatgggagagggcaatcactttgattgtgagttaagggaggaggtcaatcgtaagcgtaggagaccacctaaaatgaagggcagtgagaggagtgatcaatgtaatagcaaggtaaaggaaggtatgatccgtaagcgtggaagaccacccaagctgcaggctggtagtaagggtttgaagagtaggcttatagatgggagaaaaaagttgggtgggctaagaagaggcagaaaaaagttgagagggaggttgaaatctaacattcctagtacttcattgtcagagaagaaactgattgcataagattcaaatcttaagaggtttctatctgctaataaggatatatttgatga

SEQ ID NO: 16361 - DNA, 668 bp, Gossypium hirsutum
  Clone ID: GOSHI-09MAY01-C25855_1
cttagttcaaagagggtccaatcgtttcgaactataagagaagaagaagttgcagcaatgttgaatcatattgatatagcttcctcgtcatcagcccctgtaaatcttaaaaaactatcacttttgttagcgaaccacgttgtatgtcgcgttacatttggtaaaaaatacggtggcggaggtgacggtggtacgaacagattcgacagggtgttgcatgaagttcagcatctggtgggagaatttgttgtgtcggattactttccgtggatgtggtgggtgaataagttgaatggtatggaaacaagagttgaaaagaacttcgaagaacttgacaagttgtacgatgaagtaattgccgatcatgttgctccgacaagaactaaagctaaccatgaagacattgttgatgttcttcttcggttgcaaaaggatgcacgtcaacttatcactcttaacaatcagcaaatcaagggtgtcctcacggacatgttcatagcggggactgatacgacagcatcaagtctggtttggaccttcaccgaattgataagaaatccaccatcaatggagaaggtgaaatatgaggtacgaaaagttggcaatggaagagacaaaattgaagaaagtgacattcccaaactacattacttacactcagtcataaa

SEQ ID NO: 16362 - DNA, 424 bp, Gossypium hirsutum
  Clone ID: GOSHI-09MAY01-C25865_1
tagtcatttgcctattgagtacatacaatgcgatgttttagatgaagaagaaacatgtgataaattatcaaagcttaacgatgtgactcatgtgttttatgttgcatgggataagagatcaactgaagatgaaaactgcgttatcaatggtactatgttacggaacgtgttgaaagcggtaatcccgaattcacccaagttgaaacatatatgcttgcaaaccggtcgtcggcattacaccggtccgattgatttgtacggaaaatatcatgctcagccccatgatcctccttttcgcgaggatcttccgaggcttaagtcgtcaaacttgtgttatacgctcgaggatgttttgttggaagaagtgaagcagaaggagaacttgacatggtctgttcataggccgggattggtttttgggttt

SEQ ID NO: 16363 - DNA, 429 bp, Gossypium hirsutum
  Clone ID: GOSHI-09MAY01-C25815_1
gtttttcgaaatttccggttcaagctcttcgaattctgtggatttggcgtagaatttcgaatttcgctcgtcataaatcacataaaattttctgatccaaaaacaaaaggaattcgtcgccgtagatggagctccctcaatcccggcctttcggagctgaaggaagaaaaccaacgcatgactttctgtcactgtacagtcattcaagtgtccaacaagatccaaggccaccttctcaaggtgggtacctcaagactcgtgatttcttacaactagaacaacaagggaatccaagtgccaagaaggaaatatcagtagaggtagcgactgttgaaatgccaacaccgccgtctgtggaacatattcttcctggcgggattggaacatacagtataagccacgtttcctaatttaatcctagggttccaa

SEQ ID NO: 16364 - DNA, 883 bp, Gossypium hirsutum
  Clone ID: GOSHI-09MAY01-C25825_1
ccggaaactgatcctaccgttttattcattcactcttttctgcattattctcccgatgaccatgttcgttccagaggctgagcttcctgcatgggttgtttgttacatccctgctacaatgtcgttccttaacatccttccggcaccaaaatccttcccgttcattgttccttaccttcttttcgagaataccatgtcggtgaccaagttcaatgctatgatatctggtcttttccaactcggcagtgcatacgagtgggtcgttacgaaaaaatccggacgatcttcggagggtgatcttgtttcattggttgagaaaaagccaaaacaccatcgggttggatcagaacccaatcttgaggaaatgaaagctgatctccagcaagaacaggaacaaaaggctcgtaaaaagaagcataatagaatatacacgaaggagctctctctggcgttcctcctcctaacagcttcagctaggagcttactgtctgcacagggtatccatttctatttcttgctggttcaagggatatccttccttctggttggtctagaccttattggtgagcaggttctgtaaaggacagattaggggctgatacaaatacgctgatgccggcggagacacggaactcaatctgagagtgattttcatcatcttctaccctctagattctggccctaattacacccagcataagttagaatggtgttacaatgacagcataaatagtctccattttgaacataggcaacacttgaaatttgtgatactgttcagtgtatgtaaggttttccatttttttttcttttttttttgattcttttgtttttctgtcaattcttttgtaagaaaaagaaagaaaaaaattgttgttcaaca

SEQ ID NO: 16365 - DNA, 1433 bp, Gossypium hirsutum
  Clone ID: GOSHI-09MAY01-C25585_1
gaaaaaaaaaagcatgacaaacataagaacagcaaaacttatgtgtggtgttttctcttttctctgaaattcattcatggcttcttcttcttcttcttcttcttcttctttatttcgatgtttccttcatttcttcttcttcataatctcacaagtccaagctgcaaatttaccatttcaccctcgggatgttctacctttattaccgagacaagtttcgtggccggtcctcaactctctcaacagccctgttgaccttttaccgtcctttgtcggctctgtttcatcgtcgaaccgcatcgcgaactggaaaggtgcgtgcttttatgagaacacggcttgggtggagttccataacaaaaccggcagtgaatttggcggtggaactctacatataaaggtcagctacccccatagttggacttgtatggatctttatgtgttcgcaactccgtaccgcgtaacttgggattattattttttgtctcgagagcatacgctcgaaatcaaggaatggcaagataaagctgagtatgaatatgtgaaaaacagggggatttcaatttttctgatgcaagcagggatgcttggaacacttcaggctctatgggatgtgtttcccttgtttacaaataccggatggggtgagaattctaatattgggtttcttgagaaacatatgggggctacttttgaagaacgacctcagccgtggtttactaacatcagtgtcgatgatgtacactcgggagatttccttgctatatctaaaattcgtgggcgggggggtggtttcgagactctcgagaaatgggttagtggtgcttatgctggtcatactgctgtttgtttaaaggattccgaagggaagctatggattggtgaatcaggacatgaaaatgagaagggagaagatatcattgcgatcgtaccatgggatgaatggtgggattttgagctgaacaaggacgattctaatccccatattgcatatctaccactgcatcccgatgttcgagcaaagtttaacgagactgctgcgtgggagtacgcactaagcatggcaggcaaaccgtatggttaccataacatgatatttagctggatagacaccattggtggaaattatcctcctccattggatgctcacctggtagcttcagtctcgtccgtgcggagattttagttttacattttagctttaataatgtcgtttccttatgactcttgttccatctctgcagttgcctctgaatgtttttttaagtgtttgcttgacgattgtacaggtagcttcagttatgacagtttggagtaaaatacaacccgaatatgcagctaacatgtggaacgaggccttaaacaagcggcttggaactcaagtatggtatctttcttggttggttaaaatcgagtttgtggtttgtccacac

SEQ ID NO: 16366 - DNA, 487 bp, Gossypium hirsutum
  Clone ID: GOSHI-09MAY01-C25405_1
tttgttatcagagatggtgtcagctataaaggtgttaggagatgggttcgtaaggatggagcagatgaagatggaaatggcgagggagatagagacgatgaggatggagatggagatgaagaggaccgaggtgatattggagtcacagcagagaattgttgaagctttcgctaaggcagtttcagagaggaagaagaagcccaaaagaatgcccttacctcagtcctaatggattttccttactgcaatgtgtccaatccttttgactacggatttgcaagtgtaagttggtggaatggttagggggtttacttcaattttcatctttctttgtttgattattgagtgatagcaatagtgcatcctgatctgctgtagcttttgtctttttctggactaaatgtatctttgtttttactcctattatgaacttttctcctaatcctagtttcttataataataaaaataagtgcggtctgtcttaag

SEQ ID NO: 16367 - DNA, 618 bp, Gossypium hirsutum
  Clone ID: GOSHI-09MAY01-C25755_1
ccaaaattcagagaaatgggacctctcaactcccaaatcaccatttcaaacccttctttcatcaatctggttctcatggccattccatctctagtcaccgttgaacatatctagaaacacaacccaccagctttgagacaggcgaaggcttctgcatcaaaggccgagccaaccatcacgtgcagacgagacttggagaccaaaacttcccctttcacatttcgtaccacaatccccgaagcctacttaaaaccctggcagtcaaacggggcatcaaaattgattttaaggagctgccctaaggtgttttccaattctcattctcaccaacaaaggtttttattcctgtttaaccaaaacgatcacaagccacaaccagaaaaaggtctttggcgctttgtgtatcttccaaatacccaagcacttcgtaccgagaacacactcgagggctcaccgcgtcatattaccatgtcaatatgctcatccatcacaagtggaatctacaggattctatctgcatcatccgtctcgaaggttgcttccgaggattttgccactactgctgctctcaaaatagatacagaagacaaattgaagttaggaggatcggagctcaaa

SEQ ID NO: 16368 - DNA, 404 bp, Gossypium hirsutum
  Clone ID: GOSHI-09MAY01-C25775_1
ctccgacggcgtctccgattatgccaagaagcttctcgagattaaatttggcgatccctttacttttatatttatatccatattttcatagaaaattacgatcctcacagtcggttactttataatttttgaaaaaaccacaaaaatgatttgcattgatgctctgtaattattagctttacagttattgctctgttagttcactgacaaaatttataaaaagtttttgcattgctcttttgggataataaacagaagtttgaatttttaacatttgttttaacttcatttttcattttgcaatggtggttaattgagcaggctgatggttggattgtggagaatattagtttattggtgaatccaaatcatgttcggcccaaaaaggttttggggtgtttata

SEQ ID NO: 16369 - DNA, 442 bp, Gossypium hirsutum
  Clone ID: GOSHI-09MAY01-C25765_1
ggactcggttgttgatgtaggaaacaacaataaccgctacactatcataaaagcagacttccctccttatgggagggattttttgaatcacaaaccaaccggaagattctgtaatggaaaattagcctcggacttcactggttcttaatcccataaaaccctttttaacaccatcttgaatttgcttgctcatttttatattgtttcatcttacaaattggttttgttttgttagctgagaacattggcttcactgattacccaccagcttatctcagcaaaaaggccaaaggaaataacctgttaattggagccaattttgcatcagcttcttctggttattatgagactacagcaaagttatatcatacactttcattgagtaagcaattggagaactacaagcagtatcaaattaatatggtggccattgcagggaaat

SEQ ID NO: 16370 - DNA, 400 bp, Gossypium hirsutum
  Clone ID: GOSHI-09MAY01-C25705_1
attccatttgcttggtctcactaaccaaatttacgagggttaaacttagggtagtggaattatttaaaggaagttttaaggcccattttgagaagatttatgagtttatgttagaggttaggacccaaaatgttggaacaacacatactattatctggataacaagatgttttaaaggatgtatgtatgtctgtaggcatgcaaagatgggtataaggatggttgtagaaggataattgttttagatggatatttcttgaatggctactttggaggttatctactggcaactattgggatagatgtaaataatggcatctattctattttatatgttgcgattgaaattgaaaaccaaacatcatggggccggttattggagttgctctcattagacttg

SEQ ID NO: 16371 - DNA, 675 bp, Gossypium hirsutum
  Clone ID: GOSHI-09MAY01-C25695_1
cttcatacaaaactgagttatatctttcgtttcttccccttgcaaaatccccagcctacccaacacagaaaaaagaccaaaagattttttatggccgttgtttcaagtgctcattcaactatcttctctaaaacctccctttttcaccacataaatggtttcaaacgcttctctttttgcttacccttttcttcctctgccgttgcttctctttcttctaagaaaaaatggagacaacccgtggcttcctccatgttagagcttggtggaatcaaaattgccaaagatgatgtggtgagggatgacccgacaaacaatgttccggacacaattttttcgaaactgggcttgcagctccacagaaggaataaccattctcttgggattctgaagaatggaatatatgaatattttgagactaatgtcccatatatgttccacaagtttgatgatctctggccacatgttttagtttaacacgattttgatgatagtctcttcccgctgaacatgttaccccgagtattatggtcatattatgtgactcttaaatggctcaggggtgtacaatgccactcaacaaactttttttaagggcgcacacttttctgttaagcggaggttcccccagaaatatttatcaccccaaccccggtattaaagaggggggggttt

SEQ ID NO: 16372 - DNA, 378 bp, Gossypium hirsutum
  Clone ID: LIB3048-001-Q1-L1-F12
caaccacttatataaccaacccaaagaatttttaatgcccgtggtttataaacctaatgaagccttctctacttaaaacctccctttttaaccacttaaatggtttaaacgcttttcctttttcttaacccttttcttcctctgcacgtgcttctctatcttctaacaaaaaatggaaacaacccgtggcttactccatgttagagcttggacgaatcaaaattgccaaagatcatgtggtgaaggatgacccgacaaacaatgttccggacacaattttttcgaaactgggcttgcagcttcacagaatgaataaccatcctcttgggattctcaaaaatggaatatatgaatattttgatactaatttcccaaata

SEQ ID NO: 16373 - DNA, 405 bp, Gossypium hirsutum
  Clone ID: GOSHI-09MAY01-C25645_1
accaagttatcaaacccaaccaaacctaaatctattagtggagttggttagaatcagggcatttctggtattacttggggctagctttggtgataatattattggaccaataagccattggaggtcaataattggcgattctactccttatgacttgcttgaagattgcacgagtggtcagcatgccaagtttaccatcttcctgtgatactatcaaaacaaatatttttatagtgtatggtattttggtttgatgtgcagttttagcatttgttttggtgggtttactctatggtttcttcattgctattatatgtggccagaggatcaacgagcggcattatcatggtcttgcaaaacagggattaacaaaggtatgtcgtaaaaattgattagaaaatcctg

SEQ ID NO: 16374 - DNA, 1610 bp, Gossypium hirsutum
  Clone ID: GOSHI-09MAY01-C25675_1
cggaccaggtattaagggtaccttcggttccctatttggatggctcaccatcttttagtttaatctcggtcccaaacctatcatggctgcttgaaaacccacaacacttctagatctaggttaaaggccaatttatccccttattggtcaaatggatggaattaatcaaccatcaacctttatttaaataggatgaggttcaattcccggaatccctggcacatgctcatttaacagaccatgtgctattgctttatcattggtatcaatcatgtttgctacattttaccatgttaataacgcatgatgcctgaactacggggcccaccattcgtctagctaaaacactgactgatctttttatgtaaaaaagccgtagaagcaagtattggtttgttctttgaagatcaggagcaaaaccttcctgagccctgtaaatactctgcatctctgggtatattgatgatacaagcattggattccctagcaatgatgtgcagttaattatccaggaaaatgattggcaaaagcagaacattaaaaggtgtacgattctcttctaggggttcttcgacaggttcaaacaccttgggaagtgctgctactgatagtcaaagcacgggagatgaaactctaactcaatcagcagaagaagtacctggaagtccagctgaggctactaagggtactaagagaaagcgagagcctacaaacatgaaagatatatggaaccttcaacctggaactcgtatagtagtagatgccaaccaatatggccagcttattgggaaggaagcgtccaaattggctgaatttctctgtacaattgcaaggactggttctatttgtcctttgaatacaaaacattggaaacatctttctaaatatgtgttggaaaacatattgagaatcgttcatgaaaagtttgatctccaaggtaaggtggaggactctgacattctctcacatgttggaaaactccgaagaagtttaaattgactttaaaaactagatactacaaaaagatggtccaagaaggtcgatcgattgaagaaatatacaaaaccaatcctcctggtgtgcaagatgatcaatggaagtggctagcggagtgatggggaacatcacaagctgaggtatgcacttttattatactaaatgtcctattttttctgcttccacttaccgtatgatcaaagtagggggtgcataaattgcgtgatttgttgaatgaggcataataaacttacctttcctattagtctcattttttttcattaatttaaacaataggcccaatcaaaaaaggccaaaaaaactccaccaaatgtgcgttatgcacacactgctggtagtacagtatatgtgaccctcaatgcacagtttgcaagtattacatattaatcaatatgtaacttatattaattattctgtgctcattggtgaaaattgttaacaacaattgttttgttgtataaaacgctgagaaggaaggccgtgaaccccggcgtttggaaaagtttagatttcaacatttgcgcaaagatgggagtgaaaaattgagcagtgaggcagcaaaacaagtttatgatgaagcatgcaagatggtt

SEQ ID NO: 16375 - DNA, 427 bp, Gossypium hirsutum
  Clone ID: GOSHI-09MAY01-C25665_1
taccggttcggtataaaacgtcatggattcctcaggcttgaagaattccgcaccaaaatggttatactccgttgcttttgcaagccaaaatggggggaacctaaattgcccggtggttccttgttaatgggcctttaattgaacccaaagctattaccggaatgaccccgttccattaacctgtttgcaactcgattcaatcagacaaccatgcaactgtcaagacactactcgagtacaatgcccattgtagtgctgacgatgatgagcgtatgacacctattaaacatatctcgaaaggccctggaagcgagaagctacaggaattattacataggcatcttgaagagcagcgaaagagatgggcattggaagcatgccgcgaggcataggctaagatggatgagctcgagaaagagctgtcaaa

SEQ ID NO: 16376 - DNA, 657 bp, Gossypium hirsutum
  Clone ID: GOSHI-09MAY01-C25605_1
atcgtaactgccctttttcttcttccttcttccttctcctttcttcacagtaaaagcctcaaacaacactctttcacttcgtcctccatttctctatttctctctcttctctcaaatttcccttttttctttttgtagcgtttcatttcttctcagtccgataaaggacggagaattcctttttttctctgttttatcaatcaatggtctttcattcaatctcagaaacgagaaataactcgaccgaaaccgtaaccgaaaccgaaggtgtggtgatggcttcttcttcggccttgaaatctcagcctcttcataactttcaactacatgacctcaaatgggccatgaaccacagtaacaatcaacgccttcgaaagctcgctgattcctctcagaaatctcctcagcgcagcgataccgataccgactccgaccataacccgaaggggaatacagtgcgggaagctcctttcaataacggagcttcttctggttcttctctcgatcataagactggaaaatcggagaagaaagttatcaacggtcctgattctctggttgatagtgacagcttgggaagaaagttgctccacctgcaggtagatcgaagatctacatacgtttgcgaacgaagaatcataacctgttgaggaggtc

SEQ ID NO: 16377 - DNA, 870 bp, Gossypium hirsutum
  Clone ID: GOSHI-09MAY01-C25635_1
cccacgcgtccgcaggtgtccccaaaagcttgtggacatacacaaggccggaaggtggtttccagagaggaagctgtcatgagaattaaagcagcagttgacgctcgcaaagagagtggttccgacattgttattgtggcacgaacagattctcgtcaagcactgtctttagaggagtcactctggagatcaagagcatttgctgatgccggtgcagatgtcctttttattgatgcactatcgtctaaagaagagatgaaagctttctgtgaagtttctccattagttccaaaaatggccaatatgcttgaaggtggggggaaaacaccaatactagctccgcttgaacttgaagaaattggatataaacttgtggcatatccgctttccttgatcggggtatccatccgagcaatgcaggattcactgactgctctcaatggtgggcgtattccacctccaggaagcatgccatcctttgaggaaatcaaggaaatcttaggtttcaataattactacgaagaagaaaaaagatatgctaccagcaagtatcaactatatgctgacagagagggcagtaatgcatacagtatacaaagggttcgagatgactcggaacaaagaggtcaaagtcctcaagatccagttgttgaggtgataactcctgatgtatacactaaatatggtgcagatggttcaagggatcctttttctggaatctggtctcggacattgagaatcaaaattactggaagagatggatttgagaaacctgatgttagagttccagccgggtttttggaaggaatcacaaatatcgttccagctttgggtggtgttaacctcaaggcattgttggacgatgctgcc

SEQ ID NO: 16378 - DNA, 839 bp, Gossypium hirsutum
  Clone ID: GOSHI-09MAY01-C25625_1
cccacgcgtccgggacgcgtgggtttaacctctcgctataagatacagagtaaaatgggcgaaggtaccttgggtctggttttagaatgctgggatagagagaggaaggagatggttgccataaaaattgtccgtggagttaagaagtatcgtgaggcagccatgatagagattgagatgttgcaacagcttagaaaacatgataaaggtggcaaccgttgtgtgcaaatacggaactggtttgactatcgtaaccatatttgtattgtgtttgagaagcttggaccaagcttatacgattttctacgcaaaaacaattatcgctcatttcccattgatcttgtccgtgagattggcagacaactattggaatgtgtagcattcatgcatgatttgaacctgatacacacagacttgaagccagaaaacattcttctagtctctccagagtacgtcaaaattcctgattacaagggtgcattgcgatctccaaaggacagttactttagaagattgccaaaatcaagtgctattaaggtaatagattttggtagcactacatatgagcgcccagatcagaattacattgtatcaacaaggcattatcgtgctccggaggttattcttggacttggatggagttatgcttgtgatatatggagtgttggttgcattttagttgaattatgcacaggtgaagcgctgtttcaaacccatgaaaatttagagcaccttgccatgatggagcgagtgttaggtccaccactacctcagcacatgttgaagagagtagaccgtcatgcagagaagtatgttagaagaggtagattggattggcc

SEQ ID NO: 16379 - DNA, 350 bp, Gossypium hirsutum
  Clone ID: LIB3048-041-Q1-L1-B4
ggcaattccggttttcgaatttcttttcctttgttggggaaaaaaaaaaaggaaattttttaagacctaaaatctgcaaccatgaaaatggaaatgttcgcacaccttaaaaaccatgttaaaggtggcaaccgttgtgggcaaatccggaactggtttgactatcgtacccatattggtattgggtttgaaaagcttggaccaagcttatacgattgtctacccaaaaacaattatcgctcatttcccattgatcttgtccgtgagattggcagacaactattggaatgtgtagcattcatgcatgatttgaacctgatacacacagacttgaagccagaaaacattct

SEQ ID NO: 16380 - DNA, 1163 bp, Gossypium hirsutum
  Clone ID: GOSHI-09MAY01-C25375_1
aaaaaaaaaattccctcttttcctttctgttactttcacagagctgaaagtacagaacagaaaagaaaccccaaacctcaaaattttctctttctcacgttgatagaaggatttaagctagaacggcaaagatatgaaataatatcgtgttttttgtctataaatattttgttgggttttcgattcttttttcgccatttcttttgcatgttgatgatctttggtggctttaactcggtacttggactcacttcaaactcacttccgctactacttcttcgggtttcacatggctagtaaccccaacgaggcttccgctgatgatttcctcgagcaaatcctcggattccctaacttcgcgccttctgagacgggtttggcgggacccgacggtggactgacaggaacaactgctggtgccggaacgccaatgtttctacagctcagctctggtgatggagccagtcatctcggcggaatcggcggcggtggaggcggcgccgtttcccggacaggtttttccgttggggttgagcttagaccaagggaaaagcggcgggttcttgaagccggaggaaggttctggtggtgccgccagccggtttcgcgatgaagtcgttgatggcagggcgtcctcagttaaaaacgttttccatggttcaccaatgccggctaccgttgctccatcaccgcatccaccttctttgcgtccaagggtgcgggctagacgaggacgggccacggacccgcatagcattgctgaacggttgcggagggaaagaattgccgaaagaatccgagcattacaggaacttgttcctagtgttaacaagactgatagagcggtcatgcttgatgaaattgtagattatgtcaagttcctgaggctccaagttaaggttttgagtatgagtaggttaggcggggcgggggcagtggcaccgcttgttacagacatcccattatcatcggtcgaggacgaaagcggcgacggtggaaggaaccaaccggcatgggagaaatggtcaaacgacggcaccgagcgacaagtagccaagctcatggaagaaaacgtaggagctgccatgcaattccttaaatcaaaagctctttgcattatgccaatcttactagccaccgccatttaccactcgcaaccactg

SEQ ID NO: 16381 - DNA, 863 bp, Gossypium hirsutum
  Clone ID: GOSHI-09MAY01-C25325_1
gcgagacgcagagttccaatttgatatcgactttgaggaaccagagttagacttaaacccgaaaatggctacagatgattttatgagcagagcaccattccaattgggaaacggatttgtaagtaatcattttccactttcaaagctggaggaatgcttcgaggaagacgaagaagaaagtgaagaagaaaccgagcagccatgtttttccactttcaaagctcttgaaaggatcccatccacttcaaagctgtcaatgtcattcaaaaataccagcttaggtgacaagagccagaagtattcaaaattttctggaacaaagcaagaaaatggttaccttaataactcatctgggcataggagtgcaaatgagcagctcccaggaaatgtgagctttgtgaagctggcggacatgaatgaggaggaatggaatcttttcctagagaagttccaggagttgctctacccgggatttgaaaaacgaaaatcggttactttaggtcagaagcagatacagaggctcggtacttcgtgccagttttgatatcgagatatctgtatatcgataccagatagtcgaaatgagttttaggattgtttgcacttggttctgaaggactgttaggagagatttgagtaatatgggtttggccccgggaattgttgtagtttgggagcagcattacgaggaatagatgtaaatattctttggcttcatttcagctaagtagaattggttttatttcttcttttaaggtctttgattttgttttttgttttttgtttcctttttctttcacttgaatcaccttcttatggaccttgtttgataaataatatataaaaagggagagcatttatgt

SEQ ID NO: 16382 - DNA, 929 bp, Gossypium hirsutum
  Clone ID: GOSHI-09MAY01-C25205_1
atcatcttccgcctaccatcggccctcttcgctctttcatctctgcaaatcagttttttttccttctcttctcatatcagttctcacccaccaacgtgtccgctggtgctttcctgatctgacccgtatcccttgtcggatcgtgtcggcacagttactgtacccaaattaccgagtccggggaacgaaggtcactgccactgtccaatccgaaaatggcgtcgagactagcgatgctaaaacattccgccgccaccgactacggttcttttttaggtctgaggagatggattcatgcttcagcgctccctccacccttgggcgctccaatcggtcatcccccaccatcacaatcgttggttttccccgagtctgatcaaaccccagaaagcaataataacagcaacattgggtttgggttcgggttctgtttccctatttttcccttgggaggaggatccatggagctcatggctgtcccaaagaaaaaagtgagtcggcataagagaggcataagaaacggaccacaggctttgaaaccgattccggttattatacgatgcaagagttgcggtcgtgttaagttaccacacttcttctgttgcagtggagatcgtgggcacaacaatgaacgagatgattcatccggttaagttgtaggtgaactaataataagaagctttttcatttattatgagaaaaccctattgggatgtcatgacaatgttggtgggcaagcgtagacggattcagtcataaaaataggttagaaagttttgtttacaaatgaagccatctagaatgatggcaaataactgcaaaaatgatgatctgatctagctagtacatttttatggagttacataagtttgcacttgtatggaaaatcttggttggtttaaaaaaaaaaaaaaaaaaaaataaaatat

SEQ ID NO: 16383 - DNA, 342 bp, Gossypium hirsutum
  Clone ID: LIB3149-006-Q1-K1-A8
gagggccggagccaggcgtacccaatacagaagcatgtacgcattatatgtatgagaaaaacattattgggatggcatgacaatgttggggggcaagcgtatacggattcagtcataaaaataggttagaaagttttgtttacaaatgaagccatctagaatgatggcaaataactgcaaaaatgatgatctgatctagctagtacatttttatggagttacataagtttgcacttgtatggaaaatcttggttggttaagattgctttcgtggtctgtgtttcttgtatttcttagctgcaactgggttctatgctaaaatgacaagttaatttgcccgtc

SEQ ID NO: 16384 - DNA, 473 bp, Gossypium hirsutum
  Clone ID: GOSHI-09MAY01-C26945_1
gaaaaataacccagtttttgtttcccattttcattgtacatttaacgaccctttccgtcaaggtgatatataatacatatatacacacacactcttctcgtcattataaacaaaccccagttttaaggcagagagatatatggccagagaggggcaaaagaacaccatgttcattgaacaaaacactggcgactatgaaaatggtgaccttcaaaagaatttggatgatgatggtcgagaaaaaagaactgggacttgggttactgcaagtgctcatattatcacagctgtgattgggtctggcgtattatcactggcatgggcgattgctcagctaggttgggtggttggaccggcggttcttatagctttctccttcatcacctacttcacttcaacccttcttgctgattgttatagagctcctgatcctgttcatggaaaaagaaactatacttacatggatgttgtta

SEQ ID NO: 16385 - DNA, 424 bp, Gossypium hirsutum
  Clone ID: GOSHI-09MAY01-C26875_1
ccctcgcgacctctgagttttcaacttaaaatttcttggttttcctcaagaaggaagaagatgttgcaaatagctttcagctcgtattcatggctgttgactgctagcaaccagaaagatggaatgttgttcccagtagctttgtcatttttggtagccatattgggaatttcactgtgccacgtatggaccataaggaagccaaagaaagacatcgccccattaccgccgggtccccgtgggttgcaaatagtgggatatcttccatatcttggaactgataatcttcacttggtgtttacagatttggctgcagcttacggtcccatctacaagctttggctaggaaacaaattatgcgtagtcattagctcggcaccactggcgaaagaagtggttcgtgacaacgacatcacattttctg

SEQ ID NO: 16386 - DNA, 309 bp, Gossypium hirsutum
  Clone ID: GOSHI-09MAY01-C26835_1
gcaatttcatatatctgatcgtccatgggaggttctgaggaatgcagttagtaagacatacaatcgtatcactgatctaaggaaagagatttcatctctgaagaagagtgttgtatctgcagaagacgctgcatctaaggcaaaagcagatttggaggctgctgagtcaaagcttaccctagtggaaggtgaacctgttcttggtgataaccctacacagttaaagcatttaaaatctgtggcttggaaagaccaatgaagagacagtatccatgcatgactcttagaagccaaagaggctctttttgc

SEQ ID NO: 16387 - DNA, 1167 bp, Gossypium hirsutum
  Clone ID: GOSHI-09MAY01-C26555_1
taattccaaaccctgatttccgggcttgcaaggggaacacttcattcactcggcgacgtcaagcacttaaaggttgtagcttagagaagtgtacttttctacgtgctaaataccaacccgggtttgaagaggaaattgttccaagggagggtgaaagtgctttgtcagggcggggggcaggggaatggtccactgttccgtatgctcctcaaggaccagacagaaatggaaacaaacgtatgtcaagtctcgagtcaccaatcatgttgcttaccggacatcagagttctataggtaccgtgaagttcaatccagctgggactgttgttgcatctggatcgcatgacagggaaatttttctgtggaatgtccatggagactgcaaaaacttcatggttctcaaagggcacaagaatgcaattttggatcttcattggaccactgatggatcccagataatatcagctagccccgacaaaactttgagagcatgggatgttgaaacagggaaacaaatcaaaaagatggcagaacattcttcttttgtgaattcatgttgtccatcacggagagggccacctcttgttgttagtggatctgatgacggaactgccaaactttgggatatgcgtcagagaggtgccatccaaacatttcctgataaataccaaattacagctgtcagtttctccgatgcatcagataagatcttcaccggtggcattgacaatgatattaaggtttgggacttacgtaaaggtgaagtaacaatgacacctcaagggcatcaagacatgattacaggtatgagtttgagtcccgatgtgttcctaccttctcaccaatggtatggattgcaaactctgcatatgggatatgcgcccttatgcaccacagaatcgttgcgtaaagattttcgaaggccaccaacacaatttcgaaaagaacttgttgaaatgtggctggtcaccagatggaagcaaggtcacagccggtagttcagatagaatggtctacatatgggatacaacatctcgacgcatcttgtacaagcttcctggccacacaggatctgtgaatgaatctgtattccatcctaatgaaccgatcattggttcttgtagcagcgacaaacagatatatctgggggagatatgaactgtgctc

SEQ ID NO: 16388 - DNA, 329 bp, Gossypium hirsutum
  Clone ID: LIB3145-022-Q1-K1-E3
attcaacacttcattcactcggcgacgtcaagcacttaaaggttgtagcttagagaagtgtacttttctacgtgctaaataccaacccgaggtttgaagatggaaattgttccaagggagggtgaaagtgctctgtcagggcccaaggccaatggaatggccaattgtccggattctcttcaagggcccaaccgaaatggaaacaaacgttcgtcaagtcttgaatcaccaataatgttgcttaccggacatcagaattctatatataccgtggagttcaatccacctgggactggtgttgcatctggatcgcatgacaaggaaatttt

SEQ ID NO: 16389 - DNA, 442 bp, Gossypium hirsutum
  Clone ID: GOSHI-09MAY01-C26525_1
ggcataagaaacgaggtacgcgaaagggaagagggaataaactgagcccccaaattcagagaattgttggagatgctacagttcactatggaaatggtcgtttcaaagaggccatatctgttctgaaggaaggtgttcaacttgaaccaaaatttcctcatttatatcatatgcttgggctttcttataaagcccttggtgataataaaagagcttttcaattctacatcatagctggacttcttaagccaaaagatcctgatctgtggaaactgctttttacctggtccatagagcaagagaatgttagtctgacctgccattgcctttctaaagcaataatggcagatcctacagatattagtttaagatatcttcaagcatcactttatgatgagctcggtgattaccagaaagcagctgagtcatttgaacaaattca

SEQ ID NO: 16390 - DNA, 429 bp, Gossypium hirsutum
  Clone ID: GOSHI-09MAY01-C26415_1
gaattctacaggacgcttttgtattgtgtagggtgtttcagaagagcgggtctgggccaaagaatggggagcagtatggggccccttttattgaagaagaatgggaggatgatgaggcagtttttgtgcctggtcaacaagatgcatctgcccatgaagaggctgccaacgaagatgcttttgttgaagtgaatgatattgatcagaatcttgacgttggcaatccatctgaaaacaatatccttccgttgaacggctattgtggggaatcaagcaaccatgtggaaaattcaagggagttcagtgaagacgatcaaaacccacgaaacagtatgcatgagaatgcattcctcccttccagtttctattatggcgaatcaagcaactgtggtgaacattcaatggagttcaaagaagattatcagaagc

SEQ ID NO: 16391 - DNA, 464 bp, Gossypium hirsutum
  Clone ID: GOSHI-09MAY01-C26775_1
cttaaaaacaaacaagacgtcagctaagatgaatatgggcaatgctaatggggaggatgctattgaggcactccaagcacaagctcacatttggagacatgctttcaacttcgtaagcttcatgtctctaaaatgtgcacttgatttaggcatccttgatatcattcatgatcatggcaagcccatgactattacccagctggttgctgcgctacagatgctcaaccctactaaagcatgcgacatttataggctcatgcgcattctagttcactcggacttctttgcacgccaaaagctagacaatgatgctcaagaagaaggatatgttcttaccaactcttctcgtattttgctcaagaataatcccttctgcataacgcctactttgaaggctacaatggatcctattataacaaagccttggagttttctagggacctggttccaaaatgatgatcata

SEQ ID NO: 16392 - DNA, 249 bp, Gossypium hirsutum
  Clone ID: LIB3048-042-Q1-L1-H12
tagcatctgatatatcagatcatgcagccatgatataccactgttgctggctacaatctcaccctactaagcatgcgacatttataggctcatgcgcattctagttcactcggacttctttgcacgccaaaagctagacaatgatgctcaagaagaaggatatgttcttaccaactcttctcgtattttgctcaagaataatcccttctgcataacgcctactttgaaggctacaatggatcctattat

SEQ ID NO: 16393 - DNA, 601 bp, Gossypium hirsutum
  Clone ID: GOSHI-09MAY01-C26155_4
tctccctaaagtttatataaagaccagaagaacaaccaagtagagccacagcagcgtcccaagcattgcaatcaaaagagaaagcgaagaggcgagggtctattttcttgacaactataatgagttccgagtcttcaatgatcaagaggctagatgctaaggtggcactgataactggtggtgccagtggcctaggagtgtgttcatgctaggctattcgtcaaacacggagccagggttctcattgcggctatgcaagacgaactgggccactccctctgccaagagctgggtgcggatagcaccagctatgtccactgtgatgtaccatgtgtatccgatgtcggaaatgccgtatactgagccgtgtccatgtttggaaaactcgatatcatgttcaacaatgcaggcctcattggtgaccgtgaagtcagagtgacagacgccagcactgacaacttcaagagagtgttcgatataagtgcctcgggtggtttcttgggagccaagtatgcagccaaggtcatggttccggccaagaaaggttgcattctcttctcatcgagtatttcttcaaaaatcagcatcggtctggcccatg

SEQ ID NO: 16394 - DNA, 935 bp, Gossypium hirsutum
  Clone ID: GOSHI-09MAY01-C26155_3
tttcttatattcaagacgaattgggccactccagttggcattagctaggaactgaaaacatcagctatgtccactgtgatgtaacatgtgaatccgatgtcgaaaatgccgtaaacttagcggtttgccctttcgtccgcggacgcgtggggttcaacaatgcaggcctcattggtgacggtgatgtcagagtgacagacgccagcactgacaacttcaagagagtgttcgatatcaatgtcttgggtggtttcttgggagccaagtatgcagccaaggtcatggttccggccaagaaaggttgcattctcttctcatcgagtatttcttcaaaaatcagcatcggtctgccccatgcatacaaggcatcgaagcatggcgtcgtagggttgacgaagagcttggctgtggagttaggtgagcatggaattagagttaattgcatttcacctcacgcaactgtgaccccattgttcctaacaacactggggatgttcgataagaagaagggagaggagatgattgcgacttcagcagtgttgaaaggcaccgttttggagcctgaagattttgcacatgcagcgctgtatttggcaagcgatgaggctaaattcatcagtggtgttaacgtgcctgtcgatggagggtataatctcagcaatcagtcatggaagatgggatttgcagcactttttggataaatcaacaagtcctctattttaagctttgaacaaattttcttcaatagggaaaataaaaattacccaaaattaaagtacctgtaataaattgtattgtcggtcggtctgtgatgtatgctttcttcatcaatatgcaattatagcaggtgttagctgcagtctctgaggaaaacaagacgtgctaatttgaattttcaaactctagtagccttaatcaagatatgaattcttcgg

SEQ ID NO: 16395 - DNA, 1170 bp, Gossypium hirsutum
  Clone ID: GOSHI-09MAY01-C26155_2
cctgcgggcccggtccccaagttccgggcccgacccacgcgttcggctttggaaggagaaatcttcttcacagggacagtgagctccgagtctggcataaccaagaggatggctggccaggcggcattgataactggcggtgccagtggcttaggagagtgtacagccaaactattcgtcaaaaacggagccgaggttttgatcgctgatattcaagacgaactgggccactccgtttgccaagagcttggcactgaaaacattagctatgtccactgtgatgtaacatgcgaatctgacgtcgaaaatgccggaaacttggctgtctccaagcatggaaagctcgttatcatgttcaacaatgcaggcattcctgggggcaatgtggtaagagtgacacatgccggtactgaggacttcaagagagtgttcgatgtcaatgtattgggtggcttcttgggtgccaagtatgctgccagggtcatccctccggccgagaaaggttgcattctcttctcagcgagtcttgcttcaaaaatctccttcggtctcccccatgcatacaaggcatcgaagcatgccgtcgtagggttgacgaagagcttggccgtggagttaggtgagcatggaattagagttaattgcatttcacctcacgcaactgtgaccccattgttcctaacaacactggggactgttcgataagaagaagggagaggagatgattgcgacttcagcagtgttgaaaggcaccgttttggagcctgaagattttgcacatgcagcgctgtatttggcaagcgatgaggctaaatttatcagtggtgtcaacttgccagtcgatggagggtatagtctcagcaaccagtcatggaagatgggattcgcagcactttttgggtaaaccaacaagtcctctgctttactccttggacaaaatttccttgaataaggaaataaaagttacccaaaactgcgctacttgtaataagattgtattgtcgatcagtctcatgtaatgcttttgatgtgtcctttctttaccagtagccacttatatcgttttgaaagattaaacgatgtcaatttcattcccaaaaaaatatattttttttctttttatttttttcttcttttcactttttctcttttttttctctttttttctaa

SEQ ID NO: 16396 - DNA, 1136 bp, Gossypium hirsutum
  Clone ID: GOSHI-09MAY01-C26155_1
cggacgcgtgggaagctataaagagcagaataacaggacgtgaacccacgcctccccaatcattgaaatcaaaagaaaaggcaaaggcgagggtctattttcttcacaaactacaatggcttccgagtctttagtaaccaagaggctagatggtaaggtggcactgataactggtggtgccagtggtttaggagagtgttcagccaggctatttctcaaacatggagccaaggttctgattgctgatattcaagacgaattgggccactccctttgcaaagagcttggaactgaaaacttcagctatgtccattgtgatgtaacatgcgaatctgatgtcgaaaatgccgtaaacttagcggtctccaagtatggaaaactcgatatcatgttcaacaatgcaggccttattggtgatggtgaagtcagagtgacagacgccagcactgacaacttcaagagagtgttcgatatcaatgtgttgggtggtttcttgggtgccaagtatgctgccagggtcatggttccggccaagaaaggttgcatactattcacatcaagtcttgcttcaaaaatcagcttcggtagcccccatgcatacaaggcatcgaagcatgccgttgcagggttgacgaagagcttggccgtggagttaggtgagcatggaattagagtcaactctatttcacctcatgcaatttcgactccaatgttccaaaaatcaattgggatacccgataagaagaagggagaggagatgattgcggcttcagcagtgttgaaaggcactgtattggagcctgaagattttgcacatgcagcactgtatttggcaagtgatgaggctaaatttatcagtggtgtcaacttaccactggatggagggtatagtctcagcaatcaatcatggaagctgggattcgcagcactttttggataaaccaccaagtcctctgcttcactctttgaattatattctcttaaataaggaaaataaaactcatccaaaattacacacatgaaaaactgtattgtcgtatttgatcagtctcctgtaatgcttttgaagtatcctttctttatcaataacacttgttttgctgttcaaatgaaaaaattacttccattttccaatc

SEQ ID NO: 16397 - DNA, 382 bp, Gossypium hirsutum
  Clone ID: uC-gsronu33B074f06b1
caattattgaaatcaaaagaaaaagcaaaagggagggcctcttttcttcacaaccaccatgagctgcgactcttcaataaccaagaggctggatggcaaggtggcactgataactggtggtgccagtggcttaggaaagtgcacagccacactttttgtcaaacatggagccaaggttctcattgctgatattcaagacgaactgggcgattctgtttgccaagagcttggaactgaaaacatcagctatgtccacttgcgtcattatatgccaattctatgtttttaatgttgttatcttggtttcttttatattattaatacatatgtttttattcctctcatttttatcatatttttttatcccaactccattttatct

SEQ ID NO: 16398 - DNA, 433 bp, Gossypium hirsutum
  Clone ID: GOSHI-09MAY01-C26135_1
ccgaagtcggaaatgaaaaggttgacaagcgaccatataaagaattaactctaaggcctaattctcctaaacatccttccggccgaccccaaccgagcacgactcccagaactctaacattaaaccaaacttcaaaagagctgtcgcctattgctggagaaaacccgaagctggcaatgagctcagagaccacatgtcttaagaagaagcttgaattggaaaaaaaacctcgtcgcactcgtccagcatcagagcagagcagaagcagaaggcaatcaagcagaatacaagcagaatcaggcttgccgcattggatgtccagggataaatcccacgatttgcaacgacgcgatgatcaaacaagtgatatcagtagtgacatgacagattaagccaccaaggggatgcttgttcaatgcaattcaagagcaat

SEQ ID NO: 16399 - DNA, 407 bp, Gossypium hirsutum
  Clone ID: GOSHI-09MAY01-C26075_1
cggaccaaccggcttattgattcccttcaacggttccaccgccggcaccatttctaccatttccttgacccatcatgataaagtcatgctcctaggtcacagtgactcttacacccaagaccagaccatgcaagtcaccattgccttcaaccgttttggagaagggcttgtgcagagaatgcctagatgcaggcatggatattttcacgtggtgaacaatgattacacgcattggataatgtatgcaatcggtggcagtgcaaatccgacgatcaacagccaggggaacagatttcttgcaccagataaaatgaataacaaagaggtgactaaacgagagaatacgccgcggaaaaaatggaagaaatggaattggaggtcaagaggggatttgatgttaaatggag

SEQ ID NO: 16400 - DNA, 425 bp, Gossypium hirsutum
  Clone ID: GOSHI-09MAY01-C26395_1
aagactcaataaaatttcactctctccactttaacgcgggggctcagcccctcttctctctctattcgctcctcttttcgtgattttgccccagcgggtcaatttgggggcaaagctaaatctttcctcgaaaccctagattaatgtccgcttagggcatgtccatatcccctctcgcatcttttattgatttattaattggtaaacaagtcgaggttattgttcgagaggactttcgaatatggcgaatgtagctgcgcatggtgcattaacttctgctttcgttgcaaatcggtggggatgccctgaaagttggtccaacagttaaaaggaagaccccttcggaactcataggggatcagttaaagcgaacccatgttgctgagcttgttagtaaatctttggccccaagtgagaaggataat

SEQ ID NO: 16401 - DNA, 904 bp, Gossypium hirsutum
  Clone ID: GOSHI-09MAY01-C26355_1
ctcatacttactctttgtctttcagaaagatttgatacattccgaaccctactttgtgctgatggatgctctatgattgatcgaagaatgggtatttatggttatcctattgaaattcaagcacttttctttatggcattgaggtgtgccttatcaatgttgaaacatgatgctgaaggcaaagaatgcattgaaagaatcgtgaagcgtttgcatgctttgagttatcacatgcggagttacttctggcttgacttccaacaactaaatgatatttatagatataaaactgaggagtattctcacactgcagtaaataagttcaatgttattcctgattctatcccagactgggtatttgactttatgccaacacgaggtggctactttattggcaatgttagtcctgcaaggatggatttccgatggttttgtttaggtaactgtatagcaatactatcttctcttgcaactccagagcaatcaatggctattatggaccttattgaagcccggtgggatgaacttgttggagaaatgcctctaaaaatagcttatcctgcaatagaaagtcatgaatggcgaattgtcactggctgtgaccctaagaatacaagatggagttatcacaacggaggatcatggccagtgctgttgtggctgctaacggctgcttgcatcaaaacgggaaggccgctgattgcaagacgtgcgattgatcttgccgagacacgtttgttcaaagatagctggccggagtattatgacgggaagctcgggagatatattggtaaacaggctagaagtaccaaacatggtcaatacaggatatttagtggcaaaaatgatgctggaggacccatcacacttggggatgatttcattggaagaggacaaacagatt

SEQ ID NO: 16402 - DNA, 198 bp, Gossypium hirsutum
  Clone ID: LIB3146-057-Q1-K1-F12
cccacgcgtccgcccacgcgtccggaggtggctactttattggcaatgttagtcctgcagggatggatttccgatggttttgtttaggtaactgtatagcaatactatcttctctaacaacttcataccacccaacttcaataatggacctaacgcaagccggcggccattaactttttttataaaacccataaaaat

SEQ ID NO: 16403 - DNA, 619 bp, Gossypium hirsutum
  Clone ID: GOSHI-09MAY01-C26375_1
tggcggccgctctagttcttacgcgtattgtccttccgcacgaattcggttttaggttcttggaatcgatggaggatataagggtttttatgcaaagaacactatcaccttaacacctaagtttgtcgatgatatccataaacgtggaggtacgattcttggaacttctagaggaggtcatgattctgtcaagattgttgaccgcattcaggatcgtgggatcaatcaggtctatataatcggaggtgacgggacacataaaggagcagctgtgatttttgaggaaataaggcgacgtggtttgaaagtagctgttgctggaattcccaaaaccattgacaatgacattccggttattgacaaatcatttggtttcgatactgcggttgaggaggctcaacgtgccattaaagcagcacatgttgaatctgaaagtattgggaacggcattggacttgtaaagctaatgggacgctactgcggtttcattgcaatgtatgctactctagccagccgagatgttgactgttgcttgattccagagtcaccattctatcttgaaggaagtggtggactttatgaatatattgagaaacggctcaaagaaaatggacattat

SEQ ID NO: 16404 - DNA, 438 bp, Gossypium hirsutum
  Clone ID: GOSHI-09MAY01-C26295_1
atgccctctatgcattttatcatgaaagaagaccagaatcttttgtctgccctccaactcctgagtggaaaagatcttctgatcttgatctcaatggtgaagcaactgcagatgatgatgatgatgatgatgatggagctccaactgcattacctgttagagggcatgcacaattcccgggatcacatccagtttcactgaacaggtcccttatatgtttggttttattcttttttcttagttcttctttattctggtttttgattcttcattttgttgaaattagtgcattatctcttagaactttgttcggcctttaagttattttcttactaatgcagcaattttccttgttaagctagtagagattaaaatgccttgagattgcaactggatgttaaagttctaaaatatgggttcaaaatttttctgaaattt

SEQ ID NO: 16405 - DNA, 504 bp, Gossypium hirsutum
  Clone ID: GOSHI-09MAY01-C26285_1
ttcaaggtatgcaaccgaaaaaggaagggggggatccatgaagtgagtcaggagctaaactcagcaatgtttccgtccaaccaccagctttcgggtcaaccgagggcgttagctgttgttgaaaccaccacaacttcgattcagggggatctgaacgaagcctctttggcttccagggatgaagtgcaaaatggaggattttcagaagcccaatccatcatggagagctctgagaaacttcaagatgatcttcgaatgttgggaatgaaaatcaagcagcatgaggatagcttagaacttctgaggaatcagaagaacaaattagatgataccatacttgatatgcaaggtatacttttcttattctaaaacgcatgcatgacataaaattcacttgccattcaagaatggaagtaaagatattgtgatgtttgcaccgattgctatgggtgacaatcagaatgagttaatatacagctcatagatgacaagaagctaatgact

SEQ ID NO: 16406 - DNA, 372 bp, Gossypium hirsutum
  Clone ID: LIB3048-009-Q1-L1-C11
aaaaaagaaaatccaggaagtgagtcaagagctaaattcagcaatgtttccgtccaaccaccagttttcgggtcaaccgagggcgttagctgttgttgaaaccaccacaacttcgattcaagtggatctgaacgaagcctctttggtttccagggatgaagtgcaaaatggaggattttcagaagccaaatccatcatggagagctccgagaaacttcaagatgatcttcgaacgttgggaatgaaaatcaagcagcatgaggatagcttaaaacttctgagggatcaggagaaccaattagatgataccatacttggtatgcaagttaagcttggcaagtatcattcttctagtttgcctgttgtgaacaa

SEQ ID NO: 16407 - DNA, 745 bp, Gossypium hirsutum
  Clone ID: GOSHI-09MAY01-C26235_1
gccatggctgatgaaagtgtgatggttaaaggaaatggtaccatttttctagctggaccacctcttgtcaaagctgctacaggagaggaagtgtctgcagaggatttagggggtgctactgttcattgtaagacctctggggtttcagattattttgctcaagatgaaatgcatggacttgctctcgggaggaatattgttaagaacttgcacttggctgggaagcaagggatgttgagttcatctccacccgcaaaccttgaatttaaagaaccattgtatgatgttaaggaactccgttccattgcaccagtagaccacaagcagcagtttgatgttcgatcagttattgctcgaattgttgatggaagtgagtttgatgagttcaagaaactgtatggaactacacttgtaacaggttttgctagaatttacggacaacctgtagggatccttggtaataatgggatattatttaacgaatctgcacttaaaggaacccatttcatcgaactttgttctcagcgtaacattcctttggtctttcttcagaacatcactgggtttatggttggctcaagatccgaggcaaatggtattgcaaaatctggagcaaaattggtgatggcagtttcttgcgcaaaggtgccaaaagtgactataatgattggtgggaagttttggtgcgggaaattatgcaatgtgtgggccgtgcttttaacccaaatttcctgttcctttggcc

SEQ ID NO: 16408 - DNA, 532 bp, Gossypium hirsutum
  Clone ID: uC-gsronu33B101g07b1
tcgtcacgcgtccggttaaaggaaatggtaccatttttctagctggactcacctcttgtcaaagctgctacaggagaggaagtgtctgcagaggatttagggggtgctactgttcattgtaagacctttggggtttcagattatcttgctcaagatgaaatgcatggactcgctctcgtgaggaatatattttagatcttgcacttttttgtatacttgttattttgtgctctttttctctttttatctttttttcctcctatttatttttataaatctattattttatattttttttcttctacctttttttgttttttctttttttattttctcatttttctattaatttctttatatactttgtttttttttttttttctatttattctctctattaatctccttattctttcttatccttttcttactttatcctttttttctcttcttattatatcttattaatcctttttcttttttcatctctttctcatctttttactaaatttatttattttcttttcttatt

SEQ ID NO: 16409 - DNA, 377 bp, Gossypium hirsutum
  Clone ID: GOSHI-09MAY01-C27905_1
cctagggtcgtcgaagcttagactacttcagtaaagtcttcatttttaggtaaaaaagaaacacacaaatggttgtgctgtcatcggcaacttcaatgagaaccaaaaaaaccaaagcagtagggattcccgtcgttgatctttccctcgataggtccaccgtatcggagctaatcgtcaaagcttgtgaagactatggtttcttcaaggtcatcaaccatggcgtacctagtgatacaatatcgagacttgaagacgaaggggttcgtttctttgacaaggaagcaggtgattagcaacgtgcagggcctgcaactccatttggttatggtttaaagaacatcggtcttaatggtgataagggtgaacttgagtac

SEQ ID NO: 16410 - DNA, 1064 bp, Gossypium hirsutum
  Clone ID: GOSHI-09MAY01-C27865_2
cccatgcgtccgcccacgcgtccgcccacgcgtccgtccacgcgtccggtcgattttattggacgatcctgtgaatggtgagaaagaagctattccaaataataattcagctaggggttatgaagttattgatgccatgaaggctgccttagagagtgcttgccccaacactgtttcctgcgctgatattctcgctattgcatctgagcaatctgtcagcaccctggcaggcggtccttcatgggcagttccactaggaagaagggatgggttcacagcaaaccggacactcgccaactcaaacttgccaggtttcaacaatactctcgaccgattaaagaacaggtttagcaatgtggggcttaacaccagcattgatctagtagccttgtctggtgctcacacatttggcagagctcagtgtttaacttttaccagtcgattgtacaattttacgggagtgggtgatacagatccgaccttgaacaccacatacttggaagaactacgccaaatatgcccacagggtggaaatagtagtgtgttgacaaatcttgatcccacaacacctgatggtttcgacaataactacttcacgaatctacaagttaatcgaggcttgcttcgaagtgatcagaatttattttcgactgagggtgctgatacaattgaaattgtgaataggtttagtagtaatcaaacagctttctttgaaagctttgtggaatctatgatcagaatgggaaatataagccctttaacaggtacggaaggagaaattagatcaaattgccgcgccgtgaattcagcaactatcagatccaactcagatgctgctctcgtcagctcaatataatatttgctgagctcaaggctaagaaaaatgggcagaagagaagctattttcctactcaaaatcaaaacgaataatatattgtaactctttgatgcctacaataaccccccacgcacttttgtttcacacaagatgattcacaaaaatatttctctgtcacttttggggttttctcccacaagttaatataaaataagtttaagagttg

SEQ ID NO: 16411 - DNA, 694 bp, Gossypium hirsutum
  Clone ID: GOSHI-09MAY01-C27865_1
cggacgcgtgggtctgaaactcaccttccatattatttaaactaaatacaggagtcatttgttttgggggaatgcctgagaaaatggcttgttttcaatatatagtagctgctctatgctttgcagttttacttgagggatcgttatcaaaagctcaactgaccccgacattttacgatgaaacatgcccaaacgtgacagccattatccgacatgtgctcgtgaatgcttcgttttcagatccaaggattggtgccagtctcatcaggcttcacttccatgattgttttgttcaaggatgtgatgcgtcgattttattggacgatcctgtgaatggtgagaaagaagctattccaaataataattcagctaggggttatgaagttattgatgccatgaaggctgccttagagagtgcttgccccaacactgtttcctgcgctgatattctcgctattgcatctgagcaatctgtcagcaccctggcaggcggtccttcgtgggcagttccactaggaagaagggttgggttcacagcaaaccggacactcgccaactcaaacttgccaggtttcaacaatactctcgaccgattaaagaacaggtttatcaatgtggggcttaacaccacatgattatagcctgctgtgctacactttgcactatgttaactttacatcgatgtcatttacgg

SEQ ID NO: 16412 - DNA, 610 bp, Gossypium hirsutum
  unsure (1)..(610): unsure at all n locations
  Clone ID: AI055279.1
atttaaactaaatacaggagtcatttgttttgggggaatgcctgagaaaatggcttgttttcaatatatagtagctgctctatgctttgcagttttacttgagggatcgttatcaaaagctcaactgaccccgacattttacgatgaaacatgcccaaacgtgacagccattatccgacatgtgctcgtgaatgcttcgttttcagatccaagattggtgccagtctcatcaggcttcacttcatgattgnntttgtcaaggatgtatgcgttcgatttattggacgatccttggaatggtgagaaagaagctattccaaatattattcactttgggttttgaaaagttttggatgccttgatggttgctttaaaaatggcttgcccaaaatgtgtttcttgccctgaattcttgcttttgcgttttaaccattttgaaagaacctgccgggcggtctttattgggccgttcacttaggagtatgtatgggtttccaagaaaccggaaacttgccaatcaaactgcccagttttacaatctcttgaccgtttaagacaggttagcatgtggggttaacaccagcttgatctatagcttgttgtgctacac

SEQ ID NO: 16413 - DNA, 394 bp, Gossypium hirsutum
  Clone ID: LIB3135-022-Q1-K1-F4
cccacgcgttcgatgggaaatataagccctttaacaggtacggagggagaaattagaggaaggggccgcgccgcgaattcagcaactatcagatccaactcagatgctgctctcgtcagctcaatataatatttgctgaactgaaggctaagaaaaatgggcagaagagaagctattttcctactcaaaatcaaaacgaataatatatctgaactctttaatgcctacaataaaaccctacgacgcttgttgattgtaaaaataaaattaagcacgatgcatggcaaaacactgtactaaagacatggcgaggacgttacaaagaatgttcatgctgcacaaaaggctctttgggtgcgtgcaaaagcgaaactctctggctcaacttggaaaa

SEQ ID NO: 16414 - DNA, 383 bp, Gossypium hirsutum
  unsure (1)..(383): unsure at all n locations
  Clone ID: LIB3048-029-Q1-L1-F9
cgaggggccagtctcatcannggcttcatcttccatgattgggttttgttgcaaggagtgtgatgccgnntcgattttattggggacgnnntcctgtgannatggtganngaaagannagctattnnncaaataatannattcagctagngnnggttatgnnaagttatnntgatgccanntgaagggctgccnnnttagagaaggttgctttgccccaacaacttttgtttccttgcgcctganntattctcgctttattgcatttctganngcaatctgtnncagcatccctggcaaggccggtccccttcaatgtggcagttctcacttaaggaagaagggggatgtggttcaatcagcaaactncggacactttcgcca

SEQ ID NO: 16415 - DNA, 279 bp, Gossypium hirsutum
  Clone ID: uC-gsronu33B050e04b1
tccacgcgtccgaaattgccgcgccgtgaattcagcaactatcagatccaactcagatgctgctctcggcagctcaatataatatttgctgaactgaaggctaagaaaaatgggcagaagagaagctattttcctactcaaaatcaaaacgaataatatattgtaactctttaatgcctacaataaaaccctacgacgtttgttgatttacaaaaactatgctctgtaactttttgtgtttattacttagaaggtaatataaaataagcttaagagttg

SEQ ID NO: 16416 - DNA, 442 bp, Gossypium hirsutum
  Clone ID: GOSHI-09MAY01-C27525_2
ctgtgctatatagttgcttgattgtctgtatgtagtggttgttcctgtgttgaagataccatatattgctgcattttgttgcattttcaaatggattttttctgttgcagattttaaatcttctattatatacccaaaatttcaaaattttatgcccatatattgagacataagtataaataaacttatctatgtgtggctgattatctttaatattagtaaagcctcttattgtttgtcatgaatcaagtgactgacaccacttgttagtgaatttttttttaaaaaaaagcatgttaaatcttagtaaatataagaaatactttatataccttttaacttcatgtgttgaaaggcatgttatgatcttaggtttaatcatgtgtacagaactgtcttctgcagattgtgggttttagtgaatggatattgtcttgatgag

SEQ ID NO: 16417 - DNA, 605 bp, Gossypium hirsutum
  Clone ID: GOSHI-09MAY01-C27525_1
cccccgcgtcccaacattcacttaggaggaagcgaagaacaaaatgagaggattaatgaacaagctagtgtcccgctctctctctgtcgccggcaaatggcagcaacagcagctccgccgtctcaacattcacgaatatcagggtgctgacttgatgaacaaatatggaattaacgtgccgaaaggagttgcggtttcttccatcgatgaagttaaagaagcagtcaaatctgccttccccaatgaaaatgagttggtggttaaaagtcaaattttggctggtggaagaggcttgggaacattccaaaatggttttaagggtggagttcacatcgttaaggctgaccaagttgaagatattgctgggaagatgcttggccagatacttgttaccaaacaaactggcccccaaggcaaagttgtcagcaaggtttacctgtgtgaaaaattgtcacttgtgaatgagatgtactttgctatcactctggatcgtaaaactgcgggtccggtatgtttccaaactctgtagattaatctttatggctgctggagacgtcatttttgttcacctgattacttttgttaagattaaatgattctcctga

SEQ ID NO: 16418 - DNA, 371 bp, Gossypium hirsutum
  Clone ID: LIB3048-024-Q1-L1-D3
tctctctctgtcgccggcaaatggcatcaacagcatctccggggtctgaacattcacgaatatcatggtgctggcttgatgaacaaatatggaattaacgtgcctaaaggagttgcggtcttttacaatgatccactttatgaatcaatcatatgcccatatcttgagacatatgtataaatactcttatgtatgagtggctgattatctttaatattagtaaagcctcttattgtttgtcatcaatcaagtgactgacaccacattttagtgaatacttttttaaaaaaaagcatgttaaatcttagtatatataagaaatactttatataccttttaactgcatgtgttgaaaggcatgttatgatctt

SEQ ID NO: 16419 - DNA, 830 bp, Gossypium hirsutum
  Clone ID: GOSHI-09MAY01-C27605_2
tggaaatatgctgtgctttggagctcagcaccgaacccctgtttgttggtaaagtagcatatacggggaagcattgttgggtttcctatgatgatattttcgctggcaaagcaaactcgaagttagttcccgagtatccggcggaatggttacttcagtttgcatcaggaatcaagacaatagtgctcgtacctgtgcttccacatggagttctgcagcttggttcattggagatggtagctgaagatttgtctattctttcatgcatcaaagatagatttgcctgcaagaacattcacacccagttgatatcatcagatatatcaagtcctttcgagaagttagaagcgtcttcaagtgcattgatgggcccactgaactctaaagattcaaatgctgttaacagtgttgaatcaaataagcttttagctttagatcatattgtgccactgttaagtattcagaatgaattcaaggtgcctggaataattccctctgagattttagaaagtgagagtgagaataggattagtgtgccactagttagccttagtgaattaccgtcaccactaagccaatctgtaagtgttgatcagcttgcagtaggggagagtgaactgtttggtttctattgccttaaggaggaattgcaagcttatcctgaatgtaatgcttacagagtgggagagtgcggagaaatcttagatgaagttatgaatccttaccctgctggatactttcttgaaccacctgatattgatgatgtgaattttttaagttttccaattaattttatattgtggggggggggggggggtatatttttataa

SEQ ID NO: 16420 - DNA, 709 bp, Gossypium hirsutum
  unsure (1)..(709): unsure at all n locations
  Clone ID: AI055087.1
ccgcatcttaaatatgcatggggagaggggtttgttggtaaagtagcatatacggggaagcattgttgggtttcctatgatgatattttcgctggcaaagctaactcgaagttagttcccgagtatccggaggaatggttacttcagtttgcatcaggaatcaagacaatagtgctcgtacctgtgcttccacatggagttctgcagcttggttcattggagatggtagctgaagatttgtctattctttcatgcatcaaagatagatttgcctgcaagaacattcacacccaattgacatcatcagaaatatcaagtcctttcgagaagttagaagcgtcttcaagtgcattgatgggcccactgaactctaaagattcaaatgctgttaacaagtgttgaaccaaataagcttttagctttagatcatattgtgccactggtaagtattcagaatgaatcaaggtgcctggaaaatatctcctgagatttagaaagtggagtgagaatggatagggtccaccagtagcctagtgataccgtacactagccaantgagtgtgacanttgaatggaaaggactgtggttcattgcttaggagatgccgctttccgatgatcctacggggggggcggaaatttaaagatttaacctcccggggtttttaccctttttaaggccttcttattcaaagtgtataaaaaggag

SEQ ID NO: 16421 - DNA, 608 bp, Gossypium hirsutum
  Clone ID: GOSHI-09MAY01-C27335_1
ccatggggccgcacttaataacagcagtagccaaattcgatctcttatcatcaacccctagtttctcccctttaattgtaggcttgatctgccctttcgcactcaaatattgcatcaatttaagggttggtgttgctcggctttacattgatttaatccatgcaggcaggctcttcttttttcagttgaatcggatagtccttgaagctgatcatcaaccagcagcagctccggccggtaatggtagcagatggcaacgagctctccggttagtttgccggaggataataacccatgcgagaaggtcgccgccagcgttagaattcgacgtggctagcttccatactctcaccatgctttcactgtaagcactcagattctatttcagggtgagaaacataagaatcttatatgatccggaaaaccagaaatttagttttcatatgagtgtatatatctaggtttcaaatctctttaaaggtttaattttgattttagtcccttttattatgctgaaatttaagatttgatccttggcaaaatttaaccatggtttttgtaaattgttattagtatgtgcgaattgataacaccgttgttgttggctt

SEQ ID NO: 16422 - DNA, 553 bp, Gossypium hirsutum
  Clone ID: GOSHI-09MAY01-C27275_1
gctgcatttgttggaatctttcagggagttatttgtatgcacagaaagattgcatccaaagaccacaagctggtgtattgggtggctggtgctttatctgctctttctgtattgctggtgaaaaaatctagacgcagcgaacttgctctatatgttcttccacgagccacagaatcgttgtggtatatttcagtaaatcggcaccttcttcctgatgttaaaaattctgaggtggcgttattttgtgcatgcatgggaggaatcatgtactacctagaatatgaaccagatagcatagcaccattccttaagggtcttatccgccggttcctatctagcagaataagcaaccccggcagttcatttgatcggacagcttcctacacctacttgcagactcttgatgccatgaagaagccaaaaccagaggataatccacagcttgatacttcagctcctaaacaatacagtcttgagtctatccaggggctctaagcccctgaatttcacttgctcaaaccattctttgcaatttatattaatttcttgctat

SEQ ID NO: 16423 - DNA, 838 bp, Gossypium hirsutum
  Clone ID: GOSHI-09MAY01-C27235_1
ccttctcatcgcagttctcacccaccgccgtgtccgctggtttttttccggatctgacccgtagcccgtgtcggatcgcgtcgattcaggtacagcaccccaaattgccgagtccgggcaacgaaggtggcatggtgtgtgaactgtgaacagagtgtttaagagttgaatatgataaagtattatggagcttgaagaactaagaaaaacttgctattagcagttaaagtttcaagcttaaaaatgggtatggtatggtcctgactgcataagctactgtccctagcattggtatgtttcgcgccagaagtatttgtgctcgactctcaacccatttcaagacaagacccttttgcagcagcatcaaagatggcaagaacaagaagaagaacaatatcgacattgttgatggcaagattgaatcaaatgtgagcactttcaatgagtcgtatcgtcagcttgacaatcttgacttcttgactgctgctaagatcctcttcactcatcctccaaagaaaaagaaatttgggctagatttccatttggtgcagctcttctttgcgtgcatgccttcattggctctgtacttggtagctcaatatgctcgctatgaaatgaggaaaatggaagcggagctagaggagaaaaagaagcacgatgaagaagaagaaatgaaaaggaagcaagaagaagaggagaaagataaagaggtgtaccaaattgcgcctaatccagagcttttcgaggtaaaaaggagactaggtaagctagaggaggcagtaaaggaaatcgctgctgagtcaaagaaacaatcggcagttagaataactaaaactca

SEQ ID NO: 16424 - DNA, 257 bp, Gossypium hirsutum
  Clone ID: LIB3145-044-Q1-K1-D5
gcttaacatctgttgattttatatttggaagatctcttggtttactgctggtttaaaaaattatatttgttctgtaacagctgtgtacttggtagctcaatatgctcgctatgaaatgaggaaaatggaagcggagctagaggagaaaaagaagcacgaagaagaagaaatgaaaaggaagcaagaagaagaggagaaagataaagaggtggaacaaattgcccctgattcagagcttttcgaggtaaaaaggagac

SEQ ID NO: 16425 - DNA, 1224 bp, Gossypium hirsutum
  Clone ID: GOSHI-09MAY01-C20975_1
cccacgcgtccggttttcattactattttatatggagaaccctcgcgtcccccctcgcgtccgctagaaccgattcccggccgagctatctctagaccagtgaagaaaagggagaagttggcattcgccatagggaagagtgaagagaaatgtgatgtattcaaagggaggtgggtaagggacgagttgacccgtccgctgtatgaagaatcggagtgtccgtacatacaaccacagttgacgtgtcaagaacatggaagacctgatactgagtatcagaaatggagatggcaaccccatggctgtgatcttcctagtttcaatgcgacattgatgttggagaccttaagaggaaagagaatgatgtttgttggagactcattgaaccgaggtcaatatgtttcaatgatttgccttcttcacacgctcatccctgagcatgctaagtccatgaaatcatacaataatgatgccctcacagtgttccgagccaaggattacaatgccagcattgaattctactgggctccgttccttctcgaatcaaactcggataatgccgtagtccaccgggtaccggatcggatcatgaggagaggctcgataaataagcatggcaagcattggaagggtgttgatattttggttttcaacacctatttatggtggatgactggcttggacataaaaatcttgaaagggtcttttgaggatgaggagaaagaaataattgaagtgtcggctgaggatgcctatcgtttggcaatgagaagcatgctgagatgggtgaggaaaaacatggatcgcaagaagacaagagtgtttttcactagcatgtctcctactcatggtaagggcattgaatggggaggtgagccgggaaagaattgtataatcaaacaactataattgaagatccaaactattgggattcgaatagtaggaaaagcataatgaaggtgattgcagaagagttcagtaaattcaagcttcccatcacatttgtcaacatcactcaactctcaagttatcgaatagacgcacacacatcgatttataagaagcaatggagtccattaacagcggagcagctagccaacccagttagctatgctgattgcgtacattggtgtttgccatgcctttaagacaacttggatgaacttctctttttcaaagttgactatcccttgaaaatatatattcattttctatcatgaaatt

SEQ ID NO: 16426 - DNA, 447 bp, Gossypium hirsutum
  Clone ID: GOSHI-09MAY01-C20905_2
aaaaatatgatattagcctggattttgagtctcagctccgccatggcagtagctcgttgccaagatttttactcccatgccggaccatacgttccgcctccacaaaaagtaacctatctccacttctttttacacgacactgtgagcggcaacaaccctagcgcagtccccatagtcagtccaaacaccaccacctcgacgggcttcggcggcgtgatagctttcgatgatccactcaccgttggccccgacataacatcagaggtcatagggaacgctcaaggcctctgggtgtcgacaggcaaagacgttttgactctgatggcctacctggacatcgggtttacgaaaggtgaattcaaccgcagctctatcacgtgttttgtcgaggaatccaattaccgaatcggagcgtgagcttgccgtggtcggagggaagggaaagtt

SEQ ID NO: 16427 - DNA, 602 bp, Gossypium hirsutum
  Clone ID: LIB3584-009-P1-K1-G10
gcgttcgccccgcgtccggaaattgaatgggggggggtggggagtctcagcaccgccatggcagtagctcgttgccaagattattactcccatgccggaccatacgttccacctccccaaaagtaacctatctccacttctttttacacgacactaggagcggcaacaatcctagtgcagtggggggggggggtccttacaccaccacctcgacgggcttcggcggcgtgatagctttcgatgatccactcaccgttggccccgacataacatcagaggtcatagggaacgctcaaggcctctgggtgtcgacaggcaaagacgttttgactctgatggcgtacttggacatcgggtttacgaaaggtgaattcaacggcagctctatcagtgttttgtcgaggaatccaattaccgaatcggagcgtgagcttgcggtggtcggagggaaagggaagttcaggatggcgaaagggtatgcacaactcaagacttattccgtgaatttcaagactggcgatgccattgttgagtataatgtggactgggaattcacgattaaaatgattatcttgctagctttttaaccttcttctatggga

SEQ ID NO: 16428 - DNA, 509 bp, Gossypium hirsutum
  Clone ID: GOSHI-09MAY01-C20745_1
agtaggaatagcttttttaactcaattcatttcattaacaaaatgtaaaatggagtttcatggtaatgaaatattaacacaaatcaaagtatgatagttacataacaagatcaaaaccttttaattttagaattcattaagtgcttcatgcaaccactcttacgatatggtattttattaggtcggaatttggactgtgaggcgagaatcatggaccacgaagcgaggttaaacataagcatgttggcgtttggtcgtccggtatcatccctcctcctttgcttgtattaacagcttctagcattctcacaacctcctccattgcagggcgtttctccggattcgcatcccaacattttttcatgatgtttgctaaagaattcgggcagcatctcgggatatctggtcgtagattctgtcgaacaacagcagatgacacatctgcaaagctaaggtccggataaggcatatcgcatcaataaaattaccacagcaaatgccaaagctgt

SEQ ID NO: 16429 - DNA, 793 bp, Gossypium hirsutum
  Clone ID: GOSHI-09MAY01-C20765_1
tctggatcccaaacgtttaatggatccgaaaaccggattctgtcaccaaaccggaacttacagtggccttagacggcccctccctttgccgccaatcaatcaaccgctttccgtggccgaattttgtctctcccttttccagcggacttccactgacggctccaccactttcgtcgtcaatgaaaccgccggcgaatcgctatctcactctcaattcgtttctcaagtacgttccctagcttactctctacagcagcgttactctctttcccaaaacgacgtcgctttcgttgtctcaccgccttcgattcatattcccgttgtttacttcgccttgctgtctttgggaatcatcgtttctccctcaaatccactcagttccaactcggaaatcgcttaccagatccaactcagtaaatccgttattgccttcgctacttcaaaagccttccataaaatcccttttctttaacacggaaccatactcctcgactcgcccgagtttctctccatgttaactgagtccaatatcgataacatcattaaaagcgtgaaggtaaaccagtccgacacggcagcgatattgtattcttcgggaaccaccggccgagtcaaaggcgtgatggtgactcaccgaaacctaatcggaattttggcgattattcatcgctataacatggatcaaggcaaagataacggtatgccgccgtggcgaccggtgacgtttttcaccgtgcctttgttccacgctttcggtttctttatgttgttggggatggttttgtcagcgagt

SEQ ID NO: 16430 - DNA, 451 bp, Gossypium hirsutum
  Clone ID: GOSHI-09MAY01-C20605_1
acaaaatagaggaaggaaggggtacagacagaaaagtaaagcgctaaggagaagaggaagaagagatggcagtgagcgcaacggtgatcggagcacttctgggactgggcacccaaatgtactccaacgctctccgcaagctcccttatatgcgacatccgtgggagcacctgttggggatgggtctgggagccgtgttcgttaaccagcttgtgaattgggacgctcagctccaacgggaccttgacaatatgctcgaaaaggccaaggctgccaacgagcgccgctactttgatggagatgatgattaatgctttcgccctatcatcagataagacattcatgcgccaagctactgtggtcataaaccggttcagattgtgagtgggtgactttggactccttgttttgcttgcttcctaccctttttcttcttcttttgcttttattt

SEQ ID NO: 16431 - DNA, 265 bp, Gossypium hirsutum
  Clone ID: LIB3272-050-P1-K1-H8
agaagaggaagaagagatggcagtgagcgcaacggtgatcggagcactactgggactgggcacccagatgtactacaacgctctccgcaagctcccttatatgcaacatccgggaaagcacctgttggggatgggtctgggagacgatcacgtaactcagaacgtgaattgtcatggggaattccaatgttaccttaaaacaaagcattttaagggtccgggtggaagctcacgcaatgttcattttttgcccagtgctttgaat

SEQ ID NO: 16432 - DNA, 337 bp, Gossypium hirsutum
  Clone ID: GOSHI-09MAY01-C20635_1
cttcattcttttcaaagggtcctaattcattgtaccagacattgcggaagcccgatataagtgcaccaggagcggatatattggctgcatattcaccggtagcttcaccatcgataactacaaccgatccaaggcgagtttaatactacatactatcaggaacctcaacgtcttgtcctcatgttgctggtgtagctgcatacgttaagacttttcacccgcattggtctccctcagccattaaatctgctcttatgactactgcttgtccgatggatgcaccgacgaatcaaagagctgaatttgcttatggatcatgacatatgaaccctgtcaa

SEQ ID NO: 16433 - DNA, 472 bp, Gossypium hirsutum
  Clone ID: GOSHI-09MAY01-C20195_1
ttgccctagacggtgcaattggatcattttcagcctggatgcagagcaatggtcttttaacatgttttatcgagtcacaagtgctgcaattatagtaatagtcatccaccgacttgaaaccaaatgaaacccatgttaatccttcatcaaagtccctgacagattttgcattggcagctaaggggatattaaattcaccccccatatcttcaaataggagagcatccttcttgaatattttacagaggcctctagcaagagctctgtcataaacattgttaaagcccttgtggaagtcctcatcagcgatgaccaaattgaaaggattgcacaatgacaccgcaccagaaagggggcaagcatgagattctggaccaagatatcgaacaagaatgtttgcacccagagaccaaccaacagcgcctagattagcttctgggtatctagcaccaacatgtttcactacttcata

SEQ ID NO: 16434 - DNA, 780 bp, Gossypium hirsutum
  Clone ID: GOSHI-09MAY01-C20155_3
ccagtttccacttcgatttcgtcatttttgggaccaattctttatgtgcttttgctcttaatctagctgtgttcttgcttgttggaaagacttctgctttgaccatgaatgtagctggggttgtcaaggactggttgttgattgcattctcatggtctgttattaaggataccgtaacacccatcaacttgtttgggtatggtctggcattcttgggtgttgcctattataatcattccaagttacaggctttaaaggcgaaagaagcacaaaagaaggctgcacaagctgatgaggaaggtgggaggttgctggatgaaagggaaagtgagggaactgacaaaaagagggaatctgagaattagatcttgtcggtggttaattttaggatatgagatatggaaggaggtagcagataagggctaaagggagagtggttgggatgatgatcgtgaaggtttgcatttaaaggcaaaaggaaatgaggggatcggatttcttttgccccatttggctgcatttgggttttggtatgttgtgtttttaggcctccgttccatagactagttattatgcccatttcttagtaataccaggggattgcgattcacatatgttgcttatttcacaggttaatgtatgttagtagaggaagaacaatctaaaatgccctgtactctgttggtttttatttaatttgtatgtcttcttcaaaaaaaaaaaaagaagtgaaaaaaataaaaaaaaaaataaaataaaaaaaaaaaaaaaaaaaataaa

SEQ ID NO: 16435 - DNA, 777 bp, Gossypium hirsutum
  Clone ID: GOSHI-09MAY01-C20155_2
tttttttttttttttttgaaaaagaaaagttaatgtactgttatttattgcaacagaaaattagaaattcacacattcatatcataaagtaattaacaaaacatataaataataaattaacgattcctctcttaattttaacaattttcttcttcttcttttgttgctacatttattgcatgaggtactgctggggaacttgttcacactaaccaccttcattaaatgcgtaaaacaatgcaagatagcttaaggatgatggggagcaaagggtggcaaaggaggccattttcctaacttggggtggtggtggaaatacttgggaggaatcttagggagaggaggcagcttaggaagaggagggtggtggtggaaatacttgggaggaatcttgggaagaggaggtagcttaggaaggggagggcatggcttcttagggaatggagggatcttgggaagtggagggagtggcttgtaaggaatgggagggaggggttttggattgtaggttggaacaggtggtggaagtggcttcgtatacactggaacccggggaggtagtggtttgttgtatacaggaactggagggggcttgtagattggaaccggaggagggactcgtttcttgtataccggaactggaggaggcttatggactggaactggcggaggatgtggttccggaactggaggagatttatagactggaactgggggaggacatggtttcttgtatactggaactggaggtggatgtggtttcttatagactggaac

SEQ ID NO: 16436 - DNA, 874 bp, Gossypium hirsutum
  Clone ID: GOSHI-09MAY01-C20155_1
aattttataatttatgtataatttaaaaaatattatcaatataaatagaaaaagaaaagttaatgtactgttatttattgcaacagaaaattagaaattcacacattcatatcataaagtaattaacaaaacatataaataataaattaacgattcctctcttaattttaacaattttcttcttcttcttttgttgctacatttattgcatgaggtactgctgtggaacttgttcacactaaccaccttcattaaatgcgtaaaacaatgcaagatagcttaaggatgatggggagcaaagggtggcaaagaaggccattttccgaacttgggatggtggtggaaatacttgggaggaatcttagggagaggaggtagcttaggaaggggagggtggtggtggaaatacttgggaggaatcttgggagatgatgatcgtgaaggtttgcatttaagggcaaaaggaaatgaggggatcggatttcttttgccccatttggctgcatttgggttttggtatgttgtgtttttaggcctccgttccatagactagttattatgttcatttcttagtaataccaggggattgtgattcacatatgttgcttatttcacaggttaatgtatgttagtagaggaagaacaatctaaaatgccctgtactctgttgttttttatttaatttttatgtcttcttccttttgggatgttgacaaatattactgtaggtactccttccattcacggggttttaatgcttttttattttattttatataaaaaaaaaaaaaaaaatgtttcttccttattatctggtttctttgttttgttcaatgtttcgctcacagcttgattaataacatacattggatct

SEQ ID NO: 16437 - DNA, 414 bp, Gossypium hirsutum
  Clone ID: AI731355.1
ttttttttttttttttttttagaaattcacacattcatatcataaagtaattaacaaaacatataaataataaattaacgattcctctcttaattttaacaattttcttcttcttcttttgttgctacatttattgcatgaggtactgctgtggaacttgttcacactaaccaccttcattaaatgcgtaaaacaatgcaagatagcttaaggatggtggtggaaatacttgggaggaatcttagggagaggaggtagcttaggaaggggagggtggtggtggaaatacttgggaggaatcttgggaagaggaggtagcttaggccggcgagggcatggcttcttagggaatggagggatcttgggaagtggagggagtggcttgtaaggaatgggagggaggggttttggttt

SEQ ID NO: 16438 - DNA, 471 bp, Gossypium hirsutum
  Clone ID: GOSHI-09MAY01-C20055_1
aattaaatcaaaaacttgatctaaaaacctcatcaaaaggtagggattttcgttgtgtgacctctattttttccaggatgccttataaatatatgaagtggaaggccataaataaagcagcaatgagcaaagagccagtcatgtcatcaaaccaccattatgacagccaagtaagcaaatccaagcatgtattacttacacataacgttctggaacaatcaaaggtagcatgcgaaagaaaaagtccgcaatcccgtcccgagtttcctattccagtctttttctatgcttacaatggcccggcacgggcacttgtgttgtaaattgcgaatggtacttcaatagcagtcacaatgtgattacatcatcttttggtccttgttgcttctatgaatcttgaccccctccggatgaacctccacctttcttaccgaaaatcatttcatcgacatcatccatcatgtcatcatt

SEQ ID NO: 16439 - DNA, 379 bp, Gossypium hirsutum
  Clone ID: uC-gsronu33B153a06b2
cggttatgcggactttttctttcgcatgctacctttgattgttacagaacgttatgtgtaagtaatacatgcttggatttgtttacttggttatctttatggctgtcatattggtggtttgatgacatgactggctctttgctcattgctggtttattcatgtccttccattttatatattaatatggaattatggatattgggtttctatatttattttattatttttttctgtttttttttttttgtatattagattattttttatttacttttttatttatttattaatatattttttattattttttttagtgtgtgttttatttttttttatttaattttttttattcttttgttatttattacttattatttt

SEQ ID NO: 16440 - DNA, 440 bp, Gossypium hirsutum
  Clone ID: GOSHI-09MAY01-C20045_1
ggttcggtttttgattcagggaccggtcaatatagtacggtgttggttgttagggcagggggccttcaagactcatattttctgggtgatatggatccatatgttataattcaatacaaaggtcaagaacgcaaaagcagtgcggccagaggtgatggatctagtccatcatggaatgaaaaattcacattcaaggtggagtatccagggtctggtggtgactacaagctacttattaaaatcatggacaaagacaccttctcttctgatgactttgtaggccaagccaccatatttgtgaaggatttgttggcagttggagcagatgaaggaagtgctgaactacatcctactaaacatagtgtagttaatgctgaacaacgttattgtggagaaattgtagttggtcttactttcaccaaaaaggaagaaaatgatta

SEQ ID NO: 16441 - DNA, 439 bp, Gossypium hirsutum
  Clone ID: LIB3083-028-Q1-L1-A3
gaaaaaaaacgcatcaaattcaaggatggcagttggaatattggaagggttgttggttagtgcaaaaggccttcaagactcagattttctgggtgatatggatccatatgttataattcaatacaaaggtcaagaacgcaaaagcagtgcggccagaggtgatggatctagtccatcatggaatgaaaaattcacattcaaggtggagtatccagggtctggtggtgactacaagctacttattaaaatcatggacaaagacaccttctcttctgatgactttgtaggccaagccaccatatttgtgaaggatttgttggcagttggagcagatgaaggaagtgctgaactacatcctactaaacatagtgtagttaatgctgaacaacgttattgtggagaaattgaagttggtcttactttaaccaaaaaggaggaa

SEQ ID NO: 16442 - DNA, 1122 bp, Gossypium hirsutum
  Clone ID: GOSHI-09MAY01-C20065_1
aaaggatgagaaggcagaagagaaggcaacagaggaaaagaaaggggaaccaccggcacccacccctccgcctcctccttttatcttgttagtggacttgcattgtgtgggatgtgcaaagaagattgagaaatccatcatgaagattagaggtgtggaaggagtggagatcgacatggctcaaaaccaagtgacaataaagggaataattgagcctcaaacaatatgtgctaagatcatgaagaaaaccaagagaagagctaaagtactgtctcctttgccaccagctgagggtgaacctataccagaagttgtcacttcacaggttagtggattagcaaccgtggagcttaatgtagacatgcattgccaagcctgtgctgaccagctcgtggtttagtggccacatgtgacaggcgtacagactgccgtaacagagcatagcacaggaaaagttacagtgacgggcaccatggatgcaaacaagctagtggattatgtatatagacgcacgaaaaaacaggcaaggatcgtgcctcaaccagagcctgagcctcaacctgagccagagaaacaagaagaaaagaaagagggcgaagagaagccgaccgaagaagccaaacctgaagaaaacgcagagaaaaaagaagaaaagtcccctgaagaaggtgaaaacaaagaagaagggaagaaagaaggatctgcagaagcagaggaaaatagtggcaatcatggtaacgaggaggaaaccatgaagagaatgatttactattaccagcccctttacgttatcgagcaaatgccgcctgctcctcagctttttagcgatgaaaatcccaacgcttgttgcatttcgtgatgatttatcattacgacaaacttctttttctacctgtagattatttcaattttactataaggttgagaagtatacagataactagtatatataattaatgttcagtccttaccactggagatgagagttttagagaaatctggtggacggttctcacatgatcaatcagggaatgtggtaaagtgggatcatttgtacgactgggttgattaattacttgaccattctgtacgaaaggcatactcataatagtttattccatt

SEQ ID NO: 16443 - DNA, 565 bp, Gossypium hirsutum
  Clone ID: GOSHI-09MAY01-C20275_1
aaaatctcaaaatattttttgagatattattttcccataagaatcattttaacattattgggctaacatttatacaattactattccaaaaaaaaaacttgaaacaggaaaataaattgcaaaaagccttgtctattttcaaaggtaattaagataacattacaggggacaaattacaattgggagtttaaatataaaaccctaaataaaaataaagggggaaaaaaatgataacaaaggggaagatacctttggaaatttctcagcacaactttatgacagcaaaatttgttcattattgctacaaattgtaaggggctgagattatgacaattttttggacccactaatttaataataataataataataataattataatgtgactcccccaaaaaatctttaattaattaattaattaatttttcttcccctcttcaccgccttcttccaagtaagccttctttctcctatcaacaccagcaaacaaacaaatcacaaggaaaaacgtggcgtacatcccatggacctttcaattagtcttaggcggttgatgcaaaaaca

SEQ ID NO: 16444 - DNA, 465 bp, Gossypium hirsutum
  Clone ID: LIB3828-013-Q1-N6-G11
gcaaaaagccttgtctattttcaaaggtaattaaaaaaacattacagggggcaaattacaattgggaatttaaatataaaaccctaaataaaaataaaggggaaaaaatgacaacaaaggggaagataccttcggaaatttctcagcacaactttatgacagcaaaatttgttcattattgctacaaattggaagtggctgaaattatgacaagtttttggaccgactaatttaataataataataatggacccccccaaaaaatctttaattaattaattaattaatttttcttcccctcttcaccgccttcttccaagtaagccttttttctcctatcaacaccagcaaacaaacaaatcacaagggaaaaacgtggcgtacatcccatggaccttccaattagtcttaggccgggtgtttcataaaagtggttttgcattaaccgcctaagactaattggaa

SEQ ID NO: 16445 - DNA, 848 bp, Gossypium hirsutum
  Clone ID: GOSHI-09MAY01-C20215_1
aagactagaatttataatattattatcattttggtcattaatggactgaagaaagcagttaaaagtttatttaggattgccaaatgcaaagtgaagcctcttagcaaacctgtcattgaaagcatattcaagacgcagaagtcctaaaggcgagttcagtcggataccaatcccgtatccgtatccactcccgcgcttattcctcgcagcggctggattccctggcacattggggcctgaccatagatcatgtccataatcagcaaaaataactccttccacaggccctagcatttttaaagaaacttcactggagccaactacgtaagattgaccagagcctacagcaccttctttataacctctcacgctgttcgttcccccaatagcaaaggcttcatgaggaggaaaattacccactacatgtccacccgacaatcttagaagaagacgagcaggaccaagtttaacacttttactcacacgagcattcactctgttgaagtacagccaatcaggaatgacaggaagtcccccacgcgtccgcggacgcaacatcgaggatcctttgttaccagaaccaggatagacacactcaactttggccagtaacatatcgtcatatagcttaccacttgccgtgagtgggctgccatagaagtctttaataagtggattttttttttcatcatgagcacctgcgcgctgaaaaaagagcccagctgttccactccattttggcctgagtggccgactaaactcgacaccggctgttacacggccaatgctgagactgctattatcatgttggttgccatgaacaagtgtgccagagccccacgcgtccg

SEQ ID NO: 16446 - DNA, 616 bp, Gossypium hirsutum
  Clone ID: GOSHI-09MAY01-C21975_1
tgatctcatggcacaagtttcccagctacaaaatgaaaatcaccagattttaacaacggtgagtatcaccacacagcgttacttgaacgtggaggctgagaactcggtgcttagagctcaagccaacgagcttagccacaggttacagtccctcaatgatatcattgattccttaaatggatgcaataacaatattggtggtgctgacggtggtggtgattgtggtggttttaatgttgcaacgattggtttcaatgagatggttgatcatagctttattaaccctttcaatttggcttacttgaatcaacctatcatggcttctgcagataataacatgtttcagtattgatcttcatgagcttattgatatatatatagatatatctgatcaaagggggttaaagtggaggagatttcaatagaggaaagatcatggtgtttttaatgtttttttggggtttggtttttagagtattttcaatgattattagtagtaggggaattgtgcttattggggtttaatttgtataacctatccaatgcaaagcaaaatattattaatgtattttgaggttttagttttttttttattttcattttttaaattataatt

SEQ ID NO: 16447 - DNA, 648 bp, Gossypium hirsutum
  Clone ID: GOSHI-09MAY01-C21935_2
cccacgcgtccgtgacaaggcaggtgaaaggaatgaaccttatgacctacgatccaaatccttgattgtggtcaaggtatggtgcttgattctagtgtttgtagggacgttcgtaggtggtgtgtcaccctattttctaaagtggaaccagggttttttggtgctgggaacacagttcgccggtggggtttttcttgggacagccatgatgcatttcttgagtgatgcgaatgaaacttttgaagacttgacgagtaaagaataccctttcgcctttatgttggcatgtgctgggtgtgggttgactatgctagctgattgtgtgatctcttatgtgtacgggaaagggaagaattcatgtaacaatggtgatttggagcttcaaggggctgagcagagcaaaacgaatcctcatggtcaaggcgatccgccagttggtaatggcactgatacaaaatgtgcgcagtcttcatctctcacatctgcaagttctttcggggatagtgttctgttgatcattgcattgtgcttccattcagtctttgagggcatagcagttggagttgcaaaaactgaaactgatgcttggaaagccttgtggacaatctccttgcacaagatatttgcggcgatcgcaatggggatagc

SEQ ID NO: 16448 - DNA, 565 bp, Gossypium hirsutum
  Clone ID: GOSHI-09MAY01-C21935_1
tttctctttttcttctttctctacctctctcttttcatctctgtcacctgccacgggggcagtgatgctgacggtgatgatgatgatgatgacaaggcaggtgaaaggaatgaacctcatgacctacgatccaaatccttgattctggtcaaggtatggtgcttgattctagtgtttgtagggacgttcgtaggtggtgtgtcaccctattttctaaagtggagcgcagggttttttggtgctgggaacacagttcgccggtggggtttttcttgggacagccatgatgcatttcttgagtgatgcgaatgaaacttttggagacttgacgactaaagaataccctttagcctttatgttggcatgtgctggatatttgttgactatgctagctgattgtgtgatttcttatgtgtacgggaaagggaagaattcatgtaacaatggtgatttggagcttcaaggggctgagcggagcaaaacgaatcctcatggtcaaggcgatccaccatcttcatctctcacatctgcaaggtctttcggggatagcgttctgttgatcgtt

SEQ ID NO: 16449 - DNA, 706 bp, Gossypium hirsutum
  Clone ID: GOSHI-09MAY01-C21925_1
tgtggctcctctagtcctcactgcatcttcccagctacttcttttcctctctatgggtctctgtttcctttcatttcccatttattttgcttcattttcagctgttggaactgtgagtccttttgccatttcatgtgatcaacattttggtaaaaaaaatggtagcggagtcttggtttcgtagtttttggaaaattccgcggaggcatgaaggaggttctgagagagttgaaattggagtattagcatttgaagttgcaagcttgatgtctaagcttgtgcatctatggcggcgtctaagtgataagcaggttagtaggttgagagaggagatcatgacttgtgtggggattaagaagctggtatctgaagatgaaggttacattggacacttgatatgtgcagaaatgattgaaactgttacacatgtggcgaagtccgtggctaggcttgcaaagaaatgtagtgacccgggtttgaagagttttgaacttgctttcactgagttagtccagattggggctgacccttattgttggacattttccttaaagaaaatggacaagaaagtgaagaagatggaacggtacatttcagtgaatgcaactttgtatcaagagatggaaatgctcctggatcttgagcaaactctaaggaggatgaaagccattgatgcagagccagagaatttgcttgaatttcagat

SEQ ID NO: 16450 - DNA, 700 bp, Gossypium hirsutum
  Clone ID: GOSHI-09MAY01-C21885_1
aaggggacagatccttggaaaggaagaaaaatggcggagcatttggcgtcgatatttgggactgaaaaggacagagtgaactgccccttctatttcaagataggcgcgtgccgtcatggggatcgctgctcgcgtctccacaccaagcccagcatcagccctactatccttctctccaacatgtaccaacggccggacatgatcaccccgggcgtcgacgcccagggtaaccccatcgatccccgcaagatccaacaacattttgaggctttttatgaggatttgtttgaggagttgagcaagtacggtcaaattgagagtttgaacatatgtgataacttggctgaccatatggtaggcaatgtgtatgttcagtttagagaggaagaacacgctgcaaatgcagtaaagaatcttagcggaagattttatgctgcccgtcctatcattgttgacttctcacctgtgacggacttccgagaggccacctgtaggcagtatgatgagaatacttgcagtcgtggtggatactgcaattttatgcaccttaaaagataagcagggagttgaggcgccaggtattgggaaggtcaaaagagcaagtctaccgagcagagcctaccgcgtgtatagcatgagacgcctatggtacggacatagaacgtcaagatgggtatatccgaaccgacaagaccaaact

SEQ ID NO: 16451 - DNA, 499 bp, Gossypium hirsutum
  Clone ID: GOSHI-09MAY01-C21845_1
gccacacggatatacgcgggcttttacagaagcttttctctctctccggttcctttgaagggaataaaagaggagaggagggaaagtacgtgaaatttgtgaatttgttttacatcttcgttaatctgcgttgagcatttcacacagcctttgtagaggatatatggagaaacaaagaaagaaagagaaaccggcctcttccagacaaatattctgcctttcaggtccttcacacctcacttcagtcgactgggataactttcatgaccgaagatcagttgctgcaagcttggttcagggagtgtacatcctagaacgtgatcgccaagagaaccgcaaagaccctctggctcatgcaccagcttggtgggagttcttcaatttccagttgttccatattcttgtagatgatgttgataactccatttttggtgccatttttcaatccaagccttggtatttcacctacaaccattcatctcaaagttcttcacattat

SEQ ID NO: 16452 - DNA, 731 bp, Gossypium hirsutum
  Clone ID: GOSHI-09MAY01-C21865_1
tttctctaggcgaatctactataagggggcgcttccgaattgtcctgtcaagaagaaagtcgaaagatcacttgatggccaaatagctgaaatcgtttacaagggtgaacacaatcatccaaagcctcagcctccaaaacgaaactcgtcccaagggttaggagttactagtgatggaaccggtcaagatgccaacaactccttgtggagtaataatcataatgagaggagcgaaggttctgaaactagagctgaaaatcatagtgaagtcaggttgtctgtgcttccggcttatcaagtcaaagctctggcaccttacgaacatgttaccaccggtggagcttctgaaaattccgctggtcttagtggggaatgtgaagaagcaagcaaggagggagcagatgttgaatctaaaagtaaaagaaggaaaaatgagaatcaatcaagtgaagtgggcaccttaggggaatgcatacaagaacctcgtgtggtagtgcaaagttgtactgattctgagattatgggggacgggtttcgatggagaaaatatgggcagaaggtggtgaagggaaacccatatcccagaagttactacagatgcactaatgtaaaatgccacgtgcggaagcatgtggaaagagcatcagatgatccaagagctttcattacaacatatgaaggtaaacataaccatgagatgccacttagaaacacaaatcatgtgaccgccc

SEQ ID NO: 16453 - DNA, 980 bp, Gossypium hirsutum
  Clone ID: GOSHI-09MAY01-C21835_2
gttggccaagaagcacttgtagaagcataacgtgcgatactggcttctagtgattgctttcaacatggacagatctgcctatgaactgcgcttcttgaatattgccgagcatgaacgggaggaggaagaatgatgaatcagctacacatttctaaaacctagattactggtacattacgtcttaggatcactgtggacatccatttaaggtgtcagagtgcagatttgccacttcagaccgtactgtaacctgcaatgaagaaccgaatgctgatagttatgaggtcaatcctgatatgatatcacaacttgaagcagctggtctatcatttgttggcagagatgaaagtggtaggcggatggagattgttgaactaccaagccatccattttttattggtgttcagttccatcctgaattcaagtccaggccaggaaaaccgtctgcacttttctcaggacttattgcagcatcatgtggggagttggatgaacttctaaacaagtctagtcatgtcagcaaagtagtgggaagtgggataagtaatggaaaagccacttataacggtcatcaaaatgggagctatttcaatgctttgaacggatcattaaatggtgtgtgcgtcaatggcaacggtgtgcaccattaaggaaagctgcgtggaagggtttttgatagaaaagtggtttacatttatgggtttatgtgtgtccaacagtttttgataaaaaactcggttctgtttgtacagtttaagaattacggtaggattttagcattgaagggactttattttgaaaaattactggttttgagtgttaaacaacacaatatatgcagcacagatagagaaagtggaccggacaagtaggttagcgtcctttgtttgccagtattttgggtaaatccatgttggattttgagaggagaatttccggttgtttgtctgtcgtatgaacaattgaaagaccccatacat

SEQ ID NO: 16454 - DNA, 1238 bp, Gossypium hirsutum
  Clone ID: GOSHI-09MAY01-C21835_1
gctagtgacaaatgtttatgacatgcttcatgatcctgttaaattgccatggttggaaaatatgttgggcttaaagattcttacctttctgttttaaaggcacttttgcatgcatctgttggctgccgcaagaagctagttgtcgagtgggttgaagcaagtcatcttgaagatattactgctaaagtggatcctgacacttacaaagcagcatggaatcgtttgaagggtgctgatggtatcttggttcctggaggttttggtgataggggagtgcaagggaaaattcttgctgcgaagtatgctcgtgaaagcaaagttcctttcctgggcatctgccttgggatgcaaatagctgtagtagagtatgcacgttcggttcttggcctgtatgatgcaaatactgaagagtttgatcctcaaacctcaaatccttgtgtcatatttatgccagagggttctaaaactcatatgggaggaacaatgcgtctgggatcaaggaggacttacttcaaggttcctgactgcaaatctgccaagttgtatggtgatgcaacctttgttgatgaacggcatcggcatagatatgaggtcaatcctgatatgatatcacaacttgaagcagctggtctatcatttgttggcagagatgaaagtggtaggcggatggagattgtagaactaccaagtcatccatattttattggtgttcagttccatcctgaattcaagtccaggccaggaaaaccatctgcacttttctcagggcttatcgctgcatcatgtgggcaaatggacttgcttttaaacaaatctgatcatttgagcaatggaatggcaaatgggataaatgggaaagcaacttccaagccccgggcaaacggaaactgtttcaagtcatccaacggatcattaaatggtgtatacagcaatggtaatggtgtccaccattaaggaagctggatagaactcttctggttatgggtttaagtgtgcgtctccaagagctttacatggacaacgttttatattatgggttaagtttccccaagagtttttcaatagaacttgggcgtgtctgtacagtggtcgagtacaagtagggtttagcaattgagaaacatactttttcccagggagttgttgggttttttggtgttggatgaaacggatatatatatcattatatgcaacaggaggttagagaatatggacaagaggtgtccaaagttgaactt

SEQ ID NO: 16455 - DNA, 839 bp, Gossypium hirsutum
  Clone ID: GOSHI-09MAY01-C21435_1
tcgccggtcgcgtgggtgagaagcttgatgaacacgggggacgtcttatgaaacaaaggataatagtgatatgtacttggacaaagatgggaaagatcgtgaaataaatattcgcatggaaactagatctagggttaaggattctattcctgcttggatcagaggtctctgttcaagcacctggtgaaatcccatacagtggaatatactatgatccaccagaagaggaaaagtacgtattcaaacacccccatacaaaaagaccaaaatcacttagaatttatgaatcacatgctggaatgatttgcatggatgctgctacaggcagtgttaataggaatctagataatccattgttagttgtgcctcttaaaccctctgttgcggagtttccattcgccaagaaggaagagcaaagtgatcgattgagtaatttggctggagctggttaccaagcttttgaagatgctattttaaataaactgacaaagactgccgaaaaacaacaaaaatgatgacaaaaaggtcttaggagcagattgcaaatgcatcagtggcattttatccacagatgttttgccaacatgtcctaaatttactagttcgggattgaattttagctttctgaagtataccttttaagaagagagatgaaccattccggttaaagacataagttcttatgtatgtaaattctattattcgtttattaatgctcaatacctcaaactattttatctgtactttttgtaagtagaaaattcttcttacaatctatgcaataacatttgttttcttattgtaagaatatttttaacattgtaacttttaacattatt

SEQ ID NO: 16456 - DNA, 507 bp, Gossypium hirsutum
  unsure (1)..(507): unsure at all n locations
  Clone ID: LIB3582-021-P1-K1-H2
cccgtgtatctgataaatccctaacccatcccctcctccatttttttccccaaatcgaaaaaccacctccaccgatccaccattccacctccggtgtccggtcctccacgactattaaagtccttgcttgtattaatctggctattgagagaaacaagctattgaggcagaaaaacagcaggcccagtcaggttgctatcacttagagtgagttgacttagcagctgcttttttccgtatggngatggaaacgaaggatgagttcatgactttcgagccagagcaggcccaagtgggatctcgaggaccgacgttagtaattaacgagatggtgatgaggaacgtcaagtcttatgccggtgagcagcgcgtcggtccctttcacaagattcgcatggaaactcgatctggggttaaggattntattcctgcttggatcaagttctctgttcaagcagctggtgaaatcccatacagtggaatatactatgatccaccagaagagag

SEQ ID NO: 16457 - DNA, 365 bp, Gossypium hirsutum
  Clone ID: LIB3083-064-Q1-L1-G5
gaactgttttctaggtttggcgaatttgaagatattgtagtgaacagttcaaagaaaaaggggtctgcgcttgttgtcatggctacaaaacatgcagttgattctgctacaggcagtgttagtgggaatctagataatccattgttagttgtgcctcttaaaccctctgttgcagagtttccagcccccaagaaggaagagcaaagtgatcgattgaataatttggttggagctggttaccaagcttttgaagatgctgttttaaataaactgacaaaggctgccgaaaaacagcaaaaatgatgacaaaaaggtcttaggagcagattgcaaatgcatcagtggcattttatccacagatgttt

SEQ ID NO: 16458 - DNA, 611 bp, Gossypium hirsutum
  Clone ID: GOSHI-09MAY01-C21425_1
agcaagacctaacatagcttttttaatcgcagacaatggtaacaatataaacataaattgcatactttttcggcatgcagcagctatgtagcttatcatgagagattaagacaaataagttaatcaaacagcaaaccaacacattaacacccaaatcaatctccatctcatttctctcttactacgctttttcatcatcatcatcacaacttttagctgtcaccagggaaggtgcccctcacaaaagaacctcgacagtggccaccaacgatgacttctttaagacgatatatggaatcgagcaccctaccagtcttctcgttgttgatgctgagctgccacttaagttgcaatgcctgccacctctcttgttgccaacgctgcccaagaatcacaaggcccatcacagctgcagcaatgaaaacggaccaaaatgcatttgtctcttttgcatgaacatacaatgaaactgctcttctcttccaccaagcttcgcatgggagatcagaggcatcacatttatcatcttgaggctttggggactgagggatatctgaaggaaaacctaagccttgctcagaagcttcaataagttcagaaacagtaacaga

SEQ ID NO: 16459 - DNA, 364 bp, Gossypium hirsutum
  Clone ID: LIB3083-082-Q1-L1-A6
gccaacgctgcccaagaatcacaaggccatcattgctgcagctgtgatgggccttgtgattcttgttgccaacgctgcccaagaatcacaaggcattgcagcttaagtggcagctcagcatcaacaatgagaagactggtagggtgctcgattccataaatcgtcttaaagaagtcatcgttggtggccaccgtcgaggttcttttgtgaggggcaccttccctagcgacagctaaaacttgtgatgatgatgataaaaaaaagcatagtaagagagaagtgagatggagattgtttgggtgttaatgtgttggtttgatgtttgattaacttatttggcttaatctctcatgataagctacat

SEQ ID NO: 16460 - DNA, 363 bp, Gossypium hirsutum
  Clone ID: GOSHI-09MAY01-C21765_1
gggggggggtctagaactagggggatccccccggccggaaggattccggcccggggccatagggtttttccgatctataccaaaagaccacagggatggatctatggatttcctttttcagcagggtattttctttttcctttttcagtttggttcgatttttttaacttatttcctttctctctccactgtttcgaacccagcttctcttttgtcgaagccatcggagctcggtatttgttctcagcttcaagtgattcaccttcgttcgaatcgattgatcggtaatgtaacggcggatttctctcggttgtctcatttaaaagagcttgatttgggttctaacacgttaaatggtgaaat

SEQ ID NO: 16461 - DNA, 575 bp, Gossypium hirsutum
  Clone ID: GOSHI-09MAY01-C21085_1
gcagagcatgtgccagcgtcttcaccaacagagcatcagcaccaggcggcaactaaatactcttcccaacgtacccattttaccaaccagaagccattttcgattaaaataacgaaataaaagcctatttttaatcaactttttatccatttttacccatttaagatccaacatttggcatttattccaaactttatctaaattttagaaaccctttttctgctagaaaaattattaataatggtagaaaaatagataaaaagttttaataaggtttttaagaaaaaaatctttttttttcttctgatattctgggaatccttatccataatctattcagcacttatcgtctttgcttaccttttctgtttattcgagatcgtttcttcttctctttttatttaccccagctccttctcttttttcttcttttaatcccctttccagattaaaaaagtttgggtgtttggtttttttgtctgggtttagaggtttttattattattatacaaaaacaaacccttgaggaatcgctgtgtctgaagctaactctttggatttcatccaagggggga

SEQ ID NO: 16462 - DNA, 473 bp, Gossypium hirsutum
  Clone ID: GOSHI-09MAY01-C21075_1
tttccttcccttcttccttctttttcatacatattaggtgtagcattgttcactgttcctttgaatcccttcttcatccaaaatcttggcttagagatttcaaagggccttaagatcatgtccatcttaagcaagagtccaagcagcaacatgggttcttctcctttcttccatgaattcaagaaacaagcttctttcttcctcaaggagaagatcaaaacagctcgtttagctttaactgatgtcacccctgctcagctgttgactgaagaagctacgaatgggaatccatgggcaccaaacacccagtctcttggttccatctcaagggctgcttttgaattagatgattattggaggatcgtggagattttacataacaaattggacaaatttgaaagaaagacatggagaacctcttacaattctctgatagtgcttgaacatttgttgactcatggacccatattgta

SEQ ID NO: 16463 - DNA, 586 bp, Gossypium hirsutum
  Clone ID: GOSHI-09MAY01-C21005_1
cccacacgtggtcgaaatgaaatgggatatggagatcgaggaaatcgaagcagttctcgagaaaatctgggacttacacgacaagctcagcgacgccattcactccatttcgcgagctcacttccttaactccatcaaagccctaaaaaaatccgacaagaagaagctctacgacgatgtcgtagtcggcgcggacgataacaggactggcttcgtgttcgtcaaggaatttagaatcgacgatggtgactccgcaattcaagaggccaagagtcttaatgatataagaactgctctcgagaatctcgaggaccagctcgaatttttccacacagtacaaatacagcagcgtgttgagagagatgctgccattgcacgattagaacaaagccggataattcttgcattgagattggctgagcatcatggtaagaaatacaaagtaattgatgaagctctagctgtcgtgggagacgtacacgatgccaagccgttacatctcacctaaaaacctttactgttcaccgattaatccatcttgagagaatctgcatcgcatgaacggaagcacactaatatgctaata

SEQ ID NO: 16464 - DNA, 572 bp, Gossypium hirsutum
  Clone ID: GOSHI-09MAY01-C21025_1
gggagctatcgtggtcttttcttgagggatggtgttgcagagatggaagctgctgccaagaagtttgagcaagaagataccatatcaaaagagattgagcgacggcctggaaatggtgatgatttgtattcatatccactgtcaaataattcacggtccgatcttgaggatggattctttccatactgtgagattaatgttgtgttgagtgtaacaacttcaactgtgggtcaaccactagaacataaacagccttcaattagccttgatattccaagttgtcgacctgaagcggcggatgctctctcttttgctgcatcaactctctgttctttggcggagcaggttgggtcctcaaccaaaaatgtacaggggctaggtaatctaggaaacactactgataaacggttctctgaagaggtctcgcgaactacatacaaattgtctgtatcctgtttttcacacgaagattgtcctggcattaatcaatacagcggtaatacatgtgttcatgaaccagtgagtaggtctgtagtggaccgagacatgataattccgattcagaggtattt

SEQ ID NO: 16465 - DNA, 450 bp, Gossypium hirsutum
  Clone ID: GOSHI-09MAY01-C21215_1
gctatctccacttgtcacgccaatgtgttcacagaaaaccgattagggacgttccttgcggaattccaactgtacgtctaaccacactaaatcaaacgacgtcttttttaacttagtgttgatctgactttatgagctgacaaaatcatactcttaatccagagaagtaataagtactgaaattttaggagttaaatgggctcaggttcgtaactcacgagttttgacgaggttaatttcggcctaaagctgaaaatgggtttagttggctaaagtttgggacatgtcggtatttgataaattaattaaggtaaatgggtgaaaaggtgggtgatgtgattgaatatgggaagtggaatatatattaaagcggggtggctgactattttgaaaaaaaatttgaaaatgaatttctaattgtgatttactactgggaatttaaatttttag

SEQ ID NO: 16466 - DNA, 375 bp, Gossypium hirsutum
  Clone ID: GOSHI-09MAY01-C22985_1
ccaccatcaccacctaaacacccctacaagtacggggccccacccccaccatcaccacccaagcacccttacaagtacaagtctccacccccaccacctccagtttacaagtataagtctccaccacctccacctccatcatcacccaagcacccctacaagtacaagtctccacccccaccacctccagtttacaagtataagtctccaccacctgcacctccatcaccacccaagcacccttacaagtacaagtccccaccacctgcaccaacatcaccaccaaagcatccttacaaatacaagtctccaccaccaccaccatccccacctaagcatccctacatgtacaagtccccaccatcaccaccacca

SEQ ID NO: 16467 - DNA, 1018 bp, Gossypium hirsutum
  Clone ID: GOSHI-09MAY01-C22975_1
gcattgaagaatcatagaagagcaagttttacttttacatggcaaccttgacttattagttccaaaaagtcaaattgaagtggtaaccgaatacaagcatcaaaaggaaactcacatttttcctgcagcaatagcagcttgcacaaaatcctcacaccgggaaaatccacccgataaaacatcacccaaggcaccaatgatgtcgaaagcctcttgcaaatcacttgcagaagtcatgtcatcgagccatgagagcaactctttggagaaccctatcatttccttcacattcaacaacctctctttcatcaccacctcccaaccttccaacccttctccttcggttccggttgaggttccttcagatttgcctttggtggctgccaaacttgacgatttcttaaccttgaatatttgctgcaactgctcaatcaagcctgtatacaccagcatgggtcgaacaattgacagtagctcatcaccaccagtttctgaggtggaggtgggacttttgctgctacttgctgattctatcttagctgttgaccggccatgagtatgctgcatgtaggcatgatatattccacgttgcaagaagtcacgtcgatgttgcaaccatgactcgtaggactctgaaagcagtgaatttaccatcatgaactgaacggtttcctctgttcccaaaggttgagttccaccggttgcagactttgaatctgatgttgaagaggatatgtatgttgctactgtcttggccatgttacgcctctgagaggggcctccctgttccagaaggtgacgagccatttggatcatgaaaggcaaaaagcgggagttgctttcccttccaccgcccctacactctgcactgaatgatgcccctgttgcaaatcgagctagcatcagaacaatatcataagtcaacagccggagccgacttccatcagcacgaccaagagcattgaggttatcccagtattggtcgacataccggacatactgtgctagtggaactgac

SEQ ID NO: 16468 - DNA, 831 bp, Gossypium hirsutum
  Clone ID: GOSHI-09MAY01-C22905_1
cccacgcgtccgtgaactttcagggggagccattgctggtatcgttattggttccgtgattgcttttatattgattttggttctctcgatatgtttatgtagaaggagaagtggtaagaaaatggaggctcaggcaagggacattggcccttcaaaacaggctgaggttgaaattcctggagataaggtggtatcaatggagaatgatcataatcatcaccataataataatacaggtaatggcttatctggggttgtcaaaaaggatgcaaagagcagtggtaaaggtaagaagagcttgtcatttttccggacgggggccgaggtgttcgatctggacaatttgttgagagcttcagcagaggtgttagggaagggaacatttgggacaacctataaggccacattggagatggggttggttgttgcagtgaatagaattaaggatgtggcggtgccagagaaggaacgcgaggcaaaaatggtggctgtcggagccatggatcaccacaacttggtcccgttaagggcgtattacttcagtggggatgagaagcttcttgtttatgattacatgcccatgggaagcttgtctgcacttttgcatggcaacaaaggagctggtaggacaccattgaattgggacacacggtcaagcattgcacttgaagcagctagaggcattacatacctccattccaagggaccattaatctcacatggaaacatcaaatcctcaaatatcctactcactacatcctacgaagctcgtgtatccgatttcggtcttgctcagtttgctggccccacatctaatcccaaccgtgttga

SEQ ID NO: 16469 - DNA, 628 bp, Gossypium hirsutum
  Clone ID: GOSHI-09MAY01-C22925_1
cagggcattgctagggtttaaaagattgttagtcatggctggatcaggaagttcgatgctgtattcatttcttttatttactgtcattctttcactccaagaaatgtatcgagggaagttagcatcgtcggagctttttacaatacttggaggattcatcagctccctcttgtttcttgtgttactaacattcattgggaatttccaggaagcaagtggagtgaagaccggctggggtgctgtcatattagcagaagctgtatccctgattgctgctagcactgtccaccgagtgtgtatcacaacatgtttcttgttctcggttgggttactttatgaggtcaacaagatttcagcagtgactgtttctaaaattgaatcgaaagcaaagaggcactgagctaataattccttttcagtataaaaggtatttgattaaaggttgcctgtttgtgctattaggggactaagatgtaatcaaaagttatcagtgatgtcaatttagaaaatttcctttagacgttactgcttttcacttgttattggctccaaggacttctacatgtgtggatggcaggtaaatcttcaccccactctgcttcctcaccctttatttcctttgaatgac

SEQ ID NO: 16470 - DNA, 743 bp, Gossypium hirsutum
  Clone ID: GOSHI-09MAY01-C22495_3
ttttttttttttttttttttttttttttttttttttttttttttttttttttttttctttttaaaagaaaaaacagccattttctataaatttaagacataaatacataatatttgcaggcattttaacagatcaaaacatgtaagtttgaaaaagggcaattcaacttcactgctccatagagttttaagagtcaagacctgctgttgatgtacattgtctcagtcgaaatgccttaccggtggaaacacgcttttttcgtggtggcgctgggaaaaacaggcggtacagaaactctacaaatccattccaacaagaaagtaactgaaaaacaaataccatagaaaatgacaaagtacctagaaagctataatagcgaactgcacaacattttcccaacaaaattgtagcttattctttttgacttggatgtttcccaccttacacagtcctctttggatcacgagcagctgcaagatggtccaaaataaaatcaaacgctctggtgtcctctttcttagaattgttcatcatagaactagctgtttgagttggcaaatttgactggaaaatatcaggcataggtgatcctccatttgatccactggaaacatgattaatcccagcattttgtgcattaagattaccaaagtgttgtaagttagacattgtagcaagcaattgctgctgcgcaaagaaactccccatagcaccataattcataggctgagaggaaaaggctg

SEQ ID NO: 16471 - DNA, 1756 bp, Gossypium hirsutum
  Clone ID: GOSHI-09MAY01-C22495_1
ttaatgtaataaaattaatgtcgtaaattttaataatttattttggaaattcaaaaggctagtaacgtaaaacccaaaattaattgcacgtggggcatacatttataaaggctagcggccaaaaaaaaagagagccattttctataaatttaagacataaatacataatatttgcaggcattttaacagatcaaaacatataagtttgaaaaacggcaattcaacttcactgctccagagagttttaagagtcaagagttgctgttgatgtacattgcctcagtcgaaatgccttacccgtggaaacacacttttctcgtggcggcggagggaaaaacaggcggtacagaaactctacaaatccattccaacaataaagtaccttacacagtcctctttggatcacgagctgctgcaagatggtccaaaataaaatcaaacgctctggtgtcctctttcttagaattgttcatcatagaactagctgtttgagttgggaaatttgactggaaaatatcaggcagaggtgatcctccatttgatccactggaaacatgattaatcccagcattttgtgcattaagattaccaaagtgttgtaagttagacattgtagcaagcaattgctgctgcgcaaagaaactccccatggcaccataattcataggctgagaggaaaaggctgggttcaacgttattccgggaggaacaccatatggcatcgtccctaaaggaaacatcggagttgcattcatccccgtggcttgagaaccaaagatgccactcaaagcatcattagaagcttgttggctagaatgggtgttaatattggcaaacatattttcaggggcctcagaagtcattcctttctgcttcaaattaggtggattctcattcatcgacaagccagccattaactcattaacagaatttgttttattctctggctcgaatggagcttcagaattggtcccaaagatatcaattagttcagattttttattagcagccacatgattaccattgccaactgacttgtcatctatagtcatcccagagaaaagatcgtccacattttctctaccctcgccagagtgaaatgagacacctgcaaagggatcatcatcatatttctgtttgctgggactcagaccagcatctataccatctccaagtaagtcatcaataagtggggttccggtcagatttgaagtattttgattatgcgaatcttttatagatgtattttgtccatcataatcatcaggatcaccagtgtctatcaggtcaggcatttgaacaggagttgtcatgggctttgaagacttctctgaattactagccaaatcacctgcctgttctccattcaaaaggatcaacaccttgttggccttttctcttagagaagcttggggagactcggaacatctcaaaacaccgtcgcggggcccggcgcgtggggaagccacaatcacaaaatgctcatcttcctttctcctcaaaattgactcaagcacacacaccgctttcatgcgaacctgccacaatggagatagaagcttagattcaagagcatgacttaaagccaatgcatcaagctttgcagcctccacaaggaaagcctgaatagcatctcgagtaggttgtagacggacaccaccagatgtaactatagtttccaataatactctcttcacgagttttagtcgctgaataatttgagctagattcccctttgtcgttctgtttaaactct

SEQ ID NO: 16472 - DNA, 545 bp, Gossypium hirsutum
  Clone ID: LIB3825-022-Q1-N6-H5
aaaaaaaaaaaaacagccattttctataaatttaagacataaatacataatatttgcaggcattttaacagatcaaaacatgtaagtttgaaaaaggcaattcaacttcactgctccatagagttttaagagtcaagacctgctgttgatgtacattgtctcagtcgaaatgccttaccggtggaaacacgcttttctcgtggtggcgctgggaaaaacaggcggtacagaaactcttacacagtcctctttggatcacgagcggctgcaagatggtccaaaataaaatcaaacgctctggtgtcctctttcttagaattgttcatcataaaactagctgtttgagttggcaaatttgactggaaaatatcaggcataggtgatcctccatttgatccactggaaacatgattaatcccagcattttgtgcattaagattaccaaagtgttgtaagttagacattgtagcaagcaattgctgctgcgcaaagaaactccccatagcaccataattcataggctgagaggaaaaggctgggttcaa

SEQ ID NO: 16473 - DNA, 538 bp, Gossypium hirsutum
  Clone ID: GOSHI-09MAY01-C22485_2
ctctcttcctcctttattgttctttctaacaagccgctgtcgctgccgctgccgctgcctctgcctctgcctccacaccttccagcgtcttacgtcatatatctattcaatccatagctccccatttcttcgccgattctctctcactctcactctcggtctcttttcaaaattttcctgtcattcttttttagctttgggtaaccacaggccaaaaaacacacacgctataataggaagagagttttcgtgagagagaaaccctaagtttttctgccgtttctggtttttgtgatttttgaaatccgctgcttcatcggagactcatttcagataggacttccagaggactggaataagcactttagtcgctgtgggagtccgagatattagtgcaacttggttctgcaacaggtgtctataaaagccttgtaaagttcttggttggagttctgcagtggacttattgacaacaatggaattagctgcattaaacttaataatgccactttaaattggatcacttttgctttggatg

SEQ ID NO: 16474 - DNA, 1526 bp, Gossypium hirsutum
  Clone ID: GOSHI-09MAY01-C22485_1
ctttctttcttgcaatatcgttcggatgggcatgtgcctcataaaattctaaatctcctcctcgtgggcgtaatcggcggcttcttcttcggcggcgtttcaaagccaggcgaattctcaaaccaatataaataccaataaattagaaataaaatattataaactggatcaagagggctgccggagctcgcatcagcggacttatcaacaacaatggaattagctgcattaaacttagttaatgccactttaaattggatcacttttgctttggatgccccttctgcacgagctgtggtgtttggagttcacataggcgggcatttatttgtggaagttcttcttttggtggtcattctctttctgctttcccagaaaagttacaagcctcctaagcggccattgacaaagaaggaaatagatgagctctgtgatgaatgggtcccagaatcccttattcctcctatcacgcaagagatgctgagtgaacccccagtgttggaaagtgctgcagggccccatactataatcgatgggaaagaagttgtgaactttgcttctgctaattatcttggatttgtagggcatgataaattacttgaatcatgtacttctgcattggagaaatatggtgttggttcttgtggtcctcgtggattctatggcaccattgatgtccatcttgattgtgaggccagaatagcaaagtttttgggaacacatgattctatcctctattcttatgggctttccaccttgttcagtgcaatcccatgtttttgtaaaaagggtgacataattgttgtggatgagggagtccattggggaatacaaaatggcctctacctttctagatgcaccattgtttatttcaagcacaatgatatggaatctctagaaaaaactcttgagaaaattacagcacagaacatgcgggctaagaaattacggcgctacattgtggttgcctcgcggccgcagaattcaggtcaaatagctcctttggacaagatcatcagggggaaagagaagtatcgctcccgtgtcttattggatgagaccaactcatttggtgtacttggccgtactggaaggggtctgactgaatactgcggggttccgatagagaagatagacattgtcactgctgccatgggacatgcattggcaacagaaggaggattctgcactggaagtgctcgagtcattgatcatcaacggttgagcagttctggctacgtcttctctgcatctttacccccatatttggctagtgctgcaattactgctattgacatcttagagcaaaatcctgatctgacatcaaagctgaaggaaaacattgccattttatggaaaggactctctgatatccgggggctttcaatagcaagcaatccagaatcaccgattgttttccttgtgcttgaaaaatcaactggttcgctgaaaagtgacctccagctccttgaagacattgctgatcgtgccttgaaacaagaatccatttttgtaatggcttcaaa

SEQ ID NO: 16475 - DNA, 436 bp, Gossypium hirsutum
  Clone ID: LIB3145-016-Q1-K1-D2
cccacgcgtccgctcactctcactctcggtctcttttcaaaattttcctgtcattcttttttagctttgggtaaccacaggccaaaaaacacacacgctataataggaagagagttttcgtgagagagaaaccctaagtttttctgccgtttctggtttttgtgatttttgaaatccgctgcttcatcggagactcatttcagataggacttcgagaggactggaataagcactttagtcgctgtgggagtccgagatattagtgcaacttggttctgcaacaggtgtctataaaagccttgtaaagtacttggttggagttctgcaagtttgtctacattgtcttgttgtatgtagctgttgcgatctgataagttgaagagtgattatttgtttggttcataaaatggctattctgcagaagcaggcagataat

SEQ ID NO: 16476 - DNA, 1543 bp, Gossypium hirsutum
  Clone ID: GOSHI-09MAY01-C22635_1
gttcgtgcatttttcgcctgcaatttttgaaagcagtaatcggtcttcttctctttgttccctaaactaaacttttcttcgttggctgttttgagaagttttggtttctgatgtctccaccactgctgggcgtggaggaggaagtgcagagtagtgtttcttctccctctgttgaatgtatctccgagaatggcatggggttaaaggagcgtaattatcttggattatcagattgttcttcagttgacagcctccggtgtctcgaggtaatctgaatttgaaggctacggagcttaggcttggtcttcctggatcacaatcccctgagagagaaacagagctttgcttgttgaacttgggaaaacttgacgagaagccactatttcctctactcccttccaaagatggaatctgctcatcatctcagaaaaatgttgttactggaaacaaaaggggtttttctgataccatggatggattctccgaggtgaaaggctacgtgtacactgagaaaagttggatgtttcatgaagctggttctgattctgaatctccacaatctgtgggacatggaaaatatcctggtaattcaggggttaatgtgattttgtcaacaaggtctccgggagttcaagcatctgtaaagcaagatgagcctgcaaatgtgttacaagagcaacctcgtgctactaatggaaccagtctcaagcaaactgtcatttctaacaacaacaccggtgcacctgctgccaaggcgcaggttgttggttggccaccaataagaccatttaggactaaaacgctggctgcttcttcaaagaacaatgatgaagttgatggaaagcccggtcctggtgctctttttgtcaaggtcagtatggacggagctccttatctgaggaaggtagatttgagaacttattctacataccaggaactgtcttctgctcttgagaagatgttcagctgtttcacccttggtcaatgtggggctcatggtactcccgggaaggaaaccctgagtgagagccggttgaaggatcttttgcatggatcggaatatgtgcttacatacgaagataaagatggtgactggatgctggttggggatgttccatgggagatgtttatcgaaacgtgcaggaggttgaaaatcatgaagagctctgatgcaattggattagctcctagagcaatggagaaatccaaggccaacagcaaaaaagaatttggatatgggtgctaatttcctcgtgccaaacccgaaccaaaccaacaattcagaggtgaaatctgtagggtgtgttgtggagagtgaaagatcatatcatgcttcatctcatctataggttagttgcaagaaccatttactcatagatatcatatgatctcggaggaacctgtgacgtttaagacatgctctctattgtgtgttgaatgtgtgcccgatcataaagctggtacctgttatttgttcatcactacacaaatacacgatatcgcctaatgatctgaaggtgttgggttgctaacacgacataag

SEQ ID NO: 16477 - DNA, 442 bp, Gossypium hirsutum
  unsure (1)..(442): unsure at all n locations
  Clone ID: LIB3493-012-P1-M1-B9
atacgacctcactatangggaaaggctggtanccgcctggcaggtacccgtgtccggtaattctccgggatcgactccacgcccgtccgtatttaggtactaataacacttgaccactctgcttgcaaaaaacagatgacggaagtgtgtatggaaaacgcgggaccatggtacctctttttgtcaagggtcatgtatggatggagctccttatctgaggaaggtagatttgagaatgtattcaacttaccaggaactgtcttctgctcttgagaagatgttcagctgtttcacccttggtcaatgtggggctcatggtactccttggaaggaaatcttgagtgagagcangttgaaggatcttttgcatggatcggaatatgtgcttacatactaggataaagatggtgactggatgctggtttgagatgtttcatgggag

SEQ ID NO: 16478 - DNA, 583 bp, Gossypium hirsutum
  Clone ID: GOSHI-09MAY01-C22095_1
caaaaaaaaaaaaaacccccgctagaaaattaaggggagggaatactaacaagagaagagggagtttgggagatttcctttttctttttggatttttgatggcgagcagcagaggctattactcgagaccgaactaccgctttctgtccagcgatcaacaactgcaatcgccgttgagtcacgactcggcgtcggcatttgagttagacgagtctgatatctacaacaacggtgtctcgactcgctctgactcgcctgagttcaggtccaccagtcgagtggcgaagaagcagtccaacaagcgcggcggcggagggaattccgtcgtcggaggggcgccggcctccctgccggtcaacataccggactggtcgaagatcttgagggaagagtaccgagataataggaggagatcggagagcgacgataatgacgtggaagccgatgattggtcggaaggaggtgtcaggattccgcctcacgagtttttggcgaagcaaatggcgaggacgaggatcgcgtcgttctcggttcatgaaggggtagggaggactttgaaaggaagagatctgaggagggtcag

SEQ ID NO: 16479 - DNA, 504 bp, Gossypium hirsutum
  Clone ID: GOSHI-09MAY01-C22355_1
gaccaaaaaatacgagacacacttcataatatattatataatactttaatattacacaattttctttttcaggtacaaattttcactataacatttaattataataagttcacttgtgtttcaagatcaaaatctcatcatcttgaagtttcaattctctctccaacctcgagttcccgaactcactcctctggttcagccaaccaatagtatctgcagacacaatctcgatgttttccggtaattcaccatacaacaggccatgccacatcccaggatacaacttgaaactcttgtccgaacttgctgcatcattgtacaattgctggctcactgctttgtctgttactttatcttcccctccatgtagaactagaaatggtaatgaaacctcatggagtctttgttcaatttccaggctggtgtttagaagttcattggctgtgttcaaacgaagccgtcctttgtagcaatacggatttgctctaacctgagctcttattt

SEQ ID NO: 16480 - DNA, 395 bp, Gossypium hirsutum
  Clone ID: GOSHI-09MAY01-C22335_1
gttgaatatgtcggattttagagatgaggctcactcaagttcatgggatcactccgcctttatgggaacctatgctatgtatttggatcaaagacttgaattgatgcttttcgacaggaaaagcagtggaggcagtggcgctgggggaagtagtcatggaagtgctgatgatagatatggtgggcgagataatttccgatcaccaccaccgaggccgtacgaatatgattatggggatatcagaggtgataatggatatggaaattatgggatgacaaggagaacgaggtcttatggcgatatgagtgaggcagcggggagtgatgggagagatgggagagaggagaagaaagcagtgacccctttgagggaaatgacaccagagaggatttttg

SEQ ID NO: 16481 - DNA, 814 bp, Gossypium hirsutum
  Clone ID: GOSHI-09MAY01-C22255_1
tttctgaacctgatagtgttgtggcctcagatgtgtcaaaattggaggattctgcaagccatgctgagaatgtatcaggaaagccaaacttgatggagttcagatcattttcatcttctgatggagcagcggagggcccggtcttatgggcttctgcggctgtctcatcagatgcatccctcaagaaaactcctgcttcaaatgctaaatctgaaaggattaataaggggaagttcgcaccatctggtgggaagttggcaaaaatcgaggaaaaggttttcaatgatgatacaacaaaaacaagttctgaaggtgttgaacctcgtagatctaatcgcaggattcagccaacatcaacacttttgggagggctacacagctcgttggccatctcgaaaattccttcgggttcattcgacaaaagtcacaaaagtcaaagtagaagtatgagaggttgagaggtgccctcctgcaactaggggaatccagtcttaaaagaaattcagcgaatagatgaccaacatacaccagtgtagctttgtgtaaattatcagatgatagaggagaaagctaggaacgaaaatttgcttctttgtatttttgatgtagcggtagatatatacatatatatgtttagtgttctttagttttatttagaattattataatctgatctgtctaggccatgctcttttgtatatggaacgtctctaagtagttgggtttgataattgaagtgcagcatcggaagtgatatcaacccatgtattttgttgcatctaactgctcattgcttattcagccttctttgctc

SEQ ID NO: 16482 - DNA, 379 bp, Gossypium hirsutum
  Clone ID: LIB3083-079-Q1-L1-F9
caaaaacatgttctgaaggtgttgaacctcggggaggtaatcgcaggattcagccaacatcaagacttttggaagggctacaaagctcgttggccatctcgaaaattccttcggtttcattcgacaaaagtcacaaaagtcaaagcagaagtatgagaggtgaaacttaaatttcatctctctctattctcaaatcaacattgctgtcctttgagccttctttgttatgaaacgtacgatgattcatgcaattgtaactgtctggaaaataacaggttgagaggtgccctcctgcaactagcggaatccagtcttaaaagaaattcagcgaatagggatgaccaaaatacaccagtgtagctttgtgtaaattatcaga

SEQ ID NO: 16483 - DNA, 1051 bp, Gossypium hirsutum
  Clone ID: GOSHI-09MAY01-C22215_1
cagagatggttaatgccctgaggaaggctagtggacaggtggatcgggcaaatgcagctgtgagacggcttgagactgagaatgcagaaatcagagctgagatggaggcgtctaaattaagtgcatcagtatcggtcacaacatgtctggaggttgcaaaaagagagaaaaagtgcctgaagaagcttttggcttgggagaaacagaaagctaagttacaggatgagattgctgatgaaaaggataagattaaagatctgcaacgatgcttagctcgagtagagcaggatcagaaagaaacagagttaaaatggagagaggagttaaagtccaaagaacttgccttggctcaaattgaggaggaacgatgctccaaggaagcagctgaggcaagcaataaaaggaagcttgaagcattgcgcttgaagatagagattgactttcagcgtcatagggatgatcaccaacgtcttgagcaagagctatcccgtctgaaactatctgctcaatctactgagttgaatcatcaggccgataatttactcccaggaaggtcagaaagggtacaaaaccccaagggagaaacaattgctaagttccttaatgaattagataagctagaggattcttctgagaaagaagttaacggtgatagagaaatgcataatatgttcaaaagatgaagtctctattgtattcctgccttgtgcgcaccaggttctatgtgctaattgcaatgacagttatgggaagaagggtaaagctacttgtccatgctgtcaggtgccgattgaacagaggattcgtgtttttggtgctagttcatagtcgcatttttcggtttaggaaaatcctatccaaccaaaagcttcatacttggtttgccagttttcttatcctagcgccagtgagactgctggcttttgcatatacctaaacatgctgatactacttcagcatgatgagtttgtatgtaaataattaccgatgttctcttcggcttatgctttaagccttaaaataagttgaaacccgtgcttgttttgttgcc

SEQ ID NO: 16484 - DNA, 642 bp, Gossypium hirsutum
  Clone ID: GOSHI-09MAY01-C23975_1
acaaaaatgacgaaagactaaatgttattcaatatttctgttcttgccaaaggcaagaggagtacacatcaaatacagaaattttagcttaaaaaagcagtagcaccaacattttattgatctttctaactcacggggacattttcacaaacacttttattgattatattaacctcagtgacatttccacaaaaacttgttaaccagctacagtttacaaggcgataatggaggtccacacaaacaatcatttcccacaaatgaagaaacaggaaatttgttcttgggaagctgcccgcacagatggttataactcacattcaatttattgaacccagtaatcgccgcaggaaccttgccgtacaccaaattccgtgatatatccaactctttcagtgttttaacgattctcaatttccccaaatcgaacttcaacttattcccggcggccttaaattccaccaagaaatccgttcgattcaataaatcaactgggctacctgttatctcattctccgataaatcaatgtagtcataaaagtaagtttccgctggcttccaagtgtctaagttcattttaatcccacactttgctagcttgagtgaatatatgatcggagatgaagtgacccattttgagga

SEQ ID NO: 16485 - DNA, 374 bp, Gossypium hirsutum
  Clone ID: GOSHI-09MAY01-C23965_1
agagagcaagcgagttagacgacgaagagattataaacgtgactgattgcatatataaaatcggaaaattttaaataaatcgccttagatctcttagattcaaagtttcagttggcgatggcacaacctttggtgaagaaggacgacgatcgcgatgatgaagcggactactctccatttttggggattgagaagggtgcagtccttcaagaagctagggttttcaatgaccctcagcttgatcctcgaagatgctctcaggttatcacaaaacttccttatctactgaaccaaggagaaacattcactaaggtggaagctacagaagtcttctttgctgtgacaaagctttttcaatcaaaggatatagcttg

SEQ ID NO: 16486 - DNA, 517 bp, Gossypium hirsutum
  Clone ID: GOSHI-09MAY01-C23915_1
ccttatttttgcacaaccatacaagcaaactaaccccatctaggtgtcttcaacattgaaaaatgggaaagagctggctcctcctggcttttatactttggcagataattccaaatgaagcggccatcgctgtgggcggtggtgttggcattggtatcggtaatgcagggggcgttggtggcggaggtgtttggattggtggaggaatcggcagcaacaccccaactccttcagtcccttcagtgtcaaagctgagcagtgcttacactgctctccaagcatggaagtctgcaatcgctgatgacccaatgcggattttggagacttgggttggctcagatgtgtgttcttataaaggggtgttttgtgcagatccccaaagtggtgtggcttctgaatcgttcgttgctggcatagatctcaaccatgcaaatctacaaggcactctagttagtgaactctctgttctcacagatatttcgatccttcaccttaacagcaacaggttctcaggcac

SEQ ID NO: 16487 - DNA, 584 bp, Gossypium hirsutum
  Clone ID: GOSHI-09MAY01-C23815_1
gaaaatgatcgaggctaatcctggaaattcacttttcctcagcaattacgctagatttttaaaaaaggtttgtggggattttgtgaaaaccgaggaatactgcgggagggcgattttgggtaatccaaatgacgggaatgttctatctatgtatgctgatttaatctgggaaactcccaaagatagttccagagctgaaacttacttcgatcaagctgttaaagcagctcctgatgactgttttgtgctagcatcatatgcaaggtttttttgggatgctgaggaaaaaaaaaatggggaaaatttgagtgaagtaccagagccaagctttatccatggagttttttcaatgcctccccctttgactgctgctttttaagatccttctctgacatggcttgtatatttagctatttttctgacttttttgttcatggtcccttttttttgtttttaagtagaaatgatatgagtgaattatgggtaggtattgagaactctgttttgccttttctcatccttggtggtaccatataatgtaaaagggaatattaataatatatgaaaaattaatctttccagtg

SEQ ID NO: 16488 - DNA, 556 bp, Gossypium hirsutum
  Clone ID: GOSHI-09MAY01-C23805_1
aggaatctgtatgtcgcattcataaggcaaaggaagaaactgcagatgcagagaaattggtcgactctctaaagtccgagttagaaactatgaaggaagaaaagatccaagctctagataacgagaagcttgcggcttccagcgttcaagttcttttggaagagaagaacaaactcattaatgagttggaaaattctcgggatgaggaagagaagagcaagaaagcaatggaaagcttagcttcggcattacacgaagtttcggcagaagctagggaagctaaggagaagctgttatcgagtgcagccgagcatgaacattacgaggcgcagttagaggatctaagattggtcttgaaagcaaaaaacgatttgtacgaaaccatgcttgatgatgcaaagaatgagatcgatctttttacaaataccattgaacagtccaagaacgaataccagaattcgaaaatcgaatggtatcagaatagaaattcattttaatagatgggcataaaaaatatcggaagaaagaaaaatttgtgtattcgaaaaataaaggt

SEQ ID NO: 16489 - DNA, 690 bp, Gossypium hirsutum
  Clone ID: GOSHI-09MAY01-C23525_1
cccacgcgtccgcccacgcgtccgcccacgcggccggaggagactttgatttttctcttcattgattttattcattacaaaacaaattaacacagatcactttttactgacaggggagaagacagtttcccaaaaccttaaaatccacgaaaaaacataaaaaacagacaccatgtatagagttgctctttcacgtttcagggctctcaagggccgttccggtaatttagcagctgcacgttatgctacttcgagtgccgttgctcctctggacacaccatcagacagcgtttcccttccgccaccactacctgattacgtagcacctagtgaaactaagattaaaaccctatccaatggtgtgagaatagcctcagagcaattaccgactcctgctgcctcgatcggcttattcattaattgtggttccatttacgagacaccaatatcatctggtgcctcccacttgctagagcgaatggcattcaagagcacgacgaaccgtaaccacttgcgtgttggtagggaagtcgaggcaattggaggtaacacattagcctcggccactagggagtgcatgacgtacacctttgatgcccttaagacctatgtacccgaaatggtagaatgcttattgactgtgtgaggaacccctgcttttttggaatgggaaaataacgaagagttgca

SEQ ID NO: 16490 - DNA, 920 bp, Gossypium hirsutum
  Clone ID: GOSHI-09MAY01-C23765_1
gtcgacccagcgttcgtttttacaagcattcgagtccattctcggttctcccttgacaatcgaaattagatgtaaaatgaacaaagatgccacagctggttttcatggacttctcgttttaccatcttcccgggatggtccatctcatatgatcatggatctggagtccaattctcgaagtaggatacatgaggcaggttttcatgatactaacaaaagagttatgggagagagagattccggcatgcatcggaaatcacccgaagcaggagggagcgaaattgttgaaattccagtttctccgagagaagccaaggacaacgaacatgcagcttttcaggagctgatgttggcatcctactcagggagacaaaaacccggggaactaaccccgagtcagagcattgttagaagtaagctgtccattgcacacgtaattcatcatggagatggatatacacaagagaacagatggtcaaatcacaaagcagtttccattgccgaaaagctcgaacaagagaacctgagactcgaaccaaggtcaagaagcttacttttctggaaaacatctaaagcaacacgtcggaagcgcttgaagatcagaacacgaagaccggctctgttattgaagctcgtctcttgtggaagatgtctctcttccaaatctcctaggtaaagacccgataaattcccggacggttcgaacggttattaaattcatattacatttgtaattagctattcttctagccatttacaagctcgatttgatccgaaaaaatatttttcctcgaataaatgttcgagtttttcagcttaggttccacgtcaaatcttgtattcatcaacggtgttaggcattttgtatgtgaattgattctgcacacaatcgtattatttctcttgttataatcgtattt

SEQ ID NO: 16491 - DNA, 716 bp, Gossypium hirsutum
  Clone ID: GOSHI-09MAY01-C23145_1
attcacttttgtaaacgggcgaaaacgctcatctgtccacgaatacggttcccttcttttattcaagatagcttttattcaattagggcgaataccttgtaaccgaatttttctcttgaaagatatgctactccccggtcgagctgtcttgtaacggtctctagggtcttcggtcaaattggtcttctttcctgtagtagttcatctgatgagttcatcgcgcaatttgagtttaagcatcgggctcctgaaagctatcttctgtagggatctccgatcgccttgtataactatcgatcaatggctttcgcgctaggagatcatcagcttatggcaggaaggatggatgagctccctattgatataataaaaagggatggaggttaagtctgagcctcggatgaggggggaatatagacactgggaaaggaatcatgggagtccgccccaagattggaatgaaggaaagactggtgaatcaggcaacccctctaccttgaattcataacttgcataatgaattgcatcgacatctttgcccgtgatcgaatgcccctttcccacgccaccaatcgacgaattctgaggaaggagtgaatcaactgctgcaaccaaccacaatacaagacaccacccgagaaactacccaacacccgaaaggcgaaataatgccaggaagttaccaagcaacctcaagtgaataacccaaccacgac

SEQ ID NO: 16492 - DNA, 492 bp, Gossypium hirsutum
  Clone ID: GOSHI-09MAY01-C23085_1
ttaacataaaaatcagagaatcaggaaaaagaaagaggaaaggaagaaaatggggaaatcaactcctgtgaaacaagcggcggtggttttgggagcgctagctttcgggtggatggctatagagatggcgtttaaacctttactggacaaggctcgctccgccatggacaactccgaccctgatcgggagcccgacgacatcgactccgctcgcaaggacgactccgactccgactccgatcggaagcctatctcttatgctgatgccgtcgccaagaacatagcgggtgcaagttaggggcgagattcttgtgtttggtccagtccaagtaatcatgaaagtagggttcctttttatgataaatggaattatggtgttatcttattttagatttcttgctgctgcttttctaggttagccttaagaattaatgttgagagaagagctaattggcgctatttttctgtttctacattattatgtaattagat

SEQ ID NO: 16493 - DNA, 883 bp, Gossypium hirsutum
  Clone ID: GOSHI-09MAY01-C23345_2
cggacgcgtgggcggacgcgtgggcggactcgtgggcggacgcgtggggttttaggaaagggggctggtttcacatgggaagaggctaagatgcaggctgctgaaaaggcccttggaagtctaagatcaatgctcggtcaatttactcagaaacgtcaaggttctccaaggtcattgcaagatatgccaagtaaacgcctaaagcctgagtttccacgtgttctacaccggatgccctcttctggtagatatcacaagaatgctcctccggttccttgaagacacctcgatatggtagatttttcctcattttatagtgtagcaattcttgtgacatctgtacagtacgcaatatggactacaagtgcacaacgggtgaaggccatcaagacctgcaacccacgttgactgttaaaaacttcgagtgtttcttgcatatgacatgtctgaagcccaaaagatgagatgtttttatcagggtaaccgaggattttaattcaacatgctatcctttcatggggatagacattcattcggtttcaaacaaggtggcaaaagggagaacgccaaattcacggtggaactcggttaattcgggacttgagcgcttaagcaaaaggaagacaaggttgagcttgttgctatgtaagattcaacaacagtcaacatcgtttactaactatagccaatgtttccctgtttttttaaccatagagtccagagctgtggcctaactgggtttgattgctacatataaattgtcaatccgtgagaaaattattactcttcgaaaccgtagtcatgaaattggtgaaatttgcttttagtacacagctgctgatgtatttacaattttgaccatccacgagtttgcctttctatc

SEQ ID NO: 16494 - DNA, 789 bp, Gossypium hirsutum
  Clone ID: GOSHI-09MAY01-C23345_1
agaaactccggccggagtttttcaagatattgccatgaagtgcggagccaaggtggaattcagaccagctttggttgctagcatggacctgcaattctccattgaggcttggtttgctggggagaaagttggtgaaggtactgggagaacaagaagagaagcgcaacgtcaggctgcagaggattctataaaaagcttagctaatacatatttgtcacgaattaagcctgatactgggtctgcaccaggggatttaagtaggtcggccaacacaaatgagaatggctttcctggtaatttgaatttgtatgggaaccagcaatcctctaaagaggaatctatgccattttcaaatgcaccggaaccgtctaggcttcttgatccaaggctagaaggctccaggagatctatgggttcagtcactgcacttaaagaactatgcatgatggagggccttggggtagtttttcaagcacagcctcctgcatctaatacattgcagaaagatgaagtatacgcacaggttgaagtagatgggcaggttttaggaaaagggactggtttcacatgggaagaggctaagatgcaggctgctgaaaaggcccttggaagtctaagatcaatgctcggtcaatttactcagaaacgtcaaggttctccaaggtcattgcaagatatgccaagtaaacgcctaaagcctgagtttccacgtgttctacaccggatgccctcttctggtagatatcacaagaatgctcctccggttccttgaagacacctcgatatggt

SEQ ID NO: 16495 - DNA, 448 bp, Gossypium hirsutum
  Clone ID: GOSHI-09MAY01-C23335_1
ggaaagtcttcggacctttccagaaagggaacgaaacaaaaaaaatcactgaaaatgtggcatttcccccaatccttcattctaagactaattcaaagtcttgggctttcctcccatcattcacgcattaagccccttctggattttctcccgcaaaccagatttcaatggcggaagcgccgctggaaccacaaatgggctccgaacttgaatcgctggccattccaccaatggatccgttgtatctctcctcagatctagggtttcctctcgacgaaaacgatgatttccagcttaccttcgacgatttcgacgaattgtacttcccttccgattccgaccacctcatcatgcccgattcttacgacgcacccgctttcacatccgaatcgtacgtggaaaggtacctcaattcttcctccccgggacttgacagtttcagcgggcc

SEQ ID NO: 16496 - DNA, 909 bp, Gossypium hirsutum
  Clone ID: GOSHI-09MAY01-C23265_2
cccacgcgtccgggaagcctcatcttcacaccatgggggggcaatcctcttcattgggcggacttcacaaatagccttaaccttagcttatccaccatttctcaacgatagaaacattgaatacatcaaatcttcatgcagcaccacaacatatcccaaattatgttaccagtccctctcagtctatgcgagcagcatcagcaccagccccaaattgttagtccacactgcactcaatgtaactcttagagccagcaaagcgacttcgaggttgatggtaaagatctcgagattccacggtttggaaccaagggtagctgccgccatggctgattgtatcgaggtgatcggggactcggtggatgagctgcaacagtcgttaggggaacttggtcacattagtcgctcgaacttttcacgcgcccggagcgatgttcaaacatgggttagtgcggcactgacagatgaggatacttgtatggatggatttgctgggaacaacatgaatggatatgcaaagacaatggcgaggaaacgtattattaaagttgcacatttgacaagcaatgccttggctctcattaataattatgcctcaactcaaggttactatttaccttaatttctcatgaaaacttcaaagagaaaaatgatcaatatgtatataggtatatcttaggatcgaattcgggattggtgtcaaccaaagattagatatcaactgtgattcggtcgactaggctgcttttatgtttattttgctttgcgtgttgtatgcttatcatcaaacaatcagggcaattagaaaaatgttgtcccaaactaagatggtaggagattgcagattggggcctgaactgtatttatttcttaatttctgcactatattgtaccaaaggaatatgaaat

SEQ ID NO: 16497 - DNA, 615 bp, Gossypium hirsutum
  Clone ID: GOSHI-09MAY01-C23265_1
gccctttaatggaagcctcatcttcacaccatggactagcaatcctcttcattgtcctcacttcacaaatagccttaaccttagcttatccaccatttctcaacgatagaaacattgaatacatcaaatcttcatgcagcaccacaacatatcccaaattatgttaccagtccctctcagtctatgcgagcagcatcagcaccagccccaaattgttagtccacactgcactcaatgtaactcttagagccagcaaagcgacttcgaggttgatggtaaagatctcgagattccacggtttggaaccaagggtagctgccgccatggctgattgtatcgaggtgatcggggactcggtggatgagctgcaacagtcgttaggggaacttggtcacattagtcgctcgaacatttcactaacgatgagcgatgtcaacatgggttatgcggcactacagagagatcttgatgatggatttgtggacacatgaaggattgcagacatggcaggaacgatataagtgccattgcagcatgctggtctatatatatgctaaccaggtcattacctatttctgaactcagagaatgacattgaatagatactggacaatg

SEQ ID NO: 16498 - DNA, 649 bp, Gossypium hirsutum
  unsure (1)..(649): unsure at all n locations
  Clone ID: LIB3543-059-Q6-K6-F4
ccccgcgtccgctcattttcttgcacaaatatgtcagggatttgcagttctttctctccatcagaagaagaaataggtgctgcagatttacaagatacaaatacaaatcaaaggaagcctgcaggatggaaagcaatgcctttcgtcttaggaaatgaaacgtttgagagattggcatcattcgggttgatggcaaactttatggtgtatttgcagagtgagtatcacatgaaccaggttaaggctgcaacactccttaacacctggtctgctgcttccaattttgctccggttattggtgcctatgtctcggatgcattcatcggcaaattctggaccattgctttcggttcattttcatctctcctgggaatgataatcatgactttaacagctttgttaccacagctgcgtcctccgccatgcacccatgaaggacaactacatgggcaatgcgtaggccacaataaagctcaacttggcattntgattgctagcttgtgttggttgtccatttggcactggtggaatcaagccctgtagcattcccttcagtgttgatcaatttgatttaacaaccgaaagaagcagaaaaggaaacaacagtttctacaatttgtactacactactcaaacaattgttctggtg

SEQ ID NO: 16499 - DNA, 284 bp, Gossypium hirsutum
  Clone ID: LIB3083-099-Q1-L1-E10
tcgtggatacaaatacaaatcaaaggaaggctgcaggatggaaagcaatgcctttcgtcttagggtgtggcttttcctgagtgcaggaaatgaaacgtttgagagattggcatcattcgggttgatggcaaactttatggtgtatttgcagagtgagtatcacatgaaccaggttaaggctgcaacactccttaacacctggtctgctgcttccaattttgctccggttattggtgcctatgtctcggatgcattcatcggcaaattctggaccattgctttcg

SEQ ID NO: 16500 - DNA, 578 bp, Gossypium hirsutum
  Clone ID: GOSHI-09MAY01-C23205_1
gtaatggagaggaagaaacccaccgattccaactgcaactctaagttgaacatagccatcatacacccagatcttggcataggtggagctgagagattgattgttgatgcggctgttgaattggcatcccatgggcacaatgttcatattttcacagctcatcatgataaaaatcgatgctttgaggaaacccgtgccggtatctttccggttactgtgtacggagacttcctgcctcgacatattttctatcgccttcatgctgtatgtgcatatcttcgctgcatttttgttgcactttgtgtgctgttcatgtggccttcgttcgacgtcatactagcagaccaggtctccgttgtcgtcccgttgttgaagcttaaacgatcaaccaaggttgtattctattgtcattttccggatcttttacttgctcaacatacaactttgttgcggaggatatatcgaaaacctattgatattatagaagaactgacaacaggaatggcagatatgatacttgttaatagccgatttactgcatctacctttgcaaaacatttaagcatctccatgcacga

SEQ ID NO: 16501 - DNA, 793 bp, Gossypium hirsutum
  Clone ID: GOSHI-09MAY01-C98575_1
cggcgcgtgggacaaacccaaacaaatcaataaacaacttcaacacacatccaagtccaaaaccccagataaggttgtccaaaactcgaccaatgaatatcagcagcagtcgaaaccagacatcatcatcggtctgggattttttcaggttaggcttggttcgagcaccagaacttgaattccatgagttgaaaattcggaccaacaacaacaataatcggagtcgaaattctgtcagccgtaacagcagttgtagtagcagtaacagtcagctagattcgatcaaagggttcttaagaaaagggttgtttagtggatgtaaatgttcagttaatgtagttgaaacagttccattgaacaaaatagcagtcatcaaaagtatgatgataaaaaagaagagtgagaaagagaaagcaatgtttcaagccgccatggaagaaaaaacgaagctactgcaagaagtgaagataaagaagaaaatgaaagaaaagcgagttttgtcacgtcatcgaacgtatgaatggttaaaggagctttcacatgcaggctttgttgatgaggcttgaagaaaaaaaagactcaatgaacaatctctcgcatgcttccctttttctttactttcatcatttttcaacttttttgttctttttggtttatatttttgttcttttagatgcttcaaattgcaggctgttgtgcctataaaatctgtctcactgtgtgttgtgagatttgcagtttgttaattattgaagttttaaatttaaaaaatgaaaattctgaattcaggttt

SEQ ID NO: 16502 - DNA, 849 bp, Gossypium hirsutum
  Clone ID: GOSHI-09MAY01-C98005_1
ccccgcgtccgggttcaaccgttgaatcagttggcgaaaaactgttgaaggcttttagtacgactggcatataggaatctgtcgaagtaaggtatctgaatttttaacctcttcatattccatagaaagtgagagaactctcagttcatttcttttggggtcggctgcctaatccctgaagtttgaagaaaagctcgggttatcaggtcaggcttgaatgtttgatcagggaagtcaaaatagatttgacagtgataaaaccgtactcatagttatggcatgaaatgagcttagactgaaaaaccgtgggaaccggaaaccttgctactgcttggagtattagggtaagaggaccacatgttatggtttttcatttgctataagtctcggtatgtcgtgaagttgccatcttcgtttacaagttttagctttgccccaagatcataaagtccgtgagtgctggtttcctgtttattgatttgggcatagctcttgaaccccattggtgtgtgttccgtgaatctacttcatccttttatgttatttcaaatgctagtcattttatatgcatacatacaactgcacatctcatcacatccatgatattatatcttgatggaagctttattgggtgaggatatgctttgttgtgggatttggatgttttatgccagtgtttatgaatggtcgggttcattgacacgtaaaacaccacaaacacagaaattaattagcttttactgcatatcttgtccttctggtttcgatatagtgctactggtctgattaatggcaaactgattcttcatgttatatatgtttgtgtttatatatattattcttaatttc

SEQ ID NO: 16503 - DNA, 997 bp, Gossypium hirsutum
  Clone ID: GOSHI-09MAY01-C98365_1
tttatcaagagtgctagggagagcaagaggtggtggcttccattgccacaagtaccaaaaactgggctctcagataccgaaaggcagaagttgcaatgtaaaggcaaggtggtatatcaagtattcaaggctgcagcatcgattaatgaaaatgttttgcttgaaatacctcttccatccattattagggatgctcttcccaagtctgggaaggcaagccttggtgacgacctgtacaaggttttgactctggagtccagctcggttgatgaaatgttcatttcgctaaatttaaagtctgaaaacaatgctctcgaggtcattaataggttggaagctgctgtatttgcatggaaagggagacttacagaacaagctagtggtaaatcgccagtgcgaaaatcatggtcttttattaatcctatatctgaaatggataagatggagctcctagtggaccgtgctgaagcacttttacgtcagataaagagtgcatacccaaaccttcctcaaacatttcttgatgcttcaaaaattcaatatggcaaggatgttggacattccattctggaagcatattcacgagtcctaaagaacttggctttcagcataatgtgcaggatgggagaaattctacaagaagatagtttgtgtaacccaaattcaggggtggcaacatggtgctttcctggaataaatgtgggaaatccaaggcactctcactcactcagtgatgttatgaacaaagtagaggggaagtactgcgaatccgatacggacgtggagttgtacagtgatgcaagtataaatgcaacaccaagtacaagtaggagccgtcgagtttggtgtattgggaaagaggcatgtagtagtataggagtgtctccttgataataaaaaaaaataaacaagatgatggaagtttgattttccaacactgcttttgtatatcattattaagcttaattaattaataatatccataaaagaatcatat

SEQ ID NO: 16504 - DNA, 874 bp, Gossypium hirsutum
  Clone ID: GOSHI-09MAY01-C98205_1
acttttgagcttcggtttagtgctatggtagatttgaggcttgggcttatactagctgcttttcacattgttgaccttttctcctttttgagaaatatgcttttctttgtttctgtcatttcctcgtttaaattttgtagaacctttcacttaagccaaaagaaaaaaggtataaccttccatttcatatttgttcgttctcagaccatgaaattcgttaatgatctgttttcttctcttcatttctttgtagtcacattgctgtcgagtgcaactcaaccactatgtgttggaactgtaaggagccagggcatcttgctggacaattcccctatgagcctgtttgcaatatgtgtggtaagatgggtcacttagctcgagattgcctaaatcccagacttccggctcatgatgcaagactctgcaacaactgctacaaggcaggtcactttgccgccgactgtacgaatgagaaggcttgcaataactgtcataaaattggtcaccttggtcatgactgccataacaagccagtttgcaatatctgcaatatatcaggtcatgtagccagacaatgtgccaagtcgaaactatcatcagacataggaggccacttccgggacattgtttgccgcaactgtggccagctaggccatattagtcaggactgcgtttccatcgtcatatgcagtaactgtggtggaaggggtcacctttattacgagtgcccttcagcaaggatgtatgaccgcagtggcgtacgtaggtattaactacttaactgaccaacttttatatgattcattcattagcatccctttgtttaactcatctttataatttgattttccaattgatttattcttgaactgat

SEQ ID NO: 16505 - DNA, 1074 bp, Gossypium hirsutum
  Clone ID: GOSHI-09MAY01-C99925_1
caattcgagttgactcaacttctttctggtccatatgacaaagaagtgcagtcatctctataactgctggtgctggaggcaccgatgcacaggactgggctgacatgcttctcaggatgtacacgagatggggagagaaacagaaatataagacaagggttgttgaaaagtcattgggagaggaagccgggattaagtcggtcacaattgaagttgaaggcagatatgcttatggctatctatctggagagaaagggactcatcgtatagtacgacagtctcctttcaatgctaaaggtcttcgtcagacaagcttttccggtgttgaagtaatgcctcttctccctgaagattcggtagatgttgaattacctgaggaagaccttgaaatttcattttcaagggcaggagggaaaggaggtcagaatgtgaacaaggttgaaaccgccgttcggattactcacatcccgactggtgtcaccgttcgttgcacagaagagagatcgcagctagctaacaagatcagggcccttaccagattaaaagccaagttattagtgatagccgaggagcaacgtgcatccgaaatcaagccaattaggggagatgcagtgaaggccgagtgggggcagcagatacgaaactacgtattccatccttacaaactggtgaaagatgttcggactgggttcgagacttcggatattgtatcggtgatggatggtgaattggatgccttcatcaaagcttaccttaaatataaacacagtatcaatgtatctgcaactgcaactacaacaggggcctaattaaagagttttgtgattcatgattaacttatataataccctttttgtgtaggtaggctcaaattctttgaattatttacgaataacagcggctcggatatttgtaattttttaaattttcggaacggcttaattgatttgttatccgagtccattcatctgctaaccattcgaatagtaccatatgaatcttatttaatttgttggatatatgaatatgcttattagtcattttatacaataaaaatataaaaaacttatcgtt

SEQ ID NO: 16506 - DNA, 981 bp, Gossypium hirsutum
  Clone ID: GOSHI-09MAY01-C99545_1
tctccccgcgtccgccccgcgtccgtgtggatccatcaatgacatttaggctacccgtgataatcgtcgagttcatgccatcaccaacaatcatcaaattcttcttgtttgttccaatctcgacgttttcattgtaagtaccctttttcacatgaattatgtacctggtcttgcttttatctggtgccgctgccactgcttctcctagggtcttgtagttgccactcccatctttagccaccacaacgtcggccttgatttcattaggcaaagcctgtaaaagctttcgatccttgctgctgagccatgatggaaacccaccgatcaatgggtcgtcatcgaattctgtcttcgtaggagaaacggaaaccaaaatggccagggaagttcttgctctcgatataaggtcgctgagccctggctccataagggtcctcactgacccttgtaacccatccaagcacgtcacatggtttgtcagcacgctgctcagccacgcctgagcattggaatgccaattaacatcttgtttttcaacaccaaccatagaatccatgatcctgtccctggataactccaccaactccagacaatcagccaaactcgcttgctccctactattattgattccatcgttgaagttgcgagcctggttgatgacattttgcatatcagaagcagatcgctctaagaaagcatgtagcagatcaacacccttctttcttacggttgtctttgaggctacttcagagagcaaggctaaacatgatttctggtcaacagctctctcacaatatttatatggatgattagcatcgaaggagctgaatcttactaaatggattgcaaccagggcagctaagcatattagaagtaccaatgtgaaaattagggggcaatccctgctgtaagaacctcttggtctgtctagtaaaggctgtcggatattagccatggtatttaagtaagcttgatatgctt

SEQ ID NO: 16507 - DNA, 596 bp, Gossypium hirsutum
  Clone ID: GOSHI-09MAY01-C99535_2
gcgtttgattttaaaaaaataaaagagaaaaaatctgagcaatgccggaggagacgaattccatagactacattatggagaaggcatcggggcctcacttctccggcctccgtagtccgacctccgcctcttcctcttcgtcctttttcgccgacgccaacgctcctcgtcagcccttcgtcatcggtgtttctggaggtacagcttcaggtaaaacgacagtctgtgacatgatcatccaacagctccacgatcaccgcgttgtacttgtcaatcaggattcgttttatcgtggtttaaatactgaagagttaaaacgcgtgcacgagtataattttgatcaccctgatgcttttgatactgagcagcttctggaatgtgttgagaagcttaaaagtgggcaatctgttcaggtcccgatctatgattttaagcaacatcgtcggtcttcggatagtttccgacaggttaatgcttctgatgtcataattttggaaggaattcttgttttccatgaccagcgtgtcaggaaccttatgaatatgaagatttttgttgatacagatgctgatgtgaggcttgctcgtagaataaga

SEQ ID NO: 16508 - DNA, 882 bp, Gossypium hirsutum
  Clone ID: GOSHI-09MAY01-C99535_1
gcagccacttcactgtatttctgttccaagtttcaactgttgagttgaaatcttaaatttctttctaataaactacttatttttaaagatgtcggaggggtcgatctctatagtgtacgctatggagaaggcatcgggacctcacttctccggcttccgtactccgaccgccacctctgtctcctccaccaccttttccgacgccaatgttcctcgtgagcccttcgtcattggggtttcaggaggtacggcttctggtaaaacgacagtctgtgacatgatcatccaacagcttcacgatcaccgcgttgttcttgtaaatcaggattccttttaccgtggtttaaattcagaagagttaaaacgcgttcacgagtataattttgatcatcctgatgcttttgatactgaacagcttttggagtgtattaagaagcttaaaattgggcactcggttcaagtcccagtttatgattttaagcttcatcgtcggtcttctgatagttttcgacaggtgaatgcttctgatgtcataattttggaaggaattcttgttttccatgaccagcgtgtgaggaacctcatgaatatgaagatttttgtcgatgcagatgctgatgtgaggctcgctcgtagaataagacgagatacagttgagaggggtagggatgtaaactctgttcttgaacaatacgcgaagtttgtcaagcctgcatttgatgattttgttctgccatcaaagaaatatgctgatgacatcatcccccgaggaggtgataatcatgttgcgattgacttgattgtgcaacatatccgcactaagcttgatgagcatgacctctgcaaaatatatcccactgtgtatgtcatccagtcaacatt

SEQ ID NO: 16509 - DNA, 619 bp, Gossypium hirsutum
  Clone ID: GOSHI-09MAY01-C99415_1
aaaccagtaaaaaaaaggatataagaaattattcttgaaaatcgatgaaccaaaatggatgggaacctataaaaattctacaagttcttttctagaaccaacccgaacttggctaatttgccattaagaccgtggtctaaacggcccttacggtttcaaagctggagaaccatgacaaattttagggtattaaagacatttattcggcgacaagaaacaagacctcaacaaggactgagtgggtgccttttgagcaacctattctaccatcaagcagctgctctatgcaaattgaaactccattcttttaagaactgacaacaatcctcaaacctcataacccccacatattctttgcttaaccaagggcacctgttcaacctgtggcaggaccagttcccacttttgcactgctgtatttcttggggatgaatctgaacaaatccctcctcaacaactcgaacatcagccagttcatttgagtatcaggtgagccactgcccccatcatttttctttggggtagcagaaacggctctatttacagttctctttacttcattaaacatgaaccggtgagataagcataccatatgtagccatggtgatattttgcaaga

SEQ ID NO: 16510 - DNA, 648 bp, Gossypium hirsutum
  Clone ID: GOSHI-09MAY01-C99715_1
cggccgcgtgggttccagtacacgccgttgcagatgctccctcgtcgtctccatttctaaatcccatcaactgacgacgagaaagagctgcaggtggtttgtatggctcccgaggaagaaaaatgactcgtcgcaatcccctcgattttcccattgagtgggagaggcctaagcctggacgcagacctgacatattccctcaattcagccctatgaaaacacccattaccaccaccaatgccatatgatccccctgaagaagatgaagaagaggaagaaaagaaagaggaagaggaggaagatcctgaaaaggaagaagtacctgacaaccctgagaaacaataatggagtagataagatgtcacagtcagccattttagaacatggagttgagtggtataaccatatttgagttgaggggattttccaggcatcttcttgggattttattgtcttgttaggttaatatagagaaacttaggtccaagttcctgttttagagtgttgtaatccgtaagtctttcttacatgattatactagttgctttcgaataaccttgttcttagttgttatgttcttgttcatttggttgcgggactagaatttattgataacatgaaattcaatattgtcaaattctaagtttg

SEQ ID NO: 16511 - DNA, 881 bp, Gossypium hirsutum
  Clone ID: GOSHI-09MAY01-C99705_1
ggattctcaaacaatgaaagctcgggaaagggaaatccgtcaacccgatgccagtggatgaagaggtaatggtagagggtttcttgcagatagtatccgaagcaagattgtcagtgaaacagttgtgcaaggcacttgttgcacaaatggaagagagtgatacgactttaatggacaacttgaatttggtgcttcaaccatataaactttcattgaattccaagtactcgaagacggtattataccatttggaagcaatcataaaccaatcattgtaccaagattttgagaattgtgtgttccagaaaaacgggtccccaaagctgttggaccctcaacaagatcgccaagcccagttttcctcctatgttgcacttagaaacctcagctggaatgaagtggttaggaaagggactaaatattccagtgaagaattcagtaagttttgtgatcagaagatgagtttaatcatttcaccgttgaattggaccagaccctggcctgaacagctgcttcaagctttcttcgttgcagctaaatgcatatggttgcttcatttactagctttctcattcagtcccccattagggattttaagggttgaagaaaatacaccctttgatccccagtacatggaaaatatgttgatggaaaggcaaaagtcccatggagggagtcgggttaaaataatggtaatgccaggattctatgttcaaggaagggttttaaggtgtaaggtgatatgcagatataaaattgtagcttaagcacctttggttcttttctcaatgcttttttttcaagggcttcgtgtatcaaaagtttgtaactccccaatacgtcttaataaataaagggtgctaataggctttttttttttt

SEQ ID NO: 16512 - DNA, 959 bp, Gossypium hirsutum
  Clone ID: GOSHI-09MAY01-C99685_1
tgtttttaatcttttacgatttcttggaagggtgaagattaaaacatttatcaatccttgcggcagcgtaaaccgattttccgaggcggaccataaaaaaagagaagaacagaaaaaagcagtaatggcggtggcaggcggtgtttgtcgcggcggaaacgtttgcctccggcgccgcgattctttcaatcttttcaacttccataatcagaatgctcgcccacgttgtttcatggtctcaggttcacaatcgtcatcgggatcaagaaaagaaaagatgctggcgtcgtctaaggtaagaagagtaagccttcttcaaccattgttgaaacaagaaaagacgagagggaaggaattgtcgtacgagaaaatagacgagtggatgagagattcggtggcggacatcgtgaagaggttgccggaatctcctttattggtcgaggtgttctccgacgtaaaaaataacaccacgagaacaaggacggaaaaggcggaggaagataagtggggtttggtgaaacaaaagtgggagaaaggggagagtccaatgcctgatgggctgatttttgtcgaacaaatacaccaaggagaagaagaagaggaagggaaggaggaggtttgtaatacaagggcatgggggatagtagtgcagggcattggggcggctgctccagcgtgttatttgttgaagacgagtaaagtgggttcagggtttgggataaggtgcacccacttttgcttggttagggttaagagtttcagggaaactgctttctcacagctccagaattgttggctgttgcagcaggcgatccttgaagacaatgaaacatgagcatatctgatttctattttcttgatgatgagaactggtattatgggaaacgggcccctttaattatgttaagtattcacaatttgatgtacaatataggaattcagaattcagaattttccct

SEQ ID NO: 16513 - DNA, 621 bp, Gossypium hirsutum
  Clone ID: GOSHI-09MAY01-C99605_1
cccacttttcttttcttattctcttgttattctcaattcttacacttgaacagcaaaagaaatcactttcactttcagttcagttctactgaggtttccatctctgaggacatggagagtcagagaggtcctcttcttagctgggcttacttctgtcaaggaaagacaatggaagagcttaggtattctcttttctatacgactatggagctggaacagacaaggatggcagttcaggaagagctaagaaagagagatgatcaattaattctactcaaggagttgctaagcaaggcaataagagagagggatgaagcacaggagaaatgccaaagactttttcttgagaaactcctgcttcatcaactgcagcagcaacaacaacaaaaacagcaagtttctcctctctctggagtttctggcgttgaggatgaacgcataaaaggaatagactccaacaatggcttctcatcatctgactgtgagggaagcatcgtttcatcccctgttcttgacccaactcaaccaccccaactgccaccacaagactaccacctcagtccatgccacaaacaaccatggagcttgtgcctgataagccattgcctgaaaagggaaagc

SEQ ID NO: 16514 - DNA, 1020 bp, Gossypium hirsutum
  Clone ID: GOSHI-09MAY01-C99625_1
gcgtttcggctctttcttggccatatcgccaggcagatttgttgcgggaaattgttggttatcgtgcagacattgtttgtcttcaggaggtgcaaaatgaccattttgaggaattttttgcccctgagctggacaaacatggatatcaagctttatacaagagaaagacaaatgaggtttacagtggaaatatccatacaattgatggttgtgccacatttttccgtagagatagattttcccatgtcaaaaaatatgaggttgaatttaataaggctgctcagtcgttgactgaggttgccgttcaaactacccagaagaaagctgctttaaatcgtttggttaaggataatgttgcacttattgtggttttggaagcaaagtttactaatcagggagctgacaatcctgggaagcggcagcttctttgtgtggcaaacacacatgtaaatgttccacaagagctaaaggatgtcaaaatctggcaggtgcatacgctcttaaaggggttggagaaaatagctgcaagtgcagacattccaatgttggtgtgtggggattttaattctgttcctgggcgtgcttcccattcacttcttgctatgggaaaagtggatccactgcattcggatttattggtcgatccacttgcaattttgcgttcttacaacaagttgactcattagttgccactggttaatgcttactcaacctttctaaaagggaatgggctttggtccgaacaacccagaaaaaaggttgaccccgcaactttagaacctttatttacaaaatgcacaaaaaaatttattgggaccctatatacatattttaaacccggactcttttaaggggagtcactatttgaaacttggatgaaaaaacttatggaagaacagcccttctttttccgaagggctcctatatatacatttgtacgaaatatagttgccgcgatataaactgcccttttgctccgatgacccccaagggggggaaacccgtgtcccaatttttttt

SEQ ID NO: 16515 - DNA, 797 bp, Gossypium hirsutum
  Clone ID: GOSHI-09MAY01-C99085_1
ggattcaaacccaacccaaccaaacagtgctaaacctaatgctgataggcaaagtggtacgagttatcagcagcatagtctcccacttgaagcaactgattggcaatgtcggggatttaggtctatgcaggaatctcgtagaattgatgaagctggccatggatatagtgaggaagaaacaatgcagttgttgagccaaactcacattcactctccagctgtctcagttaagtgtaatgaaatgcaaagatatggacagatgaggagacctggaggcaacagtaacatgtttcacattgttcctcaacacattaatccatcaccttatcagattcatattccaagaagcagcaatggagggcgaattgggagtgatctttcattatcaactagtgatcaacagtggcaatcaggtcctcaccaccagttgtttggaaattctgcagcatcatcaggattcccatcgcagatcagaccttcccaaacatggcttcaccaaaatggcttccattcactcatctaattcttcactaattaaaattctttacatgcctttctcatatatcatccttttttattattattaataaaatctagatgtatagaaaaacaattccaaccttgttgaatatatatttatatatatgatgttcttctgactttttttctttttttttttttctcgtctttaatgcattgctttgccgccctacacagttggtattattattgatttaataaaaccccccattgtatgtatatgtaactttatcaactatcatcattaaatgtttctt

SEQ ID NO: 16516 - DNA, 638 bp, Gossypium hirsutum
  Clone ID: GOSHI-09MAY01-C99355_1
tccgggaaaaaaagacacaaaatgtttgctttgtttctttgggggaaaaatcgggcatggctgagactgagagccaagcaaaacgacatgagggaaagcaatacgacaattcagaaggggaggaggaggaagaagaagaagaagaagaagtggacgagttagaggatgaagaggaagaggaagaggaaggagtgagtagagttaatgagtcgcacggggctggaacggcgccgtcgagtgatgctgaggtgagagactcgcaattggaaaccctaacaaatgatgatcgttgtgagaggttgcgggaaaatcctacttcggaattgaaggaaggagctgaatctaaggagcaagttaagatagcccaccagaaagttttgcctagtttggttgtccagcgtgcagaagctccaaaacaacatctgctccagtcatctgtttctccaacttcttcatcacaaccatcaccaacttctattacacaagatatttcatctcctcccactccaactctaccagcacaaagtcattcagatcagaaggttaatggcgcatctcctcctgtagcaaaccagcaaaacccttctaatcttaaaatgctatcctttgttcccgttgtgaagacacctgtgtctgat

SEQ ID NO: 16517 - DNA, 634 bp, Gossypium hirsutum
  Clone ID: GOSHI-09MAY01-C94925_1
caacatcaaaatccttcacgcgccacttcacgcgcagctgttttttttttcctcggaacgttctaaaaaaatggaaaaatgaagaaggaaaccgagccaaagtccagctcaacgcaatctatggctcaagaaccgaatgccaaagcggacccgaaaaactcggatcccgaaatggacgcggagggctttgttattgtgccaacaacagagccagagaaagagaaagagaaagagagtcagattcaaaacgagcaatcaccgaaccaggcacaatcgggattgaggaactcggttcatccattggatagtggatcgcctgctgcggatcgcgacgctaacatgtccgctcctaacagatacaatcctaaccttgctcaggctcccgctatggattcttcttcggcttctttcaaagagaagatggatatagtgagggatgccttttggagatggaagaggatagtgggagaagcgacgaagaaagccgaggatcttgccggaaacacgtggcaacacttaaaaacaagcccaagtcttgctgaggctgccatgggaagaattgctcagggaacaaaggttttggctgaaggtggctatgagaagatttttagacaaacttttgaaacagttcctg

SEQ ID NO: 16518 - DNA, 703 bp, Gossypium hirsutum
  Clone ID: GOSHI-09MAY01-C94415_1
gaaactggtgaattgaaagagttgtaattttcaaagttgtaacaccaaaatatccttgtacagagaatacggctaattaactgtatggatacatttccatttctgtgttctcctatctaactctatgtccagatctcatctttttatttttaactccttgaatgaaacaaaaataatcggtaatgaaactcagagaatactgttactgcaatatcagaaaaatggggagcccttcttcgagcacaggtaggagttggtttaaatatttccagtacgaagaagggcgagactctccaagcgacgctcgcaacgttcttttggtagtggctggtctgatagccgccgccaccttccaagcaggtgtcatcccaccgggcggggtttggcaagacagtgaatgtgggcacgtcgcaggcagggccatttacgcctctcaaaagcatgccttttatattttcttgatctcgaacaccctcgctctttcctcctcgattctagtcatcatctctctgacgtataagttcccatttcatttcgagatctttacggcttccatgatggtcacctacgcatcatctattttcgccgttacgtctcatgagtctgtgaggtttcgcttcatcttgacggccaccgctgggccatttgttatccgaatttccattcagatgttcaacaggtgcagactcaaatctcccaatag

SEQ ID NO: 16519 - DNA, 435 bp, Gossypium hirsutum
  Clone ID: GOSHI-09MAY01-C94405_1
aatataatattcgatgaattgacgttcaaaattacatctggtaatttcagtcaaattcatactagtggatatacatacataagtaaacgcaaatagtttagcagctaagcttatgtcttaattagtagtaaattagaaagagagagatagttcttacaaatcacaaggcttgagctaagcacacaacatgatcgacgaaataccaacatgatcgacgaaatactccaaagaaagaaagatcttgtatagcatcatgagcaatcagccttacaacttttttttaattaaaaaaaattcgaagagtgactgctcatgatgttatatcatttttcatcaatgatgagatctcttgtgtttttaatcttttttctttttattttttttcatcttctaatagttctaaataaagcctagtaattctcctatcggaaaaat

SEQ ID NO: 16520 - DNA, 589 bp, Gossypium hirsutum
  Clone ID: GOSHI-09MAY01-C94185_1
gccgtgttgaatcacgactcggttggtggattcataactcactgcggctggaactcggtgctggaatcggtgcgtgcaggggttccaatgttggcctggccactttatgcagaacaaaggctcaatagggtgttgatggtagaagaaatgaagatcgcattgccgatggtggagtcggaaacagggttcgtttgttcaactgaggtggagaagcgagtcaaagagttgattgagtcgaaagaaagtgactcagttaggcagcgaacgttagatatgaaacgtgcagccgaggtagcgacgagtgagggaggttcctctcgtgttgcgctagtcaaacttttcgagtcatggaagctgaaatgactcggaccgaaccggttgttatttttgttgtgttggtccgatacacagaaacgatgtccaaatcttgacggcttcgagttttaggtaaaattccaagttttactccctttacgatttgatttttataatttaactgtacataacttttggactcaattgatgaaagtgaaataatatctctcaatgcacaaaaaaaaaaatgaacaagatttaatgaattttctat

SEQ ID NO: 16521 - DNA, 701 bp, Gossypium hirsutum
  Clone ID: GOSHI-09MAY01-C94075_1
ctctctattttttttattaggaaaaaatttggtacaaaattctgcttggaaccaaaaaaaaaaaaaacaaacaaaattcaacctttgacttctctgtctatctctactggtcttcgcctccacccaagctctaccaccagaccagccaccccaaaatcccgccccacgtgaggccatgtcagaggatgcgccaccgttccaaacccaagatcatgactctctcaccattcctttactctctcaccagcagcgatccattaattccacctctcaggtcgccatcgttggcgccaacgtctgccccatcgaaagcctcgattatgagattgcggagaatgatttcttcaaacaagactggagggcacgtggaaaggtccagatttttcaatatattttcatgaaatggcttctctgttttttgattggcggtttcgtcagtctcgttggtttcttcaataatctcgccgttgagaatatcgccggcgttaagttcgtcatcacttctaacatgatgcttgctcaaaggtactggatggcatttctagtgttttctctatcgaatttggctctaactctctttgccgccatcattacggcgtttatttctcccgccgctgctggttccggtataccggaagtgaaggcttacttgaatggcgtagatgctccgggaatactttcaatacgaactttaatagtta

SEQ ID NO: 16522 - DNA, 1012 bp, Gossypium hirsutum
  Clone ID: GOSHI-09MAY01-C94395_1
cgaccatgcctttctagattagacatcttcagaagttttactacaagttgctaaaccaaaactggaacaagctacacaattcttgcaagcataatgaacacaaatggacatgcaaaaagaaagacttaagagattcaataattcagcagggagtacttcactctcaaaacaattttgcctttctcaacaccaagctttccaccagtgaccaaccaatgacctggaggatcttgcggtcctttgctcatctcaaacatgtcgacaaattttgccaacttgtttacaatgtttccttccgagccagaactacccgcagtagccacaactttctttggtttgtcatctggagtgtgatcccaaaaagatcttcgtaccgtgcagcctggaatcctagagtacaacagcttcatgtataagacgtttcttgacccaaaatcccacactccgagttgtgctccggtgacaatgtagacaccagagaggtcacctatagaggattcagggttttcgattggtgcagtactaacatgagaaaagcttttccatttcaccggcacaaaccatttactatcttgctcctcgggtcctagccacttgggagcaccaatcgccacatgtgtgtcccagtgtggaagtaggatctttggaagagatactaagtattgaagatgaatgcttagacggttctgcttaattccttcaaggcataaccgcaagcctgttaccggctttcgtccaactgaaatctgttcttggctgacataaagtttttgccccatcatgctgaatcgcaaagatgggcaaataggttccttcctttggtggccaggaatcgtaccctgtataggagcccatatcctaggagtctggaactctagaaaatatcttagttcttccattggaggtttgtattcaagataaagactgatggcacgaatcaaatgctcctttccagctatcccatcaagcagagcagtaataggatagaaagtcatttcaatgacatcaggag

SEQ ID NO: 16523 - DNA, 709 bp, Gossypium hirsutum
  Clone ID: GOSHI-09MAY01-C95845_1
ccccctcaccccccaaaaaaaaaaaaaaagggcgcccccccccccttttttttttttttttttttttttttttttttttttttttttttttttttttttttttttttttttttttttttttttttttttttttttttttttttttttttttttttttttttttttttttttttttttttttttttttttttttttttttttttttttttttttttttttttttttggcaaaaaactataatatttcaaaaagaatgaacaaactatacatctcttagtcttacaggaatggttatatggaccctaaaatattcatccattgccaatggcatctccaacctgctgtaatttcttgctaattcgatacaagatggtccccccaaataaaaaaaaaaaggaacatatgaaacaaagcattatacaacattttgattgcaatgcaacccctaatctaaatttcttaaaaaaaactctttccatcttttctttttccgcctcctaactctgagtttgtccgatcatgtgtatataatataaaaaactcctcaagctccagcagcttttcgacaacttccatattttaccgatatcacatgttcttcgataaaaatcgtaagcggcaataccaggaaactgtcatcagttcaatgagcatcactgtcctatcaatcattatggctcttagccatcaaaataatcatcaggctcaa

SEQ ID NO: 16524 - DNA, 538 bp, Gossypium hirsutum
  Clone ID: LIB3825-003-Q1-N6-D10
aaagataaaaatgatctctcatccttcataatgcacattatctttactacaataaaaagcccaccagaaccataaacttgaatcaaaagaaaaaccctctgtagactatacactgtttagtttgtaaaatcattgagatttgcttaactgctgcgttttctagcagatatcatcacaaacggtccgtttctcatgcatgtaaaaccaactagtccacaagttcggcacagatcttcgagttctcgttccgaaacggcgaaatagctaccagcaattcccatcatattctgtcggaaagtattcacaaatggcagaaatgtaaacggcccatcaactatgtaggtggtagcgacaaaaacaccgcctggtcgaagaactcgacttatttcagctaccacagttgaaagaaatgcttacagcggttgatggtgaaggccaacagtgcaaagcagcaccagcatgcacagcatcgattgaacttgactcaaaaggaagtcgagagatatcagctcggaccaaggtcactttctctttgggg

SEQ ID NO: 16525 - DNA, 406 bp, Gossypium hirsutum
  Clone ID: LIB3083-049-Q1-L1-E5
cagcgacaatgctctgagttcatcaagcacgaggaaaacgtgccgaaatagaaagtgacgcttgtccgcacccatatctctcgacttgcttttgagtcaaatttaatcgatgctgtgcatgctggtgctgctttgcactgttggccttgaccatcaaccggtgtaactgaaataagtcgagtacttcgaccgggtggtgtttttgccgctaccacctacatatttgatgggccgtttacgtttctgccatttgtgaatactttccgacagaatatgatgtgaattgctggacgctatttcgccgtttcagaacgagaactctaatatctgtgccaaacttgtggactgagtgcgcttacatgcatgagaaacggaccgtttgtgatgatctctgctagaaaacgca

SEQ ID NO: 16526 - DNA, 740 bp, Gossypium hirsutum
  Clone ID: GOSHI-09MAY01-C97985_1
ttttccacgcgtccggtttgtttgctcataatcacagggaccgaagcagcacggacaagagtggaaacattttgcctggcactgtcgttgattcgaaaatctgtcatccatcggaatttgacttctatctttgcagccatgccggtattcagggaacaagtcggcctgcacactaccatgttctttgggacgaaaacaattttactgcggatggaatacagtctctaacaaacaacctttgttacacgtatgcaaggtgcacgcgctcggtctctgttgttcctcctgcctattatgcacatttagctgcattccgagcacggttctacctagaaccagagatgcaagacaataatagctcaacgggtgctggttcaggtcaagcaaaaggtggtggtacaaaggcagcaggagaatccggggtgcggccgttgccggccttgaaagagaatgtgaagagagtgatgttctactgctagaaccgtagcaaaagctaggcggagatgcagcaaccatgaacgacctttcggttcacaatgttgtttgtacagttgctaatgatacttgcatggttgcatgcaaggtcttcgaattaaggtcgtcagcgcagcctttaatgtaaaaatggtcggtgggacagtgaccaaaatgatctttgatggataaaaatgtttaaagtaggtatatgtaaagcaatgcttatttagaatcaaatcttaacgtaggaaattttggctgag

SEQ ID NO: 16527 - DNA, 656 bp, Gossypium hirsutum
  Clone ID: GOSHI-09MAY01-C97975_1
gcccctttttctcgtacgatcttagcgtgactgggtgatcacaaattccaaccagtggcagagatgaactttccggaaactcctgtagattatcatgttaacggagttctagcaggtcctagagctggatatgacccaaaccaaggtagttgggcttccacttctggcccttgtgctggggccatgtttgatgagccattatatactggacaactaaactgagatgcagaagagtgatgctacaattcatttcatccactaagcaaactatggagaactatactatacaatgcggaattaaccgaaaatcctcaaaaattgcctagacattttgttatcaccaagtaaaactcgtactcggatgatgtgatgatagctcgactgcacgacatatggttaccttaatagtggtaaaatgcagaccaaatgctgctaactccaatcaaatgaggcaccacatttctgtatactaatatatttagtagtagattttctttttaacttatttttgttttcaccttttgattactagagtttactaatggcggtcactgcctttcctcaatgtcaagtttaagctgtaaataaaacaaatagcaagacattgattgtaaatcatatgattaacatataaaaatgcacgacagcaattcttc

SEQ ID NO: 16528 - DNA, 544 bp, Gossypium hirsutum
  Clone ID: LIB3828-034-Q6-K6-G2
cgggtcgacctcgcgtccgcacaagtctgttccaaaatgaaatgcgggtaccatatagaatgggccttgaacaccagctccaaactctttcgtggttgcctaatggagacagtagacacatagccttgtcagatgacccaaatttgattccacacagagatgtggagtgctctgcaagttcctcatttggaagctatgggggttattttggcactggtaaaagttcattaccatcgagttctggacaagagaacagcatcctgaatgatttgagcggaaacggatcattgcagctgcaacttggtggacagtgccccctcttctcttacaatcttaatatactgaatgatcccaaattcccacctgtggcggagatgaacttcaatgaaactcccgcagattatcaggttaatggtgccctacaaggtcccagaactggatttgatactgccccaggtagttgggcttccacttctggctcttgtgctgttaccatgtttgatgagccattatatacccgactccaacagcattgagcaatcca

SEQ ID NO: 16529 - DNA, 713 bp, Gossypium hirsutum
  Clone ID: GOSHI-09MAY01-C97925_1
ccgggtcgacctcgcgccggccagttttaaaggggtgcaaaacggaggaggctcaggcattactgatactgatgcctgccgggctgcggttgtcccttgcaggggggcacaaggttggagactctgctggttggaccaccattggcaatattgactacaaacagtgggctgcaacaaagaccttttaagttgggggggggatgcttttcgaggtacaatgctcagttacacaatgcgatgcgggtaacccattcgatgtacagggcctgcaatacctcatcccctttggctacatataccactgacaatgactccattaaaataactactaaaggtcaccatttttttttctgtggtgttcttggacactgtcaagctggacagaaagtagacatcaatgtgcttcgcttacttgaaacagctccggcctcggctccctctgggtcacctttgagcccgccgcccgttcattcagtgagtgttccagtatcctccccgagcaacgctctcactttgaaagcttccaaggggaatttttccaaacttggtttagcaattactgttttgcagtttttgaatcaggtttcccattgaaccaaactagttttgcttattccgtggaattatttaggggccttttgggggacctttattggaaatggttaatatactttataatctcaaagattaataattgtacaatcaattatact

SEQ ID NO: 16530 - DNA, 470 bp, Gossypium hirsutum
  unsure (1)..(470): unsure at all n locations
  Clone ID: uC-gsronu33B079c11b1
agatgctataacgaccaaacaaaagttggngcaaaaaggtgttacaattacaaggagtttttgagtccctcacccccctcaaaaacccagccagaaaggaaaatacaaacacctcttctccttgctcaggagcatcgaagccagcttacaaatggcagcgaagagaatagaagctcaggctttattgatactgatgcctgccttgctgcggatgtcccttgcagctgtttacaaggttggagactctgctggctggaccaccattggcaatattgactacaaacagcgggctgcaacaaagaccttccaagccggtgacgtgattcttttcgaggacaaagctcagctacacaatgtgatgcgggtaacccattcgatgtacagggcccgcaatacctcatcccctttggctacatataccactggcaatggctccattaaaataactactaaagggcacccattttttt

SEQ ID NO: 16531 - DNA, 552 bp, Gossypium hirsutum
  Clone ID: GOSHI-09MAY01-C97525_1
cggcgcgtgggcggccgcgtgggcggacgcgtgggggcgggattacccgctgagtttaagcatatcaataagcagttaatgaaaagagaacccggttcaaaaggaacaatgcaaatggaagctgatgaagatgagaagatagatcaagtaagtgattctgattatgattcggatgatgatggggatttcagcattttaagtgattccagttttgggttcccaaatcaacctcttgttaatgggactgaatcttctggcatatcagatgagggtatgtttgagaattaacgtgaatggttttgttaattggactcgggtgtgaaagttgggacccgtttatgtttgagaactaggtttcttcaggtatttgaagggtcgttaggtaatcatgtttcgggcctgatatccgaatgtatcccggattcggacctcccccccgcttatttctgcagtcatggtaacataggggatcatgctgtaattgatgtatggtttcacagtttgagagctggtgagcttaaaattttgatccaatttagaacagttttaccc

SEQ ID NO: 16532 - DNA, 819 bp, Gossypium hirsutum
  Clone ID: GOSHI-09MAY01-C97495_1
gtgaacgaaagagggaactattgcaggcagcgaaacgatgataagacttcactagagactgcgattaatcaaacaagaaaggaagaaagggaagttgttaatgctaaagaagcaattgaagggctgaaagatgaagggatcagtgaaaatgctctcattcttatggagctactaaagccactcaagagtggattcgtgtggttttggaaaacactttcatgggaacgaccgggaacaacccttgtcgtaattgccatagttacagtaattgtgtacaaggagtgggttggcaaggcgatatctgcaggcttgcttgtattggtggcaaaaatgatccaagctagacaagaaaagctcaaagacaaacaaaaggagataaccgtgtgcactgcatttgagccgactgcctcgacgagggagaacatagtttcagctcaatatatgtatatgacgatttgccagataatacaccaagcaaatgtcacaattctgaaattgcattcagtcctggtttcaagggcacccaagcatgcaaatgtgatgatggttggcatcactggtttggcgatattgtttgcagtaactccattgaagtatttgataataagtgctgtatttcattggatgataatgaggtcaaagctagggaagtacatgaaaaataaccaaaacgaaaggcgagtgaaagaatggtgggattctatcccacctactcctgttcgaattgtcgatcaatgcctatgatctgcaaatctgttgtaaaaatgatctagatatctgttgtacttatatatatatagaatttatatttcaccattt

SEQ ID NO: 16533 - DNA, 582 bp, Gossypium hirsutum
  Clone ID: GOSHI-09MAY01-C97755_1
ctcacgcgtccgcggacgcgtgggaagaaggccaagagaaattctgctttccaatacagttattgctcctttctttttatccttctcggttggtttaaggtttaagaatcatatataaagtggtgctatgtatggttcttcaccattgccccgccgaaggaacttgtctctttaatactaataataagatgatgatgatgatgatgagtggatattaaccatagatgagcaataaagtgggttgttgcaggggtttcccttcacttcttgtggtgggagtcgctattggcgtggttactacaattaatcaattctcgtgatgctaagggtaaattgtctcctgaaatgaaaggttgcgactagcatttgttcacctactcattatccagatgcttgtcataagactttcgcctctatgaacagcactggtcctaaagaattcgttaaaaaggttatctatgctgctgaagaagaagtcaaaaagttcctcaacttttctgactccaaattgctgaagctaaggacaattggcctcacaaaatggccttgaatgattgtaaggacatgatgcaatatgccatt

SEQ ID NO: 16534 - DNA, 578 bp, Gossypium hirsutum
  Clone ID: GOSHI-09MAY01-C97155_1
atgaaatgtaccttggctctattttgtttaactctgattcgcaaagcgtatttatttgacagaataccacctaaaattgacaatgcttctttaacaaacatcacgaactcaaatcatatgggtacattacaaaaatgaaagctatgctttccaaaagtggaatgatcttcagcaatggataatgatgagcgtatgggaccactggcagagatactcacagacagcttatcattctcatggttttgatggaggtggtgaagatggcggcttcagatccgggtactacatagaaaagagggtgagtttcaggaaaattaattcatgtattaaggcaaaagatttaacatgtaaattagtcttcgaatcggacctcaaatgaatatattcattcctttcctatgtattcaagggatcgctaaaaggtcatatcgcactagggtaaggagaagagagaatacgtgagcgtccaacatgaatatgttcatatttttaaaagttcttcccgtactcgtattcgaatatgcaaagaaaaataaagattcggagcaacataatgtaaaagagagaagtcatacatt

SEQ ID NO: 16535 - DNA, 607 bp, Gossypium hirsutum
  Clone ID: LIB3825-023-Q6-K6-B2
tcgcgatttcaagtggtatgatgggttcttcttgtctatgctggctacaaaatcattgttgctatcaattggaagcgttatcatcattgtacatacccgttgcatatatggatcgtggttgactactctactgtcttcatttttcgtcttttgatgtttgtagataatggacttgccgctggaatgggtttggattttgggtggcagcagaggtatgctcgattttgtggaagaatagtggtcctttcaattctgtctatgctactttatccgtttctttgggcctggactgtaattggcactctatggttcactagtgctaggaactgtttgccaaaagaaggtcagaaatatggtttcctgatttggctgcttttcagttactgtggactgctttgcattgcttgtatgtctgttggaaagtggatgacacggagacaagcacacttattacgtgctcagcagggtattcctatttcagaatatggggttttggtagacatgattcgagtaccagattgggcatttgaggctgctggtcaagagatgagaggcatgggccaagatactgcaccataccatcctggacttttattgactcctgcta

SEQ ID NO: 16536 - DNA, 605 bp, Gossypium hirsutum
  unsure (1)..(605): unsure at all n locations
  Clone ID: AI054860.1
gtttctttgggcctggactgtaattggcactctatggttcactagtgctaggaactgtttgccaaaagaaggtcagaaatatggtttcctgatttggctgcttttcagttactgtggactgctttgcattgcttgtatgtctgttggaaagtggatgagaggcatgggccaagatactgcaccatatcatcctggactttatttgactcctgctcagagagaagcagtggaagcactcattcaagagcttccaaaattcagattgaaggctgttccaactgattgcagtgaatgtccaatctgcttggaagagttccatgtagggaatgaggtaaaagcttttaggtcaattcaagcacttctctaaggtcttccatttatactctacanatgttcctggttaagcttagatagggctactattctncatcaattataggtgagttggatttgtggcctgtgaattgctctttaagggtaatacatcgtatgaatctgtatggatgttgatctatatgaagttatactcgtatccccagtttgagattctgctcagattatatttcagagtactgactacactgatcatatgaaataatactata

SEQ ID NO: 16537 - DNA, 842 bp, Gossypium hirsutum
  Clone ID: GOSHI-09MAY01-C90905_1
cgttttcaaagttctccgtctctgcaaaactgacccgccaggctcgttcgaactaccctttcggagctccatttcctgccatctgccccggcttccttttttcctttccgaaattttatagaggtttttcataaaaagaaaagaaacaaaaaacaaaaggaacagaaatggtgaaatctgtggcatcggcgcagcttcatcaagaagaggaagacgatgatggggaaacggtgaaagtagaagggaacggaagtgaacaaaaggcgaacagtaatcggtctaagcattctgagactgagcagcgtagaagaagcaagattaatgaaaggttccagactctgagagatattatacctcaaaatgatcaaaagagggacaaagcttcttttctattagaggtcatagagtacattcagtttttacaggaaaagttgcaaatatatgagggttcgtaccaagggtggagccaggaggcaacaaaactgattccatggagaaatcatcgtgggcttgcagagagttttattgaccattctcaaattatgaataatggatctaattgtgagaatgatggtgtcattccgtcaatggttgcaaatgcacagaactcaattgattctgacttgggtgatgctgcagtttttaaaacaccggatcacccccctgtgtctgctacttccacagttagcatgcagactcaatcgaacacaattgctactcatggaagaggtacattacttttcatgagtctgcttctgattctgagaacatggtacatcaaccccaatttcagtcatggcaaaacaaaaactgtctgtctgaaaatgctggtgtgaacaatg

SEQ ID NO: 16538 - DNA, 843 bp, Gossypium hirsutum
  Clone ID: GOSHI-09MAY01-C90795_1
gaaaaaaaaacccagctttagggtttcttcttctcctccaattccaagccccgaattttccagtctgttaagaagcaatttggaatggtgcgggggaagctgatcttgatttgccagcatggtggtgaatttgagacaaaagatgatggatccatgtcatatgctggaggagaggcacatgccttggacatcagccctgagacaggattcgatgatctcaagtacaaattagctgagaaatgtaacttggaactaaaatctttggctatcaagtattttctccccggaaacaggagaactctaattactttgtctaatgagaaagacctaaaaaggatgtgtgatttccacaaggactcggtgactgcagatgttttccttacagggaaagcaggctttgttcctgtaaatcatggcatgcctgctaagaggaaaaagaaagccactgctgcacgtcctgctacttccaaagttgctccctctgctggcggcctgaaggatgttaccatcagtatagcaaccccttctgactctgttgcaggtgtcaatgcagcactccgaagtccctctagagcagcaaagcgtactgctagccgtaacattgttgatggtctttttgaggtcagtgttgctgatgcaactgacacagatacaattgatatgagtgcttctcctgctgatactgtcaagaaacgaaggcgcactgcgtcctgaaacgtgctgcaaatggtcttaccattgtgactgttgacgacaatcttgaggagacagagaaaactacacccaggaaaaaggtagctaggaaattcaatcccattgtagtagctaataatggggaccacc

SEQ ID NO: 16539 - DNA, 585 bp, Gossypium hirsutum
  Clone ID: GOSHI-09MAY01-C90655_1
accttctttgcagaaactcttcactttcttcaatctggaggttttggccagaggtttcctaacgcactctgaaccatttttggggctctcttctccaagtaaaaactttctcttcttctaagagcctccgttgctatagtatgagcgtagatattttttgctttttgggacccaaaagtaaactcaatctcctggaatctgtttatttttggttttgaatatctctgattattgctccaatgaccgatttatccgtattagagactttgacatttcttgatgacccagttttcgagtctcccataacttctattttgttgactcccaactcaatccctagttttattacctgtaatcctgcataggcctctgcagtgaatggatttgcaatgttggagtgaataactacttgtgttgcaagaatttccccttcctcgttccatactattagccccgaagttgatctgaaaccctgatgatcgaagactgcatcaaaatgaactatggcccttccccttttgggtacctgttgaatattgtcagaagaatgaagactgaaccagatgaaccagaggttacagtaga

SEQ ID NO: 16540 - DNA, 692 bp, Gossypium hirsutum
  Clone ID: GOSHI-09MAY01-C90015_1
cccagcgtccggccaacataaaatttgtcattagattctgatctaaataaaaacaaagatgtctggttacgtaggcattttggtctcagatccatgcctgcaaaaccagttcactcaagtcgaacttcgtagcttaaaatctcattttacgagtatgcgaagagagaacgggaaactaacgctgggagacttagcatccagaatatccagattgaaagttgtgggagagaatctgagtgaccaagaaactacagattttatcgctgctttgtatcctaacttcaacgatgaggtcgatttcgagtcctttttgaaggtttatctgaaacttcatgcacatgcaagctctaggacaggaaatccagcaaagaactcatcagcattcctcaaggcagctacaactactctgcttcacaccataagcgaatccgaaaaggcatcctacgttgcccatatcaataattatctcgctcaagatgggttcttaaacaaatacttacccatcgatccgtcctcaaatgatctatttgagattgttaaagatggagttcttctttgcaaactgataaatgtagcagttccgggtaccattgatgaaagggctattaatactaagagactgctcaatccatgggaaagaaatgaaaaccataccctatgtctcaactctgccaaggctattggctgcactg

SEQ ID NO: 16541 - DNA, 672 bp, Gossypium hirsutum
  Clone ID: GOSHI-09MAY01-C90315_1
ctttctctccacaaacccactaaaaaaactccgcgattccccaattgagacacagataaccttccagcagtcgctcgcttttcaacagtgtgaatttgatgaatttggtttagaaagttgtggaaatctgcaatctttctttgatcttatccttttttttggattaatttgcaataaactagatggttgaggatttgcgctgttatttttattggaattgattcgatagtgctttcataactcacagctatgaaggaagaactatgtgaaccgatgccagattcaagaatggtacccaaaatttaaatcagtgtcgattaggacattcattcatgagcttcctgaatcttttgtccagtacctactcgatgattcgggacctttcctccttcccgcttcaatctcaaacgaggatgcctttccgaatagaattcataatccagaagaggaggaagattatcaagtatcactaaggatccggcagatgaagcagaagctttttcggccccttgtttcccagaacttgagttgaagatcaaggagtcaattgaaacccttgggggtgcaatctttcctaagttgtaattggagtgcacccaaggactctgcatggataagcaccttcgggacactccgatgcactacattcagcgagattgctctcttgcttcg

SEQ ID NO: 16542 - DNA, 912 bp, Gossypium hirsutum
  Clone ID: GOSHI-09MAY01-C90335_2
ggacacattggggacggctttgtggggggggcttaaacgaacttacaggcttgctttgaagattcagcgtcggattattagccctaagcgtcccaggattcgacaatttgttcacagacgaacacgtgctgtatttgacatagcactcaaggttcaccagaatatacaacagagaggctgggaagttggtaggaaccttggtaactggatcctccgctggcttgacaaaatgaaaccttctgctcaaatccgacctccaagccaccagaaaccccaccatggtaccggcagtgcaaacatgaacatcacaaagcaagtgaataactcatcaaaaactcctagaagcttgcagacaccacgaaacagtgaagctgataaacgtctttttagttcatcaacgtatatgctgtctaaatccctccctacaattgcaatgatgattcggccaccaagggccgcaggaaacttgcccccgtccgggcatttgagcatcaatggacctcacacactgaggttgaactacacacgaggcgaaggagttattagaaaggatataatgcaatggatgctgcacaactgaagattggaaactcttttccgtttgcatttggggacttcagaaaccccctatggtcgtggaagggggtatgtttggtgctggaaattgtttttttgaaaggatacattgcttttgagtttggcctgttcatgggacaataaaatgtacttgtcatctgcgtttgtagattctttcgagtctatatgttccagcattctgttgcttggagaacacagatgttatgacattgtcgttatgttatacaagatctgtgaatcatttggtttgccattgccatatggaaattttctttggacactatttgtgataacgttgaattttacttaaaaaaa

SEQ ID NO: 16543 - DNA, 759 bp, Gossypium hirsutum
  unsure (1)..(759): unsure at all n locations
  Clone ID: AI055059.1
gaaataaccagatggttattttgaagatagaaaataagaaagtcaagggtgcaagagagagtgaaaaatggtgttgtgggagatcacattggggacggcttatttcttggggcttaaacgaacttacaggcttgctttgaagattcagcgtcggattattagccctaagcgtcccaggattcgacaatttgttcacagacgaacacgtgctgtatttgacatagcactcaaggttcaccagaatatacaacagagagactgggaagttggtaggaaccttggtaactggatccttcgctggcttgacaaaatgaaaccttctgctcaaatccgacctccaagccaccaagaactccaccatggtcccggcagtgcaaacatgaacatcacaaagcaagtgaataacttattagaaacttctagaagcttgcagacaccacgaaacagtgaagctgataaacgttttttaattcanaacgtatatgcttgctaaatccttcactacattgcattgatgattcggncaccatgtccgtaggaacttgacttagtcatgcatatgagcacttatggacttacatactgagttgaactcacagagccatgagtttttaaggattatgcatgatctgactatgaatataaacttttacttggatctggatttaaactcttagtcatagaatgggtatttttctgtaatgtttgtatgatattcttatattgtatgtctgatatattgattatgttacttgtttg

SEQ ID NO: 16544 - DNA, 683 bp, Gossypium hirsutum
  Clone ID: GOSHI-09MAY01-C91955_1
gagttaaatgaagatgccattaaagctcatcaaacccaaactcaactcgtaaattacatcaaatcaaagcggttgaaatacggagacctgcactcgacttgttcaactaacgaaatatttaacaaatctcttcattcatcaaattcaagctcaaagtctgctaaagaacaagaagagaacttcattttatgtcattacaaaacactatttgctacttaaaaacccaattcaatagtcggaactgacccaccggatgccatgatctgttgctctaacctgaacaaagtttcaaacttgttcttcacaaggtaacactcttgcttcacttgttgcagacatgttaggcacccttcaatgtttctgcacatcacagtagttgcggaaagcaatgcaagcatttttaaccctttgtgcaccaatgctggaactgctacctttcaattgatgaacgtggctatcaagttttttaaaatccacatttggctgatctaaagcaatggtcagttcattgaggagtttctcgaaatcctcgaagaaaagggacacaacttcgaagacaaagtctgggttactatcatcttgaagctgttgaagctgtaagaactgagcatccaggaaaccctccataaacaaggattttgtgtagtccaccaacttctctgaatttgaaccaactccatttt

SEQ ID NO: 16545 - DNA, 563 bp, Gossypium hirsutum
  Clone ID: GOSHI-09MAY01-C91965_1
aatgaacttgtacttcaattttgaattccgaatttcattctgtgtctataatcactacaaacatctctaatcgcaataatcgtgagtgaaatggtatttgaaattcatgtccttatggtatttttatggataaaaaaaatcaggcgtttgtggatagttttgaagataaatattactacaagcagcttgagggctgaacaaaaccagaagcggttccatcagcattactacaggatgcttcagctgctttgtttctgtaagtgagcttcacgtcctccagctttatattactgcaaggatattctgagctacaatcaaacttcactgctacttctgtcgctgatgttccatggatgtcttggtatgtcacatcgctaatttttactcccgaaacctgaccagggcagttcttttcatctgggcagtactgttgatcaatgacgatggggttttggacatcggtcatgactgcatgctgaaaaagtatgttcctagcaaaaccagagctttgtctcccccatgactttattctcaccccattttcagtgccagtaaatgcaact

SEQ ID NO: 16546 - DNA, 491 bp, Gossypium hirsutum
  Clone ID: GOSHI-09MAY01-C91855_1
aaaactaataaaggtattatattaaagaataatattttcaatgtgtcttcatacacttcactaaatttatcaaaaaaaaaaatttgcaaaatagagtttctctactgtaatcacaatcacagcttatacatgcatatctctcttcattatgctattgatactagcattcatggaaatagataaaatacccaaaaaactgcggctgttactatagcaatgggagcttgaaacaattttaaaaaagtatgtacaaatagagaataatccatcctgccatggaaaaaactgcaaaaatatgaacccaaaacaacacagcagctgactcctttccacatcctcttaaattagcaacagccccagaaagcacagatgttggcattgaatgctgaagaagaagaacaaatcgaaacatcttatcaccagcaggaagaaaaccaagcttatcagccatcatcacaatgccaagtcctgcaggaggcaccaagcataga

SEQ ID NO: 16547 - DNA, 932 bp, Gossypium hirsutum
  Clone ID: GOSHI-09MAY01-C91465_1
gaaagctattccatacaaaataagacagacaatgttgtgaaaatagcggttgtttaccttggtttcattaagggtgaggatggcactttagatgagccaaaaaaagcaactgctttattcaaagttgacatgctttacacaatccatgcgtccggtgacatcgtaattgaatccaatgtaaaaccaagttctggtcttcctcctttaccacgtgttggagttgaattccacttggaaaagtcggtggaccaagtgaaatggtatggaagagggccatttgagtgttacccagatcgaaaagcagcagcaaatgttggggtttatgagcaatcggtagaagggatgcatgttccttatatagttccacgggagtccggaggtagagcggatgtcagatgggtgacatttcaaaacaaggatggctgtggaatttatgcttcaacatacggaaaatctccacctatgcaattaaatgcaagttattttagcaccgctgagcttgatcgggcagtgcgcaatgaagaacttatcaaaggggattccattgaggtccatcttgaccacaaccacatgggtatcggtggagatgatagctggacaccctgcgtacacgagaactatctggttccagccgtgccgtactcgttctcaatccggttatgtcccgtaacttcagctacttctggccaaaatctctacaggtcccaacttcaaaactgagttcattctcattgtgttttatttgcaagatatgagggatgcccttagtttgacactgtaataaggcgttcccattgaactttcttttcatggggattcaaatgtggctttatgttaataaataagtaaaagaaaatcttatttccatacccaaaatgtcttgtaatttggatacaatatgaaaatgctgtacaaatatggcaatggctctg

SEQ ID NO: 16548 - DNA, 596 bp, Gossypium hirsutum
  Clone ID: GOSHI-09MAY01-C91415_1
tttttttttacctaatgaataatttgattagtattccaaaaattttgataatataagagtcgaattatatccaaccaaatttgaaaacaaatgcaaatgatgaaaaaagaaagaatgcaagctcaacatataagaaatggttaggtggcgatgatacccgctagaacatcaatttttcctcgtgcataaattgtgtaaactaagcggagagcgtcaagccacccatctagggattcccacgaatcagcaaccaagaaaacttgaccggatgtggtattaatgcagaggccagcacctggaggtaaagttagatcagcagaggctgatacagaaatgatgtctggaatatcaactctgatagcctttttgtccgtatttcctgcatccacgattcttccagagaggcttcgggaaacttgtttctgctcaactttgatgacctgttgaagtgcttcttgattcagaaagaactctgttctcttccaatcactatgaggtggaaatgtgtttccgaatggtggtgcagtcagatacccatctttaagatggggtaaaggtagcattgaatgaacaagcttcaaggcactgctgtaaac

SEQ ID NO: 16549 - DNA, 546 bp, Gossypium hirsutum
  Clone ID: GOSHI-09MAY01-C91705_1
cagttcccaattctttgtatcggtttcaaatagttctaactatttccggttatatgtccccaattcaaccagtcaagttatacaatctagcattaaacaaaagttatataaagctcccccgagggaactcataatcacaatcacaatcacaaacacaaaaaatgaatctaaacctatagtgagctttggtttttgttgtacatggaaaaacaaaaaacaaaaaaaaaagaagagcctggccaatgtactagaaatatccctcaagaatcaaaacctgcattcaatgatgactatgcagcattgaccggctcagcgacagtctctctctgagtcttacacctattgcattgagctcgagatgcatagttgtgattgttgcactttgggcacatccaatctccactacgccattgctttgctccttttccaagaagggttggtgctgcagctactggaggaaatggaattggtaactgccaatttgaagctgcaccgggaggatatgcccccagattttgggtcagtattagcttctatcatttgctc

SEQ ID NO: 16550 - DNA, 949 bp, Gossypium hirsutum
  Clone ID: GOSHI-09MAY01-C91175_1
ttcttctcgcgtccggtttcattatcagctctcatttgtcagacgtaaaacccataaaaagggcaagttgcttcttttttcttgtccaatagttcctttgtttgttcaaaaacatattcttttttaaggttgaaacaagtttaagcttaagggaaaatggcattcacgggaactttggacaaatgcaaggcttgtgataagactgtccatgtggttgatatgatgactcttgaaggagttccttaccataaaacttgtttcaaatgcagccattgcaagggaaaccttgtgatgaacacctactcctccatggatggagtcctgtattgcaagcctcattttgagcaactatttaaggaatctggcaatttcagcaagaattttcaaacagcgaataccgagaagcaaaatgacacgtcgaggactcccaacaaactctcatccttattctctggaacccaagataaatgtgctgcttgcgagaaaacagtgtacccattagaaaagattacaatggaaggggaatgctttcataaaacatgctttaggtgcgctcatggagggtgccctttgacacactcatcctatgcggctttgaatggtatcctctactgcaagcatcattacgctcaacttttcatggtgaaagggaactacaaccatgtcctccagtctgctacacataggaggaacccctcccctgcatcatccacggactttgctgaaaaccaagctgacctcgaaactgcagcggctaatcaagatgccaatgaagaccagtcataattttaaagaatattgaaaccaataaactttagcaattatcgatccattggatgattccctgactggttcttcataaaattcccttatatgatctctttttagagcttttgcaattgtaccagtttgatgtcgaaattaacattaaattcttgtctgattgccc

SEQ ID NO: 16551 - DNA, 755 bp, Gossypium hirsutum
  Clone ID: GOSHI-09MAY01-C91115_1
cggcgcgtgggcggcgcgtgggtgcgttcaaaccttcgctgctgaccagttcgatgagaacaatcctgaagaaaggcagccaaaagctcatttttcaactggtggtaccttgggatcgttacaggagcctcagtcgccatcgttgtcgtcatttatctccaggataccgcccgcgcggccgcaggatttggggtgttatcagggtcattagcggtagcattggcggtgtttctaattgggatcaggaagtaccgaaagcaacggccgacagggagtccgttcacctctgtggctcaggtctttgtcgccgctgcaaagaagtggcgcgtgagtgaaacccacggtggcaggggaatttgctatgaagatgatagaagaggtgggagccacgtcaaaggtcaaaccatgggtcgcgacttggtccgtacaaaacagttcagatttctagataaagcaatgatcatcgacgataaagataccttgagcaaaactagggatccatggcggctttgctcattgaaccaagttgaagaagtgaagcttgttcttcgccttatacccatatggcttggttgcttaatgttcagtgctgtaataactcaattacacacatttttcaccaagcaaggcagcacaatgttgagatcaataggtcccaattttcaagtccccccggcagcacttcaaattctcgtaggcctcacgatcctcatcgccgtcccgatttatgatcgggttttcgtccccatcgctcg

SEQ ID NO: 16552 - DNA, 1051 bp, Gossypium hirsutum
  Clone ID: GOSHI-09MAY01-C91255_1
ataataaagctgctcgcctgctgtaccgccccgccagtgtaccggctcgaccgcacccggttctccttttccctttttctgtaaaaacctaaatctgaagttcttgaaatgacgaaaggaaagggagttgtaagccctaatttgaagctctctcttcctcctccagccgagacctccgtctccaaatttctgaccgaaagcggcacattcaaagacggcgatcttctcgtcaacaaggacggtgttcgaattgtctctcaatccgagcctgaagctcatccgcccattaagccatcagaagctgacaatgacgatcagttgagtttagaggatttagatgccattaaagttatcggaaagggtaatggtggaattgtgcaattggtccaacacaaatggaccggccagttttttgcattgaaagttattcaaatgaatattgaggactcgtatcgcaagcagattgcaaaggagttgaaaataaaccagtcctctcagtgtccatatgttgttgtttgttatcagtctttctataacaatggtgccatttcaatcatcttggagtatatggatggtggatccttagcagactttctgaaaaagttaaatcaattcccgaaccctatcttgctgtgatatgtaagcaggtgctcaagggtttgatatatcttcaccacgaaagacacattatccaccgtgacttaaagccatctaacttgttaataaatcatagaggcgaagtcaagatcactgactttggagtgagtgcaataatgacaagcacctcagggctagcaaacacttttgtcggcacatacaactatatgtctcctgagagaattattggtggcaattatggcaataaaagtgacatttggagcgtgggactggtgttgcttgaatgtgcaactggtcaattcccatattccccaccagaccaggcagcaggatggacaaatttttatgagctcatggaacaaattgttgaacaaccaccaccttgtgcaccttcagatcgattttctcctgagttttgctcgtttatttctgc

SEQ ID NO: 16553 - DNA, 480 bp, Gossypium hirsutum
  Clone ID: GOSHI-09MAY01-C91235_1
cattgaccagttttacatgttatacgatgactttaacatcacgaagctgccactgctcccacaagaggttactggggttgaagctctgaaatcattttcacgtcattttctttcaccatatcaacccttgtgtaaaagaggaacggttgaagatcttgagcgaagaatatcaatgttaaaggtacagatatcagaagctgaagcagaacttgagaaactccgaaaatgagatggaaaggtctgaatggtgttctatatgacttcgtatggtcttttcagtttgccgattcgctcggcatcgcatgatatcatgtgacattgtcgattgaaacagaatttagcattctatttgtgttgctgaataatgtttacataagcataatttaattttagagaaaagaaattctttaaacattgcattttcaccattgacatgtattagatgttgccattatattagtgttatgaaaggattttctt

SEQ ID NO: 16554 - DNA, 472 bp, Gossypium hirsutum
  Clone ID: GOSHI-09MAY01-C92545_1
cttgatttaagctgagacagggagaatgtaatataagtacaaaaatagcggtcgtaagctccttttctgtcgtatttaattcatcatggctgtggatgtaatggatactattacagtcaaatgcagtacacattggtagcagtgagagccgaaacccgtaaaacacgaacgtactggagcctcatgctttgtatgttttaaccctatccccttttattggcttggagagtgttagggttgagtgtttaattgtttgaaacatacattatacaggagattgttctcatttgcttggtttgcagtaaccccacctttcttggtgttcgtatgtttggcgtatttccgtttttgctaccatttttactgctgcttctctagcaaagtccgatgatttctttggaaagcattcttgctgccgaagcaatctttctgtaactcgatatttggattaagagggtataatattttccct

SEQ ID NO: 16555 - DNA, 776 bp, Gossypium hirsutum
  Clone ID: GOSHI-09MAY01-C92565_1
actggagccaccgatagctttatagttttagttaatgagaaatattattgtagtagttggtgcattgaactaataaatatcggtggattcggtttctacgacaaaagcaaaaatttatcaaactatttttaccccaactgacatgccattaagcagttgatcgttcctttgattgggttgtcccgcctaatttatccgactattttctaccgtaacatgccattaagtacttgattgttcctttggttggttgccgtgcactttattttaaatctccttctggtcattcctaatcttttcttcttatgcttgggtatctcatgacaatatcactatcaatttggacagtcatctggttatagaaacatcgcaagagatcaacaatgtgccgtatggagattatttcattgtagaggggctctggtctgtagaaagagacattaatggccagcgagaagactgcattttgagggtctatgtgaatttggcttttagcaagagaactgtttggaaagcttgctgtgttggaaggagaacgctattctttggtgtgaaaggtgaatttcttccggctagattgttgcctgtttcgttgcataagttgtctatactttggcgtggaaggtaaatgcttcattcttctgttgtaatgtatcagcgtcagttatgtgtgttgcttttcgaggtactgatatagccattgcatgtaggcaatttttacatgtattatgcaaatccccaaatagttttaagcaggtggactatgtttatgtgct

SEQ ID NO: 16556 - DNA, 583 bp, Gossypium hirsutum
  Clone ID: LIB3828-016-Q1-N6-H1
aggcaaaatcgagatgaatttataaaataaatttcaatgcattggctaaatgatacaacatagacaccatttgtgatcttgatgctatagcattccatcttacataataaagcacaatgcattaaaattcactcttattctacagaaacacagactatattgcaatcagaattctaaataatccagcatcataaaatgagactcttacttgacatacttcaaaagccattccagcatatcttgatgcgcttcgttagcacgtgccacagcagttgaattattaatatcatatctgagcgtccatccatgagaacaattaggaaataccttgacaaacctatcaaccttattcgcacttaagatgtcatcaaactgttttaaaactgctggggaagccaaatggtcaagctcagctcccaatatcgcaatgggcagcttcacactcttgatatcatccatagtcatatatgaaggatgtaatatcacagcagcttgaataagtttagcctttgtcagttcaaccacagctttagcaccccaacaaaacccagcagctccaattgatgaaaaccctttacttttc

SEQ ID NO: 16557 - DNA, 355 bp, Gossypium hirsutum
  Clone ID: uC-gsflnu33B094c10b1
tcccacgcgtccgcccacgcgtccggaagctagactgcatgaaacagtgggtcccacgtgattcttctgctcctataacgcatgcaacgttctcatgtgatagccaactggaatggcttttgaagtatgtcaagtaagagtctcattttatgatgctggattatttagaattctgattgcaatatagtctgtgtttctgtagaataagagtgaattttaatgcattgtgctttattatgtaagatggaatgctatagcatcaagatcacaaatggtgtctatgttgtatcatttagcccatgcattgaaatttattttactaattccattctgattttgccttaatatgccattc

SEQ ID NO: 16558 - DNA, 547 bp, Gossypium hirsutum
  Clone ID: GOSHI-09MAY01-C92035_1
tagaagaaaagagcacctcatcatacttgaaaattttcattccattacaattatttggtttttaagccacaagatggcaatctcagatcccaacccatatttattatggttttcatcatttggcattacaacagacaattttcaaacttggtgatcaaagttaccaggaaaacagtttttaaagacggtaaatgatccaagggaagaagacaaagagccccagccgccaccaccgggtgttaaaatctgaagtatttccccagcctgcacctccactgtgtttttgcctccaaggtagattcgtcttttatcttttgttataagatagttggctccacgagctccatttgctcctccttttagccctctaggtgcatgtactcgcctctcagaaagaatgctaaccacaactgggcgcctgaactcaatttccctcacgagtccattaccccctttgcgatgtcctgctcctccactattttctctcagtccaaatttgtgcaagaatactggatacctctgctcgaaaattcaggatcggtcattc

SEQ ID NO: 16559 - DNA, 693 bp, Gossypium hirsutum
  Clone ID: GOSHI-09MAY01-C92295_1
aatacaaattggtaggttttattgagaaagaaagaggatagaaacagttataatatgtccaagaaacatttcgagaaatcgaaaaaaaaagcaaaggctagaaaaacaaatccttccctcttctctaccctaagtacatctccatgatttaaactaaaatatacatatctaagataaaaatcatttatgttcgggcccaattttacccgggccttaaacacaaaacacaaataataaaacaaaattaaaacaaaaaacccaattacagaggcccaatacccaaacccgaaaaccaaagtcaacttagggtttcagtttttgaaaccctaagcgccgcactagctccagaccgatggtcttctgccgccactcgcttcagacccttggtctccgggccgctgcgcgtctatcaccgccactgacccatcaccggcgcatgtcaatcacctgcttgcttcgggagtcggtgtcggaacttgtcttcgccgtcaccggagttggataggtagaggtctctttctccttttttctctcattcccacggtcgagaaggccaagccttcagggacaccgtgaagcgagggctgaaaagcccgtttcgcgactccggccacctgccatgacggttgtacgccgagggccaaagatctcaatgacccccctttgagaaaaagggagaagggatttgatttc

SEQ ID NO: 16560 - DNA, 671 bp, Gossypium hirsutum
  Clone ID: GOSHI-09MAY01-C92285_1
aatcattgttggcagctacaaacccaacagaggagcatgtgcactccacttttgcttctagatacgttcgcgctcctgttccaaggttcaagatgccggagaagtcgattccaaaggacgcggcgtatcaagtaatacatgatgagcttatgctggatggaaatccgaggttgaacttggcttcatttgttacaacatggatggaacctgagtgtgataagcttatgatggctgcaattaataagaactatgttgacatggatgaataccctgtcaccactgaactccagaatcgatgtgtaaacatgattgcaaacctgttccatgctccggtcggggaagaagagacagcagtaggtgtgggaacagctggttcctctgaggctataatgctggctggattagctcttaaaaggaggtggcaacataagagaaaaacagagggaaagcccactgataatcccaacatagtcacgggagctaacgtgcaggtttgctgggagaagtttgcaaggtattttgaggtagagctgaaggaagtaaagctgaaagagggatattacgttatggacccagaacaagcggtagagctagtagatgagaacaccatatgtgtagcagctattttgggatcaacgctgacaggatgatttgaggacgtgaagacgttg

SEQ ID NO: 16561 - DNA, 675 bp, Gossypium hirsutum
  Clone ID: GOSHI-09MAY01-C92245_1
gattgtcagatatatcagcttagcaaaagacaatggaacttgaagaaggaatacaaagaaggacatggaacttaaccagttccaccaagaacacccttcagtttcttaacctgagcatcatctaggaaggtagtctcctctataatgttggagggcaaatcatttccaaacaaggcgaagtctaggatttgaacaccagggcttggactactgaaagatacatatgccaatgctggtgttgtacctgcattgatttgaaagtgcaataaaccttgggggaaaaccatgatatccccagttttaagagttttgaagtaaactttgttggcagatgatacgaatccggcatcaattatgccttgaataacaacaatgatttccgaactgtcggggtgtgtatgcataggcactactccgccaacagccaaatccagacgagctatggaaatgccgagtccgttaacaccaggaaactgagcagtgaatgctggtgttacagcagcttttatgaggtttgaagtgttgcccgcgtgtagtccggagaaaacgaaatcgtctacagtgactagttcaagcctcttgcaagagtaccctgcaagcccttgaggagtctttaggtctgcaacacaaaagtctaatgcattgcaggatgatgatgataataagaaagaaaac

SEQ ID NO: 16562 - DNA, 674 bp, Gossypium hirsutum
  Clone ID: GOSHI-09MAY01-C93935_1
cggcgcgtgggcaaggtaggaagaagggaagtttgattgatgatgtagttgggagtgcttcttctagggtaacaccggctcttgatggcaccgccggaggactaaggggaaatagaagcgaaagagattcaagaaatacaagttcggtacccggggctggtcggacatcattagacggtgccaagggtgaccggagaacaaaagcaaagcccaaacagaagtcagggcatggattcaacggcaggctctcggatcctttgctaccacctttggctaattctaacaagatgactgaaagagaagctaggtcattatctccaaccccgagtaatgttcgtccgaaagaatcggacgaaccagatgatttcgcaaacttgcaactaaatgatttagatcctatggaagaattgggtgtttcaaatgacattggtggtccccaagatttgagttcatggctaaactttgatgaagatggcttgcaagaccatgattcaataggtttagaaataccaatggatgacctctcagagttgaaatttgcattttgatggcccatttgatgcaatctgatcaagtaaggactaattatgattcattttatatataatagatgtcatatgtatgtaattgaagaattttgctgctttaatccaattaaatttacttaccttgtc

SEQ ID NO: 16563 - DNA, 793 bp, Gossypium hirsutum
  Clone ID: GOSHI-09MAY01-C93585_1
accaaatgactttttgtatatttaaaaagttcattctctatactcatgatcaaatataaagccatggtcgaatttaagaaaaaaagatatgaaggtccgtgtctgggtaccatcataactgtgcatttactaaagagtccaagataatagccatgccatcaaagagtccgtactcaaaaatgttggaaaggaatcctctttacaagcactcctctagttagtcactgaaatcggagctacgagaactgctagcattacgactgtgtaatgacaagcctctcatatgaccagccacagcagagccgtcagcctttttctcctgaaagtacctttctctctcgatgtgttttgcaggagggggaggaattgcaacagctgaaggatgtccattgttttcatatgatggttccgagggcaatggtcgaataagtggacggtttagccgttctttttctcccagaatgtttgatccatacaatcccacgtgtggctgctctctagagcactcttcatcttccggtcttgcacatgctttcccttttcgtatccgtcttaaaagttgctcaggctcctcttcctcttcttcatggttgaaatgattaagagttgatgccggcctactagaaacagttgtcctcccagagagaagagcatcatgtctgataagaacattctggagttgctcattcaattcaattgctcgagaaaccaccttctcatccctagtactcatcccccgatgcatctttagttgcttctggaatgaacactgttccacaaggtcaaataaaat

SEQ ID NO: 16564 - DNA, 1180 bp, Gossypium hirsutum
  Clone ID: GOSHI-09MAY01-C93545_1
ggaaaatctggtaaaagtatatatttcaaggatatatggcctagcaatgatgagatcgcacaggttgttcaatctagtgtgttgcctagatatgttcaagagcacctatgaagccatcacaaagggcaacctgatgtggaatcaactttccgtccctgcttccatgctctattcttgggatccaaactcaacatacattcacgagcctccatatttcaaaaacatgaccgtagaaccaccaggcccgcatggagtgaaagatgcctattgcttgctcaattttggtgacagtattaccaccgatcacatctctcctgcaggtagcatccaaaaggatagccctgctgctaagtttcttcttgagcgtggggtggacaagaaggacttcaattcctatggtagtcgtcgaggcaatgatgaagtgatggcaaggggcacctttgccaatatccgcattgtcaacaagctcctgaagggagaagctggtccgaagactattcatgttccgacaggagaaaagctttatggctttcttcccgccctgaggttcaaggctgctgggcaagacacgattgtctgagctggagcagagtatggaagtggcagctcaagagattgggctgccaagggcccaatgttactgggcgtgaaagcagttatcgccaagagcttcgagaggatccatcgaagtaatctggttggtatgggaatcattcctctttgtttcaagcctggtgaggacgctgattctctaggattaactggccatgaacgttattcaattgaccttccaaataaaatcagtgagataaggcccggccaagatgttacagtcacaactgacactggcaagtcgttcacgtgtgctgtccgcttcgatactgaggtggaattggcatactttgatcacggtggcattcttccatttgttatccgcaacctaaacaaagagtagacaatttggcttcaagttagtagtctcttcactttgctatctgctttgattggttttgacagtcgtatcgattcgatcgacagtgaataactagtactggtatctcaatgttctctatacgacctgtttttcgttatgtttcgttgtaatatctggcgtgatttattttgaaaccgaaccaatttgaagagttagaaatgaaatctagtctgtttctgagtcctc

SEQ ID NO: 16565 - DNA, 619 bp, Gossypium hirsutum
  Clone ID: GOSHI-09MAY01-C93415_1
gaattgctagaatcagcatgaggacctataaaaaagcaattattaggctggagcaggtttcccattcttacatgcaaagggccattgcatcccatggagcttttgccatttggtatgcccgccattccaaacattatattaagaaacctgagatattgctgggtagaacaacagaagattttgttgttgacattgacttgggaagagaagggtgtgctaataaagtgtcaaggcggcaggcaattttcgacttggaaggcgatggatcattccatcttaaaaatctcggcaagtgttcggtatcgataaataacaaggaagtaggtcctgggcagagcctgagccttgattcgggttgtttgattgagataaggggaatgccattcatcttcgagacaaatcagacatgcgtggagcagtatttgaatagtaagttgaggaagtcggcaggcccatgctgaaaaggtcgatttcaggccagtcttagtgttttgtggggaagacgggattaagaatagggggcaatggcaaccaatccttttttgtaattaaaaacaagtttgagaaaaaagaaaaattgtaatccattgatattcaataagagttttagtttttcttt

SEQ ID NO: 16566 - DNA, 659 bp, Gossypium hirsutum
  Clone ID: GOSHI-09MAY01-C93765_1
tgacttgttttagcagtatagtagttgtttatttttatatatacaaaaccaaagttctatccatggctgcatctttctcagtgccttcaatgataatggaggaagaagggaggtacgaagctgaagtaacagaggtgcaagcatggtggaactcagagaggttcaagctaacccgacgaccgtattcagctcgagatgtcgtggctttacggggcaacctcaaacagagctatggctcaaatgagatggcaaagaagctatggagaaccctcaaggcacatcaagcaaatggcactgcttcaaggacttttggtgcacttgatccagtccaagtaaccatgatggccaagcatttagattcaatttatgtctctggttggcaatgttcctcaactcacaccaccaccaacgagccaggtccggaccttgccgactatccttacgacaccgtccccaacaaagttgaacaccttttctttgcacaacaataccatgaccgaaaacaaagagaggcaagaatgagcatgagccgcgaggagagggctcgatctccttatgttgattatctgaagccaattatagcagatggtgatactggctttggtggcaccactgcaactgttaagctttgcaagcttttcgttgaacgtggtgctgca

SEQ ID NO: 16567 - DNA, 613 bp, Gossypium hirsutum
  Clone ID: GOSHI-09MAY01-C93725_2
gaagaactagtgttggtaactggtgacccgactcctacattctgctaagatgggacaaggccaagaacacaagaccagagatgtcccccaacttgagattcaggaaagaggggaaatattcttcttctataggcctaaagtaaacaaggaggaagttcatagtgttgatgatgtgcagcgcttgtacattgtattgcgtccagagtccggtgagagaggtgttgaagagaagcaagatccccactctggcaaggaaggtgccaaatcaagatcaggtgatcaacctcaaactggctcctccatgaataaaactgaaggtggacaggggagccaggaagtaaatatcgaggaggagccattgttaaggttcatagttatgggcagaaagagacttccagatccaggcaagaagtcccaaactttctggggttttgttgaattagtgaccacaaaggtagaagatgtaaaagatgctttaaaaggagaggaatatgatacatcatcaagaggtcaccgatatcaacctcctgcaagagcagtgggagaaggtgtttaccgtattgtgaggcacaattcaagtaagaacaagatgcacactcatttgatatataaa

SEQ ID NO: 16568 - DNA, 814 bp, Gossypium hirsutum
  Clone ID: GOSHI-09MAY01-C93725_1
tcggggagccaggaataaatatcgaggaggagccattgttaaggttcatagttatgggcagaaagagacttccagatccaggcaagaagtcccaaactttctggggttttgttgaattagtgaccacaaaggtagaagatgtaaaagatgctttaaaaggaggtcaccgatatcaacctcctgcaagagcagtgggagaaggtgtttaccgtattgtgaggcacaattcaagtaagaacaagatgcacactcatttgatatataaacttgaattcccaccaccaaaagaagagaatgaaccccaagaatcacttaacatcgagccagaaggctccttcttgatacaaatcaagaacccatcacaagctagcaattcccagtttaggggagttggaaacaaacgaaaggcagccttccctgctcacctgcaagcccggttggggaatacccgataccatccggctgatccacccgactttttgaactacgaaggatgtgagtttctactcatatcggcatccgatgctattgataaagaactggggttggaactggagactgaaggggaagcagatccttcttgttcggatttggtgaggacttttggggacactgcatctactactccacttttcaaaggaatctggtcttgaactatggcgcttttgttttaaatggcactgttgtagcctactatgaaatgttgcagttggtttgttaaggtagtgtgcaatggcatagatctgtcattttggaagttaggttgtaactatgtctacaatataaatgaagtatatttctagctgtttagaag

SEQ ID NO: 16569 - DNA, 999 bp, Gossypium hirsutum
  Clone ID: GOSHI-09MAY01-C93095_1
tttttttttttttaaaaatgcaagccgatgaatttgtttctccattactccaacaatcaaacatgaaacataatgcaagtaaacaacttttaaaaagttgtgacacaaaacataatgttaaggattcagaacaaaacagccttagtgctaagctaagtcaaagcaacagtagcagtaatgaatgcatataggcaacctccgagtggtcccttcatttgggctttggagaatatttagtagtaccccaaagttgatagattttcctaaaattccccacaaaactagtaccatctctaggctggcaaaccttgccttggcttgatccttttcttctaatggttgacgtctttgaatgcgaggaccaacttctccataactgaccaaattggcattcttgttgtacaatcatacttcgcttcttgtcatttccactcttgcatgtcccagcctccatatcatcttcatcttcgtcatcttcaccgttatgttcacatgctaaagtgctcgttgagcttgatatcgacaagtatgattgtttttgggcagccattcttctctttgattgaatctttgtcaggttatagctggaagtgacatgcctaataaaatgaagctgatcaccatccttgatgccataattcatgatatgatcagtgtctgtgagcacacttcttgtccatcatagcactagctaatatgtccccaaacatgtggccatgcaatcttgccgggacctttccttggcatatgactaaacacgtgttgaacagccagcttgtggtcggcaatggtggctgactttagaacttcaacctcaaaggaagagccatccagtttccgaacagagagcttgatgggctcctcgggaagcttagaataagaatagcaggatccaatggaccgccttggcttctgcaaaacagcccttgggatcaccaagtcctggacttggtttctcaacatgctgtctatgacataaggagaagcgcctttttgcaa

SEQ ID NO: 16570 - DNA, 488 bp, Gossypium hirsutum
  Clone ID: GOSHI-09MAY01-C93045_1
agggacaattaccccggtttaacaatccggctttctgttctgacttcaataaaatcattaccctcataaatcaactaatttaaatgggggttcacaattttcttaggggagctaatttccaagtcaaaattttaacaaaactaatggtgaaaaatggctctcatgaaatgttacaaagattgaagccgtccctcagctgtaatgaacaacgattctatcttttccctaataaatgatgaaactttcatggcttgaatgcagaaaatgccaccacagagttgtgtccaccaaatcccaaagaattcgatattgcaacgttaacctcatgctgctgcttttcattggcaacagtgtcgaactcaactgaaggctctggcttaaattgattaatgggttggatgaacccatccagttgtaatggctttcacaggggcaatggcttctaaaccacctgctgcgcccagacaatggccgatcatagactttgt

SEQ ID NO: 16571 - DNA, 1138 bp, Gossypium hirsutum
  Clone ID: GOSHI-09MAY01-C93335_1
ggcttttgaaccaaaagtgcttaagttacgtggacaggttgagactctgagaaagagagtgaacttcaagaatcggagcttcaaaaatccacaaagaaaactcaggaagcaatgaaagtggctgcagaggagtctgctaaatctaaagctgcaaaagaagttataaagtcgctgactgcacagctcaaggatatggctgaaaggttgccacctggagtttatgacacagagaacattaaaccagcatacttgccaaatggcttggagccaaatggtattcactatccagatgcgaacggagagggacatttaagatctgaatcaattggtggctctttccttgcttcccctactgctctcgattcttccacaatcaatggcaatcagagccctggccaattacttaaggaaccaaccggagccaatggtagagatgaccattctggcactagactgctgaatggtagtgggggtttacagccaggtggcagtggtgtgtcagcagctggtgatgaaagggaatttgggtcttttggagatggagaaaatggtacgaaatctagaaattcagcattggctgctaatggcaatcaagtggaggctgagtggattgaacaatatgagcctggagtctatataactcttgtagtactgcgggatggaactagggatctcaaacgagtgcgcttcagccgaagaagatttggagagcaccaagcagaaacttggtggtcggaaaaccgcgaaaaggtatacgagcggtacaacgtccatgtatcagacaaagcgtcgatttctgggcaaactgcccgcagatcggaaggagctctgtctccgacttctcaagtgtaagaaaaggaggaaaagcgtgagctcatttagtgtcactgacaaggttaaggagcatgaaaccccctccttttggtcatctcattttacatagtttgactccccctctataatttattttattgcatttaatgtctaggtctctttcacagatatgttgtattgtggtatatataaaatcatcattttccagatagtccaggcaacaaaggttttgttcattgctttctctattgcattgcatagaggtgatattttagtaaaatcaaatcccgaatacgaatttcac

SEQ ID NO: 16572 - DNA, 615 bp, Gossypium hirsutum
  Clone ID: GOSHI-09MAY01-C93285_1
ccccgcgtccgcaagttattggtttgcacatgtgtggagaagattcagctgaaattgcgcagggatttgcagttgctgtcaaagctggcttgactaaagcagactttgatgccactgtgggtattcatccaacatcagctgaggagttgtcacaatgcggtctcctactaggaaaatacgacagagctctgagtctcagggaaacatgggtcatgaggcaaaaactgcagcaggggtttagctagagtaattgaataggttgcgttttgttggagttccttttaaggttgatgctgattgtaacctctattacgatgcaaacaagctggttggtggaaaaaatggttctgacacgaaatttcccctttgcatcctagtcaaaacatgcatgccatgccatacatcataattccaacttcttacacatcatggtagtaagaaagtaaaattatttgcatcttcttcgatcagttcacattttactgtaaaaaatgctgttagatcacatttaacctatagccgttgcctatatttggtctaaaatgtttttggatcattgatgttaaaataaacagtgttaatttgttgcttaactgacaaaatctttagtttcgc

SEQ ID NO: 16573 - DNA, 543 bp, Gossypium hirsutum
  Clone ID: GOSHI-09MAY01-C88485_1
gttgaaacgctagaattactttcatgacaaggcaaatagataaactcattgcagccattattttttatacaggctgttggcaaagcaaccatgatgacatctcagtcatcaaattattctctatgtacaagcacgctagctagttgaccgccttagagcccagctgcccaggaattgaagtggcgagtgagaaagaacaaggattcaccatcttagttttgctgggaagtacttttctatgagggagagatagtatggcttcaccttttcgacatcgatccgaactttgctcttgctgtaaagatcatatttgttgaatatttcgagccacttgagattctcgacatcctccccgttcatcagttgcttgtatgaccctgacctatgcaaggcatagaatgaatggtatctgataatgaaaagggctgctgatggcagagttgtatcgttctctttagccaccagatacatgtagtcatcatgcccccatgacatcataacactgttaagtccacagccctctgagtacactccatatttaat

SEQ ID NO: 16574 - DNA, 1055 bp, Gossypium hirsutum
  Clone ID: GOSHI-09MAY01-C88785_1
aaatttttgaatgaactggtacaaagttctgttgttagctaaatgaaattggatctcagtatgaaatagcggttatataagttcagtggtgaagtgagcctttatcccaaatagctatggttttcttttagttctttatgaggcttgggattagctgcttaaagaatatgctttctagaaaatccgcttaaagctatattttaggaggacgattcaagagaagtttgtatatgcggtaaattatatcatagttctggtagatttgtgtctatttttgctactttaggtatttgcttcttgcttagatgacttaaaaacagagaatagaaaagcatgaagacaaaacctgatattcagctttatgctataaggttagtgttaagtacctcaattttcatatgctctgtgtttggaagaccaaggtcgccatgtttcgggagagcctgaaatatggagtcaaggttgttatcgaaatctttgtactgcattgacattgatgctcatattttttttaattctctgaacttccaattgttaacttgaaattagttctcaatgaaaaaataatttacatgcttattagttattcatgtgtggagtttggtcaacgagtttccaatccatgcaggtgatgtatgatgcatctggtgtccgacttcacgctggccgccaagctgaattgctgaatcaaattgtgtgtgagttccctcctgaacacccattgtctagcgtgaggcccctgcgtgaattacttggacatactccactccaggttgttgcaggtgccttagtgggattcatagtggctttccttatgcgaaattctggttaggatgacggtgttacgggggggagcaacattgattcatttgcctttccggtaacgagtattgagttaattataccttataattctaaagttgtttaaagttgtttttagatgatcaaaatgacaactcatttctgttactttggacttcaaccttattttgtataaatctttcgcaatatgtcgccgaccgtttataatatacatgatacagatactagtttgc

SEQ ID NO: 16575 - DNA, 637 bp, Gossypium hirsutum
  Clone ID: GOSHI-09MAY01-C88745_1
tccgcttatgtatgaccataaaaccgcgttaccacagtgttcatcacttacatttagaagaacatatagtcaagaaaccgagtattaaacgtagcttgtccgaaaagaatcagtaagtggagttttaaaaggttcaggtcgaatgtcaagcaagactgctgaaagttctggactttctgattccggaagagaattcgttcaccattttttctcaggaacattctcatttgattccgatgccggccaaagtgaactgcaagcaaaatacggctgtaatttacgagagggagtacatgcaaggagttatgattaaagagagaatacgagattacaacgaattatcaaagaaagctgaaaagaaaactaaatttcatgccaaagaaacacaaaagagctcatgtgttggcattttcaaaggccataacagttatcatttgatgcttaatttgcaactcggtataaggtatactgtcggtaagataacaccagtgcctaagcgtgaggttcgagcagctgattttggtgatcgagctagaattactatgtttttccctaaaaaggttcacaatttacccctccacacaaatcaattgatttctactggaaggattactgtcccatggttttcaggcatttg

SEQ ID NO: 16576 - DNA, 1035 bp, Gossypium hirsutum
  Clone ID: GOSHI-09MAY01-C88635_1
taattttgtattaattcaatatttaattagtagcgtatagcgtatgacggtgttgtttaattacacaacgtgatcctgcatgtgtttttttaaaatgaattaaaataggagttcaatcagtggacgtggatggagctaaagatttagtaaccgtaaaaggcacaatggacgtggaagacctcgttccttatctcagggagaagttgagacgaaatgtagaggtggttccccctaagaaaaaagatgccggtgagaagaaagacggcggagagaagaatgacgccggcggtgataacaaagagaaaggaaaagaagctgctgctgcaggcggcggcgggaagaagggaggaggaggtggagagaaggaaggcggcgagaagaaggaaggaggacccggggacaagaaggaagccggcggagagaagaaggaagccggggagaagaaagaagccggtggtgaagccaagatggaggtgagcaagatggagtatcatggatatgcttatccaccgcaaccaatgtactggtcgggtggacaggagtacggtggtccgagttatgcgattgagggatatcggaatcatcagcggtccggatacgtggatcgagggtatatgcacccgcatcctgtatatgtgaatcaagggtacatgattgatccacgtcatccccttcacgcccctcaaatgttcagtgacgaaaatccgaacccctgttttgtcatgtgagggaaaaattacctgtgcaggatgaaagatgagatcccaaaaaataaaaatgccaaatgtaaataccagacctttctagggagataaagtaaatagagagccaaaaaatgacccatataaccggcccgtaataggctaaaggttttaaggatgacccggctaaagccggcttggctaggagctggggtggtgttgttggttgcttcttttgtctaaattttattaattggggtaatggaaatacctttttttaaaaaaaaaaaaaaaaaaaaaaaaaaaaaaaaaaaaaaaaaaaaccccaccccac

SEQ ID NO: 16577 - DNA, 542 bp, Gossypium hirsutum
  Clone ID: GOSHI-09MAY01-C88145_1
gcacctggtagccgagacgtcgttcactccgtcgcaatcggagtcgggcgagggattggggcctccaagcgttggtttgctgagcggcgttggagaagagttacttttttttcttctcgttttttttatcttttgtcgattctttttttttctttcctttcttttctttttatttattgtttgcaaaacagaaacgaagggagaggaggaaggagacccttaccttcgtgggtgcgtcgatgaagccttcttctcctcggcacgaatcggagtcgaatgggaagaggccttagatttgaaatggcagagaaagggaaaaaacggaggcggcgttcacctctctttgcaattttaaacccccgaattttattcagattttaatttaacgctccccataaattttacttcatttaaatttttatatttatgattccctttttatcaatttatattttatttatttcatttcattttattattcatattaaaatgtgtgatattatctacgctaagttatttcatatattacctatttaaaaacc

SEQ ID NO: 16578 - DNA, 469 bp, Gossypium hirsutum
  Clone ID: GOSHI-09MAY01-C88315_1
gggacttgctccggatactcagtcctccagtcaggcacagacaagtcaggctcacaccagagatacaagcaactccgagaaggatgctgcagtgacagagaaatcgaaagaatcatccagtgctagctgaatgtgaaactcaattttgttaaagcatatgcttcttaaaggttagcttgctacagtggtgcctaccatggatagttgggttcacgaatctcctaaagctaaacttccatgacacaattcaggcaaggggatagaaatatggaaggcagtcactattctttatcatgcccttgatatctaacacatgacatataatatacctgccattgatagagaaagactgtctgccttcgatttaaattatttgatttctcgagaaatttcagggaattctagtcaacatgtacaagaggattgattgcaattttgataagttgaagtattgcacataggggtttgt

SEQ ID NO: 16579 - DNA, 586 bp, Gossypium hirsutum
  Clone ID: LIB3543-058-Q6-K6-E2
agagaccagagcctcctaatgaaaaggaagtatgatggttagagaaggtaactcggatgaaatgtctaggaactctgccaattcttcgtataaccctggttccttggatatgattggaactgataattacctgtcattggatgagtccattgcacggccggttgcacgatagtccgttgtttgtccatgtacaaagaggcaattccttatgttttctcttcttaaattctttgttatgttgccagaatcttcaatcatgctctagcctgtaggaaatttcttctgcaatccaccctaaatagccagggaagataaaaaagaaaagaaaagaaaaaagatgggaagatgataccatgagctggttatttttgaggttgttgcgtagtatagttttattgccttccttgcatggaattaatgttcattttatgtgaacggaaaagggaaaagaaaagatatgacatggttttcgtcgtgcttagattgcgtgggacatgcatgatttggctttcatcatgcatggtaaatgtaagatttaaagttttggcaccatcaaaaggataaacagatgttcaacatggttatg

SEQ ID NO: 16580 - DNA, 421 bp, Gossypium hirsutum
  Clone ID: uC-gsflnu33B091b01b1
gaaaaaaagggttacaaaatttgaccacgtttatttcataaccatgttgaacatctgtttatccttttgatggtgccaaacctttaaatcttacatttaccatgcatgatgaaagccaaatcatgcatgtcccatgcaatctaagcacgacgaaaaccatgtcatatattttcctttcccttttccgttcacatattatgaacattaattccatgcaaggaaggcaataaaattatactacgcaaacaacctcaaaaatgaccagctcaaacttggacctgttatgtcccatggtatcatcatcccatcttttttttttactttgattttttatcttccctggctattaagggtggattgctccggtatttctacgtttagaggacttctataacttatttcttttacaaattctattacc

SEQ ID NO: 16581 - DNA, 634 bp, Gossypium hirsutum
  Clone ID: GOSHI-09MAY01-C89495_1
cggccgcgtgggtcccctcactggcttctgccattctacattaattgccaagaaatataggaaatattcatggcatcacggctgcaaatcgagggcgatgcctcagtgctgcttcgagtcactcactccaacctcaaaagcttcgccgctgacattcgcttctctcttcagatgagcgtggaagcagtgaaagataagctatggaagaaatgtgggacttcagtaaattcaatgcggttagagctatatgatgattgtaaaaataaactttgtgatttaagggatgattcaagacctctcggtttctattctccagtagatgggttccgactacacattatagatcttgatccttcatcggtaacttcgggagggtggcttgaagatacgtcattagtcgagaagtactcgatttctgaagatgaatacaataaacgttctggtacatttaggaaattcaaggaacagatggcatctcaaaatccatcagaattcaggaataaaatgtcagatgactacatgggagacctctgctcaaatatcaaggtaggagacagatgtgaagttgatccaggggagaaaagaggtgttgtcaaatatgtgggtcgagcagaagcattagggccaggctttt

SEQ ID NO: 16582 - DNA, 529 bp, Gossypium hirsutum
  Clone ID: AI731356.1
gcttcaataatatactgaaaggtgttctttcaaaaaccattacacctcttcagaatcttggcactccatctaaaaagagccagagattcctcttccaactattttcttcctcttttccagaacagggaatcgatattagatgtggcttgtacgatgtgatgttgttttttttccttaaaatataggaaatattcatggcatcacggctgcaaatcgagggtgatgcctcagtgctgcttcgagtcgctcactccaacctcaaaagcttcgccactgacattcgcttctctcttcagatgagcgtggaagcagtgaaagataaggtatggaagaaatgtgggacttcggtaaattcaatgcggttagagctatatgatgattgtaaaaataaacttcgtgatttaagtgatgattcaagacctctcggtttctattctccactagatgggttccgaatacacattatagatcttgatccttcatccgtaacttcggaagggtggcttgaaaatacgtcattagtcgagaa

SEQ ID NO: 16583 - DNA, 715 bp, Gossypium hirsutum
  unsure (1)..(715): unsure at all n locations
  Clone ID: AI729455.1
agcttgcggcgagttcancgtgatccgtctctggcaggataaccaaatcgtagctgtactcgcgcgcgtggctgatgaaatccaatggccgataacgaaacagggaacgtcggttaaacttgatgattctcattatttcttctcgcttcagtttcctaaggaagcggattcaattgaggacggtgatatgaaggttaataaatccgatgacgatggctctgatttgcttagttacggtttgacgatagcttcgaaaggacaggaagatttgttgtcgcagttcgatgtcatattgcaatgttatagtttttttacggtgcagaaagtatatgacaaaggggaggaggtcttggatggaccggtgtctgccgccaaaaatatctctccggatgatttgaattccggaagctagatcgaagcgatggatgggatctttctctgcctattcgaacctcctggcgcctaatttggtatgatttcgtctcttccttctcgtcctatcgactttttactttgtctagtcctcctgcttctctagtcttgcgtttctccgtcgggcctctgtgccgttttcttctcttgcttctcctttcttactgttccattcgcttccgctcgtgtcggttgcctctttctccgccctcctgtgtcttcctgttcctgtctcgccttctctatcgttggcgttcctcgcggtgggttcttctctctcacc

SEQ ID NO: 16584 - DNA, 607 bp, Gossypium hirsutum
  Clone ID: LIB3543-050-Q6-K6-C10
ctccgcaaatcgtacagcgtcgagcttgcttgcggggagttcagcgtgatccgtctctggcaggataacgaaatcgtagctgtactcgcgcgcgtggctgatgaaatccaatggccgataacgaaacagggaacgtcagttaaacttgatgattctcattatttcttcacgtttcagtttcctaaggaagcggattcaattgaggacggtgataggaaggttaagaaatccgatgacgacggctctgatttgcttagttacggtttgacgatagcttcgaaaggacaggaagatttgttgtcgcagttcgatgttatattgcaatgttattgttgttttacggtgcagaaagtaaatgaaaaaggggaggaggttttagatggagcggtgtctgccgcgaagaatacatcgccggaggatttgaattccggaagcaagaaagaagcgatggaggggaaatgcgcggcatattggaccacgctggcgcctaatgtggaggaatatagtaggaaagctgctaagatgattgcggctggatcagggcagttgatcaaggggatattgtggtgtggggatgtgacaatagatagactgaatagaggggatg

SEQ ID NO: 16585 - DNA, 952 bp, Gossypium hirsutum
  Clone ID: GOSHI-09MAY01-C89115_1
cccagcgtccgcagttatccaggggttcctccttcaccgccatatggtaatattttcgggagtggtccaactggaagtactggagatctcccaatcacagctaattttgttaacaagaaccaaaagatgaacatcaggattattgccattattgttttatctgcttttgtgctcttattggttttagctggagcaatctctgtcctcgtaaaatggaggaaggttagaagaccgtcaaatgctgttggtccagcttttccttcctcattgaacaaaagatctggcattggttctatgctgtcaagcagtataacaagctctccatcaatgtcactcatttccaccatggctacttgtgctttcccggttaaaacatttacacttgttgagcttgagaaggcaacaagcaacttcagttcaaagaggatactcggtgaaggaggatttggacgtgtttaccgtggtgttatgggagatggaagtgaggtagctgttaagttacttacaagagataatctgtatggagactcgtgaatttattgcggacgtggagatgcttagccgattgcaccaccgcaatcttgtcaaacttgtcggtatatgtattgaaggacgcatacgctgcttggtgtatgaacttgttccaaatggaagtgtggaatcacacttgcatggtgttgacaaaaacaaaggacctctcgattgggatgcacggctgaagattgcccttggagctgctagaggattagcttatcttcatgaagattctaaccctcgagtgattcaccgagattttaaggctagtaatgttctattagaagatgactttaccccaaaggtctcagattttggtttagcaagggaggcaactgaaggaagccagcacatttctacccgagtcatgggaacttttggatatgttgctcccgagtatgctatgacggggcatcta

SEQ ID NO: 16586 - DNA, 636 bp, Gossypium hirsutum
  Clone ID: GOSHI-09MAY01-C89305_1
gttggtaaatactttttatatacatatatgaaatgtggtaaaaaaataatgataaatgcgaaacgttatgccgaaacagactagtactgatagatactagtagcggcagaaaaatgatacatcaatcaatacggtgctgactatctggtgttgaactctgaaaggatgcactctgaaatactctcaacttacttctttgttaagccaaatcttcagccatatgtccctttgtcgaccttaccgaccagcacctgtcactacgctcaatgttactaaatctgctctagtcttcctctcttcctttttatggtatatcccatccacttgttcgcaatgctgcctctctccattaaaataccccttgaataataagagcttgaatattatcaaaccaaatccaaatgtagcattcaaatttatgtaaactttggttaatgatattcatctgagtatgaaattaggcgtttaaatctttgatatttttattatccttaaaaatctattgacatctttcatctaagctgatacttagtttgctaaatataagtcaatgattagctatcaaagagattactgaaatgaaaatttatttttgtgtgaaaaacaaaatcaacaaaaaaggagcttgctatttac

SEQ ID NO: 16587 - DNA, 695 bp, Gossypium hirsutum
  Clone ID: GOSHI-09MAY01-C89325_1
ctagcttcctctgaattctccctactaccgtgtgccgacagccaccagtcacccccgactaccgtaacccaacgcagtgacgcaccttcaccgtcgtgtcacttcactcaccatcgtccaatatttcaaggctcaagcagcttgcactcttctgggttcttcgttgtcgtcgctcatcattgctggacccccttttgccttcagctttgaagtaattgaactcgaggaagggaaacccaatggcatctaaattctggactcagggtggtagtgacactgaggaagaggagactgatattgaagatgaaattgagaatgggggagctggagaaaccacagccgccgccgccggaagcagatatctacaaacaaatgctagtgatagtgatgattccgatgggcaaaagagggtggttagatccgccaaagataagaggtttgaggagatggcaagtacggttgatcagatgaagaatgcaatgaaaatcaatgactgggttagcttgcaagagagttttgataagattaataaacagttggagaaggttatgcgtgtaaccgagtctgacagagttccgaatctttatattaaagtgtcttgttatgttgggaagatttcttagcctgaagcttttggctaattaagggaagccccaaaagaaaatggagtaggcagttaattcacaaagggcttt

SEQ ID NO: 16588 - DNA, 552 bp, Gossypium hirsutum
  Clone ID: GOSHI-09MAY01-C84895_1
ctgaaatgatggtcatcctccccaagaggcgccactaaaaaaatacgctagaatagtcctcgccgtgtcagcatgctacccaggtccactgaaaccagtagatcgtccatgcaaatcactgtgtagctcttgtccatcatgagcagaagagaatcgcaccgtggttagggcagtcggaccgtcgtagtcgcggttgaatcggtagaagtagcgttgcgccagatgactataacggctgtagatctgacactgtattcgaggacgaaagacacgcccacgtgagccatatgtggaatgaccactatgtatatcacgcagatctgactcggtcatcgctgtaagcgaaggagcttgaaccatattagcatgcatcgacacatcatgcaccacccgtgtctggcggctctcaaactccaacaacacgtcgactattttttgaaacggaagagtcttcgataagaacgataccagagtcaacaccgcatcaaagtccggcaagagaccggcaaggataacttctacatttttggcctccgaaatgatagatccaaa

SEQ ID NO: 16589 - DNA, 667 bp, Gossypium hirsutum
  Clone ID: GOSHI-09MAY01-C84785_1
cccacgcgtccgcggacgcgtgggcttttttctcaaagctctgctctgaagactctttccgacagaagatttggatggatcaatcattttgtcactgtcttctctgatccctttccccatctctccctcttatttcatggcgatcgccgctgcttcttccttctccgtcggttcttcccagtgtcatttatgtcaagtagaaggggcttattactcaccattagttggtgtcaacaatggttggatcagacatacatttgatggctgcaaagtgacagactcgcccggcataagtgtcagatgcaggaacctgttttttggatcaacacaatttcattggttgtctatgggacgtgatctttccctttcaaaagttttagttgccgcggattattctgattctgttcctaatccatcgagttatgaaagcaaccaaggttatcaccctcttgaacaacttaaaggttccaaaaggatccaggagatacaactgtcatcagctgaaatagcaaggacaaccgtcgaggctaacagcagcgctttgctagtctttcctgggacagtacattctgaacctcatgaacagatttcatgggctgagtttccatatgttgctgatgattatggagatatcttttttgaaatttccgatgatgagaacatctta

SEQ ID NO: 16590 - DNA, 596 bp, Gossypium hirsutum
  Clone ID: GOSHI-09MAY01-C84105_1
ttcgtgtaaataaacactttatatttttcgttcttgttacatccggtagtaatatttctccgtgagcaaatggtttcaaaccaaaggtaaaaaagaaaaaggaaaaatggccgcagctgctacacctcctcctgtggctgctgatgcttcctcttcttcttctcctttgactttggcttcttcggcatgtgaatcggaggaagtagcagtgaacgaaggacagaatcaggaaccacaaaaccaagacggaattaaagagtgcttgcacaagactaagccaatccagttcttaggtcgtactacgcctattattctccaaaacgacaatggaccttgccctctccttgccatctgtaatattctccttttaaggaacaatttgagcctgagtgctgatatagctgaagtttcacaggagaaattgctctcactggtagctgagcgcctgattgattctaacagtaatgtcaataataaagatgcagggtatgtagaaaaccaacagcagaatattgcagatgctattgatttacttccgcgccttgctacagggattgatgtgaatattaaattcaggagaattgatgattttgatt

SEQ ID NO: 16591 - DNA, 917 bp, Gossypium hirsutum
  Clone ID: GOSHI-09MAY01-C84315_1
cccacgcgtccgagattacaaagcttctgtcttgaacatccatggcttcctctcatttgctctgtaatcacagtctcttcttctcttctgccttcaaaaattgtggcttctcaaatactcccccatcaaagcttcaatttcaaataaccccatttgtcaaagcatccaagaaacagctagagattgtatatgaccctgatgagaggctaaacaagttagcagatgaagtggacaaggaagctccgttttcaaggcttactttgttctcaccttgtaagattaatgttttcttgagaattaccaacaaaagggaagatgggtatcatgatttagcatctctctttcatacaattagtctcggggatgtaattaagttctctttgtcaccatccaaaaccaaggatcgtttgtcaaccaatgtctctggtgtcccccttgatgataaaaacttgattattaaagcccttaacctctacaggaagaaaactggcagttccaacttcttttgggttcatcttgataaaaaggtgcctactggggcagggcttggtggtggaagcagccatgccgcaaccgcactttgggccgctaatcagttcaagggttctgttgcaactgaaaaggagctccagcaatggtcgagcgacataggtgcagatattccattctttttctcacatggagctgcttattgtactggtcgaggtgagtttgtccaagatatatcccatcctcttccatccgacatcccaatggttcttataaagcctagagaggcatgttcgacagccgaagtttacaagcgtcttcgactagatcaaacaagtaatgttgatcctttgacattgctggagaagatatcaaggaatggaatatctcaagatgtttgcattaatgatttagaacctcctgctttt

SEQ ID NO: 16592 - DNA, 563 bp, Gossypium hirsutum
  Clone ID: GOSHI-09MAY01-C84325_1
aaggaaacattttctgtcgttttggaaatgcaaatctatacatcagtcgttgcaagctgcctatcgactatcggcctctttgcaagtggtgaatggaagagtttgcagcacgagatggaggtatttggcaccggaagagtttcatacgtgcttacattggtgtggactgctataacttggcaagtatgtgctgttggtgttgtggggttgatttttgttgtgtcatctctcttctccaatgtaatcagcactctgtctttggctgttaccccactagctgcactggtagttttccatgacaagatgaatggtgtgaaggtaattgccatgcttttggctctttgtggttttgcttcttatatttatcaaaattatattgatgataggaaggcaaggaggttgcagacccatgtccgggaaatccagcatactgcttgatatgtttggtaccaatgtagacccaataaaataaataccaatacccttgaatttattatggatgaataaatatgtaaccaataggataacattttattaaataatttatataattatgcttttct

SEQ ID NO: 16593 - DNA, 655 bp, Gossypium hirsutum
  Clone ID: GOSHI-09MAY01-C84245_1
tttacgcgtccgcgacaaggagattacactaccaagattatagaatggatggagcttcaaaagagaatatggatctatgagttagggtccttgccaccgtttttgcttgtctttgcagggaatatagctcctgttgatcaccggtggaaccaacatggcctcggaggagataactatagaggattgtgtagaaatttgcatcctggtccagttagcttactgcattggagtgggaaagggaagccatgggtgagattagatgcaaacagaccttgtcctttggatgctttatgggctccgtatgatctgctgcaaacaccatttgccttggagtcctaaaattttggtattaattatttttatatatgattatgttttcatatctaggcctgagatttttagttggatgaggccatagaacatacacacaacatagatttgagtgtaaaattaagatgtttctctcttgcagatggtggcaaatgttggggggggggaggtgttcaatgttcatagattatacaacagagctttaacaatcttactacattaatctactttttggtttcttttccatctatgtaattgaaaacagtatatataacaactacagctatagatcaagaagaataaattggtttcaaattttatgttc

SEQ ID NO: 16594 - DNA, 916 bp, Gossypium hirsutum
  Clone ID: GOSHI-09MAY01-C85945_1
cccagcgtccggtgttttttgtggcaagtagagggcatcatgctgagattgggggtgttacacctggaagcatgccacctttttcgaatccatatgggaagaaggagctgccataaaagcatttaaactagtggaaaagggattttccaagaagaaggaataataaaactacttaagtttccaggtgctgatgaacattcgcaaaatatcccaggaacacgacggcttcaagataacctatcagaccttagagcacaagtggctgctaaccagagaggaattactctaatcaaagaacttattgagcagtatggtttggaaactgttcaggcttatatgacttatgtgcagcttaatgcagaagaagcagtaagagagatgctcaaggcagttgctgcaagaatttcctcggaatcaactaggcttggcgagagaaactctataacgatagaagaagaggattgcatggatgacgggtctgtcattcatttaaaactctctattgattctaacaaaggggaagcaagttttgattttagtggaactagccccgaagtctacggtaactggaatgctccagaagctgtcactgctgctgcagtcatatactgccttcgttgtttggtcgatgttgatattcctcttaatcaaggttgtttggctccagttataatccacgtaccggcaggctcatttctttctccaagtgataaagctgctgtagtaggaggcaatgttctcacgtctcagagaataactgatgtagtattgactgcatttcaggcctgtgcttgttctcagggatgtatgaataatcttacctttggggacaatactttcggttattatgaaacaatcggaggtgggagtggggctggtccaacctggatggaacaagtggagttcagtgtcatat

SEQ ID NO: 16595 - DNA, 976 bp, Gossypium hirsutum
  Clone ID: GOSHI-09MAY01-C85435_1
gaaagctgtagctaggtcaaagaaaaacccgaaggccaaacataagagtcctgcagctcctcatacttgggagctggaatccgtatcccgtggaaagaaagtaaattgctgtgcttgcttgaagccaatgtcaccttcccaaaccctagggcctacggtagcttcagatagtttcattcaccgctgtagcatatgtggggcagtggctcatttgagctgctcttcgcgtgcacagaaggattgtaagtgtgtatccatgattgggtttgagcatgtgatgcatcagtgggcagttcgttggacagagcttactgatcaacctgatggagcttccttttgtagctattgtgaagagccatgtagcgggtctttccttggtggatctcctatatggtgttgcttatggtgccaacgactcctacatgtggactgtcacagtagcatgtctaatgaaactggtaatatttgtggtttaggaccattcagaaggttgattctctcacctctttatgttaagaagttgagccccaattcgggatttctgagctcaatcacacatggtgcaaatgagttagcttcttcagtgcgggaaaccattaggagtcagggcaagaagcacaagcataataataaaacctcagctgatacaggtagtaatggtagcatctctgacatgtcaacagggagtactgctgagaccccacaaaatgtaaatggttcttatgcaaaagaagggaactgcaatggtagtatgaacgtaggaaccccatgccaagatggtagtattaataagaaaatagagtcaaatccaagtatcaaaagaagtggatcaattaatcagaaggatgagtctcaagctttaaggatgaagcaaagatatgagctgactgacttaccaccagatgcgagactattactggttttcatcaataagaagagtggtgcccggcgtggagattccctcaggcagcgcttg

SEQ ID NO: 16596 - DNA, 703 bp, Gossypium hirsutum
  Clone ID: GOSHI-09MAY01-C85295_1
cccacgcgtccgcccacgcgtccggttaaatagtctcccccaatcatccatcccacttcgatggctgaaaccctctcccatgccatcaccccaaaaacccaaactttaaccagaaaaaaagaacccacttccccccttttttttcctgttcttttaaagaacccaagattttggatccaagtcccaaacccaaactctcatcctgtttttaatgaaaaagggtctttcagaatggatcccccattgatcaatgagtcatccttttcagcagccaatccttcagcttacagcctcgctgagatttggcctttcccgatcaacccaggctctgacccaactgctgtaactggaggtgggttggggctccggataggtaatttgggtgggtttggggaaacttcgggtcttagagatgggtccatggaggaatctactgtgactgaacagagtgttggatgtggaggtgggagaaaaagggagggaattgagctctgaagatgaagtcttccaagattgtttctactactactagtgccaatgaattgaatgattccaatggaaaacggatgaaaactccggtctcaaagaatggaaatacgggttctaaagaagccgaggtggaagcgagttctgcagatggtagcaagccagataagatagcaaacctgccgaaccacctaagcagactattttatgttagagc

SEQ ID NO: 16597 - DNA, 396 bp, Gossypium hirsutum
  Clone ID: GOSHI-09MAY01-C86975_1
ctcagtccccttctccccataactgtgcagctgcttcattcgccaatacaccattcacaaattattcggtgatcaaccctcatgaatcagagattgttcagctagagcttagtgtgtgtgtgcgtgttcacaatcttgtttgccttatcccttagccttagcctgccttgatttttttttatactttcaaaccacaattcaaccccctccaaatcttctttcagtgtttccttttttttttcctttttgtagcattgatccatgaaatttaatctctaggtttcagattaaattttgtagtttcacattctcacttgtgttttaatttaatatttacttactttttcatgcattaattctcttcaataaaaatgatagtataggtttgaagatgtt

SEQ ID NO: 16598 - DNA, 850 bp, Gossypium hirsutum
  Clone ID: GOSHI-09MAY01-C86905_2
ccgggtcgacccacgccgtccgattgactcataaggtcattccagaacgaatgcctgattgttcatatttcctgcaaggtttgtgcacaaacgaaaattgtccttatagacacgtgcatgtgaatccaaatgcctccacttgcgaaggatttcttaggggctattgtgctgacggtaatgagtgccggaagaagcacagctatgtctgtccgaattttgaagcaacagggtcctgccccctaggatctacatgcaagcttcaccaccccaaaaaccgaagtaaggcaaagaaaagcaaaaggtcaatggagcacaatactgctcgtgggcgttattttggtatcgacatttcagaaccgaaaagaatgggatcggaaagacaacaggaggtactagaggaagccaacatttgctttgatgggaaattctctgattacattagcctgggtgttagcgaagatgaagtggggggacttcatcaagcgaattgtgacgaaacaagctttggtgacaatgattcgactgttttacaatctgaagatttggatgagttaatcaaacccattcgtataatgagtgagtgtaaaataacagaatcatttctggttactgaatcttcaagtggtaagcatttagccatccaatagaggaattgaaaatgttgtatagagagagcgagcaccctttttatgtatttttagctttctgagaaatatttagcatccacccataggcttattttttctcttttgtttaaaatttgcatttttacagcatagtatatgttgtcatgtgccccttgtaacaaaacagaaatgtagaaataaaaaatgccgaattggagttgagc

SEQ ID NO: 16599 - DNA, 597 bp, Gossypium hirsutum
  Clone ID: LIB3825-014-Q1-N6-G3
gtgaaatactcttctttttctttcaaaagtttagaacaaaatgttaccttaattttacaaaactcagatttgacctttctaatattaattaattattaagaccagtatgagccaaccaaacaaattgaatataaagatatatctccataacatgatatgaaacaggatgtggcataaaatgcaaaataattactaaaataacatttccaagatgataaggcactacctcattaccgtcagcacaatagcccctaagaaatccttcgcaagtggaggcatttggattcacatgcacgtgtctataaggacaattttcgtttgtgcacaaaccttgcaggaaatatgaacaatcaggcattcgttctggaatgaccttatgagtcaatttgcagttgggatttgaacatagacccttgagaaattttgtgcatacagatattttggagggatcgtgaatatagggacactttccatcatctttgttgcatttcccaaaccttgtgaaaaattgacagtacttgcgctttttaaccaaccgtaaccttgcagtgtgcaaactccaacgaactttctcacttgccaaaacacgagtacgct

SEQ ID NO: 16600 - DNA, 484 bp, Gossypium hirsutum
  Clone ID: GOSHI-09MAY01-C86865_1
gctttaaatgtcatcaaactggacattgggccagagactgcccaaactctggacgtttacctccattgaggcactgatttttcttcaggaagatatggaggtgttcagaggcaacaggagttggacattggacttgggaggcatgagttgctgctggaatgccatttggacaatcttaaagtgaacttaataggttagggctttctggtggagacttgagatggcggtggcacaggttctttcattttgtattggggtcatgcatgcgaaaagcctgatgaacttggcagtctggaaagggtagcttttcaagcattttgggttcggtgtatttagggccgaccctatatctttacatattacatggttctgttttccacatgtaaaaaagttggattgtgggataatctttgggtgtaccaacgttttggtgcattgcggggtcctgaattttatgacaaacaccccccattggtttgcactg

SEQ ID NO: 16601 - DNA, 574 bp, Gossypium hirsutum
  Clone ID: GOSHI-09MAY01-C86835_1
gcacagaaaaattctgcctgaaacgattagagacctaaaagcaaatccatgaaggttttacgtgcgtaacgcacacaataggccaaaattgggttaaacaaagaccacatgaaaatgtatcgactcacagactgccaaggaacagaacaattagtagtactcaaaaactattattgatggtactgcacatcctccgatcgctcatggcagtttggaccgctattcacaggaatgaatgtaagcatatcttattttctctccaacgatgacatgttctcgtagctccagtgattgaatagtaatcacttagctgcatcatcaggattagaggcctgaggaacattactcgaagatgatcctttacctgttgggaggtaagaccaagccaaggctgctgtcccaagggtaattgcagtggcaattgaaccccatatccatctctgacttcttttcttcctttgtctctctcgccgtgccatctctacagcctcctggttcctctgagacatttcctgattaacagcctcatagtagtgtagtcggtccaacaatcgggcgatttcaaagttttttg

SEQ ID NO: 16602 - DNA, 913 bp, Gossypium hirsutum
  Clone ID: GOSHI-09MAY01-C86455_1
ccccgcgtccgtttgagaaaatagggtgggaaaaagaaaaaggcaaagaaggaactttttaaagaaaaggggaaggagaagaagtgtgcagagctgacttccctcctaattttgtgtttggggttgccactgctgcatatcagatcgaaggagcctgcaatgagggtagcaggggtgctagcatatgggattctttttcacacactgaaggaaaaattattgatggaagcagtggtgatgtggcagttgatcattatcatcgatacaaggaagatgtcaaccttatacacaagtttggatttgatgcttataggttctccatatcatggtctcgtatctttcctgatggtgttggaaccaaagtcaacgaagaaggaattgccttttacagcaaccttattaatgctcttattgatcggggcattcaaccttttataactttgtggccatgggggtctccctttgcatcttcaagaatcaattggagggtggttagataagcaaattgtaaattactttgccatctatgcagatacttgcttttcacactttggtgacagagtaaagaactggatcactataaacgaaccgctccaaactgcagggagaggggtatgatactgggatatttgctcctggaagacgtgaaggttcttcagcagaaccatatttggctgcgcatcatcagatcttggcccatgcaacggctgtttcaatatacagaagcaagtacaaggataagcaaggtggacaaattgggttggtgctagattgtgaatgggcagaggctaattctgataaaattgaagataaatctgctgcagcaaggcgccttgattttcaacttggatggtacttgtgcccattatattatggagactatcctgcagttttgcttgaaagattaggagat

SEQ ID NO: 16603 - DNA, 1181 bp, Gossypium hirsutum
  Clone ID: GOSHI-09MAY01-C86785_1
aattcaggaagcttgagcatatattaagcgagttgaaaagcatatccttacttcagttgatgatccatctcctatgaagactatggctgggggaagtgttgcaaatgctattcgtggacttagctctggctttggtgttaacagtggaatgatcggggcccatggggatgatgagcaaggccaattgtttgtaagtaacatgaactttactggagttaatatttcgagactgcgaaagaagaggggaccaacagctcagtgtgtttgcctagttgatgcatacggcaatagaacaatgcgcccttgcctgtcgaccgctgtaaaagttcagggggatgaattgaccaaggatgactttagtggttctaagtggttagtaatgagatatggaatattcaatttggaagttactcaagcagctataagatttgccaaactagagggtctgtctgtctccatcgatttggccagttttgagatggttcggaattttagagaacctcttctaaagttactggagtcgggagatatcgacctctgctttgccaacgaggatgaagcaacagaactactaaggggtgaagcaaatgctagtcctgaagctgcactggaatacctgtccaaatattgccgatgggctgtggttacattaggggccaacggatgcatcgcaaaacacgcaccagaggttgtccgagttccggctataggggagacaaaagcggttgatgccacaggagctggggacctcttcgctggtggtttcttatatggattggtcaagggattatcacttgaggaatgttgcaaagtgggctcatgtagtggtggtgcagtgattcgttcacttgggggtgaggtaacacctgagaactggcaatggatgtataagcagatgcagataaagggcctaccacttcctgatatttcggaattgatgtctccacgatcaaacaagcattgattttcacttctattgctgctatttaataattttttttcctgaagaaaatggcaaacctaatcagtgttgaatcatcactgaattattctgtagaaactcctttgcaagggcttccattacgcgtttatattaagctttattggccttatgttacatcttcttttccttcgatgtactaaatgccctcttaaatttgtcattttatgcacgaatcatt

SEQ ID NO: 16604 - DNA, 870 bp, Gossypium hirsutum
  Clone ID: GOSHI-09MAY01-C86165_1
cccagcgtccggaaaactgtccttgttttctaaaaaattagactttttatctgaatcttttctgactctaaataaacaaaatatggcgaggagaccggacgaggaatacgattacttgttcaagattgtattgatcggcgattctggtgtcggtaaatctaacttactttcccgatttactcgaaacgagttttgcttggaatctaaatctaccatcggagttgaattcgccacccgcactctccaagttgagggaaggactgtgaaagctcaaatatgggacactgctggtcaagaacggtatagagcaataaccagtgcctactattggggtgcccttggagcacttttggtctacgatgttactaagccgacgacatttgaaaatgtaagccgatggttgaaggaactcagggaccatgcagattcgaatatcgtgattatgttgatcggtaacaaaactgatctgaagcatttacgagcggtttccacagaagatggtcaaagctatgcagagaaagaggggctttcgttcattgagacatctgcactggaagcaataaatgtcgagaaagctttccagaccattctctctgaaatatatcgcatcatgagtaagaagtcactttcttccgatgacctggcacctgcaagtattaaagaagggaagaccatcgctgttggagcaccagatgccaacactaaaaaggcttgctgctcatcatcttgaacatccatctttgatcattacaattataattcttcttttttaattacagtttgtgtttcttttatagcttgtctcgtgcttacggtgtatgcaatagctgtgcaccaattattggtatatcgactcgaatgttaatttct

SEQ ID NO: 16605 - DNA, 566 bp, Gossypium hirsutum
  Clone ID: AI731768.1
gactttttatctgaatcttttctgactctaaaataaaacaaactaatggcgaggagaccggacgaggaatacgactacttgttcaacattgtattgatcggcgactctggtgtcggtaaatctaacttactttccccatttactcgtacccaatcctgcttggaatctccatctaccctcagagtcgaattcgccccccccactctccctcttcacggtacgactgtcactcctcccttctcggcacctgctggtccccaccggtattcagccattcccactgcctcctatcagggtgcccttggagcacttttggtctgccatgtctcctccccgaccacatctgaccatgtcaccccatggtcgaacgaactcgtggaccatgcagattcgactctcctcatgccgttgatcggtaaccaacctgttctgagccttctatctacccgtttccccacaactatggtggcacctccctccgagactgaggggcttttcctcctctcgagaccttcctcctcggctgccgcttactgtcccgtatagcctcctcgaccattgctctc

SEQ ID NO: 16606 - DNA, 497 bp, Gossypium hirsutum
  Clone ID: LIB3583-048-P1-K1-E9
cttgatcgtgaaaaattacacatatgttttgtaaaattataagctaatatatcagattgtgtagtgactctaaaataaatcaaaacaatggttaggctaccttacgagtaatacaatcacttgtgtcaagatgaggttgcatcgatcacttctggtgggggcaaatacaacttactttcatgctttagtggtacccagtttcgcttggaatataaatataccatagaaggtgaataaagccaccctgactgtgaaagttgagggaaggactgcgaaagctcaaatatggaacactgatcgtcaagaacggagtagagcaataaccagtgcctactataggggtgcccttggagcacttttggtctacgatgttactaagccggcaccatttgaaaatgtaagccaatggttgaaggaactcagggtccatgcagattcgaatatcgtgattatgtggatcggcaacaaaactggtctgcagcatttacgagcggttt

SEQ ID NO: 16607 - DNA, 525 bp, Gossypium hirsutum
  Clone ID: GOSHI-09MAY01-C86385_1
atactacccattctttggagtggtactgtagggagatatgatggtgactattctgaagaggatccacaaattatgaggctaaagagaagcttaaggccagaactaggagaacctgtgattttgaggtgtcagccttacaaaattccattgaccgagcttctcttgccacataaaatggcaccggtcgagtttttccgtctatggcctagtttgccagctattgtggaatacactggcacatacatttatgaaggaagtggcttcaaggctactgctgcgcagcagtatgggtcttctccatttttgagtggactgaaatcactgtatttcaagcctttccacagagtttgttcacacatcattcgcactgtggctggatttcagctatgttatgctgcaaaaacttggcatgggggcttcattgcgcatgaatgatttttggagctagtgaagtgagcaggaatgttgatttgggtgacgaaacaacaaccatgatgtgcaaatttgtggcccgggcttcagatg

SEQ ID NO: 16608 - DNA, 903 bp, Gossypium hirsutum
  Clone ID: GOSHI-09MAY01-C86265_1
tggaatgcttctcgaactgagataactttcaaggatatgataagtagaggggtgttgcctaacgtgctggtatataacacgcttattgctggaaattgtgcagccggaaacttgactgatgctttcaagtactttgatgaaatggtgaagggtgaaacaagaccgacaatcgtaacatacaacacacttattagtggactatgcaagaagggaaggataactgaagccgaagctttgcttcccaaaatcacaagtaatgggtgtagtcccgatgtcatcacctacaacaccttattatcagggtattctaatgaaggaaatgccgagaaatgtctggatttgtatgaaaacatgaagagtttgggcattaagccgactttgaatacctatcatcctctcattagtggttgcagcaagaaaggaattgaacttgctgcccgcccgtcccgcgaaatggaagagatgcatttgactcccgatctactcacatataacgtgctgattcacttgtatgcagagcacggagatgttcaaaatgcagttttctttgcatcgagagatgatagaccgtggaatttgccctgacaaattgacctacaatagcttgattttgggacagtttaaaaacggaaagttgttagaaataaaggatcttgttgatgatatgaaggccaagggattggttcctaaagctgatacatatacccttctgattaagggatattgtgaacacaaggatttcatcggggcatacttttggtatcgggaaatgtttgaaaaccatttcctttcacgtttcacgacttgtaaggaaactcgtgattgggccttaaagagcaggaaagtcgcaagaggcgcagattatctgctcggagatgaaggctaaaggaatggacaactgga

SEQ ID NO: 16609 - DNA, 744 bp, Gossypium hirsutum
  Clone ID: GOSHI-09MAY01-C87995_1
ggctccacttgataaagtgtgtgttcttagctgcggaatgtcgacatgttttggtgccactgtgaatgttgctaaaccaaaaagggtgggtctgttgcagtttttggacttggtgctgtaggtcttgcggctgctgaaggagcaagagtttgtgaggcttctaggatcattggtattgatctaaaccccaacagattcgaagaagccaagaaatttggttgtaccgagtttgtgaacccaaaagatcataataaacctgttcaagaggtgatttcggagatgactggaggaggagttgattgcagtattgaatgtacggggagcacccgggccatggtttctgcatttgaatgtgtccatgatggttggggtgttgctgtgcttgtgggtgtgccgagtagagatgattcattcaaaacccatccaatacatttcctgaacgagaggacacttaggggtactttcttcggcaactacaaacctctatccgatatccctggtgttgtggagaagtatatgaaaagggagttggaactggataaattcatcactcattctgtcccattcttggatatcaacaaggcgttcgagtacatgctgcgaggggagggtcccccccgcatgattcgtatggatgcttagggaaccgcttggattaattcaaccacacttttttatttaccttttacactctctgcagagcgattgcactaaataaataaatatataattcattctacatgg

SEQ ID NO: 16610 - DNA, 826 bp, Gossypium hirsutum
  Clone ID: GOSHI-09MAY01-C87865_1
cttggatgccctgtggtccgccgtatatgatgaagcctcctgggtctcaggtgccattgatacctattcctaggttgaaaacacagcaacaatcaaggccagcttccaaagctaaaaagaatgagagcaaaactaagaaggttgctagtgttagtgttctgggaatgttgtttttcatattattgtttagtggtttggtcccaattatgaacctaagatacgataatacccctgttggatctgggcctggttttgttggagatgggttttacgaggtgcatcgtgggagagttttgagagttgatagtcatttaaataggtctaactatggggggggggcggcgttttcttacggtgattttaacattagcaatagagttcatggtagacgctcagagtctggtggtgagcgcaaagagactggtgcacaaagtgcacctgattatataaaaaatgttagtgagcctctcactgcttcgttatatgtaccgagaaatgataagcttgtgaaaattgatggcaatctgataattcattcagttctggccagtgagaaagctttggcctcacataaggcttctgaaagaaagaataaggagacaggtttggccatccctaagaatttctctccagcactggccattcctaatgccagagagaatggaggaaagcattcacgtgaatatagaaatcctgcagaaagaccgatggctctttcttcaggctctgctgatgctttgaaggaccatatcaggtcaactgctgccgatggtaagatgcgccagtggctccgggaggggtggcaggaccgatgtgagttcggcat

SEQ ID NO: 16611 - DNA, 1012 bp, Gossypium hirsutum
  Clone ID: GOSHI-09MAY01-C87575_1
cttgtcatattccgtaagctgcttcttccgagttttgcctcattgatactattgtttctgtaaccagctaacctcaaaagcagtggacaaagatttttcacgaaatcgatcgccgcattttgcatgtggatccttgaccgaggaggaacctgctgtaatagttaacactccgttaccagataagcctttgccgttgaagaagccaagtagtgagtgtggggatggccaaagatccatgcgttacttcttaaccgagtcactgggcaaaaatgcaaagcataggaaagcgaaggttccaacttccaatcagcgaactttagccctttatgatggcaacgatcccagcgtggaatctgaacccgatgaaacattggcagctctgaaaagcaaaatgaaaccaaaatctaaaagtgagcgaactttagccctttgttatggcaacgatcccagtttggaatctgaacccgaggaaacattggcagctctgaaaagcaaaatgaaaccaaactctaaaagtgacggtaagaagaaagacaatgatcgtcaagcattggcacaaggaaccaaagaagcaacgaataaagagagagaagaaaccgaaaaagaaggtgaaagccaaatggagacatttcctcccaagattgtggcaatgcatagagtgagatggaacatgaacaagggtagtgagagatggttgtgctatggcggagcagccgggattgttcgatgtcaagaaattacagtgcgtgatgttcataagaagttaaccagaaaacgttaaaacgacgttacgaactgtgcctgtaacattctggcaattatgtacatatttaatttaatggcctttcccccctttatttcttttagctcaaattgagctagccttgggaagcctagtgtgcattccttgaattgaagtggatgaaaaatgaaaataatcaaataagaaattacgtggctttaaagagaaagaaaaaaaaaaaaagggcagccgtcgcgatcggacgcgggg

SEQ ID NO: 16612 - DNA, 669 bp, Gossypium hirsutum
  Clone ID: GOSHI-09MAY01-C87515_1
ccccgcgtccgaaagttttggagcttgtctcagaacaatgctcgaaggccacgaagttattaaggatggcgataaagatgtcattaatggttacagacgggatttcaagccctccgttgttgaaattgatatttgtgaacctagcagcggttgttgacctcaactctatacctgatgcttggagttccattgcattctttgttaagtaaaatggaggctgcagttcaagttgatctctcattgtatcagcttggtttctcgtactgattttcttcaaaaatgagtaaacaaaatttggggcgaccatttgggatggacttgatgagcggatagactggagaagcaagtcaagtaaatggtggggtttcaaagggcaggcgatatccatggatagagggaaagctagatcgaaaaatttcaaggccttagtgcatagagaaggtgtcggtgtcccttcttggctctccaatgactcaaacagcatttccaaaacaaaaaagggaatttggttgtctagaatgagcaggtcttgaaccaaaatggggagttgccatggttcaatggggaaaacccaaggttgttgttcagagactccaaaatggtgcagaacctccattatgaagcaaccatcaagtaacatcatttcaacgaatggggactggacatgag

SEQ ID NO: 16613 - DNA, 876 bp, Gossypium hirsutum
  Clone ID: GOSHI-09MAY01-C87695_1
cagataaatggaaattttattgataagaccttttcaattgtagccaatatcttattacgaataattccgacaactttaggagaaaaagaggcatttacttattacagagatggtgcgatttgattattattatatatatattttactttattctctttattctttatttattatttacttttttatttactttactactctcagtcttaggaaaaagacacattattcagaatagaaaaaaggctattgaaaacaaaaaagaaatctacgcttgttgaaggtgaagtttataaataaagcaattccttctgtcgtgtatccccgattaatgcttcccccgtcccttcaattgttgattcgagtattgagcgaaaggttacacctatgggtctgtattgggggtcaaccctactacactagtaccaataggcggcatagaggaagaagcactacgcctaggaatcaacaacacgaaaactttgttattaatgattccctttctttatccggatcggaactaagagaaatgggttgggacaacatacatccatcttggttcgtactttggatacccatataaccatcgaagattggtgaagtgactaattcctggaaattagggagcgttgagaacaaagaaattgttggagtttacttttttatctagttcgaacacgcttgatggtaagaaaagatcttttgcaagagggttggctagagatttcttgtaaaaacattagccccgctcagttcataatgacaatatttcgaccttttttttaattccatggattattctcattatgcacataaaggaggagccgtatgaggtgaaaatctcatgtacgggtttggaaacgagaattctttgaatcg

SEQ ID NO: 16614 - DNA, 413 bp, Gossypium hirsutum
  Clone ID: uC-gsflnu33B075e02b1
gtacacttcctttgtttgtgagattattttctcacgaggggtaatgaaaagagttatagaatggattgctacctatgcctagatcgcagataaatggaaattttattgataagaccttttcaattgtagccaatatcttattacgaataattccgacaacttcaggagaaaaagaggcatttacttattacagagatgggatgtcggctcaatccgaaggaaattatgcggaggccttacagaattattatgaagctatgcgactagaaattgatccctatgatcgaagttatatactatataacataggccttatccacacaagtaatggagagcatacaaaagctttagaatattattttcgagcactagaacgaaacccgtttttaccacaagcttttaataatatggct

SEQ ID NO: 16615 - DNA, 781 bp, Gossypium hirsutum
  Clone ID: GOSHI-09MAY01-C87645_1
acctgatgttggggtccttaattataggcttgatctgaaggtcagcaaagtgtgagggaagctatctcactgtcaagaaatgctcctcctggacctcctccattatgttcaatatgtcagcacaaagctcctgtgtttgggcaccctccaaggtggttcacttatgctgaactagaacatgctacaaatggcttttcacaatcgaatttcttggctgaaggtggatttggttctgttcatagagggatcttaccagatggtcaggtgatagctgtgaagctacataagttggctagttctcaaggtgaccgagaattttgctcggaagttgaggttttaagttgtgcacagcatcggaatgttgtaatgctgattggcttctgcattgagggtggaaaaagattgctagtttatgagtacgtttgcaatggctctttggattctcatctttatgggcataatcatgatacattgcaatggtcagcacgacaaaagattgccgttggagctgccagaggattgagataccttcatgaagagtgcagagttggttgtattgtacaccgtgatatgcggcctaataatatccttctcacccacgattttgaaccattagttggggattttgggttggcaaggtggcagccggatggagacaggggagtggaaactagagtgattggacgattcgggtatttagctccagaatatgcccaaagcggccaaatcacagaaaaagctgatgtctattcctttgggtggtaatggtagagctcatcac

SEQ ID NO: 16616 - DNA, 718 bp, Gossypium hirsutum
  Clone ID: GOSHI-09MAY01-C87185_1
gcctacctcctttacctgtcccccttgctccaaccctaatttctctttcttcaatctcgcccctactaagaaacccaagtcaacgcccgatcatcctcccggatctacccacgacggcgacgacgacaacaacaagacgacgaacacgagggttattgacaaggaagcagctaaggcacttctagctgctgctaagattgctgccgcctctatgaccaaagctgccgccgttgcgaaagtggaggctgagcggagggtcaaagaagctactttggcaaagaagagagccaaagaggctctcgagagactcgccttgttggcccggaaggatagtgatagacataagtcgtccctcgtaggcattcccaaatctaaacctgatgctgccattgctgctgctgctgacgccaaagcaagctctttatcccttccatctcctattcccgacaagggaaacaatgggtcgtattcagtttctggtgctaatgtacccatttcaatccccaagttgcagcgtcaacaaagcactcatggtatgcctaattgatcattggtgattccaacaatctcagtaaagtgtttgttttcgtttgttggtatttagcctttctgttcatgggaaccatatgtcaaatctttgtagagatgatttaggagtttttctgtattcagtaagctttttgtttgcattcaattgtagctttctctattgccctgt

SEQ ID NO: 16617 - DNA, 449 bp, Gossypium hirsutum
  Clone ID: uC-gsronu33B113a11b1
gcgttctggcgcgcgaacggagggaagcaccggggggaggggtaaatggagtattgttgccactccaaaccccaagttgcagcggaaaaaagcgactcaggggtggcgaaatgagccatgggggattccaacaatctcaggaaagagttggttttcgtgcgggggtgtgcagactgtctgtccatgggaaccacaggtcataacttcgtagagatgatttaggagtttttctgtattcagtaagctttttgtttgcattcaatgggagctttctctattgccctggatgtatttttcattaagctcgttgtttctgattatttgcttcacctttagcccttcttatgccaaaactaaagctctctggactttctgttcttacaaaattacaagaaaaaggactggacaaaatggtttagaccgctctccatgattgtttggagactatt

SEQ ID NO: 16618 - DNA, 921 bp, Gossypium hirsutum
  Clone ID: GOSHI-09MAY01-C87045_1
ttgctgccgtatgacagccttgaagggcggaattggcattagggtggaacttaacggtggcagagagattatggtttagttattcagctcataaatccgattacatattgtatacacataattgtttatttgtgtttttggtgttttctttggtaccgttgccctgggcattggtggagttgtattggttcgacgccgtagatagattcaagcttcaaccgagagtgaagagatcgttcccggagttgtttaaatgttataaagatgttcttcatcagtttatctttgtggttgcccctctcattgctgtttctttccctgttctagagtgggttgggattcgtacgagcttgccactgccaacaaaatgggaggtaattagccaattgatagtgtattttctagtggaggactacaccaactattggattcatcggttcctacatagtgaatggggctacgagaaaattcattacatgcaccatgaatataatgctccaatagggtttgcagcactttatgcccattgggctgaaatcttaattttggggatcccaacattccttggtccagctatggttccatgccatatgaccacattgtggctatggtcatctctacgccaagttgaagccatcgagacccacagcgggtataattttccttggagtcccaccaaattgataccattttatggaggaccagagtatcatgattttcatcattttgttgggagacaatgccaaagcaattttgcatctatatttacatattgtgattatctatatggaacagacaagggttatcgtcgccacaaacaagccgttaaaaaaggttttttgagtaaggaaagtatttctctctgtgatctccactgaagaatctcaaaaataaatatatctgtatttggttattggaccc

SEQ ID NO: 16619 - DNA, 756 bp, Gossypium hirsutum
  Clone ID: GOSHI-09MAY01-C80425_1
ctggactttgttgtagcggaagctaacaagtatggaattcatttgattctgagtttggcggagagtttcaaagattacggaggaaaagacaaatacgttcagtgggcaaagcaacgaagccggaacctgagcaaagaagatgatttttttacagactctgttgtcaaaaaatactacaagaatcatattaaggcagtgctcacgagaatcaacacgattactggagtggcatataaagacgatcctatcatctttgcttgggaactaatgaacgagcctcgttgccccagtgatccatctggagctaatcttcagaattgggtaaaagaaatggctgcacatgtgaagtccattgataatcatcacctactggaaataggacttgaaggattctatggggaatcgatgccagagaagaaacagtataatcccaatagctattccattgggaccgacttcatttccaataatcagatccccgaggtcgattttgctactatccatatataccctgagcaatggttaccatcgacaaattcatgcgaagaggcccagcttggtcttgtagacaaatggatggaagcccataccatggactgcaattcggtgctgaaaaaaccactggtcataggagagtttggcaagtctttcaagctgccaggttacagcttagagaaaagaaacgagtttttccagaggatttacaaagcaatctacagcggtgccaggaatgggggatcatgtgacggtgggctg

SEQ ID NO: 16620 - DNA, 652 bp, Gossypium hirsutum
  Clone ID: GOSHI-09MAY01-C80795_1
gctattaagagctgggcacggcaaatccttagaggcttacactatctgcatagtcacaatcctccaatcattcatagagatttaaaatgcgataatgagatgggctaatggaaataatggagaagtgaatattggagatcttggattggcaactgtcttgcagcagcccaaccgcccgaagtgtaattggcactcctgaattcatggctccagagctttatgatgaggagtataatgagcttgtcgacatatattcttttggtctgtgcatattggagatggttacttgtgaatatccatataatgaatgcaaaaatccagcgcaaatatacaagaaagttaccttctggtattaaacccgcttcccttggtagagtgaatgatccacaaattaagcagtttattgagaagtgtcttcttccagcatctatgagattgccagctgcggaactcttgaaagatccattccttttggctgaaactcccaaggagcctgcgagtggtccaccagtgaacttgatccagactgaacctcatctgatggaaatagatctcaactgcaaaatgcttatggtcaaaccttctactgaaagcatcaaagaaactcctcggttctcagctctggagctacagtctttcactcagaataatg

SEQ ID NO: 16621 - DNA, 584 bp, Gossypium hirsutum
  Clone ID: GOSHI-09MAY01-C80155_1
cccacgcgtccggcgcgtggtcgacttgccgaggaatgaaaagcatagaggaaaaaccatcctcatgaatttgttgcgaaacctgagtcattattcctggtaagttaaattttctatttagttcctataattttttttccattattggttcaataaatcgggcgggtttgtctattattttcacttcttggcaattggacactgtgttgttcttttaaatttataattttgttttagattttttcattttggttaaattaggcagtcattttgagataatattagagatggagctgaattgatctaattgaaacctaatcttatgcgatttaagcttgtaaaacatagactgcaaagatattgatggttctaaaaattttagtgatgggtttattttcaccgtgattatttggaggttgtgctatagatgcattatttgtcgtacttttttcagaacgttttaggaaaatgatgattgatgggaagaatggtagatatcgaactgcatgtacaaaaactggaagttgatatattctttttttgtacataaaaagaggaaataaaaatagatttgaggcttttat

SEQ ID NO: 16622 - DNA, 300 bp, Gossypium hirsutum
  Clone ID: uC-gsflnu33B143e03b1
gtcaggaatgaaaagcatagaggaaaaaccatcctcatgtccgttctcttctttctttttcctttttggtttaaaattttttattatttttattttctttgatgttcttttatttcctttttcttttgaaatttcaggaatttgttgcgaaacctgagtcattattcctggtaagttaaattttctatttagttcctataattttttttccattattggttcaataaatcgggcgcgtttgtctattattttcacttcttggcaattggacactggtgtggtcttttaaatctataattt

SEQ ID NO: 16623 - DNA, 1101 bp, Gossypium hirsutum
  Clone ID: GOSHI-09MAY01-C80175_1
atgaagactcattgttttcctgtcattcttttttagctttggttatccaccggccaaaaaaacacacgctatagaagggagagagttttcgtgagagagaaaccctaagttttctctggcgtttctggtttttgtgattttgaactctctattttgaacccttctctcttgtatatatattctgtttaattaaacattttaatacttgtaaggactagattctggagtaggatgttccagatattctttctcaacataagttattagtttctgttctggtttctcttattcattttattctcttcattctctcttcctcttttatgtgtttttactttttaatgttataaccagaaagtagagtagcaaatacctaatcaggttcttttggtcggtaaagacattggattgacaggaacgaagcttggctgcgatgaaggtggttgtggggcttgtactgtgatgatttctcattacgatagaaagacaaagaaatgcatgcattatgctgtcaatgcctgcttggctcctctttattctgtagaaggaatgcatgttattacagtcccgcgcgtccggaaccacaaatgtggcttgcaccccatacaagaatcattggcgcgttcgcacggctcccaatgtggattttgcacccctggatttatcatgtcattgtatgcattattgcggtctagtgaaacacctcctactgaagagcaaattgaagaatctcttgctggaaacttatgtcgttgtactggttacagaccgattgttgttcttatgtcaatattattgtcaatattcttaccttggactaggccctttgaatatgtcaaagaatttaaccaggcacatagaagggatgatgatattgccattgtgaatgctggaatgtgtgtctgtctgcaggagaaaagtgaagaatgggttatttcagatgcatcagttgcttatggcggggtggcaccactctctttatgtgcaattaaaacagaatagacacgaacataatattactgtttcatttgttccctcttctgcgaaccccccctccccaatgaactcaagaactcaagcggacaactttggccttggaaa

SEQ ID NO: 16624 - DNA, 907 bp, Gossypium hirsutum
  Clone ID: GOSHI-09MAY01-C80095_1
ggttttaaaaataccaataggaaaaagggagagagagagaaggtggtgactttacatatacctttgttatttatagtccactttcaagggcaagattcttgggctcctaacactataatatatccatttatttcaggctcagctttccattcattttttaaaggcaacccgcgcgtccgctagttcctataagatctgcaagtgggaaaatataacttaaaagcaagctccaatggatttggttcagttgcaaaggcagtttgttgactacaaaacctcactctatcatgagggttttctggatgaacaatttacccaacttcaagaacttcaagatgaaaacaacccagattttgtggttgaagtggtgtctcttttctttgaagattctgaaagacttctcaatgaactggctagagctctagagcagcagaacatagattacaaaaggattgatgctcatgttcaccagttgaaaggtagtagctccagcattggcgctcagagagttcagaaagtctgcatagccttccgcaactactgcgaggagcagaacgtcgaagggtgtcttaaatgtctgcaacaagtgaggcatgagtattcgcttgtgaaaaccaagcttgaatctttgttccagcttgaacagcagatcttgactgctggaggctcatttccgatgtaatagtttggcttcaaaaagagacctaaaaatcatttgcagagaaaaaacaagggaccaaaaatgatattttggcaatgtagaaaaagttattatcttttatctttgttggttttcaattattgcagttttagtagggtaactaagctactgaaggggatctatctactttcgagcttaagcttgtatcatatcttcagtgtatgagcaatgacaaagaatgtgaat

SEQ ID NO: 16625 - DNA, 952 bp, Gossypium hirsutum
  Clone ID: GOSHI-09MAY01-C80065_1
gttccctcgatatctaagctttgtcaagggtgttgtggactcaaatgaccttcctctcaatgtctcacgtgagattcttcaagaaagtcgcatcgtacgaatcatgaggaaacgtttggttcgaaaaaccttcgacatgattctcggaatatccatgagtgaaaataaaggagactatgagacattttgggagaattttggaaaacatttgaaattgggatgcatagaagatcgtgaaaatcacaagcgtcttgcaccgttgcttagattcttctcttcccagagtgaggacgagatgataagtttggatgagtatgttgcccacgcgtccgctgaacagaaggatatctattaccttgctgctgacagcgtgagcagtgctcggaatacaccgttcctggagagacttcttgagaaggatcttgaagtgctctatttggtagatcccattgatgaggttgccattcaaagtctgaaatcttacaaggagaagaactttgtagacattagcaaagaagatttggatctaggtgataagaatgaggagaaggaaaaagtaacaaaagaagaatttagcagaacttgtgattggattaagaaacgattgggtgacccactggcccttgttcaaatctcaaatcgtctgagttcatcaccctgtgttgtggtatctgggaagtttggttggtctgccaacatggagagactcatgaaggcacaaactgtcggtgatacctctactttggagtttatgaaagggagaagggtgtttgagatcaaccctgcgcatcctattattagagatttaaacgctgtattctagaggtacccagatgatgaacatgtcttgagagctacagatcttttgtttgatgcaccacttgcttttagaggttacacttctgacaatccaccacagatggttggtaagatttatgagatgatgggaatg

SEQ ID NO: 16626 - DNA, 616 bp, Gossypium hirsutum
  Clone ID: GOSHI-09MAY01-C80395_1
agcaagagttttatggacaaagtcaaagttcaggtcttgaaaagtttttgaactttgttctactactggaaacaaaaaagacaaccaaaagaatcatttggtgacttcacagcccgcattggatttgaaaaacttaaagagctggtggacaagtgggaaggtgtagtgcaaacgccaccagcaaggtataacctaaagctttttgccgataaagagacatatgaagtcatggatgagcttgcaaagctgcaaaacaagagtgctcatcagctggcaattgaagtcatgcgcaattttgttgcttcccagcaaaatggtaaaagtgaatgagtcatacgagaaactattgctgctgcattctctttcggacttcgataccattagtcaacatctagagcggatgaaatcattttgtattccagttttggtattggattaggcattatacaggttctggattctctatattcaggagtagttcctcgaatttgctttaaaaaatacaattcccagtgttgtagtattgtgcctttagatatttcttctggactgcgcaggaattgtaaggcaatttcaaaacactgagctataaaactaggaaggattgaacctggat

SEQ ID NO: 16627 - DNA, 546 bp, Gossypium hirsutum
  Clone ID: GOSHI-09MAY01-C80315_1
tgctaaatttctaaggttgaaatggaggaaatttggtcacttggcaagtgaagtcggtggagcaagaaacatatttgctgagactttttgggaaaaataaggctgaaaacactttttggttggacagttcatcaacagagaagggaagagcacggttttcgttcatggggggtaaaggtggagatctttggaagcaattaactttcagactgtctgaacaaagtgatacagctggtgaacgtggtcatttattgattgaagataccaaaggctttacttgtagcaaaattctggaagaaggtttttttgaatatttgaacaaggagcttctgtcactgtgtcacgaggaaaaagattatgaaggcctgccatttgacttctacggtggatttattggttatatagggtataatcttaaagtagaatgtggcgcagcatctaatgctcacaaatccacaactccagatgcttgctttttctttgccgataaccttgtagttattgatcatcataccaatgatgtttatgtattgtccttacaagaag

SEQ ID NO: 16628 - DNA, 639 bp, Gossypium hirsutum
  Clone ID: GOSHI-09MAY01-C80295_1
gcacaatgaaattcaaactgtgaatattaagagtgtagggacaaatattgaggttactgatggagaaaggttgcccttgactgttaaggaattggggacttgtgatctataccctcaaagcttaaagcataacccaaatgggaggtttgttgttgtctgtggagatggtgagtatatcatatatacagctttggcttggagaaataggtcatttggttcagcattggaattcatttggtcacctgatggagagtatgctgttagagagagcacatctaagattaagattttcagcaaaaatttccaggaaaagaggattgtccagccaaccttctctgcagagcatatttttggaggcactttactagcaatgtgctccagtgattttatttgtttttacgattgggctgaatgcaggatgattcgtcgaattgatgttactgtgaaaaatctatactgggctgatagtggtgatttggtggcaattgccggcgatacatctttctatatccttaaatacaatcgggatgtggttcaatcttacttagatagtggaagacaagttgatgaacaaggggttgaggatgcatttgaacttcttcatgaaaccaatgaacgggtcatgactggcatatgggt

SEQ ID NO: 16629 - DNA, 317 bp, Gossypium hirsutum
  Clone ID: LIB3585-054-P1-K1-A2
gttacttgacattgaatctatgtattaagacagccacctgacatacttgtgttgtatactgaagataaaacattgaccgggtctgtttaggaattggggacttgtgatctataccctcaaagcttaaagcataacccaaatgggaggtttgttgttgtctgtggggggtcgggtgtatatgatctatacttacttacgcttgcatacataggtaattttgttcaatagttggacctaatttgattacatggtccagagtttgccaacagagagacgcgcaaaaaccatgaagatacccaactaaattttctaggaaa

SEQ ID NO: 16630 - DNA, 539 bp, Gossypium hirsutum
  Clone ID: GOSHI-09MAY01-C80255_1
gtcaacactgccaccaaacatggcctaatggatgccccgaaagccgtagtccaatgagcgtatggtggttacttcctcaatatgtgcttaccggactaggagacgtttgtccgcccgcccgtccgcaagaattgttctacgatcaaatgccggaagaaatgagaagcattggggcagctgcatatataagtgtagtgggagttgggagctttataaacacagctataatctcagtggttcaagtcattagttcaaggcatgggaatgaatggttgggagataatctaaaccgtgcaaaacttaattacttttattgggtattggcagggttgagtgcttttaatttgtgtgcttatatttggatttctaggagatttgtgtataaaaaagttgaaaataatgatgaaagagttggtgaggggaaagagtcgggaatgggaggctatttggacgtaaaagtatgaaatttggagctatttcgatgtaaaaaaatgcatgtgttacaacttagtaattatattatattatattattatatt

SEQ ID NO: 16631 - DNA, 577 bp, Gossypium hirsutum
  Clone ID: GOSHI-09MAY01-C81955_1
cggaagctatttatttgaataggaacatttgtgatggatttaaacatgtgtttatcggcaacctcatagttcgagtcataaagaccgaagaagggcaaagatttccggttttattttcgactttcgagcatcttaaagaaactgcgtccgttgtggaagaaattgagtttttaccgagattggaagaaatgggatagaggtcataaaagaaaagtaccattgaagaagataaagagctataaaactacaccaatgcaactcaaaaaggataaaaccacaatcatatggagacaatttgatggaccagagcctgataattattggtatagagtatgtgaagggcaagctgctaagtacattcacagaccgtggcatacaatatggaaatcgaaacgattgatgaacatcgtaaccgagataagcggtcgtatggattgggatttcgacgctattcacgtcatccgtggtgaaaaagcacaaaacaaacaactttggccgaatctggattctgagacctcccctaacgcaatcttaaccaagcttcaacaaatggttcaaccgtggaggaacctttaca

SEQ ID NO: 16632 - DNA, 566 bp, Gossypium hirsutum
  Clone ID: LIB3543-029-Q1-K6-C10
cccagcgtccgcaagtgaagagtgttagtaattttgtgtttagttttgatttgattttatttttttggcttaattttgttaataggttgtaaaacaagaaggatgggaacggttatatggaggcttaactccttctttagttggtacagctgcttctcagggtgtttattattatttctatcaaatattcaggaacaaagctgaaaccgcagcacttcaaagccagaaaaaagggattggtgatggatcagttgggatgctttcttcacttgttgtagcagctttatctgggtgcgtaaatgttctgttgacaaatcctatttgggtagttgtgacacgcatgcaggttggcaacgactgctccagaggaaacagctcttccggtcattgagcctctttcttatggaacgagccatgtgattcaagaagtctatgatgaagctggattatttggtttctggaaaggtgagcaatccgtctatacaatttatgctgtatgaaacgatgttgaagaagttgaagaaaagacgagctcttagtaagcagggcaacaatggagtaactgc

SEQ ID NO: 16633 - DNA, 467 bp, Gossypium hirsutum
  Clone ID: LIB3585-012-P1-K1-A1
cggacgcgtgggctttaacacgtcttcaaacaccaaattttctcgagaaaatttttagtttttttctcggggatcagaaaacgatgtcggacgctttgattaatggactagctggagccggtggagggatcatagctcaaatcatcacatatcctcttcaaactgtaaatgctcgtcaacaaacagagcgtgatctcaagaaagagaaacggaaagtcggcgccattgaacaaatgtgccaggttgtaaaacaagaaggatgggaacggttatatggaggcttaactccttctttagttggtacaactgcttctcagggtgtttattattatttctatcaaatattcaggaacaaagtctgaaccgcagcactttaaagccagaaaaaaaggattggtgatggatcagttgggatgctttcttcacttgttgtagcaactttatctgggtgcgtaaatgttctgttg

SEQ ID NO: 16634 - DNA, 527 bp, Gossypium hirsutum
  Clone ID: LIB3585-007-P1-K1-E8
ctgaaattactcaatgggatgaacactggggtgaagccaactagtgaacataggagttcgcttttgcaggttactgatattgtgccggctgatcttgatgagaagaacctttggcctaaacatggcttttacatcaaggtctccgattcttcgcattccatttacgttagtcttccttcagaccaagatgattttgttcttagcaacaaaatgcaacttgggcagttcatttatgttgatagattggagcctggctctcctgttcctgttgttaaaggtgcaaagcccctccctggaaggcatcctttagttgggacacccgagcctttaatgggtttaagaagaaaaggggagaaaagtgagcaaaaacaagagtctaagctgcatagaagaggttcttggggcaagggtgttaatgggactgatgagatctcttctcctttagttttaaagccggtacccttagattttgatcaatgtactccggtgaaagagcggtctaacctggcgagaactccgatgatgtc

SEQ ID NO: 16635 - DNA, 376 bp, Gossypium hirsutum
  unsure (1)..(376): unsure at all n locations
  Clone ID: LIB3582-041-P1-K1-B6
cccacgcgtccgcccacgcgtccgcccacgcgtccgcccacgcgtccgagattggagcctggctctcctgttcctgttgttaaaggtgcaaagcccctccctggaaggcatcctttagttgggacacccgagcctttaatgggtttaagaagaaaaggggagaaaagtgagcaaaaacaagagtctaagctgcatagaagaggttcttggggcaagggtgttaatgggactgatgagatctcttctcctttaggttttaaagccggtacccttagattttgatcaatgtactccggtgaaagagcggtctaacctggcgagaactccgatgatgtcttcgatgataagaagggtagggaaagatgngaaatgtagt

SEQ ID NO: 16636 - DNA, 439 bp, Gossypium hirsutum
  Clone ID: LIB3585-007-P1-K1-D7
ggtttgaagacaaaaccacactaattacatgaatggatttttaaatatctgggcggatggatacgatgggggatagataacgagagagaaatgagaacaaggagagggatttcttacccagagcccatgtttgtttagatgacatagtttttgaaaggagggatttcgccggtgataatatggttgccggaaatggcgaaactgttgccgggtattgcctgaaagagagatttctttgatgtttggccagatgatcttgtcattactattttcttcaaactaagctctaccgcggcttgccattccgatttcgccaacgttttgattgtatgcaagaaattgaatagtttagaagttcgtcctctggtattatccaaagactctccaaaaatgtttgcaattaaaggcaaaagctggtctgaggtaactcacaggtttt

SEQ ID NO: 16637 - DNA, 440 bp, Gossypium hirsutum
  unsure (1)..(440): unsure at all n locations
  Clone ID: LIB3585-008-P1-K1-D6
agaagatcgagaaagtnaannnctaactacgaatgctcagattttaagatcatctgggtagatggatgtccgatgtagtgatagagaacgagagagaaatgagaacaaggtgagggatttcttaccccagagcccatgtttgtatagatgacatagttttcgaaaggagggatttcgccggtgataatatggcttgccagaaacggctaaaactctcgtcgggtattgtcggaaagagagatttcttagatgttttgcccgatgatcttgtcatttctatgttttccaaactaagctctaccgcggtttgcccttcctatttctccaactgtttgattgtatgcaagatattgaatagtttatcagttcgttctctggttttatacaaagccttttcaaaaatgtttgtaatataaattaaaatctagtctctgttatta

SEQ ID NO: 16638 - DNA, 675 bp, Gossypium hirsutum
  Clone ID: GOSHI-09MAY01-C81665_1
gccaaagagtccagagaggaaagagctccctcctgcacctaaagaggaagagcctgcaccagatatgaatgaaataaaggcactacctgctcccgaaaattatactccaccgccaccaccagagcctgagcctgttaaacccccggagccacaagaggatttagtgaatgtggcggaagacactgtgccacctgatgatcatgggaacaaattgcctggggctgcatttaatgctcctacagctaataatggggatggatcatgggaagctctcccatcaaacggacctgaggtgacatcggcttggcaaaccccagctgctgagccagggaaggaagactgcgagttggctttggttgagaccgctagtaacttgtcaaggcaaaaggcagctttggggggtggtctagatccattgctgttgaatggcatgtatgatcaaggaacggtcaggcagcatgttagcactgcacagttaaatggggggagtgcgagtagcgcggcatcgccacccccagggaagaccacatcacatggtgtagctattgcagcaccagatggaacagttcataatgacaatcaggacccgtttgccggatctttgagcattcctcctccttcctatgaacaaatggctgacatggagaaaaaacaaactctgcttgcccaggagca

SEQ ID NO: 16639 - DNA, 658 bp, Gossypium hirsutum
  Clone ID: GOSHI-09MAY01-C81045_1
cccacgcgtccgcgcttttcttcgccaacgatggcttcactgcttacgattgtaaaggtcagttggttttccgagtggactcgtacggtcctgacgctcgtgacaaagccgaaattgttcttatggatgctcatggaagatgcctgctcactgtcagaaaaaagaggccgagtttgcatcaccggtgggaagggtttttaggggaaagaacagagggtcagaaaccgatcttcagtgtgaaaagatcgtccataatcggacggtgcgggatgacagtggaagtgttcaacaatccagggctggagtaccagatagaagggaatttcggacaacggagctgcacgatcttcaacgcggccaaggaatcagtggctgagattaaacgcaaagttgatgcttccactaacgtggtgcttggtaaagacgttttcttgctttctttaaaacccggttttgatggggcctttgctatgggtttggtgctcgttcttgatcaggttaacggtggtgattacgttgaaaatgatgaggccgagatgatccctaccacagaggattaatgtgctgtgcattttattaatttcttaaacgaagagatgtggtaaaagaaagctgtttgtatatttattcaaaatgtattattagtttccttttgaag

SEQ ID NO: 16640 - DNA, 645 bp, Gossypium hirsutum
  Clone ID: GOSHI-09MAY01-C82555_1
cccagcgtccggtaaaatggtgtggaattaaaagacttcaagctcaagtgtagcagccaatggagatgtggctaaggaaccgacagctcccgaagctatggatggttcagattgggtggagctttttgttagggaaatgttaaatgcttctaacattgatgatgccagagcacgtgcttcgagagcactggaggttttggagaaatccatttgtgcacgagctggagcaaaggtggcccaaaatttccaccaggaaaataagatgctaaaagaacaactggaagcactcattcaggaaaatactattctgaaacgagctgttgccgttcagcatgagcgtcagaaggagtacgaaaatcagagtcaggagttgcagcatctgaagcaactagcatctcagtatcaagagcagttgagaacccttgaggtaaacaactatgcattgacaatgcacttgaagcaaactcagcaaagtagctctatcccgggccgtttcaaccccgatgttttctagaagttcttggatatggtttttgcagatgatttgtgtgcaactcagtcctcgaatcctggcaaaagctttgctaacaatattaagctgccaatagctattatcttaatgtgcatcaacaggtatgctgccac

SEQ ID NO: 16641 - DNA, 564 bp, Gossypium hirsutum
  Clone ID: GOSHI-09MAY01-C82575_1
aacggttcaaatgggaaaggttttaccggatcagaaagtgaacaattaattttaaagtcatcaagagccatggatcaaaatgctggaaagaatgagggtgaggattctaggcaaagtagctctctaccacgtcaggccattccagagtataaaacgtttagtggttcactaatgcctgataacaccttttcttctaaaaaggttacaggagatgaggacaggaactttccgcagcttaaatttcaatctgactgcatctacagtggtccattgtatcgccagaggagagaaacaaataatactgacaatgcatcggagagtgcagttgttcagcggggacgctttaaggtgacttcagccgatctcagttctaagggggctacaaactgcatttttagcccatctactggaggtccatctccaaatgttacagctagtgcaattctcccatctctacaatacattttgcaacagaacactgtgcaaagggaagaacttattagactgttcaaatacttggagcaatcttctggtaagcttggagacttgacagaggttggcacc

SEQ ID NO: 16642 - DNA, 1009 bp, Gossypium hirsutum
  Clone ID: GOSHI-09MAY01-C82445_1
ctgtcgcgtggggtgccttagagatgtttgcaaccggatactctacgataaaagatttagtgcctttcattacccagtcactgatgaggacgcgccaaactaccgctccataatccagaatcctatggatgttgctactttattgcagcgtgttgactctggacaatatcttacctgttctgcttttgtgcaagatgttgatctgattgtaaccaacgcaaaggtttacaatggagatgattataatggtgcaagaattgttagtagagcttgtgaattacgggatgcagtacatgggatgctgtcacagatggaccctgcattggttgcttattgtgacaaaattgctgctcaagggggtccagctcatatgcctgatgatctagggctgcctcctgcggtacctgttatgcagctaggaacttcaactcgggcaagtgctcgactccggaatggccagccagaggctgatcttcaaagctacaaggccttgaaaaggccaaagaagaatgccgatactgcccctgcggcagaagacaaatcccaggcctcggattcagtacaaatgaagccatctcagaccctagaggtaaaggagataaactgtgagagggatgaacctactttgggtgatggcaagcagcaagaaacttctacagaagctaatggatcccaggacacgataatgttggatggtgagatttcaactcaagcctgatcggtgaagaaactgctagtggagcgaacaggaaactacgggatcccggggctgggaaggctttacagtcggataatgagaaggcatttttgaaagtagggttggagatgatgatgaccccaaaccttcagttttggagtttttgttgaaatttgcagaggatgacgctaatttctcttctctttaatgcctctcatcataaaaaaagaaacgggcgcgcggcaaagaaacctttcagtagggtagttgtaaagtcgggattttcttttttccaattcatattattgagtc

SEQ ID NO: 16643 - DNA, 761 bp, Gossypium hirsutum
  Clone ID: GOSHI-09MAY01-C82465_1
cccacgcgtccgcaaaaagatagagaataaattacaggataaaacgagggcaaagggatcttttgggaaattaccatggaccgatctgagcaaactgaacaacagcagcagcagcagcaacagtctgtgatgggagttgtagccggtactggaccaatgggttattctactggtccctatcaagctgctcctgtggctgcttccggcactccagcaacggcggtcccttcaccaactcagcctccggctactttctctggttctccgcaccaacttgcctaccaacaagctcaacaattccaccaccaacagcgacagcgacaacaccaacagcttcatatgttttgggccaaccaaatgcaagaaattgagcatgcatcggacttcaagaaccacagtctcccgctcgcacggatcaaaaagataatgaaagcagacgaagatgtgcgaatgatatcggcggaagctcctgtgattttcgcgaaagcttgtgaaatctttgtcttggaactgaccttacgttcttggatccatacagaagagaacaaaaggaggacgctacaaaagaacgacatcgcagctgccatttcacggaccgatgtctttgatttcttagttgatattatcccgagggacgagttaaaagaggagggactcggggtcaccaaggccaccattcctttcgttggttcacctaccgatatgccgtactattatgtcccgcaacatccggtggggcatgcagggatgacaatgggaaa

SEQ ID NO: 16644 - DNA, 546 bp, Gossypium hirsutum
  Clone ID: LIB3828-025-Q6-K6-F2
aggcgccgcctcatctatccaaagctcctctttcgtctcacaagttgaatggtgacaatggaagtctggattttgagaagttgtggaagcaaccttctaatcgcgattttgtgccttgtgtgcagcccggttctaattatacggcccctgatgagtcaggaggctaccttctagttcatacaaatggtgggctcaaccaaatgcgagctgggatatgtgacatggttgctgtagcccgtataataaatgccacccttgtggttccggagcttgataaacgatcattttggcaagatgcaagcaatttctctgatgtttttgatgaggaccattttatcaatgctctggctaatgatgttaatgtcataaaaaagcttcctaaggatttgtcttctgctacaaaagtagttatgcattttagaagctggtctggtttggagtactaccgggatgaaatagctagtctgtgggaagaatttcaggttattcgagcagcttaatctgattctcgcctagcaaacaaccatctgcctcctgaaatgcaaa

SEQ ID NO: 16645 - DNA, 511 bp, Gossypium hirsutum
  Clone ID: LIB3585-004-P1-K1-E1
cggacgcgtggtcggacgcgtggggcaaagtagtcatgcatctttcatgttttttcactcctttagatttgacagttgaatggtgacaatggaagtctggattttgagaagttgtggaagcaaccttctaatcgcgattttgtgccttgtgtgcagcccggttctaattatacgggttggtttgaatttcttttttgatgtgtctactaagtacctgtttattgatttttaatttatggtttgtttgctcagcccctgatgagtcaagaggctaccttctagttcatacaaatggtgggctcaaccaaatgcgagctgggatatgtgacatggttgctgtagcccgtataataaatgccacccttgtggttccggagcttgataaacgatcattttggcaagatgcaagcaatttctctgatgtttttgatgaggaccattttatcaatgctctggctaatgatgttaatgtcataaaaaagcttcctaaagatttgtcttctgcttcaaa

SEQ ID NO: 16646 - DNA, 751 bp, Gossypium hirsutum
  Clone ID: GOSHI-09MAY01-C82115_1
ggcgcgaatctgatcgctctgctgccaagcgtgccactcacgtgctcgctgagcttgccaagaacgaggaggttgttaatgtgatcgttgaaggtggtgctgttccggctctagtgaagcatctgcaagcgccgccatgcgaggacggcgaccgaagcccgaagcctttcgagcacgaggttgaaaaaggaagtgcttttgcattggggctgcttgccgtaaagccagaacatcagcaacttatagttgattctggggctttgtcgccgcttgtgaacttgttgcggcgtcacaaggatagttctatttctcgcgctgtgatcagtgtcattagaagagcagctgatgctctcaccaaccttgctcatgagaatagcagcattaaaacgcgtgtcagaatggaaggtgggattccacctcttgtcgagttgcttgaatttactgatactaaggtgcaaagagcagctgctggcgcattacgaaccctagcattcaaaaatgatgaaaacaagaatcagattgttgaatgcaatgctctacctactctcatcttaatgctaagatcagaggatgctgctatacactatgaagcggttggtgtgattggcaatctggtgcattcgtcaccaaacataaaaagagaagttcttgctgcgggggctctgcaacctgtcattggtttgcttaactcctgctgctcggagagccaaagggaggcagctttattgcttggacaatttgctgcaactga

SEQ ID NO: 16647 - DNA, 502 bp, Gossypium hirsutum
  Clone ID: GOSHI-09MAY01-C82065_2
tttccatctgcatttttttttcttttcttcaatttctacacttcgattctctggaatataaaatcaaattaatttagttttctagaaatggaaaggaaaaatatgaaaagtaaaagaaagaggataataatcaattgaattttccaccaaatttgttcgacggatttttctgagggtttccatcagaattccaacatccaaacagaacccagaaactggctcgtctttggattagaatgcaggcatcaacacatttaatcaaaggaaatttagaggttaagatttcaaaacggagagatctgccttgttttcgtgaatttaaggaacggaagtcaactttgactcgtaatctttgcatccgaaggggttctatttgcagtggtttaaagctctggtgccgtttcaatgggagctgagctcgcacgtgctagagataatgttgaaaccgtcgctcgctcttgatcaaatttcgatctgtcaaaggtggagatgttgaggatct

SEQ ID NO: 16648 - DNA, 617 bp, Gossypium hirsutum
  unsure (1)..(617): unsure at all n locations
  Clone ID: LIB3829-020-Q6-K6-E5
caaacacccactgaactcagtttccatctgcattttttttcttttcttcaatttctacacttcgattctctggaatataaaatcaaattaatttagttttctagaaatggaaaggaaaaatatgaaaagtaaaagaaagaggataataatcaattgaattttccaccaaatttgttcgacggatttttctgagggtttccatcagaattccaacatccaaacagaacccagaaactggctcgtctttggattagtctttatcgtttggtgaattagctaattcagaatgcaggcatcaacacatttaatcaaaggaaatttagaggttaagatttcaaaacggagagatctgccttgttttcgtgaatttaaggaacggaagtcaactttgactcgtaatctttgcatccgaaggggttctatttgcagtggtttaagctctggtgccgtttcaatgggagctgagctcgcacgtgctagagataatgttgaaaccgtcgctcgctctttgatcaaatttcgatctgtcaaaggtggagatgttgaggatctggcaccaatcaaccctcacgagacatctnactggacagttttaccatttgttggcgttgcttgct

SEQ ID NO: 16649 - DNA, 655 bp, Gossypium hirsutum
  unsure (1)..(655): unsure at all n locations
  Clone ID: LIB3582-058-P1-K1-F1
ncaaaaaatactgtattacacgcatatttcagaaatcaaagnaaaaaaaagggttgattttgattttctcttctttttcttttcgttttcccttttctttttttatattattacaaatctattttcaagcaaaaggataaaataaaaaaaagacagagaaaacttacccgagtccgatcttgcgtgactccgaccactgtccacggtggagccaaggctgttcggcgatggtgcgatgatgggttttcaaaaccctagcagaaaaggaaaaaggaaaaaggaaggggaggggctactctctgtttttagaaaaaaagaaaggaagaaatgaaaaaaaattaaaaaaaatttggctttaacagccctgcaaaacgaccacgttttgcttcccccccgccttaaaacgtcgtcgtttagggggggaacccgcgcgacccgacccaggtagtggaggattcgcgtgttttcagacgtatgggctatttacgcccttagtccttccacctttggggacgtttcaaatgggatcctttctgttatttccatttcagccttaaaatttatttcagtttcaatttagtcccccaatttagcccatacacgctgcgcacaagggaccaaggatattttcccttttggtcgctattagtttttg

SEQ ID NO: 16650 - DNA, 362 bp, Gossypium hirsutum
  Clone ID: uC-gsflnu33B072h09b1
tgatggttttgaaaacccatcatcgcaccatcgccgaacagccttggctccaccgtggacagtggtcggagtcacgcaagatcggactcggatggtggttgaagggtgtcagacagcacgtgggtggcagcagaggctgtgctgaggctgctggtcagaagaccctaggtgcggcacacctagggttttggtatttttgtttttttctgttaacttagggctagggttagattgggcttggtttgggcttgttttgtaagtggttttttttgtgtttgttggattgtttattttgggcccgagtaaaatttgggtcttacagattttatattttatattagttacaatgaattttatttttc

SEQ ID NO: 16651 - DNA, 614 bp, Gossypium hirsutum
  Clone ID: GOSHI-09MAY01-C82375_1
cggaaccggcattcccgggtcgacccagcgtctcgccctcgcgtcctgccccgcgtccgcctttctagattaaattaaaacaattacctgatgtgactcttccccttaaagtaatcccattattggggttttctttttgtgcttatatttcacaacttcgtgtattgcttaccctcctcacttgcaaaaatatggataaatttcagggttttgtgctcctttttttgcttgtaatctcagtttcttcatcccagattcccatggtgtcggcagccaggccattttctatcctgcctgatcaacaaagtaagagcctgcctgcttgtttgtttctcttgagctttaccttattgtttcagtttcagttgacttactaaggggttgttgtttatataggatactcgaagatttttgcgactcttggagttgtttgcatgtgttgcgatggaagtggaggtgaatgctccactacttggacccaaccttgctctaagctcaagtgccttgccctggaatctacattagggttttgggttttccgctttttcctttctcttttttccctcaccttcttggctgttcttatatgttcatgtgtcatcactagtacaggg

SEQ ID NO: 16652 - DNA, 646 bp, Gossypium hirsutum
  Clone ID: GOSHI-09MAY01-C83955_1
ctttaaagcctcactctctccggaaatggggaaggccaagtcggagtttgagaatttatggaagaagagaaacttggaagagcctttagatggtgacggagaaactctcataaagcgattgaaaaccgaaagaacaaaaccagggtttgatatggagcttcacctcgacactccattgcctatagagtggcaaagatgtcttgatcttcagtcagggacgatacacttttacaattcaaggactgatacgagaacttgtaaggatccaaggacaagccctgagtgtccaagcactgggcacatgagtttagaccttgagctaaacttaccatgcgtttctaatgcaacaaatccggaagccgtgagcaagcaaaactgtgtcggctcagttgagaagaagctcaacagttggggaggattaatgcagaagcgtccgtggttaacgatggaagaggcgaaggaggaagaggaggagatggtagcaacagtgtgcaggcagtgccatatgttggtgatgctaatcaaatcatcacctgcttgccctaattgcaaattcaggcacccaccaccagacccaggccctccaaaactattcaaccaaaggcttagcctcctgtgctagtaaggcgtgatggatcatcaagct

SEQ ID NO: 16653 - DNA, 881 bp, Gossypium hirsutum
  Clone ID: GOSHI-09MAY01-C83815_1
gcacatcaaggaaatggtcatgaagggattttggtaatgacgagcgtgtgtacatcctggatatgtacaatcctggaatctacccatttgatatgactgctagaaattatattaaccagaaggttgaagtgatgactgggactgcaactgttgactacttggaccaattggataaagcacttgcggtagcggggagtaattttgcccccgagttgattgtgtacaatgctggaactgatattctcgatggagatccactgggtggattaaaggtcagtccagagggggtgatccaaagagatgagaaggtcttcaggtttgctcgtgatagaaagatccctattgtaatggtcacatcaggtggctacatgaaaaccagtgccagagtcatagcagattccattataaacctctcaaaggaaggcttgatagagacaaatgtccacagcggaagaaaaataatgatataaggctactttgctatcaataaacaactccattacaaaggtcagttccactgatgaatcccaaggcatgaatactatccaacttactcacgtgtttgtaaccgaaagtgatccttactatataagcaggcaaataggagaaattaggagatagaagtgtgagttttacataggaataatactcataggagcatgagtgtgtctcgagttgttattcaagtagtttgcaaggcagtatcttagggattagcttggcttggtcttccttgtacacgaggtatggccgcttgccgtgtgtctaccttctctcttaggttatcgaataactgatatataaggaagcttgtttaatgcacaaatgtttgtgtaaatgcaaatatgcagtatacagcttatttcagtttcaaaaacccc

SEQ ID NO: 16654 - DNA, 565 bp, Gossypium hirsutum
  unsure (1)..(565): unsure at all n locations
  Clone ID: LIB3829-007-Q6-K6-C5
cggccgcgtgggcttngacagcctcttctcctacacgatagtatgtactgtccttttaactgttatttttttgctctatgcaatgagttccgacttttttctcttgaaatatcaatttaagaggacaactcaccttaccttctggttttattattattttcattcaatcttttcaggatatgactgctagaaattatattaaccagaaggttgaagtggtgactgggactgcaactgttgactatttggaccaattggataaagcacttgcgttattagttacaaatgccaggtagcggggagtaattttgcccccgagttgattgtttacaatgctggaactgatattctcgatggagatccactgggtggattaaaggtcagtccagagggggtgatcaaaagagatgagaaggtcttcaggtttgctcgtgatagaaagatccctattgtaatggtcacatcaggtggctatatgaaaaccagtgccagagtcatagcagattccattataaacctctcaaatgaaggcttgatagagacaaatgtccacagcggaagaaaa

SEQ ID NO: 16655 - DNA, 1212 bp, Gossypium hirsutum
  Clone ID: GOSHI-09MAY01-C83595_1
aaaaattttgagggcaaacatctggttcctggcgccgcaccgtttacctaaaacctcgaaggttttaccattgcaaagaataatttcaaaggaatccaagagaaccaatctctgagtcccataaacaaaagggttgtagcgatggctttcttaagtaaaatcgggggtatacttaagcagactgtaagtacgcccccctgggctcggttgtccgagtcaagaccaggcctctttcaagtgttcagaagcatgtccagcgacccgagctcgaaactttttgtaggaggtatctcgttccaaatggatgaccaaagtctaaacgaagcatttagcaaatatggtgaagttgttgaagcaagagttattgtggatcgacaaacacggaggtcgacaggatttggatttatcacttacactaccaccgaggatgcttccagtgcactacaggctttggatggacagattctccatggccgtcaagtaagagtagactatgcaaatgacagacctcgtcgtaactttggaggtgctggcggctatcgtggtggtggtggctatgggggtggtaactatggaggtggcggctatggcagaaaaatgaatggaaacgtaacattggatacggtaacagtggtaactatggaggccaaggaagctatggtggggataactatggcactggtggtggtgttggctatggaagtaacttcggtcaatccaccaattacgacactgggagtttcgaagttgctggtggtggcagtggcagtgatggttttgcggctggtggtgaaaatgtgggacttgggggtggtgatcaactcggtagtgccgaagatagctacaaagaggaaaccgcaggttttggcctaaacgatccaccgagtgacaacttccgggatgatgaggacaggaatggtgacttgtccaaaagggtatgaaataactcatttcaatttgatttggggataatagttggattgttttggtcgaggttctcgaacactctctcttaactaattgttatgtcttagtgattcatgcgcctgagtccctgtaaaaccttttttctgatagagaaaactgaatattcaaaattgaagtgcctattggggtatttttgttgcgtctgttttatgatttcatcgtaactatgtttataaattaattagtaagtttgtgactggtttggttttatttttaaatctacaa

SEQ ID NO: 16656 - DNA, 531 bp, Gossypium hirsutum
  Clone ID: uC-gsflmaxxa096a10b1
gtttatagttcggcaggttgctatacaatctgatgcggattccttatacatcatatcctgaatacatcctggccaatttggttcatgctcttgctcatcattcatgtccgaacacagatgaatgcaaagatgtcaaagcatttgaattaatattccggcaattgtacttgactatttctatgttggtgaaaaaagagaggaaatattagattatagatttgaggctcgttacccccgccccccaaaataaaaaaccttgacccctgttaccaagggaatgtccactcttattgaagaggagattgaggtgagaaaagggccatggaccacggaagaggatacgctcctaacccattacattggtcgtcatggggtaggtccttggaatatgctgacagctgaaagtagatcagcagctgtactttgccaacttgatactgttttatttttggacttgcaatgtttgcttaggatttaaagacttgcccatgaaaaatgttagcaatttttagctgtaatttaattttagac

SEQ ID NO: 16657 - DNA, 416 bp, Gossypium hirsutum
  Clone ID: LIB3493-034-P1-M1-H2
aaaaaaagagaggaaatattagattatagatgtgagggtcgttacccccgccccccaaaataaaaaaccttgacccctgttaccaagggaatgtccactcttattgaagaggagattgaggtgagaaaagggccatggaccacggaagaggatacgctcctaacccattacattggtcgtcatggggtaggtccttggaatatgttggcaaaatgtgcaggtcttaagagaagtggtaaaagttgcagattaaggtggcttaactatttgaaccctgacattaagcgcggaaacctcactctccaagaacaacaattgattcttcaacttcattccctgtggggaaatcgatggtcaaaaattgcagagcatcttccgggaagaacagacaacgagatcaagaactattggagaac

SEQ ID NO: 16658 - DNA, 900 bp, Gossypium hirsutum
  Clone ID: GOSHI-09MAY01-C83255_1
gggacaactgccttcgattccatttggtctagacgaagatcagctgcgaatggtgaaacaggcagggaatggtggactgactacaaagaaggaagtggagagaggtccttggtttggggttcggaaaatgtagattccgttatgctgtgggaaagaagtcatactgcagacgcttatttaaccgggaaagcagaaggactggatgatggtgacatagcaggccaagcaatagcaaccaaaacagtccaaggtgatgagagaacttatttaactggagaagagctcaagagaaatgtagaattttgtgaggcagtagattgcaatccgcacgatcccgcggttgatatggaaccagctgtttatgacatacatgttgtcgatgataaagtagacattctgaaggaggagaatacaaaagaaagtaaattaccatctggttccgctttaaatcacaaaactttgctatatgactcgaggaggagtttttctgcagtcggtactgaaatgttggagattggtgctgaaatcaaatgccttagagaaaggctgcaaatcgtacgaggagaaaaagtgaagctgagtttctcatcggatcagaggaaaaggatagatacccatttgaaactcatcgaggagctggtgaaccaacttcgagaatttcagcagctaaaggagcccgttcggcagacttctttacctcctttaccttcacctttcaaggtaaactccaaccggagacgctgccggagcgtatcggatggaatcgaagatagtgcgtaagcaatgtaagcaatgtacagaataagctatggaatcggctgtttcttaggttttctttttttcagataagaagttgataaaatatctgtgaagtccataaatacataaatatttaagttt

SEQ ID NO: 16659 - DNA, 939 bp, Gossypium hirsutum
  Clone ID: GOSHI-09MAY01-C58944_1
cccactcgtccgattggacccaaattcttgaatgccagcgttggtttcggcggatcctgtttccaaaaggacattctgaatctagtttacatctgtgagtgcaatggccttcctgaggtagctgagtattggaaacaagtcattaaaatcaatgactaccagaaaaaccgtttcgttaaccgcgttgtgtcatcgatgtttaacaccgtttcaaacaagaagattgctatcggccgcgtggctttcaagaaggatactggtgatactagggagaccccagccattgatgtatgcaaagggctattgggagataaagctcggttgagcatattcgatccacaggtcactgtggaccagatccaaagggaccttaccatgaaaaaatttgactgggatcatccccttcacttgcagcccatgagtcccacaactgtgaagcaagtcacttgtgtgtgggatgcttatgaagctacaaaggatgctcatggaatatgtattctaactgagtgggatgaattcaagaatcttgacttcaagaggatatatgacaacatgcaaaagccagcttttgtctttgatggccggaacattgtaaacgtggaccagctgagggagattggtttcatagtgtactcaattggcaagccacttgatgcatggctcaaggacatgcctgcagtggcataaatgatgcatgcagaggttatcgatgcgcgtcaatgtcagtttgattctttactacctatctttttgacaagttttattgtttccttgctttcccttccccatggtagccaagcatttgaaggcagtaaacggctcttcgttgtgccacacattgtattcaataatatttaccatctactctgttgtttgttagaaaacttgatattatttttggatttcatctaatttcatattcaatttggctctttttgg

SEQ ID NO: 16660 - DNA, 604 bp, Gossypium hirsutum
  Clone ID: GOSHI-09MAY01-C58554_1
ttccacgcgtccgggggactccatccttgattcattctctttaagccctttgccttatcctgttctgttaatcctagcagtgacatcaatatttcttgggatatcatggtatgtgaactatgaatcagttctggaaaccactgaagagcaactgagttgggttcttttcgccacaccagttgtgttgatactcttggctcgttgggtgtcatctatggatacttccgatatgttatttggttcatcgccatgggaacgtcgccgccaggctcaccagcgtccttccgagggtagctcaccttggattgtggctgctttcattgtgctgctgctgattttggtacagtatcagtcagtttttcgcgagagctggctggtatgatactgtatatgtgtttagatacatgataaaaactagttgtgaatttcttattttggttggtttttaggtgtttgatatgtgatagactgaactgggtttgcctttatcagatgaagtataagcatgtatgatagttttgtattgtaaataacattgcaaacacaaaagaagttgcttgtttaacacagagtatctcatggttttaaataattctaccagaaa

SEQ ID NO: 16661 - DNA, 660 bp, Gossypium hirsutum
  Clone ID: GOSHI-09MAY01-C58444_1
tgattctgtcccttccttaaggcccaaggggcagtcttctctaaatgaaatgcctcatgtagatacctcaggaccggaggaaactaaatctgttttgggacatcaaaatcctgtaatatctctgccatcagttattataaaagaacttcctgccattgatgatgatgatcttccagaatttgattttggggctgagtgtggcatatctagaactccaagaagcaaggttttcgatacagcagtgtttgacaagaatgttgtggttgaaggattaaagaaagttgttgcgtcagtgccattgtcttcaccaactacacagtcactacctgctcagtgtaaaaggcgagcagaagatatcctttctcctcagtttgcattcaacagttgtctcaacttgcctccaggaaataaagcttctaaacttgctccagttctacaagcaaaacatactgtcaaaagcagctcagtcttcacacctgttatcactagtatcattgcaccacaaaagaatattttcgatgatgatgatgatgacatgcctgaatggtgtccaccgaatgtaaagcacacatttcttgaatcagcaatggtagcaagaacttctattcatcctacttatcaaactcaaagttagtatgttcatttcaggtcagccaagtc

SEQ ID NO: 16662 - DNA, 464 bp, Gossypium hirsutum
  Clone ID: GOSHI-09MAY01-C58734_1
ccagggggagttttcaggccgcaccaaagggtttaggtggttggaatggagataactatcagcgagttaatcagaatggaagaggtggccgtcaaggtggtgcaggtgccgcggcgaaaccatgatttggttcttcataattgactgagaaagtgaccagatgatttttttttttgacaacataaaacaaaggtaatggaaggcactagaagaattgaagttcttgattttcataaattcaactatttatgagtagactactgagttcccgcgccccccccacccggccctaaactctctttttcttgtgttatttgttcaagtaatgtgtttgaggattatatgatcaaattttgatttaatcgtcatgtcattgttatatagttttaatctgttactgactgattccttgaaaattggagctaatgacatttattggcaaatacaaaagtggagggcggccg

SEQ ID NO: 16663 - DNA, 954 bp, Gossypium hirsutum
  Clone ID: GOSHI-09MAY01-C58724_1
agttgttttagaagaggcctctaaaggtggaccacctgcttccctaccaatatcatgtattgaagctggagatgaccatagtttgccaaatctagctctcaggaggggtgaagagcactcttttattttaaaaccagtgtcttctatgtggaaggatctctcttccccccgcgcgtccgctaaatcgtccgctttgcaacctccttccatgacctctgatagaaaggggagtgtttcggttgttaaccactatgcggttatggtatcatgtcgttgcaactacacagaatcaagattgtttttcaagcagccaacaagttggagaccacgagtttcaagggatcttatgatctctgtagcatctgagatgtcaggacaatattctggacccaatgaaggaatcactccgcttccagttcaggttttaactcttcaggcttcaaatttgtctgatgaagatctaactatgacagttcttgctccaacatccttaacctcacctccatctgtggtgtccttgagttcttctccaacaacaccaatgagcccatttgttggtttctctgagcttgcagggaaagcgggtggtgagaggcgcactgcagacataaacttggctcaatgcccagtctatctgagaatcaaaaacaggatggtgatgctggggctaagtttacttcttccaatgcgcagttgactccaaccgctgatttcattccaacttcgggtttgggatgtactcatctctggctgcagagtcgagtaccactaggatgtgttcctgctcaatctacggctaccattaagcttgagctacttccgttgactgatggcataatcactcttgacacattacagatttatgttaaggagaaaggtcttacatatatccctgagcactcattgatgataaatgcgacttctagcatcttcacagggattatttaggatgga

SEQ ID NO: 16664 - DNA, 615 bp, Gossypium hirsutum
  Clone ID: GOSHI-09MAY01-C58694_1
gctgttgccttcaagctccttaccggcccatcttcttgttcaattgccggctgtccatttagctcagagactcagtgagtctaagcaatcataaaaaaaaccaaaaatggtggccgagttgaagtacgagatctcacagaacgcttacataaaattggttctacatgctctgaagcacaagaccacggcggtcaacggcatcttactcggccgagtcaacccacaaaatgatagcgttgttgagatcgctgactcagtccctctatttcactctaatcttgccttgttgccttcccttgagatcgccctcatcatgatagaggagcattatggatctaagggcttgggaattgtgggttatttccatgcaaatgagagatttgatgatgcagagctaggcattgttgcaaagaatataggtgaccatatttgccggtacttccctcaagctgccattttcttgttggataacaaaatgcttgaagctttgcccatggggaaagaccaaagccctgtgatgcagctttacataagggatgcatccaagaattggaaactggctggaccggatggaggcaccgatttgtaattaaggagccagcggctaatgctgta

SEQ ID NO: 16665 - DNA, 662 bp, Gossypium hirsutum
  Clone ID: GOSHI-09MAY01-C58124_1
aaagtaccgacacttcgtaaaactgaaataaaaattatagaaaagaagttaaaaacaaggggagaagatggcaaccaaagcagcagtttcagtggcagcttctgttacggctgcctcatcttcatcttcgaagtttgtgatcaatacacctcatcggttcttgtgtctcaaaaggttgtcttctttcagctccttttctgcttctgctttggccatcaaatgcacgagtattagcaattgcagtcccaacaagtctgctagatcaatggagggttttacaacaagaacaaaggcatccgctcaacctttggagaacgccgacgagcttatcgcctccgtcgagactttcatctttgattgtgatggagttatatggaagggtgataaattaatagatggagtccctgaaactcttgatatgcttcggtcaaagggaaagagactggtttttgtcacgaataactcaaccaaatccaggaaacaatatggtaaaaaatttgagacacttggcctgaatgttaatgaggaggaaatttttgcttcttcatttgctgctgctgcatatttgaagtccattaatttcccaaaagataaaaaagtttatgtcattggtgaggatggcatcttaaaagagcttgagcttgcgggattccaataccttg

SEQ ID NO: 16666 - DNA, 385 bp, Gossypium hirsutum
  Clone ID: LIB3149-046-Q1-K1-G11
gccggatgagattttccatagggctaaaggggttcagttgtgcaacacccaggcatctcagtgcagtccagccttttttgctgattctttcttcctcaaccagttctcttttgatgttatccaagacaggccttttatacctcctacagcctgggtcatatgcgagagacatatgatctcagtggtgccggtgacacgtgtcaccatgtctcgtcatcgtcaatttttcagcttctacatcgttggattaagccgggaggtgtacttgaaggactactatcctgctaggttttgctggggcttgtgtccttgcctggaatggttgaagacgtattcactaggcagatacgttgtccaccttaaaggagattgcttctcaattatt

SEQ ID NO: 16667 - DNA, 279 bp, Gossypium hirsutum
  unsure (1)..(279): unsure at all n locations
  Clone ID: LIB3582-030-P1-K1-B9
gggaggtgtacttgaaggactactatcctgctaggttttgctggggcttgtgtccttgcctggaatggttgaagaagaaagaattagccaaatacgctggactgcactgagaagactgcgtgttgcacatctgtaccgcttatatcatatggaaaatctcattcagcacccttactgttcaacttgttacacttactgttcaagagaaagagttaactacatgcgaatgatgaagtctcagtttgtgaaggggctccaagcacacaggtctacacnggc

SEQ ID NO: 16668 - DNA, 402 bp, Gossypium hirsutum
  Clone ID: GOSHI-09MAY01-C59854_1
atgccaccttgtaggctcagggctcaggtggagggttgtgggtttgggcgatccagagggaggacgaacgccctgaatcttgtggctagtaatatctcccctagagacctctcagacaggcagacaggcaagacagacaggcacccgatgctgctgtctcttgagctgggggcacagctaggaggcactagagtctagcccaggggctccaagtgacaagccgaggcactcccccagaggaacaggtaggcacctgccctcagttaccctctgctcatggccacctctctcctttctcccaggatgactggtgtcccttcctcagcaggtaagagaacagccccatggagtggggggaggcggagttaggctcctgttcactggcccaataaaagtgggagc

SEQ ID NO: 16669 - DNA, 484 bp, Gossypium hirsutum
  Clone ID: GOSHI-09MAY01-C59524_1
atggcgccttcgcccagctcggtcagctctcccgcctggacctcacctacaaccgcctggccacgctggctccggatccgctcttctctcgtgggcgtgaggcagaggcctctcccgcccccctggtgctgagcttcagcgggaaccccctgcactgcaactgtgagctgctgtggctgcggcggctggcgcggccggacgacctggagacctgcgcctccccgcccggcctggccggccgctacttctgggcagtgcctgagggcgagttctcctgcgagccgcccctcattgcccgccacacgcagcgcctctgggtgctggaaggccagcgggccacactgcggtgccgggccctgggtgaccccgcgcccaccatgcactgggttggtcctgatgaccggttggttggcaactcctcccgagcccgggctttccccaacgggaccttagagattggggtgactggcgctggggatgctgg

SEQ ID NO: 16670 - DNA, 488 bp, Gossypium hirsutum
  Clone ID: GOSHI-09MAY01-C59464_1
atggggacgctctcagctctcggcgcacggcccagcttccttcaaaatgtctactgttcatgaaatcctgtgcaagctcagcttggagggtgatcactctacacccccaagtgcatatgggtcagtcaaagcctacaccaactttgatgctgagcgcgatgctttgaacattgaaacagccatcaagaccaaaggtgtggatgaggtcaccattgtcaacattttgaccaaccgcagcaatgcacagagacaggatattgccttcgcctaccagagaaggaccaaaaaggaacttgcatcagcactgaagtcagccttatctggccacctggagacggtgattttgggcctattgaagacacctgctcagtatgacgcttctgagctaaaagcttccatgaaggggctgggaaccgacgaggactctctcattgagatcatctgctccagaaccaaccaggagctgcaggaaattaacagagtctaca

SEQ ID NO: 16671 - DNA, 476 bp, Gossypium hirsutum
  Clone ID: GOSHI-09MAY01-C59764_1
gaccacgcgtgcgctaaacaaaaggagtttttttaagaaaaatcttccctcaatcctcttactgccctctttccctgcgatcgagctacgtgcgacggtggcaccaaacacacctactccggcatggtttaagtcgaatcctcaagatccatctacctttggaccggtgaaacaaccaccgactagatctgcgcagatcgattggtgagagatctttctttttcctttgtatcggctatgccgacttctgctcaaaaaatgatctacgatccttgctcttttttgaatatccgcgtatacggatcgaggaaataaaaacatagatcaaggaagaaaacgatctaaaatccccttaaaaattgatttcgaattgattgttctctttcaatatgcgtgtgtatttctgggaataaagatcccatttacaatcgcttcatttcggtctttaatagctgaaaaatgaaataaaatttata

SEQ ID NO: 16672 - DNA, 362 bp, Gossypium hirsutum
  Clone ID: GOSHI-09MAY01-C59714_1
gcgagacctttgcctcttgtgtggtttgtcgtcgtctttttttccaggaaaattcgaatcctaaaccctagctctgggaaaacaaaatctgataactaaagtaaaaaaaaatggctttgttgagaggtcgtacagcttctttgaacctcttcaataggcttctccatcaatcgtttcgtgctccaaatcgcaatctctcttctgttgcggccgatgctcataatcaatcaacgattgagaatatgaaaaagagatttacttaatcttgacattaattcacacattgggagttgtatgccaattgcttcaatgcgaatcgggacctttatccacaacattgaggtgaacccgggtcaaggcgg

SEQ ID NO: 16673 - DNA, 417 bp, Gossypium hirsutum
  Clone ID: GOSHI-09MAY01-C59214_1
atccttaaagtgccggcttcggatgtcatggtagcgctcaagagtagcaacattaaaaaccgccgaatttgtctcaaatgggggaggctcggcagatcgttctatggattccgtatgcgggatgaatcccttttcgatgtctctctctagaagatcttgcatcgtcaaaagacgatttagacgggctgcgggtgcttcaacgaggagccattcatgaggttttacaagttcagatatccattgttagttccagaagcaatccctgggcctaatcaaagctcgcaagcaccagtttaaacaatggggagaatcagggtaaagaatcatagaggtctttgttttaagagccacattatagtttgtccctttcagattatagtttggccctttcactcaaaaaatggataaattaatcac

SEQ ID NO: 16674 - DNA, 586 bp, Gossypium hirsutum
  Clone ID: GOSHI-09MAY01-C54714_1
gcggacgcggggcggacgcggggttttacgcgggccgaaatttggaaaaactagcaaattccgcaaggcgggcgacttccattagggttcttcgattccgattttacagaacttttatcgaatttgtgaaatttcatcttcaaaaccctagtttctgctaatatcttattgattcaacatggctactgcatcagtggcgtttaaatcaagggaggatcaccgaaaacagctggaattagaggaagctcgaaaagcggggcttgctcccgctgacgttgacgaggatggaaaagaaattaaccctcatattcctcagtatatgtcatcagcaccttggtatcttaacgcctgaaagacctatgtttgaaacatcaacggaagtggaaatctgatcccaattataccaaatcttggtacgatagaggcgcgaagatatttcaagctgaaaaatatcgaaaaggagcctgcgagaactgtggagccatgacacatgatgcaaagtcatgcatggagaggcctcgtaaaaagggcgcaaaatggacgaacatgcacattgcacctgataaaagatagagactttcgaact

SEQ ID NO: 16675 - DNA, 1035 bp, Gossypium hirsutum
  Clone ID: GOSHI-09MAY01-C54184_1
cccacgcgtccgcccacgcgtccgcccacgcgtccggtatccactgtttcttgggagacctaagagagcactcttgacttctttttgtttataaattgttagatacaactattttattttaatatttttagtgtatttgatatgttattttttttaaatttatttttatataaaaaatttaagtctattttttcgacccaaattgagcctagaaaatggatctaattcttttacttaactttactcaacccaactcatgaacaactctagcgtacacataaatttatcaaagaattaatatgatcctaagaagaaaagacaattatacccctaattagaatcgctgctgtaaaataggaaccggatcaaccgcaggtcgaaagcaagacaaacatcagtatcccacgttcttgtttttttcacttctttctctttctcgaaaaccggtcacctgaaactcaaacgcctctctgaatcctcgccggaacctgtcaatctcttacatctccggcggctgtctcacggatctgttcacgatgagcaccggccaacttctcagcatcgagcctcaagagctccagttcccatttgaattgagaaagcagatctcgtgttccctaaacttgtccaacaagaccgacaattatgtggcttttaaggtcaaaacgacaaatccaaagaagtactgtgtaaggccaaatactggagttgtgctgcctaggtctacgtgcaacgttgttgttacaatgcaagctcaaaaggaagcacctactgatatgcaatgcaaagataagtttttacttcagagatgtgggttgctagtcctggagctaccacgaaagatataccggggaatgtttaataaggaatctgggcataagttgaaagtgcaagggggtggggatgttgcacctctcgggccttcccctgtcagaaagatctgaggaggctgtacctaagcttagtctcgaaatggaactttatgctgtgaactacattgcagccctatttcagctaacgagagaaacttgcttt

SEQ ID NO: 16676 - DNA, 506 bp, Gossypium hirsutum
  Clone ID: uC-gsflnu33B035c07b1
ttctctctctctctctcgctcgcagaccggtcatcattgtcatcatgctgctttcgcctgacaccagaagctcgggccctattaaaaacttgatagaaagcctccctcaattatatctctggtggtctcctgtcactgatccaatcacgatgagtaccggtgaacttctcagcatcgagccttatgagctccaatttccctttgaattgcgaaagcagatctcatgttctctaaacttatccaacaagaccgacaattatgtggctcttaaggtgaaaacgacaaatgcgaagaagtactgtgtaaggcctaacactggaggtgtattacctaggtcaacgtgcaacgttattggtataatgcaagctcaaaaggaagcacctcctgatatgcaatgcaaggataaatttctacttcagagtgtggatgctagacctggagctacagcaaaggatataacttcagagatgtttaacaaagaatccgaacatcatgttgaggagtgc

SEQ ID NO: 16677 - DNA, 574 bp, Gossypium hirsutum
  unsure (1)..(574): unsure at all n locations
  Clone ID: LIB3829-032-Q6-K6-D6
ctgtcctccccgttcttgcctttaggtctctctcaaacctagttcccattcgtctctttcctccgtcgccagaggactagnaaagcccaccgccactctcaagggccgacggaagcggcctatatttaatatctccaactaacatctccgcgatccactcatgatgagcaccggcgaacttctcagcatcgaccctcaagagctccaatttccctttgaactgagaaagcagatctcctgttctctaaacttgtccaacaagacccacagttatgtagcttttaaggtcaaaacgacaaatccaaagaagtactgtgtaaggcccaacactggagttgttctgcctgcctctacgggcaacgttattgcagttacaatgcaagcacaaaaggaagcacctcccgatatgcaatgcaaggataaatttttacttcagagtgtggttgctagtcccggaaccgcagcaaaggatataactcctgagatgtttaataaggaatctgggaaccgtgttgaggagtgcaagttgagggttgtttatcttgcacctcctcagcctccttcccctgttcaa

SEQ ID NO: 16678 - DNA, 495 bp, Gossypium hirsutum
  Clone ID: LIB3582-017-P1-K1-B8
agcctcccccaattatatctctggtggtctcctgtcactgatccaatcacgatgagtaccggtgaacttctcagcatcgagcctcaagagctccaatttccctttgaattgcgaaagcagatctcatgttctctaaacttatccaacaagaccgacaattatgtggcttttaaggtgaaaacgacaaatccaaagaagtactgtgtaaggcctaacactggagttgtattacctaggtctacgtgcaacgttattggtctctctccttgtccctctctggcacaaaatttggacttagctatcattgttttagttaatcatgtttcttttttaatgtttagttgaatttcatggcaatcatagctttatttgcaactttataattacctttttcagtagttactttttttttttttttttttatggagtcagttataatgcaagctcaaaaggaagcacctcctgatatgcaatgcaaggataaatttttacttc

SEQ ID NO: 16679 - DNA, 545 bp, Gossypium hirsutum
  Clone ID: GOSHI-09MAY01-C54164_1
gcctttatccccttctctgctactaattggcttggctgccattgaaatggcttgctccggtgagcgccaggaaaagcttttcttggctccctttgcgtcaatccttcttgtgacttgccatagtcaccattgccaccaccggctccatttccaaaaagaaatccagtaatactgtagcagctcactccatcatcaaatcttcatgtagctccacgttgtacccagagttatgctactcaacaatctcttcagcaccagatgctgagaccaaggtcaagaaccccaagcgatgtgattgaattgtcgctgaacttgaccgtgactgctgttcagagtaactatttgtccatcaaaaagctcattagtacccaaaggaagagcctcacggagcgcgaaaaggctgcccttaacgattgtcttgaactagtggatgagaacttggatgagctattcgtagctgaacatgatctcagtgactatccaaggcttacaagtcaatctccaacatgctgatgaccttaagagtcttcttagtgctgcaatga

SEQ ID NO: 16680 - DNA, 685 bp, Gossypium hirsutum
  Clone ID: GOSHI-09MAY01-C55144_1
cccacgcgtccggtcgcccaacaaaaagcccaataacatcgcctaacgttgatcaatgcccactcattcatatcatcaatttccaccaactttcctcaaccaatcgccgccagctgacaaattaatcaacacccaatcccatgttggccattcaatgaccatcatcaaacacccaacatcgaccacccttagattcctttcctccatcaacagccgtagatttcaatacccacggcggcgatttcttctcgtcaacggttccgttcgattcaaacccatggctacgaagttggaagagacgatgataaagggtgccggcgaagatagcaaaaagggaggtaaaggggaagaaccgggtaagggaatacaaccgccgccgccaccaccggagaagcctgagcctggagattgttgcggcagcggttgcgtgcggtgcgtttgggatgtgtattatgaggaacttgaggcttataataagctttacaaatcagattccaatggatccaaatcaaattcattttaatttcactttcttttttttaatttttaatttttgtttttaaatttgcttcttttttttttaagtttagtgaattattgttgttgttgtggttgtcgggttttgacaacataaaaattattgtttttccactttttcggaaaaaaaaaaaaaaaaaaaaaaaaa

SEQ ID NO: 16681 - DNA, 443 bp, Gossypium hirsutum
  Clone ID: GOSHI-09MAY01-C55344_1
aaaataatcgaaactgacgttagctacacgttcttaaagacaaccctggcagatgattattcggaagagagctcttacaatgttgtggtgtcagctgaaggaagcattggtacaaacgactacaaagtaatgtaacataatgttgcgaaatcccagatagcatctttagtggcagatgttttctccaacacagcagtggcagaaaacaaggttgtggaagtttttactagcccatcggctccatcgaagagtgtagacgagcttttcagtgctattcctgaggatggaagaaggaaggcgtatgcagaagccaccgcacgggctaaagctgaagaagaggcagtattagcagctgtgaaagctcgtgaggcggccgaagcagcgaagaagctagaagtggaagtgaagaagctttcagagcaagaagcgaacgcagctaacct

SEQ ID NO: 16682 - DNA, 767 bp, Gossypium hirsutum
  Clone ID: GOSHI-09MAY01-C55374_1
atcaatctcgcaaaaactccacccttcgtcgatcttcattcagagcttcttccacaccagaagtgagcgtattctgcagataagttgtctccttcttctgtaaaccctccggtagcaataagatgagccactttgtttgcctctcttgatacaaatcgaaaaacacaggactcaaaaccgaaacttagatattttgaatcttgtataaaagcttcgatttttgatctgtcatcgactttctcttgcagtttccgagtaattattcgggagtcgccttcaacttctacctttcgcagcctttgaagtatcccaacatggattgcctagaggcacgccatcgcttcagcagcaaaagtagaagcatcaaagttgatctttacccaaggatccgttggggcatcccatcgactaataagaacctgcatcgttgggcactccttgaatacatgctcactggattccggtccattatgacacctccggcaaatagcagatcccatcagtctcctgtagtgaagattacaaaaagtaggcaagaagttgcgaaaaagcctccaatttgtaattttaatcttaggaggtagatctaagctccaaattcttttgtaaaaatgcttgtaattagagtgtgtattagtatgtccctcttgtaaaatcaatttgtgtccactacgaaccgtgtattccacggtcggctctccacgccggattatgtgatctgtctgcttattcatggacagaggaatacataaaatccattccgcatc

SEQ ID NO: 16683 - DNA, 390 bp, Gossypium hirsutum
  unsure (1)..(390): unsure at all n locations
  Clone ID: LIB3165-045-Q1-K1-G3
aaaaagaagttctttttttcttaacctccattatttaatcttccaaaaaactctgctgatgccatccactaaaatcattcttggaagggcttcttccttcgcccatcttcattcaaagcttctttcacaccaaaaggggacatattctggaaattaagtggcttcttcttcttgaaacccttcttaaccattaaaataaccactttggttgcttcttttggtaccaaatggaaaacaccaggcttcaaatcggaaactcaattgtttgaatcttggataaaaaacttcatttccgatctgtcatcgacttgctcatgcattttcgaatcactgnntcggagtcgccttcacttctacctttcgcagccctagaagtagccaaaacgatcg

SEQ ID NO: 16684 - DNA, 802 bp, Gossypium hirsutum
  Clone ID: GOSHI-09MAY01-C55324_1
cacgcttggaaccaaacgccatctgatgatcagagtcgagtagaaaccaagctaacataacaaaaaggccatcgttctttcatttcatttcttttccctgttccctatttgtcacaaaacagataccatcccttccccaagaacctaaaatatggcggatgcagctccacccagtaaatcaagagacctcgataagctgctcctccgaccgggaaacctcgttggcccaaccttcgaccctggcgttcaattacgggatgatttacaagaatatgcgagagttttggtggtgggagctggaggattggggtgtgagctgcttaaggatttggctctctcggggtttaaaaatcttgaggtcatcgacatggatcggattgaagtcaccaatctcaaccgtcaattcctcttcaggctggaagatgttggtaagccgaaggctgaggttgcagcaaagcgtgttatggaaagagttagtggcgtgaacattgtgccccatttttgccgaattgaggataaagacattgaattttataacgacttcaatatcattgccctcggtcttgattccattgaggctcggagctatattaatgctgtggcttgtatttccttgagtatgattctgatgacaatccacgtgaagaaacaatgaagcctatggtatatggtgggactgaaggtttcaagggtcacgctaggtgattgtgccaggggttacgccatgctttgagtgtacaatctggctatttccgcctcaagtgaagtttcctctatgtaccttacagaaacccctagaatt

SEQ ID NO: 16685 - DNA, 675 bp, Gossypium hirsutum
  Clone ID: GOSHI-09MAY01-C55214_1
ctacccaaagctctttctccatttctttcaagggcagtgttcacttccttctgctcacttaacagctaagccaccatgtttaaggccactagaccactctccatgcaccaaaactaagccaagtgttcgaacccatgctaagaaaaagaacccatggctggatcctttcgaagatgatgtggaagaccccttctcggaatatggttcattgttcactgatggcaagcaagaagaagatcctaggccccctgaagaccctgataatccttacggtttcttgaaattcccaaaggggttcaccgtggagttggcttcactgcctttgaaaatcagaggtgatgtcaggagatgttgctgtgtcatttctggtggtgtctatgaaaacttgttgtttttccctgtgattcaattgatcaaagacagataccctggtgttcaagtggatatattggcatcagaaagaggaaagcagacatttgaactgaacaagaatgtgagatgggctaatgcttatgaccctgacgatgactggcctgatcctgctgaatacacagacatgattggacttcttaagaataggtactatgacatggttttgtcgacaaaactggcgggtcttggccatgctgccttcttgtttatgaccaccgctcgagatagagtgagctacattta

SEQ ID NO: 16686 - DNA, 751 bp, Gossypium hirsutum
  Clone ID: GOSHI-09MAY01-C56994_1
aataataaaatgggaatgcattatcatggaaaggtccgtattaacacaaaagactttcacagctctaatttgcattctcaaagggaggggggggggatacacaaatggtttcaaaaagcatcaaaattcaagtataatgtcagaaatggcgtgaccccatatataattttcaatcaactatgctatagagaacctaaacatcctccaatccactgaaactcaaccatcatgactcagcagtaacaaaacgcaagtctcacatggtggcttctacttcagggtcagtctcagccgacacagtgggtgtgttgttgctgcctcgcaatcgtgaggatacattatcgatggccgcattgagttggctgattttttcattcagggtctccctggttttctctaaacctccatcgtagtataatggtcgctttgccttacggaatccgtattcatcttcatttagaagggatcttctaatctgaggtgcaaaaacgtatcccaaagttccgaatatagcacctcctaaaagaaaaccagtaacaaaatcacttcctccacccctgctgccattgcggctattcagcagaaactgaaaactggtttttcgatgacaatggtttccttcgaactaccaaacttggttttttcccaaaggtgctggacttagtgaaccaaacctcacgtgccttgagatgagaaccacctgagatggaaaccggagccaagccagaagccatgagagaagcagtagatg

SEQ ID NO: 16687 - DNA, 486 bp, Gossypium hirsutum
  Clone ID: GOSHI-09MAY01-C56554_1
gatggaagtggaatgaaagaaccagtacaaacgcaggcgatggatggtagagcaggactcggaagtcagacgaagaagttggaccctagccttgaggtgcaagccggggatagttacaaaactgtgattcataagaaagcacttgctaggtttcgtgaaatgtcttagcagcccctaggtagaaaagatgtggaaatcattattgtttctgtttatatatatgtatcatttagagaatgttggcgtggtttgaaacttccagtccacaccattttggaaagttaatatttatggccattttaatttcggtgtgaatcgagttttttggagcctgcctaggatatcttttacttcattattatttgagtggctaaatggcttgcaggtagtgtttactgattcaactagacgggctattgatgcataaatatttgatacgtatggacttgtgattcaatatatagccaatgatattgtaattttcac

SEQ ID NO: 16688 - DNA, 354 bp, Gossypium hirsutum
  Clone ID: GOSHI-09MAY01-C56494_1
gcggagggtcaaaggtattcttggaaatgaatcgccagttgtgattcttttattctggaatcgggagcgtcctgtcatgatttggggaatggagtgtcactgtaattctttttggatttatcttaagcattagctaattgggaaaatgaagcttagcctggagcttatttcctttttattatatacaataatgcaaaggagtgggtaacccgaaagatagtgtaattagtatcattattatgaccagtgatatgtcagagctaggtcttgattcttgaacttgagccttcatttgagttaatctaaaattgaactggtgaatctgagttgatttaaaaaaaacaaatctaatat

SEQ ID NO: 16689 - DNA, 272 bp, Gossypium hirsutum
  Clone ID: GOSHI-09MAY01-C56484_1
gcgaaaaaaagaatcttttttattttcaagctgtcattatctgaaggtaaaatatatttcctgaagaaaaaatatttgtaatttatatatttgcattcgttgataatgataccagagaatttacagtgaaagaactctgcttttttgtctacttctctctttgttgaagttctactttacatgaaacatgcctccccacattctctcagtttgtctttaaatcttcagacttcaggaaaaaagtttcgttgatgggtgtcttcagtttattt

SEQ ID NO: 16690 - DNA, 598 bp, Gossypium hirsutum
  Clone ID: GOSHI-09MAY01-C56424_1
gcgaggctctcctaagccattgcaggggtgttttctaaaagagccatcgcagactgagatagagcattttgttttttggcaaaattaaaaaagaaaaaaatggcagtttccaaggtttctttcgtggcagtatttgcggctcttgtttttactttggttgccttgccggctgctgttcaggcacagtcctctgctcccgcccctgccccaacgagcgacgggacgtctattgaccaagggattgcatacgtgctgatgctggtggcactggtgctcacatacctcattcacgccgctgatctctgcttcaccttttgagcctgcaaatttcaaagattgaaatggggttgtgacattttatttgttatttatagggagagaaggatggatgatgtgtaaccaattcatggctcgtcgtctgatacatacatacgagagtacaaaagggttataattagagaatgagctggacttcagacgaatcattgttgtggattttgagaatgaaaatgtttatgttttgtggtctttctccctttttttagtagggaatcttcattccactcaaaataaaaatataaataacaatataaattat

SEQ ID NO: 16691 - DNA, 393 bp, Gossypium hirsutum
  Clone ID: GOSHI-09MAY01-C56384_1
caagtcttcaaatatactgttggatgaacattggtatgctaagctttcagactttgggtgggccggattagggccttcagatggattaagccacgtctcaactgcggttgtaggaaccatcggatatgcagcacctgaatacattcaaacaggacgccttacaatcaaaagtgatgtttggagctatggagttttcctctatgaactcataaccggtaggcgtccgttggatcggaaccgtcccaaaggtgaggaaaagctcttggaatgggtgcgaccacacatctccaatataaaaaaggtcaggttgatcattgaccctaggcttgatggcaagtattcgctcaagtcggctcataaacttgcagcagtggccaataaatgcttgtcacg

SEQ ID NO: 16692 - DNA, 648 bp, Gossypium hirsutum
  Clone ID: GOSHI-09MAY01-C56314_2
ttctttaagaatcagattattcggtccttgccccggatattatccagattattgagtccacaatcttggtattccgactttttttaaaaatggccaataaaaaacatggtagttttcgtaacttgttcggaaaccagaacccaatggctacccctcttcaacaagttcaatctttgttagagaagaaaggcgcaaagctgaaggagctgcgtaagaaacggaaaggatggaaaaagaatacgtggccgatatcgcacgaggatgttccgttgttgtttgggcttattgaccttaaaataatatcaagggttcttcggatgggaaggataagtaaagagcagttgttttggtgtgaagagaagatgaaaaagcttcatttttgtgatgggaaattggagagagatccttcacccatacttttccctgttttgattaaaggttaggtgttgtgtaaagctatgttactttttcccttgttttgatgcacagtttgctactgattttcccttggaagcaactcattcgacttttatgttattcggatttggaagtaaatatgacctccacttacgttatttgggcgcgtctaaataactctcctctcacttattttagataatatatgcgttacgtatgaactgtcatatc

SEQ ID NO: 16693 - DNA, 604 bp, Gossypium hirsutum
  Clone ID: LIB3829-003-Q6-K6-G10
ggtggtgagaagtgctccagtgaatggagggatgtcgaagccgaaggtcgacaatggtggggtggattcgatgctgtttacgagaagtattgcgagcgtatgttgttctacgataagatgattgcacaacagctcaaggaagctggctcctcaaatccttcaactccatccccgaaatctgaaaataagaaacttcggtcccccttgagttgccttttcttgaagaagatcgaagaacctgatgaagaagccgagcaactacaacagtctattaataacccgtatcaggatctcgaaacagcatatgttgctcaattttgcttaacatgggaggcgcttcattgccaatactcgcaactcagtcagatagttttgtgccaacctgagaatcccatctgttacaaccacagtgctcagcaacttcaacaatttcaggtcttattacaaaggtttatcgaaaatgaaccttttcaggatggtccgaggtcagaaatctatgcccgagctcgaaatattttacctaagcttcttcaaattccaaacattcaaggttcagatcggaaggaaaaggtggaagaagaatcggattattcggtccttgccc

SEQ ID NO: 16694 - DNA, 713 bp, Gossypium hirsutum
  unsure (1)..(713): unsure at all n locations
  Clone ID: LIB3583-034-P1-K1-F11
cgaaaatgaaccttttcaggatggtcccaggtcagaaatctatgcccgagctcgaaatattgtacctaagcttcttcaaattccaaacattcaaggtaaatcttcaatgatcggtccttgaatgaagaatcttttgtggcctagtatctgtttttcagttttacgaaacccggaagtacttagatggattgtttccatttgtttttcaggttcagatcggaaggaaaaggtggaagaagaatcagattattcggtccttgccccggatatcatccagattattgagtccacaatcttggtattccgactttttttaaaaatggacaataaaaaacatggtagttttcgtaacttgttcggaaaccagaacccaatggctacccctcttcaagttcaatcattgttagagaaggtacatttctatctcaactttttatgttacctatgttactcgatatggaagtatcaaatatgaatattggtaccgtctcggtatgtaccaatgtgcgtttggacatagatatgggatatgaccctccaaagacgtccaaaaggcggaagtactaataacaaattgagcatactcgtctcagatactggtcacacttgaatttgagcaatgtagcagtaacattcatctactatattactatngcattcttgtttgctacttgcatcacacttggcactagttggacatgtttgtgttcttt

SEQ ID NO: 16695 - DNA, 600 bp, Gossypium hirsutum
  Clone ID: GOSHI-09MAY01-C57874_1
cgcggcaagccaaacagtgcgtctcttcttggggttctgcaatccacacaaataacaccagtttaggggcgtggttactagtaacacagtgggtgtggacgcttacttatggagggcagtgtctaccgatggtatacggctatgcttttgccaccaccaaatggcttaggcatgtacgcggctgcagccaccgcatacggggcatatccgatctacggcagtcatcagcagcaggtaagctaaaataataacagcaggagagatgttatagctctacttagacatttgaactagaaaaaaaaaaaagaggggtaaagggggactggcttgttagttgttactccataactctctctgggttgtgtagaattcttacataaatccctccaaatatggagcggaactgaattttgacccctttttttaagtagttttgtttttttagggcccgcccttcattatttaattttatgtgttcagttaaaaagggaaacttggtgattgggatatatgaattggctgacgtgtgtggtagtgtgcttgatgaataatttaagttatattcataaataagaatttgttcctttcatttgaaaaacc

SEQ ID NO: 16696 - DNA, 429 bp, Gossypium hirsutum
  Clone ID: GOSHI-09MAY01-C57834_1
ggcatactccgcagtgaacaggggatgggtccgacatcagctccaacgacggccacagcgccgtcggcgggcacggctccggcggcgggaaaggcgccatcaagtgggtcggggaagtggtgcgtggctaaatcaaacgccagcgatgcggcgttgcaagcgaacatagattacgtgtgcagcagcggagtggattgtaagccgatccaatcggctggggcctgctttaaccccaataatgtgagggcacatgcatcgtacgcaatgaatgcgtactatcaagccaatgggcggcatgatttcaactgcgatttcaatcgtacgggtgtcatcacctctaccgagccaagtcatgcagcttggaactattcagggaatcaagggccaggggtaaaattggaaagttcagtggccgcaaatacaatgaga

SEQ ID NO: 16697 - DNA, 870 bp, Gossypium hirsutum
  Clone ID: GOSHI-09MAY01-C57554_1
cccacgcgtccgctcgtttcgctcatattgaaatcccggttcactcgttcggtttcgggcaaacaggtgggtttagtgcgatgacccggctgaggacgcgtttgctaaatgtattagtgggatatttagtgtcgtgatacaagatttgagaatccagctcagctttgcccctgactcagctccggctgaaatcacagccgtttactcatgtaacgggaagccgaccgttttaacttccggctcagtccggctgggtgatttctacgccgaggaagaaagggatttactcgtggaactcaaagttccggcgtcggcactcaggtccaatcacgtgatgtgtgttcgttgtctttacaaagatcccgtttcgcaagaagtcgtatacggccgagatcaatcccttctcgttcctcagccgaacgccgttcgatcaccggctcctgagatcgaacagtttagattctttttcataacgactcgagccatagccgagtcgaggaggttaattgagtgtggtaacgacttgacaagtgcacaccatctgttggcttcggctagagcattgttaatgcagtcgaattcgttgacggtggcggagtacgtgcgagggttagaagccgagctgacggaattgcagcggatgaaacaacagatggtggaaatccaacggcggcgagtgaacgagagggaacgagaaagggaggcgattatggtggtgatggatgagaatggggagccactaacaccgtcatcggcttggagaacggctgagaagttggctaaagtggccatggtgaagaataaagtcagtgatctacacggcttcgaaaatgctagattttagtttttcctaatattgttatttttaat

SEQ ID NO: 16698 - DNA, 864 bp, Gossypium hirsutum
  Clone ID: GOSHI-09MAY01-C57474_2
atatgtaccgcatggcgttgatggctttgatcgctggcgaccttcctggtgtgaatagagaaagctattgttggagatataacaccatcatgtggtgttcctaaagaagaaaaaagcagacgtgagcaagcagcgttaactgaaatgtgcaaaattctgggtggaggaatgagaggtgcttcctagccaattttatttttggaaatcttgggttgctaaattatttgtttattgcatctgcttgtcttattttggtattttgttagttgcagctgaggagatccaagaactgtgggtagaatatgaaaacaatgcttctctggaggctaaccttgtgaaagattttgacaaggttgaattgattctgcaagcactggaatatgaacttgaacatggaaaggtgctgaatgaatttttcctttcaacagaaggaaaatttcagacagagattggaaagagttgggccagagagatcaattcaaggaggaattcaatattggtagaaaagaggaagggacctaaataacaaaatgattatcatcaaatttcattataatctagtatcagtagctacaaattttcttaatccggttacgcactttattaaccaaggctggtaacctggagttggaagccaaatgtggttgataatgtgtgtgttgtttaacttcatcagaaaatttttgatttgttgtaagaatgcaaagtgattttcattagcatgtctggaaatagaggatgctaatagtctggttacctgtaatgtaagctgcaaaagtcattttgaaaactatcctagtttgagatattctgtgaaatggacgaaaaggtcaattttaattataaataataatccatttggat

SEQ ID NO: 16699 - DNA, 1066 bp, Gossypium hirsutum
  Clone ID: GOSHI-09MAY01-C57474_1
cccacgcgtccggagaactcagaagggagaaagcctgatttttcgcatttaagaccaaacgttaatcgctcgcccaaccaaccccgcccccgtttctcgggccccctccatcatgcaaagccattaaaccaaacctttaaaatctccggcgtacgccctccccttcctccgccttccattatggctttctctgcttctccccactgcgcacctcccttacatcgtttcgcccttcgccgctctccgccgccacagccgccgctcgctttcatgcgctgccctttcttctcctcctcctcctttcgacccgtttacttctcccccgctcccaccctgaggatcatcgtctctgccaaatccaacaaaccttcctccgggagatcagccgattcgacgtcggcctccgccattgattttctcacattgtgtcacagtctcaagaccacaaaaaggaagggttggatcaatcacgggataaagggtcctgaatcaattgctgaccatatgtaccgcatggcgttgatggctttgatcgctggcgaccttcctggtgtgaatagagaaaggtgtattaagattgcaattgtccatgatattgcagaagctattgttggagatataacaccatcatgtggtgttcctaaagaagaaaaaagcagacgtgagcaagcagcgttaactgaaatgtgcaaaattctgggtggaggaatgagaggtgcttcctagccaattttatttttggaaatcttgggttgctaaattatttgtttattgcatctgcttgtcttattttggtattttgttagttgcagctgaggagatccaagaactgtgggtagaatatgaaaacaatgcttctctggaggctaaccttgtgaaagattttgacaaggtatgctacatgatggcattcatttgtgtatgcatgctcacacacacacacacaccagcagagatatttttcacctgaaagatgattttccattaaatatcaaatgtcatagattgttagttgttataggtgttaaatggatattccactacaatgaatctctctcttagaact

SEQ ID NO: 16700 - DNA, 414 bp, Gossypium hirsutum
  Clone ID: GOSHI-09MAY01-C57434_1
ctcactttcgaaagttatggatggcctcttcaaacttgctaagacccttttcgggattgatatcgagccagctgatggtctagctcctgtttggaacaaagatgttaggttctaccgcgtcaaagattcttcaggtagtccaattgcctatttctattttgatccatactctcgtccatcagagaaaagggaaggtgcatggatggatgaggttgcttcccgaagtcgtgtactgtcaaggactggtaccacgccctggttgcctatttgcccatatggtgtgcattcaaactccaccatttggggacaagccaagcctcatgacattccgtgaagttgagactgtcttccatgaatttggacatgcacttcagcatatgctgaccaagcaagatgagggtctggttgcttgca

SEQ ID NO: 16701 - DNA, 613 bp, Gossypium hirsutum
  Clone ID: GOSHI-09MAY01-C57694_1
gccatatccatatttattggaatagcaaatgcattaatgacggtgactgctgtgagcatgcagaatgtgctaatcggtcaagatcttaatggttgcgcatttgtctgtggatcattgagcttcttggataaaatctcatgtgggctcaccctatttgttcttcaatcctttcatagtagctcaccaatagttgctggaaactattcaaccagtaacttttcaatcacgagatacggcttaggacttgtgccggcattttgttcacttgtcggcgtggcggttacttggaccatggaactacgtgtcccgttgtacaaaccactgaccgaaaccctactggaatgacataaaatgttaataataccagtaagtcatttacagcttagaaaagaaagcatagcatcatatggttgattgagggaggaattgaagggatagcaagtgaaggacatttgctcaattgcagtacagtccaagacagtcagcaatggagaatatcaacaatttgttaacagttatagtgacaataactactattattgaaacactaacttgcaagattcacacagttattgtattgattttaattatttatttcagctttttttttttt

SEQ ID NO: 16702 - DNA, 665 bp, Gossypium hirsutum
  Clone ID: GOSHI-09MAY01-C50914_1
cggccgcgtgggcgccgccggtcgaggtgcggggagagtacgatctgagttcgttgcattcggcgttgtcaggtggggcaccgcttagtaaagaagtgattgagggttttctggagaagtatccgaatgtaaagattcttcaagggtacggcttgactgagtcaactgggattggtgcgtggacggactcattggaagagagccgaaagtatggtacggcggggatgttgtcgcctagcatggaggctaaggttgtggacccggatagtggtaaggctttgaacgtgaaccagacgggtgagcttcggcttaggggcccctccgttatgaaaggttatttcagtaatccagaagcaacgacgtcgacacttgactcggacggatggctgaggactggcgacttatgctatattgatgaggatggcttcatatttatagttgacaggttgaaggagctgattaagtacaagggatatcacgttcctcctgcagagcttgaggcattgctcctttcccacccggatatcttagatgctgcggttattccgtttcctgatagggaggttgggcagtttccgatggcatacgtggtaagaaaacccgggagcaatttatcggagacaggagtgatggatttcgtgggtagacaggttgccccatataaa

SEQ ID NO: 16703 - DNA, 447 bp, Gossypium hirsutum
  Clone ID: GOSHI-09MAY01-C50884_1
tcggtaattgggaggtctccttgttgttagaataggtccacatacaaaggatcatgggctaggaaagaatattagcgtttgataacttacatccaagctcatggagagggttgttggagatcccttccgaaagctgctggccttctccgttgtggtaagagttgccggcttcgatggattaactatctccgccctgatgttaagcgaggtaattttaccgacgaagaagatgaactcatcatcaagttacatagccttcttggtaacaagtggtcaatcatagcagggagactacctgggagaacagattatgagatcaagaatcattggaatacccacataaagaggaagctagtgagcagaggtattgaccctttgacacatcgaccggtcaatgaacaagctgcaattcacaccatatatacagtctcattaacagcagttcta

SEQ ID NO: 16704 - DNA, 857 bp, Gossypium hirsutum
  Clone ID: GOSHI-09MAY01-C50824_1
cccacgcgtccgcagggagttaactcgattgcgagttgttgaccttagttataaccgcattgctcgaattggacatggtaggtaactagttcgtgaacctgtcacctagaaacattctccttagacaacttgcatgtagttctaaaagtgcattgtgtttcattaatggggcctgggttgtcaaactgcatactgatcaaagaactgtacctggctgggaacaagataagtgatgttgaagggctacataggttcttgaagttgacagtattggacgtgagcttcaacaagataacgacaacaagggcattgggtcagcttgtcgccaactacaactcattgcaagcattgaatctgttgggaaatccagttcagagcaacgttagtgacgaccagctgcgaaaggcagtttgtagcttgctccctaagcttacgtacctgaacaagcaacccattaaaccacaaagggcaagggaagtgctcactgatagtgttgccaaagctgctctagggagtggcagttggagctccagaagaaaagcatcaaaaagaacaagccaaggtgcttcaacatccgccagtgtgcataggggcagtgtgggattgaggcataagaacaagaacaagtcgaagagccgaagtcgctatcactcatctgcaaaatcacctgcactggcttcttcatcccgttaagatattttaccagtaacttgcctggacaattcatgggcacttttttctttatttccttgtttttgctttgtgagtgaacctaaaagactgcttgcttcgcagacatatcaaccccgctctgttttcttttgtatgtttgggaatttgatttgtggttgtgtggg

SEQ ID NO: 16705 - DNA, 517 bp, Gossypium hirsutum
  Clone ID: GOSHI-09MAY01-C50544_1
atataattttattttataaaaaccccccccccgtatatttttataaagaaaaaatatatattttaatcttatatatatttttttttattttttttttttttatttttttttttttttttttttttttttttttttttttttttttttttttttttttttttttttttttttttttttttttttttttttttttttttttcttttttttattttttttttttttggtatagaattatgaatttcatttcatacaattcctaaagccattcatttgacttcaataatctctagcaatgcttttgagcattttgattttcttacctaaattaaccttatttttgttattacttgcggtaagaaaattcataatcttagtgtagagtactagtgatggtaaggtgctttcaacgggcatagctagtatggccatcatctttgctacttccaccaccactttcatatcttcattcatgtgcacctcttgcactggagcggacgcgtgggcggacgcgtggaa

SEQ ID NO: 16706 - DNA, 354 bp, Gossypium hirsutum
  Clone ID: LIB3146-018-Q1-K1-B1
cgcgtccggggacgcgtgggctgacccatgcgtccgggtgcggattgtggaggcggagcgggacgatatagaaatataagtgtctgaaggcgatacaatctgcatctgatttcataccattcctaaagccgttcatttgacttcaataatctctaccaatgctttcaagcaatgtgaatgctttaccaaaaataaccctatttttgatattaacttggcggagaaaattcataatcttgttgtaaaaggccttgtgatggtaaggtgctttcaacgggcatagctggaatggccaagctctttgctgcttccaccaccactttcatatcttgattcatgtgcaccttttgcact

SEQ ID NO: 16707 - DNA, 291 bp, Gossypium hirsutum
  Clone ID: uC-gsflnu33B074h04b1
cgtccgcccacgcgtccgaaatgaaattcattccacttccttactatcactaatactctacactaagattatgaattttcttaccgcaagtaataacaaaaataaggttaatttaggtaagaaaatcaaaatgctcaaaagcattgctagagactatggaagtggaatgaatggctttagaaattgtatgaaatgaaattcatattctaaaaaaaaaaaaaaccgaacacaacaaaaaaacaaaaaaattaacaaaaaaaaagacaaaaggaaaaataaaaataaggagaa

SEQ ID NO: 16708 - DNA, 258 bp, Gossypium hirsutum
  Clone ID: uC-gsronu33B014a09b1
gtagctatgccccatgagggcacctttctatcactaatactctacactacgattatgaattttcttaccgcaagtaataacacatataaggctaatttaggtaagaaaatcaaaatgctcaaaagcattgctagagactatggaagtggaatgactggctctagaaatcgtatgaaaggaaattcatattctatagacagaaccagcaacaccatcgccctcgaacccaaacaaggaaaccgacaaccaccgaccaag

SEQ ID NO: 16709 - DNA, 536 bp, Gossypium hirsutum
  Clone ID: LIB3829-028-Q6-N6-G1
aagcttaaaaatcttagtagtagattagaaaaagaaaaaggagggctaagcttgttagcttgttagcacacacataatcatcacctagaaaataaatagtccaaaatgaaaattttaaaataatttgtgtatagcatcatgagcaatcagcctttgaaccattttttttcttagcagagtgactgctcatgatgttataacgtttccatcatgaagctcttccatttgatcatctctacctaagtacttactttttttgttgcttttttttttccttttaagtgtgctttgctatagcctttcccaaaaaccctaataaagacggaggagcccaataatcggctccattgtcgcttccgacttgaagtgtacatgatatcggaaccaagcatagccctctactctttaggtttttctttggttcttcattagaatcctgaagatcagcaggactacctttcctcttcttcatgcatttttcattcaacagctgaccacgggtcttcaggaaatatacaatttctctccccttgaac

SEQ ID NO: 16710 - DNA, 358 bp, Gossypium hirsutum
  unsure (1)..(358): unsure at all n locations
  Clone ID: LIB3146-016-Q1-K1-G1
aagattccttaaaagtcaaatggaggctctcagcttaccgtacttgaccagggatggatcatcaggaaatatgaggcagcagcaacagtctctgttgaatgaaaaatgcatgaagaagaggaaaggtagtcctgctgatcttcaggattctaatgaagaaccaaagaaaaacctaaagagtagagggctatgcttggttccgatatcatgtacacttcaagtcngaagcgacaatggagccgattattgggctcctccgtctttattagggtttntgggaaaggctatagcaaagcacacttaaaagggaaaaaaaaagcaacaaaaaaaagtagtcctaggtagagatgatcaaatg

SEQ ID NO: 16711 - DNA, 794 bp, Gossypium hirsutum
  Clone ID: GOSHI-09MAY01-C50764_1
attggaaaacccggcccgacgcacgcgtacgctggaatggcacctacaggtgatacaagatttcaatttcactccgatcaaattggcatgggggtatttcatgaaactcaattagcaatatatcatgcctccaagatggagcgcgttcgacagtggattctacaagatgtattgcatgcacccatatctgacgcaacatactcctgtaatagtcaatctgtttatgccaccttttgcgatggtaacattggggtatttgatgctgatagcctgagacttacatgccgtatcgctccatcagtgtacttgtcctcggtaatcttaaaaggaagtcaaactgtgtacccgcttgttgtggctgcacacccgatagaagcaaaccaatttgcgatcgggttgagcgatggaactgtgaaagtactggagccctccgaatctgaagggaaatggggagtgagtccaccagcagataacggcgtccagctcaacggtaggacgacatcatcatctaccacaagcaatcacacaccagatcaattacaaagatagatttatgaaatgtagattattaggttcttactttttagtgttccatatgtcccaaaaaggtaaaaccctgaatgattaagaatgccccaattcttggataatcctcctacttgattgatagttgttcactagttttatttacttgtattaacctttggagtgctgttctttttcaaaacaatggctgtatcgacttctattgaatttatttcctaataaaaccctgttgtaagtttgattttttt

SEQ ID NO: 16712 - DNA, 398 bp, Gossypium hirsutum
  Clone ID: LIB3146-019-Q1-K1-F2
cccacgcgtcccccacgcgtccgcccacgcgtccgcccacgcgtccgctaaattctctccttatttggtttcttggaaaattttctgatcaagaatggcgcaccttagcatcatcagcgcgttcttgtacgtttgctttgcagtggcgcttctctcatcgagtgttgtgacggcgctagatactgaactggcaccgtcaccttctccgtcgccattgattgaaactggagctgggtctttcctccgagcctcatgcttcgtcctcttctcttcattgatcttctcagttctttcttttcttccggattaaatattcttgacattttattgtcaaaattgaaaacctttggggtttgattgaaaaagtggtgtgctgatgtaattttaatttctttttc

SEQ ID NO: 16713 - DNA, 354 bp, Gossypium hirsutum
  Clone ID: LIB3146-019-Q1-K1-E8
cgacccacgccgtacgcccacgcgttcctccaagcgttcagtccactcgtcctcccacgcgttcgctatattctctgcgtagttggtttcttggaaaatcttctgatcaagaatggcgcaccttatcatcatcaacgcgttcttgtacgttagctttgcattggcgcttctctcatcgagtgttgtgactgcgctagatactgaactggcaccgtcaccttcttcgtctccatttattgaaactggagctgggttttttctgtgagccatatgctatagtcctttttttttattgatccttttatgatctttcttttcttcgggattaaaaattcctgacatttttattggcaa

SEQ ID NO: 16714 - DNA, 616 bp, Gossypium hirsutum
  Clone ID: GOSHI-09MAY01-C50614_1
catgacttaaacatatctcttgatgatatcctcggatgaaacttaaagttttctgcaatgagaacttgacaccttcatacacacatttaattctacggtaccatagtgccataaaaagatagatataatctgtctgttatgttcgtcacctgcaagaaatgtattaacaaaatgacatttgtaatttgaggtacacccaaccggagccatcttgatttgaaggccactacatagttgtcgtaagatacaacacgaccacaacagatgatctgagtcctccggatctttcttgcaaagaggacagataacatccgcaactaatttcctcttagcaagagtacaaaaatgcggcaccaagtttttaaacaacctccacacatggatttttactttaggaggaatttgtataatccatagcgccttatagaaacccatgtaattttctgcattaggaaggttgtaactcttattttgatcaagctctgtaagtagtacccgataaccgctctttacagagaactccccagtagcgccatgcttccagaacaccatatcctccaaaccatggctattaatcgggatggcaaagatacactttaattgatcttcatcaaca

SEQ ID NO: 16715 - DNA, 275 bp, Gossypium hirsutum
  Clone ID: LIB3146-019-Q1-K1-A1
agtaattttctgcattaagaagagttgtaactcttattttaatcaagctctgtaagtagaactcgataaccgctcttaacagagaactccccaatagcgccatgcttccagaaaaaaaaaaaaaaaaaaaaaaaaaaaaaaaaaaaaaaaaaaaaaaaaaaaaaaaaaaaaaaaaaaaaaaaaaaaaaaacaaaaattattaaaaaaaaagggggcggtaactttgaaaagaccgataattacgcgccgtggaaaagaaactttaatacatagtt

SEQ ID NO: 16716 - DNA, 1249 bp, Gossypium hirsutum
  Clone ID: GOSHI-09MAY01-C50194_1
cgaagcgtgtgcaaagcatgttaggagcagcaagaggtataacatcttcttcatcttccagaatcttctctacgaatattctttccaagcctccttctttcttcaccatttcacgcgctcttgctccctccattccccgcttttctgtacgatcaatggctgactctgctttcaagaaagttcagattcagagagatgacactgcatttgatgcatatgtggttggcaaagaagatgcacccggaattgttgttcttcaggagtggtggggtgtggattttgagataaaaaaccatgccttgaagatctctcaactgggcccaggattcaaagctcttattccagatttgtatcgaggaaaggttggtcttgatgttgcagaggcacaacacctaatggatggtcttgactggcaaggtgctgtaaaggatatctgtgcttcggttgattggcttaaagctaatggttcaaaaaaggttggagtgaccggattttgcatggggggtgctctctctattgcaagttctgtcttagttcctcaagttgatgctgttgctgccttttatggggttccttcacctgaactggcagaccctgcccaggccaaagcacctgttcaagctcattttggagaacttgataactttgttgggttttcagatgtgacggctgcgaaggctttggaggaaaaactgaaagaatcaaaaactccatatgaggtgcatatttatccaggcaatgcacatgccttcatgaacaggtcccccgatggtataaagcggaggaagggcatgggaatggctgatgaggatgaagctgcagtccgcctcgcatggtcctcgtttcgagtcatggatggctcgtttcctgtcataatcatgatatttcagtactttatcatgctagcataaacataaaactttctcgttggtttttggaatgtgtggagtatgctgccatattattttgagtcttgtttaaaagaaaattttgaatatctggattcctttaataatctgcatttgttgtttttactcttttccacgtgcccatattactcaatatttcgaggcccatttcattttttaaaaaatagatactatctttttatacatttaattggatttcgtaaaagataaaagaggtttaaattctgcaattcatccctgtactatgtaaaaggtgtggattttgtaacagtttcagttacctcagctcagtctaataatataatgtctttttattttgt

SEQ ID NO: 16717 - DNA, 521 bp, Gossypium hirsutum
  Clone ID: GOSHI-09MAY01-C50184_1
cacatgggtatgacaatgcatttttctccatgaggaccatttttattggtcatggtcctcaattcgcacggggaaagaaggtgccgtcttttgagaatgttcagatatataacttggtaacttcgattctcaagttagagggtgctcctaataatggttcttcagcatttgctgagtctgttcttttgcctagtcagtcattttatctcctaagcatgttcagagtgatcttagctgctgaaatatgggagtagaagtgggcatgatgtcagctgcaaagccaaatgatttatctgttcatcattgcagataattgcaaatgatgttagtgaaatttggaccagttgatagcattgagttacagatgtttgtagtttgtatctcctctaaatccttggctccaactttgcgcttacctgaactgcagcatatcatctgaaattcatattactattttgtgcaatgctcgtattacttcaaacttacattgttaaaaaccaaaatatcctggcattgttctc

SEQ ID NO: 16718 - DNA, 679 bp, Gossypium hirsutum
  Clone ID: GOSHI-09MAY01-C50124_1
ccaatgtcctattcaagggaccgtcttgctgaacattttttgtcttcagattagaggaggttggctaggtcttactctagtgacccttcacctggccagtccttaatgagtgcctatcctagggcacaaaaccagtggccagctggttatggcgcacaacctcaaacttggccttttactacacaggcacaaacatggacccctggctacagccaacaggctgcatatggtgcgtatggtagttatggtagcacctatgctactccacaagtacccacatcagttccacaaagtgctgggtctggtgcttatccgactacgtatcctgttcagacctttcctcaacaaagttttgctgtaccaactgcgggcacgatgttaaccccagcccagcaacctgctgcagcagttcctcaaactacttattatgggacctactgatgagactgcagttaaaaagaccatccaattactttgctgtctctgttctacgcgtatcctcataacttagatggcttagcagttagccaaggtggacatttttgaggtttaagaagaaaaaaggaaatgggggggggttgttaaatgttggagaatattggtatgttttaggcgacagtgggtgagttggtcttaggtattggagtggtttttttttacgagatatttatggaacttg

SEQ ID NO: 16719 - DNA, 577 bp, Gossypium hirsutum
  Clone ID: GOSHI-09MAY01-C50074_1
cacaaaatgatagtccttttggatctgccaatgtcagttttcggcttcgacttcaccaggctgcatcagctcataacaagacggaaataccaagtgccaaaaaaccttctctagcaaaggaaaaatcaacaaagtctttggcacctggaaatttggagctgaactacataaagcagaagctcgagacgctgacatcaatgctggagacatcagaggaaacaatgtcatcagaggctaaatccaaaatacagagcgagataaaagggctgttggagatggtaaacacaatggttgaatcatcatcatcttaggcaaaaaagtagtcacttttaggatgtatggatatgtagaagtgtatgttacgtcattgctgttacatacattgggttaggattttgtaagaaatacttaggtaagtagttcatagttaccatttgcatatgttgaaatcagcacatgctatatatatatatatggcataagctgcagtagttgaattctgttttcattggatacaaattctgttactattgagcatactggaatcagatttttcttctaaaaaaaaatttttttt

SEQ ID NO: 16720 - DNA, 935 bp, Gossypium hirsutum
  Clone ID: GOSHI-09MAY01-C50384_1
gcgaggagatgtccacaaatccatgaagtataatgtgtggtcaagtactccgaatggcaataggaagctagatgcagcattccatgaagctgaaactagagaaagtgagactggcaccaaatgtcctatctttctttttttctcggttaatggaagtggacagtttgttggcttagctgagatgattggcaaggtggacttcaataaagatatggaccgctggcatctgatcaagcggaatggtttcttccctgttaagtggcatgttataaaagacatccctaacaaggagctcttccacatcatcctagaaaacaatgagaacaaacctgtgactcatagtagggacactcaagagattggtctcaagcaaggcttagaactgctcaggatttttaaaggctattcagaaaaatcatcattgttacatgactttggattttatgaaaatcgagagaagacacttgatgcgaaaaagaattacaagcctgctactctagaatacatggaagatgatttgactaagcaaacaaaagcaggagagagagaagtggaagaagagttgaggaggaccaagaaaactggagatgcaacatccatcatcaatcgcaccaaaaaactatccctcaacggctgcaatcggaagagcgtcgctgtgaagaacccaatagcaagttcatttcctaccgtccctgcaccatagcttttcaacttttttaactagttaagatgtgcgccgggggtttgggggtggggggggggcgctctgtttttcagctttctgctttaaaattctttttctatgttgcctgtcttttttttttaatctgcgttggctttttagctgacgaagcagtgaattcgaattagcatttgctgagagttttttaatgtctgaaatagttacaaatgctttggttaacatctgctgtgcc

SEQ ID NO: 16721 - DNA, 437 bp, Gossypium hirsutum
  Clone ID: GOSHI-09MAY01-C50214_1
cgttcacaagtgccttggcttgtggacaaatacatgaagaaggaaatcaaaatagatgagtgcatcacccacaatgtgacccttggagatattaacaaggcatttgatctgatgcatgaagggggttgcctccgatgcgtgcttaagatgaatgaatgaggctaatatgggtgaactaaaggggtgatctgtgaagaactacgtgcctatcttctacaaccgggtttgtacttccactgccaacttaggagtgtaaagtagagtctgttggaacaaactttttctatgaagcctagtagtttaaccttgtgaaaaatgtttggtttatgatgttaaaagagaaccagcgatggaggtgtgtgcatgaatgaatgaatgaatgaatcaaataattatccgccttatcatctgaattatggagatgatgagtattggac

SEQ ID NO: 16722 - DNA, 254 bp, Gossypium hirsutum
  Clone ID: uC-gsflnu33B068f05b1
ctcacgcgtccgcccacgcgtccgcccacgcgtccggtctgttggaacaaactttttctatgaagcctagtagtttaaccttgtgaaaaatgtttggtttatgatgttaaaagagaaccaacgatggaggtgtgagtttgattgaattatattattaattgtttcattatctgatttatggttatgatgcatattgtctacatatacaccttttctctttacttttctttatcttctatttatatcttctcttc

SEQ ID NO: 16723 - DNA, 1062 bp, Gossypium hirsutum
  Clone ID: GOSHI-09MAY01-C51984_2
ctttgatacctcgacgcttctttatccctcacatattgagcttgagtcactaaatggcatctctttttcttgtttcagggatctggtcttcaagaagttgtactgtagattaattgaggctgcattaactttgatcaatcaggagcgtgagggacaacagattgactgcgtcctgctgaagaatggcttggatatctttgtggaaattagtgactacaaaggggttaactattatgaagattttgagcggatcatgcttacagaaatctctggttactattctcgattagcttcagagtggcttctgcatgactcatcagctgaatatgttcaaaaggttttctggtgcttgaatcgggagaagcaaagagctcgacagtacctacatcctgacacagaagttaagatagtgcaggtatagtcaatgattttaaactggagaattcctttttgcgcttttactgggttatatatcaaagtgtgcttccaaatgaaacaattgatgaacataaggcagttgtacgggagtttctggctgtgttcttggtatcaatataaactgcttgcttgagcttgtttaacagtggtatcagctacaaatctgtgctctcttctgggttcaatctttagtaatttggaaggtgtgtgttttccctttttgtactcttattatttcgattcatgcttgtcatggagattggtaagtgtagataacagctgaatttatttgaaagttgatcaagttggggctctccatcttgtaatgatcttcacaacctggacatgtatatagaaaatccattttacaaagaacagattctgtcacttttatagcattagagattccaagaaatgtcaataactcttatcttctatggtttctgcaggttgtcagatatcatttgctagatcaaattgcgaataaactgatgaaaaaaggcaagctgagaattctggcatggtgacagtttatcaggaaatattgtcgaaatgtgctggcatgtcccttcaagagggaagttcttcaacatcacccgaagaatggctctcgacgctaatcgc

SEQ ID NO: 16724 - DNA, 1333 bp, Gossypium hirsutum
  Clone ID: GOSHI-09MAY01-C51984_1
ccacgcgtccggattaattgaggctgcattaactttggtaatttccatgtgcttgcctatggtaaaaattttagtttcccttttagtggaatttgggtcagttcacggtcgcgtgcggatcaatcaggagcgtgaaggacaacagattgactgcgtcctgctgaagaatgtcttggatatctttgtggaaattagtgactacaaaggggctaactattatgaagattttgagcggatcatgcttacagaaatctctggttactattctcgattagcttcagagtggcttctgtatgactcatcagctgaatatgttcaaaaggttttctggtgcttgaatcgggagaagcaaagagctcgacagtacctacatcctgacactgaagttaagatagtgcaggttgtcagatatcatttgctagatcaaattgcgaataaactgatggaaaaaaggcaagctgagaattctggcatggtgacagtttatcaggaaatattgtcgaaatgtgctggcatgtcccttcaagagggaagttcttcaacatcacccgaagaatggctctcgacgctaatcgcaaattcagcacatatatgctaaacttgttttgagagcattatcagcagatgtttgtacaaattactttgataaaaatatagttaccaatagtcgacctagtgctgcaacctctgtccttttctgttttcccgaaatgcaaaattaaagttcagctgttcattagttgaatgaaattgagatgttttgtatttatgttttttgcccgacggcagattcactcctgaagaatatccaaaggctctttgctgcttcacactttttatttattttttatgtaaaaccataactgatgtagaccttattcagaatctatgtgtgcattgataagaatcttgtgacctatgtatgtgttgaagcctaatttcgaacaagcctttggattgaacacaccagataacatggcattaactcatgttactgagaagagaagggggagtttgctggtgattttgactggagaaaaagaaaatacattaatgatgctagaaaggcagatgaaaagcattcagaagctaataagtatgtcgttagatcacattatagtttttgatcagagatcatggcatgggaaacagcagcaaattcggtgtctcatagatgtttccttaagtcgtgtctcaaaattatagtattaccatataaaatatattaattgctttttcaaaagcattgttaaagttatgttttggtaccttcaggatttttatttgtagaatttgtactttataattggaagtgtaatctatactattattt

SEQ ID NO: 16725 - DNA, 452 bp, Gossypium hirsutum
  Clone ID: GOSHI-09MAY01-C51954_1
gaatgaagggccgaccgacgcgtgcgggcgtccactgtctgaccaactcttgctggtctgctctgaaaccttcgtcgttttccgtgagtgggaattcaaatttctccaagcggagggtcatcaaagcttttttcttcgatcccaatcaagtgcccatccttaatcaagctgttaaggagccagtagccttcatgggtgggatgtttgctgggattttaaggcttgacttggatgaagagccatttaagggatgggttgctagaactgtggaagcctctaacatcagtgaggatgatatttctgaaggactccaggaggaagaagacacccctgaacaaattgagattgattgaaatctaatccctgttttgcaaagttgttccataatactcgaaccttactcttttctttcctatatctatggcattatagtgtatccgacttgcatcaat

SEQ ID NO: 16726 - DNA, 601 bp, Gossypium hirsutum
  Clone ID: GOSHI-09MAY01-C51974_1
tccatgcttccgcccacgcgtccgcggacgcgtgggggctttatttgaaggttctctggtagtttttgattttttgggtgtttgttaaaatctgtatacaattttaccttagaaatttgagagggaaagtgatattgtatcagtggctaagttaaaggaatacgtgatgggagaggaggaagccaataaaatggaagcctctgaacccaaggaggacatgcagcagcagccacagccacagccacagcctgttaaggaagaagagatggagaatgaagatgaagcaggtgcagagaagaagagtgtgatcatccctcttcctcaaaaagttgcagcagcagaaacaccaccatcagttacagagaaaagtccaaacaacagagattccgtgcttgctcgagttgagacagaaaaaagactagctttagttaaagcatgggaggaaaatgagaaggcaaaaatagacaacaaggcatataagaagatatctgctattggatcatgggagaataccaagaaatctgctgtagaagcgcagctaaagagcattgagggaaaacttggaaaagaagaaggaagaatatgcagagagaatgaaaaa

SEQ ID NO: 16727 - DNA, 500 bp, Gossypium hirsutum
  Clone ID: GOSHI-09MAY01-C51924_2
cttgttcggaaccaatggctttgatagatcccaaggtaatggcttttgatagatcccaagatagagtttcttatgtccgaagtaaacgaagagaaaacatctggagactttagagaaatggactaaggttggcgcatgaagtcatttcttttgttaaaaagaaaatggataaagcttctagatctggagacttgagagatatcaaacttagtttgatcgggcattctatcggaaactttataataagaacagcattagcagagagtgctatggaaccttacctgagattcctccatacatttgtgtctctatctggtccacatttgggatatctatacagttcaaattctttattcaattctggactgtggcttttggagaagctcaaggggacacaatgcattcatcagctcacttttgctgacgaccgtgatattcgtaacacattattccacaaactttgcgaggtattgagaacaaagttgcaaaatggtcttgag

SEQ ID NO: 16728 - DNA, 668 bp, Gossypium hirsutum
  Clone ID: LIB3583-034-P1-K1-D12
cccacgcgtccgctcaatttccacagggatagtaaaacacggatattggacttccttcgtgatgaatgggctaaagatcgaagagctgaatggtcaatatggatggtgtactccaaagttgacatgcctcatcgttacataaatggcagttttgatgagtcttcccaccaaatcgtgcataagaggggttcaagtttgtggaaattaacagatgatcctgcacagatggcagctatgcgggctgagcttcatcggcgaagtattgcacaaatgaggatgaacagccgatcaatccaagacatgcaaatatttggagatccttcaggaattcctattgtaattatagagcatgtaatgaatgcacctcaacgtacttctagtgataacttgtacatgaggaacttggacataagagattcaattaccacaagcactgttcctagttctgaagctgtgaaaaagctatcaagtgcaagtgctgcgcaaagtggccgtgatttaaagattgtcatctttgtacatggttttcaggggcatcatttggatttgcggcttgttcggaaccaatggcttttgatagatcccaagatagagtttcttatgtccgaagtaaacgaagagaaaacatctggagactttagagaaatgggactaaggttggcgcatga

SEQ ID NO: 16729 - DNA, 1235 bp, Gossypium hirsutum
  Clone ID: GOSHI-09MAY01-C51844_3
ctctgccaagaattgttgctcatcttagaagaaagtagtggattttctagaggggcttcaatttacagaggagtaacaagcttggaatcatggaatcaaagaattggaattggatttgaagataggctttgattgactgaaaacgtcagctactaaatatgaatctctctggaactttagtgcctgaacttggccaactttctcacctcaaaatactacatttcatgtggaatgaattgactggtaatataccgaaggagataggacatatctctaccttaagactcctgtacgactactctggctatggacaatcatcgggaaagccaagtcagcagaatacgtatgcggatatcgaagctgcatacaagtgtcttgaagagaattacggtgccaagcaagaaaatatcatcctgtatggtcagtctgtcggaagtggccctactgtggatcttgctactcgtttacctcgattaagagctgttgttctgcatagtcctatattatccgggttaagagtcatgtatcctgttaaacgctctttctggttcgacatctacaagaatatcgacaaaatctcattggtgaagtgtcctgtgctgataatccatggaactaatgatgacgttgttgactgctctcatgggaaggcaactctgggaactgtgccaagaaaaatacgaaccgttatgggtgaaaggaggaaatcactgtgatttggaactgtacccggattatattaggcatctcaagaaattcatctcaacagttgagaagtcaccttctcgaagaaatgcttctcggaaaagtacagatggtatcgaacagtctaggcaaagtactgaatatttcgaggctccgagaagaagtatcgaccgcagggagaaaccaaggaaaagcaccgatacccgggacaagccaaggaaaagcaccgattcccgggaaaaaccaaggaaaagcatcgataggcctgaaaagctgaaagttcaggagcacaacaaattcaataacatggacaagcttgaaaagcttagaacatcactagaccagatggaaaggatggagagatcacgtcgaagcgtggaataccacgagaaatctcggagaagcgttgaccttcagctagagaaaggaaggaagagtgttgattggatagatagaattccagcagtttagacggccgtaaaaattgggtttactgagttctttgatccgagtgggtggaaggaatagag

SEQ ID NO: 16730 - DNA, 655 bp, Gossypium hirsutum
  unsure (1)..(655): unsure at all n locations
  Clone ID: AI054982.1
ggatgatgaagctttactcttaattcgaaaatttgatatcaaatggtcatgtttgcttcttcaactgttcgagatgtacgcgagaaacttgttgtgtgcgcgctcttttgtgtgtgtgtgtatgtatgcatgcatgcaggtatttataaattacaaggaatatctacgatgggcaactggcattaactttggtgatttcatactggtatcggaatttagggaactaatgatgacgttgttgactgctctcatgggaagcaactttgggaactgtgccaagaaaaatatgaaccgttatgggtgaaaggaggaaatcactgtgatttggaactgtacccggattatattaggcatctcaagaaattcatctcaacagttgaagaagtcaccttctcgaagaaatgcttctcggaaaagtacagatggtattgaacagtctaggcaaagtactgaatattttgaggctccgagaagaagtatcgaccgcagggagaaacccaaggaaagcaccgatacccgggacaagccaaggataagcccgattcccgggaaaaccatgaaaagcttgatggccttaaagctaaagttctgacacaccaatcattacatggcagcttgaaactagaactcctgtacctttggaggatgagatccn

SEQ ID NO: 16731 - DNA, 685 bp, Gossypium hirsutum
  unsure (1)..(685): unsure at all n locations
  Clone ID: AI055591.1
gagagaactagtctcgagttttttttttttttttttttttttttttcttttcttctctcacgcctcctctgccaagaatatgttgctcatcttagaaggaaaagtagtggattttctagaggggcttcaatttacagaggagtaacaagcttggaatcatggaatcaaagaattggaattggatttgaagataggctttgattgactgaaaacgtcagctactaaatatgaatctctctggaactttagtgcctgaacttggccaactttctcacctcaaaatactacatttcatgtggaatgaattgactggtaatataccgaaggagataggacatatctctaccttaagactcctgtacgactactctggctatggacaatcatcgggaaagccaagtcagcagaatacgtatgcggatatcgaagctgatacaagtgtctttgagagatttacggtgccaagcaagaaaattcatcctgttggtcggtctgtgnaagtggccctactgggatcttgctactcgtttacctcgattagactgtngttctgatagtcctatattatccggtaagagtatgttcccgttaacctctactgttcacatttcagaattcacaaatcttattgtagtgtccggctgatatcctggacttatggatactgtctgtttttggaacactt

SEQ ID NO: 16732 - DNA, 598 bp, Gossypium hirsutum
  Clone ID: AI731904.1
catttactgagtcgacagcgagtgtgaaacatcctctgaaagcgaaactacaaaggaatgttcatcatcatcatccccttcttcttcttcttcttcttcttttagattctaattccaaaaaaacccaaaacaacccgattttttttcacaggtaaaatcttaaactatgggtggggtgacgtcatcaatggctgcaaagtttgcgtttttcccacccaacccaccttcatacaagctggttaaagacgaagcaaccgggatttcagttttagaccctttccctcaccgtgaaaacgtcgacgtattgcgtatcccgactcgccgtggtaacgaaatcgttgccgtttacgttaggaaccccatggctacctccactctgctttattcacatgggaacgccgctgatattggtcaaatgtatgagcttttcatcgaactcagcatccatttaagaatcaatctcatggggtatgattactctggctatggacaatcatcgggaaagcctagtgagcataatacgtatgccgacatcgaagctgcatacaagtgtcttgaagagagctatggtgccaagcaagaaaacatcatcctttac

SEQ ID NO: 16733 - DNA, 540 bp, Gossypium hirsutum
  Clone ID: GOSHI-09MAY01-C51864_1
tacaatttcggtcagaccatttaaaacaaataatctcagggtttcaaagttttcattcccactgcacttcttgcttcttagtattatgtgatatgattagaccactaaatgtgtcttgcttcttttgctgcttgaaagaggggggggcgcttcttttgtcatcttatccaggaacgggtttcctttcattttgcaacctaggttgtaattctattgcagttttgttgtcacctactttttgggcgctcctatttctcccattctgcttctgaaactttgttgtagaacgaggagcttggtttacttgtgttcttattctttctgtttgagggttttgtgtttgtcatttgataaaactagtatgttaccacccatttgccaaaccagaattccaatttatctctggaaatctgacctggctgaagcgggctattgagtctggcttaatagagcctcctatctagccaaatactgaactgaaaaaagagaacctttttgttttaggatttcccattataagaattagttaagaggatatta

SEQ ID NO: 16734 - DNA, 766 bp, Gossypium hirsutum
  Clone ID: GOSHI-09MAY01-C51574_1
cggacgcgtgggttcggctgaaccccggccgctttcttcctgctttaccaaaccctaaactcccccttttttgttcgaatctcaataggccctagccgccacttgaccgccgaacggcgatcgacggagggagacttgttcgctcactaaccccgcttgggcccttgctttaaggactactgatttcaggccttacaccccgccccgactttgattaaagcgaatgagacgaagattccggaggttcgttcttagaagtaatccctttactccctttttatgctcgaaatgactgtgtgtgtaaccaaacaattagaaaagaagatgaaaaccaacgggaaagaagggccaaagccgaataatcacctttgcaaagttttgatttcatttctttgtattaagtatgcaaaaatgtgcgtatattcctctttttcgtaacctcttacagagattaagaactatggctttatatccgaaaaaaagaaagaaaaagaaaaaaaaaattaaaaatacaattttcattcccttctatttgctattctgccatttttgtttgtatttgccgttgtgttcgtccttcttgcaggtacggggtgcgctggcatcgtacggaggctgtgctggcgtggttgctggagactgaaacatacggaggagctgagggggctcggttgcggcgcaaagcgagggggagccctagggtttctggacttgtaattttctgggcctatcgggcctgtatttgggtttctgggtcaggatagat

SEQ ID NO: 16735 - DNA, 437 bp, Gossypium hirsutum
  Clone ID: uC-gsflnu33B073g07b1
aataggccctagccgccacttgaccgccgaacggttatcgacggagggagacttgttcgtttactaaccccgcttgggccctagcttataaggactactgatttcaggccttacaccctgccccgactttgatttatgcgaattgacaccaatatttccgaggtacggggtgcgctggcatcgtaccgaggctgtgctggcgtggttgctggagactgaaaacatactgaggagctaatggggctctgctagcggcgcaaagcgaggtggagccctacggtttctggacttgtaattttctgggcccatcgggcctgtatttggggtttagggtcatgataaattgggtttaggattgcgtaatgtaatattggacttgtaactggcctattgggtagttatacaactggacctaatggtttatttggtttcaatta

SEQ ID NO: 16736 - DNA, 518 bp, Gossypium hirsutum
  Clone ID: GOSHI-09MAY01-C51514_1
gcagacccttccgaagcacacgattctcatgagacagctgaaggcgagacaggtgaagggaatggggacaattcggaaccgataactcggtcatgtacatacagctacgaccagctgaagtccaaatctgaaaatccagtaactggaattgacttcaaacgcagagagacttatttgtccgatgaggagttcgagacggtattcgggatgccgaaagaagcattttacaagttgccaaagtggaagcaagatcttcaaaagaaggaagttgatctattctagagcttcatgcacttgaacaagtgatttaagtgtttccgctgcattctacctagcaatccctcctatatttgatcttcaattccgcccaaaaatcatgggttcgtctacacgatgcctggattaccatttttgtgccctttttccttcttgataaacgtacgtgtaattagtattcggatggattccgatgttgcatggattaccatgaactcatattggaatgtttcgcaggtcaa

SEQ ID NO: 16737 - DNA, 1055 bp, Gossypium hirsutum
  Clone ID: GOSHI-09MAY01-C51714_1
ttctattcagagagagcacacagtgaagcatatgcaacaatcctacactcggctcatgtatatgtttgtggggccattactgctgctcaaagtatccgcatgtcaggttcaaccagggaccttgtgatacttgttgatgactcaatcagtgattatcatagaggtggcttggaagctgctgggtggaaaatttatacaatccaaagaatcaggaatccaaaagctgaaccagaagcttataacgaatggaattacagcaagttccgtctttggcagttgacagattatgacaagatcattttcatcgatgctgaccttcttatacttaggaatattgatttcttattcgagatgccagaaatttctgctataggaaacaatgcgacgctcttcaactcgggtgtgatggttgttgagccatcgaattgtacattccagctactaatggatcacatcaatgagattgaatcatacaatggtggtgatcaggggtatctgaacgaaatcttcacctggtggcatcggattccgaaacacatgaacttcttgaagcacttctgggaaggtgatgaggtggagaagaaacagatgaagactcgcctctttggagccgatccaccaattctttatgtcatccattatctgggaaacaaaccatggctatgcttccgggactatgattgcaactggaatgtggacattttgcaggagtttgctagtgatgttgctcacaaaacatggtggaaggtacacgatgcgatgccagaaaatttacagaagtactgtctgcttaggtcgaaacagaaggcacagttagagtgggatcggaggcaagctgagaaaggtaattacacagatggccattggaaaattaagataaaagacaagcgtttaaagacgtgttttgaagaattctgcttctgggaaagtatgctgtggcattggggtgaaaagaattggacggataattcaactgctaacccatcaccacctgctataaagaaggtatctctctcttcattatgatttaattttcctttcattttctactacat

SEQ ID NO: 16738 - DNA, 635 bp, Gossypium hirsutum
  Clone ID: GOSHI-09MAY01-C51704_1
cagctatctacggtgccacctggacggaggaccccagaagccattgccagagctgttgaatacttggataatcttgaccaggcagctttacaaggtggattcatcttggaaaaaattatgggtccgatctcaacaggccatttggagctccaaacccgtaacccagacgataacccatccgtcaccttcaattatttccagcatccactagacttgcaaagatgtgttcaagggattcaaaccatagggaaaatcgttgaatcggagtcattctctaaattcagatatgattacatgtcttggccaggactcgttaacatgacagaacattccccaataaacttgctgcctagacattacaactcctcaatcccacttgaaacgttctgcagagacaccgtgatgactatatggcactatcatggtggctgccaagttagtagggttgttgaccccgattataaggttcttggtgtcgaagctctaagggttatcgacgggtccactttcaactattcccctgggactaattctcagccactgtcatgatgcttggaaaggtggtccttaaattaatcacttgccgaaatattcattttatggtggggtttttaaaattgacattttagtttgat

SEQ ID NO: 16739 - DNA, 375 bp, Gossypium hirsutum
  Clone ID: GOSHI-09MAY01-C51614_1
cgtccgggcttcttctagggtttctttaacccttgggggccgccgttcaagagctcccctcggcttcaaacgccgttttagcttctgatcgagacagagagaatagcagaacgcaaccaagtctggtattgttggcgcatggagcggtgcacgctggggagggtcgtggcgcgagattcgcggcggtgtgcgagggtggtactggagactgctggggcttgcggcgttggggccaaagctgctagggttttcggtagaaaatttggttagtgggctgttggggtttgggcctaggtttagtttattgggttgttttactatttgtaaggcctggcccttggcggcccacttctctctcactattatgatgtatgt

SEQ ID NO: 16740 - DNA, 247 bp, Gossypium hirsutum
  Clone ID: GOSHI-09MAY01-C51144_1
gccaatccaaccgtacattaaaacggaccgatcgattgatggatcatgacctgtcgcatgagctaaagatctagctccaggtcttgctcccagtgggacggctctagggatgactctctgtatgagttaccggcgcttgtgcctgtgcacgtacgtgttcacatatgataaaataattgatgaacctaatagctgacctaaaatatgcctgaagacatgcctggattggttccgggattggattcgg

SEQ ID NO: 16741 - DNA, 889 bp, Gossypium hirsutum
  Clone ID: GOSHI-09MAY01-C51124_1
ggacgacctacgcgtccgcccacgcgtccgagaatctactattcaaacccacaaataaaaaaaatccttatcttctcattttctctcttgttttcagtttttggatatggaaagtagcagtgaagtgtcgagcaggcttcaatatattgaacaatatttacttgatgaaaatcaatttcctcctgtgggattgtggagcttttcaaatgaaaatcaatggacaaattatccgaaatccgaggtttccacctctcaatctcactctctttactctcaaacttccacctctgattcctgtcttacagcatccaattttaatagccttgacgaagatgatttcttcaacttctctaccaatttcccaggtttcgagtctaaccaaagtgatgttttcgaatttgactccaaacctcaatctatccatctcaccacgcctaagcctctcgcttccgacgccactgcctgtgaattccaagtgaaatctctatcttcttcgaattcgacttccaattctcagagtcgaaaacctttgttgaaaatctcgttgccgcataaagtggagtggattcagttcggcaaaccggatttaaccgaggtaaagccaaagaattcaaataccgaagagaaaactaagcattacagaggcgtccgacaaaggccgtggggaaagttcgcagccgagatccgagatcctaaccgaaaaggttcacgggtctggttgggaacttttgacaccgccatagaagccgcaaaggcttacgaccgagccgcctttaagttacgtggctcaaaagcgattcttaacttccctctcgaagctgggaagttggatgtaatcgctgctgacggagagaggaaacggatgagagacgacgacgcttgggatgaa

SEQ ID NO: 16742 - DNA, 312 bp, Gossypium hirsutum
  Clone ID: GOSHI-09MAY01-C51034_1
gccaactctccgtttttgaaggggacacttttcatcatgtgggctgatttaacattgcttggactataacctcacggtctccatggaactgctcacatattcaaggatactctgccatggtttccccagaaacttgtgaacctctcaaggaaagtatctaccccaaccattcttcagattgttaccatctatccaatcatttgcggagttcaggccatcaaaacaaaggctcttggttacattcttggtaaatagtgggtaacatataattcgttttaccctgaaatccaccctttgtcatgattttttttt

SEQ ID NO: 16743 - DNA, 738 bp, Gossypium hirsutum
  Clone ID: GOSHI-09MAY01-C51384_2
ggcaaactttgatgtcagtgagctctcattgtcacttcatagagcgattattctttgagtcttccaaaactgggattccgtaaacttaaatatgctgatttttcaacgtcatactcgatcactggaacctttttgaggaatttgggaaatggcggtggtgggagtctactagaggttttaatattaagggattgcatgcatctcaaagagatggaagttgctcggttcttgacagctgttattgcaggagattttaagttccttaaacatcttgacatatctaatagggaaggtttagcttcagaaggtgactggtatcagagatcttacaactccagtttgattcctttacagcaggttttggaagtaagacctgatatttgtctgctagctgagtttccatcggaaggatgcggaagagatgcttccttgacatagaccacatgattgatagtgattttaacagtgagctcagcctgccattccagcagagcggccaaacttctgacggtgcattggttacgagttcatttgagagcagttataatagtgatcagggtagcggttatgaggagtatcaagattcaggttttgtaatttacgaggaaagctcacatgaggaggattttctggtcgtctaaaaaaagctaccagagctgacgagttcttaaacttgcagccactaagtgatcggataaccaggaaagatgctctctttctcataactgaagctgataa

SEQ ID NO: 16744 - DNA, 614 bp, Gossypium hirsutum
  unsure (1)..(614): unsure at all n locations
  Clone ID: LIB3582-007-P1-K1-B3
gcctcgccggagctgcttgcccttctgcacttgcattcggaaatcgttggccttcatgttgagctgaggcaaactctgatgtcagtgagctcaaattgtcacttgatagagcgtttattcttcgagtcttctaaaacaggaagggatgacagcttgaaatcgcctacatgtgtggatttggtgaacaattgtcctaatatttcttatttgtcgctgagaggttttaaacttcatgattataaagttcgcattcttgttaagggattccggaaacttaaatatgctgatttttcaacttcttactcgatcagtggaacatttttgaggaatttaggaagtggctttggtgggaatctactagaggttttaattttaagggactgcatgcatctcaaagaggtggaagttgctcggttcttgacagcagttcttgcaggagattttaagttccttcgatatcttgacatatctaatagggaaggtttagcttctgaaggtgactggtatcagagatcttacaactcgagcattattcccttaaagcaggttntggaagtaagaccaaatatttgtttgctggccgagtttccatcagaaggatgctatattgacat

SEQ ID NO: 16745 - DNA, 408 bp, Gossypium hirsutum
  Clone ID: LIB3146-027-Q1-K1-C4
gatatttgtctgctagctgagtttccatcggaaggatggtacagtttactcttaaacctaattagttggtagtcgcatcattgttgttagtgtttccttttttcccctcctcacataagcattctaagatcagaaattggaagttcctgggaaatgaatatcgcattttgacttgtttttcttggctttgcagcttccttgacatagaccacatgattgatagtgattttaacagtgagctcagcctgccattccagcagagcggcgaaacttctgacggtgcattggttacgagttcattagagagcagttataatagtgatcaaggtagcggtaatgaggagtatcaagattcaggttttgtaatttacgaggaaagctcagatgaagtggattttctggtcgtct

SEQ ID NO: 16746 - DNA, 433 bp, Gossypium hirsutum
  Clone ID: GOSHI-09MAY01-C51224_1
gcatattcttgtaaaatagatgtatattgggacctttcttcggctaaattcggatccgggcctgaacctttcgaggggttttatgttggtgttgttgctaataagcaaatggttttgcttcttggggacatgagtaaagaagcttgtaagaaaactggtgcaactcatatcccttgtaatgccagtttagtggctaagaaagagcatgtttttgggaagagggtatttggtaccaaggcgcagttttgtgataatggtcgaattcatgatctgataattgaatgtgacgcggttggtatgaaagatccttgccttataattcgtgtggatggaaaggctttgatgcaagtgaagcggctgcggtggaagttcagagggaaccataccattttggtcgatggaatggctgtagaagtttactgggatgtgcata

SEQ ID NO: 16747 - DNA, 527 bp, Gossypium hirsutum
  Clone ID: GOSHI-09MAY01-C52904_1
cccggaggcgtgggaaaaaaccaaaagaagaaaaactcgacagtgaaaagaaaaggaaaaaaaacccttcaagctgctctctgattcttttaaattgtttttttgatatccctcttttttggtttccaaatgtattcctcagtttttatagccgaaagaagaaaaaagaagaagaaaaataatctctttttacaatttttgctatattttcggtccttctagtgctatccgtggttcgtttgcaggaataacgtgcatggtgggtgcggggccacgtgcccaacatgtggggcgacgttggggcggttactgcggccccagtttgctgctactgcttagggtttctgctgtgttgtgtttttgctgagggcccccctgtagttaggctaggctttaggttagtgggctagggattggatcatttgggtttaggttatttgtaaaaatggcctgggttttttttttttgcttttgtttcttttttatgtgcatttattggagccccagcttaaaattgagtattaaaa

SEQ ID NO: 16748 - DNA, 285 bp, Gossypium hirsutum
  Clone ID: LIB3146-050-Q1-K1-D3
ggggttctctgcttgggtttcgaccctagcaccttcatgccgccaccgtcgtgcccaccgtgaggccaccgcgaatggcgctcgaaaccaggaattaccttccttgttggtgccgggccaccttccccacatatgtggccacctttgggccgttactgcggcaccagtttgctgctactgcttagggtttctgctgtgttgtgtttttgctgagggccacactgtagttaggctaggctttaggttagtgggctaggtattggatcatttgggtttaggttattt

SEQ ID NO: 16749 - DNA, 363 bp, Gossypium hirsutum
  Clone ID: GOSHI-09MAY01-C52934_1
gtcaaaaccctcatatttgatatgctccaagctgctcgagctcaagtcaactgatcacactgctaaaagtgacccaagtggatattgggttacagtttcttcaaacttctccagaatatggaccaacatatatttccagaattcatccaataaaaatacaattacagaagacaagcagctgggataattcagctttctgcatcttatacctcggaaactttcatttcaagttattactattacagtctatgatgccatttgaaagttgaaactaagggacgtgaaactggattgtgatttatgtatatatactttgccagggtataatattttcttctttccactaacaaagtggagttggat

SEQ ID NO: 16750 - DNA, 436 bp, Gossypium hirsutum
  Clone ID: GOSHI-09MAY01-C52894_1
gttgacgtaccctctcgagttgctcaaagctcgtttaactgtcaatgaagattacaagaatctattggacgcggttgcgaaaattgtacaggcggaaggaccgggaggactatacaaaggcctcactccaagtgtgatgggagttgttccttatgctgcctctaattattttgcttatgatacactaagaaatgcttataaaaaagcttttaagaaagaggaaattgggaatgttatgactcttctaataggatcagcggccggtgcgatctcgagcacggcaacttaccctctcgaggtggctcggaagcagatgcaggctggtgctattaatggaagacaatgccacagcatgattcaagcattaacaagcatagttgagaaagaggggatggcagggctttatagagggttgggaccaagctgcatgaaattg

SEQ ID NO: 16751 - DNA, 767 bp, Gossypium hirsutum
  Clone ID: GOSHI-09MAY01-C52574_1
cggacgcgtgggaaaaaaaattgaaatcctctgaaagaggagctagagaggtgccctccagcatcacgcctccggccactgggctgcacgcgcacacgcgccgccgtacacggccgttggaaggctaaaagccttcgtttttcttggcgaatcgcaggtcatcccttcttccttttaaacatcaacaattttttttgcaaaaacgattcgcatacacgttggacaatgaagaacacactgtaaaattaaatcaccttcctcaaaaaaaactgcttgtatctctttgaatatatctgtgtatctattttttctttttatctaaaaaaaaagggtcccttttacagattagtgaagaggcttttatagccttttgtgaatcgttacatttagaaagaaatctttgatttcttttccatgtttatttctcttttctgctgtggttctcttctttttgcaggtaccagcgaggaatccggcgatgacgattcactggcgcgagttcaggcctggtgtcgaggtgcttgcggcgcctagggcttcagaaaccctaggccttctgtcttttgttaacaaattgggccacttgggccttgtgtattttgggcggcatttggtctatagtatgggcttgggtgtaattgggcaccgggtaatttaggtatttgggctatgtaaatgggctagcagttttgggctttgtaaaaggactgtaaaacgttattatttttaataaatttttgtttttatttaaaaaaaaaaaaaaaaaa

SEQ ID NO: 16752 - DNA, 624 bp, Gossypium hirsutum
  Clone ID: GOSHI-09MAY01-C52504_1
catctccaaagatcttttttcttctcgtctgatcatcacaatgaattgtcttcagaatcttccgagatcctatgccttgccatttcaaggtttcaagtgcaatccaagaaaactactttcttgttcccttaatatgatggtacatttccagggcgggatgaactcgagtaatgtaccgcggagtatggtagttaaggcaattcctggttccacatcaagtgagaaaacgagtaactctgactcagaggggaaaaaatctgagacatatagtcatgatatgacagaagctatgggcgctgttttgacctataggcatgaattgggaatgaactacaactttatccgtccagacctaattgtgggctcatgtctgcagactcctgaagacgttgacaagttacgaaagatcggagttaaaacgatattttgcttgcagcaagacccagatttggaatattttggggtcgatattggcaccattcgagattatgccaagaaatgtggtgatattgaacacatacgtgctcaaataagggacttcgatgcatttgatttacggatgaggcttcccgctgtggttagtatattgcataaggccgtaaatcggaatggaggtgtaacata

SEQ ID NO: 16753 - DNA, 409 bp, Gossypium hirsutum
  Clone ID: GOSHI-09MAY01-C52494_1
cccacgcgtccggaaaaaaaaatttaagagcctctcctctctgctggggtctccaatgcccttgacgccgactgatgagccacctcagtggttcaccgcaccaccactatggctggtggccgacgacaagcgacgacggggaggtgagtttccttcctctcttttcttattttttttattattttgaatgcaaaagaaaagaaaaaaagggaaaatgaaatacactgaaatagtaaataaataaaaacaagcagaaactcaagcaaaaagagtaaaaagaaacatcatctgaaactgttttgctcttgatgtatctcgtttataaaacgttggttttattgagataaattcttaaacaataaggtaaaaaaaaaattaaaccaaaataaaaaaaaaaaaaaaaaggaca

SEQ ID NO: 16754 - DNA, 404 bp, Gossypium hirsutum
  Clone ID: LIB3146-044-Q1-K1-D7
cctctctgctggggtctccaatgcccttgacgccgactgatgagccacctcagtggttcaccgcaccaccactatggctggtggccgacgacaagcgacgacggggaggtgtcagacgagcatggtgaagtgcggcggcggcgtgcagggagttggagcggcgcacaggggcaagggcgtgcatgcggcgctggagagggctaggttttgctcccctctaccgaaattgttaatgttatttgggctaggttttttaatattttgggcccgttgggtttatttaattttggttttgggccgcaactgtaatggactgttttattttggaatttggggttctattttggacccgggcaaaaatgggctcttacaataataataatcaattaagtcctctttaccat

SEQ ID NO: 16755 - DNA, 623 bp, Gossypium hirsutum
  Clone ID: GOSHI-09MAY01-C52484_1
ccccgcgtccgcaaaaatatgatgggtgttgaggagcgagaaatctgaaggtgaagggaaagtttggagtctttgtaggatgccgaagttgtggcagatgagtagtggcaatggagaatggctcatcttcatcttcttcatcatcaatggggaacaacaatgtttaccagcaaaccccaagtagtgaaagatcagctgtgacttcttcaaatgcatttttttctatggccaaatctttgcttcctgctcgaagaagacttaggcttgatccttccaacaagttatattttccttatgaaccaggtaaacaggtcaggagtgccattgacattaagaacactagcaagtcccatgtagcattcaagttccaaacaactgcaccaaagagttgttacatgcgacctccggaaggtatacttggtcccggagaaagccttatcgcaaccgtattcaagtttgtggaaccaccggagaacaatgagaaaccaatggaaaaaaagagcaggttaagttcaagatcatgagcttaaaagtgaaaggagaaacagattatgtcccagaactgtttgaggagcagaatgatgaggtcacagttgagcagatattacttgcagcttttctag

SEQ ID NO: 16756 - DNA, 414 bp, Gossypium hirsutum
  Clone ID: LIB3146-044-Q1-K1-C8
aaacaactgcaccaaagagttgttacatgcgacctccggaaggtatacttggtcccggagaaagccttatcgcaaccgtattcaagtttgtggaaccaccggagaacaatgagaaaccaatggaaaaaaagagcagggttaagttcaagatcatgagcttaaaagtgaaaggagaaacagattatgtcccagaactggtataattctgcagatacatttagaacatacaatttcttcatgtcaaatagtgaaactgaaaatgtgtggtataacaatcttgcaacagtttgaggagcagaaggatgaggtcacagttgagcagatattacttgtagtttttctagacccagaacgttcttgtcctgtaagtaatcaaaacataatcacaactggattacttggtttattcgtagt

SEQ ID NO: 16757 - DNA, 681 bp, Gossypium hirsutum
  Clone ID: GOSHI-09MAY01-C52414_1
cccacgcgtccggctaaagaagatgacattcttctcgagaaagaagtctcggaaacttgcaatgactctgccgagctagatccgagtgagatgcagatattcgaaacaacaaacataaagcaggaagtagaagagatcgaagaaaacaatatgatgccaagacttgacgagacttccagtcgatacaggcagtttgatatggttagtgattgctccgatcaccatttccttggtgaaagcaaggtgttggccatgtctcaggtgaaacgaagttgggtgaaaaaggttcaacaagaatggagtatcctagagaaaaatctccctgaaattatctatgttcgtgtttacgaggaaaggatggatctactacgagcggtccttgttggtgcccctggcacgccctaccatgacgggctgttctttttcgacatttttctcccttctaactatccgtacgaaccaccttcggtgcactaccattcatgggggctacgcctcaatccgaacctgtatgaatcagggaaggtttgcttaagccttctaaatacgtggacaggttccgacactgaggtctggaatccaggaagctcctcgattctacaagttcttctgtccctccaggctcttgtgcttaatgagaaaccctatttcaacgaagctggatacgataaaacagtagga

SEQ ID NO: 16758 - DNA, 457 bp, Gossypium hirsutum
  Clone ID: GOSHI-09MAY01-C52434_1
gtttgaatatcgtgtaactcaagaaagtttgatggaccgattaaccaccgacattcgtgcagcatgtctatcgattgatcaaaattgcagggtattaaccattcatgggtccatggataaaattgtaccagcccaagatgccctggaatttgcccggtttattcgaaatcccaagctgcgcataattgaaggagctgatcatgagttttctgcacaccaggatgagttagctacagttgtgctcgattttgtaaaggcagttcgtgaagacagaaactccgctgaacgtctgcaatcatgcgagagagcagttaatttcatcaaagctcgaatctgaagattgtggtaacttgtatacaaaggttttaacattgtattaaaaagtacacactattaaatccaatatagaactcaaattgttcatgtaagtatacagcaaatctaaagtttgaatctt

SEQ ID NO: 16759 - DNA, 515 bp, Gossypium hirsutum
  Clone ID: GOSHI-09MAY01-C52744_1
cccacgcgtccggtggtgttggtgactcggtgatcggtcgggcactttcgcagctgctgtggagcgttaatgacattcctgttagctcgagcaagtatgggatcgttcgatctttagcggaacagcttatagaagagaacaataaggaagatattgaagctttgcgtgaaatgaatcggacggttttaatcggcggctttttcgaggacacttggcctggttgaagctgcaatgcttgaattggggcaaggcagggttggtcattatggtgctgggtttggaccggtttgttatcagttgaaccggcttttacgtgcggttggggtagggagtgggagagtgggtgtcagccgttcggggaattcgatgcagaagctggcggctgagttgctttggttgccggagaaattgtctggttgtgaatttgaggaagaggctgtagagagatgggcatcggcttcaaatctcgccgggctttcttaaccagggaacttgaagacgcggtacttacaaag

SEQ ID NO: 16760 - DNA, 505 bp, Gossypium hirsutum
  Clone ID: GOSHI-09MAY01-C52764_1
cccacgcgtccgtcttatttggctaaacagcagtgggaagaggttcaggcagtgattcagcaggttcagaatatcatgggtggatgcttgacaacacatgataacctggaagcatcactacgtgatctttctaggactgggaacattcgagcttgtaaagctgctcgaaaagcagctgatggtttgttaaaagagctgtccaaagaattgaaacccttgctgaccttcttgcgatcttctccatcagctgctcaagtattacccaaggtggaggagctggtggctaaggagagagaattacaggaaaaagtaatggtgaagcactctacagtggtggacggctatgagaagaagtcgggggcccgtgatattgagaaccgggtggctttgcagcaacagaaacttacagcacttgaggcaaggaagttgatgatcttctttgagttcattgtttgaaatatttttgtttgtgcgcttgtaggcataatattttggtccaaaccat

SEQ ID NO: 16761 - DNA, 861 bp, Gossypium hirsutum
  Clone ID: GOSHI-09MAY01-C52614_2
ccccgcgtccggttgactcttcacccccgcgcccgcccgcgcggccgggacaaaaggtgacaattatgaacctaatcgcatgaatcctcagcagccggttctcgatgtggcgcctctcaattgtgtgccatacatgggtccaactaatgcagatgatatgttttcttcaccaaccaaagagaataccgaggctgtggaagcaatcggtccagctatgatatttctgccttcacaatcaaccagggaagagttggataatatcatggccgctaccaaaaatggagttgcactcactggtgctgcagccactggatcagttggacctgttatcggaaaagtggacattggtgaattggaggattcatactatttccgtgtcgcccttcctggggtctcaatggataaaagagacttcaattgtgacatagaacctgatggaaaagtcgtaataaaggggatgtcaactactggcgagaagatagtgtgcaagaactttcaaatcttccatatgctgacacaaaatctttgcccaccgggactgttcactgcctcgtttcagctccctggtccagtgaataacgaagacgctaagagttatttggctaacggaatgcttgaagcggttgtgaagaggatgtaattctgaagtgttagaaagctagtgactgccgctttacttactttacatttctttcccatgcatccaactcagtagttatatgttataggctttaagcatctctaaaaccgctgttgtttaaactttaatctcttcctttagaaccaaactggtgttccttctctatgttttttcctttaaaaataataattaaattatggtatcaatcattcaacatataa

SEQ ID NO: 16762 - DNA, 671 bp, Gossypium hirsutum
  Clone ID: GOSHI-09MAY01-C52614_1
gcaaaacgcacggtccccttactgcagccaataattttcaacgtagtcctctctgtctttctccattttggcaaaacccattggcctaaagaagaaaaagcagattccttgaaaccgataaaacattgttacagactcactgaaagctttcagttttgcttatctcagttgactcttcaatggcttctccaatgaggtctgaaaggacaaaaggtgacaattatgaacctaatcgcatgaatcctcagcagccggttcttgatgtggcgcctctcaattgtgtgccatacatgggtccaactaatgccgatgatatgttttcttcacccacccaagagaatactgaggctgtggaagacaatcgggccagctttgaatttttgcctttacaataacccggggaaaattggaaaatataagggttgttccaaaaagtggtttcccctcatgggtcttaacacctgggacaattggccccttttttgggaaaagggaccttggtaatatccagatttatactattccgggtccccttccggggtcaaaggaaaaagatttcattggaaataaccgtgggaaattttaaaggggtgtcactctggaaaaaatggcaaaattaaatttctttggcacatattttcccggggcctcccttttttaattttgatcag

SEQ ID NO: 16763 - DNA, 367 bp, Gossypium hirsutum
  Clone ID: GOSHI-09MAY01-C52634_1
cccacgcgtccgcggacgcgtgggcaagtgggcatgggctcgaaccgaacatatcagggttcacacaggtgctcgcccttacgtatgcggtgaggaaggctgtggccagacatttcgttttgtgtcggatttcagtcgtcataaacggaaaactgggcactctgggaagaaaggtagctgataaatttagaaggaagggaaaactgtaatttgaacattgtaatgaacctgttattgaatggtaggctagggttaggatttcaccattgttgtcattcaggaaactgttaattatgttctgtcttgggatttcattaagccccattcatttactctcaaattagagcaattggttggatcttgagtc

SEQ ID NO: 16764 - DNA, 663 bp, Gossypium hirsutum
  Clone ID: GOSHI-09MAY01-C52174_1
ccgggtcgaccccgcgttcgcccttccaaaaaaaataaatataattaatagtataataaaactcgacgcccaaactcattcagtcgtcttctttggcgactgagtccgagactgatagtgtttgagaaaaaagaatataagatcccttttctcctgtcattgtaattctcatggaaaatcaaattaagatttattgttaataattagggcaaaaatttttgaacttccgggaaaaaaaaatgcgtcgggagatctcgattttgatacagcctcggtgccttcttctcttcatttctctctcaattctcctcattttcgctttctcaggagccaaacgggaggaagagaagatcgtagaagaagagcatgaaatcactcacagagtatacttggatgtggatattgatggccagcgtgtaggtagaatagttattggattgtatggcgaagttgtaccaaaaactgttgaaaatttcagggctttgtctacaggagagaagggcaagggtgctaaggggaaagcacttcattataagggaaccccattccatcgcataatatctggattcgtggttcaaggcggtgatatcattcatggtgatggaagaggaagtgagtctatatatggtggcacctttgccgatgagaattttaagataaaac

SEQ ID NO: 16765 - DNA, 596 bp, Gossypium hirsutum
  unsure (1)..(596): unsure at all n locations
  Clone ID: AI726244.1
ccgagactgatagtgtttgagaaaaaagaatataagatcccttttctcctgtcattgtaattctcatggaaaatcaaattaagatttattgttaataattagggcaaaaatttttgaacttccgggaaaaaaaaatgcgtcgggagatctcgattttggtacagcctcggtgccttcttctcttcatttctctctcaattctcctcattttcgctttctcaggagccaaacgggaggaagagaagatcgttnaagaagagcatgaaatcactcacagagtatacttggatgtggatattgatggccagcgtgtaggtacaacgccttcacctattcctacaggatacgataagtgatgagaagaaatcttatccttttttagcttacatttttttttgtataatttgtgttttacaggtagaaatattattggattgtatggcgaagttgtaccaaaaactgttggtatgttttaaattttaattttccgtccagtagttttagttctttgtaaacttaatttcttgaaaccattggctcattancaaaatgtacaagctactctcacccttatcataaaaaaaaaaaaaaaaaaa

SEQ ID NO: 16766 - DNA, 599 bp, Gossypium hirsutum
  Clone ID: LIB3543-036-Q1-K1-E8
cccggtcgacccagcgtccgcccacgcgtccgatctcgacccactctcatatcttcacacattccccgccgccaaacaagcttctcaccgctctcctccagtgcctcaccggagccctctttctccggcggaccaagatattaaataaggaagcttcaatgactgaagaagaaaaccgagagtttgatgttgatgttgatgataatgatgatgatggatttgaagatgaaaataatatacccaacagccagaataagaagaggaaaaagaagaaattgttgaatgaaggtggtgatgctgataatcgtggggtttgttatttaagcagagttccaccacatatggatcatgttaaactacgccaattgctttctcagtatggtgaaattcttaggatttatctcactccttccggccatcaaccccaagtaaaaggtaaacgccctagaccttctaaggttcaagaacaagaattttctgaagggtgggttgaatttgctagaaaagggattgcaaagagggttgctaatatgttaaacggtgaacaaattggtgggaggaagaggtcatcgttctattatgatatttggaatatcaaa

SEQ ID NO: 16767 - DNA, 334 bp, Gossypium hirsutum
  Clone ID: LIB3146-040-Q1-K1-A3
ccaacccttccgccaacccttccgggataatgttaaactcccccaatggttttttaagattggggaaattttaaggattattttaattctttccggccttaaacccaaataaaaaggaaaccccctaaaccctttaaaggtcaagaacaagaattttctgaaaggggggttgaatttgctagaaaagggattgcaaagagggttgctaatatgttaaacggtgaacaaattggggggaggaagaggtcatcgttctattatgacatttggaatatcaaatacttgagttaattcaaatgggatgatcttactgaagaaattgcttacaagagtg

SEQ ID NO: 16768 - DNA, 1114 bp, Gossypium hirsutum
  Clone ID: GOSHI-09MAY01-C52284_1
cttaaaatgaaagtctagttacaaatacataccaaactagacagtagcttttggattccataaggtcttgcaaggtcaagaaatttttctaagctctctgtatagaagaggctcaactatggaagagactcgaggaaatgacggtgctggtctccctaatgttgggcaaatgtcgggaactagaagtggatggtcttcctcgatgcagggatataatacacatagtcctgtacaaccatctgcgcaagtttcctcaccatcttctgtgttgatgttccaacaagcaagcaatccagttccgaacttcaatcctactcgtaacttcaaccaggaaatggagcggggagtgagttcttttcgtgtgcctgaaacttatggggccaagttactgtcatcgtcaatcagcgaacatgattcacaacctctggcagctcaaccttcttttgggaccaatcaagaattagcctcgtgtaaaagtagctgcaggctttttggtttctccttaactgaaggagatcttgatgcaactaaggaagacaacgtggtacatgcaacattatcattgggtcgtggttcgcttttaccttgtattggagaaagtttccatccaaatcctcctgcagtggcaagcacagtttggaagcaattgtactaaaagtaagcaatctctatgctgtcaaaggtatgcattttttttatattgcattgtagtttaatcaccaaatagcatgttcgggtccacaaatatggagttctatagtcagggttttattgaaaatgattggttcttagtttttgttttcgagttggtttggcatttgatagttttccgactttctttttacagggaactctgcaacattgtcttaaacgttatgcagctgatgtttgagcatagaaagatgccctatggttgcccaagttgcatgtatttttattgcaagaatctagttttccattacctaaaactgaaaaaacttgtaataattttatgaaatgactttgattctaacttttaactgctccatggatatgttaaaaacaccatgtaatgtattgacctctgtgatggtactctactattctccattcaagcctcgtgcacttctgttcc

SEQ ID NO: 16769 - DNA, 643 bp, Gossypium hirsutum
  Clone ID: GOSHI-09MAY01-C53964_1
atttttattccaccgaatcgaacatggccatatgagttgataccatcactatgtatagaaagatatcgtgtgtgaacctataggtcaatctatttatctgtatatatagatagatgaaatgcataatctagcatgcctatttgtgaacgtgaaataaaaaaatcaccctcgaccccatgtccgaataaaagcggttggttaaagggttggaaataagtcatatagaatcaatcgattcatggtaaaatccctctaccttgcattttattaattttttttggtcaatatcatagagggatcaaatggtatagttcttttgttggtagcttggaggattagaaacatggctattgctttccaattggctgtttttgcattaattgccactaggttaatcttaaggaatagaggacctgttgtatatgcatcccgtaaaggttggttgagtaacaaaaataatgtattttccggtacatctttatggattggattagtttttcgagtgggtatccataactctcctatttctagaaacaagccattctggatccaaaaatgacccctcccacggatttttcagaattgtagacacattcgataaaataaaaggataagtcgcctaaatcaccgttcgtaaattaaa

SEQ ID NO: 16770 - DNA, 583 bp, Gossypium hirsutum
  Clone ID: GOSHI-09MAY01-C53864_1
acgcgtccgctcgtctcattttcctaccacccaaacaacaccattctcgaaaacaacaggggagccacttccagtattttgcttgtaacaaaatttctctaatatcaccaatgcagcacgaagagtgtgtgtcctcccagctttcttctccactagcattctctcaccttagccctacggttcttaaccttccttttcactccattactcttcaattactgattccaaagctcactgtttagtcaagaaagcttcaaattagaaacttttgtagcgaaattttgagatgataaaaaattttgagccctaaatgtcgggaccgccgagggtaaggtcggcttacactgcaacgggaatggaagcgaggtcggttctgggtccggctgggaacaaggtcccgacaaaaccggcatcaaaatcgaccaaaaaaccagtccagcaaacacctgagggaaaagacaaagagaaggttaaagaactgtttactccacagaagaaaccaacgccggcccctcaatcgttgactttgactgcatcgattttgaggctttaggaagggatgctgtgaaattttcgatgagtc

SEQ ID NO: 16771 - DNA, 739 bp, Gossypium hirsutum
  Clone ID: GOSHI-09MAY01-C53424_1
ctgaaaagttaattgtctttgttactcatcatcatcttgatcatgttgaaggtctttcaattatccaaaaatgcaatcctaatgctacactgctagcgcatgaaaatactatgcgtcgcattggaaaaggtgactggtctcttggttatacctcagtttctggagaagaagacattttagttggtggtcacagattgactgtcatttttgctccaggacatacagatagccacatggcattgcttgatgttagtactaactcattaattgtgggcgaccattgtgtgggtcaaggaagtgctgctctggacattacttctggtggaaacatgactgaatacttccaaacaagttacaaatttttggagctttcaccacataccctgatccccatgcatgggagagtcaacctggggccaaagaacatgctttgggggtatcgcaagaaccgaaggagtagagaagaaagcattttgcaagccatagaaaatggagcagagacattgtttgacatagttgctaatgtgtattctggggtagaccgcactttgtggactgctgctgcatcaaaagtgaggctatatgtgggtcatatctacccccacaagagactctataaggggtcttctatatggaaaactatattgacagtgtgtcagcattagagagccttgtggttgcttatgaaccgaactttgaagagctttatcattggaccactattctactacctgtcttt

SEQ ID NO: 16772 - DNA, 791 bp, Gossypium hirsutum
  Clone ID: GOSHI-09MAY01-C53724_2
ggagaagctgctgggcctcgaagacagtcggaaaatgaaaacataagccagaacggaaacccgatgcagattccagcacaacccgatctacagcaagctgaagctggacctaatcccggaactatgagttcattcagttcattattattatggatattgggaggtgcttcgtctgaaggtcttagttcgtttctttccatgtttagagatgtgagagagcaaggacaggtttatactgacccaccgcacgaaaaccgcgcaatgcagaacgtgcagtagccccaggtgccgttacaaaagagatgaaagttggtagagtttagtgttttagatgaatgttgtatagctaatgttctaatcatatataaagaagaacttgcagtaatacacggcgcaaaaccgatgaacgttatgctgacccgatctacagcaagctgaagctggacctaatcccaaactatgagttcattcagttcattattattatggatcttgggaggtgcttcgtctgaaggtcttagttcgtttctttcctgtttagatgtgagagacaagacaggtttatgctgacccacgcagaaacggcatgcaaactgcataccccagtccttcgaagaataagttgtagatttatgtttaattatgttgatactaatgttatatatataaactaattgcttaatactggacaaaacatgaacaattccaacttaaaagtagaaattgtattaaaaaaaacataactgttaagacttttttgaagttttatgttatgttattaactatttggc

SEQ ID NO: 16773 - DNA, 488 bp, Gossypium hirsutum
  Clone ID: LIB3828-004-Q1-N6-H12
gccaaatagttaataacataacataaaacttcaaaaagtcttaacagttatgttttttttaatacaatttcctacttttaagttggaattgttcattggttttgtgccatgtattaatgcaagttatgctttatatatgattagaacattagctatacaacatacatctaaaacactaaactctaccaaccttcatctctttcgtaacggcacctggggctactgcacgttctgcattgcgcggttttcgtgcggggggtcagcataaacctgtccttgctctctcacatctctaaacatggaaagaaacgaactaagaccttcagacgaagcacctcccaagatccataataataatgaactgaatgaactcatagttctgggattaggtccagcttcagcttgctgtagatcgggtcagcataaacctgtccttgctctctcacatctctaaacatggaaagaaacgaactaagaccttcagacga

SEQ ID NO: 16774 - DNA, 521 bp, Gossypium hirsutum
  Clone ID: GOSHI-09MAY01-C53664_1
cgcgcgaagagctcctgaagcgccgattgcagcacttgaggaagctttctcgatgttacagagaccattactgggctcttatggaaaacctcaagatccagtacaggaactattattggaagtttggtatcagtccttccaagcaaaatgataatcaacagctagctgatgcccaagttgttgctaatcccattgtcgatgacattgaaagcccccctgcggataatgttcatgttgataataattttagttcgaattttaagaataatcaacattgtttgttcgttggatgtaagttcaaagccatggctttgactagattttgtcatctccatattctctccgattccaagcagaagctttataaggcttgcacttatgtcatcaaaagtgctcatgcgggacctataacatgtggaaagcccatactgagaaccgccattccttttctctgtaccggcacttccaaaagactcagaaacatgttaacagggccttgaagaagcaagtcttaatgtttt

SEQ ID NO: 16775 - DNA, 565 bp, Gossypium hirsutum
  Clone ID: GOSHI-09MAY01-C53014_1
cccacgcgtccgcccacgcgtccgcccactcgtccgcccacgcgtcccacagattgaggttaatgcttctaatggaagcattggagctcatcgtgctgttctttctgcacgatcgcctgtttttcacagcatgttttcacataacctgcaagaaaaagaattgtcaaccataaacatatctgacatgtcaattgaagcttgtcaggctttgctatgttacatttatggaaacatcaaacatgaagaattcctggctcaccggctggcacttctccgggcagctgataactatgatatatcggatttgaaagaggcctgccaccagaggctcctagaagattttggatccaaagaatgtccttgagagactccaaatggcacctttttaccaattgccaaaactcaagtccagttgcatgcgatatcttgtgagatttggcaagatatatgatattcgagatgattttaatgctttcctgcaatgtgcagacgggagctgataactgatatattctatgaagttctaaatacctggaaaggattctaagatgccaccaatgataaa

SEQ ID NO: 16776 - DNA, 733 bp, Gossypium hirsutum
  Clone ID: GOSHI-09MAY01-C53324_1
tttcacttcctctccacccttcacaatcctttcgaagaaacaaatcgttctatccggtcacctacacatcttcctcgccggagtaagtgaaagagttccgattctctcgagccacgaacaactctagcgtgtcttggtcgagaccccagccagcttcccttctaaaatcctccgttgccagacaatgcgcagatctgttcgccgaacgtgaaacttagataatgaatcaccctccaccatcacctccctcaaccccagatcccccccccactttgagcggttggaggcatgcaagagcttcggccgcgaaaggtgtccgccctcgcgtccgagcctggaaagcggcatcaaatttgattgttataaaagggacttccggtggcctgcacctctcgcaccccaccttggtgacagaccaaagagaccaaactgcacaaacaatctttcgacagatgccaggtttcaattgcaaacggacagttgcgaaaaccatcctccaacgtctcctcacttctcaagcattttgggcaagtcgctgctccaaccaatcttttattgtacgaattataggaatttggaattagattattgaaaatacgccagaaaatgattttgaccttttctggcaaattaagctgccataatttgttgtaataaggtatataggaattgtccccttctattgtatttgcatactcgaggccttcttacctatacccactccgaacgatat

SEQ ID NO: 16777 - DNA, 767 bp, Gossypium hirsutum
  Clone ID: GOSHI-09MAY01-C53244_1
atgacatactacctaagttgatgacgtccactggctcctatgaggatcttttcaggaaggagatagcgaagtatgatcacatttgtgaggaaattgcccaaaacattgaggcacaagaacaattattgatgcaaattcaggttcagaatgaagagtttggtgctgtctttaatcttgaagattataaagcatcacgagagaagtgttacaaacaaattcaagcagctttagccaagtgtaaagaaatcaaggaaaatattaacgagggcctaaagttttatgttactcttcaggatgcaatcaataatatcaagcagcaatgtagtgattttgtgatgactcgaaacatccagtgtcgagaaatgatggaaagatgttcaaaggcaaatggcaggtttcaacttccagaccgtgagagcacagggccttacccttcagttggacagccccgtcaattccaagatccagtacacagcagctaacagaatctcagagtatatcccatccttcaccgcaaaccccttattataggcctcctgagcagccaatgcatgggtatggtcatcctcctcccccatacactgccccacagcaaccatctccttaccatgttcccccatcaaccggtgctccttatcctcccccacatgcccaacaacatgcaccagtcggccatgaatacggccaacctgcctatcctgggtggcgtgggccatattataatgcccctgcagagcaatctgggtctcatcctcgacctccatatt

SEQ ID NO: 16778 - DNA, 420 bp, Gossypium hirsutum
  Clone ID: GOSHI-09MAY01-C48974_1
atttttgttgctggatagaaatgtgtttgactctggatattttcatcatttcaggcaagaatgattgatttttattacggtctgattatggttttagtccctctgttatcatttgattttaatttagtataatttggtttctttaagtttataatattgacgtgaattttaaaaaaaatggaactatactatatgcggtcacaaaacttatggaggatagttatactttttgctttcattaatgaatagctttcttgtctttatctgcccttatcaaataagattttattagttaaaggatgtttcctggatcaaccttcaattgatactgtaagcaattttcttatgtaattctaatatagaatgtatcttgttttaatagatctaatgcatggcaataaggagtcattagcattttta

SEQ ID NO: 16779 - DNA, 783 bp, Gossypium hirsutum
  Clone ID: GOSHI-09MAY01-C48914_1
aacgatgttaaccgaccgactaggaaatgaaaattcatgaagtttgggtagtgaaaagaatcatctggtaccaaattttatatcaaggctattgcacattttcttccctgccaagtttcaactctgtccaagtcaatttcatccccatcccaaaaatggcatctccaatctgcttctacctgcttttcctctccctcctctctcaaacccaactctccttttccactacccacacaccaatcgatcacggccgtccgttggtcacctcaatcgctgatgtgcacgatctgctgccaaagtacggccttcctaagggtatcgttcccaacaacgtcaagtcttacaccctttcatccaccggagacttcaccatcgagttggaaagcacctgctatgttcagtttgatgaccttgtttactatgacaaaaccatcagtggaaagctaagttacggggctgtgcacgatgtgtttgggattcaagctaagaagctcttcttatggttgcctgttactgggattgaggttaatggcaaatcaggtatggttcagttcttcgttggagctttttctatggagtttccagctgtacagtttgaagatattccagtttgaaagaagaaggctgttctgagggctgacctgtttgcttctatgtgaattcaggactggttcctccgtccattgctggtggcggcaaccttacttgcctgttttatttcatgcccccaattaagacttcttgttagctcaataatttctttgaaagagccttactatattt

SEQ ID NO: 16780 - DNA, 482 bp, Gossypium hirsutum
  Clone ID: GOSHI-09MAY01-C48844_1
caacatcccggcggcctctttcggcatctctactatgatcggcgttacggtatggatacggatttacgaccgtttaatagttccatggctccaaaagtccaccaaaaaggaaggaggaatcacattactgcaaaagatgagtataggcatggttctcgccataatcaccatggttatatccgccattgttgaagatagaagaagagccttagctttgagtaaccccatcggcatagattcaaagaaacgatccttttcttcactgtcaacaatgggggtaaatccctcagcttacattaataggactctccgaagcattcacattaattggtttaatcgaattttactacaaacagttccctgaaaacatgagaagcattgctggatcattcacttttattggccttgcattgtcgagttacctcagcagtttcttgatatcagttgttcataagatctcggaaagatcccaaacaggtgac

SEQ ID NO: 16781 - DNA, 869 bp, Gossypium hirsutum
  Clone ID: GOSHI-09MAY01-C48864_1
aaaacactacaccatggatgaagtgaagctctttgggttttggccaagtccttttagtagaagggtcatttgggcattaaagctaaaaggcgtggaatatgaatacattgaagaagatctgccttataataagagtgatctgttgttgcagtacaacccagttcataaaaagatcccagtgctcgttcatggaggaaagccaattgcagagtcattggttattctggaatatatagatgaagtgtggccacataatcctttgttgccaaaagatgcttacgagagatccgtagctagattttgggccaaattcattgaggaaaagactcaaccaatgtgggaattctttcgtaaattcggcgaagaacagcaaaaggcaatcgagaacaactatgaaattctgaggacgattgaggaacatggtcttggagacaaaaagttctttggcggcgaccaaattggcgtagctgaccttgtttttggaatggttattcatatgttggcacccatggaagaggtggtggggggagtaaagttcattaaagccgatagcttcccacgcctgcatgcctgggtcaggcatttcagcgaacaccctgtgatcaaagacaatgtccactattacactagagttgtggatttcttgaaaaaaagaatagaactttataggaaatctcaacatagtcactaaaaaattaagcactcttgatattgagaaataatgcataaggattgggattttcttttcgtacatttctatgttatctccatgcattgtaagttcgtaacactcactgtttgccaataattaatgtttagtgaggtggatgagctgaatgaatatggggaggtttccgagacaagctttg

SEQ ID NO: 16782 - DNA, 879 bp, Gossypium hirsutum
  Clone ID: GOSHI-09MAY01-C48554_1
cccacgcgtccgtgccttatttttagcaattacttcccttgttttaggctcaacaatagccagtgatgaatttgatcctgtgcttgacatctcaggtcaagagctccgaacaggcattgactactacattttgccggtaatccgcggtagaggtggtggcctcactctagccagcactggcaacgagacctgcccacttgatgttgttcaagagcagcaggaggtgtcaaacggtctcccattaacattttcacctgtgaatgtcactcaaggcgttgtacgtgtatccactgatctaaacatcaagttctctgctgcttcaatttgtgtccagaccactctctggacactgcacttcgatgaatcggtacaaaagtatatagtaacaaccggtggagttgaaggtaacccagggcgtgaaactctgagcaactggtttaaaatccaaaaatttgaagacgactacaggcttgtttactgcccgacggtgtgcaatttctgcagacctgtgtgtggggcattgggtgtttttatggatggtggaactaggcgcctggctattagtgaagagccattaaaggtcatgtttaagagggcttgaagctgttgcgcccatctaccttattttccttgatttaccccacacacattctcacttttatatactatgtaatacatatcgcaataatgtaaatcttgggaaacattataggaaatatatatatatatatatatataacaaaaaaaaaaaaaaaaaaactcgaggggggccccgtacccatttcgcctatatgagtcgtatacattcactgccggcgtttacacgtcggactgggaaacttgcgtaccaactaatggcttgcagaatccccttcgcag

SEQ ID NO: 16783 - DNA, 624 bp, Gossypium hirsutum
  unsure (1)..(624): unsure at all n locations
  Clone ID: AI055331.1
atgaagactgccttatttttagcaattacttcccttgttttaggctcaacaatagccagtgatgaatttgatcctgtgcttgacatctcaggtcaagagctccgaacaggcattgactactacattttgccggtaatccgcggtagaggtggtggcctcactctagccagcactggcaacgagacctgcccacttgatgttgttcaagagcagcaggaggtgtcaaacggtctcccattaacattttcacctgtgaatgtcactcaaggcgttgtacgtgtatccactgatctaaacatcaagttctctgctgcttcaatttgtgtccagaccactctctggacactgcacttcgatgaatcggtacanaagtatatagtaacaaccggtggagtttaaaggtaacccagggcgtgaaactcttgagcactggtttaaaatccaaaatttgaagacgactacaggctgtttactgcccgacggtgtgcatttttgcagacttttgtggggcattggggttttatggtggggaactagcgcttgctaatatgagagccttaaatcatgttagaggctgnactttgcgccatttactatttctgattcccaacactttacttatta

SEQ ID NO: 16784 - DNA, 704 bp, Gossypium hirsutum
  Clone ID: GOSHI-09MAY01-C48674_1
cttttaattcttcaaaacttcatactttaccccattttgagctaaaaagattggaactttcatacctcaaaaccctatcttccatggcgaaaacaagacctggctccttagctcccaagtccaaaccagggaaaaaggacctcgactctttcaccatcagaggcactaacaaagttgtaagagttggggattgtgttttgatgcgtcctccggataatggtaagcctccgtatgtggcacgggttgaaaaaattgaatctgatagtaggaacaacgtgaaggttcgagtccgatggtattatcgtcctgaggaatcgcttggaggaaggaggcagttccatggagcaaaggagctgtttttatctgatcactatgatgtgcagagtgctcaaaccattgaagggaagtgcattgttcattctttcaagaactactctaagcttgagaatgttggggctgaggattacttttgtagattcgagtataaagctgctaccggagcctttacgcctgaccgggttgctgtgtactgcaaatgtgagatgccatacaactcccgatgatctcatggtacaatgtgagggctgcaaggactggtatcatcctgcttgtgtggacatgacaattgaagaagcaaaaatgttggatcactttgtctgttttgaatgttccgaggatgatctgaaaagatcacaaaacggatt

SEQ ID NO: 16785 - DNA, 369 bp, Gossypium hirsutum
  Clone ID: LIB3135-048-Q1-K1-E9
aaaaagggccgaggcacgcgttcgctatgaagtgcacagtgttcacaccatggtttggaagtgcatcgttcattctttcaagaagtacactttgcatgaggatgttggggctgatgattactattgtaggttcgagtataaagctgctaccggtgcctttactcctgaccgagttgctgtgtattgcaaatgtgagatgccttacaacccttatgatctcatggtgcaatgtgagggctgcaaggactggtatcatcccgcttgtgtggacatgacaattgatgaatcaaaaatgttggatcacctttgttgttccgaatgttctgaggatgatccgaaaatgatcacaaaacggatttcattcatcac

SEQ ID NO: 16786 - DNA, 431 bp, Gossypium hirsutum
  Clone ID: GOSHI-09MAY01-C48194_1
cccacgcgttcgcgaagccaacgctcatcacgccctcccactcaataactattgccatcaggttcagtgtcaggtaaccgcaacaaaccaaaccacgcttgaaccagccaggaactcacccaagaagcattacaggggagtcaggcgtcgcccatggggtaaatacgccgccgtgatccgtgactccactcgacaaggggcacggatgtggcttggcacattcgaaacagctgaagctgctgctttggcttatgacaaggcagcttataggatgcgtggttcaaaggctttactgaatttccctgctgaagttacggtggaaccatgatcggttcatagattacggccgaatgtgagctcaaaaagattggaagaaacaacctgtggttcaggtagtagctccaccgtgatttcatttggggcatccatat

SEQ ID NO: 16787 - DNA, 524 bp, Gossypium hirsutum
  Clone ID: uC-gsronu33B169f05b1
ctattatttcccgcttcttctagggttttacatataacaataattttctgaaactcttaccagaaacaagggtttgttatttattggcgggagctgaatccttaaaaataaatacaaataagagattgtttctttctattgagttctttaaaggaaagattcatggcgtattctcaagcacgagacttcatgttctgtaacttgtgtggtacgatgctgtctttggtttcacctaagattgctgaatgctctttgtgtagatctaaaactagtgctaaaggtattgtgggacgagaaatcggctacacactcactgttgaggatattcggagagaccttggcatctcacatgctgcggaagagatgacgacaaaagaatcagctgcgttgatcaagcagacttgtaaatcctgtggaaacgcaaagcttgagtacactacccgacaaatgagatcagcagatgaagggcagactgtattccttggatgcccgaagtgtaaaagaagggataccgaaaatgagtc

SEQ ID NO: 16788 - DNA, 361 bp, Gossypium hirsutum
  Clone ID: LIB3135-041-Q1-K1-G9
taaaacacagtttattggtgagcttgggcccaaattgttaaaaaagttaaaattgaggcatatgtaaaatgggcttgcatagacgctaacactaagcgctaaatcatcttctccttcccgcttcttctagggttttgcttctgaaactcttaccagaaacaagggtttatcatttattggcgggagctgaatccttataaataaatacaaataagagattgtttctttctattgagttctttaaaggaaagattcatggcgtattctcaagcacgagacttcatgttctgtaacttgtgtggtacgatgctgtctttggtttcacctaagattgctgaatgctctttgtgtagatctaaaa

SEQ ID NO: 16789 - DNA, 676 bp, Gossypium hirsutum
  Clone ID: GOSHI-09MAY01-C48364_1
cggcgcgtgggtcgcccacgcgtccgggaagctgtgggccttggtggttggcattggctggttttgaagaatggcgttgaagtcaagttgcaaagaacgcattgagcgtgttggaacatcctaccggcaacgaagtagacgatgatcatgatttggataactcgagcagtggctccgacattgctagtagcatcgagttccagaggccagcgaaacccagagttcgacatacgaaaccttgggttccatctgcatccatgaaatcaacgaatcgtaacggttacagagacgtccgatccattattcatgcgccacaatcgggtggcatcaatgcttattcaccaagggaacaaatgcttaatactgtgcagcagcattttatgtcgcagctgccgttgaacgaggtacacgtgatatcggaattcatcacagcggctaagagactgaaaacggtagacggtgacaccaagggtgagcaactttgagtgttgtcaaacattgtataatttacatacatatctttaactctaaccttagattagaatctaatttgaaaaaaaaaaagactaattgggaagagttgtcgctcaaccgaccaaccggattctaacctttgtaatatagagggtctatgcccttttgttaattttcttctagtatatctactatttccaac

SEQ ID NO: 16790 - DNA, 447 bp, Gossypium hirsutum
  Clone ID: LIB3135-044-Q1-K1-D6
tcgcccacgcgtccggtgggccttggtggttggtattggctggttttgaagaatggggtggaggtcaagttgcaaagaaacgcattgagcgtgttggaacatcctaccggtaacgaagtagacggtgatcatgatttcgataactcgagcagtggctctgacattggtgagaaagaccatgatttccctagtagcattgagttccagaggccagcgaaacccagagttcgacatacgaaaccttgggttccatctgcatccatgaaatcaacgaatcgtagcggttacagagacgtccgatccattattcacacgccacaatcagtaaatttggcaagactcgataccaactcgttacgaagatattgcaaacacttcaaactcggtggcatcaatgcttattcaccacgggaacaagtgcttaataccgtgcagcagcattttatg

SEQ ID NO: 16791 - DNA, 665 bp, Gossypium hirsutum
  Clone ID: GOSHI-09MAY01-C49984_2
cccaccttcaaaatctctgtacatgtttttatttttcttgtctatattatcaaaattttaaaccctcctttctctctctctctctctctctctctctctctctctctctctctctttcatttcttttctttttctctcccacaagttgcagttgcagagcttcgccattgttgtcttccttcaagctttttcagtttcttattcactcttcttcaacacccttttgatttttgctcttcaaccatggctgctttagtgcttccgctgctcatcctggctgccatcactggccgctcaagtggcaactggtgtatatgcaaagatggtgtcagtgatacagtattgcagaagacactggactatgcatgtggtgcaggcgccgactgtaaccctatccacttgaagggatcctgttttaaccccgacactgttaaggctcattgcagttacgccgttaacagttactttcaaagaaaaggccaagctcaaggcacttgcgatttttccggcactgctaccgttaccaccgctgaccccagctacactggctgtgctttcccatctagtgccagtaccgtatgcacccaccacaacactcacatccatacttttatccaccatacccttgttctggatcccaattaacatcacctcaacaagtacaa

SEQ ID NO: 16792 - DNA, 1050 bp, Gossypium hirsutum
  Clone ID: GOSHI-09MAY01-C49984_1
ttaaattttaaaccctcctttctctctcacacacactcccacgcgccccatactctctctctttcatttcttttctttttctctcccacaagttgcagttgcagagcttcgccattgttgtcttccttcaagctttttcagtttcttattcactcttcttcaacacccttttgatttttgctcttcaaccatggctgctttagtgcttccgctgctcatcctggctgccattactggccgctcaagtggcaactggtgtatatgcaaagatggtgtaagtgatacagtattgcagaagacactggactatgcatgtggtgcaggcgccgactgtaaccctatccacttgaagggatcctgttttaaccccgacactgttaaggctcattgcagttacgccgttaacagttacttccaaagaaaaggccaagctcaaggctcttgtgatttttccggcactgccaccgttactaccgctgaccccagctatactggttgtgctttcccatctagtgccagtaccgcaggcaccaccacaacaccaacaactacaccgtcatccaccacaccctcgtccgtgaacccaatcaacaacaccccaacaagcacaacaccattcggttcgacaacacctactggaatattgggaggagttggcaacggcttaggcccgtccggaactgggatcaacacagattacagtactgatggaggatttaggctgcaatactgcttctcttcctatgcaaccctcttgatttcaggattgatgctattgtggggttaaaagaagttacaagggaacatgttttctggtcattcagtcttgttctcttctagtgtatggtgttgttgatctaagaacatgtttgctaagggttttttttttttttttgggtatgggttttaatcattttaaaagcatgacttttatgggtatggaattttggttttctaggttttatgtacatttaattggaaattgttatttttaggaggatttggcaccacaaaatcatcctcttattagtaattggccgtagcaatttt

SEQ ID NO: 16793 - DNA, 301 bp, Gossypium hirsutum
  Clone ID: uC-gsronu33B046e09b1
tctcactgataaggctcattgcagttacgccgttaacagttacttccaaagaaaaggccaagctcaaggcacttgtgattttttctgcactgctaccgttaccaccacatcacctacaaccacacccttattcacaatactcttgtccgtgaacctaattaatatgattaaaacatgcttatctccttttgtttctacccacttacctgaatattgggtggagttgtctattacttttcgtttctcctatatataatttattaatttttttttctttaaattattcttttttttatcttta

SEQ ID NO: 16794 - DNA, 646 bp, Gossypium hirsutum
  Clone ID: GOSHI-09MAY01-C49534_1
gacagatccatcacaaatgtcatcaaggtccataaggaggcagcttggccataatttactttcttctttgaaatatacctttaaatttgataggagaaattcaacaatgcgtccaactcggggttatgcttttgtttctacgactcaaatcggtggcctcacacctgatagccggagcttacggtttctgcggcaggagtttgatcttcgctacgttgttcctcttggattttatcatgctgcccttaattttggggtttctggcggtgttgtctttccatgggggaatgggttctcaagtaggccgtcatctttgccagaaagattcttcttaggtggcaacatatctccggtttgtgctttaggagggccaacagccttgtggggatttaagacaaggggattgggaccgacagtaccaaaaagacaggttaacaatgaaaatgccgatccctctggtgtggatttccttggaggagaacctcgctgtactgctttggcagacctttctttgatcttcatttagtggttagagaaaagggatccatgctatgtgttgatgtgctggtatgtgctaattacagagatgagatcgcatatcttgtcaaagtcgagagcactccgagtcatagtgttgacttgcgtc

SEQ ID NO: 16795 - DNA, 579 bp, Gossypium hirsutum
  Clone ID: GOSHI-09MAY01-C49484_1
cgacaaatagctgaattaaattttcgaatatgtatgtgtttggaaatcggctcagagcccggagaagcaattccgtactgtcagaaggccatctccgtttgcaagtctcggctgcagcgactcacaaatgaagtaaagacttcctcagacctggcatcatcttcagctacatctgaattggatgatggtgttcaacagtcctcctctggctctcaaactgtcatatctgtcaaagatttagattgcagagatcgaaacacttgctggacgtgctgaagaccttgaaaagaagctcgaagatctacaacagctggtagccaacccaaagtccattattgccgaaatcctgggaatggcatctgccaaggcaaaggctgatgagaagagtgcatctcctgctgtggggagttcatcgcggatgggtactggtaacaggaatggaggttttgattcttcaccggttttcactggttatacaaatggggctgcagcagtcacgcatcttggtgtcttaagacgaggtgtgaaacctgttttgatgagtccagtagaatctggaccagcaaaaaaaccagtcac

SEQ ID NO: 16796 - DNA, 666 bp, Gossypium hirsutum
  Clone ID: GOSHI-09MAY01-C49454_1
cagtagtagcaaattgaagactgaaaccgtcagcaagaaaaatgttttgctttacaagataagctcttttcaatatatgcagctggtaatacagtacccattccattcttaagggcatcggatatatccccaattgcccttttatcagacaatatcctcggaggcatgcagcaggatagcactggaaatgtggcagttgaagcactgcaggaactttttgccggtgatggacaatcaaaaaaaggtcgaagaacacaaaacgaggtgccacttcctcctagtgtttaccaaagactcacttcaagttctacgctaatgaacctggcacaggccctagcttaccacaaaatgtgctacgaggagatgccgcttcaagagttgcaagcaacacaggagcagcaaaccatccaaaacctatgcgacacactaagaaccattctccggttatagatagatagtcgaatgctacatttcttttttcggttgttgtatgttattgtcattgtcctccgttgctttaggatactgcagggtatgttgtattatataagggtatacatgatggcaaaatgaaatgcaatctaaatcaagctttgaagcgtatattgtcgaaaccgttttttgaaaaaaaaaattaacttttatgctttttttctcctctttctt

SEQ ID NO: 16797 - DNA, 480 bp, Gossypium hirsutum
  Clone ID: LIB3829-024-Q6-N6-A3
atacgcttcaaagcttgatttagattgcatttcattttgccatcatgtataaccttatataatacaacataccctacagtatcttaaagcaacggggataataacaataacatacaacaaccgaaaaagaaatgtagcattcgactatctatctataaccggagaatggttcttagtgtgtcgcataggttttggatggtttgctgctcctgtgttgcttgcaactcttgaagcggcatctcctcgtagcacattttgtggtaagctagggcctgtgccaggttcattagcgtagaacttgaagtgagtctttggtaaacactaggaggaagtggcacctgtcaaatgttgaaaaccgtaaatcattgtgtgtgtgtgtgtgtttgagggggggggggatgcacaatgaacagggagaggaagagagatggagggagatgggaattgacctcgatttggggttcttcgacccttttttga

SEQ ID NO: 16798 - DNA, 394 bp, Gossypium hirsutum
  Clone ID: GOSHI-09MAY01-C49774_1
gccaaatatgaaaataaagtgaagttggcactcggtagttaaatagtaatggttgattattgcttatccggtcacatggtcgatcgagtcagcaggttaaccccccaaagcgcctgtgggaataacgtagtaaaaagagtagcagttgaaatgataaaattctaccctcatttctttttttgcctattttggcttatttcattatgcctatggcgttatcatgatgtcctcgtattgtacgtacagaagagtgtcaaagttgatcaaagtaacttctttatgatgtggtcgccatcgagtacgtattccttgtaaatggaaaaaaaagtaaatggcttttgatatatatatatgcaaagaaaaaaccccgactgctttttgattggaatattgt

SEQ ID NO: 16799 - DNA, 1137 bp, Gossypium hirsutum
  Clone ID: GOSHI-09MAY01-C49654_1
ctttactctcaccaccttttcagaaccctttaccttatctaattccatcaagcttcagattctttctccattataccttgagagaaaaaagaaatgggaggcaaagaagaggatgttaggctgggagcaaacaagttctcagaaaggcaacctatagggacaacagcacagacagacaaggactacaatgagccaccaccagctccacttttcgaacatggtgagctctactcatggtctttttggagagctgggattgctgagtttgtggcaactttcttgttcctttgcatcaccgtcttgaccgtcatgggtgttaatagggcaccttctaagtgtgccagtgttggtatccaaggcattgcttgggccttcggtggcatgatctttgcccttgtttactgcaccgctggtatctcaggtggacacataaacccagctgtgacatttggtctgttattggcaaggaagctttctctgaccagagccatcttttacatggtaatgcaatgcctgggcgcaatatgtggtgctggggtggtgaaaggattccagccatcaagatatgaggtgttgggtggtggagccaatgttatgaaccatggatacaccaaaggggacggccttggagctgagattgttggtacatttgttctcgtttacactgttttctcagcaaccgacgccaagagaaatgccagagactctcatgtccctatattggccccattgccaattgggtttgcagtgttcttggttcatttggcaaccatccccatcacaggaacaggcattaaccctgccaggagccttggagcagccatcatctacaatagggaccatgcttggaatgaccattggatcttttgggttggaccattcattggggctgcacttgctgcgctttatcaccaaatagtcattcgagccatcccgttcaagagtagagcatgaaatctgggttttgttctttatctactactttgtgtgtaaagtgatcttatttccgtactaaaaactttccgctgcaagagcgtaataggttacttgctaagaacttaaaagaatattataataaaatatttgtatcttcattacattttattatactaatttatgtagcatgattttgcactc

SEQ ID NO: 16800 - DNA, 919 bp, Gossypium hirsutum
  Clone ID: GOSHI-09MAY01-C49604_1
cctcgtgccggcacgagggcattattgcccaagttcctcttgttcctctctaaaaccgaaggaatccctagtgggagccatgtcataagggctgcatctgggaaatacttttatttcatcgtgtttaatgttttcattggtgttactattggtgggactttgttcgcttcaattaagaccattgaggagaaacctaactccgttttcgacatgctggcaaaaagtctgcctggcaatgcaactttcttccttacattcgtggctctaaagttctttgttggttatgggcttgagctttctcgaatagtccctttaatcatatatcatttgaagaggaaatatctttgcaagaacgaagccgagttaagagaagcttggtttcccggagatattaactatgcaactagagttcctagtgacatgcttatcgtcacaatcgttctttgctactcggttatagctcctgtgatcatcccatttggagtactttactttgccttgggttggcttgttctccggaatcaggcactcaaagtttatgttccagcatatgagagctatggaagaatgtggcctcacatgcaaatccgaatcattagtgccctgttcttataccaagttaccatgttgggttactttggggtgatgagattctactatactcccatcctgggtccgctcccgatattatctctcgtcttcggctttgcctgtaggaagaaattctatggggctttttgtcacacggtgctagaggtcgcttgccatgaactgaaagaaactccttacatggaacagattttctattcctttatcccacccaagcttgatctctgagaaacaagaagatgagctttttgaagatgctttgtcttaagttttaagatctgaattttttgtttcatgtcttttattcgtt

SEQ ID NO: 16801 - DNA, 997 bp, Gossypium hirsutum
  Clone ID: GOSHI-09MAY01-C49104_1
caacctttaaggtaacattaccatcaggatcatccccgccacttccacttaaagaaaagcttccctttttcagtctgaaggatgataaaggaaagatagcaaggggaatatgcatcacaaagacttctttgaagcctgatatatcgaactttttggttgtatatcctccaagatcattgtttcctgaacaggttacttcaatcagacttctccaaatagctagcactcgggctgttggtctgccaggcatgtctgtgttatatatctcagcatcatgtaatgctgatgatcaaggaaagaagttaattcatgctgtcgtgaacacgcttcttacagttcctctagattctgaaagtaatgctgcagttcaaagtgagactgcagaaattggtagtgcagttcaagatgagacttcagaaagtagttctggaggtccaagtgattctggagaagaaaaacctactctactttggagtgcgttgtatagtcaggagctaactttgggtcaagttgattttatctgttcaactcccatgccagatggtaaactgaactacaatgatctcatagatacgacttttaagatatttcaggagatttaccctgaggaagaattctttccggagacatccttagagaatcctgaggttgatggtgatgcttctccggagacataaagatttactgaatggaatataatctctacctaatggagcatctaacaatccagctccttttccaagactgtggtctagtgattggaggatgccgttatcaaatgatgtatttgaagtggtgaagaaaaaaggaaagggatttgagaggacattggggtttacggattttgacttggtttcccatgtataaacttgtgttgtatccattctttactagttgtattttggtcggattctttgcttcttttacaggtctgatgtaacagtaaataaacaattctccccgcgaagtttgaaaaaagttatagcggcagttatga

SEQ ID NO: 16802 - DNA, 802 bp, Gossypium hirsutum
  Clone ID: GOSHI-09MAY01-C49084_1
cttgcaacatatatcgagcctgggaagtgtttacatgggacggttggcagtccattttacatagcgcccgaagttttggttgggggatataatcaggctgctgatatttggagtgctggggtgattctatacatacttcttagcgggacaccaccattttggggtaagactaagtcaaggatatttgatgctgtgagggcagctgatttgcaattcccgtcagatccttgggatcggatttctgattctgcaaagaatttagtcaggggaatgctcaatacggatccctctcaaaggttcaccgcactgcaggttttacatcatttatggatgaagtacgatgaatcttgccctgaagaatcaagtgagtttgtataccacagtcatggagagttggaggttcatagtggctcattttcgttgtcccgggatcaggatatcagctttggtgctggatcgccaatcatttatgacgttcaatcaccctcgttaacatgcagaacctcattttcttcttccttggtggagccatctacaacttgctttgctttgggtggattttctttccacggtggtaattctgaaaccttagaattttcttctgctgttccatcaatgccaagctttgcattcttcagtcctagctccgttgcagaacaagagaacattgccctggttgagcgatttgctggagatacagggttggataaactgctcgtgctaccggattcttcactttcctgtggacctgaggcaagagaaaaggagaccaagacagctgaattcggaaggacaggaggaa

SEQ ID NO: 16803 - DNA, 411 bp, Gossypium hirsutum
  Clone ID: GOSHI-09MAY01-C49014_1
cccacgcgtccgttaatgccaaaaaaaaaaaagtcatagtttcttcatttctagcttagccatggaaatcgaaatatggcacaggcaatgctcaagcagattggaaaccatcaaattaggccggagctacacgcaacgtggccacgatgaacattccaagcccaagtggagaacgttttggaagatattcacaagagaaaggaagaaaatcttcgcttctccagttggattccaggcttcttatgatccagatgaatattcacagaattttgatcaaggaaccggttgggctgaaccggataatctttctcggtctttctcagctcggtttgctgatccatctaggatctcaagaaggaacccgttgcgttcatgtgattggcaaatgaatgacagctaagaatgttcttc

SEQ ID NO: 16804 - DNA, 564 bp, Gossypium hirsutum
  Clone ID: GOSHI-09MAY01-C49374_1
tgactggatagattacccttgcaacaacgtagctttcaagctctatgagattgtgaactaccaacaatgcgtggacgacaatgtgtctgatttccacaggacaggacgactgattcaagggtgccaatttgtaaccgtgcgcacctgcttcgagttcgaacgggacgcgattaaattgcttatcaagctttaccagaaacctgtggttccggtaggcctgttgcctccgttgttatcactgccatcaaacgaggataacaaatgggaagctataaaaagctggcttgacagccaaggagagaaatcggctctctatattgctcttggcagtgaagtgaatctaagtgaagggtccatccaccaattggcatttgggatagagaaatccaacttgcccttcatttgggtggtaaggaaaccgtccagtgggtgaagggcagatgaatgacataattcctccagggttcgaaaaacgagtgtctaacaggggcttagtgttgagggattgggcacctcagttgtggatattagcccactcttcttgttggggtttcctgactcact

SEQ ID NO: 16805 - DNA, 646 bp, Gossypium hirsutum
  Clone ID: GOSHI-09MAY01-C49364_1
gcatttgttgcaggaaacgatgctggccgtgcatacaatacttttccaaagatgggagatgtgtgggttcctgataatatatttgagttgaaaccaacaatccgaaacttctttgagaatacatccatggtgcagcttgaccatcgtatccttgcaactaccactttaatctccatttgcggtttatggtggtcaaccaaaaagctcgacatccatccagctattcgaactttggttggagccacgtttggcatggctgctcttcaggtaaccctaggtgtatcaacacttttatcatatgtgcctgtttcacttggcactgcacatcaggcaggggccttgacccttttaacactgatgctacttctcaatcacactgtgaggaggccatcaatgtcacttttgaaaacactgcctcaggtgacaaagacagcttggtagccattgtcttttaagtatattattaggtagattaatcaaacacttcaatttgttatttggttcacatatcgttccattttttaaggtcattttgattgtaaagacctcaacaaggagaatgcatactgatttgtaatttcgaaacttgtttgctagcactgaaataaagtcttatcggcaaaaaaaaaaaaaaaaaaaaaaaaaa

SEQ ID NO: 16806 - DNA, 583 bp, Gossypium hirsutum
  Clone ID: GOSHI-09MAY01-C49334_1
cttcatcagaagttgccgccaaggactcccttacgggagaacatgttcaaaatgatcaggctcaagagctcctaggaactgaaaagacacaggctgaccaggctgaggcttcgattattgaaccaaactcctcagaagctcagacatctgtaccgcaatctggcattactgacgatgaagagcagcttgctcagaggcctgaggttgaccttgttgaggcctgcaatgaggaatctaatcctgcagaaggaccatcctcggcacaagccatctctgatgaatctaccaggcctgagaatgatccagggcttacacgtgcatcctcactgcaatctgaaaagcctgaggttcatcaggttgagacctgcaatatggaatcgaatcccacaggaccatcctcatcacaagtcatctctaatgaatctaccaacccagggcttacacaaaacgagctgcaatctgaagatcccgccgaggcttctcagtcacccaagactgaaactgttgatgtctttgatatggacatacaccttaaagaaacacaagatccttcacctgaactggaagatgatgctaaagtttc

SEQ ID NO: 16807 - DNA, 415 bp, Gossypium hirsutum
  Clone ID: LIB3135-056-Q1-K1-H7
gtcggaagtagtaagcatgctagaaggaaggagtggcatcccggaaatggtccctgatcctggtagttacaatcaagatttgaggtttaaagccatcagagaccatcataagtctatgaacaataataatagtaagtggagcagcagctcagcatctggtaatgagattgaggagtcctacttaaggttcaaagcaatggaaacccagacatcaatgtcagctgcatcgtggaccgcctcttccacaatgtctgaatggcagcattcatagttggatttattaatcttcttgaatctgtttgagtacagcctattacttgtgactcatgattgtgaggttccattgaaacatggtgtgaggtaagggggggatgctttatttattaatttggacaaggtgaaaaccttacaagat

SEQ ID NO: 16808 - DNA, 342 bp, Gossypium hirsutum
  Clone ID: LIB3135-056-Q1-K1-H5
ggcctgtcagaagtgagactgacgtatgggatcatgaagagcatgcataatagaatgccaggctacacgatgatgttcctattcctggataatacgataagatgaggaggatatgactcatgagcgtttaaggctgaggacatgttttataagaggagcgctgctctatacatggtgttgtgattgaggagtcctacttaaggttcaaagcaatggaaacccagacatcaatgtcagctgcatcgtggacccgcctcttccacaatgtctgaatggcagcattcatagttggatttattaatcttcttgaatctgtttgagtacagcctatacttgtgactc

SEQ ID NO: 16809 - DNA, 673 bp, Gossypium hirsutum
  Clone ID: GOSHI-09MAY01-C49264_1
gggaagccttagtaactagtactaggagagaaacaaagagaaaaaaaccagatgtccaccacctttggaaccatgaatgaaactctgtgtacctcttcttcttctgagtggaagcaactgtatgaacaaaccattgatgcttgtttcggattctccgatgctactgccgtcaccgtcaccacgaacaacttaacctccaacacttcatatgcagccgccgttgaccactacttggcccccaaggcctgtatatcaaagtctattcggagacgatctagagcttctaagaggacacccgtcaccctcctcaatgccgacgccaaaaacttccgatccttggggcaacaattcacgggctgtcgccgtcgtagcacctccttttcatttgccaaaaacccaagaggtcccggcaatataaattttgcccatgttaatccaaagaacgacgaccaccaccaccataattacactagtcattcagatcatgcttcaacattaccgcagcctggcactaatgattgttggaagtctcaactgctgcaaccgcaagaaaagcatgaacatcatcatcatcatcaacaacatgatgatgagtaccaacagcgagtgtcaaatgaagaacaagaaggcgagttttcttttgacagaataacgtcgactgatcatgatgatc

SEQ ID NO: 16810 - DNA, 398 bp, Gossypium hirsutum
  Clone ID: GOSHI-09MAY01-C44834_1
tttccacgcgtccggccgcctcctaacaacatgggtgggatgccaccaggtccaccgaatcaaggatggtctggtaacatgggtggaaatgctcagaatttccaaaatccttaccaaggtaatacacagaacgtgcaatatccgaataactatccaccaaatatgggcgggcatggtgggaattaccagtcttagatatttgttttatatgaattgaaggaagacatttttaggaatattgtagataaagagaatatctgttgagcttgtggctattaaaatgaattgctgtactgctgtgcatgtttgctaagttcatcagtatatcttcataagtacgaaattttgtcgtgttggatggactgctggggatgttttctaaatatattattatgatg

SEQ ID NO: 16811 - DNA, 740 bp, Gossypium hirsutum
  Clone ID: GOSHI-09MAY01-C44554_1
ttgtaatactccattcaacagcccgaaagaaggtgtaatttccaagagcatggcaaattgtgtgatgatgagacatgtttctcttgcaatagtattcgggaagcagaatctcagattgtcaggggaacacttttaataccgtgtcgaacagcaatgagaggtagctttcccctaaatggcacatatttccaagttaatgaggtatttgccgaccatgattctagtctgaacccgattgccgttccaagggaatggctatggaacctgccaaggagaatggtctactttgggacatccataccttcaatatttaaaggcttaacaacagagggaattcaacactgcttctggagaggatatgtttgtgtgcggggatttgaccagaaatctcgagcaccccgtcctctaatggctagattacatttcccagtcagcagattggccaaagcaaaaggcaagggtgctggagaagacgagtaaatgatagcagagtcataagatccaaacaagtcaacattgaccaaataaccatgtatgaagaaatggaattgcattttacaccactgacttggcttgtagggaaatgtgaaattccttgtataacccataatggaaaagcatgtagggctgtatactgtttaacaaggttgtaattatttagtttcgtgctcaaattttgggcaatttttcagaaatcagtttaaaaaaaaaaaaagggattgacaggaacccacaccaaa

SEQ ID NO: 16812 - DNA, 455 bp, Gossypium hirsutum
  Clone ID: uC-gsflnu33B058b08b1
cctacgcgtccggtgggatgaccaaatccaggttgtttggctatgggtcagtcactcgaggaagctaatatgcatcggccatcagtacattaattgaagagatgaatgctaagcatgtcgagcaaatacaaacaattcaagctgaacaagcagttcgagagaaaactctactcgaggaagcaaaatctcgatttcgtatggaggttgcagagcgagaagctcgtttgatagctgaggcagaagaaagatttatgaaattaactgaaattcgagaggcaaagctcatggatatgtttgatgctcgtgagaaaaagtatgaggctctcatcaatgagtgtatggcaaaaggaatgccaattgaatttcaaagtagccgacatgaagataaagccttcagttcgaatgatgatgaatgaggcttgctgcatattatgcattacatatatatgttatag

SEQ ID NO: 16813 - DNA, 399 bp, Gossypium hirsutum
  Clone ID: LIB3148-027-Q1-K1-F10
gccaaacaagcagttcgagagaaaactctactcgaggaagcagaatcttgatttcgtatggaggctacagagcgagaagctcatttgatagctgaggtagaagaaagatttatgaaattaactgaaattcgagaggcaaagttcataaaaatgatggatgctcgtgagaaaaagtataaggctctcatcgatgagtgtatggcaaagggaatgtcaagtaagtccaagacttttcataataagcatagtaaggtgactattttataactagattgtcaataagtttattaatggtttaatagacattgcttgttgtaattgaatgctatgtccttatttgatgtcttcattgcttgctcaaccaataattagtagtggatgtattgatgaaaattcttt

SEQ ID NO: 16814 - DNA, 784 bp, Gossypium hirsutum
  Clone ID: GOSHI-09MAY01-C44504_1
gaattccgggtccgccccacccttccgcaggcggcgggttccttttttttttttaccaaagttcatggttttggtcctccttgggctggcctggtccttaaagtctggctttgggggctaataatctgtttccattgttctcatcttcctgctcttataaatgcttaaacatcagaccctcctcctctcaggacatggttttgaaggtttcatgagctctgcaaccttcttaggctggacaacgatcgcgtccattcacagttgcatacatttatagctgaaaatggctgatggaatatcaagcttttggggtccagtcacatctacaagcgagtgttgtgagaagaattatgcctactcttcttatgttgcagagttctacaatactatatcgaatatcctcgccattcttttagccttcatcggtctcgtaaacgccatacgacagaggttcgagaaaagattcactgttcttcacgtatctaatatgatacttgccattggaagcatgttataccatgccaccttgcaacgcttgcaataacaaggtgatgaaactcccatggtatgggacatccttctttatatgtacatcttgtactccccggattggcatcatcgaagcacgatgcccactttccttctcctttacggtgtcatttttgccgcccttcattctgtctttccttttggcatcggctcccaactgcatcacctgatcctctgccttctctgtatcccaccgatctttacctactatcttccctcccatgatgccccctcc

SEQ ID NO: 16815 - DNA, 554 bp, Gossypium hirsutum
  Clone ID: GOSHI-09MAY01-C44494_1
tcgccctcgcgtccgcccacgcgtccgaaaatgtcttcattaggcacttcaaagggtgttcttgaaatcgccaaatttggcctttatgttacgatccccatcgttcttatgtacactttcgccaacaacactaagaatctccagaaatttatgggaaatcgatcctacgtagtgtatcctccggagggaccaagacctccatcacctgaggagttgagagagatggcccgggagctcgctcggaagaaaaataatcattgaggctctttagggctggtagtgatctatgtagcttttccggtcgtacctattagttgacctattactactctacgaaaactgcattatgtaaaattgctgtaataagtatcgtgtttctgttaaaggaaacactatgtctggcttgtaccccattactgattaaaaaaaattttatagctaaacctgttgctttgcttgcttagcatggaaatttatgttctttcattggttaaaaaaaaaaaaaaaaataaaaataataaataaaaatataaaaaaattaattatttaatttt

SEQ ID NO: 16816 - DNA, 401 bp, Gossypium hirsutum
  Clone ID: LIB3135-024-Q1-K1-A10
gcttgcgttcataaaaaaaaaaaaagaagtttacaatcgaaatcaataggggttatagccgaatgtaaaaaaaataaaaataaaatacaattcttctttcttcgtatttttgctactttcgtttgttctcttttgcaggtacgagtacggggctgtgcgttggcccttggcgtgaggcgtacgaaaggtggacgtggcgtacgaggactgctcgctggtcgtacggcgctaaaggttcggcgtggctgctgagcgacgcttaaggttttccccttctcttttggctgaaaagagtttaggatagctaggcatacttggactttaggatattgggcctatatttgggtcttgggcattggtttgggcttgcaatgatttggtttgtaaaaagacattaaaat

SEQ ID NO: 16817 - DNA, 332 bp, Gossypium hirsutum
  Clone ID: LIB3148-026-Q1-K1-E7
gtaagagtacggggctgtgtgttggcccttggcgtgaggcatacgaggactgcgtgctggtcgtacggcactaaaggctcggtgtggctgctgagcggcgcttagggttttccccttctcttttggccgaaaagagtttaggatggctaggcatagttgggctttagggtattgggcctatatttgggtcttgggcattggtttgggcttgcaatgatttggtttgtaaaaggacattaaaatgggctgtttgtgttttaaactttttgttattgattattttatattatgttttggtctataaaatatatatttatttttttattgtccgt

SEQ ID NO: 16818 - DNA, 510 bp, Gossypium hirsutum
  Clone ID: GOSHI-09MAY01-C44404_1
gccggtaaagaaagttccctctcacaagttgtgaggacaacgatcggtcgggactacgtcctttccttcaccattggtgatgctaacaatgcatgcgaaggttccatggtggtcgaggcattcgctaacaagaacactgtcaaggtcacgtatgactcgaaaggcaaaggaggattcaagcaagcgagacttcgatttaaagctgactcgacacgaaccaggataatgttctatagcacgttttacaccatgaaaaatgacaactcgggttctctctgtggaccagtggtggatgatgtgaagttggttagtattcaaaaattgcatcatttgtaaaattcatgttttaaatttgttttgcattgattatgctacaaattaatgtgtttcatccatttaggggtttactttaggattatttaatctatcaaattaatgagttcaccaccaatgttgacatttatgtatctactttcttcgttaaattaatggtgtgaaccaagttctttt

SEQ ID NO: 16819 - DNA, 1347 bp, Gossypium hirsutum
  Clone ID: GOSHI-09MAY01-C44724_1
gttttaaccggatcaataaagtttcagctacctggagtaacaagcaatgctgaagttgatgcaggggaaactagttctgatactagtgaagcacagactgatgaagtaaaggcagagaaacctgatgacacatcaaagaatcgaccctcaaagaaaagcaagaagaaggaaagggagcttgcggaaaatcctcctgccaaagccacagccaaagccaaagccaaagctgagaagaagaggcttcttgctttacctttggaggcatctgtgatttcacttctcttactggttgtgctgggcgccttctatgtggttcattctgtttgggctgcagcagaagcttattcagctccttcaatagttttaaccactcgttcacgtgatggtctacatgtttttgatgattttagagaggcttatgcatggttgagccataatacagatgtcaatgataaagttgcatcatggtgggactatggttaccaaaccactgccatggctaatcgcactgttattgtcgacaataatacctggaacaatactcatatcgcaactgtcggtactgccatgtcttctcctgaaagggcagcttgggaaattttccactccttggatgtcaaatatgttcttgtagtctttggaggtctcattggttaccccagtgatgatattaataagttcctgtggatggttcgaatcggacgtggtgtctttcctcatatcaaggaaccagattatcttagagacggacaatatcgaattgactcccaggccactccaaccatgctaaattggctaatgtataaactctcatattacaggtttgttgaaaccgatgggaaagcctatgatagagttaggcggacagagatcggaaagaaatattttaaactcactcattttgaggaggtattcacaacacatcattggatggttcggatatataaactgaagcctcttaagaacaggattcggggaaaggcaaagaaatcaaaatcgaaaactagttcaacaagcagttctaaaagaagtggaaccaaaaagaagaatccatggctgtaggaaacagaatattgataccaatggtaaaattttctctgtaactcgagtacaatcgtttgtttgccgaaagagccttttaggctttgctcggtagcgagaatgaaaggagacgggaagtttgttattccaatgattgttctgactctttttcagctttcctatcgagcaaacccgtgatagagtttgattacgccggctatgttaggtgatttttctttgagaattacaatatataaatcaaaacgattttgcaggtttaaaaaaaaaaaaaaaaaaaaaactcga

SEQ ID NO: 16820 - DNA, 394 bp, Gossypium hirsutum
  Clone ID: LIB3148-030-Q1-K1-C3
cagaaattggaaagaaatattttaagctcactcatttcgaggaggcattcacaactcatcattggatggttcggatatataaactgaagcctccgaagaacaggattcgagggaaggccaaaaaatcaaaatcgaaaactagctcaacaacaagcagtcctaaaagaagtggaacgaaaaagaagaatccatggcagtaagaacacaaatattttataacaatggtgaaagcatcttgtacctaattagattggattccttaaggagccttttagagagatgatccaattattccaggcaatggtaaggtaattttcctcttaggtggaattccacccaagccattcaaggtaaaccaggtttggtggaccacctgactggatcgctttaatct

SEQ ID NO: 16821 - DNA, 523 bp, Gossypium hirsutum
  Clone ID: GOSHI-09MAY01-C44674_1
tggatgcgtgggcaaagttcttggccggagctgtgtgcaataggaagcattgctatgccagctatcttaaaacatgccggagttatcagttggggcgcattggcaatggaactttcatcgtttttcgtttttgtactggccataatgttttatattcgaatgaacaatgatgatgattacagtttcttctgaaaaatcattacagtttcttctgaaaaatcatgttgaaagcactgtaaaagtttgttcataggatgctataccttttccgttttgacaagcttcattcatgtttgttctttgtcttttgcgtgccattatcgtctttgaacatttattacaccaaaaaaaatgagaaacccactttattattgatcctctatttaaaaaaaaaaaaaaaaaaaaaaaaaaaaaaaaaaaaaaaaaaaaaaatttttaatataaaaaaaaaaaaaaaaaaaaaaaaaaaaaaataaaaaaaaaaaaaaaaaaataaaaaaaaaaaaaaaaaaaaaaaatttaa

SEQ ID NO: 16822 - DNA, 287 bp, Gossypium hirsutum
  Clone ID: GOSHI-09MAY01-C44184_2
gagaaagtgaaggaattggaaaccagtgaagccgactctgaagaaaatatagagcaagtagcctgaatagcagtggagatcttgtacagtcttcaaaattgaaacaattctccccatatatggtaacacagatggcttcaatatatttgtttttgttttgttctgttggtcctccgtcgcagtttgggcattacctctgtcaagccgagagaatttgaaggaaaaatgataatattctctattgatttgatttacacgagtatatatacaaaatactatcaactctt

SEQ ID NO: 16823 - DNA, 576 bp, Gossypium hirsutum
  Clone ID: GOSHI-09MAY01-C44184_1
gaaacaaggccgggatgtcttgcaaggatctcagcttctagcccttgatgttgcggctgcagtgagagttgcttggaagggctctgataggggatgaattagctagagaaagaaaagaaagccctccgcagaaccctaactgatttagcatcagttgttccaattggttttttgatgcttcttcctgttacagctgttgggcatgcagccattttggctgccattcaaagatatgtcccgtccctgataccatccacatatggatctgaaaggttggatctcttgaggcagcttgagaaagtgaaggaactggaaaccagtgaagccaactctgaagaaaatatagagcaagtagcctgaatagcagtggagatcttgcacagtcttcaaaattgaaacaattctctccatatatggtaacacaaatggcttcaatttatttgtttttatttcttctctttttttttttgtgtgctgttggtcctccatcgcagtttggggattacctctgtcaagccaggagaatttgaaggaaaaatgataatattctctattgatttgatttaaagggcggcc

SEQ ID NO: 16824 - DNA, 914 bp, Gossypium hirsutum
  Clone ID: GOSHI-09MAY01-C44134_1
gccaatcaaccgtggaggcttatcacttgcttctggctgcacgctggtgttattcatcttcttgcaaacatgttgagcttgatcttcattggaattcgccttgaacaacaatttggattcagtacgttatctgttcccttttgcagtggtagcgtactatcgtctcttttcattcaacgtagcatttctgttggtgcctctggtgctttatttggccttcttggagcaatgttgtcagagctgctgactaattggactatctatacaaataaggctgcagctctgatcacactcacggtcatcattgtcattaacttagcagtgaggattcttcctcacgtcgacaactttgcgcatattggaggtttcttaaccggttttctcctcgggttcgttttgctgcttcgtccccaattcgggtgggtgggacgtaaacatcttcctgccggtgctcgtgtaacatctaagcataaggcataccaatacctatttttggtgatcgctatggttttactcattgttggtttcacagtggggttggtaatgctgtttagaggagagaatggacatgaccattgcagctggtgccattacctgagctgtgttcctacatcaaaatggcactgtgggaactaagcagacctttattacatatcgttccctgattcttttctggtttcctttacattttttacatttgttaatttcttggtgttgttacgtgcctatgtgtatatatatacatacatacgtacatgcgtacttggttggcttcgagttattttattcactgttgttatgtgatttgacattttatacgcagcttggtctacatatatattataagcgattttacttgaagaaaatacaagaatatctttcagtttttcccaaaaaaaaagtcgacgcggccg

SEQ ID NO: 16825 - DNA, 423 bp, Gossypium hirsutum
  Clone ID: LIB3135-035-Q1-K1-A5
cgtccggttttggtggcagcgtactatcgtctcttttcattcaacgtagcatttctgttggtgcctctggtgcatcttcctgccggtgctcgtgttacatctaagcataaggcataccaatacctatttttggtgatagctatggttttactcattgttggtggggttggtaatgctgtttagagaagagaatggacatgaccattgcagctggtgccattacctgagctgtgttcctacatcaaaatggtactgtgggaactaagcagacctttattacatatcgttcactgattcttttatggtttcctttacattttttacatttggtaatttattggtgttgttacgtgcctatgtgtatatatattcatacattcattcgttcatgggtaggttttaaaaaaaaaaatatattttttt

SEQ ID NO: 16826 - DNA, 903 bp, Gossypium hirsutum
  Clone ID: GOSHI-09MAY01-C44124_1
attctcttctcgaaggctgcacttgactttattgtttgtgatgagagtgatgtgtttgtcaccaacaacaatggtaacatggctaggatattagctggacgaaggaaatattttggacataagcctactattcgtccaaatgctaaaaaactatatcggttattcttgagcagaagcaacatgacatgggaagcatttgcctctagagttcgtacattccagagaggctttatgggggaaccaaaggaggtcaggccaggaaggggtgagtttcacgagaatccatccgcttgtatatgtgaagattcagaagccagggaaaaggcaactacatattcaagaggcaagaaaaatgggaaattggatgattcatcacgaaaaaaagaggttatagtaagtgatgatcagaatgattatgatgataatgatgaaccaagatggcctgatctggacgatgatgagaatcaagtttggcctcaagagaagctccattataatggaacaggttcggattatgatgcagtcatctctgatgaacctgagttggaagagatgctttcagactgaacagaatgagttccttcttgaaattcctcgccctctctcttggccatctgaggcagtcataattttgcgatgataatgcaaaccctgtctattaaaaccccaggttatcaatggttgcgtgtgggtgtgtttgtttacttgagttttagatttgaggagcattcaactgataatgaggcatacaatagacagcaggtcaaaagatggaactttctcccctttaggttatgtttcatagcataacaaagggtcctcaatccaaataccatggcatgggaaaagaaaaggttgaaatgcagctgtggttgtactgatactggtttggttttgcatttt

SEQ ID NO: 16827 - DNA, 644 bp, Gossypium hirsutum
  Clone ID: GOSHI-09MAY01-C44044_2
ggaacctactctctcaatctgcagcacccatatcttcacttcttttgcataaaatgggcttgtggacgttattagaaggatttttgcttcttgcaaatgctttggcaatattaaatgaggatcgttttcttgctcccagaggatggagtttctcggatttctctgcagggcgtacaaagtcatttaaagggcaacttattggtctcatttacgccactcaatacatgagagttcctctcatactacttaatgcaatctgcatttttgttaagctagtttctggttgatgctgcgctagaacgcatgaagtcgaatatggagcataggaatttgccgaaggttgtgtaagacggaagcagtcagttcaaaaattaggtgatgtatctgttttacacttaagtttgtatcccccctccttttaaaattgaatttgaggtttcatgatgggattttatcgaacctggaaatgtgataacttgatagctctagcatttgtataatttggagactttacgctgtcattttgaaatatacagtttattgtgcctggaatttctattaattgctgctgtatgaacatgatatttgaaaatggagttcaaggttgggggtgggggtggtttgatttcaaaaaaaaaaaaaaa

SEQ ID NO: 16828 - DNA, 635 bp, Gossypium hirsutum
  unsure (1)..(635): unsure at all n locations
  Clone ID: AI055685.1
cttcttttgcataaaatgggcttgtggacgatattagaaggatttttacttcttgcaaatgctttggcaatattaaatgaggatcgttttcttgctcccagaggatggagtttctcggaattctctgcggggcgtacaaagtcatttaaagggcaacttattggtctcatttacgccactcaatacatgagagttcctctcatactactcaatgcaatctgcatttttgttaagctagtttctggttgatgctgctctaggtaagatgtttatgtctatggctgatgattggttgaatttgtattaggttctcaaacagatgccccttgttttttttgcattcaagaacttgtttattagttgtgatgaccattttagtcagtttttgtttctgatttctaaaaatacatgggatttaaaaggtgtgatcaataggtgtctgtgaaacttaagctgaatgattattagttatttctaaacctattaattggttgacttgattgtgaaaaaggaaacttantcttaaattaatnttctgaatacaattgtgaatacacacccgaaactatgagtttgaatagactttttacaccgaagtctatatggatacttgacaaacgtgatagccgaacgga

SEQ ID NO: 16829 - DNA, 785 bp, Gossypium hirsutum
  Clone ID: GOSHI-09MAY01-C44024_1
gctgttggtgctactacgccgtttttcacggcggtttttgcggtggttatgacttctaaaagggaaggttggattacgtatgttacactcgtgcctgttgtcgctggtgttattattgccagtgggggaaaaccattgtttcatctgtttggatttatgatgtgtattggtgccacagcagcaagagctcttaaatcagtgcttcaaggccttttgctgtcttccgaaggggaaaagctcaacgccatgaacctattaatgtacatggcacctatagctgtcctggcccttttcccagcagctctttacatggaaaaaggtgtagttggcatcaccattgcacttgcaagagatgattggaagttcttaatatatctcctcttcaattcagcacttgcttattttgtcaacttagccaatttcttggtcaccaagcataccagtcccttgactctccaggtgttgggaaacgcgaaaggcgcggtggccgtggttatatcgatcttgatattcaaaaatccagtatcaattaccgggatgcttggatactcactcacagtggcaggggttattctttatactgaagctaaaaaacgcagtatgtaaataaaggggccattaagcaatagggatatatatatatgggtacaaattcaacaaatattatgtgttttttagtgttggattaggctgttgagtgaaacaaaattgaaggaagaattttgtaatttttgttgaaccaatgtctctcttttagggagaatttggcaaaaatttgattttat

SEQ ID NO: 16830 - DNA, 633 bp, Gossypium hirsutum
  Clone ID: GOSHI-09MAY01-C44374_1
ggactctcccgccatgatgtttaaaggaatggaaggcagtacattaggtgtatgggctgcccatggtgagggaagagcatattttcccgatgatggtgttctggatcgtgtattgcattcagatttggctccattaagatattgcgccgatgatgggaacccaacagtggcataccccttcaacttgaacggttctccattaggagtggctgcaatttgttctcctgatggtcgacatcttgccatgatgcctcatccagagcggtgtttcctgatgtggcagttcccttggtatccaaaggactggaatgtggacaagaaaggccctagtccatggttaaaaatgttccaaaatgccagagagtggtgctcgtgatatggttatgagattcaaaggccaaatgagaggagttgaagtgtgatttgatcatggatgcttcatctgagttttttggtgttatgagtatttgctttgtgcaaaccccaggaactgtttcttaattctattttttcatcatgcaactgacaggagagtttactttttttgctttccttttacaatcttgttcggtgtcagcttataaattttttgggactttcatctactaataaatcccagatttttgagagctc

SEQ ID NO: 16831 - DNA, 302 bp, Gossypium hirsutum
  unsure (1)..(302): unsure at all n locations
  Clone ID: LIB3148-025-Q1-K1-E5
aagaaaggccctagtccatggttaagaatgtttcaaaatgccagagagtggtgctcatgatatggttatgagattcaaaggacaaatgagaggagttgaagtgtgattgatgatggatgcttcatctgagttaaactgttatattgaaatgcctggaaagcagtcttagtctttaatttagacataaagagtctttgctttgtgcaaacctcaggaactgtgtcttaatactatttcttcatcatgcccaanaaaaaaaaaaaaaaaaaagaccatgaaaaatgatgaaagaagagcattga

SEQ ID NO: 16832 - DNA, 582 bp, Gossypium hirsutum
  Clone ID: GOSHI-09MAY01-C44294_1
agcatcaatcgaagatgaatgaatgatccaacctactgtgaaattcaagccgaaagcaggcttttatcatatcaggtataatttgagctttgccggtgatctctacctagttttgaagattctgcataataccctttttaagcaatcgtccactaaatgtgtatattatttagcgatatcgataccctttggaattagttgtatatttaccatataggctctttattcgcctatatatatatgtcacgggtgcctcttggttgagtgttgttttatgagcaggatatgttttgatgtgagaatatcgagttttccgatcctttataagtgaagcaggttgcttggctcgaattcgaagtcgaatatcaccctttttaaaggcaatggcagtgagtttggttgaatttgtctctttgttgaatgatctctcatggtagcattgataatgttcagggaagaagagcctttttttacttactagtatgatcttttgtgtttgtattcgcttgaaaattggaaaatttatggtgaagaccctaaaataggtcttaatcattgattaatggcgtttatgttgggatg

SEQ ID NO: 16833 - DNA, 1511 bp, Gossypium hirsutum
  Clone ID: GOSHI-09MAY01-C45994_1
ctccgtccctcccttgagccccttccttctcagatcccatatggttcctttaagaagccctcctttttcacttcctccaagcccttttctcctctcatgaaaggcaggattgcacggtaaaaatggaaattgatgttcctgcctcggtggcttaccaattgtactcagatcgagaagcaattcccaattggatgccattcgtttcatctgtgaaggcaagtattgtatgtatatatggtacaagggcaggatatttgtgagcttgcttctttgttttgtgtaactaggtattagaagacaagcctgatttgtcacggtggttcgtgaaatataaagcatttggtcgtaatattgaatactcttggcttgctaaaaatatggaacccattcccaatcagaaaattcattggagatctttggaaggatttggtaacaggcaagcacaaaagaaccctgtaacccaatttgttatccactcaattagtacagtttctgggtttagttctgctctgtggttttttgacatctaaagctttaaaaattaacactaactgggcttttaacatggtaggggtgctgttcgattctatccgaaaggtccctcatcctgtttagtagatgtgaggcagctctacactatattttcatcacactatgagcatatataacctgttagattgatgttgctgttgtaagaccaatatgataaaaccatagacgagagctaatgagtgtttttattcgaactgtactcacttgctgcaatccttcttttcttttcagctaagaatttcatatgaagttcctcaacttttgattccggtggcttccgtaagtaatctttttcatcattttgaggttaacatgaagtaatccgttatttttctgatatattcaggtacttcaacctttcatggaaaatttactggaacgaggtatggaccgatttgcaaaatttgctaaaagttcaagctcaacaagataatcatttcataatcgctgatccattgatgtgacagttcacctatattcaaaccccaataccccaccgtgtgggtatagttcttcattcatctcttaaaatatctaccctgattttaagattttatcacattattattattattttattttttgcataagctctgtaattccattaaaccagatgcaattttgtggggttggaactaaaggcatcaaattttcattgataagatcttcaatgttcatattctgcaaaatcctaattgataaatatctctattgacagtataactaactagcaatatatatagaggaccatcctgtatgtacattccccttaagccctgcaaaactggtagctgctttttatagactctaactgaagcagccagaaacagtacgaatgtaccctactaacaaatagtatcatctaaaaagtgtatttacattcaccggaagacctcatttacatgatgtaaaatgttaccatgttttgattattgtaatactaaaagcttgttggattt

SEQ ID NO: 16834 - DNA, 586 bp, Gossypium hirsutum
  unsure (1)..(586): unsure at all n locations
  Clone ID: LIB3828-002-Q1-N6-F12
agttccaaccccacaaaattgcatctggtttaatggaattacagagcttatgcaaaaaataaaataataataataatgtgataaaatcttaaaatcagggtagatattttaagagatgaatgaagaactatacccacacggtggggtattggggtttgaatataggtgaactgtcacatcaatggatcagcgattatgaaatgattatcttgttgagcttgaacttttagcaaattttgcaaatcggtccatacctcgttccagtaaattttccatgaaaggttgaagtacggaagccaccggaatcaaaagttgaggaacttcatatgaaattcttagctgaaaagaaaagaaggattggcagaagtgagtacagttcgaataaaaacactcattagctctcgtctattggtttatcatattggtcttacaacagcaacattaatnttacaggttatatatgctcatagtgtgatgaaaatatagtggagagctgcctaacttttactaacaggattagggacctttcggatagaatcgaacagcacccctaccttgttaaatccccattaggggtaatttttta

SEQ ID NO: 16835 - DNA, 204 bp, Gossypium hirsutum
  Clone ID: LIB3148-048-Q1-K1-A11
gccaataataatcgctgattcaccagtacccaccgtgtgggacaatcaaatctcgtgttggatagttctgtattgcatgtctgatttgaatattttatcacattattattattattattatttttgcataagctctgtaattccattaaaccagatgcaattttgtggggttggaaataaatgcatcaaattttcattgataag

SEQ ID NO: 16836 - DNA, 356 bp, Gossypium hirsutum
  Clone ID: GOSHI-09MAY01-C45914_1
gtgaaagctggaaatcatagaacaaaggtggcagataagttaacagtttcatccgcatggggtcggttctatttcagtcggtggccgctcgcattccctggttgaatccttaaggaattggggttgtttttataagcattacttgtagatactgtggtatatttctggttgtgatagagttgcttaaatcttttcctcttaggttttgtagtcttgggtaaaaccgcagagaatgatattgttgtactggtttgtactgttaaatggttgtattgaattatttgatcatgttggtaagcaaattttctatattcaaaaaaaattattaaaaataaattttttttttttatattttt

SEQ ID NO: 16837 - DNA, 990 bp, Gossypium hirsutum
  Clone ID: GOSHI-09MAY01-C45854_1
gtagatcacaagtgctgggagcggcctgaggacatggacactgttcgaactgtgtactctgtctcatcaagcaaccctggctctgatgttgctggtgaaacggctgcggcattggcagctgcctccttagttttccgaagggtggatccaaaatactcgaggttgttgctgcaaacagcaagaaaagttatggcgtttgccatccaatatcgtggtgcttacagtgactcacttggatcagcggtctgcccgttttactgctcatattctggatataaggaatgagttactatggggtgcagcatggttgtttagagcaacaaatgatgcttattactataatttcttgaaaacattgggagcttggtgttcaacctgacatcttcagctgggataacaaatatgctggtgcttcatgttcttctatccaggatggcattgttgggcaaagataaaaatttcgagcaattcaaacaagaagctgaaagctttatgtgtaggaatcttgcccaattctccttattcaactacccaatacacacaaggtggccttatgtacaagttacctgaaagcaaccttcaatatgtaacatccatatcatttctacttaccacatatggcaagtacatgaaagctaaaaagcagacatttaactgtggcagcctcttcgtcactccaaattcactaatcggacttgcaaaaagacaggtggattacatactaggagagaatccaataaaaatgtcgtacatggcttgggtttggtcggaatttccccaagagaattcaccacaggggttcttcattgccgtcgttggcaaaacaccctcaaagcattggatgcgacggtggtttccagccatacttctactcatcgaaccccatccccaacgttttggttggagctattgttggaggtccaaatcagaatgatggattcccagatgatcgatctgattattcacattctgagctctctacttacatca

SEQ ID NO: 16838 - DNA, 591 bp, Gossypium hirsutum
  Clone ID: GOSHI-09MAY01-C45874_1
gccaagtgcgacggagtattgtttatggagatcaaccaaggaatagattggatctctacttgcccacaaatactgatggcccaaagccagttgtggtgtttgtgactgggggagcatggataattgggtacaaggcttggggttctcttctaggactacaattggcagaaagagatatcatagtagcatgtgttgattacaggaactttccccagggaaccattagtgatatggtgaaagatgtatctcaaggggtctcatttgtctgcaatctcattgacagatttggaggtgatcctaatagaatctatttaatggggcagtcagcgggagcacatatttctgcttgtgttcttttggagcaagcaatcaaagaatctagaggagaaagcactacctggagtgtctcccaaataaaagcttattttggcttatctggagggtacaatttatttaatttggtcaaccattttcacaatcgaggcctttatcgttccatctttttaagcatcatggaaggggaagaatcctttgaacaattttcttcctgagttagaataaaagaccacgcaattgagaagctgcttcttt

SEQ ID NO: 16839 - DNA, 492 bp, Gossypium hirsutum
  Clone ID: LIB3582-038-P1-K1-B9
gcctgtcctggcggagacggaggaggaagcagcggaggatttgaggccgaagttgtttggagtttcaatagggatgaagcgcgtgaggagagaaggtgaggaagaggaaggggtgatggatgaggagcagcagcaggagattaagcctggatctgacattaaatcagagccgttggatggcaataatgataatcaggactccacgtggctggagcttggcaaatgatcgaatgggatttattattattatttatttgattttcttttaatcagtggatggcgatgttgatgatgagaatcggaaaggaacgcgccaacgtggtccctatggagcatgtttcgaagaatcacgtgttgggaaaacagacacgtggcgccatgtgaaatatttgttctggatgcttctagaatgtaaagcccacagacgacagaacatgtaaaatagactaaacgtggggcaaaattgcccaaacgaaatggggcattcaaaga

SEQ ID NO: 16840 - DNA, 407 bp, Gossypium hirsutum
  Clone ID: LIB3148-046-Q1-K1-C11
cccacgcgtccgatttggaggtgatcctaatagtcagcgggagcacatatttctgcttgtgttcttttggagcaagcaatcaaagaatctagaggagattaagcctggatctgacattaaatcagagccgttggatggcaataatgataatcaggactccacgtggctggagcttggcaaatgatcgaatgggatttattattattatttatttgattttcttttaatcagtggatggcgatgttgatgatgagaatcggaaaggaacgcgccaacgtggtccctatggagcatgtttcgaagaatcacgtgttgggatgaaactatagttgtaccagtcttgccttactccattggtcgaaaacgattactacctagtattttgatagtaggatgatatgtatgta

SEQ ID NO: 16841 - DNA, 773 bp, Gossypium hirsutum
  Clone ID: GOSHI-09MAY01-C45564_1
accgtcgcgcgctggggcgaaacgagagaagaacggggtagtctaaagactaaacctccaaaaacgaaaatgaccgatttcgaagcttgctaccagagtaacggagaggatgcttgaaaacagcaatggcggcgttccctctcctcagcctcgcgaaggtagtcacggcggccttgaggggcgccgcgattccaaatctcagcatggatcacgtgagcacgagagagggtcttctagaagtagggaaaaagagaaaagccgcgataagggaagggataaggattccgatcgacatagggacagggaaagagacaaggagagggaaagaagtaaggatagggacagagaaaaggaccgtgaccgtcatcacagagaccgtcgtagggatcgaagtagggagcggagcgaaaggagagaaaggggaagagatagagatgatgatgattatcaccgaagtcgagactatgataggagaagggattatgacagagataggggggacaggaataggcgtgggtctcgtagatctgaacacagatcaaagtcaaggtcccgctctcgctcaccctcaaagagcaaaaggattagtggctttgacatggcacctcctgcttcagcaatgttagctgctggttctggtggtgctgctgcggctgctgctgctgccgtcactgccaccacagtccagattccagggaataatccaaccctacctggagtgtttccaaacatgtttcctctggcaactggtcagcagtttggtggtctccctc

SEQ ID NO: 16842 - DNA, 1384 bp, Gossypium hirsutum
  Clone ID: GOSHI-09MAY01-C45724_1
cccacgcgtccgcccacgcgtccgcccacgcgtccgaccaaagttacaagaaactaattatttcaaggaatttccctctcgttttctttctctttctcttatcattttgcttcttttttcttttttttttttgctctttgtgtttcacaaatttggttagactttgggacctgagatcctgacttagcaaaacaaaaatcaacccttcaaccagcagctgcttcccaagaaaaaaaaaacataattttagcaaaagaagaaacaattatatacatagagaaatagttgataatctaaagttgtagaggtatagttagtataaatatagtaaggaaataaaaaacaaaaaaaaaggtggtttaaacggccgcgtgggggagaggaagagtagagttgaagaggatagagaacaaaataaatagacaagttacatttgcaaagagaagaaatgggttgctcaagaaagcttatgagctctcagttttatgtgatgctgaggttgctcttattattttctctaaccgtggcaagctctatgagttttgtagcagttctagcatgctcaaaacacttgatagataccagaaatgcagttatggtgcagtggaagttagcaagccagccaaggagcttgagagcagctacagggagtacctaaaactgaaagctagatatgaggaactgcaacgaactcagaggaatctccttggtgaagacttgggtccattgaactcaaaggagcttgagcagcttgagcatcaactagagtcatccttgaaacatgtccgctccaccaagacccaatatatgcttgaccagcttactgaacttcagaataaggaacaaatgctaatggaaactaacagggccttgtcaataaagcttgaagaagttagtgccagaaaccagttccgagtatcatgggaaggtggtgagcaaagtgtagcattcactaaccagcaggctcaatctatggggttgtttcagccattggaatgcaatccaactttgcagatagggtactgcaatcctgttgcttcagaccagatggctgcaacaactcatgctccgcaagtcaatgggtttatccctggatggatgctctaaattttttggtttcagcaatgtggtcaatggccacaaactagtagccaaaaatgcttcttgatgttggaaaatgtgtaaaaatagtttcaagagcatatgcataatatactgcattgacataaacactactgcagtgactgaatttgctggtaagactattgagaccttgagccacagacaaaaggcatgtgattgattaagtttatatatatgacaatggaagacttgacaaaaagctttatatattaaaattatggtccttgcttgctttcgcatt

SEQ ID NO: 16843 - DNA, 255 bp, Gossypium hirsutum
  unsure (1)..(255): unsure at all n locations
  Clone ID: LIB3148-044-Q1-K1-C6
tgggtnaacccccgaagggtgggcggagtttttttgatttaactaatccccccaatgcccacaaactattacccaaaaatgcttcttgatgttgaaaaatgtgtaaaaatagtttcaagagcatatgcataatatactgcattgacataaacactactgcagtgactgaatttgctggtaagactattgagaccttgagccacagacaaaaggcatgtgattgattaagtttatatatatgacaatggaagactt

SEQ ID NO: 16844 - DNA, 385 bp, Gossypium hirsutum
  Clone ID: GOSHI-09MAY01-C45644_1
aaaatccccatgcgccgctcctgggtcgggctaatcggaagctctacgaacgatcgtctggctccgattacggcggagtaaacgatgttcgagtaacaggtaaacttttagccctcgattttcttgctttgattttatctgaaaaagagaaaagaaaatccaggaaaaagagtctgaaatcacctttccaatttttgatctttttttctctgaaatttttctgtttttctattcaatatccgtcaaaaagatcccgttacaatgtttgtattggctctttatagccaaaataataataaaaataagataaaatgaaaaatctgaaatacaatctgttgtccttttttcttgttatttcgtttttcttttggttggttgtgagttt

SEQ ID NO: 16845 - DNA, 377 bp, Gossypium hirsutum
  Clone ID: LIB3148-036-Q1-K1-C4
aatctgagttggatttttagttgacaaagcagtgaatttgaattagcatttgctggagttttttaaatttccgaaatagttacaattgctttggtttccattttctgttcctttaaactgctgaatgaagtatattaataaatatgaagaattacaatctgattagaagaagaaaaaaaaaaaaaaaaaaaaaaaaaaaaaaaaaaaaaaaaaaaaaaaaaaaaaaaaaaaaaaaaaaaaaaaaaaaaaaaaaaagggggggcctttttaaagatatcagattatgttccgcgggcttgcaagttaaaattttttttttggggcccccaaaattaaattaatgggccgcggtttaaaaacctcggaattggaaaaac

SEQ ID NO: 16846 - DNA, 316 bp, Gossypium hirsutum
  unsure (1)..(316): unsure at all n locations
  Clone ID: LIB3148-036-Q1-K1-E2
aatctgagttggatttttagttgacaaagcatgaatttgnttagcatttgctggagttttttaaatttccgaaatagttacaattgctttggtttccattttctgttcctttaaactgctgaatgaagtatattaataaatatgaagaattacaatctgattagaagaagaaaaaaaaaaaaactaaaaaaaaaataacaaaaaaaaaaaaaaaaaaaaaaaaaacaaaataataaacaaaagagaatggtttagggggactcattttgtgactgctcctaccccagccgcgttaggctaaatatttttttaacct

SEQ ID NO: 16847 - DNA, 1217 bp, Gossypium hirsutum
  Clone ID: GOSHI-09MAY01-C45164_1
gcgatgtttatttatctaagtgggttcaggacagtgaggtattaaaatttgagcctgctcgggaaagtttctcttgttcctcaagagtggaagaaaaggtggatattaatactccttacttgtatggtcatttttcttcggaggtatcgccatcagagtgccagcctgcgactaaattaaaagcctctcatgtcaccttggatggtcataataacgtcgtaaatgttggagttcttgtcatggaaaacagaacgaactcggagcaggaagcctgcattgacttaaatcttgatattgtatctgattatcctgcaactgcaaggaagtctatttgtgattctgatagctccagtaaccacagtgtaactgatgttgagacatttttgcgagagaaaagttgtggatttgatgaagtaagagaacctgttctaaagagactcaagagtgattgtagctcatcagtttctcgagaatattccgagaagtatcagcattcaatttcaacaggtcatcggggtcctgacggctttgaaggcaaaaaattgttcggcgttgaacttcagtttccgcatatcaatgcaggacaatcaaataccttgttgaaggcagaaactctcaactgctcagatgtaattgcgtctatggctcaccaggggcatccgttggggaatcgtgctgttgagcctttaaattttggatccgtaatttttggaaaactatggtgcaacagccaggccatattccccaaaggttttagaagccgtgtcaagtacttttgtgtgctcgacccaacaaagatttctaggtgcggggcggaagtcttggatattgggctacttggacctctatttaaggttactttagaaggctgccctaccacaaccttctcgaatgtgttgcctaacaaatgttgggaaatggtgctacagcagttaaatcaagaaatcttgaggaggaaaaacctaggagaaagtgggctcctacctttgcaatctctgcagagcatcaacgggctccaaatgtttggatttctctcaccacccataattcaggcaattgaagctctcgatcccaatcatcaatgttcggagtactggaatcacaagactgctcgtgttatcaatgaagtcaaaaagtacgcgcttggattgagttgctcggtaggcgaatcgaaagcaaaaattttgggggttgatttgacaaagcaagatcatgaa

SEQ ID NO: 16848 - DNA, 602 bp, Gossypium hirsutum
  Clone ID: AI725439.1
ggtcctgtttcggaagtattgccccagcatgggactaaattaaaagcttctccttccaccgtaggttgtgaaaacaatgcctataatattggggttcttattatggaaaacagcgtgaacttggagcaggatgcctgcatgaagttgaatcttgatgttttaactgattatcctgcaagcaagtcagtaaatgctttggatagccctaataacaagagtgatgtggagatatttttaccctcctttaatcaagagaaaatttgtggctttgatgaagtaagagaacctgttctaaagagactcaaaagtgattgtagttcatcagtttctcgagaatctcccaacaactatcagcattcaacttcatgtgttcatcaggattctgatggctttgatggcaagaaattgtttgatgttgaacttcatccaggaaaatctaataccttctggaagacagcaactgtcaataactcagatttaaatgcatctattgttgcccgaggtgatccattgttgatttcttctgtaaaacctttaaattttggatctgttatgtttggaaaactatggtgcagcaagaaagccatattcccaaaaggatc

SEQ ID NO: 16849 - DNA, 1111 bp, Gossypium hirsutum
  Clone ID: GOSHI-09MAY01-C45124_1
aagttttttgagatgccaagacatgaggctgtcaatgctcttgatgtatacaagcgagctggtcagcaggctaatagcctttctgatttctacgaagtttgcaaaggattggaacttgctaggaacttccagtttcctgttctccgggagccgccgcaatcttttcttgctaccatggaagagtacattagagaggcgccacgtgtggtttctgttccaacagaaccggtgcttcaattaacatacagacctgaggaaggcccttctgaagatactaaatcacccaatgatgaacctgagccatctgctcctgctgatgacgttgcagcttccactgtcgagactgctccccctccccctcccccgcctcagaccaacttggacactggcgacttactgggattgaatgatgctgctcctaatgcctcggcaattgaggaaagtaacgctttagcactagccattgttccaactgaatctggtactgcctcagcatttaattctagtgccggccagcctgtggattttgatcctactggatgggaacttgcccttgtcaccacaccaagcaccgatatttctgcaccaactgaaagacaattggctggtggattggactcactcaccctcaacagtttatacgatgaagcagcgtatagagcttctcagcagcctgtatacgggactgcagcaccagaacccgtttgaggtacaagatccatttgcggtatcaaataacattgcaacccctacagtagttcaaatggcagcaatgggtcagcagcagaacaacccttttggttcctaccaacccacctatccgcagccgcatttggtgatgagcccatcaaatccttttggtgatgcagggttgggggcatttccagctaaccaaatggttccatttgctcaaccacatgcgaataatccatttggtggaagcacaggcctattgtagtgttaaatacgaagagttgatgggtgtgtattttggttgggagatgagaagagtgtgtagaaagcacctgtgttttgcacttgtatgggctgtaaaagccagcctgtggatatttaaagatgtaataataatttgttgctgccaccaattcat

SEQ ID NO: 16850 - DNA, 348 bp, Gossypium hirsutum
  Clone ID: LIB3148-035-Q1-K1-E10
tgctgcaacaaattattattacatctttaaatatccacaggctggcatttccagctaaccgaatggttccatttgctcaaccacatgcgaataatccatttggtggaagcacaggcctattgtagtgttaaatacgaagagttgatgggtgtgtattttggttgggagatgagaagagtgtgtagaaagcacctgtgttttgcacttgtatgggctgtaaaagccagcctgtggatatttaaagatgtaataataatttgttgctgccaccaattcatgaaaaaaaaatgattaccccgacgactaaactttagaaaaacaaaataaaatccggtttaaggaacaaaa

SEQ ID NO: 16851 - DNA, 1103 bp, Gossypium hirsutum
  Clone ID: GOSHI-09MAY01-C45294_1
ggggactgactccgggacattggttgtgcattaacggattcccagcgacaacccttcatggtgctaggactcagcaggaaagggaactggcattaagatctttcaagacctggaaagaccccaattttggtagcaactgatgtggctgctcgtggtcttgatataccccatgtagctcatgtgatcaactttgatcttcccaatgatattgatgattatgtccatcggattggaaggacagggcgtgctggtaaatcaggattggctacagctttctttaatgagggcaatttgtccctggcgaggcctctagctgagctgatgcaagaagcaagtcaagaggtacctgcttggctcacccgttatgcatcccgagctccttatggaggtagcaaaggtcgacgatctgggggagggcgttttggtgggcgtgatttcagaagggaaagttcatttggtaagaatctggattactacggtggaggagggaatagtggtagtggatattggagttccttctagcaattatggtggaggatatgctcccggggtggcaagtgcttgggattaggtcacactttatactggattaactttttgcatgtttgtcttgagtatatatatattccctccctcagatttggagaataatttttctcaaattccatatgtatctggattctaacataggatatatattaatgagggaccccataggattgatattgtttgttaattgatgatgctgtcgttgggatagtgacaaaggagactaactatttaaatgtgtctacgactggttcactgataaggaggttgtggttaacattttagggcttggggcgccttagtagcttaggaggaccctaggttgcaatgttggtatggtgtgcgtgtgtggtaaggtacgtacatttgcagccaaattatgggtgagtggtgaaagaagagatgggcgtatggctgtgagtgattacttttaaatttttttgaaacttccttttatgtaattagctatgtttttgcagagtacacttttgcacaatccaatgttttcagaatgatgatgtgtgttttggaaatcaactttatcgagtgttttg

SEQ ID NO: 16852 - DNA, 850 bp, Gossypium hirsutum
  Clone ID: GOSHI-09MAY01-C45224_1
aaaaagtctccctgtcttccccaatgatgcactcttccttacctttttccttctcttatcagctgccgatgcatttaacatcactaaggtccttggctccttctcagattacagcaccttcaacgacttgctgactcaaactggtgttgcgagtgagaatcaacgacaaaaaaagcgtcactgttcttgttgtttccaattctcagatttcaggactttctagccaaccgaaggatacaataaaaaagagctgagcattcatgtggtactggattattacgacaaagccaaggtggacaaggtgccatctaaaccgttgactctcaccacactttaccagcaaagtgggaaagcccaaaaccagcaaggtttcttgactatgacacgtgtggggaaacaagtgtcatttggatctgctgctccgggttctagccatgattctatctttgttaaacaagttacgactcaaccctatgatatttcagtactggaaatcagcaatgttataaatgtagccataacttcttccccatcttacgctcctaatgcttctcctcccaggaaggctttagcacctggtcccaacaagtccccacttgcatccccacctaaaactacccgaagcgacataccagctgctgatgctccttctacaatcaccgactctgatgctcctgataatacttctgctgcttctatagcttctgcctctgccatccttttcattttcgcttcggctcgcttcatgcttaccatgatgtgagtgcatgaatttttggttagcactcaccccactatgatgggatgttcccaagttttcaaatgcttatgaaatcagacttttctttct

SEQ ID NO: 16853 - DNA, 452 bp, Gossypium hirsutum
  Clone ID: LIB3272-046-P1-K1-E8
acaaaattagaggcaaaaatgcttacttcactttgcttcgtctttatcttcatctttgggttctcccctttcgcaacccctaccttattgttccagggtttcaactgggaatcatccaacaaggctggtggatggtataactttctccagagttctgtttccgatatttctaacgccggtgttactcatgtttggctcccaccaccctcccagtcagccgctccccagggatacttgccaggaaggctatatgatcttgatgcatcaaagtatggatctcaggctgaattgaagtcattaatcgatgctttccatcaaaagggagtcaaatgtgtagctgacatcgtcataaatcatagaacagccgagaggcaagataacaggggtatatattgcctcttcgaaggtggaacttcggatgatcgtctagattggggaccatccttcatttg

SEQ ID NO: 16854 - DNA, 396 bp, Gossypium hirsutum
  Clone ID: LIB3148-059-Q1-K1-D11
cccacgcgtccgcccacgcgtccgcccacgcgtccgccccaccctctcattcagttggaccccaaggatatctgccaggaaggctatatgatcttgatgcatcgaagtatggatctcaggctgaattgaagtcactaatagaagctttccatcagaagggaataaaatgtttagctgacatagtaataaaccatagaacagcagagaggaaagatgggagaggaatatactgcattttcgaaggaggaactccagacgatcgattagattggggaccatcttttatttgtgggaacgataaggagtattcagatgggacaggcaatcccgacactggactggattatccaccagctcccgacattgaccatctcaacccaagggttcaaaaagagt

SEQ ID NO: 16855 - DNA, 465 bp, Gossypium hirsutum
  Clone ID: GOSHI-09MAY01-C46534_1
tcgcccattcgtccgcggacgcgtgggttagaatttaggaaccgggttgtatctgtggggaacactaacaatggccctctgcaggctccagtgtcagatgcagcaggagctgcaccgataatttcaagcaatggagctggtccttccatcagtttacatgctagtgggagtatagaggagttagagcctgcggttcttactgcaatgacatcaatccctggtgcacctgtggtccagatgatgccgctaccaagatcgaactttcacgtccttgggtaaggcttcggagaaaagtgggtaaaaggggggtttttagagaagtggttttcacagtagtttgggaaggtggggttatgcatcataactgaagttaattgatccctttccatcctttcttaaacagttaagacttgtagttaataaaaaagaattctgagtttgcaagaattccagctttcagttgtg

SEQ ID NO: 16856 - DNA, 502 bp, Gossypium hirsutum
  Clone ID: GOSHI-09MAY01-C46494_1
gcgttcgggcagactatttctggtgttacttacaggttcagcgcaaatctgataaaatcgtttgtgcttgccatggaacccacatgtcccccgaagagtttgttcgtcatgccagtgaagagtgcaccaatcctgataataacaacggtttggcaacatttccaggtaccaatcctgctgcctctagtcagagctgaaatgacatacatttacttccaatcaagtatgacattggtatggccttgagaatacactgatgaggggccttgcttttctcgcggagtttagctctctgtacccttttccggttgtattagctccctgagttgaatacttcatttgtatgtaagaatttctagcatccgtttcttgtcaaatagtaatgttaagcattttatttctgtagtaacagttccttaagagaatcgttttccttttgttgtattttatttcctgccttttaagcttcagattctgacatgttagtatctgcagttttttg

SEQ ID NO: 16857 - DNA, 622 bp, Gossypium hirsutum
  Clone ID: GOSHI-09MAY01-C46464_1
attcttttttctttctcccaactaaacttggcagccctaaatacttttcaaattcattggagctacgaattcccaattggatgaccaccatctgcctgacttcctcagctaaattactactaaaaaaagactgtcgattagtcaaaatttacgcacctgagctatttctatactctcacaagatctgtttaagtgtgcttacacctttgcttgatgcttcttcaaacagtaagcagtcatcagcaagcaatagatgagacaccctagggccacttctgctggctttgacaccttttataaccccttccccagtagccgttcgcattagacccgataggccctccccacatatcaagaataaaaaagggcttaatgggtctccctgcctaagtccccttgttggatagaaatcgtctcctttaatgccattaaacactattgaataggagacactagagatgcatttcataattgaatcaatccatttttgaccgaaacccattttatgcatgatttcttggagaaagttccattatactctgtcatatgccttacttatgtcttacttgactgccataaattctttcttcctccctctttctgttcatcgaatgtataattg

SEQ ID NO: 16858 - DNA, 682 bp, Gossypium hirsutum
  Clone ID: GOSHI-09MAY01-C46674_1
cccacgcgtccggtatctcatgtccgcatttgatgttccagaggttatggctgtcacccgaagcaatatttgcaagaatggaatacaggcgctgtcccgagggggtgctgtcatatattatgcttcaatcttcctttacttctgggttttctcgactcctgtggtttctttggtgttcggaagctacttgtatatctgcattaactggtttcatctacactttgacgaggcgttctcttctctcagaattgctaattacaagtcattcacccgattccacatcaatcgtgatggtgatcttgaagttttcactcttgcagtcgataaggttccaagggactggatgttggatcctgattgggatatggagcagaagcagccccaccagttgagccataggagaaaataccctagcaaatggagtgcagcagcagggcaacaggatccagtgaatacagtcagggtggttgaccattttgttataagacaaaatgagaaacctgattttgtatcaagtaatgggtcagttagtcgctgatctttgttgtaacattattctaatttcttaaatataggcagcaatgaagggaatgtatatacgtcaaatgtcatagttgtttagatggactaacatcattcaaatgttaaatgttaatgcagctaatagtggtttttcccagcc

SEQ ID NO: 16859 - DNA, 567 bp, Gossypium hirsutum
  Clone ID: GOSHI-09MAY01-C46154_1
cagcaggtagttctccgtcgcaaggtgggtcaagcgagtcttctgatgaaaacggtggtagccctcttaatggagggtctggattctatagtaattcggctcctccatccatgcataataataatatgcaaatgaattcacaaatgaactcactttggcctggccacactcaacaatgaagatgcctgctgcattctgaattaaacagttgagcgcttggggctcgggcatcaacttggtgactgttcttgcatcgaatatgcaacacccttagctgtcaaactgggaaagaatggtggagaatcaattttcttatagatccagtcttttgttctttcttgttgagtagttttttaagttttcttcacctcactaaaaaatgactgcttttgacacctttttctttagaatctcaaatttactttggtcagagtgtttgttcctcctcttcttctgggtggtgcttttagagtttagatgtaagactcgtgtttatggatctgaatatgataggagtcttctatagtctccaaattttatatattgttcatttattatatttatttt

SEQ ID NO: 16860 - DNA, 543 bp, Gossypium hirsutum
  Clone ID: LIB3582-041-P1-K1-E4
cccacgcgtccgcagacaattgaccagctcattgaaactggaaaaagtgaacaaattttccagaaggcaattcaagaacagggacaaggacagatactaaatacagtggaggaaatccaagaaagacatgatgctgtagttgagattgagaaaaagcttctcgatttgcaacagatttaccttgatattgcagtacttgttgaatcccaaggagaaattttagacaacatagaaagtcaggtttcaactgcagtcagtaacgtccaatccgggacggttgcccttcaaaatgcaaagaaacgacagaagagtacaagaaagtggacgtgcattgccattataatccttctaatcatagttgctgttatagttgttggagtccttaaaccttggaagagcagctagggtgcgtgccttattcactctttcttgtttgaccatttagttagaatggaaccactagttttcttgtgtcaagagtatatggtctgttttgcatgatcccatttttcttagttttgagcactcgggtacttgttcctt

SEQ ID NO: 16861 - DNA, 417 bp, Gossypium hirsutum
  Clone ID: LIB3148-049-Q1-K1-G10
ggcaattcaagaacagggacgaggacagatactaaatacagtggaggaaatccaagaaagacatgatgctgtagttgagattgagaaaaagcttctcgatttgcaacagatttaccttgatattgcagtacttgttgaatcccaaggagaaattttagacaacatagaaagtcagattcgtttgcattctcaaatctcttagaatgggcatttaagtgcatattaggttgaatgacgtgttctggtcggtcttgtgcgttaatggaatcttgttcaggtttcgactgccgtcagtaacgtccaatccgggacggttgcccttcaaaatgcaaagaagcgacagaagagtacaagaaagtggacgtgcattgccattataatcctcctaatcatagttgctgttatagttgttggagt

SEQ ID NO: 16862 - DNA, 477 bp, Gossypium hirsutum
  Clone ID: GOSHI-09MAY01-C46084_1
ctctctttccccctaaagccaaaaaacccccaaatctctccttgtctctcttttcatatccatttttttctctcttctatttcttcccttttgcagggcaaaggaaaaaaaaaagcaacaaaaaatggctcaaagaaccgaaaaagaagaaaccgagttcaaggtaccggaaaccttaacgctttgcgtcaatgattgtggtgttataggaaatccggccaccaataacatgtgtcaaaattgtttcaacgctacaacgcctaaatcaaccgctgccgtcgtctcctcttcaaccggtggtgctagttcaggtggtgtttcgatcctgaaccaaagatctaccacgtcgcgttctataaacaagcgatccgatctttctccgcctaaaacgaccacggttggtaggagctctggttcgaggaacgatccggagcctgggtacggaaaagagggtggtgaacccgggttctggatgta

SEQ ID NO: 16863 - DNA, 548 bp, Gossypium hirsutum
  Clone ID: GOSHI-09MAY01-C46074_1
aaaggagagggagcttcgaactagttcactaactagaaaacaaccaaatactgggtcaaaagaaaccagattagatgaagtgctattgaggcacaaggagagaaaaccttttgcctatggactttgtaatgaatgttatgaagaggtgagcacccatgtacctactaggcgttcctatcttcttttgcccgctacaattgtaccactggaaactgttctatcattgaagctcgagttcatgctgttactggttggtgcagttcatgaaggtttcaggagggcttgatggaggatcagatccacctgcattccagcgtcctgagaaagagagactggcaaaattatctattgaggaaaatgctaaagtatgttctgtaatcatactttctaaaggtttaaggacagtgataggttgaaaaatcctaattgtaatcacttgatatattttactttgcgagagtcatgtgggcactcaagttattctctcacttctctcccttcctaatgtgctagctgatctcttaattgtgttattaatttattatttt

SEQ ID NO: 16864 - DNA, 679 bp, Gossypium hirsutum
  Clone ID: GOSHI-09MAY01-C46024_1
ccggggcggaccaagccgccgaccaatgtacacaaatggagtccccagctgttgtttaggtttctcaccagctattgaacgcattttccgtcgggctgctgaagggctaagtgaaattataccagaagagccagagctttttgaagacccctgttatgttcctgatccggtatccttgcttgggcctgtttctgagtcgcttgataattttcagttggacttgggtgctgggtttgggatggacgtgggaacggaaaggccttgtggtttgaagaatatatctgcttcttctgaaattaacaagccctcacctattgaatccccattgtcaaggtcacgttgtgctaccccaaaggccccaagatcttcaaacttctcctgtggatgatactaattgcaaatgagaaaaggacgtggcagatgtggagcagttctccccttggtcaggatggtctgggcttgatgggtgatccagcaagctggctcctaccactggaacataatagatcaaacaaggatgaccttttgcacctttcttctcagaaaactatggcgtcattgtttgcgaaagaggaccctatactagctggtaaacgatcttctcagaaggtttttcttggtaatggccagaatggtggtacattcagtcctgtccccggcctgagtgatcaccacccat

SEQ ID NO: 16865 - DNA, 430 bp, Gossypium hirsutum
  Clone ID: GOSHI-09MAY01-C46344_1
cccacgcttctcgaaaaaaaaaaattcacagatccaaaatcaattctctagggttcattccagcagcctccatttgctaaggcctgttcatcaccagtgcaccattaaaattggtgagtgatgtagaagcagcctttacctccaccgaaatcaacactcaagaccattttcacttgataatctgcattgcaaaccccgatttagacggagaagccaagggatctcatcgatgcatttaacgaagtattggatttgcctagtgtgcgtagagtgtgcgtaatgtctccgtccctttgcaggatcatccgtaccgaggagcagggagaggcacgcatgaaagaaaccgtgcgaggaaaccgctcgtgagatccaaccccctgacactgttcttggcatgttccagaagcttctggtgcttggctgctgggat

SEQ ID NO: 16866 - DNA, 663 bp, Gossypium hirsutum
  Clone ID: GOSHI-09MAY01-C46324_1
gtgaattgtgtagaccttcaaacgacgtcgaagtaagagcaggcgatccattagagaaagttcaaaaaacttaattaatggcgaacagagttcaaatccccacgagcaactcagctcttattgcaatgattgccgacgaggacacggtggttggttttctaatggctggtgtgggtaatgttgacttgcgaagaaagacaaattatcttattgtagattcaaaaaccacagttaaacaaattgaagatacgtttaaggagttcactacaagggaggatattgctgtcgttctgattagccaatatgttgcaaatatgataaggtttctggtggatagctacaacaagcctgttccagcgatcttggagattccatctaaggatcatccatatgatccggcacatgattcagttctttcacgggttaaatacctcttttctgcagaatcactggcatctgggaggcgttaaatgccattagacacttagtctcattgtgtttctatttccttcatgattcgtctattatggggagactacaattattcttttccagaccattggtagtggttctggtctcaaattccatggactacagtaggcaccttttagttggagatatgctttaatggcttttttaaatgaataagatgtttgactagag

SEQ ID NO: 16867 - DNA, 811 bp, Gossypium hirsutum
  Clone ID: GOSHI-09MAY01-C46244_2
cccacgcgtccgcttatatgcagccacttgatggttcttcggcagtaaaggtgcaagtaagtgctgttgaaaatcctgaagaagcatcattctttgagtcttatgaagcagcacactccatgcatgatttatctagcttgattgcccagaaactcggcgtcaaagcaccaccggttagaattgatagccaggcaaagtatggtgctctatccagaggagacggagccatatatctgcgtcttccgcacaaagggtatcgagaaaaaatatgggatcatgctgctgggtgtattgttgtgactgaagctgggggtgtggtcacagatgctgcagggcagccattggatttttcaaagggaaagtatcttgatctggacacaggcatcattgtcaccaaccagaagttgatgccattactgtttaatgcagttagaaaatctatccaggagaaagcttcatctttgtgattcattttagaggcaggcttcatcctttcctcctaacttgctctgttaagctggttgaaacttgattatttttgccttcaatgcttgaacttttatcattcttctccccaatgcttataggaagatttccatttagcatgcatgaacaagaatgggaccaataaatctcatctctacaattatgacaacgtaattgtagactatgaacttgaaagcatggtcctaggccttgagcccttctctttgtcctacctggcagttggggttaggggtgattaattagataaaggaactgtgttgttgaatacaaacatattacattattactaaacttatttcatggt

SEQ ID NO: 16868 - DNA, 665 bp, Gossypium hirsutum
  Clone ID: GOSHI-09MAY01-C46244_1
catcattctttgagtcatatgaagcagcacattccatgcatgatttatctagtttgattgcccaaaaactcggtgtcaaagcacctccggttagaattgacagccaggcaaaatatggtgctctgtccagaggagatggagccatatatctgcgttttcctcacaaagggtatcgagagaaaatatgggatcatgctgctgggtgtattgttgtgactgaagctgggggtgtggtcacagatgctgcagggcagcccttggatttttccaagggaaagcatcttgatgtggacacaggcatcattgtcactaaccagaagttaatgccattactgttgaatgcagttaaagaatccctgaaagagaaagctccatcctcatgatctgttttagaggcaggcttcatcctttcctcttaattattttgcccgtaagtgctttctccctgcgtgtacaagcatttacatttacatttagcatgcatgaacgttaatgggatcaataaatcttgtctccacaattatgatgatgtaaccgtagactagaacttgaaagcatggttttaggcctagatcctttgctttgtatccccgtgtcctatttaaaaattagtgtacgtttggttcacgaaatttaagattccttttgaaaataggattgatgtg

SEQ ID NO: 16869 - DNA, 587 bp, Gossypium hirsutum
  Clone ID: LIB3828-016-Q1-N6-D5
ctactagaaattaataatattatccaaatgcataattagtagcacactacataataacaacaatattgttcaagtgtataattaaaatattgttcaagtgtataattaagaggaaaggatgaagcctgcctctaaaacagatcatgaggatggagctttctcttttagggattctttaactgcatttaacagtaatggcattaacttctggttagtaacaatgatgcctgtgtccacatcaagatgctttcccttagaaaaatccaggggctgccctgcagcatctgtgaccacacccccagcttcagttacaacaatacacccagtagcatgatcccatattttctctcgataccctttgtgaggaaaacgcagatatatggctccatctcctctggacagggcaccatattttgcctgactgtcaattctaaccggcagtgctttgacaccaagtttttgggcaatcaaactagataaatcatgcatggagtgtgctgcttcatatgactcaaagaatgatgcttcttcaggattttcaacagcacttacttgcaccttcactgccgaagaatatcaagtggctg

SEQ ID NO: 16870 - DNA, 418 bp, Gossypium hirsutum
  Clone ID: LIB3148-051-Q1-K1-D11
cccacgcgtccggttgatgcatagggtctggtttttaatagtagaaatgaatgaagggttgacaggataactagtttgctcattgatttaacatccagtgattcatttgcctacttttcttagagggtgcaaaatgcaaacggactcctagtacaagggcctccatgaagctgggggtgtggtcacagatgctgcatggcagccattggatttttcaaagggaaagtatcttgatctggacacaggcatcattgtcaccaaccagaagttgatgccattactgtttaatgcagttagaaaatctatccaggagaaagcttcatctttgttgattcattttagaggcaggcttcatcctttcctcataacttgctctgttaagctggttgaaacttgattatttttgccttcaatgctt

SEQ ID NO: 16871 - DNA, 260 bp, Gossypium hirsutum
  Clone ID: GOSHI-09MAY01-C47964_1
ccacgcgtccgtgtaacactgcctggagacattgccattctctatgtaatagagaaaaccaacgcatgacatgtgtattgtatcactcggatccgaggttatcaaggaaaacaagttcatggtagtctgaagttgatatcattttcatctgtaaacttgttctttttaatatatatatatatttgttaaaaaaaatatgaaaaaatctcaagttttctagatagctaaacaaagaaaactaaaaaacccaaaaaaatgac

SEQ ID NO: 16872 - DNA, 966 bp, Gossypium hirsutum
  Clone ID: GOSHI-09MAY01-C47854_1
cccacgcctgcccaaaaaatgcagcaacgaagggacgagcaagaagccactgccgctaaaactactctgcggttactggagaagacggtgaaagatatgctggtggaccaggggagactagtggaagtaccttacacggccacgctaggtgacaccatgaacgcattggtggcgctaccggttgctgcgcctccagggcaatggataggggctagtggctcaatgattttggagtctgataaacagacgggggctgtgcggaagcactacatagggatggttaccatgcttgatattgtggcatatattgctgatgacgatggtagtaatgatcagacgacggacgttgctaatcttgagaagaagatgatggtgccggtatcgtcgattatagggcgcagttttgagggacttagcttatggactttaaacccaaacacaaacattttggactgtatggaattgtttagcaagggaatccacagggccttggtcccaatggacagtcaaatggagcccacgcgtccggttgaacttgtggtgtctgcatccagctataagatgcttacacaaatggacttgctgaaattcctcaaggaccatgcctctgaattgggggagatattatcaagcagcataaaggaaataggttgcttaaaccagaatgtttacgccattaccgatcgtaccagagggatggatgccatcaaatgcttgaggactgctttgctcaatgctgtccctatagttgagtcctctaatgattttgaagaagatcaccgacaactcgtagatggcgaaggaaggaagccaattggaacattttcagcaacagatttgaggggttgccatctttcggcactgcagacatggttgcctctaaggcactgtgattcaccgagctagtctcaaggagccctttatttgcattcaaaagaggggtgtcgcgccaaagaaatggtgagt

SEQ ID NO: 16873 - DNA, 639 bp, Gossypium hirsutum
  Clone ID: GOSHI-09MAY01-C47544_1
atgaatctcaacccccaactacgtggcatgtttgatatgaatcctcaattgagagatatgatgcacaaccctgaagtgctacgtcagatgttttcccccgagacaatgcagcaaatgctagctttacagcagtcgcttctgtctctcaatcggcagcaatcaaccccggactcagcacagactggcggtactacagcggcaccgggaactgccaatctagacttgttgatgaatatgtttggcggtctgggcgctggtggccttggtgtccccaaccaacccgatgttccccctgaagaactttacgctccacaattatcacaactccaagaaatgggtttctacgatacacaagagaatatcagagcattacgagctactgccggaaacgtccatgctgcagtcgagagacttctgggaaattccgggcagtagtaactccttgaaatttcatgttcttttttttttcttttttaaatttgaccaagaaaaactgtctcatgtaagattaggtgatttgggttggtgccttagcaaaccacagatttatgttgcatatacattgttgattccttgtttttgccgcgtttaataagcaagtaaacacgataaatatatatacccgagaacttgttggtt

SEQ ID NO: 16874 - DNA, 555 bp, Gossypium hirsutum
  Clone ID: LIB3825-020-Q1-N6-F6
gccacgagcatcctttttaagcttaaaattggaaagcaataatccaaagtgtatgtacataagcaagtgcgtgggtgaaatatgggatgatccaagtattgcataagcctatatcaacacggtctcgggtatatcatcgtgtttactaacttattaaacacgcccaaaaaaggaatcagcatgtataccccataatctgtggttttgctaaggcaccaggccactcatcttacatgtcttacatgagagctctttgctaaaagtttaaaagcatccagttgtgatgaattactgcccagaatttcccaggagtctctcaactgcagcatggacgtttcccgcagtagcacgaagtgctctgatattctcttgtgtatcatagaagcccatttcttggagttgtgataattgcgtggcatacagttcttctgggggaacatcaggttggttgggaacactgaggccgccagcacctagaccaccaaacatattcatcaacaaatccagactagcagtagggggtgctcctgtagtaccacttgtctgtgttgaatc

SEQ ID NO: 16875 - DNA, 736 bp, Gossypium hirsutum
  Clone ID: GOSHI-09MAY01-C47504_1
gcgatggatggcagcccggccatgggaagtccgaagcacaactgataacaatgaccgtggctcagtcaagagtatgggtgctcgttcaatatctataagtgaaatcagcagagcttattctcgaagagatcttaacaatgataacaaaccaagtccaacacctcagaagtcaagtcgagttcctagccaccagtctccatcgactccaccttcaaaggcaccttcgatttcatcggtttctggtaaaacaagactgccaagtccgagatgaagtcaatggggagggtatgtacgctcaaggagcatactcagtacccggtctgatcgttataggagacatagcattgcagggtcctcaatgagagacgatgagagccttacaagctcacctgcagttccgagttatatggcaccaacacagtccacaaaggccaggtcccaaataccaagccccttaggaagtggcacaccagataggagagtggcagggtctgcaaagaaacagcttttgttctcagcgtccccagccagtagtaggagacattcagagcctcctaaagtggacataagtgaggttagaaagaatcaacatgcaccaagcaatggaaggcaagtggtttggtgaagagtgcaacaaaagttagattgaataaacaaggaagggttattacaacttgaagctcttgagtgtgtttgtgattatctttttcttcctaggttttatgattattaatta

SEQ ID NO: 16876 - DNA, 502 bp, Gossypium hirsutum
  Clone ID: GOSHI-09MAY01-C47404_2
ggcaaaaagtgaaggagtctgttggcagcagtaagcgcaagggaattgagtcggatgaggactcacctcctagaaaagctcccacacatcgtcgcctggcagttgtttatgatagtgatgaggaatgaaacaagattacaggggaataatcgtatcctcaaacaatgaactattgacacacaactttggtggctggaaaggatgttggagctgagcttgctgctaacttcactgagttatataacactgctggagacaacttaaggtttaaatgttaattgttatatatgacttccaaattaagttgagctcagaaaagtaattgctctagaatttgaggaaaagaattgcaggcaagttattatttttctgtcccataatgtgaaaacttggtgttatagattcttactactaacatgtttgaggtttgccttaaactaaacttgaaggttgacataatctaaaggccctttctggaaaaaaaaataatataatataatat

SEQ ID NO: 16877 - DNA, 486 bp, Gossypium hirsutum
  Clone ID: LIB3825-007-Q1-K6-F5
ggatgttggagctgagcttgctgcttacttctctgacttatatgacactgctggagacaacttaaggtttaaatgttaattgtattttcactccctttttctgaaattgttatatacgacttccaaattaagttgagctcagaaaagtaattgctctagaatttgaggaaaagaattgcaggcaagttattatttttctgtcccataatgtgaaaacttggtgttatagactcttattactaacatgttttgccttaaactaaaaaaaaaaaaaaaaaaaaaaaaaaaaaaaaaaaaaaaaaaaaaaaaaaaaaaaaaaaaaaaaaaaaaaaaaaaaaaaacaaaaaaaatagaaaaaaaaataaaatattatatattgaaaaaataaataaaataaattgaattgtaattttaaaaaattaaaattgggaaaattgtgaaattactaaattgaaaaaacttggaggatatccaactttatccatt

SEQ ID NO: 16878 - DNA, 605 bp, Gossypium hirsutum
  Clone ID: GOSHI-09MAY01-C47744_1
agcaaatgggtgtatttcaagaagatggatatgttaatgtcgactcctccacagcagggtgggctctcttgtggtttggactcgggtgagtatgtattcatgaaccccagagtttatttgaaccgtgcaaatggtttagatgaaatgagggatagtccagcagattcagaatctgctgacagtgaagaggatgtctcagatggactcccaccaaaaaagagaagattcgggaggcaatatgatgagggttcttctttcagattgcttgctgatttgatccaaaagttcagcgatacatatgaaaagattgaggatagtaaaaggcagcagatgctggagttagagaagatgagaatggattttcacagggagttggaaatgcagaagcaacacatcatggaacgagcgcaggccgaaattgcaaaaatacagcagcaggctgacgatgacgagaatgagaaggcaagcgggtaatgtatgcaaaatacagttttatttcttattgctgattcaatgtcgactgctgaatgttgttgtataatatattggagcctttgcccgatctccaacaataacactgaatatgctgcatcgattgagtagaa

SEQ ID NO: 16879 - DNA, 576 bp, Gossypium hirsutum
  Clone ID: GOSHI-09MAY01-C47604_1
gtcagggtgtttctagagcactggttgagaactcaagaacattaagattgcctacatatttgcatgaaagattgggattaatccgaaatgcaaaatataggctggaggagaaaggaataacaccgactattgataggattgctgagagtctgaacatgtctcagaggaaagttaggaatgccacagaggcagtcagtaaggtcttctcccttgacagggatgctttccccgctttgaatggtcttcctggagagactcaccatagttacattgcagataaccatgtagaaaacaatccatggcatggagtagatgagtgggcactcaaggatgaagtgaacagactgatcaatataacgctcggagaacgagaaagggagattatacggctttatcatggtttggataaggaaagtcttacatgggaggacatcagtaaacgcataggtttatccagggagagagttaggcaagtcggactcgtggcgctggagaaactaaaacacgcagcgaggaagaagaaaatggaagccatgctagtcaaacattgattttgtaacgcttcaacatacacat

SEQ ID NO: 16880 - DNA, 567 bp, Gossypium hirsutum
  unsure (1)..(567): unsure at all n locations
  Clone ID: AW187491.2
ccgaaaatcacctttcaaagttttgattaccttttctttgtattcagtttttttgtgcgtccccaaaatatataggtggttctctttaggcttcatagccgagagaagaaataaaaaaaatacaatttttctgccattttctcgcgtttgttttcttcttgcgtttggtgtgcaggtacggtgagtgtggagcgcgtacaaaggccgtgcgctggcgtatggagatagctggggcgtcgtacggtgcgagggctggggcttggctgcggcgagagggagagaaccctagggttcctgttgntaaggaattttgggccgtttgggccttgaacctttgggtctagatttgggcttgtaataggtttgggctagggtattaatttgggtattaggttagtaattgggtcaaagtctgtaaatgaacatttaatggactgttataatatttttattataataatttttttggttttgtgtttatacgggcccaggctaaattggcccattacaaatggaattgtggaatatgagatatatgaatttttctaaaaaaacaaaaaaaaaaaa

SEQ ID NO: 16881 - DNA, 360 bp, Gossypium hirsutum
  Clone ID: LIB3135-026-Q1-K1-H9
cgtttttgcaggtacggggtgtgcgtggcgcgagtacgggggctgtgtgctggcgtaaggaggcgcgcgtggcggtcgtacggagcgagggctggggcttggctgcggcgcgaggaagagaaccctagggtttctattgctaaggaattttgggccttgaacctttgggtctagatttgggcttgtagtaggtttgggctagggtattaatttgggtattgggttagtgatttgaatttaatgtttaggtttggtttggtttaagcctaaatatttgtaaacgaacattggacttttgatttttaatttatgtttctgggttcatttcgagccaggcaaaaatgggacattacacattat

SEQ ID NO: 16882 - DNA, 689 bp, Gossypium hirsutum
  Clone ID: GOSHI-09MAY01-C47034_1
acctcatcggttcaaccaatcaagtgttttcgctggttttcgcggttatacttctcattggattagctagtccgttggcggtcccgatatatgcttttgtaaagagttggcgcttggtcgggttcgaagctgacatggagcgacaacaaccgttgctgaaagaggaaactacgtcgccgccgtcggagacaaaggacatcattaccgaagtggcagcagcagcttcggcggatgacgcgacggtgttagtggaaaagacaaaaccggtgataggagaggagcacacgataatggaggcgatgcagacatgggacttttgggtatcgctcacatcgttcctttgtggggtgggaacaggtatggcggtgataaacaacatggcacagatcgggttagccttgggtcacgccgacgtttctatattcatttcattgaccagtatttggggcttttttggacgaatcattttcggctctgtttccgagtactttctcaagaaagcaggaactcctaggccactttggaatgcagcatctcagatcttgatggcgggtgggcctcctttaaatggcatgggcatggcctggttgccttaacatgggtccaattgttgttggcttgtgttacggagtccgtatagcattgactgtcccggttgcctcagaactattcggtctcaaatactacgg

SEQ ID NO: 16883 - DNA, 395 bp, Gossypium hirsutum
  Clone ID: GOSHI-09MAY01-C47334_1
gttcgcatgatgaatgaagctcagttccaaaaccgacccatggttttccctcaactcgtggcgaccgacttgtctcggttccaagttcagcctcattggcaaggtcttagccctcgagcacagccgagacagaagcaggattcacttcctccggatcttaatatcgggttccaatctccagggtcaccggtgaaacaatcggcaggtgttttggttgattcccagcagccagatctggctttgcagctttgagttgctgtgacggatttatctattttttctttcttggagctatgtatttattacaagtttaagaaagttttaattttgttttcaattgaaacttgaaatgattaggctgtgctttaattttaagctgctgccattttattttt

SEQ ID NO: 16884 - DNA, 511 bp, Gossypium hirsutum
  Clone ID: GOSHI-09MAY01-C40984_1
gtggaaatgcccacagtggtactaagaaaaaaggaaatgcacataagaggatgaaaggctctatgctgcaagctaagccctgggagcatgttgatcatgtgattatgaatcttcctgcttctgctttactatttttagatgctttcagagctattatctcaaggaagaactggagagggcctcttccattggttcactgctattgcttcatacgagcaaatgaaactcaagaatttataatatcagaggcagagtccgccttaaatgccaaaataaaggacccggtgtttcataaggttagggacgtcgctcctaacaaggcaatgttttgcttaagctttaggctgccagaagcatgctttattgaagacgtcgctaactcgacctgtcataatacaggtggattatgagttatgatctcaaaaagtatccaattttcttctagctcttcaactcttgtaacttgtaagaaggcatgcaaaaatgaaatattagtattagctttagcttt

SEQ ID NO: 16885 - DNA, 478 bp, Gossypium hirsutum
  Clone ID: GOSHI-09MAY01-C40954_1
gttgatgttcttcccaagaagcctgctaaacagtttcatgagcaggaaaatgggaacattgagaaaaatggaaagcattctgagcaaaagagctcaaagaagcagcaaaatggttcagttcagccaaagaaaccatttcaaagagtgaatgtggatgaggtagaatttgttgatagcaggcttgaagataattcatactgggcaaaggatggtgctgaaactggatatggtgcaaaagcacaagaagttctaggtcaagtaagaggaaggggtttccggcacgagaagaccaagaagaaacgtggatcatacaggggagggcagattgatctgcagtcgcactctataaaattcaattattctgatgaggagtaaatgctgactttctagttggatgatgagcactgctgtaccctctaacacgtttgcattcattggagtctattaagtggaactcaatggaactcaatgataatat

SEQ ID NO: 16886 - DNA, 460 bp, Gossypium hirsutum
  Clone ID: GOSHI-09MAY01-C40944_1
aacttcaatagcatctctcactttgatatcttttatgggtgctttgctcagctgggttgcttagaacaatggagggtagcaaaatggccatgattttgattgcctacgttacggttcttgccgttttcaccaatggagccacagctttgagggaagatcaaggggccgtcgcaccatctccgatggaaagtgcaggagcggctctgggtgttccagctgcagtagctgccttagcttctatggctgcatggttcttttgaagttcattccttggtatctatcttttcattccttggcgaatatggtctaaaccctttttaatttctctttctcaagatttgtcctgttggtttatttgagtttattattattccaagcaactggtattgtggatggagaccgaaatttttattcttcttttcaagtaattataatgttaataaaatcttaattgtagtgt

SEQ ID NO: 16887 - DNA, 701 bp, Gossypium hirsutum
  Clone ID: GOSHI-09MAY01-C40964_1
acgcacgcgtccgcactttcaggcacttaactaaaggtttcatttttaactagctgatgctccaaaaaaggataggttccattatacacagggtgcgcataagattaacagcttttatactgctccgaagaagctattggcatctgactctcgcctacgtcccgacagatatgcactatagctgggtgacctctctaaggcaggctttgaaaagagcagtttggaggaaagacagagagctgaaaagaaaaacagggaggtaaagggccataaattcacgcctaaatggtttgacttcgccaacgaagttgctgctacaccttggggtgacttggaagtttatcaatacaacggcaagtataccgaacaccgagctgccatagatggctcgagtagcagtgaggagattgacattaagtccactgaattcaacccatggcagtatgaagatttggctgctaactaaaagcacatctttgcgcttgcttttgaactgtgtgatatattctttttctatgccttttacacttcggtttcctgttgtggctagtgtcaattatagaacaattacatcataggtatttattctgttctgttttatttataatttctagaattttattgtttagttattttttggtccatggttttcaagaaaggtttatgtatttttatcatcaaatcatatatgatataatatt

SEQ ID NO: 16888 - DNA, 346 bp, Gossypium hirsutum
  Clone ID: LIB3146-042-Q1-K1-A5
ggtgacctctctaaggcaggctttgaaaatagcagtttggaggaaagacagagagctgaaaagaaaaacagggaggaaaagggacataaattcacgcctaaatggtttggctttcgccaacgaagttgctgctacaccttggggtgacttggaagtttatcaatacaacggcaggtttcccaacaacggacttgcataaattgctttagtagcaatgaagaaaatgacatttagtccacttaattccacccatggcaggatgaaaaattggctgctaacttaaagcacatttttgcgcttgcttttgaacactctgatatattctttttctatgcctcttacactt

SEQ ID NO: 16889 - DNA, 790 bp, Gossypium hirsutum
  Clone ID: GOSHI-09MAY01-C40914_1
gggaatgtggacagaaccaagccaatcaattgtggacattgacatcaaatgataacacagttcgatctggcggaaaatgcttaaccacttatggatacagcttcaaaaattatgtgatgatctatgattgtgagacggctgttcctgatgccaccaaatgggaaatccgcagtgatgaaaccataagaaatcccagatctgggctagttttgacgggaagtagagatagttcaggtatgattaatttggttgtggatcataagtatgatggttctaggcaaactttctatgccagcaacaatacaaagccagcagtgaccaccattgtcggttacaaagacatgtgcttgctagcaagtggaagtcgggtgtggctggaagactgcgtgagcaacgatgctgaacaacaatgggcgatatatccagatgggaccatcaggcctcaaaagaatagaaacgggtgcctcaagtatgcaaatgattatagtgggttggtcaacgtggctacgtgtgatggatttgttgaggaacgatgggtatttcgaagcgatggaaccattttgcataagatgactgagatggtaatggatgtgcttgatcctactgcaacccttcttgaggtctcggccaatcattacaacaatcaacaatttagccagatttggtttcaggtgcaaccatgaaaacaaaaaagagcatatactggtctctttccatgtattgaatgaataaatgctgggatgatcatgtacccaacaccgtttgctaatagacactttttctcctcctc

SEQ ID NO: 16890 - DNA, 472 bp, Gossypium hirsutum
  Clone ID: GOSHI-09MAY01-C40824_1
atttagcctatcaccgccgaaaatgaagctcttagaactccaaagccagtttgcagcctcaagaccactcctcaaacttcaatttagcgaagcaaagaagaacccgtggcgaatttgcaagagctgggcgtacggagaagaagaccccgggtgatgtggaggctgggcggaagggtctctcgtgtgagaccaactttctggtgcctctctagcttgttccagactcttctggaattcacaagaagctgaaacaattttgggtatgttgggcttcgggttttgggcttatttaggctaattttatttggattttggaaatttagaatttgggtcagagttttggggtatttggttaaaaaaaataggtttattttattttggcccaaatatttgtattggacttttaattttggatttttattatttttggtttattctggttttggttcttgatggaagcccgggcaaaaat

SEQ ID NO: 16891 - DNA, 637 bp, Gossypium hirsutum
  Clone ID: GOSHI-09MAY01-C40564_1
gtcaaagaagaaacttcctttttcccacttttcttttcagctagggtttgaaacccatcatcgccgacaccattgcgataccgccgtgagtggtggttgagggcgcacaatccgactcccttttatgccctgttcaaaccttttcccctcatttttttgttaaaaaaaatctaaaaggaaaactagatctagagagtttaaaacgggattaaggggtttaatgtgtgaatcatggaggaaacgccttcggtggcgtggccttttccgaccttgtcggaacccaaatgggttccacgacgtttgggttgccggagaccccccaccgacgaccgaatacgcgtcaaggtctttggaagcgatgggacgaagccagggagtggttgagcctcgagcgttgaatgcgctgaccaggcacgtggggagcggcgcatactgctgctaggtttattttttctatttctgctttttttttcttttttgggttatgggcttgtaaaattttgggctagggtagtgtttggtttgattcgggcttgttggtattaaggcccggttaaaattgggcttttacaatattttatgtacttatgttaaaaagttacattttagtacttacattatcgttttgtttgaagtg

SEQ ID NO: 16892 - DNA, 649 bp, Gossypium hirsutum
  Clone ID: GOSHI-09MAY01-C40524_1
tagaccggtacctctcggggaataccatgaacaggcagcggctacagttacttggtgttgcctgcatgatgattgcttccaaatatgaggagatttgtgcccctcaggtggaggaattctgctacataactgataatacatatttcaaggatgaggttctagaaatggaatcatctgttttgaattacttgaagtttgaaatgactgccccaacagctaaatgtttcttaagacggtttgttcgtgctgctcaagggatcaatgaggttccatcaatgcaattagagtgcatggccaactacattgctgaactgtctctccttgagtacagtatgctttgctaccctccatcactcattgctgcatccgccattgtccttgctaaatttatacttcttccatcaaagaaaccttggaattctaccttgcagcattacacactgtataagccctccgatctatttgagtgtgttaaggaccttcatagactatgcttgaacaacaacaattctactttgcctgcaatcagggagaaatacagtcagcataagtataaatgtgttgcaaagaagtattgccctccttcaataccttcagatttcttccacaactgaagaaggcattggacaccatcagcaacagcacaact

SEQ ID NO: 16893 - DNA, 514 bp, Gossypium hirsutum
  unsure (1)..(514): unsure at all n locations
  Clone ID: LIB3584-009-P1-K1-D2
cgttctgtactgtctgttgttgnatgatgtggngcaattgtatatcttgcacaaatgaaacctctcattgtccccattttgagtgaaggggaatgaagttctttacacattatgtttcagaaccgagaatgtgattgtgaatcgaccactgaggagcatctgaatttagctatgatggatgatttttgtgtcttctggtgtttggttttgtatgtaacccgaatttgagcatgaacttaaaagtttgtgttggcacttgttatcagtttctcatttgttatattatcatcttttattcaattttcataaaaattagtgttctatgggacattatgagattttggtaaaataaaagattatatatcttttgagaataatagcaatgccttgtgttgttttgatgtatcaaatatatagaaaatttaaacatatttgtattcaatcttcacactcaatttacccaccaaagggaaaaaaaaataatttaattgnttnaaaaaaaaaaaaannnnaa

SEQ ID NO: 16894 - DNA, 259 bp, Gossypium hirsutum
  unsure (1)..(259): unsure at all n locations
  Clone ID: LIB3147-027-Q1-K1-H1
cgtnnncgcccacgccgtntcgnnccacgcggtncggggggaatggaaggtcttaccaccattattgtttcaaaacccgagaaatgtgattgtgaatcgaccactgaggagcatctgaattagctatgatggatgattttgtgtcttctggtgtttggttttgtatgtaacccgaatttgagcatgaacttaaaagtttgtgttggcacttgttatcagtttctcatttgttatattatcatcttttattcaaatttca

SEQ ID NO: 16895 - DNA, 619 bp, Gossypium hirsutum
  Clone ID: GOSHI-09MAY01-C40724_1
ccccccggcccccgggaaacgcatcgaaaagttagggttttcgctccttacgattatcgagatcgtccttttgaattgaagtatgggaaagaggaaatcaagagcaaagcctgctcctaagaagcggatggataagcttgacactgtgttcagctgccccttttgtaaccatggaaccagtgttgagtgccgccttgatatgaagaacttgattggcgaagcctcttgcagaatatgccaggaaagctttagcactgttataacagctttgactgaaccaatagacatatacagtgaatggattgatgaatgtgaacgtgttaacaaccttgaagaagaggacgatggggatcaggatgaaggttatgtgcctagaaaacgggtttcgacatctgaatgggactagcagtagcgatggatgttttagtacttaccaaggctgtaattatgttagttttctgtggggagtagttgtgtgcaagtatgcatatcttacagcatcttatggtatgaatagcctaaatgatccattgtatgctaagcaagagcttcgtcaaatggctatcagatactcgttttgtgttgttatgttgatttaatgcaattacgtgatcctatt

SEQ ID NO: 16896 - DNA, 472 bp, Gossypium hirsutum
  Clone ID: GOSHI-09MAY01-C40664_1
gaaaccgccttccctgattggtttgttgcttttcagttgtatatggctacccccgggttgcaaaagatgtactcctgcaacggcacagccttggagttgaatggcgttaacaatactatattcatgcaaggtctgcccgggttaaactatatcgttgcagaaaccgatgcagctaaccctcagaaagatcctagggtgcccggaaaacaacagacagttatctcattcaccaagaaaacgaccccttccattaacattgctgcaggtgatggattcccctctaaagtgttcttcaatggcgaggagtgtgcactcccttcaatgctgccaacaaacagcggtaatcgaaagggctcaacgactgtaatctcgatcttgatagcagttcttgtgttcatgctggttcaacagtagctacaaatgtgccattactttgtggttgtgttggtcttttctgcagttcttctctttt

SEQ ID NO: 16897 - DNA, 539 bp, Gossypium hirsutum
  Clone ID: GOSHI-09MAY01-C40174_1
cccacgcgtccgcccacgcgtccgcccccgcggccggagaaaacaaaaggttaagtgaagatgggagcagaacaagcactgaagagaattccacgcattaagtttcctcaaagacacccaaaaccctcgccttcaggttcaatctctgaaatacaagcaacacgcaaagatggaggtgtcattggtaacttcattgcaaggtcaaggttgagctcagatgttcctgctccgcccagcaacactgctgtaggaggaaaagcatctcttttgccaaaacgtactcctgtctctgagagggaaatcgaggctattctgttaggcggctgcttctgaattttcagctgtcaaagctagctttcccgaagctcgaaataaaatttctgatctgttatttttctcccatcttagttctctgatatgtaaagaactgtttactgaagtttaaaaagctcaaaagaatcaaaattggtcttaaaaaaccattgtgggatgagacttcattctcagtgaaataatatgtggaaactctttttctattt

SEQ ID NO: 16898 - DNA, 567 bp, Gossypium hirsutum
  Clone ID: GOSHI-09MAY01-C40134_1
tgaatttgcgagcagtatcttcggatccaacactcgtttcaagaccctcggaacggagcatcttaccaagtcaagcacccttgtccaaaactatactgttttaacaacaccagaagagataccagctccgatgatggtggcttgtcacaccgtgccttacccttatgctgtcctgtattgccatagccaagtgactgaaaacagggtgtttaaggtatcattggacggtgagaacggagataaggtgaccgcggtggctgtttgtcacaaggatactacgcaatggaaccgtaaccacgtgtcgtttcgtgtgttggggattgagccaggaacgcccggtgtctgccatttcttcccggcggataacttcgttctggttccagacccttgaatttgtagtaattgtctttcctaggatacgagacttgggttgtcataaataataatactcgattcctaatacttgatgtctggttatatctatggatgttgttctcatggtaacgaaatcaatgttttttgaaaaaaaaaaaaaaaaaataaaaaaaaagaaaaaaaagaacatac

SEQ ID NO: 16899 - DNA, 814 bp, Gossypium hirsutum
  Clone ID: GOSHI-09MAY01-C40064_1
cccacgcgtccgcccacgcgtccgcgatttctcctccatcaaagaagaagccaaacaatgccgcctaaattcgacccaacccaagtcgtcgacgtcttcgtccgcgtcaccggtggtgaggtcggagcagccagttccctcgctccaaagattggtccgttgggtctctctcccaaaaagatcggtgaagacatcgccaaagaaactgccaaagaatggaagggtctccgcgtaactgtcaaactcaccgtccagaaccgtcaggcgaaagtcgctgtggtcccgtcggcggcggctcttgtaatcaaggcgttaaaggagccagagagggataggaaaaagaccaagaacatcaagcacaacgggaacattaacctcgacgacgtcatcgaaattgccaaggtaatgaggccgaggtcgatggctaaggatttgagagggacagtgaaggagattttgggcacgtgcgtctccgttgggtgtactgttgatggaaaagaccctaaggatctgcagcaggagatcgatgatggagatgttgatgttcctttggagtgagaaagcttgttcttctcgttttttacgtctatcctcatgcttgcctcttttagaaaaatgttcaatataaagattttgaacaatttgcttatatttaattcagaggctgttttgaagtttaatttagatgattttaactattatggattctttatattgttttgtttcagaaaaaaaaaaaaaaataaaaaaaaaaaaaaaaaaaaaaaaaaaaaaaaaaaaagaaaaataaaatttttggatattggcataatac

SEQ ID NO: 16900 - DNA, 384 bp, Gossypium hirsutum
  Clone ID: GOSHI-09MAY01-C40024_1
cggacgcgtgggcagtgaatccatggaggtaccctgtacaagtatgcaagaaaaataatggatgcgtacaaatgacaaatgcaagatcatgattatggtctatcatccaaattttgtgttacactcttatataatttgtgggcatgcactgcatagaaagaagaaacatcctgtatggaatatctttaatccataatctacaactaaatattaaaaaaagatacataaagcactgtagaagttatgctttcgaatgctgacacgttagcagttggtttttttttcttcatttcggtgaatgagaaagcaagggtgaaaaaatgcctaattgccccttctataatttaaccaactgacagttgttaactcttctgcttatttaca

SEQ ID NO: 16901 - DNA, 620 bp, Gossypium hirsutum
  Clone ID: GOSHI-09MAY01-C40354_3
cccacgcgtccgccagagttcaccgtgccacaatgttattatgctaagcaaccacctgctttgcatcaaggctatttttcgaagtttacagttgatgcgttgttctatatattttacagcatgccaaaagacgaagcccaattatatgctgcaaatgaactttataatagaggctggttttaccacaaggagttccgattctggttcatgagggtccccaatgtggagccactagttaagacaaacacatacgagagaggttcataccactattttgatcccaactcatttgaaataatccgcaaggataattttgttgtccattacgagttgttggaaaagagaccgtcgctacctcaacattaatatttttccccctcatttacactgtaaagcacaagcatgtaattcattccttataacatcagtttgcagcgtttgtgtttttgcaaatttaagcgattttaagcatttctgtttatctttttcccaatgaggagcccttggggcttctttccaaatctaatgcatacccccctttccctccaaaaaaaaatttaaaatattatttaaattttattatttttattaatattttatatatttttatcattattata

SEQ ID NO: 16902 - DNA, 723 bp, Gossypium hirsutum
  Clone ID: GOSHI-09MAY01-C40354_2
atgacttccctcagttgacaagtcgtcctagttctgctggagggcctcaaggacaattgggttcattacgaaaacaaggtcctagccccattgtccaacaaaaccaagagttcagcattcaaaatgaagatttccctgctttaccaggctttaaaggtggtaatgctgactatgcaatggatttgcaccagaaggagcaacttcatgacaataccatgtcaatgatgcaatctcagcacttctctatggggaggcctgcagcatttaacttgggtggatcctattcttctcatcgcccgcagcagcaacagcaacatgcgccatcagccagtaccactggtgtctcctttccgcctgtaaacgaccaagatcctctccatttacatggctctgatattttcccatcttcgcattcgggctaccactcgcagaccagtgggccacctgggattgggctaaggcctctaaattcctcgaattcggtttctggtatgggttatgaccagctcatccagcaatatcagcagcatcaaaaccagtccccgctccgtctgcaacagatgtcagctgtcaatcagtcatttaggggaacctggcttgaaaccaacgcaggctgcgcaatctgattctgacccttttggtttacttggtttgcaaagtgtaataaagatgactaatcctgatctgacttccttgctcttggaattgatctgacaactcttg

SEQ ID NO: 16903 - DNA, 1019 bp, Gossypium hirsutum
  Clone ID: GOSHI-09MAY01-C40354_1
gttttattatgcaatggatttgcaccagaaggagcaacttcatgacaataccatttcaatgatgcaatctcagcaattctctatggggagatctggagcatttaatttgggtggatcctattcatctcatcgcccacagcagcagcaacatgctccatcagccagtagtagtggtgtctcctttccatctaacaggggtcacctgggatgggctaagacctctaaattcctcaaatacggttttggcatgcgtcatgatcagctcatcagcaatatcagcaacatcaaaaccagtccccgtttcgactgcaacagatgtcagctgtcaatcagtcatttagggaaccaggcttgaaatcaacacaggctgcgcaatctgattctgacccttttggtttacttggtttgcaaagtgtaataaagatgactaatcctgatctgacttcccttgctctcggaattgatctgactacactcggattaaatttgaattcatcggaaaatctttacaagacatttggttctccatggtctgatgaaccagctaagggtgacccggagttcactgtgccacaatgttattacgctaagcaaccacctcctttacaccaaggttatttttcgaagttcactgtggacacattggtctatatattttacagcatgccaaaagatgaagctcaattatacgctgcaaatgaactttacaatagaggctggttttaccacaaggagcactggtgttggttcataagggttcccaatgtggagccactagtgaagacgaacacgtacgagagaggttcttatcactgttttgatccgatatcatttgaaacagtccgcaaggataatttcgttgttcattacgagatgttggaaaaaagaccagcattacctcaacattaacaagttcttattcccatttaccaatgtaaagcacaagtatgtaagtcattcattagctgttgctgttttcggatttagcaattttcattatattcctttctttttttggc

SEQ ID NO: 16904 - DNA, 291 bp, Gossypium hirsutum
  Clone ID: uC-gsronu33B015e08b1
tggacgcgtgggctcaacattaatattcttccccctcatttacactgtaaagcacaagcatgtaattcattccttataacatcagtttgcagcgtttgtgtttttgcaaattttagcgattttaagcatttctgtttatctttttcccaatgagtagccattgtagcttctttacaaatctaatgcataccaacatttccatcaaaaaaaaaaaaaaaaaaaaaaaaaaaaaaaaaaaaaaaaaaaaaaaaaaaaaaaaaagggcaaacgttctaaaggaatccggggtgc

SEQ ID NO: 16905 - DNA, 283 bp, Gossypium hirsutum
  Clone ID: LIB3148-035-Q1-K1-B6
ggtgcatgagggtccccaatgtggagccactagttaagacaaacacgtacgagagaggttgatgccactattttgatcccaactctgctactgggggatgccaacaatcaagccatcaaagctcgggtagaagaccatgaagcacaccttgaacacaaaaacgatgcgcttctgtgctgcaaattaaaccaacctactactttcaactattggatttcgtatattgattcaaatttaaaataagactggtatacataccttatttgtggaccaaaagggggac

SEQ ID NO: 16906 - DNA, 628 bp, Gossypium hirsutum
  Clone ID: GOSHI-09MAY01-C40344_1
tccgtacaggcccacttctgggtgatgcagcccaacatcggcatcatacattcctacatctcctttttacagcccaacctcacccttctatagccctacatctccatcatacagccctacgttcccagcatatagccccacttctcccgggtacagtccgacctcaccaagttatggtcccacgtcacctagctatagccctacctctccaagttacaatccgcaatcagccaagtacagtccatctctagcatactcaccaagcagtccaagggtgtctccttccagtccttacagtccaacatcaccgaattatagcccgacctcgccatctcattcgcctacttctccatcttattccccttcaaacccaacctatagccctaccagcccatataattctggaggcaatcctgactccagcccaggttcgccacagtgcagtccaagtgctgggtactcccctagtgctccagggtatgcgccatcctcaactggtcagtacactccaagcaacacggatgatcaggcagctgatgacggaaaaacatgacaggagttaatgataaggcacgccgttttggaaaagctcgagaaaaccaacgtggaatgcggcgaagactttttc

SEQ ID NO: 16907 - DNA, 802 bp, Gossypium hirsutum
  Clone ID: GOSHI-09MAY01-C40204_2
cccacgcgtccgcccacgcgtccgatagaatccctcgaactctgttatttttgaaattttcatggcacccatccctttcttatcacttcttttgctcttctcattaactttcccatcttcttcctcagccttcgaacaacaacaatcacccctccttaaataccatcatggtcctcttcttaagggtaatattactgttaatctcgtttggtatgggaagttctcatctacgcagcgttccataatcggcgactttttgaactctctcagcaaccccaagacgacgtcatccccctctgtctcctcctggtggcgaacgactgccaaatacaagggaggttccagcagcgttgttgtagggaagcaaactctcgatgacaagtactctttaggcaaagctcttaaaacttcccaactcaaagttttggctttcaaatatggatatggagatggtaaagcggtcaacgttgttttgacttcctctgacgtggcggtcgatggtttctgcatgagccggtgcggtacgcatggttcggttcaggttaagaagagcaggttcccttacgcttgggtaggtaactcggtgagtcagtgtcctggttattgcgcgtggccgtttcatcaacccgtgtacgggccgcaaactccacccttggttgctcctaacggagacgtaggggtggacggaatggtgatcaacttggcaacggttttggcaggaaccgtggtgaacccgtacaacaacgggtactttcaagggccggcagaggcgccactggaagcggtgagcgcgtgtacgggg

SEQ ID NO: 16908 - DNA, 582 bp, Gossypium hirsutum
  Clone ID: LIB3584-010-P1-K1-D6
ccgggtcgcccagctctggcgacgactgccaaaacagggggggggcgggggggggtgtaggaacaactctcgtgacagtactctttagcaaactcttaaaacttcccactcaagttttggctttcaaatatggatatggagatggtaaagcggtcaacgttgttttgacttcctctgacgtggcgggggagggtttctgctttagccggtgcggtacgcatggttcggttcaggttaagaatagcaggttcccttacgcttgggtaggtaactcggtgagtcagtgtcctggttattgcgcgtggccgtttcatcaacccgtgtacgggccgcaaactccacccttggttgctcctaacggagacgtaggggtggacggaatggtgatcaacttggcaacggttttggcaggaaccgtggtgaacccgtacaacaacgggtactttcaagggccggcagaggcgccactggaggcggtgagcgcgtgtacggggatattcgggaaaggagctttcccgaggtatccgggaaaggttttggtgggcgaaacgacgggggctagctctaacgccgttggggtta

SEQ ID NO: 16909 - DNA, 570 bp, Gossypium hirsutum
  Clone ID: GOSHI-09MAY01-C41954_1
atttggattatgttggttatctttatcaaaggatggaaccgctctcggagcaagaacggattgaacttggttatagggattttttacaggctccattgcaacctctgatggataatctggaggctcaaacatatgaaacatttgagaaagactcggtgaaatatattcagtatcaaagggcaatctgtaaagctttactggatagggtccccgatgggaaggcatcagcaataacaactgtattaatggttgttggagcaggacgaggacctctagtgagagcagcattgcaggcagctgaggaaactggacgcaagcttaaagtttatgctgtagaaaaaaacccaaatgctgtggtcacacttcatagtctggttaaactggaagggtgggaaaatgttgttaccatagtttcttgggatatgcgtctttggaatgctcctgaaaaagctgacatcctggtcagtgaattgctgggatcttttggtgataatgagctgtctcctgagtgccttgatggagcccaacggtttttgaagcaagatggaatttcaataccctcatcgtact

SEQ ID NO: 16910 - DNA, 415 bp, Gossypium hirsutum
  Clone ID: GOSHI-09MAY01-C41934_1
gcaaagaagctggaattgcagatggggaagatcggacgatagctgcaatcgaaggaacatatcgaagcgagcttattgagcaaacacatagctgcaatgagacgagaaagggcaatggcttattcatttactcatcagcaaacttggaagaatggttcgaaatccatgaatccgttattcatggatatgaacaatccgacatggggttggagttggttagaacgggggatggccgctcgaccatgggaaggacatggcagtgacgggaatatgaaccgatcatcgaccatgtcatcggttatgatatgcacatttctgaaggagaaatcagcttagcttaacgctcgttactcaactcaattggttaataaacaatccccgaaatcaagccaaaagccaaaccgaacatcaagtc

SEQ ID NO: 16911 - DNA, 569 bp, Gossypium hirsutum
  Clone ID: GOSHI-09MAY01-C41814_1
tttgttttaggtctgagaaacaaaagaatttgaaagctttaaaagataagaatagagaaggtttaggtgaagagaattgtgacgaagataagaaagaagagggttgggttaatggtggtcgtggacctttaatggctgcttcacaaggttcaattggttctcaaggaagtggttcttcaggcatatctgaacttgacagccaaccacctcaaggaacttacaaatgccaagggtcaagaagccctacgagtgtgcaatctacaacacaaaccgagcaaaaaccaaacatcatcaaccccggaaagatatcaactcagaaatccgaaaagttagccggaatcacagcaaagaatcaacataatcaaccaggagtagatgaaaaaagacttcgggcaagtttgaagaacataatggaagacatgccatgtgtgtcaacaacaggagatggtcctaatgggaaaagaatagaaggatttctttacagatatagaaaaggtgaagaagtgagaatagtatgtggttgtcatggcagtttcctttctcccgccgagttcgtcaaacatgctggc

SEQ ID NO: 16912 - DNA, 437 bp, Gossypium hirsutum
  Clone ID: GOSHI-09MAY01-C41834_1
ttcaccttttatttctttttttctcctatatcttggaatgctactttacctcttcatcagttgtttctccatcatcttctttataaagtccttaactttgaaaccactcccaccatgggcaactgagatgagactattgtctccctggtttaggaaagacgtttccttttttctcagttccagattgagcaaaaacattcttggtcttgcttattttaccacagtcgtttccaaaatgtctctcaaaaagatgtctttcacttcaaaagttgataactttgaggaggtttgaagtttgtcgccatgtcaattttggacctaccagatttggtcttggtatgcattcttgaaaggctaccacctgctgctctttggtagtatggctggtgtttgcagctctttgaggagtaggtgtattagtgaccatttctgggaaa

SEQ ID NO: 16913 - DNA, 628 bp, Gossypium hirsutum
  Clone ID: GOSHI-09MAY01-C41544_1
caagttttgaggtagaaaacaagagaccatggcaagagggcgaaccattctgacttgtctcatgtggcttttactcgttttctccattactttgtgtgcaagtgcaactgccggttctcgtctgggaacatcccaacaagttgtttatccccaagggtgtcgctgctgctatttcgttgggaaacctttcatgcttcggtgtggcaaagtatgctgcgatgatgattgctgttagctatgttagcatgagatttaaggttgaatcattatgtgcatcatcttttttcccctttgttgaatgtaatgtaattgtaccaaataaaaaataaaaataaggcttatccaattaaaaaaattttcatcttaggttggtttaattaaatccaaaatttacaatttaaatatcgcgacatttttgatcactaaccttaaaattaaggaaatggaatttattattaaaaatttaccttgggtctttggtcatattatgaaagtatttccaaacattaccttcgaaaaatacgaaaattaaaaaattggggttatatttcccgttacatttcatcattgttccttactaggtatgattactcaagcttctttgtctttttactgaaagtttcatttt

SEQ ID NO: 16914 - DNA, 408 bp, Gossypium hirsutum
  Clone ID: LIB3147-043-Q1-K1-A4
caagttttgaggtagaaaacaagagaccatggcaagagggcgaaccattctgacttgtctcatgtgggctttactcggtttctccattactttgtgtgcaagtgcaactgccggttcttgtctgggaacatcccaacaagttgtttatccccaaggtacgtatatctattctgtattattataatatatttgattaagttcatatatttaagaatgcagctttaaaggcgatgataatgatgatatttgcagggtgtcgctgctgctatttcgttgggaaacctttcatgcttcggtgtggcaaagtatgctgcgatgatgattgctgttagctatgttagcatgagatttaaggttgaatcattatgtgcatcatcttttttcccctttgttgaatgtaatgtaatt

SEQ ID NO: 16915 - DNA, 340 bp, Gossypium hirsutum
  Clone ID: LIB3272-009-P1-K1-F11
caagttttgaggtagaaaagaagagaccatggcaagagggcgaaccattctgacttgtctcatgtggcttttactcgttttctccattactttgtgtgcaagtgcaactgccggtgctcgtctaggaacatcccaacaagttgtttatccacaagtatgctgcggtgatgattgctgttagttatgttagcatgagatttaaggttgaatcattatgtgtatcatcttttttcccctttgttgaatgtaatgtaattgtaccaaaaagaaaatgaaagcaagcatcatccaatttaaaaaaaaaaaaaaaaacaaaaaaaaaaaaaaaaaaaaaaaatag

SEQ ID NO: 16916 - DNA, 738 bp, Gossypium hirsutum
  Clone ID: GOSHI-09MAY01-C41794_1
gaacattgaccccctataaagtacctatcaaggtggaatatgcggtccgaaagagttgttatgcttctgtagttgttgaaaatatcaaacttgtgtacttaaggaggagcttagtggaggagctgttgatgcatcctgatacatttgaagaaaaggttgtgggaagttttgttagagtgaagagaaagcctggaaactgttcggggatgacttcttttcagcttttgctagttactggcgtaaagaaaacctcaaatgctgagagcaacaaggggattctcctcgaggtttcttgcatgccggttgatattcctatcgacatgcttaatgatgatgacatctcagaggaagaatgcatagatctgcaacagaggataaaagatggtattatcaaaagacctactgttgtggagctcgaagagaaagccaaaagtctgcatgaagatataacaaagcattggattcagcgagaattagttcaattgcagggtaaaattgattttgcgcatgagaagggacggaaatacatgttggaacgatttctgtatgaaagggaaatgctgcagaaaccgtctgaacagcagcgactacttcaaaagttgccgagagtgattgcggaggaagtcgaggttaaaaaaactgctgataggaattactcgggaaatgattgcccaaccggattgtgaaagctgcaaaagcgagctgataatgaagcttaatggcaaaaactggattgtc

SEQ ID NO: 16917 - DNA, 238 bp, Gossypium hirsutum
  Clone ID: LIB3148-041-Q1-K1-G9
ctcgaagtagaaagccaatattctgcatgaagatataacaaagcagtggattcagcgagaattagttcaattgcagggtaaaattgattttgcgcatgagaagggacggaaatacatgttggaacgatttttgttttaaagggaaatgtctgattatctgtttgttcttttattctttatttatataagtcgactattatttctttgctttttttttctttttttctttttttttatt

SEQ ID NO: 16918 - DNA, 1102 bp, Gossypium hirsutum
  Clone ID: GOSHI-09MAY01-C41644_1
gaagtattcagcttctatccggatgagacgttttgcaatggatttgaagaagtgttgagacgatacagagaattagtccctaatctgaaacttgcagggccaacgtcatttgctcctataattgaaatggccatcaccattgttgagcaaagtggtgggcaataccatgtgttgctgataatagccgatgggcaggtgactagaagtgttgatacagagcgtggcctttgataatttccagtttgtgaattttacggaaataatgtcgaagatcgtggataggtcccgaaaagaggcagagtttgctctttcagcattgatggaaattccgtctcagtacaaagcaacgctggagctcaacatattgggtaataccagggggaaggctattgatagggttccccttccccctcctctttatggtgctggttcttttagcaactcgaaactttcgtggtcgagcagttttcgtccaagtgcaccttcttccgctagacgtgaagcaccagtccaaaccgctcctcctgcaagttctgcttcagataatcatctatgccctatttgcatttgcaatgcaaaggatatggcctttggttgtggacatcagacctgttgtgagtgcggacaggaccttcagttgtgtcccatctgccgaggcaccatcgatacgagaataagactctattaagcataatatgctttgcctggacttgcttatgctctctctatcgtccagcattccaagagtaagtcctttaagtttattgtgcaaaaggcttcatagttggccatgattggatgcgcattggatcttttctttagagagattgggcacccatcatatatgtatccaaagttttgtacatagttgtggatttcatcgaacgaaaaaacttagtcatatagcattatctatttcagtagatcatattgttgtaatgtaatcaggcacagaacacctgggaacagacatgtctcattgtcggattagcatccgtgccacatgccaactgtaatctgtaatgtttttcatgccgtgagaatgcattttcagcccccatttattaactgaaaaaaaaaaagaccaaactccgctcaccgt

SEQ ID NO: 16919 - DNA, 395 bp, Gossypium hirsutum
  Clone ID: LIB3147-044-Q1-K1-B5
cccacgcgtccgcccacgcgtccgcccacgcgtccgcccacgcgtccgggagctcaacatattgggtaataccagggggaaggctattgatagggttccccttccccctcctctttatggagctggttcttttagcaactcgaaactttcgtggtcgagcagttttcgtccaagtgcaccttcttccgctagacgtgaagcaccagtccaaaccgctcctcctgcaagttctgcttcagataatcatctttgccctatttgcatttgcaatgcaaaagatatggcctttggttgtgacatcagacctgttgtgagtgcggacaagaccttcagttgtgtcccatctgccgaggcacaatcgatacgagaataagactctattaagcataatatgc

SEQ ID NO: 16920 - DNA, 538 bp, Gossypium hirsutum
  Clone ID: LIB3582-006-P1-K1-D2
attaattccttgttttggattcggagagcatcaacacatgatcaagagtattcagcttctatccggatgagaccttttgcaatggatttgaagaagtgttgagacgatacagagaattagtccctaatctgaaacttgcaggtccaacgtcatttgctcctataattgaaatggccatcaccattgttgagcaaagtggtgggcaataccatgtgttgctgataatagccgatgggcaggtgactagaagtgttgatacagagcgtggccaactaggcccacaagaaacaaaaacagtcgaagcaatagtaaaagcaagtgagtatcccttgtctattattttagttggaagtggagatggaccaatggacatgatgagagaatttgatgatacatttctgcccgtgcctttgataatttccaagttgtgaattctacggaaataatgtcgaagaatatggataggtcccgaaaagaggcagagtttgctttttcagcattgatggaaattccgtctcagtacaaagcaacgctggag

SEQ ID NO: 16921 - DNA, 373 bp, Gossypium hirsutum
  unsure (1)..(373): unsure at all n locations
  Clone ID: LIB3146-013-Q1-K1-H10
acgcncacgcgtncgacaacgcgtgcgcccacgcgttcgcccacgcgtacgaaggcctttaagtatattgtgcaaaaggcttcatagatggccatgattggatgcgcattggatcttttctttatagagattgggcacccatcatatatgtatacaaagttttgtacatagtcgtggatttcatcgaacgaaaaaacttagacatatggcattatctatttcagtagatcatattgatgtaatgtaattaggcacagaacacctgggaacagacatgtgtgattggcggattatcatacgggccacattcccactgtaatcttggatcgttttgatgccgtgagaatgcatttttaaaccgcatttattaact

SEQ ID NO: 16922 - DNA, 570 bp, Gossypium hirsutum
  Clone ID: GOSHI-09MAY01-C41664_2
ccggggcggacccacccgtccgaaatctgtaaaaaaccttataaaagacttcacttttagcatctgtatataatctgccgcaaccccttcacagcaaatgtagggcggccaatccaaaaccctaattttgccataggtgagaagaaggtaaagaagaaatggcggtgccgcttctaagtaagaagatcgtgaagaagagggtcacgaagtttaagagaccccagagcgatcgcaaaatctccgtcaagacgaactggcgaagaccgaagggtattgattctcgtgtaagaagaaagttcaagggctgcactttgatgcctaatatcggctatggttcagacaagaagacacgtcactatctacctaatggctttaagaaatttgttgtacacaatgttggagagctcaaactgttgatgatgcacaacaggacatactgtgcagagattgcacatgatgtttcaacaaagaagagaaaagagattgttgaacgagcagcccaacttgatgttctggttactaacaagcttgcgaggttgctcaaccaagaggatgaatgaacattgaact

SEQ ID NO: 16923 - DNA, 521 bp, Gossypium hirsutum
  Clone ID: GOSHI-09MAY01-C41664_1
tttattattggatatgtggtccaaggactatacaaagacaatgtgtgaattagacatacttatagcaaatgctatccgacatttacgttgcatgaaacagacaaactgtcaaagaccgaagggtattgatgctcgtgtaagaagaaagttcaagggctatactttgatgcctaacatgggctatggctcagacaagaagacacgtcactatctacctaatggctttaagaaatttgttgtacacaatgttggagagctcgaactgttgatgatgcacaacaggacatactgtgcagagattgcacatgagggttcaacaaagaagagaaatgagatcgttgaacgagcagcccagcttgatgttctggttactaaccagcttgcgaggttgcgcagccaagaggatgaatgaacatggaacttgggatcttgtgcaccattcccattgcagaattagcttgttattgaaagattattatttgtcaaaaaaaaagaggaaaaatttatcaggattttttcgc

SEQ ID NO: 16924 - DNA, 486 bp, Gossypium hirsutum
  Clone ID: GOSHI-09MAY01-C41064_1
tggtcgcgtccgcccacgcgtacggatacgggtacggaaccctttaattccttctttcttttccttcctttcgattgagtttcagagaaaaccatggagtttagacctttagaaatcaaagttatctccgccaaggatcttaaagacgtcaatcttttcactaagatggacgtttacgtcgtcgtttcgatcaacggtgattctcgcacagcgcaaaggactccggtcgacaaggacggtggttcaaacccagagtggaattacaccgtgaggttcaccgtcgatgaagctgccgcccgtcagaatgggcttaccgtcgtgtttacccttaaatcacaacgtcagcttggagataaggatatcggtacggttcaagttcccgtcaaggaattgcttgataacggtgatggaaaccggaaaggtcaaaataatctaagttacgctgttaggttggctaatggtaaagctaaaggtgtgttgcattta

SEQ ID NO: 16925 - DNA, 318 bp, Gossypium hirsutum
  Clone ID: GOSHI-09MAY01-C41024_1
cccacgcgtccgaaatgactctcactatctagatgctgacgcccgctcgaaggctgtggattaaagttcaatcaatgttcttgacgagcttcgcggtggcgacagcattggctcctcgctggcagacctgctcggcttggttacaataaccctgggctccaccgatcacactggagttgtttggatgtctaaagcttgggctgagcttgtttgccctttttcttaatgttctatttttctgggctttggatgtacacatttatgagttaatgaaatgatttgaatttacttaattaataattttaatatttttattat

SEQ ID NO: 16926 - DNA, 646 bp, Gossypium hirsutum
  Clone ID: GOSHI-09MAY01-C41284_1
cccacgcgtccgccggattcttcactttcctgtggacctgaggcaagagaaaaggagaccaagacagccgaattcggaaggacaggaggaatgaacggttccaagttattggccttccacagcaagagaaaccgcaccatcggtcacggtgagcgagaacaacttgattttatcgtgtctgaatcagttatccgatgggcatcatgcacaaatctcccaactgccacatcccttaggtcatctctcgtgtgttgagctgtgtcagtatgagtcaagatagtcccaacggaggttaacattcgcataaactgcattttccatgtaagctagttcttgtatcatgtggtgtttcaagtctgtatttccacgtcccggtgcgtagcaccagctttagtgtcagtgggattgctgcttctagctttgattaacgggttagatccaataggtaggaacagagtaacaagttgtggttgctggggttttgattcgtgtataaagttttttccatgtttcagattttggcactgtataagtaaacagtaactgtaatattatgcctgttatgttttctaaaaaaaaaaaggaataaaatgaaacaagattgaatcagttaactgaaaaaaaaaaagaaaaaatatatcatctg

SEQ ID NO: 16927 - DNA, 576 bp, Gossypium hirsutum
  Clone ID: GOSHI-09MAY01-C41234_1
gctttaaaactagctctatggttttagatgttcaatttagtgtcagtcaaacgagcttgagaatggttgctgcttactcagatggcttcgtgaaagtctttgagctccttgatcctttagaactaaagaactggcaacttcaggccgaatttcaaaacgttatacatgcggtctccatagtagggaaggcttcatgcttgacagcatgtatttcatggaatccacaaaatggtgaaggccaagaatcaagctttattttgggtttcaaattctgacactccacaactcaattcccccataggtggtgggaattggatccagctcatcagagatggctgccagtagcagagttggctttgcctggtgacaggggagatcaaatatactctggtgcatgggcaccaaacattggacggccatatgaggttatagctactgcatctcaaaaaggaatttctgtatggcgtgttggatcaaccactgacatggatggaaggctctgcatggagaatggtgcattgctctctcgacataacagtgaggtgtggcagatggaatgggatatgaatgggatga

SEQ ID NO: 16928 - DNA, 425 bp, Gossypium hirsutum
  Clone ID: GOSHI-09MAY01-C42944_1
catcagctgcttcggatgtgccatcgaaattatctatcttatattatacattgtatacgcacccatgagggataaggtttttacagtgaaatggataatcttattcaacctaggagggtattgtttgataatggtggccaccaatttgtttagagaaaggtctaaacgtgtgacagtgatgggatgggtttgtgctgttaacagtgtggcaggcgtctgcttctcctttaggcataatgagacgtgtgataaggacaaaaagtgtagaatacatgccatttcttctctccttttttcttacattatgttccacaatgtggttcttctatggacttttcttacaagatttatacgtggcttttccaaatgtgttgggatttctgcttggaacagctcaaattatcatctatgtgatatacaagaat

SEQ ID NO: 16929 - DNA, 531 bp, Gossypium hirsutum
  Clone ID: GOSHI-09MAY01-C42924_1
catcatcatcatcatccattgatgatgataattcatctgtttggtcaatccaagtaaatgcaagcacccatgatgaagatgaggaaacaactattgaagaaatgggagatgattaccatgaagatgcagaagaaatgggtgatgatgatgatggattggttgatgagctttgtgaaggtttaagcaagatgagcatggaagagatgtttcaaggaaaacacactagatttgtatacaacagtgatgaaaagattgaagaagagtgtgcagagaaggaggattcatccgatatcatacgactcaagggattgccaacaccgaaaggaaagcacctgcggtttcctctagatgaggttgacgatgattgataactatctcggtgtagaggtggggatgttgggattcattttgttgtcatcccaatttgtttgttctttctggaaaaagaaaagatcacgaacgaagtgattgaataaataaaaattgatgcaacgcaaaaattcctcggaaattgaactaattaatttttac

SEQ ID NO: 16930 - DNA, 764 bp, Gossypium hirsutum
  Clone ID: GOSHI-09MAY01-C42594_1
cccacgcgtccggcaaaagggagtgctgtaggaggcctaataggagtgatgcacatttatcagtggaagaagaggccaaattggaggagcagaccagggattactttgaccacacagcacctaaacgtcacactaagcctcaacgaagcgactattcttctaactacgtcgacgctcttgccgccgctgattccggtatccctgaatacctcgagtttcaacgtctagagaatgatccccagaaaatagtttacaatggaagtgaagtgagagaagaatttatggagactgaatattataaggatctcaattgcgtcgacaaacaccaccacacgacaggaacaggtttcataaaggtagagaacgacaatggcagaaactttaagttggaaccagattcagacaccagctgccatgcctcttgtagggaaatccagcaactaacgactggattccagctgctttggatgcggcttatgttgcttcagacaagcccaacagaatgatcaatgaatttaatgaaccagcgtggttttcaattgtctttcttttatctcctgtaatgtgtttctagaatatgatgttgaaaataatttaagaacccattttcaagggatgggatcttaactagaagtggtgttataaaaaaatatactatattattaatacaaaaaacttcagggggcgcggaccaatattcctttaggagggttacattcattggcgggtttcacgaggattggaaaaactggtcccatttaacg

SEQ ID NO: 16931 - DNA, 888 bp, Gossypium hirsutum
  Clone ID: GOSHI-09MAY01-C42794_1
ttgtgatcttcacaagttgtataaaagttacagagagaggatgaggaaatttgacatcttgaattaccagaagatgtatgcaataggctttcttcactcaaaagatccacttcaatcaatttcaacccacaaatcatcgtctccagcaattacatctcttcttcaccaaaacctgaggctccgacgccgaaaaaagtccaatttcgaccccaccaccaagttcatcaaggagctccacagtgatttagaaatggtctacgtaggccaactttgtctttcttgggaaattcttcatcggccctctgcgtctgccatggaaatatgggaaactgatccttatagtttacgtagatttaatgaagttgcttgtgaatttcaacagtttcaagtcctgattcaaagcattcaatcgaaaaccgaactgtttgaagggtccaagggtgcaaaactacgtaaagaaccgatgtcgttttaccgtaatctccttcaagttccagttattttcgagaggattagcgtgtaaggacacaaaggaaacgggtagaagaaagtagaattacgatgatgataatgatgatgatgatgatggcacttacaacgtgatcatgcttagttgacgaatcatgtgaagaatctcattaagaatatctttggcgcattcaattcgagcctgatataagactgcaaatgttgtcatcaaagaattccaggaaagggaactcacaattgaaccctctagaacccagctgatctttgaacttttaacaaaggttcaaactagtctacaaaagatggatgagaagcttaaagacattctaagaagtgggaactgcatattgagaaaattgaagaagaatgaaaaggaaaattcaaaatcaggtctttatt

SEQ ID NO: 16932 - DNA, 577 bp, Gossypium hirsutum
  Clone ID: GOSHI-09MAY01-C42764_2
atggggatgttttcaagtggaagcatttgtggagcgttttggcagagcaattcgggatagaataatttgggttcgtggaaggggagaaccgggggttggaggagatgatgaaagggaaggaaggagtttgggaagaaatagtgaaggagaaccagttgcagaagacgagtttgcaggaggtgggaaatgtggtggtttacagatgcgatgctttcggctccgttgccgatgccgctgctcagtatgaataagagcaaggagcatgggtttttggggtttaggaattctcagaattcgtttgttacttggattgataagatgaaggcttacaagattgtgccttgatctcattcaatctcttgttccaatttgtctcctgggttttcaaaacttttgttattgtacctctaaaataagcacataaggtaagctattatggcggtggaatgtggaaccgtaagatgttagacacactggctgaccttcaaatgttggctccctgtatttgtttatgatgcattgtattttatcctattctaatattagaattatacaataaaaacttgttcggttagac

SEQ ID NO: 16933 - DNA, 965 bp, Gossypium hirsutum
  Clone ID: GOSHI-09MAY01-C42764_1
ccaaccgcatgatccgcctttcaccgaagatttaccgcggttgaacgcacccaatttttactaccatcaagaagacatcctctttgaagaaatcgagaagaaagaaggattaacctggtcggtgcaccgacccgcaatcatattcgggttttcgccttacagtttaatgaacctcgttggcagtctttgcgtttacgcggccatttgcaaatacgaaggcaaaccgttacactttcctgggagcaaagccgcttggaactgttactttgaagcttcggatgcggatttgattgcggagcaacatatatgggcggcagtggatccgtacgccaaaaacgaagcctttaatgtgactaatggggatgttttcaagtggaagcatttgtggagcgttttggcagagcaatttgggatagaagaatttgggttcgtggaaggggagaaccgggggttggaggagatgatgaaagggaaggaaggagtttgggaagaaatagtgaaggagaaccagttgcagaagacgagtttgcaggtggtgggaaactggtggttttcggatgcgctatttttggctccgttgcagatgccgctgctcagtatgaataagagcaaggagcatgggtttttggggtttaggaattcccggaattcatttgttacttggattgataagatgaaggcttacaagattgtgccttgatctcattcaatctcttgtttcaaattgtttccttggtttttcagatgaagatgaaatttctgttgttgtacttctaaaataagttagtagggtaagttattaattggcatgctaccgtaagatgtcagaaacaattgcttaccttcaaagagaagcttctgttgtacttgtgaaaatgctgtgtggttttcttttccctttatttgtttatgatgcattgtctaaaaaaaaaaaaaaaaaaaaaaattctgcgtcgacgcggccg

SEQ ID NO: 16934 - DNA, 394 bp, Gossypium hirsutum
  Clone ID: uC-gsronu33B127g08b1
ttcacgcgtccgcccacgcgtccgcccacgcgtccgcggatgcggatttgattgcggagcaacatatatgggcggcggtggatccgtacgccaaaaacgaagcctttaatgtgactaatggggatgttttcaagtggaagcatttgtggagcgttttggcagagcaatttgggatagaagaatttgggttcgtggaaggggagaaccgggggatggaggagatgatgaaagagaaggaaggagtttgggaagaaatagtgacggagaaccagttggagaggaccagtttgccggtgcggggaaattggcggtttacggaggcgaaatgtttggttttaagcacacacgttagttatggtgtttacaaagcaggtgcatgggcttttgaggttaa

SEQ ID NO: 16935 - DNA, 302 bp, Gossypium hirsutum
  unsure (1)..(302): unsure at all n locations
  Clone ID: LIB3148-002-P1-K1-F10
ataccggggccgacccacgccgtccgttcattcaatctctggtttcaaattgtttccttggtttttaagatgaaaatgaaatttgtgttgttgtacttctaaaatacgttagtagggtaagttattaattggcatgctaccgtaagatgtcagaaacaattgcttaccttcaaagagaagcttctgttgtacttgtgaaaatgctgtgtggctttcttttccctttatttgtttatgatgcattgtctattctatcttgtagaatcttgaattatactatttatacttgttgattngacaaa

SEQ ID NO: 16936 - DNA, 802 bp, Gossypium hirsutum
  Clone ID: GOSHI-09MAY01-C42624_1
cggacgcgtgggcggacgcgtgggctgttaagccacatgaggcatttctcaagttgagacatgagagcaaggttgagcacatctttgtggttgggaactctggaaaacagtttgagatagttctaaattttcttgggctggttgagaagttcttctatctctcaggcaaatatgacatggagctcactgttggtgatgccgctatggagaactctctgttagtagctatcggacatattgagttagatctaccagaagcacccgagaaggcaccccgccctcctcctcagcccgtagatccatactcaagatatggacccaaagcagagataacacacatcttcagggctcctgaaaagcgtccacctcaggagctttcccttgctttcctggggcttactatcttgccattgcttggatttttgattgggctattacgtctaggggtgaatctgaagaactttccctccaaacccttacctgccacatttgccgttcttttccatgttggcattgcagcagttctattgctctgcgtgtctatctgcgtgaagttggatctatcccaaacactgaagatacttggtttcttgggaggaatccttgtgcttgctgggcatagaatcctatcccacctggccgctgcgtcagccaagttgaaatttgcctgagcttgagaaaggacaaattaattagtcgttgtacattttaactcaaattttgtaggtccattttggcgacatttaagttctttattacgaatcctagtggtagtaactcccacaagggcaagtgtagtagg

SEQ ID NO: 16937 - DNA, 464 bp, Gossypium hirsutum
  Clone ID: GOSHI-09MAY01-C42054_1
caaagcttaggaagatattggatggcttatgcaaagggtaactgcggtacttgtagttacttggggacattccgaactacaaagtgccagagtggttgtgaccagccaacccaaagatggtaccacgttccaagatcatggctaaagccaacaaaaaatttgttggtagtctttgaagaacttggtggagatgtatcaaaaatatctcttgtgaggagatcagttttataaacattgcctagacaacaccacaagtctgggagctgggaaggaaaacaaggtgcaagaatataggtggagaagacatcccaggttcactggctaaattctttttcactattggtttatttggttacttaagcagccggcattaaactcaccatgcattaaaagaatgctcttgtaagaaaatggggctgatgggaaactaaccctgtaatatctgaggttgaaaaaccattttt

SEQ ID NO: 16938 - DNA, 383 bp, Gossypium hirsutum
  Clone ID: LIB3147-054-Q1-K1-F6
cgcacgcgtacggccacgcgtccgtccacgtgttcgcccattcgtacgtccacacttccgagggtttcctggatgccgaaccagttcataacttttgttcaagcagaacaagaaacgctgctgctgaagtgattcaggtattttttgtcgatgattgctgtagctcatcaacattgttataaatgttttgttagaaacaggaaaggaaaatttagatatgcaaaactcttcaacctatgacttttggtgtatgagtgattcattttatgaaatcaaaggttctgaagcgttgattgctgacagtcacactataaaaatttgttttcatactgttgggggtgtcactgtcaatttgcttttgaatgtgagtttcatatcagaaa

SEQ ID NO: 16939 - DNA, 277 bp, Gossypium hirsutum
  unsure (1)..(277): unsure at all n locations
  Clone ID: LIB3147-054-Q1-K1-F2
cgtccgcccacgcgtacggcactcatnctcccctcttccgaccattcgtccgtccacgcataggggggtttacgagatgccgacccacccataacactgtccatgcaaaacaagaaacgctgctgctgaagggattcaggaactttttgtcgatgattgcgtgagctcatcaacaattgtataaatgttttgctagaaacaggaaaggaaaatttagatatgcaaaactcttcaacctatgacttttggtgtatgagtgattcattttatgaaatca

SEQ ID NO: 16940 - DNA, 424 bp, Gossypium hirsutum
  unsure (1)..(424): unsure at all n locations
  Clone ID: LIB3829-022-Q6-K6-F10
tgcctcgttgaggtcctacagcgatgagcttaaagcaaaagaaccccaatccgataggaagaggaagaaagtacctagnaaaagaggacaagggtatttactgtatggtgaatatccctgatctttgaggggggggggctcttaataggagattttatgcataaccaactcttacctgaaagtactgaactatacttatgtcattacacactaaaagcttgtaaaaacttatgtttaatggtaattcaagttgtaataaaaaaaaaaaaaaaaaaaaaaaaaaaaaaaaaaaaaaaaaaaaaaaaaaaaaaaaaaaaataaaacaaaaaaaaaaaaaaaaaaaaaaaaaaaaaaacaaaaaacaaaaaaaaaaaaaaaaaaaaaaaaggggcggccctttttaaggaccccaaactttcttccc

SEQ ID NO: 16941 - DNA, 334 bp, Gossypium hirsutum
  unsure (1)..(334): unsure at all n locations
  Clone ID: LIB3147-055-Q1-K1-A12
cgaaaggaagaggaagaaagtacctagaaaagaggacaagggtatcgacggtatggtgaagagccccgatctttgattctaggtttctcttaataggagattttatgcataaccaactcttacctgaaagtactgaactatacttatatgtcattacacactaaaagcttgtaaaaacttatgtttaatggtaattcaagttgtaatacaacctatttactagttgcatgctagtgtcaaatttgtatatgttaaactactttgagagtctttgtatctctctactataaaatcgaataatttagtttggttttttttttaanaacaactttat

SEQ ID NO: 16942 - DNA, 538 bp, Gossypium hirsutum
  Clone ID: GOSHI-09MAY01-C43954_1
atgatgctcgccacttgacggtcattcttgaaccttattttcctctttcaattgaaggtggtagcggattgcgtagcctttcaatcttttctgccttaggaacccgagttgttacagacaagtctctgcatcaattgtttgaaaaatctccgtgcctaagggtgctagatttgggcatgaataattcatgtgatgatttgattcccgagatttcaagcaaaataggtgatttgatacatttaaggcatctcaacttattttgttgcaagatgatacatagattacctgatacaatctgccaattgcatgatttgttatccttggatcttcatggatgcagtcgtcttggaaaactaccggatggtctggggaacttgatcaatttgaggtatctttgtactacagattgttccagtctaacttactaccccaaagggattgggaaattaacatctctaaggactctaacagatatcattgcaagagcggattgcgatgatcctaaagtgttctgcattggagatctcgaaaacttgga

SEQ ID NO: 16943 - DNA, 820 bp, Gossypium hirsutum
  Clone ID: GOSHI-09MAY01-C43964_1
gaccttcctcaagtttcccatcaatggcggctaacaagaattcccatctgggtttctctttaatctctctaatcttcttgttttcaattcccaaatcactctcagcccttgatcctgaacccgcagtttgggatatgcttcccaaatacggtctccctagtgggcttttacccagcacagtcaccgactatgtcctccacgaagatgggaggttcatcgtcacgttggacagcccttgctacgttcaattcgagtacttggtctactacgataagaccatcaccggaaaactgggttatggttccattactgatttgaaaggtattcaggtgaagcgattcttgttttggctcgatgtcgatgagatcaccgtcgatttgccaccttccggttctatctatttccaagttgggtttatcaacaagaagctcgacgttgaccagttccagaccgtccattcttgccgtgatggggttactggctcttgtaaatattcttggaaatcagttcttcagcttccgatgccaacgaacgatattcagatgctaattactgagtagctgccagccacagagtactgttgctgtatgtgaaaccgataggagtaagcttttatctatcacttgtgtataaaaggaatgggagtgaagtacttgatggttgcagactcaaaaaagatgggtctgtcaatggcttgccaaaatgtgctataagtaaaaaaaaatgtacttatatttgaactctagttttaaagtatgagatgtgaagaacaatgttggccacaacttttgtagtgatattgttatatggattcaagtgt

SEQ ID NO: 16944 - DNA, 563 bp, Gossypium hirsutum
  unsure (1)..(563): unsure at all n locations
  Clone ID: uC-gsronu33B106a06b2
cccactcgttcgcccacgcgtccgatccatggcggctaaccgcttcaactcccatctgggtttagctctagcctatctaatcttcctcatttcaatccccaaatctctatcagtccttgagcctcagcctgctcctccctctgtctgggatatccttcctaaattcggtctccccagtgggcttctaccaagcactgtcaccgattacgtcctccacgatgatgggaggttcatcgtcacgctggacagcccttgctacattcaattcgagtacttggtctactacgaaacgaccatcactggatcactgggttatggctccattaccgattcggaaggcattcaggtgcagcggatcttcttgtggttcgatgtgaatgagatcaaggtcgatttgccaccctccgactccatatatttccaagttggattcatcaacaaaaagctagacgttgaccagctcataaccatccattcttgccgtgatgaggttacgggctcttgtanatattcttcggaatcacttcttcagcttccaacgcctagaaacgaaattgaggagc

SEQ ID NO: 16945 - DNA, 846 bp, Gossypium hirsutum
  Clone ID: GOSHI-09MAY01-C43934_1
caggggggcaagtagggcggcacaagtggtcgaattgcagatacgattggtcgaaaggggcaatgagactttcagctgttttctgcattgctggatggcttgctgtttgatttctctaagagtgatgtgtcattggatcttggggggtttgcaactggctatggcattggtattttctcttatgtggtccctatcttcatagctgaaatagcaccaaagaacctcagaggaggactcacaacattaaatcagctcctgattgtgattggtcaatcaacagcattcttaataggaacagtcatatcatggagggaactggctctagcaggtcttttgccatgcattgtcctgtttgttggcctttgtttcattcctgaatctcccagatggctggcaaaggttggcgaccagaaagaatttcatgcagctctaagggaacttcgtggtaaagatgctgacattaccgaagaagctgaagaaattcaagaatatattgaaactcttcaaagtcttcccaaaacaacaatatgggacttgtttcagaaacaatatattaagtcagtgatcattggagttgcattaatggtgttccaacagtttggaggaataaatggagtaagcttttatgcaagtcaaacttttgcattagctgggctttcctcagcaaaagctggaaccgttgcatatgcttgtgttcaggtccctataacttttctgggagcaatgctaatggacaaatcaggaagaagaccactcattatggtatcttcgctggcacatttcttggctgttttctagcttgtacttcattttattttaaggaacatgatcttttgcccgaatgga

SEQ ID NO: 16946 - DNA, 395 bp, Gossypium hirsutum
  Clone ID: LIB3148-019-Q1-K1-C9
cccacgcgtccgcccacgcgtccgcccacgtttccgcattaatggtgttccaacagtttggggggatcaatggaggaagcttgtatgcaagtcaaacttttgcattagctgggctttcctcagcaaaagctggaaccgttgcatatgcttgtgttcaggtccctataacttttttgggagcaatgctaatggacaaatcaggaagaagaccactcataatggtttcttccgctggcacatttcttggctgttttctagctggtacttcattttatttcaaggaacatgatcttttgcccgaatggagaccaatattagctgttgctggtgtcctgatttatgttggttctttctcaattggattgggagcagctccttgggtgataatgtctgag

SEQ ID NO: 16947 - DNA, 707 bp, Gossypium hirsutum
  Clone ID: GOSHI-09MAY01-C43894_1
tgatctcactgctggttacttctcaaactgtctactgatgaagttaaagcctatgttcccgatgtgcttaatcagttccagacaataattcagtatatatataaccaaggagggagatacttttggatacacaatacaggtcctgttgggtgtttaccatatgtaatggagcgtatcccggtcttagcaggtcaaattgatgactatggatgcgcctctccattcaatgaagttgctcagtttttcaaccgtggattgaaaaagattgtggaacagttacgcaaaaatttgccccatgctgcaatcacttacgttgatgtctactcagtgaaatactccctaattagccaaggtagcaagcatgggttcaagcaccctcttagaacatgctgtggccatggtgggaagtacaattataacaagaacttggggtgtggagcaaaggttaacaaacatgggaaagaagtgttggtgggagctccttgcaaagatccttggacttacgtaaactgggacggggttcatttcactgaagctgctaataagtacatatttgaacgtattgttaatggttcactttcagaccctccaacggcattaaacatggcttgctataggaattaagctaggaaggggaacgcaagtctttttagatttttagttgtctatttttgttccttttttatggattaagcaagttttatgtc

SEQ ID NO: 16948 - DNA, 864 bp, Gossypium hirsutum
  Clone ID: GOSHI-09MAY01-C43844_1
attactgaaatgttttcttctccgaagaaagaagatgatgattcaggccaaggctttcgttttgacaagtctctccaggaactgagagatttgcggtctcagcttcattacgctgcggattactgtgaaacaacatttttaaagtctgaagagaagaaaactgtggtggaaaacacaaaagaatacctatgcaaggcacttgtcactttcgttgatcatctgggaaacgtctctgctaatctaaatcactccatttcccagactaattcattttccgaggctgagctccgcatcaattgcctccatcaaagacttctctcatgccaacaatttgctcacaagcttgctctaaccagagtcaaatggaaccccattttgtcaagacataaccggcgttatttatctgcaccaacattagcagctgtagagaaatcaaatgaaaactcaagggctaccatttctgcaattcctggaaagctcgtaaacaagcatgaacttgacacggaaggagtcccactttttttcttcacttgtaccgacaagccttcactatctaagagtccatctctcaaatcaaattgtgacgaaagtaactctgattcaacgttggtgcctgtccgtgatgggttctcgatgctatcaaagggttcaaatcctacattccatttccagcaaggaaataaaaaacatggacgcaaaagcttgtatagaaaatcattgccgagtgctgatatcttatctttcattcgacgggcaagaagatcagctgcttgataaaaaacctgaaagggaaaatctatgtcttagcttccgctccgcatgtttttagtttagttcatcatttggtgtgttaaaaaactggta

SEQ ID NO: 16949 - DNA, 653 bp, Gossypium hirsutum
  Clone ID: GOSHI-09MAY01-C43874_1
tttaaaatcaaatttattccattattagtgaggcgtttcattcttgtgaatcttttgtagcagttctcagtgttatcctatacaaatcagtggttggccattggagttaatggcatatgcttacctaacagtcagccctccaagcatgagcaagcagtttgaggaggtttgtaaactctctaccttctaaatcccaggctcaaagtttaagcattgaattcttaaagattacttcttcagatggctgctatggcatccaatgaatctattatcaggaaggatttaagataccctgaaattgaagaaaaagcactgcaatttattcttgacaattgtgaatcaagcatatcaaagtattctaaattcttgaaggaaagtggctccatggatttggatataacatctcaagaactacagaatcgaggagtgtttctgaaacagctagcagtagatttatgcataagtgagcagaaaatactacatcgggctcaatatatactgaagaggagattgagggatatgagaagtggtgaactgagagcttaatcttttgatggctacaaccttttccccctctaccttcgccagtgacgaaacttgaacttagaaatgcattattggaccgtctctttggcgtctttggaggacttagt

SEQ ID NO: 16950 - DNA, 619 bp, Gossypium hirsutum
  Clone ID: GOSHI-09MAY01-C43574_1
ccacagctacaagggtttccagcagcttagcagtttggttgatgttggcggtggtcttggaatcacactcaaccttatcacttccaaatatccctctattaaaggaattaattttgacttacctcatgttataaaacatgctcctgcctaccatggtgtccaacatgtagggggagatatgtttgaaagtgttcctaaaggagctgcaatttttatgaagtggattctccatgattggagcggcgatcattgcttgaagctattgaagaattgttacaatgccattccaaaagaacggaaaagtaatagtggtggaggcagtggttccggttgtaccggaagctaatgcctatttgagaagcatcacacagcttgatgtgctgatgctggcgcaagatcctggaggaaaggaaagaaccaaatcggaatttgaagcgttagctactaaagccggattcagtggcatcagatatgagtgttttgcttgtagctactggatcatggagttctttaagtaattggatttcatataattgcgaagctaccaatgcaaccgaaaagaataaaagtggatgcttgtatttcctttactttggaaaataaaaatactagagtaatt

SEQ ID NO: 16951 - DNA, 589 bp, Gossypium hirsutum
  Clone ID: GOSHI-09MAY01-C43534_1
gtgagagggaaggtagggagcgtgataggcgagacagggagcgtggcagacgaaggagccgttcaaggagtaggagtagggagcggaagagacatggtcgcagtagtatgagtccgagaaggcatgaagcagaggatggtaatgctccagaagagtcaaagaagaagggaaagaaagaaaagaaagaaaagaaggaaaagaaggatgatggaacggaccaccctgatccagagattgctgaagccaacaggattcgagcatccctaggtttgaaaccattgaaattgtaagcatggtagatgttatatgcggcaagattaactattatatcatatgaaggtacattggtgttgttttggtatgtattgttaatacaaaagctatgcgggagttggaatcagatgatgatggccatcttactaatatttttctcgttactatttgtctatgttagtatatttgtgcttagagcatcatttgttgttcttctaaaggtcgctgtatacttttgatagggaattagagaaattctcatcacttgaaagagtattcaaattcaaaagatttacttaacaaaaattcatttttc

SEQ ID NO: 16952 - DNA, 1080 bp, Gossypium hirsutum
  Clone ID: GOSHI-09MAY01-C43454_1
gaagaattcaatacttaaccccccctccgtattttcagttcccatatgaagaattgaaataagcagaggaagtgagtgaaaaaaaaatggataaaacccagagtattccaaccattgatctttcagattttccagcacagtatgagaaactaaggcgatcatctgaagaatggggttgtttcagggtagtcaaccacaacatcccttttgaattgatgcaggaaatgaagcaagttgtgagatcattgcttgacctccccatccaaatcaagcaaaacaacgtcgatgtcattgccggcagtggttattgggctcccagtcctaaaaaccctctttatgaagctttgggtctctatgatatggcctcctcccaagctgttcataccttctgctctcagttggatgcctctccttcacaaagagacgcagtagagaagtatgctaaagcaatacatgaggtaatcatggatataggtggaaaaatagcagagagtatgggattgaagggtgattactgcaaggaatggccttgccaatttaggataaataagtaccatttcacccctcaatctgtaggctcggctggggtccaattacacactgattctggcttcttaacaatacttcaagacgatgagaatgttggtggacttgaagtgatggacaaatctggtgaatttgtagctgttgatcccttgcctggcagcctccttgtcaatcttggggatatggccacggtatggagcaatggaaggttacacacggtgaagcatagagtgcaatgcaaggaggcgaaaactagagtgtcgatcgccacgttcctcttgggaccgaaagaggaagcggtggatccgccaccggagctggtggattcggaccatccgcggctttacaactcgttcacgtacgaggagtacaggaagctgcggctgtcgacggaattgccagctggtgaggctcttgcacttgtacatacctgatcttaaagaaagattgtgtaaagcatattgcaatgtaatgaaagtcctccacttctgccctctgtttgatgaataaagcatgaatttaaatttcctagaa

SEQ ID NO: 16953 - DNA, 713 bp, Gossypium hirsutum
  Clone ID: GOSHI-09MAY01-C43774_1
gttttggagacatcccgagttaagggtgaactctacaaaatcaatgattggtcacctactaggagcttccggtgctgtggaagctgttgcaacagtacaggcaatacgaactggttgggttcatccaaatatcaacctggaaaacccggatgtaggagtggacacaagtgtgcttgtggggccaaataaagaaagattgaacgttaaggcggcattgtcgaattcattcgggtttggcgggcataactcatcgatcattttcgccccatacaagtaaaaatagttcaacagctgctctccctgtgttttcttacatttggccgaagagtatcccagaaaatcctcctgtagacaaaacataactctgaaagcgttattattacgaagtagtacggtggtggccggtagcagagctctagaaaaaaaaaaaccctcctactgtttcatagttcagtgttggtttgggaaggtttcgtttctcttaaacgtagtagctacaattgaggttttagtgtttgaggcctcagggccattgaagaaccagtaaatgtagtaatttttgtgctcatgtaaaagaaatggcttatatcagttgttgtttttgtttttaattaaagccaatttgtaatgaatcctgatttggcagcagggtggatgcttttctcatttaatcctcatgcaaaagcttgtgtttctaattaaataattatatt

SEQ ID NO: 16954 - DNA, 263 bp, Gossypium hirsutum
  Clone ID: LIB3148-016-Q1-K1-H2
accgtggtggccggtagcagagctctagattaaaaaaaaaacctcctactgtttcatagttcagtgtttgtttgggaaggtttcgtttcacttaaacgtagtagctacaattgaggttttagtgtttgaggccacagggccattgaagaaccagtaaatgtagtaatttttgtgctcatgtaaaagaaatggcttatatcctagaaaatatagtgttaacactgttataaaattacactatgttgagataattttattttatt

SEQ ID NO: 16955 - DNA, 281 bp, Gossypium hirsutum
  Clone ID: GOSHI-09MAY01-C43664_1
cccacgcgtccgcccacgcgtccgaagctatgaaactggtaatatctcagcagattaacctaccttctggtatgataaactaaaatggtgttctataaaactttgcagaagataataatggtaaatgtctgattacaattctgtatttcttaaagattagtaatttataagtaatgaacctcaagctctgcagaaattggttgatctacaccgcattgagaaagggtctgtaaatttttacaagacttcaatatcaattgtttatgctcaagctaagtttg

SEQ ID NO: 16956 - DNA, 438 bp, Gossypium hirsutum
  Clone ID: GOSHI-09MAY01-C43144_1
cccacgcgtccgctgctttccagccaaacaactagttcccaagcctcaacattcccaaaatccgacgacgaacggagagccctccccacggcattagcacgacggtatggtgaacgtggggcgtgggtcgtgctacacgtgagatggccggacgggtgaggtgcgtcgacgtgcgtggtggaggggagcagcagctattctcttttttgctgaaaagttagtctagtttcgggctgcttgggctctagggttaggtttattttgggcttataattgggtttgttgtttttgtaattttggactctttttggatttttttgggttctatttattgggctggaatcaagtagcccgggctaaagttgggtcttacatgtattataatctaatttatcaagaaatccattttcccacgtcacccgattctagctagcaatc

SEQ ID NO: 16957 - DNA, 528 bp, Gossypium hirsutum
  Clone ID: AI725926.1
tgctttcctctctgctttccagccaaacaactagtacccaagcctcaacattcccaaaatccgacgacgaacggagagccctccccacggcattagcacgacgccgttcttaggctattctttgaggtgccatttgaaaaaattccttccccccccccaaaataatgcagcagctagcccgtgataaagtaagataattggcgctggaagatcatatctattgttgaaagattgattaaggcatgaaagcttgtgttggatggcgtcgtttccttttctgtttcccacttattttcatccttcctcatttattttctgttctggaattgcaccagaatcaagtagtcacagattcccccaaggaaaacacgaagaagtttgatgttcagcattcatcaggagatgatgcccccaagaaaataaccaagaaatttgatcacctggttcttggacctgctgccggagaaggcttgcccaaccgtttgcaatgccgaggagttaaagctctcaacaagacctatttttctt

SEQ ID NO: 16958 - DNA, 393 bp, Gossypium hirsutum
  Clone ID: GOSHI-09MAY01-C43074_1
accggggcggaccgacgcgtccgcccacgcgtccgcccacgcgtccgcccacgcgtccgaaagaattaatcttgctaccgactctctcttttcttacatgatcaacgggctgaaagtagcctgttcctcctagggtaactaagtgcttgtgtgttttcttatcatgtaatatatgattagtgttggattggcattttattcaacttttatattttatttttactctattgataccaattaatatttctagtttacaaaaaaaaaaaaaaaaaaaaaaagggcgggtcgcccacgcgttcccccacgcgtacggtttattttttaatgttcttgaatgaattccatgttcttttaagggtttttggtggtggtcatttttggagtcacaaaaat

SEQ ID NO: 16959 - DNA, 692 bp, Gossypium hirsutum
  Clone ID: GOSHI-09MAY01-C43024_1
tttccaccaccacaattccaccagttccaagcttcttttcaaacaacaaaacccccatgtcttccttgtcggtccgtttctttgctccacaacagccgttactgccgtccacagcttcctctttcaagcccaaaacatgggttatggcagctcccacgacggcgccggcgacttcggtggatgtcgacgggcggaggttggaaccccgagttgaagaacgagaggggtacttcgtgttgaaagagaagttcagagatggcatcaaccctcaggagaaaataaagatcgagaaagaccctttgaagcttttcatggaagctgggattgatgaactcgctaagatgtcgttcgaggatcttgataaagctaaggctacaaaggacgacattgatgttagacttaaatggctcggcttgttccataggagaaaacatcaatatgggagatttatgatgagactaaaactaccaaatggtgtaacaacaagtgcacaaacacggtacttagccagtgtgataaggaaatacggcaaagaagggtgtgccgatgttacgacaaggcaaaactggcaaatccgtggagcggtgttgcctgatgtgcctgaaatacttaagggtctcgacgaagtaggcttgacgagcctacagagtggcatggacaatgtgaggaaccctgtcggtaatcctcttgcc

SEQ ID NO: 16960 - DNA, 316 bp, Gossypium hirsutum
  Clone ID: LIB3148-006-Q1-K1-E11
cgacccacgcgtccgaccaggtccaagcttcttttcaaacaacaaaaccccacatgtcttccttttcgggccggtgctttgcttcacaaccggcggtactgccggccacaagttcctctttcaagcccaaaacatgggttatggcagctcccacgaccgcgccagcgacttcggtggatgtcgactggggctcgggtcataactgtaaagaacgatttggcaaaactgcaactcacatctcctgtgtgcaccaacaagggagagaagattgcactaaatcgacacgtggagaaacactggcgtctaatatgatggg

SEQ ID NO: 16961 - DNA, 461 bp, Gossypium hirsutum
  Clone ID: GOSHI-09MAY01-C43354_1
gccgcaagcgtcacacaccaagcgcatgtctgtagttgcaaggctgagggagctgaatacactggggggtcatgttgaatcagttgtgaagctgaagggacttgatatcgatactattcagcagcattacacagcttaaagctaaagccaccgcagatgatgacgatatgcattttaatttgagacaaacaaaggatcattcatgatcttccctcccttgctacaaagaaaatgttgatgatgaacaaggcctatggagtacggcctatgttatgagaaaaaaaataatgaaacaggaatttgtattatggtaagtattctaagatggtataggttatgtatgttatgatctctttcggaacacgggataagctagtatagggaagggaaagaagtgttttaccttttttataactgcaaaataacaacaggctttcaattcatagcctggccttgtttgc

SEQ ID NO: 16962 - DNA, 694 bp, Gossypium hirsutum
  Clone ID: GOSHI-09MAY01-C43324_1
cttgctattgtcccatatactatcctaattgatgggttgtgcaaagctcagcatattgaagctgcaaaggaattatttcatcaactctcagacagtggtttgaaaccaaatgtttacacatattgtgtaatgattaatggactgtgtaaagagggattgccaaatgaagcatacaggttgtttgggagcatgggagataatgactgtttgcctaatagctgctgttataatgtaatgattcgggggttccttcgcaacagctatacctcaaaggcaacgcaacttcttaccgaaatggttggtaagggcttttctgcagatatattcactgccaccttatttagggatcttatcgtacactctaataaatcaatcttgctctgaaatgtttcacaaattgtgtaaagatcatcacttgcaatgtgaatcaggttgtacataaccattgcacagtgataaaagattctggaaactagaatgaggtttagtgtctattttcaatagtgttgatttccttctgccctgtggagcttgttgatcttgatcttagcaacttcttgatctttttggtggtgatgttaagaaattaggggaaaaccaatattgcttgtgaattttaaagcaggggcatttgtatgaacaactaaacatgagttgagaataaaaggaattgaaataaatattaaggtgactt

SEQ ID NO: 16963 - DNA, 348 bp, Gossypium hirsutum
  Clone ID: GOSHI-09MAY01-C43204_1
gagccaagaagataattattggaacatggaggatatatggtccatgcagatacttaatgggaattaaataaatatcaatgttagtccaaattaattgagattaatttggttgattaatgttagggttttgtgaacttatataatattttggattaagtatggcttgtaataggaaacgttgtagtactataatatatatatatatatatatatagccttctacattatatatatgagagttttcaatgctaattagctattgtacataccctttgagatgtggataaataagcaatatcttttttataacacgagtttaattaataaagctaaaattgtactttgctc

SEQ ID NO: 16964 - DNA, 600 bp, Gossypium hirsutum
  Clone ID: GOSHI-09MAY01-C78474_1
tgatgccaagcaaagttgcaatgaagttcttttctggtgtgcatgatgcatccatatttggtgccttgatctggatcaaaaacttttgtatgaaaggccaaatgatacttctgcacactgataccctgcaggctgctctgctgcttgaactgtaatgtgacaataacagtttcagcaagagtctattttacaaaaacaacaatcatccttggaatggtgcaatgagactacctagcagtaagcatcaattttcaggtagttgacactgcccttcatttacttctaatttcagttatcataggcaattaaatgaaagtgggatcttttacatttatgtaaagcgtccatcctattcttggatttgcaatggccaataagccaaacggttttaagtagttggcacttagaacaactcaagcaacatccatgtttaagatgatagagctgtaaggtatttggcattcatatatgtttaaagtcttgcaatagggtattgtaccattggattttagatgaaagtgacgtttttgtatgatgttagtgtgaacaagtaatgtagtagagcacatgtgtgatttttctttctatactatatgaaaa

SEQ ID NO: 16965 - DNA, 482 bp, Gossypium hirsutum
  Clone ID: LIB3582-003-P1-K1-F6
ctgacattttatgtgggaactaagcttatgtttcatataagtgatgccaagcaaagtatgcaatgaagttcttttctggtgtgcatgatcatccatatttggtgccttgatctggctgctcagctgcttgaactgtaatgtgacaataacagtttcagcaagagtctattttacaaaaacaacgttcatccttggaatggtgcaatgagactacctagcagtaagcatcaattttcaggtagttgacactgcccttcatttacttctaattttttacatttatgtaaagcgtccatcctattcttggatttgcaatggccaataagccaaacggttttaaggtagttggcacttagaacaactcaagcaacatccatgtttaagatgatagagttgtaaggtatttggcattcatatatgtttaaagtcttgcaataagtattgtaccactgggttttagaataaagtgacttttttgtatt

SEQ ID NO: 16966 - DNA, 687 bp, Gossypium hirsutum
  unsure (1)..(687): unsure at all n locations
  Clone ID: AI729376.1
ctggagttgttaagtaccatggaccacggcctatcatgcggcccaagcaggtgtttgtggccaatcatacttctatgattgatttcatcatattaaaacagatgactgcatttgctgtcattatgcaaaagcaccctggatgggttggactgctacagagcactattttagagagtgtagggtgtatttggtttaaccgttcaaaggccaaagatcgtgaaattgtaacaaggaagttaagggagcatantcagggagctgacaataaccctcttctcatatttcccgaagggacatgtgtaaacaatcaatacagcgttatgttcaagaagggtgcattcgaacttggttgcactgtttgcccgattgcaataaagtacaataaaatttttgttgatgccttttggaatagccggaagcagtcctttacaatgcatttattgcagctaatgacatcctgggctgttgtttgcgatgtttggtacctaaagccccaaaatctaaggcctggagaaacaccatcgagtttgcngagaggatcagagacatnatctctgttcgagcaggtcttaaaaaggttccatgggacngatatttgaattattctcgcccgagccctanncataaagagcgaaaacaacaaagttttgccgaatctgttcttcggggactggaactggaaaaaaa

SEQ ID NO: 16967 - DNA, 502 bp, Gossypium hirsutum
  Clone ID: LIB3582-006-P1-K1-D3
cccacgcgtccgcccacgcgtccggccgcggcctagcatgcggcccaagcagtacacctttaggatgtgtgcctttggaaattaaaatgtatctttcctacaatgaatcgaataggtgtttgtggccaatcatacatctatgatcgatttcatcatattagaacagatgagttcatttgctgtcattatgcagaagcaccctggatgggttggactactgcagagcactattttagagagtgtaggatgtatttggtttaaccgtactgaggcaaaagatcgggaaactgtcacaaagaagttaagggaacacaatcaaagtgttgacaataatgctcttctcatatttcctgaagggacctgtgtaaacaatcaatacaatgttatgtttaagaaaggtgcattcgaacttggttgcacaatttgcccgattgcaataaagtacaacaaaatttttgatgatgcattttggaatagccgaaagcagtccttcacaatgcat

SEQ ID NO: 16968 - DNA, 1341 bp, Gossypium hirsutum
  Clone ID: GOSHI-09MAY01-C79964_1
gctgttcggccgcgtcgggaaacccggtggaggggggggctgtttattgcctcttcgctcgatctcatcagcccctttctttaagaaaaactcaaatctcactaaatcccccacaaaacattcaagacagaaaagggggcgtgttgttgttgttctcttcgacttcgatcgatgtcggcgagggtaataacggtgtcccaagacggcaatggcgactaccgaacagtgcaggaagccattgacactgtcccactctgcaacacctgccgcaccatcattcgactgtcacccggcgtttacaagcaacctgtttacgttcccaagaccaagaacctcatcaccttggctggtctccgccctgaactcactgttctgacatggaacaataccgctactaaaattcaacatcaccagggttcgaggttaattgggactggaacgttcggttgtggcactgtgattgttgaaggagaagatttcattgctgaaaatgtcacctttgaaaactcttccccagagggttcaggacaagctgttgcaatcagagtaacagcggatcgatgtgcattctataattgcaaattcctgggctggcaggatactctatacttgcatcatggaagacagtacttgaaagactgctacattgaaggaagtgtagacttcatttttggaaatagcacggctcttttagagcattgtcatatacactgcaagtcagctggatttataactgcacatagccggaaaacttctcaggaatcgactggttacgtgtttttaagatgcgtcattaccggcaacggagggtcttcttattcatatctcgggcgaccatggggaccctttggaagggtggtctttgcctacacatacatggaccaatgtatcaaacatgtaggttggcataactggggaaaagccgaaaacgagagaagtgcttgcttttacgaatacagatgtttcggccctgggtgctgtcaatcgaaacgggttacttggtctcgggaactgctggaggaagaagcagaagagttccttatgcacggattcatagaccctgatccgaaccgaccatggcttgctcaaagaatggcactgaaaataccatattctgcatagaaaagagaaacagatagtggtggtatgagttaataatgaggaatgtaatggtgtgtgttggaagtatttgaagcatagaataacgaagatggccaagaaaaatggtaagctcatatggtttgggcagttgaaacttgaatataatggtgttgaagtatttgaatcctcataattgctttattaatcaaattaactataatagttggagtgttttaagat

SEQ ID NO: 16969 - DNA, 498 bp, Gossypium hirsutum
  Clone ID: uC-gsflmaxxa045f08b1
tttttcttttactagaactcaaacaatacattcacgacgactaccaggtcttgtggttggtgtttctcttcgacttctatcgatgtcggaaagggtcataacggtgtcccaagacggcaatggcgactaccgaacagtgcaggaagccattgacactgtcccactgtgcaacacctgccgcaccatcattcgactgtcacccggggtttacaagcaacctgtttacattcccaagaccaagaacctcatcaccttggctggtctccgccctgaactcactgttcttacatggaacaataccgctactaaaattcaacatcaccagtgttcgaggttaattgggactgcaacgatcggttgaggcactgtgatttgtgaagagaaagatttcattgctgaaaatgtcacatatgaaactcttgcgcgagggttcaggacaagctgttgtatcagagaacagcggatcgatgtgcattctataatgcaaattcctggctg

SEQ ID NO: 16970 - DNA, 771 bp, Gossypium hirsutum
  Clone ID: GOSHI-09MAY01-C79904_2
gcgtttggacatggcaaagtgaaaaaaacaagagtaagggggaaaaaaatcaaagacaaaacacacaacatcagatgtacaatgaaagagacagacagagaaggaagtcagagtatccaatgacaaaaagcattacaaatagttaacatttgatgggttttctttggatatccttcctttcaccataacttccccttctttttctttttctttttctctcttctagacacacacatatatattcatattcaatttttaatattctttacttccttatttcacagctttctctccaacttgggagttggtgaaaagttgggtgttcttcatagtcgaaactgatattactaccaaaatcttccatttcttttctttttttattcgttaaatatatatatattccttatcatcacattcacacctgtaaatctggagtggaggaaagggaaagtaaatccattttcaagtagcataagggccagattaaggccaaaagctatgccaatgaatctagttcatgatgttgatggattgcccagaattatactcactgaaccaaccggttcatctgctgaggtgctactctatggtggacaagttgtttcatggaagaacgaaagaagggaagaactgctttttatgagcagcaaggcaaattggaagccacctagagccatcaggggaggtatacccatctgctttcctcagttcggaaatcttggttcactggagcagcatgggtttgcacggaacccaatgtggtcactggac

SEQ ID NO: 16971 - DNA, 661 bp, Gossypium hirsutum
  Clone ID: GOSHI-09MAY01-C79904_1
accgggattatggtcgaccccccccggccccctcgcgtccgctccggtgtagctggagtggaggaaagggaaagtaaatccattttcaagtagcataggggccagattaaggccaaaagctatgccaatgaatctagttcatgatgttgatggattgcccagaattatactcactgaaccaaccggttcatctgctgaggtgctactctatggtggacaagttgtttcatggaagaacgaaagaagggaagaactgctttttatgagcagcaaggcaaattggaagccacctagagccatcaggggaggtatacccatctgctttcctcagttcggaaatcttggttcgctggagcagcatgggtttgcacggaaccgaatgtggtcactggacagtgatccttcgcctttgcctcctgctaacaaccagtcatcggtggatcttatattgaagtctacagaagaggatctaaagatctggccccgttgcttcgaattgcgtcttcgtgtaactctcagtgctggcaggctgacgttgatccctcgtgtgaggaatacggataacaggccttctctttcatgttcacactctgcaactattttttctgtctctgacatcaatgaagtgcgtgtggagggcttggagactctcgattatttt

SEQ ID NO: 16972 - DNA, 562 bp, Gossypium hirsutum
  unsure (1)..(562): unsure at all n locations
  Clone ID: uC-gsflmaxxa005c03b1
aaacccgtaaggcgcaaggaagctgatatggctattcaaaaatttgggtcttagaatcttcacaggagcaaattttcagagtgaaccaagagaatggctcattgaaacaaaatttgaatgcaacaaatgcggctccgagtgcagctagaagtgaaatttccaaagtatcaaataatggaattaatgcactcaagggaaaaggtgatcagtcagcaaaccgacagcataagtcaacaagtttagtgaaaaactgttatgctggaatccaaatgtccaatggtcttagctctaaacatgatgaggagcttgcagatttgctggaagaaaaaactaggtccctggaggccattcaagctagtcatgaatcacaaataaagcaattcaagatggaacttgaaaaagagcatgataaattagtgaacgtacagataagattacaagaggagcacangctgaatgagtcttttcaggaggagcttaggttactgaaaatagacagggataaacgctcttcagagttgagcaatattcgcaacgaattggatgagaaaacaaaagaaat

SEQ ID NO: 16973 - DNA, 519 bp, Gossypium hirsutum
  Clone ID: LIB3584-024-P1-K1-H8
cccacgcgtccggcgggatctcggatactttcaaaacctctttatcttgaatacaactattggttgcgggatcttaaggagatgtggacttccattgctaatttgaaggaaaatttgaataagataacgcttgacgtgcacggcgatgacgacgaagaactcgagatctacggttcggagaatggacgccattcgactttctccgatagacggaattctcatacatttgcacactcaaagcctgtttccttctcttctctcgccagtggaattgattcgccgttcaattccgagattggaagatacagagcagaaattaagaagcttcaggaatctgaggcagaaattaagtccttatcagtcaattatgctgctttattaaaagaaaaagaggagcaaattttcagagtgaaccaagagaatggctcattgaaacaaaatttgaatgcaacaaatgcggctccgagtgcagctagaagtgaaatttccaaagtatcaaataatggaattaatgcactc

SEQ ID NO: 16974 - DNA, 519 bp, Gossypium hirsutum
  Clone ID: GOSHI-09MAY01-C79134_1
ctcttctctaagctaattttgcatctctcaaacactcttctttatccctctcaccttttattttcgctggttgttggtgggttgtaacctggtctacttttctggtgatttttacggagttgtaataggaaatctttctgtcaattatcctgtaaacttacttgtactcatttaaaggggctcataaaataaaactccatagtttccacttttttgcaagatgggagagatgtcaagcttccaattgggtgtcattggtgccctgtttctttcagttgcatcatcggtctccattgtcatatgcaacaaagctttgatgagcaatcttggattcccttttgccacaacactcactagctggcatctaatggtgacatttttcacccttcatgccgcacaacgctttaatctttttgaaagtaaacccattgacatgaagaccgtggtgctctttggcatccttaatggcgttttcattggactttctaaactgagccttgggtttactccattggattc

SEQ ID NO: 16975 - DNA, 760 bp, Gossypium hirsutum
  Clone ID: GOSHI-09MAY01-C79384_1
gcaaatgcaggctttatgttcttgtgaagaagcgattgatatcggaacgatgatggaaaacaaacggaaccctttttctgttgatcatactgggtttacgtctttggcatcgaaacggcagaaggccacaaaggagaaaaaagatcaggtcagtgaacggattgccgctctgcagcaacttgtttcgccatacgggagagacggatacagcttccgtcctactcgaggcaatgggatacatacgatttcttcacgaacaagttaaggtgttgagtgctccgtatctccaaaccatgccagcaaatagtttacagggtgatgatcagtatagcttgagaaaccgaggtttatgccttgcaccggtctcgtgtaccgtaggacttgctcgcagcaatggagccgatatttgggctccggtaaagaccacatctccaaaatttgacgaggttatctcacaattcaattgaagctttcattttcacagccaaactttgtgacatagataggacgatgatggtaggcggaaccggtatagtctatgatatttgagaattgtgtattcggaaatggtattgcaccgccgtgacggagttatgaacttttatataagttaggaattttggggtgattggttcagatgtccttgattgcctcatagctccgtcgaacacatctgtattatttgaaacttgttggtttcacatgtatattgatgaaacataattagtagttcaattttatgcacttttattgtttcact

SEQ ID NO: 16976 - DNA, 546 bp, Gossypium hirsutum
  Clone ID: GOSHI-09MAY01-C79314_1
gttttctttggaagtaaagagtttacatttcgaaaggcttggagcgccgtacctaagacagccgggggagtcaccacgactggaggagaatttttatgcaaatcctcttcctggatgcatctgcaaaagatcccaggaaaagcaaactagcagcctgaagcttgagcggaccttgagttcagttcaaagacggtatttaaggtagtcaatcgtgtcagttgaattatacactgcattttacattctttgattctggtgctttcccctggtaaagagacttgcagcaatcacctactaggctgtgaaatcttgtggtttccgatttctcacttgaattatacagtagcgatttcagtttttgttagaggaccgaaaccagcaacttaggtaagcagagaagatgatgaataattctggggcaaatcaggctagttctacaggcacacgaatatatgtcacactggaaatcatgatattgatttattcgttattctttcaataatttgattgtagaaacataacatttgccaaattagtctcttacat

SEQ ID NO: 16977 - DNA, 1147 bp, Gossypium hirsutum
  Clone ID: GOSHI-09MAY01-C79334_1
cccacgcgtccgcccacgcgtccgccctcgcgtccgccggctttgacccaactctcccaaactaaatcccatcttaaagttaagtttgatcccaacttctccaaaaacccagatcgaaatcccaccatgacatatactgcactaaaagcggtaagtttaactcatgtaaggtatcaaagaggtgaccaactaggccatttcttagcctgggtttctttagttcccgttttcatttcccttggtggcttcgtttctcatttcatcttccgtagagagcttcaaagcatgttctttgcattaggcctagtaatatcacagttcatcaatgaattcatcaaaaaatccgttcaacaagcccgccctgaaacctgtgctcttttagaaatgtgtgattctcacggctggccttcaagtcactctcaatacatgttctttttcgctgtttatttcacccttttgacatgcaaagggatcggtgggatttggaatgttagaaccaagtgggctgctttgtttttaccttggtctttggctgtcttgactatgtattctagggtttatttgggttaccatacggtggcccaggttcttgctggagcttctttggggattttgcttggtgggctctggttttgggtggtgaattctatgctcttctgttatttccctttgattgaagagagttcctttgggaggtttttttatgttaaggatacttctcacatatcagatgtgttgaagtttgagtatgataatgcaagggctgctaggaatactatggctgccagaaaagccatggcttccaagagcagttgattaaacacaaactcatcaggtcatattcttgataccaatgtttcaagatccaacttctgtgccaatggatgattgaatgagaagtcaaaacggggcatcaaaacggggcattgatgtttgaggatgctgtatgtgtgtgtcagttaagaacatgtttctgtgtttttttgttataccacgatgaaagaaacatcattgcaagacacaaatacatacatatcatttacaatcttctattttgtttcacttttggttataatcagttggtttaacaaacaggtgctaacttgcatctaatgaaagatgtgcaatgtttcaatgttgactatgg

SEQ ID NO: 16978 - DNA, 573 bp, Gossypium hirsutum
  Clone ID: GOSHI-09MAY01-C74844_1
gcaacagccacggcgtctcgagtattgcagctaggattggttctaggattgatacttgctgtcattcttggaggcggactgagttttggagcaaaattatttaccaaagatgccgatgtcctccgcctcattggtacaggcattccatttgttgctgctactcagcccatcaattctttagcatttgtttttgatggtgtcaattttggagcatctgattttgcatattcagccttctccttggttcttgtagctattgccagcattatatgtttatgtattctctcctccactcatggattcatcggactctggatatctctgacgatatatatgagtcttcgagcttttgctggattttggaggatagggacaggaacagggccttggaagtttctgaggggctgaatgtaggcttttgtaagttgattattagctttcaaaccctccctctgtatctgataattatgagttgtgggggaattctttgaaagcacgtaaaaggcccacaaatctgtatcttaacaaatatagtaaacaggcggtataccaaaatatttgtttcagtcttat

SEQ ID NO: 16979 - DNA, 1393 bp, Gossypium hirsutum
  Clone ID: GOSHI-09MAY01-C74874_1
gaactcgccatgaacacccattcaacttgttttggaggcaaggatcgttcatttgtgatgcatgtggttcagaggggaacaatctttgctatatatgttctatatgtcacctccaagttcataagaagtgcacctctttgccgcgcatcattaaaatctcacggcacaatcactttgttttccgcaagtatttgatatcatgaagcaaagattgaaaagcaagagtgtatgatttgtcatcatgatgtgaaaatggagtatgggtgttattgttgtttgaaggatgattgcaattactttgttcatgtgaattgtgctactgaggataccgatttgtactacattgttgattctgaaaatccagacgagttggttgaggaacctatagaatccgcaatcacttgtgtcattgaggtgaacgaactcggagatgctacgaagatagaacatgtcagtcatgaacattgcttagttcttggagtcatgacccaggacgatgttgataaacattgtgatggatgttctctctcgatcttgggttcattttactcgtgtttgcaatgcatcttctttctccataagtcttgtgccgacatacctatgaaagaagcatcattggtttgacatacacttgctaaaccttgaaaccaattgtatttttcaatgtgatatttgtcttcaacaatgctgtggtttcgtctacaactgcgatgaatgtgcgttctcattttgtcttaaatgtgctatgattcctgatactctcgattacctgagccatgaacatcctcttttctgggattccaaatacaaagggaaatgcaatgcttgtgatttatgggtttatggtggatacagatgtaagagttgcaagtatgctgtgcatttcgaatgcattacacttccgaacgaggtgcggcacaagtgtgataaacacttcctgaaacttacttttcgtgatgaaagcgattacccagagcagcactattgtgatatctatgaagaacgaagagatccgaataaatggttttattgttgctccatttgtgatacttccattcatcgggatgtgttctcgggaaatatccattcatcaaggctggaaagtcgtacaggtacaagggtcactcacaccccctcacatttgttagaaagaagtatcattacctggagtgtgctatatgtggtgagatttgtgaagagttagctctcgagtgtgatatatgcagctatattgtccattggagttgtatatctccatttttttctttagattttgcaagattgtttggagatcgcaatgttgatcaactgtaagaattatggtagagcatagaactctgccattagtggcatttattgtgttgtgcaaactgaaaattatgtgatagttttt

SEQ ID NO: 16980 - DNA, 498 bp, Gossypium hirsutum
  Clone ID: GOSHI-09MAY01-C74494_1
cccacgcgtccggttaaaagcacttatatgtgttgtaaaggtgatggttggaactcaaagggtgataaatggaagagtgtttggaagatcccaggaccacaaagagtttgtgtcttcatttggttgattctcaagcagcgtcttctcagaaatgtcgaaagggtcaaaagaggcttatcagactttctttcatgctctatatggggttttcattcggaagatactctccacattctcagagattacaccgcagctaaagatgtgtggagtcagttcttaacagggtcaaccttggaactcaagggagattgtcaataactcctattgctgggctactcaatatttctcaccctctagaggtactactagtggcagttctggtttactcttagaagagcatgattatggttctacgatcttccttaatactaatagggcagtacgtttggacactagaaacgcttatgctggggggttgcaagacatatgaatggacag

SEQ ID NO: 16981 - DNA, 724 bp, Gossypium hirsutum
  Clone ID: GOSHI-09MAY01-C74774_1
cccacgcgtccggcaatccttatcttgctgcacctctgcactttggggaaaaagaagtacatgtgtgaccagttcttcttccggctaagctttcaaatgaagtgaatttgagaaaccttgttccagaaaattgttttgtaggaaatcaagtttctgtgctggagacatttgctcctgctattgaagcaatgaagagtgggatatgtgaatatggcaatggacagaaaaatgtcctttatagccagaggcctatggtgcattttaaaattggaattggaaagaagcctttaggcactgcaccagatttcaattccaagaacaaggatcttgagaagatcgtttgaaaatgataatgaaaaggaagacaggaagagaagagcagaaaaaattctgaaagaatctatagaattctctcacgaactaggtcagttgtagctttaaaataggtttgttaccattctctgttgactttccaaagctggataagtctcctactttggcaactttcttgagtatgctcggaaagtagccaggatagaaatttgtgagggcatgaattttttttttaattgaaattcttgtttcttcttttgttgtcttaaactgatcgtggatttatcagtttctgtttcaatgtcaactctatatgtacactatgctcaccattgttgaagctttacaatattgtatcaacatttgttattaatgaagtcaggttaatttc

SEQ ID NO: 16982 - DNA, 986 bp, Gossypium hirsutum
  Clone ID: GOSHI-09MAY01-C74294_1
gtttttccttcaaaatttgataactttcagacagaacatcgaaatgaagtgaagtgaaaacgaagtctcaaatggaaggagttgtagtaaaagaagaggaaactcaaatgacgtttgcaacagctgttgggactactgctgggttgtcttcatcttcatcgtcatcaaatgttactcctcagccgaaggaagggcttaacgaggttggtccgccgccgttcttgactaaaacttttgatatggtggaagacccttcgacggattcggtggtttcatggagtgaagctcgtaatagtttcattgtttgggattctcataaattttcaaccacgttgcttcctaggcacttcaagcacaacaatttctccagtttcattcgtcagctcaatacatatggttttagaaaagttgatccagatcgatgggaatttgccaatgaagggtttttaggagggcaaaagcagctacttaaaacgattaagaggagaaggaacatagtgcaaagctcacagcatcaagctggaggaggaggagcttgtgttgagttaggacaatttggattagatgaagaactggagagattaaagagggatcgaagtgttttactagctgaaatcgtgagattaagacaacaacagcagcattcaagggaccagattgttgcaatggaggataggttacagagcacagagaagaaacagcaacagataatgtcgttccttgctaaggcacttcgaaacccgactttcatacagcaacttgctcagaacagacaggctaaaggcgtcgaaatcggacgaaaacggaggctcacggcgagccccagtgtggagaatttacaacaagcagcagtccctgtggtggttgataatgatcaagttgaggaacaagaaggattggcaactattgagactgaaattgagacttttttcaattctgccatggatgatgaatcaagtactgaaatcaaggatcatatgccaagt

SEQ ID NO: 16983 - DNA, 646 bp, Gossypium hirsutum
  unsure (1)..(646): unsure at all n locations
  Clone ID: AI729182.1
gtttttccttcaaaatttgataactttcagacagaacatcgaaatgaagtgaagtgaaaacgaagtctcaaatggaaggagttgtagtaaaagaagaggaaactcaaatgacgtttgcaacagctgttgggactactgctgggttgtcttcatcttcatcgtcatcaaatgttactcctcagccgaaggaagggcttaacgaggttggtccgccgccgttcttgactaaaacttttgatatggtggaagacccttcgacggattcggtggtttcatggagtgaagctcgtaatagtttcattgtttgggattctcataaattttcaaccacgttgcttcctaggcacttcaagcacaacaatttctccagtttcattcgtcagctcaatacatatggttttagaaaagttgatccagatcgatgggaatttgccaatgaagggtttttangagggcaaaancanctacttaaaacgattaagaggagaaggaacatantgcaaagctcacagcatcaagcgggangangangannnnntgtnnanttnnnggaaatgtggagtagatgaagaatggaagaaattggggagggatcgatgtgttttgggtgggttgaattctggaggagtaagatggcgggggcgct

SEQ ID NO: 16984 - DNA, 826 bp, Gossypium hirsutum
  Clone ID: GOSHI-09MAY01-C75834_2
cccacgcgtccgcccacgcgtccgctcactttccattccacttcttttatatttggaatccaaagcctcatttctcttcattcaacatctaaggggggtttttttttagttctccaattttcaactatggcctattgcaacccttcttctgatcagaaactagatgaaatggcttcaatggaggttggaagtgacaaggatgttaaagttcatgtcttctcttcatcatcagagttgatcgaaaagctgcacgagaagtggagtccggtgaagaagaaaccatatccggctatgtattccagcgttttcggagggatcattcttgaccctgccatgatggtaattcccatagatgatcacatggttcatcgaggccacggtgtattcgatacagcagtcattctagatggttacctctatgagctggatgctcatttagatcgcttccttcggtcggcatcgaaagcaagaatcacccttccgtttcctcgatcaactcttcgtagtattcttgtgcaattaaccgccgcatcacagtgcaaggaaggaactctacggtactggttgagtgccggtcctggtaatttcttgctttctcctgccaaatgccctacttctgcattctacgctgtagtcattgccgacgttgtctcgcaatgcaaaaacggggttaaagtgataacttcgactatccctatgaaagcacctcagtttgctacaatgaagaatgtaaattacttgccgaatgttctttcaataatggaagctgaagacaagggtgcatatgcttcgatttgggttgacgatgatggttttattgcggagg

SEQ ID NO: 16985 - DNA, 652 bp, Gossypium hirsutum
  unsure (1)..(652): unsure at all n locations
  Clone ID: AI054460.1
aagttggttcgaanggtgtaatagtgtcagatcgaatccccaccttcatgagctggtgctcattagatcgctccntcggtcggcatcaaagcagaatcaccccntccanttcctcgatcanctcttcgtagattctggtgcaattaaccgcccctcacagtgcaagaaggaactctacggtactggttgagtgccggtcctggtaatttcntgctttctcctgccaaatgccccacttnntccattttacgctggagtcattgccgacgttgtctcgcaatgcanaaacggggtaaagtgataacttcgactatcctatgaaagcacctcagttgctacaatgaagaatgtaaattacttgccgaatgttctttcaataatggaagctgaagacaagggtgcatatgcttcgatttgggttgacgatgatggttttattgcggagggccctaatgtgaatgtcgcatttataaccaatgataaggaacttatttttccttcattcgataggatcctaagcggatgtacgtcatggaagccaaaggtgcagcagaaattatgtatataggaagtacgctaccgatattgccaatcatcatgtgggacgaacatcccatcggagatggtatgtacaatctaatgtttcgaaagc

SEQ ID NO: 16986 - DNA, 652 bp, Gossypium hirsutum
  Clone ID: GOSHI-09MAY01-C75404_1
aaaaggttgaggaagagaatgtccatatcagaccagaaatgaaaggccttccaaaaactcttgctgttaacgaaaaagagctgtgtaagtactttgagcctgggaatcatgtgaaggttgtgtctgggacaaaggaaggtgcaactggcatggttgttaaggtggagcagcatgtgctcatcattttatcggatacgaccaaggaacatattcgtgtttttgctgatgatgttgttgagagctctgaagtgactactggtattacaaaaattggagagtatgagcttcatgatcttgtgctactagataacaatagctttggtgtaattatacgtgtagaaagcgaagcgtttcaggttcttaagggtgtcccagagagaccaagaggtttctcttggcaaatttgagggaaatccaatgtaagggtgattagaaaattaatgggcatgacagatataggaatactgttgctgtgaaagatgtattaggattcttgatggtccttgtaaggggaacatggtcctgaaagctcatattaaaggagtccggtccttgatgatcggcttaccttgacatgctgctttaatgtgctaaactgattttggtgatattggaggataccttccatggtgacagaatgttgttcttttca

SEQ ID NO: 16987 - DNA, 501 bp, Gossypium hirsutum
  Clone ID: GOSHI-09MAY01-C75364_1
cccacgcgtccgcccacgcgtccgcccacgcgtccgcaaaatgttatcccacatggatcctctgggggagttgttgcggcatctggggatgaacttgagaatgattatcagcaaattaagaaacatgttaagaatgatttcaaattcttactggaaattgcttctgcagaaaattcaggattacatgtatttgacttcctggcaaattcaattctgaaagaggtccttgaagccatccaaaagggaaagcctggtgctttttctccaggaagacctaaagaattcctcaaaaactacaaagcaagcctagatttcttggcctatcttgaaggctattgcccaactagtgctgctgttgcccgatttcgagccgcaccttcttatgttgagttcatgaagcagtggaatgttggtgtgttatttctcgttaaggtttcaagaaattgctggtgcactggactctgcacttacagccgctggtcttgttcttgtccagaattc

SEQ ID NO: 16988 - DNA, 557 bp, Gossypium hirsutum
  Clone ID: GOSHI-09MAY01-C75254_1
caaattattaacacattcacgccaacaaacaggccaatggattcccaaattttgaaacaataagctcagctaatctttctagagacgcttcacaaagcataaaaaattaaagattctaggattttccaacaccatttcgattgaagcaacaaaattaggggaaactgttcatcttctttaagaatgcaatggacaaaacttttgctacttcccattccttcatcttcgagcacgtttcaatctggagcttccagtaagctacggtttctctcaaccagtattgccgcaacctttgggatcccatacctcaaaaacacctattgtttttgccaaagacctccgctggctaactggtgccccacttcattggccgatctgttcacatgcataaagggaatctcctttcaacctccggcttttgtaaatttaaatctaagcacatcctcaatgccaacacacaagccactgtttccgccgcaaaaggcgaaagaatcctctcagtcaagaattaaaatcaatcaaatctacaacaaggcttgcatttggatttttcacac

SEQ ID NO: 16989 - DNA, 720 bp, Gossypium hirsutum
  Clone ID: GOSHI-09MAY01-C76584_1
ataatggagacggcaggagaatggctggagaaggctttgattgatttgtgtaaaaaaatagagacgggtttggatttggatgctgaaattatttctgggttagtttcctattgcgagttggctcatccccttgacgccaaagaatatcttgacaatattattggacaagaagcaggaaaagttgttaccgaagagtacttgcggcggaggggtcacttagttctctgcaccggcaatgcagccatccctgcttcgaaacttcaagcctatgtcaaaccaccttcgggtgaaatctctgtcagtggaacgaagaaaccatttaagactccaaaagaggctgcgggctctagttatcgggctgaaccaaaaaagaatgtcatttctggtaatcaggaaaacagaatcccgaatgatgctagtgattcaagaaacatgcgtaaagggaaccaaggtaattctaaaaagaagaaagctggtaaagttgtttcacttgcagaggcagccaaagggtcgattgtcttccaccaggggaaaccgtgctcgtgtcaagctcgccaacacagactggtcagtaattgtctttcatgtggtaagatagtctgcgaccaggaaggagaggggccgtgccatttctgtggtgctcttgtgcttagagaaggagcacgtatgctggtcttgaaggaagcttcactcctgtatcagatgctgaagcagcagctg

SEQ ID NO: 16990 - DNA, 605 bp, Gossypium hirsutum
  Clone ID: GOSHI-09MAY01-C76684_1
atggtcaccatttgatggaaaaacaatttctccaaaattttctccttcgttttccatgtttatggttaaaaacccggaaatagcgaggggagcctctcaaagtagataaatataaaataattgcagtagttgacatttcgagtagcaatggctcctggaggcagcgcttgcaaagaagtcattgaatctcattcccctgttgcagattatgacatagcttcagcaaaatctgagagtaataatgccactagtactactacaacaacaacaatgaaaacttcagttaatttagttggaaaacatggaattcattcaaacaacggtgtttatgagctccttgagtgtcctgtatgcacgaatttgatgtattcaccaattcaccagtgcccaaatggacacactttgtgttcgaactgcaagattagagtgcacaactgttgcccaacatgcccctatgatcttggaaatataaggtgcttagctttggagaaagttgcagaatccttggaactcccttggaaataccagaatctacgtggcctccccacccttccctctcaccgcaagcttgagcacaagtcgacatgcatgatggatgtaccttc

SEQ ID NO: 16991 - DNA, 809 bp, Gossypium hirsutum
  Clone ID: GOSHI-09MAY01-C76094_1
gaatccaacttagcaagttcatagatgtgtgtgctcatcactgtaaaataagatctcaagaagatgtcaccaatcaagttaatcttccaggtcatctggaccctcaaagagtcatggagtcaatttaagcatttcaatgatgtggaaagggtttgaaaagagtaaccaaatagaagaactacattgcagcagcagtagcagcaaccaaagaagagcgatctcaggtggtgctcctcaattctatcgagtctttttgcagcaaggctagccctgaggcggcgaaggaggtggcattggttcttaaagtgctgtatgacgatgatattttggaagaagagtttatcatggagtggtaccagaagggtatagctggtagcaataagggttctcagatatggaagaacctcaagcccttcatcgagtggctccagactgccgagtctgaatcggaagacgagtgaatccctaagctctccgtatggtgtctttaccatgttaagcctctacttctagtgcaataaatattagcgtcgtcttctattatatgttggtgtttggctttcctgtgtcgtgtttcctagaataaaagacagtgagctacatcccgtacgtgctctctgctgttctgtggtttattatggtgtgaactggtcattgtttattcccctaatgtgttaactgagtttactgttttatttctcaatagttttctttttcttttttatgttatcttaaaccgtcattaagcctggtttaaattttcatgtttttaattaattatttctataaaaaaacaatgttttgtttgc

SEQ ID NO: 16992 - DNA, 548 bp, Gossypium hirsutum
  unsure (1)..(548): unsure at all n locations
  Clone ID: LIB3830-001-Q1-K6-A6
ctttccttctaagctggccttcccagnacacaatctctacatgtatgctattagtataaagttgcaaatacaagagtaatcatataattatacatanaaagaagtaagaattaaggtttgagaagtagaaaaggaatgtttggttggttggttacaggtaaaatgtcatctaagtgtatattttacgttttagattttttgtttgaatttcctgttgtaaagtgtaataataatgtttgacttgtaatgcgtgccttgtaacactttttctgttgagtggtctacccgccgtttgcagtttctagaggtttaggggtatattattaatatataaagaaaatttcataaaaaaaaaaaaaaaaaaaaaaaaaaaaaaaaaaaaaaaaaaggggcggccgccggacgcgtggggtttcctagaataaaagacagtgagctacatcccgtacgtgctctctgctgttctgtggtttattatgttgtgaactggtcattgtttattcccctaatgggttaattgagtttatgtttaatttctttctaaagaa

SEQ ID NO: 16993 - DNA, 366 bp, Gossypium hirsutum
  Clone ID: LIB3829-020-Q6-K6-H5
agaaagaaataaacataaactcaattaacacattgaggggaataaacaatgaccagttcacaacataataaaccacagaacagcagagagcacgtacgggatgtagctcactgtcttttattctaggaaacacgacacggtaaaggcgggggcggcgtataatagaagacgatgatattttggaagaagagtttatcttggagtggtaccagaagggtatagctggtagcaataagggttctcagatatggaagaacctcaagcccttcattgagtggctccagactgccgagtctgaatcggaagatgagtgaatcccgaagctcttcgtgtggtatcttcactatgttaaaccttctcttctcg

SEQ ID NO: 16994 - DNA, 450 bp, Gossypium hirsutum
  Clone ID: GOSHI-09MAY01-C76324_2
ctcgtccaaccatttcccttccctgccctcgcagcattcatgaatagccaatattatatataccctataaatagtacagctcttgtttcttcgaggtgtcgattgccggttcggatttttgtgactcaaagtgtgcggtgaggtgctcaaaggcaggggttcaagacaggtgtttgaaatattgtgggatttgttgtgagaaatgtcattgtgttccatctgggacatttgggcataaagatgaatgcccttgttatagggacatgaagaactctaagggcaaatccaagtgcccttagatgtttttttccccataattacttgtatgtatttattttgcctttatacccttataaagatttaacaaatgatgttgtgggaggacccttaatcttaactatgtaaaatatactaaatgaataaattgggtccttagatatgtgatttatg

SEQ ID NO: 16995 - DNA, 506 bp, Gossypium hirsutum
  Clone ID: GOSHI-09MAY01-C76324_1
ctttgtgcttatttataaacaaagtatcaagtaaaaatgaagatggtattggtgcttttcttgcttgtttctcttgctctcagctcttgtttcttcgaggtgtcgattgccggttcggatttttgtgactcaaagtgtgcggtgaggtgctcaaaggcaggggttcaagacaggtgtttgaaatattgtgggatttgttgtgagaaatgtcattgtgttccatctgggacatttgggcataaagatgaatgcccttgttatagggacatgaagaactctaagggcaaatccaagtgcccttagatgtttttttccccataattacttgtatgtatttattttgcctttatacccttataaagatttaacaaatgatgttgtgggaggacccttaatcttaactatgtaaaatatactaaatgaataaattgggtccttagatatgtgatttatgaatatgccggtgtggtggtatttatatatattaattaatatggggtttgttt

SEQ ID NO: 16996 - DNA, 221 bp, Gossypium hirsutum
  Clone ID: uC-gsflnu33B073b11b1
tttttcacgcgtccgtccacgcgttcgcggacgcgttctttcacgcgtacggagaaatgtcattgtggtccatctgggacatttgggcataaagatgaatgcccttgttatagggacatgaagaactctaagggcaaaatcaagtgcccttagatgttttttttcccataaatactcgtatgtatttattttgcctttatacccttataaagattaaacaa

SEQ ID NO: 16997 - DNA, 591 bp, Gossypium hirsutum
  Clone ID: GOSHI-09MAY01-C76234_1
atatgaacataaatccaattgaattcctatatgttttggttccatgaatgttttgtcgttattacctgttgccgttaaggattttctctttttatctcttgatgggttcttgtctctgacactgaaaaagttctgagaaaaaaaaggaagaaaaaagaggaagcttccttaaggctgaagctctttagggtttttttttcctgcaatgggtttgagtagaactcacaagactgccaatggagtttctaccagatgggtttctttcttttgcattgctagcttcttcttgggtgtgcttgttatcaacagattgtggactagttccgatcctgtcaaaatcaatgaggcttcttctgtacagacacatgggagaaaggaagttcatcccttggttaattgtgataaggacacttctgtcgaggcaggtgatattctttctcgagtttcacaaactcatgatgtaattatgacattagacaaaacaatctcctcattggaggtccagctagctgctgctagagctgccaagggagatagtaatgaaggatctccgatgggttacaagacctggaatcgagaacttgaaggatt

SEQ ID NO: 16998 - DNA, 665 bp, Gossypium hirsutum
  Clone ID: GOSHI-09MAY01-C77904_1
gttcctttggatgccctcttcgtggccaaaaaggaacatgttttcggcaaaagggtgttcggtactaaggcacagttttgcgataccggtcggattcatgatcttgtgattgaatgcgacatgatcggggtaaatgatccgtgtcttgtgattcgtgtggacggcaagagtttgatgcaagtgaagcggctacgatggaagtttcgagggaattatactattttggttgatgggatggctgttgaagtttattgggatgttcataattggctcttcggatcatcggtcgggaatgctgtttttatgttcaaggcattgccttcatcggaggagaagttgtggattagccaatcgatcactaatccgagtacgttgcaatggtctttctcacaacggtttcaagattcgaagacacgaaatctcggcttttcattggttttgtatgcttggaagaatgagtagaaaaacagactatagattcttcttcaactctctcaaaagtgctaacaaaaaaaaacttttattgagtggtgatgtttatatacacttatgatcaaagttcgattaattcgactgaaaaatcgatccatttgttttctttttcgtgttcttagtctgctgtatatccttgatacattagtttaattatcgatatctgttatatg

SEQ ID NO: 16999 - DNA, 821 bp, Gossypium hirsutum
  Clone ID: GOSHI-09MAY01-C77844_1
attttatctttcaaggtcctctctcttcctcccttgtttcttctggtgggggtttttttatattttcttcttcttctttctcgctttctttttttcttgagaaaggagaggagaatagcttcaaagattgcttttttattttttatgattcctgtttttatggtctaatcctttattttcttgttaagattctcttttagatcgatcaaggtctttcatttccacctgcaaggacttcgaaataatttgtattgaagtgcatacaagccctaatgcaggggcaaaagggtgcttttggttccttctctgaaaccttctttgatcaaggctctacatcgagtaatgctactatagaccagcaggtgtgctggaataatattcaaaatcccatagaaaatagatttcctgattgtttgccttcgcataatgacataaacattggatatgtgaactccattggtcgagaggagcaggagccaggcagatggagcttagaagagcctagctctagcggcacacagaatgaggtcaatcatgatgagaggaaaatagaccatgtatggtcgtcttccatgagtgcttctgtgactgctgaaaagaactctccatttgtccaaaattccaattctaatacagtttccccgagtctcaacttaaatgcagccatagttgctcacggtaataataactgtcaagttacggaacggtctaacctaaataagcctagtggatctgaaagggacctgatttcatcggatgctggtcctgaaggttttatacatgcttctagaagtagtggatatgttgtggatgataatgat

SEQ ID NO: 17000 - DNA, 1102 bp, Gossypium hirsutum
  Clone ID: GOSHI-09MAY01-C77564_1
cccgcgtccggaaaaaaaatgtctcaatttattttagggtttaagatttagagttaaaaaggatgaaattcccttgtaaaaaactattaccactgcttattttcatcctctcttgcctttccgttctcagactccttaaactcgcaattacttcttcagatccttcatctcaagctgctgctttgttatcgtcgcttcaacgggagtgttcgtcaccttccgaatgcagtaagattcaatcaaatgcggccaatgcgacccttctttccccaaaggaattcatgcttctttctgatcttgttacacggaaaacaccttgtaatctccttgtgttcggttttcaaccgcagtatatcgacctctcgtcaataaacgccggagggatcactctttttctcgaggacaatcattacaagataagcaattttgaagccagttcaaatcagactcgaatttataaggtcaagtacggagtacctgcgaaaaaggcatacaagctactcaaacatgctaggggaaaccctacttgttccccaagcataaatctactccaacaatcaacttgcaaattggcattgagggatttgccacaacaagtgtatgagcttaaatgggatgtcattgtggttgatggcccaatcggggactcgcccgaagcaccgggcaggatgtcgactatctacaccgctagcatgttagcgagagccacagccaggaatatgactgatgtcatggtgcacgacgttcatcggacaatcgagaaatggttttcttgggagttcttgtgcgaagagaatttggtttctgccaaaggaaaattatggaactttaggatctcctccgatcaatccaattctacacagttttgctcttccgagactgttcatatacggtaatatccttattttgttttgcggcaaaagaacaaaaacatttcctgcatcgttaatgctggaaattagggcttcaacaaaggcatatgatatattaattttcagcgttagagagtgccatgtaactaaacttgtccatacaggtcgagtcggattgcaattttattttattttgtcataatgaatttttggaactctaatttcctttt

SEQ ID NO: 17001 - DNA, 488 bp, Gossypium hirsutum
  Clone ID: LIB3585-006-P1-K1-G2
aaaaaaatatctcaatttatttagggtttaggatttagagttaaaaaggatgaaattccctggtaaaaaactattaccgctgcttattttcatactctcttgcctttccgttctcagactccttaaactcgcaattacttcttcagatccttcgtctcaagctgctgctttgttatcgtcgcttcaacgggagtgttcgtcaccttccgaatgtatatctcgacctctcgtcaataaacgccagagggatcactctttttctcgaggacaatcgttacaagataagcaatatcgaagccagttcgaatcaggctcgaatttataaggtcaagtacggagtacctgtgaaaaaaggcatacaagctactcaaacatgctaggggaaaccctacttgttccccaagcataaatctactccaacaatcaacttgcaaattggcattgagggacttgccacaacaagtgtatgaagctaaatgggatgtcat

SEQ ID NO: 17002 - DNA, 812 bp, Gossypium hirsutum
  Clone ID: GOSHI-09MAY01-C77754_1
cccacgcgtccgggcggatacccagcagtgtaagatggaagggcatggacatatatcgagtaaagttcttcatgccctttgaagaatcgatcccaaagaggagccagtggcaatggacccttggtcaagaacatgaaggcaatcttggggactctcttaaagggataatccttgatttgaggaacaaatgaagctctccacagtaattctgtatcattcatattatgcatcaagttagaaggaggcctaataaaattgtctatggtagtaccatcatcttgaaacaaaggctgaacagcggatgttgctttagttgctagctgctggaccatagaaaatcgtactgaatacatactgatgatcgataatccgacgcccacacccagaaacaacaaacaaaatacaaggagtctggaaggcaaagccctgaagaggttcgttttgtttgcagaaatgggttctttaccttcctccatagccactacccttggctgcatcataacttaatccctccattaaaaaccaacccaggagggacccttttacgatccaaaattctcccacgcaggtgataaaaccaagactttgaaacactgtcttaatacagaaaagattaggggtataaaaaagaagtgacccagaatagatcagcttttcaccaactagaagggaaataagtagaggaacagcgacaaaaagatttggaagaatcaatgagctttattcccgtgatatcggagaaattaataaaacacaacatatgaaaacaatgctgaagagatttaaagacagaaaagaagggaacaaagttg

SEQ ID NO: 17003 - DNA, 807 bp, Gossypium hirsutum
  Clone ID: GOSHI-09MAY01-C77744_1
gaaaaaagagaacacctaagcagtccaaatacgagatgccaccacctccttcccttcaagctggtccagtgaagaaaggtcatcatatgggcgattatatcccacaggaagagcttgaaaagtttatggctgcctgcaatgatgctgctgcacaaaaagctgcaaaggagactgcccagaagacaaagattcaatctgataatgttgggcataaactcttatcgaaaatgggttggaaagaaggtgatggtttagggagttccaggaaaggcattgcagatccaatcatggctggtgatgtgaagatgaacaatttgggggtcggtgctcataatcctggagaagtgacgccagatgatgatatatacgagcaatacaagaagcgaatgatgcttggctatcgatacagacccaatcccctgaacaatcctcgaaaagcatactattgagaacacagttgtggaagaaatctactatgtgtagggtgggtggctggttggaggaataactctaaagagttgaaggatgcttattgcatatcatatacatacactttatatttatgtatatatttgtgtttatgactgaggttcctttcttttctatgggattcatttcgtttcgtttattcaggtggctaaacacagcttttttcccttcttaaaaaacccaagactgttaagtgttaaccgactattttgaaccaactggagggaaggtagttttgtatcaagaaacttgtaagatagcttctgctttgttctgtttgtgaaaggccagtgttggtccaaaaatatattttaattc

SEQ ID NO: 17004 - DNA, 364 bp, Gossypium hirsutum
  Clone ID: uC-gsflnu33B132f01b1
ttttttttttttttttttgaaaaaaagctgtgtttagccacctgaataaacgaaacgaaatgaatcccatagaaaagaaaggaacctcagtcataaacacaaatatatacataaatataaagtgtatgtatatgatatgcaataagcatccttcaactctttagagttattcctccaaccagccacccaccctacacatagtagatttcttccacaactgtgttctcaatagtatgcttttcgaggattgttcaggggattgggtctgtatcgatagccaagcatcatacgcttctgttttgtcctcctcccctgttttcgcattctatggctagtggaatggtttctataatatgagaacaag

SEQ ID NO: 17005 - DNA, 816 bp, Gossypium hirsutum
  Clone ID: GOSHI-09MAY01-C77764_1
aaacgaggaaaataacagtatcagtctctctctctctcgctattcagtttggctttgactgtatctctctcttccttcagttttcttctgcctctctctttcattcgagagcctaaaaccctctctctccttcctcagtcctctgtaaggtatctgtcaggataggggaaaatgggcgggactggtgatgataaaattccaatacatactgaaactgaaggttccgagactacaatagaaataaaaataaaaacattggccgagacttatactatgagagtggataaacagatgccagtgcctgcactaaaagaacagattgcttctgtaactggggtgttatcagagcaacagcgattaatctgtcggggaaaagttctaaaagatgaccaactactttctgcgtaccatgtcgaggatggtcacacattgcacatggtggtcaggcagccagttccaccatctgacggcgcacctaatcattcagatgatctgggatcaggtacaagccgcagtcatggtaatcatgtcccaagttttgtgatagaaacttctaatatgcctgaacaaggagatggagttcctcctgaaattggtcggattgtctctgctgttctgggcatgttcggatttgcaaatatggcaagtgatgtccgggaacagggttcacaaaggcatgaaagaacatctggtattggcataccaaaatcgtcgcagggtccaactgaacaaaccagcatgaggaatcaatccgatagagaacacactgcttttggccttccagcagcagttttcttggggcctatgcaaccttct

SEQ ID NO: 17006 - DNA, 1061 bp, Gossypium hirsutum
  Clone ID: GOSHI-09MAY01-C77734_1
cggacgcgtgggccagaaagtaccacaacttttccagtcacactttctgaactgaccgaacgactaaaacactggaaaaatatactacagagcaatgttgaggacaggtttcctgctgttctgaagctggaggaggaaagcagggtgttacgggacttccatgtagttgacgtagagattccagggcagtatttctgtgatcaggaaattgcacctgaccacacagtaaagttagatcgtgtgggagctgatatacaaattgttcgaaggcatggaagcagctttcgtcgtttgacgctgattggctctgacggctctcaaaggcatttcattgtccagacttctttgactcctaatgctagaagtgatgagcggatattgcagctcttccgtgtaatgaaccagatgtttgataagcacaaggagtcccgacgtcgtcatatatgcatccacacacccattataattcctgtttggtcgcaggtgcgcatggttgaagacgatttgatgtacagcacattccttgaggtgtatgaaaatcattgtgcaagaaatgaccgagaggcagatcgtccaatcacctacttcaaggagcaattaaaccaggctatattggggcaaatttcccctgaagctctggtagatctccgcttacaagcatataatgatataacaaaaaatcttgtaacagatggtatcttttcccagtacatgtacaagaccctgccaagtggcaatcatatatgggctttcaaaaagcaatttgcaatccagttagctctgtcgagttcctgctctttcttgttacaaattgggggaaggtctccaaataagattttatttgcaaaaaacacggggaaaatattccagacagatttccatcctgcatatgatgttaatggaatgatcgaatttagtgaaccagtgcccttccgtctgacaaggaacatgcaagcattcttctcccattttggtgtggaagggcttattgtatcttcaatgtgtgctgccgcacaggctgtagtctcacccaagcaatcgcagcatttgtggtatcaact

SEQ ID NO: 17007 - DNA, 585 bp, Gossypium hirsutum
  unsure (1)..(585): unsure at all n locations
  Clone ID: AI054866.1
attttgttagggagtacaagcaagattttgagcgtgatctagatccagaaagtaccacaacttttccagtcacactttctgaactgaccgaacgactaaaacactggaaaaatatactacagagcaatgttgaggacaggtttcctgctgttctgaagctggaggaggaaagcagggtgttacgggacttccatgtagttgacgtagagattcagggcagannttcagtgatcaggaaattgcacctgaccacacagtaagttagattcgtgtgggagctgatatacaaattgttagaaggcatggaagcagtttnngtcgtttgacgctgatggcttgaacggttctaaaggcatttcattgtccagacttctttgactcctaatgtannnaagtgatgagcgggtattgcactntnnncgtgtaatgaccanatgtttgataagcacaaggacnngacgtcgtatatttgcattacacaccattatattcgtnttgtncnagtgccatggtgagacattgatgtcagacattctgagtattganatactgtcagaaagacganagcaacttcatacctctaag

SEQ ID NO: 17008 - DNA, 736 bp, Gossypium hirsutum
  Clone ID: GOSHI-09MAY01-C77284_1
ccttcaacctaaattcttaaactaaaagctaagtgctaagtttgaagccccttcttcctttttgtacatccaagccaagtctccagcaataacccaagccaaaccaaagagagcttatctctgcggaactctcctgtaattttcaccttcttatttatacagaggtgattgctcattgattagatatatcaatcagaaaacaaatgaacggtggtgatgcttacggtatgatggaggcgcaatacatttggagacaccacaggcacgacatcagagacgaccagtgctcctctgctcttgtcaaacatgtcaaagctcctgttaacctcgtatggtcattggtaaggcggtttgatcagccgcagaagtacaagccgttcgtaagccggtgcatcatgaaaggggacctcggaatcggtagcgtcagagaagtcaacgttaaatctggccttccggccaccaccagcaccgaacgattagagcttctcgatgacgaagagcacattctcggcatgaaaatcgtcggaggcgaccaccgtctcaggaattattcgtcaatcataacggtccatccagaggttattgaaggaaggccaggaacaatggtgatcgaatcattcgctgtggacgtgccagaagggaacaccaaggatgaaacttgttactttgtgggggctcttatccgatgtaatctcaagccatcctccgatcgttttaaaaaggatgtgctggtctt

SEQ ID NO: 17009 - DNA, 706 bp, Gossypium hirsutum
  Clone ID: GOSHI-09MAY01-C77244_1
ctcttctaataaaattttctttctttttttttttttttaatttcaacatctagcatacatgtttcggtacgcaaaagccatctttatctgtttctcatgtgactctgaagcctgacaactttgttctttctttccttcttcatcccccggacataagcagttggttcaaatatcagagctcaattgcagctatggcagcaacaaagttgtatgtagtgtattactcgttgtaccgtcatgtcgagatcatggcaagggaggtgcataggggggctaagtcacttcaagatgttgaggcaacactttggcaggtacctgagacgctatccaatacaatactgcaaaagatgaacaccccagctaaagcagctgatgtaccagagattaggccagaacagcttttggaagctgatggttttctcttcgggtttccttctcgtttcggtgtgatggcagctcagtttaaggccttctttgatgctactaacgacctgtgggaacgccaagcacttgctggcaagcctgctggtatcttctggagtactggtttccatgggggaggacaggagctcactgcattaactgctataacacagttagcacatcatggtatgatatttgtgcctcttggatacacttttggcagtggcatgtttgagatgaatgaggtcaaaggtggctcctcttatggtgctggcacttatgc

SEQ ID NO: 17010 - DNA, 179 bp, Gossypium hirsutum
  Clone ID: uC-gsflmaxxa051e08b1
tttctccccacccttttttttcctttcaacacctaacatacatgtttcattacgcaaaagccatctttatctgtttctcatgtgactctgaagcctgacaactttgttctttctttccttcaacatacccatgcttttaaaggggaatcatttagttttggtcaaatcctatggagtga

SEQ ID NO: 17011 - DNA, 724 bp, Gossypium hirsutum
  Clone ID: GOSHI-09MAY01-C70824_1
ctttgatagggttaaaaagggtgacacatttgtggccatttgtaggcattgtaagaagaagcttagtggatcaagtactagtggaacctcgcatctgaggaaccatttaattaggtgtcaaagaagatccaatcatggtgtagctcaatacttttctgctaaagataagaaaaaggaaggttctcttgcccttgtaactattgatcaagagcagaagaacgtggaagtgcttagcattgtgaatcttagatatgaacaggagcagattaaaagtgagcatgttgccattggtagcaatagcttggatcaaaggcggagccagtttgatcttgcccgcatgatcatattgcataactatcctttggctatggtggagcatgttgggttcaagatttttgtcaggaatctacagcccttgtttgaacttgcgactcgtaataaagttgaagctgattgcatggaaatctatgcgaaggagaagccaaaggtgtatgaaatttttgataagttgcctggaataatcagtgtttctgctgatgtgtggactgcttctgaagatgatgctgcataccggagtttggcagcacactatatcgatgagaattggcagttaaaaagagggtttgtgtttggtctttcttccgctctcagagactgcttcgaagtttatgatggctgatgttgggttagaacgagggcccatgaattgaagttaccggatact

SEQ ID NO: 17012 - DNA, 782 bp, Gossypium hirsutum
  Clone ID: GOSHI-09MAY01-C70594_1
aacatatggccctgatatcagctatctcagagactctgatcacaagcctcaagttctcaatgcatgggaaaagaatgggaagtttgtagtgggagctgttgtttctgttctgtgcctgattttggtaatcttaggtattctatggtggaaaggctattttcgatccaagccatcaagggaacaagtcttgagggggttagatctgcagactggcttttttacctttatacaaatgaaagctgctacgaactactttgacgctgcaaataaaattggagaaggtggttttggagctgtctacaagggtgtattgcttgatggcaccataattgcgattaaaaaactttcttcaaaatcaagacaaggagaccgagaatttctggatgaactaggcatgatttcaggattacaacacccgaatgttgttagattgtatggatgttgcgttgagggaactcagctgttattggtatatgaatacatggaaaataatagccttgcacatgctttattcggtaagcttaatgtcctaaacctcttttattccccctttctttgatggttctgtgattggaaccacattgagcgagtgtccttgtcctcctttggacgcttccatgtccccacaagcaaagaaaatgttgatattgatttataaaagttaaagagagaaaagatctcaacactctgtaccgacaattgtttgatgaattgaatttcactggattggccggtgtcaatgagtaggtcctcaagaaagccggctgatattggactggcct

SEQ ID NO: 17013 - DNA, 811 bp, Gossypium hirsutum
  Clone ID: GOSHI-09MAY01-C70484_1
gcgaaaatgcagctttttgtgttcatctccaaaacccaatcttcttctcatctcatgaacttcattttgatctcatcttctgtttgtgtcacctatcttgttgtatcggttttgttactcaacggctcgaagccgctgtctctgcgtgcgtattcttcttaccaagatgttaatacaccgacgacagtggagcatattgttttcgggatagcttcgaatcagaaatcgtggacgaaacggaaggagtatgttaagttatggtggaagcctcgtcaaatgcgtggatgtttgttccttgaaagcatgccttctaatgcaactttaatggatgttgatgatgttactctgcctcctatatgcatttcggaggatacttcgaggtttcgttacacttacaggggtggtcttcgatcggcgatccgtgtagcacgtgtgggttcggagacagctgctcttaaccatcctaatgtaaggtggtatgtttttggggatgatgacacagttttctttccggagaacttggcaaagacactttctaaatacgatcatcagctttggtactacatcggggctggctcggagatttatgaacagaacaggattttcgggttcggaatggcgttcgggggagcaggctttgctataagttacccattggctaaagttttggctaaagttttcgattcatgtatagaacgctatcctcatctctacggaagtgattccagggtctactcttgcttgacggagctcggtgtaggcttgacacgtgaacccggctttcatcagtttgatgttcggggtaatgcat

SEQ ID NO: 17014 - DNA, 763 bp, Gossypium hirsutum
  Clone ID: GOSHI-09MAY01-C70784_1
acgcccacgcgtccgatttcctcttctcacttcatttcttgagcaaacaaaagatatcttgaaattggctcttcttttaggaaactaagtaactcgtgataatgtctggttattccttcttaaacgatcagctgtcgaaacgcacctctattttcagtttgcaattatgggttgttcttggaatctgcgttggaactgctatagtcatcgttctcttccttatttccctttgtatcacttgtaaacgccaaaacaaagcaacccgcagcagcaacaacgttgttaagcctattcttaactccagtatccccatcgcttctaaggagattcaagaaatccgcgtcgaaccgtcccatcattctaaccctgtcctacttccggaatccgaccctgtattgattcttcatccggaagaaggcagcggcgatgtttctaggtgcaacggcattcacattgagatagggaaggatcataaggtagcgtctccagagcgtggatccgggtcgggtcacgggtcaggtgaggcccggtgtagtgatcaagggatgacagttagggcggttccggaagtttcccacttggggtggggacattggcatacattgagagagcttgaggagtctacaaatgattttgcggcggataatgtgattggtgaagggggctatggaattgtttaccgtggagttttggaagacaatagcaaagttgctgtcaagaatctgctaaataataggggtcaagctgaaaaagagtttaaggt

SEQ ID NO: 17015 - DNA, 658 bp, Gossypium hirsutum
  Clone ID: GOSHI-09MAY01-C70144_1
cggacgcgtgggtttttctcacgtatgcaggaaaccagcccactgttttattctttctttttataactgttttttcttcatgcatgtaaatcctatcaaaatctaattccattaacatttttttaatatttaaattttttttataaattttggtgatgcatgaaaggtaaagatttctttacttaaagattatctatatcatctgtgtttttcaatcaatatctttaattttgttaattagagcaataaaaattcaatttttttctttcttctttttcaacaaaaaatggaacctgagagaccaaattatggtgcgataatggttcacttgaaaaaaccgtattgggttttccttattcttctctttacattcgtagctgttctcacttttcaaatctccacaaaagatatccttcctttccaattctttggcgttactggatcacgtaaaaccagcgtcacatccggctccgaacccgtccccgaccccggaagttgcgccgggttgttgggagagtttcctgagagaaaacatgttatgtcgataaaggaattcggaggagttggcgatgggaaaacctcaaatacggctgcattttggaaggcgatagttcacatgcaacgtttaagtaacaaagggcggggtcagcttaatgtg

SEQ ID NO: 17016 - DNA, 891 bp, Gossypium hirsutum
  Clone ID: GOSHI-09MAY01-C70134_1
cccacgcgtccggccttggggaagaaaggaggaggaagtcctttgatgtttgaatggtatggagaaaagtattggggtgctgcgcatggattggcaggtattatctatgtgttaatggacacggagttgaaaccggatgaggctgaggatgtaaaaagcactcttagatacatgattaggaatcgatttccaggtgggaactaccctgcaagtgaacaagataggaagtcggatgttcttgtccattggtgtcatggagcccctgggatcgccctcactcttgtcaaagctgctgaggtctttggagatgacgaatttctggaagcagctgtggatgcagcaaaggtggtgtggaaccgtgggttgctgaagcgggtaggaatttgccatggcattagtgggaatgcttatgttttcctttcactttaccgaaaaacaggcaacgtaaagttcttgtatagggcaaaaagcatttgcttgctttttgcttgatcaggctcacaagcttatatccaagggagagatgcacgggggcgataggccctattccttgtttgaagggattgggggtatggcatatcttttcctagacatgattgagcccttgggttccagattccctgcatatgagctctaatttctaggctaatgcaataggtattgcctgtctgctttcctggaagacatgcctttggataacacttgtaatgaattgtttgcaattttgaaatggttgaagcatggatctccaaccttcggattatttgctctctttatatgtgcaccaatttgtagtcaatgatatgaacctgatactaatgtactatttctccaccccaatactttgattaactcaaaataagaatatgtggcagttcttatcttcgtccc

SEQ ID NO: 17017 - DNA, 549 bp, Gossypium hirsutum
  Clone ID: GOSHI-09MAY01-C70374_1
cccacgcgtccgcttttgcttctccaggttggttgtgtatcgtttagccagggatctgccgtgccgtatcgaaatcggattctatgatatgagcctattccggcttgatattatagtctgctgcatgagtaggtaatgaagggttttcatgagaggaatgattctctgaattgctcttctaaagcttctattgatagctcacctacccctggaactggatcagaaccaggtcccaacgactctaagttctcaaagacttctctctggtcaaatttctttgcttctgctttctcagtatttgacacatacagtgagtcgtcttcatcttcggcttgtgaaaagaagtcctcattttctaaaaccaatgggtggacaacagctgtgaagagggttgtctccggtggctcaatgaggagaattcacgagcgtgttttagggccgagcaagattggaatatctagctcaactagcgacatatggcttctaggtctctgctataaaatttcacaggagtcctcgggagacgtggatgccaccagtgcattagct

SEQ ID NO: 17018 - DNA, 715 bp, Gossypium hirsutum
  Clone ID: GOSHI-09MAY01-C71984_1
agttagtgtagggaagctgaacggttagattcttcaaatgatcagctaagctcttgtatgagctctgtgttggatgaagtctcactagaagcatctagtttttggcagcttcaacaagtcatggaaaagttggatatccggacaaaattgtgcatacgggatagtttgtatcgtttggctaggagtgctgaacaaaggcataattgcacaaatacgaaaggtggcatgaaagaggaaaaagatgaagctggttcatttgtggccaatgagacaaacaagtgcacgcgatttatggatatggaaactggcacaaactctatagatagatccatagcacacttgttatttcacaggccttcaggtccatcgctccaccatgcgaccggctacggatcgtggacaacaacaaaagcaggtaaccacgaatttgttaatatcagtgttaactccttttagagtatatagttttttttttttttttaatttatggtggtgtaaaatggtcttagtatggccttcaacataaaatgcagtttggtttaacatggacgtagtttgtggtgttgtaaatggttgtaaatggtaatggtttgtgaccctttttatccgtcactaatacgtcagtttgcttttctcaaactattcagcgtgcttgccaccaattcactggactctctttttatatctgatgatgacaatgaatctttttcatgct

SEQ ID NO: 17019 - DNA, 649 bp, Gossypium hirsutum
  Clone ID: GOSHI-09MAY01-C71804_1
gtgaccgcagaagaattaacgaaaaaacttgcagagatcggattaaggggcaaattcgaaaaggaaaggaatggaagattttgagaagaaggtttcaataaaagactcaatggagattgaacaagaaaacagcaattgcagtaaaagcaatgaaattctcaattcacttcgcaaattccttgaaattcaacagcgtagagctcaggcttactccaagcttaaaacgggtttttcggagtatatgaaatcgggaggggaattggcctaccagcagctttgcagtgagatcacagtagagttcaatgattgctcgaaacaagtccttgagatggaatctctgtttttaaaccccgattactgccgagttgatctagctgagctgctcagagccattcaaacacaggaaaagcagaaattacatttgactgccacgattcaggtcttgaagaaggcaggtcgtccgtcagagcgtctggtgaaccacgagaattgctcatttaagaagccaatggagcatgaatgtgtgcatctccaggagataacagaagctgccggaaccgaagaagcagaattaaatgctgagtatgataatgctctcaaggaagccattaaaggagtgcaagatgctgtaactgccattaacgaacac

SEQ ID NO: 17020 - DNA, 514 bp, Gossypium hirsutum
  Clone ID: LIB3582-053-P1-K1-G3
cccacatttccagttactcataggctggcacaaccgaactagattcacaatatagacttgcggagatcggcttaaggtgcatatttgaaaaggaaaaaaattggaagattctgagaagaaggattgaataaaagactcaatggagattgaacaagaaaacagcaattgcagtaaaagcagtgagattctcaattcacttagcaaattccttgaaattcaacagcgtagagctcaagcttactccaagcttaaaacgtaagccttcttcatttcttttttctccccaaaaagaaacccctaaatttgatttggatttgttaaatccattcttttgtttcactttttttcttattcataactatttcttgggttcgctaatcaatactagtgttattgctaaaaatcagggaaaatatcaatgaatagttaatccatgcgtctagtagttcttgaaatcccttccttggggtttaatttttttcttatttggatatattttgggggtaaataagcg

SEQ ID NO: 17021 - DNA, 634 bp, Gossypium hirsutum
  Clone ID: AI054981.1
ggtcataggagattgaggagaagggatcattttgttcaggaaaatggagatcctgatctatcttgttccattgatgagttagatccatggactgcatgggcatacaagcctcgtactatttcatttttatttgttggcgcatgctttctaatttgggcaagtggagcccttgatcctgagagcaacaaatctggtgatcttgtcacatctgtaaaaaggggtgtatgggcaatgattgcagtttttcttacttattgcatgctgcaggctccttctacggtccttattcggccacatcctgcagtttggcgtttagttcatggatggcttgttgtttaccttgttgcactcacttttttgctttttcagacacgtgatgatgctaggcaattcatgaagtttctccatcctgcttttggtgttgagcttccagaacgatctatggtgctgattgtcgcatttatattcctgaaaatcccttagcagattaagatgtttatgtatggatcttctgcacacctgaatgcttatttaatctctctttactcttttcttagaactttttgagaattgtcttccacatctagtgtggggaagcctttatcgcataccctttttgggccttacgcttgat

SEQ ID NO: 17022 - DNA, 528 bp, Gossypium hirsutum
  unsure (1)..(528): unsure at all n locations
  Clone ID: LIB3585-064-P1-K2-B5
gttgtttaccttgttgcactcacttttttgctttttcagacacgtgatgatgctaggcaattgaggaggtttctccatcctgaccttggtgttgaccttccagaacgatcctatggtgctgattgtcgcatttatattcctgaaaatccctctagcagatttaagaatgtttatgaaactctatttgatgaatttgttctagcccacatcttaggttggtggggcaaggccattttaatccgcaatcagccacttctctgggtcctctcaactggatttgagtttatggagcttaccttccgacacatgctccccaactntaatgagtgctggtgggacagcattattcttgatatttttacatgtaattggtttggcatttgggctggaatgcatactgtcaggtactttgacggcagaacctatgagtgggttggaataagtcgccagcctaacattattggcaaagtgaaacgaacattggggcaatttacgccagcccagtgggacaaaaatgaatggcacccc

SEQ ID NO: 17023 - DNA, 993 bp, Gossypium hirsutum
  Clone ID: GOSHI-09MAY01-C71304_1
acgggttttcttgaaagggccatcattatatgcttttaagggactggctggtcggtttgcaccaatcggagtacatttagcaatgctgctgataatggcaggtggaacacttagtgcaacagggagcttccgagggtcggtcactgttccgcagggactcaattttgttatgggagatgtactgggtccaaccggctttctttccacccctaccgaagctttcaatactgaagttcatgttaacaaattctatatggactactacgatagcggagaggtttcacaatttcacaccgatctatcattgttcgatatgaacgggaaggaagtaatgaggaaaacactgagtgtaaatgaccctttaagatatggtgggattactatataccagacagattggagtttttcggcactgcagatacttaaggatggtgaagggccattcaatttggcaatggcacctctaacgatcaatggagacaagaagcttttcgggacgtttctaccagtaggggacactgattcttctaatgtcaaagggatatcgatgcttgctcgggatctgcagtctattgtcctatatgataaacaagggaaatttgctggggtgcgacgacctaactcaaaacttcctataaagattgatggaacgaaaatcgtcatcgttgatgcaatcggaagtattggtcttgacttgaagaccgatccgggggtcccaccaatctatgctggatttggtgctctaatgctcacaacttgcatcacttatttatctcatgcacaaatatgggcgttgccagatgggacaacagtaatccttggaaggaaaaataaccgaagccaaggctgaatttccccatgagatgaatcgcttgcttgatcaagttcctgaaataatcgaatcatccctttcccagaaaccaaaatacattggttggctattttccaggttgccgaaaggcgaggatacaagctttcaagctcaccaccgtg

SEQ ID NO: 17024 - DNA, 619 bp, Gossypium hirsutum
  Clone ID: GOSHI-09MAY01-C71244_1
ccctctcttccgaaagggttcagttttcaatctgcgttttttttagtgttgttgtgagaaaaaaaaaactagttatggctgaagttttggggaagggaaatctgtttacgactggtacctatagtcagacgaggagtctagaaggtggaacttgtttggttcctaagaaaatttctgggttttctttagaaaggaacggtttttcttctttaaaggttaaatctcaggctttgagaagtggttttaatgggcaaagaatggtttttttggagaagaaaagtatgaacaggcgaaggttttgtcaagttcccatcaaagcacagatgcaaagtgggcttattggtcgagttcagaaatggtgggagaaagggcttcaaccaaatatgaaagaagttgcatctgcacaagacctagtagactctcttctgaatgctggtgataagcttgttgtggtagatttcttctcccctggttgtggtggttgcaaggctcttcatcccaagatttgccaatttgcagagatgaatccagatgtgcagtttcttcaggttaattacaaagagcacaagttaatgttcttttgcccttaatgtcatgtgcttcctttttttgcgttttt

SEQ ID NO: 17025 - DNA, 757 bp, Gossypium hirsutum
  Clone ID: GOSHI-09MAY01-C72864_1
ctcccaaaagaggtgggtatttggtctcgatttatcactacataatgacatcgatgtgtaccagttcaagttcttttctgaattagtaaagaacaaaggttggagaaaatgacactgtgattgttatgacgcatgaaccgcagtggcttcttgattggtattggaatgaaaattccggacagaatgtctctcaccttatatgtgattacttaaagggaaggtgcaaacttcgaattgctggagacatgcatcattatatgcgccattcatgtgttccatcagaagggccggttcatgttcaccatcttcttgtaaatgggtgtggaggggcctttttacaccccactcatgtgttcagtagttttaataaattttatgggaagacatacgagtgtaaagctgcatatccttcttttcatgattcaaacaggattgcattaggaaatatcttgaagttccggaagaagaactggcagtttgatttctttggtggcgtcatatactttatattggttttctctatgtttccacagtgtaagcttgatcacatattgcgaggtgattcattttctggtcatctagggagcttctttggcacagtatgggataattttgtatatgtgctggaacattcttttgtatcactgactggcgtggtgctattgctgatcatggcaattgcatttgttccatccaaagtatcacggaagaaacgtgcaataatcggaattattcatgtatctgcacatctagctgc

SEQ ID NO: 17026 - DNA, 492 bp, Gossypium hirsutum
  Clone ID: GOSHI-09MAY01-C72464_2
cgggagagaaaatcggatgcgggggggggggcgatttgtctgcggcttctataaggaagaaagctattgaagttggtgctagagttgatgctcttgaagcagcagcagcccatcatcatcatcatcatcatcatcatcatcatcatcatcatcatggtcatagctataatgggggtgactatggcgatgagttaaagcccagtaatggggggtttttaaatcgggttgatttgaacaagatgcccgacccggaagattcggatggggaatggttaaggggatttgattcaatcatggccctccaaatggtgatggattaaaatataattctttttggggggggggggggccctccctagggccggcggggaccggttaaaaaagggcgggaaaaaaaatgcggaggtggtagttgctaacatgcaccgtgggatgtagctaacgtgcgccgcagtggaggtaaggtaagttctatacatggggcggctgaag

SEQ ID NO: 17027 - DNA, 888 bp, Gossypium hirsutum
  Clone ID: GOSHI-09MAY01-C72464_1
aaaaaaaaaaaccattttcagacacaaacacacacagaggcacaacaatcaaaactgacatgcctcaaaaacccttcctttccctgtctttagttttatagttcttcgtgcccaattttaatacagccaaaaaaaaaaaaaaaaacaggcccagagttgaaaaactttggatttatcgaaaaaaaactatggaaaatggaacaggggttgttgctggttcaaggaagtcgtctacggagaggccgtacaaagggataaggatgaggaaatggggaaaatgggtggcggagataagggaacccaacaagcggtcgaggatttggttagggtcttattcaacacctgttgcggcggctagggcttacgacacggcggttttttacttgcgtgggccgtctgctaggttgaatttccctgaccttttgacgggagagaaaatcggatgcggcggcggcggcgatttgtctgcggcttctataaggaagaaagctattgaagttggtgctagagttgatgctcttgaagcagcagcagcccatcatcatcatcatcatcatggtcatagctataatggtggtgactatggcgatgagttaaagcccagtaatggtgggtttttaaatcgggttgatttgaacaagatgcccgacccggaagattcggatggtgaatggttaaggtgatttgattcaatcatggccctccaaattgttatgattaaaatataatttttttgtggggggggtccgtcgctagtggcggctgggagctgataaaaaagggagggaaaaaaaagtggaggtggtagttgctaacatgcaccgtgggatgtagctaacgtgcgccgtagtggaggtaaggtaagttctatacaagggacggctgaag

SEQ ID NO: 17028 - DNA, 635 bp, Gossypium hirsutum
  Clone ID: GOSHI-09MAY01-C72094_1
cggacgcgtgggaaaaaaaatgaggttggcttttactctctccccgttctctctatggccggccggggggacacccaaatcgccgtccatcgtaccagcgccatatccggcggccaacggtgcgcgagggtgggtattgagccccgtttcaaggcgtgttcgaaagccaaaacgctcccaatcctcgaaagcgcgaagagaacggcacgagaagccctccgacgaagcggtcacgggacgatttcgggccggtgcttagtcaaccgaggaaagaagggtttcttcttccatttccgtgtaaacttacagacgagccttgggatgaggcgcctcgggatgaggtacgggcgacgtggccgaggagagcataggtgcggcacacattagggtttaggcttctgtacaaaagtttaggtgcatgggcttgttatcttcttttttttttaattttgggtttgcaaaaatttggaattgtgttttggactctggactggtgatatatttgggcttttagtttgggctggttaatggtcttgggcccaagcaaatttgggctcttacaacccttactttcctttcgttagttaatcttcgcgaaacaaacactattttaagttttggaagttttttctgcc

SEQ ID NO: 17029 - DNA, 542 bp, Gossypium hirsutum
  Clone ID: GOSHI-09MAY01-C72074_1
ggagggagaaccttcagaagaacgcaactggtttctcttttctgttttccccctctctcgttctcgccaactaaatttcggaaatttccttattcttttgaaaacgattgcttcctttttttttctaaaatttgatctaagcgatgaacttttttactcgggaaattcccccattctatcataaatgatatgagtttcatcaaagacataatcgactctctaagctcaatcatctcaaccgatagcatgccatatgaatcaacgcaaaagcctagttcgtccacgtgtcagaacatggagggaatagctggaaaccaacgcaccgcgtataagctcaaaggatacttcgatttggccaaaggagagatcgacaaagcggttcgagcggaagaatggggtttagtagacgacgccctgattcactataaaaatgcacagcgaattctgatcgaggctagctccactcccacaccttcatatatcagctcttgtgaacaagaaaaggtgaaatcgtataggcaaaagatatcgaaatggcaagg

SEQ ID NO: 17030 - DNA, 575 bp, Gossypium hirsutum
  Clone ID: GOSHI-09MAY01-C73954_1
cccactctttcgcaacagaaaggattgaggcaacaggtcgtcgcctggcaaattattgcgagcgctttaatgttccgtttgagtacaaggctatagcagctcaaaactgggaaaatattcgaattgaggatatcaagattaatagcaatgaggtgcttgctgtaaattctctttttcggtttgagaatctgcttgatgagactgccgaagtggactgtccgaggaatgctgtgcttaaactgatcaggagaatgaaccctgatattttttgttcactccataattaatggatcatacaactctcccttctttgtttcaaggttcagggaggctttatttcatctttcatctagtattcgatatgtctgataatacatcacctcgtgatgagcctggaagattgatgtttgagagcgagctttatgggcaggaagcagtgaatgttgtagcatgtgagggtccagcaagggttcagaggccagaaacatacaagcaatggcagattcggatgacaagagcagggttcaagccacttccattgaaccaggaactaatgaccaaacttcggcataagt

SEQ ID NO: 17031 - DNA, 624 bp, Gossypium hirsutum
  Clone ID: GOSHI-09MAY01-C73424_1
cgactctgctgctcttctatctggtgctttaaatgtaccaatgctttttactggccactcacttggacgagataagttggaacaacttttaaagcagggccgcttatcaaaggatgaaataaatacaacatacaaaattatgcgtcgaatagaggctgaagaattatctcttgatgcctctgaaatagtcataaccagggctagacaggaaatagatgaccatgggcgtttatatgatggttttgatccagtcctggaacgtaacctgcgtgcaaggatcagacgtaatgtcagctgctatggaaaggttcatgcctcgcatggttataattcctcctggaatggaattccatcatattgttccacaagatggtgatatggttggtgaggtagaaggaattgaagaatatccatcttcccctgatccgcctatctggtccgagataatgcgcttcttcagcaatcctcggaagcctatgatacttgcccttgctagaccagatcccaaaaagaacatctctacgttggtcaaagctctcggtgaatgtcggccactacgggagcttgcaaaccttactctaatcatgggaacccgtggaggatttgtgcagccctctggctgtt

SEQ ID NO: 17032 - DNA, 613 bp, Gossypium hirsutum
  Clone ID: GOSHI-09MAY01-C73144_1
caaagttgactggtcttcacttgccttagacataaaatgttcctgatactttatctgccaaaaacttaggccctgccgaggaaattaacctgcagagccctaaaaaaccagtagatgcatctgaagacttggctacaagaccagtttcactgactccagaagttgcattaaatagtgatgctttaccagtccccgcaactcttggttgtgaagaagaccgggatatggaagctgtgtgaaagcagtgagggcaaaaagaggtaagacactagatgagggacagagacttcaatcagcaatagacttcaaaactgcgtcaaatagtgatgtcgatcatttcaaggacgccaatgggtctaccctgcagtttgattccactagggacggaactgtacaggtaggctcacaaatagaagacaaaaattgttccacattaaaagaagttgctgaaactggcggtgctgcatctactgccaatgggttaccttcttcaggatacagtatgccagctgaagtggaaaaagaagaaaaccatggagccataaatgaggaagagaataatacagttggttcaggtgatgagaatgcaacaagagtgggtgaggcttccata

SEQ ID NO: 17033 - DNA, 1148 bp, Gossypium hirsutum
  Clone ID: GOSHI-09MAY01-C73164_1
aattaattaagtaaataagattagttcatccaagtatcggggtcgactgaaaacaaaacccaatatataaaaccctaaaccctacctttcttctttcgctattcctctcttcaaaggtggcctctttgtagcattgagtaaaatgaatctcaacaacctcaaagttcctaagatgcctggaggcggagcacttcctgctttgcttaagattggagtcattggtgggcttggcctctatggagttgccaatagtctctacaatgttgacggagggcaccgagcaattgttttcaatcggattttgggcatcaaagataaggtttattcagaggggacgcaccttatgataccatggtttgagaggcctatcatctatgatgttcgtgcaagacctcatttagttgagagtacttccggtagtcgtgatctccagatggtcaagattgggcttcgtgttctcactcgccccaagtcaactcagttaactgaaatttatcgaacccttggtgagaactataatgagagggtcctgccttcaatcattcatgaaactttaaaagctgttgttgctcaatacaatgctagccaactcattactcagagagagaatgtcagtagggaaatccggaagattctgactgaaagggcagcttacttcaacattcaacttgatgatgtgtccatcacaagtctgacttttgggaaggaattcactgctgcaattgaggcgaaacaagtggctgcacaagaagccgagagagctaaatttattgtggaaaaagctgaacaggacaagaaaagtgctgtcatccgagcacagggagaagcctagagtgcccaactcattggtcaagcaattgctaagaacccagcattcattacattgaggaaaatcgaagcctctagagagattgcacagaccattgcaaattcagccaacaaagtcttcttgaacttaaggatctgttgctgaaccttctgagatggatcttgatcccactcagtaaatggttcctttatttacactcgttcataatccatgtgagaacgtaatacaactgaggcttgctgtcgctatggttcggaggattatggctttagacctgtcaactctatcgtgatcaaaaaagaaaaaactgaggggccgg

SEQ ID NO: 17034 - DNA, 545 bp, Gossypium hirsutum
  Clone ID: LIB3825-006-Q1-N6-E9
acctcaaataaacagccccatatggatcaactgatatgatgtttgaacactgatccttaaaacaataaatccttccaaaatccatgagacgacagcaaagccttcaagtttgtatttaacgttctcacaatggaattattgaaccgagtgtgaaataaaggtaaccattttactttgggtgggattcaagatccatctcctgaaggttcagcaacagatcctttgagttcaagaagactttgttggctgaatttgcaatggtctgtgcaatctctctagaggcttcaattttcctcaatgtaatgaatgctgggttctttgcaattgcttgaccaatgagttgggcactcttggcttctccctgtgctcggatgacagcacttttcttgtcctgttcagctttttccacaataaatttagctctctcagcttcttgtgcagccacctgtttcgcctcaattgcagcagtgaattccttcccaaaagtcagaattgtgatggacacatcatcaagttgaatgttgaagtaagctgccctttcagtc

SEQ ID NO: 17035 - DNA, 439 bp, Gossypium hirsutum
  unsure (1)..(439): unsure at all n locations
  Clone ID: LIB3493-047-P1-M1-E3
gcctctttgtagcattgagtaaaatgaatctcaacaacctcaaagttcctaagatncgtcgaggctgagcacttgctgctttgcttaacattggagtcattggtgggcttggcctctatggagttgccaatagtctctacaatgttgacggagggcaccgagcaatggttttcaatcggattttgggcatcaaagataaggtttattcagaggggacgcaccttatgatacccatggttgagaaggctatcatctatgatgttcgggccagaccttatttaattgagaagaccttctgtagtccggaacttcaaatgggccaaaatgggctttgaggtcttacttccccccaggcaacttaattaacttaaaattaatcaacccttggtgagaacctttatgaggagggtctggccttaattatttcttaaactttaaa

SEQ ID NO: 17036 - DNA, 283 bp, Gossypium hirsutum
  Clone ID: uC-gsronu33B086e06b1
cctcgtgtccgccggaatccctctattcctctcttcgaaggttgccattttgtagcattgagcaaaatgaatctcaacaacctcaaagttcctaagatgcctggaggtggagcaccttctgctttgcttatgattgttgttattgctggactatgtattattatttaccttatattctatcttttttttattttctttattctcatttattttctatctcttattttttttttcactatttctctacatttttttttctcttcatatttctcctttacttttt

SEQ ID NO: 17037 - DNA, 478 bp, Gossypium hirsutum
  Clone ID: GOSHI-09MAY01-C73124_1
ttcttcttttctaaaccctaaatcccctttgaaaatgccgattctcctttccctggcggcggccaacagatttagactggagagaacaccttttctcctttcaatctcctcttaacttcgattttaactaagcaagaggagatctacggcgtgctttcaaggtaaactcccgcttttcccttttttattcatgccttcgagtaaaaataaaaaataaacaaaagatcaagccgaaaaaaaagaacgcccccgagatttcagtcagaaaatcacctttaagaatcgggtggtttctattgcttctgcttttttatgcgcatttctggggttatgtggcgttcgagtgtgtaatatgcatgtgtatatttcattcgtaaagaagaaccatttacaatcgaaaataaaaggctttatagccgaataacacaaaaaaaacaatttttggtctcctattggctgctattctgctgctcttttc

SEQ ID NO: 17038 - DNA, 871 bp, Gossypium hirsutum
  Clone ID: GOSHI-09MAY01-C73354_1
cgttgttgtttattacgataaattgttgtctggggaaagtgggattggactcatcgaccggttcgatgcttccaagtttccgactcggttcgccggtcagatccgggggtttacttctgaagggtatattgatggaaagaacgataggcgactcgatgattgcttgaggtattgcattgttgctggtaagaaggcacttgaagatgctgatcttgggggtgataaattatctaagattgataaagagcgaaccggagtgcttgttggaactggtatgggcgggcttactgtgttctctgatggtgttcaaaatctaatagagaagggtcatagaaaaataacaccatttttcattccttatgctataacaaacatgggatctgccttgcttgcaattgagcttggtttcatgggtcccaattattcgatttctaccgcttgtgcaacgtccaattattgcttctatgctgctgccaatcacatccgtcgaggtgaggctgatttgatgattgctggtggaactgaagctgcaattattcctattgggttggggggttttgtcgcctgtagggcattgtctcaaagaaacgaagatccacaaactgcttcaaggccatgggacaaagagcgggatggctttgttatgggtgaaggtgctggagtattggtgatggaaagcttggaacatgcaatgaaaaagaagtgcacatttatcgccgagtacttaggtggagctgtttaatgtgatgcctatcatatgactgatccaaaagcccaacgtcccggggtgtctcattctccaaaaaaaccttgaaaaatgccgtgttttcccttaagaagttattaacttcattgccaacccaactccact

SEQ ID NO: 17039 - DNA, 897 bp, Gossypium hirsutum
  Clone ID: GOSHI-09MAY01-C73344_1
cagcaaaagacatctgcaggtgcaccatccactgcaaagaagcttctcctgtcactatgatgaatggaatggatgacctctcttttatttttggagctgcctcaatgtctggagaatttgaggaagttgctggggaaagtgaagaaagacgaagggccagattgggacgtcatcaaaggacccaggacagagtggcaagagcagttgctgatatgaatcagcgtgatcgtcaatcacagaatgagcaagaagagagatataggattgctgaagcgtgggattttgagataaaacgctgggctgcagggaaggaaggcaatatgcatgcactgctttcatcaatggaacgggtactttggcctgaatgtggttgggagccagtttcattgactgatttgattacctctggctcagtcaaaaaagtttatagaaaggccacattatgtgtccaccctgataaggttcagcagaaaggtgccactcttgaacagaaatatattgctgaaaaggttttcgatattctcaaggaagcttggaacaagttcaacaaggaagaactttcttaaaacctgtaaagtataaatagctcatttgaagaatcgagctatttttaattgggaatggttccttcttgaaacagaaggtgcaagaacagccgtagcagtgttatgggttcgcaatgatgacacggtccaaactcacgggaacttttatcaaggaatgaggcgatttggtaaggagtaaattttttttggtttcgtgtatgactgtaaattaatatacgttaatcaggaagcaagtagatttcgcaaagtttacggaacctgcaccatgccatatgtttcatttatttttgcttttatagacttctcttctctctctctctctctctatata

SEQ ID NO: 17040 - DNA, 476 bp, Gossypium hirsutum
  Clone ID: GOSHI-09MAY01-C68904_1
atttaatccttacgtttcttcttcttccgggaattaatcaaaatcatcactaccacaaccgacaccgatatgaggaaagaagcagtgccctccaccgcccctttcaccgccaccaccgttggcaagaagctattcctttgctttgaaactaaaccctttgttgttacattgcttgctcttactttagttatgcttctctggaacttccctccttactatcaaaacctctctactacccgtccctgttcagctgctcctctcgcctcagtagtcgctgccgcctccactagcttattctccaccaatgcatcactcccttatacagccacccccgcaggtgaaaagaagtactactcggatccctaagttaaacccagggaccccaacaagcgggtcttcgaggcttacggtaacgctgctgctttgtctgtgcagatgggtgcttacaggggcggtcctacaacattcgcggtggt

SEQ ID NO: 17041 - DNA, 540 bp, Gossypium hirsutum
  Clone ID: GOSHI-09MAY01-C68864_1
ctaatttccccagattctccctcctcccaacccaatttgaagagagtaaaggaagatcccgaaactggggggttcatgaatttggatgaaaaccttttgtacgaggttctgaaacacgttgatgccaggaccttagcaatggcctcctgcgttagtaagctgtggctcaaaactgctagagacgagcgtctttgggagttgatctgtaccaggcactgggctaacatcggttgtggaacccaacagcttagatccgtggttttacctctcggtggtttccgccgtctccactcccgttacctttggccgctttccaaaccccaagctgcttcacctttgccttgggctccgcccaagattataaattccaagccgcctgcacggtggggaaaagatgaggttcacctttgtttgtctctttttctctatacagtattatgagaagatgcatttcacaagcaggcgcagataattgtagattggggtttttgttttacgtttggattgggtcttattttcttatatttaccttgggatttt

SEQ ID NO: 17042 - DNA, 893 bp, Gossypium hirsutum
  Clone ID: GOSHI-09MAY01-C68504_1
cccgcgtccgatttgcaggccgggggggggcctgacaccaaattgattgcgattcttacttcatctttctattcttcacatttttaaggggtccagtttacagaagaaaagtacaaataggagggaagcaaccttctggcttgtttctagcaacgataactcgtgttctgatggggagtgggttttgatggtaaatgatttggccgtgagcaatattgtgtgtgataacaaacatatgctattgggtctttctgatggatctttgtatagtatctcttggaagggggagttttatgcagcttttggatttgattcctctcaacataatgacaatgaagttacttcattatcacattctctagctaattctattgcttctggagaggctgaaagagcttttgcctcaaattatagagtctccaagaaatctgctatagcacagttggagttttgtgtttcgatgaggctgctattagtcttatattctgatggacaactggtggcatgctctgtgagcaagaaaggtctaaagccagttgaatccattaaagctggaaaaagttttgggaaatggtgatgctgtatgtacttccattgctggagatcaactgatccttgctgttggtaccagaagaggtgttgttgagttatttgacttggctgattctgggtcactcattcgtactgtctccttatatgactggggatatacaatggaggacactggttctgtcagttgtatttcatggacacccgataattctgcttttgcagttgggtggaagttaagaggacttactgtttggtctgtttctggatgtcgtctaatgtcaaccatccgtcaaattggtttgagttctggcttttttcccgtagttaagccaaaccaggat

SEQ ID NO: 17043 - DNA, 697 bp, Gossypium hirsutum
  Clone ID: GOSHI-09MAY01-C68414_1
gcgttcgcaaaatcagcgggtagagagagaaagcagagcaagggaagggaaaaggaagggaaagggaagctttatataacccatctcctttctctctaaacgctcttcctttccatctttcctttctttgctttgcttgtttctattgagagatttccactaacaaaagctctagacttttgtcttcccacatttttctctcaccatgatttccttgcacagaagctgttttctgaataacactggcatttctgggtcatcaagccctttctcatacaagctgaagaagctgccaccagcttcagtcaaagtcacagctttaggccccaacagggatcgaaacagcagcgttttgattgaaaacaacaactaccattgaaagaaataaaagaagatggcacttcttctgttgctgatgtggaccccaatcctactgttaccggcgaagaccgcgacctctactatgacgccgccgccaccgacgatcaacttgtcaccccttggtctctctctgttgccagtgggtattcgttgttgcgagatcctcaccacaacaaaggactcgcctttaatgagaaagaaagagattcttattacttgcgtggtcttcttccccccacagttatttcccaagaacttcaggtgaagaacaagatgtatagtatccgccagtatcaagttcctctgcagaagtaca

SEQ ID NO: 17044 - DNA, 584 bp, Gossypium hirsutum
  Clone ID: GOSHI-09MAY01-C68714_1
atttgattttgattcgtagcttgtatcaggctgctagtaataggagaaggagatgagatgatcgacgggatgaaatctgctggatttggtgatcagcttggcaagaaagaatattatggatttctgaagattttgtgtgggattgaaagggttgagcatgcaatgagtgtttttaagaaaatgaaggctgatgggtgtaaacccggcattaagacttatgatttgttaatggggaaatggtgtgctcattatcggctagatcgagccaatgcactctacaatgaagctctgaaaaatggggtgccagtggaacctaggccgtatcgtgttgatccaagatatatgaagaaaactaaagctgtgaagaagaagaagaagagggagactttttctgagaaaatggctaggaagaggagacggctcaagcaaattcgactgagttttgtaaagaagagtaaaggaaggatgcgcagtgcctaaacttattttttttcttactgaaaatttaagtgaaatgacaatgtcaattggaatttgaggttctttctgatctttgggcatttgtctttttatgaattattgtt

SEQ ID NO: 17045 - DNA, 737 bp, Gossypium hirsutum
  Clone ID: GOSHI-09MAY01-C69824_1
cccacgcgtccgcagaagtcaaattttcgctctttttttcattacaaaaagtataatttttcggcctttgcttctcatctcaaacactcttcatttaaatttacatttcttttttaatttcttcgatttacataaagaataatagatccaaaaagcttcactccagttcgagttcttcacagggaatttgtcctttggagtgtacgccgaggagtttaaacgctccgaacacatggatcatagtgttgctgtcgaggagtctgggagtctgagaaacagcctcgaggttacaaagtcactttctgataaacatcttgatcttttaaggccgtctgctcggtactattcagtgttcaaagggcaagcaccggatgcagtggggaaaggcaagtatacgcttatcaaagacgaggaagacttccaaacggggattttcgacaaacctcttccatgttttggttgtgggattggatggttttccttccttgtaggatttatgtgtccattaatgtggtactatgctacgtttctctatttcggaaatcattaccgtaaagatccgagagagagagctggccttgccgcttctgctatcgctgcaatggcgtgttctgttgtagtgttgatcgtaataatttttgttttgttttcgacttaatgatgcggaaccgaagtgcgttcgtacatgtcgaaaatgcatggaaatcgaaaatatcaaatgcattaggtgcaatggg

SEQ ID NO: 17046 - DNA, 559 bp, Gossypium hirsutum
  Clone ID: GOSHI-09MAY01-C69574_1
tctatgcggattgttttccgcttattgttaataaggaagtaacggagtatcagtggaatggctatcttgagaaccccgaagagtggacggaagccgagtattatggcgacaccgtcgaactagaaagtatttcaccactagattttgtttcaattgtggatatcaggtataaggataaaacaatatgctcaaaagtgctgtggggtattcctaatgcaaatggatccaatagttggtttcacaactgcccgtttcggatcgatcttctcaattatgcagctagagatgatgatagtgaaagtgaggttaccctttcggtttctgatggcctgccacctattacttctatggaaaaggaaaggaaagatgggaagctatggaaggagctacgagacggccttcgccttagttggatcgttgtaaaccggaaagttaaacaagctgctaacccttgcaagctggagccctcttggcggacagagacattggccaacggacaaagatttcgtgataaggttcgggtctgtgcttcctgccaaggacatccttccatgtcaag

SEQ ID NO: 17047 - DNA, 423 bp, Gossypium hirsutum
  Clone ID: GOSHI-09MAY01-C69174_2
tgtttactgagaaaacggagaaagaaagagacaccgctgaatgcaattttagcaggttgcattgcaggattgtcgattttagctctggatgatcccaatcgaaggcgaacactttcattgtatcttttggctagagtagctcagtgtgcttataattctgcgaaatcgaaaaataagtttcatttatggggaagccattggaggcatggtgactctctactcttttctttagcttgggcccaggttatgtacgcctttgtgatgcgtcctggatgcctgccaaaatcatataaagattttattcagaagactggtcctgttgcagctcctgtatataaggctgtacgggagagttgttagagtgggccagtggatgttgaatctatatcagcctacttaaatagccgagggaagtctgatact

SEQ ID NO: 17048 - DNA, 665 bp, Gossypium hirsutum
  unsure (1)..(665): unsure at all n locations
  Clone ID: AI054582.1
ctattgtcttacaaataggtgtttgcttccgatgttaacaaatgattggtaatttctagtggttttgtatctacttttcactttctagggttaggttgatgcttttcttatcatctgtgtttgttttcacttctcccgttttattgagttgatttttataccaggttatgtatgcctttgtgatgcgtcctgaaagcttgccaaaagcatatcaagattttatccagaagactnggtcctgttgcagctcctgtatacanggctgtaagggaaaactgtnnnaggtgctccagtgaatgttgcatctatatcagcctacttatctagtcgagggaaggccatatgtngaattgaaaagagttcccatctattattccttgttctattattcatcccgacacaattcttgtctatcgcacaatgctaaggctgcatcagctacattcaggaaaaacgttcctctgtacttctctttacatttgtgcctttttgttgtctgcacctcaaaaagttttggatacncttctcgtacctgttgcttgctgtaaaggtnctgttcgattcacaacttcttgnctgcatttgttgaatttttcagcgttatatgcatgcacagaagatgcatcaaagaccacaacttgtatatgggtcnctgtgttatcacn

SEQ ID NO: 17049 - DNA, 1000 bp, Gossypium hirsutum
  Clone ID: GOSHI-09MAY01-C69234_1
tcgcggttttgtccgccggaatcctgccttcatggcttctcacgcgcatctcgatgatgatgacgattttggcggtgactttcctgggagtcatagtgcaaggcattcaggtaataaaagaagttttggtgatcttgaggacgacgaggacgatatttttggatcaaaaaaggcaatactaaagtagaagaaactgcccccggtgtagcaacagggatgattttgtcgctcccgggggccctcccgtggggtaaggacacccttgcaacgtgccaaacggagcttgaagctgcgaaatcagagattcagaaatggcattctgcatttcagaatgagcccttcataccagctggaatagctcctgaacccaagttagtaatgaattatcttcaaactctgaaatcctctgaggagacactgaaggaacaactagaaaaagccaagaaaaaagaagctgcctttattgtaacatttgcaaagcgtgagcaggacattgctgagttgaagtcagcagttcgtgacttgaaagttcaactgaagccaccatcaatgcaggccagaaggttactactagatcctgccattcatgaggaatttactcgtttaaagaatttggttgaggaaaaggactagtttgttaaagagctgcaggaaaatattgctgctgttagttttactcctcaaagcaaaatgggaaagatgctgatggcaaagtgtagaacattgcaagaggaaaatgaggagattggtactcaagcagaggaaggaaagatgcatgaattggccatgaaacttgccttacaaaaatctcaaaatgcagaacttagaagccagtttgaagcattatacaaacaaatggaagggctgacaaatgatgcggaaagatcaaatgaaatggtgtttatcttgcattagttaaattaatttttttctgtataataaattttctattatatttttttatatgtacttaatattaattcttttgattttttttttt

SEQ ID NO: 17050 - DNA, 838 bp, Gossypium hirsutum
  Clone ID: GOSHI-09MAY01-C69224_1
cccacgcgtccggtttcattttcaattttttcatgaaagaaaaagcggcactgacttaggaaatagagatggaaaggaggaggacaagaagaagaagtagctgctgttccttttcttaagaactctgtgacttaaccctaaaacaaatctaatccaagatcaaattgttttccttcctttttgaggcaaatatttcaaagacacagtagatctgtaaaagcttctcctttctattggtttctgacaacagagatggattcttaaactggttgattccaatgggtgctgtttgtaaacctaagttggattcttttcaaatgaaagcatgtgccgcggattagcgtggttaaattgcaggccacctccaacaacatctaatatttctttttaagatagctgagacatgaatcactcgactctagaaactgaagatacttttgcaagcttgcttgagcttgccgctaataatgatgtcgagggctttaaacgatccatccaacgtgacccttctggtgtagatgaagtagggctgtggtacggtcgtcccaagggctcaaagcagatggtttacattgaaagaacacctttgatggttgctgctacatatggtagcatcgatggtattaagctgatcctatcttcatccgatgctgatattaatcgtgtgtgcggccatgacaaaagcactgcactccactgtgctgcctctggtggggcttcaaatgctgttgatgttgtgaagctgttattagcatcttggtgccgatgccaatattgttgatgcatatgttcatttttctctatagttaggtttcttcttttttattcttaactcttt

SEQ ID NO: 17051 - DNA, 477 bp, Gossypium hirsutum
  Clone ID: GOSHI-09MAY01-C64904_1
gaaaaaaataacaataaagacgacaaagacaagcagttcaaattacacgaagaaaacggagaatcagagcttactattctacatatatgacccccacccctaccctcaccaacgctctcaattttactattttgcatttttattccttcttctctttcttaccaaagaaaaaaaattcttttttttttcttcggtaaagaaaagtattttatttaattttctggggtttttgattcttacccatttcaggttttccatcgacttgcaataaaggaccttgaggaagtaaccaagcatatgattttactcttttgatgcgtgaagatggattacaaagtgcaagtcggagtccaatcccaccttgaaatgggacccctagatgataggacaatggaagatctcgatgacgagtgtctctttccctctgaaatggatgctcaaaagacacaatctgttgatccaaatcaacatatttca

SEQ ID NO: 17052 - DNA, 729 bp, Gossypium hirsutum
  Clone ID: GOSHI-09MAY01-C64804_1
ctgagacctatcatcacttgaaggctgttattacagaaaaatacggtgcaaatgggtgtaatgttggtgaaaatggtggctttgttcctgacatatccagtgtaagagaaggattggatattgtccgagaagctattggcagaacagggtataatgacaaaataaagataggaattggtgttgcagctactgaattttgcataggtacaaagtatgatttagaattcaaatctccaaataaatctgggcaaaatttcaagtcaggagaggatatgattcagatgtacaaagacctttgcattgattacccaattgcttctattgaagatccctttgacaaggaagattgggaacacagcaaacgtttttgcggtcttggactatgtcaggtggtgggggatgacttattgatgtcaaatccaaagcgcatcgagagagcaatacatgaatctgcttgcaactctcttcttctcaagataaatcagatcggaaccgtgacagaggctgttgacgtggtaaaaatggcaaaggaagcccactggggagtggtggtatctcaaagatttggggaaactaatgattgtttcattgcggatttacactcgcacttggcgcaggtcaaatcaaacaggggctccttgccagaaagcgagtggctaagtacaaccagttgcttcgcatcgaacaagaactcagtgatcaagcagtgtatgctggcgaagactggat

SEQ ID NO: 17053 - DNA, 521 bp, Gossypium hirsutum
  Clone ID: GOSHI-09MAY01-C64574_1
tccgcctcaacccccgttgtaaccttcccccccctcctccgccgcagcattctcctctgtacagatatgaaattagcttagattaaaatttctttggggggttttggggttttcgtctttgtgatcagttcttttttttccttttaaattttccgatggcttctacgaggaaagatatggatcggatcaaaggtccatggagtccataagaagatgaagctttacaacgtttagtacaaacgtacggaccaacgcccccccactttgataagcaaatcaattccgggtcgatccgggaaatcatgtcggttacgatggtgtaaccagctttcaccggaagttgaacaccggccttttacccccgaagaagatgatactataatccgagcccatgctcgagtcggtaacaaatgggctaccatagctcgtttactcaacggccgtaccgataacgccctttaaaatcactggaactcgacgtttaagccaaagtgcttgtccatgaccgaaggttttaacga

SEQ ID NO: 17054 - DNA, 798 bp, Gossypium hirsutum
  Clone ID: GOSHI-09MAY01-C64494_1
tttcactcgtccgaaattttccctctcatttcctctctggcagcccgcttgagaaatcaaaattcaaaaccctagttagggtttttatcttcctcaatctcccgttgtcacactgcaaatcggccacaatgtcgatgtccaagagttccaaaatgcttcaattcatcaactaccgtatgcgggtcactatccaagacggccgtcagttggtgggtaagtttatggctttcgatcgtcacatgaatctcgtactcggtgactgcgaggagttccgtaagttgccgccggctaaagggaagaaaaaccccagtaccaatgaggagcgtgaagatcgtagaacgcttggtcttgttcttcttcgtggtgaagaggttatttctatgactgttgagggtcctcctcctcctgaagagtcgcgttcaaagtctgccgctgctaatgctgttcctggacctggtattggtcgtgctgctggtcgtgggattccgactggtcctcttgttcaagctcagcctggtcttgctgggcctgttcgtggtgttggtggaccggctcctgggatgatgcagccccacatttcacggccgccggttccgcaactgtcagctccgcctatgacttaccctgctgctagtggagcacctcctgttatccgtgcacctggacaaatgccacctggtggttaccctggtcaaccacaggctcctcagatgcaacgtggtcctccttcacaggtaccaccacctgcttttggagtaaggccacctcaacaattccctgtcccaccaccacaatatg

SEQ ID NO: 17055 - DNA, 618 bp, Gossypium hirsutum
  unsure (1)..(618): unsure at all n locations
  Clone ID: LIB3493-043-P1-M1-E6
gagaaatcaaaattcaaaaccctagttagggtttttatcttcctcaatctcccgggggagactgcaaatcgggcacaatgtcgatgtccaagagttccaaaatgcttcaattcataactaccgtatgcggggtcacttattccaagaacgggccgtcagttggtgggtaaggtttatggcttttcgattcgtcacaatgaattctcgtacttcggtggactgcggagggagttcccgtaagtttgcccgccggctaaaaggggaagaaaaaacccccagtacccaatgaggganngcgtgaagaatcgtagaaacgctttggtctttgttctttcttcgtgggggaagaggggtatnttctattgacttgttgaggggtccttcctttcttctggaagagtcgccgttcaaaagtctgcccgctggctaatgcntgttccntggacctgggtattgggtcgtgcttgctgggtcgtgggattccgactggtcctcttgttcaagctcaggctggtcttgctgggctgttcgtggtgtggtggaccgctctggatatcagcccagattcacggcgcggttcgactgtagtcgcttactacctgtgtaggagactctgta

SEQ ID NO: 17056 - DNA, 946 bp, Gossypium hirsutum
  Clone ID: GOSHI-09MAY01-C64174_1
cggacgcgtgggttcagattctgggttatggccatagctctgccatctacagtgtggcgcgcagcaaagtttcagccgcaacgtccgcttcttcagcgtcggcgccccttattagtccaatcctttaggcggagcgacttcgacaccttcactcgccgcatggcttctggtgaggccttgaaggaggcctggcgaaccgccaacgacggcttcgagcaattcgtcttcgaagctaaaaagaccgctgaacgcttagaccgccagtattccgtttcccgccggctctcctccgccgcccaatccgctgcggaccgtgctcgtgagattgaccgggagttcgagattggactccgttggcggactttttctatggattttagtagaaattggcctaggtacaggaagcagctgaatgatttcttggatactccattgggaagaagttttgctacaattttcttcctttggtttgcattatctggttggatgtttcgatgcttaatatttgccacatggatactaccatttgctggacctcttctcattgggactgttgccaataatcttgttattaagggtgcttgtccagcttgtaagagacagtttgttggctataaaaaccaaatagtacgttgtgtgagctgtggaaacattgtatggcaacccgaaggagacttctttagcagagatagcaggggcaccaattcaagaaagtcagagcctgacattatcgacgttgaatttgaggagaaatgacaagatgttctcatatcatacaagtgatctatcactttttatggagtcaaacgagactgaaaggcaattcttgctcagttctttcgaggtttagtttctttgaaaatctcatgttgccattggtacctgtctgtagtgtatagcatgattctcagttttagtctttttatatacaaggaaacttaaagga

SEQ ID NO: 17057 - DNA, 671 bp, Gossypium hirsutum
  Clone ID: GOSHI-09MAY01-C64104_1
aactctttcaacaataatatccccacaacctcgccaaatctttcccattttccgtttccttcccttctcttagtaacagtcgtttctccgccggatcacaaaaacaaatatatatagcaaaagaccattgatatatatatatatacacggataatcatttgttttgtttgttaaacggctttttaacgggtgttacgtttatagagaagaacagtttgtcaatcacatagatcatgggttttctagacaaactttgggacgaaacgcttgccgggcctatgccagaaaccggcctcggaaaactacgaaagtatggttcattttcagccgcatcatcatcgcctgctaccgctgatactagtcaggttatgataactaggagcattacgattcttaagagcaactctggtttgaaaaacctatctatggacccgggttcagctccgggttctccttctgggtctagcaatcctgggacacctttgtcaccggggacaccgactggggattttaggagattcacgagaaggaaatcgccggctgaagcacttcaatcggaagaacctagaagtccgactgtttacgattggttctccctctctctttttttactacttatgaaattgcaaaaataaaaattgtttgtaactgtttaaccaaaatatctttgg

SEQ ID NO: 17058 - DNA, 474 bp, Gossypium hirsutum
  Clone ID: GOSHI-09MAY01-C64384_2
ggtaaatgctctataagctattcattgaagccaatcattcatagggaaaagctgtgtgggagtttgtctctcatctcccaaaatttgctgccatgaacctaatgattctcttccttttttcttctctgttcattaaggcattctctttgaaacctgagccagcaaaaaataatgcccagatcactgtcatgggccttgtttattgtgacatttgctccaacaacagcttctccagacacagctacttcttaccaggtgcagaagttcaaatagcctgcaacttcagggcatttgttccaaaaacaagagaacaagtatcattctcagtcaacagaactacagataaacatggagtttacaggttggaaataccatcagttgatgggatcgcatgtgcagaggcagccattgcatcatcttgcccaggcaagcttagttgggacctcatctacttcatgcaacattctggtcaca

SEQ ID NO: 17059 - DNA, 721 bp, Gossypium hirsutum
  Clone ID: GOSHI-09MAY01-C64384_1
ggtaaatgctctataagctattcattgaagccaaccattcatagggaaaagctatgtggaagtttgtctctcatctcccaaaatctgctgccatgaacctaatgattctcttccttttttcttctctgttcattaaggcattctctttgaaacctgagccagcaaaaaataatgcccagatcactgtcatgggccttgtttattgtgacatttgctccaacaacagcttctccagacacagctacttcttaccaggtgaaatttctcaacaacgacctatgtgttttttccaagttgtgctgttttgttctttgggtattatttactaagttaaaagaaagcatggttctaattatcgggatattgtgtaaaccaggtgcagaagttcaaatagcctgcaacttcagggcattttgttccaaaaacaagagaacaagtatcattctcaagtcacagaacttcgattaactgggagtttacaggttggaaataccatcaggtgatgggatccgctgtgcagatgcagccattgcatcatcttgccagcagcttaattggggacctctttacttcatgcaacatttctgtcacagaagactactgatcagattgcttcaaatccgacaccccatctctgcattacagctaactgctttagatcagacctcaaaagaatgttgcttggtggagtaaacaccctcttacacatcctggaattttt

SEQ ID NO: 17060 - DNA, 728 bp, Gossypium hirsutum
  Clone ID: GOSHI-09MAY01-C64334_1
aaataaacaagttgccatcttgtcctgcacccctactgctttcccactcccccaaaaaaggcaaggggagcgtaaccaaacctcccccaacaatgttggtctcaacctcaggcctgctcctccccgtgtgcttgttgtttcttctaatatttggcactgtcaccgctactgaccacatcgtgggtgctaacaaaggctggaaccctggcatcaactacaccctttgggccaacaatcagaccttctacgtcggagacctcatctcgtttaggtaccaaaagacacaatacaatgtgtttgaagtgaaccaaactgggtatgactcctgcacaacggaaggagcagtagggaactggagcagcggcaaggattttatacctctcaacgagtccaagagatactacttcatttgtggcaatgggcagtgcttcaagcggcatgaaggtttcagtcgttgttcatcccctgccttcgcccactgcctcacccgctgcctcccattcatcaaacagctccaacgccgctggactggtaattttgccaaggggtataactggtttcagaactttggttgttgccttagcttctatttggtttggatctgggtgggtttagcaggactttcagttggctgcttaagcttagggaaccgtatttttttaaaaatgatttgtgacacttatttttcttgtttttgtttttagtgaaattcgggtggtgtttcgttg

SEQ ID NO: 17061 - DNA, 525 bp, Gossypium hirsutum
  Clone ID: GOSHI-09MAY01-C65894_1
attgaagaaaaaaaaatggcgaaagctccaaggttgaagataacagtgataaacttgctatgtttggtggtgctctgcggggcaactgaatcgccacagtacgaggtggtacacgctgaatccgatttcgaaatcagacactaccgggacgccacgtggatgtctgcaaccgttaacgaactttccttccaaaaagccaccttatttgggtttcacagattattccagtttatacaaggtgcgaatctgaattattctcgggtagccatgacagcgccggtggtgacgagcctagtcccgggagctgggccacttcactcattagcctatgttgtccgattttacttgcctgccaagttccaggacagtccaccaaccccacttccggagctaaacctgaaaccttacgcatgggattctcactatgttgctgtgagaaagttctcaggatttgctacggatgatattgtggtcaaacaggctgcgaagctggctactagtctgagcttgtctccatgggctaac

SEQ ID NO: 17062 - DNA, 534 bp, Gossypium hirsutum
  Clone ID: GOSHI-09MAY01-C65864_1
aaatggggtctctttttactcctctgctccttccactcttttgtctttgccttactctaatctcacccacacattccacggattgttcatcgctcaaactctccggtggcaaaaaacaatactccaattgcacccacctccccaccttgaacgcaaccctccatttcacctacaatgccaccaactcttccctttccatagccttctcagcacctccggctaaagccggcggttggattgcttgggccgtcaaccccacggggacaggcatggcaggttcacaagccctcctggctttcaaaaacaatggatctatggttgttaaaacctacaacataagctcctacagttccattgtggaagggaagctttctttcgatgtttgggacttggcagccggagccggcagccatgggaagatggttttatatggctcattgaaagtggaggaaagtgcggactaagttgaaccaggtgtggcaagttgggccagggatcgctggtggtcacccgatgaagcatgagtttgataaa

SEQ ID NO: 17063 - DNA, 658 bp, Gossypium hirsutum
  Clone ID: GOSHI-09MAY01-C65754_1
ccgaacctaccaagcttcccgattctgatcctccgaggaacgaggacgagtgggaggaagagtatgttgagaaaggtaacggtacccccgccgctgcccaaggagctgctgagccagcgactgcggatgtggcggagggttttgatgatagagttgcggatttgaagaggtgtttggtggattcggtttacgggacggagttggggtttcgagcggggcaggagttaagggctgagattttggagttagtcaatcagttggaagcctgttaacccgacccgagctccgattgaggccactcagcttcttgatggcaactggattttgctgtatacggcattttcagaaactgttgccactactggcggctggtgcaacccccttactgaaagttaaaagcataagccaatcaattgatacagcgaggtcagtctaattgtgaactccaccacattgtctggccctttttgctgatctctcctttagtgcatcagctaccttcgaggttagatctccttcaagaatacagttgaattaagaaggggatatgcaacctcagaaataaacaaatgtggatcttctgcagattagatggcttggtcaaagatagtttgtcgctgtgcagcatctcttgccccctgcgattatcgcaatatta

SEQ ID NO: 17064 - DNA, 757 bp, Gossypium hirsutum
  Clone ID: GOSHI-09MAY01-C65654_1
gtaagattggaacttataccgttgttttgaaggaggcttataaaaggggtttgctgattgagaataatccattgatgaacattaggaatcggtatcttcatcttatgcacactgttaaagaacatggtaaagacatttctatgtctacaggaaccaatcaagaaaagaaagcagcgagtaatgcatccaaaaaggaagctggtgatgatgatagtgaagaggagaataatggactttcagttactttttctggttcagaaactgagaatggtgatagcggccggcgtggttctcgtgaagctgttgcagttagtagaagaacaacaccaagaagttagaggaagaatggggacttgaaaactcatttgggtgatggtgaaggtgaaagggcaatgggaagaaggcatagtaggactaaacccaaagttccacaaccactaaatgcttctactaatgtccataggagatctcaacagagattttcaagttgacatcagagaagcagtagataatttgccaaaataacttttgggcctagtttgccacttgctctgattcttttgatatgaattttgacaagaaaaagtggggcaaaatgaccagtttgagccacaaatgaaggccttttgatggaattcaaatgagtaggctgagaatttgttgagtttatctttgtattatcaaatttactagaagcatattgcctgaaactcaatcaattttataatattatgttgccttttaagtccttatcctc

SEQ ID NO: 17065 - DNA, 478 bp, Gossypium hirsutum
  Clone ID: LIB3828-010-Q1-N6-A7
ataacagtccattaatatatatatacatatatatatatgtatatatatatatatttttttacaaactaaatcggtacatggcccaaaccaattacataacctagacttaaaattaaaaccaagtcacaagcctaataacttagcccaataccctaaatgacccaaagacccaaatacaggctcgataggctcagaaaattacaaccccagaatcctagggttctttttctcctgtgccgcagccttcaccagtggcccccagtgccgtacactcctcctggcgccatgcccacaccccatacgccagcacacaccctcgtacacacgccacgcacttgtacctgcaaagagatagacaaaacgacaacaacaacaatggccaatacgaaaaaagaacgaaattgtattcttttatttcttttttgaacattcggctataaagccgatgatttcatattgtaagggggttccttttttc

SEQ ID NO: 17066 - DNA, 404 bp, Gossypium hirsutum
  unsure (1)..(404): unsure at all n locations
  Clone ID: LIB3272-021-P1-K1-D7
aaaaaaccttagacgctctttcaatccttcgccgaccaacagccttttgaaggtctattcctctgcccctctttttgactcatatgagagtcaatcaaggcctcatcgagtcgaaagattcgtgagtcttgctcgtagaccccgaatcgtcacttggtctcaatcgtggtgagacaagcgtggattcgaaggcatcaaacgcaggtacaagtgcgtggcgtgtgtacgagggtgtgtgctggcgtatggggtgtgggaatgcgccaggaggagtgtacggcactgggggctactggtgaaggctgcggcgcatgagaaaaagaaccctaggattctggggttgtaattttctgagcctatcgagcctgtatttgngtctttgggtcatttagggtattgggcta

SEQ ID NO: 17067 - DNA, 578 bp, Gossypium hirsutum
  Clone ID: GOSHI-09MAY01-C65084_1
gcgttcttatattctgggttttcttctctgaaggaggtttggggataatgtcatggtgtcagtagcaacacaacaagcttcaaacccggttcacacggttgctaatagtttgagtcttcctggcttacaattgatcacaaaaaaactagaattgcctgtaaagattgtttttccaaggaatttgctcgggggggcgtcccctggtgggaattcagctgacttcatgatgcttggtcttggtgatatggccattcctgccatgcttctagcattagtcctctgttttgatcatcgaaagactagggaaactgtaaatcttttagatttacattcatcgaaggggcacaaatacatatggtatgcccttcctggctatgctgttggattagtaactgcgcttgcagccggcattttgactcactcgccccaacctgctctttttatctggtaccttcaactctgggacctgtgatttttatctctggttaaggaaggatctagttgaattatgggaaaggaacaatgccaaaatctcaatgacatgggctagccacataggaagtttgagccattttttt

SEQ ID NO: 17068 - DNA, 919 bp, Gossypium hirsutum
  Clone ID: GOSHI-09MAY01-C65314_1
ggcaaatccgatagaaatatggcgagaactgctctcttccacttgcttcgatcccaatccaagcaactcatttccagaaacatccattcaggttatcgttttaggtttgcaacactgtctggcacccaatatgcgaagccgaacctcaactatgcaacgagcattttcagtgtccaaaaaagatgggcttctcaagctaagacatctgaggatgacgacaaaatcagcatcggtcctcgtaaaagcaaagaagacgacgaagatgagaaggatgccggggttgtttactacggtccgatttcttctacaatcaagaaagtaaagatgctttcactttcgacctgctgcctctcggtatcgttaggccctgtcattacattcatgacttctcctgatatgaatgtgattgtgaaaggtgcggtagcatcctctgtgatattctttagtgctacaacaactgccgcacttcactggttcgtgagcccttacatccacaaaatccggtggcagcctggttcagacagcttcgaggtggagatgatgtcttggttagcaacatatattccacgaaccattaagtttgcagacatccgtccagccgagaccaacaggccattcgtgacatttaaggccaatgggaacttctactttgtagatgctgagcattgccataacaaggctttgttggcaagactcacaccccagaaagcaactcatgagtcagctcttaagaacttatgatttgatcatttgaaaggtcgggtatcgggtctcgagagctcgtgaaagcttcattgttaagacgaatggtctatagggtaggattatgataagtgcttgaataataagcctgttgattacagagaaacacagactttcatggattttaaatggaatttcattttactgctgcttcgcc

SEQ ID NO: 17069 - DNA, 516 bp, Gossypium hirsutum
  unsure (1)..(516): unsure at all n locations
  Clone ID: uC-gsronu33B109d02b1
ccggaccgttttcccgggtcttcctaccccccggatatacccccgaaanacggcgagaactggngggattttataaaaaattttggggtggaaacaactcatttccagaaacatccattcaggttatcgttttaggtttgcaacactgtctggcacccaatatgcgaagccgaaccttaactatgcaacgagcattttcagtgtccaaaaaagatgggcttctcaagctaagacatctgaggatgacgacaaaatcagcatcggtcctcgtaaaagcaaagaagacgaccaagatgagaaggatgccggggttgttttactacggtccgatttcttctacaatcaagaaagtaaagatgctttcacttttcgacctgctgcctctcggtatcgttaggccctgtcattacattcatgacttttcctgatatgaatgtgattgtgaaaggtgcggttgcatcctctgtgatattctttagtgctacaacaactgccgcactttactggttcgtgagc

SEQ ID NO: 17070 - DNA, 766 bp, Gossypium hirsutum
  Clone ID: GOSHI-09MAY01-C65244_1
ttcttttcaatattgatgatgcagctggggggctgtagatcaagaagatacaaatgtcgccccacaccaaagagttccgttacttggatagggcagctctcaaggacccacctcttaatgatcaggcaaataaaaggaacttggctacattaacagatgctgaagaagtgaaactggaactaatgatgttacctatatgggcaaccactgttatattccggaccgtatatgcccaaatgacaacattttcagtatcacaagccacaaccatgaaccgtcacatagggaaatctcagatcccaccagcgtcactcactgtattcttcgtcggaagcattctcttgacagttccgatttacgacaggctcatcgctccaatcgctagaaaattacttaaaaacccacaagggttaacccctttacaaaggatcgctgttggtttagttttatccattatagcaatggtagcagcagcattgaccgaaataaaacgattgagagcagcaactacgaatggtcttgcgaataacccaaccgctcaaatcccattaagtgtcttttggttggtccctcagtttttgcttgtaggcgctggtgaagcctttacatacataggacaacttgattttttcttaagggagtgcccaaaagggatgaaaacaatgagtacgggtttatttttaagtacactttcattagggtttttcgtttgttcattattagttactatagttcataaggtgactggaaacaagcatccatggct

SEQ ID NO: 17071 - DNA, 614 bp, Gossypium hirsutum
  Clone ID: GOSHI-09MAY01-C66504_1
acgcgtccggaaagatcctctccactaggaactagttatagtcttctctcttccaccagattctttttggatcatggcgatatcggatgtggtggttgggaatttgctgatcatatacgtggcggttatagcggggataaaggcgtacggtttagtgtgtgggaggaacttcggtggttggtttgtgttgatggcgtcgactacggtggtgggtctgatcttggtcggggctttgacgtgggacgtcagtcgtaaagccacgcaagcaatttccggtgaggatcaagatgctggttcccttcaagttcacgagatgtgtaaaggtggtatttgctggcacggcgtggctgtccggttccctgcttctcaactccggttcagcctccctcaacaaattccagacggctctttgtaaaaagaagaagaaaactttgggaatttcaggtttaaagctgtaagatataagattagctttgggtttgggtttggccgaaaacaaaaccccatgaggtcttttccttttctccttaattttgattgcgaggaataaaagagcgtgtataaggttatatatatagttgaaaatgaaaatgaagatgctttaatttgtgaat

SEQ ID NO: 17072 - DNA, 951 bp, Gossypium hirsutum
  Clone ID: GOSHI-09MAY01-C66474_1
tcctagaattccctcagaaaagccatggctccacagcgtttattgctccttttcatcttcctcttttatttctcttctttcccatctactgcccgttttatcaccggtccttcatcccccaccgatctcgtttccgatggaatctccaccgtcaaaaacccacctttcctctcactcaagcccctgttttcagcggaggaatcgtgtgaacaaacctatgggttcttaccctgtaccaccacagttctcggcaacttgtttttgatcattgtttatggataccttatgtttttagctgctacttacttgtctaatggaagtgagcttttgcttgagatcctcggtcctggtattgtcggaggattgttcttgcctattcttggagcacttcccgatgcaatgcttattcttgtatctggactttctggaacagcagaaacagctcaagatcaggtctccgtaggaatggggttgctagcagggtcaactgtcatgcttctcactgtgatatggggttcctgtgttgttgttggccggtgtgatattcgcgactcagttgcggttgatggaactattactaaaggatttcacctaacagagactggtgtgagtaccgatatttggacttgctatgctgcaagtataatggctatatcaattatcccctttgttattgttcaactaccccaagttctcaattcaacttcaggaagacacctagcagttttgattgcactgatcatatcagtatcaatgttggtttcttattgtgtttatcaggtatttcagccatggatccagagaagacgactagcttttgcgaagcacaaacatgttatatcggggatcttaagacacttgaaaaagcaagcttttggaaagcttcttaccgaggatggtgaacctaacacagagatcataagaaaagtgttcgagacaatcgatgagaac

SEQ ID NO: 17073 - DNA, 612 bp, Gossypium hirsutum
  Clone ID: GOSHI-09MAY01-C66434_1
atacctttatttgttttctctttctttttcaacacttctttgttttcaactgttccaatctgtatttcagcttccacagaataaaaatttccctttctgtttccactgcctatatccacactgttttcatgtttgctgagaaaatttggaatgtataagagctgagagggagaaaagctagtggagtttgctaaacaagtttagatagagatatatgatgtgaatcgggaagcaaagatgaaatctttcagtggattagggattggtttaagtttggtatttggttgtcttgtattggctcttgttgctgagctttactatttgctttggtggaagaagagaattgctaacgctgaagttgaatacgattacaccaactatgcaaaggatcttgttcaactcttgtgctggaagaaatcggcttctttacatgcaaccacaatccccaacagcaaccaagatagcaatggtgtggagccagacctggaactagggtcaaccaagggtctgatgctaaagggttttggagaagagggtgttgaatcagagctgatgaggctccacaatctggttggtccacctaaattcctcttcacaatcaaagaagaaact

SEQ ID NO: 17074 - DNA, 379 bp, Gossypium hirsutum
  Clone ID: LIB3272-032-P1-K1-C6
cacacttcaaagttaaataagctattgtacaaagaaattgcccataccccgcctcccaatcatatatacctttatttgctttctctttctttttcaacacttcttctttgttttcaactgttccaatctgtatttcagcttccacagaataaaaaatttccctttctgtttccactgcctatatccacactgttttcatgtttgctgagaaaatttggaatgtataaggtaaattttcccagcttgtgaactgcagtaaaagtcaaagctctctgggtctttttggttctttttttttcctagctacttcaatattccattgttgtttcctttagaatatgtttgtgtagctcacatggaagttgtagcatgatgggaa

SEQ ID NO: 17075 - DNA, 445 bp, Gossypium hirsutum
  Clone ID: GOSHI-09MAY01-C66034_1
acgcttctttttcgttttttaatttgctttctgtaatggctaaatcttatttacctgcaaactttgggtttatggcttcaagaatgctgctttttgggctgtttatggtatccctatataccacaagtgctcaaataggtgtttgctatggacagctcggcaacaacttaccatcaaggcccgaagttatatccatcttcaaccagagaaacattagaagaatgcgactctacgcgccagaccaacctagtctccaagctctcagaggaaccaacattgagctgatgctcggcgttccgaattccgatcttcaacgtatcgcggctagccaagccaatgcaaacatctgggtccagaacaatgttagaaactttggcaacgttaagttccgctacattgctgttggaaacgtagtccaaccttccgatccggcggctcaatttct

SEQ ID NO: 17076 - DNA, 403 bp, Gossypium hirsutum
  Clone ID: GOSHI-09MAY01-C66384_1
gtttcgtgcttcagaaaggaagtgtctcttcttgtttagaaaaaaaaaacccccaagaacgaggaatcaatcaaaaagagaagagaggtgtcacggtcgtaacgaatgcacatgtgcttagttttcttgaggcttttattcgctctttgcttctcccctttgaatctgcttctacttttagaaaatttcctgaattctcatcttctagccccgtcacagactaatacaaagaaaagacacccaagagcagaaaaggagggacaatacacctatgcggtcttgctttagtttcttgctactatgaggctggctttgtgaagattggctttgtttcctcgggggggtctttttcttgcatctttttttcccttttttgttttccgtcttgggggtgctctgagtc

SEQ ID NO: 17077 - DNA, 1401 bp, Gossypium hirsutum
  Clone ID: GOSHI-09MAY01-C67924_1
gttcgttcagtgatagaggcgaaattcaaagcacctgaaattttggatttgattttacgttgttctcgcttgctgattgtaatgcgggtttggattaggtgcgcgcggctaaaattttccctgttgttgaaattgtggatctgaaaatcagatcattggcggcggatccttgattcttcgtgtggaagcgtagatgtcggggccactcgatcgattcgctagaccttgctttgaggggttttcaggtagtgatgagagaagagagaggaaatctgattttgagaactccgaggatgaaagacgcactaaaattggatcattgaagaagaaagcaataaatgcatctactagatttaagcattctctcaaaaagaagagcagtagaaggaaaagtgatggccgtgttagctctgtatccattgaagatgttcgtgatgttgaggagctacaggctgttgatcaatttcgacaagcactgattatggaagaactgcttcctgaaaaacatgatgactatcacatgatgttgaggttcctgaaagcaaggaagtttgatatagagaaggctaagcacatgtgggcagatatgctccaatggaggaaagagtttggtgccgacactatcacggaggattttgagttcaatgagttgaatgaggttctaaggtattaccctcatggtcatcatggtgttgataaggagggaagacctgtgtatattgaaaggttgggaaaagttgatcccaacaaactcatgcaagttactactatggaccgatatgtaaaataccatgtccgtgagtttgagaaggccttcactgtgaagtttcctgcatgtacaattgctgcaaaaagacacatagattcaagcacaacaattttagatgtgcttggtgtgggctttaagaattttaccaagtctgcaagggacctgattatgcgactacaaaagattggcggtgacaattaccctgagactcttcatcaaatgtttatcatcaatgctggacctgggtttaggctgctgtggaacactgtgaaaacatttctagaccccaagacaacttccaagatacatgttattggaaacaagtaccagaacaaattgcttgagattattgatgccagcgagttgccagaatttctgggtggtagctgtacatgtgcagatcaggaagttgccttcgctccgataaggggccttggaaaaatccagaaatcttgaagatggttcttaacggcgaggcacgatgtgctaaacaagttgtaaaagttttaagtagtgaagggaaagttattgcttatgctaagccacagtttccaatgttaagaggtagtgatacttctactgcagaatctggatctgaagctgaagatattgcatcaccaaaagcaatgaac

SEQ ID NO: 17078 - DNA, 399 bp, Gossypium hirsutum
  Clone ID: LIB3272-051-P1-K1-D12
aaaaacaaaattaatatattttccgttacagtctcgaaaatcggtcaaaattctcgtcagaagcatttatgaccgtcggatcaagctcgtgatctgtgacgacgacattattttttctactggttttttttcaaggtgcgcgcggctaaaattttccctgttgttgaaattgtggatctgaaaatcagatcattggcggcggatccttgattcttcgtgtggaagcgtagatgtcggggccactcgatcgattcgctagaccttgctttgaggggttttcaggtagtgatgagagaagagagaggaaatctgattttgagaactccgaggatgaaagacgcactaaaattggatcattgaagaagaaagcaataaatgcatctactagatttaagcatt

SEQ ID NO: 17079 - DNA, 642 bp, Gossypium hirsutum
  Clone ID: LIB3543-061-Q6-K6-G8
ccccgcgtccgcacacgcccctgcgacacctgcgctgaaaacagctacttctcaccagatctcttacatccaacggccttgatatctccacgtctccgtaccccaatccattattttaatctagctctttatttctcctccacatcctccgtcctttcctccactctttttcttacacgaagagaaagaatcaaccggcgccgctgcgattgatcgcctctttcgccgccgccgtacgccgttaatctagaagatttctactttggagttggaacatttaaattttaaagtgaaattaccgttacatagtttccaaacaaaaacaaaaggaggagattttggtttaaaatcagacggtcgagatgccgagcacgattcaaaaagcgatcggggccgttaaggaccaaaccagcataggactagcgaaggtggctagcaacatggcgccggacctcgaggtggcgattgtgaaagcgacgagccacgacgacgaccctgccgacgagaagtacatacgggagatcctaaatttgacctcgtactcgcgcgggtacgttcacgcgtgcgtgtcggcggtgtccaaacggctcgggaagactcgtaactggatcgtggcgctcaaagcactggtgcttgttcata

SEQ ID NO: 17080 - DNA, 382 bp, Gossypium hirsutum
  Clone ID: LIB3272-050-P1-K1-F11
atcacacgcccctccgacacctccgctaaaaacagctacttctcaccagatctcttacatccaacggccttgatatctccacgtctccgtaccccaatccattatttgaatctagctctttatttcttctccacatcctccgtcctttcctccactctttttcttacacgaagagaaagaatcaaccggcgccgctgcgattgaccgcctctttcgccgccgccgtacgccgttaatcttgaaggaggagattttggtttgaaatcagacggtcgagatgccgagcacgattcaaaaagcgatcggggccgttaaggaccaaaccagcataggactagcgaaggtggctagcaacatggcgccggacctcgaggtggcgatt

SEQ ID NO: 17081 - DNA, 563 bp, Gossypium hirsutum
  Clone ID: GOSHI-09MAY01-C67494_1
cttacgtttccgctcatgtccttcatctctgccgttccagaatctcaacgttctggtatatatccgcgctcaactttccttttctctgtcatatatttctgagttttggtttgattttttttgtatgaaactttcgatcagctttgttccaatcactgttgttcgaagcttgtggtagaacagtgaatccagtgaacggagctgtcggacttttatggacagggaactggcatgtttgccaagcggcagttgaaactgtcttacgagaaggaactgtacgggcggtgcctgaacttatggctccctcaccagcatccggtgaaaaatcggaagctactaagattgcgtgcatgttgaagttgcaagaaacagaaacaaaatttaattcaacctgtcggttttccacttcaagatctaaggtttcacctaagcgcataaaaggtgaagaattcagtaaatttcagccgtccgatctagatctttgcttgactccaagctccacaggcaaccggcttccggataacagacgaccggggactccgtcattgaactcggaggaatct

SEQ ID NO: 17082 - DNA, 400 bp, Gossypium hirsutum
  Clone ID: LIB3272-045-P1-K1-H2
caaccctgggaaacttttggcataagggagggaagagcagtgattgttggtgttgttgaatcatgagttgcaacgggtgccgcgtcttacgaaaaggatgcagcgagtcatgtattttacgaccttgtctgcaatggatcgacggccctgaagcgcaaggccatgccactattttcgtcgccaagttctttggccgagcggggctcatgtccttcatctctgccgtgccagaatctcaacgttctgctttgttccaatcactgttgctcgaagcttgtggtagaacagtgaatccagtgaacagagctgtcggacttttatggacagggaactggcatgtttgccaagcgggagttgaaactgtcttacgaggaggaactgtcgggcggtcctgaactta

SEQ ID NO: 17083 - DNA, 1361 bp, Gossypium hirsutum
  Clone ID: GOSHI-09MAY01-C67434_1
gttaaaaaaccttgagctgtgacagagagggagaatggcgagccgtacaaatggcggtggcagcaatggaccggtggataaaggagctgattttgccaattacttctgcacttacgctttcctttaccaccagaaagagatgcttagtgatcgagtccgtatggacgcttattacaatgctgtttttcagaacaagcatcatttccaaggaaaggctgtattggatgtaggaacaggaagtggcattcttgcaatctggtctgcccaggctggtgcaaggaaggtctatgccgttgaagcaactaagatgtcggagcatgcccggactcttgttcaggcaaacaatcttcaagacattgtagaagtaattgagggctctatggaggaagttgtcttaccagagaaagttgatgtgattatcttcttgtggatgggttattttctcctgcgagagtctatgtttgactcagttatatccgctcgagatcgttggttgaaaccatctggggtcatgtatcctagccatgcacgcatgtgggttggacctatccgatctggattggtggatcaaaagaaaaatgattatgaagcagcaatggatgattggtatgggtttttggaagatacgaaggattactatggtgttgatatgagtgttttgacaaggcctttctcaaatgagcaggagaaatattatctgcaaacatcattatggaacaacctccacccaaatcaagttattgggacagcagctgttataaaggagattgattgtttaactgcttcagtaaatgacatccttgaagtcaaatcaagtttttcatcagctatcagtatggcgcccactcgcctctgtggatttgcaggatggtttgatgtccatttccgaggaaaaggggaggatcctgctcaaaaaaagattgagttaacaactgctcctagttcaaataatggcactcattggggacaacagatttttatgttgcatcctcccgttcatgttgatgaagagatcaatctcgatgtttctttttcaatgaaccgttttaaggaaaaccatagattaatggaggttgagtttgatgttaagataagcaaaccttccggcaaaatacttccacccattaataagaagttttacatagagtgagcccagcaattacttgctggttcttttttttttcttttgatgctttcgacgccaaggtatatctcactacttgatggttctataagtaagaacttggttttttaccctaatcagggtaacatcacaatcctttcacttttccgatgtcagcttttgcactttctagtgatttattcctgtttaatgaagcagttccccccctctaaccatt

SEQ ID NO: 17084 - DNA, 541 bp, Gossypium hirsutum
  Clone ID: GOSHI-09MAY01-C67424_1
gcaaatccgaacccctagttaaattaaagatcacttttgattcttcagcttttgaaattcagagagtaggtcttcttcggagtaagccgaaaaactaatagaggaaaacgctatctttgttagttctgcccttcgattcttcttgttcttgaaccttcttctttcccgtacttcttcttttatctgtaattttcgcctcaaacatggaaattaatcctccaactaagtcagttgaaattaaagagaaagacctcttcaaagctgcggagaagggcgattcttccatattcaaacccctctcccaagaccaccttaccaagtctgttaaactccggaatgaagacgcccgatctcttctccacgtcgccgtctcctccgcccaccctgaggtggtcaaactactctctgccgccgctgatgaatcagttgtgaatggtatcgatgaagaaagttgggctcccattcactcagccgccagcattggtaatttggaaaatatggaaatcctgttgaataaaggagcaaatggtaatgtgaaaaa

SEQ ID NO: 17085 - DNA, 489 bp, Gossypium hirsutum
  Clone ID: GOSHI-09MAY01-C67054_1
ctctttcttccttccttccttcttcttatacggtgccggcgccggcgacccattaggttctcccctaacacaggttatcatccgttttggatctttgtccaagatggggttggacggtccaactggaaacgaaggtgtgaggagacgaggatgttcatgcaccaaagatgattttcttccagaggagtcatttaagagctggggtaattatgtccaagcactccagcaaactccgagaagggttatggatcgggtattcacccgatcacttgactcaacggagctccatgaaatcaaggctcggggccagcatgaaatgaagaagaccctctcctggtgggacctcatatgggtcggtatcggaggcgtcatcggcgccggcattttcgtacttaccggacttcaagctagagaagtttcaggccccgctgtggttatatcctacgtggtgtccggtatctccgccatgctttctgtattttgctacac

SEQ ID NO: 17086 - DNA, 372 bp, Gossypium hirsutum
  Clone ID: GOSHI-09MAY01-C67364_1
caaaccgcccccccccccaatttcgtagtttacaatggctgctgcatcaccagcaattgcatgttcgccacagacattatcattctatttgaagaaaacccatctcagtatcttaccctcccatttacatggccctactgctcgaagcaatgacctctttttaaggtcaaaagtccaaaaccgggagtatgttccaattccttctagccgaactagagcttcctcaaatgggtttcttaatgcagctcatacaagcagagaagatgaaatattgccttcttttggggaggctccagtgaacatcatcttctgggttgtcttctgggcttctttgtctcttgtttggtacgctgcatctggagacgctaaagc

SEQ ID NO: 17087 - DNA, 666 bp, Gossypium hirsutum
  Clone ID: GOSHI-09MAY01-C67334_1
gttttcttattttcctttgtccatatcttacccttctctttgtccaaaaaggagggattctccgccattaatatgagattccgatcaacacctgtgcacaaatcagccgcgacggtgatctcggcggttatcttccttttcctgatacacggcgcccactgcttcgaccttcctggtgccgctaccgagatcttccaaaagataggagaagagagaaagatttcgttagctcctcattgcggctcaaatccacccatattggaccctgacaggggaggtgggcatgttgagaaacttgctgatttcaacagttatgtctctggctctcctgagtgcaagcatgctgttcttcttgcctctgatgtttacggatatgaggctccaaacttgagaaagatcgctgacaaggttgcagatgctgggttctatgcggtggttcctgacttctttaatggagaaccctatgaccctaataatcctgaaagacctaaagatgcttggctgaaggatcattcaccggaaaaaggttttgaagatgcaaagctaatgattgatgctttgaaaagtaaagggttttcatcaattggagctgctgggttttgttggggtgctaaagctggtgttgaactgacaaaggctaaacttattcaagctgctgtgatatta

SEQ ID NO: 17088 - DNA, 581 bp, Gossypium hirsutum
  unsure (1)..(581): unsure at all n locations
  Clone ID: LIB3825-030-Q6-N6-G1
ctatgaaaaaagaggttgcttgattaacagttgaagagaaaaaaaaggaagcaggttttggtacaaatctataagagagaggttgatatcattagctgcatttttgttgattttgattagctttccaaaactcaactccccttttctccatggacttgtacttgacccaccttgccatccatcaatatctttgtactttcttcatatcttttctctttttactctttttgggatttccttcgtcactggaaattcccacgttctccgaaagattgctggcttgtcggcgccgttatgttactatttctctctgaactcagcctgcttatcccaattccttgtcgttgttgtgccgctcctccgctcatgtttctaactatatgcccaaccccaaggaagtcccgagtcaatctatccgacccgcctccgctaacattcatactttgcggcggtggcggcggtggttgttcttgtcccatgctacttctatttgtgtaagggctttcttgaccatgtacagcgtcatagccgcttccgaaatgggggaatttccactggcaatggagntcattagttcatgt

SEQ ID NO: 17089 - DNA, 381 bp, Gossypium hirsutum
  unsure (1)..(381): unsure at all n locations
  Clone ID: LIB3196-020-P1-M1-E7
aaatgataataatgatcaactttgacataattttatttattttggtagatattgatggatggcaaggtgggtcaagtacaagtccatggagaaaaggggagttgagttttggaaagctaatcaaaatcaacaaaaatgcagctaatgatatcaacctctctcttatagatttgtaccaaaacctgcttccttttttttctcttcaactgttaatcaagcaaccatcttttttcatagataactttctcttgtttccttttttattttattttattttattttattattatagtaaggttatcaatttcaattatttgaaatttaaaattgaattaatataaaatttgaagctacataaacaacanatcaaatcacatgctt

SEQ ID NO: 17090 - DNA, 384 bp, Gossypium hirsutum
  Clone ID: GOSHI-09MAY01-C60824_1
taaataacagagagcctttgctctctccttctcccttcctccttgcagctagggtttcgacctcaaccttggagcgtcacctcaccaccatcggactcggtggccgaccacgcgaagaaggaacgcaatgagaggccggaggtctggacgattctcctgggacgcgctttatgcaaaagaaaagaaagaaagactaaagaatagaaaagaagtgagattcgaaaactaaaaaaattgaaatcgcaaatcaccttttgaaactaattttttttatttcttttcgtgtttaatacaatcttttttttccaaaatcccccctttttttcatagccgaatccctatttattttgctacccatttctatttggtgcttctggttttcta

SEQ ID NO: 17091 - DNA, 696 bp, Gossypium hirsutum
  Clone ID: GOSHI-09MAY01-C60404_1
ataactccctaaaaaaacacatttcaaataggcttcgcactgaactctataatttatataacttagtgtaaaccaggaattggcacactttttaaaaaatgggccagaaggtaaatatttatgcttcatgggccatacagtctgtcacaactatagcatgaaagcagctgtacacaatacagaaatgaatgagtgtggttatgttctaataaaactttatttataaaaacaaggggaggctgggtttaacctgtgggccatagtttgtcaaccactggtgtaaaaccttagttatatccggtctgcattttcttgaactgatcatgaaaacctataaacctaatagacaagccacataatatttagcttcattatgcaataatcacattgcctttgtgttaatagtcacatacttacctttggaggaatgtatgggttctcagactatctcaggcagagtcctggatgtaggcaaaagtaatttatgaagtaaactttagtcgcttaatcaaactaatgatagtctaacaactgagcaagaatcctcatctgagaggtgcttaaaatgggatccccagagaccattaaccactactggaactggtatctagctacttatgccttactttgagtttatgcttcagtatacaagtcgtttgccctgggcttgaacatacccatatttgggtgtggata

SEQ ID NO: 17092 - DNA, 637 bp, Gossypium hirsutum
  Clone ID: GOSHI-09MAY01-C60774_1
ctaaactttctctctctctctcctcccaattactctctcctctctgtaactcttctcctcgaagaagaagagaaagaggaggaaaagaaaaaagcttagatagatattcaaaaagaaaggagaaaaaacagttataaagaagggtaagaaggaaagtcaacatttgtaaaatggggaaacttctctgtgatccaaccgccgttgcggagacatttcaaacgtcttctccgacggtcacttggagggagcctaacgccgccactcttgaagccgttgatctagttgaccagaccctcacggcggcagccggcactacctgggacgacgtgattggcctagaggaccaacagagacggcatctctcgaagcttcacgccaagggggtgctttggaagcaccctagcgagcacgggtcctcggtggtgttcaggctgtcgcatggaggcgatgtgtccacggacgggaactgcctgttcacagcctcgaaaaaggccatggcgcgtgaggtcgacccgcgtgatttgaggaagcggacagtgaagcggttcttggaggatcttggatctgctaaagaagaagagaggcagatgataaatgaggtgattaagaatatgtactctccagatctgagaaacgt

SEQ ID NO: 17093 - DNA, 936 bp, Gossypium hirsutum
  Clone ID: GOSHI-09MAY01-C60104_1
gggtgtcttcagggaatcaccaacttattttaggtgctgttatacgtcatctagaccacaaaaatgtgtcccatgaccctcagctgaaatctaatatcgtacaagtagcggctgctttagctaggcaaactagatctagaggggtgcttgccgaaactggtttcgttagtgatctatgcaggcatctgagaaaaagtttccaagccactcttgaatcggtagggcagcaagagtcaaacttaaatatcttgcttcaaaattccatcgaagactgcttgttggaaatagcaaaagggattgataatgcactacctctgttcaacatgatggcaatatcactcgagaagttgccttcttctggcattgttgctcgtgcaacaattggatcattgatggtccttgctcatatgatttcattagcattaatctcctctcgctcacaacaggtgtttcctgaagatcttcttgttcaactgatgaaagcaatgttgcatcccaatgttgaggtccgtatgggagcacaccacatattttcagctcttcttattccaagttctagtcatcctcgacatgaagttgcatctctgcgttccggttttgtctatgaaccaagaagatggcgttccaccaatgcttctgcatttgcatccatatcagcgttgcttgaaaagctccgaagggaaaaggatggcatcaaattggagaagaatggttgtaatattcatgaagattttaaaggaaaggacaatatggaggaggactcgaaacaaggccttgtcgtgaagagtccccgaacatctatactataacctctattattgaccgaacggctgcatcaaacatggttgaggcagaaccatacatcatgaagctgacggaggatcagataatgcagttactgtcaggtttctggatacagaccaatcttctgataat

SEQ ID NO: 17094 - DNA, 284 bp, Gossypium hirsutum
  Clone ID: LIB3196-010-P1-M1-G12
cggactgaaattccgggtccaacccaaccttccaaatggaaaagaagggtgtgaataataaaaaaaattttaaaggaaaggccaatttgggggggggtctaaacaagggctcttcgtgaagagtttccccaacatctatactataacctctattattgaccgcacggctgcttcaaacatggttgaggcagaaccatacatcattaagctgacggaggatcagataatgcagctactgtcaggtttctggatacagaccacacattcttataatttgccttcaa

SEQ ID NO: 17095 - DNA, 611 bp, Gossypium hirsutum
  Clone ID: GOSHI-09MAY01-C60124_1
aaggatgtgattgtctcggctatatcaaatacttcgatgctcactttacaaatttcactggaggtgttgaaacgattgaaaattgtgtctgtttgcatgaagaggatcatgggattttatggaagcatcaagattggagaacaggtttggcagaagtccgaaggtctagaaggctaacagtgtcattcatatgcactgttgctaactatgagtatggattttactggcacttttatcaggatggaaagattgaagctgaagttaagcttactggtattcttagcttacgagcattacaagcctggggaatctcgaaaatatgggacacatgattgccccgggtttatatgcacctgttcatcaacacttctttggtgctcgtatggacatggctatcgattgcaaaccaggcgaagctttcaatcaggttggtgaggttaatgctaaagttgaggaacctggggaaaataacattcataataatgcattctatgcggaagaaaccctgcttaaaacagaactccaagcaatgcgtgattgtaatcccttaacagctcgccactggattgggaggaatacaaggacagtaaacaggagtggtcaactgactg

SEQ ID NO: 17096 - DNA, 375 bp, Gossypium hirsutum
  Clone ID: GOSHI-09MAY01-C60384_1
atttcttccgaaattcaagtcgaaaaaagtctttattcactctatctcttaatacaatcgctatcaacgtagaccaccaatgttaagtttcatcttttaacaataacaagacacatctcaaacaatcattaggggtacaagccatttcatcgaaaactctctatgtgttctctagccaatattcaaccttgaccgaataatcttccgcttttcctcacaactctttagccccacattttttgatcttatctattgaaggttgttttacactttctgtattatgaggatgaagggttattagggggagcacaatacggaatggagtttgcgacgtcataggattagttcttataaattcagtaaaccaccgattca

SEQ ID NO: 17097 - DNA, 1020 bp, Gossypium hirsutum
  Clone ID: GOSHI-09MAY01-C61404_1
cccttccctacttcccttcactttccaaaatttcactttctcaggaaaaagaattatctttgtgggtgcaaagggtcggatttaagactgagactcagttaagtgataaaatggagtcagggaacccaactgaacaacttatcaggaatctttatccacctattgtgctcttatagcacaggttttctcaaggtttctgatgtccacacaatctactgggagcagtcaggaaaccctgatggccatccagtcgtgtttcttcatgggggacctggaggaggaacatcacctagtaaccgaaggttctttgatcctgaattttataggatcattttatttgatcagcgtggtgctggaaagagtactccccatgcttgcttggaaaataacaccacttgggatcttattgatgacattgaaaagctaagagaacacttgaaaattccagaatggcaggtctttggtggctcttggggaagtacacttgctcttgcttacagtgaatcacatcctgacaaggttactggcttggtcctaagagggatattccttttgcggaagaaagagatcgattggttttatgaaggtggtgctgctgttatttatcctgatgcttgggaaccgtttagagatcttattccagaaaaggagagggagagttttgttactgcttaccacaggagactgaattctgaggatttggaaatacaatatgcagctgctagggcatggaccaaatgggaaatgatgactgcccatcttctaccaaatgatgaaaacatcaagagaggggatgatgaatatttttcactggcttttgcaaggattgagaaccactactttgtgaataaaggattctttccttccgattcgttcttgttagacaatgttgacaaaataaggcatattaacactacaattgtacagggaagatatgatgtttgctgtcccatgatgtctgcttgggatctccacaagcatttccagaggcggattttaaggttgttcaaatgcggggca

SEQ ID NO: 17098 - DNA, 453 bp, Gossypium hirsutum
  Clone ID: GOSHI-09MAY01-C61184_1
gaggaacttgagctctcaggttgtgagaggctggagaacttgccagagctgagtgctcttcaaaaactgaagattctcaatctaaatggttgcagcaacctcaaaagccttccagacttaacatccctattgaaacttgagaagctcgatctacatggtactgtactttggagcgaagatgtggttaaatccctgagtcatattaaagacctccaaatatgaccctaaaggtgagcacattgccccccttcttgacagccataatttcttcatgtaactttcgatgagaggttgttcaagcttaccaagaggtctattgggaactggagttgaaatttgctttattaaggtttgcacatttaaagcaccttcatctgctggacttgaagtttcccccagaacaagtttagtagcctactggaggagcagttatgtgtgtaaaaataaactttt

SEQ ID NO: 17099 - DNA, 522 bp, Gossypium hirsutum
  Clone ID: GOSHI-09MAY01-C61134_1
atcaacctcccccttttgctgcccaattaaccccaaaatgctaccctcggcactaatgtgccacacgaacaacgatctgcgcgttcgagccctaaaagagtggttttggcccttgagaccccattcagacttcgatttcgacgaagtgaaggggaaacgacggctagcttcgcaaggtaaactcctctttcgttttctttttgcgtttttgatagatttcgaagcagaaatggaaaaatggaggcgtaaaaaaaaaataaaaaggaaccacctttgaagaatattcaacctctgtattcgattgctattgtatgtgtatattccttttttttcgcgtttttttgtattcagtgtgtagaaatgtgcttgtatccctccttcaaaaaagagtttacaatcgaagatagtaggcttttatagttgaatgttcaaaaaaaaataaagaaaaatacaagttttttctttactttggtattggctactgctctgtctgtgttcttgcaggtacggtgtgcgctcggg

SEQ ID NO: 17100 - DNA, 457 bp, Gossypium hirsutum
  Clone ID: GOSHI-09MAY01-C61004_1
taggtcccactatagaacaagtaggtgcaacaaagcaggctgctgccgccgccgtaattcccgggattcccagcggagcctgagaagaggctgaggacggcgaaacatggctgctctaggactccagagtatcaactggcagacggtctttaaccgacaagcgcatcacacacacaagttctctagccgggagctcatcttgcggagaggccaaaacttccaggtcttaatgctcatgaacaaaggccttggctctaacgaaagactggagttcattgtctccacagggccttacccctccgagtcggccatgacgaaggctgtgtttccactctccaatggcagtagcggtggctggagtgcggtgcttcaggccatcaatggcaatactctgactattagcatctccagtcctgccagcgcacccataggacagtacacaatggcccttcagatc

SEQ ID NO: 17101 - DNA, 308 bp, Gossypium hirsutum
  Clone ID: LIB3196-030-P1-M1-B10
acgctggagcgcctgcaggcaccgccccgatttccccgatgcgacgcacaccttcgctgctctggggctggagggaatcaactggcagacggccttcaaccgacaagcgcatcacacacacaaggtctatagccgggagctcatcttgcggagaggccaaaactttcacgtcttaatgctcatgaacaaaggccttggctctaacgaacgactgctgttcattggctgcacaagaccttacctcttcgtggcagtcatgacgaaagctgcggttacactatccaactgcaataccggcggctgaagtg

SEQ ID NO: 17102 - DNA, 405 bp, Gossypium hirsutum
  Clone ID: GOSHI-09MAY01-C62494_1
ataagcattagaatctggttgtccctatgtaaatactgatatgctaaagtggcccaaaattaattctagcttaaaactctcctttacattgggattctaggtgctgtccaaccctgagtttctggcttagggaacggccctcaatgacctaaagtacccacacagggtactgattggaggggatgaaactccagagggccagacagctgtgcacgccctgtgtgctgtatatgagcactagcttcccagagtaaagatcctcaccactaatacttggtctttagagctttacaaactggcagcaaatgcttctcttgcccagagaataagcagcattaattccataagcgctctgtgtgaagcaacaggagctgatgtataagaggtagcaacagcaattggaat

SEQ ID NO: 17103 - DNA, 476 bp, Gossypium hirsutum
  Clone ID: GOSHI-09MAY01-C62464_1
atccgggagtgggatcgcagttcttgtttgtgtgtcggtggcatcgccacttgacaatgcagatcttcgtgaagaccctgactggcaagaccatcacccttgaggttgagcccagtgacaccattgagaatgtcaaggcaaagatccaagataaggaaggcattcctcccgaccagcagaggctgatctttgccggaaagcagctggaagatgggcgcaccctgtctgactacaacatccagaaagagtccaccctgcacctcgtgctccgcctcagaggtgggatgcagatcttcgtgaagaccctgactggcaagaccatcaccctcgaggtggagcccagtgacaccatcgagaacgtcaaagcaaagatccaggacaaggaaggcatcccgcctgaccagcagaggttgatctttgctgggaaacagctggaagatgggcgcaccctgtctgactacaacatccagaaagag

SEQ ID NO: 17104 - DNA, 1085 bp, Gossypium hirsutum
  Clone ID: GOSHI-09MAY01-C62754_1
tttcctttttcctaagggccagttcagggtccataggggtaaggcctgagagaaaagaaaactattctgatgaagggtctctctacaccctccgtctctgctatctgactcttcatttcagtcgggctctcttggtctttccagttccgactggtgtgtggcatacccaggcaccgcatcaaacagaagcccatctccttccccatgagaaccgcttcataacatgctatcgcttctgcttcaaaagtcgtagtcaccatggaatggaggggccttccatttatcagttttctgggcgtcactaatttgtctctcatttatgccatcaagttcacccagagtacccagataccacaaatcagtgatcgacgttgtgctatagtacaattactgaaaatccaggacaccccacaaaggcatgccgaaggttttcagttccagttctacaccttgaacatatggcagttagggccactctttgctaatgcagattaaccatcgtggggatgaaattccatgataccttccatgccagtatctttattttattaggcagttgtaattcccacagttgtttataaaatgagtgggccgtattatgtgaatcaataggataagtagtaggcctttggttctgtaacattttgtaagtactacgcactgcgaactctcccgagtgctccccacgccagaagatcatgtccggatgtgcttcgctcgccagtggggtacgcaggattttatcggcatcatcaggttcaaaggttgcccgtcctaaggatgttatctcggttcctactatgtgccagcatttctgaaagaaaattactgggaagccatcctccccgggagcctttgtgggacccattgacttcaaggctgcctttatttcatctgcggaatattctaccgtaagcttttcattagtttcatcattgatacaacgtgccactccctctagaactagttctgggttgcgaactcctctagatctaaacaaatactgaaaatattctttgcaatgtagcgaatgacacgttatttttaatattcatggtactatacttggtgtgccaccattaatt

SEQ ID NO: 17105 - DNA, 390 bp, Gossypium hirsutum
  Clone ID: GOSHI-09MAY01-C62064_1
atcggcgggcggcggccgatatgaggcggcggcggcggcggcggcggaggccggcggcgacgacgcccgctgcgtgcggctgagcgccgagcgggcacaggcgctgctggccgacgtggacacgttgctgtttgactgcgacggcgtactgtggcgcggggagacggccgtgcctggcgctcccgaggccctgcgggcgctgcgggcccgcggcaagcgcctgggcttcatcaccaacaacagcagcaagacccgcgctgcctacgccgagaagctgcggcgcctgggcttcggcgggcccgcggggcccggcgccggcctggaggtcttaggaacggctactggaccggtctctacctgcgccagcgcctaggcggagcgaccgcgccc

SEQ ID NO: 17106 - DNA, 374 bp, Gossypium hirsutum
  Clone ID: GOSHI-09MAY01-C62344_1
atctctattacaccccacattctcttttctttaattcttgtctgttctgcctcactcctgagctctactgactcccaacagagcacccaagaggaaaatggccataagtggagtccccgtgctaggatttttcatcatagctgtgctgatgagcgctcaggaatcatgggctatcaaagaagaacacgtgatcatccaggctgagttctatctgaaccctgaccaatcaggagagtttatgtttgactttgatggtgatgagattttccacgtggatatggctaagaaggagacggtctggcggcttgtagattttggacgatttgccagctttgaggctcaaggtgcactggccaacatagctgtggacaaag

SEQ ID NO: 17107 - DNA, 535 bp, Gossypium hirsutum
  Clone ID: GOSHI-09MAY01-C63824_1
ggaaaagagcagaagcagggccgtcagcaggtgttagtgaggatgggcgaacagagagaagaaagggaaatgagtgagaagcaattggctgatgaagtttgtgatgatcgtgaagatggtgatgatgatgatgataaggaagatggtgctggagctttggctggttttgtacctggtccgctcctttctctcaaggagcagattgagaaagacaaggatgatgacagcttaaggagatggaaggagaagcttcttggttgtgttgaagaagacctaaatggccaaatggaacctgaagtcaagtttcactcaataggaattatttcgaatgaccttgaggaagtttcttatccattgccattggatttgaatcgtgaaggccttgtcctgtttactctcaaggaaggatctcgatatcagcttaagttaacattcagtgtcctgcacaacattgtttctggcttaacgtactccaacactgtgtggaaggcaggtcttaaagttgatcaaaacaaaggaatgctgggtacttttt

SEQ ID NO: 17108 - DNA, 1533 bp, Gossypium hirsutum
  Clone ID: GOSHI-09MAY01-C63764_1
gccaccgtccgtagggtagaagcacaccaccaatcaccgtccaaatcttttgttagtgagtggcataaaacggtaaattgatcatgaatcaagggccttatctaagcctctcatctccttcatcctccaacctgcttcattccgtctcaatcgcttcaccttaattaattatttattaagcccagaatttcactttaaattttgttcattataaattattgttttttttaattctttaaccttagttttaatttctcttcctgagtttctctatatatttaattatataatattctgttgcatttcttgtttttatttttccccttttgggggagattttgtggtaacttgtaatgttaaacgaatggcgaattcgaatcaccagcgaacgccaatgtacggttcaggtgccgcgaacatgcaacggaacattgacgaagaagaagacgatgacgttccaggcggagccggaggaggaggggaagagtccgtggataaccctcagattggatttcaagaaaacggtgccgttgttgcggttatgaataatggcatggacgaagcttctcatgcccacgtttatggtcaaggatctgattcaacctctgctcctggtaatggtggcgctgatcagctcactctatcgtttcaaggggaggtttatgtctttgattccgtttctcctgacaaggtacaggcggtgttgttacttctaggtggatatgaaatcccttcaggcattcctgcaatggggacagtgtctgttactcaaacgggcttaagtgactttcctgggaggtcaattcagccacagagagctgcttctttaaaccggttctgggagaagagaaaagagcggtgctttgagaagaaaggccgctatactgtgcggaaagaagtggccctcaggatgcaacgtaagaagggtcaattcacatcatccaaggcaatttctgaagaagtagcctcagcctcttcaggatggagtggaacaccaggttctgggcaagatgagaatattcaagaagttttatgtacacactgtggaatcagctctaagaaaactcctatgatgcgtcgtggacctgctggtccaaggactctttgcaatgcatgtggactcaagtgggcaaataagggtgttttgagagacctttcaaaggtttctacagtagcaatcccggatccaactgtaaagactgctgagcagagtgatgctgaagctaacgagtcagaggctgtaactgtaactccagatgttgtatcttcatctaatggggataactccactgtcactgctgaaagatgattaacaagatccttctgctgtggtgagtgctatgtaacttgatgtttaaggggcacaggtcgaactttgttgtaataattgagttcgtttgacaactgtatatatggttcattgccgatcattatgtaactgcagaattgcgaaatacagcctacatggtgtctgtaggaagattagaaatgtttcttcctttaatatgcgtcgaaaccagagcttgttttgac

SEQ ID NO: 17109 - DNA, 514 bp, Gossypium hirsutum
  unsure (1)..(514): unsure at all n locations
  Clone ID: LIB3825-029-Q6-K6-E7
cggccgcgtgggcggccgcgtgggcggacgcgtgggcggacgcgtgggttcatctaatggggataactccactgtcactgctngaagnatgattaacaagatccttctgctgtggtgagtgctatgtaacttgatgtttaaggggcacaggtcgaactttgttgtaataattgagttcgtttgacaactgtatatatggttcattgccgatcattatgtaactgcagaattgcgaaatacagcctacatggtgtctgtaggaagattagaaatgatttcttccttttaaaaaaaaaaaaaaaaaaaaaaaaaaaaaaaaaaaaaaaaaaaaaaaaaaaaaaaaaaaaaaaaaaaaaaaaaaaaaaaaaaaaaaaaaaaaaaaaaaaaaanagggggngccanttaaaaaaaaacaaaaaagggcgggcccctttttaggaaaacccaaattttctcttcccggggcccccccaaaaattaaattttttttgtagggggcccctctaaaataaat

SEQ ID NO: 17110 - DNA, 552 bp, Gossypium hirsutum
  Clone ID: GOSHI-09MAY01-C63604_1
cccacgcgtccgaaacaagttttctgttgttattgtctttttgttttttggttcatagagcttgaagtagagagctagctggtggggtgatccattgtgtgaaaggagaagaatggaaaggcaaccctctccgagtcttgaaagggcatcatcgtttgagatggatgaacctctcactttaaccaagaagcaataccaagctgcattggctgcggtgatcaaagcctccgccaaagaaaaaggaaaagctcccgcgccacctgttggtgaaaagctggcgaagaaaattgcagggaaagtaggtggcaaaggatgcgttaaattcaacctgtaattttctatcttaattgtgtcatccgatatccctatgtattgctttttattttcatgttggttttgttgtatggtacgtgtggcagcatgggaaatattactaataattactataattaatgttatagtaattaattagtattctatgaccttattaatgttgtgctcttggcttttcggttaaataaacaaataatcaacaaccttttcatcttctgg

SEQ ID NO: 17111 - DNA, 670 bp, Gossypium hirsutum
  Clone ID: GOSHI-09MAY01-C63074_1
attttccaagttgtagagaaataggaatggttcagggaagattcagagcagtggcagccacagtgctgctctgctgcttgttgctccactttgaggtggctcaatcagcaagtttcactgttggaggaagaggtgggtggacctttaacgccgctgcttggccaaaaggcaagccctttaaggcgggtgacactctcgtgttcaattacaacccttcaatccacaatgtggtagctgtgaacagagcaggatacaaatcatgcaaagcaccaaaaggtgctaaagttttcaagtcaggcaaggatcagatcaagcttaaaaagggccaaaactttttcatctgcaattacattggccattgccaagcaggaatgaaaatagcagtcactgctgcctaatccgagattaggcattgccatatgatatcttcagtttgcttttaagtattaatgtaagattcggtgtcacaaagtctactctagtgttagacttgcttgctttgagtgggtaggtggtgctccaaacactaaatctatactataataatgatggttttaagtggaaatcttttgtgtaatgctttgtggctaaggttttacttgtactcccttttgcaataaaatatataaagatgcttctaccacgtttatttaaaaaatatttaatcatt

SEQ ID NO: 17112 - DNA, 421 bp, Gossypium hirsutum
  Clone ID: GOSHI-09MAY01-C63314_1
atcccggccaggcacccctgcaacatggcctggaacaccaacctccgctggcggctgccgctcacctgcctgctcctgcaggtagctatggtgattctcttcggggtgttcgtgcgctacgacttcgatgccgacgcccactggtggacagagaggaagcacaagaacttgagcgaggtggagaacgaattctactatcgctacccgagcttccaggacgtgcacgtgatggtcttcgtgggcttcggcttcctcatgaccttcctgcagcgctacggcttcagcgctgtcggcttcaacttcctgctggcggccttcggcatccaatgggcgctgctcatgcagggctggttccacttcttagaaggccgctacatcgtcgtgggagtggagaatctcatcaacgctgacttctgcgtgg

SEQ ID NO: 17113 - DNA, 419 bp, Gossypium hirsutum
  Clone ID: GOSHI-09MAY01-C63324_1
atcttttggccaagtgtttccttgaccataagacactgtactatgacacagaccctttcctcttctacgtcatgacggagtatgactgtaagggcttccacatcgtgggctacttctccaaggagaaagaatcgacagaagactacaatgtggcctgcatcctaaccctgcctccctaccagcgccggggctaccgcaagctgctgatcgaggtcagctatgaactctccaaagtggaagggaaaacagggacccctgagaagcccctctcagaccttggcctcctatcctatcgaagttactggtcccagaccatcctggagatcctgatggggctgaagtcagagagcggggagaggccacagatcaccatcaatgagatcagtgaaatcaccagcatcaagaaggaggatgtcatc

SEQ ID NO: 17114 - DNA, 471 bp, Gossypium hirsutum
  Clone ID: GOSHI-09MAY01-C18914_1
attttgtgtaaaatcgagatctgaaatatgggtttcttagtaacagccctaattttttctgtgattgcggtaattgcatcactttgtaccagaatctgttgtaacagaggtccctctgctaatctgttacatctaacattggtcattacagcaaccgtctgttgttggatgatgtgggcaattgtatacctagcacaaatgaaaccactcattgtccccattttaagtgaaggagagtgaagagtgtgtgtgtgtgtatatatatattgcacaaaaatcatttggaagattatcagtaaatcagcaattatggattttggccattgagggaatacctgaattccattgtttaatggaatggatgattcagtgtgttctcatatgttgattttgtatgtgctttgaattggaattgtgttggttctttgatgttattagtttctcatttgttatatttttatgatttccttc

SEQ ID NO: 17115 - DNA, 1718 bp, Gossypium hirsutum
  Clone ID: GOSHI-09MAY01-C18934_2
ccggtttcgacccacgcgtccgcccacgcgtccgcggacgcgtggggtttcagtgtcatgggaaaagacaatgtactcatttcatactgtgatgtttccatgaacgcttcttgggaccagtgaaaactggacattgatgaaaagcatcagtgttacagagtatttaaattacgaagctgggaagttctccaagagtaaaggcataggagtttttggcaatgatgtaaaggatacaaaaatacctgtagaagtgtggagatattacttgttaaccaatagacctgaggtttctgacaccttgtttacatgggacgacttgcaagcaaaactgaataatgagttgcttagtaatttgggcaacttcatcaatcgagtgttgagctttattgcaaaacctcctggtcaaggatatggttccgctattcctgattctccaactgctgagtcacatcccttgacaaaggctttaagtgagaaagtgggtaaacatgtagagcaatatattgaagccatggagaaggtgaaattaaagcaaggatttagaactgcaatgagcctctcatgtgaaggaaatgcatatctgcaagaaagccaattttggaagcttacaaagaagaccaaccttcttgttcaattgttatgagaactgcagtggggctagtgcatattcttgcatgcctattgaaccttttattccatctttttctgttgaggtatttaagcaacttaatttgcctcctcaagcacaaatttccctttgtgatgagaaaggagacatcgatagggcttcaagaccgtgggagataataccagctgggcataaaatccgagatccaaaacctttatttgaggaactgaaaactgaaagagttgaagagctaaggcaacaatatgccggaagtcaagctgataggcgtgcaagggcagaagccgatgctgcaaagactgctgagcaactgaagaaaacaaaaatttcagatagcaagaaagagaaggctaagaaatcttcagccaactctaaagaaaagcccactgctgaaccggaaatttccatcacaagactcgatattcgggttggcaagattataaaagctcagaaacatcccgatgctgattctctgtatgttgaagagatcgatgtgggtgaagcgcagcctcgaacagttgttagtgggctcgtgaaatatattcctttggaagagatgcaggaccggatggtttgtgttctttgtaatttgaagcccgcaaccatgcgcggtataaaatcacatgcaatggttcttgcagcttcgaacaacgaccacaccaaggtggaattggttgaaccaccaaagtcagccaaggtcggagagcgagttccctttcctggtttcacaggcgagccggatgatgtgttaaacccaaagaaaaaggtttgggaaactctccaagtggatctccccagtgatgcaaatctggtggcctgttataaagatattcctttgcccccatctgctgggatttgcaaagtttcccccattaccaatgggtcaattagataaagatggttacaccaagccatttatcccaaagaagaaattggaaaattgtgttatgaattttaactattttctgttccccattttgtttttgtgctttaagttcatcgtgatttttcaaaaagaattttggcacgcccccatttttatctcatagatatgaatgggctttttaatccc

SEQ ID NO: 17116 - DNA, 693 bp, Gossypium hirsutum
  Clone ID: GOSHI-09MAY01-C18934_1
cttgaatcctactgaactaaaaaacctaggtgcaaggcctgccaaaatactccacatattcgtgacacaaggcacttatttcttgagcttcctttgctaaaggataaattagttgagtacatcaacaaaatgtcagttgatggttcttggagccaaaatgctattaatacaacacaagcttggctcacagaaggacttaaagcacggtgtattaccagagacttgaagtggggggttcctgttccacacgagaattttaaggacaaggttttctatgtctggtttgatgcacctattggatatgtctcaattactaaatgctacacatttgattgggaaaaatggtggaaaaatcctgaaaatgtggagctgtttcagttcatgggaaaagacaacataccatttcatactgtgatgtttccatcaactcttcttgggaccagtgaaaactggacattgatgaaaagcatcagtgttacccactcgttcgcccacgcggccgggaagttctccaagagtaaaggcataggagtttttggcaatgatgtaaaggatacaaaaatacctgtagaagtgtggagatattacttgttaaccaatagacctgaggtttctgacaccttgtttacatgggacgacttgcatgcaaaactgaataatcgggtgcttagtaatttgtgcaactttattaat

SEQ ID NO: 17117 - DNA, 578 bp, Gossypium hirsutum
  Clone ID: LIB3825-026-Q6-K6-C3
gtgcagtgctgactgtttaacttgatttctcatgctatgagatccattttttttttgttgcatttaaaggtatttaagcaacttaatttgcctcctcaagcacaaatttccctttgtgatgagaaaggagacatcgatagggcttcaagaccgtgggagataataccagctgggcataaaatcggagatccaaaacctttatttgaggaactggtatcattgcatcttctatgttatatgtcaatatgccatcttctttattttatttttactatttggtggtttggagtcgacggattggcacagtacttgtttttctttttggtcatacttatattgtaaacataataaatgacagaaaactgaaagagttgaagagctaaggcaacaatatgccggaagtcaagctgataggcgtgcaagggcagaagccgatgctgcaaagactgctgagcaactgaagaaaacaaaaatttcagatagcaagaaagagaaagctaagaaatcttcagccaactctaaagaaaagcccactgctgaaccggaaatttccatcacaagactcgatattcgggttg

SEQ ID NO: 17118 - DNA, 850 bp, Gossypium hirsutum
  Clone ID: GOSHI-09MAY01-C18894_2
ccgcttataacagggattccaagcgtatttcttgacaggttagggcaagttttgaggttagtgaaaccacctttggtttggatagtggtggaggagaaagtagcgtcgttcgagacggcagagattttgaggagaaccggtgttgtgtatcggcacgtggtgtgcacgcgcagtcctagtgaaccgaaggatcgaggggttcatcaaaggaatgccgctttgggacatattgaacggcataaggtcgatgggatcgtgtttttcgccgacgatgacaatgtctacacggtggagttgtttgaaagcttgagaactatttgacgatttggaacttggcctgttgccatgcttgcaccaagcaaaaacaaggcaatcctggaaggtccggtatgcaatggaagtcaagtaatcgggtggcacacaaatgagaaaagtaaaagacttcgtaggcccccgcgtccgccctcgcgtccggctttcaacagctccatttggtgggatccaaagagatgggcgcgccccttctcaaacccaattcgacagttggacactgtgaaggagggtttccaggaaaccacgtttatagagcaagtggcggaagatgaaagtcaaatggaaggtataccacccggttgttccaggattatgaactggcatctccatttagatacagacaatcttttttatcccaaaggctggttactagagaagaatctagaggttattttgcctattaagtgatggaagctcatctctacagttctttttatgcggagggcttaattggttctgcccatagtttttgctggtgcacagtagttcaaacttatctgaccagatttgccatcat

SEQ ID NO: 17119 - DNA, 937 bp, Gossypium hirsutum
  Clone ID: GOSHI-09MAY01-C18894_1
cgaaatgttggaaccgaaggatcgaccgatataatcgagccgttaaagcagttaatcgttgtcacgccgacttataatcggggatttcaagcgtatttcttgaacaggttagggcaagttttgaggttagtgaagccgccgttggtttggatagtggtggaggagaaagcggcgtcgcatgagactgcagagattttgaggaaaaccggggttatgtatcggcacgtgttatgtgcgttcaactctagcagcgtgaaggatccaagggttcatcaaagaaacgccgctttggaacatatcgaacggcataagctcgatgggatcgtgtttttcgccgacgacgacaatgtctacacgctcgagttgtttgaaagcttgagaactatcagccgtttcggaacttggcctgttgccatgcttgcacaaagcaaaaacaaggcaattctggaaggtccagtatgcaatgcaagtaaagtaattggatggcacacaaatgataaaagtaaaagaatccgtaggttttatgttgatatgtcaggatttgctttcaacagctctatattgtgggatccaaaaagatgggcgcgtccctcctcaaacccaattcgacagttagacacagtgaaggagggtttccaagaaagcacatttatagagcatgtggtggaagatgaaagtcaaatggaagagttctgaccatagtttctgctggtggcacggtagttcaaacttatctgaccagatttgccatcatcgtcatcatcatatggtagcgtatgcagatattcatgtgacgttggcaaagaaacaaaaggagcagtttgcatacaccacaaaataggtggggtttgttgtggatccattgtttatataccctgtacttaagcatcgttgtatatggcgatatcatacttgtctgaaagcagcattttccttt

SEQ ID NO: 17120 - DNA, 669 bp, Gossypium hirsutum
  Clone ID: GOSHI-09MAY01-C18874_1
tttgagtaattcaaaagctatatgaactaaatattagatttacgaaaagaaacagaaatctgtacataaggattcttcatggtgcagtatgtatgaaggtcagaatcaaagggtacaataacttgaattttaaatcttgtgtaattctttagccgcaccaccagttcaagtccttccttcccaactcaaaaaggaataaacaaaggtttcaacacaagttcgtatttctcaaattttaaagcaacaatcacaaaagcatggcagcattatcactgtctcaaaaccagaatcatctgtcgctgaaaggttgtcaacaaaatctggctgctcagctaaacatcgggtccatcggttgcattctctatcttcatgatcttggatgccgtctcctctttggtcggcttcggtcctcttcgtagtccatcactccaccaggttcagagtagatatcctcgagccctcggaactcacttcagccttgacagatacagacttttttacttcttcccccctatcttcaacccccctttgatgtttttttgcccactccattaatgtaacaagcccatttatttccttctggaattaagacaggtaaatggtttatggggcccacccggttggatagggtttgtatcaaacttccaaggtgttctggcctcaaatccc

SEQ ID NO: 17121 - DNA, 778 bp, Gossypium hirsutum
  Clone ID: GOSHI-09MAY01-C18804_1
gtgaaatgagtgagaatcatgtgatccaccccactcggctctctcacactctttgtctctaaatccaaaatccaactaaaaaagatcataaatttatccatccatcaaaactacccaagcttttttctttttcttttttttttctgtatttgctttattgttttgtgtttcaatggcttcaagcgcttcaagatttatcaaatgtgtaacagttggagatggagctgttggcaagacttgcatgcttatttgctatacaagtaacaagttcccgacagattacataccaacagtttttgataacttcagtgccaacgttgtagttgaaggcacaactgtgaacttaggtctttgggacacggctggacaagaggattacaacagactaaggccattgagctacagaggtgcagatgtctttgtcctagctttctcattagttagtcgagcaagccatgagaacgtactaaaaaagtggattcctgaacttcagcattatgccccaggcgtccctgtggttctggttggcaccaaattggatcttcgtgaggataaacattatctggctgatcatcctggcttgctgccggttagcaccgcacagggcgaggagctccgcaaacagataggtgctgcttatacattgagtgcagctcaaaaactcagcagatcgtgaaagcaatttttgatgctgcaatcaaagttgtgatcaagcacccccaaaaacggaagagaaaaagattaacccagttcaagatgtctataaaatgtctcctct

SEQ ID NO: 17122 - DNA, 903 bp, Gossypium hirsutum
  Clone ID: GOSHI-09MAY01-C18564_1
atcacttcaaatattgatattactattaagtacgaggaggagggagatatttacaactttgtcactgaaacaaacatgaatcagtggataaaggaagactgaagtggccaagagggaaaagtatttacggaaagggaataaaatgagcggcagaaagaagagctcctccgcaacgacggagaacgatgcggtggatcagctgttgcaagcggcgcaggatgagatgctcttaaaactctctgtcgacagtcacatgtcccgtgtggcacccgattatctcaaccctgatctccgccgtcgattccaggctctccgatcccgaccttcctcttcccattcacaacagaagaaacaatcatcggcaccaccaccatcgccgccgaaacacaaccggagcaatagatgacgatgagaataaggatcgaaatcgaaggttgtcgttcccgacaatgtcgacaaagaactgaaccctcgcgtccgcgatgatctctccgcacggttcgctgctctcaaggcttccttgtcttcatcttcttctaatcctactgctgctactagtatttccactaacgaagttcgtatcggtctcgaaaaatccgacggcgaagatgatgaggaagatgaagttgaaagagtggtccaatgggccaaggatgctgctcgccttgacccttctcctgcctctgatgaagatgatgatgacctaatcggttctgattccgatgataaagatactgactatgatgatgatcctaaacataaaaaaaaggaatcaaaacttaggaaatgagggtctccttaaagagcagccttgcagcaataatccattgccaagcctgaaacttttaatcctatttttatcgaacatgttcatgttcagattggatgcagtgaatactttca

SEQ ID NO: 17123 - DNA, 802 bp, Gossypium hirsutum
  Clone ID: GOSHI-09MAY01-C18784_1
atttattttctccctattattttcatcgttcgggagaacgaaaatagaaatgggaagcgatagcgaagtagagaagacgcagcagaaggagaaggagaggaagaagatgttagctatagctcccatcgcaaagccccttgctggcaaaaagctctccaagaaaacccttaagctcgtccgaaaagcatctgagcacaaatgcttgaagagaggagtaaaggaagtggttaaaagtattcggcgtggtcataaaggattatgtgttatagctggaaacatatctcctattgatgtcataactcatgttccgatcctatgtgaagaggctgaaattccatatgtctatgtttcttcaaaagaagatcttgcaacagcaggagctactaagagaccaacatgctgtgttttggtgctaaccaagcccaccaaaggtgaactcgccatcgaggaacaagaaaagatgaaagccgattatagccagatagtatcggatgtatctgagcttacatcatcccttttctaattaactcggaaaaaattttgatgtgcttgtcatataagcattgttgttgacaatcttattttcctgcagctcaggtaatggtgctttgtctccggcatttgactgtctgttcaaaaccttttgttttacttcttttaacccgcttcttttaagtgttttattcagtgaagtcattggctttttaatatttaagtcataatctagcccctgaacttgaacacttttctaatgttggtacctgaaagaattttttcttggtaccttaacatgtattctgtt

SEQ ID NO: 17124 - DNA, 632 bp, Gossypium hirsutum
  unsure (1)..(632): unsure at all n locations
  Clone ID: LIB3582-031-P1-K1-D11
cccacgcgtccgttcacgttgcagtagttatattgtgtacactctcgttgtgtttttagttaatttggcattggtaaagagaaatggggagcgatagtgaagccgagaagtcgcagcagcggaaggagaaggagaagaagaagatgttagctgttgctcccattgcaaagccactcgctggcaaaaggctgtgtaagaaaaccttcaagctcgtccgcaaagctgctgagcacaaatgcttgaagagaggagtaaaggaagtggttaaaagtattcgtcgtggtcataaagggtaaagttttttttttatatatatataaatatattatatttgcttgcttcagattctctgtgaatgccttttcgttccacttttaagcatgtttaatctgatctatgctccgagatgtttatttggatagatataagaataagtttcatggactgagaaatattagtgtcttacttatgttcagatatgccgatataagttttacgtggaggattcttatgccctaatgtcacctggatttttcattgtactcaaatactcatgtggagcacatttgtccaacacatatttggactgaaatatggngtatatgattcttcaaatatatgatatatgacac

SEQ ID NO: 17125 - DNA, 617 bp, Gossypium hirsutum
  Clone ID: LIB3582-038-P1-K1-B6
gttaaagagaaatggggagcgatagtgaagccgagaagtcgcagcagcggaaggagaaggagaagaagaagatgttagctgttgctcccattgcaaagccactcgctggcaaaaggctgtgtaagaaaaccttcaagctcgtccgcaaagctgctgagcacaaatgcttgaagagaggagtaaaggaagtggttaaaagtattcgtcgtggtcataaaggattatgtgttatagctggaaacatatctcctattgatgtcataactcatgttccgattctatgtgaagaggcagacattccctatgtttatgttccttcgaaagaagatcttgcaactgcaggagctaccaagagaccaacgtgctgcgttctggtgctaaccaagccaaccaaaggcgaactagacccttcagaacaagaaaagataaaggccgattatagccaggtagtagcagatatatctgagcttacatcctcactcttttaagaaattgtgttgtcatatatatatgtaagccttggatgttaaaatctaatctctgcttctctaggcgatgtgctttactgagttgatacttcattgtaactatgtatctggcttaactttcattttaac

SEQ ID NO: 17126 - DNA, 376 bp, Gossypium hirsutum
  Clone ID: LIB3148-036-Q1-K1-B6
gtattcggcgtggtcataaggggttatgtgttatagctggaaatatatctcccattgatgtcataactcatgttccaatcctgtgtgaagaggctgacattccctatgtttatgttccctcaaaagaggatcttgcaactgccgggtctaccaagagaccgacatgctgtgttctggtgctaaccaagcccacaaaaggggaactaagtcccgaggaacaacaaaagttaaaagcagattatagccacattgtagaggatgtatctgagctcacatcctctatgttttaagttaacaaaaaagttgtcattataacatttgatattgacatcctcttattttacttccagggggggaatatgctttactacttgtt

SEQ ID NO: 17127 - DNA, 381 bp, Gossypium hirsutum
  Clone ID: GOSHI-09MAY01-C18754_1
ataaaattatcaaatttggcattatatcaaatgaaaatatagtctacatacagaacacaattattggtatccttaacttgaaacaaattgttcaaggatccagattaactggttttaaatacacaaacaatttattgtgaagtttgaaactttaagcaccaccagtcagctgaaggtgcttgatgtttgtaatctgttttcctgggttcagacccttcgggcaagcacgagcacaattcaatatcgtatggcaacgatacaactttaactcgtcatttatggcatccaatctctcttttgcgtattcgtcacggctatcgcttatccatctgttagcgtgaagcaaagcagcaggacccaaataagattcaggattccacc

SEQ ID NO: 17128 - DNA, 645 bp, Gossypium hirsutum
  Clone ID: GOSHI-09MAY01-C18744_1
agaaaacgcaaccacattccttatcaatattaaacattaaacttcattttcgtcaaagatgcagagatcaacctatggagattgaacattacagcttcatcaaggtatggattttagctataatttccctttgttattgttactacatatcatcaaagctccccaaaggcattttcaagctttttctttaaccccaatcttcatcttcttcctttacctccctctcaccgtctccacctttcatcttgttggcatcagcgccttcttcctctcttggttagctaatttcaagctcctcctcttttgtttcgaccaaccaccgctttcaccaccaccgtccaacctttttcacttcatttccttagcgtctcttcccattaaacctaaacaaaaaaccccatctcaaaacaaatctaaaccaccccaaagatcaatcttgtttgctataaaagttctactattagctttgctttaccattgttatagctacaaacaaaatctccattaaaatgtagttctagcaatgtactgggtccatacctacattgagcttgagctcaccctagccttggccgcaatcccggctcgagccatgtttgggctcgagatcgagccacagttcaatgaaacctacttaactacctc

SEQ ID NO: 17129 - DNA, 822 bp, Gossypium hirsutum
  Clone ID: GOSHI-09MAY01-C18684_1
ccatttcgctgtgggtctgcttcccattcccaaatcccatcttcttcttcctattgattcactcaagatccagagctgccacaaaatttcaccaaaaaaatcatctctttcagacatccccaaaaatcccaaatcgagaaatgttactctctcttgttcaaagcagcttcctttcaccttcaacacccctctgcaaattccattccaacttgaacccactaaaaccctcttttttacttcccaaatccctttcccataaaaagtcgctgtgtttgtcaccaaagtatgccactgctattcgtgcttccatgattgaagctccagtgctttgggctggtcggctttgtatttattatgctcttttgaagtctgggttagctggatctcaggctaacccacttgtttcagggttggaggagaatggtgatagtgttggcgaatctggtgatttgggtttctctaagtggttggacaatatacgagggaaaccagacaaggaagcagctgacaaaagaaagctggtcagcaaatggcatccgaccacgaaaggtacacttaaaaggaactacagggtaccttccaaatccgaaggccgacgactacttaaagcagtggcgtctcttctgtcagacgatgatcattttactgatgccacctcccacaagggttgccagataaggagggagagtgctcatggtgaaagtgtatgctgcaacaatgttagagctttgtttgacgagcttccgactcctcaccttacagtcgaaattacgccttttcctgctggacctctcactgaaatagattacatcaaggctgaaa

SEQ ID NO: 17130 - DNA, 334 bp, Gossypium hirsutum
  Clone ID: LIB3145-058-Q1-K1-C11
gtgcttccatgattgaagctccagtgctttgggctggtcggctttgtatttattatgctcttttgaagtctgggttagctggatctcaggctaacccacttgtttcagggttggaggagaatggtgatagtgttggcgaatctggtgatttgggtttctctaagtggttggacaatatacgagggaaaccagctccactccactctggactttaagcaacgaacattctcggaaaggatgaacttaatagttgacaaggaagcagctgacaaaagaaagctggtcagcaaatggcatccgaccacgaaaggtacacttaaaaagaactacaggg

SEQ ID NO: 17131 - DNA, 604 bp, Gossypium hirsutum
  Clone ID: GOSHI-09MAY01-C18184_2
attatttccatttctgctcctccttccctcgtcttcgagctagggttttctcccgtagcggtcagctcacgattgcaaccagcttccattctgatattttcccccttttttactcacagtcatgcctcggtattactgtgattattgcgacacttatttgacccacgactctccatcagttagaaaacaacacaatgcagggtacaaacacaaggcaaatgttaggacgtactaccagcaatttgaggagcaacaaacccagagcttaatcgaccaaagaatcaaggaacatcttggccaagctgcagctttccatcaggttggagctgctttcaatcaacatctaatggctcagagacctcgacttcctgttcttccgactcctgttatgcctattccgagggttgcacctttacgtataaatcaaccaatggtccctgggattaggccacctgtactgccaagaccagttccaggtgctcctccttatgctcctgttccaggcatgccaccaacggtagcaccacctggtgcaccttccttccctggtcaaataaatggccttccacaacctcctacattggttcccccatcaaccgttact

SEQ ID NO: 17132 - DNA, 638 bp, Gossypium hirsutum
  Clone ID: GOSHI-09MAY01-C18184_1
cccattcgtctcgttcattctaattttctttgtactcgagctagggcttttgctacggtaccctctctctatggttttacgatcttcaaccaattagcttcgattctgagtcgtttcgcaatgcctcggtattactgtgattattgcgatacttatttgacccatgactctccatcagttagaaagcaacacaatgcaggttacaagcacaaggcgaatgttagaacttactatcagcaatttgaggagcaacagacccagagcttaatagaccaaaggatcaaggaacatcttggtcaagctgcggctttccagcaggttggagctgctttcaatcaacatttaatggctcagaggcctcgacttcctgttatgccgattcccggggctccattacctgtaaaccaaccaatggtcccagggatgaggccccctgttctgccaagaccaattccaggtgccccaggttatattcccgttccaggcatgccaccaatgatggcaccacctggtgctccttggcctggacaagtaaatggccttccacgacctcctacattggctcccccaacaacagtttctggaactgcaacgacacccagctcttctaacggagcacccacttcgtctgcaccata

SEQ ID NO: 17133 - DNA, 783 bp, Gossypium hirsutum
  Clone ID: GOSHI-09MAY01-C18154_1
gtttcgacaaaatcaaacggttacgaacactaggagttccaaaaaggggcacacccgatattcacctccttcaaaagttttggcattttcattttcgtctccaccactaaaaaaggccctgcgtccttcgaatcgattccattcgatttcaccatcttttaaatcctatcaatttctcagatctttcccagtcttttctgcaaccatgagtaagggaccaggactcttcgtcgatatcggcaagaaagccaaagatctgttgactaaagattatacctcggatcagaagttcactgtttctacttacactggcgctggagtggcccttacatcaactgctctaaagaaaggaggactttctactggggatgttgctgcattatacaagtacaagaatactcaattcgatgtcaaagttgaaaccgactctaacatctcaacaacacttacattcactgagattcttccatccacgaagactattgcatcgttcaaagtgcctgattataagtccggcaagttggaggttcagtatttccatgaccatgcaaccgttacaacaacggttggtttgaaccagacaccaggcgttgatgtctcggcgaccattgggacacccactattgctgtgggtgcacacgcaggttacgataccacctctggaaatttcacaaagggtactgctggtattagcatgacaaaaccggattcctgtgcttcgataattctgggagacaagggagacagtataaaagcatatatgtgcattacatggaccagctg

SEQ ID NO: 17134 - DNA, 526 bp, Gossypium hirsutum
  Clone ID: GOSHI-09MAY01-C18144_1
gaaagaaccagctaacccatactttgccaattgcaagcttcatcttccatgtccctgctggcgccacccctaaggatggacccagtgctggttgccccatgatcacttccatgctatcccttgccatgaagaagcctgttaggaaggatctagcaatgtctggggaagtgactctgacacggaaaattcttcctattggaggggtgaaggagaaaacaatagcagcaaagaggagtgaagtgaggcccataatattcccagctgctaacagacgtgattacgacgagcttgccccaaatgtaacagaaggtctcgatgttccctttgtagatgactacagtcagattttcagtttggccttcgaatatgatgataccactatggtaaattaggttcttattaccagccaatggtttagattggtttttggctgaatattctttgcaactgatcttggaatccaaaacccagttttatattgtgaattacatcaaaattttcaatcaagaaataacaaggttgagta

SEQ ID NO: 17135 - DNA, 655 bp, Gossypium hirsutum
  Clone ID: GOSHI-09MAY01-C18054_1
cccacgcgtccggattttgtcaaaaaaatcttgaaaatatttcacaaacccttcttcctctcagtccattcgcaggcttcatcggcgccgaatgcgcctccaccatcaacgcgattttaattagatcctaaaggatctaataacccttggaccggagaagtgaacaatgaataaattgaccccaaatccactaaccgagaagaagaggctcaagtgataaggaaaagctaagcaggtgtaatcagtactagctttcaggtattttgttgaggttcgaccggattgtacgaagaatgtatacgcatgatattggttttgcaaaggttcaggtggattgtatggagaatatatataaacatgacatttggttttatggaggttcgattggattgtacggagatacttgtgcatatttatatgataaccctacatgggttctttcaagtataagactctgcggagtctaaggcttaaagcctcatatgcgtaagcaaacccttggccatggcatatgtaagttatgtaagtccatcggacttgttctttaagttttatgttaaagttatgagatttcaccatgtcaagtccgtaacaaaaatcacatgtatgaatccgccaaatttatgaagtttcttttatgtttgcctatggatct

SEQ ID NO: 17136 - DNA, 1664 bp, Gossypium hirsutum
  Clone ID: GOSHI-09MAY01-C18034_1
gcaaaaaccaaaccctccgaaaagaagcaccccactttagtttagccctggtttttctactttttctaatcaaatcacacccaaacaaacacaaaatagaacctgtctttacaaatcgcacatttgatccttttcttgcagagacctcagaataatacaagtttattttttgtttcttttttttcataattttggccatgaagcgtggattccctgaatctctctcttcctctttaggtccacctcaatcccgattcaaacataaccctgaaggtgatgcacaatttccggaggatgagagcaccaagatttttgctaggaaagtagctgatcattatagtgcaagaactaatcagactttggaagaacgagaagcaagtccaatcattcacttaaagaagttgaataattggattaaaagtgtcttgattcagctttatgctcgtaagggggatgctgttcttgatcttgcctgtggcaagggtggtgatctcatcaagtgggataaagcaaaagttgaatattatgttggtgttgatatagctgaaggctcgatagaagattgtcgtacacgttataatggtgatgcagaccatcatcaacgtcgcaaaaagttcacttttcctgcccgtctattatgtggggattgttttgaggtgcgcctggataaagttttggcaaatgatgctccttttgatatctgcagttgccagtttgccatgcattattcctggtctacagaggcacgtgcacgtcgggcgctggccaatgtttcagctttacttcgtccgggaggcaccttcattgggacaatgccagatgccaatgtcatagtcaaaaaacttagagaagctgaaggattggcctttggcaacagcgtctactggatacgatttgatgaagaattttccgacaagaaatttaaatcttctagcccctttggtatcaagtacaagtttcatttaaaggatgctgttgactgccctgaatggatcgttccgtttcatgtcttcaagtcattagcagaagagtacgatctagaacttgttttcgtcaaaaactctcatgaatttgttcacgagtacatgaaaaaaccggaatatatagagcttatgaggaggctcggtgcactaggtgatggtaaccaagcccagagcccattttctccggatgaatgggaggcagcttttttatcccttgcatttgttttaaagaagcgtgggcaaccagatcggacccaagcaaatagcagaaaagataaaggccagatgcaaatagcaaaggaggccatcctgtatattaatagtgatgattaacaggaaaaccccgcgaattccatagatttattcgtaagttcgagcgagccaaaataacggagggtggctaagtggctgaaccaatgcctatgaaccggattttttcggggctctttcggttttgtaggttgacaaattgtttttgtaagccattgctttcagcatgaagtttctaagaaattgccccttcatttgtaattttgggtcggaaagattaaagaaagaatgagaatctcccaggttgatgggttaacttcggtaaggaaagccgatattgcctgtttaaatgcgtgtgacataagttttctatatatgaaattgccaataaaagtttcatttttcattgtc

SEQ ID NO: 17137 - DNA, 452 bp, Gossypium hirsutum
  Clone ID: GOSHI-09MAY01-C18284_1
gtcgaatgagaactatcttttttctttctctttggatctcttctctgctcccaaacccatccaacatttttgaggtttgttaggtcggaagtccctgattttctggtctaagtctaagattctaagtagttaagagttagttgtaattcatttttattgttattgttctgtcaatatgtggagttttgcttcaaataccattgctagcattgggttaaagagttcaaaagaggcgaatcaagcttgctccgagtgttcagatgacgagctgtgttcaaatggtagtagagatgaaggattagagtgtcccatttgttgggaacctttcaacattgttgagaatgtgccttatgtcttatggtgtggtcacactctttgccaaaattgcttcctgggtctccaacctgctgttttgaaactccccactcagcaatcaagatccccatgttcat

SEQ ID NO: 17138 - DNA, 584 bp, Gossypium hirsutum
  Clone ID: GOSHI-09MAY01-C18274_1
caaagggtactctctcactctactcgtttccctttgcttaacagagcagagattttttcttctctaatccgaaatctgaaatctcaatctaaagcaggaatggaggcttcttctgtcactgaaaattcttccactggcaatgaccacgagcaagagcctgttttgaatcatggaggcacggagtcgaaccctgagactaatcgagaagaagaagaactagacggagaacaagttaggcgcgtattgcaagttagtgccgctactgggaaattttggcataattgggataagctgaagagcatgctatcctttcagttgaaactggttttatcagagtatcctgaggcaaaaatgacggttgagcaacaaaatgcttcactaggtgaaacttacctagagttggttacacggctaaatgaagagcttcattcttttattgagggcccaccatttacccttcaaagactctgtgagatcctactggatgcaagaagcatctatccaaaactctcgaagcttgccctagcactagaaaagaatttgctggtaacctccacattgacagtctgcaccgaaccctaccc

SEQ ID NO: 17139 - DNA, 416 bp, Gossypium hirsutum
  Clone ID: GOSHI-09MAY01-C19954_1
gctcaatcagcggactttttgggtcgtacgaacctggtataagatagccctcccccactcttaaccctaaaactaaaggtaagactacaactaaaacttagagactcaaactcaaacttgctcttctcttccctctcccccccaattccataaccaacgaaagaagacgaagagagctcctggtgccaagaaagataaggaatttttgttcctcacttaagacgtcattgactggactagcaaaagaagggacatcgccgacgagaagccgaagaagtcagacgtcgagccgagcaggcacaaagagtagacaaaaaagataaggttcggtttcctctaagaggtctccaaactctgagtcacgaaggcctctaagtaaaaatgaacgcacgaagggtaatgcgacacgtcccaca

SEQ ID NO: 17140 - DNA, 639 bp, Gossypium hirsutum
  Clone ID: AI055651.1
agtagaaaaagttcttcttttcttcattccaatccttccccaacatacaatcaaatcaaattttaatacttcccctcgtgattcaacccaatcccatttcttcttatcttgtttaaatcttggacttcaaagaggtgtttgattgtgtgttttcagcttctttttatcgaatggctcctccagattctatgatcaaaccaagagatgcttgtattgttggagttgcacgtacaccaatgggtggtttccttggttccctttcctattactctgcttcccatcttggttcttttaaccatttaatctgcccctaattcggcacactcttatccatcacaagctttattaggatctcctttggaaattgaccctattgggcattttgttaacctcttaattttgtacactggcttaattcaagggattccaaaaatttttcaaggcttcttaaagcttaccaattgggttaaccctgatcctttcacctaatattatgatgtgtactttaaaatttaatatctcgaatttaaaaatgtgtgctttttgaatatcccttttagttttaaacttaacctgactccgatgtcttaaaaaaatgcggcgataatgtctttatctcctcgtaatatagaataaaag

SEQ ID NO: 17141 - DNA, 410 bp, Gossypium hirsutum
  Clone ID: LIB3083-027-Q1-L1-B1
aaaaaaagttcttcttttcttcattccaatccttccccgacatgcaatcaaatcaaatttgaatacttcccctcgtgattcaacccaatcccatttcttcttatcttgtttaaatcttggcttctttttagcgaatggctcctccagattctatgatcaaaccaagagatgcttgtattgttggtgttgcacgtacaccaatgggtggtttccttggttccctttcctcttcctctgctacccatcttggatctttagccattaaagctgcccttcaaagggcaaaccttgatccatcacttgtgcaagaggtgttctttgggaatgttcttagtgcaaatttaggtcaagctcctgctaggcaggctgcattaggtgctggtatccccaattctgtcatttgtaccact

SEQ ID NO: 17142 - DNA, 988 bp, Gossypium hirsutum
  Clone ID: GOSHI-09MAY01-C19804_2
tttttccattaaagaccatggctgcaaaacctgggggaaattctaaagtagatgattgagccccatgaaccatccccaacaacaaaagatgatgcaccacaaccaaaacttgatgatgatgatgatcatcatcatcaacaatcatctgcaaacgaaccgcgatcatcttcatcatcggaggaagatactaagcaatggggtacccacgtcatgggaccgccggcgatccctattgtccacccggataaccagaaggccgctttatgggtcgccggcgaccaccagcaaattcacgagctgccttacctcgtttacactcctgctgaaaaaccgacccaaaattcatttgaacttgtgattaacgttttcaatacttggagtaggaaggccgagatcgtcgcacgcagcgtctggcacaacctgagaagtggatcgtcggtatcggatgctgcgtggggtaaagtaaacctaacggcgaaagccataacaaagggtgggttcgactcacttttcaagaagatatttgcaactgatccaaatgaaaagttgaagaatgcatttgcttgttacctctccacaacaacaggccctgttgcagggactctttatttatccactgctagggttgccttttgcagtgatcgtcccttatccttcgttgctccatcgggtcaagagacttggacctactataaggttatgatacctttgttcgatatcggaacggtatatccggtggtaatgaaagaaaacctggcatcggagagctacatcgaggtcgttaccgttgatggccacgatttttggttcatgggatttgttaagtttgaaaaagcatcgtttgcactattgaacaatgtgctagatttcaaggcaacaactgagccagtggctgcctagttgggggaaccatcttcggatcgatcctacgtaccatattatatactccaaatttaattttctaagttaattatgtttggtacgttag

SEQ ID NO: 17143 - DNA, 632 bp, Gossypium hirsutum
  unsure (1)..(632): unsure at all n locations
  Clone ID: uC-gsronu33B031b03b1
aaaaataatttctcccaatattatctttgagatcttaacgtaaggtctctcatttgaaatgcaatttatctttccagtacactcaatatttgtaaatgatgcatgccctacctattagatgtgtgtattaccttatagtaggtccaagtctcttgacccgatggagcaacgaaggataagggacgatcactgcaaaaggcaaccctagcagtggataaataaagagtccctgcaacagggcctgttgttgtggagaggtaacaagcaaatgcattcttcaacttttcatttggatcagttgcaaatatcttcttgaaaagtgagtcgaacccaccctttgttatggctttcgccgttaggtttactttaccccacgcagcatccgataccgacgatccacttctcactgtagttttcatcattgtatatgtaaatatttttttgcaacatcttgttaaaagaattttcgataaaaaaatggggttaattccattaaagttctcaaaaatggttcatattttaaattagtcaccgaacttcaaacatcttaatggctcttcaaatatctatatttatcaataggntcttcgtcagcagtcataccttggtgtaatatcactcaatatacggag

SEQ ID NO: 17144 - DNA, 455 bp, Gossypium hirsutum
  Clone ID: GOSHI-09MAY01-C19834_1
atttaaattcatttcttcaatattatatggaacagaaaggatggcaaataaaactgatgggtatgtggagttcgaacatcatacgtttcacaaatccaattctggaatgcagcaattccattccattatcgccactgatacacaaataataccaatcaaaactgctaataatatcataacgcatttccctccactctttgaacctacaacagttaatgaaacatccaacataacatgactactgttgctgtgccgcctgtgcaacatataagtcacctttaccaccaccattttccattgctggaacacttttcattactaatttttcatctccgacgaatgaatgtaacatcttgaagattttatgcatgcaggtccttgttcgtatttcctacaggggctttaggacctacaccatcactcaacatcccacttccattatccacgctaatcag

SEQ ID NO: 17145 - DNA, 440 bp, Gossypium hirsutum
  Clone ID: GOSHI-09MAY01-C19594_1
attcaatgagaaagcagccaaatcagcaagcaaccaatggcataaagtaaacaaaagacagaaaaaaaaagaacaggtaactccagcaaaccttgccatatactcttccttttctccatttcttcccaaaaaatagatactaacaattaaagaaaaacccagagagaaagtttttttggaacaatttactgcccactagcgttacctttggcatcccatatgaatctgctgcttagaaaaggagactgaagttgagcaatgaaagtacaaagtataaatacaaattttataataataaaaaaaggtctttgaaactgcagggaagtggtttcctttgagacagaaggcaaaagaaaaaaaggaagacagagtgggatttttagtttggttttgagatggcgttctgctctatgatttgttgtgggaaaagcttctatcgg

SEQ ID NO: 17146 - DNA, 473 bp, Gossypium hirsutum
  Clone ID: GOSHI-09MAY01-C19574_1
atatgatgattgttccataaaaaatatacagaaacagcacctcttgtcctagaaacagtgctaaaatgctgccaagagatttcaattatcctacactcactgctttagtaccagcaggcaagccattcactgttaatttccatagaacagtaacaaatgttggtatagcaagatctacttacaatgcgacaatctctaccctgtcggaacccgaaatccaagtgggtcctcaagtcttgtcttctcaagtctctaacagaacagaagtcttaccatgttattgtttctggcaaagctttgggtgagacatcaatggtgtctgcaacattgatatggtcagatggtactcataatgttagaagttccatcgttattcacacatataaggtgtccgtggggctgtttgagtcaaagattagcccccattttgtttttatttgttcagtcaattttttgcaatctattaataaaat

SEQ ID NO: 17147 - DNA, 680 bp, Gossypium hirsutum
  Clone ID: GOSHI-09MAY01-C19564_1
ggatttgtcaaagggttagctcttggaattgttgtcttagaggctattattttcttgttagcccttatggttagggccgccaatgtacctgctgattatgacagtgatgatgagttcattgcaccaaggcaacaaatcagacagcctttaatcaacaggccaccagttccagctacaggtgttcctgttactggcagccttgatcaacgacccagcagaaatgatgcttggagtgcacgaatgagggaaaagtatggtctggatacgtccgagttcacctacaacccttcggagtcaaacaggtaccagcaggcagctccgcaaccagcagaagaaagcagccgttgcaccattatgtgatgatcatctggttggttggttggtttccgaaggaaaggttattgcattgtcgatggagtgacaaacttcatatttttcagatgatggtcttattttgttttttgctgagtttgtacacaatctataggagctttatgtgttccccactcattcatttttcttgagaacatgtgtgtttgttcccaaacgcataacccccattttgtgtgtaaaatttgactgctacgttagggtttggcaatgagttgaatcctgagccgaatgcaactctgcccttttcttatctgttccttctcattttatgaatggtagtaagcagc

SEQ ID NO: 17148 - DNA, 983 bp, Gossypium hirsutum
  Clone ID: GOSHI-09MAY01-C19734_2
ttttcttctccatttaaagtatccacacattcatttcatgtgaggaaaacggttacaatacaaatattcacattggaatccgcatccagcaaattagaaatttatcatttcaaagactaaaaaaaaattcaaaagaaaataaataaatcttacaagcacaaggagaaacagcaccatgttgagagagaataagggatgctctctactctgtatataacaaggtcttgtaaattgggatggaattagtcaaacatcatcacatcagctgttaagaacacgacgtaaaagaaatgcttcaccctgttccccatttgccgaccttctctccaaacagcaagctgttagctgcctcagtaatctctcaagatacgactgtaagcacccttccatatcttgcgtgttcggatttgttgacaatatcatcgcattaactgtgtctgccacaagatcacgttgcgactcttctagaaggtatcccacacaggactcctgtggatgttcatatgccagcagagcagcacagtcctgcactaaatcatcaaatccagccaaccgaaaaaaatttgccaattcaattcttccagtacttaacagcctcttcaagtgctcctacccgaaccaattcgataaatttttggcagtgcagcagaaagcaagtagcagatttgtcatcctgaacaatctggggataccaatcacgaagtttgctaattgctgcatcaatctcaccattcctgatgagctgtcgtagaatctttctctgatttagtgcatatccgatatcctgctcgtcaaagccattttcttgagctatatagacaggggggatagtgcttttactagccaaatcaaatgaattgagtgtatcttcatagccataatgtagcaagtaagagcgaacaagtccataactaatatttggtggaagagatatcttttcaatagtcatctgccgcttcaacctctcttgagattcatattcc

SEQ ID NO: 17149 - DNA, 888 bp, Gossypium hirsutum
  Clone ID: GOSHI-09MAY01-C19734_1
aagatatttagcatattctgttgtatcactggctaacctgacccagtttaaacatctctatcctagccataatatagggacagaggaaaagggaaagaaggaatgacaagaattactgaagtaaaaggcaagaatgcaagttaaatttgatatttataaatgcagggcactccttgagttcccaatggccaaaacaacaataatggaaccagaaaagaaagaatcaagaggcaaaaaaggttaaaatatgccattaatcattgtaaagtacaaggactaactgcatattttagctgacaaaaaaatatgcaaatgctttaacagaacaaagaaacaaagttctagaatgacattaaaggagccacatacaagtcccattcacatgcattgacaacataacttaatcctcttatgacagttgatatatgttttcacaacagtagacaaaatcgaatagtgtacagacctgaacaatctggggataccaatcacgaagtttgctaattgctgcatcaatctcaccattcctgatgagctgtcgtagaatctttctctgatttagtgcatatccgatatcctgctcgtcagagccattttcttgagctatatagacaggggggatagtgctatacgagcaaaatcaaatcaattgagtgtatcttcatagccataatgtagcaagtaagagcgaacaagtccatacctaatatttggtggaagagatatcttttcaatagtcatctgccgcttcaacctctcttgagcttcatattccttcaaatcaaaagcaaatttgttttggccaaagttgacatgaacctcctcgtcttgtttgtgagtggcattttgtagggaataatcgacccttcatttccttttccgattccc

SEQ ID NO: 17150 - DNA, 397 bp, Gossypium hirsutum
  unsure (1)..(397): unsure at all n locations
  Clone ID: LIB3493-033-P1-M1-E12
atttatcgaatttgttcnggtangggcactgtaagaggctgttaagtatggaanaattgaattggcaaaattttttcggttggctggatttgatgatttagtgcaggactgtgttgctttgctggcatatgaacattcacaggagtcctgtgtgggataccttctagaagagtcgcaacgtgatcttgtggcagacacagttaatgcaatgatattgtcaacaaattcgaacacgcaagatatggaagggtgcttatctttcttatcgtggggggggggggaggaaaattacaacttgtttttttttaaataagtggtttttaaatgtgtttaacttattatataatattttatttcttttttttttattgctccgtgttgtttttaacgagttatg

SEQ ID NO: 17151 - DNA, 1053 bp, Gossypium hirsutum
  Clone ID: GOSHI-09MAY01-C19684_1
tttttcatctctgttttgttccaagctctgggttatggcttcccaggcgttttatcttcttgtttcaatcattgttctcttatccgccattgttgtctcaggttcgggttcggtcgggattaactacggtcgtgtagcaaacaacttaccgtcaccggaaaaagtcgtggaactattgaaatcacaaggaataaacaaagtgaagctttacgacaccgacgcgacggttttgacggcgttagcggattccggtataaccgtggtcgtcgcacttcctaatgaactactttcatccaccgctgctgatcagtcgtttgcagacaactgggttgaagcaaacataacaaagttttacccaaagacaaaaatcgaagccatagctgtcggtaacgaagtgtttgtcgatccggccaacacgaccaaatacctcgtaccggcgatgaagaacatccacgcttcgttagttaaatccaagcttgattccgccattaaaatctcttctccgatagctttcagtgctttaaaaacctcgtatccttcatcggccggttcgtttaagccggaattgattgaaccggtgattaaacccatgttggattttttgaaacaaaccgggtcttacttaatggttaatgcgtacccgttttttgcttattcggctaattcggatcagatctcacttgattatgctttgtttaaggataacccgggtgtagtagattcgggtaacgggttgaaatattctagccttttggaagctcaaatcgacgccgtttttgcagctatgtcggctattaaatacgacgacgtaaagatggttgtgaccgaaacgggttggccatcaatgggcgatgaagatgaaataggtgctagtgaatccaatgcggcgtcgtataatggtaatttagtacggaaagttttgaccggtaatgggacccctttaagacctcaagacccacttaacgtttatttatttgctttatttaatgagaataaaaaacccggtccaacttccgaaaggaattacgggttattttaccctaatgaacaaaa

SEQ ID NO: 17152 - DNA, 574 bp, Gossypium hirsutum
  Clone ID: GOSHI-09MAY01-C19624_2
taaaaactctcgattcaacagagaagaagactgtaaacgaagagaaagaaggaaaaaggaaagtgaaaggaaaaagacgaaaagatgatgtccggaggttataccagcattgataaccagaaagtttctggatccgtacccgccgtttcggattccggccgtgtcccggtccaattcgcagattcgggccttcaaacatttcctccatcgggtgtgcaggggaagatctcgggtggaactctacctccatctgatgccgacgattcattttcaagacctgctggtggctcttctagtggctctgatgaaccacaagcaagtggatggcttcataaattcacagttgctgcatacaagccatattttgatgttgatactacagatgttttggatagacttaaggagtcactctatccatttaggggaacatttacagagaaaacagctaccaacccagatttatatggaccattctggatttgcaccactcttatatttgtagcagcgtctattgggacatttgtgacctatgtagcacacaagctccgggataaagaatggaattatgacataa

SEQ ID NO: 17153 - DNA, 832 bp, Gossypium hirsutum
  Clone ID: GOSHI-09MAY01-C19624_1
gagagaataagtaaacaaaaagctaaaacctggggacggcaacacgcgcaagagagagatctgtttgaacaaagagaaaaaaaaatgatgtccggaggttatacaagcattgataatcagaaagtttctggatctgttcctgcggtttcagatcccagtcatgtcgccgttaaatttacagattcgaaccttcaaacgtttcctccatcgggtgcacaagggaagatctctggtggaactcaacctcctcatgatgctgatgatacattttcaaaacctgctggtggatctcaacctggatctggtgaaccacaagggagcggctggtttcgtacattcaccatcgctgcatacaagccatacttcgatgttgacacttctgacatcattgatagacttaaggagtcactctttccatttagaggaacatttacagagaaaacggctaccaaccctgatttatatggaccattctggatatgcaccactcttatatttgtagcagcatctattggaacttttgtgacttacatagcacacaagctcaagaaaaaagaatgggattatgacataaatctagtgacttggtctgctggtgtgttctatggctatgtcactgtggttcctcttatcttgtatgttattccccagttactttccaccaccaccaggccttttcaacctttttggtctgttatgaatacccataattgttctttatcccacaattttgtctatccgtggttcccctgggaattttccaaatgggttaattggccggtgtacctgggtccatgttcacaactttggtggcacttattcctcaagctct

SEQ ID NO: 17154 - DNA, 533 bp, Gossypium hirsutum
  Clone ID: LIB3584-035-P1-K1-G3
ccaacgcgtcgggaaaaattatttcacaaaaattaaaattaaaaccttctcgactccaacaggagagagaggttggtgttaccgaagagaggagaggggaaaaaaaggtgaaggaaaagagacgaaaggatgatgtccggaggttataccagctttgttaaccagaaagtttctggatccgtacccgccgtttcggattccggccgtgtcgcggtccaattcgcagattcgggccttcaaacatttcctccatcgggtgtgcaggggaagatctctggtggaactctacctccatctgatgccgacgattcattttcaagacctgctggtggctcttctagtggctctgatgaaccacaagcaagtggatggcttcataaattcacagttgctgcatacaagccatattttgatgttgatactacagatgttttggatagacttaaggagtcactctatccatttaggggaacatttacagagaaaacagctaccaacccagatttatatggaccattctggatttgcaccac

SEQ ID NO: 17155 - DNA, 803 bp, Gossypium hirsutum
  Clone ID: GOSHI-09MAY01-C19314_3
cggtccgattcccggtcgcccaccgtcgcacggagcaaggcagcctggcaaagacagctaatcgttgctttgtccaagaagatgccaaaagagctcccaagttagcttgctgccaatcatcgtcttccactaaacaagccgattccaaccccagtggcgtggcagataaacataatcaccctgcaataggtttcatgcctctcaacaggaccccttcttattccaatctaccccctgatacgaggtggtggcttcagctgcaacctaactatggtccccaaatgagtttaacaaatgagcagctgaatgccttagaggatgaagtggaaagcttgaaagctgaaataaactcctccaaagtaagtagtgatcttcagcaggatgcacatgatatttccattactgatagaaaaaagaacaatggcggttctcttgattcaacggagacggtgcgaagctttgaacttttggagatggaatctgttgaatgccgtgcttccatgaaaaccaatgactgctgttccgatccagagtctccctgggccgggggtgggaaggctgagccatggtggcgcacaacagataaagacgagctggcctctttggttgcacagaagtcgttggatttcattgagaattgtgatcttcccccacctcagaagatgcatgtaagaaggtacttgtgtgcatcttccggttcttatggcggtaatcggaagtctgaagcaggccctatgcttggtccaatcctcaatgcgcagggctctcctgattctgtaataactcttggaagaaagatgcag

SEQ ID NO: 17156 - DNA, 1038 bp, Gossypium hirsutum
  Clone ID: GOSHI-09MAY01-C19314_1
attagatctatcatctatgcaattaccacttgcccatctcctttcaatcctttatctttctggctacatgtgtcgacaaggagtgtaatggcagcagctgaagcaagggctgtctggcaaagaacagcgaatcgttgctttgtccaagaagatgccaaaagagctcccaagttagcttgctgccaatcatcatctcattgtaaacaggctgattctagccccactggtgtagcagatgctcgtgatcaccctgcagttgatctcaatgctctcaacaggaacccttcctattccaatctaccgcttgatatgaggtggtggcttcagttgcagcctagctatggaccccaaaagggtttaacaaatgagcagttatatgccttggaggatgaagtggaaagtttgaaagctgaaataaagtctccctccaatgtaagtagagttcacccgcatgatgcacaagatgcttctggtgttgacagaaaaaagaacaatggaggttctcttgattcaactgagacggtgcgaaactatgaacttttggagatggaatctgttgaatgccatgtttccaaaaaaatcaatgactgctgttacgatccagagtctccttgggctggggatgggaaggctgagccatggtggcgcacaacagataaagatgagcttgcctctttggttgcacagaagtcgttggatttcattgagaattgtgatcttcccccacctcagaagatgcatgtaagaaggtactcgtgtgcatcttccggttcttatggcggtaatgaaagtgtcttctttgggtcggaagtctgaagcaggccctatgcttggtccaatcctaaatgcgcagggctctcctgattctgtaagaactcttggaagaaagatgcagtgtgcttccaacacaccattcagaacaatccaaaggatattatagcggaagttacgagtctgatcctaccacagctcagctgttagatgcacttcgtcgctcacaaatccgtgctagggaagctgaaaaagcagcaaaacgaa

SEQ ID NO: 17157 - DNA, 610 bp, Gossypium hirsutum
  unsure (1)..(610): unsure at all n locations
  Clone ID: LIB3825-010-Q1-K6-E7
anaaaaccaagtaccagaaatttgtaactgaaaaaagacactgttttctacaagactgtcctgttttgttccttgtatccctcttatccattgcaatccaacggtttctttgaccttccctttttgtccaaagaacgacttcttttactttacttcctaatttatactagatctatgcagttaccgcttactcacctcttttctatcctcctccttcctggctaaatgtgtagcagagaaagattgtaaatggcagcagcggaagcaagggcagcctggcaaagaacagctaatcgttgctttgtccaagaagatgccaaaagagctcccaagttagcttgctgccaatcatcatcttccactaaacaagccgattccaaccccagtggcgtggcagataaacataatcaccctgcaataggtttcatgcctctcaacaggaacccttcttattccaatctaccccctgatacgaggtggtggcttcagctgcaacctaactatggtccccaaatgggtttaacaaatgagcagctgaatgccttggaggatgaagtggaaagcttgaaagctgaaataaactcctccaaagaaacaatggaaagctttg

SEQ ID NO: 17158 - DNA, 550 bp, Gossypium hirsutum
  Clone ID: GOSHI-09MAY01-C19334_1
cggctcgtttaaaaaggcatggagcaaattggagaacaacgtgtattagaagcacaacttagaatgaggcagcaggaacttcaggatgaagaagaaagaatgcagaaaagacgagaatcgagtacttcaactggtgttgcaccaggagaagttcaaaacagttcggttgcagctcgttcatctggtgcggaggaagtagtttcttttcaagattcacaacctgccttgatgattaaacaaccttcaaatcctaggtcaaacagggatgagtttgacatagatcttgagggcataatggtcacggaagcaatttggcagtcaattcaggagaactgtggacacagaaattctagctgcagagatgctgcttctttagtccaacatgtttcaggatatcgttatatctctcctgctatgacaacagtggctggttcatcatcatctgcttttgctggtcatgtttgtgcggtagctggcctaactgagtggcagcagatgactggagaatcttctcccaattataatgtaaatttgccagcatttcatatgc

SEQ ID NO: 17159 - DNA, 412 bp, Gossypium hirsutum
  Clone ID: GOSHI-09MAY01-C19234_1
acggccatatacataaaatcacgtactatatgaggtaacgaaaccaatacccctggaccgggagctcattcaactctcacggctattgctacctctagaatgaaaattgggcgtatcgaggatggtccacccatatcgacagatagcacccggaaaaagggtggtcgaagagggagaaggctataaactagcacattatgttctagcaaatctatccttcagtgttttttcggtggtattggaatttggttatttggtaataactggtctttatgagccctttttcatagttttatattggtgtattttatattgcagtaatgttttatatgaatctcatgtcataagtagaaatgtttaaatgaaaatagtctggtgatatttttattaaaaaattggtgggttttatcac

SEQ ID NO: 17160 - DNA, 473 bp, Gossypium hirsutum
  Clone ID: GOSHI-09MAY01-C14954_1
cggtcggtcttctggatttattactaaactatttggattttggttctctacccaaattcagacaagcaaccggaaaaaagtgtcagttgtttcagttttcagacaaggaaacaaagcaggaaaatcgggtcagaaaaaaaaatgagagttaactggaaatcatggtcacttaacaaggaccatcttgtgaagcttgcaattggcattctcttagtgggttttgcttttaagctcttggtttttcgttctaaaggatttggtgttgatttggaattccctgaggtagagaaagagtatgttcaaaaaccagatttgaaatctcctctccctgttcaaatacctgaaaatgatgatcaaatgcctctagatgttgttatagagaaatgtgatctctttacaggggattgggttcccaatccctcaggtccgacctataccaacgggagctgtcccttgatagaagtcatcagaat

SEQ ID NO: 17161 - DNA, 523 bp, Gossypium hirsutum
  Clone ID: GOSHI-09MAY01-C14924_1
gacgcaccacgcgtgcgcccacgcgtccgtccttttttaattttcttccatttctttattgccttccctcccactcttcctcctccttatattcttcctttccctccctatttccttcttgggttcctctcggctttttcccttttcttctatctatccaaacccaaacacctcttttttcgcaaaattttctaagttttagccatttagaaaaaaagctttttgttgttgaaggccatgactatgagtaacaatattgggcaatttggtgacacaactttaaccaaagttttcgttggagggttagcttgggaaactcccagagaagccatgagagagcactttgagaagtatggtgagatccttgaagctgtgattatttctgataaagtcactggcagatccaagggttatggattcgttacgtttaaggaagctgaagctgctaagaaagcttgtgaggatgctaaccctatcataaacggccgccgagctaactgcaacctcgcctcactcggcgctc

SEQ ID NO: 17162 - DNA, 410 bp, Gossypium hirsutum
  Clone ID: LIB3189-048-P1-K1-B9
cggacgcgtgggttttttcgcaaaattttctaagttttagccatttagaaaaaaactttttgttgttgaaggccatgactatgagtaacaatattgggcaatttggtgacacaactttaaccaaagttttcgttggagggttagcttgggaaactcccagagaagccatgagagagcactttgagaagtatggtgagatccttgaagctgtgattatttttgataaaggtaatggcagatacaagggttatggattcagtacgtttaatgaagctagagctggtaaacaaggttgggaactttctctctctataataaacggacggcgtggttacttaaatcttgactcacttgaagcgtataacccgatgtccactctcactgtttattaacaacaaggaccacacgca

SEQ ID NO: 17163 - DNA, 2232 bp, Gossypium hirsutum
  Clone ID: GOSHI-09MAY01-C14854_1
tctctctatgttgttctctctttaattttacctcccattacccttttctacttaatctctcattgcttacttatattgtaagtgtgaccaagtaaaccaagtacagaagctcaatgcccaagatggaggccagcagcagcacctcccatgacccagcattgttccatgctcccttgctacaccaccctcggaggaggagcagcagacccttaaagggtttcgcagtgatatttgggtccgtcgttttcctactctcactggtcacattaatcgttaaccaaagcccggagccattagcaagtaaccccagtagtgtaacggaggcagggtcgtattcaatggcggcgcagccaagagggatagctgaaggtgtttcagccaagtcaaacccatcactttttgacaaagttgggtttaattggacaaacgctatgttttactggcaaagaactgcctaccactttcagcctcaaaagaattggatgaatgatcctgacggtccgttatatcacaagggatggtaccatcttttctatcaatacaaccctgattcagccatatggggcaacatcacttggggccacgctgtatcaaaggacctcattcactggttctatctcccactcgccatggttcctgatcaatggtacgatatcaatggttgctggacggggtcggccactctccttccagatggccgaatcgtaatgctttacaccggcagcaccaatgagtccgtgcaagtccaaaaccttgcatatcccgccaacctatctgatcccctcctccttcagtggttaaaatacccgggtaacccggttgttgttcccccaaccgggatcgaagacaatgagttccgagacccgacaacagcttggcttggacccgatggttcctggcggattactgttggtacaaggtttaataccaccataggaacagcccttgttttccaaacgacaaacttttcggactatcaattattggatggggtcttacatgctgttccgggcacgggtatgtgggaatgtgtaaatttttaccccgttgcaataaacgggtccgtcggacttgacacgacggcacttgggcctggaattaaacatgtcctgaaggctagtttggatgatacgaaagttgatcattatgcaatagggacctacgacatgataacggataaatggacacccgataacccggaagaagatgtaggcatcgggttgaaagtggattatgggagatactatgcctccaagacattttttgatcagagtaaacaaaggaggattctttatggttgggttaatgaaactgatactgaagctgatgacctcgaaaaaggatgggcttccattcagacaattcccaggagtgtgttgtatgacaacaagaccggaacccatttactacagtggcctgtggaagaagtggagagcttgagactgaatgctacagtgtttaaggatgttgtagttgaagcaggatcagttgtgcccctcgacataggcaccgctactcagttggatatattagcagagtttgaaatagagacgttggtatcgaacagcacggaggatgaagtcagtgattgcggtgatggggcggttgataggaacacttacgggccatttggggtcctggttattgctgatgattcactttctgagctcactcctatatatttccgtccacttaatatatccgatgggagtcttgaaacttacttttgcgctgatgaaacaaggtcttctaaagctcccaatgtcacgaaacgagtgtatggaggcaaagttccagtgcttgacgatgaaaactacaatatgagggtattggtggatcattcagtagtggaaagctttggagaaggagggaggacggtgataacatcaagattgtttccgacggaagccatatatggagcagcacggctgttcttgttcaacaatgccagtggagtgaatgtgaaggccacactcccaatatgggagatgaattctgcctttattcgtcctttcccctttgaagaaacattattccaggaaatggttgcttccacatgattatcatttgggaagggtggatgcccccagtccacattacatattagtattatgtttgcagtgcttaatttttttttattggttgggcatgatccattcactttgttttgtcgcctggtatttggttgagaataaatcgataaaattttgagattcttatatgttaaatatt

SEQ ID NO: 17164 - DNA, 1022 bp, Gossypium hirsutum
  Clone ID: GOSHI-09MAY01-C14844_1
ccttctcgtccgcccacgcgtccgccgattattcctttccacctctcacctctctcctccttttcatcgaacagctctcaaaattcccaatttttccctaagaaaaaaccctaactccatctccacatttacgcaacatgtcattcgatgaagaagagtccttcgaacacaccctcctcgtggtccgcgaagtcactgtctacaaaatcccgcctcgttccacctccggtggttacaaatgcggtgagtggctccaatccgacaagatctggtcgggtcggctccgggtcgtctcttgcaaggaccgatgcgagatccgattggaggatcccaactcggctgagctattcgccgcttgttttatctaccctggccagcgcgagagttccgtagagcccgcgctcgattcttcccggtacttcgtgctcaagattgaggacgggaatgggaaacacgccttcattgggctcgggtttaatgagcggaacgaggcgtttgatttcaacgtggccttgtctgatcacgataagtatgttagcagagagaacgagaaagaggctagtgagaaaaatgcgactgattctcttattgatattcatccggctgttaatcatcgattgaaggaaggtgagaccattcggattaatattcagcccaagccatctagtggaactggcatgctttcagctgctgcattgtcaggggcgattctaaagcctaatactttgtgccttgccccgccgcctgctggttcgggaaagataagatctccttctcccaccccctcccaatgaccctgcagctgctcggatgacatctaccagtcaaggtgttggtcaaagagcacccaccgaaaacacaagacaaactgaccctttaacaaacttttctcaacttgagaggaatcttcctgctagtggatctggatctaggaagaccactgcatcaggatgggcggctttctaatagtacgagtatttggtcagtatgtaagatcttttgttccatgttttggatatatg

SEQ ID NO: 17165 - DNA, 1006 bp, Gossypium hirsutum
  Clone ID: GOSHI-09MAY01-C14814_1
gttgtcttcaaatggtgaaattcctcacagagtaaacaaaggacattctagattgttatctatgtcaccaaatgcgagaaaggaaagaatagcctcccttgagaacatgctcagcatgtcttcaaatgcactcacagcaatggcttcacaactctcggaggcagaagaaagggaacgtgggtcggttggtcgtgggcggtggaatcaagtacgctcaataaatgatgcaaagaacttgcttcaatacttgtttaacactactgcagaatcaaggtgccacttgcgggagaaagatttggaaattaaggacctcaaacagcaattaaaggatctcacagctctattatggcaaagtgaggcacagaaaaaagagcttgtgaaggagcaaatgatgagggagcaagctgttgctattgccttagctacatcagcttcggggaactctcgcagttcgtctaagcactttgccgatgatttgagtggtccgctttcaccagtgtcactgccagcccctaagcaactaaaatttacccctgggtttgttaatgtatctgttagagactcagcagcatttctagatcaaacacgaaagatggtaccagtaggacatttatcaatgatgaaattgacaaccaagggacaaaccggaaaactctggaggtggaagagaagtcatcaccaatggcttcttcaatttagatggaaatggcagaaaccatggaaactatcagaatggatcaaacacagcgacgaaaccatcatgagatcaaagcctcgtgcacttgctctaactgaccggatatgataaaagcttacctttaaccacctcctccgtcatgtatatatacatcttgactgtcataatggctctccacggcttaccaagaaaataaacccaggcatgttgtaaatagggaagaggttggctcttcctggatgtgtctaaacaatgaagcttatgcaaccgtagtgtgatggccaaggactattgtgatttcattcatat

SEQ ID NO: 17166 - DNA, 641 bp, Gossypium hirsutum
  Clone ID: GOSHI-09MAY01-C14804_1
gctgctgaaactgccattaatattttactaacactttcatagcaggtttttcagaagattgtattgtatgtaccgggaccactgatagcatagcggcctttcttgcagcacgagcaacaaaacccgggaaagcggtttcctctttgggttcctcccttgcacttaaactactaagtacaactaggatagaggatgcaagatacggagtgtacagtcatcgccttgacaataagtggcttgttggaggagcttccaatactggcggagcagttttaaaggaaaatttcagtgatgagcaattggaaaaactgagtgaacatattaatcccatggaggcctctcccttagactactatcccctaaaatcagttggagagaggtttcccgtggcaaatctgaagatggagcctagtgaattgtgaaaatgcttgtttggaacatggaagaagggggaaccatgttatttggactccggtgtgtcagtgttggataaggatatatatcttacgcaggttacatccacgaccggaaagtgatgtggagtacttgcatggcattttggaatcaatcgcccgtatagaggcaaaggcatacatgttgtttaaggatctaagtgcgacccaactcgatgaagtgttccc

SEQ ID NO: 17167 - DNA, 397 bp, Gossypium hirsutum
  Clone ID: LIB3148-027-Q1-K1-A5
tggactcgggtgtgtcagtgttggataaggatatatatcttacacaggtatttttagttgtgtaagttattccttatatttggagggtcttagagagttatatccccacacccatgtacgaatatacattatacatggacacttaaagaaaaaaaaggaagagtcagagatcaacatagcttttacaaacattgcgtttggatcaaaatgctatcgagttttcgattttgttcaggttacatccacgaccagaaagtgacgtggagtacttgcatggcattttggaatcaatcgcccgtatagaggcaaaggcatacatgttgttgaaggatctaggcgcgacccaagtcgatgaagtgttcaccgccggaggcggtgcaaagaacgacaaatggac

SEQ ID NO: 17168 - DNA, 1111 bp, Gossypium hirsutum
  Clone ID: GOSHI-09MAY01-C14834_1
caaccctttctctccaacgacccttctcaaatctcccatggaattaacccttcttttcccccttttcttcttcttcaccttatcttctgctacatacatatccactctaaccttaaaccaaaaccatccatcatcatcatcaagctggagaagcgatgatgaagtgatggggttgtacaaatcttgggtcatccaacatggcaaagcttacaatggcatcggtgaagaagagaaaaggttcgaaatctttaaggataacttgagattcattgatgaacataactctaacaacaacactacatataagcttgggttgaacaagtttgctgatttaaccaaccaagagtaccgagccaagttcttgggcaccaggactgaccctagacgtcgactcatgaagtccaagatccccagctcacgttacgctcaccgtgccggcgataacttgccggattcagtagactggagagatcatggagctgttagtccggtcaaggatcaaggatcttgtggaagttgttgggcattctcaacaattgcaacagtggaaggcataaacaaaatcgtgtccggtgaactagtctctctatcggaacaagaactagtcgactgtgaccgatcctacgatgccggttgcaatggtggcctaatggactatgccttccaattcattatcgacaatggtggcattgacactgaaaaggattatccttaccttggcttcaataaccaatgtgatccaacaaaaaaaaacgctaaggttgttagcattgatgggtacgaggatgttccaaataacgagaatgctttaaaaaaggccgtcgcacatcagcctgtgagtatcgccattgaagctggtggtagagctttccaactctatgaatcaggagtttttaatggtgaatgcgggttagctttagaccatggcgtggttgcggtcggatatggctccgatgataacggtcaagactactggattgtgaggaattcatggggcagcaattggggtgaaaatggatatataagaatggagcgtaatattaatgctaataccggaaagtgtggtattgcaatggaggcttcctatcctggtaagaatggggcaaatatc

SEQ ID NO: 17169 - DNA, 316 bp, Gossypium hirsutum
  Clone ID: LIB3149-021-Q1-K1-A4
ttcattgatgaacataactctaacaacaacactacatataagcttgggttgaacaagtttgctgatttaaccaaccaagagtaccgagccaagttcttgggcaccaggactgaccctagacgtcgactcatgaagtccaagatccccagctcacgttacgctcaccgtgccggcgataacttgccggattcagtagactggagagatcatggagctgttagtccggtcaaggatcaaggatcttgtggtgagtgaatttttatgtaatttctaacttcaaaatgaaaataattatatccatgcacttctttttttt

SEQ ID NO: 17170 - DNA, 391 bp, Gossypium hirsutum
  Clone ID: LIB3189-041-P1-K1-B1
caaatcggcagccttctgcatctcctcaaaaggttatagcagaaggaggtctcgaactagcagggaaagtggtacagattcatggagtccttatggataccccacgccaccacaatctgcatattctcaacaaaattattactacacgtcgcaacatcctagttatgcaccaccgccatcatataattatatatcgtgaacgcctgggtgtgtacataggactatggagaggaaatactcaaggatttatgataactaccagacatgggaccaggccaatacttatgggacagcagtgccactcaaaatggatctcgacaggcaaattctctcgcgtgttggacaaattagcagcagaaccaaatgcatgaagctttaagcaaacagacta

SEQ ID NO: 17171 - DNA, 342 bp, Gossypium hirsutum
  Clone ID: uC-gsronu33B139b03b1
ctcccctaacccgattccttttatttttcccccaatttccctaaatcggcagccctccgcatctcctcaaagggttgtagcagaaggaggtctcgaactagcaggtcaagtggtacagattcatggagaccttatggatgataactaccagacattggaccaagctgtttgtgttttattctatttttgttctaagatctattaaatctaacttaattttcacgcattctgttgtgcaagtagatcattcttctcttatgtagaatccattcattagtatatttcaaggctgccagattcattctaggtaaaagttttcatggaagccaaatttttagatct

SEQ ID NO: 17172 - DNA, 1239 bp, Gossypium hirsutum
  Clone ID: GOSHI-09MAY01-C14544_1
tttaggaaagcatcttcaagtttcaagctttggggttctgttctttttccttcatcttctttctttctttctttctctttacatttgggaagcagaaggaaaaaagcaaagatgaagcttttgtgggtttgggttgttttaccatttgcttttgctcaactggttactgccttctttgattttaatgaaactgagctgtctcttatcgagtctttggaatatggagtctctaaaatcaattataatcctctcatggttggactcactcttattcatactgctggtgctaaaggagctgtgtgtctggatggaaccttaccggggtatcattggcaccgtggatatggatcaggagcaaatagctggctcgttcaattggagggaggaggatggtgcaataacattagaacttgtgtgtaccgcaaaaagaccagacgcggatcttctacttacatggaaaagcagataccatttactggaatattaagtgaaaaagccgaagaaaatccagactttttcaattggaaccgagtaaagcttcgttattgtgacggtgcctcttttactggggacagcgaaaataagggtgcacaattgcaatttagaggccaacgtatatggttagctggaatggaagatttaatgtcaaaaggaatgcgctacgcaaatcaggctcttctttcggggtgttctgctgggggtctggcagcaattttacactgtgacgagtttagaggcttgtttccaagaaccacaagagttaaatgccttagtgatgctggtctattccttgatgcggttgatgtctctggtggtcacacaattaggagtttatacagcggcgtggttggcttgcagggcgtgcaacataacctgccacgtatatgcaccaaccacctcgatccaacttcgtgtttctttcctcaaaatgtaatcaaccacatccggactccactgtttattcttaacgcagcatatgattcatggcagattcaatccagtattgctccaccatcggcggatccacatggttattggcatgattgcagattgaaccatgcaaaatgctctgcttctcagctccggtatttacaaggcttccggacacagatgcttaatgctataaaagggttctcaatgtcgagacagaatggattatttataaattcatgttttgctcactgccaatcagaaaggcaagacacatggttgctgataattctccttgaattagaaaca

SEQ ID NO: 17173 - DNA, 770 bp, Gossypium hirsutum
  Clone ID: GOSHI-09MAY01-C14564_1
ggcccggaacgaccaacccgtccggccacttcctctcttccgtaatctcttactttcagatttcagtctcagtaaagctttttcagcaccagccaaaatggggaagactcgtggaatgggagctggccgtaagctgagaacccaccgcagaaggcagaggtgggccgacaaggcatataagaagtcaaatcttggaaatgaatggaagaaaccttttgctggatcatcacatgccaagggcatagttcttgagaaaattggcattgaagctaagcagcctaactctgctatccgaaaatgtgctcgtgttcagttgatcaagaatggaaagaaaattgctgcttttgtacccaatgacggttgcttaaactacattgaggaaaatgatgaggtattgattgctggatttggacgaaaggggcatgctgtgggagatattcccggagttcggttcaaggttgttaaggtttcgggtgtgtctcttctagctcttttcaaagagaagaaggggaagccacggtcttaaaagaatttgacttttaatggctcacttaatctttgctatttatataaaaacctagtgtttgggattttgtgatgaaggattttagatatccaactcaaactgtgttctgtttttggtttcaaatctaaaattctgtttggtcgatcattatatatggtcttatgaacccattatgtttggtgttatcatgtatgaacagaatagtacttgctgattatgataacaatggctcgatttttaaaaa

SEQ ID NO: 17174 - DNA, 1694 bp, Gossypium hirsutum
  Clone ID: GOSHI-09MAY01-C14494_1
gtgaaaaggcttttgacaatgaattaatcaaagaggaacttgtcaaagcaatagatgaggaaaatcagtgtgacaaaacaaatgaaatcatagtgaatgaagtttcaaaagaagaggtccagggtgttgctgaaacatcttatctgacttcagaaccggaactgccggtgagagatggcctaggagaagacgagctaaagggtaaactgattgaagacaaagcattggaaaccactcaaactgaagagcacgttgtggaagctcaaaagatgagtgaaaatgagatagctgaaaagcagattgtttgtgaggataaaactgttggaaatcctgcccaagcttcagttgcaaagatagaaaccgcaacagtggtacaagaggaatcaagtttagaattaccaaagtcagatccagaaggtaccaagggttcagataatcagatttccagggaattagagccgattgaaaacacagagataacaagttcacctgttaaagaatatgttccaatagatttgcaggacaaagttgcagaatcctctgagaaagctgaagttgaagatgtcaaagaggtttacctaaaggaagcagaagttggccatggtggagacaaaataacagacgaatccagtgaagaaataaccaagaagtctacatcggtggaggattcaactgagattaaggagcttaaagatgaacatgcgggagacaagaccaatgaaacctccgaaaccccaatattagaaaatcaaaatgagaagctcactgtggaagctctaaaggacgatggttcaaacaacaattttaagaaagagattgttgaagaagatcgaactgtgaaggatcacgaacaagcgccagttgccgtgaaagaagccataactgttccaggagaagccattgagaagcctgaagcaagagatttgcaacctgaaaaagctgaggttgataatggagaagagaaaacagataattcaggtgttgaaataaaattggaacctgcatccacaggtagtggtaatttatcattttccgatctactccaacaatctacagaaaagaaagtggagatggctgaacgtgtgattgaagagagggaacttacagtaagcaaggaagcagcaccggtggaagctgcaggaactattcaagccaaagatttaaaaactgatgaagtacctgaaggagaggaacagaataagaccgactctggctcggatgctccagtgatggtggaagcaccgagagaagctgaaactaaaccacccaagaaatctcaaaacatactatcaggtgttgggtccaaagtcaagaactcaatttccaaggtgaagaaagcaattactggtaaatcttctcatccaaaagaaccaaaagcaatatcaccaaagtgaagcgagaaatgaagatcatcctcaattcttagtacataatcacatattttatgatttgttttataagggtttgttttctgtcaaatattttatgatttgttaagcttggtgagttttttgtgcagattgagaaagcagtttctgtattctttggtataaaaatacttgaacagttacatgattgtgaaaaggattttaaattgttgcagtcttttttgagcttgctctttaaattgaaatatagaaaatcaaatttattacagatgaaataactataaaattggcgcccccttttggtgg

SEQ ID NO: 17175 - DNA, 472 bp, Gossypium hirsutum
  Clone ID: GOSHI-09MAY01-C14474_1
ctttcccgaagaaaaccaaaaggcagaaaaacaatttgaactgatcattgctatgatgatgatataagccaaagtgggtctgtttcatttgttgtttcgacctgcatattgaagattaacgatggcgggaatagcaatattactagatctataccagaaaaaaccaagcttttgttctccacaaagcttccactcttctgggttattctctgcctccgctgccgccgcatcggccgccgctaccgtcgctgctggaaccccttttgcctccaggtttctttttggttatcccaaggtttcacattgtgatgctggtgctgtactgcctgaacattacatttcaaatacccaaagatcatctgaacatttctttaagaatgatgctctcaaattcagtgtgaaggagtttaagattgagctggagcctctggtttctgcttttgaattgagggccatttgcttgacaaccttg

SEQ ID NO: 17176 - DNA, 1336 bp, Gossypium hirsutum
  Clone ID: GOSHI-09MAY01-C14424_1
gcttttcatatacatataaaagaagttcctagaaatgagctcccgcgcctccgaaaaaaatggagttttggggagttttaatttctggggttttagtttcttggtgggttttgagtgtaaatggtgctaatttaccaccatgtcaattccctgctatttacaactttggtgactcaaactcagacactggtgggatttcagctgcttttgaacccattagagctccatatggtgtgccctattttcacaaaccatctggtagagactctgatggtcgcctcatcattgacttcatagctgagagacttaagttgccatatcttcatgcatatttgaattccttgggagcaaatttcaggcatggagcaaatttcgctactggtggatcaaccataagaagaccgaatgaaaccatttatgaatatgggataagtccatttggtttagatatgcagattatacaattcgaacagttcaaggcaagggctactgaaatgtataatcaagctaaagatccttctgaaaaagataaacttccaagacctgaggacttttcaaaggcgctttacacctttgacattggccaaaatgatctttctgttgggtttaggaaattgagctttgatcaactgcgtgctgccatcccagatatcataaaccagttagcatcagctgtccatcatctgtatgagcaacgagggaggagtttctggatacacaacacgtggtccgatcggttgcttgccggttaactatttctacattcttaatcccgaacctggttatgttgatcagtacggttgtgtcaagaaacaaaatgaaatggccatggatttcaatagacagcttaaggacagagttatcaagtttagaacggagctcccagaagcttcggttactcttgtagacgtctataccgctaagattgcaatgattggcaatgctaagaatctaggaatggcggatccattaaagccctgttgcggatatcacgtgaactacgatcacgtatggtgtgggaacaaagcaatcatcaacaaaaccgaagtatttggagtttcgtgcaaaaacccgtctatgtttgtaagctgggatggagttcattacactcaggctgcaaatcaatatgttgcagatcgtacactcaatggctcgttatcagaccctgcaattcctgttactctagcatgtcataagcagtaagtaagagaatcttttgatctcaaatgtattgaaatctccattttgatgtatggaaagatctgttacgtgcaaattgatctcaaatgtcatataaaaaagactttaatgagaagttttaataatgttggggacc

SEQ ID NO: 17177 - DNA, 457 bp, Gossypium hirsutum
  Clone ID: GOSHI-09MAY01-C14754_1
cttccttttgctaaggattcgacctagcggtgcgccgcacctgtgggtcatcggtgccttacacctccaccttggccgacggttcatggagcgaagtcaggtacatgtgcgggcataccactaacgtggcatggtggagcggcgcacgacgcggggcgtgtgaaggttgttcggcagctgagggctacggcgcgaaggaactctaggattcctgaaagagttttgattttgggccgtttgggcctggtttatcctatctaggtattgggccctgttgtaaatgggtattcgggtttgggcctattgtaattgggtgtggtatttgggttttgattggctgtaatgaactttatattttggactatcgtttattgggccccgggctaaaattgggccctacaactataatgcatattttattatattaaaaacccacaattaatataataaatatttt

SEQ ID NO: 17178 - DNA, 1586 bp, Gossypium hirsutum
  Clone ID: GOSHI-09MAY01-C14734_1
gcctgccgtccggactgatggtggccgaccgtgcgtccggctttcgtagataactacacttttcgcactgatctgtttgagatcaagaaagtaagtgacatcgaaccgtcgttaaaacgacaactgcttatctccaccgttctcatgactgccgggattgctgtcgttagcttctttgcattgccgtcagaattcactctcttcaattttggaactgaaaaggaagtgaagaattggcacttgttcttctgtgttgctatcggattgtgggctggactcattatcggttatactacagaatattatactagcaatgcttacagtccggtgcaggatgtagcagatgcttgcaggacaggagctgcaacaaatgtgatttttgggttggctctgggatacaaatcggtcattatccccatatttgccattgccatcgctatttacgtgagctttagcttggctgcaatgtatggaatcgcggtggccgctttggggatgctcagcactatagccaccggtcttgcaatcgatgcatatggtcccataagtgacaatgctggcggtattgcagaaatggccggaatgagtcacaagattcgcgaaagaaccgatgctttagacgctgcaggaaacaccactgcagctattgggaagggtttcgcaatcggatcggcagccctcgtttcacttgctttatttggtgcctatgttagcagagcaggcatcaagaccgtagatgtattgacaccaaaggctttcattggtctcatagttggagccatgctcccttactggttttccgccatgacaatgaaaagtgtcggaagcgcagctctcaaaatggtcgaagaggttcgtcggcaattcaatacaattccaggactaatggaaggcagggtaaagccagactacgcaaactgcgtcaagatatcaaccgatgcctcactccgcgaaatgatcccacccggcgcactcgttatgcttactccacttatagtaggaaccctttttggagtcgaaactctagccggtgtcctagctggtgcactagtttccggtgtccaggttgccatctcagcttcaaacacaggaggagcatgggataatgccaagaaatacattgaggcgggtgttagcgaacatgcaaagtcattgggaccaaaaggttcagaatgtcacaaggcagcagtgataggagacacaatatgggatccactgaaagacacttcaggtccatcactaaacatcctcatcaagctcatggctgtggaatctttggtctttgctcctttcttcgccgctcatggaggctttctcttccaattcatctaaatttcaagctcctcttaacaatacatacatacatgcgtgcctataattatatctatctgtatatccccagtacagtggtaagttggacgatattgcgaccctttcgtattactaataacatacgttaacgaaagtcaggccctgccttcaagttggttcttacaccaccatatcaattctatgatcgaatcaaatgatctttgtttggatgaactttaacatgtccgttatgccgttcatctcctaaaatcccc

SEQ ID NO: 17179 - DNA, 783 bp, Gossypium hirsutum
  unsure (1)..(783): unsure at all n locations
  Clone ID: LIB3543-037-Q1-K1-H3
ccgggtcgnacccacgccgtccgtattggggcacttgnnttcttctnngtgttgcttattcggnattgggtgggctggnacnttcattatnncggttattacctacagnnaatattannnactagcaatgggcttacagtnnnccggtgcagggatnngtagcagnatgccccttgcaggggacagggagnctgnnncaacaanatggtgnatnnttttgggnngttggcnnntctgggnnatannnaaatcggtgcatgtatgccgccattatttnngccattgnnccatcgctnnnatttacgtgnnagctttnnnagcttggncnntgcaatgggtatggannnatcgcggnntggccgnnctttggggggatgcnntcagcacnntatagnnccaccgnngtcttgcnnaatcgnatnngcatatgngnntcccanntaagtgnanncaatgnctnggnnncggtatnnntgcagnnaaatgggcnncggnaatgganngtcacaagnnattcgcngnnaaagaaaccgatnngctttagaacnngctgcaggnnaaacacncnnactgcanngctattggggnaaggggnntttcgnncaatcggnatnncggcanngccctcnngtttcactttttgctttatnnttggtnngcctatgntnntagcagnagncagnngcatcaagnaaccgtagnatnngtattgnacnnaccaaaggggctttcnnattggtctncnnatagttggnnagccatgncnntcccttacnntggttt

SEQ ID NO: 17180 - DNA, 288 bp, Gossypium hirsutum
  unsure (1)..(288): unsure at all n locations
  Clone ID: LIB3135-056-Q1-K1-C9
cccacgcgtccgattgggaccaaaaggttcagaatgtcacaaggcagcagtgataggagacacaataggggatccactgaaagacacttcaggtccatcactcaacatcctcatcaagctcatggctgttgaatctttggtctttgctcctttcttcgccgctcatggaggctntctttttaaattcatctaaatttcaagcttcttttaacaataaatacatacatgcatatatatatatatatcaaccggtagagttgttagttagaggatatggggaacttttgt

SEQ ID NO: 17181 - DNA, 1258 bp, Gossypium hirsutum
  Clone ID: GOSHI-09MAY01-C14694_1
catcaaaacaaactctacaccaggtttctgatacaatctcagctgcttggttcattaagagagagaagaagaacatggatgttggttaccattcgtatgagaccgagtcaacccacactgcagggaaagtcatcacttgcagagctgctgtagcatggggtcctggacagcctctcgtcattgaagatgttcaagtggcaccccctcaaaagatggaggtgagggtcaagattctcttcacttcaatctgtcacacggatctcagttcttggaaaggcgagaatgaagcacagagagcatatcctcgaattctaggccatgaagctgcagggattgttgagagcgttggggaaggtgttgaaaacatgaaaataggtgatcatgtcatccctttcttccaaggggagtgcggcacctgcatctgttgcagaagccaaaaaaaactaatctctgccaaaagtttggagtgaatccattgaagagcgtgatggtaaatgatgggaagacgaggttttccaccatggatgggaaccccatctttcatttcctcaacacctccactttcagccagtacaccgttcttgattctgcctgtgtagtaaagattgacaccaaggcccccctcgagaaaatgagcctcttaagttgcggtgtctcaactggcgtgggagcagcttggaatgtagccaacgtgcaacctggctcaagcgtggcaatctttgggttgggtgccgtgggactcgctgtagctgaaggagcacgagtaagaggtgcatcgaaaataataggcgttgatatcaaccctagcaaatttttcaaaggcaaagcagtgggaattacagaattcataaacccaaaggatctagacgtaccagtgcatgagaaaatcggagctattacagagggaggtgtagactacagcttcgaatgtgtaggaaaccttgaagttcttcgagaggcatttttgtccacccataccggatggggactgacagtactactggggattcacccaagcccaatgttgctgcctctccatccaatggagttatttaacggacgccaaatcgtaggatccatctttggaggcttcaaaggcaaaacccaactgccaaagttggccgaacaatgcatgtgtgggaccctgaacttggacgagtttatcacacatgagcttcccttccacaacataatgaagctttttaactgctaatcgaggggaaatcgcttagatgccttctgcacctctgagctttta

SEQ ID NO: 17182 - DNA, 444 bp, Gossypium hirsutum
  Clone ID: GOSHI-09MAY01-C14194_1
ggaaaaaaaaaatccacattacattcatcaacagaaaacccaaaaaacccgaagctcgaaaatgggaagctctagattctcggtcagtttcctcgcgatttgcgcaatcctggccatccacgtggcggcttccgcttcgtctcccatgctcgatttcggcggcaaccatttcctctcgattaaatcggagtgcagtggatccatcgcggaatgcctgatgctaagcggggaatattcctcggacttcgacgccgaattcgccatggactccgagatcaacaggcgcattttagcggcgaggcgttacattagctacggtgcgctgaggagaaacacggtgccatgttcgcgacgcggtgcgtcgtattataactgccggccgggagctcaagcaaatccttactcacgcgggtgcagtagaattacacgctgtcggcgttagat

SEQ ID NO: 17183 - DNA, 907 bp, Gossypium hirsutum
  Clone ID: GOSHI-09MAY01-C14184_1
ccccgcgtccgcggccgcgtcggcttcccgaaagcaatttcttctcattttcgagaacattttttttaaaggctttttctatatattctttgaagatattaatcagaaaaatggcgctggtttctttcatcggcagggttctttttgcgtcagtgttcatcctctctgcttggcaagagttcaatgaatttggcgtcgatggtggtccagcggcgaaggagctgaggccaaagttcaacgtcttctcaaagactgtgtcgtctcacacagggttgcaagtgcctgaatttgatatcaagtatgtagttgctgctgctgtagcctttaaaggtgttgggagtattctctttacctttggcagcaccgtcggagcttatcttctggttttgcaccaactcgttcttactcccattgtttatgacttctacaattacgacacggaaaagaaagaatttggtcttctttttacaaagttttcacagaacttgacgctgttaggggcattgctgttcttcattggcatgaagaactcaatccccacaagacaactgaagaaaaaggctccgaaaaccaaaacagtttgaagacgtaacacatccggttaaaaccgaagagggtctggtttttctcgttcgatcttaatttgtatacctcggtgtaactagatctgtttctgtatgcttgtaccaaggctttgttgtcctgtcgaagttcatagctatttaatttgagttccacaaaaggatttcataattttgcccttcaatctgctgtttacctttttggattttgccattctcatggaacttttaatcatggattcgtggtggatctagatgatatattaggaaatatacttatgaggtaagttgggttcatttgtagtgaaatgattcatatgtttatg

SEQ ID NO: 17184 - DNA, 488 bp, Gossypium hirsutum
  Clone ID: uC-gsronu33B160a09b1
tttcattttttttttcttccttttgttcgtatgggccctgtttttcagttttgttctttatctagaagtgttgacttcgagtcaatcatcaagttttcgaaagattcaggcaaatcaaatggtttggaacggaaaatagttgatagtagataattgtgggtaataaaatcgagatgcagctaaagttttacaacagaaaacaagtcaaaaacttagtgaaggttagaagaaaatagtggtatattactgaagctcattaatggagggtaaaggtaccaaatcggggaaaacccgagctcaaaaggatgctcataacgcccgttgcgtacagtacaggcagaaaactaaccggcggctagaggagctggaacaggtgaagaccaagtactatgaaatgctcccaatcttcaagcagatgcaaactgaaaaccagcagatgaaaatggagttgaagcaaaacgagtctataattcaatatatgcaaaatt

SEQ ID NO: 17185 - DNA, 533 bp, Gossypium hirsutum
  unsure (1)..(533): unsure at all n locations
  Clone ID: uC-gsronu33B160a03b1
tgcttggctangagttcaatgaatttggcgtcgatggtggtccattggcgaaggttctgaggccaaagttcaacgtcttctcaaagactgtgtcgtctcacacagggttgcaagtgcctgaatttgatatcaagtatgtagttgctgctgctgtagcctttaaaggtgttgggagtattctctttacctttggcagcaccgtcggagcttatcttctggttttgcaccaactcgttcttactcccattgtttatgacttctacaatagcgacacggtacagaatgaatgtggtcccgagctcacaaggatgctcataacgcccgttgcgtacagtacaggcagaaaactaaaaggaggctagaggagcttgaacaggtgaagaccaagtactatgaaatgcttccaatcttcaagcagatgcaaactgaaaaccagcagatgaaaatggagttgaagcaaaacgagtctataattcaatatatgcaaaattgtattcaacagtttaagactacatttgaggcacaggggcaaa

SEQ ID NO: 17186 - DNA, 284 bp, Gossypium hirsutum
  Clone ID: LIB3147-060-Q1-K1-F1
cccacgcgttcgcccactcgtccgcccactctttcgcccacgcgtccgcccacgcgtccgggtatttaatttgagttccacaaaaggatttcataatttttcccttcaatctgctgtttacctttatggattttgccattctcatggaacttttaatcatggaatcgtggtgattctagatgatatattaggaaatatacttatgaggttagtttgggttcatttgttagtgaaattattcaatttgtttatgaattggatagggatatggcattcatttcttt

SEQ ID NO: 17187 - DNA, 682 bp, Gossypium hirsutum
  Clone ID: GOSHI-09MAY01-C14054_1
cgccacagcgtacgccacgcgtccgagaacacaagtatccagtctagtcctccaatcaaacgccccttttgttaactgtctcaactttatccatttgccttgtttttagcaaaacaatgtctactttagttcctgatttcccaaatctttcttaatttttcttccgattttcattttcgggttttacaaatagatttcgtcttccaattttccctagaaaaagaaataaaaaaaatgatgccaagtgaacagcaaagtcatgatcaacatcgggatccgttatcgtgtgttatttacgagctgtcggcgctagtcctgaatctcctccgatcgccaccgacgccggttccgactaagatatcggcggtgggattcgcttggctgatgctagggatatcggtttctttaatgctttgtggatcagtgactttctttttagggttcgtgctgatgccctgggttcttggtctgctcatgttctttgacgttgccggagattgtttcaacgatttcgatgttgggccgttcgattctttgttatgccagggcacctccctcaccgaccaaaggtattaccgaatggaaccccttgtggtgattgatttgaaaaaaagaggggccttgctgcgtgaatttagtaaactttacttcctcccaaatttatgcacgagatgttgatatt

SEQ ID NO: 17188 - DNA, 680 bp, Gossypium hirsutum
  Clone ID: GOSHI-09MAY01-C14034_1
ggttaatagataatgaatttattgaacgagttgtgtactcaagtgctcatgagctttccgtaaatgtttcttttttttccccctgtaaacatatatatatatatgattaatgatcaaacactgccttcaaatttaaaaaaaaaaacttttggtaactgttcttaatcattatcaatttaattattcaaaaattggggtaacaatttccattcagcagccaataggggaaaacattatactggtttacttcttatgcaggtataagaaaccaaccaacacagagatgccaacaattgccacggggatggtccaatattgctttgtcaagtccatgagcttctcagagtacttaacggcttccctcttagaggaaatttcaagttctgggatgataggggaggatgtgtcaagttcaccaatgcaaaagctttgcaggagctcctttgcacttttgctgtgtccagcatcttcaaaatcatcggttgcatctttccctgtcgactcgaggactacatcatcacctcctggatgctcatccaaataagaagtaacatcatataccttgccgtctataacgatccgacgcgcggctttggtattgtgctgagaggcttcttgcatggtataaagctttgtaagggtcggcatgcctttgaccctttttgtctctgttttttcca

SEQ ID NO: 17189 - DNA, 315 bp, Gossypium hirsutum
  unsure (1)..(315): unsure at all n locations
  Clone ID: LIB3149-055-Q1-K1-D5
aagagggaagccgnnaagnactctgagaagctcatggactggacaaagcaatattggaccatccccgtggcaattgttggcatctctgtgttggttggtttcttatacctgcataagaagtaaaccagtataatgttttcccctattggctgctgaatggaaattgtaccccaatttttgataattaattgatatgataagaacagtacaaaagttttttaaattgaggcaggttgacataatatattattattgttacagggaaaaagaacattcngaagtatacactgatcacactgtaataatcatattata

SEQ ID NO: 17190 - DNA, 429 bp, Gossypium hirsutum
  Clone ID: GOSHI-09MAY01-C14024_1
ccataatcaaccaagatgctctcctctagatctgcaacaacacacgcaaaatgaaaggcgggactttgaacaacagcttggagattcaacagaaccttctccaaagttcaaagcaaaacttcagcgaccttgagtcctctgatcccaggcgaaccgatctttcctcaccatcgtctgaaccagatcaggtacatcgttaacccaactcccacagatccctcttctccatccctccattgtcaggacatgcgctgcttcatttacctcacgaggcacaaagatatagagcgtcaccttccacaaccagccgctgaaagcacatcttacgcgcgaatactaaagctctctcacaagcccgtgcctttgccacaaaagaatcatctacatttttgaataagataagtttcgacccaacaacttcttaattgt

SEQ ID NO: 17191 - DNA, 793 bp, Gossypium hirsutum
  Clone ID: GOSHI-09MAY01-C14394_1
tcgctgagaaattctttgtgttccatggcgacaactcttgcattctccctctcaaccccgatccgagcctcaaccggttcacttcaaagacccgatccaagtcgcagaaaacctgtttcttcctcctcctggggggctcccctcttcgggttgtcctccaaccccgattacctcaacgatggccatatcggcgtcacatcggagagaaatcccgaagtatccgaatcggactcagatccgggtcgatccagatccaaatccacgctcaggtgcttcaccgaggagaaagcgaagcaacttcgcaggaagacaatggagaacgcgtcgtttcacgatatgatgtaccactcggcgatcgcgtctcgtcttgcgtccgatacgtcgggttggccggtatgtgattgaggcctaataattgctgggttaatggtaagaataatttgtcgaaatgaaactctatgtggaaatcctgaatcctgcgttgttgttttttttattatattcgtctgaaatctgggttatgtttagtgtttgtgtcagtttcgaggaaagacagttgattgtgctttgtaatattgattttagaccgttggatcggtgatgcatttttatctttaggtgtcacgcgtcgatgagtgacttccgtcgtctcgtatatggtgggactcatatcgttgtgagttccctttttgatgacgtggaggatacttttttacggtatactaatttagatctttccacgtcagctttgtccaggtgtgcgggtccctccaatctctgtggtttaatagac

SEQ ID NO: 17192 - DNA, 774 bp, Gossypium hirsutum
  Clone ID: GOSHI-09MAY01-C14344_1
ctcacttcctcctctctttggctatggctgccgatgttagctctttacatagagttttaagcggatacaaagatgatctaatggttgggaatgaatccggtggtgcaaaaccaacggctttgatcactagggacttgcttggaggcggaggcggtggcgcaggtggtgcctccccgttcatcaatatgaaaactgatcaatcagaagaacttaacctcgaccttcaagtccctaatggatgggaaaagcgcctagacttgaaatccggtaaggtgtacttgcaaagatgcaattcctcaagttcttcacaatcatcagatggaagcaagcaccaaatcaatcaaacagtgccaaagcttcaagatttgaattttccagcctcttcctctaaacctttgctaaaccttttcgacgacacccacctagaattggaattagtctcatcacccactcctacctattatcaaagtggttgcaccctcgacaaagtaaaattcgcgcttgaacgtgccgagaaagagccgatcaagaagcgatcaccatcatactcttcgtcatcatcttcgatcaaagattcgcaaaacagtgaaggtgatcaagataagttgtttgcgtcgccggttgcagcgggttgtcccggatgcttatcgtatgtgttgataatgaaacataaccctaaatgtcctaggtgcaatacccttgttccaatgccagttgctaaaaagcctcgcattgatctcaatatatcaatttgagggaagatttaatttttct

SEQ ID NO: 17193 - DNA, 933 bp, Gossypium hirsutum
  Clone ID: GOSHI-09MAY01-C14304_1
ggctaggatggctaaaaaagggataaataagaacacaaatatgacatatcctaatatatagtagtggaggattatgggacaaaaaataaatccacttggtttcagacttggtacaacccaaagtcatcattctctttggtttgcacaaccgaaaaagtattccgagggtctacaagaagataaaaaaataagagactgtatcaagaattatgtacaaaaaaatacgagactatcttctggtgtcgagggaattgcacgtatagagattcaaaaaagactggatctaattcaggtgataatctatatgggatttcctaaattattaattgaagataagccacgaaaactcgaagaactacagatgaatgtgcaaaaaagaacttaattgtatgaaccgaaaactcaacattgctattacaagaattggaaatccttatgggcaccctaatattcttgccgaatttatagccggacaattaaagaatcgagtttcatttcgaaaggcaatgaaaaaggctattgaattaactgagcaagcggatacaaaaggaattcaaatacaaattgcagggcgtatcgacggaaaagaaatcgcacgtgtcgaatggatccgagaaggtagggttcctctacaaaccattggagcgaaaattgagtattgctcttatagagttcgaactatctatggggtattaggaatcaaaatttggatatttatagacgaagaataataagaataagactctacttgtctttacgttctattctgcgatagaacaaaaaatgacaaattctttgattttttgattgaacataaaaataaaaaaatgagcagttctaaattctataaggttaaataaaaatttgattgatcatttgatataattgctatgcttagtgtgcgactcgttgggttttttaggcttaggattc

SEQ ID NO: 17194 - DNA, 766 bp, Gossypium hirsutum
  Clone ID: GOSHI-09MAY01-C14284_1
aatttctcaaagaagaaaaatggtgtagctccgggggggtcaaggtccaccactgaaaaaagaactcattataaaggcagctcctcccaatagttatctctccacagtcctcatcactcaatatcctttgaaactcagtgtttaagctttgattcccaagttttttttttttaagaaatggctcaggcaagaggcggtgcaatggcggtggcagcggtggcggcggcggtgctctgcttgttgctgagccactttgagttggctcaagcagcaacgtatactgttggtggaaccggtggttgggcctttaacgtggctggttggaccaaagataagcgttttaaggctggtgatacacttgtattcaaatacaacccatcaatccacaatgtggtagctgtaaacagggccggttacagttcatgcacaaccccaaaaggtgctaaagtttaccagtccggcaaggatcaaatcaagcttgtcaaaggccaaaattatttcatctgcaactattctggacattgtcaagctggcatgaaaatagcagtcactgctgcttagcctatgataagcaaagcatagcttgcttttatcagctttcttaagtataattagtgttggatttggtgtcaacaaagtcttttaagtgtagtgctagagtttagttttatatatatgatctataatatgatggtttttgagtaatgttttgtggcaatggtttacatgtactctctttttgtaataaaataaacttttgtgttgg

SEQ ID NO: 17195 - DNA, 520 bp, Gossypium hirsutum
  Clone ID: GOSHI-09MAY01-C14224_1
ctgacagtcgctcaaagcctcgatttagcagaagagaagaagagtaagaaagcttgaattctgaaatcgtttcaagccatgagcacgactcaacaaggaacccactcccttgccttcagggtgatgcggctttgcaagccttctttccacgtcgaacctcccttccgccttgaccccgccgatctcttcgtcggtgaagacatctttgacgacccactcgctgccgctaaccttcctccgctcttatcttcccaactcactaagtcaatggactcctccgatctgacttacggcaaccgattcctcctccaccatccatctgatgctatgggcttctctggcctcctcctcctccctcaatccttcggggcgatttatttgggagagacattctgcagctatattagcatcaataataactctaattttgaagtcagggacattattattaaggctgaaattcaaacggagaggcagaggatcctcctgttggatacatcaaaatcacctgttgaatctg

SEQ ID NO: 17196 - DNA, 404 bp, Gossypium hirsutum
  Clone ID: GOSHI-09MAY01-C15974_1
gttcacagttcacaaacatggcgatttccctatcgacaaatctcttgccaaacactttccagtgcaacgggaaccacaatcatcgttcgacgcgcctctttcccaaccaaccattgagtttcggtctcaaacaccgtagagacgagaacaaactcttcacgccacggaatccgccggtgctctccgccgtctccggctctaccggactggaatcttctgcagggagtgaagatactggtgatttgttggatacggtcacagtgtttgatttgaacggcaatggaatccccatctctgatttgtggaaagatcggaaagctgttgtagcatttgctcgccattttggatgtgtcttttgccgcaaacgggctgattatcttgcctcaagaaggatgtaatggata

SEQ ID NO: 17197 - DNA, 630 bp, Gossypium hirsutum
  Clone ID: GOSHI-09MAY01-C15914_1
ttgactcgtgggaaatttctcattttcttcagcttaaagtgcttttggctgaaaattgaccaaattaacttgtcgtcttctcccacaaactttcttttccctcatctgctggttctttggaactgtcttctcccacaaacgtgcttttggccgaaaagaacagaaatttgatttctcattcaggataactgctactgctttgaggcaaccctccagtgcttaaaagcttaaaagatacccaggagaaggtgctggaagaacatgaacaacttggttttatcccttgctcctaaatttaccaaattgctaactctcgtactacgccaagaaaatccgcagcttgaggacactgctgttgagacgattgcgaaattctgtcatgatctgcaggatctggacctcagcaaaagtttcaagcttggtgatcgctcattgtatgctttggcccatggttgccctaatcttacaaaacttaacatcagtggctgcacatcattcagtgatgaaggtcttgaatatttgactaaattttgtcgaaaactaaaaatattaaatctctgtggatgcgttaaagctgcaactgactgcgcattgcaggcttgtgcactgctctgctttacgttgcaatct

SEQ ID NO: 17198 - DNA, 551 bp, Gossypium hirsutum
  unsure (1)..(551): unsure at all n locations
  Clone ID: AI726808.1
aaaaaggaattctctccagatgaaaagctaaaaatttctccttttcttcagcttaaagtgcttttggctgaaaattgaccaaattaacctgtcgtcttctcccacaaaccttctttcccctcctctgctggttctttggaactgtcttctcccacaaacgtgcttttggctgaaaagaacagaaatttgatttctcattcaggatagctgctactgctttgaggcaaccctccagtgcttaaaagcttaaaagatacccaggagaaggtgctggaagaacatgaacaacttggttctatcctttactcctaaatttaccaaattgctaactctcgtactacgccaagaaaatccgcagcttgaggacactgctgttgagacgattgcgaaattctgtcatgatctgcaagatctggacctcagtaaaagtttcaagaaatattggtataggctattggtgatctangagttatgagtctagcatatggatgccctgatctcagatgccttgacttgtgtggctgtgtccgaataataaaacggaaggcaac

SEQ ID NO: 17199 - DNA, 447 bp, Gossypium hirsutum
  Clone ID: GOSHI-09MAY01-C15934_3
agaaagaaagcgcccggggccgtccggctcgcattccgacccaccctaccttctcttcgctttcgagccaacaacctcctgggcttcgataaacccaatatcggccgggactttcctcaccgtctgaaacctgcaaacgactataatgagagaacaaacactttagaacgaacctccaccattttcaaagcaaaaatgaaatgaccttagatccgctggttccaaaccaaacggtcattcaatgccgccatcctcacagattcaggcactccattaactcaactcccgcaaatctttcttcttcggccttccaccaccagcttgtgagacgcttcattcaccaaccgaggcacagcacgaatctccttccacaactagtcctcgaaagcacatcatactcgcaaagattaaagccctctcacaagccattgcttttggcacaaacgc

SEQ ID NO: 17200 - DNA, 593 bp, Gossypium hirsutum
  Clone ID: AW187524.1
gccaatactctcctcaccatctgaaacctgaaacgagtataatgagagaacaaatactttgaacgaaccccctccaggttgcggggaggggacaaaattaccttaaatccactggttccaaaccaaacagtccttcaatgccgccatcatcacagattcaggcactccattaacccaaccccctcaaatctttcttctccggccttccagtgctagtgtgtgagccgcttcattaaccaatcgaggcacaacaagaatcgccttccacaaccagtcgttgaaagcacaacatactcgcgaagattaaagccctttcacaagcccttgcttctgccacaaacgcgttagcaacatctttaaaaagataagtttcttcccctacgatttcacttgtaaaatctctggctagaactgctgttacaacgagccccttttcttttagaaaagacgcatcaaaatttaacttgataattccatggtctgggggtctccaaatttccttaaccataaatctaggaaaaggacagaaatgcatgtgatttagacaaatatcttgcttatatccccaaataaaccccaacaccacctatagt

SEQ ID NO: 17201 - DNA, 537 bp, Gossypium hirsutum
  Clone ID: LIB3543-052-Q1-K1-H12
cggacgcgtgggcggacgcgtgggtcagattctggaacaagtataatgagagaacaagcactttggatgaccctcctccgtttccaaagtaaagcaagatgaactcagctccgctggtcccaagccaaacggtcctgcaatgccgctaatctgactaattcaagcactccattgatccaacccccatagatctttcgtctccgaccctccaacgccagtgtatgagctgcctcattaatcaatcgaggcactgcaagcgaatcgccttccacaaccagtcgacggaaacacattatactcgcgaagattagcaccctttcacaagcccttgcttctgccacaaacgcgtaggcgacatctttaaaaagataaatttctgcccctacaatctcacctgtaaaatctctggctagaactgctgttacagcgagcttctcttcctttaggagagacgcatcaaattttaacttgataactccttggttcggtggtctctagatctccttaatcagtagtctacgagaggaacagagagac

SEQ ID NO: 17202 - DNA, 587 bp, Gossypium hirsutum
  Clone ID: GOSHI-09MAY01-C15844_1
tttggtaatgcgatacaaccagaaacaggcgctgagaaagaaaccatgtctcaagaagatcaggaggaagaagttgggaaactggccgtccgcctagccaacgccgtggtacttccaatggtcttgaaatcagccttggagctgaacataattgacacaatctcagccgctggtgacggcgcgtttctgtcgccttcccagattgcgagtgcccttccctccaagaatcctgacgcaccggtgctacttgatcgaatgctacgcctgttggccagccattccattctcaaatgcgcagtaaaagcaaaggaaaaaggagaaattgaaagactgtacggtgcaggcccactatgcaagttccttgttaagaatcaagatggagggtcgattgcacctctccttttgttgcaccatgaccaagtcttcatgcaaagctggtaccatttaaatgatgctatactaaaaggaagggttccttttagtaaggcatacgggatgacagcatttgaatatccaggaaccgatcaacgattcaatagagtatttaaccaggcaatgtcaaatcatactgctttgataatgaggaa

SEQ ID NO: 17203 - DNA, 393 bp, Gossypium hirsutum
  Clone ID: GOSHI-09MAY01-C15864_1
cttgcttgggctgctttaatggtagtctttacattttccctttcactcgtagtatggggaagaagtgggctctaggggtactcctaattggggttgaggaatcaaaccgtatcaattgttttctagatcgttttgcaaagcctttttttattttaactattttattagtcttcatttcgaaattcttggatgctagtggagtaatgtattctatgaataacaccttttcaatcaaaatcaaataaacatttcaataatccccatgttcgtatttcgaaagtaaaagggatccggatgataggcaataaaaaaaaagaattcttcctaaattttctattttgatgaaccagctcttaccagagttatgaacggacaatgagggacaaggaaacc

SEQ ID NO: 17204 - DNA, 552 bp, Gossypium hirsutum
  Clone ID: GOSHI-09MAY01-C15814_2
cccacgcgtccgctctaagtgaagaaagatgcgatcttttgctgttgtgtgtttctgagactcgttaactgttacttacttcctaatgaaaggcttctggcgaccctttgctgcaagttaaaggctcttgtgcttcgctgaggcttgggggtgttaggagctattcagtgttaagcaatgatcaactgagaattaacggggttaaagatgtgattgctgttgcttctggtaaaggtggtgtaggcaagtctaccactgcagttaatttggcggttgccttagctaacaagtgcggattgaaggtgggcgtgcttgatgcagatgtgtatggaccatctgttccgaccatgatgaacatccaccaaaagccagaagttaataatgatatgaagatgattcctattgaaaactatggagtgaagtgtatgtcaatgggattcctggtggataaggatgcaccaattgtctggagaggccccatggtgatgagtgctcttcagaaaatgtcgagggaagttgcttggggagttcttgatatccttgtggtggata

SEQ ID NO: 17205 - DNA, 809 bp, Gossypium hirsutum
  unsure (1)..(809): unsure at all n locations
  Clone ID: AI725911.1
accaaaaccaatacaccaagtatctctaagtgaagaaagatgcgatcttttgctgttgtgtgtttctgagactcgtgaactgttacttacttcctaatgaaaggcttctggcgaccctttgctaggcttgggggtgctaggagctattcagtgttaagcaatgatcaactgagaattaacggggttaaagatgtaattgctgttgcttctggtaaaggtggtgtangcaagtctaccaccgcagttaatttggcggttgcattanctaacaagtgcggattgaaagtgggcgtgcttgatgcacatgtgtatggaccatctgttccaaccatgatgaacatccaccaaaagccagaagttaataatgatatgaagatgattcctattgaaaactatggagtgaagtgtatgtcaatgggattcctgctggataaggatgcaccaattgtctggagaggccccatggtaatgattgctcttcacaaaatgtccaaggagattgcttggggaattcttgatatccctgttgttgaaatgcccccctcgcnccggttattgcncacctaactttgtccccaaaactccattgttcaggtggataataaaattttaacttcctttttttccctctcttttggaagaaaaggtttttggttctgttgccttaaaactaacatatccnacccagaataagcttggactagtcctctnaacttgaaattacctctctggcctgggataggtgtttcccctcgctctgtttaattccaacttccctcattccgacctccctttgtgtcatcctcctt

SEQ ID NO: 17206 - DNA, 538 bp, Gossypium hirsutum
  unsure (1)..(538): unsure at all n locations
  Clone ID: uC-gsronu33B117c03b1
gaactgtttcttacttcctaatgaaaggcttctggcgaccctttgctaggcttgggggtgctaggagctattcagtgttaagcaatgatcaactgagaattaacggggttaaagatgtaattgctgttgcttctggtaaaggtggtgtaggcaagtctaccaccgcagttaatttggcggttgcattagctaacaagtgcggattgaaagtgggcgtgcttgatgcagatgtgtatggaccatctgttccaaccatgatgaacatccaccaaaagccagaagttaataatgatatgaagatgattcctattgaaaactatggagtgaagtgtatgtcaatgggattcctggtggataaggatgcaccaattgtctggagaggccccatggtgatgagtgctcttcagaaaatgtcgagggaagttgcttggggagttcttgatatccttgtggtggatatgccccctggcacaggtgctntaatagtttcaaccccacaagatgttgcactgattgatgctcgtagaggagttagaat

SEQ ID NO: 17207 - DNA, 562 bp, Gossypium hirsutum
  Clone ID: GOSHI-09MAY01-C15804_1
cttcatcaaagggcacctcaaaacccagagaccccgtttactcaaccgttgatgtcgactttcctattgcagatttttcccgagaaaaaaaccaatgcaaacagcggaggacatccgtaatctcccaatcgacatcacattttctcgtcttggagaatggttggtagatcgcaagagaataccgtctgattggagaaagagattggcggcgatacgatccaagatatcgaaggagttctcggcgttgcctaaggatattgatccctattttcaaacccttgaccctgaatggattggttacttagaggccaagaaaatatatgatattcttcttaagttgactccagaaagccggaacatttttggtccgctatcaggtgctgctggatcttgggaaccaattgggcgttcttttgagaaagatcatctatacctggcgagctgctcaatatatcagaagtaacatgaatccattagaaaacaggcaagatcacacactgctgactgacgcggagctgttaaagagtgcgtttcgtgtaattctagctgcagactggtgagg

SEQ ID NO: 17208 - DNA, 419 bp, Gossypium hirsutum
  Clone ID: GOSHI-09MAY01-C15554_1
cccacgcgtccgatttttagagaactatcttctttatttgccgaaacttcaaacaaagggaggaatgtgtttttggattggacgtgctcaaagaacaaagataaaaacttgaatgagatcatgacttggcttgagtggatcttatctcacacgcttttgcgtactgctgagagcaacccacaaggtcttgataatttctggcttaagcaaggggcagcattattgctaagcttaatgcagagctcacaagtggatgttcaagaaagggcagccactggactagcaacttttgttgttattgatgatgaaaacgcaagcatagatcgtggaagggctgaagcagttatgcgagatggtggcattcggcttcttctgaacctagcgaagtcttggcatgaaggacttcaatcggaggctgc

SEQ ID NO: 17209 - DNA, 597 bp, Gossypium hirsutum
  Clone ID: GOSHI-09MAY01-C15504_1
ctttttcttccataatcatactaccgtcgtccctctctctcgtctctgcaaatcagttgtcctttcttattcttctcttctcatctcagttctcacccactgccgtgtccgctggtttatgccggatctgacccgtatccagtgtgtatcgtgtcgacacggctactgcaccacaagttgccgagtccggataacgaaggctgcgacaaacagaagtaacttttgtttctttatttaacgcaattacagggtttttgaaaattaaaatggaggtagagaatgcagaaaaagtaaatctggaacagaaaaagaagcataaagggaaacacgataagccaaagccatgggacgaagacccaaacatagaccgttggaagattgaaaagtttgacccttcttggaaccccgatgggttactggaagtcagctctttttccaccatcttccctcgttaccgagaaaaatacttgcaagaagcttggccaaaggttaaatctgctttgaaagaatatggtattgctgctgagctcaacttggttgaagggtctatgacagtttcaacaacaagaaaaactagggatccatatgttatcatta

SEQ ID NO: 17210 - DNA, 916 bp, Gossypium hirsutum
  Clone ID: GOSHI-09MAY01-C15764_1
gttactctcccttcttctccttgtaaacttcatttttatctatcaatctcattcttctccagataacagtgtcaccaaagctcaatctcagatcaaaccaaagaaggttcatttgtctctgtattatgagtctctatgtccatattgccggagtttcattgtaagtcaacttgtgaaggtcttcaacactgatcttctcaatattatcaatctcaggctagttccatggggcaatgctcaatatgtaaaacctaagaagaccatcatttgccagcacggtgaagatgaatgttacctcaacactatacatgcctgcgccatcagcatctggcctgatccgagaaagcatttcaactttatctactgtattgaaaatcaaggccttcccatcaaggataatcagcactctgacggtatggaagcagtgtggaaagcctgctctgccagatccggtatggatcagaaactcatcaaggactgctatgacagtggatatggaagaaagcttttactgcagtatgctactgaaactgatcatctctatccaaaacatttatatgtcccctgggtgacagtgaacaatcaacctctctatgataagtatgaagattttataacctatgtctgcaatgcttacaaagacaaagatttggtaagggcctgcctgtccaattctctaaaagttactgaagagaaattttcaaggtctccagtctgctatgtagaaataagatcccaaattcagcagagacttcattgttgcagtggaggaacataaacaacaacatgagtttatactgtactatgatggaccactttttacatcattttatgtaagaatgaagttggatcattataattggcaaaccatcctgttattatgatttacttgtgatgcaaaaaaaaaaaaaaaaaa

SEQ ID NO: 17211 - DNA, 663 bp, Gossypium hirsutum
  Clone ID: GOSHI-09MAY01-C15714_1
caaaaaccgaaaaggttttttttcttctttttccaacattttattttccttcaatctaaacgaagaaaagagaaatgttcctttatctatcataggagtagctgcaagatctactgatccagctgaatctaatcgaggaattgttgaaatttttagagattatgtccttttaaattgtccgtttctagattttggaagacaagggaatgggggacaaggaggaggaagaagagtggaccgggacggagagcggggatttgacatcggaagacgaaggaacggaagattaccggcggggcggttatcacgctgttagaatcggagacactttcaagaacggtcgttacgttgtacaaagcaagctcggttggggccatttctccaccgtttggctcgcttgggacactcaccgctcctgttatgtagctttgaaagtacaaaaaagtgcccagcattacactgaggcagcgatggatgagataacaatcttgcaacagattgcggatggggataaagaggataaaaaatgtgcggtgaagcttttggatcattttaagcattcaggtccgaatgggcagcatgtttgtattgtgtttgagtacttgggagataatcttttgactctcatcaagtattctgattatcgtggcatgcctattcata

SEQ ID NO: 17212 - DNA, 833 bp, Gossypium hirsutum
  Clone ID: GOSHI-09MAY01-C15614_1
aagctgacctccattcctctctgcaaatattctaccttcattaattctctaaccatgctctcttcaacctctttgaaccccatcaccaatcccaaaattcccttcttttcttctttttcaatccaaagcccatctcttttatcctttcatcttcctttctcaccttcaaaaaccctcttaaaacccatctcagctactctgatcccctccactcctccgcctcaacagcaacaactttatcaaccttttaggccacctccatctccactccctcctaaattccggtcacttgacgctcaaggtcgcttagatgtcttagccaaccggaatggcctttggtttgaatatgcgccacttatcccttctctttaccaggaaggtttctcacctccttcaatagaagaaataactgggatcactggggttgagcaaaatacactgatagttgcttcccagcgttatcatcctgttaaacaaattcatggagtactaatcgggacttgaaattagaaggtaacgcctgaggttaggaagaaagatttcaagcaatggaagtttccttatgtggcacttaatctctaaacaaggttattgcataattgtggtatacattgcatattaattcaaattctcttggagaggtttgatgacactagatcaaaggattttcatactggttctttgtgtctttgtattgatcatggctttggagttgggatgtttttctctacagcactttgaaaaacagagaagcacgtgtttaaatgagagtaggaagcattgatggatcaatattgttgggggctgtttatcatattgcatattcaaatata

SEQ ID NO: 17213 - DNA, 686 bp, Gossypium hirsutum
  Clone ID: GOSHI-09MAY01-C15604_1
cagcactcgactgactgtctctgggactcccttctccagagtgattgcttgtaatcctgcatgagcctccgctgtgaatgaatcttcgatgttggagtggagaactgctaaatacgcaaggatttccccttccccattccaaactattaaccccgatgccgatctgaacgtctgactatcaaacgctgcatcaaaatgaactgttgcccatccccttttgaaaacttgttgataacagtcagaagtatggaagatataccatagtccacagcagaatagtcgcaactgctcctcgtttccttgaccaaagattccagtgagccatctccataaatcctcattattgtagttcagtatccacgaaagattaagatgataccagacctcaatcgctgcagggcactgttgcaaaatatggcgactgctttcttcttcagactcacatctgggacatttagtattcaccaaaacccgctttattttgagattgagaaaagatgggatatagttccatgaaatcctccatatagtcattttgattttcgatggaatttgtaatgtccatagtttcctgtaaaagtttatagtttcggtatgtaaaaataactcattaggatccaaagtcaactcatgtaatagtttataggcgctcctaactgaaaattctccggtcgactcccctttcc

SEQ ID NO: 17214 - DNA, 434 bp, Gossypium hirsutum
  unsure (1)..(434): unsure at all n locations
  Clone ID: LIB3145-035-Q1-K1-A9
gcgtccgcccacgcgtccttccacgcgtcctgtaaacccgcnnttttaaaagatcgagaaaagatgggagctagagccatgttttaaaccatatagtcatttaaaatttcgatggtatttagaatttccatagtttcctgtaaaagattatagtttctgtttataaaaataactcattaggatccaaagtcaactcatgtaatagtttataggcgctcctaactgaaaatactccggtcgactccccttaccaaactagaagatcttcatgttcagactccaacaatgttatcctcaatattatcttcactacagctttatttgaagatcatcacagatagaaatcctatcacctcgacccagtcttcagcatatacctttttcaagcatacctttttcttaccaaacactacaacaagattttttcctcttta

SEQ ID NO: 17215 - DNA, 363 bp, Gossypium hirsutum
  Clone ID: LIB3135-014-Q1-K1-C11
gaactgctaaatacgcaaggatttccccttccccattccaaactattaaccccgatgccgatctgaacgtttgactatcaaacgctgcatcaaaatgaactgttgcccatccccttttgaaaacttgttgataacagtcagaagtatggaaggtaggcttatctttttttgctgcttcgagttctgttaaatagtttctaatttttcttgctatttccaatcctgacattcgtttttttccataaatgagttgatttttactgaaccagatttaccatagtccacagcagaataatcgcaactgctcctccgtttctttgaccaaagaatccagggagccatttccataaatcctcatttatt

SEQ ID NO: 17216 - DNA, 239 bp, Gossypium hirsutum
  Clone ID: GOSHI-09MAY01-C15104_1
ctgacactgaaaagagaagaacgaagtaatgatgttcctgcatgcgtgtggatgatctatagccggcattttagcgaaacatagttagaatttaagttttgggggttctttgttagtgccaaaaagaaagctcgttccgaagtatagttaacgatgtgagggatgctttggggagcttatctaggcgtagttgggaggtgaggttgactggttatttaaagggaaaattataatggtta

SEQ ID NO: 17217 - DNA, 653 bp, Gossypium hirsutum
  Clone ID: GOSHI-09MAY01-C15064_1
aaactctgtacgaggttttcttttagcggcatttgtcattgcgaaggaaaacatgggagctgaaaggagattctttgttaagtttgagttgatgttaatggcgattttgatggtttcaatggaatcttccatggcggcattacatcgtgttggaggcaagctaggttggaaccctaacgttaattattcagaatggtccgaccatgagcgattttatgtcggcgattggcttctcttcaacttcgacaagcgctacttcaatgttctggaagtgaacgagacaagttacgataactgcaatgatcaaggtttcgtaaagaacatcactcgcggtggccgtgatgtggttgagctgacacaggcgaggccgtattactttctcagcagcggtggctactgctaccatgggatgaaagttgctgtcaatgttgaaatgcttccacctgctccggagccggctccggtcaaaaatggttccctaacatccgatgctgttagccttaagattttccgctatatgatttcctttgctgtggcatactattatttggtccttttgttttagatcagacggttgattgagattaagcagcagcaaatgttggattatatcaatagtcatgatggaaatggaatatatttcttttttcgcc

SEQ ID NO: 17218 - DNA, 1199 bp, Gossypium hirsutum
  Clone ID: GOSHI-09MAY01-C15024_1
ggtgtcctcggcttttcaaagtttttcatttctctttcagctctttttgtttttaggttttcttcgattcgtgtttggctgaggcgggttttgtttttcccgggaaagctcggggaattaagagaaaatggttagaatgacgaaaatgccactgaacttaacttctattgagcttccagctctggtgtccgactggtgggacgagatcaatgagtccactaagtggcaggatggcatcttctacactctctgcgccgcttatgccctagtttcctccgttgctctgatacaattagtaaggattgaattgagagtgcccgaatatggttggacgacacagaaagttttccatctaatgaacttcattgctaatggagtgcgtgcaattgtgtttggatttcacagacaagtatttgttttgtttccccagggcctccccttttatgttgttggatcttccgggcccttctgtttttcctccccttccactttacttgtcctgtttggggccgagatttaccatcaggctaaatcctttccaccggacaaactccgaatcctttatgtgtctttcaatgctgttatttactttatacaggtctgtgtgtgggtatacctctggatagatgacaacagtgtggtggatttcattggaaaaatatttattgctgtggtgtcatttatagctgcattaggattcttgttgtatggaggaagattatttttcatgctaagacgattccctattgaatcgaaaggaagaaggaagaagcttcacgaggttggatctgttacggccatttgtttcacctgcttccttattaggtgctttgtggtggttttatctgcctttgatgcagatgcgtcactggatgttttggaccatccagttctgaacttgatctattacacgctggttgagatcctaccttcggctctagtgctgtatatcttgcgtaaattgcctccaaagagagtatccgctcagtatcacccaatccgttagtcggaatgcatccttgttcgtagaattgtttattcccgtaggaaaacaaaaaaaaagatggttttggcatgtttcaagagggctagttaaatttccagttgagtgagggaatcagagccaggagaagtggaatggttgctgatgcatgcaaaaaaattttaattcttgatgtgaccatactgttttggagctt

SEQ ID NO: 17219 - DNA, 1373 bp, Gossypium hirsutum
  Clone ID: GOSHI-09MAY01-C15374_1
ctcatggcaaaactgttactcaggttaccctagcacatttgaaggagaagccagctccatcaactccgacgtcttcatcgtccagctacagtgccagcagtggggtcagatcagcagcagcaaggtggctaggtgctgggaacgggagccgcacgcttggatttgctggggggaatggtgggagtaaaagtattggtagtactagtaggattgggtcattgggtgcttcaagttctagtaattcgatcactaatatgaattttgatgggaaagggacttatttaatctttaacgttggtgatgctatctttataagtgatttgaattctcaggacaaggatccaataaagtctatcaatttcagtaattcgaaccctatctgccacgcatttgatcaagatgccaaagatggccatgatttgcttatcggggtgaattctggtgatgtttactctgtgtcactgagacagcagttacaggatgttggaaagaagcttgttggggcgcagcattacaataaagatggttctgtcaataacagtcgctgtactggtattgcatgggttcccggaagtgatggtgtttttatggtggctcatgctgatggaaacatgtacgtgtatgaaaagaacaaggatggtgctggtgattcttcattccctgttgtcaaagaccaaactcaattttctgtttcacatgcacgttacagtaagagtaacccaatagcaagatggcatgtttgtcaaggttcaattaatagcattgctttctcccatgatggggcatacttagcaactgttggaagagatggctatctgcgagtttttgactattctaaagaacagctcgtttgtggtggcaaaagctattatggtgctctactatgttgcgcttggagtatggatgggaaatatattctgaccggaggtgaagatgacttggttcaagtttggagtatggaagatcgaaaggttgtggcatggggtgaggggcacaactcatgggttagtggagtggcatttgattcgtattggtcatcacctaattctgatggcacaagggagactgtgatgtaccggtttggttctgttggtcaggacacacagttgttattgggggacctggaaatggatgagattgttgtgccattgcgtcgatgccctcctggtgggtctcccacttacagcactgggagccaatcttcccactgggacaacataagcccattgggtaccctgcaacctgccccaagtatccgagatgttccgaaagtttctccactggttgctcatcgtgttcacaacgaaccactctcgggcttgatttttacccaggaatcagtacttactgtttgtcgagagggacacataaaa

SEQ ID NO: 17220 - DNA, 366 bp, Gossypium hirsutum
  Clone ID: GOSHI-09MAY01-C15364_1
cttggttcctgtagatcttgttattgatcattcagttcagttgatgtggcaagatcggaaaatgcaatgcaagcaaacatggaacgtgaattccaacggaacaaagaaagatttgctttcctcaagtggggttctaatgcatttgataacatgcttgttgtcccccccggatcaggaatcgtacatcaggtcaatttagagtatcttggaagagtcgctttcaacacaaatggcgtgctttaccctgatagcgttggtggaacagattctcatacaactatcattgatggtttgggtgttgctggctggcgagctgggggggtagaagctgaagccgtcatgcttggtcagcccatgagcatggtt

SEQ ID NO: 17221 - DNA, 792 bp, Gossypium hirsutum
  Clone ID: GOSHI-09MAY01-C15314_1
cggacgcgtgggcgctacttccgtcctaattttcaggaaaaaatcgccgccgtgattcaaaactcagcccactgtctccgatcgtgtcaactcgtaacccaatctctcaaatatggatcgacccagattcgtaatcgacgccgtcgaagccgagcaaatggccaaacaatcaggcaagacggtgctccaactccttccttctttggtcaaatcagcccagtccgttgcccgcccgccgatctcgaagtaccaagttggggcagtcgggatcgggtcatccggtcggatctttttcggagccaatttagaattcccgggcttgcccctcaaccattccgtccacgctgagcagttccttatcaccaacctttccctcaatgcagagccgcgtcttaaatacatcgccgtctccgccgctccttgcggccattgccgccagtttttccaagagctccgcggtgctcccgatgtcaagatgctcataacttcctccgatgatgaaaaggaaaacaaaataagcaacacttgtaatgataaagaccaagaatttacccctttgtctcattttttacctcacaggttcggccccgatgatttgctaggaaaagatgctcctctcctcctcgaccctcgccggaacggcttgtcgtttacctccgacggcggcgagtacgacgagttaaaacacgcggctctcgatgccgcgaacatgtcgtacgcaccttacagcgggtgtccatccggagtggcgttgatagacgttgaagggaagatataccaagggtcttacat

SEQ ID NO: 17222 - DNA, 424 bp, Gossypium hirsutum
  Clone ID: GOSHI-09MAY01-C15304_1
gaaactgatggtgatcgtggaatgtggtcgtaagtattttgtcgctcgatttgccttaagctgtgaatcaatgacctagtaagccttgaattggttcattatccttcccccattctttagaatattttactatatatttactaacgctcacatgctactttgtatgtctggacttaagagagcctttaagaagaaaaacttggtaacaaaattttgtgattctagtctaaccaactcagcataagaatgattacctgactacaatatggggtaactaagttatgcgtcctataatattcttttgcctttttttcttaatctttctcttagtaagttacctgttgtggttattacattacaagaaaaagtggtgccaatgtttatagtggcattggctattggtacggttttacttttagatata

SEQ ID NO: 17223 - DNA, 289 bp, Gossypium hirsutum
  Clone ID: GOSHI-09MAY01-C16804_6
gagttaattattgtgatgataactaccgattattaaaaaaccccttaaattacaaggagcatctgttattgagactacaaggagcatctgagttcagaattaagacaagcaaaatgagtggcttgatggagcttgtaattcttgtcccatgttgtttcttcctcgtagctttaataaagttcctttatgattacctgtgggtacctctccgtatacagcatctatggccttgaagcatgatatttttcctagagtgcagccacatgtttacaccccgcccggggccccc

SEQ ID NO: 17224 - DNA, 476 bp, Gossypium hirsutum
  Clone ID: GOSHI-09MAY01-C16804_2
cccacgcgtacgcccacgcgtccgcgttgatgaagcttctaattcttgctccatgttgtttgttgttcatagctttaataaagttactttatgattatctatggatacctctccgtattcagcatatgctgaattcacaggggatcaaaggacctccttacagattcatccatggcaacaacaaggaagttaccaaaatgaaacaaaaagctttaagtaaatctgtgggcttgacagatgatttatttcccaaagtacagccacatatttacacctggaccaacagatatgggaagaattgtgtttattggaacggtgctcgagctgaattggtgatttcagagcctgaattagtcaaagaggttctgagaaatagtgaacaaatttttcagaaaaagaaacttacagatattggtaggaagttcttggggaatgggcttatattcattgagggggaaaaatgggcaaagcaccga

SEQ ID NO: 17225 - DNA, 733 bp, Gossypium hirsutum
  Clone ID: GOSHI-09MAY01-C16804_1
gaaattcaactgttactgagactacaaggaaacatctgagttcagaattaagacaaccaaaatgagtgccttgacggagcttgtgattcttgtcccatgttgtttcttcctcgtagctttaatcaagttcctttatgattacctgtgggtgcctctccgtatacagcgtctcctgaattcacagggaatcaaaggacctccttacaaattcatccatggaaacaacgaagaagctaccaaaatgagacaggaagcattaagcaaacctatggccttgaggcatgatatatttcccaaggtgcagccacatatttacacctggatcaacagatatgggaggaattatctttattggaacggtattcgacctgaactggttatttcagagcctgaactactcaaagaggttctcaaaaatagtgaaaatacattcccgaaaaagaagccttcgatctttttgagcaacctactggggaacggacttgtgccgcttcagggtgaaaaatgggtgaagcgtcggaagctcgccaatcatgttgtccatgggtgaaagccttaaaggaacatggacactcagcaaggaatctgccatgcgcctgaaacaatgtctagcagaagtgcgaaaggccaagaaggcaaagagattgaagtgcttcaagaatttagattgctgacttcagaactgatatccagaacagctctcggtagcaaccacttggaaggggagaagatt

SEQ ID NO: 17226 - DNA, 507 bp, Gossypium hirsutum
  unsure (1)..(507): unsure at all n locations
  Clone ID: uC-gsronu33B179d06b1
attcctcatagctttaatcaagttccttgagtgattacttgtgggtgcctgtgagtatacagcatatgctgaattctcagggaatcaaaggacctccttacagattcatccatggcaacaacaaggaaattatcaaaatgagaaaggaagctatgagcaaacctaaggccttgacgcatgatatgtttatcaaattgcagccacatacgcactcctggatcaaagaatatggtaagatggatgcatgtttctcactatgctgttaataacttgtagctttaagtaaaaaagggtcaaccctttttgttgttttctacgtgattagggaagaattttgtgtattggaacggtgttcgagctgaactggtgatttcagacgctgaattagtcaagaggttatgaaaaatagtttaaatgtttttccaaaagcgaagccatcagtttatgttagcaacctactgngaaatgggcttgtgatgatcgagggtgaaaaatgggtgaaacatc

SEQ ID NO: 17227 - DNA, 405 bp, Gossypium hirsutum
  Clone ID: LIB3149-019-Q1-K1-A9
gatttattgtccttactaattcaaatatagattaatgagtttggtttattttttttaaaacatatcattatataaggctgatttgaagttaagaaatcatctaaggtcgtgcgatttttgaaattaaagttttagtcttgtgatagttgtgtcggactaagatttgaagttgccagatgacaaaaggagtaaaagagcagattgagcctagggagactcatgggagggatatgctgtcgactttgaaaggggatcaaaggacctccttacagattcatccatggcaacaacaaggaagttaccaaaatgaaacaaaaagctttaagcaaatctgtgggcttgacagatgatttatttcccaaagtagagccacatttttacacctggaccaacagatatgggaag

SEQ ID NO: 17228 - DNA, 475 bp, Gossypium hirsutum
  Clone ID: uC-gsflnu33B100c01b1
tttcggaaagacgacagtaatatcacattaagttatcacttaagtccttgttcaatatggaaatcacaatacaaatattaaaggaacatctggattctgtgtaaagagaagaaaaattgagtggttttgatggagcttgtaattcttgtcccatgttctttgttactcattgctttaatcaagttcctttatgattacttgtgggtgcctcttagtatacagcatatgctgaattctcagggaatcaaaggacctccttacagattcatccatggcaacaacaaggaaattatcaaaatgagaaaggaagctatgagcaaacccaaggccttgactcatgatatatttgccaaaacgcagccacatatgtactcctggatcaaaaaaatatgggaagaattttgtttattggaacggtattcgagctgaagtggtgatttcagaacctgaactagtaaagaggttctgaaaatag

SEQ ID NO: 17229 - DNA, 451 bp, Gossypium hirsutum
  Clone ID: GOSHI-09MAY01-C16824_1
gaattatcaagtataaagaaacagcttcttgagggcttttcacccgatgatgcatgttcatgaggtgttccggtgtggagaccatgttctcctcttgcgcagatggagtttcagtcatttgatgagatgcctctagctgcagtaacagatgaagccaatggaagtcagtcaggtcgcaaagcatcagtatccataagtaaactagatgtcttaagtgccaatgagctattggattcagctctggaaacagcccggcaagttgtaagcttttcggtttccccagcaccgattccttatgaccagatgaagagtcagtgtgaagctagtgtaatgggtaaacagcagaagatgtcaatacttcatcacttcaagcatcaacaggaagccagtgcaacctcagaggaaattgaaaatgaaattctctatttaccaagtgagaaagcggagtcta

SEQ ID NO: 17230 - DNA, 584 bp, Gossypium hirsutum
  Clone ID: GOSHI-09MAY01-C16764_1
tggaattcagtcctggaaagtattaatggaggtgtgcctatgatctgcaggccattttttggagaccaacaattgaacactcgtactgtggaggttgtatggggatttgcgttgggcttagaaggtggaacattgacaaaaggaggagcaaagaaagcattgaagttgatattgtgcagccaagaagggaagaaaatgagagagaaaattagagttcaaaaagagctggtttgcaaggctgttaaacccaatggtagttctattgaaaatttcaaaacactggtgaaacttctccaacacttaccaccaagttgattgaaccaagtacacaaaacaagtaaacacaagtgctaggatgataaagttgttagggatttatgtcatgtcgagaattaaagatgaacatcatttgaggttctctcccaaagcacatttggcttcctatttgtgttttttcttttcggtgtagttttggtatcgtttgccaatttgttgtcctcgtctttatctaatttaaataaaattgtcaaatggtttgagcaaaaaccacaaggttggtaattgcggaccaagccttatccccc

SEQ ID NO: 17231 - DNA, 665 bp, Gossypium hirsutum
  Clone ID: GOSHI-09MAY01-C16104_2
cttcattttctttgtttctccgtctgcttatccacggccgagaataaatgaaaaaaatgagctccgatgatccgaaccaacccggtctcgtgataactgtgaccgaatccattcgctcgtttcttctctcagcctccaatgaccatcgtctctctaaagaactccgagaactcgctctcactctttcctcagcagccaatgctccgtacaagcagatccgaagcatatggatggaatcagcttttgactccaggcccggattgattcctctcttctccggatctaatttcgttttcaccagtcctaaacccagagagaagagcgaagaattgaaggagaggttaaggaagcttaaagaactagcagagaggaaagagtatcaagagcttgttaaagatatcacgccgaagaaggatctcactgaacctttctctacttataaggatcaaattggctttgaattctgctggaggtattcttggattggtgtttggcatgcttcttgaaacatttttgttcattattaggacttcagagcctaaccttaaatcgccgtcctcaacttcgagattgaagaaaaatcaatagagtatttaaaaagaggttggttgtgttttcttttcttgctacctattgtccattatcaatagagtatgtgagtttaa

SEQ ID NO: 17232 - DNA, 1020 bp, Gossypium hirsutum
  Clone ID: GOSHI-09MAY01-C16104_1
ccgtcttgtcctgatttccaggggggcttttttcccccgaatccgttgatatctcatttcaaactctccatattttatcttcttcctttcatattcagtgtggttctcccgccctatccctttcttcttgcttttctgcagattcaggaacgcttcctaccagtaaatgaaaaagagagttccgacgacccgaaccaacccggtctcgtgataactgtgaccgaatccattcgcttgtttcttgttgcagcctccaatgaccgtcgtctctctgaagaactccgagaactcgctctcactctttcctcagcagccaatgcaccgtacaagcagatccgaagcatatggatggaatcagcttttgacaccaggcccgaattgatttctctcttctccggatctaatttcgttttcaccagtccaaaacccagagagaagagcgaagaattaaaggagagattaaggaagcttaaagaactagcagagaggaaagagtatcaagagcttgttaaagatatcacgccgaagaaggatctcaatgaacctttctctacttataaggatcaaattggctttggtttacatgttgctctgacaatgtttactgggtatttgcttggttattttgcattcagagcgttgtttaaccacagtcctatcatgaattctgctggaggtattcttggattggtttttggcatgcttcttgaaacatttttgttcattattaggacttcagagcctaaccttaaatcgccgtcctcaacttcgagattcaagaaaaatcaatagagtagttaagaagaggttggttatgttttcttttcttgctacctattgtccattataaatctacgagtatgtgagtttaagactgtaaatactatcatattgtaatcatagggcattttattttgatgttctttgccgtgaacaatattacaaggtaaaggttgtgtaggattatttttctaactttgttgagagcagatgaataagagaacatttatatctattttt

SEQ ID NO: 17233 - DNA, 478 bp, Gossypium hirsutum
  Clone ID: GOSHI-09MAY01-C16054_5
tttttcacgcgtccgaccactgaaggacaattttgacatgggagaacctgatacatgcaatcctgctggaagtggcttgccaagtgaggaggcttcggttaagacagcaaagaaaattcataatcagaaattcgctgagctctcaggaaatgacatatttaagggtgatgttcctccaggttctgctgagaaaccactcagtgctgcaaaactgcgggagatgagtggcagtaacatcttcgctgatgggaaggtagagtctcgagactactttggtggtgttcgcaaaccccctggcggcgaaagcagcattgcttttggtttaacttcttagctttctctaaccctgtcaaattgcttcagccgtgtctggtgtttgtctttaggtggcggtgggaattgtgttatgaccttttccattgtgggttttggaattatgtctttagggttaacttttccacatgaggtatggacatat

SEQ ID NO: 17234 - DNA, 604 bp, Gossypium hirsutum
  Clone ID: GOSHI-09MAY01-C16054_4
gcaaagtgcaaggagcttatcggacactacatctgggcacccccacctgaaattttgccgaggccaacaaccatacgtgcattggcattgaaggacagtttcgacttgggagaatctcatacacataattcgagcgatgaggccagggttaagacagcaaagaaaattcctaatcagaaattggctgagctttcgggtaatgacatatctaagggtgacgttccgccaggttctgccgagaagccacttagtatggcgaaaatgcgggagataagcggcagcaacatcttcgctgatggaaaggttgagtctcgagactactttggtggtgttcgcaagcccccaggtggtgaaagcagcattgctttggtttaacttaggtctaaccctgtcagtttgctgttggttccgggtgtttttcggttatctcttcaatgggggtgtgattatattatttgacttttttttcaatgggttttggtaattatgttaggttataacatgtcaaattgagctatggaccgttgctaattgcattgtttgtctatagtcttttttcagtcccgatttagtaaaggtcttgggctgttgcagatttaatttt

SEQ ID NO: 17235 - DNA, 583 bp, Gossypium hirsutum
  Clone ID: GOSHI-09MAY01-C16054_3
cactccttttgaatcttttttttggtggtgcacagaaggattcgaaggcatttctccattgttgttttattcaattacaagctactttttgttttggtagttttgagagtggaattagggaaaaaaatggagaagagcactccagtgaggaaaccacacacttccactgcagatctactcacttggtccgagactcctcaaccggatttcaccgcctccgccgcacgctccacccgccctcaccagccgtcggatgggatcagaaaagtggtgtttggaggtcaagtgaccgatgaagaatttgaaagcttaaacaaacggaaaccttgttctggatataaaatgaaggagatgactggtagtggtatttttgcagccgatggagaaaatgacgaatcagaacctggtagtgcaaatcctactccaaacaacaaaacagcaatacgaatgtaccagcaatctctagctggaatcagtcacatctcgtttgccgaggaagagagtattacacccaaaaagccaactactcttccttgaggtggcgaagcagcgtgaattgagtggaacactacaaagtgaggat

SEQ ID NO: 17236 - DNA, 682 bp, Gossypium hirsutum
  Clone ID: GOSHI-09MAY01-C16054_2
ctcagatcctgttttcatacttcctcttcactctttcacagctctacaaacagtaccctactgccctccttttgctgttgttgcagaggaggagtaagaatagaggaacccaaaggcttttgtttgattaaattgaaagcatttccatttttttctttgcgtgtagttttgagagtgggagggaaaaaaaatggagaggagcactccagttaggaagccacatacttctacagcagatctgctcacttggtctgagactcctcagccggaccccgacacctccgccgctcgctccgtccgacctcaccagccgtcggatgggatcagaaaagtggtgtttggaggccaagtaactgatgaagaatttgaaagcttaaacaaacggaaacctccttctggatataaaatgaaggagatgactggtagtggtatttttgcagccaatgtagaaaatgatgagtccgaaccaggcagtgccaatcctgcttcaaacaacaagacaggattacgaatgtaccagcaagcactagctggaattagtcacatttcttttgctgaggaagagactatttctcctaagaagccaactactcttcctgaggtggcaaagcggcgtgagttaagtggaacgctagaaagcgaagattcaaagttgaagaagcagctctcagatgcaaagtgc

SEQ ID NO: 17237 - DNA, 1413 bp, Gossypium hirsutum
  Clone ID: GOSHI-09MAY01-C16054_1
ggggaatagagtacagagcacatggtgtcgtcggcatctgaaaaggcaaaccaaaaagaaaagaagagaataataaaatcacagacagagggcggtacaatattcaaaaaccaacacacccaacacaagtgatagaggtgagagaaagtcgactcaactcaaactcgactcgactgcagtcaatttataattactagaataccactctcgctctctcgctaactccatttctactttccatcagatccccttttctttcatttcattcaaatcgaattctctctctctctctctctctcgctttgtttcttcaattagaagcgtttcttgttattctttgggtggttttgagagtggaatcagagaaaacccaaacgaaaatggagaggagtactccagtgaggaaaccacacacttccactgcagatcttctcacttggtccgagactcctcaacctgattcctccgcctccgccgctcgtcccacccgccctcatcagccgtcggatgggatcagaaaagtggtgtttggaggtcaagtgaccgatgaagaatttgaaaacttaaacaaacggaagccttgttctggatataaaatgaaggagatgacgggtagtggcattttcgcagccaatggagaaaatgatgaatcagaactaggcagtgctaatcctattccaaacagcaaaaccggactacgaatgtaccagcaagcactagctggaattagtcacatctcgtttgccgaggaagagagtatttcccccaaaaagccaactactcttcctgaggtggcgaagcagcgtgagttgagtggaacactacaaagtgaggaggcaaagttgaagaagcagctctccgatgccaagtcaaaggagcttggtggacatgacatctttgcacccccacctgaaattgtgccgaggccaactactgtacgcgctttggctttgaaggacaattttgacatgggagaacctgatacacataaacctgctggaggtagcacgccaagtgaggagaccgtggttaagacagcaaagaaaatacataaccagaaattcgcagagctatccggaaacgacatatttaagggtgatgttcctccaggttctgctgaaaaaccactcagtgtagcgaaactgcgggagatgagcggtagcaacatctttgctgaagggaaggtagagtctcgagtcagtagcggacgcaaaccccctggtggggaaagcaccattgctttggtttaacttcataggtctaacaccgtctccgattaccgtgtttttctgttatcttcagtgggggtgtgtgattatgggttctgggaattatgttttaggtttaacatgtcaacttgacctatgaacctatatgctaattacttgtttcataattcccaaaaccaccgag

SEQ ID NO: 17238 - DNA, 496 bp, Gossypium hirsutum
  Clone ID: uC-gsronu33B139e07b1
ttctcgttacgcgtccgagctactctaccttttctttttatatttatttaaaaaaattcaaacgtatatatacatttatgaaaatccatgaaaatttaaacgaaaaggaaaagggtgagatcgaatttcaaagcaaaaggcacaaaaagaaagttccagatcaagagattttcaagtgtttcgacagttttgagagtgggagggaaaaaaatggagaggagcactccagttaggaagccacatacttctacagcagatctgctcacttggtctgagactcctcagccggaccccgacaccttcgccgctcgctccgtccgacctcaccagccgtcggatgggatcagaaaagtggtgtttggaggtcaagtaactgatgaagaatttgaaagcttaaacaaacggaaacctccttctggatataaaatgaaggagatgactggtagtggtatttttgcagccaatgtagaaaatgatgagtccgaaccaggcagtg

SEQ ID NO: 17239 - DNA, 429 bp, Gossypium hirsutum
  Clone ID: LIB3083-082-Q1-L1-B3
ggggggggcggttataaactagggggacccccgggccggcggaattcgggcccgagctcaaaggaggaacccacacacttccacggaaaatcaccgaacttggtccaagactcctaaaccggatttaaccgcctccgcggaacgctcaacccgccctaacaagccgtgggatgggatcagaaaagtggtgtttggaggtcaagtgaccgatgaagaatttgaaagcttaaacaaaaggaaaccttgttctggatataaaatgaaggagatgactggtagtggtatttttgcagccgatggagaaaatgacgaatcagaacctggtagcgcaaaccctactccaaacaacaaaacagcaatacgaatgtaccagcaatctctagctggaatcagtcacatctcgtttgccgaggaagagagtattacacc

SEQ ID NO: 17240 - DNA, 1082 bp, Gossypium hirsutum
  Clone ID: GOSHI-09MAY01-C16074_1
tgtttggcaagattcaagttcattcacaaatatatttgatgtggatcactttatcaatgtccttcaagatgaagtttctatagttaaagagttgcctagagaatattcttggagctcacgggaatattatgctacaggtataagagctactagaatcaaaacagcacctattcatgcttcagctgactggtatctggaaaatgtgttgcctgttatgcgaagttatgggattgctgctatatcgccattctcccatcggctagcgtttgacaagttgcctgtggaaatccaactttacgttgtaaacttcaagcatcaggcactgaggttctacgagagagaacagatgatacagagaaagggagagctggaaagtttgttgtattacatcttcgctttgacaaagacatggctgctcattcagcttgcgattttggtggaggcaaagctgagaaactggccctagctaaatatcgcccagttttatggcgggcaggggttttaaactctcaattcactgatcatgagctgagaaatcaagggcggtgcccattgactccggaggaaattggattgctgctaactgctttgggcttcaacaataatactcacctctatcttgcttcacacaaagtttatggaggagaggcaaggatctcaacattgcgtgctatgtttcccctcatggaagataagaagagccttgcttcagcgattgagctcgctgaggttgaaggtaaggcttctttgatggctgctgttgattattacgtgagccttaaaagtgacatcttcatctctgcttctcctggaaacatgcacaatgctctgcttggacatcgagcttacttgaacttgaaaaccattcgaccgaacatgttactgctgggcccactattcctgaacaaaaccatagagtggtctgagtttcagcatgcggttattaatggacataaaaataggcaaggccaaacgaggttaagaaaggagaagcaatctatatatacatatccagccccagattgcatgtgtagagcttaaacttcgtaaacattatggtatgaagctatttatgtgtcttt

SEQ ID NO: 17241 - DNA, 404 bp, Gossypium hirsutum
  Clone ID: LIB3145-028-Q1-K1-C3
cccacgcgtccggattgctgctatatcgccattctcccatcggctagcgtttgacaagttgcctgtggaaatccaacatttacgttgtaaagtaaacttcgaagctttagcttttgttcctcggataagattaattggagagacccttgttaatcgactccgtgatccttctgggaagcttcaagcatcaggcactgaggttctacgagagagaacagatgatacagagaaagagagagctggaaagtttgttgtattacatcttcgctttgacaaagacatggctgctcattcaacttgcgattttggtggaggcaaagctgagaaactggccctagctaaatatcgccaagttttatggcagggaagggttttaaactcttcattcactgatcatgagctga

SEQ ID NO: 17242 - DNA, 535 bp, Gossypium hirsutum
  Clone ID: LIB3585-041-P1-K1-E9
cccacgcgtccgggagagagaaagagaagctgcacggataactggaacacgagtactccgtactgatccctgccggtgccaaggaatctaggcgtagtccaacctatgatgcttatccacgtaggaggtcaagatctaaatcacgttcatattctccatcatactcaaggcgccatgcccgtggaggttattctgatgattctcatagaagaaagccaaaggctccaaaaatagagtatattacagagtttgggggttctggtgacggaaatggaccaaagcttgatggagtttctccaccatcatctcctccatctcaggctgacattttaaaccggccatcatctggtcatatactcgaggcacttcatggtgatcctgcatctggtgtatctcttaacaaagaaaagagtggtgaagtgttaaaaccagcatttagtggaacatcagcattagccaagttgacaaaagcaagtgcctttggagggccctcaaaacaggggcaggttgaaaagaaagaaacttcacaggagcg

SEQ ID NO: 17243 - DNA, 379 bp, Gossypium hirsutum
  Clone ID: LIB3197-024-Q1-M1-A7
aagaagatgatgatgaattcgacagtgatgatagtaatgatgaaggaatggaaataatagcgaaaggatttggagtgaaaaggtatggttggcttgtttatatggataaaaaagcaaaagaggaggaaaaaagacagaaagaagtaatcaaaggcgatcctgcaattaggaaactgagtcgcaaggaaaggagaaaagcttctcaaatagagagggagagagaaagagaagctgcacggataaccggaacacgagtactccggaatctaggcgtagtccaacctatgatgcttatccacgtaggaggtcaagatctagatcgcgttcatattctccatcatactcaaggcgccatgcccgtggaggttattctgatgat

SEQ ID NO: 17244 - DNA, 641 bp, Gossypium hirsutum
  Clone ID: GOSHI-09MAY01-C16374_1
atacggtctagggttctgacgagacgaatccaatttcgatcggcatggtattgctgtaatctagacgagacgaatcgaattccaatcagcatattattactgaattcatagttgggaaatcaatctctccctctctttctccctctttgtatatatatgtatgaatgcatgtgtatacatgtatttatagatgtactccagcaatctcaagggctttattctggcgatggtctctagcgccttcattggctccagctttatcatcaagaaaaagggtctccgaaaggccggtgtcaacggcccccgtgctagttctggtggatatggctacttgttggagccgctctggtgggttggcatgcttactatgattatcggggagatttccaatttcgttgcttatatctatgcacctgctgttttggtaacgcctcttggtgctttgagtatcatcgttagtgctgttttagcacatttcatgttaaaggagaaactgcagaaaatgggaatgttgggatgccttttgtgcatagtaggttcgacaatcattgtgcttcatgctcccgaggagcgttctattagctcagttgaagaaatttgggaatttgctactcaaccagcctttcttttgtatacagctt

SEQ ID NO: 17245 - DNA, 748 bp, Gossypium hirsutum
  Clone ID: GOSHI-09MAY01-C16314_1
gattacttttccaacctgcagaggaggggggtgctggtgcatctcacatgataaaggaaggagctttaggtgacgctgaagcaatatttggaatgcacattgattatagcacattgacaggaagcataacactggtttcagggccagtcctagccgctacatgcatctttgaagccaaaataaaaggagttggtgggcatgctgcgggacctcattcaactgtagatccaatacttgctgcatcctttgcaattttggcactgcaacagctaatctctagagaagcagatcctctccacagtcaagtgttgtctgttacttttattagaggtggatccgcattcagtgtgatcccatcatatgtcgaatttgggggcactttgaggagtctcaccactgagggcttgcataaactacaacaaaggttgaaagaggtcattaaaggacaagcagccgtacaccgatgcaaagcttttattgacatgaaagaaaaagatcaccctctctatcctgctgttgtaaatgatgatggcttgcatcaacatgttcagaaggttggtagccttttgcttggtcctgagaatgtgaagaagggcaaaaagataatggcaggagaggacttcgccttctatcaagaaaaaatccctggattcatgctaagcattggaattagaaacgaagaactgggttcaattcatcctccccattccccgtatttctttctcgatgaagagtcctcgcccgcggt

SEQ ID NO: 17246 - DNA, 643 bp, Gossypium hirsutum
  Clone ID: GOSHI-09MAY01-C16304_1
aatcagcaaagaattgcgatatgtaatgcagtggctgtggccaaaattctgaatgccacgcttatcttgccagtgctgaagcaggaccagatttggaaagaccaaaccaaatttgaagacatttttgatgttgatcatttcatcgactacttgaaggacgacgtgcgaattgtccgtgacatacccgggtggtttactgacaaatcagaattatttaccagtataaggcggacagtgaagaacattccaaaatatgctcctgctcaattttacatcgacaatgtgctgcctcgggtcaaagagaagaagataatggccctaaaacctttcgtcgatagacttgggtacgataatgtccctccagaaatcaacaggctaagatgcagggtcaattatcatgctcttaaatttctcccggagattgagcaaatggcagatttattggtatcaaggatgagaaccgcacggaagtccgaatccttacatggcttacatcttaggtttgagaaaggatggtgggcctatcattttgtgatttgtggaactaggggagagaaagctagaatggcagaatcagacaaaaagaatggcctcgacggtataagaacggacccatctgtggcagctggctctgcaaaaaaga

SEQ ID NO: 17247 - DNA, 718 bp, Gossypium hirsutum
  Clone ID: GOSHI-09MAY01-C16254_1
cagtcatcgaacggcttgagaggaagttttccactatggctgctgaacatccttttaaggcagtcctgaccagtcttccaaagccaggtggtggcgagtttggaaagttctatagcttgcctgccctgaatgatccgaggattgataaactgccctactctatcagaatcctgcttgaatctgcggttcgtaactgtgacaacttccaagtcaagaaggaggatgttgagaaaattattgattggcaaaatacatcacccaagcaagtagaaatccccttcaagccagctcgtgtgctcttgcaggatttcactggagtgcctgctgtggtcgaccttgcttgtatgcgtgatgctatgcacaagcttggcagtgatacaagcaagattaatcctctggttccggtagatcttgtcatcgatcattcggttcaagttgatgtaacaagatcagaaaatgctgtgcaagcaaatatggagcttgagtttcagcgaaacaaggaaagattttcattccttaaatggggatcttctgccttccgtaacatgcttgttgttcctcctggttctggtatcgtgcatcaggttaatcttgaatatcttggtcggcttgtgttcaacaccgatggcattctctaccctgatagtgtggttggaactgattctcatacaaccatgatagatgggctcggagtagctggctggggagtaggaggtat

SEQ ID NO: 17248 - DNA, 418 bp, Gossypium hirsutum
  Clone ID: GOSHI-09MAY01-C16264_1
cttctgctttcgttttacttttttgtttcttccttatcttgcaagagtgcaagctgtactgcataactgattttttctgagctctggctttttattcctctccttcatgcagatttccatcttgattttgcctcgcatgcgagattaaacgttgtccaaactccaagcctttaccaattcaaaggcaagtcggtttcatggactccaatttacagacttcgcctaatagttctgatgcaaaaacagcatttcgtaagccttctaccgactcatctaaccgacaatataggcgtcgttctccagtcagcgggttatcttcatctgaaggaagttctccccagcgtgaccgtagcattagtcccatagtttcaagggatgatctggaaaaaagtgctgatactcgaccggggagagatgg

SEQ ID NO: 17249 - DNA, 651 bp, Gossypium hirsutum
  Clone ID: GOSHI-09MAY01-C16214_1
cgaaaaaaaaaggaaggaaaaggcacttccatctccgtcgtttaaagcaagtttttaattttttttctttgcttcgatacgatcaaatcacctgagtgagaacataattttttttttgcttttttagagattgaaaattaagctaatttatttgttttttttagatagtgataggaaaaaaatagaattatgatttcgtagctacttttcctccttttctttcttcttcgcatttagattaacctaacctaaccctaggttttttttttggtgttcttgttaattttgtatttgtttgtggtttaaggtaaaagacggaattctaggtttttttctcccttcttttattttattttttttagattttttttacttgattgatcatctggatgtttatgggttgtcggtgcggttgatttgaagtttagtgtcgccgtataatttcctcgcttttttaacgtgaggggatttttttaaatttagggtttcggattataagtttaggggtgtgaatttcttttttttttaaatacttatttgagttgattgatggacctgtgttggtataagttcgactggtcgtagatcgcagtgctcttttgaagatctattggtacaacatcgacaccgagagtgccttagcttgaatgg

SEQ ID NO: 17250 - DNA, 608 bp, Gossypium hirsutum
  Clone ID: GOSHI-09MAY01-C17864_1
cttactcgtccgcccacaaaagtttgtagtattaagaaaaaattagaaaaaaaaagaacaaaatccccaagcagcagcagccaaaaacgggggcaaattgaagaatgggtgttgattattacaagattcttcaggtcgaccgcaatgcaaaagatgaagatttgaagaaagcgtatcgtaaactagccatgaagtggcatcctgataagaaccctaacaacaagaaagatgctgaagcgaaatttaagcaaatctctgaagcttatgatgttctgagtgatccccaaaaacgggcggtttatgatcaatacggagaagaagggttaaaaggccagatgccgcctccaggggcgggaggttttggaggcggtgacagtggtggtccaacgacgttccggttcaatactcgcaaccctgacgatattttctcggagttttttgggttttcgagtccgtttgggatgggtgatatgggtgggccacgtgcaggggcgtctgggttccctaggggaatgtttggtgaagatatattcggctcgtttaggggtggtgctggtgagggttctaccactatgcctcctaaaggtgcccctattgatcggccattc

SEQ ID NO: 17251 - DNA, 934 bp, Gossypium hirsutum
  Clone ID: GOSHI-09MAY01-C17804_1
cccacgcgtccgggggatacccaaaggttctgcgtcgttcggccatcatttcatcactgcgacgatgaatgacgaccttcggtgaccaccccctttttgctccttcattcgctccggcgtggaactcatcgatttaagccccgaaatcccatctccgacttcgatttcagcgaaggagacgaggtcttcaatggctcgtacgcaaaggtaaggtttcactctccctcttttattttattatacagaaacatgtgaaagcgaaaggaatatgaaacagatgcgaaaaagaaaagaaaaaaaagcacgaggcgttcgaaaagatcaccttcttggtctattgcttttctattgatttgctgtctgtgtttgtatttgtgtgtttctctcaaaaaaaaaactttacaatcgaaaatcaataggcttttatagccgaatgtaaaataaataagtaaataaatgaaaatacaattcttcttttttcgtctttgctgcttttgtctgttctcctttgcaggtacgagtacggggctgtgcgttggcccttggcgcgaggtgtacggggtggtgctggcgtgtgtacgggagggtgcgtggtgccaggaggatgctggggttgctggttgcggcgcatgggaaggaaccttaaggttctaaaatttctgggccacttaaggtgttcatatttgggctgtaaggctactggtttttttgtaatgggactaaagtattagtaatggggtcatgctattgggcttatgctatgtaattggactttaagtatttaagggactgttataattttatttatttatttatttattatttaggtttgggatttctttagcgggcccgggccaaaattggtcactacaaccttgagacatgacctgaaccttgtaaacaaaggagctgaaaaaggcttagtgaacacatc

SEQ ID NO: 17252 - DNA, 348 bp, Gossypium hirsutum
  Clone ID: uC-gsronu33B055c03b1
ggggatcccaatggttctgcgtcgttcggccatcattggatcactgcgacgatgaatgacgaccttcggtgaccccccctttttgctctttcattcactccagcgtggaactcatcgatttaagccccgaaatcccatctccgacttcgatttcagcgaaggagacgaggtcttcaatagctcgtacgcaaaggtaaagtttcactctccctcttttattttattatacagaaacatatgaaagcgaaaggaatatgaaacagatgctaaactgaattgaaataaatagccctaggtagtttgtaaagactcccccttctgtctcattgcttttctatcgctttcccc

SEQ ID NO: 17253 - DNA, 735 bp, Gossypium hirsutum
  Clone ID: GOSHI-09MAY01-C17584_1
gcttcttggccgaaaacccatcttccctggtacagagtgtctcaaccaacttaagctgatcatcaacataccttggcagccagaaggatcttgaatttatagataaccccaaggcaaggaactacattaaatcactcccatattcccatggaatccccttttcttgtctttatccaaatgcccatcctttggcaattgatttactgcaaaaaatgctagtttttgacccttcaaaaaggattggtgtaactgaagcactccaacacccttacgtggcacccttgtacgatcccaactgcaatcctccagcccaagtgccaattgatcttgacatagatgaggatttgggggaagaaatgatcagggagataatgtggaaggaaatgctttattaccatcctgaagctgctaatgctaatggtgaggtgtgtgtctaatcttttccacatcttccttaagcactctgcagtcaagcctatgaggctgttttactactgacgagcagggttttatcttggtggtattaagatgctatatttatgtctttgctactcctttatggctttaataatgttggagaaacacaggcaatatgtgtctgttgtcggctgtgatgcctgatataactaaattttgtaccaatagcttatttaggagcttgagttattttctgtagatgccttgagaaagagaagaataaaaattatatataagggtgctgcttgatgtgtctta

SEQ ID NO: 17254 - DNA, 709 bp, Gossypium hirsutum
  Clone ID: GOSHI-09MAY01-C17444_2
caatgcttgaaggaattcgagacagaactcgagacaattgggagtattaagcaccgaaatctggtcagccttcaagggtattctctctccccgtctcggaaccttctcttctatgactatatggaaaatggcagtctctgggatctcctccatgtttctaccaagaggaaaggtctcggttggggcatgcgtttgaggattgcacttggagctgcgcaagggttagcgtatctgcatcatgactgtagtccccgaatcatccacagggatgtcaagtcatctaacattctgttggacaaggattttgaggctcatattactgattttggcattgcgaaaagcttatgcatctcaaagtctcacacttccacttacatcatgggcactattggttatatagaccctgaatatgcccgcacttcccgcctgactgagaagtcagatgtttacagctatgggattgtcctactcgaattactgactggaaggaaacctgtagacaacgaatccaatctccatcatctgcttttgtccaaggctgccaataactctgtcatggaaactgttgatccggagatcactgatacatgcaaggatcttggagcagttaagaaaggttttcagctagcccttctatgcacgaagagacaaccgtctgatcgaccaaccatgcatgaagtgacccgggttctaggaagcctaatgccat

SEQ ID NO: 17255 - DNA, 991 bp, Gossypium hirsutum
  Clone ID: GOSHI-09MAY01-C17444_1
cccacgcccccgcccacgcgtccgatttcaaactacctgcttttagctctccttttgaatcaatctccatttttggtttttcgtaaagtgaaaggatgttaggcattttcaagaaagaattaatgaatcctccaaaggagctgcatagcccagcttcactcacttcatcaaacaagcccaagcttcccaatcaaatcatcaaccatttcctttcttcaaatcccaacaatgctttctcaatggggttcggatcctcagcttgctttgcttatgctcccacagagaatcgtttccccagtcatcaaaggttgttttgtggagtggatgaaatatactgcatattcttgggggatttgaataatttgagcagcctgctaaagcagtatgggctgtcaaagggcaccaatgaagccatgtttatcatcgaagcatatcggaccctccgagaccgtggtccgtacccggctgaccaggtccttaaggatcttgaaggcagctatggatttgtggtgtatgatagcaaagctggaagtgtatttgctgcattgggtgcagatgaaagggttaatctctattggggtgtagcagctgatggatcagtagttgtttcagataacttgaagcttataaaagaaagctgtgctaaatcatttgcaccatttccaccagggtgtatgttccacagtgagcaaggattgatgagttttgagcatccaaggagcaaaatgaaggcaatgccaagaattgacagtgaaggggtgatgtgtggtgccaatttcatggccgatgctcagtcgagaacaagtaggatgccccgagttggtagcgaagccaattgggcactgcgaggctccaaagcttgaataattcaatactaaatgacccacattttattatttgtgttttttttttttggggggggggtttatttcctcgtttatgaaattgtaaaatgccttgtaaaaggcatgtttgattaatacattgtaat

SEQ ID NO: 17256 - DNA, 417 bp, Gossypium hirsutum
  Clone ID: LIB3148-030-Q1-K1-G8
cccacgcgtccgcccacgcgtccgcccacgcgtccgcccacgcgtccgtgatggatcagtagttgtttcagataacttgaagcttataaaagaaagctgtgctaaatcatttgcaccatttccacctgggtgtatgttccacagtgagcaaggattgacgagttttgagcatccgaggagcaaaatgaaggcaatgccaagaattgacagtgaaggggtgatgtgtggtgccaatttcatggccgatgctcagtcgagaacaagtaggatgccccgagttggtagcgaagccaattgggcactgcgaggctccaaagcttgaataattcaatactaaatgacccacattttattatgttttttttttttttttgttgggggggggggttatttccctcgttatgaaatcgtaaaatg

SEQ ID NO: 17257 - DNA, 410 bp, Gossypium hirsutum
  unsure (1)..(410): unsure at all n locations
  Clone ID: LIB3148-046-Q1-K1-D2
gcgcccacgcgntccgcccacgccgtccgcccacgccgttcgctttctcaatggnggttcggatcctcagcttgctttgcttatgctcccacagagaatcgtttccccaatcatcaaaggttgttctgtggagtggatgaaatatactgcatattcttgggggatttgaataatttgagcagcctgctaaagcagtatgggctgtcaaagggcaccaatgaagccatgtttatcatcgaagcatatcggaccctccgcgaccgtggtccgtacccggctgaccaggtccttaaggatcttgaaggcagctatggatttgtggtgtatgatagcaaagctggaagtgtatttgctgcactgggtgcaaatgaaagggttaaactctattggggtgtagcagctgatggatc

SEQ ID NO: 17258 - DNA, 490 bp, Gossypium hirsutum
  Clone ID: LIB3582-021-P1-K1-G6
tcctacagaactcgagacagttgggagtattaagcaccgaaatctggtcagccttcaagggtattggcattcctggtctcggaacctgtgataggatgactagcattgaaaagaaagaattaatgaatcctccaaaggagctgaatagcacagctgcactcacttgatcaaacaagcccaagcttcccaatcaaatcatcaaccatttcctttcttcaaattccaaaaatgctttctcaatggagttcggatcctgagcttgctttgcttatgctcccacagagaatcgttatccccagtcatcaaaggttgttgtgtggagtggatgaaatatactgcatattcttgggggatttgaataatttgagcagcctgctgaagcagtatgggctgtcaaagggcaccaatgaagccatgttgatcatcgaagcatatcggaccctgcgagaccgtggttcgtacccggctgaccaggtccttaaggatcttg

SEQ ID NO: 17259 - DNA, 274 bp, Gossypium hirsutum
  Clone ID: uC-gsronu33B148h07b1
ggcccggactactggctcgacccactcttcgccaccgtcgtaaggattgacgagttttgagcatcccaggggcaaaattaatgcaatgccaagagattgacagcgaaggggtgatgtgtggtgccaattttatggccgatgctcagtcgagaacaagtaggatgccctctagttggtagcgaagccaattgggcactgcgaggctccaaagcttgaataattcaatactaaatgacccacattttaatatgcttcttcttttttgttggggggg

SEQ ID NO: 17260 - DNA, 977 bp, Gossypium hirsutum
  Clone ID: GOSHI-09MAY01-C17434_1
taattttgctgcttccaactttcagttcacacgaaaaataaaatacatacactgaaaactaacggcaaagcttcttcttctcttcatctgcatatctgagaatggaaaacccaggatcaaatcagcttcctgaagtggactcattgccagatggttttgttgagagtccttcagagattttggctccaaaaaccccaatttctaaagaagaaaagcctttgctccctgattgtagagaaggtgatttagtctccagtgagtttggagcaaacaagggccaaaaacaaagaacgttccctgtgccattgtctgaggcagatggttttgagggctcagcagactatgtagaaggtaaagtagtctgtcccgagttgagcaattcgcttcccgaggctgctgaatgcagtgaggtgaaggaagttaaagggaagtgtgaaagtacagaaacatgcattggaagaggatctgaaacgaacttgactgctttgaaagaatcgtcttcatccgaaagcatagatttgccagaataaaaaaacagaaaccactgaaaccaaacgcaagactgcaaaacgtacatccaaatcagaaaaggagttccttgagttctctttgaaatatcaacaagttattgcagaaagagataccgctattgctgttcgagataaactccaatcactttgttggagttaccacgtcaaaaccaaatgttaatggatgaatgttaaccggtttccaccggaaggccaaaccttaaaataaatttatcccccagtttccaaataccatcccagagtttaggccttaccccaaaaaaccaaagagcaatgcctttctccccctaaaggggaatgaaaattttagaaaataatttgaaggagacctccgaaccaattttccctcttccttaccaccatttttgcccaaaaccttagcgcaaaaccttttaaattcaccttttcgaattttagaatccaccc

SEQ ID NO: 17261 - DNA, 481 bp, Gossypium hirsutum
  Clone ID: GOSHI-09MAY01-C17754_1
agctccactccattaaacaaacaccaaaaagaaagataaaccccaaattctcatttttactctatccaaaccctagattcaatcgtcgcccatcttccctccgatggccaattcaaagaaaccgggcggtctccgcgagatgctggaatcgatgtactccgtcatcgctctgctcttcattttagtagcctgcgtcgaactctgcgacgccgccgctcccgtcgacgtctaccgtctaatccaatacgacatgtccggttcacctttcggatctcgattcgccgccctcaaccatcacgccgcctccttgcatttccctcccggtgtcgatctttccagaaccgttctcatcatccctctacgtgaactgaatatcactttcgttcgagaatatatcaatcaaaaaaagccgttgggaagattgttagttttgcttcctgaagtacttatcttaaaactggaggaataaccaagttcatga

SEQ ID NO: 17262 - DNA, 411 bp, Gossypium hirsutum
  Clone ID: GOSHI-09MAY01-C17714_2
ggaatgttgtctaaagccaccgagccacgatccgcaccatctcagttgattgtaagagaatggtattgtagaaaaaggtaattaaaagatgagtgaagttttcgaaggatatgaacggcagtattgcgagctatccgcgaatctttccaagaagtgtacggcttctggtgctctgaatggagagaagatgaaacaaaaactttctgaaataaaagccagactagaagatgcagaagctctgattcggtaaatggaccttgaggcaagaagcttgcagccaaatgttaacgctgtacttcttgctaagttacgggaatataagtcagatcttaacaatctcaaaagtgaagttaaaagaattgcatctggcaatttaaatccatctgctcgagaatagttgttggagtctgg

SEQ ID NO: 17263 - DNA, 929 bp, Gossypium hirsutum
  Clone ID: GOSHI-09MAY01-C17714_1
atcatcgattattcttttagctaatgttcaattttattcttcttcctttcagtagaatttaaggggaatttttcttggaaaataacttaaaagatgagtgaagttttcgaaggatatgaacggcagtattgcgagctatctgcgaatctttccaagaagtgtacggctgctgttgctcttactggagagcagaagaaacaaaaactttctgatgtaagagctggagtggaagatgcagaagctctgattcgaaagatggacctcgaagcaagaagtttgcagccaaatgttaaggctgtacttcttgctaagttaagggaatataaatcagatctaaacaatctgaaaagtgaagttaaaagaatcgcatctggtaatttgaatgcggctgctcgagacgagttgttagagtccggcatggctgatactctcacggcatcagctgatcaaagatcaagattaatgatgactacagagcggttgaatcagagcagtgacagaattaaggacagcaggagaaccatgttagaaacagaagagcttggggtttcaatccttcaggatttgcattcacagcgacaggctctcttacatgccaataacacgctccatggagtagatgacaacatcggcaagagcaagaaaattttgacagctatttctaggagggtgagcaggaacaagtggatcattggcaccattatcgccgtccttatcattgcgatcgctcttgttttggacttcacacttgctaaataggccattatttgtatcctcgccctgttgattctgcttggtttggctttgtttgtccttgcgaacttgtccatggtgaattccaatataaatggatgctttggtaatcctaaggactgaatttttcgtcactacaattttatgtgctgacttccaagaaatggttttacgta

SEQ ID NO: 17264 - DNA, 837 bp, Gossypium hirsutum
  Clone ID: GOSHI-09MAY01-C17704_1
aaaaagcttaagcgctgcaatggatgaaagtgggagaaagggcgagaatggaatagaattggaataaacaaaaaagtaaaagctaaaattaaaattaaaatgctaaaatgatgaatctatccacgatgatagcgtatggataccgccattgtacgccaccaataaagcaactcttaaactacactaccttccttcatcttcaccatcaccatcaccatcaccatcaccatcaccatcttcaaggccgccctctttcctttaacagtcttaatctccctaacctcaatctccttctcacgggtaattgtctcttcttcaggatgcagcgcttttggatcggaaatgggatcaacaaaaacaaacaaatggtggagcatttgcagcgttacggagtgatttcgtcaatgaaagtagctgaagtaatggagactatcgatagggcattatttgtaccggatggggcttcggcttatgctgatagtccgctggcaataggttacaatgccaccatttcagcaccgcatatgcatgctacctgccttcaattattggagcaaaatttgcagccccgcatgcacgctttagatgttggctcagaactggatacttgactgcttgttttgcgataatggttggaccacaggtcgggctgttggtgtcaaacatattcctgaattggttgcttcttctataaaaaacatcgaaaaaagcgctgcagctccactgttgaaagaaagttctctctcgtgcatgctggcgatggaaggcaagggtggccaaaatgtgcaccctatgatgctatacatgtcggggcagcagcaccggaaaatacacagc

SEQ ID NO: 17265 - DNA, 448 bp, Gossypium hirsutum
  Clone ID: GOSHI-09MAY01-C17694_1
cccacgcgtccgcttttcttactttttattttcgttatttttttcatgattgtgcagatcagcccttaacctttcattttctttttggtttttttttttcgaagtattttttttgttgttgtttttcatgaagagaagaagctttacgtatggtttttctgaaattttgaatggtttttgaaagtaacaaagaagatgacgtcgacttcggtagcaacttcgtcttctaggatttgcttcaattcagtctgtaacgatttgaaatcggaaagaccgaggaaaggatggcggttgcgaacgggagagttggctgagctctgtgatcgatgcgcttctatttacgatgagggaagaccttgcgatacttttcacttaatggcctccggtggcgggacctccgagccctggagctcagaagccttatggcccaagcgatgcccttttttgc

SEQ ID NO: 17266 - DNA, 387 bp, Gossypium hirsutum
  Clone ID: LIB3083-104-Q1-L1-A6
gattatctttattcaccagtagtcgtgaggcgccagaggatcgatctccggcgaattttgtccggctacgaaattccttatttttataataatgggagggggaacgcatcgtccgacgatggatctgctgcgatcggagccaatgcagttggggcaactcataatcccgattgagtcagctcatcgttccatttcttatctcggtgatctcggcttctttcaattcaaagaccttaattcagagaagagccctttccagagaacgtatgctacacagatcaagagatgcggggaaatggcacgcaagctacgtttcttcaaggaacagatggtgaaggctggtttatcaccctcgactagatctgcaattagtgatgatgttgattt

SEQ ID NO: 17267 - DNA, 318 bp, Gossypium hirsutum
  Clone ID: LIB3197-037-Q1-M1-F9
cttgtacattaattacgcatttttatgtagatggaattttttataactaatattaattgtacttttaaagaattctttagatttttataataatgggagggggaacgcatcgtccgacgatggatctgctgcgatcggagccaatgcagttggtgcaacttaatcccgattgagtcagctcatcgttccatttcttatctcggtgatctcggcttctttcaattcaaagaccttaattcagagaagagccctttccagagaacgtatgctacacagatcaagagatgcggggaaatggcacgcaagctacgtttcttc

SEQ ID NO: 17268 - DNA, 626 bp, Gossypium hirsutum
  Clone ID: GOSHI-09MAY01-C17164_1
gctatagctgtttggtatcgtatagctgctcagccaaaagcctgcttctgtgagttgagtattaattgcattcattttcacttcctttgcttcttcccctatgtctaaagcagtttgggcattattgctatcttaaaatgttgtttcctgatttgttttgggagtttagtggttgctgaagctttagtatcgtctatcttagttgcagagcttatgaacacacaaatttctcattaataacctgtcataactcatggaagtctattttgtctaacatttttggttgttcttattagcggttcaccaatattgtttaaagttcttgtcatttgttaattatatactaatcaacttcggtgtggtctttgaacttaggcctcattcatcttcttgttccatgttaatggagacttatctacattattggcgaggactattttctggaaaattttcaccactgttgataactaaaaattgttcatgtacctctagatatgactaggagaaagcttttcgaattgagttgctcactgcctggttcttaaggcatttgcaatttcaataagtagaatggctacttatacgattataaatcctgaggttatctggctatttatatgttgcag

SEQ ID NO: 17269 - DNA, 1628 bp, Gossypium hirsutum
  Clone ID: GOSHI-09MAY01-C17094_1
gtttttggcccatagtcaatcatcttccccactcttctcctgtcaaactcctattacagatctgcagtaataggtaatgatcactgaaatcgttggtgggttagatttgagggggagattcctttctccaatttcattgttgttgattaattatagccattttcgttatacatcccaataattgtctgtttgttttggggatggactgattgcttgccatggaaatggatcgagaatctgggaaattggagcaaattgtttcccaatttcgttccaagatcttgcacgttattttggactctagggtcccttctcttcaccaccaccaccagctgcaacagcaagaatcgctttctcattctcgggtgagaaagactgacaaatggttcaatttagtattaggagaccgtcccccagctctggagaatctcaatttctcccttaggaatctcttggatcctatggtaatagacataatactggttcaccgtggttcttgttcctcatcggtggacaatctttatagtccttcagctccagctgtgggacctgctgatgagactgttatcgaaagatgggttgttcaatatgattgcccacgatttattgctactccaagtggtgctgatgcttctgtttcttataagaagatttacaagaagtcaatcatacttttgagatcactttacacacaaatgaggcttctccctgcatatagaatctttaagcagctaagttcattgagccaaacttataatttcgatcttgtttacaaggtttcatcatttagtcaccccttctctagggaagaggagagtggtatgaaagaatatagttttgcacctgttgaggctctttcaggttacctttctgtgtcggtaacctaccgtgcaactctatctgatttcaaccttgagcctttggtgtctttgccaccaaaaattataacagactatgttggcagccctacgacggaccctatgagatcctttccttcatcagagaagggtgctcatgctacatcctttcctttaagaggagcacgacctccatcttcgtctccatttcaacgtccacacagctggtctagtggttttcacagaggattcccttctacaaaaactcaatctcttgcaggatctccacctgcttatcgtacatctcccaagccgtatgatattgcatctacacctactgatttatatggtaatagaattcaaaatcaaagagtgtcaactctacaacaggttactgcttatgatgaatataagtcgtcacccccattctcaccatctgcttctccatcaactccgtcatacttatctggtgctaatcctttgcttactcgtcattgttctgagacggctccagtaaccattccacttccactaactggcagaagtactagatatctttctcccaactcttctgatccaagtaggcattcccttccccctttgtctcctagaagctcaaagcacgatgcctcatctcaggaatctccttctgggattcggtcatacaggaaaatagaagctctaagggcaggagagtctccttctggcttatcgaataattattctgcacaaaaagtggttagagatagtaaagatgactcgggtcgattc

SEQ ID NO: 17270 - DNA, 583 bp, Gossypium hirsutum
  unsure (1)..(583): unsure at all n locations
  Clone ID: LIB3828-026-Q6-K6-B6
ccggttcgacccagcgtttgctccgtcatacttatctggtgcgggggggggggggtactcgtcattgttctgagacggctccagtaaccattccacttccactggctggcagaagtactagatatctttctcccaactcttctgatccaagtaggcattcccttccccttttgtctcctagaagcctcaagcacgaggggggaggctcagantctccttctgggattcggtcttcccggagagtggaagctctaagggcaggagagtctccttctggcttatcgaatnnttattctgcacagaaggtggtttgagatngtaaagatgactcgggtcgnttctctgcnttgttgtcttctagtgggtcacctcatattggattctctagaagctctagtggactatctttccaggatgacctggatgattgtgagttctcttgcccttttgctgttggtgatgtctgctgttctgattcatccagtcccaacacagaggggcaaaacggcttcggtaattcactgcacagtctagtgtggttggtgataatctctcacgatgcttgctgttgggcttcttgttc

SEQ ID NO: 17271 - DNA, 491 bp, Gossypium hirsutum
  Clone ID: GOSHI-09MAY01-C17054_1
tgtagaataccagccctcactccacacatgactaatgggaggatgcttcttcacaaggtgctggatggtgcccagataagtttggaagaatatgaggttatgaaggatctaataataccacttggccgagcacctcacttttctgcacagagtggagcttgagtggtgtgatttgtagtcattgtggaaattctgtttccttatgattagtatctactgagaagttgcaaaatctgatgatcgccgatggaatcatctcaaaggttttgcttggagtgaaggaactatatgtgctaacaaattcggctcattgttgattacggagttgattgttcaaatttaatcgaatttcgatgcttgtaaagtgaaaggtatttcttgttcaaaaacaaaaactgaattgcaaatgcaaatgcagatacagtttatatatatgtttgttgaggatgttgcgtatagtttagatgtatcaaattactcatggtttttgg

SEQ ID NO: 17272 - DNA, 568 bp, Gossypium hirsutum
  Clone ID: GOSHI-09MAY01-C17074_1
attttctatgcagatcgcgcattttagccggcaatattggaaagcagtattcgagcttgtttgctgggcctactctgcacctctaccaagttttactcctgttttctggctgacaccattatttgagctttagaagaggctatcttgagaagctttgagttctgatgtctccgccgttgcttggtgtggaggaggaagggcagagtagggtttcttctccatctgttgaatgtatctcccacaatggcttggggataagggagtggaattatcttggattatcagatttttgttcagttgacagctccggtgtcccggatgataatgggaataacctgaatttgaaagccacagagctgaggcttggtcttcctggatcccagtcccctgagagagaaactgagctttgctttctaaactcgggaaaacttgatgagaagacactgtttcctctacttccttctaaagatggaatctgctcatcatcccagagaagtgttgttactggaaacaaaaggggattctctgaggtgaaaggcaccatatacactgaaaaaaaatggatggg

SEQ ID NO: 17273 - DNA, 390 bp, Gossypium hirsutum
  unsure (1)..(390): unsure at all n locations
  Clone ID: LIB3145-037-Q1-K1-E6
agttcgtgcattttagcctgcaatatttgaaagcagtaatcgatcttcttttctttgtctgactggcaactctaccaaggggtactgctaggctatcttgagaagctttgagttctgatgtctccgccgttgcttggtgtggaggaggaagggcagagtanggtttcttctccatctgttgaatgtatctcccacaatggcttggggataagggagaggaattatcttggattatcagatttttgttcagttgacagctccggtgtcccggatgataatgggaataacctgaatttgaaagccacagagctgaggcttggtcttcctggatcccactcccctgagagagaaactgagcattgctttctaaactcgggaaaacttgatgag

SEQ ID NO: 17274 - DNA, 1195 bp, Gossypium hirsutum
  Clone ID: GOSHI-09MAY01-C17064_1
cccacgcgtcgcccacgcgtccggactgtctaacagaatttatgcaggtattctgaacgctgtgaaggaatcgggtaccctgaaggagaggctttttaatgctgcctacaactctaagaagcaagcaataatgaatggaaagagtccttctcccatatgggacagattggtattcaacaaaataaaagctagacttggaggacgtgttcgttttatggcttccggtgcttcacccttgtctcctgatgtcatggacttcttgaagatatgctttggtggtcatataattgaaggttatggaatgaccgagacatcatgtgtcataagttgcatggatgagggtgatattctttctggccatgttggctctcctaatccagcttgtgaaataaagcttgtggacgtcccagaaatgaactacacatcagatgaccagccttatcctcgtggagaaatctgtgttaggggtccaattgttttccaaggatattacaaagatgaaatgcaaacgagagaagtacttgatgaagatggatggcttcataccggagatatagggctatggcatactggtggccgtctaaagattattgataggaagaagaacatttttaagctggctcagggagagtacatagctccggaaaaggttgaaaatgtatatgctaaatgcaaatttatagcccaatgttttatatatggagacagccttaattcttcattagtagcaattgtgtcggtggaccaagatgctcttaaagcatgggcttcatctcaaggcattaagtacaaagatttagaacagttgtgcaatgacccaagggcaagagctgccgtacaggctgagatggatgccgttggaagagatgctcagttgagaggcttcgaatttgcaaaatccgtgacgttggtgctcgaaccctttaccatggaaaatggtctccttactcctacatttaagattaagagagcccaagcaaaggcgtattttgccaaagcaaatttcagatatgtatgcagagcttactacatctgattcctctcatgttaaataactgtgagaattggatgcaactaaacatatgtagaatccctttcctctgtaattatttgcctctgtaaactattagcatattgagacaatgtcatctttgttgaataacatttaatttaattaaatcactatttagattat

SEQ ID NO: 17275 - DNA, 561 bp, Gossypium hirsutum
  Clone ID: GOSHI-09MAY01-C17344_1
atgttttcaatcttttcctgttgcatttctatgttcaaattccttcctttttttttatctattccacattttcatgaataccagcaaagctttgtccacttgtatcaaaagtaaagtaatcgaatgaaggaaaaaaaaataacagcttgcaatagcatgtctctatgtgacttcaatacatacaagaaaccaacctggtaattttcacaaggcagggaattcattctcacctggaattggaaagtccctggattcccatttgtttttcatcatattgcttcaagctttttctcttttccatttgtatcaatatacagaaacttataatacaagaattgaaggagaccatggccattaaagaggacatagagagaggtaacgacactgttctcgaaagcgcagctgtatctctcttgcaagatgagaatgatatgggccgataaggaagatggataccctgatcaaacaagcagcaaagcaagtctgtggatggtttacttcagtacctttgttgctgtggcggttcatttgagtttggatcttgtgcaggctattcatcgc

SEQ ID NO: 17276 - DNA, 409 bp, Gossypium hirsutum
  unsure (1)..(409): unsure at all n locations
  Clone ID: LIB3197-040-Q1-M1-H5
cccacgcgtncgcgaagaaatcctaaaatttcacttgaaatttcttctctttttttccccattttatttttcccaaaccatttctcccctaccccgattccctttattttttcccccaatttcctcaaatcagcagccctctgcatctccgtcggtagcccgctactatatctctgtcgacatctgctgtcggtagccctctctctctttgtttactatcactgtttttacttgtaattttcatattaataactatctcttcaaatgggttttcttttcaatttatatgccatcgggaatagacctctntagtcttcgaaaacactttccctgatcgttaattttactacagttgacagtgttctaagggttcagactcgagagtgtgctattggtatgcttgaaaaag

SEQ ID NO: 17277 - DNA, 375 bp, Gossypium hirsutum
  Clone ID: uC-gsflnu33B111a11b1
tccatccctaaagaaatcctaaaatttcactggaaatttcttctctttttttccccattttatttttcccaaaccatttctcccctaccccgattccctttatttttcccccaatttcctcaaatcagtagccctctgcatctccgtcggtagcccgctgttgtatctctgtcgacatctgctgtcgagaaagagaaatggctggaagtaatgaaatcaacctcaacgagtgcaagctattggtttcaattagatgaggctaacatatccatcaccagtgtatagaggtatctttgccacgttcctcgcaggttcaagacaggtttcaggaaaggtactgaagcagcaccaagacagaaggttgcagcagtttct

SEQ ID NO: 17278 - DNA, 585 bp, Gossypium hirsutum
  Clone ID: GOSHI-09MAY01-C17274_1
ctcttctctcccacacacaccattcaatatctcccataatctctttcaatttttttcttttttcaattctaaaaagaaaaaaaaacccaatttttgtttttttttctaagctatggatggaactggggttgttgcggtctatggaaatggagcaatgaccgaaactcataacaaatccactttctcagtgaaagtggggttagcccaaatgcttcgaggaggtgttataatggatgttgtcacccctgaacaagctcgtatcgctgaagaagccggagcttgtgccgtaatggctcttgaacgagtcccggctgatatccgggcccagggcggtgtggctcgaatgagtgacccacaactcattaaggaaattaagcaagctgttactatccctgtcatggctaaggctcgtattggtcatttcgttgaagcccaaatccttgaagccattggtattgattatgttgatgaaagtgaagttcttacacccgccgacgaagagaaccatatcaacaaacataactttaggatccctttcgtttgtggatgtcggaatttaggtgaagcacttcggaggatccgagt

SEQ ID NO: 17279 - DNA, 605 bp, Gossypium hirsutum
  Clone ID: LIB3828-009-Q1-K6-C12
ctcgcagcttcaaaattcaatctggcaaggctgttggtcattccattctggaagcatatgcacgagtcctaaataccttggctttcagcataatgaacaagctcgtctcgactgaagaagccggcagcttgtgccgtaatggctcttgaacgagtcccggctgatatccgggcccacggcggtgtggctcgaatgagtgacccacaactcattaaggaaattaaaccagctgctactatccgtgtcatggctaaggctcgaataggtcattttgatgaagcccaaatcctccaagccattggcattgattatgtcgatgaaagtgaagttcttacacccgccgactaagagaaccatatcaacaaacataactttaggatccctttcaacgtgggtgtcggaatttaggtgaagcacttcggatgatccgagaaggtgctgctatgatccgaaccaaaggtgaagctgggactggtaacattatcgaggccggtaggcatgttaagtccgtgatgggggatattagggtgctaaggaacatggatgatgacgaagttttcagcttctccaaaagaattcactctccttacgatttggtcatgcag

SEQ ID NO: 17280 - DNA, 573 bp, Gossypium hirsutum
  Clone ID: GOSHI-09MAY01-C10994_1
gcaaaccctaattcgaacgttgataaaaagaaaaaaacaagcgaagaactaaaaatcaagcgaaaatctcaacagaaaaataaaggaatgaagaatgagagcgcgatgtcgtgttcggtcgctgtatgtaactcccctgtgttttctccgtcgtcgtctcttttctgtggcaaaacttcgatcatctctcagtcgccggaagcgttgaacttgtcgttgactcacctcaagccctcctcttcttctcctgcttctccgtctccttcctcgccgtcttcgccttttcggcttcggctacaaaagcccacgtcttgggtctctttttgtcaacgccatcgtcttcttcggtttcgggttcgacgatattgaagaggaagaggccatccaggctggatataccggtgtccacgacggctttgtgttttggggttccggctactccctgtgaagtggcgagagaggtagagagagaaggagatggttattctgtttattgtaaaagaggcaggagagaagctatggaagataggttttcagcttctgttgaactccaaggagattcaaagcaggcat

SEQ ID NO: 17281 - DNA, 708 bp, Gossypium hirsutum
  Clone ID: GOSHI-09MAY01-C10954_1
cggacgcttggcggacgcctggggtgaaaatcaaaatcagattaccagaaaggggaaaaaaaaagaaattttctcatcagcccaacagagcccagaaagttttaaccattaaaaccaaaccataaaaactcaacctttgagtgttaattagcttttttttgtttttgaatcggttcatgtgaacatcgttggtactttcacaatgagtttctccagaatcggccgctctctctcccgctcttctcgctctaatttccgaacaaatgttatatcgaggaaactgttacgatatgaatcgaatgtgccaagtcctgtaacaaatacgtgcatttcacgcgttaataaaaggttagggcttgtaaagggttatttcgcaccggctggagttgggaagcagcttagtactaatacaccgttgtcgaatttggattctattcttgcaaaccctaggatcaggcggttcttttgcagtgaagggcctaagaaaagaaattatgaaaattactttcccaaggtccagtggttgatcccgaaggctaatgaacagaaatctggatccaaagaggattcaggtgctggtgagcctgggaattctcagaacattcaaaggttggtgcagaatattgttaccactttaattgtgattgggattacgtactctttgttatccggtccttatgaacagcaggagattagttttcaagagtt

SEQ ID NO: 17282 - DNA, 541 bp, Gossypium hirsutum
  Clone ID: GOSHI-09MAY01-C10964_1
ccttttattaggagaaaaaggtagtcctttagttgaaggtttctactttagcctcaactgagagtcgaagattttccggctgaaaatggaaacaaataatgaaaccagcaacccatctcagattaagagctttctcgagaagtcgatcaacattgttgacttgaacaaaaaaaggaaattagagcctgaacaattgggcttgcctttatcgaagcatcaatgttggaagcaaagctcatctttgaagcctcctacgtttggcagtatcacacaagtagaggggttcactccatgcactttccaaggaaagacaatgggctgtttgtgatgtactggaaactggatcggcaaaagatagttttagctttgccgatgattcggatactgcaatatctgtgcatgccgatgctaagtatttactatatgacagagcttcctcctcatcatcacctaattggggatccagctcccaacattgccattctgatggacaactgtagcataagcagtgccgaaaagtagtatcttctcctgggatgag

SEQ ID NO: 17283 - DNA, 759 bp, Gossypium hirsutum
  Clone ID: GOSHI-09MAY01-C10884_3
ataaaatcaaatcaaagtcctaaaaattaaacaaagtccaatccaatcaaacacaattcatagaaagtaaaactccgacgccatgtccagctccgatcccaacaagctcatttccaaagccgacaaactaacaaggctaagtcttacaaggtggagtgcagattggaaaagtgctactcttttatatgaacaagctgcaaatggatttcgagtttcaaaggattatgagaaagcaaagttggcattcgagaaagcttccaaaggacaagaaatgctagcttctccctgggatgctgctaaacacatggagtctgctgctgctttagcaaaggaactacgcaactggactgaggttatcgacttttacagaagggcatctgagctatacatgcagtgtgacagaccacagcctgcatctgattcacttgccaaggctgcccgtgctttggaggatgctttgcctgatgatgctgttcagctatataccgatgcttgtgttattctcgaagatgatggaaaggaacagatggcctttgatctgtatcgagctgctgctagtatttatgtaaaacttgagaagttcactgatgctgctactttcctattgaggttgggcttagcagctgacaagtgcaatgctagaaatagtcagtgcaaggcgtatcttagtgcaattattgtgtatctttatgctcatgacttaaagcaagcagagaagtgctacaatgattgttcacaaatcgatgctttcttaagaag

SEQ ID NO: 17284 - DNA, 764 bp, Gossypium hirsutum
  Clone ID: GOSHI-09MAY01-C10884_2
cggtcccgaattggagcccccgcccccgcccacgcgtccgctttgtctctcttaagtcttcccataaaacagagcagagaaggtaaaacccaaagtttgaaaaccatcaaaaatggttcaaaggctcacttaccgtactcgccatagctacgctaccaaatccaaccaacaccgtgtcgttaagacccctggtgggaaattggtctatcagacaactaagaaaagagcaagtgggcctaagtgtcctgtcactggcaagagaattcagggtattcctcacttgagacctgctgaatacaaaaggtctagattgccaaggaaccgccggactgtgaatcgtgcttatggtggtgttttgtcctgcagtgctgttagagagaggataattcgagccttcttggtggaagagcagaaaattgtgaagaaggttctgaagatccagaagtccaaggaaaagcaagcttcaaagagctaagaaattagatgtcgaatcatcatttcaattctgatatgtgatcagcaaggctttggaaagtgccaccaatgacttcagaagattagaggttctctttttctattggcaaatggacttcaatgtttacaatgttttgataattttggattacgttttgatcatcgaatttaaaaaaaaattatggtatgatcgctaatgttattacttttttgtattttgatcattgagtcattaattgtcatttacacagacatgttatatcatcattttagacaaaaaaattaaggtt

SEQ ID NO: 17285 - DNA, 674 bp, Gossypium hirsutum
  Clone ID: GOSHI-09MAY01-C10884_1
cggacgcgtgggcggacgcgtgggcggacgcgcgttcacgcgcccgctggctttcgcgtttctttctgaaactagagctgagaaaataaaacccaaagccttaaaaactatcaaaaatggttcaaaggctcacttaccgtactcgccatagctatgctaccaaatccaatcaacaccgtgtcgttaagacccccggtgggaaattggtctatcagactactaagaagagagcgagtgggcctaagtgtcctgttactggaaagcgaattcagggtattcctcacttgagacctgctgaatacaagcggtctcggttgcctaggaaccgtaggacggtgaatcgtgcctatggtggtgttttgtctggaagtgctgttagagaaaggataattcgagccttcttagtggaagagcaaaagattgtgaagaaggttctgaaaatccagaagactaaggaaaagcaatcctcaaagagctaggaattttaaatgctgatgaagctgaattgtgtttggcttgttagatttacctgagagaaatttttgtttgttattatggtgaattgatgaaatgtggaactgagtttgagtactttttctcatttggtagtttcatactgatatattttgctgcttggttcactagaagacaaatctattgaaaggttattgttt

SEQ ID NO: 17286 - DNA, 561 bp, Gossypium hirsutum
  unsure (1)..(561): unsure at all n locations
  Clone ID: LIB3585-033-P1-K1-C6
cccgccgaccgactgcaggtcgaccaggcgtccgcccacgcgtccggtactcgccatagctatgctactaaatccaatcaacacccagacgtaaacacccggggtgggaaattgatctatcaggctactaaaaagagagcgagtgggcctaacagtccactaactggaaggcgaattcaggacattcctcactcgagacctgctgaatacaagcggtctcggttgcctaggaaccgtangacggtgaatcgtgcctatggtggtgttttgtctggaagtgctgttagagaaaggataattcgagccttcttagtggaagagcaaaagattgtgaagaaggttctgaaaatccagaagactaaggaaaagcaatcctcaaagagctaggaattttaaatgctgatgaagctgaattgtgtttggcttgttagatttacctgagagaaatttttgtttgttattatggtgaattgatgaaatgtggaactgagtttgagtactttttctcatttggtagtttcatactgatatatattgctgcttggttcactagaagacaaa

SEQ ID NO: 17287 - DNA, 444 bp, Gossypium hirsutum
  Clone ID: uC-gsflmaxxa006a12b1
cccacgcgtccgcccacgcgtccgtaaaaattaaacaaagtccaatccaatcaaacacaattcatagaaagtaaaactccgacgccatgtccagctccgatcccaacaagctcatttccaaagccgacaaactaacaaggctaagtcttacaaggcggagtgcagattggaaaagtgctactcttttatatgaacaagctgcaaatggatttcgagtttcaaaggattatgagaaagcaaagttggcattcgagaaagcttccaaaggacaagaaatgctagcttctccctgggatgctgctaccaaatccaatcaacaccgtgtcgttaagacccccggtgggaaaattagtctatcagactactaagaagagagcgagtgggcctaagtgtcctgttactggacagcgaattcagggtattcctcacttgagacctgctgaa

SEQ ID NO: 17288 - DNA, 536 bp, Gossypium hirsutum
  Clone ID: GOSHI-09MAY01-C10584_1
cccactcgtccgcacccctaatgtttcaaacaaatataaaccccaaaagtgagagagagagagagagagagagagagagagagagaagaggaaaagaaaagagaaggttttcttcttttttactgtcgagtaagtgattaaagatggaagcagtgaatggatgctcatcttctacatcatcatctgatgcatcttcttcggattcgtatttatctgcaaggggttcaaacaaagctgagaagatcaaaggtccttggagtgctgaggaagataggattttgactcgactagttgagagatatgggcctagaaactggtctttgataagccgatatataaagggtcgatcagggaaatcttgcacgcttagatggtgtaaccagcttatccccaatgttgagcaccgttcgttttcccaagctgaggatgataccatcttggccgctcatgctcggtatggtaacaggtgggccaccattgctagattgcttccgggaaggactgataatgctgtgaaaaaccattggaactcgacg

SEQ ID NO: 17289 - DNA, 1781 bp, Gossypium hirsutum
  Clone ID: GOSHI-09MAY01-C10544_2
attttgaaaccagaaactaaaccatcgttttcataaagacaaaccactacaagcatcccacgcaagaccacatggtgtgggagtctcaaatctcaaagccttcattgcttctctcaccaagtcctttataaaagagttcccaaagctgacaagcagccataatatcatctgcgaaacatatggcagaaatgtcaaccctttgtacatttcttttctcacttctactctttgcctcacatccccttatcctccccactgctgccgacggccggtggcagctgctacaaaaaagcattggcatctcatccatgcacatgcaactccttaaaaatgaccgtgttgttatgtatgataggactgatttcggcccatccactctgccattggcaagtgggaaatgccacaatgacccaaccaacactgctgtccaagtagattgtacggcgcattcagttgagtatgatgttttgagcaacaagttcagggctcttactgtccaaagcaacgtttggtgttcttcaggcgccgtcatgcctgacggtaaattggtccaaaccggtggtttcagcgacggagaacttcgggtcagggttttcagcccatgcgaaagctgcgactggcacgaaacaccaaatggattggcggccaaaagatggtatgctaccaatcatgtcttgccagatggaagacaaattgttgtcggcggccgagaacaatttaattacgagtttgttcctaaaaacatagccgccgacacgttcaagttgcatttcctgtcggaaaccaatgaacgaggagtagagaacaatctctacccttttgtttttctcaatgtcgatggaaacctgttcattttcgccaacaatcgagctattttgcttgattatgtgaacaacaaggtggtgaaaacttaccccaaaataccaggtggggagccaagaagctatccaagcacaggttcggctgtattgctaccattgaagaacttgacagccgccactattcaagctgaagttttagtttgtggcggtgctccaaaaggatcatttgtccaagcattacaaggtaagttcgttaaagccttgaacacttgcgccaggatctcaataaccgacccgaaaccaaaatgggtcttggaaactatgcctttagctagagtcatgggtgacatggtattgcttccaaacggcaaagttttggtcatcaacggagcacgttccgggtcagcaggatgggacttaggaagggacccggtcttaaatccagtgttatacatgcctgataatgaaatcgagtcacgattcaagatactaaacccaacaaagatccctcggatgtaccattccacagcagtattacttcgtgatggaagagttttagtgggtggaagcaatcctcatgcgtattacaactttacgggagtcctttaccctactgaactaagcctggaggcattctatccgggttatttggacgccaaattcaacaatttacgacccaccattgttgctcccaagtcaatgtccggaatcagatacagtaagaaattaaagattcaagtggtgattacaggtgaagtaactctaaacttgttgtcggtgacaatggtgtcaccagcttttaatacccattccttctcgatgaatcaaaggttgcttgtacttggaaacgaccaagttatggcttccgggaaatcaacatataagattgaagtgatgacgccaggttcgggtaacctcgcacctgcaggcttttatcttttgttggggttcatcaagaca

SEQ ID NO: 17290 - DNA, 1774 bp, Gossypium hirsutum
  Clone ID: GOSHI-09MAY01-C10544_1
cctccccctccccctccccttcggccccgttccactctaataacctctgccccaacacgttggggactcaggctcacggcgtttcagagaattcttttgaatttctcctttttattgatcttataattttttgtttagtttttgaagccgaagagggatgggatcggagctaatatacagaggccatgagactcagcttgcttcagattcctattcacctaaaccggttaaaccatgggcctctgtcacgcgcgtggtccggtacatgctccgggagcagcgcctcctctttgtgctcgtaggcattgccatagccactctggtcttcaacatcttcccggcctcgcgtgctgcgcacggcccccacctccactccaccaccccgctccttgattctatcccctacttccccatcgagacccaaaacaagttctcctatgcacaccggctcgggttcgggtcgggcaatccaaccggttagaattccgttggggctgaagcggaaggggttgagaatcgtcgtaacgggtggagctgggttcctgggggcgcaacctcctggaccgtctgatagcgagaggagacagcgtgatcgtggtcgataatttcttcaccggagggaaggagaacgtcatgcaccatttcgggaaccccaacttcgagcttatccgccacgacgtcgttgaacctttactcttggaagttgaccagatctaccatctcgcttgtcctgcttctccagtccattacaaatttaaccccgtcaaaactatcaagacaaatgtggtgggaacactgaacatgttagggctggcaaaaagagttggtgccaggttcttattaaccagtaccagtgaagtatatggagatcctctacaacatcctcagaaagaaacttactggggcaacgttaatcccatcggtgtccgaagctgctacgatgagggaaagcgtactgccgagacgttgacaatggactatcacagaggggccggagttgaggttaggatcgccagaattttcaatacttacggacctcgtatgtgcatcgatgatggtcgtgttgttagcaactttgttgctcaggctttaaggaaggagcctttgactgtgtatggtgatgggaagcagacaaggagtttccaatatgtttctgatctggtggagggtctcatgcgtttaatggaaggagaacatgttggaccttttaatcttggaaacccgggcgaattcaccatgcttgagcttgctgaggtggtacaagaaacaatagacccgaatgcgaagatagagttcaggccaaacacagaagatgacccgcacaagaggaagcctgatatctcaagagccaaagagttacttggttggcaacccaaggtctccctccgaaagggtctccctctaatggtttcagacttccgacaacgtatctttggtgatcacaaggtcggcagcagcaccaccaccaccaacgactcatcatcttaagatggcctatatactcttctcacagacagagcgataaaaatatataatggttaagaggaaaagagcttgccgttgtcttttccctattgaaacaattaatattatagtgtatctttatgatagatgtgggatggagttttttattttttatttttgacatttatttgtttgccatctttgtagcttcaatatttcttgtccctttttaagagttgtagttttactgtgagctttccggatctaaaaaaggttgatattttccccaaaaaaaaagtcgacgcggccg

SEQ ID NO: 17291 - DNA, 585 bp, Gossypium hirsutum
  Clone ID: uC-gsflmaxxa047a01b1
gtagtaatgtcaaccctttgtacatttcttttctcagttctactctttgcctcacagccccttatcctccccactgctgccgacggccggtggcagctgctacaaaaaagcattggcatctcatccatgcacatgcaactccttaaaaatgaccgtgttgttatgtatgataggactgatttcggcccatccactctgccattggcaagtgggaaatgccacaatgacccaaccaacaccgctgtccaagtagattgtacggcgcattcagttgagtacgatgttttgagcaacaagttcagggctcttactgtccgaagctgttacgacgaggggaaacgtacagccgaaaccctgacaatggactatcacagaggagctggagttgaggttaggattgcccggattttcaatacttacggacctcgtatgtgcatcgatgacggtcgtgttgttagcaactttgttgcttaggcattaaggaaagagcctttgactgtgtatggtgatgggaaacagaccaggaagttccaaatatgttctgatctgggtgaggggctaatgcgattgatggaaggagacatg

SEQ ID NO: 17292 - DNA, 549 bp, Gossypium hirsutum
  Clone ID: LIB3585-061-P1-K1-G4
acgcctacgcgtccgaccaaatctatcatctcgcttgcccagcttccccagttcattacaaattcaatcccgtgaaaactatcaagacaaatgtggtgggaacattgaacatgttaggcctggcaaaaagagtaggtgctaggttcttgttgaccagtacaagcgaagtctatggagatccactgcaacatcctcagaaagaaacttattggggcaacgtcaatcccatcggtgtccgaagctgttacgatgagggaaagcgtactgctgaaacgttgaccatggactatcaccgcggagccggcgtcgaggttaggattgccagaattttcaatacttatggaccacgtatgtgcatagacgatggtcgtgttgttagcaatttcgtagctcaggccttaaggaaggagccattgactgtgtatggtgatggtaagcagacaaggagttttcaatatgtttctgatctggtggagggtctgatgcggttgatggaaggggaacatattggaccttttaatcttgtgaaatccaggagaatttaccatg

SEQ ID NO: 17293 - DNA, 523 bp, Gossypium hirsutum
  Clone ID: LIB3197-034-Q1-M1-H4
cggtccggaaattcgccgtggtcgatcccacgcccgtccgagacacagtgttacgtgctgtgatctgctatccattcgaagaactgtgagcagccgcgcactattcaagcgcgaagcttttagtgttgtggacggcgtctccaaaatggatcacttttgtccacagcattacaatggtagagttcgttaaagcgcttgaacacattgcgccagtgatctcaataacccgacgccgaaaccaaaattgggtctttggaaactatgacctttagctagagtcatgggtgacatggtattgcttccaaacggcaaagttttggtcatcaacggagcacgttccgggtcagcaggatgggacttaggaagggacccggtcttaaatccagtgttatacatgcctgataatgaaatcgagtcacgattcaagatactaaacccaacaaagatcccttcgatgtaccattccacagcagtattacttcgtgatggaagagttttagtgggtggaagcaatcctgatgcg

SEQ ID NO: 17294 - DNA, 437 bp, Gossypium hirsutum
  unsure (1)..(437): unsure at all n locations
  Clone ID: LIB3135-002-Q1-K1-F4
cacaaggtcggcagcaccaccaccaccaccaacgactcgtcatcttaagatggcctatatactcttctcagagacacagcgataaaaagatataatggttaagaggaaaagagcttctcctagtcttttccctattgaaacaattattattatagtgtatctttatgatagatgtgggatggagttttttattttttatttttgacatttatttgcttgccatctttgtagctttaatgtttcttgtccctttttaagagttttagttttaaaaaaaattatttttnttttttatttaaatattaatttttttaattatttttatatttattttttcaatatttaattttattaaaattttaaatcttatataatttttttatattattttttactattattttatatttttttttttttttttctccaattttaaa

SEQ ID NO: 17295 - DNA, 665 bp, Gossypium hirsutum
  Clone ID: GOSHI-09MAY01-C10574_2
cccacgcgttcggtcgctgccccatttgaccacatccaacatgcctcgccgaagctctggaagatctgcttctcgcccagcccctcgtcctgctccggcacgtagccccccgcctcaacctgctcaacatgctcctcccccagctcctgctcagagtggaagtgggggatcccttcttggaggcataggctcaacaatagctcagggcatggcttttggaactggaagtgctgtagcccacagggctgtcgatgctgttatgggtcctcgtactattcaacatgaaactgttgtttccgaggctgcagcagcccctgccaatagttttaccggctctgatgcatgcagcatacactctaaggcattccaagactgcctgaatagctatgggaacgaaatcagcaagtgtcagttctacatggatatgttgtcagagtgcaggaagaactctggatcaatgttgggtgcctaaatttatgcctcatttgttgcttctacaatgcaatgtcagctttgcccttcacttctgtttctcttttattgatgatgatgatgaagctgaactcccttcaatgattcaataatatttatctttactggctgaaccttgatctttactggctgaaccttgatattgttaaactttacagttgaaaatgtgaatg

SEQ ID NO: 17296 - DNA, 968 bp, Gossypium hirsutum
  Clone ID: GOSHI-09MAY01-C10574_1
tctacgcgtaccgccccccgggctgggattttaagcttaaaaccctaaccctagaattttctttggaactcatcgctggtgctatttgacctcattcacaatgcctcgccgtagctctggaaggtctgcttctcgtcctgcttctgctcgcagccctccacctcaaccagctcatcatgctcctcctccagctcctgctcagagtggaagtggtggatccttgctcggaggcataggctctaccatagctcagggcatggcttttggtactggaagtgctgtagctcacagggctgtggatgctgtgatgggtcctcgtactattcaacatgaaaccgtggtttccgaggctgcagctgcccctgcaccagcaactacttccaatagtttagctggcactgattcatgcagcatccactacaaggcattccaggattgcctgaacagctatggaagcgaactcagcaagtgtcagttctacatggatatgttgactgagtgcaggaagaacacagggtccatgttgggtgcctaaaagtttattcaccattttccttgttatcctattgaaattgtcagcttcggacttgcgctgagacttacccttgtttttctttggttgattgacgaagctgaactcttccataaatctctatgaataaaaaacactctttgagtgatactgttttttaattgttgaacctttgttatcgctaatcaattctcagtatcatttgtactctttcagtaaatgaaaaaaaaaaggagacaatataaaaaaaaacaacataaaaaaaaaaaaaataaaaaaaaaaaaaaaaaaaaaaaaaaaacaaaaaatataattaaatgactcgtagttaaaaaacaatattaccttgtaaaaaaccatgacattaaaaagggggggcccctttttaagagatacatttttttcccgctgggtttaaaatcttaaattctttttt

SEQ ID NO: 17297 - DNA, 442 bp, Gossypium hirsutum
  Clone ID: uC-gsflnu33B140a02b1
ttgcacttgtggccggacgcgcgggagctggcagggttgtagatgccaagggggtcacgcaagctatgccacatgaacctgtggctctcgaggctgagagttgcaccaagcgaccagcagctgcttgcacgagttaagctggcactgattcatgcagcatccactacaaggcattccaggattgcctgaatagctatggaagcgaactcagcaagtgtcagttctacatggatatgttgactgagtgcaggaagaacacacggtccatgttgggtgcctaaaagattattcaccattttccttggtatgctatagaaaatgtcagctccggacttgcgctgagatttaccctgggaaacctctggttgatcgatgaagatgaactcttccataaatctctatgaataaaaagcactctttgagagatactgcttattaattg

SEQ ID NO: 17298 - DNA, 714 bp, Gossypium hirsutum
  Clone ID: GOSHI-09MAY01-C10514_1
gggaaagggtaggctttgttactcttcttctgcatgtttgtttctccagagctgataaaatagtagctttgcctggccaacccaaagtcagtttccaacacttctctggctatgttaccgtccatgatgagaagccgcacaggcagagagctctgttttactactttgttgaagcagaaaccatccctgcttctaaaccacttgtcctttggctaaacggaggccctggttgttcatctgttggagcaggagcttttattgaacatggaccctttaagccaaatggaaagactttaaccaaaaattgacagtattgggatgcagaagctaatatgctgtacctcgagtcaccggcaggagttggcttctcttattcggctaataactcattttacaccgatttaaacgatgaagtagtagcaagagacaattttgttttcctggagaggtggttactgatgttccctcaatacaagaatagagatttctacatcacaggagaaagttatgcagggcactatgttccacaacttacactgcacatcattcactccaatctgaagctgaatctgaaagggatagctatagggaatccgcttctagaattcgttacagatatgaactctgcagatcaatattattggtctcatggcctaatatcagattcagcttatgagctactcctttcgtttggcaactcttctcgactcatga

SEQ ID NO: 17299 - DNA, 459 bp, Gossypium hirsutum
  unsure (1)..(459): unsure at all n locations
  Clone ID: LIB3166-026-P1-K1-H4
ggaaatacccgggtgcgacgccaacgcgataccggtagganctttgttacctctttacttcttgctattgtttgtnnttctccacgagacttgataaaatgagtgagcgttttgccttggccaacgctcaaagtcaagtttccaaccactttctctggcttatgttanccgtccaatgatgagggaagccgcactacggcagagaggctcttgttttacttactttnngttgaagcagaaacccatgccctggcttctannaaccactttgtccttttggcttaaacggagggcccttggttgttcatcttgttggagcagggagcttttattgaacatggaccctttaagccaaatggaaagactttaaccaaaaacgtccacagttggaataaagaagctaatatgctgtacctcgagtcaccggcaggagttggcttctcttattcggctaataac

SEQ ID NO: 17300 - DNA, 500 bp, Gossypium hirsutum
  Clone ID: GOSHI-09MAY01-C10504_1
caagatttattttcttgaaatattctcttttgtttactgagttgcttttaatggagtcggatggaattatcagcctctttgattcgtgttggtttgagatggaaatattcaaaaaacagacatctccatcaacatctacggtttcggaaccaaaccaagatctccgagttgaagaaacatcatcgaaaccagagtttacacgcaccccatctctccatacaaggtccatgagcgaccagttgagcttaaacagcacaagcttcataggttcagcttcgttgtcgcccgactcggttctccactcaccaaagctgcataaaatcatctcgggcaaagaaatgacggaagaagagttgcaagataacgggagtagaatccaagaagaacccaaaaagaaggagacagcagcaagcaacaggagaagtagtagaaggaaaaagggtacatgcaagagcttgtcagacttggaatttgaggagctaaaagggtttatggatctg

SEQ ID NO: 17301 - DNA, 381 bp, Gossypium hirsutum
  Clone ID: LIB3166-026-P1-K1-G4
aaaaaacagacatctccatcaacatttacggtttcggaaccaaaccaagatctgcgagttgaagaaacatcatcaaaaccagagtttacacgcaccccatctctccatacaaggtccatgagcgaccagttgagcttaaacagcacaagcttcataggttcagcttcgttgtcgcccgactcggttctccactcaccaaagctgcataaaatcatctcgggtaaagaaatgacggaagaagagttgcaagataacgggagtagaatccaagaagaacccaaaaagaaggagacagcagcaagcaacaggagaagtagtagaaggacaaagaggcaaaagagaagaagaagaaggatgaggtagaagaagatgaagaagaat

SEQ ID NO: 17302 - DNA, 870 bp, Gossypium hirsutum
  Clone ID: GOSHI-09MAY01-C10534_1
aatttctaggtcttctctccccaattacaatcgaaatcagggtttttccctatccaaattctgatttaacccagtatgcctcaacgtcactcgaagaacaacaacgatttagccttcttcacgtacgatgagaagaggaagctaggttacggtactcaaaaggagagattaggaaaagattccattaagcctttcgatgcttgctgcctttgcttgaaacctttcatcgatcccatgtcttgccaaaaaggtcatgttttttgcaaagagtgcattctcgaatgccttttagcccagaaaaaggatatccaaaggaaacttgctgctcatgctgctcagcagaaacaagaggaggaggaggaagaagagaggttgatattggagaaagcaagagagctggacgcattcgatcaacaaaatcacggtgccttaccacaatacaacgacaagaaccacagcagagacaagaatggtttccacggagcaaacagtgtcaaagtcacatcttttgaagaggaagcactccggacaatgaaagcattttggcttccctccgccactccagaagcacctattaaagttgacactccttccaccagcacagtctgtccagagggcaaagaaaaactcaaactgaaaaccctttttcctatctacttcactgaagatgagagcgagcaaaagaaatccaatctcgataaaacctatatctgcccgagctgcaaggtcactttgaccaacacattgtcgttggtagctgtaagttcctgcgggcatgtcttttgcaagaaatgtgccgataggtttatggctgtcgataaagtttgtttagtctgcgacaaaccatgcagagagaggaatttggttact

SEQ ID NO: 17303 - DNA, 653 bp, Gossypium hirsutum
  Clone ID: AI726900.1
agaatttctaggtcttctctccccaattacaatcgaaatcagggtttttccctatccaaattctgatttaacccagtatgcctcaacgtcactcgaggagggggggggagggggccttcttcacttacaataaaaaaaggaagctacgttacggtactcaaaaggagagattatgaaaagattccattaagcctttcgatgcttgctgcctttgcttgaaacctttcatcgatcccatgtcttgccaaaaaggtcatgttttttgcaaagagtgcattctcgaatgccttttagcccagaaaaaggatatccaaaggaaacttgctgctcatgctgctcagcagatactctatgaggaggaggataaggacaggttgatattggagacagcaagagatctggacgcattcgatcaacaaaatcacggtgccttaccaccatacaaccaacagataccagctgataccagaatggtttccactgagcacacagtgtctaaatcacctcttttgattatgaagccctccggacaatgacagcattttggcttcgctcccccactcccgaatcacctattagagttgtatctctcttccacattcacattctgtccactagggtagatatcaactcctcctggacaatccttttcc

SEQ ID NO: 17304 - DNA, 658 bp, Gossypium hirsutum
  Clone ID: GOSHI-09MAY01-C10484_1
gaaggaaaggttttttttggaaaaggagatagcatcaacgcgggcgatttgtaacgggcatcgagccacaaatgagaacttgaaaagaattaggcttgatttgaacatggacactatcaagaactctagtttaattgctgatgaatctgagaaagtaccttgtctgagagtaccatcctcttctgactcaaccttgccaccggaagcccttgatgatgatcgtaaaccgtcattaggttcatgcaatgtgggcaaggttaatagtagcgagaagagtgtttttatgctacccgatctgaatatgatgcctgctgaagatgattcctgtccggcaaagttatactggactagctgaaaagagaagagtggattacattcagattagaataggagttgatggagaagtagtgagaccgggcaaggagccgtttgctcaggtgactataatattggaatccaggctaagcaaagattttgagttgcgtcataaacctgatgagataggggatggagttgatgtataaattagatgtgattctttgtaggtatgaaacctgatgacatagcctcctggtctgtgtaagctttgtttaattaaaactaattttataatttggtggtggctgggaaaccctgtttcccacttccccttttagtt

SEQ ID NO: 17305 - DNA, 1891 bp, Gossypium hirsutum
  Clone ID: GOSHI-09MAY01-C10454_1
cattaactcatcctcccattttccttcattttctcagcgaattcgaaaccgaaaacgcaagaaatttttcattttttcttgattccaggcaacttttcaatctgggttttgcttgaatattcatattaactttgttttatacttaaaaaagatgacagaagcgagtaagaaaagcatgaatccggaaccagttcatgttcaaagcacagcttcgtcaaacgaaacaagatcaaacaacaatctccccaattttcttctttcagtgaggctaaaatacgtgaagctcggctaccattatttaatctccaacgccatgtatttaatgctggtgccgttgttagccattgcttcagctcatctctcaacgctcacggtccttgatttcgttcaactatgggaccaactcaagttcaatcttgtctctgttactttatgttcaggccttttggtttttttagccaccctttacttcatgagccgtccccggaaagtttatttggtggatttcgcttgttataagccggagcctgaacggacttgtaccagagagattttcatggagagatcgaatcttactggaagtttcactgaagagaacttggcttttcaaaagaagatactggagaggtctggtttagggcaaaagacgtatttgcctgaggcggtgttgcgtgtaccgccgaacccttgtatggcggaggcaaggaaagaagcggaggcagtgatgtttggtgccattgatgagctggtggagaagactggtgttaacgctaacgatatcggcatccttgtggtgaattgtagcttgtttaaccctacaccgccgctttccgccatgattgttaatagatataagcttagaggcaatattttgagctataatcttggtggaatgggttgcagtgctgggctgatttctattgaccttgctaaacaaatgctacaggtacagcctagctcttatgccttggtggtgagcatggagaacattactctcaactggtacttcggcaacgaccgatccatgctagtctctaactgcttgttccgtatgggcggtgccgcgatccttctatcaaaccggtcatccgatcgccgccgctccaagtaccaactcatccacaccgtacgaacccacaaaggagccgacgacaaatgccacaactgcgtcttccaacgtgaggacgacaccaaacggatcggcgtttccctctccaaagacctcatggcggtcgccggcgaagccctcaaaaccaacatcaccaccctcggtccattagtcctccccatgtccgaacaactcctctttttcatcactttagtagcccgaaaagtcttcaaaatgaagatcaggccatacatcccggatttcaaactagctttcgagcatttttgcatccatgcaggtgggagagccgtgttagatgagctagaaaagaaccttgagctctcagattggcacatggaaccatcgaggatgacactttacaggttcggtaacacgtcgagcagctctttatggtacgaactagcttactcggaagccaaaggaaggatccgaaaaggtgatcggacatggcagattgcattcgggtcagggtttaaatgcaacagtgctgtatggaaagcattgaagaccattaatccagcaaaggagaagagtccatggattgatgaaattgatgaatatcctgtttatgtgcctaaggtggcccctgtttcttcttcttcttcttcccaaaaaaccatataattttcatcattcaaaggaagagaatagagagaaagagaggacttaatcagtaattattagaactatgatttattttttatttttttacatgtttaattgtgtgttgatttgaagattaatttattccaagttgaagat

SEQ ID NO: 17306 - DNA, 480 bp, Gossypium hirsutum
  Clone ID: GOSHI-09MAY01-C10464_1
ttcatttcttctccattcctaaaaatctctccacaatgcttttgagaccagtttcatctttgtgtgtgcaagccaagcaaggggataatctaatttgttcccttaagggctcccctgtaacatcatcatcatcatctgctttgagttttctgcccagaaaacatggaagggctttgggtgtttatgcatccataggaaccgacaatcatgcacttacaggggtagtgttccagccttttgaagaggtgaaaaaggaggaacttgacatcccaatcgctcctcatctttcgctggctcgccagaaatatgctgatgcctgtgaagccgccatcaatgagcaaatcaatgtggagtacaacgtttcctatgtgtaccactcgttgtatgcttacttcgacagagacaacgttgcgctcaaaggcttttgcaaattcttcaaggaatcaagtgaagaagaaagaaagcatgcagagaagctga

SEQ ID NO: 17307 - DNA, 486 bp, Gossypium hirsutum
  Clone ID: LIB3585-013-P1-K1-A8
tccattcctaaaaacctctccacaatgcttttgagaccagtttcatctttgtgtgtgcaagccaagcaaggggataatctaatttgttcccttaagggctcccctgtaacatcatcatcatcatctgctctgagttttcttcccagaaaacatggaagggctttgggtgtttatgcatccataggaaccaacaatcatgcacttacaggggtagtgttccagccttttgaagaggtgaaaaaggaggaacttgatatcccaatcgctcctcatctttcgctggctcgccagaaatttgctgatgcctgtgaagccgccatcaatgagcaaatcaagtgagttgtgctgcttcgcgttttgatatttttatcagtttcttgatttatcggggtggttatttattttgtgtgacagtgtggaatacaacgtttcctatgtgtaccactcgttgtatgcttacttcgacagagacaacgttgcgctcaa

SEQ ID NO: 17308 - DNA, 376 bp, Gossypium hirsutum
  Clone ID: LIB3166-047-P1-K1-G7
gtgaaaaaggaggaacttgacatcccaatcgctcctcatctttcgctggctcgccagaaatatgctgatgcctgtgaagccgccatcaatgagcaaatcaatgtggagtacaacgtttcctatgtgtaccactcgttgtatgcttacttcgacagagacaacgttgcgctcaaaggctttgccaagtaagattataacaacaagaagctctccaaagttatttttttaatatatatatctgtatcactgtatgacatgataaaatttttatattgttgtcatcagattcttcaaggaatcaagtgaagaagaaagagagcatgcagagaagctgatggaatatcaggttttctttcatgtctattttctttttggg

SEQ ID NO: 17309 - DNA, 1466 bp, Gossypium hirsutum
  Clone ID: GOSHI-09MAY01-C10404_1
cttatttccatatccatatatttttagttttggttttattttttcatttttttaatttgattttttgccatctctgtcatgtcaacggctggggagatggagccattgacatcgggagcaagcaatcggataatcccgatcttaaaaaccctaagaactcctctgattttcattcaatcagtaatcttgtacatcctcatcctactcttccctcggcgccggcaatttcggacggatgttgcggcggttgacggtgctacttccgggccgcaatctccggctaaaacggcgaggctgaaatcgttatggaggctagaagaggaggacaccttaagaaggagatcgttggcggagggtttgaacatggggttcgaaaccgaggacggagagattcagtaccgctggaacacatctctgttctttggcgttcgaagaaatgccttgtttagccggtcttggcttccggctaccggtgaactaaagggaattttgatcattatacacgggctgaatgagcacagtggaagatatgctcaatttgcaaagcaactaatctcttgcaactttggtgtatatgcaatggactggataggtcatggtggcagtgatggattgcatggatatgttccttcacttgatcatgttgttgcagacactggggctttcttggaaaagatcaaatcagagaacccaggtgtaccttgcttcctttttggtcactctaccggtggagctgtggttttgaaggcagcttcccatcctcgtattgaaagaatgctggagggagttgtgctgacctctccaactttgcgtgttaagccagcacatcccattgttggggctgttgctccccttttttctctggttgctcctaagctccagtttaaaggtgcgaacaagaagggcatcccagtttcaagggacccggccgcactcttggccaagtactctgatcccttggtctacactggtccaataagggcccgaactgggcatgagatattgcgcatttcctcttatttgatgcggaactttaagtccgtgacagtcccattctttgttctgcatgggactgcagacaaagtcactgatccactcgcctcccaggatttctacaacgaggcatcctccaccttcaaagacataaagctctatgaaggcttcttgcatgatcttctctttgaacccgagcgtgaagagatagggcaggatataatcaactggatggagaagcgattaggcaccatagccgaaaatattgatcatatctggtgaatgatcttgcaggacgccatctcaagtgtttttttttttcctttctcaaaactaatgttagaacatcgcacttgaaagaacaagtagatgttttagtaaaatttaaaagctcacgtttgttgatctggttttatagtgaaatttgtaaccgtgtataatcaatattaatctagtggtttgtttcattttaa

SEQ ID NO: 17310 - DNA, 345 bp, Gossypium hirsutum
  Clone ID: LIB3165-048-Q1-K1-B1
gagaatactagagtctttacacaaatcaacttattttcaatttcctatatttagaatggtaattcgagtggatcaagattttgaattttagtgggaattttgatcattatacatgggctgaatgagcacagtggaagatatgctcaatttgcaaagcaactaatctcttgcaactttggtgtatatgcaatggactggataggtcatggtggcagtgatggattgcatggatatgttccttcacttgatcatgttgttgtagacactggggctttcttggaaaagatcaaatcagagaacccaggtgtaccttgcttcctttttggtcactctactggtggagct

SEQ ID NO: 17311 - DNA, 967 bp, Gossypium hirsutum
  Clone ID: GOSHI-09MAY01-C10794_1
atctcagacgcatactcacatccaccacaaaccgctccattcttctcatcgaagacatagattgcatcacaacagcatcacatgatcgaaccaaggtcattgaaaaatgtgaagcagaagaagatgaagatgagaacaaacgtcccttctctatcaactatcgggtaattcatttgtttctctccttatcttggtttgattgacgttgaaacaagtttctgaagtcactaagttaacataattttgtaggtaacactatcaggcttactcaacttcattgatggattgtggtcgagctgtgggaatgaaagaatcataatcattaccacaaatcataaagaagagttggatccagcgctgctacggccggggcgaatggatgtgcatatttacatgggatattgtagtccagcaggattcagaaaacttgcagcttcatatcttgggatcaaagatgacaaactgctgaagtggcacaacaactgatgatcagtgatgaacccaaagttgcactccaaggcccccgcgtccgccgtcgcggcggcgggcgcgtggggaagctgcagttgaagagaagacaaaattcaatgcttgctgggtctgagacactgaaatatttttgacttaatttacttatctggcttaaaagcgggtaaacttgtggcatttacaaaagagtttgactccatatcatcaaaagagtgtgcttcatgacaatcttcatgggtggatttctttcctaaatcaatttaggatcctggtgcattgatattgactttaataaaaggggccactccacaacgcaaattttcaggtgccaactttcccccctgaatctacagctattttcccctcctatatcaatttttgcagcaacccaatgctttaactaaaaaggaagttatcatatatacgtgggcccaatctggggctagctctttttttattaccataaaattccaagaaa

SEQ ID NO: 17312 - DNA, 390 bp, Gossypium hirsutum
  Clone ID: LIB3166-030-P1-K1-D4
ccttccggccgtggaaacgagggtcccttttttttggtccaccagggacaggaaaatcatgagctggttgctgcaattgcaaattacatgagatataatgtatatgatcttcagtttcaaagcgtaagaaacgattctgatctcagacgtgtactcacatccaccacaaaccgctccattctgctcattgaagacatagattgtagcacgaaagtcacaaatgatcgaaccaaggtcaaggaaaattgtgaagaagaagaaaatgatgaactcaaacatccctatggtaccgatcctggggtaacactgtcaggtttactcaacttcattgatggattgtggtcgagctgtgggaacgaaagaatcataatcttcaccacaaatcataaa

SEQ ID NO: 17313 - DNA, 817 bp, Gossypium hirsutum
  Clone ID: GOSHI-09MAY01-C10784_1
gatagataaagagaaggagatggtggaaaacttgaaactgcccaccaaagtccgctgttagtcacagcaaacgccctttttattcaaaaaacttacctttattcaaaaaagtctctctctttctttctatgtgcctatcctttttatctttgaatgtttccgcttctatcacccaataattccttattttcctgcttgacttcccaagatattcgcttgggtttctgttagtttcccccccttttcttcctaaattgatttcttagctggacatagatagatgggtgtatatctcagcactcccaaaactgaaaaattctcagaagatggtgagaatgatagagttagatatggtctagcatcaatgcaaggatggcgttcaactatggaagatgctcatgctgcatatcctgatctcgatgcatctacttcgttctttggtgtctatgacggtcatggaggtaagggtggttgccaagttctgtgccaaataccttcaccagcaggttctcaagaatgaagcatatgctgctggggacataggaacatcagttcagagagcatttttcagaatggatgagatgatgcgtggacaaagaggatggagagaattagccattttgggtgataaattcacaagttttctggcatgatagaaggtttgatatggtctcctagagtggtaacagtaatgaccaagttgataactgggcctttcgagagggccctactctgacttttcttgacccacatctgggagcacggctgtgttgcaagtctaagaaacatcaactttttgtgcaatgcttgtgatctc

SEQ ID NO: 17314 - DNA, 368 bp, Gossypium hirsutum
  Clone ID: GOSHI-09MAY01-C10684_1
cttgtagagaacaaggctctctttgaggacaaggagcaattatcacagaagccgcctatttgaggaattagtgcctccaatttcaacctggaggacttgaaaagtcaggctgcacttattcatgattatgatgatgtgccaaatgcagaagatcgagatggcagcaatggtgttgttggattatcaccagagagaatgtcttctgaaatggctagtaattccattgcttcaagtagccaggaggatgggcctaatgatcttcatgatctaaagagttccctggcggcagttcccattaaacctcttcaagcactcaaaggctgttttgacattggtgaagatgatgaggatgttaacagtcccaatcg

SEQ ID NO: 17315 - DNA, 706 bp, Gossypium hirsutum
  Clone ID: GOSHI-09MAY01-C10654_1
aataaattttggcttttttttattcaagatttctataggtagtaactcgagtaaaccctactaactccacccaatttcgtgcttctttcaaaaggtgtgccgagatggctgatgttcaagactcagatggcaaaccatgtgaagaaagtttgccttgtacatctcaaaagcaggaaactcgtgatgaaatgctttctaggcacaggagagagatatcggagctgcaaaacaaggaaattagcctgaaaaaggcagcagcaaagggtagcaaggctgaacagaaggctaaaaagaagcaggtggaggaagagatctctcagctctctactaatctcaaggcaaaacatgcagaagagcttgcttcactaggctacagtaacggaaatgataaaagcaatatggacaacttggtgaaggccatagctggggtgtctgtcgctcctcagcaggatcatccaaagcccagcaaaggtgccaagaggcgagtgaaaagagctcagcaagaggcggctagagaacaaagaatccaagaagagcagagcaacatcgtgagtgatagaatgatcgacgatgagaaattggaggaaaaactcaaacccctgggattcacaattaatgaaattaagccagatgggcatccgcctctaccgagccgttgaagaccagttggcgcttctgtctggaggttcttctccttatacatatc

SEQ ID NO: 17316 - DNA, 475 bp, Gossypium hirsutum
  Clone ID: GOSHI-09MAY01-C10614_1
ccaccgttcgcccacgcgttcgcccacgcgtgcgcccacgcgtacgcccccgcgtccggaagctcaaaagaccagggagaatgggattgtccaaaagcacatcaaagacgcagttgtggtggatcgaggccaagcttcagctgtcgggattgagaccacaacagaatcaagctccaaagtatccattgcagaacgcaatcaaatactcaatgatgttcagctgactgatgaaacaacaaagacagcatctgatgagcagattccaagggaatgcgatcacattgagaacttggagataacaagcttggtcgtcggggaatatgttcggatagatttgcaggacagagttgatccgcaaaaggctgaaatcggagatgtcaaagagatctattcaggaggaatagaacatgctggagacaaaacagttaataattcaagtgaagaaataatcaaggagtctgtatccatggaagat

SEQ ID NO: 17317 - DNA, 513 bp, Gossypium hirsutum
  Clone ID: GOSHI-09MAY01-C10194_1
cccacgcgtccgtcgatgctaaacataaatgctttctttaattttcagcaggagccatcatttccataaaaaaaacttccaaatatcacaaatcatcctggcttttcaaccttcatcccaaaaactttccgacagtaaatccaacgattcagtccccccaaaaaaccttccaacttcgatcggccaccatagcttcctccgctccaatcaaaaccatgcccaacagataagttgatttgttcttttgtgagcctctttcgctatgaaatgagcaactttattagattctctagggataaaccgaaaaatacaggattcaaaggcaaagctcagatgctttaaatctgtaatgaaaatttcgatttctaatctgtcttccttttctttttacagtttctgaattactgatcgcgagtcactttcaatctcatcctctctcaaccctagagataactgaagatggacgcctagagacatgccatcgcttccgcaaaaaaaaaaaaaaaagaaaaa

SEQ ID NO: 17318 - DNA, 779 bp, Gossypium hirsutum
  Clone ID: GOSHI-09MAY01-C10184_1
cccacgcgtccgaccacgcgtccttccactcgtgcggattaaaggtgaccgggggtggggattttaatggctgcgaggctctataaactggacagttcttgctttgtcagctaatatcttcacaagtctagagttgtatcattagttccttctttgctcatagtaaagatttgttggtttcatgatgtgggtcttcattattttgagctctggttgagtgactcctttaaggtatacctgcaacttcccatctttgcctggttttaaataaccattagctcctttccatttgttttccacctttgtttttatggtccttggcttctaaacctgcaacacttaaaaacatatattttcagattattgctaattgttggtcttcaaaggagttgaagaaaggtgatcatattggtgtggttggagatcatatctggtgtgtgaaggagatggagagtggttgctctaagaatggtggatcatgtcctaaacttcttgatttaatacctcaagaaagagagtggcatttgaagggagaagaggagagaagggatggatcctcacaggagaagaagctggaactgaggcttggtcccccaggtgagaacaactggtccaacaaaaacaatactgagagagatgagtctttactctcactagggtacttctcttccatgaagagcaatggaaaacagacacacaagtttccatgtccgaggaccactctgctggtcagttttgtccactccatgggccaaaagccaccatcagcagcagacaat

SEQ ID NO: 17319 - DNA, 364 bp, Gossypium hirsutum
  Clone ID: LIB3166-028-P1-K1-E11
attttcctcgtttaaaggtgtcggtttgtaaagattttaatggtttagaggctgtataagctggacagttcttgctttgtcagctaatatcttcacaagtttagagttgtatcacttgttccttctttgctcatagtaaatatttgttggtttcatgatgtgggtcttcattattttgagctctggttgagtgactcctttaagattattgctaattgttggtcttcaaagtagttgaagaaaggtgatcatattggtgtggttggagatcatatctggtgtgtgaaggagatggagagtggttgctctaagaatgttgaatcatgtcctaaacttcttgatttaatacctcaagaaagagagt

SEQ ID NO: 17320 - DNA, 448 bp, Gossypium hirsutum
  Clone ID: LIB3146-004-P1-K1-E6
gttcaaagaaaatgacgctgttgactttaaaaattgagtgtctcataatatgtttcattgtgttttttgttcattttcgtttggacgtcatttgcttgtcttcatttggttctgacttcttttctgctccgtaagcacccaatctgtttcttatctgcagtccattggttttgttggtcctgcggttgctcttgttggcttaactgcagcaaaaactccttcaactgcatctgcttggcttagtctagctgttggacttaaagcattcagtcattgtggttttcttgtcaaccttcaggagattgctccacattattctggtgttttacacggattgtcaaatactgccggaacattcgctgctattattggaacggttggagctggcttctttgtggagctggtgggatcattccaaggatttttgttgcttacatcgatcttatac

SEQ ID NO: 17321 - DNA, 380 bp, Gossypium hirsutum
  Clone ID: LIB3166-022-P1-K1-G8
tttgcaacaattagggaccagcatcactttgactcgcaagatcatgcagtgcaggggttttgttggtcctgcggttgctcttgttggcttaactgcagcaaaaactccttcaactgcatctgcttggcttagtctagctgttggacttaaagcattcagtcattgtggtttccttgtcaaccttcaggagattgctccacattattctggtgttttacacggattgtcaaatactgccggaacattcgctgctattattggaacggttggagctggtttctttgtggagctggtgggatcattccaaggatttttgttgcttacatcgctcttatacttccttgctggtctattctacattaaattttccactggagaga

SEQ ID NO: 17322 - DNA, 652 bp, Gossypium hirsutum
  Clone ID: GOSHI-09MAY01-C10104_1
cagactaccgccccactaaaaaaatttcttgtgataggtcctgttcctggtaaaaaattagtgaaatcacctttcctattctttccccagaccctgctagtaataaggatgctcatttcttaaaatatcccatatacgtaggcggaaacaggggaaggggccagatttatcccgacgggaacaaaagtaacaatactgtttataatgctacggcaacaggtatagtaagcaaaatcatacgaaaagaaaaagggggtacgaaataaccataacggatgccttggatggacatcaagtggttgatattatccccccaggaccagaacttcttgtttcagagggtgaatctatcaaactcgatcaaccattaacaattaatcctaatgtgggtggatttggtcagggggatgcagaaatagtacttcaagacccactacgcgtccaaggtcttttgttcttcttggcatctattgtttttgcacaaatctttttggttcttaaaaagaaacagtttgagaaggttcaagtgtccgaaatgaatttctagatctgtggatttatcaacatcaaatttgtaaaaaagaacaaattattcctggcaattaggttaggtataatgaaaaaaggatgaaaagtcttttgcttgtttcta

SEQ ID NO: 17323 - DNA, 450 bp, Gossypium hirsutum
  Clone ID: GOSHI-09MAY01-C10124_1
cggacccgtgggcgaagaactcgtttcttgggccgaacagagtacttacaagaggcggtgggtttccccagaagaagcatataaactgtgccggtacgattggatgagcgaagctcttgagaaacatttgagaagaatggagaggaacagcaatattgagaaggcagaaaagttggtggaacatcaaatgttatcagctggttgctctacaaaaccatccaaccttgaagagtcttttagtaagtgtattgtgcagggttaaccagtccttgtcctagtccttttgtgaaactgttatcagttaagctgtttgccattattaactgttgtatactggatatatcacatcaatcttctaatttatttgaatggatagaaaggcaccagccaaccaagtatcccgtaaagagaggctggtgctgagtatgtcaaggagtacaccggtgtctg

SEQ ID NO: 17324 - DNA, 779 bp, Gossypium hirsutum
  Clone ID: GOSHI-09MAY01-C10094_1
ccaagaccaaaacctttttttcttacgttttccctgacaagttttagatccatctcttggaatcaaaaagaaatggccaacaacaacaatctagaggaatccagccctcttttgagcaaacaagttagtgttgaagaagatgagaagaagaatctaaatgttaacaactccaccgacgtggcagcttcgccggcagctaggaccggagctgggttcgggtggaccgccaatggtctgcccttggtccacgggagtgtcgtcggagaacctatgggccggtctcagtgggattcctccctcctcgcttgtcttggccgtaacgatgagttttgcagcagtgacgttgaagtttgtctactaggaagcgtggccccttgtgtgctgtacggaagcaatgttgaaagacttggatctgcacctgggacctttgcaaatcattgcttgccttattctggtctttacctgattggaaattccttttttggctggaattgtcttgctccatggttttcataccctacccgaactgcaattcggcgcaagtttaatctggagggtacctgtgaggcacttaacaggtcaggtggatgctgtttggaagatgaagtgcaacgtgaacagtgcgagtccccctgtgactttgcaacacatgttttctgccatgcatgtgctctttgccagcaaggccgtgagcttcgtcgaaggttgcctcacccagggttctttgctcacctgtgctggtcataatccctcctgtcgagcagaccatgggccgtggg

SEQ ID NO: 17325 - DNA, 1584 bp, Gossypium hirsutum
  Clone ID: GOSHI-09MAY01-C10054_2
cagcaaaaacaatagggattctttctatttattcctttgttttcagctcaacaacataaaatcattatccaaagccgtacaaaccggccatcgaaacgtcagataacacaatgataaacaagatatctggacaaatgaggaaagaaaagagtaatgctcccaaaagaaaaccatgtcatcagtaaccaaagcaaacctatcagttctatcactgaaatgcagttataatccctcccattattgaggaaaaaaagggaaacacgagtaactgttgaagaagcagaactgccaaggtctccaaataacttaactgcttcaaatggcaggcttcagtgtaataccgtgtgcaaccaatgttaccagatgccaacctagcagaaaagttcaacgttctacgatggccgagagaaggttagccaaaagccagcctttgcatggtcattagcaaatttcttcagtatgtagcaataattaagctccatgcaaaatcggtttgtaggaatgacaatgccaattccagctgaacttcttaatgagcctatgaacttctgcatggagaaacttcggaactcattctctgttaacatggcaacatttccagcataagcaaagacatgtgcatggattcccctttctctaaaccacctagttggaaggtcaaatgaaaggtctgctagagcagtaacagtaaagtttcctccaagagaatccctactagcaacatcagcgatctcatcatcaatctgacttttaggttcataggaactcgttgcccttgtcttaaatccccatgatgcttttggcccccctaaagcacaaactggagatagattgccacctaagaagaatctttctggtatggatgtagtcctgtttaagaacccactcccccatggaaaaataacaccactacaaatctcaaaattaagagctgcatgataaaatctaagtgggatagcacatcgaagatcgaactcctgttagaaaatcaggtgagttgtagaagtaaattgacagcaaaattgtacaatagctaacagctagtctatataacaacaatgataacatgaaaggtctacaacaaaaagaaaccaaatataatcatgaaaaacagtggcaaattcacatggtcatttgtattcatacacaaaattcagatactagagacccagaaagataagccgagtttagataagatgcttttatgcctgtgattaaatggcaaagccagtattccacatcaagggaaacaaaataagacattatttcctcataaaaataaactaacttagcacattaaagaagaaaagccccacaatacgtaaacttccatctggcagtcaattgcactaaacttccatctagcagtcaattgcaccattaatgctcacacttctggaaataagcttcctgaaggtttcgaataaaaatatggaattcatgcacacaaataaaagaacatgcatatacaaggatagataataattcctaagcctaacactcttccgtctacttcacatgaaaacatagcacacaaaagctattctacatcaaagtctaaactccaaactgtcggacgctggg

SEQ ID NO: 17326 - DNA, 637 bp, Gossypium hirsutum
  Clone ID: GOSHI-09MAY01-C10054_1
cccacgcgtccgtttttttttttttttttgcaaataatcaaatttcatcaaatttagaaactttagaacgaaacaaatctaaaaaggtacatctgctgaaatggaaatctcgaaaataaaaattgtcagaatcctaatacgaagtgtaaaattaaagccacaatacttttcctttttcttttttttttccaaaaaaagaaaattaagtaaatttaaaattactataatcttcttcaatttgaaacgatcttgtgagatatgtcgtcatcttccctccatggattgatgatgagatcgaggttgaatttccatagctgttccgaattccgggtcgaaaaatgtttccgaataatatgattttaataggatttcataaaaaaaatatatatcagactttaattatcttggccgctttaaccaccggattttccctagcgatctcatcatcaatctgacttttaggttcataggaactcgttgcccttgtcttaaatccccatgatgcttttggccccccttaaagcccgtactgtagatagattgcctcgtaagaagaatctttctggtatggatgtagtcctgtttaagaacccactcccccatgcactgtcccacgcgtctgcggacgcgtgggcgc

SEQ ID NO: 17327 - DNA, 438 bp, Gossypium hirsutum
  unsure (1)..(438): unsure at all n locations
  Clone ID: LIB3148-053-Q1-K1-H2
cccacgcgtccgggaaaagaaggtggtgaaccggtgttctggatgtagaaaacgtgtcggtgtgaccgggtttaggtgtcgatgcggtgaactgttttgtgccgatcatcggtactcggatcgtcacgattgtagttatgattacaagacggtcggtcgtgaggccatcgctagggaaaatccggttgttaaagcggccaagataattaaagtctgatatatatattttttatgaaaccctattaaaatcatattattcggaaacatttttcgacccggaattcggaacagctatggaaattcaacttcgatctcatcagcaatccatggaggaagatgacgacatatctcacangatcgtttcaagttgaagaagattatagtatttttaattttacttaattntctttttttccaaaaaaagaaaaatgaaaatta

SEQ ID NO: 17328 - DNA, 386 bp, Gossypium hirsutum
  Clone ID: GOSHI-09MAY01-C10044_1
attgaaacctctgaaactcagaggaaaatgaatacctgaaaaagcgaagccaaatcctcaaaggacaaatctcagtacaagtccctaccaagcttatgcagaagcccatgaaaagacagagacttaccccagtaccgccgccatcggttcatcgtctgtctcctgaacacgaaatctccatcatggtcgccgccttaaaaaacgtcgtcgctggttatacccccacctccacctccgcagtctccgtctccgccgttgatattccttccgatttcgttcccctggtgacttccactgttagtactgctgggatcagccgtgattttgacgacgcgttgtttcaagcgaacgaagttacggataggtgccacgtgtgcagatttgac

SEQ ID NO: 17329 - DNA, 701 bp, Gossypium hirsutum
  Clone ID: GOSHI-09MAY01-C10074_1
ggggtaatgatagtcaaggctttgatggatttaaacactattacactcctggtaaaagagggactgggtctcgttcttctgatcaagaaaggaagaaaggggtgccatggactgaagaacaacacaggctattcttaatgggtcttaaaaagtacggtaaaggggattggagaaatatttcacgcaatttcgtgactacccgaacaccgactcaagtggcaagtcatgctcacaaatacttcatcaggcaggtcaccggggggaaagacaacaggaggtccagtatccatgatatcactacggttaacgtccctgatactccctcttcgtcaccggatcgctgcaagcattcgtcttcaagtgattcttctgcagtcatacaggcacagcagcaagcttaactacccactactaaagatatcgactttgaatggaagccacccaatggatactctatcgttttccaccggatgaattatttgcctgccttcctgttccccttccgttggatttcacccacccgaccccctctgaagaatcacacttgccttggaaaaacccctccccctatccccttccgtattcttcacccctctttccctatatccttccttgcctcaccttcttttcacctcgttcagatcgttgggaatacttccctccgcggttctcttctctcctctgccctatattaactattc

SEQ ID NO: 17330 - DNA, 718 bp, Gossypium hirsutum
  Clone ID: GOSHI-09MAY01-C10064_1
cggacgcgtgggcggacgcgtggggaaataacaaatgtttactctgaatctcataccatccactcccatcactttctccaaatccactcatcaatattttcccataaaaaggatccaaagcccaaagaacttggctgagtctcctgtttttttcaccaaatccacccctctcaacttcaacaaaatccatgcctgccctttcggcaggagccaagctttaagcaccaaaactacccatctggggaaaatccttgaaaacccatctaggaaagcaggatcccatgttcccaaagcagctgcatcatctgaatctaatcctgaaggagaagctgaatctgttgaagcagcagcagccgctaaatcgaaggccaaggctttacagcttgcacttgtgttcggtttttggtactttcagaacattgtctttaacatttacaataaaaaagcattgaatgtcttcccattcccttggctgcttgcttcttttcaactctttgctggttccatttggatgttggttctgtggtctttaaagttgcaaccttgtcccaaaatcacaaaaccttttattattgctcttcttggacctgcattttttcacacaataagccacatttcagcttgcgtttcgtttctaaagttgctgtttccttcactcatgttatcaaatcatcggagccctgtgtttcggttgttttctcttcattcctggtgatac

SEQ ID NO: 17331 - DNA, 682 bp, Gossypium hirsutum
  Clone ID: GOSHI-09MAY01-C10014_1
caaaaataaagaagatcagctatcggaaaatgtctacgtcaccgtccgtcaccgaactccaggtggagaactttacgttccctccgacggtgaagcctcctggttccaccaaaaccctgttccttggtggagcaggggagagaggattggaaatccaagggaagttcataaagttcaccgcaattggagtttacctggaagatagcgccgtgaattgcctcggcgttaagtggaagggtaagagcgcggtggagttaacggaatccgttgagtttttcagagacgtggttacaggtgattttgagaagttcatacgggtgacaatgatattgccattaacgggtcaacaatactctgagaaagtatcagagaattgcgttgctatttggaaatctcttggaatctacactgatgcagaagcaaaagccattgaaaaattcattgaagtcttcaaggatgaaaacttcccacctggctcgtccattcttttcactatttcaggccaaggttccttgactattgggttctccaaagatagctcagtaccagaaggtgggaaagctgtgatagagaataaactacttgcaaactcagtgctggaatccatcattggtaagaatggagtttctcctgcagcaaaggaaagcttggcatcaagattatcaccattgttcaatgactt

SEQ ID NO: 17332 - DNA, 435 bp, Gossypium hirsutum
  Clone ID: GOSHI-09MAY01-C10374_2
cccgggcggcccgacgcgtccgaaaagtgagagcatatgttttaggagctttgtaagcatttcaagaaatcaataaaaaatctccctcacggagaatttccagtaaaactattctcaggaggcttatagccaaaatctaggatttaggagattcaaagagtttctgaaaattttcagagatcttttctggaggcgttgatacggcttggtggtaagacccgagaggcggcagtaaattccagtagccatccgcttgaaaagagaaaatcaccagaaacaggagaatcattccaaccaaacaaatccagaagaacgatggaaggtataaaaaacttaaattttatacaggagtcatatctgaggattcagagtaatctgaaatatttatctgaggaacggcagtgccgtactatctctatgataaactatctcgat

SEQ ID NO: 17333 - DNA, 578 bp, Gossypium hirsutum
  Clone ID: GOSHI-09MAY01-C10374_1
cacccacgcgttcaggaaaagtgagagcatatgttttaggagctttgtaagcatttcaagaaatcaataaaagatctccctcacggagaatttccagtaaaactattctcaggaggcttatagccaaaatctaggatttaggagattcaaagagtttctgaaaattttcagagatcttttctggaggcgttgatacggcttggtggtaagacccgagaggcggcagtaaattccagtagccatccgcttgaaaagagaaaatcagcagaaacaggagaatcattccaaccaaacaaatccagaagaacgatggaaggtgtagattgcaaatttttctatcttcctacggataatagtcgctaagcactcaagggcatcgcctcacagagaccaaaatcaaacaagcacgacaaactaacataaaaaaatatagcaaaacctaaaacttattgccagagacggtagacaatagcttgctagggtagcagactatattttttattttatttctttgattatccctaaatagaatccttacctaagtgaaataagatacgagaaaattatctgtttacttt

SEQ ID NO: 17334 - DNA, 768 bp, Gossypium hirsutum
  Clone ID: GOSHI-09MAY01-C10324_3
cccactttttcgcccacgcgtccgcccaccctccgcgcgggcgttctacagaccctgtggggctgctgaggcaattgaaaagattctcacccacaacagcaagggaatcaaattccaaattctttcgaacccagaatttcttgctgagggaactgcaattcaagatctttttaatcctgatcgtgttcttatcggaggccgggaaaccccagaaggcaataaggctgtccaagcattgaaggaggtttatgctcattgggttcctgaggagagaattcttaccaccaatctttggtctgcagagctttccaagcttgctgccaatgctttcttggctcagaggatctcatccgtgaatgccatgtctgctctttgtcgggcatccggggctgatgttacgcaggtctcttatgctgttggtaaggacacaaggattggacccaaatttttgaatgctagtgtcggttttggtggatcctgcttccagaaggattttctaaacttttgtttacattttgcgagtgctatggccttcctgtggtggcagtgtatttgcttgtttttcttttatatcaatgtctattatatattctcattttatctccttttttgttttttaatgtttacctttttctcttctttttttatttctttaataattctttttttttatttctctttttatcttttctttcttttattttttattctctttacttttctctttttttctttttatttttctatttctcttttttcttttttttt

SEQ ID NO: 17335 - DNA, 576 bp, Gossypium hirsutum
  Clone ID: GOSHI-09MAY01-C10324_2
ttccttgcgtccgcgagatcgcgggcggcggccctgtataaaacaacaacccgctcttctgaattttatatcgttaaagcgaagctgccctcttcttctgttgctctgaacttattgtctctatttgaggagcaagttttgaggttgtggtctaaaaaacgaaaatggtgaagatctgttgcattggagctggttatgttggtgggcctacaatggctgtgattgcacttaaatgcccatctattgaagtggctgttgtggatatctctgtgcctcgtattaatgcatggaatagtgaccagcttccaatctatgagcctggtcttgatgctgttgtgaagcagtgtcgtggaaagaaccttttcttcagcactgatgtagaaaaacatgtgcgtgaggctgatatagtctttgtttccgtcaacactccgaccaagactcgagggcttggagctggcaaggctgcagatcttacatattgcgaaagtgctgctcgaatgattgctgatgtatcaaaatctgataagattgcggtccgagaaacaacagtccctgtcaaaactgctgaggcaatcg

SEQ ID NO: 17336 - DNA, 1919 bp, Gossypium hirsutum
  Clone ID: GOSHI-09MAY01-C10324_1
ccccgcgtccgccccgcgtccgcccacgcgtccgcccacgcgtccgcgcaaagctcctctcttcttcctcttcattttcctctgaattctttgtctctatttaaaaaaaaagagcaatttttttgaggtggtagtatacaaaaacaaaatgaagatctgttgcattggagctggttatgttggtgggcctacaatggctgtgatcgcgcttaaatgtccggatattgaagtggctgtcgttgatatctctgtacctaggatcgctgcctggaacagtgaccagctccctatctatgagcctggtcttgatggtgttgtgaaggagtgtcgtggcagaaaccttttcttcagcactgatgtagagaaacatgtgcgtgaggctgatatagtctttgtttctgtcaacactcccaccaagactcgggggctcggagctggcaaagctgcagaccttacatattgggaaagtgctgcccgcatgatcgcggacgtatcgaaatctgacaagattgttgttgagaaatcaacagtccctgtcaaaactgctgaggcaattgaaaagattctcacccacaacagcaagggaatcaaattccaaattctttcgaacccagaatttcttgctgagggaactgcaattcaagatctttttaatcctgatcgtgttcttatcggaggccgggaaaccccagaaggcaataaggctgtccaagcattgaaggaggtttatgctcattgggttcctgaggagagaattcttaccaccaatctttggtctgcagagctttccaagcttgctgccaatgctttcttggctcagaggatctcatccgtgaatgccatgtctgctctttgtgaggcaaccggggctgatgttacgcaggtctcttatgctgttggtaaggacacaaggattggacccaaatttttgaatgctagtgtcggttttggtggatcctgcttccagaaggatattctaaatcttgtttacatctgcgagtgcaatggccttcctgaggtggcagagtattggaagcaagtcattaagatcaatgactatcagaaaaaccgatttgttaaccgtgttgtttcctcgatgtttaacaccgtttcaaacaaaaagattgctatcttagggttcgcctttaagaaggataccggtgacactagggagacccctgccatcgatgtatgcaaaggactcttgggagacaaagctcgattgagcatatatgacccgcaggtgaccgaagaccaggtccaacgggatctttccatgaacaagtttgactgggaccatcctcttcacttgcaacccatgagtcccacgactgtcaagcaagtcagctgtgtgtgggatgcttatgaggcaaccaaagatgcccatggaatttgcattctgaccgagtgggacgaattcaagaaacttgacttcaagaggatatacgacaacatgcaaaagccggcttttgttttcgatggaaggaacatcgtgaacgcggatgagctgagggagattggtttcatagtgtactcaattggtaagccactggatccatggctcaaggacatgcctgcagtagcataaatgtctatcgattacagatggagtccgggtcagtttgattcatacctattgatttttgttttcgatgaagagttgtgttgtaccttgtttttcccccagccacaacataattggaattttaccatcataatgaagatttaaaaggctctgcgttgtgcctttaattcttgtcgtctgttaggaaacttatattgagttcgatcagaacttgtgtcatttgtagaatgttgaaatttcataaacgatttgtctctttaatggaataccttttttattcccaaaaaaaaacgcgtaggagtgcccgaattttaaaaggtatgggctaaaaata

SEQ ID NO: 17337 - DNA, 400 bp, Gossypium hirsutum
  unsure (1)..(400): unsure at all n locations
  Clone ID: LIB3493-034-P1-M1-C4
cacgcccgtccgnngctatcttaagggtgtcgcccctttaanaaanngatacgcnngggggacactatgtgagagcccctgcgcatcnnnatgtatgccaaaggacctcnnttgggagaccaaagnnctcggttgagccatanttatgacccgcagngtgacccgagagagtcgaggtccaacggtgatctttttccatgaaccaagtttgactagggacccatcctcttcacttgcaacccatgagtcccacgactgttaagcaagtcagctgtgtgtgggatgcttatgaggcaaccaaagatgcccatggaatttgcattctgaccgagtgggacgaattcaagaaactcgacttcaagaggatatactacaacatgcaaaagcccgcttttgtttt

SEQ ID NO: 17338 - DNA, 179 bp, Gossypium hirsutum
  Clone ID: LIB3083-099-Q1-L1-H2
tcgtgtcttcttctgttgctctgaacttatggtctctatttgaggagcaagttttgaggttgcggtctaaaaagcgaaaatggtgtaaatctggtgcattgacgctgcttatgttgtcagtccttgccggccgggaatcacgattggttgctgatcaactaccaccgctgttgctgata

SEQ ID NO: 17339 - DNA, 742 bp, Gossypium hirsutum
  Clone ID: GOSHI-09MAY01-C10274_1
ggtgctcgtgctcttgatctgattgaacaagcagaggtagaagtggaacggctggatcagctaaagtcaagcagaatgaaggaacttgctttcaaaaggcaagtggagcttgaggagatatttgcccatgctcatatagacatagatccagaggctgctagggagaaaattatggctctgattgattccgggaatgttgagcctgctgagttactagctgacatggataatcagatcgcaaaagcgaaagaagaagcccttagcaggaaagaaatattggatagggttgaaaaatggatgtcagcttgtgaagaagaaagttggcttgatgactataatcgggatgataacaggtacaatgcaagcaggggggcacacttaaacctcaagcgtgctgagaaagctcgtattctggtaaacaaaattccaggtatggttgacactttggttgccaaaactcgagcttgggaggaagatcgtggcatatcatttaagtacgatggcgttccgctccttgccatgctagatgaatatgctatgctcaggcaagaaagggaagaagagaaaaggaggcttagggatcagaagaagttcggtgagcagcaaaacacagaacaagaacccatattcggttcaaggtcaaccccagctcgaccggctagtacaaagaaggtggtgggacctcggaccaatggaacccccagcagacgcttgtctttaagtgccagtcaaaatggaagca

SEQ ID NO: 17340 - DNA, 505 bp, Gossypium hirsutum
  Clone ID: uC-gsronu33B038b09b1
ctttttcccctaattttttgagaacttgccttgttagttaatgttaattgtcctcacttgaagaaattatgtttgaaaatctttagcttgtttaacttaaattttgttctcacaaaaaaaaaacccccataaattctgtaaataggtctgatatatgttggcttgtaataaatagcggcaagaatgagggtggctgccaatgagaaagctgaagcagagaagatattgcagatcaagagagcagaaggagatgccgagtcaaagtatctggctgggcttggtgtagctcggcagcgacaggctattgtagatggacttagagacagtgtgctggccttctctgagaatgtacctggtacatcatcaaaggatgtcatggacatggttcttgtgacacagtactttgacacaatgaaggagatcggtgcatcgtcaaaatccaactctgttttcatcccacatgggccaggtgctgtaagagacattgcttctcaaatcagggatg

SEQ ID NO: 17341 - DNA, 388 bp, Gossypium hirsutum
  Clone ID: LIB3166-023-P1-K1-D6
ttttaatttagttattagggcaagtgttccgaagttggacctggatgcagttttggaacagaaaaatcatttagcgagagctgtggaaaaggaactggaaaaggccatgtcacattatgggtacgagatggttcaaactcttatggggatattgaccagatgagcatgtgaagagggcatggatgagattaatgcagcggcaagaatgaaggtggctgccaatgaaaagctgaagcagagaagatattgcagatcaagagagcagaaggagatgccgagtcaaagtatctggctgggcttggtgtagctcggcagcgataggctattgtagatggacttagagacagtgtgctggccttctctgagaatgtacctggtacatcatcaa

SEQ ID NO: 17342 - DNA, 507 bp, Gossypium hirsutum
  Clone ID: GOSHI-09MAY01-C10204_1
cttaaattcttaactaaaatattaggacctagaagatcgtcgctccgcttacacgcttcttctattatttccaaattcccaatgctctctcacaagccgaagcttcaaaattcttagatctccgcttcaatttgagttgtttcctggaaattttttaaaaatttccatcttattcatttttacagtatcaggctgcctttgaagttaattcataatggttgatagcaacaaatcttctggtccacctgaagaaaccccaagccataatcccaatggaaatgtaccttcagaaagtgaccttgcactcgatgagataactgagaaagttcaagagtcccttggcctcgaaaagagacacaagttttgggaatcccagcctgttgggcaattcaaagacttgggagacactagtttgcctgaggaccctattgaagctcccactcctttatcggaagtcaagcaggaaccgtacaatcttccaaccatgtatgaatggattacatgtga

SEQ ID NO: 17343 - DNA, 462 bp, Gossypium hirsutum
  Clone ID: GOSHI-09MAY01-C11954_4
ctttttcctctctaatggctgcagttcctctcagtttgtagcattagtagggacatagcatatgcttgctcttcttttttgatttctaaggcgttgtaagtactttcatgtttgaattgttagtttaatcgtcttatgtactcctctctcctgttcccgctccttcggctgcggtgcctctcagaaatttcgacgattttttagtgaggaggagatcatcgaatttgagattgaatctttcctgcaagtttccacttagatccattagaatggaaatcagtgataattgtacccctttgagtgcaaacaatgaatctagaggcacgttggttgttttcgaagggttggatcgtagtgggaaaacttcacaatgcgggagggtggtttcgtatttggagggaatgggtcattcagttgaaatatggcgatttccagacagaactactagtgtcggacagatga

SEQ ID NO: 17344 - DNA, 587 bp, Gossypium hirsutum
  Clone ID: GOSHI-09MAY01-C11954_3
ctgacgcgtagattttctctctaatggctgcatttcatctcaggcgcatgacacatgcctgcgctggttagagtttccaaggcctggaattttggagttttggccgtgaggaggtcattgaatttgggattgaatatttcttgcaagcgttcagttaggtcaattagaatggagaatggtaataattgtaacctgatgggtgcaagcaatgaatctagaggtgccttggttgtttttgaaggattggatcgtagtggtaaaacttcacaatgtgggaagctgctttcgtatttagagggtatggggcattcagtcgagttatggcgattccccgacagaactacaagcgttgggcagatgatattccgcatatctggcttatataatcccagttggattgaccatcaccaatctctccatctacttttcagtgcaaatcggtgggagaagagatcaatgatggaagcaaaactgaaagctggaaccacccttatagtagaccgttactcttattctggagtcgctttctcatctgctaaaggacttgatttcgaatggtgtaaggcaccagagaatgggctaatagc

SEQ ID NO: 17345 - DNA, 883 bp, Gossypium hirsutum
  Clone ID: GOSHI-09MAY01-C11954_2
ctttttctctctaatggctgcatttcatctcagttaggtcaattagaatggagaatggtaataattgtaacctgatgggtgcaagcaatgaatctagaggtgccttggtagtttttgaaggattggatcgtagtggtaaaacttcacaatgtgggaagctgctttcgtatttagagggtatggggcattcagtcgagttatggcgattccccgacagaactacaagcgttgggcagatgatatcggcatatctgactaataaatcccagttggatgaccacacaatccatctacttttcagtgcaaatcggtgggagaagagatcaatgatggaagcaaaactgaaagctggaaccacccttatagtagaccgttactcttatcctggggtcgctttctcatctgctaaaggacttgatttcgaatggtgtaaggcaccagagatcgggctaatagccccagatctggtcgtgtacctcgacataccgcccgagaaagctgcagaaagaggaggctaccggggtgagagatacgagcagctcgagtttcagcggaaagtcgcccaacactataaactccgcaaagattcttcatggaaggtaatatatatgtatatgttggccatagatgaaagttttctgtgttgattgcagattgtagatgcttgccaacccttggatgatgtggaaaaacaggtgaaagagattgtattacagcatatcatagcatgccaaaaagggaaaattctttcatccttgtggtcatgttaggttatatatatatatatataacagaatattatcccatataccgtctgtggagtttttatattttaaatcggtggtggtgttttggatttggatttcaatttagttcttttttc

SEQ ID NO: 17346 - DNA, 1135 bp, Gossypium hirsutum
  Clone ID: GOSHI-09MAY01-C11954_1
tttcctctctaatggctgcagttcctctcagtttgtagcattagtaggaacataacatatgcttgctcttctttttcggtttctaaggctttaaatttcgatgattttttagtgaggaggagatcattgaatttgagattgaatctttccagcgagtttccacttagatccattagaatggaaatcagtgataattgtacccctttgagtgcaaacaatgaatctagaggcgcgttggttgttttcgaagggttggatcgtagtgggaaaacgtcacaatgtgggaggttggtttcgtatttggagggattgggtcattcagttgaattatggcgatttccagacagaactacaagtgtcggacagctgatatctgcgtatcttacaaataaatcgcagttggatgaccacacgattcatctccttttcagcgcaaatcggtgggagaagagatcaatgatggaaaccaaactgaaagctggaaccactcttatagtagaccgttactcttattctggagttgctttctcatctgctaaaggacttgatttcgaatggtgtaaggcaccagagaatgggctaatagctccagatctggtcgtgtaccttgatataccgcccgagaaagctgcagaaagaggaggctacggaggtgagagatacgagcagctcgagtttcagaagaaagttgcacaacactataagcttcttgaagattcttcatggaagatgatagatgcttcccagtgcatagaagatgtggaaaaacaagtggaggagatcgtattggaacatgtcgtgacttgtcagaaagggaagcctctttcatccctctggtcttgctagtttatctattatcattttctcttcccttcttttccaactgaagagatgcaaaacttgcatgtggcaagcttggtggcaagcttggcaaagaacttgatactgtataaccttaaattgcttcttgtgtcttaagtgttgtagatttcagttcagtatcttactatgtcttcaaaaaatatacctctcaactcttgttttcgagtagtgtgttcttatttatgctttggttattgtttcgtgttgtgtgatcaaaacaattatattgctaatttatgaatgttgatttgtt

SEQ ID NO: 17347 - DNA, 343 bp, Gossypium hirsutum
  Clone ID: LIB3083-069-Q1-L1-E3
aaatttacgaggacacaaaggagcgagagaattggccaattgggtcaaagagggtaatttggtctttttgtcttgcgcgggcaatggtttcgctttttataaagtctccatagttttccccatcaaaaccctctcgttttctgtttttctttttctctctaatggctgcatttcatctcaggaattttggagttttggccgtgaggaggtcattgaatttgggattgaatatttcttgcaagcgttcagttaggtcaattagaatggagaatggtaataattgtaacctgatgggtgcaagcaatgaatctagaggtgccttggtagtttttgaaggattgga

SEQ ID NO: 17348 - DNA, 487 bp, Gossypium hirsutum
  Clone ID: uC-gsflnu33B080e10b1
tattttttgtctgactcggctcactttcgggtttgtcttccactctttattctcagtgccggatcagccgagaattccgcgggcgaatccctcacttgtctcataatgctctaaaatgccactttcttcgccatttaagttcttaaatgccgaagtcgaagaaaattgaagggcagagactagtgatgaaggaaagaattttaggtgacaatgaaagtgatgccgccgggggcaaagagattagaaatcttgatcacgtgctttcccaatttgtatacgagggcgatcatggtgaggaaacgggcttgaaggaacctgagattgcgcgcataaggattggaaagaggaagattggagatgtgccagtgcgaaaggttctaccatattttcaaggcaactgccaaagacagctcatgtcaattacgcaagttgtgtacaaaggttgcagtaatgaaaagctttttgaggaaggggaaaactttacaaa

SEQ ID NO: 17349 - DNA, 333 bp, Gossypium hirsutum
  Clone ID: LIB3166-045-P1-K1-C12
tccacgcgtacggttgatggtaacctcacttatcaccaatcaccgattcttcactttctgggatttgttggtctgatttggatcactttcgtcttagccgaccactctgaattatcagtgccgtattagccgcgaatttcgcgggcgaatccctcacttgtctcataatgctctaaaatgccactttcttcgacatttaagtttcttaatgcctgagtcgaagaaaattgaagggcagagactagtgatgaaggaaagaattttaggtgacctagaaaagtgattgccttctgtggtgcttatatgatttttgataattctttgattctactg

SEQ ID NO: 17350 - DNA, 771 bp, Gossypium hirsutum
  Clone ID: GOSHI-09MAY01-C11804_2
gcgatgagatctagcttggaaacttctgttattccagcatttgagatgtcatgcaaatcaatgtcaggggaaattggtgtcacatgtgacccacgcctccgagaacacacacgaactgctcaccagcaatctgaaaattcacattcttcccttgctgctgctctacaggaagctattaaatctgcaacttcaatcacacaaaccttaagtggtgaactggccaacgcgcaacgaaatcttctagctatagcagctgcaggtggcaactccaatgcaggaaatcccttggtttcacaattgagtaatggaccactgactcatctgcatgagatgcctgacgcacacttagatccaactaaacagtcagcaagattgatagctgaaaagaaatatgaacaagcattcacctcagccctgcatagaagcgatgtctctatagtttcctggttgtgttctcaggttaatctgcaagggatattgtcaatgaaaccatgtccactgagccaaggagtattgctgtcactttttcagcaactggcttttgatgtcaacaaggaaactagtagaaagcttgtatggatgactgatgtagctgttgccataatcccctcttatcccacaatatccatgcatgttggtaccaatatttaaacaggtgtttcaaattggggatcatttacaaagcattgtcccacatctgcctcagaaaccggcagcatacggattcttaagattgtcataaacagagtgttgaactgtaaatgatttttt

SEQ ID NO: 17351 - DNA, 939 bp, Gossypium hirsutum
  Clone ID: GOSHI-09MAY01-C11804_1
gccaacgcgcaacgaaatcttctagctatagcagctgcaggtggcaactccaatgcaggaaatcccttggtttcacaattgagtaatggaccactgactcatctgcatgagatggtatgctcccctctctctgtttctcatgaatctgacagtcactatccatctgcctcacaccgatgttatacgtgtaccgcagcctgaggcacacttagatccaactaaagagttagcaagattgatagctgaaaagaaatatgaagaagcattcacctcagccctgcatagaagcgatgtctctatagtttcctggttgtgttctcaggtaagttccaataactagttgtactctttgacattattttccaacaacccttgttgtgcatgacaagaaaactctttgagacctgacattggtctgatctgaattaaccaggttaatctgcaagggatattgtcaatgaaaccatgtccactgagccaaggagtattgctggcactttttcagcaactggcttgtgatatcaacaaggaaacaagtagaaagcttgtatggatgactgatgtagctgttgccataatcccctcggatccgacaatagccatgcatgtggtatcaatctttagacaggtgtctcagattgtggatcatttacaaagcatgtccacgacatctgcctcagaaaccgccagcatccgggttcttaagtttgtcataaacagtgtgttgaactgtaaatgatttttgtgctaatttttgcaagaagattttcccttttttttccccctttacatatagaaatctaaggaacatacggtgaaaaaggtggatatttcgtaaattcagttgtatgtttcaatgtgtgaaatagttgagtttatttgtttatcaattttcaaaattaattaaccatttcaattccattaatcttttacatttct

SEQ ID NO: 17352 - DNA, 640 bp, Gossypium hirsutum
  Clone ID: AI726050.1
gtgcagattataaccggctcaaagccctcccagaagcagttgggaagatagaaaccttagaggttttatccgtgcgctataacaacatcaaacaattacctacgacgatgtcatctttggcaaacctgaaggaattagatgtcagtttcaatgagcttgagtctttgcctgagagtttatgttttgccaccacactagtcaagatgaacgtaggcaacaattttgctgatatgcgatccctaccaaggtctattggaaatcttgagatgcttgaagagctggacattagcaataatcagatccgggtcctcccagactcttttaggatgttaacacgacttcaagttctacgcgtggatcaaaatcctctggaagtgcctcctaggcacattgcggagcagggtgcacaggctgttgtccggtatatggctgatctggttgagaaaagggatgttaaattacaaccggtgaagcagaagaagagttgggctcaaatatgcttcttctccaagtctaacaaaaggaagcgcaatgggatggactatgtaaaagcctgatttacagcactttatgtttgggttttttagctgttagtgagtcagatgacatcaattaggacgatgcaacgagttgttgttgt

SEQ ID NO: 17353 - DNA, 374 bp, Gossypium hirsutum
  Clone ID: LIB3166-040-P1-K1-G7
gtctattggaaatcttgagattcttgaagagctggacattagcaataatgagaggcgggtcctcccagactcttttaggatgctaacacgacttcaagttctacgtgtggatcaaaatcctctggaagtgcctcctaggcacattgcggaacagggtgcacaggtaatataatcccttttgtatgctttttctttgataaaagaaaagaaaatgttatcccatggcctaaagttactttattcatttacttaggctgttgtccggtatatggctgatctggttgagaaaagttatgttaaattacaaccggaaaagcagaagaagagttgggctcaaatatgcttcttcttcaagtctaacaaaaggaagcgct

SEQ ID NO: 17354 - DNA, 641 bp, Gossypium hirsutum
  Clone ID: GOSHI-09MAY01-C11554_4
cccacgcgtccggagaatgcatctgttggaaagactacgtatgttcactgcaaggcaggtcgaggacgcagcacaaccattgttctctgctacttggtggaacataggcatatgactcctgatgcagcttatgagtatgtgagatctatcagacctagggtccttctggcacctgcacagcagcaggctgttcaagattactatcttgacaaggtgaatgataatggaatctgtggggactggtgcttaatgataatgcagaacactctaggtgctgcatattcacaggcatcggatcatctctgttacagattatcaagacagcgaccagcggaggtacggcataagtctgcacttttggtgttaaagaattgcgaggagactggtcttgcattgggcttttcttttctgttagttgcgcagggaaactgatgatatatttactagagatatgcttacgttgtgaaatgttcggaatgcgaataaagacctcccctttctttgtctggtcattgtgctttgtctgctacttttttcatttttgcattgagatggacaaaatactgatttacaataacatgtgattaaacacaaactaataaagggataatatcttgatacgaatgatgcaagaaccaaat

SEQ ID NO: 17355 - DNA, 1192 bp, Gossypium hirsutum
  Clone ID: GOSHI-09MAY01-C11554_3
cggacgcgtggactttttttctcgacatctcttctttattttcttcacgcgcccctctaacattccccccctccgcggccgcctgggttttcgcatatcatgcatatttccaggtcaaacatgttttcatctttccatagtcgggttttgcttgaagatcttaattattgttgtttgattaaagctttcatctgttttagttgattgtcgtccttgtttttcgttgatttccatgttatttttttttggtagattccaattctgggtaattaaggttaaatggtaccttttttcttgttaatctgagtttgttgtgtgtaatttttagggttcaagggtaaattgtcttcttcttcttcttcttcttcttttatgtctgcatctttctgaatttattcgagatagagaaaaaaaaagagatgcatattgaggaattgaaagaaggggagcagcaggatcaagatcagagtcaattgtgtgaagatagattggttgtttgggacgcaaaaagggttttggtgggagcgggagcacgcgcccttttttacccaacgttgttgtacaatcttgttaggaacaagatccagtctgaatttagatggtgggatagagttgatgagtttattttgttaggtgccgtaccgctcccgcctccggttccccggttgaaggatcttggtgtctctggagttgtgaccttaaatgaaccatacgagaccttggtcccaacatcgctgtatcatgcacacaatattcatcatttggtgattccaacaagggattatctttttgctccgtcatttgctgatatttgccaagctgtagatttcatacatgacaatgcttctgttggaaagactacgtatgttcactgcaaggcaggtcgaggacgcagcacaaccattgttctctgctacttggtagaacataggcatatgactcctgatgcagcttatgagtatgtgagatctatcagacctagggtccttctggcacctgcacagcagcaggctgttcaagattactatcttcacaaggtcaataataatggaatctgtggagactcttgctcaatgataataaagaaaactctagttgtacctgaaaaacaggatatagcggtcttcgatgatggctctgtagttgttgtaacagagtcggaccttgacgggtatgacgctagctttgacac

SEQ ID NO: 17356 - DNA, 761 bp, Gossypium hirsutum
  Clone ID: GOSHI-09MAY01-C11554_2
cttctttccagctgcgactccaactctcagagccgacatgaggtaacgagatgtagggctggccgaggaccccgcacatccactgttccgcgtgcttcttgggggaacaatgggcatatgactcctgatgcagcttatgagtatgtgagatctatcagacctagggtccttctggcacctgcacagcagcaggctgttcaagattactatcttcacagggtcaataataatggaatctgtggagactcttgctcaatgataatgaagaaaactctagttgtacctgcaaaacaggattcggcggtcttcgacgatggctctgtagttgttgtaacagagtcggaccttgatgggtatgatgctagctttgcacagatgtgttaagtagcaagatgttggatgagggaagcctagctggcaggttgcagtttgctagtcaagcagctatgaccaggctttcttgcctatggttacgttgccgtgcggaacaaaaggcatctaggaagctattgagcagtctcggtattgacattcgggtttattgattgttggtatccatcaattctagttgttaaattgagtgtctttttgtatcaacgtttcaagttgtgttcgtcccaagtgcattctcgctcctgtcgtgttattttcatttttggtcgggttatacagagaatggagtatgtatgtatgtatgatatttgattcctgtttgactcaagttgagacgctcatgtaagagagacagagagcaagtgtag

SEQ ID NO: 17357 - DNA, 691 bp, Gossypium hirsutum
  Clone ID: GOSHI-09MAY01-C11554_1
atggatagctgacatcctctatcaaatccggagattttcgcaaaaaaaaaaaaaaaaagagaaagtgagaggtcgagagagaaaataattcgcagggaattagcgagatcctgcaattttcctgcgttttctctcttcaatcttctccggctatctgatctatccgtcatcatgacaacatcaaggcgtcttgcagaaagaaaggtggagaagttccaaaagaacataacaaagagaggagctgtgcctgagacaaccacaaagaaggggaaggattatcctgttggtcctgtgcttcttgggttcttcatattcgtcgtcattggatcatctctcttccagattatcaggacagcgaccagcggaggtatggcataagtctgcacttctggtgttaaggaattgcgaggagactggtcttgcattgggcttttcttttctgttagttttgtagggaaactgatgatatatttactagagatatgcttacgttgtgaaatgttcggaatttgaataagacctcccctttctttgtctggtcattgtgctttgtctgctacttttttcatttatgcaatgagatggacaaaaaactgatatattagtggttgaaccgagttacccgagtaacttggtatttgaatggttataccaacagcttcagcaaaatccatggactttataataaact

SEQ ID NO: 17358 - DNA, 475 bp, Gossypium hirsutum
  Clone ID: uC-gsflnu33B051c02b1
cccacgcgtccgatccgtcatcatgacaacatcaaggcgtcttgcagaaagaaaggtggagaagttccaaaagaacataacaaagagaggagctgtgcctgagacaaccacaaagaaggggaaggattatcctgttggtcctgtgcttcttgggttcttcatattcgtcgtcattggatcatgtaaggattctttctttgccatcatatttccttattcgatgtgtatggataatttgtctggtttcttcgttggaaagtgtaatatgtttagcttttcttggtgttcagttaatttcatcattgtaatcttcaaggatatttgcttaaattaaaatatctataattacaatttagagtcaagattttctgcatgtcctgtctgtcatgatttactgatcaacttcgtttacattcaccgtaacagctctctttcagattatcaggacagcgaccagcggaggtatggcataagt

SEQ ID NO: 17359 - DNA, 489 bp, Gossypium hirsutum
  Clone ID: uC-gsflnu33B058b05b1
cctacgcgtccgctgacatgctctgtcaaacacgtacattttctctagaaacagagagatcgtctgttaaaatacttcgcagggaattagcgagatcctgaaattttcctgcgttttctctcttcaatcttctccggctacctgatttatccgtcatcatgacaacatcaaggcgacttgcagaaagaaaggtggagaagttccaaaagaacataacaaagagaggagctgtgcctgagacaaccacaaagaaggggaaggattatcctgtcggtcctgtgcttcttgggttcttcatattcgtcgacattggatcatctttcttccagattatcaggacagcgaccagcgtgggtatggcataagtctgcacttctgatgttaaggaattgcgaggagactggtcatgcattgggctttgcttttctgttcgatttgtagggaaaaacttgagatatatttactagagagatatgcttacgatgtgaa

SEQ ID NO: 17360 - DNA, 399 bp, Gossypium hirsutum
  Clone ID: LIB3148-022-Q1-K1-F12
cccacgcgtccgattttcgcgagaaagtgtgagatcgagagagaaaatacttcgcagggaattagcgagatcctgaaattttcctgcgttttctctttcaatcttctccggctacctgatttatccgtcatcatgacaacatcaaggcgacttgcagaaagaaaggtggagaagttccaaaagaacataacaaagagaggagctgtgcctgagacaaccacaaagaaggggaaggattatcctgtcggtcctgtgcttcttgggttcttcatattcgtcgtcattggatcatctctcttccagattatcaggacagcgaccagcggaggtatggcataagtctgcacttctgatgtaagagaattgcgaggagactggtcatgcattgggctttgcttt

SEQ ID NO: 17361 - DNA, 375 bp, Gossypium hirsutum
  Clone ID: LIB3585-003-P1-K1-A12
gaaagtgagaggtcgagagagaaaataattcgcagggaattagcgagatcctgcaatttgcctgcgttttctctcttgaatcttctccggctatctgatctatccgtcatcatgacaacatcaaggcgtcttgcagaaagaaaggtggagaagttccaaaagaacataacaaagagaggagctgtgcctgagacaaccacaaagaaggggatggattatcctgctggtcctgtgcttttggaggctcttcatatatgagccaagagtatcatgctttggcactattatggatgtctgatcgaagacaacgtttgccatatgttacatactttgaataacaagtatttgactgagatcggtgtagattattaactg

SEQ ID NO: 17362 - DNA, 220 bp, Gossypium hirsutum
  Clone ID: LIB3543-043-Q6-K6-D8
tgcttagttgtgaaagttcggaatttgaataagacctcccctttctttgtctggtcattgtgctttgtctgctacttttttcatttatgcaatgagatggacaaaaaactgatatattagtggttgaaccgaaaaaaaaaaaaaaaaaaaaaaaaaaaaaaaaaaaaaaaaaaaggggggacgaaaaaaaaaaaaacaaaattacaaaaaacaagcatac

SEQ ID NO: 17363 - DNA, 1647 bp, Gossypium hirsutum
  Clone ID: GOSHI-09MAY01-C11544_1
ccccgcgtccgcccagcgtccgcccacgcgtccgggttaatatgaatcttgactggagggagtcacttcctcatcctgatgaacgggttgagtatgagttctggacaaatagcaacgatgagtgtgggccaaagtgtgacagccagatagaatttgtcaagaacttcaaaggagctgctcaaatacttgagcggaagggctacactatgttcaccccccactatataacttggtattgccctgaagcttttattttgagcaaacagtgcaagtcacagtgtatcaatcatgggaggtactgtgctccagatcctgagcaagacttcagtaaaggttatgatggtaaagatgtggtggttcaaaatcttcgccaagcttgcttgttcaaagttgccaatgaaagtggaaagccatggctttggtgggattatgttacggactttgctatccgctgcccgatgaaagagaagaaatataacaaggagtgtgctgataaagttatccaagcccttggtgttgatctcaataaagtagacaaatgtattggagacactgaggctgatgtggacaacccagtgctgaaagctgagcaagatgcacagattggaaaaggctcccgtggagatgtaactatactgccaacccttgtgataaacaacagacagtatagagggaagttggacagaggagctgttctcaaggcaatttgtgcaggttttcaagagaccacagagccagcaatttgcttaactgaagatatacaaactaacgagtgcttagaaaacaatggtggttgctggcaggacaaaagtgccaacataactgcatgcagggataccttccggggaagagtgtgcgaatgcccgttagttaatggtgtgaagttttctggagatggttatacacattgtgaagcttctgcggctttacgctgtgaaatcaacaatggaggatgttggagagaaacacgggaaggaaggacatactctgcttgtattgatgatcattcacatggttgcaagtgcccatacggattcaggggtgatggagtcaagagctgtgaagatgttgatgagtgcaaggagaagctggcctgccaatgtcctggttgcaaatgcaaaaatacctggggcagttatgagtgcagctgtagtggtggttcattgtacatgcgagagcatgacacatgtatcagtaagaatgttaaaacagaggtaagctggggctctgtttgggtaataattcttggattggttgctgctggagctggagggtatgccatttacaaatacagaatccggagatacatggattcagagattcgggctataatggcacaatacatgccattggataatcaaccaaacaacgttcatcatccagacatctgaagtgcctcttccgattgggttggttatatattagtaggttttatatttttgggtcacgtaacttatttggcttctcttcgacattgtaattctaaataaagaacaattttcataattatgtggcttttacatttatcttccggctggatttatttttgaaaaattgagttcagggtgggtcggaaaatagttgggtaaatttgcccgatattaagtttttaaaataaataaaatttggatccggatgcttcgttct

SEQ ID NO: 17364 - DNA, 820 bp, Gossypium hirsutum
  Clone ID: GOSHI-09MAY01-C11574_1
gccgtattgcttcccccatgtactctctcgatttctctctttaatgaatctccaaatcgaaatttaaggccaaaaagacacaagggttactaattaaattaatcttcagcgaatatgttggtttatcaggatcttcttacaggtgatgagctcctctcggactctttcccatacaaagaaatcgagaatggaatgttatgggaagtcgagggaaagtgggttgttcaaggagctgtcaatgtagatattggggctaacccttctgcagaaggtggtgatgatgatgaaggtgttgacgatcaagccgtcaaggttgtggacatcgtcgacactttcagacttcaggagcaacctgcttttgacaagaagcagtttgtgaccttcatgaagaggtacatcaagaacttgacacccaaattagagcctgaaaagcaagagtctttcaagaagaacatcgagggggctactaaatttttgatgtcgaagcttaaagatctccaattttttgtgggtgagagcatgcatgatgatggtagcctagtgtttgcatactacaaggacggtgccaccgatccaaccttcctctactttgcctatggcttgaaggaaatcaagtgctaaatggagttttcacccgataccggaccggctttgttatacctaaagacttagttttaattctagatataaggagttcttaactatctattttagtcttttttatctcttttaggtcatatttataatgtttggtttttgagggttatgaactattggttaaaggatatgcttgaggaataaaatttactgttttcgagct

SEQ ID NO: 17365 - DNA, 373 bp, Gossypium hirsutum
  Clone ID: LIB3166-045-P1-K1-H8
cccacgcgtccgcccacgcgtccgcggacgcgtgggctttaatgaatcggcaggtcgaaatttaaggccaaaaagacacaagggttactaattaaattaatcttcagcgaatatgttggtttatcaggatcttctcacaggtgatgagctcctctcggactctttcccatacaaagaaatcgagaatggaatgctatgggaagtcgagggaaagtgggttgttcaaggagctgtcaatgtagatattggggcgaacccttctgcagaaggtgctgatgatgatgaaggtgttgacgatcaagccgtcaaggttgtggacatcgtcgacactttcagacttcaggagcaacctgcttttgacaagaagcagttt

SEQ ID NO: 17366 - DNA, 1019 bp, Gossypium hirsutum
  Clone ID: GOSHI-09MAY01-C11564_1
cccacgcgtacgaccacgcgtacgaccacgcgtacccctcgcctcccaaccaacacggtttctacttcttcatcttcactgtaactgaaacatggagaatgaaaggaagaagagaaaaatggggaatgaagaggaaaaagacgatgaagatgaagatgaagatgatgatgaacaagagaaagtggacaagttctttgctttgataaggagcacaagggagatgcgtgatcgtctaagaaacgcggcggtgcctaatggaccaaaagaggaagaatatcagaagaagaaacaggaagataaggcggttgttgttggtggcggcggcgtcggacagtggaatccaaagttccaagcagaggatttcatggaaggttccatatccaggtctgggaataattctttggggttgaatgttgcaggcccttccagttccaaagtacaacgtgaacccggaaaaaaagaaccgaggacgacggcggagaaggtggaggtggtttggaccttaagctttctttatctttgtagtggtctgtcttggtgtttctgtatgtaaatttgtggctctgcttggttcaagttttagaggcaagcctctggctgcgggaattgaaagcagggccatggtggtggtaatagggtaacttaaacaagtaaaataagcatttgaatgtgcaatcctttttcactatgattttaaaaatggggttacgttttcaggcctaaagagccaatcggccgaactgtaacttggggttgaatttcacattctatcacatatgtacaggctgatagactcaaatatgtagttttgtattaattgggtgcttcaagtttgttttcagcctattaactcaggtatttcgagacctaatttcatggtttccgatttaccaaattactagtttgcagggcctttgacataggaacttgcacttgcatatcacaaggcctggtttgggtttcgaacaagtcgattgcagttcttagcaaaataaaaaatatgcatctattcatatttg

SEQ ID NO: 17367 - DNA, 384 bp, Gossypium hirsutum
  Clone ID: GOSHI-09MAY01-C11434_3
caaggtttccgggttgcatatgatttagcgggttctcgtgtcgggttttctccccgtggatgcgcctaaaaatggcggtgcttttaatttttatattaagggacaaagctctatccctatctctatattattttccttggatatttttgggggagggtaagaaaggaagaaacataataatgttttcatagataagaatgtaagggaaagatgatgaccaggaaaggcgggttgctggttagaagtagagaatgtcgttcggcgggttttcggttttcacgtgttgtccattgtacttttgaaacaaaagaaatggcatgtccaagaaagttatatatatttttaatttttaatttaataaaaaagattaatggaatcaccctt

SEQ ID NO: 17368 - DNA, 927 bp, Gossypium hirsutum
  Clone ID: GOSHI-09MAY01-C11434_1
cccacgcgtccgcggaagttctcttactgtttggtcgaccgatcggcttcgtctaaaccatcctccctggttttcggtgatgccgccattcctcgaggtgctctgttcactcccttattaacaaacccaaagctcgacactttctactacgttgaactgctcgggatcagcgtcggtggtacacgtgtccccaagatctcaccttccttgttcaaaatggatcaagacggtaacggaggggtcattatcgactcaggcacgtccgtaactcgcttgactcaacccgcttacacggcaacgagggatgcattccgtctcggagctacaaatctgaagcgggcgcctgatttctctttatttgacacgtgctttgacttgtcagggcagacttccgctggggtccccccgctcgtgttgcattttagaggagctgacttgtcactgccggcgaccaactatttgatcccggtagatagcagcgggaccttttgctttgctttcgcgggtacaatgaacgggttgtccatcattggaaatatccagcaacaaggtttccgggttgcatatgatttagcgggttctcgtgtcgggttttctccccgtggatgcgcctaaaaatggcggtgcttttaattcttatattaagggacaaagctctatccctatctctattttattttccttggatatttttgggggagggttagaaaggaagaaacataataatgttttcatagataagaatgcatgggaaagttggtgatcacgaaaggcgggttgctggttagaggtagagaatggcgttcggggggttttcagtttttcacgtgttgtccgttgtacttttaaacaaaagaatgggctggtcaaaaaggattatattctaattttaactaataaaaatatattataattgattaaggatct

SEQ ID NO: 17369 - DNA, 413 bp, Gossypium hirsutum
  unsure (1)..(413): unsure at all n locations
  Clone ID: LIB3493-020-P1-M1-D2
ccgactctggtgttgcattttagaggagctgacttgtcattgccggcgaccaactatttgatcccggtagatagcagcgggactttttgctttgctttcgcgggtacaatgaacgggttgtccatcattggaaatatccagcaacaaggtttccgggttgcatatgatttagcgggttctcgtgtcgggttttctccccgtggatgcgcctaaaaatggtggtgcttttaatttttatattaagggacaaagctttatccctatctctatattattttccttggatattcatggtgagggaagaaaggagaaacataatgtttcatagatagaatgtaggggaagttgtgatcacaaggcggttgtggntaaggagagatgcgtcgcggtatcagttacggtgccgtgacttg

SEQ ID NO: 17370 - DNA, 792 bp, Gossypium hirsutum
  Clone ID: GOSHI-09MAY01-C11424_2
ccgggcggaccaacccgtccggaacgaacatgtagttcaataaaatttgtaagactttgtagtgaaccagatcaaagagctggtggtcctacagcaaattctggtgttgcacctgatgcagctgaaatacagcttaaaagtccaaattggctatttggccaaagaaagtttgaagaagttggctcaggccccaaagtctctgtgcgcgaaattaaaaatggaggggccaatggtgaaatgaaacttgacgatttctgtgacttaaattggctttcttcctatgttgatgatgaacaggatattttccagaggtacctctcaatgacgtctgttgatgaagccaatggttggtatggtggaacacttcttggtgatcaagatgaaagcagtgagatatataggcattacgctgaattatgtcaggggccggccatggagcctttccaacatgatctggaaagggagaagcattacactgatgttctacaaatgaacacgatcgatgttgtagatgatgcatctgttgaagccgagatggctgaagctctaaaggaatacgacctaattggtgctgatctcgggatttttcctgtgtcatgcaaatcatttactgaagatccaagtcggctgacacgatggatcatcgttgaggagaagatgtgaatggtgtaaatccatctctagtgaactctcagtttctgatataaaatacacgcacattttgttgtgctgcatagctcatataaagctgaaacccaaaatgatgcagaattatctaaataataatttaat

SEQ ID NO: 17371 - DNA, 515 bp, Gossypium hirsutum
  Clone ID: LIB3582-038-P1-K1-G5
gggccaatggtgaaatgaaacttgacgatttctgtgacttaaattggctttcttcctatgttgatgatgaacaggatattttccagaggtattttcgtatcattcattcttgtttacctcaggaagaatgcatgatctttttgttttcacagcatgaaggaatcatattggtttagattgttgctgtgtcccactaatgttggctttgcatgaacaaggcctgaaaattgagtaaaggtggggttgatagattgtttaatgtttgagacccctatgtgcatgcatgaacgtggtcccttgtcttgaatgcattagcaaagtgtaattacatgcgaggtgacaacaaattgccataacacgtaaaactatacattttgaagatgatatcatttgttgattcccaagtagatgaaggcttgttagtcatgaaaggataggaccttttggcttagttataaaagtatacggttagttctgtgtattatcagtttttgtgaatattttaagatatatat

SEQ ID NO: 17372 - DNA, 1391 bp, Gossypium hirsutum
  Clone ID: GOSHI-09MAY01-C11784_1
aaaatttctccatttttttcaccttttcctccttttaggtttggtaatttctttttcgttttcaaattaaatttctcactttctatatgtactcctaatcttccaccaccctcacttgctactatagccttccattgcccttttcttctcttcaactccacctgctaaaatgcaccaatttccggtgcttctcagcctcatcgcagtgtctgtactgctgatggtaactccagtcattggataccgtccatggcctcacttaaaacccaacagctccgatttaacgtttggaagctccaagaaattcgagggctcatcagagttcgtccaaatgagataccatatgggaccagttctcaccgccaacatcaccgtacacatagtttggtacggccgatggcaaaaatctcagaagaagatcatccgtgagttcatcaactcaatctccgccgttgatgccaagcgcccttctgttgccggctggtggaagaccgtacaactttatacggaccaaacgggcgccaacatttcccatactgtgcatttaggggaagagaagaacgaccgattttactcgcacgggaaaaaactgacgcgcttgtcgatacagtcggtgataaaaagcgcggtgacagcgagtacaaagccgttgccgataaaccccagtagcgggcttttcctcttgctcacatccgatgacgtgtacgtccaggatttttgcggccaagtatgtgggttccattatttcacattcccatccatcgtgggttacacgctcccatacgcatgggtggggaactcggcgaagctttgcccgggggtatgcgcttatcccttcgctgtgccgaaatacatgacggggttcaagccgttaaagtcacccaacggtgacgtaggagtggacgggatgataagcgtgatcggacacgaaattgctgaactggcaactaacccgttggtgaacgcttggtatgccggccaagacccagtggcaccggtggaaatagcggatttatgtgagggtatttatggaactggaggtggtggatcttacacgggacaactatttaacgataaagatggtgccacgtttaacatgaacgggatcagacggaggtacttggttcagtgggtttggaatcatatcctcaattactgtactgggcctaatgcacttgatcagtaatttttattttgaaattaaaatattttagggttcctttattttggcattttgaggcttattaaatatggacttttgtaatatttataattcatatattattccttatatgaggatttgaaagatttggatggtggtgataacaggggttgaaattaaacgaattttcaatattttaattgctaattgaattaaatttaaagaaaaa

SEQ ID NO: 17373 - DNA, 457 bp, Gossypium hirsutum
  Clone ID: LIB3189-025-P1-K1-A7
tttctgtttaacggcctgcccaccctggaaacggctcaaacggagcgtggggtccatacggtgggaagagcaccgtacgcttgcgtgtggtaacttgcgccatcgggggcccttgataatctggatgaacaagtgacagctgcgctcggacgttctgataatcgaataaagtctacaaggtgatacaaactctggcaaatgagacaccgtatgcaacgcaggttgaccgactgcatccgcgcactcatagtaaggatcggctcttgggaaagatctcggaagaagatcatccgtgagttcatgaactcaatctacggcgttgatgccaagcacccttatgttgccgcctgtggggaagaccgtacaactttatacggaccaaactggcgccaacatcttccatactgtgcatttaagggaaagagaagaacgaccggttttactcgcaccggaaaaa

SEQ ID NO: 17374 - DNA, 773 bp, Gossypium hirsutum
  Clone ID: GOSHI-09MAY01-C11754_1
cgcgcatgcgtggggtgaacggcacttgcacaaatattcgtttcccccctttcaatgcccacttttctctttcggattttcttgctatacaatctccttctcgactatttggtccccagaaagctcaaatctttcctctctccttcttgtactaccaccaccccctttgtttctgtcggaggtgaaaccgaaaagaacccatctccggcagttgcattggcatcggtctcccctcgctgtcctctaaaaagaatggacgctgctgagttgaagagggtgttccaactgttcgacaagaacggagatgggtccatctccaagaaagagttgaacgattcgttggagaatatgggtatctgcatccctgatcctgaattaacccaaatgatcgaaaagattgatgtcaacggcgataagtgcatcgatatcgacgagttcagtgagctgtaccgatccattatggataataaggatgaagaagaagatatgaaggaagctttcaatgttttcgatcaaaacggtgacggatacatttccgtggaggagttgaggtccgttttggaatcgcttgggcttaagcaacggatagggatcgaagattgttcaacgatgataacgaacgtggatgtacaccgtgaccgtagggttaactttatggaattcaaccatatgatcaaaggaggtggctttacagccatggcataaaacattccgtctatattggatttgtaaataagcttgtaagatcttcgggctgcattacatttgttggc

SEQ ID NO: 17375 - DNA, 1057 bp, Gossypium hirsutum
  Clone ID: GOSHI-09MAY01-C11714_1
gattaccttgttaagagtggaaggtctactgattgctgcactgattatctgaaaggtaactgccgtaggggtgcatcatgtaggtttgctcatgatggtgctactgatggcttcagtaaaagaacaacgaatgagataagtagtgaaagggaaaacaccaagcggaacagaattagaactccagatcgtgatggtgagcgtgaagctcgtcgaagcagtgatattccttgcaaattctttgcttctggaaattgtcataatggaaaatattgtaggttttctcatcatggtcaggcacgtgcaagtcctgatagaaggtcacgtggtgataaaggtgtatggtgtccaagttccattaatgtggataggttgcaggatggtccaacattgaaagatacagatgcttcattcaatgtgaataaatcttggaatgctcccggaagaagtgatgctaatgtgataaatgaagctgagataccctggactggtccaaaatggagtgatcttgatgcttcaaatgatgcaaacaactcatggactggttcaaaatggagtgatgctgaggcttcaaatgatgcgaacaactcatggactggttcaaaatggagtgatacaggtgcctacttaggggctacaaagttcagcaaggacacaattgcaaaaaatggtgcctctgaaccaagattctctaattggtccatggatgagagatggcggcacaactatgatgtcagtggaaagaacattgaggctgatgtgcagtataaaacagttgatattgacaaggatgaacaaactccgacgaagatagaaaattctggtgttaatattggcgtatcagaaccaaaaggtgctgaagagtcgcttggtgatatggaaatgtcccctgagtggaattacaagataaagtcttctgttaaaaaggaactcactcatggttcaaaaccatctcttgtcgaaacacttttacattctcaagaaaggaatatatctgaagcggcctcaggtcaggtacatgatgggcttgcagctttgcagccaatgtctaactgagaaa

SEQ ID NO: 17376 - DNA, 917 bp, Gossypium hirsutum
  Clone ID: GOSHI-09MAY01-C11704_1
agcattttgagctccacgaaccattccaaggctaccccctcggctttctccaacaggaaatttcaggaaaatggaaagccaaatcccgagaaaacccagaattctgtgcctccatggattcagaacaagcgctgaaattttcaagagacaggtccttcgatggcctgcagctgtgcttgataagctggacctcattttccttgatgccccatatcctgcccaagggaagtccggtgttgaacgcttttttgatcctccttactatgaatggttccaagctacagaggatttcactgagtacacaaattttgaagaatgccttgcgtttattgaagataatatgatgaagagtggtccatttgatggttttctgggcttctcccagggagcacttttatctgctgcattgcctggaatgcagagagatggattagcccttaccagggttccaagaatcaagtttctgataataatatcaggagccaagtttggagggccaaagttcgtacatcataagctcacttccaatgcatattcttcacctcttgaatgcccttctctccatatcataggagaaacggacttcatgaaacaagaatcaatttctctgctggaatattttgtggatccttttgtgattaatcatcccaaaggccatactattccagaacttgatgagaaaagtactgaggtgatgcttgggttcattgagaggattcagaagacaatggcaacagctgttgaacagatctacttaaatgcggaaacctaactagtctatttcaaataagacgatttgggatgtgatattaatgctagttattaattaaatgaaactaccatgcatgttcatgatgaatcaatgtcacgtgagtagttaaaagagtcgaaattctgaatgatggaagtattttctc

SEQ ID NO: 17377 - DNA, 737 bp, Gossypium hirsutum
  Clone ID: GOSHI-09MAY01-C11624_1
cttttgtccaacatgatatgattgaattttaaagaaaatgaaggatggaaataacattaatttttgtttttgcagggtcacaaatggtggtggtggaagctgatgggaaccatgtgcaaccatttgctgttaatgatttggatatatattcaggggaaagctactcagtgttgttaaaaacagaccaaaacccgtacaagaactattgggtttcaattggtgtcagagggagagatcccaaaaccaaccaagccttaacccttttgagctattctgccacccctgcatcaaagctccctacaactcaaccccctgtaacacctcgatgggacgattacaatcacagcaaggccttcaccaaaagcatatatgcactcatgggatcacctcagccacccaagacttatgaccgtcggatcatccttctcaacactcagaaccgactcaatgggttcgtcaagtgggccatcaacaatgtgtccttggtgttgccttccactccttatttggggtccattaaatttggtctcaacaatgcttttgaccaaaaatcccccccagacaactacgatagcagctatgacatcatgaagcctgcacccaaccagaatacaacacaaggggagtggggtttacttccattactttaaacaccactgtgggatgtgatccttcaaaacgccaatgcccttagcaaaaggattgtcagtgaaaatacatcccatgggcattttgca

SEQ ID NO: 17378 - DNA, 451 bp, Gossypium hirsutum
  Clone ID: uC-gsronu33B162e12b2
ggttcaatacaattgctcattggctgccaaatttaggaattcatcaattagccaatgcaagttcgaaggaaatgaaaaatgtgcaccccaagtcttgaaagtccgaccaaacaaaacctacaggctcaggattgccagcaccactgctttagcttcactcaacttggccattgagggtcacaaaatggtggtggtggaagctgatgggaaccatgtgcaaccatctgctgttaatgatttggatatatattcaggggaaagctactcagtgttgttaaaaacagaccaaaacccttacaagaactattgggtttcaattggtgtcagagggagagatcccaaaaccaaccaagccttaacccttttgagctattctgccacccctgcatcaaagctccctacaactcaaccccctgtaacacctcgatgggacgattacaatcacagcaag

SEQ ID NO: 17379 - DNA, 559 bp, Gossypium hirsutum
  Clone ID: GOSHI-09MAY01-C11184_1
tcgtccacgcgtccggttagggctctttattttctctgttcatcagtttctttttatctcttcgaattttcattacagaccctgatcctaaactctcaattatgtcttccaagcaaggtggcaaagcaaagcctttgaagcaacccaaagctgagaagaaagaatacgacgagcatgatttggctaacattcagaaaaagaaagaagaagagaaggcccttagagagctgagagcaaaggcatcacaaaagggatcatttggtggttctggtcttaagaagagtggcaagaaatgagtttcttaaaaacccgagctaaaccgaacttatcgagtcctgtcttgggattaaaacatctattatgctgatgtctcttgtttctattgtgatagttgggatgatttgatgctctagtttcattctgaatttgctattaaaaacattgtgtgtaatttcgtgacgtataacttaataaattcaagttctacgtttgtgttttttgtctaaaaaaacaagaaaaggaagaaaggattactgctggcaaataaatgatgaacgcc

SEQ ID NO: 17380 - DNA, 337 bp, Gossypium hirsutum
  unsure (1)..(337): unsure at all n locations
  Clone ID: LIB3149-056-Q1-K1-E10
ggttagggctctntattttctctgttcatcagtttctttttatctcnttcgaatttcattacagaccctgatcctaaactctcaatcatgtcnttccaagcaaggtggcaaagcanagctcttgaagcaacctaaatctgagaagaaagaatatgacgagcatgatttggctaccatcagaaaagaagaggagagaaggcctaagagctaaacaagcttacaaggacattgtgtctgtctaaaaggcaaatagttaaacactacactaagatttgatacaattcttgttgtatgaatgaatgagatattatgtaactgtatcactaaatattatgtt

SEQ ID NO: 17381 - DNA, 236 bp, Gossypium hirsutum
  Clone ID: uC-gsronu33B087b04b1
aattcatttattatgctgatgtctcttgtttctattgtgatagttgggatgatttgatgctctagtttcattctgaatttgctattaaaaacattgtgtgtaatttcgtgacgtataacttaataaattcaagttctacgtttgtgttttttgtctatacatttgtaaatcgcctattgttgtggttcaaatcacaattttttatgccaagtccactctcaacagcatgcacttac

SEQ ID NO: 17382 - DNA, 1179 bp, Gossypium hirsutum
  Clone ID: GOSHI-09MAY01-C11164_1
gcttcccctatgcttgccatagaactccccttaaccggccggcttcccggctcgctctctgggcagctgattcggtgatcccaaagattcagcccgagtcataaactcggagctcgaactcaatcacagagagagaaagagagtcgatttccttttctcaaaacaatttaaagaagaaatcttttattttctgtgaatttctctttgactctttcggcactctctgcaactgcaatcatgacctcaattgtgcaaggcttttccaagtctttggccatgactgtgctatcggagatcggcgacaagacgttcttcgctgccgcgatcttggcaatgcgccatcccaggaaacttgtcttgttaggatgcctggcagctttaattgtgatgactattctttctgctgttgttggctgggctgctccaaatcttatctctaggaaatggacacatcacattacgactctgcttttctttggatttggcctgtggtctttatgggatgcatttatggagaatggggaggctgaagaattggctgaagttgaagcaaaactggatgctgactggaaggcaaacccaggaacagtcaaaggggggaataaggctgatgatgattcaaaaaaggagaggcagccatttctcacacagttcttctctcccatatttctgaaggcattttccatcacattctttggtgaatggggcgacaagagccagcttgctaccattggtttggctgcagatgagaatccatttggtgtggttcttggtggaattttaggacaagcactgtgcaccactgctgctgtacttggagggaagagcctggcgtgtcagatatctgagaaaattgttgcactctcgggtggagttcttttcattgtttttggaatccaatccctcctctcaacagttgagtcttgacgacttactaatggttagttctgatttttccatcaagaaaattggtcactagagttggcgtactccgttggggaggagttgggttgctatgaattctttaatgtttcacataaaacaggcgaagatcctaaatccaaattggacccgctgttttgttattacatttataattattcatacctgtctgtcatcttctcagtccaggcacagtgctgtgtcttacagtcattattagataggcaagcaaacgct

SEQ ID NO: 17383 - DNA, 1188 bp, Gossypium hirsutum
  Clone ID: GOSHI-09MAY01-C11094_1
ggaaaaggaaaaaaagaaaaaaaaaacagagatgagctgttatcaattttcagtgataccaaaaaacacggtttttccttcttccctgtctttctctgtcttctcttacttttttatattactctcaattcccattgaaactttcagtctttcagccataattaagcttcttcccttcagaaaacatcgactgaagctgctccaagattaaagaagcttcaatttataatactctgccccttaaactagcaaagcctgatctgctgcataatcgtctaaagaaaaattgatggggataaataagttgctgtgttggtttgcagttttcttctttttgttgggtttctctgcttgcagttcgatttctgatggtgtttttgactctttcacttctactggaaggcacctccttcaagctaagaaagcttgccctgttaactttgagtttctgaactacacaattatcacaagccaatgcaaaggaccaaagtatccacctgaaagttgttgttctgcattcaaggaatttgcttgtccttatgcagaacagatcaacgacttgacgaccgaatgcgcttcaaccatgttcagctacattaatctttacgggaaataccctcctggtctttttgctagtgagtgccgtgaagggaaagaagggctcgcttgccctgccttatcgccatcagcatcagcatcggagaatgctaatggtagtcaacagctgatacgtaatccttggatgctggtaatggccgcaatcatagctgcagctatgttgttatgaaagcctggaaatgaattccgattattccattgtttgatttttatataatatttatattattttcccacttttaacgctgaagaagagtgcagtattttgatttcatacaccaggttctttcttggtgcatccttttatttgtacttgaaatgttgtagaaataatatacttcatttggttttgcgtggacagacatcatgtctagtagtattaggagattccaagctggtttctaccacataagtcaaggggggagggtaccttccgcttctttatgttgatgaccatgagaccaacttggcaagcaaggagaaacctgattggagtaatataattaacgaaccatggctatgtatctgttaacatggtatgaaattccaaatggatccttagtgaaaaat

SEQ ID NO: 17384 - DNA, 315 bp, Gossypium hirsutum
  Clone ID: uC-gsronu33B039d10b1
ttcttctcttactttttatattactctcaattcccattaaaactttcaatctttcagccataattaagcttcttcccttcagaaaacatcgactgaagctgctccaagattaaagaagcttcaatttataatactctgccccttaaactagcaaagcctgatctgctgcataatcgtctaaagaaaaattgatggggataaataagtacctgtatgcgattactttttttaaaccctactgaggtataactttcaagctatgatcaatgttttttgatgctgttgtacattggccccatattattttcctgtatt

SEQ ID NO: 17385 - DNA, 453 bp, Gossypium hirsutum
  Clone ID: GOSHI-09MAY01-C11384_1
cccacgcgtccgatccccctctactccgatggtggttggctctcccacaacttcaatctcgagaagtgctggtggtagtcccaggacaacaggttccacttctactggcaacaaaggttggcaagcatctagtttatcttctcagctgaccaagaactctccatcagtgcctagtcagatatcatctcccgttggtgggaggagtgtgccatcagtcctgggaaacccccatttaagttcgtcttcaagtatggggacgaagccccaatcagtgctacatcaacagcagctgcagcagcaaaagcatgcactacatccggcgcaactgttcttctcaaatgcttacattcaggcccaagctcaacactcaccaaccacaacagctgcaagtgggttctttcttcaaagacaccgtaatgagcaacagcaggcactgccttcaagatcatcaac

SEQ ID NO: 17386 - DNA, 683 bp, Gossypium hirsutum
  Clone ID: GOSHI-09MAY01-C11354_1
gcaacagttgctgcatcatctactctcatttgacatggccaacctccccgatggcgtcgatagcatgtttgatagccctcaattcaaggagaacttatgttactttcagcaactgcttgaagaaagggtctttagtgtatctgcaccattggtgaaagtctaagattagaaaacattgcaaagactagcattattcctcttaacaaaatcccattgggtggaacgcctgccgacacttaagaaatgtgatagttttcaaggatctatgaatgctacaggaccaaatgccattgcatcaaataacttcgtaactatgaagagatcacgcaacagtcaaattcaaaactttccagaatcaaggtctttaaagagccccaaaagggtgatcatgaaagcttcttgtgaaaacaaagaactcatagataatgatggttcttgctttagtccaagaagcctatttgctttgccttctgatcgtagctctctcatgctggattctcttcattttgtcgatgaaagttccgaccaagatttgctgctggatgtgccgtccaatggctcattcccgcaggcagaaactgcttcatcctgctttaagttttgggccacaggcaagcaccagtagtagctcggcacacccaaatcctttccatccttagcattggctttttataattacaact

SEQ ID NO: 17387 - DNA, 407 bp, Gossypium hirsutum
  Clone ID: GOSHI-09MAY01-C11364_1
cccacgcgtccggccacgcgtacgggaaaatgaaacgccaaacgaacatcagcagtggctcttcctcaacccaaatcagccaaagtgcttcccactatatctgcatcgatacccacagaaaggaaacactggagctatgaacagattcttggagattcaaccgaaccttctccaaagtttaaagctaactcatcaacaaccttgagacttccgcccccacgcaatccagtcctttctcaccgcctgttgaatcagattggggacatcaggatcccagatccgataagcctctctccttcgtccttcgatggctagagcatgcgccgcttcatttccttcccgaggcacaaatgtgcatcccccccctccaccaccccttgcaggcccttggatgtgataaacgatcg

SEQ ID NO: 17388 - DNA, 419 bp, Gossypium hirsutum
  Clone ID: GOSHI-09MAY01-C11304_1
ctgccttgttgctgcaacccatcaatgacaaagatcccaccgactcggcctccgcctcttctttatcttccaacttggttgagtcagtcaagaccatctgcaacgtgactcggtaccctgactcatgtttcaccgctctatcttctcttaacgcctctacaaaacctgacctagaggccttccttgacctctctctccaagtagccatcacccatctctccgacctctcttcctcattcaagtccctcaacgacctccactctcagcctgctttaaaagactgcttgaccctgtttgatgacgccctcagtcgactcaacgactcagtgtctgccatgaaggtgggtaccgggaaggagcttgtgttgactaaggagaagatcagtgatatccagacttggatcagtgctgcaatgact

SEQ ID NO: 17389 - DNA, 430 bp, Gossypium hirsutum
  Clone ID: GOSHI-09MAY01-C11284_1
aacatcccaatccacactccactcatccattggccgacgacatgccaacataaaacttccttcaacctgctcattctcagcctccacttattaagcgctattctttccacgcttcccttctattccttgttcctcccaatataaaaaccattcctttgttcgctctaaacgctcaccccaagccaaccccaactccccattgaaaaacctctcctgaatggctcttgaaacgttgaattctccaacttcagcccctccactgctccaccatgatgatacagttgaccaccactgtgttgagctcgtggacacggaggaaaagaacacaaagacccagaactgacaacccgccaacggtagaagaatacttagctctttgccttctcatgctggctaagggaaccaccaggaacaacccctcatgctcagc

SEQ ID NO: 17390 - DNA, 691 bp, Gossypium hirsutum
  Clone ID: GOSHI-09MAY01-C11204_1
gggggggccacgcgtcctaattaataaaaacaaaatttagataaggagagagaacaaacaaaaaaagtcttctctatctttgttcttgcctttaacatcaacaacaaaaagaaaaactgaattatcgaaggaaagatctgaaagagaatggcaacttttgcagggactacccagaaatgcaaggcttgtgaaaaaactgtttacttggttgaccagcttactgctgacaacaaagtttatcataaagcttgcttcaggtgccaccattgcaagggtacccttaagctaagtaattatagctcctttgagggtgtcttgtattgcaagcctcactttgatcaactatttaagatgactggcagcttggataaaagttttgaaggaactcctaaaaccgttagggtagaccgatcagctgaccaggtcaccaacagcaaattttcgggcttgtttgccggaactcaagagaaatgtgttgcttgcaagaaaactgtgtacccgattgaaaaggtggcggttgatggcacttcatatcacaaggcttgtttcaaatgcacgcatggaggttgtgttatcagcccgtcaaactacgttgcgcatgaacatcgtctatactgtaggcatcaccacaatcaactgttcaaacagaaaggtaacttcagccaactcggcaagcacgaagaagctaaac

SEQ ID NO: 17391 - DNA, 409 bp, Gossypium hirsutum
  unsure (1)..(409): unsure at all n locations
  Clone ID: LIB3147-019-Q1-K1-B8
ccgggaccaacgcagtcctcccacccatgctatcacaaaaacaatgtttgtaaaaaaactttatacttggatgaccataatggtggtgacaacaaagtgcatcataaaacttgcttcangtaccaccattgcaagggtacccttaagctaagaaattatagctcctctaaaggtgtcttgtattgcaagcctcactttgatcaactatttactatgactagcagcttggataaaaatttagaaggaactcctaaaaccgttaaggtataccgatcaactgaccaagtcaccaacaacaaattttcgggcttgtttgccggaactcatgagaaatgtgttgcttgcaagaaaactgtgtacccaaatgaaaaagtggctggtgatggcacttcatatcacaaagcttgtt

SEQ ID NO: 17392 - DNA, 486 bp, Gossypium hirsutum
  Clone ID: GOSHI-09MAY01-C12954_1
ccacgcgtccgaaccctagccgcccctttctcttaagagcaagcccgacaatgccgcccaagttcgacccgacccaagtcgtcgacgtattcgtccgcgtcaccggcggcgaagtcggcgcggctagttccttagccccgaagatcggtccgctgggtctttcccccaaaaagatcggtgaagacatcgccaaagaaacggccaaggaatggaaaggcctccgcatcaccgtcaagctcacggtgcagaaccgtcaggcgaaggtcacggtggtcccttccgcggcggcgctagtaatcaaggcgttgaaggaaccggagagggataggaagaagaccaagaacatcaagcacaacggtaacattagcctcgacgacgtcatcgagatcgctaaggtaatgagaccaaagtcaatggctaaggatatgaaaggtaccgttaaggagattctgggcacgtgtgtttcagttgggtgtaccgttgatg

SEQ ID NO: 17393 - DNA, 183 bp, Gossypium hirsutum
  Clone ID: GOSHI-09MAY01-C12964_1
agatgagctacctttatgcaaaagggtggatgacaaagggagataggatttggcagatggcttttaagagtggatgcgactgcaacacccggtatggaagttcaatccaaccatcaaaaaaccaacatatgggcctcgggaggattgcatccatagtttttccgcccatatccacaaaactca

SEQ ID NO: 17394 - DNA, 391 bp, Gossypium hirsutum
  Clone ID: GOSHI-09MAY01-C12904_1
taattttccctttcctttctctctttctattcaaccaaactatccctttctttctcctcgtaatcaccaattttctacatgctttggctgagaaattttttgggttgttcatttgtttcttttcttcttgtttgtttcctaataaaatgcaaaaataacttcaagaaaccatgtgtgttttcctatatttctagatttgaggatttgattaagttttgaccttctctcaccaaacccatatcggagttgaattgagttcttgaaagtgtttgaagaaagaagcagttgattttggacttctttttgttttcgtggtattttctttctgtcttccccttcgttttctaggcagccaaacggattgcttagagtaaataaaagggtgaaagtg

SEQ ID NO: 17395 - DNA, 493 bp, Gossypium hirsutum
  Clone ID: GOSHI-09MAY01-C12814_1
aaacttttaaagcttaaaactttctcagcttctccacttcccttctcaaccgaaaggctattattctggcctacaaccgccccccaagatctgactgcgacgaatggggcaagacccttcgacagtgtgaacgtgatataactccggtaagtctctcgttctctctatacctcgtatttctgtcgaaatagaaacagaataacagaataaaaaacaaaaaaaatcacctttggaggattcttggctggtctttattgattttaagttggctggtggtactaaaaaaccgaactcggttttcttggaaagaaaagggaaaaacccccctttagtacaatctcttctctccgaaatacaatcgattcctctctaaaatcccccctttcaaaatttttctcttttcggtttttataaccgattacaatcaccataaaaactcccattcctctgttggtgctgcttgttttgttggttgtgtttgcagggtatgagt

SEQ ID NO: 17396 - DNA, 360 bp, Gossypium hirsutum
  Clone ID: LIB3166-057-P1-K1-E7
gaccagaaacacaaccaacatgcatacatttatggagtcattagcagctcaagtggcggcgaggaaagcattgtgcctatatcctaaagtctgtgctacaaacgcttctgagagacggactcactctgatggctcttgtaacggcgacatttatgtctttggatgacgtcgcggaggctctcattctctctatagcctcgatgcttgtcgaaacagaaacagattggcagactctagaacacacaagatcacctccggagtctacttgcatgatctttattgattttagtttgcttgtggtactaaaaaacgtaactcgcttttcttgaaaagaaagtgaacaacctccctttagtacaa

SEQ ID NO: 17397 - DNA, 644 bp, Gossypium hirsutum
  Clone ID: GOSHI-09MAY01-C12594_4
attttgagtgtggcaaatttgcatgtttatgaaaatatggagaaattgatgtcgaaagcagagctttgcaaagaaatgagcacatcttccaccgtgcagcccagcgattgtggaaacggcgaggctccgatcaattattagctattggttttagtcttcttcccttcgctggctattttcttattctttcccctaaattgtcatctgtattttacccgttccaatgaacatgcaaatatcatatggagaaaggattaggttatgctttttctgatgtatatgggtttggagtttgatttctatctttttctattttcttcttcccagacaatcttggagaagattgccctgtgtttgaaaacttgtttgaattttgtcaaatttatactggtgggacaataggtaaattttgatatggtaggttgtttctcttaatttgatttgtgcattttcagttgtaattgattgtcatggttggcagatgctgcaagaagattaaacaatcagttatgtgatattgctataaattgggctggtggtttacattatgccaaaaagtgtgaggcattggcttttgttacatcaatgacttggttttgggaattttagagttttgaagtatcatgccgtttattatatattga

SEQ ID NO: 17398 - DNA, 519 bp, Gossypium hirsutum
  Clone ID: GOSHI-09MAY01-C12594_3
ccctcttcgtccgatctcctcccacttccactcatcatttagacgaaaatcttcttgggttttcataaaatgtatagaatactctttgtttttggatttttggtgtggcggatttacgtgtgctagaaattatggagaaatcgatgttgaaggcggagttgtccaaagaaatgtgcacgtctcccaccgtggagcccagcgattgtgggaacggcgagactccgtattaattatcaacgatttgttacaattcttggagaagacagccctgtgttcgaaaacttgtttgaattttgtcaaattttatgctggtgggacaataggtaaattttgatatggtgggttggcttctcttaatttgatttgtgcattttcagttgttatttgattgtcatggctggcagatgctgcaagaagattaaacaatcagttatgtgatattgctataaattgggctggtggtttacatcatgccaagaagtgtgaggcatctagcttttgttacatcaatgacttggt

SEQ ID NO: 17399 - DNA, 607 bp, Gossypium hirsutum
  Clone ID: GOSHI-09MAY01-C12594_2
gatacactatgtagtacacctgagaggcacgcaattatttctcctcttctcccccgccccgtcgctgcaactctcctcaggagctttaacaatggcggactctttgtagccaaagccttccagtttccctctcttccgctcttccttttcttttctcattagttgccaaaatgcgttccaaggacaaaatatcctacttttacgacggagatgtagggagcgtatactttggaaccctaatcactccaatgaaacctcaccggctttgtatgactcaccatttggtccttgcctatgacctccataaaaagatggaaatttatcgtccccacaaggcttaccccgttgaactcgctcagttccattcagctgattatgtcgagtttttgcatcgaattacgccagatacgcagcatttgttctcgaatgaattggccagatacaatcttggagaagactgccctgtgtttgaaaacttgtttgaattttgtcaaatttatgctggtgggacaatagatgctgcaagaagattaaacaatcagttatgtgatattgcaataaattgggctggtggtttacatcatgccaaggagtgtgaggcatctgg

SEQ ID NO: 17400 - DNA, 648 bp, Gossypium hirsutum
  Clone ID: AW536058.1
cactcatcatttagacgaaaatcttcttgggttttcataaaatgtatagaatactctttgtttttggatttttggtgtggcggatttacgtgtgctagaaaatatggagaaatcgatgttgaaggcggagttttccaaagaaatgtgcacgtctcccaccgtggagcccagcgattgtgggaacggcgagactccgattaattatcaacgattgttgttagtcttcttcccttcgctgtttattttcttattctttcccctctttgaaattctctatcaaaattgtcatctgtattttacccgttccaatgaacatgcaaatatcatgtggagaaaggattaggttatgctttttctgatgtatatgggtttggagtttgatttccatctttttctattttcttcttcccagacaatcttggagaagacagccctgtgtttgaaaacttgtttgaattttgtcaaatttatgctggtgggacaataggtaaattttgatatggtgggttgtttctcttaatttgatttgtgcattttcagttgtaattgattgcatggctggcagatgctgcaagaagattaaacaatcagttatgtgatattgctataaatgggctgggtggtttacatcatgcccaagaagtgtga

SEQ ID NO: 17401 - DNA, 538 bp, Gossypium hirsutum
  Clone ID: GOSHI-09MAY01-C12584_1
cccacgcgtccgcctttctctcttgtttttccacaagacctggtacttcattcattctcgcataggtcaaccatgtctgcaacgtcgtcgtattggtgttacagctgctcccttctgtttcgcatctcggcttcagataacgcaaccaacgaagccattgtatgcccctactgtgacggaggtttcatcgaggagattgagtcatccgatgatcatagccctcggtttccacctacctacatcatccccagcaaccgtcgagattcggatcggaaccggaaccccgtttctcgtcgaaatcgttggattcctattggccacttaaacatcaatccaataatcgtcctacgtggtacaaccggcgacgagagcaccaccgccaccgatggaaacaacaacaacagcagcgaatttgacttcttctatgacgacggttcggggtcgggtttaagatccataccgacctccatgtccgaatctctaatgggattgggtttcaatcggctattagcacatctttcccagatcgaaataactg

SEQ ID NO: 17402 - DNA, 731 bp, Gossypium hirsutum
  Clone ID: GOSHI-09MAY01-C12514_1
cggccgcgtggggaaaagatctggaggtttttatcggaaatcgaagatctccactggttaatggaccctgacgatttccttcgtctcaaaagccaattaatgataaaatcggtgaacgaaacggaagcgctttgtttcagatcgaaagggttagttgaaattaccaaaatgtccaaggaattaaaacataaggttccgtttattttgggcgtggaagtggaccctaaaggtggacccaggattcaagaagccgcgatgaaactgtacgcagagaagcaggagggtaataaggtgtttttggtacaagccttgcaagccatcgaaggagccttgaaacggttcttttatgggtacaagcaagtgctggtggtggttatggggagcttggaagctaaagggaaccgagtcgtgacgagttctgactcgggtgactcgttgagtcagatattcttggagcctacttatttccctagtttggatgcggccaagacgtttttgggcgagttttggagtcgtggacagggtgcatctgggttgactcggtggatgaagaagtgagttgcctcggcattctcattttgattttggaaggtttaaaattttaatttggtttaagagataaaacaaaaattaaaaaaaaaattaattattctttgtagtgttgatgtttgggagtcaattattgtgtatatcataaaaattttgtacaattaaaatggaaaattcaactt

SEQ ID NO: 17403 - DNA, 426 bp, Gossypium hirsutum
  unsure (1)..(426): unsure at all n locations
  Clone ID: LIB3197-045-Q1-M1-D6
ataaggtcccgttcatattgggtgtcgaggtggaccctaacggtgggccaaggattcaagaagcagctatgaggttgtactcggagcaaaaggagggcaataaggtctctctagtacaagcattgcaagccatcgaagcggccttgaaacggttcttttttgggtacaagcaagtgttgatgatcgttatggggagtttggaagcgaaagggaacagagtcgtggcgtgttccgactcgggtgactcgttgagtcagatattcttggagcctacttatttccccagtttggatgctgctaagacgtttttgggcgagttntggagtcgtgaacagggtgagtctcggtccaagaagtgatgatgactcggacccgtcggttggttaatcataaaaagaaaaaaaaaggggttaattattcttttta

SEQ ID NO: 17404 - DNA, 599 bp, Gossypium hirsutum
  Clone ID: GOSHI-09MAY01-C12534_1
gcgttcgctaaaacccatattttgcaacccatgtgtgttgtgaatctcttactaactatggatttagacgatgagagggttgcaaaaagaaggaaaaccatgcttgaagatgatcgtggtgttggacagcagacgacaactgagatggaaacccttccccatgaaatcatcgtcgacatactgtcaaggttgccgataacatctttggtgcaattcaagttcgtatgcaaaggatggcgtgctttagctcaagatcctctccttgctgatatgccaactttcctggaaagctccgaccactaatccatgcctcatccttcactgcgattttcccatccgaaaccagctctatttcgttgatttatcggttcacaatcacgataaggacagggtaaaaagattatatgtgcctttccagacatcgttgcctgaattcgatgtagttggaacatgcaatggtttattatgcttgtctgattcattatacaacgaggcactttatgtttacaaccctttcaccatggatttcatggagctgccaaagtctagacaatattcagatcaggaagtagtgttcgggttcggattccatcagaaaa

SEQ ID NO: 17405 - DNA, 615 bp, Gossypium hirsutum
  Clone ID: LIB3543-058-Q6-K6-C11
tttttattttcttttccgcagctgggggtggggggcaagtccaccatgtttatcttcaacctgatctccaaacccacaattttgtaacccccccctccatgtgttctctgaatctctcaaccatggatttggacgatgataaacgtgctaaaagaaggaaaacccagactgaagatgagggggagcatcatcatcatcatcaaccacagccaacagccatggaaacccttcccaacgaaatcatcgtcgacatactttcgaggttacccatcacatctttggtgcaattcaagttcgtatgcaaacgatggcgtgccttaactcaagaccctgttcttgccgatatgcatctttcatggaaagctgatggaaacgacccctgcctcatccttcactgtgattttcccatacgaaatcagctttatttcctggatttatcagctcacaaccaagacaaagacaaggtaaaaaggttatatgtaccttttcaagctaccatgcctgaatttgatgttgtaggttcctgtaatggtttattatgcttatctgactcgttatacaacgatgcactttatgttcacaatcctttcaccatggattgtatagagctaccaa

SEQ ID NO: 17406 - DNA, 1031 bp, Gossypium hirsutum
  Clone ID: GOSHI-09MAY01-C12404_2
agcagtgaagactggaagagcaaaagaaggaaggggaaaggaaatagtagaatgaatcataatcggcaatccaacgatgggaagcatgatgatgactctgctctctccgatttccttgcttctctcatggattacactcccactgtactcttttttctttttttcttcaaaagagggaattcctataattacgtttctgaacccttttttttttttttcaaaattcattgcagatacctgacgaactggtggaacattacttacccaagagtggttttcaatgtcccgatgttcgattgtaggtttttctctctccctttttttttttttaacttcccattacctttaatcctctgttaagctgcccagccggaaattttcaataaaggattttcttttatatataaaaattgcagttaatctttacagcttttattggtcttaatgacaaaaacctaatttcaattctgctttcctcgaataggggcatcttatccttcgtcaggatggttctagggttccggaataaggcttgtacctgttgctactcaaaagttcgccgcagaggttgcaaacgatgcacttcagcattgcaaggcaagacaggctgcagttgtgaaggacaaaagggagaagcagcaaaaggataaacgcctaatcttgacaatggacgacctctccaagtcattgcgtgaggtaggcattcctgtgacttgttcagatgttttaaaaaaaattggtcatgcctttttgtttttcgtcttcaacagctaaagagtattaatttctctcatcattttcgattgatatccagaaattatttgattttgtgttctttgaatgagcagtatggagtgaatgtgaagcagcaggagtattttgcggatagcccttcaacaggaatggaccctgctactagagatgaatagttggagttagaattatgttattactttgttgatgctgctggaaacctcctttatggccctttattacttgattgctcagcttaatagactcgattaacattt

SEQ ID NO: 17407 - DNA, 688 bp, Gossypium hirsutum
  Clone ID: GOSHI-09MAY01-C12404_1
caaaaaatcaaatttaagaaagctccattaaatgaatcttcttgccgggagaagaagaatcacgaagcagtttcccatattgataaaggcagtgaaggactggaagaagcaacagaggaaggggaaaggaaatagagaatgaatcataatcggcaatccaacgatgggaagcatgatgatgactctgctctctccgatttccttgcttctctcatggattacactcccactatacctgacgaactggtggaacattacttagccaagagtggttttcaatgtcccgatgttcgattaataaggcttgtagctgttgctactcaaaagttcgttgcagaggttgcaaacgatgcacttcagcattgcaaggcaagacaggctgcagttgtgaaggacaaaagggagaagcagcaaaaggataaacgcctaatcttgacaatggacgacctctccaagtcattgcgtgagtatggagtgaatgtgaagcagcaggagtattttgcggatagcccttcaacaggaatggaccctgctactagagatgaatagttggagttagaattatgttattactttgttgatgctgctggaaacctcctttatggccctttattacttgattgctcagcttaatagactcgattaacatttacattgctgtggctaataattttcccagtcaatgtgt

SEQ ID NO: 17408 - DNA, 477 bp, Gossypium hirsutum
  Clone ID: LIB3147-024-Q1-K1-G8
gaatgaaccacaacccgcaatctatcgatggtaagcacgatgatgactctgctcgctccgggttccttgcctctcttatggattatgctcccactatacctgacgaattggtggaacattacttagccaagagtggatttcaatgtcccgatgttcgattaataaggctcgttgctgttgccactcagaagttcgttgcggaagttgcaagtgatgcacttcagcattgcaaggcaaggcaagctgcagtcgtcaaagacaaaagggagaagcagcaaaaggataagcgcctaatcttgacgatggacgatctttcaaagtcattgcgcgagtatggggtgaatgtgaagcaccaggagtattttgctgacagcccgtcaaccggtatcgatcccgcttctagagaggaatagttgggccatgttatttacatgtttgtatttagttgatctacatttttttgcaaatctatgaaat

SEQ ID NO: 17409 - DNA, 1221 bp, Gossypium hirsutum
  Clone ID: GOSHI-09MAY01-C12774_1
ttatatttatattcatagagacatcaagcctgacaacctgctacttgataaaaatggtcatatgaaattatcagattttggattatgtaagccattagattgcagtaatctccaggaaaaggatttttccttggcaaagaatctcagtggggctcttcaaagtgatggacgacctgctccaccaaaacgcacacaacaagagcagttgcagcattggcagaggaacagaaggatgcttgcttattctacggttggtacacctgactatatcgctccagaggttttgctgaagaaaggatacggaatggaatgcgattggtggtctcttggtgctatcatgtatgaaatgcttgttggatatccacccttttattctgatgagccaatgtcgacctgtcggaagatagtgaattggagaacgcacttaaaatttcccgaagaagcaaaactatcccccgaagcgaaagaccttatcagtaaactcctatgtaatgttgagcaaaggcttggcacaaagggcgctaatgaaattaaggctcacccatggtttaaaggtattgaatgggacaaattgtatcaaatgaaagctgcatttattcctgaagtcaatgacgagttggacacgcaaaatttcgagaagtttgaggaggctgacaaccaaattccatctgccacaaaatcaggtccttggagaaagatgctttcatccaaggatgtaaactttgtcggttacacatacaagaactttgaaattgtagatgacaatcaattacctggcattgcggagttgaagaagaagagctcaaagcccaagagaccctccatcaaatccctttttgaggacgagtccgccgcagctgccagtcaacctgttcaagggagtttcataaacctcttgccgccgcaacatgaagccccagagaatcattatagaaaatgacctgactcactttagtggtatccatgggataatagctatcgccctggaaatccaaagataacaaagctttaatattatctggtaagtagcttttgttttttgccacagcttacctttcaagtttccattgaaaaagtttttaaacaaagtggtttgagatttatgagattggctcttgaatcagctaggagattgttcgtctgtaaaattatatatatatatatggaagtaaatattctttcaaaaaaaaaaaaaaaaaaaaaaaaaaaaaaaaaaaaaat

SEQ ID NO: 17410 - DNA, 388 bp, Gossypium hirsutum
  Clone ID: LIB3135-057-Q1-K1-D1
gcgattcacccatggtttaagggtattgaatgggacaagttatatcaaatgaaagctgcatttattcctgaagtcaatgatgagttggatacgcaaaatttcgagaagtttgaagaggttgacaaccaaattccatctgcagcaaaatcaggtccatggagaaagatgctttcatccaaagatataaactttatgggttacacatacaagaacgtcgaaattgtaaataataatcagttacccggcatcgctgaattgaagaagaagagctcaaaacccaagagaccttccatcaaatccctttttggtaagatattttcactattgttaagtttgggacactgcaagcaatgaatgttaatgttttgaaatcggtagcatatcaatc

SEQ ID NO: 17411 - DNA, 491 bp, Gossypium hirsutum
  Clone ID: GOSHI-09MAY01-C12714_1
agctatcttgtttcatcttcaatccgtcaagctcttgacaaccctttgaattatgcaaggatttatttagctgacttacttgaaacatgcatccaaaaagtgatctatttagattcagacaccattgttgtagatgacatccaagagctatggaacataaatctgactggttccagaacaattggggcacccgagtactgcaatgcaaactttgacaagtatttcacaagggatttctggtcaagcccaggattttcaaaggtatttgaaggcaaaagagcttgttatttcaacacaggtgtgatggttatggatttggggagatggagacaaggtgattacacaagggagattgagaaatggatgagagttcagaaagataaaaggatttatgaactgggttctctgccaccatttttgttggtttttggtggagatattgaagccatagatcataggtggaatcagcatggtcttggtggggataattt

SEQ ID NO: 17412 - DNA, 642 bp, Gossypium hirsutum
  Clone ID: GOSHI-09MAY01-C12704_1
ccgcgcgtttcttaaaaagaacaggcaaagctttcttggtattacgcaattagcaacaaatgtaaatcctgaaacttggccttccaagaaagtcctgcaactttataacaatgctgaggaaaacataaaaaagggcatgctgatgtgggaggaattacaagtgcaacgcctacgtgagctttccaaaccgaatgaggaacaaaatcaaataatgggattggatggtttattcaaagatatatcagcagacgaggttgcagagcaggctctcacaatgagtgctcagataaaccttttatggggtgccattctttacgaacgctcgatcatggaattcaaactagggttacctctttggcaagaatgtttggaagtggctgttgagaaatttgaacttgctggagcttcaactatggatatagccgttatggtaaagaaccattgctcaaataacaacgcaccggaaggtttagggtttacaattgatgagataatgcaggcatggaatgagacttacgaagccaaaaagtggcagagcagaattccttcattccgactagaaccattagttcaacggcaagtttcgaaaaattatcatgcatgagttgcttgctgtttcgaagtgagatttataatcccaag

SEQ ID NO: 17413 - DNA, 672 bp, Gossypium hirsutum
  Clone ID: GOSHI-09MAY01-C12144_1
cgtccgacattttttgcacagttaacaatgtttctgtgagattctgctgggctgacaagccagaggattttgctaaagttttcgtcttcaggccatggagcaacaggcccaactgaaagatgcactaaatgaagcattagctgctgaagtccagcgactgaagctcactgccgcagagttcagtggagaggttcatctttcgaactgtatggctcagcaactttcaattgatcatcaaatgctccaattacagcctcagcaacagcagcagctaaacatttatcagatgcagcagcaacaccaacctcagcagggtcacgataaccagtcacagacccagcaacaaaatggtgatgcttctgctgcaaatgaatccaagtgatgaccagcgaaattccagcttcagtttatgtgcagccatgtttatcatatccaactacattcaaaataacagtgatggtttaagaggtttctacataaattagatatatatattatttattctagtaaactttaaccattttttgttcattagatgccttgtctttgacaaggcattgaagggttgaagctaaactcaagctctgtttattcatttatggtagacacaaacaatctcaagcattgtctatatttgatggttatattatgcattctcagcttgtaaggagt

SEQ ID NO: 17414 - DNA, 1651 bp, Gossypium hirsutum
  Clone ID: GOSHI-09MAY01-C12164_1
gcagaaagagagactgtatctaagtttgttggtagtcaccctgtatcatattgtttatctaaaaaaactctttctaggacagtaatgagatcaggaattacaatgggtggtgtggtatacagcaaaggacttttatgttcacaggcactttctaggagaggatttgcatctgatgcaggccttcctcctcgccaagaaattggaatgccttcactctcacccacgatgactgagggaaacattgctaggtggttgaagaaagagggtgataaggtgtctcctggtgaagtgttgtgtgaagttgaaactgataaagcaacagtggagatggaatgcatggaagaaggttatcttgctaagattataaagggagatgggtcaaaagagatcaaagttggtgagataattgccatcactgttgaagaggagggggatattgcaaagttcaaggactacagtcctccagcatcagattctggtgctcctgctgcaaaagactcagcagctcctcccccgccaaagcaggagcctgttgaacagccagctagttcaccagagcctaagactcccaagcctacttcctctccttcagaagatcgcatttttgcaagtcctcttgcacgaaaattggctgaagatcacaaggtacctctctcaagtatcaaaggaacaggtcctgatggacacattgtaaaggctgatattgaagattatttggcttcacgtgggaaggaagtttcagcaccaactcctaagacaaaggatgcaaaacttgcagctttagattatgtggatatccctcattctcagataagaaaggtcacagcatcacgcttattattctcaaagcagactataccacattattatttaacagtggatacatgtgttgacaaacttatggatttgcggagccaactcaactcattacaggaagcttcaggtgggaagcgtatatctgtcaatgatcttgtaattaaggctgctgcattggctctccgaaaggttcctcagtgcaatagttcatggacagatgactatattcgccagtataacaatgtgaatattaatgtagctgtgcagacagagaatggactttacgtccctgttatcagggatgctgataagaaaggtttgtcctcaattgctgaggaggtcaagaatttggcacaaaaagccaaagagaacagcttaaaaccagaagattacgagggaggcacatttacagtgtctaacttgggagggcccttcggtattaagcaattctgtgccatcattaatcctccacagtctggaattttagctgttgggtctgctgagaagagggttatccctggctcgggtcctgaccaattcaagtttgcctcgttcatgtctgtaactctaagctgcgatcatcgagctattgatggtgcgattggtgctgaatggctgaaagctttcaaagggtacattgagaatccagagtcaatgttgctctaaatcaatggtgtttgcttctttaaactaaacacactttcttgctgtgatcaattttcgtgatggcttgaatccaatacatgtattcctgggcaatttccttcgggagtagtatcttcatgtgtaaaccaatttaaattttttggggaataagggggatcaggaattgagg

SEQ ID NO: 17415 - DNA, 633 bp, Gossypium hirsutum
  unsure (1)..(633): unsure at all n locations
  Clone ID: AI730744.1
atttagaacataatttattttcctcctttattttccttttttcttttccattgctttgaataaatttgctgtgatctttgaaaatcatggttacgcatctcgtatcatcaatcactctaaaaaattaaggaatgttcctaacttattgcggcaagatcatgctgttttggttcgttgcttttccaatggagcacaatcctctgtttgtaaaattgaagctgcagaaagaaagagggtatccaagtttgttgcatgtaaccatgtatcatctggtttacctaggaacaattgttctagggcaataatgaaattgggaattccaacagttggtgtggcatacagcaaagagctcacatgttctcaggtacagtcaaggagaggatttgcatcaaatgcagtttcaagcctccctcctcaccaagagatcggaatgccttcactctctcccacaatgacagaaggaaatattgctaaatggttgaaaaaaaaggtgataaagtgaatcctggcgaagtgctgtgcgaatttgaaactgataaancaaccgttgagatggaatgcatgggaaaaaggttaccttgccncaaattataagggagatggatccncagacctcaaagttggtgagatatt

SEQ ID NO: 17416 - DNA, 740 bp, Gossypium hirsutum
  Clone ID: GOSHI-09MAY01-C12034_1
ggtttctttctttcactagatctctcatggcttcctgcatcgctcccgttgccatctcaggtggttctcatcttcaggcaagtgaaatttgtttcgctaagtccagcacctttggcaaaataccaagtttggcagttcagaggaaaccaaaggcatctaatcatcggttttctgtttgtgcagagtaccgtgatggcactaagggtggaggaaacgattttgctgctggttttcttttaggaggtgctttatttggaactctgggatatatttttgcaccgcagattagaagatccctgttaaatgaagatgaatatggattccggaaggcaaagcgaccaatttactatgatggaggtctagagaaaacgaggcagaccctgaatgcaaaaatccgccaactcaattctgcgattgacaatgtatcctcgcgtttgagaggtggaaacaattcaccaagtgtgccggttgagacagaccctgaagtagaagctactatgtaagacatatttcaatgtgattagtcatgaagttccaagtttacagtgattgatggatttacctgttctgctatgaattctgaattccaagtgtttgagaattttatacgggattaatgcagttttgttatgtttttagtgttttctaacaaaaacataaaatacaacccaatagaaaaaaaaaaaaaaaaaaacaataaaagaataaaaaaaaaaagcaaaaaaacactaaatataagg

SEQ ID NO: 17417 - DNA, 360 bp, Gossypium hirsutum
  Clone ID: GOSHI-09MAY01-C12294_1
gccctaaactcggggcatcactggaatcgacgcaaactcaaggctaacaagtggatcatgtctgtcggcggccaacccatcaccaacaggaggatatccgatatgggaagtgccaagaacttcacgatccacagcactcttaaatggctaaactctcaactcccgaaacatcctcatctaaaagccttttatcggagcatctcccctaggcacttcctaaatggggactggaacagcggagggagctgtaacaacactattccaatgtccatcggtcaagaagtattacaagaagagtctactgatcaaagtgctgccaatgctgtgaggggtacaaggattgcacttctcgacataaca

SEQ ID NO: 17418 - DNA, 546 bp, Gossypium hirsutum
  Clone ID: GOSHI-09MAY01-C12244_1
cccacgcgtccggcaagttttagcttgcgaaaacttgatttccaatgatgtctgcaggctggaggttaaagataacaaatatgtgcttggagaatttctggaatttaaagggaagcaagaggacatcctagctttgagaaatatcaagagatcaaaagttagtcgccttgtcatccaaaagattagcatgtttggattagcccattcaaagcttcaggttttgtactctcctcgagattatcgaagtggaggagcttcggcttccgagtggaaagaagtaagcgtaagatcaagtacagaggtcatattccagcctcaaaattctaccaaagtctgcaaattcaagctttcttcgatcatgtctatgtcgctaagtgcctaagaatgcatccttggaatgaatcaaatttttgtgtggggattctttcaacaagtcctgaaagtgaatgtgaatattaaataaagagctagttgtacatttctgctataaaacatccaaaaactcaaaaaaaacccaaaaaaattactaagaaatattataagctg

SEQ ID NO: 17419 - DNA, 627 bp, Gossypium hirsutum
  Clone ID: GOSHI-09MAY01-C12274_2
aagacttttacctaactaattgtcctaacatatttcctcaaccaggatgtccattgttttctcgagcaacaaaagttatcaaagctctatcgggaccaaaatatgatggcaagttcttacataacgttgttagggacaggcgaggagaaacaaggttgcaccagacattaactaacgttgttatcccaacatttgatgtcatgcatctccagccagccattttttcaagctatcaggtgaagaaaaaacctactttggatgccttgctctcagacatatgcattgcaacctcagctgcaccaacatatccccctgcccattactttaaaatccaaaccgacaacggggacgtgagagaatataacctcattgatggtggtgtggcttgcaaataacccgactttagtggcaatgggggaagtgagcaaggagatcattaagggaaaccctgactttttccaacgaaacccatggattatggggaatttctggttatttcattggggactggctctaaaagacgaaaagagatcaatgctaacagtcgcgaatgggtatgtaggtggctaaccagcgtggtcacgccgttgtggagttttactaagctatgagactgtaacttacctt

SEQ ID NO: 17420 - DNA, 767 bp, Gossypium hirsutum
  Clone ID: GOSHI-09MAY01-C12274_1
gttatcaagtcttcccctttatagcacacaactactatcacaaataccatttagattctatatatatagatagatatatagatatggagggtgcaaaggaacaattacaagctcctacatatggagatttaatcaccatacttagcattgatggtggtggaataagagggatcatccctggaaccatacttggtttcttagaatctcaacttcaggaactggacggtgaagatgcaagactagcagattacttcgatgtgatagcagggaccagcaccggcggcttggtgacagccatgctaacttgtccgaacgaaaagaatcgaccattatttgctgccaaagacatcaaagacttctacctaactaattgtcctaacatatttcctcaaccaggatgtccattgttttctcgaacaacaaaagttatcaaagctctatcgggaccaaaatatgatggcaagttcttacataaagttgttagagacaggctaggagaaacaaggttgcaccagacattaactaacgttgttatcccaacatttgatgtcatgcatctccagccagccattttttcaagctatcaggtgaagaaaaaacctaatttggatgccttgctctcagacatatgcattgcaacctcagctgcaccaacatatcccccagcttagactagcttgaacctagtgacaactattccagccatactaaatcaaacgcattgggactaagattactattgatgtgtgtgataaccactatgcagg

SEQ ID NO: 17421 - DNA, 818 bp, Gossypium hirsutum
  Clone ID: GOSHI-09MAY01-C13954_1
acattgaaaaccataaacatacttgacgcaaaatgagacattaaaacatagcagaatgttagatacaggattaaatataaactatgagagctcctttttctgaaagtaggcaaccacattcctctgcaacagattatcagcaaatcctacttgaaaaccatgttcattagcgtaattcagcgcagctacccactttttcaatgtaccccaatccaaatcctcaagtgacatatcttccatctctttaattacagcacagaccagaatttgtattccagtatgaaaaaactccgtagcttttccacgagcatcttctattcggatcccaatagatttgaggtagtctggaacttccccccaggcagtgtttgctaatgcatcttctaagccttgaaaatctttgtactccacttcgttgttgtcattgtcgtaaagttggtttatgaaatgaacaaatttagactcaaaagacttgcaacttccacgatcttgagcaggagcacacgccaaagaaaactcattttgctcagttggtaaactcgcatttcccgaatcctcagatagttgtaggtctaatttttcgcatagcaaattttgctttaactcatatgtttcaaggaactttttcatcatttcattttctgccaaatggccatccttgaacttgccatcgttagtcttgatattttgggtattgactaggggtaatgtcttcaccctatgatataaccataatatagatttcatatctgcctcctggtcggtcattttctgtctgtacatcctgtccatgagagtttcgatccgttccgatacag

SEQ ID NO: 17422 - DNA, 589 bp, Gossypium hirsutum
  Clone ID: GOSHI-09MAY01-C13944_1
catcacttttcaactctcaaaccttcaagtctcatttctttctctttctctttctctcactagagaatccaagtttctgtttggccaaagagaaaataattaatgatggtgggaaaagatcaagatctgggtttaagtctaagcttgagttattctcaaaatcatcattcgcttcagttaaatctaggcccatctctcgttccatcttctgctaatcaatgctactctccttctgatccaaacatggaatctttacgggcagagactagatcatttcttaaagggatcgacgttaacaggctgccatccacggtcgattgtgaagaagaagccggagtttcatctccgaacagcaccatatcgagtagcctgagtgggaaaaggagcgaaagagaaggtaataacaatggcgacgagctcgagatcgaaagagcttcttctcatggcatcagtgacgaagaagacggtgatacttcgaggaaaaaacttagactttctaaagatcaatctgcaatcctcgaaaaatgttttaaaaaacacaacactcttaacccaaagcaaaaagttggttttggctaaaccactgggg

SEQ ID NO: 17423 - DNA, 661 bp, Gossypium hirsutum
  Clone ID: GOSHI-09MAY01-C13914_1
caagaacataaccaattctctgttttttcttcccttttttttttcaaaaacaatttagtaaaacatacacaaatattctctcttttttgcagttttttctttaaaaaaaacagtttcaaggattgtttttgtgttgtttctctcccatgatcacaaaaatggcttgatttgcggttgatcctgcaaataatcgcatttcgttctcttttttaacagagattcattaatcaataaataaccatcagttttataaataaaaaaacgttataacgaggccttgcttttctttgttttacaaacccctttagccttacctcaagcttcatcccctttatatttctttgaaattttttcattaaaaatcctaacaaaagcatgggtaattctgggtttctagcaacattattattaccgacattcctttgtgttcatctctttggtgggtttgttgatggtcttggtgtgaattggggcacaatggcaacccataaattacctccagaaacagtggttcagatgttgaaagacaatgggattaaaaaagtgaagcttttcgatgcagattcaaagactatggatgctctttcagggagtgatcttgaagtaatggttggcattccaaacgatcagcttcttgctatgaaaagctatgatcgtgctt

SEQ ID NO: 17424 - DNA, 424 bp, Gossypium hirsutum
  Clone ID: LIB3189-018-P1-K1-F7
cccacgcgtccgatttatatatcttgtgttctctagtattggtaggactggttttttggtgttttaattaactgtcctgaaccttctttctctatcacttaagcagtatcttggagtctgaactaatgtagtttcaagtttgatgtttcagtacccaccaaagattttgtgatgtaagctggttgttttaggttgctttccgttccccctttagatcttatagttggctccttgttgcttgtctcccaaattaatttttcatggagccactccagtgtttctttttagttattgtgtttcccttttttctaagaatgctgattcatctgaaactatcttgtgggttttatagcaatgttcgggggaaagagtgacttgggcaaatggacatgatgttgatgttgtggctgttgatgctgtttga

SEQ ID NO: 17425 - DNA, 302 bp, Gossypium hirsutum
  unsure (1)..(302): unsure at all n locations
  Clone ID: LIB3189-018-P1-K1-F2
cccggtcgaccacgcgtccttttatctattattntattttatatttttagtttttaatatattttggaactggttattgggggtttgaataaactatcctaaaccttggggcttattaactaaagatgacattttggtatcttgaactatttaattttataatattttatgtttagtacccaccaaagattatgtgatgtaagctggttgtttaggttgctttccgttccccctttagatcttatagttggctccttgttgcttgtctcccaaattaatatttcatgtagccactccagtgt

SEQ ID NO: 17426 - DNA, 660 bp, Gossypium hirsutum
  Clone ID: GOSHI-09MAY01-C13844_2
ttttcttccaatgttaaaggagttgtttataggcataactgaagttccagttatatgtgcaggggaagtctctttgtgggttttggctgcaatgaaagatgttggacttgggttcttaattggagtcggctttgctgctttcagcttcgtttttgccttgggaactatagtaggagcaatgaaaggccaaacgactgaaactgggtcgttcagtgggactggacttggcgctgttgcaggtgcaaccacagaccttcaattgcttgaatcattggctgatggggagttattatcacagatcactgtattagttaggttagtgagtgagaacgtcttcattgcatgggtgaattcagcaatgctaaaagcttttcaatgggaaatggagcaaagggtttgtcaagaagtcggattcaaaagcttccaatgcatgaaattcaagctagtcctatgtttcagtcttgttgttcaatttgcttacagggcctataacatggtgaaagggcaagaaaccttccgagatgtaagcatatgtttcacttaaattgcatagatgaatggctgagcagggtaggcacctgtccaatgtgcagagaccatgttttttagatttgtaaatcacctaactttgatttatgaacagaaacatatatatatata

SEQ ID NO: 17427 - DNA, 768 bp, Gossypium hirsutum
  Clone ID: GOSHI-09MAY01-C13844_1
cccacgcgtccgatttcaaataattttcttccaatgttaaaggagttgtttataggcataactgaggttccatttagatgtgcagaagaagtctctttgtgggttttggctgcaatgaaagatgttggaattgggttcttaattgaagtcggctttgctgctttcagcttcgtttttgccttggaaactatagtaggagcaatgaaaggccaaacgactgaaactggattgttcaatggggctggacttggtgctgttgcaggtgcaatcacagccgttcaattgcttgaatcattggctgatggggagttattatcacaggtagctttattagttaggttagtgagtcagaaggtcttcattgcacgggtgaattcagcaatgctaaaagcttttcaatgggaaatgaacatatttgaatcaacatatacagagatctcaaacatttgtgatgtagatggagcaaagggtttgtcaagaagttggattcaaaagcttccaatgcatgaaattcaagctagtcccatgtttcagtcttcttgttcaatttgcttacagggtctaaaacatggtgaaatggcaagaaatcttccgagatgtgagcatatgtttcacttaaattgcttagatgaatggctgagcagggtaggcacctgtccaatgtgcagagaccatgttttttagatttggaaatcttcaaactttgatttatgaccagaaacatatatatatatatcaatggggattgggtttttaaattgatttcat

SEQ ID NO: 17428 - DNA, 397 bp, Gossypium hirsutum
  Clone ID: GOSHI-09MAY01-C13864_2
ctcttgccgtttggcttttatagaactggcggacaattatcatgtggtgggtaaagcttcaaatactggagagtttgcagctcttatattattacatcactaacatgaatgcgagagcaaataaatacagagagcaacatatgaagaaacaaaccttcatttcacacttcatagtggcattttctgaaacacaacatataaaaaccaaaatcattttcaccagccatgactgccaataggcaacctccaatcttctccaccgtggccaccagcggtatccgggctacatccacctagacgcctagacggtatgcgagcaccgttactcttttggccagggctccttggtgcctggtagactgttgttcctccacctgaacttgatgaatcacaacct

SEQ ID NO: 17429 - DNA, 487 bp, Gossypium hirsutum
  unsure (1)..(487): unsure at all n locations
  Clone ID: LIB3189-018-P1-K1-D1
cgaatcccggtcgccacgcgtcggccgcctttttttttttttttgaagaaaagttttttatactgagagttngcagntnttatattattacatcactaacatgaatgcgagagcaaataaattcagagagcaacatatgaagaaacanaccttcatttcacaacttatagtggcattttctgaaacacaacatataaaaaccaaaatcattttcaccagccatgactgccaataggcaaccttcaatcttttcaaccgggccaccagcggtatccgggctacatccacctagacgcctagacggatgcgagcaccgttactcttttggccagggctccttggtgcctggtagactgttgttcctccacctgaacttgatgaatcacaacctggggaattttttgttgatgggttccattgggggtgcatgtggtacacgttgctgcttcataatcataggtccttggcttcgaaccttggctttggc

SEQ ID NO: 17430 - DNA, 672 bp, Gossypium hirsutum
  Clone ID: GOSHI-09MAY01-C13594_1
tttcgaaagccttttgccatcataaaaacaccctgtcgaaacctctccaactcacccaaggaaaccgaagcattacgaggagaacacaaaagaacaggagaaacattacgatccctcctaattccaataatgcctgccactaaatgttgcatcgttttcatctgtctcctcttgatgttttcttcttcttgggatgttgcaatgggtggtcggtacatcccatcgagtgttccgagcacaatgaggcctgcatccgtggattacgtgaagatgaaccctcaagtgctactgaatcacaagcacaaggtttcccatgagaaggaagtaaagggttgcatgccaaaagggtttcgccgttcatcagctccaagccgctatgttaactatcaaactcttggttcttcttgtgctacaaaagcgcactgagctgatcagaagcctttatcatgccatatacttttgtctgattttaagagaactatgtatgtataaataagagttcgacttgcatcattattattattaatttttgaggggacataatgcttgtgaggggggggggggaggcataatgcctaagtgtttgagcatatatgtacgttgccaacatatatatatttttggctgtcctagttttctgcttaaagtaaatattggagtgagcttatatgt

SEQ ID NO: 17431 - DNA, 1039 bp, Gossypium hirsutum
  Clone ID: GOSHI-09MAY01-C13584_1
cccagactcactttgttgtcgtgtgtatatacagatatacattatagaagcaaaagagcccatctctatatagactacctcaggatctgcaacatcggtacccaaggtactgactttcgctctgaattcctctgggtcaggaatttggagagtgatcactactgaatcaaaatcaaactttggggggaaatggagttttccaagatttttacgatttgtttttctgtattgctgttgtactcctccttggcctatggtcaagcaaggagccctcctccggtcgcaatgagcccaactccagcaccagccccagcaccggcaccggcatatgtaaacctcacttatttactctcagtggctggtccatttcacactttccttgactaccttgagtccactaaagtgattgacacctttcaaaaccaagccaacaacactgatcaagggattacagtttttgtaccaaaagacagtgccttcaaggatcttaggaagccttcattttccaatctcagtgatgaccagcttaaatcacttatcctttaccatgccttgcccagattttacacacttgcagacttcaatgaactcagtacaaagggctccataagtacccttgctggtggcgaatacactttgaatttcaccgatgattccggaaccgttcacgtgggtggtggatggagtaaaacaaaagttacaagcgctgtacattcaaccgatccggccgcaatctatcaagttgataaggtccttcttcctgaggcaatcttcggtaccgacattgctgcaactcctgctccatccccagccccagtccctgatgttagtcctgcagcggattctccatcagcagaatccaaagaacgtggttcttcaccaaagtctgctccttcaacttcatcatgtaacagtctcatgaacttgtgcatttggaggcaatttgttttggccgtctcagctggggttgtcctgtttttctaaagataaaagacttcatcgagtctaatttatattcatgggagcctcacgtatctgg

SEQ ID NO: 17432 - DNA, 384 bp, Gossypium hirsutum
  Clone ID: LIB3145-042-Q1-K1-E9
cgaattcccggtcaccacgcgtccgatgcacctaactatgacgaattcgattgaatggtcgattgattatggcaggaatttagtgatcactactgaatcaaaatcaaactttggggggaaatggagttgtccaagatttttacgatatgttgttctgtattgctcttgtgctcctcgctggcctatggtcaagcaaggagccctcctgctccggtcgcaatgagcccaacttcaacaccagtcccagcaccggcaccgtcatatgtaaacctcacttatttactctaagtggctgatgcatttacactttccttgactaccttgagtccactaaagtgattgacaccttttaaaaccaagccaacaacactgatcaagggatta

SEQ ID NO: 17433 - DNA, 350 bp, Gossypium hirsutum
  Clone ID: LIB3189-013-P1-K1-A11
cagatatacattatagaagcaaaaaagccaatcttgtatagactagctcagttattcctatgtgcaacattggtacccaagggctgactttgctctgaattccttgggtcaggaattagtgatcactactgaatcaaaatcaaactttggggggaaatggagttttccaagattttacgatatgttttctgattgctcttggctcctcgtggctaggtcaagcaagggccctcctgctccggtcgcaatgagcccaactcacaccagccccagcaccggcaccgcatatgtaacctacttattactctagggctggccattcacactttcttgctaccttgatccactaa

SEQ ID NO: 17434 - DNA, 1157 bp, Gossypium hirsutum
  Clone ID: GOSHI-09MAY01-C13494_1
tccggaattcccgggtcgacgccaacgcccgtccgtgttttaatgtcataaacaatatcgatctcccgggtcgttatttaccatgtggctggtcgacccaatattaccaccgagggatgcgtgttttttacccggatagtgatagaaaccaaatgcttctgcgattcttgagtatttagagggaaataccgaccgactgtcatctcctttctttcctgaaaaacttccttcgtataccgactatgattctgcaacacaattcaggaagcgtctgaaaagcttggcaagcaaagaacatcctatagatgttccgagaaacgtaactacccaaatgtacataacagcttccatggataaaattgttcacaacttttctgcgtatatggactatactcttctttcaagcttaaacaatataagctgggtgaacccctcaacagatgtgcttcaagcttattacaggaacttgagtggattctataccttggattttctggatgagcctccctattacttcgactttgtcgccgatttgagagatgatagtacgcatccattgaaggggacgaaggtgaaagttttggaatacagtgaagaggttgagatagtgtttcagtcaacaaatctgttgaacgcatcggatgagcattctatgtatatacacgggcataaattttacgtactcggagagggttatgggaatttcaacagtacaagagatacggaaacctataatctagttgatccaccttacctcagcactgcttcactccctgtgaaaggatggctgacgatcagatttaaagctaacaatcctggagtgtgggcaatgcactgccaggaaggtagacatttgatttggggaatgaacactgttctgatagtgaagaatggcagcaatccggaaacaagcattcgtactccccctcctaacatgccttcttgtgcaagttatccttccattcacaaagctttggaagtttcggctgaataaaccagaacaaagttagctttgtgcatgaaaaagatcgacaatgtgaatgtggtaaacatcgatggttcgtgaatctttaaagagttcctcggtttataccggtgttttcttgatgtttatttgctgggataggttcctaaatatatatggtttagttaagctg

SEQ ID NO: 17435 - DNA, 479 bp, Gossypium hirsutum
  Clone ID: GOSHI-09MAY01-C13404_1
taattctaacaacaaaggtcatcattatgtgataaaaatcaaagccaagcttcatacaaatacgaattaggaccagtttcatcaatcatgtcttgtgttctttctttttctttttccttttttaagaaaaaaaaaagggaaatttattaatttatcatcatcatcatcgtgggcaaggacataaagcagtacacgggagatcatcagcgtcatccaacggtggaaaattgagatcaaaaggcaacattctccgacgtgaagatgatgcgataaccccatcatcaacgaccgacgacgacgaatcgcagtcgctgtgacaatcctccggcgccaaaggcggcgtcctcggacgattcttcctggtcgaaaccgccgcgaaatccgtcgacttctgtggcggtagttgagccggtctcggcccactaaaagattccaccgtgctactcatgctacttcttgtcggtctttgcgggttcact

SEQ ID NO: 17436 - DNA, 491 bp, Gossypium hirsutum
  unsure (1)..(491): unsure at all n locations
  Clone ID: uC-gsflmaxxa046h03b1
cccacgtgtccgcccacgcgtccgcccacgcgtccgcccacgcgtccgcccacgcgtccgcccacgcgtccgctcaaaatttgcccccaaattctttttccttttcatttcactgcaatgaattcacccacatagctactccttttctctcgatctgttagggatttagagaaacaaatggaagtcgaagagaaggagaacgaggaagaagaagaagaggaagagaagaggggggaggaggaagaaaaagagagtgaagatgaagggactaaaaaggtcaaaggtagtagtagaaaggggagttctaggaaatctggtcgagattcggctgagaagaaagagccagtgacgcctagcagtgatagacctacaagggagaggaaagtcgtagaaaggtattcagctccttctgttgcaggtcttccctcgttaaaactgtcaattgaaaaggtatgctctcttttctggngtaaggcatgggttcatcgact

SEQ ID NO: 17437 - DNA, 591 bp, Gossypium hirsutum
  Clone ID: LIB3543-060-Q6-K6-E10
ccccgcgtccgagacgaggaagaagagaagaagaagatgagaagagaagagggaggaggaagaagaagagagtgaagatgaagggactaaaaaggtcaaaggtagtagtcgaaaggggagttctaggaaatctggtcgagattcggctgagaagaaagagccagtgacgcctagtagtgataggcctacaagggaaaggaaagtcgtagaaaggtattcagctccttctgttgcaaggtattcctcgtctaaaactctgtcaagaatatctagtgaaggtctatatgggagagatgggaagaggtacaaaccgtatcttgtacgggttgggaatgcaaaaacagttcatccaaattcactacctttctatattgatacacttgttgatcatcggttggcagaagagaaaatgcatacaaatgatgctagaaatgatttaagtatggaggcatcttctacagtactgcgttctaatctagagaaggtagtcgaaaacatcagattctgcgaaaccaagcgtgcaaacataagggatggcaattcaagcataaagaaaacatcaaaaggatctaataaggaaatggatgtaaa

SEQ ID NO: 17438 - DNA, 371 bp, Gossypium hirsutum
  Clone ID: LIB3148-021-Q1-K1-F2
cccacgcgtccgcgatctgttagggttttggagaaacaaatagatattgaagagaatgagaacgaggaagaagaaaaagaagaagaggaagagaagacgggggaggaggaagaagaagagagtgaagatgaagggactaaaaatgtcaaaggtagtagtagaaaggggagttctaggaaatctggtcgagattcggctgagaagaaagaacacaagacatgattgatgaaactggtcctaattcgtatttgtatgaagcttggctttgatttttatcacataatgatgaactttgttgttagaaaaagaaaggagaactgaaaccggttgtgtacatataaatacttaagaagtgaaacaaaataatgttt

SEQ ID NO: 17439 - DNA, 763 bp, Gossypium hirsutum
  Clone ID: GOSHI-09MAY01-C13424_1
ccacgcgtccggtgagttgaagaagaacaaaataatgagctgcaatggctgccgagttttacgaaaaggatgcagcgagacatgtgtgttacggtcgagtttacggtggattgaatcggctgaagctcaaggcaacgctaccttgtttctcgctaagttttttggccggagtgatctcctttcgcttatctcctccgtccctgaatctcaacgtcccgctttgtttcagtctttattgtttgaggcatgtggacgaactgtgaatccggtgaacggagcggtggggttgttatcgagtggtaactggcatatctgtcaagcggcagtggaaacggttcttcagggcggagctttacgaccaatttcggctggatcctggacaccgagttgtgacgagtcatcagatcgtttctgtgttaactcgtgcaactttgaatcgaagccgttaacgacgacgatgatgatgacggggaatcaatcggttttgacggcgccgtccgatcttagcttgtctgtgacggctaagttgggcggagaaatgagaactaaaacggtgtcgttttattcagaagaatcggagattaccactcttggaagcaatggaaatgaagaaacccaagacacaaaaattttgaatctctttgtttaagaaaaataattacttttttttataaaaaaaattatctattttttaatatatatatatatataaactgcccatgtagtccatacttaataatgaagaaaataatattattagcat

SEQ ID NO: 17440 - DNA, 403 bp, Gossypium hirsutum
  Clone ID: GOSHI-09MAY01-C13754_3
ttcttccatccagcaaatcttcaattaaattggatccatacaattggcatataaagagatggagaatggaggagtagagaacgcccacgcccacggcgacggcaacggcaatgggcaggcggcgtcgtatacttattgggtgagagaaacgacggcggacgctgctccgctccctgttcctaagaagctcactgctcaagacatcctttcaactcaatctcagtctacatctattgtttctgtttggaataaggctggaacttgggaggagaaaaaccttaataactgggctactcaaagattaaaggaattgcttaaatctgtgggttcattggatttatcttgtggcaaggctgaaatttctgatgtaaccaagtgtgttggcgatgcttttttggtgact

SEQ ID NO: 17441 - DNA, 808 bp, Gossypium hirsutum
  Clone ID: GOSHI-09MAY01-C13754_1
gaaaagaaggtgaaaagcatgaggaagaatctaggtttcaacttcaaaagccataatattggaagaagcttccagaaaatccttatttgattgaattttaaataataaataaatcttcccttcttctccattctcccattcatccttccatccagcaaattttcaattaaattcggcgaggagttgattggatccataccattagcatataaagagatggagaacggaggagtagagaacgcccacggcgacggcaacggcaatgggcaggctgcgtcgtatacttattgggtaagagaaacgacggcggacgctgctccgctccctgttcctaagaaactcactgctcaagacatcctttcaactcaatctcagcctacatctcttggttctgtttggaataaggctggaacttgggaggagaaaaaccttaataactgggctactcaaagattaaaggaattgcttaaatctgtgggttcattggatttatcttgtggcaaggctgaaatttctgatgtaaccaagtgtgttggcgatgcttttttggtgactgtacgaaacaagaagcgtgttggctatacgtatgagttgacattaaaaatcaagggggagtggcatctacgggaggagaagaagacggttaagggccatattgatatcccagaattttcatttggcgagctcgacgacttgcagatggcagtacagcttagcgaagaaaaggatttcgtgcagcaagacaagcagcagattatccaggacttgaagaagcggtttttgcagcccgtccgggagaaattgcttc

SEQ ID NO: 17442 - DNA, 440 bp, Gossypium hirsutum
  Clone ID: LIB3189-016-P1-K1-D10
tcaattttcccctcattctttttcgtgagagggagaacccaaagattttgtctgccgtttcttttttttttttgtgatattgaaatcctctaaatcacataaaaaaagaaattggggcaatatattggatccataccattaacatataaagagatggagaatggaggagtagagaacgcccaagcccacgcccatggcgacggcaacggcaatgggcaggcggcgtcgtatacttattgggtgagagaaacgatggcgggcgctactccgctccctgttcctaagaagctcactgctcaagacatcctttcaactcaatctcagtctacatctcttggttctgtttggaataaggctggaacttgggcttcattggatttatcttggggcaaggcatcaagtgtgttggtgatgcctttttgggcgactgtacgaaacaa

SEQ ID NO: 17443 - DNA, 636 bp, Gossypium hirsutum
  Clone ID: GOSHI-09MAY01-C13744_1
cggccgcgtcgacctgaaactctcactgaaaaccgggggagaaaaaataaaaataaaaatttaaaaaaacaaaaaaaaaagagagtacttggcagtgcagtcatttagtctaaagggaaacgactgagattgcccagattcaaagctttttcccccaaaatatcgaatgcaacttcgattttcttcttcatcaaaatttcaatctttattttttgttttgcttttttttttccattgatgggttgctagatttttattaacctcacataaatactctatctttatccggacccaaatctttacaatcttttttttttttttcacatataatctttagttttatttgtttttttctttcggggggatgatggcatcttcatcactggcaagtcctttaatgcacttggctggtggcggcttgtatgtcggtaacgtacggtaaagaccagtcccggtctccattgttcaactcatcagcctccgcttcttcgaacaggctcggccgttgggctcgtaataaaaggaaggctctcctttctcaatgctgtggtggcggcgcaacccctaacaaagacgtgggcttgatttcttccttccgtggatccaccattcaaggcttgatggcttcttgcttgc

SEQ ID NO: 17444 - DNA, 489 bp, Gossypium hirsutum
  Clone ID: GOSHI-09MAY01-C13774_1
gtggaactgagggggataaagggtagaaagatttgaacaaagagaatgaaaagaagaaaatttacaacagagatgaactagaagatgtaagcattgatgggtcagctttgaattatgattcagatgagttcactgagaataacaaagttgaggaagctcttaaaaatggtgggaacacctcaaatgcaaacagtacagttactggaggagatcaaaagggtaaaaggaaaggtcttcctgctaaaaacttaatggccgagaggcgccgtctaaagaaactcaatgataggctttacatgttgcggtcagttgttccaaagattagcaaaatggatagagcatctattcttggggatgccattgagtacctggaggaactactgcaaaggatcaatgatcttcataacgtatcggcgtccaaccctggttgctctgtggtaacacatactaacattttcatacattatctttcaagtctgtttccttgcc

SEQ ID NO: 17445 - DNA, 1542 bp, Gossypium hirsutum
  Clone ID: GOSHI-09MAY01-C13704_1
gtcgacccagcgtttttccacgcgtccgacagaggggcggggggggggagcgagtggtagcgtcaacggggacggtttcgaccgtcctcggggaaagattacgttaggtcaagcccatggcgagacccggctgcagtggcaccggcgaaatcggtgttggcgacggaagaagcggaacagtttttatgctcaatgcggggggaagagtgtgaacttagcatggctgttgttagagatgttttgtgtcagtgtgggtacaatgttgagaaggctttggatgcattacttgatttatctgcttcctcctatgaaaaatccaagagttttaatgacaaattgaacagtagacaagatacaggattcgtaattgaatgtgcagacaatttaacagataggacatctgaccgcatatctaagttgttggaaagcgaacttcaagatagtatatggtcagccggatatggtcacaggaattactctaaggttcttgctagttctgaagctatgcaaccaccttgcccaaggagtaatgtttcgaatctccctcaggaggtcctggattctttatttaaaatccccaagagttctgagcatgaaccaagcactatgagttggaggaatgtagtaaagaagatgcagttgttgggaccacctattgatttttgtccatctactgatgcagaacctcagcaggatctctatgctaagggagatgaatatcacaaatttagagagagtgccagagaacattgggattccatgagatcttattatcagaaggctgctactgcatattcaaagggagagttggagtatgcagcttatctttctgatcagggaaagatacagactaaattggcacgggaagcagatgaaagggcaagccagaatatatttaaagctaggaacaaagcctttgaaaatgtgataacaattgatttgcatgggcaacatgtcaaacaagcaatgaaacttttaaaactacaccttctatttggaatacatgttccttcggttcaaactctgagggttattactggctgtggaacacatggtatggggaagtcaaaactgaaacagtcggtcactaagcttcttgaaaaggaaggcattcagtggcgtgaagaaaaccgtggaactgtactaatcaagcttggcggatacagagagttcagctttttagaatccaatagtgacacggagtaaattaattatctaataccaggtttgcatcatttaccatctgtttgtacaagacaaggatgtaatgtaacaaggttaattagtggttcaaaaacagggatcagatgtttatatgtacattactagaaatccttgtactctttcctccttaggtaggtggaagcttcatgaagatgaagctttccgtgttcctgtatgttgagtttagcaaaatcatgtatctgactcaattattggtaatgacaaagactcatgagagactgtaaattccgtagttttcaactcatatttgtaggataattttatgtcttaattttttttggtttttatttgatctat

SEQ ID NO: 17446 - DNA, 525 bp, Gossypium hirsutum
  Clone ID: LIB3543-021-Q1-K1-F7
ggagagttggagtacgcggcttatctttctgatcaggtgtgttttctacttgggggatgttatgaatcatgtgctgcatataagttcaagatgtgatgccatgtcattggcaaattttgaaaaggaaacactggcaacaaaaatgaagcaacatgagaactggggataatatcccataattttttacttgtcttcttttctgcttgacatcaatatgatgtcttatgtcaaaactcgtgccaagggttggctttaaaataaaattctgacttgataataccttgcatctgagtaggaaaatatacaaactaaattggcacgggaagcagatgaaagggcaagccaaaatatatttaaagctaggttagtccttgtataactaactgaaagggcagactataaattcttatcaacaaagatagagttgttgcattcttttactttcattagaaactcggtttggtatagagcatctttcctactgtaggtaacctatttatttgacaagatggaagaatgtttggg

SEQ ID NO: 17447 - DNA, 626 bp, Gossypium hirsutum
  unsure (1)..(626): unsure at all n locations
  Clone ID: LIB3827-001-Q1-K6-E2
catcctcctcctcctccacctcctcttcttcgaattagggtttcacgatccccagatatgaagcgaactgctacgaagaagaataggcggcctcgtgcgacgaaaacgccggcggtcaacgattcgtcacgtcatgcgttaagtcagcgggatcagcggcgagaaggagaaggagaagacgatgaagaacaaaaaaggcttctcggctcgttaatggaagccttcggttcgatctctctagaagaagccacgtcagcttataaccaagccgacggtgatttggacaaagcggccgagattctatccaatttgatcgatnacggtnacaatagtgaagatcccgatccgtcaacgagctcgatatcgagtggctcgtcatcgncaggttcttccgggttcggtttttccgaaacgagttgcttacaaaatctgaatagcggaaggggacgtagcagatggggaaaacagcagaagcgagtggtagcgtcaacggtgacggtttcaaccgtcctcgggaaagaattcgttaggtcaagcccatggcgagaccgcgctgcagtggcaccggcgaaatcggtgttggcgacggaagaagccgcacagtttttatgctcaatgcttgggga

SEQ ID NO: 17448 - DNA, 557 bp, Gossypium hirsutum
  Clone ID: LIB3825-018-Q1-N6-B6
gaacaagaaatattgttggatgaataggttaatacaaggaattattgtaagacaaagccatgaaccataatccacgttacagatacgctaattcatctattctataaaatgctaaacaaatcaactcaagccagcaacaaaatcgaagatagaacaactagggtgtcactggaaactccccaactttaagtatcaaaacaataataaaatagatttcccaacttctcaaaatctggcactgctgcgccattctgcaacacttcaagcaaaacaatccccaaccattcttccatcttgtcaaacaaataggttacctgcagcaggaaagatgctccataccaaaccgagtttctaatgaaagtaaaagaacacagcaactctatctttgttgataactatggaattcacagtctctcatgagtctttgccattaccaataactaagtcagatacacgattttgctaaactcaacatacaggaacacggaagcttcatcttcatgaagcttccacctacctaaggaggaaagagtacaaggatttctagtaatgtacat

SEQ ID NO: 17449 - DNA, 185 bp, Gossypium hirsutum
  Clone ID: LIB3189-014-P1-K1-H2
cccacgcgtccgggcttatctttctgatcaggattttttacaaactaaattggcacgggaagcagatgaaagggcaagccaaaatatatttaaagctaggtaacctatttatttgacaagatggaagaatgtttggggattgttttgcttgaagcgttgctaaatggttcgtcagttctttattt

SEQ ID NO: 17450 - DNA, 376 bp, Gossypium hirsutum
  Clone ID: GOSHI-09MAY01-C13644_1
tttttgattttgatgtattgctgtccttttctcttaaccacctctccgatctccttcgcttcacagctctctcatctcccccatttctttccatgcaagcgttctgtcatttctcactcattgaatgctatatttctctctaactttgccttcgtccgccagctaagtaagatcttctttcttcttctgaaaacaagattgttgaattcttttcttttgggaatccgggtcttgtctttcttgagatttgggaaacccttttgtttcattggccactgatgcgaaatgggttgttatgtacatcatagctttcagcttgaatttttgaaaaagctgtaatttgagtgttaaatatgcatagatgtgttggctttct

SEQ ID NO: 17451 - DNA, 1260 bp, Gossypium hirsutum
  Clone ID: GOSHI-09MAY01-C13674_1
aaaaggctatcaataggctacacagaggctgagaaggttgttgcatcttcacttgcttgcttaactgattcgaagtcatcctttggatgtggggacccaaccaccaatttccagcagtgtccacttctgaatataacttactgtcctgcatcagaagctgacctgtctcatggaaagaacttaattgttgtggtctacaattctttgggatggaaaagagaggatgtcatacgttttcctgttgttaatgaagatgttactgttcatgattctgagggaagaaaaattgaatcacagcttgttccaatagttgatgcctatgtggacctaaggaagtattatgctagggcatatttaggtagcagcccagatgatgtacctaagtattggattgcatttacggtatctgtaccacctcttggcttcagcacttacaccatctctgcctctaaaaagccaggagctggatcaaccaaatcatctatatacaaatttcagaagggtgagaagccagctattgaagttggtgaaggaaatttaacgcttactatttcagctccttcagggaagatcataaattatgtcaacaacagaaacttggttgaggaatcagtggaacaatcatttagctattacactggatataatggagttaacgacaaagcaccccagaactctggggcatatatcttccgtccaaatggcacataccacataaaagctgaacagccctcattgactgttattcaaggaccattggtaaatgaggtgcatcagcagatcaatccgtggatatttcagactactagactttacaaggagaaggagcatgttgaagttgagttcattgttgggcctgtgccaattgatgatggatttggaaaagaaatacaactcagataactacttctctggaaaacagcaaaacattctacactgattctaatggacgtgattttattaaacggattcgtgattttaggacagactgggacctgaaagtaaaccaaccagtcgctggaaattattacccaattaatttaggaatttacattcgtgatagtaagaaagaattctcggtcctggtaaatcgatctctaggaggatctacatagtggatggacaaatagagttgatgctccacaggaggctgctccttgatgactctagaggtgttgatgaggctctaaatgaaacagtctgcgttcttgatgattgcagaggactactgtcccaggaaaatattattacagaattgac

SEQ ID NO: 17452 - DNA, 411 bp, Gossypium hirsutum
  Clone ID: uC-gsflmaxxa009c08b1
ttacaacagaaacgtggttgaggaatcagtggaacaatcatttagctattacactggatataatggagttaacgacaaagcaccccagaactctggggcatatgtcttccgtccaaatggcacataccacataaaagctgaacagccctcattgactgttattcaaggaccattgataaatgaggtgcatcagcagatcaatccgtggatatttcagactactagactttacaaagaaaaggagcatgttgaagctgagttcattgttgggcctgtgccaattgaggagggatttggaaaagaagtaacaactcagatagctgaccaatctggataacagtctaaaatgatacactgtacctaatgaacgacttttaatagaacaagattattagctggcctgcctctaga

SEQ ID NO: 17453 - DNA, 358 bp, Gossypium hirsutum
  unsure (1)..(358): unsure at all n locations
  Clone ID: LIB3189-014-P1-K1-E6
actattcctactacaattcttttcttcgatccttcttttcttgaagttggggtcttagctgctgctgtttatttttatgggtaaggtggtaataanagcccaacctatataatattattattattctaatggagtcttaatgatttttactgtgatgagaatatccatttcattacatgatcttaattgaatctatctacaattctttgggatggaaaagagaagatgtcatacgttttcctgttgttaatgaaaatgttactgttcatgattctgagggaagaaaaattgaatcacagcttgttccaatagttgatgcctatttggacctaatgaaatattatgctagggcatattt

SEQ ID NO: 17454 - DNA, 885 bp, Gossypium hirsutum
  Clone ID: GOSHI-09MAY01-C13114_1
ctggactctagactatatatagtttagataacccgcgaaaattttcgacatatttgattgcgatcttgagatagacagggcgctccttcgtctcaaaatctgaatagaacaatctttattatttgaagcggttctttcgggcagttatcaaaagagggcaattgcttcgaatttgatcaattgagatatatggaaacaaaaacaatatcaatataacaataatatatatatttcattcgaattcaaagtggattcttattttctatattctgtattctttttagattcaattagattcaagggctaagcactgaatcaaaaaaaaaaaaaaaaacagagaatagattcatgggcccctactttataatataatgaaaggcatgcttgatagaaagattacatcacataaagtcaacgaatgaggtgggttcattaacaactcacagatgaaaaaatggcaaaaaagaaagcattcactccccttctatatcttgcatctatagtatttttgccctggtggatctctctctcatttaataaaagtctgaaatcttggattactaattggtgggatactaggcaatccgaaacttttttgaatgatattcaagaaaagagtattctagaacaattcatagaagtagaggaactcttcctgttggacgaaatgataaaagaatacccggaaacacatctacaaaagcttcgcataggaatccaaaaagaaacgatccacttcatcaagctgcacaatgaggatcatatccatacgattttgcacttctcgaccaatctaatctgtttcgttattctaagtgcctattctatcttggggaatgaagaacttcttattcttaactcttggggtcaagaattcctatataa

SEQ ID NO: 17455 - DNA, 949 bp, Gossypium hirsutum
  Clone ID: GOSHI-09MAY01-C13094_2
cggacgcgtgggcggacgcgtgggtttgaattttctattatcattaagcaatcctcctccccaaagttcatccttgaatgttgtaaggtttggaggacattcttttatctgtagttatatgcatctcctacagcccaaagtactgtcttgatttgtatgttcttgtttttatccctggaattgaaagaaattcggaattcgcaattctcgccggtggttaggggataaaatattttcaggaacaaacaaatcataatgatttttgtctttattttcagtcatcttttgatgtcttgcaataaattcataaaaaatgatttttatcaatataggttttttcttggtatctttgattaatttggcggttatttttatgaaccaacaaaatacttatagtttgatatagaataaattgtccatcattttttaccgacagacgaactggatcgataatcaatattccttttttcattaattctctaagagttaaatccttctgaatcatcaaaatatccagattcatctctccccgttgaatagaggatataacaatttcgtttggatttatcagtctaagcaggaggcaatatactttgatattattgattattctttgatttaaaccctcgcccccgctcaattgaaaacgcaaatacctttttaggaagaaatcaagctctgcttccgtgttgctcttgtattgctttttctttcaacgtttttttttgtctgatttatcataatcttcttcaacatctttttcttggtttgagagaacggatttaaaatttccttgtttttgtgcatctgatacaagacccccttcacctatgggttctttttcttcttgatttcgattctctaatccaataatttgtttttcgtttggtgctataagggagtccctttttttattttcaataatattttgattaatgttcctatttcc

SEQ ID NO: 17456 - DNA, 536 bp, Gossypium hirsutum
  Clone ID: uC-gsflnu33B056a04b1
tcggacgcgtgggcttatagcaccaaacgaaaaacaaattattggattagagaatcgaaatcaagaagaaaaagaacccataggtgaagggggtcttgtatcagatgcacaaaaacaaggaaattttaaatccgttctctcaaaccaagaaaaagatgttgaagaagattatgataaatcagacaaaaaaaaaaaacgtagaaagaaaaagcaatacaagagcaacacggaagcagagcttgatttcttcctaaaaaggtatttgcgttttcaattgagatgggatgattctttaaatcaaagaataatcaataatatcaaagtatattgcctcctgcttagactgataaaatccaagaacctcaattcctcttttgaaagtgtattgggttaaacgtataaccagattttaatttttggtgatttgggtttaacttgaagagagaaaagaaatcttttcatgggggagttaggagctctttctactgggctctctatcatggtttccacagtgcaataaaaatatgttatagtct

SEQ ID NO: 17457 - DNA, 334 bp, Gossypium hirsutum
  Clone ID: LIB3189-004-P1-K1-A12
aaaaatactgcattggtgggcataccatttttatccgtggaattgaaagaaattcgaattcgcaattctcgccggtggttaggggataaaatattttcaggaacaaacaaatcataatgattttagtctttattttcaggcattttttgatgtcttgcaatatatacatatagatgattgttatcaatatagttttttttttgggaattttttactaatagaatgttataaaactttttctaagatatttcttttaatattgttttgggggggatttattttttcatcattatttttgctgaaaaaatttttttatcaatattttttttttcca

SEQ ID NO: 17458 - DNA, 795 bp, Gossypium hirsutum
  Clone ID: GOSHI-09MAY01-C13064_1
gtctgtctccattcttgtctgtcccttatggttacagtgggcttgaaatagatcagaaccttttcttcttcttttattttccctttcttttccaataactctcatttgtttaggttagatctgcgagagaaaaaaagagagcgagaaatggggagaatgcgacagtatttggcaatgaaaacggatcctgttgctcaagaattgatcagttccgatatcaaagaactcaagctggctgcgattaaattgatggatgatgcaactaaacttggaggtcttggttttggaacttcttttcttaaatgggtcgcctcattttctgctatttatttgttaatcctggaccgaacaaactggagaacaaacatgttgacctcacttttggtaccttacatcttctttagtcttccttcaggattgttcagctttctaaggggggatgttggaaaatggattgccttcattgctgtcgttctaagactgttcttccccagacactttccagactggctggagatgccaggatctttgattcttttactggtggtggctccaaatttctttgcagtcaccttgaaggacagcttggttggtgttttcatatgcctcctcattggatgttacctattacaggaacacatccgagcatcgggccgattccggatttccttcactcagagtgatggaatatcaaacaccatcggcattatctttctgtaattctaccctgtctggggacttgtgctccacttcgcctagttggtgcacaaaagcactcattgcactgtggtgcgt

SEQ ID NO: 17459 - DNA, 266 bp, Gossypium hirsutum
  Clone ID: GOSHI-09MAY01-C13014_1
aaatcccgggccgcccacacccttccgaaaaaaaaaaaaaaaaaaaaaaaatttatatcaaacaaaaaaaacactaaaataggaagtaatactaaattttactgggagaaaaacatctattatctttgacaagaaactttaatcatccaaaaatagcaaatacttcaagaatctgaactaaaaatacattttcattgccggtgccctttttatagattccactttttcatcacccatcttgccatatatcattttttattattctc

SEQ ID NO: 17460 - DNA, 621 bp, Gossypium hirsutum
  Clone ID: GOSHI-09MAY01-C13364_1
gccaccaatggcatcccccccccccttttagctagcattagcaatgcccccattactagaactgtctttggctgctcgaaatcccatccccatttttatcttcttcctcaaactctgcggcagcagattcttgttgtttgtgggtttcatgtcattctaaaccaaatggtcttataactactaacccatcttttcctcttcttcttaaagctttctcttcacaatctgtacgagattggtgggttcttccttgggattttcaggttgcatttcttttattctattcaaatttcccatttaatggccgcccgggccgcttgtaaacgggtgggtcagatcggacccaattcctggacgatagggggagttagcagattcaaaggagtgctttcccctcttgatgcctcgacgtttcctccctcagccattcgattgtcactttctccttctcccttctcacaacggagacaggtttctcacagctcgtaaaatcaaatggaaagagattgtttctcatcgacacattagctttggttagagattaaaagctgaaggtctgccttcgaacaagccgaagccataacagctgccataactgaagttctgaatggcagcttggat

SEQ ID NO: 17461 - DNA, 441 bp, Gossypium hirsutum
  Clone ID: GOSHI-09MAY01-C13314_2
gtcgtccacagggccttgagtttgtgcaaaagggctctattttggggggttcctactactctaaagttgggtccagatcaacaggtaagcaatgcaactatatggagtaatcgaattggatatttgggtaaatagatattggttagtctactagggaatttattgaagcaatggttagcatgtagcaatcccatgttttattattgttattattattattattattattattattattattattattattatttggatggaatgatgtaacttagttgtattccaactaagtttgttagtggtagtaggtggtgatttattttaagtggaggtaatgatgaaacttagttgtattccaactaagttgtcaagttgtaagcttgtataaataggctttatgccattttaaaaaaatgaatgaattcaatcaagatttcatcc

SEQ ID NO: 17462 - DNA, 2846 bp, Gossypium hirsutum
  Clone ID: GOSHI-09MAY01-C13314_1
gctttccgtaaaagtgaggcttctttcattacttataggggggacgttcctccaaccccgaagaataaaagtaatttcttctactggtatatataacaatggtagaacctcggcgtttactcctgatattctttttgtcgacattgttgattgcttatagcaatgcaaatgtcgaagagattcagaaggataccgaggaaggggacgaagaagttaaggtaggaggtcagaaggctctgggtgtgacatacgacgcaaggtccttgatcatcaatggcaaacgagagcttctcttttcgggagctatccattacccacgtagcaccccagatatgtggccggacctgattaaaaaagctaagcagggaggcatcaatgcgattgagacgtatgttttctggaatggacatgaaccagttgagggacagtccaactttgaaggagaatttgacttggtgaagttcatcaagttgattcatgagcataagttgtatgcagtcgttagggttggcccctttattcaggctgaatggaatcacggaggattaccatattggttaagagaggtccccggcatcattttccgatccgataatgaacctttcaagaaacacatgaaaaggtttgtgaccttgattgttgacaaactgaagcaagagaagttgtttgctccacaaggaggacctattattttagcacagatagagaatgaatacaacactattcaaagagcattcagggaaaaaggggatagttatgttcaatgggccggtaaactggcccttagcttgaatgccaatgtcccatggatcatgtgcaagcagagggatgccccagatcccattatcaatacatgcaatggaaggcactgtggagatactttctatggtccaaataagcgcaacaagccggcattgtggactgagaactggactgcacagtatagagtattcggtgatccaccatcccaaaggtcagctgaagatttggcatactcagttgctcgattcttctccaaaaatggaagcatggtcaactactatatgtactatggtggcaccaattttggcaggacaagtgcctcatttacaacaactcgttactatgacgaagcccctcttgatgaatttggtcttcaaagggaaccaaagtggggtcatcttaaggacgtccacagggccttgagtttgtgcaaaagggctctattttggggggttcctactactctaaagctgggtccagatcaacaggctatagtctggcaacaacctggaacttcagcctgtgcagctttcttggccaacaataacacccgtctggcacaacatgtgaatttcaggggccaggacattcgcctgccggctcgttccattagcgtcctccctgattgcaagaccgtggttttcaacactcaactggtcacaactcaacataactcaagaaactttgtaagatcagaaattgcaaacaagaactttaactgggagatgtacagggaagtccctcctgtcggacttggatttaagtttgacgtgccaagggagctttttcatttgaccaaagatacaaccgactatgcttggtacacaactagccttttgttgggtcggcgtgatttaccaatgaagaaaaatgtccgaccagttttacgggttgctagtcttggccatggaatccatgcctatgtaaatggtgaatacgccggttctgcacatgggagcaaagttgagaagagctttgttttgcagagagctgtaagcttgaaggaaggggaaaaccatattgctctcttgggctacttagtgggactccctgatagcggagcctacatggagaaaaggttcgctgggcctcgttctatcaccatccttggtttgaacactggaacactggacatatcacaaaatggttggggccaccaggttggaattgatggagaaaagaagaaattgtttactgaggaaggctcaaagtctgttcagtggacaaagcctgaccaaggaggaccattaacatggtacaagggatattttgatgcaccagaaggggacaacccagttgccattgttatgactggtatggggaagggtatggtttgggtcaatggtagaagcattggccgatattggaacaattaccttagtcctcttaagaagccaacacaatccgagtaccacatcccacgggcatacttgaagccaaagaacctgattgtcctccttgaggaagaaggaggcaatcctaaagatgtccatatagtaacagtcaacagggatacaatctgcagtgctgtgagtgaaattcacccaccatccccgagattgttcgaaaccaaaaatggtagtctccaagccaaagtgaatgatttgaaaccaagggctgaattgaaatgtccaggcaagaagcaaatcgtggcagtggagtttgcgagctatggtgatccatttggcgcttgcggagcctactttattggaaattgcacagcgccagaatccaagcaagtcgttgagaagtattgcttggggaagcccagctgccaaatcccactagatagcattcctttcagtaaccaaaatgacgcatgtacccatctcaggaagactttggccgtccaactcaaatgtgcctaaacaaatgcgtgcttcgacacagcttggattaagcttcacattttattttttttaattgagctaagacggtgcatggaggagtgctcgatctatttaatttgtatttcttaaatattaaatgaatatgtgcgaattccagaattacaataaaaaaaaaaaaaaaaaaaaaaaaaaaaaaaaaaattttttttttttaaaaaaaaaaaagggcggcca

SEQ ID NO: 17463 - DNA, 598 bp, Gossypium hirsutum
  Clone ID: LIB3828-018-Q1-N6-G11
ggatgaaatcttgattgaattcattcatttttttaaaatggcataaagcctatttatacaagcttacaacttgacaacttagttcgaatacaactaagtttcatcattacatccacttaaaataaatcaccacctactaccactaacaaacttagttggaatacaactaagtttcatcattacatctacttaaaataaatcaccacctactaccactaacaaacttagttggaatacaactaagttacatcattacatccaaataataataataataataataataataaaacatgtgattgctacatgctaaccattgcttcaatactcctccttggtttgcatggagcaaacacctagcttccttcttagacattcgaaccttgtgacattaagggctttagtcaaaatgtctgcaagttgatcctcagaattacaatggatcagcttcacttcttgagcttgctccatttctcgaacaacatgcaacttgatgctgaaatgctttgttcttccatggaacactggatttttagcaattgcaactgaagattggttgtcacagaagatctcagtagcttccttttgatgcactttc

SEQ ID NO: 17464 - DNA, 517 bp, Gossypium hirsutum
  Clone ID: LIB3828-033-Q6-K6-E7
ggccgtcctagtcaaatgtgcctaaacgaatgcgggcttcgacacagcttgggttaagcttcacattttatttttttttttaattgagctaagacggtgcatggaggagtgcttgaactatttatttgtatttcttaaatattaaatgaagatctgcgaattccagatttaaaaaaaaaggggggaaaaaaaaaaaaaaaaaaaaaaaaaaaaaaaaaaaaaaaaaaaaaaaaaaaaaaaaaaaaaaaaaaaaaaaaaaaaaaaaaaaaaaaaaaaaaaaaaaaaaaaaaaaaaaaaaaaaaaaaaaaaaaaaaaaaaaaaaaaaaaaaaaaaaaaaaaaaaaaaaaaaaaaaaaaaaaaaaaaaaaaaaaaaaaaaaaaaaaagggggggggggttttatttaaaaaaaaaatatttttggggggggatgaaaaaaaaatttttttttttttgggaaaaaaaaaaaaatttttggggggggttttaaaaaaagggggggggaaaaaaaaatggggg

SEQ ID NO: 17465 - DNA, 373 bp, Gossypium hirsutum
  Clone ID: GOSHI-09MAY01-C13284_2
tttgagacataaggcaataaaaaaaaaggaagacagtgtgggatttttagtttggttttgagagggcgttctgctctatgattgggggtgcgaaaggcgtcgatcggaaagagaagggaaagcagcagccgacatggaggatattttcattgaaagaattacattcagctaccaataattttaattatgacaacaagcttggagaagggggatttggcagtgtatattggggtcagctatgggatggatcacagatcgcagttaagaggttgaaggtgtggagcaataaagcagaagtgcagttttcggttgaggttgagatattggcaagagttagacacaagaatctactgagtttacgaggatactgtgc

SEQ ID NO: 17466 - DNA, 662 bp, Gossypium hirsutum
  Clone ID: GOSHI-09MAY01-C13284_1
cttcatcatcccctttttcactttaactgaaaactgctgcaacattctcttttaagcaaaagcaaatccctcgtccccccccccaaaaaaaagaaataataatttaacaaaaccccataaagaaaaccatgttcttctgtagcaattcactgctcaaaagcgttatgtttagcatctcttcagaatctgttgcttagaaagtgaagaagttgagagttgaactaccaatagaagaaaaaaaacaccaagtctttgaaagtgaaacagggatttaagaaagggcttgggatcttgggtttgataatggcgttttgttccatgatttgttgtgggaaaggtgtggatcggaagaaggagaaaggaaagaagcaaccggcatggcggattttttcgttgaaagaattgcattcagctaccaataattttaattatgataacaaagcttggagaaggcggatttggaagtgtttactggggtcagctttgggatggatcacagattgcagttaagagattgaaagtgtggagcaacaaagccgaagtggaattttccgttgaggtcgagatattggcgagagtccgacacgagaatctgctgagtttacgtggatactgtgccgaaaggtcaaaacatctgattgtatacgaatacatgccgaatt

SEQ ID NO: 17467 - DNA, 1085 bp, Gossypium hirsutum
  Clone ID: GOSHI-09MAY01-C13254_1
cccacgcgtcccatcccttcattcattcatatctgcttttctttacgtttgttcattcgattttttctttgggttttctttctttttgatccttttgctattttgggtggtgaaagattgaagaattttgatcatgtcgatcgcgttggaacggatagaatcggcggggttcgggcgggtaatgaattgcgcttgcgatagttctaaattcgaatcgccgccgccggttaaggaaacgaagcagttgttattggcggagacggcggcggttgaagaggaggaggatgattggagggtttcgtcgtctactacgacgtcgtcttcgatcgggaagaacagtgatgaggtatccggaatatcatcggacggtggtgattgcgaggaaaatgaagttcaaagctcttataatggtcctttagatatgatgaattcccttgagcaggtcttgcctatgaggagaagcatctcgagtttctacaatggaaaatcaaagtcttacacgagtttggtcgatgcatcatcagcttcctccattaaagacatagcaaaacctgaaaatgcttatactagaagaaggagaaatttattagcaatcaatcatatatgggataaaaacaggagcaaaaagttcattagaccaataagttcaagtaaaagcacattagcacttgctgttgcaatgagtggttcagagactgatagtttttcaagcgctggtgaggattcttcttcaacttccagtcctaggttattactacctccattacacccacaaacgaaaatggtttctttgtataataacagtattagtattaccccttcttcatcaccgtcgagtggtggccggaatttctctaactggcggtctttttcattggctgatgtacgtgaatataactgactgttatagttttacatggagtttgatatactttttatgattggctcctccttgttaatctttatttgatggaaaaaaaagagagagagaagaaattgttggcctccacaaggatttttttgtcagtctgtagttttcatttttgagatcatatgatgctaatgaagtgttgatttcattttcc

SEQ ID NO: 17468 - DNA, 424 bp, Gossypium hirsutum
  Clone ID: uC-gsronu33B012d10b1
ttcacgcgtccgtaaaaacaggagcaaaaagttcattagaccaataagttcaagtaaaagcacattagcacttgctgttgcaatgagtggttcagagactgatagtttttcaagcgctggtgaggattcttcttcaacttccagtcctaggttattactacctccattacacccacaaacgaaaatggtttctttgtataataatagtattagtattaccccttcttcatcaccgtcgagtggtggccggaatttctctaactggcggtctttttcattggctgatgtacgtgaatataactgactgttatagttttacatggagtttgatatattttttaaaaaaaaaaaaaaaaaaataaaaaaaaaaaaaaaaattaataattaaataaaataaaatataaatttaaaaaaaaaaataaaa

SEQ ID NO: 17469 - DNA, 505 bp, Gossypium hirsutum
  Clone ID: uC-gsflnu33B059b08b1
gggtggtgaaagattgaagaattttgatcatgtcgatcgcgttggaacggatagaatcggcggggttcgggcgggtaatgaattgcgcttgcgatagttctaaattcgaatcgccgccgccggttaaggaaacgaagcagttgttattggcggagacggcggcggttgaagaggaggaggatgattggagggtttcgtcgtctactacgacgtcgtcttcgatcgggaagaacagtgatgaggtatccggaatatcatcggacggtggtgattgcgaggaaaatgaagttcaaagctcttataatggtcctttagatatgatgaattcccttgagcaggtcttgcctatgaggtaagaaaaaccaaaaaccaaaaataaaaatctttccttttggtataatttattgattaatatgcttaaaaaaatctgggttttcttgcaggagaagcatctcgagtttctacaatgggaaatcaaagtcttacacgagtttggtcgatgcat

SEQ ID NO: 17470 - DNA, 338 bp, Gossypium hirsutum
  Clone ID: LIB3189-007-P1-K1-C8
caacccccatcccttcattcattcatatctgcttttctttacgtttgttcattcgattttttctttgggttttctttctttttgatccttttgctattttgggtggtgaaagattgaagaattttgatcatgtcgatcgcgttggaacggatagaatcggcggggtacgggcgggtaatgaattgcgcttgcgatagctctaaattcgaatcgccgacgacggtttaggaagcgaagcatttgttactagtggccaattgctttttgtgaagacaagttctataatctattagagactcttttctctacctaatgaggctctcctatataatcttgtt

SEQ ID NO: 17471 - DNA, 631 bp, Gossypium hirsutum
  Clone ID: GOSHI-09MAY01-C13244_1
ggccttgttgattcgcctgtcctgtagttgtgagaagcatacctttttcctttttttttttcatttgcatatctcatttccttgaattttgttcgtcaatggcgaattcccagttgcagaaatacgggacattatcaagggagcaattgtcatatctatttgatcgattctctcttcttatttgcccagccagattttaagaagaggattctagacgctgtgaatgacaagcaggaaccggttgctgttaccacggcagttcaggaagagatatttttggagatgggtgttgatccaagtttcggtcttgcatgcctggggaaagtaaatatgacttacgagaatgatcaagatttgatgattcgttattatagatttgttgccaatgaggagttagcctgtgatgaagctgagcttggacctgagggatttgctgaaaagcttcatagtcaacaaaaacttcatgagcagcatctggggatgctaaagtacatgcgcaaatttcacttcgatgaccaatctgccatccttgagaagttgcaccatcagacggaagatgctaattttgagagtgaggcatcaattttgtcagctgagcagatacaagagattgttcgaaggaaggtgtctc

SEQ ID NO: 17472 - DNA, 770 bp, Gossypium hirsutum
  Clone ID: GOSHI-09MAY01-C8877_2
tccacttcataataatgtggctgattctgttgcacaagagggtcaacaaccggagaaacaaactgcagaaaatgttgattaagcagtgatggaacttccggacgccaacatgaatccagaagatttatggatgagtcattccaaggtggttcaccctaaaccttacagaaaggatagtccctcttggaaagctattcaaaaggtacttgatagttggagaaaagataggtctaaaacattttaggcccgtaaaaccattgggatcaggggacactggcagtgttcatttggtggaactgtgtggcactggcctgtactttgcgatgaaagctatggataaaggtgttatgctgaatcgaaacaaggtgcatagagcttgtgcagaaagagaaattcttgatatgttggaccacccttttcttccagcattatatgcatcatttcagaccctttcccatccttgtttgattacggattactgtcctggtggtgaacttttcatgcttttggacaggcaaccaacgaaggtcatgaaggaagatgcagtaagattttatgctgcagaggtggttgttgcattggagtaccttcactgtcaaggttggttaaactcaaatataccaacaaatctgatagtattaattaagtgatcgatcaattctttcagtgattatgtttctcttcttacagggattatatacagagatttgaagcctgaaaatgttctacttcaggacaatgggcatgtagccttgaccgattttgattta

SEQ ID NO: 17473 - DNA, 999 bp, Gossypium hirsutum
  Clone ID: GOSHI-09MAY01-C8877_1
cggattactgtcctggtggtgaacttttcatgcttttggacaggcaaccaacgaaggtcatgaaggaagatgcagtaagattttatgctgcagaggtggttgttgcattggagtaccttcactgtcaagggattatatacagagatttgaagcctgaaaatgttctactccaggacaatgggcatgtagccttgaccgattttgatttatcttgcttgacatcttgcaaacctcagctgctgattccagccacagatgaaaagaagaaacggcagaaaagccaacagaatccgatctttatggccgaaccaatgcgtgcatcgaactcttttgtgggaaccgaagagtatattgctccggaaattatcactggggcaggccataccagtgcagtaaactggtgggctctaggcattcttctatatgaaatgctgtatggatatacaccattcaggggaaagacacgacagaagacatttgccaatgttcttcaaaaagaccttaaattccccaaaagtatacaagtgagtctgcatgcaaagcagttaatgtaccgcttattgcatagagatccaaagaacagattaggtgcacgtgaaggggccaatgaaatcaagcgacatccattctttaaaggtgtaaattgggctctcgttcgctggatgactccacctgagcttgaagttcccatctctgcaactgaaactaggaaggaagaagataaagcaatggaccctcaattacaggatttacaaactaatattttctgagaagcttggaatgctttatcacttcaccattagaggcttcgggttttatagatgttgtgtcgttctctcatgggccctaccattatgttgcattcttctttttccttttttgggattaaaatgcccccttcctggtgattggtaaataaaaatcaaattgttccttttaatttctttatatcatcaatacaggtaaggagatttggggggtattctttagattcttaaa

SEQ ID NO: 17474 - DNA, 1163 bp, Gossypium hirsutum
  Clone ID: GOSHI-09MAY01-C8817_3
cttagcacaccacgaagcttccatactgtatagccataactggatttgcttgtacttggtgcccccgcgccccaccgcatctgtcagctctaagagtatggttgggatgttcaacagttcgcagctcgatttatatcatcgtggcatgtgtgcttgcggctaaagacggagctaatgcaccaccccgagattatagcatacatggggaatcttctagcagagtttttacaactataggagcatctgcaaatcttgtgtttgcattcaatactggaatgttaccagaaatacaggcaacagtgaggcagcctgcagtgaagaacacgctgaaagctttgtactttcagttcaccatcggagttgtaccgatgtttgccattacccttatcggctactgggcttacggagcttcaacatccacatacttgcttaatagcgtaagcggtccactttgggtgaaggcggctgctaacatttctgccttcctgcaatccatcatttgtttgcacatatttgcgagtccaacttatgagtatttggacaccaagttcggcattagaggaagcgccttgcagcttaacagcctgtccttcagaattgcagcaagaggcgggtacctcgttatcagtacactggtgtcggctcttctaccgttcctcggagatttcgaaagccttacgggggcattgagcacgtttccactaacatttatcctagcaaaccacatgtacattgtggcaaagaaggacaaactgagtaccttgcaaaagttctcgcgtccgctcaatgtcattatcttcgctctcatgtccattgcagcaacgattgcatctttgaggctcatagctgttgattccaaagaataccatgtgtttgctgatgtgtgatatctacaagggctgagaaaaatgcctaaaattagcagaaatccgattcgaatttagccttcgcttcggtttttgattagattaataatatcaatgtaatgtattcattcggttctcggttcataacttaaaaaaaaaaaaaaaaccacaaatattattaaaacagaacagaaaagagccgaaccgaaccgaaccgaattttattttaatttaattttagctagtgtttaatttctgatggtataaaaataaatatatatattttatttctaagtc

SEQ ID NO: 17475 - DNA, 1100 bp, Gossypium hirsutum
  Clone ID: GOSHI-09MAY01-C8817_1
ctgccgtaagctttttatttttatttaaatgtgtgcatatttggaagggaagataatccaataagttgcttacacaattctgacacgcaccaaatatggagcattgattctcttggcggaaaaagagaaaaaaaaaaaacccagatttacaataattggaaaaattaatttgtttattagctgtaataaattcagtagtccctggctgttataaatacatttgaagagcaagaggaagggaagaagaagaaccaagcaaagttgaaagaaaagagtgataaacatggtgcctgacaacaataggaatgaggttgaggattataagttaactgttcaagtccctgaaactgcccatcaagttagcactgattcatggctccaggccggttttgtcttgacaactggtgttaacagtgtatttgtgttgggatattctgggacaatcatggtccctcttggttggataggaggcatagtcggtttgcttttagccaccgtgctgtcgctgaacgccaacatgcttgttgccaagctccatgaacatgggggaaagaggcatatcagatacagagatcttgcagcacaaatatacggtaggagagcctatactattacatgggcaatgcaatatatcaatctgttcatgattaacattgggtttctcattttgggtggttctgctttaaaggcttgttttgcccttttcaattatgagcacaccatgaagcttccatactgtattgccataactgggtttgcttgtactttgtttgccatatcgacaccgcatctgtcagctctaagagtatggttgggatgtgcaacagttctcagtttgatatatattatcgtggcatgtgtgcttgcggctaaagacggagctaatgcaccaccccgagattatagcatacatggggaatcttctagcagaggttttacaactataggagcatctgcaaatcttgtgtttgcattcaataactggaatgttaccagaaatacaggcggccgggtgcaagtcatccttcactgctcatcataaacctttgaaactgtcttacactatgatagttgcttgaaagcaagccttttttgtcatt

SEQ ID NO: 17476 - DNA, 531 bp, Gossypium hirsutum
  Clone ID: uC-gsflnu33B015g05b1
ttctcttgcaaaagttctggcattggctcaatgtctttatcttcgctctcatgtccattgcagcaacgattgcatctttgaggctcatagctgttgattccaaagaataccatgtgtttgctgatgtgtgatatctacaagggctgagaaaaatgcctaaaattagcagaaatccgattcgaatttagccttcgcttcggtttttgattagattaataatatcaatgtaatgtattcattcggttctcggttcataacttaaaaaaaaaaaaaaaaaccacaaatattattaaaacagaacagaaaagagccgaaccaggccagaacatcggcttgcagaatcaggttggttaccagatgagaataatggtcccaactactgatgttggaagctgaccaagattctagtatgatggagttggggaatcctagttctctatgaacaggggtatctttttagttacccttaaggtgctgaatgtcagtcttgtattttggaattgtcaaggagtataatacagaattccagca

SEQ ID NO: 17477 - DNA, 440 bp, Gossypium hirsutum
  Clone ID: LIB3135-055-Q1-K1-B4
cccacgcgtcctgtacatcgtggcaaagaatgtcagactgcgtaccttgctaaagtcccggcgttggctcaacgtctttatcttcgctctcatgtccattgtagcaacgattgcatctctgaggctcatagctggggattcccaagaataccatgtgtgtgctgctgtgtgatatctacaagggctgttaaaaaggcctaaaataagcagaaatccgattcgtatttaaccttcgctttgggtttcgcttataataataatatcaatgttaggtatttattcgcgcctcggttcataactttaaaaaaaaaagagatccccacttttttttaaaacctgatcagaaattagccttaccgaacccaattttattgtaaatttaatttagctagcggttaaatcctgttgggttaaaaaaaaataaatattttttattttct

SEQ ID NO: 17478 - DNA, 199 bp, Gossypium hirsutum
  Clone ID: LIB3048-038-Q1-L1-A12
cggagtgaaagggagccggctttacgtgaatcagtaagagagggctttccaagggggttaaagcagtgctgaccttgtagcctatttaggagctaatgcaccaccccgagattatagcatacatggggaatcttctagcagagtttttacaactataggagcatctgcaaatcttgtgtttgcattcaatactggaatg

SEQ ID NO: 17479 - DNA, 680 bp, Gossypium hirsutum
  Clone ID: GOSHI-09MAY01-C8807_1
tggaccacagccttccgatgaatcttcctttaatagttctctacttttattgaaaatcaagcgtttgttttggagatggatccaaccctcgattccaagcttatttcgaatgaagcttttgatatgaaaatcatgaagaaattaggtgatgatgatcagcggcaaggcttgaccaaggcgaaaaagcggtcgtatgctttggtgtcgtacaaggagttaccggactatatgaaggacaatgagtttatactgaattattatagggctaattggtctctcaaggaagctctttttagcgtctttcgttggcataatgaaacacttaatgtttggacgcatttacttgggtttcttctatttttgggattaaccatggcgaacttgttggaactcccacaagttgcggatctcattacattcttaaccaggtcttttctcattaatggccacaccaatgtttcttatgattctgaagaccttttcctgggaataacaaatctcgtcaatttgaggcaaataactaccccggaatcagacgttacacttccggtgacacccgttacacggtggccgttttacgtattcttaggcggctccttgttctgcctcctatccagcaccgtttgccatctcttttcttgtcattcacaccatctaaactttacattgctgcgactccc

SEQ ID NO: 17480 - DNA, 453 bp, Gossypium hirsutum
  Clone ID: LIB3189-011-P1-K1-E7
atgaatcttcctttaatagttctctacttttattgaaaatcaagcgtttgttttggagatggatgcaaccctcgattccaagcttgtgtcgaatgaagctgttgatatgaaaatcatgaagaaattaggtgatgatgatcggcggcaaggcttgaccaaggcgaaaaatcggtcgtatgctttggtgtcgtacaaggagttgccggactatatgaaggacaatgagttcatactgaattattatagggctaattggtctctcaaggaagctctttttagcgtctttcgttggcataatgaaacacttaatgattggacgcacttacttgggtttcttctatttctgggattaaccatggccaatttttatggaattcctacatattgtttatcttattacattctttatccgttcgttaattatttatgatttcctcaggtttttttatattc

SEQ ID NO: 17481 - DNA, 403 bp, Gossypium hirsutum
  Clone ID: LIB3166-006-P1-K1-E10
caacgagttcattctgaattattatagagctaattggcctctcaaggaagctctctttagcatctttcgttggcataatgaaacacttaatgtttggacgcatttacttgggtttgttctatttttgggattaacaatggcgaatttgattgaagtcccacaagtatcggatctcgttgccttcttaaccagttcttttcctattagtggcgacagcaatgtttctcaagatcccttgctgggaacaacgacgaatctcgtcgatttaaagcaaataacggcttcggaacctgacgtttcgccggtgacgcggtggccgttctacgtattcttagccggctccatgttctgcctcctatcaagtagcatttgccacctcttttcgtgccactcgcaccatctg

SEQ ID NO: 17482 - DNA, 652 bp, Gossypium hirsutum
  Clone ID: GOSHI-09MAY01-C8827_1
cccacgcgtccgcccattctcttctcttaatcctttcctccatttttttccaactgaaaaaaagggtctctctttgttttcttatacagagattgcttgtaagggcttcttgctgatgtgcagtggttcaaagagtgaacttgttccttcaaatttcaccatggaaggtgaattacaaggatgtaaacccgatgctctatctaaatgctcggttttgcttgaattagccgcctctgatgatttggtagccttcaaaactgaagtagaagaaaagggtttggatcttggtgaggcaagctactggtatggtagaagaatagggtccaaaaagatggggttcgaagagaggatgcctttgatgatcgctgccatgttcggtagtatcgatgttttgaactacatcgttggtaccagaaaaattgatgtgaatagagcttgtggtgctgacggcgttactgctgttcattgtgccgttgccggtggtgcgagttcttcggttcaggtcattaagctcttgctcgatgcatctgcagatgctaattgtgttgatgctaatgggaacaaaccgattgatctgatcgtccgggtttaaaatctttgagtaattccaaaaaaaaagtgattgagttgttgttgaaaagggtgatgatgt

SEQ ID NO: 17483 - DNA, 394 bp, Gossypium hirsutum
  Clone ID: LIB3166-053-P1-K1-G8
cggacgcgtgggcggacgcgtgggtggggttcgaagagaggaccccttgggggatcgctgccatgttcggtagtatcgatgttttgaactacatcgttggtaccagaaaaattgatgtgaatagagcttgtggtgctgatggcgttactgctgttcattgtgccgttgccggtggtgcgagttcttcggttcaggtcattaagctcttgcttgatgcatctgcagatgcttattgtgttgatgctaatgggaacaaactcgtatgatctgattcttctttgttttaaggtgtttgatttattttcatatttatggtttttgatttttttgttttatttattttatttatgatttgttttatattttttatttgtatttttattttatattttta

SEQ ID NO: 17484 - DNA, 536 bp, Gossypium hirsutum
  Clone ID: GOSHI-09MAY01-C8597_2
cccacgcgtccggttaaaactttccttctttgtatcgctctttagcttttgttttttgggaatggattcacaactttccttgtggttttgctccatgtccactgctttctgcttcgtcttcttctctttcaccctcttgttttctttgttttccttattgatcttcgttttgaggttgaagctctggtgtacttgtgaaacctgccaggcttatcttacttccagttggaccaaagatttcgataatctttgtgattggtatactcacctccttaaaaattctgccaccggaaccatccatatccatgttcttggcaatatcatcactgcaaatcctgccaacgtcgagcacatgcttaaaaccaggtttgaaaactacccaaaagggaaacctttctccactctcctgggtgatcttcttggtagaggtattttcaatgttgatggtgattcatggaagtttcaaaggaagatggccagccttgagcttggtggcgtctccgtaagaacgcacgcttttgatatcgtcgggtcag

SEQ ID NO: 17485 - DNA, 429 bp, Gossypium hirsutum
  Clone ID: GOSHI-09MAY01-C8597_1
cccactcgtccgcccacgcgtccgcccactcgttcgcccacgcgtccggccagcagggagcttggtggcgtctccgtaagaacgcacgcttttgatatcgtcaggtcagagattcaatctcgtcttctccctctattatcatcagttgctggtcaagaacaagttttagatttacaagatgtatttagacgattttcattcgataatatctgcaaattctccttcgggttagaccctggttgcctcgatttatcactgctagtttcagaccttgctgtagcttctgattttgcatcaaatttttcagcacaaagagcgctaggcatcttcatctttgatatggaaggtcaaaaggctattgaacttgtgcacggaaaagcagcttaaagaagccattaaagtagcagatgaatctgctgaagagatgat

SEQ ID NO: 17486 - DNA, 520 bp, Gossypium hirsutum
  Clone ID: GOSHI-09MAY01-C8517_1
ttagctcaagggaggaaaaagaacatggctccgaaatcacaaccggtcaacccaaatcccaacacgactatgaacgagatccgttaccgcggagtcagaaagcgtccatggggccgttacgcagctgagatccggaacccgagaaaaaaggcccgagtctggctcggtaccttcgacactgccgaggaagcagcgcgtgcttacgacgcggcggcacgagaattccgtggcgccaaggctaaaacaaatttcacctacactaacatcaatgacttcacgctaagccccagccagagcagcaccgtggagtcctcttctccgccgccgttggacctcacactcgctagcggatctatttcgctccccatgacggcgaatcatccggtgtttttcgttgatgtctttgcttccgccggtaagcgtctctccgatgccggcggagcccagagcgattcagattcctcgtcctcggttgttgattttgaacgaggggtgcaaccgagagtgtttgaatttgatc

SEQ ID NO: 17487 - DNA, 836 bp, Gossypium hirsutum
  Clone ID: GOSHI-09MAY01-C8507_1
attccttcgactttgatgagtccctggtatttgactcggatggtatgaatgggaatgactctaccaccacgagtgaaagcagcagcggcgagctgagtttaggacctgagttggaatcgtcccgaaatttggaaactcagttggtaccggcccagaactacatggtaaggatgttgtcgtggaagaaaagacgattaagttttagatcgtcagcgaagaaaacagagctcttgggttttgactttgacgggcaccctcaaacctgttctgtcgttgactccgagaagggagaatattggtgggaagtgaaagaattagtgagcagaaatggaggagcaaggctgaaagctcaagtgttctttgcttcctttgaccaacgaagcgaaagagccgctggggagagtgcctgcaccgctctggtcgccgtcatcgctcaccggctccattcaaaccatgcctccatgccaacgagacctgaattcgataacctcataacacagggttcctctgaatggcgtaagctctgctccaacacagcttacaccaatgccttccccgacaaacatttcgatctcgagaccgtcctaaaagccgatgtcaggcccgttaccgtctcccatgaaaaatcattcacagggtttttcagtcccgatgaattcgagttcttgaaaggagcaatgtctttcgatgagatatggaacgaaataaaaagctgcgaaacaaacaattgtcagccgagggtgtatatcatcagctggaacgatcatttcttcgtgttgaaggtcgaatcgaaggcatattacatcatcgatacgttgggtgagcggcttttcgag

SEQ ID NO: 17488 - DNA, 1047 bp, Gossypium hirsutum
  Clone ID: GOSHI-09MAY01-C8537_1
caagaacccccaaaaagaaaaccagacgcagttaaaagaagcttctatcaaagtgccattaacaatggccactctctcaattggcatcgcctcctccgcccccgccgccaccaccttcttttcgacaaaaacaaaacgaacccacttcaagctcaacatctcctgcgtccaatgggacccagaaggtattttaggaaagccggggtcaggacacttagctcgtcttgaattcaaaaggcggctagagagggacgcagaggctcgagaagcatttgagcaacatttacgtgaagagaaggaacgtcgccgagctcttcgccaatccagggaattacccgatactgctgaggagacgatcgagtattttcttgacaccgaagctcaagagatcgagtttgagattgcaagattgaggcatagattagatgaggacttcttctcccacctgaaatttgagatcgggcagattcgatttgctgtttcgaagactgaggatatggaggacagattgattgaactggaggcattacaaaaggccttacaagaaggcaccgaagcatatgataaaatgcaagccgaacttataactgcgaagaaaagcctcaccaagattttgtcatccaaagatataaaagcaaccttgctcgagatggttgaaggcaatgaactaaatagatccttattgacacttctagatgaaaacatagcaaatgcaaacatggataaccagaagcaagcagcggctttcatggagaagatccgtgcagccgttctcaaatatttgacggtatagtatacactacacgtgtctgaatgttagtgataagtaaagtatcactctagttgattgttggtggattttggtttagcagttattgtacctacagagatttaggtattgtactaaagatcaggtcagtactttacatgtacaaagacatggatcagaattagagttttatacaatgattttgttgtttttcagacatggtctgtataaaggaactcccatattctagccatttcattaactagagtatttttttt

SEQ ID NO: 17489 - DNA, 550 bp, Gossypium hirsutum
  Clone ID: LIB3825-025-Q6-N6-C3
gaaaaaacaacaaaatcattgtataaaactctaattctgatccatgtctttgtacatgtaaagtactgacctgatctttagtacaatacctaaatctctgtaggtacaataactgctaaaccaaaatccaccaacaatcaactagagtgatactttacttatcactaacattcagacacgtgtagtgtatactataccgtcaaatatttgagaacggctgcacggatcttctccatgaaagccgctgcttgcttctggttatccatgtttgcatttgctatgttttcatctagaagtgtcaataaggatctatttagttcattgccttcaaccatctcgagcaactgcatgacaatacaataactcagctgacctgcataaaattagaaatataaaacggactcaatgataaacaggcagttacggttgcttttatatctttggatgacaaaatcttggtgaggcttttcttcgcagttataagttcggcttgcattttatcatatgcttcggtgccttcttgtaaggccttttgtaatgcctccagttc

SEQ ID NO: 17490 - DNA, 457 bp, Gossypium hirsutum
  Clone ID: GOSHI-09MAY01-C8457_1
aaatgagagagtactcgaactcatttgcttcacttctaggggtgttggccttttgccaaagcctcctccaactcattttcccaccccgtccccgctttctctgtctcaagttcttcaaccgtatcgtccatttgttctcttcctactgctacttcgacatcactgaaatcgacggcgttaacaccaacgaactctataacgctgtccaactctatctcagctcctttgtttccatcaacggcagccgcttgagcctcactcgcgctctcaattcgagcgccattaccttcggcctctccaacaatgactgcatcgtcgatacgttcagtggtgtcaccgtgctttgggaacacgttgtgatccaaaggcaatcccagaccttttcttggcgaccattgccggaagagaaaagaggtttcactctccgaatcaagaagaaaaacaagtccttgattct

SEQ ID NO: 17491 - DNA, 728 bp, Gossypium hirsutum
  Clone ID: GOSHI-09MAY01-C8787_1
gtcagagttgtccatggtaacgccttggcggctgctgagattctaaactaaattcccaaggacgtggaagaagtgtttttaacaggagctacttccaagctcggcagagcgtgggccctttacctttgtcgtaggagagtacgcgtccttatgttgactttatcaaccgagaggtttcaaaaaatacaaagggaagcccctgcggattgccagaattacctcgtccaggtcaccaagtaccaggctgctcaaaattgtaagacatggatcgtgggcaagtgcataacaccaaggcagcaaagttgggctccatcggggacacactttcatcaatttgtggtgccacctatcttggccttcagaagagactgcgacttacggtgatctggctgccatgagattgcctgatgatgttgaaggccttggaagttgtgagtacaccatggaaagaggagtagtgcacgcatgccatgcagggggcgtggttcatcagctagaaggctggacccatcacgaagttggggcaattgatgtcgatagaatcgatattgtctggaaagctgctctcaagcatggtttaaggccagtgtcaagcatgtaaaccagcaatgttccttgtcataaattgtcatgaaacaaacaagaagcaaacaaaacaaagcagagaaaacgattttcgaattttaaatattaatgttaatggccattttttacgattatcaagatac

SEQ ID NO: 17492 - DNA, 1682 bp, Gossypium hirsutum
  Clone ID: GOSHI-09MAY01-C8747_1
cccacgcgtccgcctgttcttaagttttgataagaaacaggttactttttttgggcatattcaagtttcggtcgcgtcggtttgaaagaaatggcagctacaatggatttctataggagcagttcaggtatatatggtggagagttgatggaagcactcgaaccttttatgaaaagtgcttcttcctcatcctcttcttccccttccccttctccttccccttcatcttattctccctctccttctccttctccttctacttcatacctctctttctcttcttcccaaacacatcccaatttttacgcagttggttgttggtattccccagcacgtgatcaattttcaggtgttcaacagcctcaacttggttcaaccattgggctggacggcttaacccaagctcagatcaaccaaattcaggctcaattcctcttccaaaacaatcaaccaagctacctttaccaaaatcctcaacttaaacgccaaccccaacaccaaccatatgctcagctttcttagtcccaagccagtcccgatgaaacagatgggttctccaccgaaacccaccaagctctacaggggagttaggcaacgtcactggggaaaatgggtcgctgagatccggctacctaagaaccggacacgtctttggttaggcactttcgatacagccgaggaagcagccttggcttatgataaagcagcctataaacttaggggtgattttgcgagactcaacttccctaaccttcgtcaccaaggttcccatatcggtggcgacttcggtgaatacaagcctttgcattcctctgttgatgctaagcttcaagctatctgtgaaagtttggaactcaaccaaaagcaagcgaacaacaagaagacgaagaaattatcgaaggagaacaaagtccaattggctgagcctgaggaaaagacagtgaaggtggagaactccccctcatctttatctccggttctgtcggagaatgaggggtcgacagaatcttcacctttgtcggatcttaccttctcggacttcaacgagcagccatggcctgaagttattacttcgtcggagtcttttatgttgtccaaatacccctcatatgagatcgattgggattctattctaaaagcttagtttaatgtccacaacagatgttttccttgtgtatttattttttgtaaagctcaccgcaattgagtttttggtagttgcagtgacaggttctttaggttattattaaagtctgtttatgagtttagggttcttagtattatcgtgtaagtcttaatgtttataagaatttataagatgttctccatggttgtcagctcgttttttcttgctggaccgaaagggagaaatttgttagcgtccataaaagttccatagcttctgtaatttgaatcctattaatgttatttatggccctcttcccttgtccgaaataaaaacttagacaagatgaaaatgaaggccaataaaattactgataccatcaagatctatataatcaaggtcccaaaacaatgaatacactgatatctatatctggggcggcccttttaaagtaccaaactttagttacccgtgattgctacgtaataaatttcctatagggcaacttaaatcaaattgacagcccgggattttacaacgtcttgactggaaaaac

SEQ ID NO: 17493 - DNA, 473 bp, Gossypium hirsutum
  Clone ID: LIB3147-032-Q1-K1-D3
cccaaacctaccaagctttacagaggtgttaggctacgtcactggggaaaatgggtcgctgagattcggctacctaagaaccggactcgcctttggttaggcacttttgaaacagccgagcaagcagccttggcttatgacaaagcagcctataaacttagaggtgactcagcgagactcaacttccctaaccttcgccaccaaggttcccacattggtgaatacaagcctttgcattcctccgttgatgccaagcttcaagccatttgtgaaagcttggaacaagaccaaaagcaagggaacaagaaaaaaacatcaaaggaaatgaagaaggacaaggttcaagtggcaacgcctgaacctgaggaaaagacagttaagttggagaactcctcttcatcttcgtctccggttgtgtcggagaacgaggtgtcagcagaatcttcacctttaccagatcttacattctcgaa

SEQ ID NO: 17494 - DNA, 217 bp, Gossypium hirsutum
  Clone ID: LIB3147-045-Q1-K1-B11
cttaatgtttataagaatttaaaagatgttctccatggttgtcagctcgttttttcttgcgggaccgaaagggagaaatttgttagcgtccataaaagttccatagcttttgtaatttgaatcctattaatgttatttatggtctttttcccttgtcaaaattatattattttattttttctattaaaaaataatattaataattttatatttatat

SEQ ID NO: 17495 - DNA, 352 bp, Gossypium hirsutum
  Clone ID: GOSHI-09MAY01-C8777_2
gtgaaagaaggcaagcgtgctgtgaatgtgattctagctaaacacatctggcatgcgacgatttacggtgatggcaaaacaaagactttaatttccggcggccacaactgggctgatggaactcccacatttgctacagctactttcgctgcggcaggaaaaggatccattgcatagggccttgggttcattaacacagctggtgcaccaaagcaccacgcactggctatgcggcctggttctgatcgctccgtattctaccgctgtgcatttgatgcctaccaggacactctttattcccattccaatcgaccgttttaccgcgaatgtgacattttgggcacaattgact

SEQ ID NO: 17496 - DNA, 718 bp, Gossypium hirsutum
  Clone ID: GOSHI-09MAY01-C8777_1
agttgttgaagaaatgaaagctgccatgcaaaactcaactgaatatgccagcaacagtttggctatagttgccagaatcttaggtttattgactgatttaaatattcgtattcataggaggttgcttgggttagagaaagcatgttcggagttcccggcttgggttagtcccactgaaaggagactattgcaggaatccaagcctacccccaatgttattgtggctcaagatggttctgggaatgtcttgaccattaatgatgcggtgaaattggtaggaaaaaagaatgaatcaaggttcgttatatatgtgaaggaaggcaagtatgttgagaatgtgattcttgataaacacatgtggaatgtgatgatttacggtgatggcaaaacaaagactttaatttccggcagccacaactttgttgatggaactcccacatttgctacagctactttcgatacaacaagggaagagaataaggcggagcaaggaggaggtcaaggtagggtaatggaagccagttcacctgaagaggtcgagagttaagacaaggagagactgatctcaaagacaagtgctcagagtaattttaaggtgccaaaaggtcaatcccctattcattgttttctagggtatttataggagagatctcccttgtatgttgtgttgggatatatatttagtctcgttaaatgcataatgaataattattggcac

SEQ ID NO: 17497 - DNA, 661 bp, Gossypium hirsutum
  Clone ID: GOSHI-09MAY01-C8647_6
cccacgcgtccggctcccttctctaaagaaacacggtaaggtagccgtttttgctttcagaaaatctaccgcagtttgcagttgagaggatggtgagagtcagcgttttgaatgatgcactcaagagcatgtacaatgccgagaagaggggcaaacgacaggtcatgatcaggccttcctccaaagtgatcattaagtttcttttggtcatgcagaagcatggttatattggagagtttgagtatgtcgatgatcacagatctggaaaaattgtggttgaattgaacggaaggctgaacaagtgtggggtgattagccctcgtttcgatgtcggagttaaagagattgaaggttggactgctaggctacttccttccagacagttcggatacattgtgcttaccacttcagctggtatcatggaccatgaagaagcaagaagaaggaatgtcggtggaaaagtacttggtttcttctattgagacaaatctgagttctttttatttggtttatttctcttcatgtaggacatggtagttttcctcaacctaagtttggtgtcaatttaatttttgtttatctgggattatacctatgttttgggtatggtgtttgagattacgagttgctcggtttttgttggtaatagatttcttgccct

SEQ ID NO: 17498 - DNA, 639 bp, Gossypium hirsutum
  Clone ID: GOSHI-09MAY01-C8647_5
ccctcccgtccgcgcactctttcaaactaacccaaacgcggccgccgggttttggtttcagaatcagcagcagcttgtatttagaaggatggtgagggtcagcgttttgaacgatgcactgaagagcatgtacaatgcagaaaagaggggcaaacggcaggtcatgatcaggccatcctcaaaagtgatcatcaagttccttttggtcatgcagaagcacggttacattggagagtttgagtacgttgatgatcacagatctggtaaaattgtagttgaactgaacggaaggctgaacaagtgcggggtgatcagtcctcgcttcgacgtaggagtgaaggagatcgagggttggactgccaggctgcttccatcaagacagtttgggtacatagtgctgacaacatcagctggaataatggaccatgaagaagccagaaggaagaatgttggtgggaaagtacttggctttttctactgagtcaaatttttgatattttcctttgttcttttttaatttcactccatgtagaacgtgatgctttactgcaattttaattttgtattgggagttataattatgtttttgggtataatgtttgagattatgaattggtggtttgccttaaattctttttt

SEQ ID NO: 17499 - DNA, 662 bp, Gossypium hirsutum
  Clone ID: GOSHI-09MAY01-C8647_4
cccacgcgtccgcccacgcgtccgcccacgcgtccgcccacgcgcccgcccgcccgcccgcccgcgcgcccggagcaaaacccttaagctgccgccatttttgctttcagcagcttgcatttgaaaagatggtgagggtcagtgttttaaacgatgcacttaagagcatgtacaatgcggagaagaggggcaaacgacaggtcatgattaggccttcctcgaaagtgatcatcaagttccttttggttatgcagaagcacggttacatcggagaatttgagtatgttgatgaccacaggtctggcaaaattgtggttgaacttaacgggaggctcaacaagtgtggggtgattagtcctcgttttgatgtcggagtcaaagagattgagggttggactgctaggctacttccttctagacaatttggatatattgtgctaaccacatctgctggcatcatggaccatgaagaagctagaagaaagaatgttggtgggaaagtacttggttttttctactgagtcaaatttttgatattttcctttgttcttttttaatttcactccatgtagaacttgatactttactgcaattttaattttgtattgggagttctggcgggcggccgggcggccgctgcctgcgtttaatggtggttgcct

SEQ ID NO: 17500 - DNA, 588 bp, Gossypium hirsutum
  Clone ID: GOSHI-09MAY01-C8647_3
ttctcgcaactttgacgcagctgctatttcttttttgtggttttcagcagcagcttgtatttggaagaatggtgagggtgagcgttttgaatgatgcactcaagagcatgtacaatgcagagaagaggggcaaacgacaggtcatgatccgaccgtcctcgaaggtgatcattaagttccttttggtcatgcagaaacatggttatattggggagtttgagtatgttgatgatcatagatctggtaaaattgtggttgaattgaatgggaggctgaacaagtgtggggtgatcagtcctcgttttgatgtcggtgttaaggagattgagggttggactgctcggttgcttccttcaagacagtttggttatattgtgctcacaacatcagctggaattatggaccatgaagaagccagaagaaagaatgttggtgggaaagtacttggcttcttctactgagaaatttgcctttttcattttgaatcgaactcatattattaagatggcatctttttgtagttcacaattatggttttaatgttttgtttacgattatgaattgttgggttggtaagagattttgtct

SEQ ID NO: 17501 - DNA, 804 bp, Gossypium hirsutum
  Clone ID: GOSHI-09MAY01-C8647_2
aaagatcagttgtttctacatgttcttatggttagaataattttaatatcagcaaaacaaaattgagttttggtttgaatgatgtaagagaataggaagaggtgtggttgtgacaaattaatgtttacaagttacaataatgagctgcttggttttttaaatctgattttgcagcaacttggatttggaagaatggtgagagtcagcgttttgaacgatgcactcaagagcatgtataatgcagaaaagaggggcaaacgacaggttatgatcaggccttcctcaaaagtcatcatcaaattccttttggtcatgcaaaagcatggttacattggagagtttgagtatgttgatgatcacagagctggcaagattgtggttgaactcaatgggagactcaacaagtgtggggtgattagtcctcgttttgatgtcggtgtcaaagagatcgagggttggaccgctaggctacttccttccagacagtttggatatatcgtgcttaccacatctgctggcatcatggaccatgaagaagctagaagaaagaatgttggtggaaaagtacttggtttcttctattgaagcaaatttcttagatttttcatttttgtttgaagtttctcttcatctagaacctctgttggtacgatttcaattcacatttaggggatcacgaggttttggttcatttgccttttgttatctgataggctagaagtctggctcgttaaggtttctgtaccctgttttttctcaattttataactgtgcatattatcctttttcttttgctcaaacaaa

SEQ ID NO: 17502 - DNA, 707 bp, Gossypium hirsutum
  Clone ID: GOSHI-09MAY01-C8647_1
gcgttttctctttcaactaaccagagctccccccccgtggcggccgccgggttttgttttcagaatcagcagcagcttgtatttggaaggatggtgagggtcagcgttttgaatgatgcactgaagagcatgtacaatgcagaaaagaggggcaaacggcaggtcatgatcaggccatcctcaaaagtgatcatcaagttccttttggtcatgcagaagcacggttacattggagagtttgagtacgttgatgatcacagatctggtaaaattgtagttgaactgaacggaaggctgaacaagtgcggggtgatcagtcctcgcttcgacgtaggagtgaaggagatcgagggttggactgccaggctgcttccatcaagacagtttgggtacatagtgctgacaacatcagctggaataatggaccatgaagaagccagaagaaagaatgtaggtgggaaagtacttgggttcttctattgaggggatttcattagaattaaaacttttatgaattatgtttttttcctttaaacctcttagttagcaatgcctattttctaaattttggtactcatctatatgtattttgcttatgatgtttggagattttgaattgctgaatattcatcctaatatgagactccaataccattagcattgctcttttcccccaaaaaaaaaaaaaaaaaaagtcgacgcggccg

SEQ ID NO: 17503 - DNA, 493 bp, Gossypium hirsutum
  Clone ID: AI731993.1
cctcaagcaactttgacgcagctgctatttcttttttgtggttttcagcagcagcttgtatttggaagaatggtgagggtgagcgttttgaatgatgcactcaagagcatgtacaatgcagagaagaggggcaaacgacaggtcatgatccgaccgtcctcgaaggtgatcattaagttccttttggtcatgcagaaacatggttatattggggagtttgagtatgttgatgatcataaatctggtaaaattgtggttgaattgaatgggaggctgaacaagtgtggggtgatcagtcctcgttttgatgtcggtgttaaggaattcaagattttacttcttttttggtgtttcaagtttgaatttcttgtggaatggcgttgtcggacttggttttatcaagtttttgcttatgaatttcaagtgaaactgtgttgtctttgatattgttgtaataaagtactccaaatttaggagtcttcatttttgctag

SEQ ID NO: 17504 - DNA, 424 bp, Gossypium hirsutum
  Clone ID: LIB3145-040-Q1-K1-A2
cggaggttcgacccaggcgtacgcccacgcgtacgtccacgcgtccgtgatcataaagttccttttggttatgcagaagcacggttacatcggagaatttgagtatgttgatgaccacaggtctggcaaaattgtggttgaacttaacgggaggctaaacaagtgtggggtgattagtcctcgttttgatgtcggagtcaaagagattgagggttggactgctaggctacttccttctagacaatttggatatattgtgctaaccacatctgctggcatcatggaccatgaagaagctagaaggaagaatgttggtgggaaagtacttggctttttctactgagtcaaatttttgatattttcctttgttcttttttaatttcactccatgtagaacttgatactttactgcaattttaatttt

SEQ ID NO: 17505 - DNA, 360 bp, Gossypium hirsutum
  Clone ID: LIB3146-038-P1-K1-B1
cccacgcgtccgttttcattgggcactctttcaaactaaccaaaacgaggccgccggattttggtttcagcagcttgtatttagaaggatggtgagggtcagcattttgaatgatgcactgaagagcatgtacaatgcagaaaagaggggcaaacggcaggtcatgatcaggccatcctcaaaagtgatcatcaagttccttttggtcatgcagaagcacggtttgtttcaacattcaatctaatctctacccttatatttgttccatcgatatgctaacattgggattgcaggttacattggagagtatgagtacgttgatgatcacagatctggtaaaattgtagttgaactgaacag

SEQ ID NO: 17506 - DNA, 380 bp, Gossypium hirsutum
  Clone ID: LIB3149-032-Q1-K1-E11
gatgcactgaagagcatgtacaatgcagaaaagaggggcaaacggcaggtcatgatcaggccatcctcaaaagtgatcatcaagttccttttggtcatgcagaagcacggttacattggagagtttgagtacgttgatgatcacagatctggtaaaattgtagttgaactgaacggaaggctgaacaagtgcggggtgatcagtcctcgcttcgacgtatgagtgaaggagatcgagggttggactgccaggctgcttccatcaagacaggttagccggaaaactgaacttcataattttatgctttcataagattgttttaccctattctactgagttgtataatggatttgcagtttgggtacatagtgctgacaaca

SEQ ID NO: 17507 - DNA, 255 bp, Gossypium hirsutum
  Clone ID: uC-gsronu33B082e03b1
cccactcgtccggcaactttgacgcagctgctatttcttttttgtggttttcagcagcagcttgtatttggaagaatggtgagggtgagcgactcgactgacgctctcccgatcacgtccatggctgcaaaaatgcgcatccgccatgccaaaatcctaccgtcttttatgtttatactttaacctatgaatatattcaccgcacctccctctcttctttctcccttctttccctcccttcctctattaaaaacc

SEQ ID NO: 17508 - DNA, 355 bp, Gossypium hirsutum
  Clone ID: uC-gsflnu33B004e08b1
tctcacgcgtgcgcccacgcgtgcgcccacgcgtccgatcagctggaattatggaccatgaagaagccagaagaaagaatgttggtgggaaagtacttggcttcttctactgagaaatttgcctttttcattttgaatcgaactcatattattaagatggcatctttttgtagttcagcaattatggttttaatgttttgtttacgattatgaattgttgggttggtaagagattttgtctatttgggagtttcagatatgattgttatgtttttaaagcattttacgcaggattggtggggtaaaaaaaaaaaaaataaaaaaaaaatataaaaataaacaaaagaaataaatg

SEQ ID NO: 17509 - DNA, 249 bp, Gossypium hirsutum
  Clone ID: LIB3149-038-Q1-K1-H1
gtgctaaccacatctgctggcatcatggaccatgaagaagctagaaggaagaatgttggtgggaaagtacttggctttttctactgagtcaaatttttgatattttccttggttcttttttaattccactccatgtagaactggatacttaactgcaattttaattttgaatgggaagtaataataatgttttgggttataaggttggaaattatgaatggtgggttggccttaaaaaaaaaaataaaa

SEQ ID NO: 17510 - DNA, 777 bp, Gossypium hirsutum
  Clone ID: GOSHI-09MAY01-C8677_1
tccgcccacgccctcctcccacgcgtctcgaacgaatcctacaaagccatctttgcatggagaggagatcttcaccaaaatcactttgtctttaatccttcctctatccttcatctaccttgttcacatggaagtatccaatctcttcttcaggaaaatcatccacaacgaaatagaactcgaccacactcgatcaggcactcccaaatgcgagaaactatctgacctcatctccgatgagtgggcttacttttggcttttcaaagctgcctacttcactctgtttttcatcttctcgctcctctcaacagccgcagttgtttacaccatcgcctgcatatacacagctcgggaacttaccttcaacaaagtcatcagcgtcgttcccaaggtctggaagcggctgatggttactttcttatgtattttcatcgccatgtttttataccacgtcgcagcattggctatcttgattggttgcgtggtttcaatcggaggaagcaatttggtttcgcggtgttcgttggtttagcgattttgtactcagtgggggtttttgtatttgaccccaatctggcacttggccagcgccgtctctgttttagaagaggcctacggtttcaacgccatggtcaaaggtaaaaacctgctaaaagggaacctgtggctggcgatggtcattttcctgacgttggaattgcgtcgccatatccagtttgctttcaaatctggggtggaggaagcgctccggatggctatagattggttgcaatattt

SEQ ID NO: 17511 - DNA, 766 bp, Gossypium hirsutum
  Clone ID: GOSHI-09MAY01-C8667_1
gtccttggttggttcatttgaggagtcactattgtctggaaggttcttttctggaaaactcaatcagaggattgatggttttctagctgttctgagcataactggaggggccttctctccacaatctcagaaacttccgttttctgtaaccagtgtggatggagattgttttttactgtattatgcatccattgatctttcaaggaattcatcatcaaataagtgccgagatcagaagctgaaaagaggccttggcattgatgaaccgcagcctgttagaagccggttgcgtattcctatgaaagggcgcatacaattggttcttagcaatccagagaaaacacctcttcacacgttcctttgcaactatgatctgagtgacatgccagctggcaccaagacattcgtgcgccagaagattaccctagcatcttctgttccaaattttgtgctgaacagttctgaagttaaaggcaatgaaggcttcgattcaatacaaataactagttgcaacaatgttcgttgcaaggagcacagtgatgcatatcagagaactaaccagaagctttcccatagtggcattaagatcaatgaaaatactaatggtactggttccctgcgatatgctcttcatctccgatttctatgcactccacctaaaaaaagcccaaagtcttttcagagaggtaaatctgatctagaaccgattccacaaaagactggctctgacaggaatggggatcggagattctacttgtacaatgac

SEQ ID NO: 17512 - DNA, 408 bp, Gossypium hirsutum
  Clone ID: LIB3166-004-P1-K1-F9
cccacgcgtccgagaagcagaaaagaggccttagcattgatgaatcgcagcctgtaggaggccggttgcgtattcctatgaaagggcccatacaattggttcttagcaatccagagaaaacacctcttcacacttttctctgcaactatgatctgagtgacatgccagctggtaccaagacatttgtgcgccagaagattactctagcgtcttctgctccaaattctgcagagctgaaaccaagttttgacaccaaagtccaagataaggtgagactaacctctcaggaaaattcttctttatgccacaacagacacgagaaggaaagttgtggaattaaaggcagtgaaggcttggaattactggaatcaacacaaccgactggttgcaacaatgaccagtgcaagg

SEQ ID NO: 17513 - DNA, 424 bp, Gossypium hirsutum
  Clone ID: GOSHI-09MAY01-C8617_2
ggcaggtgagaaaatatcaccaattgaggtagacgcagtgttattggctcacccagctgtagcacaggcagttgccttcggtgttcccgatgagaaatatggcgaggaggtaagaaaatccaattcatggttttgattgtttttggttttgaatggctgtttggttgtgtaatttgtctaaaagtcggtgtcaaaaaattgcagataaattgtgcggtgattccaaggggaggagtaagcttggatgaagcagaaatcacgaaatattgcaaaaggaatcttgcgagtttcaaagtacccaagaaagttttcatcacggattccgtgccgaaaacagctactggaaaaatccagaggaggatagtagcagagcatttcttgactcaaatgtctgccgctaaagtacccaaatttggagcttaaa

SEQ ID NO: 17514 - DNA, 668 bp, Gossypium hirsutum
  Clone ID: GOSHI-09MAY01-C8617_1
ggtttgtattaggggattgaatgtaacaagggatataagaacaacccagaggctaataaatcggcttttcaatttggttggttccacactggggatgtcgggttttttgactccgatggatacttgcatcttgttggtcggatcaaggagctcatcaatcgtggaggtgagaaaatatcaccaattgaggtagacgcagtgttattggctcacccagctgtaacacaggcagttgccttcggtgttcccgatgagaaatatggcgaggagataaattgtgcggtgattttaaggggaggaagcttggatgaagcagaaatcacgaaatattgcaaaagaaatcttgcgagtttcaaagtacccaagaaagttttcatcacggattccgtgccgaaaacagctactggaaaaatccagaggaggatagtagcagagcatttcttggctcaaacgtctgccgctaaagtacccaaatttggagcttaaattcagcattgcttgtctattgcttaggtacatatttaagcgactgcaatttattgtttgtgtaaaaggggattactaaagcaccatgttacatgtaattctgattagaaattattggaaagtctacattcataaatattttgatcatccaatcattctttgttttatcaatcagcgggggg

SEQ ID NO: 17515 - DNA, 401 bp, Gossypium hirsutum
  unsure (1)..(401): unsure at all n locations
  Clone ID: LIB3146-024-Q1-K1-C4
tgagaaatatggcgaggagataaattgtgcggtgattccaagggaaggagtgagcttggatgaagcagaaatcacgaaatattgcaaaaggaatcttgcgagtttcaaagtacccaagaaagttttcatcacggattccgcgccgaaaacagttactggaaaaatccagaggacgatagtaacagagcatttctcgactcaaatgtctgcctctaaagtacccaaatttggagcttaaattcagcattgcttgtctatcgcttagttgcttacgtacatatttaagcgactgtaatatattggttgtgtgaacaggtattactaaagcaccatgttacatgtgaatctgnttcgtgatagaccagaaccgcaatcaaatgcattcactgctaaaacttata

SEQ ID NO: 17516 - DNA, 869 bp, Gossypium hirsutum
  Clone ID: GOSHI-09MAY01-C8627_1
cccatttcatatttcatacccaatcatctctctccacctcccctttcttcttcaaacagctgtttccccctcaccaaatcaccccctataaaacgcaccttcactcatttctttttcccccacgtttcccctcgcccacgcgggcggcttctgcttctatttactattttctcactctcctactcctttgtgccatcccttttaccttctccgagctcgttaaagagcagcctctggtgttgaagtaccacaatgggccactcttgaaggggaagatcaccgttaatctcatctggtacgggaagttctccccaacccagcgctccataatcgtcgatttcatcaactctttgagctctgccgtcaaacccaagattccgtcggcgtcgttttggtggaaaacgacggagaaatacaagtccggttcctccactttggtcgtgggcaaacaaatcctcctcgaaaattacccgctcggtaaaatccttaagaacccacacttgccagcgttggccgggaaattcaacggcgtaggtacggttagcgttatcctcacggccaaagacgtcgccgtcgatgggttctgcatgaggtgcgggactcacgggtcgaaccgggttggtcgggttcgaggtacttttatctgggttggaaactcggagactcaatgtcctggtcaatgcgcctggccatttcaccagcctatttatggtccccaaactccaccgttggcggctcccaatggagacgttgggattgacggaatgatcatcaccttggccaccctctttggcttacactgttaccaacccgtttaacaacggggatttccaggggcccgccgacgcgccgttggaggcggtttcagt

SEQ ID NO: 17517 - DNA, 262 bp, Gossypium hirsutum
  Clone ID: LIB3189-021-P1-K1-H6
ttacgcccacgcgtgcgcacgagcgaccgactttttttttgttttgtgcgatccctataaccttcaacgagctcgctaaaaaggagcctctggtgttgaactaccacaatgggccactcttgaaggggaagatcaccgctaatctcatctggtgccggaagttcttcccaacccagcgctccataatcgttgatttcattaactctttgtgctttgccgtcaaacccaaaattcccgctgcgtggttttggtggaaaaccaa

SEQ ID NO: 17518 - DNA, 1220 bp, Gossypium hirsutum
  Clone ID: GOSHI-09MAY01-C8157_1
ggttttggccaggcctgggattatgtcattgcagatgcagggcaccaaggaattaggctgcggctcagcttggtaaataacttgcaaccatatggcggaaagacgcagtatgtcaactgggcatggcaagaaggcgttggtttgagctcttctaatgattccttcttctttgatccatctatccgcaaatatttcaagaattatgtcctgactgtccttaccaggaagaacactatcactggaattcaatatcggaatgatcccaccatctttgcttgggagttgataaatgaaccccgttgcatgactgatccttctggggatactcttcaagattgggtagaagagatgtcggctttcataaaatcaatcgacaaaaaccatctcttgaccattggcttagaaggattttacggtccttcaagccccaaaaaggcaactgtgaatccagaacagtgggcctcggcccttggagctgattttatgcgcaactcgaacattacaaatgttgattttgcctctgttcatatataccccgaccagtggtttcatggtcttgggttcgaagaaaaacggaactatgtttccaagtggatgcactcgcacattgaagattgtgacaaggaactgaagaagccagttatgttcaccgaatacggtctgtcagaccagaacaaagacttccagctatcccaaagagagcagctttatagaaccattcaggacatcatttataaatctgcaaagaagaaagggtcgggggcaggtgctttagtctggcagttctttgtagaaggaatgcaggaatatagtgatgatttcgggatggtaccatggcagtccccgccaatttacaaactcaccatagaacactcgtgcaaattggctagaatccaaggacttattcaagaaaacggaaacctcaaacaactgtgttccaagagaaagtaaagctagggcttgctatcagaaaattcaattctttctggtgaggtaatttgtgcgagatatatattggtattgtatcaatttttttcttctaatatccatacaaattactatgtattaagtagagagccatatatatatatagcacaagattgcaagttcgctgcaaaaacttgggtgaatcatcgacaatgattaacatattttcaattcattgtagaaatttgaatggatcccattaagcattgcgcttcaaatgcggttttcaagtc

SEQ ID NO: 17519 - DNA, 430 bp, Gossypium hirsutum
  Clone ID: LIB3148-049-Q1-K1-B5
cccacgcgtccgcccacgcgtccgcccacgcgtccgcgaatacggtctctcggacgagaacaaagacttccagctatcccaaagagagcagctttatagaaccattcaggacatcatttataaatctgcaaagaagaaagggtcgggggcaggtgctttagtctggcagttctttgtagaaggaatgcaggaatatagtgatgatttcgggatggtaccatggcagtccccgccaatttacaaactcaccatagaacactcgtgcaaattggctagaatccaaggacttattcaagaaaacggaaacctcaaacaactgtgttccaagagaaagtaaagctagcgcttgctatcagaaaattcaattctttctggtgaggtaatttgtgcgagatatatattggtattgtatcaatttttttcttctaat

SEQ ID NO: 17520 - DNA, 694 bp, Gossypium hirsutum
  Clone ID: GOSHI-09MAY01-C8167_1
cacgaatcaaatccccatctctccaatcccacaaacccttctccaaatcccacttttccacagaacccaacaacgtaccattcctttttccatctaaaacccatccacagctccaccgttttaaaccaaattccatatccgaaagctcagtgtcagtgcctgaagaagcttttgatgacgctgaagaagacgacccaacttcagaattgagctaccttgactcggagaccgatccctcgagtgttacggagtgggagctggatttttgctcaaggccgattctagatattagaggcaagaagatatgggaactggtagtgtgtgacagttcgctttcacttcaatataccaagtactttcccaacaatgttatcaatagtgttactttaaaagatgctatggaaaccataagtgaggatttaggtgtccctttgccagaaaaagtccgcttcttcaggtcacaaatgcaaaccataattacaaagtcatgtaaagagcttggcataaagcctgttcctagtaaacggtgtctgtcactgcttctttggttagaaaacgttatgagactatatacatgcgccatcctggttttcaaaaaggttccaagccacttttggcattagataaccctttcccaatggaacttccagagaacttatttggagaaaaatgggcatttgtccaagtacctttt

SEQ ID NO: 17521 - DNA, 393 bp, Gossypium hirsutum
  Clone ID: GOSHI-09MAY01-C8137_1
gctctagagactctctagtctcaccgaagttgcataaagaaaagtagctaactgccttggcttgtatctgcggtgctggaccaagtaccatgttttgtgggctactggctctcttcagtgttcacctagcctaatcaccgccctgaacccaccaaaccaccagatttgggtgctgggtttttgtctttatatttgtattttctcatttctgtcaactttcaactaaacattgcagcttcttaatttgtgggggtttttttttttttttggtttgctgcttaatccatggcttcttccctgctggatggagcatgaaaccttcactctcatccgagggggaaccccaaaaaagattgggtttttgggggtcaggtttacatgggaaacagtttt

SEQ ID NO: 17522 - DNA, 463 bp, Gossypium hirsutum
  Clone ID: GOSHI-09MAY01-C8387_1
accgtccgcgtctaactaggcatctcctgcgctgcacgaatccgccgcgatagattactcataaatccaatacttcgtcggggcgaaatggtttaaggttccattctttaaattctgtggttgaaatcatcgatggctagctctgggaaccgagaatttgttgatgatcatgtggatcaaaacggcgactaatcgatcgattcatcatcggacggagttaccgagacctcctctagcggtgaatctggagcggcttcgagacaaaacagcgagactatgaatgaaatcggactcacggaaagattaaccgacatatttgctgacgaaaacgacagagatttgttgcttcaacaaagcaatcgagatgatagcgttcttcaatggctgcaaagctttacatatgcgattaatcggcccttgtccgacccatgagagactaaagcctatgttgaaagtcaacgtc

SEQ ID NO: 17523 - DNA, 369 bp, Gossypium hirsutum
  unsure (1)..(369): unsure at all n locations
  Clone ID: LIB3166-001-Q1-K1-H12
cccacgcgtncgaggagatattttttctctctctaataatttccctcctccctctctctctctctctctctaaaacgacgcctctctggaagtacgccaatcgatctcctcgatcttctcgcttttaattctaaaataatttgaaaattttaacgaatcacgaaattagattccctcataaatccaataatttgtcaattcgaaaatttttaaggttccattttttaaaatttgtggttgaaatcatcgatggctagttctgggaaccgagaatttgttgatgatcatgtggatcaaaacggcgacgaatcgatcgattcatcatcggacggagttaccgagacctcctctagcggtgaatctggagcg

SEQ ID NO: 17524 - DNA, 419 bp, Gossypium hirsutum
  Clone ID: GOSHI-09MAY01-C8357_1
cccacgcgtccgaaaagatttaaaaactaaagtccaagtcttagtgaaagaataagaaatttatttatttattcattcatttggagctttgggttttgattatttattcctcagaaacaagaatttcaaggtcaattttgtttttgaaggcataacttctattatggtgttgaagtttcttatagttgttgtgaaaaagtggttgacaatcctgtcctaagctgcctataaattttctgagatctcttcatcgagttggaaagctgatgtcaaactcatagcatggactcacaccagctttttggatatggtgtgactggtgcaggcctatcctactcaacttttccttcaatacctaataggctgtttagttctttgaaatctgatataggaaactcacccaactcaccattttttac

SEQ ID NO: 17525 - DNA, 760 bp, Gossypium hirsutum
  Clone ID: GOSHI-09MAY01-C8367_1
ctttctctaactttcctggataaaccaaatccttttgaaacatcatctgaatttagcctctatatatttccagattcctcgctctgggtattattactctcttattcccttctcaaaaaccttccactctctcttcctcatcgtatcttcacagtttcagctccatcgcctgcctctttgcttcttcttttcttgttctatagtgtaatttcagtgatggaatcgacttgggtggatacgactctcgacctcaacatcaattcttcccataataccatccaagttctgaagagagaatccagtggaaaactggctgattctgatgtgaaagtaccagttaaacaagagaccggagctttggtggaggaattgaaccggattatcgctgagaacaagaagctaactgagatgctaacagttttatgcgagcgctacagctctttgcagaaccaatacatggaattggtgagcaggaactcgggaagtgatgcaacagctgcaacatcaaaaaagagaaaagccgagtgtgaggattatgtccctatgattggattcagtggaaaagctgagagcagctttagtgatgaagactcgtgcaaaaagcctaaggactgcatcaaagcaaaaatttcaagggcttacgtccgcacaaatccttctgataacagcctgattgtgagagatggatatcaatggcagaaatatggtcaaaaggttacaagagataacccctctccggaggcatacttcaaatgctcct

SEQ ID NO: 17526 - DNA, 386 bp, Gossypium hirsutum
  Clone ID: LIB3166-058-P1-K1-H12
ccgggccggccgacgctacgcgttgctatcagcatgaaatgattcaactttattgcgtgaaaagataaaagccgagtgtgaggattattccaccatgattggattcagtggaaaagctgagagcagctgcagtgatgaagactcgtgcaaaaagcctaaggactgcatcaaagcaaaaatttcaagggcttacgtgcgcacaaatccttctgataacagcctgattgtgagagatggatatcaatggagaaaatatggtcaaaaggttacaagagataatccctctccgagggcatacttcaagtgctccttcgccccaagttgtcccgtcaagaaaaaggtgcaaagaagtgctgaagatccatcaatcttggttgctacttatg

SEQ ID NO: 17527 - DNA, 1619 bp, Gossypium hirsutum
  Clone ID: GOSHI-09MAY01-C8307_1
ccctctttcaaaactttcctcctatttcccttcccttccttcttaatcaaggtttctcgagaaaattcacttcattttcctggaaattatctcttaattccagaaagttttgctcactgattagtaacaaagatttgtttcaattgttagtgccatatagtaaacatgattggatcaacggatttcattgatgagatagattgcggcagcttcttcgatgacctcatcgacttccctaacggagatgtcgaagcctacgactccaccgccgtcatcaacgccgccgcgtttcctactattttgacaactcagcccgagtcattacctttttctgactcggtttttctcaacaacagtgcttccgagctttccactgaactctttgttccgtatgaagatattgttcaattggaatggatgtcaaaatttgttgaagatactcagtgtggagcaagcttgacaactaagaaagaagattcctcttcaatcagtgagggatccaatcatcaattccagacttgcagtccggtttcggttcttgaaagtagcagctcgtgttcaggagtgaaaccattgccgcgcagtcctgaaacgtctgcccccgggaaacgcggacgtccacgaagcaaacgtcctcgtctggccactttcaatcatcttccaggagttcagatgacctccccagcttcatctgtcaatgagaacgacattccccagccatttgctgtcccgaaggtgctgtcggattctgagaactatgctgagtcccggcttctgatcaaattaccgaaacaagtcaatccagaacataagaagaagaagatcaagttatcggtttcagctgcagcagccattgctgattatagtcaaaatccaactggacaagctgttacgaaatgtatgcactgtgagataactaagacacctcaatggagggcagggccaatgggtccgaaaaccctttgcaatgcctgtggtgtccgatacaagtctggcaggctcttccccgagtaccggcctgctgcaagtccgacatttgttccgtctgtacactcaaattctcacaagaaagtgctggagatgagaaccaaaagttgtgcactagcgcccaccacaacaatggttgccaacaatttaccagagttgattccaaataaaagcaacccagcattggattatatatgagtgtcttactccgtacacatccaatcatgagtatggaaagtgttggaaaaatcgaaggtagtatatcggatacatacttttatccgatttacacccgagtccaagtagtatagctttgttattttatttatctcttcgttctttgttctttttcttgtacagggttgaaatggggggaatagagcaatagatgaccaatatgtttaaataatagggagagattgttatgagaaaaattgagggaaaaaggtagagaaaacggaagcttaagagttagcaaagttgtaggttttggcaatggttaggtccttcggatgccaatagttattggagtttatgtttttgttttttcatgggaattattaatttttgcagttaaattgtagtggaaatcaaaattatgagacgagtaaggaaaattgagaagttttttc

SEQ ID NO: 17528 - DNA, 742 bp, Gossypium hirsutum
  Clone ID: GOSHI-09MAY01-C8337_1
ccataatcccttaacgaatggttctttgggtgttcaattgggatatttcaaagatgttttgccttcattttgttcatcttcttcagattgtaaagatttcctcaagaagtcgttaatagtgatgggagagataggaggaaatgattacaattatgcattccttcaaggcaaaaacactgtggagattctacactttgttcctcttgttgttgataccattgcttcagcaatcgcggagttgatagggctaggggcggtcactattttggtccctggaaaccttccaattggatgctccccagcatatctcacatactttcaaggttccgatatggcggattatgatcctttaactggttgcataacatggctgaaccaattctccgagttccacaacgaacagcttcaggaaaagctcgatcagattcgcaagcttcatcgaaatgtcaacatcatttacgcagattattacaacattgcaatgcgtttctaccattcccggaatcagtttggatttactgaaacacttagagcatgttgtggagggggaggtcgatacaattacagttcatcaatggcatgcggggatccgccattaacgacaagctgcaaggacccttcttcacatgtgagttgggatggtttacattatactgaggcaacttacagatggatttcaagggtgttttagaagattatatgctattcttacacatagctgtgttttcatttaccgcggaac

SEQ ID NO: 17529 - DNA, 630 bp, Gossypium hirsutum
  Clone ID: GOSHI-09MAY01-C8217_1
ggcccattccatctgaagaagcaaaatactctttgcgttcttccacaagttccaggaccaacaaaatctcgttccaagctcctttaagttcccaactacctcagaattttaagaaacttgttgtgcatacctggagccaaaattttcgtgatgcaacccatataataagtgcaccattgagactacctcttgagtcagaccaagttcttctgaaagtcatttatgctggtgtaaacgcaggtgatgtgaactttagcgcaggccgttattttcaaggaaccaagaaagaccctggatttgaggcagtgggaataattgctgccattggagattctgtaagaaatttggaagttggaactcctgctgcagtcatgactattggatgttatgctgaattcatgaaggttccttcaaagcaaatacttccaattccaagacctgacccggaagttgttgctctgcttacttcaggattaacagcatcaatcgctttggaagagcttggtcagatgaaatctggaaaagttgtccttgtaactgctgctgctggagggactggacaatttgcagtccagcttgcaaaactggcaggaaataaagttgttgcaacttgcggaagaaaagaaaagg

SEQ ID NO: 17530 - DNA, 1091 bp, Gossypium hirsutum
  Clone ID: GOSHI-09MAY01-C8207_1
gttttgagcttgagataaaatcatcagataatcgtatcctgcaagagagaactgcaaaacaagtgttctgagaatgaagaattgcaagcaaaggtaactctcctggagcagcagttggcatctctctctggcgataaactatcatcttctgcacatggaatatcagaagaacatgctgatgagttacgaaaaaagattcaatctcaggagatcgagaatgaaaaactaaaactggaacaggtgcaactttcagaggagaacagtgggttatgtgtccaaaatcaaaaactggctgaagaagcttcatatgcgaaagaattggcatctgcagctgctgttgagttaaagaatttagctggtgaggtgaccaggctttcagtgcaagaatgcaaaattggagaaggaattattggctgcaagaggatctgctaatcaaactataaatggtgttaaccggaagtatagtgacagcacaagacctgggaggaaagggcggcactctggccactctaatgacttttctggagcggctggtgatgactttgaattgtggaatcttgatctagatgatctaaagatggaattgcaggctaggaaacaacgggaggcagctcttgaagctgcactagccgagaaagaattcatagaagatgaatacaggaaaaaagttgaagaagcaaagaagagagaagaagctctagagaatgatttggctaacatgtgggtgcttgttgctaagttgaaaaaagagggagttgctacccccgagagtaatacagatgagcagcatggtaatagtattgataatgccgacaatccaaaggcaaacagcattgacaataacagacaagtgtcagatgtgttatcaaaaccagctattgaaatgcctaaggaaaccctggtttttcgcctcaaggcacgaatgcaagagatgaaggaaaaagaactcaactccgttggaaatggagatgcccattcccatttatgtacagtatgtttcgaatcaccaaatgcagcaattcttctcccttgtcggcatttttgtttatgtaaatcatgttcgcttgcttgttccgagtgtccaatttgtc

SEQ ID NO: 17531 - DNA, 680 bp, Gossypium hirsutum
  Clone ID: GOSHI-09MAY01-C9977_1
gcctggggcaataacccacgcgcccgtcagcttcactccacatttcacactctttttcaactttctcttcttctctttgttttaaagaggggctggagttttagccaaagaaaactccatggctaaacttgttgctactttcttcttggctctcattgccatctccatggttcaaactttggttatggcatcacatggacatggtggtcaccattatgataacaaacgttatggacctggaagtctcaagccttaccaatgtccatctcagtgcacaaggaggtgtagccagacacagtaccataaaccatgcatgttcttctgtcagaaatgttgcaggacatgcctttgtgttcctccagggtattatgggaacaaacaagtttgcccttgctacaacaactggaaaaccaaggaaggaggccccaaatgcccttaaattactcaaaagaagacccttttttttcttttttacattattatccctataaatttcctatttgaaattcaagtcattgaagcataaggttgcactgtaatactaactatatattttatgttgttagttgttactagtggtttatgtgttttgtttttttgtaccaaattgtcactccattaaaatgagagtggctaaactttgctctattttattaatgaagatggtgttgtttaattac

SEQ ID NO: 17532 - DNA, 465 bp, Gossypium hirsutum
  Clone ID: uC-gsflmaxxa009g08b1
ctcacgcgtccgctggcgtggcgctgctggatgcttttttttgatcaatagaacaggaagaggagggagcctagaggaaagaccacgaaaactacatggctcaacttgatgctactttcttcttggctctcattgccatctccatggttcaaactttggttatggcatcacatggacatggtggtcaccattatgataacaaacgttatggacctggaagtctcaagccttaccaatgtccatctcagtgcacaaggaggtgtagccagacacagtaccataaaccatgcatgttcttctgtcagaaatgttgcaggacatgcctttgtgttcctccagggtattatgggaacaaacaagtttgcccttgctacaacaactggaaaaccaaggaaggaggccccaaatgcccttaaattactcaaaagaagagccttttgtttgttttttacattattatcccta

SEQ ID NO: 17533 - DNA, 406 bp, Gossypium hirsutum
  unsure (1)..(406): unsure at all n locations
  Clone ID: LIB3493-007-P1-M1-D1
tccacatttcactctctttttcaactttctcttcttctctttgttttaaagaggggctggagttttagccaaagaaaactccatggctaaacttgttgctactttcttcttggctctcattgccatctccatggttcaaactttggttatggcatcacatggacatggtggtcaccattatgataacaaacgttatggacctgaagtctcaagcctaccaatgtcatccagtgcacaaggagggtagcagaccagaccataaccatgctgtctttgcagaatgtgcangcatgccttgtgttctcaggatatgggacaaacagttgccttgtcaacactgaaaccaagaggaggccanatccctaaatactaaagaaacccttttttacatatatctataattcta

SEQ ID NO: 17534 - DNA, 352 bp, Gossypium hirsutum
  Clone ID: uC-gsflnu33B085d12b1
gtttaatgcacatggcacactctgttataacgaagaaacctgtctctttattgcaaaaggagatagtgatgtaggcaaagaaaactacatggctaaacttgttgctactgtcttgttggctatcattgccatctgcatgaggtagactttgggtatggcactcacactggacatggaggtcaccattatgataacaaacgttctggacctggaagtgtcaagccttaccaatgtccatgtgagtgcacaaggaggtgtatccagacacagatgcataaaccatgcaagcagttctgtcagaaatgttgcaggacatgcctttgagctcctgcagggtattatgggaacaaac

SEQ ID NO: 17535 - DNA, 322 bp, Gossypium hirsutum
  Clone ID: LIB3147-010-Q1-K1-D6
aacacaaaaatgggtccagaggttgtaatttatacaacaccatctcagtgcacaaggaggtggggccagacacagtaccataaaccatgcatgttcttctgtcagatatgttgcaggacatgcctttgtgtttcttcaaggtattatgggaacaaacaagtttgctcttgcttcaacaactggtaaaccatcgaaggaggatctatatgccgttgaatgactaaaaagatgaccatgatgattttacataagaattcctatatattttctatttggaacataagtcatttcagaattagggctgactcgaatactaactata

SEQ ID NO: 17536 - DNA, 846 bp, Gossypium hirsutum
  Clone ID: GOSHI-09MAY01-C9917_1
cgtttgtccacgcgtccgcccacgcgtccggcgccgcggcggggggctcatggtttccgccaatggtgcagctgaaacattaaccctggctcctgacttcatcaagggaggtcgagccatgcggtcggtctttgatcttcttgaccgtaaaactgagatagagcctgatgaccctgatgccacacgggtggggagggcgccttcgggagaagttgaactaaagcatattgacttttcttatccctcgcgtcctgatgtcccaatcttccgtgaccttaatcttcgtgcccgagctggaaaaactcttgcccttgtcggtccgagtggatgtggtaagagctcggtcattgcacttattcagagattctatgagccctcatctggccgtgttatgattgatggaaaggacatccggaagtacaacctcaaatccttgagaaaacacatagcaattgttcctcagcagccatgcctctttgcttccaccatttatgaaaacattgcctatggacatgagtcagctgctgaggctgaaatcattgaggcagctaccctagccaatgcccacaagttcatatcttcacttcccgaaggttacaaaacgtttgtcggggagagagattcaactttccggaggccaaaacaaaaaattgccattgcaagggctcttgtgaggaaggcaacttatgctgcttgatgaggcaacaagtgcccttgatgccgagtctgagagatccgtccaaaaggctctagaccgtgcctgctctgggaaaactacaatagtggttgctcataggttgtcgacattcggaatgctcatgtgcttgcggtgataaatgagggggt

SEQ ID NO: 17537 - DNA, 482 bp, Gossypium hirsutum
  Clone ID: uC-gsronu33B168f03b1
tgtttctttcttcaattcagagaacaaaattgttggccgattttattgaagccttcaggctgcattgaggcgctgcttctggaagggtcaaattgcgggaagtggatttggtgtagctcagttttcactatatgcttcttatgctcttggtctttgggatgcttcctggcttgtgaagcatgggatctctgatttttcaaagacaatccgagtctttatggttctcatggtttccgccaatggtgcagctgaaacattaaccctggctcctgacttcatcaagggaggtcgagccatgcggtcggtctttgatcttcttgaccgtaaaactgagatagagcctgatgaccctgatgccacacaagttccagaccgccttcggggagaagttgaactaaagcatattgacttttcttatccgtcgcgtcctgatgtcccaatcttccgtgaccttaatcttggtgcccgagctggaaaaactc

SEQ ID NO: 17538 - DNA, 414 bp, Gossypium hirsutum
  unsure (1)..(414): unsure at all n locations
  Clone ID: LIB3166-020-P1-K1-A2
cgtccggtaagaactgttgctgcattcaattccnagaacttaatttttcgccttttctcctcaaacgggcaggctccattgaaacactgcttttggaaaggacaaattgcaggaagcgggttcggggtagctcaatttgcactatatgcttcttatgcacttggtctttggtatgcttcatggcttgtgaagcatgggatctctgatttttccaaaacaatccgagtctttatggttcttatggtctctgccaatggtgcagccgaaacattgaccctggctccagacttcatcaaaggacgtcgagccatgcaatcagtctttgaacttcttgaccgtaaaactgagattgagcctgatgacccggatgccacacaagttccagaccggcttcgtggagaagttgaactaaag

SEQ ID NO: 17539 - DNA, 755 bp, Gossypium hirsutum
  Clone ID: GOSHI-09MAY01-C9897_1
ctctttctttccttttgccattttctgtggagagttgcagagattttgagtctctctctttttatattgtgaagctgggaattcattaaaagaaaaacccataaattccattgattgaccatattcagaatctctttctcatcaattatggtattttaactataattatatcacctttactttccctttagttgattcgcagtgatgaagatgatcataaagcacgtgcacactcgtattaacatcaaaccaggatccacttgatcatcccaatatcatcatttaattagttcccgttgcagctataatttatcagacaagcaagttcttaaatgggttgattcaaagtttgatgattgattgtgaagaataagtgaagtgaaagcacagaaaataacagcaaacacaacagaaacagcatccgatggcgacgtactttcatgggaaccctgaaatccaagcacctgatggtcttcaaaccctcgtactcatgaaccctgcttatgttcagtactccgacaccactccgccgccgcagccaaacaacctcgtttttcacgctccaccacctccccaaactcaacaatttgtcggtgtcccacttacggctacttccaccgccaaaccaagacccttctctccaccgaaatctcccccttggcatggtcctcgttccacgcgttcctatacaacctgggccaccctattgacccttcggagcagcgcgtgaaaactcacgcgctcagcaaggactt

SEQ ID NO: 17540 - DNA, 416 bp, Gossypium hirsutum
  Clone ID: GOSHI-09MAY01-C9867_1
cggaagaagtccatgttgctccaaggaaggactcattatttgagcttggactgctttagaagataaagtacttacatcatatattcatgttcatggtgaaggcaaatggagaaacctccccaagagagctggtttgaagagatgtggcaaaagttgcagacttagatggctgaattatcttagaccagatattaaaagaggcaacatctctcatgatgaagaagaactcattataagactccataatcttcttggcaacagatgggcttttaatagctggaaggctaccccggcgaacagacaatgaaatcaagaactactggaacactactttaggtaagagagctaaagctcaagcatccattgaagctaaaacaataccaaccgagtctagactcaatgaaccctcgaaaagt

SEQ ID NO: 17541 - DNA, 1263 bp, Gossypium hirsutum
  Clone ID: GOSHI-09MAY01-C9827_1
cttccgcccacccttccgacctaattaattttcctttaataaactgaataatcaaacctctctttgggtgtttctttcattaaactctgtgtctactctcaggattttctgcgtattgttgtttccttgaagaacatcatgccatggcagtcaagcatgaaaatatatatttttctcaatattgtttgaattaagatcattattattaagacatgtcttgcaatgggatggctttttttccggccaatttcatgctccaaactcctcatgaagaagatcatcatcatcaacccccaacttccatcaatcaaatgcttccttcatgcacaccccaagactttcacggtgttgcaccatttctggggaagagatcaatatcatttgctggtatagatcatgtatgtgaaggaggaaatggggaggatgatttatcagatgatggttcacaggcaggagagaagaagagaaggctgaacatggaacaagtgaagacccttgagaagaactttgagttggggaacaagcttgaacctgagagaaaaatgcagctggctagagctcttgggttgcaaccaaggcagattgctatttggttccaaaacagaagagcaaggtggaaaaccaagcaacttgagaaagactatgatctccttaaaaaacagtatgaagctatcaaagctgataatgatgcactccaagctcagaaccaaaagcttcatgctgagatattggcactgaaaggcaaagaaccaacggaatccatcaacctcaacaaggaaacggaaggttcatgtagtaacagaagtgaaaacagctcggatgtgaagctgggtatgtcaaggacaccaacagtcattgacagccatccgacaagctgcagaacccttttcccaacatccattaggccaactacagcagtcgcacagctgtttcaaacctcatcatcaaggcctgataatcaccttcaatgccaaaagatggatcaaattgttaaagaagaaggcctgggtaacatgttctgcaacatcgaggatcaaacggggttttggccgtggctcgaacaacaccatttcaattgatgatttggaatgtttgaaaaagtactcgtcgatcaaagtgtcatcccagttacagaaaaacataacatggtgtatttgtttatgttatacataatgattatgatatgtatccaaggttttggtaacgagagagagagtgatgtataaaagtagaaatcatatcaagtgaattttttttatgatc

SEQ ID NO: 17542 - DNA, 505 bp, Gossypium hirsutum
  Clone ID: GOSHI-09MAY01-C9587_1
cccacgcgtccgcccacgcgtccgaagaaagtgagctttgggacgactccgccctcatcgatgccttcgacaacgccatgtccaaatataagaaaatgcatggaaagaaaaacagtgaggccaatgtctctgtttctgttcatcaaaccggtgatgaggccataaaacccagggatgcaggagagaacagcagttccagagctaatactgggatggaaatggaggcggcgaaggatgttgaaccagttaaagaaagtcatactgtaaagttacagactcctgagacttacatagattcatcaactagtctgccaatgcaggataaccaagatgggaatatggcctattcggattcgcaagctgcgcaggattataaccaattactcaaccagtattatgaggttgaagacaagaggcaaatgattctgcagcagcttcagcaatttggtagttggaattatcaatactcgggtgagggttctagcacagctgcacagtcctgtgc

SEQ ID NO: 17543 - DNA, 646 bp, Gossypium hirsutum
  Clone ID: GOSHI-09MAY01-C9567_1
cccacgcgtccgtatatctaccaaagtttaaactccaaacagcaaagaatcagagtagaaaaaaaaagccaaaggaagatgaagaggtggttcgatccatggcccgtgttcttcaagagagagttcaatcgcacttggcctttcctcgttggtttcgccgtcaccgggaccatcatcacaaagttctcccttggtctaaccgaggaagatgctaagaactctccctttgctcagaagcacaagaggtgatccaactgatttcaaaagcctatatggttgcagtcccttggtatgagaggctcagttgttttcctttttccttttcccaatgaacaatgaaaataacagaagacatcagttctgagtacactttattttgtgaattatgattttgtcatcaattaatgattttgctttgaataaggttaaaacacccttccagttagtgattatgtttgacgcccttgattctgggtttatgatattgagaatcaaaacatgaaaatttggtgccattggttgccaattattagttaatgaacttaatgatggttaaggatgaaaaaaaaaggataacatcgcaaatgaagggcgaaaagcctgagtccgtataaaaaaaaaaaaacccaacgggggggcctcttta

SEQ ID NO: 17544 - DNA, 427 bp, Gossypium hirsutum
  unsure (1)..(427): unsure at all n locations
  Clone ID: LIB3166-015-P1-K1-H12
ggaattgccgggccgggccgagcgacgcgtcagtccacgcgttcgaaaaagccaaaggaagatttattggtggttcgatccatggcccgtggtctggaagagagagttcaatcgcacttggcctttcctcgttggtttcgccgtcaccgggaccatcatcacaaagttctcccttggtctaaccgaggaagatgctaagaactctccctttgctcagaagcacaagaggtgatccaactgatttcaaaagcctatatggttgcagtcccttggtatgagaggctcagntgtttttcttttttctttttcccaaggaacaatgaaaataacagaggacttcagttctgagtacactttattttggggattaatgatttggccttcaataaaggttttggttttgattaaggttaaaccacctttccag

SEQ ID NO: 17545 - DNA, 292 bp, Gossypium hirsutum
  Clone ID: uC-gsronu33B076c07b1
tctacgtgtacgagaagctatagagactcagagggcaaagtaagggaggatctctgacaacctaaacttgagttgttctgagtgtaacgtcgaaggtttaggcgttgccgcaaccagcatgacaaggttctgcgttggtctaaccgaggaagatgctaacaactgtccctttgctcagaagcacaagaggtgatccaactgatttcaaaagcctatatggttgcagtcccttggtatgagaggctcagctggtttccttcttgcttttcccaatgaacgatgaaaataacag

SEQ ID NO: 17546 - DNA, 517 bp, Gossypium hirsutum
  Clone ID: GOSHI-09MAY01-C9517_1
cttcgtcagagatatacaagacattgcctattagggaagagcttttgcgtgcctttttgaatgcggatttaatcgggtttcatacttttgattatgcaaggcattttttgtcgtgctgtagtcgaatgcttggtcttacttatgaatccaagagggggtacataggtgttgagtattatggaagaactgttagtatcaaaattctccctatggggatacacatgggtcagctggagtcggttttgagccttccagagactgaagccaaggttacagagcttcttaagcagtattgcgatcaagggaagacaatgttgcttggggtggatgatatggacatatttaagggtattagtttgaagctgctagcaatggaacaactacttttgcagcatcccgagtgtcaagggaaggtagtgctggttcagatagcacttccagctagaggccgaagaaaagatgtgaaagaggtgcacgaagagacatattcaactgtgaagcggattaatgaaacttt

SEQ ID NO: 17547 - DNA, 467 bp, Gossypium hirsutum
  Clone ID: GOSHI-09MAY01-C9527_1
gtctctttctagctaaatgccttgactgtttcccaaaactcccatctccttcccaaatgatgcttcttgcaatggaggcttctagtagagacggcgttttcagccaaaattggtccttattataatctttgtcaccttagttgttctcacaataatccctgtactttaccctttgatagggtatcctttatacgtctcaaaagcctcatcttccaggcccttgcccaccaccgcatacgagtctcaacaacccgaacccctgccttcgataaagatatccgaaggagaggactgtgacatattcttgggggaatgggtgccgaaccacgccgcgccgtactacaccaacacgacgtgctgggccatacacgagcaccagaactgcatgaaatatggaaggcctgacactgagttcatgaaatggaaatggaaacctgatgggtgtgagctacctgtgctgaacccag

SEQ ID NO: 17548 - DNA, 548 bp, Gossypium hirsutum
  Clone ID: GOSHI-09MAY01-C9497_1
tttaacttttataaaaacagaagccatcaatctctcttgctagggtttcattcaactcaccgtcgacgaaccaatatcacgcctagtggccgacggcgtgcgattaacgaccagatctttgccaacgaaggccgtaactatggaaatctggtcagcttttctcagcgccgacgcaggtaggcacggcatggcgaagccgcttatgagcttgtcgatgtggggcgtgaagcgttagggctactgatggcgtttgcggccctggctgttggctagggttggccgaaagtttggttggtattttgggcctagggtattttgggtttaggtttattaggttgggtttattggtgggttaataaatgtaaatgactggactttaaattagttcggttttattattatttttatttttggctttctggcttattataggcccaggcaaattgggcctattacagattgtttatgtttaattttaatgtttagctaaattgtcatgtgataaatacttgggatatgaatatgaggtcctttgatgcttgttaatt

SEQ ID NO: 17549 - DNA, 574 bp, Gossypium hirsutum
  Clone ID: GOSHI-09MAY01-C9457_3
gttattgcttatgagcctgtatgggccatcgggactggcaaagtggctacaccccaacaagctcaggaagtgcatgtagctgtccatgattggcttaaaaagaacgtgtctgaggaagttgcatctaaaacacgtatcatatatggagggtccgttaatggaagcaactgtgctgagcttgcaaagcaggaagatatcgacgggtttctcgtaggtggcgcttccttgaaggggccggaatttgctacaattgtcaactccgtaacatccaaaaaggtggctgcctaaatatatatgaagctgattgaaagtaagaaataaaggacccaaataaagaagctatttgaggttgaagctcatgtgacatatttagtgttatatacccccatggagttttttgattacttattgagttccattttcccggaaaatcataggaaaaaatgaattgtggtgttgtgaaataagttgaaattctcgttgtaacactttataaatgatccatggaaacaaattgaggttgtaacctatacacgaccatatacttgaacttaaataatttatctcttgtagg

SEQ ID NO: 17550 - DNA, 1251 bp, Gossypium hirsutum
  Clone ID: GOSHI-09MAY01-C9457_1
aaccaacagccaccaccacatacccttctgaaacctcacccacaccaaactccagaaccagcctccgttatcaatggcgatgatatctacatattgcccacatttcaacggacttcaccgatcatctcccaagctcgacagttctcaatctcaatctttccttcaacacatcaactctcagcttcgccttgcttcgtctcgtaaaccttgcagagctgttactgccatggccggttccggaaagttctttgttgggggtaactggaaatgtaatggaacaaaagactccatcacaaagcttgtttctgacttgaacagcgcaaagttggagactgatgttgatgttgttgtgtcacctccctttgtctatctcgatcaagtgacagcttcattaaccggtcgaattgaggtatctgctcagaactcttggattgggaaaggtggggcttttaccggagaaatcagtgtggagcaattgaaagatattggctgcaagtgggtcattcttgggcattctgaacgcagacatattattggtgaagatgatcagtttataggaaagaaagctgcttacgctttgaacgagggtctcggagtaatagcttgtattggtgaattactagaagaaagagaagcaggcaaaactttcgatgtatgcttccagcaactgaaggcttttgctgatgttgtacccagttgggacaatatagttattgcttatgagcctgtatgggccattgggactggcaaagtggctacaccccaacaagctcaggaggtgcatgtagctgtccgtgattggcttaaaaagaatgtttccgaggaagtggcatctaaaacgcgtatcatatatggagggtccgttaatggaagcaactgtggtgagcttgcaaaagaagaagatattgatggatttcttgttggtggtgcttctttgaaggggcctgagtttgctacaattgtcaactctgtaacaaccaaaaaggttgctgcttaaatatatataaggtggattcaggtaaatgaataaaaggacgaagagaagctgtttcaggttgaagcttcatggtgattatgagttacagtgttatccaatggggttttgattgcttattgagttccttttccccaaaataacaggaaaaaatatgttcgttctcgtgctataggtcaatttctttaaactgctgtgggaaatatagctaattcactgacattgaggagagtgcctgcttactgttgcaggggctc

SEQ ID NO: 17551 - DNA, 642 bp, Gossypium hirsutum
  Clone ID: LIB3828-012-Q1-K6-A8
tattgccctcacttcagtgggcttcgccgatcatctcccaacttacacaatgcaccatgtcaatctttccttcaacacttcagctctcaagcccgtctcccttcttctcccaaaccttgcagagctgttattgccatgtccggctctgggaagttctttgttgggggtaactggaaatgtaatggaacaaaagactccaccacgaagcttgtttctgacctgaacagcgcaaagttggagagtgatgttgatgttgttgtggcacctccctttgtctatcttgatcaggtgacttcttcattaactgatcggattgaggtatctgctcagaactcttggattggaaaaggtggggctttcacgggagaaatcaggttagctaaccttggctttgtgcacaaaacatgttaattcttcataattttggagcctttaacatagtaatattggctttttacccttcttgggaatataaaactgcatcattttttcatttagcctaccattagaaacatgtttaaaaatattcaggacttcaattacttcctatgatgtcccaatgagtttaatttgttgccttgatactagtggaatatttgtttttgctggtggataaatttcaaattatttagttcagacttc

SEQ ID NO: 17552 - DNA, 382 bp, Gossypium hirsutum
  Clone ID: LIB3585-063-P1-K2-D12
gtgatctatacctttcaaaagtttctttttctgacttcagattcttcaagttcgtcacgcggggctgaccccttttctgaaagtactgttgcagttttttccgtcaatacgatttcacaccctattagttgttatgccgggatcttttttattatggaacaactcatgtatgcctatttgtttcattctctagttctatttccttcactgatgatgttatttttcttcgtatagaatggaacaaaagactccatcacaaagcttgtttctgacttgaacagcgcaaagttggagactgatgttggtaatttagtgccttaaatcttgcaatttgtgtatgttaaatctattatggaacttggctttaggttttatatattca

SEQ ID NO: 17553 - DNA, 363 bp, Gossypium hirsutum
  Clone ID: uC-gsronu33B139g11b1
ttatggaagcaactgtgctgagcttgcaaagcaggaagatatcgacgggtttctcgtaggtggcgcttccttgaaggggccggagtttgctacaattgtcaactccgtaacatccaaaaaggtggctgcctaaatatatatgaagctgattgaaagtaagaaataaaggacctaaatgaagaagctatttgaggttgaagcttcacgtgacatatttagtgttatataccccatggagttttttgatcacttattgagttccatttatccggaaaatgataagaaggaaaaaaaagctgtggcgaccatataagttgaaatcgtaaagagggcactatctatgaaaggcaaagtaacagatcc

SEQ ID NO: 17554 - DNA, 465 bp, Gossypium hirsutum
  Clone ID: GOSHI-09MAY01-C9477_2
cccacgcgtcgcaaaaacctggtccgctctttctcttcttcttcttcttcttttatataaccaaagtaaggccgattttaaaccggctatttccttttgatggtagtatttcttgtttcatttaatcagattatcaagtgagaaaacgggagaatgaaaagggaagatacagttaggaatgggcatttcctcgccgataggagatggtttttccccatcgttatcaccggccttatagctggtgcgattgttacttccagcttcataaaagccgccgattactcgctgctatgctccgtcgccaacaccagatcaccccagggcgttggtaaagggtcggccacgccgatccaactccaagctatcatccactacgccacatcacgcatcacaccgcaacaaaacttcagggagatctccgttacctttgatgtcctcaagaaaacgtctccttgtaatttcctc

SEQ ID NO: 17555 - DNA, 1061 bp, Gossypium hirsutum
  Clone ID: GOSHI-09MAY01-C9477_1
ttctcacgcgtccgcggccgcgtggggttttaaaaaaaaaacctcaagaaatgaaaagagaagagactacaaagaatcggcatttcctcgccgataaaagatggtttatgcctattaccatagctggctttattgccgggacgatacttatctcgagcttcataaaaaccgccgattactccatactatgttcgctcgccaaaaccagatccatagccgtagaggaatactcctcctcgccggtccaactccaagctatcatccactacgccacttcatcaatagtcccgcagcagaacttcaaggagatctccgtaacctttgacgtactcaagaaacgctctccttgtaatttcctcgtctttgggctcggctacgactccctcatgtggacctccctcaatcccaatggcaacactattttcctggaagaggatcccaaatgggttcagtctgtgctcaaagacgccccaatcctccacgctcgcgcggtaaagtaccgtacggagctcaaggaagctgacgatctactctcccattaccgctccgaacccagctgtttcccctccaaagcttacttacgcggcaacgacaagtgcaggcttgccttgacgggctttcccgatgagttctacgatacggagtgggatttgatgatgatcgacgcgccgcgcggatacttcccggaggcaccagggaggatggcggcgatattctcggcggcggtcatggcgaggaacaggaaagggcccggcgtgacgcacgtgttcttgcacgacgtggatcggcgggtggagaaggtcttcgccgaggagtttttatgtagaaaatacttggttaaaagtgtcggtagactctggcattttgagattccttccgctgctaacatgagcagccacggcggcgctcagttttgctaaaatgcgctccgttcagtcatgctagtgtgtgtcagaactcactcataaatgatatattttggaatagtgataatttttcgttttactgaattaagggttttcttttatattataaataaaaatcaaggatgggttttattg

SEQ ID NO: 17556 - DNA, 359 bp, Gossypium hirsutum
  Clone ID: LIB3145-013-Q1-K1-E3
cccacgcgtccgcccacgcgtccgcccacgcgtccgagagactacaaagaatcggcatgtcctcggcgataaaagatggtttatgcctattaccatagctggctttattgccgggacgatacttatctcgagcttcataaaaaccgccgattactccatactatgttcgctcgccaaaaccagatccatagccgtagaggaatactcctcctcgccggtccaactccaagctatcatgcactacgccacttcatcaatagtcccgcagcagaacttcaaggagatctccgtaacctttgacgtactcaagaaacgctctccttgtaatttcctcgtctttgggctcggctacgactccc

SEQ ID NO: 17557 - DNA, 185 bp, Gossypium hirsutum
  unsure (1)..(185): unsure at all n locations
  Clone ID: LIB3166-056-P1-K1-E2
cgtccgaggtcgcgaggccccgcggttttttccctttggcacctggaaggttggctgcaggttagcttggttcggncttggcgtggaccangaaagggnccggcgtaacgcacgtgttcttgcacgacgaggatcggagggaggttttggtcttcgccgaggagtttttatgtagaaaatacttg

SEQ ID NO: 17558 - DNA, 424 bp, Gossypium hirsutum
  Clone ID: GOSHI-09MAY01-C9467_1
agcctaatttgtatgaagctgacgaacattggccactccatttagcttttgtcgtgcccatttttgcgcatctttactgctttcttaggcagatgatgatttctaattgacatgtcttactttgagcaatgtcaaactttagtgactcaaaattttgctgtgtgctgaaaaggtaccacattacagtttagtatgtcttattctttcatgtatttttcattttttccaggaagagatggaagagcttgagagaactgacaatgtatcaacattgtctgaggagttgctgcttatcatggagacaatacctgatccactactcccattaacaaatggtcctataaacccatcttgggatagatggtttgaagggccccaagacgccaaaggttgcagatgccagattctctgatttgaggcaatc

SEQ ID NO: 17559 - DNA, 206 bp, Gossypium hirsutum
  Clone ID: LIB3148-058-Q1-K1-G1
tccaagcctaatttgtatgaatttgctgatcataagctcataaatttagctactgtcgagccgcagttagtgccatcatttctgcttttttctgacagatgatgagctctaattgacatgtctctactttgagcaatgtcaaactttagtgactcaaaattatgctgtgtgctgaataggtaccacattacagcttagtattggac

SEQ ID NO: 17560 - DNA, 1324 bp, Gossypium hirsutum
  Clone ID: GOSHI-09MAY01-C9417_1
cccacgcgtccgctctcttcttttttcctcccttgaatggtgttgttgcagacatggccgttgaactcatgatgagttgcaggaacggtgacagcttcgcagccaaaatggaagaaaacgccgtcaaagaagccgcttccgggctcgaaagtgttgagaaactcatcagattactttctcaaactcaacagcagcagcaaactaacagtaataatcaagagaaataccaagcttcctctatctcaacaacatctaattccctggatttggaaatggactgcaaagctgaggctgatgccgccgtttcaaggttcaagagagttatctctcttctgggtcgaaccaggaccggacatgctcgtttcagacgagcccctgttcaacccgatcaagagcaagaaaccaaggtttattacgcaacaccgatccagcagattccgccaccagtgactactgcttatcctcttcctcctcctcctcctcctcctcctcatcatcatcatcgtgattttatgacggtgaaaacagggggtttagaacggattgattcgtcgaaaaccattaatttttcgtattcttctgctgggaattcgtttttgtcatcccttacgggagatactgatagtaagcagccatgttcatcgtcatctgcgtttcaaattactaatttttctcaggtttcctcggctgggaagcctcctttgtcgtcttcttcttctttcaagaggaagtgtagctccgacaacttgggttctggcaagtgtactagtgggtcttccggtcgctgccattgctctaagaaaagaaaactgagatcgaaaagggtggtgagggttccagcaataagcctgaagatggccgatattccgccagatgattactcatggagaaagtacggtcaaaaaccgatcaagggatccccacacccaaggggttactataagtgcagcagtgtaagaggatgtccagcccgtaaacatgttgaaagagccttagatgatccatcgatgctagtagttacctatgaaggcgagcacaaccattccctatctgttgctgagaccactaatctcatcctggaatcttcgtaggcttccccctcatgtttcaattttcattttctcttacattatgtgtaggatggaacagttttaaatgtgttctcaagttaaaaagaaaatcaatctcgaaggagatatttcctctgtaaaatatatctatatgcagaagctttgtttaattaaaagggaagatggtggatttggtattagattttattttaaaagaatggaaattgggatccaagatttccaagccatgaatc

SEQ ID NO: 17561 - DNA, 568 bp, Gossypium hirsutum
  Clone ID: LIB3825-008-Q1-N6-B7
gacaaaggatttaatttcttggttttgtaaattaaagtacaatattgacccaatggcgcttcatttctagttttccctttagtttcatcaatccaatggctttggacattgatgccattttcttctatgctatgtacaccaatctactcttgggaaaagttgggtcatttaatggatttttatctacaacacacccaccccagcacggccattactcttatctttgtttcaaattttcagacaacaactaagcctatcactccaacacaagttgcttatgacgatttaagtcatttaggtagctggttcgactgtaatcttgcaaatccaagctgtctgcaattattcctctctcaccacaatatttcagctccccctctaccggactctctttgttcttcagcaactccacaacctgaaaattgcaaagaatttagcggttcctgccatgttccaaatggaaaacaaagggaacaaaaggagatgctttcgaattcgtttcgtacccttatcatggttggacgctgactggcagagtgattaatgcacatggaagctgttatcattg

SEQ ID NO: 17562 - DNA, 378 bp, Gossypium hirsutum
  Clone ID: LIB3166-018-P1-K1-C7
gtcgattcagccagacaaagccttgtgatttggttaaaaccgctcctacaacagaacgggggaaaggaattggtagatcctgggctaggagacaattatgatccaagtgaaatgaaacgtacaatgataaccgctttcatgtgcattaatcactcggccagtaagcgtccaaccatgataagggttgtggagttgctgaagaacaaaaagagtccggtagagggtgagctgaaatgttgtggtgagagaggaataattgcagacagcttggatttgcaagattatagtcgaaccagctacctaaatgacttaaatcgtcataagcaactggttatggagtgacaggcttatttgttgtctgaaaattttgaacaaaaa

SEQ ID NO: 17563 - DNA, 429 bp, Gossypium hirsutum
  Clone ID: LIB3148-018-Q1-K1-A12
cccatacgaaaccatgttaacgtccgcttccattagccactcaacccccgacacaacgactgtcgccattctggagctggcacgggaaaaacgcctcttgacttttgccttacaggggtctctcaacccatcagcagtcatgggagtgagcttggaaagacagaaggcgataatggtaccatacatggaagcacatgtcccaaattaccacctctggatgcaagaccctgctctgcttcaagccaccggatcagagcccctctccctccaacaggaatacgatgtgcagttttgctggaaccaagaccctctcaagaaaactttcattattttggataatgagatggtccgagaaaagaatgttcatgtcaatcctcatgtcgaagccatggtcggagatgtgaatatctacatgaatgatttggatga

SEQ ID NO: 17564 - DNA, 418 bp, Gossypium hirsutum
  Clone ID: LIB3166-017-P1-K1-E11
cccacgcgtccggttaatgtcggttgcaattagtagttaaaccccccacaaaacaacagtagccataccggagctggaaagtgaaaaaagcctcttggtttttgcctttcaagggtctctcaacccagcagtagccatgggagtgagcttggaaggacagaaggtgataatggtaccatacatggaagcacatgtcccaaagtaccacctctggatgcaagaccctgctctccttcaagccaccggatcagagcccctctccctccaacaggaatacgatatgcagctctcctggaaccaagaccctctcaagaaaactttcattgttttggataaggagatggtcggggaaaagtttgttcatggaaatcctcatgtggaagccatggtcggggatgtgaatatctacatgaatgat

SEQ ID NO: 17565 - DNA, 397 bp, Gossypium hirsutum
  Clone ID: LIB3145-016-Q1-K1-C7
caaagtaccacctctggatgcaagaccctgctctccttcaagccaccggatcagagcccctctccctccaacaggaatacgatatgcagctctcctggaaccaagaccctctcagttcttctctctctcttttacttccttttctgattgtttataccaatttctcaattgggttttcttcttctttaatttaatgattaagcttggttttcaacagagaaaactttcattgttttggataaggagatggtcggggaaaagtttgttcatggaaatcctcatgtggaaggtcacctcatctactacctttgtcttaattgcacagaatttagtgaaaccctttgatttcttcagcgtattggtttggactgatatgggagtgatggtaaacgatgat

SEQ ID NO: 17566 - DNA, 850 bp, Gossypium hirsutum
  Clone ID: GOSHI-09MAY01-C9737_1
tttcgtgtttctttattcctaactctctctaccacctaaacctcattctattctttttttcgttttaatggatgagttaaacagcaagaagcgggctagggacgactccaacgagtcgggcctggactcgcccgacgtgaagagactcagagatgatttatttcttgatgattcagattccttgcctcttaatcaagaccttgcatccgtaatgaagagttttgaagaggaaatagcagctgtcccatctacttcaacgggatctatgccagttgtggatctcacttctgattctagtgactcgcaacctgatcttggttacctttttgaggcttccgatgatgaacttggtctccctccccctacggcttccacaactgatactgaaggaaggtccgaagcgactgatttggtgcgagctgactcaaactcctcaggaatcgatgatttgtgggggttcgaggaacagaaccctaactacgattctttcgagtttggattcgttaataatttcaatgatggcaccgctgcatatgatgcactgttcgagcattcctgatgtctattacgattcctccgatatttctggtcaactatggcggccggaaactttgtcggcagagtaaaaatctaaacttaaaatccaaaaaaaagagagaagaaagatagcaaaccaagctaaacacaagacagtcatagccgatctgtaaatttttttttcagctcatgttggggtttgcgttagaaaattttttattaaaggaaggtttatccatcacataaatatgtaattctcgctccttttatatataaatagtttttatttcttgttcaatgtgtttttttatat

SEQ ID NO: 17567 - DNA, 1284 bp, Gossypium hirsutum
  Clone ID: GOSHI-09MAY01-C9727_1
gttttagtcacgatataagcaaaggggctgataatccaccgaagaatttaggtcaccgccgtgcccattccgaaatcataactcttcctgatgatattaacttcgacggtgatctcggcgtcgttggggcagccgacgggccttcctattccgatgaaacggaggacgatatgttgtctatgtatctcgatatcgataagttcaattcttcttccgtcacctcaatgtttcaggttggcaagtcgttgacaacgactgctccaaattctggtccatcggctgcggtgagtatgggagcagggacggcaacgtccggtgaggaaaatgcgagtgttggtgttgggtcttctgagaagcctagaattaggcaccaacatagccagtcgatggatgggtcgacaagtattaagcccgaaatgctcctctctggttcggatggaggttccgcctgctgattctaagaaagctatgtccgctgctaagcttgctgagcttgctcttattgatcccaagcgtgctaagaggatctgggcgaataggcagtctgctgcgaggtcaaaggaaagaaagatgcgatatatagctgagcttcgagcggaaagtacagacgctgcaaactgaagcaacatcactctctgcccagctgtctctggtacagagagacaccggtgctctgactgctgaaaacagtgaggtgaaactgcgcttgacaagcaatggagcaacaagttcacttgcaagacgcattaaatgatgcaatgaaagaggaaatccagcatctgaagatgctgactgttcatcctatgccgaatggtggaggaatgatgaactttgcatcttttggagctagtcagcagtactacccaaataaccatgccaagcatactcttctggcagcacagcagttccagcaacttcagcttcactcacagaagcatcagcatcagcatcagcatcagttttcaccaaatcaactgcatcatcaacaggagcaaacaggggagatgagagctagaggttcaatgccttcccccaacaagaaagattcttcatcagatgtaaactcaaccgcgtcaaaggattaaggactgagagacctataggactgcagagataaggtgttatcctttaaactctggtgattggtaccataagctgccggtcgttcagcctatacgtactaattgaggtaaaccaaaatgatacaggtactgtatgttttttttttttttggtttttaccgacatgtatcattattgatcgatattaattaggtattggtgc

SEQ ID NO: 17568 - DNA, 343 bp, Gossypium hirsutum
  Clone ID: LIB3166-017-P1-K1-G11
cccacgcgtccgcccacgcgtccggtgatctcggtgttgttggggcggctgatggaccgtcgtactctgatgatacgggggaggatatgttctctatgttcattgatatggataagttcaattcttcttctgcaacatcgacttttcaggttggtgagtcgtcagcccccgccgctgctccggcaactgctcatatggctgctgctgcatggactgggatgaatggtgagaaccagagtgttactgttgggtcttccgagaaaccgagggttaggcaccaacatagccagtcgatggatgggtcgaccagtattaagccggaaatgcttatgtccggtgcgga

SEQ ID NO: 17569 - DNA, 580 bp, Gossypium hirsutum
  Clone ID: GOSHI-09MAY01-C9617_3
tccgccaacccttccgccaacccttccgcccacgctttcggaactttccattgtcaggtgcatatgatatcatcttttccccttggtcctagttccttttcattttcctaaccaatgtagaagctttatttttttgttcctttttcctgttctcattgtgtgaatgttaatttcaatggctagacaagttgactcctgctgcatttgagaagcattctggaagagagacggccagaaagtggaagaataatgtttgggtgatagttaatgggggagaaggtttctttatcaaagactgcattgctgaaatactacaaccaagcgtctaaaaatgccaatggtactaacagatcccataatgcaagagtttgtcaccgtgacgagtttgttcgctgtagcaggtgtaacaaggagagaagatttcgattgcggacaaaagaggaatgtcgaattcaccatgatgctctagcagatgtgaattggaaatgttcggatcttccatatgacagaataacttgtgatgatgaagaagaactagcaagtcgcatggcatacaggggcttgacccgttctccacatg

SEQ ID NO: 17570 - DNA, 917 bp, Gossypium hirsutum
  Clone ID: GOSHI-09MAY01-C9617_1
cacactactccacaccaaaccaccccctctctctttcgctctctatctcaacgtattctccaccagatctccgggagtaatcccataaagatgcgtgtttttccagcccttcctttggtatataggctttagacctgttataaaatccctcagccaacaacttcgatattacccatatgctcttttctttttgttgattcgattttttttctctcttctttggggtttctggcttctcttcctttcaggaaacctaataaggaaaacagtgtgcgtgtgtttttggtagagatacagcgtctgctgggatcttgtttggagagagaaaatggagaatgaagtacaaagagagagtgggtcgatgatctttagcgatgaggagttgatagaggtgagtggattgaagaaaggaagagattttatagaagtcacatgtgggtgtaccagtcataggtatggtgacgctgttggcaagcttagggttttctctaatggtgaccttgaaatcacctgtgaatgcacccctggttgcaatgaagacaagttgactcctgctgcatttgagaagcattctggaagagagacggccagaaagtggaagaataatgtttgggtgatagttaatggggagaaggtttctttatcaaagactgcattgctgaaatactacaaccaagcgtctaaaaatgccaatggtactaacagatcccataatggaagagtttgtctccgtgatgagtctgttcgctgtagcaggtgtaacaaggagagaagatttcgattgcggacaaaagaggaatgtcgaattcaccatgatgctttagcagatgtgaattggaaatgttcggatcttccatatgacagaataacttgtgatgatgaagaagaacgagcaagtcgcagggtatacaggggct

SEQ ID NO: 17571 - DNA, 600 bp, Gossypium hirsutum
  Clone ID: AW186912.2
ttttttttttttttttttttttttttttttttttttttgttaaaaaatatcatgttcttttcatctcttacatacatacattctctgcaacctaatctctttgtccatgccatttttatttcacaactccaaatacccataacaattttctactaaatatagaattctcctctttcaatctctctttctctcttctttccaccatcttcaataacattcgttgaagtggtcaatcctatagtaaactttttttttttggctaaaatttcttcattgagcgatgaaaattgctccccaaggaaaaagaaaaattgtattttttttggagataatgaagtgcaaagaagaagaaaaagaagccgtgatgcaagcttagggttttctctaatggtgaccttgaaatcacctgtgaatgcacccctggttgcaatgaaaacaagttgactcctgctgcatttgagaagcattctggaagagagacggccagaaagtggaagaataatgtttgggtgatagttaatggggagaaggtttctttatcaaagactgcattgctgaaatactacaaccaagcgtctaaaaatgccaatggtactaact

SEQ ID NO: 17572 - DNA, 614 bp, Gossypium hirsutum
  Clone ID: AI055503.1
cttttatcttgtcgattcgatttttctcttcttttaagtttctgtgttctttaagagactctgtgtgtcagaatctttgttagagcgagaaaatggaaaatgggatcgacaaagtaagtgggtcgatgttgtttagtgaagaggagttgatagaggtaagtggattgaagaaaggaggggattttgtagaagtgacatgcgggtgtactagccataggtatggtgacgccgttggcaagcttagggttttctctaatggcaaccttgaaatcacatgtgaatgcacccctggttgcaatgaagacaagttgactcctgctgatttgagatgcattctggaatagatactctttgaaatggaaaatattgttggcttgtatttaaatggtttaaggttccttttaataactgatttttaatttctccattcttctttttaatggctatggttttaccaggccattatgcataattttcatcatgtaagtttgtcctttgtcatgggtataggatatattattctttgcggtcattaagatgtagattcctttgtgtttatctgatgtacctgtatcttctatatctttgactatttctgttctcttttataattg

SEQ ID NO: 17573 - DNA, 356 bp, Gossypium hirsutum
  Clone ID: uC-gsflnu33B144h10b1
ttattgagagattgaaagaggagaattctatatttagtagaaaattgttatgggtatttggagttgtgaaataaaaatggcatggacaaagagattaggttgcagagaatgttgtatgtatagagatgaaaatttcagaaccataattttccaggcttacaatggcagccgccggcgccgctgctactgctgctagtttgtggctttttattgatattattctcttctcttttctttttctgttttactatcatacttttgttttttctttttgggtataatttgatgaacactttacttgtaaaaaataataattgtaagagtattcatataacgctatctgatacataaatatg

SEQ ID NO: 17574 - DNA, 282 bp, Gossypium hirsutum
  Clone ID: LIB3145-019-Q1-K1-G9
cccacgcgtccggcttgcccgttccaagccaagagttggaccaaggggcacgagcgtaggcttgtgtttcgtggttcttagagagggggaaaaagcgtgaggctggtttcacagagcagcgaacacctcccgctcctggcagtggaagaataatgtttgggtgatagttaatggggagaaggtttctttatcaaagactgcattgctgaaatactacaaccaagcgtctaaaaatgccaatggtactaacagatcccataatggaagaagttggcaccgtga

SEQ ID NO: 17575 - DNA, 859 bp, Gossypium hirsutum
  Clone ID: GOSHI-09MAY01-C9627_1
cccacgcgtcgtttcaagtctctgtttttctgattttctttttgtagaaaatacaatgaggtaaagttatgatcttgtttcgattccagaaagtaaaagcttggtgttgttactaatggaaactgatacgatcaaaccctgcgataacgtcgttcattctcgattcttccgttctggattttattgctggggttgggaattcttgactgctctgcttctctttagttgttctgcctaaaaacgaccaggtttttcaatttgttcttcctttttacttttggaatcataattctttggtagaatcttttttttggggggttttacgtgttctttgggagggatttgatcaatcggaaagtcggaaaatatggcgcaaaggtcagttccggcgcccttcttgaccaaaacgtaccagctggtggatgatccgatcaccgacgacgtgatttcttggaacgaaagcggcacctcttttgtcgtttggaaaactgctgattttgctaaggatttgctccccacctatttcaagcacaacaacttttccagcttcgtccgtcagctcaacacttacggatttcgaaaggttgttccggacaaatgggaattcgcgaacgacaacttcaagcgagggcaaaaacagctcttgtccgaaatccgtcgccggaagacggtgacatcaccgcggctgatgctccggcgaacggcaaaacgtctggtgccgcagctccctcctcgactgacttcggtgaggacctaggatccacttcacgtcgactcaccgggaatcgaagaatccgggatcggtggaaacgacgcggcagtgacacgattaatagccgatctatcgacgagacgagat

SEQ ID NO: 17576 - DNA, 636 bp, Gossypium hirsutum
  Clone ID: AI054692.1
ttttgcttttccccttttataaacaacccatcatcaacaatctgcaaaaaaagatagagaatttcaagtctctgtttttctgattttgtttttgtagaaaatacaataaggtaaagttatgatcttgtttcgattccagaaagtaaaagcttggtgttgttactaatggaaactgatacgatcaaaccctgcgataacgctgttcattctcgattcttcctttctggattttattgctggcgttgggaatccttgactgctctgcttctctttagttgttctgcctaaaaacgaccaggtactttaataagttcttccttattacttttgtaatcataattctttgacagaatctttctttgtgaggggtttaccttgtactcttggatggatttgatttatcgcatacttgtatatattgtgtaatagtcattatctttctatgtatatgttaatcatcgtatacttgtgtgaagatactctcacccactaatgatacttctataatccatcttgtccttattagaccattgaattatatcaaatatctatgatgatttattatatattttatcaccttatacatgttcttcgaattacattcattcatccgatatgtactattttaatatgatg

SEQ ID NO: 17577 - DNA, 451 bp, Gossypium hirsutum
  Clone ID: uC-gsflmaxxa089h05b1
cttttggatttactctcacaaccaactcaccacagggggtgtctcttaccaaacctatgcgattgataacactcaaaacacccaacagagtctggtgagaatctagctctaaggaaaggggatccaaaccatacaatcacacgattgcttgactatctaggttatctaaaagctcgagacagagaattcacacaccggtctgcgcatctatagatcatgtctctaaacgccatacccaccgtcctcctgcattttgagaacctgcctacccctttgatgacactgccctttgatctgtctcatgcatattctaggctagatcttgtagcaagtgtaacatgacaggcaatcgaaatggcacataggtcagccgcggcgccctgcgtgacgaaaacgtaccagctggtggatgatccgaacaccgacgacgtgataacatggaacgaaagca

SEQ ID NO: 17578 - DNA, 350 bp, Gossypium hirsutum
  Clone ID: LIB3166-016-P1-K1-E5
cttcgctttttttttgggggttttaccttatcctttgtgtgtttattcatcaatcccaaagtcgggggggatggttcaaagttcattttcgaccccgttcttgatcaaaacgtaccagctggtggatgatccgatcaccgacaatgtgatttcatggaatgaaaacggcacgtcttttgtcgtttggaaaactgctgattttgcaaaagatttgcttcccaattatttcaagcacaacaacttttccagctttgtccgtcagctcaacacttacggatttcgaaaggttgttccagacaaatgggaattcgcgaacgagaactttaagcgagggcaaaaagagcttttgt

SEQ ID NO: 17579 - DNA, 835 bp, Gossypium hirsutum
  Clone ID: GOSHI-09MAY01-C9187_1
cccacgcgtccgcccacgcgtccggtcagccttctgatttggtggggcatcttccaattcaccaattgaactatgcgtccaatgccaggctctcatctacctccaaccctactccctggttcacccaaactacccaagccttcgatatcaattccgaattttcttcggcagcgatgcccagttttctcccaccattgacggcttcgtttctggctgctcctatggggtacaagccttccgtcgctgatagtccttcaatggcctcgttcaccgtgaatggttcccgctattgggaaacgggtgcctccgctaacaacaacagtaacagcagcagcaacagcactgagctgcaaagcaatagttccttctacgacaataatagctcctcttggggattaccagattgtagcacaccagagaaagaggctccactccatctaatggaaagtcaagcagaagatataaaatggagcgaatatctgaataacccattgctaatggccgctgctttgcaaaatcaaactccacagtccttgtacaacatggacatcaaatcagaaacacatttcctcactaataattcatcaaacagtatgtggactcataaccaacagcaacagcagcgagaacctttacaaaatcccaatatgtgtgctgctaaggacatccacagacttacagcagcttatggacatgtctagaaagcatcaaacttgaactaatggcatgctcatgtataaggtgtgtaccacagatttttcattttcattttctttttaattctggtgtatataggtctgatacaaaaattaattatcacctctgcttttggact

SEQ ID NO: 17580 - DNA, 874 bp, Gossypium hirsutum
  unsure (1)..(874): unsure at all n locations
  Clone ID: AW186756.1
tagacctccttaaatataatctcttagactcagtttctttttaattaaaaatccgaaataatattttcttactctgtaaggaacaaataatcttttcttcgtctacgactctaacgctgtttttcatttttttttttggtttctatttattgggttgattgattatccaacgatcaacaagccacccgcttgcgagctatgttcaggttctggggttcacaggagcaacaagctcagccacgtccacaagagggttcttcacattcttggtatcctcctcctggtgttagctccacaaattcttcccggccttcaacgccaggtagcagtgcatctaacagcttcaacttacagaggccttcagaaaggccacattctccctcgcaagtttcaccctctgaagctgcaggaatcattgctcttttaaaggacaaaagtgttgatgaattacggaagcttttgtctgacaaggatgcttacaatcagttcttactatcagttgaccangttaaaatccaaaacaatataagagacgaacttcggaaagagaatttgcagcttggaacaatttggataaagaaccacaaataatggaactaaaaaaccagtgcaggattatctggaccacagagcttgccgcaactttggaaaaaataaatgatcttgagaagccgaaagaagagattctgaaattctatcccccgcatcgtttatcacaaggctcaaaattccnttgaataaaaaatatagaatccnaaattgttgaaagggcactccttgaaaaggaaaataatttgggagatttcttgccaaattttaaaaaccccgaaatagtttccattgcaggtttcatccaccttggagggttaaaaaa

SEQ ID NO: 17581 - DNA, 651 bp, Gossypium hirsutum
  Clone ID: LIB3582-058-P1-K1-B5
ctcctcctggtgttagctccacaaattcttcccggccttcaacgccaggtagcagtgcatctaacagcttcaacttacagaggccttcagaaaggccacattctccctcacaagtttcaccctctgaagctgcaggaatcattgctcttttaaaggacaaaaggttagatgtctggttgttgcactcctgtccaccttgctattggcaaggaaatcttcatttccttttatgaaagaaatttaagattcttattccttattgcttttgtgctttactaatgatcgattatgctcttttattcattttatccatcttcccttttttattatttgcatttgtggcttcttaaatgttgggtacttacagaagtaaaaatgcttgttttaattaatagcaaatctcgcaactcctaatcactgtcttattttcttagtgttgatgaattacggaagcttttgtctgacaaggatgcatacaatcagttcttactatcagttgaccaggttaaaatccaaaacaatataagagatgaacttcggaaggagactttgcagcttgcaaggaacaatttggataaagaaccacaaataatggagctaagaaaccagtgcaggattatctggacaacagagcttgccgcagctttggaa

SEQ ID NO: 17582 - DNA, 419 bp, Gossypium hirsutum
  Clone ID: LIB3166-010-P1-K1-E7
cccacacgtccacagggttcttactgttcttggtatccaccttccgacgttggctgcagggattcattccgacccggaacacccattaacagggcttctaacagcttcaactcgcaaacgcctgcagaatggtcgcattcactgtcgacggtttcacctactgaagctgctggagtcatagctcttttaaaagacaaaagtgttgatgagttacggaagctttcgtctgataaggatgcatacaatcagttcttactatcagctgatcaagttaaaattcaaaacaatatacgagatgaactacgaaacgagactttgcagcttgctaggaacaatttgtataaagaaccacaaataatggagctaagaaaccagtgcaggattattcgcacaaccgaattggctgctgctcaggaaaa

SEQ ID NO: 17583 - DNA, 517 bp, Gossypium hirsutum
  Clone ID: GOSHI-09MAY01-C9127_1
cccacgcgtccgaagggccctcggcggcagtacccactaggccaacggccactggtagaggccggtgcattaggttgatagatttagatcccgaaccgtgtcaggttcttcctcaggctgaacctttggctgccgctggacctgctttcaaccgagtagaagtagtggcagataaagatattgcgatggagggtcggagtgctgataaaatagtcggagttgaagaagaagctagcaccacccctgttcctgaaacggtacaagtgggtaattctcctgtatataggttagaaaggaaattgggtaagggcggttttggccaagtttatgttggccgaaggacaagtggtggtagtgatagaattggacccgatgcaattgaggtggccttgaagcttgagcatcggaacagtaaaggttgcaattatggtccgccttatgagtggcaagtgtaccaattccctaaatgggtgttatgggattccttctgtgcactacaagggtcgccagggagact

SEQ ID NO: 17584 - DNA, 925 bp, Gossypium hirsutum
  Clone ID: GOSHI-09MAY01-C9087_1
cccacgcgcccgggacgacataaaagtttatattgcatttattcgaagatgttgaagaaaaagttgaccatggatgagatccacgatatccgcggactacgtgtcattgttgaaaatgtggatgactgttatgaggctttgagagtagttcaccagttatggtctgaagtgcccggaaagctgaaggactatataagtcgccctaaatttaatgggtatcagtccttgcacacggtggtgatgagtgaaggtacagttccacttgaagttcaaattcgaacaaaggagatgcatctgcaagctgagtttggctttgcagctcactggagatacaaggagggtgactgtaagtactcttcatttgtacttcagatggttgagtgggctcgatgggttgtgacttggcattgtgaaacaatgagcaaggaccaatcgtcaatatgctacattgattctgtcaagccaccctgcaccttccctactcattccgatgattgcccgttctcttataagcctcactgcagccaggatggacctgtctatgttatcatgatcgaaaatgataaggtatgtttcttaaatagcacttcattgctttttcaggttgagcctgtagtcatgctttggcgggggaactcgagatggtctccatatggttttccagtgaaggaagaattgaggccaaggctgaaccatgagccggtaagcgatgctacatgcaggctgaagatgggtgatgtggtggagctaacaccagccattccagacaagtctttgacagagtacagggaagagatacagcgcatgtataaccgaggtctttctgtttccagtactgggcctcctgctagtaacatggttgctttacgacgttgacgccttttcgtttttttttttatgctaaacccaaaaggggggcaaaaag

SEQ ID NO: 17585 - DNA, 667 bp, Gossypium hirsutum
  Clone ID: GOSHI-09MAY01-C9017_1
cccacgcgtccgcccacgcgtccgcccacgcgtccgcccacgcgtccgagtaatttctcttttcttctcaaattatcattcaccatctttctcgtcggttttgagatctcaagctgatttattacgttttaatataggttgagatggcttcgaccactctaatctgcgatacccagccatggaaggacttgaaggctcatactgaggatatcaagaaaactcatcttcgtgatttgatgaacgacaaagaacgatgcgaatcgatgatggttgagtttgatggaatgtttttggactactcaaggcattgcgccactcttgagaccatggataagctctataaattagcagaggctgcttctctcaaacaacaaattaaccgaatgtatagtggcgagcatataaatagcacagaaaataggtcagtgcttcatgtagctcttcgagcaccaagggatgctgttataaacagtgatggaaagaatgtggtgccagatgtttggaatgttttggataagatcaaggatttttcagagaaagttcgcaatggctcctgggttggagctactgggaaaccactgaaggatgttattgcaatcggtattggtggcagtttcttaggtcctttatttgtgcatactgctctccaaacaggttatgctggtgc

SEQ ID NO: 17586 - DNA, 623 bp, Gossypium hirsutum
  Clone ID: LIB3543-010-Q1-K6-G5
cccagcgtccgcgcctcagctttttgtcagctccaacttccttttttttttattccattagttgagatggcttcgaccactctaatctgcgatacccagccatggaaggacttgaaggctcatactgaggatatcaagaaaactcatcttcgtgatttgatgaacgacaaagaacgatgcgaatcgatgatggttgagtttgatggaatgtttttggactactcaaggcaatgcgccactcttgagaccatagataagctctataaattagcagaggctgcttctctcaaacaacaaattaaccgaatgtatagtggcgagcatataaatagcacagaaaataggtcagtgcttcatgtagctcttcgagcaccaagggatgctgttataaacagtgatggaaagaatgtggtgccagatgtttggaatgttttggataagatcaaggatttttcagagaaagttcgcaatggctcctgggttggagctactgggaaaccactgaaggatgttattgcaatcggtattggtggcagtttcttaggtcctttatttgtgcatgctgctctccaaacagaccctgaggctgttgaatttgcaaaaggacgccaactacgtttcct

SEQ ID NO: 17587 - DNA, 733 bp, Gossypium hirsutum
  Clone ID: GOSHI-09MAY01-C9357_1
cggacgcgtggggaaaaaaagaagaagagagagccatgggtggaaacgacgatagattaagaacccgtgacaacatccctcccgctgacggtagtcgctacgctttgagtggcaaaatcatgctcagtgccatcgtggttttgctcttcgtagtggtacttatgtttggtctccacctttacgcacgttggtacctcctccgtgctcgccgtcgtcattcacgtaaccgacgtcgtcatcaccgtcgatcgcagctggttttttacgtagaccccgacgttaatggtcctcccgccgtggcttcacgtggactagacgcgcaggttctcaagtcgttaccggttttcactttctcctccgagacacacccggattctgccctcgaatgtgctgtttgtttgtcggaatttgaagaaaacgaatcgggtcgggtattacccaaatgtaaacatagttttcatttagagtgtatcgatatgtggtttcattctcactccacgtgtcctctttgtcgaacttccgttgaaggatccgtacccgtttctgataacgcgggagatttggttattacgattaatgaaccgtcaaatggagagtccggatccaatcaagaacccgattcgtgtcagcacgaggatggtcggcccggttcgtcggcggggaggaagttgtcgatcgaggttcctgtaaggaatattgaaggcttcataaatgagtcgagtgagtgtgagtc

SEQ ID NO: 17588 - DNA, 601 bp, Gossypium hirsutum
  unsure (1)..(601): unsure at all n locations
  Clone ID: AI054593.1
aaaaaagaaganagagagagccatgggtggaaacgacgatagattaagaacccgtgacaacatccctcccgctgacggtagtcgctacgctttgagtggcaaaatcatgctcagtgccatcgtggttttgctcttcgtagtggtacttatgntttggtctccacctttaacgcacgttggtacctcctccgtgctcgccgtcgtcattcacgtacnncgacgtcgtcatcaaccgtcgatcgcagctnggttttttacgtagaccccgacgttaatggtcctcccgccgtggcttcacgtggactagacgcgcaggttctaagtcgtaccggttttactttctctccgaacacaccggattctgctcgatgtgctgttggttgtcgaatttgaaaaacgaatggtcgggtataccaaatgaacatagtttcattagagtgatcattgtgtttcatctcatccagtgcctcttgtcaacttcgtgagatcgaccgttctgaaaccggagattgtatacgataagaacgcaatgaagccgatcataagacccattggtaaacagatgtcgcccgtgtcggggtgggatgcttaggtttacgaa

SEQ ID NO: 17589 - DNA, 443 bp, Gossypium hirsutum
  unsure (1)..(443): unsure at all n locations
  Clone ID: LIB3147-027-Q1-K1-D4
nncgccacgcgntccgcccaacccggtcgaattaacggtacccgtacggtcgtcatcaaccgtcggatcggcaggctgatttttttacgtagaaccccccgacgttaatgggtccctccccgcccgtgggcttttcacgtgggactaggaacccgcagggttcttcaaagtcgttaccggggttttcacttttcttcctccaagacacancccggaatcntgccatcgaatggtgctgtttggtctgtcggaatttgaagaaannacgaatcgggtcgnggtattacccaaatgtaaacatagttttcattcagagtgtatcgatatgtggtttcattctcactccacgtgtcctctttgtcgaacctccgttgaaagatccgtacccgtttctgataacgcgggagatttggttattacgattaatgaaccgtcgggtggag

SEQ ID NO: 17590 - DNA, 637 bp, Gossypium hirsutum
  Clone ID: GOSHI-09MAY01-C9377_1
gagaacttgagtattaaatcccaaagtttcattattgatttctctggtcacaaatggcaaaacttagagttaccatcaccggggatggctcaagcaaggtggtgaagatgggagatgatgccatgggtggccatagaagaatgaatggaaacaaaagattcttacaagacaaaccctggagaaatgttggtaacagaaggcatcaaatcaatggtgtccagtggagatctaatggctttaaaggacaaggttctcggattgctggaaaagaccttcgatttaaactgatgcgcaaacgtggaccttttcagtttcgggatacttttgaagatcatagaaggaacatggaaaaaccgtcaaatctatttagccaccacaaaatcgtaacaagcatattgtctgaaccaggacctaacggaataaccattctgaatcaaattcttacaataacataacggaatttttgcaaatttactccttgcaaactttagaatggatctagaggtttcctgaatgcccgaaataattccgactttaattccagggatgacctgtttccaacaattggattttcaatctttcaggggatccgtcctaagccttgtaaaggaaacgcttacttcaatgccatccccat

SEQ ID NO: 17591 - DNA, 303 bp, Gossypium hirsutum
  Clone ID: uC-gsflmaxxa119d05b1
aattttcaccataaaaaactcttactttattgacctgacctctcttaatgttaaatagcaaaggaagtaagagaacttgagtattaaatcccaaagtttcattattgatttctctggtcacaaatggcaaaacttagagttaccatcaccggggatggctcaagcaaggtggtgaagatgggagatgatgccttggttgttcatagtatattgattgttaacatatcattctttcctgtctaatccttgttttattgttcctaacacttttttctagttttttttcttcctctcttcctcttc

SEQ ID NO: 17592 - DNA, 440 bp, Gossypium hirsutum
  Clone ID: GOSHI-09MAY01-C9367_1
attttgacttcgaaaaacatcgggtacagtatatacatcccagttcagttcagttcaattctctccgattctattctccccagtcaagaagaacaagaagatggagagaactctaacccgctcattaatcgctgttgtaatctcttcctttgccgccattcgatcctacagaaggaagtctctcgatttatctggagctcttgccggatttctcgtcatgactattcatttcgttgccggatacaggttcggggcaatgttgcttgcctttttcttcacttcatcgatgcttaccaaagttggagaagacaagaagcggcgagttgatgctgattttaaggaaggtggacaaagagactggatacaagttttatacaatagtggtattgcagcagttttgtctgttcttattgggaacctgactggatgggaggacaagt

SEQ ID NO: 17593 - DNA, 505 bp, Gossypium hirsutum
  Clone ID: GOSHI-09MAY01-C9317_1
cccacgcgtccggtcttttgtggtggatataccggatgggaacaccaaggacgaaacatgctacttcgttgaggcactgatcaagtgcaacctcaagtcattggctgatgtttcagagcgtttggctgttcaggatcgcactgagccaatcaaaataatgtgaataatctgggtccctcttagcagcatcaaggttgttgtgtgtgatgagtgaagaaatgttattattagaagctgagtagaaagttcgggctaccttgggttagagtcaactcctattttcttaatacttcatgcatcttcttcttactagaacattataattaggtgtgttgtgttgatagtagctgacaattaagctacaccttcggcctacagatttcttaaatgaagaaacatttcagaaattttctttgtggcttattctatggtgaataatgcggtattgtattggtatctagttgttaatattcttgcacaatggaaattttatagcctttcatgt

SEQ ID NO: 17594 - DNA, 1087 bp, Gossypium hirsutum
  Clone ID: GOSHI-09MAY01-C9337_1
cacagttcctcaagaaaatgaatcactctgacaacagtgaccaccctcagcttccatccatcaagatccgtcatccctcctcccctcaccacccctcctccgccgctacccctactcctaccgctggcgcccgccgtaagatcggtgtagccgtcgacctctccgacgaatcagctttcgccgtccgttgggctgtccaaaactacctccgacccggtgacgccgtcatcgttctccacgtctcacctacctccgtactctatggagccgactggggcccactcccccacaccccacaaagcgcggaaaccccggagtcccagaagcaaatagaagacgaattcgatgccttcacggcttcaaaagtggcggatttggccagacccttgaaagaatccggggttccctttaagattcacatagtgaaagatcatgatatgagggaaaggttgtgccttgaagtggagaggttagggttgagcgccgttataatggggagtagagggtttggagccgagaaaacagggagtgatgggaagttgggcagtgttagtgattattgtgtccatcactgtgtttgccctgttgttgttgttaggtaccctgatgataaagatggcgggagtggtgagcctgtgattaccattaaggaggctgaagtggaggaggaagcttccaaagatgcttagcaagtccttggtaattgcagcttctttattgcgtcagtagcagcatagtagaaggcttccagttgtgaagagaactcaggtaaagtggattgtagggttctcattcccctggggtatatcctctttgtataaactcggttgttgtggttcttggtttcatttttatggcactgtgaggagatattgttgtactaatactatgatataaatataaagataaatccagtgtcaacgggggaatgggagctgtgtccgcgctgcttcggtgggtgttcggttgacacctcgtccttgttgtaaggtttttttcgccgcacccggggaactcccatccccccgagttaatctttgcccccgccccgggcgttttttaacttctcaagggaaacccggtgttt

SEQ ID NO: 17595 - DNA, 641 bp, Gossypium hirsutum
  unsure (1)..(641): unsure at all n locations
  Clone ID: LIB3825-002-Q1-K6-D5
gttttaactgagagcaaaccttggcaaaagctctgaaatcttgtaatctctcaaactctcttcctttaagatatagagtgaaaagagtagggccccaaaatagccatagccaagagaaggcgctacggcagtatcgagggagcaagttcacacgagactgagactcttatcagtcgtcgtgtgtggggaagggttttggttgnnttatnnnctnccacaagaattagggcgaccacgcgctcaaaaaaaaaaactgcacggcgcataaacccaatcctttagaccgcccatgaaccgaatctcccatatttaattagtttatccaaaaaaaaaattcagcatactttcaatcattaaaccccggcgaaaaatggccgcgtcgctgctattccccgtcgcatcgtcgacgaaaacagccgctcctccaacctactcgccacggaaacctataccttccggtcaccgtttcttctcattcccttccaaaaccaagcctcttctcaaattcaccggcaattcaaacaaacatcggtctttcaccgccaaggccatcgaagaaagcaaggagagcacggaagacacgttgaccgccaaggaagtggatacggaaccggaatcgagtgaggaaagcgagctgagtg

SEQ ID NO: 17596 - DNA, 421 bp, Gossypium hirsutum
  unsure (1)..(421): unsure at all n locations
  Clone ID: LIB3165-033-P1-K1-G4
cggaaannccgggcggcccacgcgtccgcccacgcgtccggccgcgtcgctgttattccccgtcgcatcgtcgacgaaaacgggcgctcctccaacctactcgccacggaaaccagtaccttccggtcaccgtttcttctcattcccttccaaaaccaagcctcttctcaaaatcaccggcaattcaaacaaacatcggtctttcaccgccaaggctatcgaagaaagcaaggagagcacggaagacacgttgaccgccaaggaagtggagacggaaccggaatcgagcgaggaaagcgagctgagtgccattggagcagagataaagacggcgatgaaggagagagaagcgaataatagtgataacagtctcgccggcggagtggctgaggagataagggaaatcgagtggcctgcattt

SEQ ID NO: 17597 - DNA, 384 bp, Gossypium hirsutum
  Clone ID: LIB3166-013-P1-K1-B11
cggacgcgtgggcggactcgtgggcggactcttttgcgcgctcaaaaaaaaaaaaatgggcggtgcataaacccaatcctttagaccgcccatgaaccgaatctcccatatttaattagtttatccaaaaaaaaaattcagcatactttcaatcattaaaccccggcgaaaaatggccgcgtcgctgctattccccgtcgcatcgtcgacgaaaacagccgctcctccaacctactcgccacggaaacctataccttccggtcaccgtttcttctcattcccttccaaaaccaagcctcttctcaaattcaccggcaattcaaacaaacatcggtctttcaccgccaaggccatcgaaaaaagcaaggagagcactgaagacac

SEQ ID NO: 17598 - DNA, 781 bp, Gossypium hirsutum
  Clone ID: GOSHI-09MAY01-C4977_2
cggaaaccggccatggctgccgccgctaatccccgctctttctactcgggttccaatcctcctcaccccaaccgctttgttttctcagccgatcctcctcccaaaatctcactcactcccgatcaattcaactactgctctgaggctctcaaattgttctcccaaaagctccagatgcccgacgaaatcaaccgcgagttctcgcacttacaggcaaataggattacaccttcggagatgatgaggagatgcacagtgggttttaacggtgctaatttggacccgcgccgccgctctgatgtcataccatgtactttaaaaagtttattttttttccaaatcgacacgaacagggtagttcttaattcatgtaaagattacaggccaactgcaaagggttatatcaatgccagctttgtcacgacttcttcttctgaaaacatttctaagtttatagccacgcaaggtccattacctcacacctacgaggacttctgggagatggttatccaatgccattgccctgtcattgtgatgcttactcggttggttgataattataagacggtaaaatgtggagattactttcaagcagaaaatggtcctagacaatttggcaatatctgtattgatactaaatggatacaagaaacagaacctcttttatggatccacacctgggaggtaatttatagggagtcagaggccccactattataagtttggcacattcaatatcctgagtggcctgaccatggagttcccactgacactcttgctg

SEQ ID NO: 17599 - DNA, 749 bp, Gossypium hirsutum
  Clone ID: GOSHI-09MAY01-C4977_1
cacttacaggcaaataggattacaccttcggagatgatgaggagatgcacagtgggttttaacggtgctaatggggacaagaatcgatactctgatgtcataccattcgacacgaacagggtagttcttaattcatgtaaagattacaggccagctgcaaagggttatatcaatgccagctttgtcacgacttcttcttctgaaaacatttctaagtgtatagccacgcagggtccattgacctcacacctaccaggacctctgggagaatggttatccaatgcccattgccctgtcaattgtgatgcttactcggttggttgacaattattagaacagtaaaatgtggagattattttcaaagcagaaaatgttcctagacaatttggcaatatctgtattgatactaaatggatacaagaaacagaaacctcattattgatacgcaacttggaagtaaattctaaggagtcagaggacccaccactatcagttttgcacattcaatatcctgagtggcctgaccatggagttcccactgacactcttgctgtccgtgaaatcttgaaaagagtgttacaagttccagtaaatattggcccaatactggtgcattgcagtgcaagtattgggaggactggaacatactgtgctattcataacaccgtccagagaatcctcattggggacatgtctgcattagaccttgctaatacgatatctatgttcaagtcccagcgcatcggaat

SEQ ID NO: 17600 - DNA, 1351 bp, Gossypium hirsutum
  Clone ID: GOSHI-09MAY01-C4967_1
ggccgcccttttttttttttttttttgcaaccaaatatgatacttgtatataattttcgatatataagattacttgtacaaccaaagtaattactaccctaagacaccactcatactagcatatgaccccatggttgtatacgcctactggtcagaaaacacaaggcctcatacctaaaccatctgtatacagaaacgtttagcattacattcgtgattcacctcacacttatcttatacatttttccctatcactgaatctggtacggcaccaccagccttccttagattacaaagcaaagcatcacgccccatcaaaactactttgaaaaagctatctatcaccttcaaaagattatctagcccttgggataatttctcttccgtctttctcaaatctgaaacagaattcttgaatgactccctttcacttgttcccaccccatcttggagcaaagttgacaattccttgacgcatgcatcaacagcatccagttctcttacaactgtaaattttccgcaagaaaatatatttctaatctctacattcacagtattttggacatcagaaaaaacttgtgcccatggtagcgtgttaggaacagttaagtccaataaattcttggaagaaccagagagagctgcagcaaagacactacatatataagtagttgccaccttagctccatacatagcacgcatcaatacttttcctttggaagagttttttaccttaggcaagtttagtgactcaacaaggttgtccaagataggtcgacaagtttcaactctgggatttttggagccaatgtgctgtttccagctattaagtgaggaagaggcccgactgaacagttctggggaatccgactccaacttgtgcagaccatattgaagtaagagatggccttggttaagccgtgtaagctcagaggtaaaagcaatactaatatcaagcaacttcacactgatatccaggtacacatccatccatttttcatcccactcagtcacagggaggtcaagttcagttatcaggttttttatgtcacaatgaatatcagaaagtgactccattgctagtttccgcccgcgcgggcggacgcgggcgcccttgtcatttggcacaagtttttgcagcttctttgataaggcggtttcaaaatcattcaataaagaacgaagttttggattaaactgagaacccttatgtgaattcttacggaaaggatttgcaaaatggaagaaagggcgatgtggttcctgaggaccacccatcttgatatttgctgatttagaagtcggtaatcgggaaaattctatgaaagcttcaaacgcgtgcggacgcgtg

SEQ ID NO: 17601 - DNA, 290 bp, Gossypium hirsutum
  unsure (1)..(290): unsure at all n locations
  Clone ID: LIB3165-059-P1-K1-G11
ccctcgcgtccggaattttcccgttttccgacttctaaatcagtatttttgcatctacccgatatagcggtattttgatttaaggatcttatactgtcatatatcaatgatgagtcgtcctcaggaaccacatcgccctttcttccattttgcaaatcctttccgtaagtattcacataagggttctcagtttaatccttaacttcgntctttattgaatgattttgataccgccttatctatgaagctgctaaaacttgagccaaatgacatgggtgacatcctttgct

SEQ ID NO: 17602 - DNA, 999 bp, Gossypium hirsutum
  Clone ID: GOSHI-09MAY01-C4937_1
cccacgcgtccgcggacgcgtggggccctagaatttcatgttgacatcacctatttcgttttccttatattagcatgatttcttaatggttgaggacattaattatttgagaaacaatgactacattttggatttgtaaatctcttcttggaaaaattgtaaaaggacatgaactcagaattaactgcttgcctactgagtcggctattctgagacaatgcccttcatggactaaattgcttggttgaaccgtatttttttgacaatgaaattgactaggctaatccttctttgacctacatcaatgaaccttatattatcatttttcttaggtttagtttggatgggtgattgggtgcggtgcggtgcggtgcgtttaacttactttttatcttacgctacagtatcgctacagtatctaatttcactgccaccgctgtttttacactaaccgcaggtaaacacaccgcccatccaaactcacccttagttgatgcagtcttctggaactggctggtgaaacctccctatgctgcgtcagtttaggttgatatcgaaaatgtcagaaaagtacaggtttttaatcataaaaaatttgctttgattactgtgttggagagcatcttgtaaaaaagtggcaatgccgcggatggcatgccaaatacattgaagacattagcatgagagggtgtcagtcgtgatgcttgagcgaaagtactgttcaggtctcaacacgagctgtctccagggttgtgctgtagtttccatcaataacacactttgagggaagaaactgttcccaagtcacataaatttaattaaaggtgcagtctaattgtatttcttctgtttctgcttttcatttttcacccaaatttgttttttcttacttcatacgtacgtttcacagtgtgtaagcttgttattgttggactttgtaacattttcagtcattatgcaaggaatttttaaacctaaaaaaaaaaaaacctcgtgccg

SEQ ID NO: 17603 - DNA, 432 bp, Gossypium hirsutum
  unsure (1)..(432): unsure at all n locations
  Clone ID: LIB3083-054-Q1-L1-A1
aaagtgtgttattgatggaaactacagcacaaccttggagacagctcgtgttgagacctgaacatactttcgctaaagcatcaccactgaaaccctctcatgctaatgtcttcaatgtatttggcatgccatccgcggcattgccacttctttacaagatgctctccaacacagtaatcagagcacattttttatgattaaaaacctatactttctgatattttcgatatcaaactaaaccgacgcagcatagggaggtttcaacagccagttccagaagactgcatcaactgcactcttttctaggctcgaccgcacacctttggctaggaacatgcatataatcaaagaataacatggccaacgtaatccagtgaccatncaatatcagactctatgtgtcagaacttgtgaacgaggccttgcccttat

SEQ ID NO: 17604 - DNA, 251 bp, Gossypium hirsutum
  Clone ID: LIB3083-107-Q1-L1-H12
ggattagacacagtgatgaaacgatggtaagggcaaggcctcgttcacaagttctgacatatagagtctgatatttgatggtcactggattacgttggccatgttaatccttgattatatgcatgttcctagccaaagctgtgcggtcgagcctagaaaagagtgcaggtaaacacaccgcccatccaaactcacccttagttgatgcagtcttctggaactggctgttgaaacctccctatgctgcgtca

SEQ ID NO: 17605 - DNA, 575 bp, Gossypium hirsutum
  Clone ID: GOSHI-09MAY01-C4897_1
tggataagtacgaacgtggaactaaataaagattttaaggatgatgaatgacgatcgaatgtagggtgtgtacatacggtttcgaagtttataggtagggagtgaagtgaaagctgagaaaagaagccaaggtgataatgaattgtgcagcaatggttgtcgtaggttacaggcctgtcctaagccccaaatgctttgcttcaaatcccaaaatcaacacagatcaacttcgttaccagcttgaccaacttcatgctgaagctgagaccacccgagccaaagctaacaatgctagattgaggtttttgcggctatcagaggcagcggagaagcttcgacgacaggcagctgttagtatgcaaagggggaaggaaaatgaggcaagggacctgctttttcagaaaaagagggttatgcaagctttggaaaagtctaagagtcggattgagttattggataagcttgctacgaagcttaatgaggtgataaacgtcaaagaaactcaactaattgggaatattgtgtcagattctgaaattggtgaagaagatggttccagtccagttcggatcata

SEQ ID NO: 17606 - DNA, 943 bp, Gossypium hirsutum
  Clone ID: GOSHI-09MAY01-C4827_1
cccacgcgtccgcaaaaaccccctcgattccccttcaaggcaccaaatttgacccaaaatggcctctgtttgtgcttcttcggctattgcagctgttgccatctcatcccccagttcccagaagactggatcagtagtggggacaacaaaggcttctttccttacagggaagaaacttagatctgtgagaaagtacacaaaaccagctgccggaccaacatttccagtgtgcgccgccgccgaccccgacagacccctttggttcccaggcagcactcctcctccatggctggatggcagtctccctggtgactttggtttcgatcctctcggtcttgggtctgaccctgagacattgagatggaacgtacaagcagagctggttcactgcagatgggcaatgttgggagctgctggtattttcatcccagagttcttaaccaagattgggattttaaacactccatcgtggtactcagctggaacagaggaatacttcactgacaccacaactctcttcatcgttgagcttatttttatcggctgggctgaagggagaagatgggctgacattctcaagccagggtgtgtaaacacagaccccatcttccctaacaacaagctcaccgggactgatgttggatacccaggtggcctgtggtttgaccctcttggctggggaagtggttcgcctgagaagatcaaggagctgaggacgaaagagatcaagaatggccgattggctatgttggcagtgatgggtgcatggttccaacatatctacaccggcactgggcccattgacaacctctttgcccaccttgccgatcctggtcatgccaccatttttgctgctttcaccccaagtgaaacactaggaggggggaaccctaacagccatgaaaatgttggagaaaaatcgatggtcgtcatacgtacaccc

SEQ ID NO: 17607 - DNA, 554 bp, Gossypium hirsutum
  Clone ID: LIB3582-014-P1-K1-B10
cccacgcgtccgcccacgcgtccgcccacgcgtccgcccacgcgtccgcggacgcgtgggtgcggctattgcagctgttgccatctcatcccccagttcccagaagactggatcagtagtggggacaacaaaggcttctttcctttcagggaagaaacttagatctgtgagaaagtacacaaaaccagctgccggaccaacatttccagtgtgcgccgccgccgaccccgacagacccctttggttcccaggcagcactcctcctccatggctggatggcagtctccctggtgactttggtttcgatcctctcggtcttggttctgaccctgagacattgagatggaacgtacaagcagagctggtgcactgcagatgggcaatgttgggagctgctggtattttcatcccagagttcttaaccaagattgggattttaaacactccatcgtggtactcagctggaacagaggaatacttcactgacaccacaactctcttcatcgttgagcttatttttatcggctgggcttaaaggagaagatgggctgaca

SEQ ID NO: 17608 - DNA, 380 bp, Gossypium hirsutum
  Clone ID: LIB3166-038-P1-K1-D6
cccacccttccgcccacgcgtccgttcttgcgtccgcccacgcgtccgcaaaaggggctctgtttgtgcttacttcggctattgcaactgttgccatctcatcccccagttcccagaagactggatcagtagtggggacaacaaaggcttctttccttacagggaagaaacttagatctgtgagaaagtacacaaaaccagctgccggaccaacatttccagtgtgcgccgccgccgaccccgacagacccctttggttcccaggcagcactcctgctccatggctggatggcagtctccctggtgactttggattccatcctctcggtcttgggtctgaccctgagacattgagatggcacgtacaagcagagctggtt

SEQ ID NO: 17609 - DNA, 372 bp, Gossypium hirsutum
  Clone ID: LIB3165-006-P1-K1-C6
ccaataaaccaccattgtttgctcctttaaatctcccccccactatctcggtgcgctaacttcagctattgcagctgttgcattcctttagggcatattcgatactcgctgatctatatatacaactacatatgctattgaactcacagggatacagacttagatctgtgctagacgtcacataaccagctgagggaccaacatttccagtgtgcgccgccgacgaccccaacagaccccttaggttcccaggcagcactcctgctgcatggctggatggcagtcttcctggtgactatggtttcgatcctctcggtcttgggtctgcccctgagacattgagatggaacgtacaagcagagctggttcact

SEQ ID NO: 17610 - DNA, 240 bp, Gossypium hirsutum
  Clone ID: LIB3166-003-P1-K1-B3
cccacgcgtccgcaaaaaccccctcaattcccccacctcattgtaggcaaaatggccactgttagtggcttcttctgccgttgcagccgttgccatctcatcccccagttcccagaggagtggatcagtagtgaggacaacaaaggcttctttccttacagggaagaaacttcgatcagtcaaaaagtacacaaaaccagcagcagtccgaaccgttccggtgtgtgcagtggctgaccc

SEQ ID NO: 17611 - DNA, 1379 bp, Gossypium hirsutum
  Clone ID: GOSHI-09MAY01-C4547_1
tctcatgcccctcatgctcaagattacttactgttgatctgactacgaatgcagatggggggcaatctagcaaaacaacactgaaggggtttaaatcctcaagtattctgaacagaattcaattaaatgattttcagacgagcactaaaatagaggctttggtatgacttactgggattcattaattgctaaaaagttgctagactagtgcgagaggatcaaatcccaacagcgaaggaaacaagtactgcagctgctgctgctgccagtccatctcatgatacttcactgcattctgttaatttctgtgaaacgacaataaaaaatggaactggtgctattttgcctgaaaagccggtctcaactggccagactaataacctgatatcagctaagacttcagagacagctctgcttgatgagaggtctttgttggcttgcattgttcgcacgattccaactggtggcaaaattcggatcagttccacgctaccaaataggttggggaaaatgcttgcacctttacactggcatgattacaagaagtatggaaagctggatgactttgtagccagtcaccctgcgttgtttctgattgagggcgattatattcagcttcgagagggagcacaagaaatgatagcagccactgctgctgttgctaaagttgctgcagcagctgcagcctcatctccttactcctcgattttgccttctgttgctgttactccaatggcacaacctaaccgactaaagaagggtctcccaacagctgactccaaccatgcgaagaatgagaatgctgctttcaaggggtatgcagttatctccaaaactgcagctggtgatcattcacagctgtcaggaatgcagaatcaacatcccaatgggggttctggtggagtggctggaaatctctcaaatgtaaaaatattgagcaaatctaatggagcaaattctgagagatcaagtctgaaaaatgttgaaaggcaggcctctggtcagggaaggtctaattctaattttgctggaaaacagcagggcaggtatgtggcttaatctttcagcggatagctgatggttatttataagtatgtttgtatgcctcaacttgttaaagcttaactgtcctgtacaatggcagggcaactggggcagctttatcttctagaagatagattcactgaattgctatgctaagttgtgggatactcatgatgtggtttggaagcgtcttgggatatgatttgtagtgaaatgtatctcttgattatggtcatcagtaatcttttgcatctgagaaaattctgtgattggatggatcacataagttgactatttaaattgttttgtgccataaggccctgcctgttttccct

SEQ ID NO: 17612 - DNA, 849 bp, Gossypium hirsutum
  Clone ID: GOSHI-09MAY01-C4577_1
atcaacagtcttatccacagagtcttagctgcagcctatacagacatagaagaggtcctggaatgtgttgattggcttgacaatgaactttcatccttggccgatgagcgtgctgtgttaaagcatttcaagtggccagagagaaaagctgatgccatgcgagaagctgctattgaatatcgtgcgcccgcgtgggtggaaagcgagatttcttcctttgaggatgacactagcattccatgtggagttgccttgaagaggatggctggcctactggacaagtcggaaaggagcatacagaggcttatcaaactgaggaattcagtaatccgttcttatcaggagtgtaagattccagttgattggatgcttgataccggaatggtgtataaaataaagcaggcttctatgaagctggtcacaatgtacataaagagagtgggaacggagcttcaattggtacgcagtttagacaaggaatctgcacaagaggcactgcttcttcaaggcatgcattttgcaaatagggctcaccagtttgctggagatcttgattcagaaacactgtgtgcttttgaagagatcaaggaatgcattccaggacacctggtaggatccaaagaattgttggcgggaatatcgtcagcctgagtcgcatggttagttaatagatttgatttatcatcagcacttgaattttccattttgccctctgcagaactagttgtagttggggaaataacacaaggtagaggtgatgtgaaatcagaatatgtaacatatattttcacttttttgatgaagttgggtttataatattctcatgcatgcatgcatccttctacttgt

SEQ ID NO: 17613 - DNA, 481 bp, Gossypium hirsutum
  Clone ID: LIB3584-053-P1-K2-F8
cccacgcgtgcggctacgcgtacgccagtagcggtagcagcagcagcgtggaatcaaacgaaacccacggctattagcgtgcatagtagcatagctggtgaaatttagaaccggtcacctcatctgctatcaataacagcggatgttgactcaaaaggagaggtcatcatctgtcttatacacagagtcttagctgcggcctatgcagacatagaagaggtcctgaaattcgttgattggctagacaatgaactctcattcttggccgatgagcgtgctgtgttaaagcatatcaagtggacagagagaaatgcctatgccacgcgagaagctgctattgaatatcgagatctaaaagtattggagctggagatgtctttctttgcggatgacactagcattccatgtggagttgccttgaagaggatggctggtctactggacaagtcggaaaggagcatacagaggcttattaaactga

SEQ ID NO: 17614 - DNA, 746 bp, Gossypium hirsutum
  Clone ID: GOSHI-09MAY01-C4517_2
ctggagtggcaatggcgacagtgaggtacagagaacaatgttggagcttctcaaccagcttgatggatttgaagcatctaacaagatcaaggttctgatggccaccaatcggattgatatcttggatcaagctcttcttaggccaggacgaattgacaggaagattgaatttccaaatcctaatgaggagtctcgtttcgacatcttaaaaatacattctagaagaatgaatttgatgagagggattgatctaaagaagattgctgagaagatgaacggtgcttctggtgcagagcttaaggctgtgtgcacagaatcaggaatgtttgctttgagggaaaggagagtccacgtaacacaagaagattttgagatggcggtggcgaaagtaatgaagaaggagagcgagaagaacatgtccttacggaagctatggaagtgattatgttttattatttattgtgctttcgcggttttggggtaaattcaaacatggaaacccgatttaatatatgaacaatgtatagaatattatattatttgcctggctagtactacacacgtctacttttctggacaaggtaagagcacattttatgaaatcatatttgctaagttttgaattctaaaataaaaaaaataatatcaaagtcaaaataaaaaaatattatataatttaaaactttaattaggcgggctcttcttaaagaaagaatattaaggcctcctgtatggcactttttata

SEQ ID NO: 17615 - DNA, 1515 bp, Gossypium hirsutum
  Clone ID: GOSHI-09MAY01-C4517_1
tccgcccacgcgtccgcccacgcgtccgcctttcttcaaaatccccgggatttgtagtacagtacaaagaaataactaaggagcatcaatactcaatggcgacggtggatatcgagaggaagcaagcggcatcggcggaagagatatgcaccgccaagagcggcgccaagcaaggggaagggctccggcaatactatatccaacacatccacgagcttcagctcaacctccgccaaaaaacccacaatctcaaccgtctcgaagcccaacgcaacgagctcaattcccgagtgagaatgcttagagaggaactgcagctgcttcaggagcctggatcctatgttggtgaggttgtgaaagttatgggtaaaaacaaggtcttagtcaaggttcatccagaaggaaaatatgttgtcgatattgataagaatattgatatcacaaaaatcacaccatcaacaagagttgctcttcgcaatgacagctatgtcctccatctgatcttaccaagcaaagttgatcccttggttaatcttatgaaagttgaaaaagttccagattctacatatgacatgattggtgggcttgaccagcaaattaaagagataaaagaggtcatcgaacttccaattaaacatcccgaattgtttgaaagccttggaatagcccagcccaagggtgtcctgctgtatggaccacctggtacaggaaaaactctgttggctagagctgtggcccatcatactgattgtacttttatcagggtttctggttctgaattagttcagaaatacattggtgagggctctcgaatggttagagaacttttcgttatggccagggagcatgctccatcaatcatatttatggatgagatagacagtattggatctgctcgaatggaatctggaagtggcaatggtgacagtgaggtgcagaggaccatgttggagcttctcaaccagctggatggatttgaagcatctaacaagatcaaggttctgatggccacaaatcggattgatatcttggatcaagctcttcttaggccaggacgaattgacaggaagattgaatttccaaatcctaatgaggagtctcgtctggacatcttaaaaatacattctagaagaatgaatttgatgcgggggattgacctaaagaagattgctgagaagatgaacggtgcttctggtgcggagcttaaggcggtttgcacagaagcagggatgtttgctttgagggaaaggagagtccacgtaacacaggaagattttgagatggcagtggcgaaggtgatgaagaaggagaccgagaaaaacatgtccttacgaaagctgtggaagtgattaagctttattttcattattgtgctttgctttctttgttacgggcaaaaatggatggaacatgtaaaactagacttatacaatgacattataataccgtgcgcctgttttctttgacaaaagcctgtcctacaaaatttgcaggtaaaggacttagatttttatg

SEQ ID NO: 17616 - DNA, 440 bp, Gossypium hirsutum
  unsure (1)..(440): unsure at all n locations
  Clone ID: LIB3083-060-Q1-L1-B9
gaaaaatccccttgtaccaagtatctgagtgccattgtagtttccaaaatcaagaacctagaagcaaactcaaatggcgacggtcgctatcgagaggaagcaacaggcatctgcggaagagatgtgcaccgccaagagcggtgccaagcaaggggagggcctncgacaatactatcttcaacacatccacgagctccagctcaatctccgccaaaaaacccacaatttgaaccgactcgaagcccaacgcaacgagctcaattctcgagttagaatgcttagagaggaactgcagctgcttcaggagcctggatcctatgttggtgaggttgtgaaaagtatgggtaaaaacaaggttttagtcaaggtccatccagatggaaaatatgtngtcgatattgacaagaatattgatatcacanaaatcacaccatcaacaa

SEQ ID NO: 17617 - DNA, 334 bp, Gossypium hirsutum
  unsure (1)..(334): unsure at all n locations
  Clone ID: LIB3147-049-Q1-K1-A3
cggacgcgtgggtttgcacagaagcagggatgtttgctttgagggaaaggagggtccacgtaacacaggaagattttgagatggcagtggcgaaggtgatgaagaaggagactgagaaaaacatgtccttacaaaagctgtggaagtgattaagctntattttcattattgtgctttgctttctttgttacgggcaaaaatggatggaacatgtaaaactagacttatacaatgacattataataccgtgcgcctgttttctttgacaaanaaaaaaaaaaaaaaaaaaaaaaatataaaaataaaaaaataaataaatatttatttataaaaa

SEQ ID NO: 17618 - DNA, 679 bp, Gossypium hirsutum
  Clone ID: GOSHI-09MAY01-C4537_1
ggacaacttattttctcccattctttaacatgctgtggggactccattctataaatattttacctataacatcaagcgcagcttcaagctcattgcatcccttcctatttctcttccctcaataatcaaaagcttcttctttctttctttttctgtgcgtgcactctcaaaccacaacaaaccaagatgagtgaagaagataaaaatgaagctaaggtagtggaaactccacgcaaaccaccccgtctgaacgagaggattctttcgtctatgtcacggagatcagttgctgcacatccttggcatgatcttgagattggacctggagctccagcaattttcaactgtgttgttgagataccaaaaggtagtaaagtaaagtatgaacttgacaagaagacaggattgattaaggttgatcgagttttatattcatcagtggtctaccctcataactatggtttcatccctcgcacactttgtgaagacaatgatcccttggattgcttggttatcatgcaggagcccgttcttcctggatgttttctgcgagccagagccctgggacttatgcccatgattgaccagggggagaaagatgaccagatcattgcaagttggggtgatgatcctgagtaccagcatttcaccgacattaaaaaactttccccttaaccgc

SEQ ID NO: 17619 - DNA, 478 bp, Gossypium hirsutum
  Clone ID: uC-gsflmaxxa003g08b1
tcgtcacgcgtccgcttttttttttcctttattttttgtgtttgtataatattcttagcccgcaaataagatggctgaaggagaagcaaatgcaaatgaaacttcacgtcaagcaccaaagttgaatgaaaggatcctttcatctttatcaaggagatcagttgctgcacatccttggcatgatcttgagattgggcccgatgctccgaatgttttcaactgtgttgttgagatagcaaaaggtagtaaggtcaaatatgaacttgacaagaaaaccggaatgattaaggtcgatcgagttctgtattcttcggtggtatatccacacaactacggttttatccttcgtacactatgcgaagacaacgatccaattgattgtttggttataatgcaggaacctgttgttcccggatggttcgtgcgagccagagcacttggactaatgccaatgattgacccaggggagaaagatgat

SEQ ID NO: 17620 - DNA, 1367 bp, Gossypium hirsutum
  Clone ID: GOSHI-09MAY01-C4527_1
gtttgccactggcccatatgcccatagacacaactagtttctcctcctgttttctcaacctttactactgagccttccaccgctcctctcactccccctcctgagttggcccacctgactacgccctcttcacctgatgtcccttttgcacggttcttgacatcttctgcagatcttgaaagtgctaataagactaattatattgctgcaaatgatcttcaagctacatattcactgtaccctggcagtcctgccagtagcctcagatcaccaagctctaggacctctgctgactgtttgtcatcatcctttcctgaacgggagttccctccgcaatgggatccttcaatttctccccagaatggcaaacattctaggagtggttctggcaggctatttgggcacgatgtaactggttcctccatagggtctcaagatactaatttcttttgccctgctacatttgctgaattctatctggatcagaacccacttccacatgctggtggggagattaagtgtttcaaaggattcagatgtttaccctaccagttgcagtgggcatcaaaataagcagagtaaaagtcctaagcaagatgtagaagaacttgaagcttacagagcctcctttggatttagtgcagatgaaataatcaccactacccaatatgtggagattactgatgttacagatgactcatttacaatgagaccttttcctatagataaacctgcttttgaagaaagtacagaacctgcatcgattgccaaaggatcaaagacagataggatacaggaaaactttctggatgagaagaaaggaaaatcaaaatctgatattgtcaattgggctgtacaccatgatgtgcaagttgcatgcaatggatacgaagatcagaaatcaaggaggcaggtgggtgatgtctcaggatcaagtacacctatcaaccataccttgactgatgaagaggatatatacttgaagaagagttcatcaaggagcaggaaatatcaactaggcttgtctagctctgatgcagagattgactataggagaggaaggagcttaagaggtaaaggagattttgaatgccattgagaaacaagtaaggtatgagctgcttcccgatgtagtgaactgcagttttcttttgttataacttgtggcaatggttctttcttttgttgtccatctctgggtcgggtgtgtgacctgatctctctctctgattacgagtgtattctgttatattgaccctagcttcctgcttcactatgatttacatgttttgtgatgcatgtaatcatatctatattatactcttgtaaaatgcaatttacagctcaatttacatgttttgtaatgc

SEQ ID NO: 17621 - DNA, 887 bp, Gossypium hirsutum
  Clone ID: GOSHI-09MAY01-C4457_1
caactgcaagatcttctataccttcatccaaacctgcatcaagagcagctacaccaactcgtcgaccatcaactccatcaagtactcctagtatatctgcccctccaattaaatcatcttcttcagttacaaagccaactcctgcagcatccagaagttctgtaccatcacgtggtgcctcaccgactgtagcatctagaccatggaagccttctgagatgcctggtttctcacttgatgctccaccaaatttaagaacaacactacctgatagaccactttcggccaccagaggtaggcctggagcgccaagtgctcgatcttcttctgttgaaccaggtgccattggtagaccgagacgacagtcatgctctccttcaagaggacgtctccctaatggtgctatgctgcatttaagtggtggctctgttcctgcagtaagtcgtggctattccaaagctagtgacaatgtgagtcctgttgttattggaacaaaaatggttgagagagtgataaacatgcggaaattggcaccacccaagcaagatgataaaaattctcctcagcgtaactcctctgggaagtctgcttcaccagacagtacaggctttggaagaacactttcaaagaaatcactggatatggctataaggcatatggatataaggcgaagcattcctggaaatttacggccgttgatgacaaatattccagcatcatctatgtacagtgtgagatcgggtcatacacgaagcagaacaattagtgtcttggattcccctcttgctacaagcagtaatggtagttcagagcttagtgtgaataataatggccattgttttgatgggagcgaagtaaagatgatatcggcagcgagagagttggta

SEQ ID NO: 17622 - DNA, 1020 bp, Gossypium hirsutum
  Clone ID: GOSHI-09MAY01-C4477_1
cccacgcgtccgcccacgcgtccgtatggtatggtggattttgcagtgaatctggttctgaagtgacccaagtgctgcttgggacagacactgtcaacggggttcctcctctagggaccgcacaagaattgtggaattccaatttgcatgcaggacgtttacttttctggcacagtgccattctataatgttccaaatagtgatggagaattatttagcaatcatatgaatacatcttgtgatgttgatggtgctatcactggaatcaggaccaggtctcgcccttctcgaagtcaactggactctgagaaccccttggcacagggtaatgcatcaagaagactacggctgcagtgtaaacttcaggtccactcacttcactgtgacaatgcaatatataaccggagtgatgtagagatagaagatgattcaaaatcagttgttacaaaggtgagaagtttgtgactgatgtagtataaaaccactgtcaaatccagatacgtatccgaccttattaagttgtccttgcaggaggaaaaagtagtggaaaaggatatcactgtcggctgtaatgctgatttcggcattgttttgggttcaaagaccattgtttcagttcgtaaagagacttcatctcggtggtcaaaggtgttttcagtgcatcactcacgtaaaccatttgctgttgtttttcgggtagctgtgatgttaatcttgtttatagttttgattagcacaccaaaggccttgtaacttgatgctacttatcgcgttttgtatagttaacagtagcacatcaccctttttttgcccccatttcgaggatcgtatctagttagggctgcagctatgtttttgagtgctgacgtttatgtatatgatatgagtacatctatttagttgttgtaatatacaagagtttatatacatattttttttatttttgcatattgcctcatgaaagcttgtttttgagatgaagctgaatccaagagaaactaggttaatgttttaccactc

SEQ ID NO: 17623 - DNA, 499 bp, Gossypium hirsutum
  Clone ID: LIB3585-052-P1-K1-B4
cccacgcgtccgcccacgcgtccggcagaagattgtggaattccaaacagtgatggagagggagggagcaatcatatgaatacatcttgtgatgttgatggtgctatcactggaatcaggaccaggtctcgcccttctcgaagtcaactggactctgagaaccccttggcacagggtaatgcatcaagaagactacggctgcagtgtaaacttcaggtccactcacttcactgtgacaatgcaatatataaccggagtgatgtagagatagaagatgattcaaaatcagttgttacaaaggaggaaaaagtagtggaaaaggatatcactgtcggctgtaatgctgatttcggcattgttttgggttcaaagaccattgtttcagttcgtaaagagacttcatctcggtggtcaaaggtgttttcagtgcatcactcacgtaaaccatttgctgttgtttttcgggtagctgtgatgttaatcttggttatagttttga

SEQ ID NO: 17624 - DNA, 532 bp, Gossypium hirsutum
  Clone ID: GOSHI-09MAY01-C4467_2
gccatgttgttcttgcccaagaaggtcactgcaggcctggagaggttttgttagggacagattcacacacctgtactgctggagcattcggtcaatttgctacaggaattggaaatacagatgcaggctttgtcttaggcaccgggaagcttctactcaaggttccaccaacattgacatttgtgatggatggtgaaatgcctccttatctgcttgcaaaggatttgattttgcacatcattggtgaaatatctgtagccggtgcaacatataaagccatggagtttgtcggcacaacggttgaaagtctaaatatggaagaacggatgacgttatgcaacatggttgttgaagctgggggaaagaatggagtcgttcccgctgatagtactacatttaagtaccttgagggtaaaacatccctgccatatgaaccagtttacagtgatgcacaagcaagttatctttccgagtacagatttgacatctcaaagttggagcccttggtggctaagccacattcttctgataa

SEQ ID NO: 17625 - DNA, 1166 bp, Gossypium hirsutum
  Clone ID: GOSHI-09MAY01-C4467_1
ctctacgcttctagttagatgggatgactgtcttggccttggcttctgcgaacaaatataaggattttgatgagttgaacgaccatacttgcagagatgcaattgatttggtggtataatacttacaggatatgttcaacccccgcgtccgccgactttgacatctgcgatggatggtgaaatgcctccttatctgcttgcaaaggattcgattctgcagatcattggtgaaatatctgtagccggcgcaacatataaagccatggagtttgtcggaacaacggccgaaagtctatatatggaagaacggatgaccttatgcaatatggttgttgaagctggtggaaagaatggtgttgttcccgctgatagtactacatttaagtaccttgaggataaaacatcggtgccgtatgaaccagtttacagtgatgcgcaagcaagttttctttctgagtacagatttgatatctcaaaattggagcccttggtagctaagccacactctcctgataaccgagctttggctagggaatgcaaagatgttaaaatcgacagagtgtatatcggatcttgtactggtggtaaaacggaagattttcttgctgctgctaaagtctttctagcttcaggaaagaaggtcaaggttcctacattccttgtcccggctacacaaaaggtttggttggacttatatactctccctgtacccggatctggtgggaagacatgctcccagatatttgaagaagctggctgtgacacacccgcaagccctagctgtggtgcttgtttgggtggcccgaaagacacatatgcacgtatgaacgaagcaaaggtctgtgtctcaacaacaaaccggaacttccctggtcggatggggcacaaagaaggccagatatatcttgcttctccgtatacagcagctgcatcagctttgaccggttatgtcaccgatccaagagagtttttgcagtaagaaacttgagtaaattttttgtaggtttaaatgtatggctcatatgaataaaccataggttgaaaaaagaaccaaaaaaaagaactttttgttgtatcctatattccaatggattcatgcaaggaatgccaaaaaaacttgaatctctctttcgtaagctttcataaatgaaaattgttgtttggac

SEQ ID NO: 17626 - DNA, 592 bp, Gossypium hirsutum
  Clone ID: GOSHI-09MAY01-C4417_1
atttgatatctcatttatcatcaactattttcatttgatttgcaaactagagttgcctatgcaagctattcggtttaccttgcttgcacaaacctatttatatttaaggaatgagttagggagaatataatagcatgttgttagcatccactatttcaggctgtggggattttctgtttggtttcatcaagttcgaagttttttctcctggcttcgacaaatgtggtatggatctccaacagcgcttttgaactctgattatcttcttgggagcgtcctcagcctgcttgctagcctgcattaagcatcgataaacatcaactcaaccattttgtaacaggtattggactgttagctaccgatttgctccagacataaatcgttggcaagctgaagttgtagttgcaattcaagaggtttggtaacttatcaaaccttctaaactaaagaaaaattgtaagacatatatatgttctgttttttttttttgtttactccatagtaatatttggagagttatattttgcaagtggtgatgtactaagttgatttttattggtatatttaatttgaatttgggatcgaatttctt

SEQ ID NO: 17627 - DNA, 383 bp, Gossypium hirsutum
  Clone ID: GOSHI-09MAY01-C4407_9
cttcaatttaaaattttctttgttagacacaaaaagcgatctagcttgaaaatttctatttgttttaataaaatgttgtttgttttagggtttaggtgatggcttccaagcggatcttgaaggagctcaaggatctccagaaagatcctcctacctcttgcagcgcaggccctgttgctgaagacatgtcccattggcccgcatctattatggctcctcctgacagtccatatgctggtcgagtgttgctcggctccatccatttccctccggactatccatttaaaccaccaaaggccgcattcaggacaaaggtctttcacccaaatattaacagcaacggtagcatttgccttgatattttgaaggagcagtggagccct

SEQ ID NO: 17628 - DNA, 736 bp, Gossypium hirsutum
  Clone ID: GOSHI-09MAY01-C4407_8
atgggtttcccctatgatctgtctcccttccatcgcaccgtttgttttgacctccgtcgcactcatccctgatttttcttctgaaggtcgagtttgcaaggtgatcacggtttgtgtttcttcccaagcgccaacatctgtgtctttgtctacacttattctaagctcaaaatgcatcagggctcgccggacatgccatattccggtggaaggccactagggaccattcattagcctgcggactatccatttaagccacccaaagttgcattcaagacaaaggtctttcaccctaatattaacagcaatggcagcatttgcctcgatattttgaaggagcagtggagccctgccctcaccatatccaaggtgttgctctcaatctgctcactcctgacggacccaaatcccgatgaccccttggtgccggagattgcccacatgtacaagaccgacagggccaagtacgagacaaccgctcggagctggacccaaaaatatgctatgggttaaagtgctactacgtatgtaataggagggcttcattccctgtgactttggtctttaaattaattgtgtgattgtctcctctttacatactggacctagccctccttaaaaacacaattttcttgttagttgtttgtatgaaaattatgtttcaaaacttaaatccccttttcttaaaaaaaaaaaaaaaatataaaatatttaaataataataaaaatgggcggt

SEQ ID NO: 17629 - DNA, 860 bp, Gossypium hirsutum
  Clone ID: GOSHI-09MAY01-C4407_4
ctatgctttactattcttcccctctccgcagcgactaacaaacaatagcggggcgggaggatctctcagggtttaggtgatggcttcaaagcggatattgaaggagctcaaggatctccagaaagatcctcctacctcttgcagcgctggccctgttgctgaagacatgtttcattggcaagcaactattatgggtcctccagatagcccgtatgccggtggggtgtttctagtcaccattcatttccctccggactatccatttaaaccacccaaggttgcattcaggacaaaggtctttcaccctaatattaacagcaacggtagcatttgccttgatattttgaaggagcagtggagccctgccctcaccatatccaaggtattgctatctatctgctcactcttgacggatccgaatcctgatgacccattggtgccggagattgcccacatgtacaagactgacaagagcaagtatgagacaacggctcgaagctggacccagaagtatgcgatgggttaacgtgctactacgcatgtaaaaaggagggctgcattccaaataactttggtctttaaattaaaatgtgtaagaatcaaatatgcgtgaactgtcacctctatatttagtggaccaagccctgcttgtttgtatggaaaattatgtttgaaactaaaaaaagcccccccccctccaactcctgtaataccctctcgtttcctgtctaccgaagcccgggtgtttttgccattattactgaaagctttgaagacctttcctttggtgtgcgtgttgaaactggatcttttgatgcttaaaatgacgaataaacatcctgtttgtagaagacgttacc

SEQ ID NO: 17630 - DNA, 781 bp, Gossypium hirsutum
  Clone ID: GOSHI-09MAY01-C4407_3
ccccgcgtccgcgacccccctcgccgcccacccgtccgccctccaaacaaaaaaaaaaaaaaaaaccccaaacagacaatagcctaggacaggaggatctctcagggtttaggtgatggcttcaaagcggatcttgaaggagctcaaggatctccagaaagatcctcctacctcttgcagcgcaggccctgttgctgaagacatgtttcattggcaagcaactattatgggtcctcctgacagtccatatgctggtggagtgtttctagtcaccattcatttccctccggactatccatttaaaccaccaaaggttgcattcaggacaaaggtctttcacccaaatattaacagcaacggtagcatttgccttgatattttgaaggagcagtggagccctgccctcaccatatccaaggtattgctatctatctgctcactcttgacggatccgaatcctgatgacccattggtgccggagattgcccacatgtacaagacggataggaacaagtatgagacaaccgctcggagctggacccaaaaatatgctatgggttaaagtgctactacgtatgtaataggagggcttcattccctgtgactttggtctttaaattaattgtgtgatttgtctcctctttacatactggacctagccctccttaaaaacacaatattcttgttagttgtttgtatgaaaattatgtttcaaaacttaaatcccctttacttaatactcattgttttcagtcttaaaaaaaaaaaaaaaaaaaaccca

SEQ ID NO: 17631 - DNA, 797 bp, Gossypium hirsutum
  Clone ID: GOSHI-09MAY01-C4407_2
cggacgcgtgggtttccagcgactactaaacaaaataaaaattagcccaggacaggaggatctctcagctactttttctctcaaaatttctccaattagctctggtttaggcgatggcttcaaagcggatcttgaaggagctcaaggatctacagaaagatcctcctacctcttgcagtgcaggccctgttgctgaagacatgtttcattggcaagcgactattatgggtccacctgacagtccatatgccggtggagtgtttctagtcaccattcatttccctccggactatccatttaagccacccaaggttgcattcaggacaaaggtctttcaccctaatattaacagcaatggcagcatttgcctcgatattttgaaggagcagtggagccctgccctcaccatatccaaggtattgctctcaatctgctcacttttgacggacccaaatcccgatgatcccttggtgccagagattgcccacatgtacaagaccgacagggctaagtacgagacaactgctcggagctggacccagaagtatgctatgggttagtgtgctaatatgcatataataggagggctttattctatgtggctttgatcttcaatttaatatgtatgaatcaatgaaacagtatgtgtgatctgtctctccaactatgtactggaccaatccctccttaaaacacatttgttgccttaattgtttgtatggaaattatgtttcaaaatttaaagtccccatcttttctgttgcaagtggatcggttagcatattaaaaacaatgcg

SEQ ID NO: 17632 - DNA, 1558 bp, Gossypium hirsutum
  Clone ID: GOSHI-09MAY01-C4407_1
gttaaaacatagcaatgaaaaagcattaaagattgaatgctacaaaacttggaagaagaagaatataaacaaattactctttttattaaaaggaaagaaggaggaggaggaaatggatggaaaaagaatcgagggcaatgaagtttatgctctagcaatgtgtgtaagtattctcctctttgctccgattgttgtgtcacaaccaataccggcagataaatcccaagtggaagcttggtttaatggcattatcaagccggtgaaggaaaggggtacaaccttagaccctgaattggttcaagccgagacagaacctagaatcataaaggtgatgcaaggtgggggtggagaattcgataccataaccaaagccatcgagagcgttccatcagggaacgccaaacgcgtgattatatccatcggacctggatcttacaaagagaaaattagaattgaaagaaataagcctttcattacattgttaggagatcctaaaaacatgccaaatttgacatttgacggcaccgccaagcaatatggaaccgtagatagtgccactcttattactgagagtaattactttgtgggtgctaatctcaatatagtgaactctgctccaaggccagacgggaaaatggtaggagcacaggcggttgctctgagagtctccggcgacaggtcagctttctataactgcaagatcattggcttccaggacactttgtgcgatgacaggggcaaccatttctttaaggattgccatattcgtggcactgttgatttcattttcggaagcgggacatctttatatctgaacacggaaatattcgtggtaggagatccagaaggagatccggaaatggcaataattacagcacatgcgcgagaaagttcatcggaggacacgggttattcgttcgtgcatggcagaattacaggaacagcgaaggacgtatttttgggcagggcctggaagagcagtccgagggttgtttattcttatactgaaatggacgaaatcgtccatcctggtggatggtctagtaatcgccaacctgaacgagccgacactgtgtactacggagaatacaaatgcacggggaaaggcgcgactcctgctacacgagagaaattcgtcaaacaactatcggatgcggaagctaaaccattcttggttcttgactacgttgaaggtaccaaatggttgcttccccctccgacagtacctaaataattcattcattcccaactttttcatgccggcaacatatcctcacagtattgctaattcaagcagactctcgtctacctctttgctgggtggaaataactagccatccattttattttatttattttattttcccttcccatggcttgtattttaacaaatagccaaatgtcaataagaagcagaatttagtcttatttttattaatagttaggatgttgatatttgccattatgtagaaaatttccatcatatcaagttaaaattatgtaataatatccatcatatatccaagttcattgattcaataagtcaaggtgatttcac

SEQ ID NO: 17633 - DNA, 490 bp, Gossypium hirsutum
  Clone ID: uC-gsflmaxxa009d12b1
ccctatgatctgcctcccttgcatcgcaccgtttgttttgacctccgtcgcactcatgcctgatttttcttctgaaggacgagcttgcaaggtgatcacggcttgtgtttcttcccaagcgccaacatctagcttctttttcttttcttattctaagttcaaattgcatcaggccttgttggctctgcttctctaggttgagagcccattctggtctcctttagagggtgcgttaggcctttttttcctgatctaattctgtttgtttaagcctggagtagttataatctctttaccagtggggggttcttgtttgtgcagctatagattcctcggcagaccctaactccttttgtgtcatgttgatttctttagtgggcctattttcatgcgagcccattttatcatttaaggtttctagcaattgtaaccgaatattttcttgcatcttttctctggctacgccgttgatggtcttcttctcttttga

SEQ ID NO: 17634 - DNA, 361 bp, Gossypium hirsutum
  Clone ID: LIB3148-050-Q1-K1-F4
cggacgcgtgggcggacgcgtgggaaaaaaaaaaaataaaaaaaaaaataaaattataaaggaggggtttattattaatagattgtcctctttttataaaacttattcttaaccactttcatacatccattttttactttaccataaaacattcttttggttaaagttctactacgtatgtaataggagggcttcattccctgtgactttggtctttaaattaattgtgtgattgtctcctctttacatactggacctagcccttcttaaaaacacaattttctttgtagttgtttgtattaaaattattgtacaaaacttaaatccccttttcttaaaatatatatactttatattattt

SEQ ID NO: 17635 - DNA, 481 bp, Gossypium hirsutum
  Clone ID: uC-gsflmaxxa009c10b1
tttacaggaggatctctcagctactttttctctcaaaatttctccaattagctctggtttaggcgatggcttcaaagcggatcttgaaggagctcaaggatctacagaaagatcctcctacctcttgcagtgcaggccctgttgctgaagacatgtttcattggcaagcgactattatgggtccacctgacagtccatatgccggtggagtgtctatagtcaccattgatttgcctccagactatacatttcctccacccatagatgcgatgcaaggaaagggtggagaacctaataccatcaccaaagccatcgttagcgttccattatggaacgcccaacgcgtgactatatccatcggacctggatcttacaaagagaaaattagaattgaaagaaataagcctttcattacattgttaggagatcctaaaaacatgccaaatttgacatttgacggcaccgcccagcaatatggaac

SEQ ID NO: 17636 - DNA, 350 bp, Gossypium hirsutum
  Clone ID: uC-gsflnu33B101a03b1
cctgcctattcgtacatgtgggcaacctccgggggcgaagtttaatcaggttttggatccgtcacgcgcgagcagatcgacagcaacaccttggatatggtgagggcaggaacaatgcttgacacaacccgtcggagctggacccaaaaatactctattatttaaagtgctactacgtatggaataggagggctaaatccccagtgactttggcctttaacttaattgtgagatttagtcacctatttacatactggacctagccctccttaaaaacacaatattcttgctagttgctcgaatgaaaaggatgttgcaaaacttaaatccccttttcttaacaataaaaa

SEQ ID NO: 17637 - DNA, 338 bp, Gossypium hirsutum
  Clone ID: LIB3135-021-Q1-K1-D1
cggacgcgtgggcggacgcgtgggcggacgcgtgggcggacgcgtgggcggacgcgtgggcggacgcgtgggcagcaactaaaaaaaaaaaaaaaccccaaacagacaatagcctaggacaggaggatctctcagggtttaggtgatggcttcaaagcggatcttgaaggagctcaaggatctccagaaagatcctcctacctcttgcagcgcaggccctgttgctgaagacatgtttcattggcaagcaactattatgggtcctcctgacagtccttatgctggtggagtgtttctagtcaccattcatttccctccggactatccatttaaaccac

SEQ ID NO: 17638 - DNA, 396 bp, Gossypium hirsutum
  Clone ID: LIB3147-013-Q1-K1-D5
actttttctctcaaaatttctccaatttgttctatacttttttgtttgttttaggggttaggcgatggcttcaaagcggatcttgaaggagctcaaggatctacagaaagatcctcctacctcttgcagtgcaggccctgttgctgaagacatgtttcattggcaagcgactcttatgggtccacctgacagtccatatgccggtggagtgtttctagtcaccattcatttccctccggactatccatttaagccacccaaggttgcattcaggacaaaggtctttcaccctaatattaacagcaatggcagcatttgcctcgatattttgaaggagcagtggagccctgccctcaccatattcaaagtattgctctcaatctgctcacttttgac

SEQ ID NO: 17639 - DNA, 311 bp, Gossypium hirsutum
  Clone ID: LIB3189-030-P1-K1-B8
gttctagatcgcgggcggccgctcgcgatctagagctattttcagcaactaaaaaaaaaaaaaggccccaaacagacaatagcctaggacaggaggatctctcagggtttaggtgatggcttcaaagcggatcttgaaggagctcaaggatctccagaaagatcctcctacctcttgcagcgcaggccctgttgctgaagacatgtttcattggcaagcaacttttatgggtcctcctgacagtccttatgctggtggagtgtttttattatctcttgttgtttttttgtcacttcatatttttttccatt

SEQ ID NO: 17640 - DNA, 264 bp, Gossypium hirsutum
  Clone ID: LIB3145-024-Q1-K1-F8
cccacgcgtccgtccacttcgtccgctcacgtttccggaagaaaataaacaaatttctctttttattaaaaggaaagaaggaggaggaggaaatggatggaaaaagaatcgagggcaatgaagtatatgctctagcaatgtgtgtaagtattctcctctttgctccgattgttgtgttacatccaataccggctgataaatcccaagtggaagctttggtttaatggcattatcaagccggtgaaggataaggggttcaacctt

SEQ ID NO: 17641 - DNA, 433 bp, Gossypium hirsutum
  Clone ID: GOSHI-09MAY01-C4437_1
cccacgcgtccgcaattttagaaggtcgatttataaccgtggagaggtcgcgtgggaaacggcctaggactccaacaccgggccattaccttggactaaaaaataccagagactatggtcgtggtgagcgtggcaggtaccgtggtggtggtcgtgatgactacgggtatcgtcgatctcccaggcgctcaccatatcgaggtcgtgattactctccaaggtattctcctcatggtggaagatcaaggagggagcgctcttattcaccaccatattctcgcggatctaggtgaagaagtgttttgggtcgaaggggaaagatgagagatttgctttagtctcgtcagtgttgaatgttgatgtattctctagtttggacggagcttcaaagttaatgtttgcagtgttcttatatctctttaagcatgtaggg

SEQ ID NO: 17642 - DNA, 427 bp, Gossypium hirsutum
  Clone ID: LIB3584-045-P1-K2-H12
atttatatgataggaaataattgcgtcggatgtgtatcttgctttttgtcttccctttctttcaatggccattttttcaccttccaggtgatcttccaaatgaatttttttgtttcttcccttgcagtgtaacatgttaattttttctaacgatatggttttggtcaaaggtgcatgatgctgcagatcctaaaccattttgatgaggctaacccaatatttgcctagttgaatattaagctcgttttttctacttttcagtcgcgtacgaaacggtctatgactccaacaccaggccattaccttggactaaaaaataccatagactatggtcgtggtgagcgtggcaggtaccgaggtggtggtcgcgatgactactggtatcgtcaatctcccacgcgctcaccatatcgaggtcgtgattact

SEQ ID NO: 17643 - DNA, 429 bp, Gossypium hirsutum
  Clone ID: GOSHI-09MAY01-C4787_3
cccacgcgtccggcagcaaccaaccccggaattttcctaccctcctttttttacattttgttcgattagtcttcttctcggtatcgctgtcatggctgggttcgagcagcgaataaaggagagagccaaggagctcaaggttttcttcaagaagggtgtgaagatcgtgggagaatcatgcaagaaaggttggtacaaagtcaagcacatcagaggctgattcttttgccttccatcatcttgttttcttttcgttttccatgtagagatctttgtcagtcatcttgatttggagggggttctttcttttattgatggatggtttcctgcctgctgcctgcttattttttgtgcttttttttagcatcttatgaggtgatttgattttgagattatagttaacttgtttcggttggctttttttttttt

SEQ ID NO: 17644 - DNA, 1133 bp, Gossypium hirsutum
  Clone ID: GOSHI-09MAY01-C4787_2
ctttgctttgctagaacgctgaaaaaaaaaggggttccaagagaaaagtagaagaaatggcctcaaagcttcttcgtcaaaccctaaccaaaaccaacagaaccgccgctatacgctgcttcttcaccgcggcttctgtcgcttccccttccgagtatgagtacccaacaggaatcaccatgaaaggtgtgaaaatttcgggtcgtccgctttacctcgacatgcaagcgactacccccgtggatcctagggttttagattcgatgcttcctttttacctctctcgttacgggaaccctcactcccgtactcacctctatggttgggaatctgaaaccgccgtcgaaacagcccgcgcacaagtcgcggcactcatcggggcttccccgaaagaagtcgtcttcacctccggcgccaccgaatcgaacaacatctcaatcaaaggcgtcttgcatttctacaaagacaagaagcgccacatcatcacgactcaaacagagcacaaatgcgttttagattcttgccggcatcttcaacaggaaggttttgaggtaacttatttgcctgtcgggtctgatgggcttattgatttggatagattaaggaaagaaatccggcccgataccgggttaatttctgttatggcggttaataatgaaattggtgtggttcaaccggttgaagaaatcggtaagatttgtaaagaatttaatgtcccttttcatactgatgctgcacaagctttagggaagattaaggttgatgtagagaagtggaacgtaagtttaatgagtttaagtgggcataagatttatggtcctaaaggagttggggctttgtatatgagaaggcgacctcggattagagttgagccgcaaatgaacggaggtgggcaagagagagggataaggagtgggacggtgccgactccacttgtggttgggatagagcggcgtgtgacttggcaatgaaagaaatggagtatgatgagaagagaattaaagggttgcaagagatgttattgaatgggattagggagaagattgatggggtggtggtgaatggaactatggatacgaggtatgttgggaacttaaacttgtcgtttgcgtatgtcgaacgggagagtctgt

SEQ ID NO: 17645 - DNA, 1030 bp, Gossypium hirsutum
  Clone ID: GOSHI-09MAY01-C4787_1
cccacgcgtccgcgctcgcgaatttggtgatctgcagaatcagagtgtaaaaaaggaaggaaaaaaaggctaaaagaatgtttttgcgaatgatatcgcggccgttgttggctaaggtgaaggagacaacggggatcgtcggattagacgttgtacctaacgcaagggaagtccttatcggtctctacaacaagactctgaaggagatccaggccgtacctgaagacgagggttaccgtaaggccgttgagagcttcacgcgccaccgtctgaaggtttgccaagaggaagaagattgggaaatgattgagaagcgccttggatgtggccaggtcgaggagctcatcgaggaagcgcgtgacgagctcactcttatcggaaaaatgatcgagtgggatccatggggtgttcctgatgactatgaatgtgaggttatcgaaaatgatgctcctattcccaagcatgttcctcagcaccgacctggtcctcttccggaggagttttacaagacgctagaagctctttctaagaaagacgagcctaaagtcacctccggagatccacagataaaggagtaatgtgacgcagacggttggctgaaatttgcattggtctttcgttcttatttgttgatcttgtattgtgcctgtttccgttgatggaattgagctttaacctatgataaaaagctggaccggaacctttagttgcataataatattgaatgccagtggttataaaaaaaaaaaaataaaaaaaaaaaaaaaaaaataaaaaaaaaaaaaaaaaaaaaaaaaaaaaaaaaaaaaaaaaaaaaaaaaaaaaaaaaaaaaaaaaaaaaaaaaaaaaaaaaaaaaaaaaaaggggggggcctttttaaaagatcaaagttaactaacccgggcatgcaaagggtatagctttttaaaagtggcaccaaaataaaattaacgggccggcgtttaaaaaagtggaaaagggaaaaaccctggggttaccaaaataaatcgctttggaaaaaaaacccttt

SEQ ID NO: 17646 - DNA, 405 bp, Gossypium hirsutum
  Clone ID: uC-gsronu33B179g01b1
ccctttcttccgagcaaccaaactctgaaatatgctgggccttattatataacattggggtcgattagtcctcttctcggtatcgctgccatggctgggttcgagcagccaataaaggagagagccaaggagctcaaggttttcttcaagaagggtgtgaagatcgtgggagaatcatgcaagaaaggttggtacaaagccaagcacatcaaaggctgattcttttgccttccatcatcttgcattctttgcgccttccatgtagagatctttgtcagtcatcttgatttggagggttttctataatttatcgaaggatcttatcctgtcttctgctgaggagttttacaagacgctagaagctctgtctaagaaagacgagcctaaagtcacctccggagatcc

SEQ ID NO: 17647 - DNA, 422 bp, Gossypium hirsutum
  Clone ID: LIB3148-024-Q1-K1-C5
cccacgcgtccgcccacgcgtccgttctactttgctttcctgtaacgctgaaaaaaagagaagagaagttctcaagagaaaaggagaagagatggcctcaaagcttcttcgtcaaaccctaaccaaaacctacacaaccgccgttatacgccgcttctccaccatggctgctgtcgcttccccttccgagtatgaggacccaacaggaatcaccatgaaaggtgtgaaaatttcgggccgtccactttacctcgacatggggtgttcctgatgactatgaatgtgaggttatcgaaaatgatgctcctattcccaagcatgttcctcagcaccgacctggtcctcttccagaggagttttacaagacgctagaagctctttcaaagaaagacgagcctaaagtcacctccggagatccaaag

SEQ ID NO: 17648 - DNA, 392 bp, Gossypium hirsutum
  unsure (1)..(392): unsure at all n locations
  Clone ID: uC-gsflnu33B036a04b1
ctgtaatatactaaccttctttttttacattttgttcgattagtcttcttctcggtatcgctgtcatggctgggttcgagcagcgaataaaggagagagccaaggagctcaaggttttcttcaagaagggtgtgaagatcgtgggagaatcatgcaagaaaggttggtacaaagtcaagcacatcagaggctgattcttttgccttccatcatcttgttttcttttcgttttccatgtagagatctttgtcagtcatcttgaattggaggggttttctttaattattgaaggattntatcctgttttctgcttattttttgtgcttttttttagcatcttatgagttgatttgattttgagattatagttaacngacaaaacatnaaattcc

SEQ ID NO: 17649 - DNA, 723 bp, Gossypium hirsutum
  unsure (1)..(723): unsure at all n locations
  Clone ID: AW187336.1
caaactctgaaatatactaaccttctttttttacattttgttcgattagtcttcttctcggtatcgctgtcatggctgggttcgagcagcgaataaaggagagagccaaggagctcaaggttttcttcaagaagggtgtgaagatcgtgggagaatcatgcaagaaaggttggtacaaagtcaagcacatcagaggctgattcttttgccttccatcatcttgttttcttttcgttttccatgtaaaaatctttgtcnntcntcttgatttggannacgaaaagaaaacaagatgatggaaggcaaaagaatcctttggtttctcatctacagcttctctcatggcttcttgcttggctcccgtttccatctcaggtggttctcatctcaaagcacgtgaggtttggttcactaagtccaacacctctggggaaaaaacccagtttggtacttcgaaggaaaacattgtcatcgaagataccgtttcccagtgtctgcttaatattcgcaatggccgccgggggttggaggaacttgatgtctgtctgctggtgttccttttcaggaggtggctgtgggcggaaacttttgggaataccttttgggggcggcaagatgaaaaaaattcgcttcctgggttnaacgatgaagtgccggattccgttaacgggtttgtcgaaccggtttgttattgataggaaggttcgtgatcaggtcgcggtt

SEQ ID NO: 17650 - DNA, 344 bp, Gossypium hirsutum
  Clone ID: uC-gsflnu33B136h03b1
ttccacgcgtccgcccacgcgtccgatcgctgtcatggctgggttcgcgcagcgagtaaaggtgcgagccaaggagctcatggttttcttcaagaagggtgtgaagatcgtgggagaatcatgcacgaaaggctggtacaaagtcaagcacatgagaggctgatgctttcgactcacatcatcttgtgttcttctcgatttccatgtagagatctttgtgagtcatcttgatttggagggttttctttaatttattgaaggattgtaccctagtttctgcttaagaaaagggttgctagctacaagatgttcagtgcagaaggtaaggtcaaagggcccttgag

SEQ ID NO: 17651 - DNA, 662 bp, Gossypium hirsutum
  Clone ID: GOSHI-09MAY01-C4717_1
cccacgcgtccgaagagatgggacaggcagtctcgtgcgttctataacttatttaggcaggcagatagagttgagaagcttgctgaaatcatccaaagattggagcaaggtgatctgaagctcagagtacgagctttggagtctgaaagggctttccaacgtgttgctactgttcagaagactgtagggagcgcagtagctgctggaagcctgatcaacctcgcaacaattttgtacctcaattccattcgagtgccagctgttgctgcatatgtcatctgtgcatttttcagctttcaagttcttattggtgttattaaggtgaaaagatttgaccagcgagagaggttgataacgggaactgcttgagtaacagatttgaagattcaactcggaggaaactttgatgataaagcaatctcgacccacagaaacaaagtgagaggcatagatacactacattttttgtttgttaattcaacataaatgaaagccttaaacttggtaaattcttagccaaatggatgtttaacagctaagcacttgggatggccttacttaaaagctctcaaagaacttgatgatgttctagctaaagctttgtggctgtaattccttatatgttactttattattttatatctcgagaaagtagtcttttt

SEQ ID NO: 17652 - DNA, 408 bp, Gossypium hirsutum
  Clone ID: LIB3148-006-Q1-K1-A1
cccacgcgtccgtgaagattcaactcggaggaaactttgatgataaatcaatctctacccacagaaacaaagtgagaggcatagatacactacattttttgtttgttaattcaacataaatgaaagccttcaacttggtaaatttttagccaaatggatgtttaacagctaagcacttgggatggccttaaaagctctcaaagatcttgatgatgttatagccagagcttagttgcggcaattcctgtagcaacttcatattttcaattctcgagttagcagttttttttacccctttttataatcggctggcctgattttcatgtagccttttagccatagcatagattaacttctgcagaaattcaatgttaagttgtagcataatgtatccccctgtcaatttac

SEQ ID NO: 17653 - DNA, 1219 bp, Gossypium hirsutum
  Clone ID: GOSHI-09MAY01-C4737_1
atataataaaaaataaaaacagagagatcgtcgatcagatttagttgattgatccaaagaatcaaatggaatgaaatgaacgtcgactgagtggatttcagcaatgaaaagcgtcttctcggcgcccggagattacatctacttcaagtcccaagtccctcttcacaagatccccatcggcacgaagcagtggcggtattatgattttggtcccaaagtggttactccactcatatgtcttcctggaactgcagggacagcagatgtctactacaaacagatcatgtccttgtccatgaagggctaccgggtcatttctgttgatattccctgtgtttggaatcatcaagagtggattcaaagttttgaaaagttcttggatgccatcgatgttcatcatatacatctgtatggtacatcccttggaggcttcctagctcaactttttgctcaacatcgtcccagacgggttaaatccttaattctatcaaatacatttttggagacacgcagttttgcagcagcaatgccttgggcacctattgtcggttggaccccgtccttttttgttgaaacgatacgtcttaacaggaatccgtgatggccttcatgaaccttttattgccgattctgtggactttgttgtttcgcaggtcgaaacactctcaagagatgaattagcatccaggttgactttgacagttgactctgcttcagttaaaccgctactactttcagattcatttattactataatggatacgaacgactactcggcaattcctcaacaactcaaagatcagttgagtgagaggtacccgggtgcaaggcgagcttatctcaaaacaggaggcgatttcccctttctttcccgcccagatgaagttaacctacatcttcagctgcacctgagacgggttggattggaagctcagccagagctggttcagagcatcccaaaagacggcaccggtggaggccccagcaaagaaaatgataaggaggatcgtgatgacgaacaaaaagatgatgggggaaatcccgaaagcaattctgaagaaagccagccatcaccttcggctccggaaagttcagaatctcatggtctagatgaacagctcctcagcaatgccgaaattcattacatcgatcagaaagattcaatcatttttaagccttctgcaatgtcaatgaatcaacacggtgcggctggcggaat

SEQ ID NO: 17654 - DNA, 410 bp, Gossypium hirsutum
  Clone ID: LIB3165-017-P1-K1-C5
gatcgttgatcgagttaattgattgaatcaattcatttgaaccgaatagaattaatgtcgagcgagtagattcagcaatgaaaggcgtctccttggcgccgggagattacatccacttcaagtcccaagtccctcttcacaagatacctgtaaggttctttcaagtccctcttcacaagatacctattggcacaaagcaatggcgatattatgattttggtcccaaagtagtttctcctctcatatgtcttcctggaattgcagggacagcagatatctactataaacagatcatgtccttgtccatgaaggtttggaatcatcaagagtggattcaaagttttgagaagttcttggatgtcatcaatgttcatcatatacatttatatggtacatctctaggaggattc

SEQ ID NO: 17655 - DNA, 365 bp, Gossypium hirsutum
  Clone ID: LIB3196-003-P1-M1-E12
aaaaaagaaaataaccattgccagcatgaagtttctctgattttcttttcactgattggtggaaacataaactcatttccgagtaatgatttacttaaaatattatattgtttattatcaaacattatttagacaagtgaagagttttttattcagggctaccgggtcatttctgttgatattccccaggtttggaatcatcaagagtggattcaaagttttgagaagttcttggatgtcatcaatgttcatcatatacatttatatggtacatctctaggaggattcctagctcaactttttgctcaacatcgtccaagacgggttaaatccttaattctatcaaatgcatttttggagacatg

SEQ ID NO: 17656 - DNA, 254 bp, Gossypium hirsutum
  unsure (1)..(254): unsure at all n locations
  Clone ID: LIB3083-014-Q1-L1-D7
gtttatctatttaattgattgaatcaaaacaatggaacggaataaaattaatgtagggagtgtanattcaacaatgaaaggcgtctccttggcgcccggagattacatccacttcaagtcccaagtcccccttcacaagatacccattggcacaaagcaatggcgatattatgattttggtcccaaagtagtttctcctctcatatgtcttcctggaattgcaaggacagcaaatatctactataaacagatca

SEQ ID NO: 17657 - DNA, 761 bp, Gossypium hirsutum
  Clone ID: GOSHI-09MAY01-C4697_1
gataacataaaaataaaaataaaaaagtttgaagcttttactatccaagtttgaagctttttaatctttctttcttttgatctaaaaccagaagattgttcttttgtcttcttctttggcaaattcaactgttcttctattcgtttcttctgtgatgaattgccattcaccttcaacaagatgaatggattctccaccgtggatggtttcgtggagataaccgaatccctagctgagatgataaagttcgtggcgaatgaaccctcagttggacttttctacattcaacagcacaccgagaatgccattcctaacgtagttaatctccgtaaatcacgttgtagaaaaatctcatgaagcaactttacacacacaagacttggaagattctatcaccacggtgagatcgatgaaggaatgcggtttcccaattgcagacgagatgattaaggacattaagagttccttaatgttaatgtcctcaaaacaaccgaagagaggattgatccacagtcctgcttcaagctttcagatgggaagaactagctcttcgggaccaatgtcttggaatcctgctgggaacatccagtttgatgggagtaattatttttcgactgtaatcaagtccgcagaacataaagcatgcaattttaagtggccacaacttgataccaggaacagatggtagccgagccccatagccaccttcacaccagctccaccgttatcagttgcatctgctagcactagttcaattcctg

SEQ ID NO: 17658 - DNA, 969 bp, Gossypium hirsutum
  Clone ID: GOSHI-09MAY01-C4687_1
ggattaagctttctttctaaatccctctttagcaaggactttggaccgaataccaaatttctgggaaaaatgcagttttccaggaattttatgataatttgttctgcattgctcctgtgctcttccttgacatatgggcaaacggctagtccaccggctccggtggcaatgaccccaactccgacacctgcaccggctccggcaccagaatacgtaaacctaacctatttactctctgtggctggtccatttcacactttccttaactaccttgaatcaactaaagtgattgacaccttccaaagccaagccaacaacactgaacaaggcattacaattttcgtaccgaaagacgattcgttcaagggtcttaagaagccgtcattgtccaatctcagtgatgatcagcttaaatcgctcatccttttccatgccttgcccaaatactatgcccttgccgacttcaattacctcagtacaaaaggccctatcactacacttgctggtggccaatacactttgaatttcaccgatgactccggcaccgtgcacctcgattcaggatggagcaaaacaaaagtatccagcgctgtacattcgaccgatcccgtcgcgatatatcaggtgaataaggtccttcttcctgaggctatctttggtaccgatatacctccaacgcctgcaccatccccagctcctgatattagcccagctgcggattctccatccgcagactcgaaagaaggcggttctccgtcgaaggctttgccatcggattcagctgctcatagggttatgaagttgagcatttggagtcatctggttttggcagtctttggtgggttgggtctgcttttctaataataagacttcattttgagtcttaaagttatgttcgtggggggcagcacacctctgagtttctcaattgaatttacttcgattataaaaccattttttcttgtatat

SEQ ID NO: 17659 - DNA, 604 bp, Gossypium hirsutum
  Clone ID: GOSHI-09MAY01-C4647_1
cccacgcgtccgcccacgcgtccgcccacgcgtccgcccacgcgtccgcccacccgcccgggctgctctcactgaattcttctcccacctctacaccgtgaccgtcgtcttcttcaccctcttactcctcgaagttgctatcctcatcaggtccctcaccggcggcctttccgattccgagaaacgcctcatcacaactacccagtacctgaaattcattgaagaaaagaacccaacaatcatatactccacaagatcatcatccagggtggatctgtcatcgaacgagtgcaccgtgtgtttatctgagctagaagaaggtgagaaagtgaggaaactgaaatgtaaacacactttccacaaggattgcctcgatagatggctccaacagtattgggcaacttgcccactttgtaggaccaaagtgttgccagatgaggttggggctaattttcacaggctccaaaatcagtgtagagtatgatggaagtgatgaagagatgattttcttattatccgcactacatgataatagcttacacagattgttctgaagtactatactttttcttttccttctctgggtacattttgatgtaaattt

SEQ ID NO: 17660 - DNA, 455 bp, Gossypium hirsutum
  Clone ID: GOSHI-09MAY01-C4637_1
cccacgcgtccggatgagatgggtgatagagtaggcttagaggttgaagaggcaacgtagcttctctctttttagtgcggtgactcacaaggtttgctttttattgagataaaccgtgttaaaacgatttctagaagcttcgtcggagagattcagtccggttgatgatcggagctccggttactcgtcggaggagacgagttagagcgtttatttgttgtttgttgctgtttcctaagaggaaaacgagtttttttttttatatggtaaataaggagaagagaggaaaatgaatgggcatagcaacggattcggtagtgtggcggcggttgcggcggctgagtatataaggagacatcatctgcatgagataggagagaatcagtgtagttcaactcttgttaaacacatcaaagctcctgttcctctcgtttggtctttggtgaggagattcg

SEQ ID NO: 17661 - DNA, 1160 bp, Gossypium hirsutum
  Clone ID: GOSHI-09MAY01-C4627_1
aaaggacaagatcatattgggaagcgaacgcaagtcagctgtcatttctgaagagtcacgaaaattgactgctttccacgaggctggccatgctcttgttgccatccatacggagggggcacttcctgttcacaaagcaacaatagtccctcgagggatggctcttggcatggtgtcccagttgcctgaggtggatcaaacaagcttctcccgaaaacagatgcttgctaggcttgatgttgccttgggtggttgggttgcagaagagctcatctttggagaaaacgaagttacttccggtccacgctctgatcttgagaatgcaactgaactggccagatccatggttacaaactatggcatgagtaaagaagtgggacttgttacccattcttataatgatgatggtcggagcctaagcaccgagactagacatcttatagagaaagaagtgaagtacttactggagaaggcttataacaatgcaaaaaccatcctcactacccacagcaaagaacatcatgcacttgctaatgcattgctcgagcatgagacactcacaggagctcagattaatgctctgctggcgcaggttaactctcagcagcagcaacaagaacagcatcaagaggtgattgtagcacagaatggacctcagtccaacccagtaccaccaagtcctagtccagctgcatcagctgcagccgcagcagctgccgcagccgcaacggcaactgctgcagctaaagccaaaggtgttgctcctgttggatcttagcatgcaaggcactggtagaggcacaatcaggtagttatttctcgaattgaatgtacacatacatattctcaagcctttttgagtttgtagctttgcatgattactgccactgggttttatctgtttataaccttgtgtctgatgtgactgaaagatgtagaagatgaattatatggcagctgtgtcgtaacgataagtggcattaacttgagtaatagaaaaatgcatggcatcacccttccccttgcccacgttcttttgttggggtttccccttttgattaaacaattttcttcatacactgataatgttccatttaagggtttaccctcctggggatttgtttgtaaagcgttgataataaagtaccttttgatcgctt

SEQ ID NO: 17662 - DNA, 961 bp, Gossypium hirsutum
  Clone ID: GOSHI-09MAY01-C4047_1
ggcaattactgttcttgaatctaaagaacggacacatccattggctctacttgcaaaccaactaagactaattgctgacagggagttaaaaatatttttcccagtattgcgtcagtggtctcctgaatctatgatgatttcagtgcagaaactacaccaattttttggggaaagactgattccattcctaaagggagtctcatctttatctgaagatgctagatcagtgcttcctgctgcctatgccctggacaacgaacttggccaactttatacttcttctcttgaggaacagaaagtgcagcactctcctagaccatatttggaccattatcagattgaaaaagtctcagggccattaattattgattgggtgattggtcagcatactcacatattggaatgggcaagaagagcattggaccttgaggattgggagccgttgtcatttcatcaaaggcaggcagcatcaatagttgaagttgttaggatattggaggagacagtggatcaactctttggaatgaatctccctctggacattactcatctgcaagcccttctatctatagttttccacagtttggatgcatatctgcagagagttctcaatcagttagttgagaagaatcatctctacccatcggcccctcctttgactcgttacactgagacagctattccactaattaagaagaggttgaatgagtacaaagtcttagatgacatcatgcttgatagattgaatgaattgacaatacccaaactctgcatccggctgaacacccttcagtatattcagaaacaggttggcgtacttgaagatgacattcgaaactcttgggcagctgtaaggccatcccttaaccaaacacaggctgaagaagagcctgtggagattttggagagtgactcactaacacataacgaaacagtagatgaactcttggtacgaccttta

SEQ ID NO: 17663 - DNA, 746 bp, Gossypium hirsutum
  Clone ID: GOSHI-09MAY01-C4017_1
gaatacttcagggatcaagagttctcttctatatgtgaatcatgaaattagggaggctggttcatcgagtaaagaccgacccatagacattgaagatgggtttgtaagggctcctcatgcttcatcagatactgctgataattctacctcacttctggagaatactggtactagtggcagctctagtggtcgtttaatttttgatgggcctgtggacttgcatgcagtttcatgcagaaacagttcattaaatgcaaccttggtaggggaagaaaatgctgtggctgctctggttccatcatcttctcaagaacaaatgcaagaagccctgagagctggtcttcattctgaaagtagtcactctagtgattctgagaaacaagaaagcggtgcattgggtaataatgaggatgataccttcaattctgtagttagtaggtctagtcaaacatgcagaattgatctgcttgaagaggtcattgaagatgctaaacataacaagaaaactttgtttcaggctatgcagtcaatcatgaacttgatgagagaagttgaacttcaagaggaagctgcagaacaagcaaaagaggaatgcgccatgggtggttcagatattctcgtcaaggtggaggaacttaaacagatgcggccacatgcaaaggaagcaaatgacatggttgtgcgcttggttggtaatagccccctttttttaagtcataaaacatattgtagttctatttttttta

SEQ ID NO: 17664 - DNA, 583 bp, Gossypium hirsutum
  Clone ID: GOSHI-09MAY01-C4037_2
atatccgcaaccattagcggccccctcgccggacgcatcagcccggctcactatatttatactcaacttcccttagctcttcatgattccaccttgtcggcggttctttggagcttaagaggaagaagcattctttcactcccaaaatgtcagatcttcaagcaccccttcgcccaaagaggaagaagggcttggtggactttttggtccagtttcgttggatttttgttatattttttgtccttcctttttcaactctgtattactttctcatatatcttggagatgtcagatccgagatgaagtcctacaagcagcgtcagaaggaacatgatgaaaatgttttgaaagtagtgaagcgtctcaaacagaggaatccaaaaaaggatggtcttgtatgcacagcccgcaaaccatggattgcggtggggatgcggaatgtagactataagagagctcgccattatgaagttgatttgtctgctttccgtaacattcttgaaattgatagacagagaatgattgcaagggttgagccacttgtaaccatggggcagattacacgtgtcacagttccaatgaa

SEQ ID NO: 17665 - DNA, 2095 bp, Gossypium hirsutum
  Clone ID: GOSHI-09MAY01-C4037_1
ccagcgttcgcggccgcgtgggcggacgcgtgggtggagcttaagaggatttgatctttgctttgcttcccatgtctccgccgtggaggcggttctttggagcttaagaggaagaggcattctttcactcccaaaatgtcagatcttcaagcaccccttcgcccaaagaggaagaagggcttggtggactttttggtccagtttcgttgggtttttgttatattttttgtccttcctttttcggctctgtattactttctcatatatcttggagatgtcagatccgagatgaagtcctacaagcagcgtcagaaggaacatgatgaaaatgttaagaaagtagtgaagcgtctcaaacagaggaatccaaaaaaggatggtcttgtatgcacagcccgcaaaccatggattgcggtggggatgcggaatgtagactataagagagctcgccattatgaagttgatttgtctgctttccgtaacattcttgaaattgatagagagagaatgattgcaagggttgagccacttgtaaacatggggcagattacacgtgtcacagttccaatgaatctttcccttgctgtggttgcagagcttgacgatcttacagtaggtggtctcatcaatggctacgggattgaaggaagctcacacatctatggcctgttttctgatactgttgtagcttatgagatagttttggctgatggccgcgttgttagagctaccaaggacaatgaatattctgatcttttctatgctatcccatggtctcaaggaactcttggatttcttgttgctgccgaaatcaagcttatacctgttaaagaatacatgagactgacatacacgcctgtagtggggaatttgcaggaccttgctcaaggttatatggactcttttgcacccagagatggtgatcaggataatccagagaaagttcccgattttgtagaaggcatggtctactcacccactgaaggtgtgttcatgactgggagatatgcctctaaagaagaggccaagaagaaggggaataaaattaacaatgtaggttggtggtttaaaccctggttctaccaacatgcgcaaacggccttaaagaagggagagtttgtagagtacattcctacaagagaatattaccacaggcacacaagatgtttgtattgggaggggaagcttatacttccattcggagatcaatggtggtttaggtttcttttgggctggttgatgccacccaaggtttccttgctcaaggctactcaaggtgaatctataagaaactattaccatgagatgcatgtcattcaagacatgcttgttcctctttacaaggttggggatgcccttgagtgggtccaccatgagatggagatctatcccatttggctctgcccgcaccgactgttcaagcttcctgtcaagacaatggtgtatcctgaaccaggctttgagcagcagcacagacaaggcgacacaccatacgctcagatgttcaccgatgttggggtgtattatgctccaggccctgtattgaggggtgaagtatttgatggtgctgaggcagttcgtaaaatggagcaatggctgatcaaaaaccatagttttcagccacagtatgcagtgtcggagctgaacgagaaggatttctggaggatgttcgatgctgacctgtatgagcatgtgcgtaggaagtacggagctgtgggaacattcatgagtgtgtactacaaatccaagaaaggaaggaagaccgaaaaagaggtccaagaagcggagcaagcccaccttgaaactgcctatgcagaggctgattagtgagcatgggggagtttggtagattttatgtgagaggaatctttgcattctctttgttgtctctttaatttagtatttgctttcagcgatggtattatggggggtcggaactgatgttatgggataggtttaagcagtgaatgttgtgggatgatttatggctatagtttagctattatggatagacttgtgataatgagaggcttttgtttttagctctcatatttggctgcgcctgctgcaatcactccaacattacctttccacc

SEQ ID NO: 17666 - DNA, 694 bp, Gossypium hirsutum
  Clone ID: GOSHI-09MAY01-C4387_1
tcttttggagaaaaggtcggttgggaggcaaaaactctgttgagaaagagctgagaggcctggatctgcaaacaggaattttcagtctaagacagattaaagctgccaccaagaactttgatactgaaaacaaaattggcgagggtggctttggttgcgtgtataagggtctattatcagatggaacagttattgcagtgaaacagctttcctcaaaatctaggcagggaaatcgcgaattcgtgaatgaaataggcatgatatctgcactgctgcatccaaatcttgcgaagttacagggagtggtggggtgaaggaaaccagttattggtagtgtacccgagcacatgggaaataactggctatctcgtgctttattcgggaagaatgctacatgcaaactgaaactgaactggccaacccgacaaaagatttgccttggcattcccgggggtttggcctacctccacgaacagtctagaataaaaattgtgcataggggattataaaacagttacgtgctgcttgataaggatctcaatgcaaaattctgaatttgggttggcaaacctaatgaagatgacaaaactacttaagcactcggatagctgggaccatgtagtttcttaatgagactttttcactttgaaataactctagtataatgcatacttagcaagaaattgaagggtgc

SEQ ID NO: 17667 - DNA, 565 bp, Gossypium hirsutum
  unsure (1)..(565): unsure at all n locations
  Clone ID: LIB3584-045-P1-K2-C9
cggacgcgtgggataggcatgatatctgcactgcagcatccaaatcttgtgaagttgtatggatgttgtgttgaaggaaaccagttattgctagtatacgagtacatggaaaataactgtctatctcgtgctttatttgggaagaatgctacatgcaaactgaaactgaactggccaacccgacaaaagatttgccttggcattgccaggggtttggcctacctccacgaagagtctagaataaaaattgtgcatagggatattaaaacaagtaacgtgttacttgataaggatctcaatgcaaaaatttctgattttggtttggcaaagctaaatgaagatgacaaaactcacatcagcactcgtatagctgggaccattggttatatggcccccgagtatgcaatgcgtggttacctaaccgacaaagctgatgtgtatagctttggtgttggtgctttggaaatngttagtggaaagagcaatacaaactacaggcctagtgaggactatgtttaccttcttgactgggcatatgttttgagagagcggggaaagttgttgg

SEQ ID NO: 17668 - DNA, 842 bp, Gossypium hirsutum
  Clone ID: GOSHI-09MAY01-C4357_1
ggatttcacagcctatccaaggcttttcagaagggatgtgtggttaacatcaagatcatcggaacatgtaccgggaaatcaatacactggaacaggatggttgcttccacatgcatgtcaaaacaactcagagaatcctccacctaacctttacaggcaggaattaccagggggaactggtgttcctagtggccggattcctccgggagaatgcttcacgggagttgttctctcacactgcgctcgctctcttctgtcaaatcaaccatggggctcctgaaatctgggattgtctcttgggttaaatgacatgatcatctccgagctttgttcaatgtctcaaccagcaatgcctcatggtgctgttacgaatccttactcaaatgcctcttggggtttcaagaggcaaccactcctgtagtcgctcccaggagatgctgcctcaaatcccagagcctattaacagtctattgaccgggggacttcagttgtctcaccaaagcaaggggcttttcatggtgcatgagccatctaaagcggatgacacctccatgcagcatattcaccaatccttctaagtctgctgagattatcattcctgcaaatattggtctgtttttgagcccagtcttacttagtgcgagatttttggtgtttctggcattatcgtttcttttttgggtaggagtttgttaaaaacccatactaccccttcatgttgtgagagcctatggttttatcatgatttataggtgagttatgtttagcctatgatgaactgaaagctaccgtatgtttcagagactatttctctagaaattattttttttttttttttgggc

SEQ ID NO: 17669 - DNA, 1261 bp, Gossypium hirsutum
  Clone ID: GOSHI-09MAY01-C4377_1
cccacgcgtccgcccacgcgtccgcaaagatatcactataatgtggcagatgtgaggcttgctcaacatatcgagaaaggaagtgaagacgggttatttataagtagtgtggcttcttgttctaacctatgggctcttattatggatgctggcactggcttcactgctcaagtatatgaactctctccatactttcttcataaggaatggattatggagcagtgggagaagaattactacatcagtgcaattgcaggagctaataatgggagctctttagttgtaatgtctaaagggacccagtatttgcagcaatcctacaaagttagtgattcatttcccttcaaatggatcaacaaaaaatggagggagggttttttatgtgactgccatggccactgctggaagcagatgggcaattgttatgtcgcgtggtgctccattttctgaccaggttgtagaattagattttctatatcctagtgaaggtattcatcggaggtgggatagtggctatcgcatcacttcaaccgctgcaacttgggatcaagctgcttttgtccttagtgttccaagaagaaaacctgcagatgaaactcaagaaacccttcgaacgtctgcttttccaagcacacatgtaaaggagaaatgggcaaagaatctctatattgcatcagtttgctatggtcgaactgtttcacccacgcccccgcggtcgcgcggcttcagatgcaactcattttgttcgatcttgcacttgtacaatgagggacgactttactgcttcaatttaaggaactaagctctttagtcagattgattgatcacagcattagagagttgatgtatgcaaaattctactttattgtcaccatgatgtagcatctattctaatgcctgtgcactgtcattcaatctagtcaaaatctttatgggctaaatttatatctttttttccactagatgtgaatgttcttacctgtatagttttgaaatcataatttctaggttgaaggcaagtgcacaggttaagtttaattgttgatggtgttcgaggaacattcaatgatgattttatgctaaactctagatgctttgaggcattaaatctgcatactatgtctagctttgtttctggactagaagatcattatgatcttttatcctttttcttctgggatgtctgatttgaccctacacaagagaatggtagttattttgtatattccgaagcaacagtatgtaattggttatcattatt

SEQ ID NO: 17670 - DNA, 694 bp, Gossypium hirsutum
  Clone ID: GOSHI-09MAY01-C4307_2
cccacgcgtccggtgcaggacgttcttggagatggtctgatctctgcaggtcatgatatcagtgatggtggattactagtttgcgcgttggagatggcatttgctggaaattgtggcattgcattggacttggcttctctaggaaatagtgttttccaatcactatttgctgaagagcttggtctcattcttgaggtaggcgggaataacgtgcatagtgtgatggacaagcttagcagtgtggatgtttctgctgagttaataggacgagtaaccacctcacctgtgatagagctcaaggttgatggaattactcatttaaatgagaaaacttctctgctgagagatatgtgggaggatacaagcttccagctcgaaaagttgcagagattggcttcttgtgtggaactggagaaagaaggtttgaagtttcgccatgagccttcttggcccttgtctttcaccccttcagttacggatgagaaattttttactacagctttaaaaccaaaagtagccatcattcgtgaggaagggagcaatggagacagagaaatgtcagcagcattttatgctgctggttttgagccttgggatgttgcaatgtcagaccttcttaacggagttatttctttgaatgaattccgtggaattgcatttgttgggggttttagttatgccgatgtgcttgatt

SEQ ID NO: 17671 - DNA, 651 bp, Gossypium hirsutum
  Clone ID: LIB3583-026-P1-K1-C7
cggtcgcgtggagagttggtggatttcttgttagcgcattaggagatggcatttgctggattctgaggcatggcattggtctaggctcctcgaggagattgagttttcctatctctttttgctgtagagctaggtctcattcttgagagtttgtttgtatttcgtgcattgtgagttggtgttgctttgctgttaggatgtttctgctgagtttattagtcgtgtttcctcctcacctgtgattgagctataggttgatggaattactcatttaaatgagaaaacttctctgctcagagatatgtgggtggattcttgcttcctgctcgaaaagttgctgtgattggcttcttgagtggttctggtgtaagtaggtttgttgtttcgccatgagccttcttggcccttgtctttcaccccttcagttacggatgagatattttttactacagctttaaaaccaaaagtagccatcattcgtgaggttgggagctatggtgtcagagttatgtctgcagcattttatgatgctggttttgagccttgggatgttgctatgtcagaccttctttacagagttatttcttagtatgaattccgaggaattgcatctagtgggggttttagttacgccgatgagcttgtttctgc

SEQ ID NO: 17672 - DNA, 717 bp, Gossypium hirsutum
  Clone ID: GOSHI-09MAY01-C4227_1
cccacgcgtcccccaaaatggcctacgccttgattacaattctactcctagccatttaccaccacacggcccaaagtgcagcaccaccaccagcaaccacagctccaccatcaatgctgccaccagcagccagagacttcctccaagcccacaaccaagcaagagctgcagtaggtgtcgcacctctcaaatggagccaacaactagccaatgcttcaagtctcatcgcaaggtaccaaaggaacaaaatgggttgtcagttcgcaaacctgacaaaccacaagtacggagcaaaccagttatggggtagcggagccgccgtgacgccgctcatggcggtggaaacttgggtaaaagagaaagattattatgattatgggactaatacttgtgcaccgaatcataaatgtggtgtttatactcaagttgtttggaagaattcttcggatttgggttgctcacaagctacatgcaaggatcaagttactttaactatttgtttttatattcctcctggtaattatataggtgagaaaccatactagaacaaaaccagctatatatatgtgtgtgtatgtatgtatagcttgttgcaggatctgatctgatctgagagttattctgggaaatttcttgattatgtaggcaagtaggtaacaatgctgtatcatcttatatccataactttggaatctaaataaaaaccagttctggaat

SEQ ID NO: 17673 - DNA, 785 bp, Gossypium hirsutum
  Clone ID: GOSHI-09MAY01-C5947_3
cgttttctggatttcccctttttccctggggggggagacgcaacctaacctaaccaacgattcatccactcctgccccggttcggctttacagctgaacttccaaggccaaaagtgtcaccgatgggtacacatgttatatcaagacaaaaaccggctccttcggggggggggaagaaaaggggaaggggaagaccgaggactcggtttccttagaaaccacaatcggttagtttcaatcctggaattagtttgtctgaacaataaagatgttaacatggaataagtagaaaaatgtgcttttgaggtttgatgctagcagaagaaaagcttagccaaatggaagaggcgaatgagtcgaattccggcattgtttaacatgcagagttgaaagctggcaacatgagaatccgggctgttcgatgtcggaaccggtgacaatcgttatcttccaaatggagttgggcttggtgaggttatattctcggtttagtaagggtgtgatttagaggggatagctagtagctttaagcatttgtattctgagagctagtagcttttagcatttgtatctagagagtcgttggattatcgtatcctttaatcggagacgtgtgggaactttgcttatctttgtgtaatcatgcaactctccctgtgtaatcctatgttaaatgttagtagctttgtattagggatcgagtgtcggatatttgatatgttggatatgaatatgtttcattcatcgagttccttttaaaaaaagaattttaaaattaaattaat

SEQ ID NO: 17674 - DNA, 891 bp, Gossypium hirsutum
  Clone ID: GOSHI-09MAY01-C5947_2
tccaaattcaatcaataaatctgaagttttggatgtaaaaccagtgcgtaccttggttcctatattcccggagccatacgagggtcctccatttgtttgcgtgcctcctaacggccctttcccatctggattttccccatttttcccatttagtggatcaaacccaaatcctaatcctaaccaaaacgatatcaatccaactcctgccccggttcggccatttacagctgaaacttccaatggccaaaatgtgtcaccgatgggtacacatgttaatcaaggacaaaaaccggctccttcgtatcctgtcaagaaaaggggaaggggaagaccgaggactcggtttccttagaaaccacaatcggttagtttcaatcctggaattagtttgtctgaacaataaagatgttaacatggaataagtagaaaaatgtgcttttgaggtttgatgctagcagaagaaaagcttagccaaatggaagaggcgaatgagtcgaattccggcattgtttaacatgcagagttgaaagctggcaacatgagaatccgggctgtttgatgttggaaccggtgacaatcgttatcttccaaatggagttgtgcttggtgaggttatattctcggtttagtaagggtgtgatttagaggggatagctagtagctttaagcatttgtatttagctagtagctttaagcatttgtattctgagagcaagtagattttaatgtatttagagagtcgtcggtcattggacacgtttgggtctttgcttatcattgtgtaatcatgcaacccccctgtgtatcctgtgttaaatgttagagctttgtttagggagtgagtgccgaaattcgatagttggatatgaatatgttcttcttgtttaaaaa

SEQ ID NO: 17675 - DNA, 603 bp, Gossypium hirsutum
  Clone ID: GOSHI-09MAY01-C5947_1
tttaaagaaaaaaaaaactgaacctatcctctccctttcaaggttcccagcagccaaacatggcccacgccggcgagcggcggttccaaaggccaaagctccttcacgagcggtggtcggagcgagaaaaggagggctttttaaccccgttctcgacctccaccttaaggcccggtcctccagaccaaacaagccgaaacaaggagagacctttcgtctccttctcggtccgattccaacaccgaagatggtctccggcgacgggctttcgagaccggtactggtgaagtcaacgggtattggaagaataaacctagcctttttggtgcaaaactggtcgtgcttcgggcgttgagtgcgctgcaaatgcacgaggagacgtacggcgcactgaggctgctggttgtgagctgaattgggctagggttttgccatcttgggcctctgttgtgtttttatttgggctacggattttgttttaattttgtttattattgtgtgttttgtgtttaaggtcagggtagaattgggcccgtacaataaaaactccgcaatgtattttaagtttaaagaattgggaaagtatccaaatctgttttcatg

SEQ ID NO: 17676 - DNA, 553 bp, Gossypium hirsutum
  unsure (1)..(553): unsure at all n locations
  Clone ID: LIB3583-059-P1-K1-E9
atcgccgcctccatggccagtggccggagttgcgtgagaacagcctttcggcctccctaccgcggcgtgggtgaaggctaagccttctcgaccgcnagaccaaaaaaggaaaaaggatgaaccacctcttttctgcccgactccggtgacggccaaggtgggatccggcaccagctcgtcgaagcggtcaggttttgggcaaggtcaacgggtgttggaaggataacccagaccattttggtgcaaaaccggtcgtgcttcgggcgtcgagtgcgctgcgaaggcacgaggagatgtacggcgcactgaggctgctggttgtgatgctgaattgggctagggttgtgccattttgggcctctgttgtgtttttatttgggctatggattttgttttaattttggttattattttgtgttttgtggntaaggccagggtaaaattgggcccatacagatatcaatccaaactcctgccccggttcagccatttacagttgaaacttccaatggccaaaatgtgtcaccaatgggtacacatgttaatcgagggc

SEQ ID NO: 17677 - DNA, 374 bp, Gossypium hirsutum
  Clone ID: uC-gsflnu33B112d11b1
gttaagccagaggctattgtatctgttgcatgggaaggagtataccatacattgactacgcttttaagagattttagggatggactgagctattatgtaagcggggggccctatttgtgaatggggtttaattaacgaatgttttgagcttgaactgaagggctggggatgtagaccaaatgtgcgagtagcaagtagcagaccataaaaaaactttttgttgccactccacaaccgaagatggtctccgtcgacgggctttcgagaccggtactggtgaagtcaactggtattggaaggtgggcctatcttatggggtgcaaaactggtcgtgcttctggcgctgagtgcgcttcaaatgcacgaggagacat

SEQ ID NO: 17678 - DNA, 1069 bp, Gossypium hirsutum
  Clone ID: GOSHI-09MAY01-C5967_1
ggaaatcaccagttgaatctcctttctcgtattgtgatgcacaacgtgggcacccatcacctaaattatcctccgctgcaaagcctaattctgttggctttaataggaatagctccctggctgcagtttctagcagctcaatgtattggcctaaccgagttgagaatgttacagaatctgttgcaccagttgtgaacaaagaatctagtgaaagaaagcagggaactgggaatggctgcaaactttttggtattcagttacttgacaaaataaacatggaagaaaattcacctttggctacaatttctgggactggtgtggatgaccagccacttcattcactaaatgctaattctgaccagcaatctgatccatcaaatcttaatcagtctgatcttccttctataagttgtgaacctgagaagtgcctgagatctcctcaggagtcacagagcaagcaaattcggagctgcacaaaggttcacatgcaaggtatggcagttggaagggctgttgatttgacacgattcgaccgttatgaggatttgctaaagaagctggaatacatgtttgacattaaaggtcagctttgtggatcaacaaagaattggcaggttgtctacaccgatgatgaagatgacatgatgatggttggggatgatccctggaatgagttttgcagcatggtgaggaaaatttttatctatacgtcagaggaagtccggaagttatcacctaagataaaacttccagtgaatgatgatgatgatgatgatagcaaagcaaccaaggctggggttgacacagttatcaaccctgaagatcgttcatcaatcgttggtcaagggtgctaaagtaaccacacctttacgcacgtcaggaacatagtgcttccatagaagagttttgaaaaaaaggaaaatagtgctcaagattttgtttatatatatatatgcattacccagatgatatatcactattgacatcgcaagtccgaaacagcatctatatctaggaaactgctgttgtgtcaacaaattcatccggaatgtgagatttgcattgcctg

SEQ ID NO: 17679 - DNA, 508 bp, Gossypium hirsutum
  Clone ID: LIB3583-059-P1-K1-H12
catgatgaagatgacatgatgatggttggggatgatccctggaatgagttttgcagcatggtgaggaggatttttatctatacatcagaggaagtccggaagttatcacctaagataaaacttccggtgaatgatgatgatgatgatagcaaagcaaccaaggctggggttgacacagttatcaaccctgaagatcgttcatcaggaacatagtgcttccatagaagagttttgagaaaaaaggaagctagtgctcaagattttgtttatatatatatatgcattacccagatgatatatcacaattgacatcgcaagtctgaaacagcttctatatcttagaaactgctgttgtgtcaacaaattcatctggaatgtgagaattgcattgccttaaaaatgaatgggttcaagtttaaaattttttctttttcccttttttaatttttttttaaagtttttgctaaagcaaccttttataaggggaaatttgttcaatttggatttt

SEQ ID NO: 17680 - DNA, 952 bp, Gossypium hirsutum
  Clone ID: GOSHI-09MAY01-C5847_1
tctgtcaactgagaaagtgaaagaaaaagtcaacattgaggtaccatggaagaaacttttgttccattccgtggaatcaagaatgatctgaaaggaaggcttttatgctacaagcaagactggactggtggcttaagtgcaggtatcaggattcttgctccaacgacatatatattctttgcttcggcaattccagttatatccttcggagagcagttggaaagaaatacagatggaagtttgactgcagtacaaactcttgcatcgacagcactttgtggaatcattcattcacttgttggaggacagcccttgctcatacttggagttgcagagccaacagtattgatgtatacgtttatgttcaactttgcaaaggaccgaaaagatttggggcataaactcttccttgcctgcacgggatccgagcttttcggggaatggtggaggagttgggcattcctcacagagaaaatcctgaccaaacagcatggcaggcttcttggcgatttgggaatggaatgttggcactggttctgtcctttgggctcctccttactgcactaaagagccgtaaagcaagatcctggcgctatggaacaggctggcttcgaggttttgtagcagattatggcgtgccacttatggtgcttttgtggactgctgtttcctacatacccgttaatgatgttccaagaggtattccaagacgtcttttcagtccaaacccatggtctcccggtgcatattctaattggactgttatcaacgaaatggtgaatgtgccccctctttacataattggggcatttattccagcaaccatgattgctggcctttactattttgaccacagtgtatcatctcaacttgctcaacataaagagtcaatttgaaaaacccgcctttataccattatgaccttcttcttttgggttttttggttatttta

SEQ ID NO: 17681 - DNA, 603 bp, Gossypium hirsutum
  Clone ID: GOSHI-09MAY01-C5877_1
gcaaataataataaattcagatacaccggtggacaaggcattggagaaatccggggataaaaccgctgctgcagcggcatataaagcaagcgttctccagcagatagccgaagggaggctgttgcttacatcgtcaaatgaaaattctgaggcattggctttgattgttgatggaaaatcattaacttatgctctggaagatgatgtcaaagatgccttcttagaacttgccattgggtgtgcatccgtaatttgttgtcgttcatctcctaaacaaaaggctctagttacaagactggttaaaactaaaaccggaagtacaactcttgcaatcggtgatggagcaaatgatgtcggtatgcttcaagaagccgatatcggagttggtatcagcggtgtagaaggaatgcaggctgtcatgtcaagtgacattgcaatcgcccagttccggtttttggagcgcttgcttctggtgcatggacattggtgttatagacggatttcatcaatgatatgctatttcttttacaagaatattgtttttggtttcaccctcttcttctatgagatatatgcatcattctcggacaagctgtatacaac

SEQ ID NO: 17682 - DNA, 861 bp, Gossypium hirsutum
  Clone ID: GOSHI-09MAY01-C5867_1
cggacgcgtgggttcgaagcttgagcctgcttgactctattcctgtttgtgttggagactttgggtttctaatctactactctgtttccttcattgatttttcagaagcttttcgtacccaaaattttctgcttactcattctttatttaatttctacttcattagattccttaaaccgcaaggttactttaattttcgcatctagtattggattctttttattgtcaccaatctaatcggaacccccgcccccgatctttacaggggtactgatacattgctgcagttggcgttttggcatttttcaaatatgggacattgcttctctaaggataagtctgacggatctgattcagaacaggctgttgagtttgttggtggaaatgtgcaccgggttacctctaaggaggattgggatcagaagttgtctgaagcgaagagagatggcaagattgttattgcaaacttcagtgcgacatggtgtgggccttgtagaatgcttgcaccattttattgtgaactctcagagaagcacccttctctaatgttcttgttgatagatgttgatgaactaactgatttcagcacctcatgggatattaaagccactcctacatttttctttcttaaagatgggcagcaaatagacaagcttgttggagcaaacaagccagagttgcagaagaagcttactgctgttttagattcggtggggaatcatgggaaatgacatttgtgaggtttccagtttcaaagacttggcagtatcttcttttctgtctctgtttgtgttgtcgtgagctttggttgaatgtggtgtatttgtaaactgttgtttgttatataagtgtaatatttgc

SEQ ID NO: 17683 - DNA, 516 bp, Gossypium hirsutum
  Clone ID: LIB3585-009-P1-K1-H3
atggtttagtctttaccgacttttttttgtctcaacacttactgcaatcctgcgtgggttatgagttctacctggttaaagttgtttgatacctgtgttacttgtaggataagtctgacggatctgattcagaacaggctgttgagtttgttggtggaaatgtgcaccgggttacctctaaagaggattgggatcagaagttgtctgaagcaaagagagatggcaagattgtaagcttcttattactttctactcaggcaaggtaacagggcagtagaaacgatgctagaggatttcccatcatttctcaaacctctcttcgtttaatttctatacccttgggagtaaaactctatccgttttaatatgttctcacacatgaaaattctatgtgaatagctatatctacgatggccgtagcttctttatggattcctttctcctttaattggccctttcctggaaagactacatgccctgagttcactcataagccttgcattgttacttgagaat

SEQ ID NO: 17684 - DNA, 468 bp, Gossypium hirsutum
  Clone ID: GOSHI-09MAY01-C5837_1
acccacgcgtccggcacgatactcaacggtgttttgtgattaaaaaaactaccaagattgtggcaaaacaagatggcttccctgcatgaaccatggctagtggagaacgggttgaaggggtctagcaaggagattcgccatggcaggactgcacacaacatgtcgtcttcgtcgttgcggaaaaaatcggacctgacgcttgtttccaaggttcggtatgcaatgcttaggcagttcctcgccaatcttcaagaggtcatattagggaccaagctctccgttctcttcccagctattccattggccattgttgctgagtgttatggatttggaagaccctgggtgtttgcattaagtttacttggacttacaccattggctgaacgagtcagctttctcaccgagcaaattgcttattacactggtccaacagtgggagggcctgtgcatgcaacatgcgggaatgca

SEQ ID NO: 17685 - DNA, 573 bp, Gossypium hirsutum
  Clone ID: GOSHI-09MAY01-C5547_4
gcttctgcttctgatatttctttaggttgtgtttggtatcgtcattttagatttatcatcaatggcggagactgaaacgtttgcctttcaagctgagatcaatcagcttctcagcttgattataaacactttctacagtaacaaggagatctttcttcgtgaactcatcagcaattcttcccctcccgtccgcaagatcagatttgagtctttgacagacaagagcaagcttgatgctcagccagagttgttcattcatattgtgccagacaagactaataacaccctatcaatcattgatagtggtgttggcatgaccaaggctgatttggtgaacaatttgggtaccatcgcatggtctggcaccaaggagttcatggaggcatcggctgctggtcctgatgttgctgtcagagaccttgaaacgcaaaatcgaggcactggactcggagaccaaggcttcactcgactcactcaagaagcgggaactcagtatcgaggacagtgtcaagatcgcactcagccgagtcgagttcaacaccaaagctgccatgaagacccttggcgatgacg

SEQ ID NO: 17686 - DNA, 616 bp, Gossypium hirsutum
  Clone ID: GOSHI-09MAY01-C5547_3
aacgccttgagcagctagagaagaccaagactgagaagagaaagccagctgcagttcctgctaacaagcgaacacgggccagtaatggcggtccaatgcctccagctaaagctggccgttcaacgaatgcatacgtctcatcttttgcagcaccaccgtcaattgtcaggtctccctcacaccctcagtaccctgctgcagtcccagcatacccatcccccccacctgccatgtacggaacccaaaccccacccacctgtccgtatatgtactcaccagaagcagcccctcagctagctggttcttaccctggagctcccatgaactatcctgcatatggagggtatggtaatggtatagcacctgcatatcagcaggcttactactgatagacgatgactactctggagattgtaactactgagatgacgactaccaaccgagctaagtttctttctaaatggtatttttgcttgtaatgaccaaccattttaatggtagcaatgcctgtgtgttaattattataattgttgtgtgcttcttgcatttgacatggtgagaagctgtatttctaatgttgagtggaacttatagtagttgtaggtgattgtgaagt

SEQ ID NO: 17687 - DNA, 692 bp, Gossypium hirsutum
  Clone ID: GOSHI-09MAY01-C5547_2
tctggtttcagcgaactgagtcagtcacccggacgagttaacgaacgaaagaaagttcaccatggggtcggtccccaatccgggtgagttaaccgagttaactcagcctagtttagatgagttccagcatcaaacatctcttatggcgggctgcactcttatgtggaaagaactctccgatcacataagttcacttgaggcaaatctgatgagacaatcggaggccttgaaacgcaaaatcgaagcactagactcggagaccaagacctcactcgactcactcaagaagagagaactcagcatcgacgacagcgtcaagattgcagtcaaccgagtcgagcttctaaaaaaagatgctttgaaaaccttaaacgacgacaatcccgacggagaagttgacaacggagacggccttttgcaaatcctgaaatcaacgtgtttgagaatggaagctaaagagttctggaactttgtctccggccggaagaaagatatcgaattattaagagagaaaattccagaagctttatcggaatgcatcgatccagcgaagttcgttatggaggccatatcggaggtatttccggtggataaaagaaggaatgagagaggaatgatttaggatgggcttgtgttttggttctaaaaagcttgattccggcggtggttgatccagtgatcggaaaatcgag

SEQ ID NO: 17688 - DNA, 2085 bp, Gossypium hirsutum
  Clone ID: GOSHI-09MAY01-C5547_1
cccacgcgtccgcccacccgccggcccccgcgtccgcccacgtgcttccttttttttcttttcggttttcggctactgagtcaccaaacgagttaaggaaaagagagacgagtttcaccaaaccatggggtcgatccccaatcctggcgagttgaccgagttaacccatccgagtttcgatgagttccagcgtcaaacgtctctgatgaccagctgtactctcctctggaaagaactgtcggatcacataaattcacttgagcagaacctgatgaagcagtcggagaccttgaaacgcaaaatcgaggcactggactcggagaccaaggcttcactcgactcactcaagaagcgggaactcagtatcgaggacagtgtcaagatcgcactcagccgagtcgagttcaacaccaaagctgccatgaggacccttggagacgacgttgaagacaatccggacggtgaggtcgacgacggagacggacttttgcaacacttgaaatcaacgtgcttgaaaatggaagctaaagagttctggagcttcgtgatcggaaaaaagaaagaaatcgatttgttaagagagaaaatccctgcagctttatcggaatgcatcgatccggcgaggtttgttatggaggccatatcggaggtatttccggtggacaaaagagggaatgagggaggaagtgatttagcttgggcttgtgttttgattctggaaagcttaatcccggtggtggttgatccggtgataggaaaatcaaggatccttgttacgcctagtatgaaagagcaggccaaagaaatcgcggagacatggaaaaagagccttgaagagagaggagggattgaaaatgtgaaaacccctgatgttcatacttttttgcagcatttggttacgtttgggattgttaagaaagaggatctggagttttataggaaacttgtcgttgcttctgcttggagaaaacaaatgcccaaactcgccgtttcgcttggcctcggcgatcagatgcctgacatgattgaagaattgatcagcaagggacagcagcttgatgcagttcattttacttatgaagttggccttgtggacaagttcccccctgtgcccctgctgaaatctttcttgagggatgcaaagaaggctgcatcttctattttagatgatcccaataatactggccgggctgcgcaacttgctgcacgcaaagagcaatcagcacttcgggctgtcatcaagtgcattgaagagtacaaactcgaggctgagtttccacctgaaaacctcaagaaacgccttgagcagctagagaagaccaagactgagaagagaaaaccagttgtagtccctgctaacaagcgaacgcgtgtaaataatggtggtccgatgcctcctgctaaagctggccgtttgacgaatgcatatgtctcatctttcccggcacctcctccatttgtaaggtctccctcccacacccagtaccctactccagtcccaggatacccatccccacctcccatgtatggaagcaggagcccacccaccaacccctatgcttactcaccagaagcagcccctcctccccttgctggttcataccctggagctcccatgaactatcctgcatacgggggctatggtaatggtttggcaccagcatatcagcaggcttactaccgataggcaatgatgacactactctggcgatggtaaccactgatacgctgactaccgacccatctaagtttttatttctaaatggtttgtttgtaatcactaaccgtttaatggtagcgatatctgtgtgtttaattaataactgccgtgcttcttgcttttgcccaaagtaagaagctgtatctctaatgttgatcagaactctagtactaggtgattgtgaagtagtaatcatgatggtaagcataacaatgtctaaactcgagactacccccatgtaggatttagttgtagaaaaatgttgtactgtttatctgctaacaaacatttatcttaaaaaccagcacaggttccccttttaaagggcgccgctcgcgatctagaaccgcacgcgtgggtggagc

SEQ ID NO: 17689 - DNA, 419 bp, Gossypium hirsutum
  Clone ID: uC-gsflmaxxa009a05b1
cggctactgagtcaccaaacgagttaaggaaaagagagacaagtttcaccaaaccatggggtcgatccccgatcctggcgagttgaccgagttaacccagccgagtttcgatgagttccagcgtcaaacgtctctgatgacgagctgtactctcctctggaaagaactgtcggatcacataaattcacttgagcagaacctgataaagcagtcggagaccttgaaacgcatcatcgaggcactggactcagcgaccaaggcttgactgatgtcactcccgacgggggtacgtagtctataggttagtgttacaaccgcggtagtgacgccgttatctacccggcgccagccctggtggagaaaggagaagaagaagagaagaaaggattgtacccaaaatttgtgttcgaagatacatg

SEQ ID NO: 17690 - DNA, 395 bp, Gossypium hirsutum
  Clone ID: LIB3165-037-P1-K1-B2
cccacgcgtccgtccacgcgtccgttcattcgtccggaaagaaatatttctttggtttgttcttttcgactttcggctactgagtcaccaaacgagttaaggaaaagagagacaagtttcaccaaaccatggggtcgatccccgatcctggcgagttgaccgagttaacccagccgagtttcgatgagttccagcgtcaaacgtctctgatgacgagctgtactctcctctggaaagaactgtcggatcacataaattcacttgagcagaacctgataaagcagtcggagaccttgaaacgcaaaatcgaggcactggactcggagaccaaggcttcactcgactcactcaagaagcgggaactcagtatcgaggacagtgtcaagatcgcactc

SEQ ID NO: 17691 - DNA, 394 bp, Gossypium hirsutum
  Clone ID: LIB3585-046-Q6-K1-G6
tcgacccaggcgtacgatcaacgtgcttgaaaatggaagctaaagagttctggagcttcttgatcggaaaaaagaaagagctcggtgagttaagagagaaaatccctgcagctttatcggaatgcatcgatccggcgaggtttgttatggaggccatatcggaggtatttccggtggacaaaagacggaatgagggaggaagtgatttagcttgggcttgtgtcttgattctggaaagcttaataccggtggtggttgatccggtaatcggaaaatcaagggtccttgatacgcctagtatgaaagagcaggccaaagaaatcgcggagacatggaaaaagagccttgaatagagaggaaggatcgaaaatgtgaaaacacctgatgctcatac

SEQ ID NO: 17692 - DNA, 890 bp, Gossypium hirsutum
  Clone ID: GOSHI-09MAY01-C5537_1
aaaaggagtacggtgagtgcaaatcctaccagcctgccattaacgccttttagcaattaggaattgcccattgcccattcctgcactaaaatcaatcaaaaaaaaggaatcaaaattcaaaaccttgttcttttatccactgctttaaagctctaaatcaaattattacgtaggaacttatagcaatttatccctcttcatgggttgctcttcttctctcccagatcggagttccgggcggtccactggacttaacaacgcggacaatcctgaaggtcccgatgccaaaaatctacgcgtaaagctggtcttgttaggtgattctggagttggaaaaagttgtattgttcttcgctttgttcgtggccagtttgaccctacatctaaggtaactgtaggagcttcattcttgtcacagacaatagctttgcaagattcaactactgttaagtttgaaatatgggacactgctggacaagagaggtatgctgcattggcacctctctactacagaggagctggagttgcagttattgtgtatgatataactagtccagagtccttcaccaaagcacaatattgggttaaggagctacaaaagcatgggagcccaggtatattgatggccttggttggtaataaagccgaccttcaggaaaagcgcgaagtaccagtccaagatggcattgactatgcagagaagaatgggatgttctttattgagacatctgccaagactgcggacaatataaatcagttgtttgaggaaattgccaagcggctgccacgtccatcaccttcatgatcagaggatggtgataccgaatcaactactaggtatttttaatgttatgcattgggatttcaagtttgtgaatatcttattaatc

SEQ ID NO: 17693 - DNA, 526 bp, Gossypium hirsutum
  Clone ID: LIB3584-048-P1-K2-B1
cctgcggtacggaaccgccggtccggcccacgacccacgcgggcgctggagttgcagttattgtgtatgatataactagtccagagtccttcaccaaagcacagtattgggttaaggagctacaaaagcatgggagcccaggtatagtgatggccttggttggtaataaagccgaccttcaggaaaagcgcgaagtaccagtccaagatggcattgactatgcagagaagaatgggatgttctttattgagacatctgccaagactgcggacaatataaatcagttgtttgaggaaattgccaagcggctgccacgtccatcaccttcatgatcagaggatggtgatactggatcaactactaggtatttttaatgttatgtagttgggatttcaagtttgtgaatatcgtattacgctttcttagtctgtgatgcaattctaaatatgattttaaaacattcagttgtgagttgtcattagcatcacttaaatctgcccacacttgaatgattggttgtaactgt

SEQ ID NO: 17694 - DNA, 278 bp, Gossypium hirsutum
  Clone ID: LIB3135-022-Q1-K1-F12
gtggagaatacatgttcatatcacatagtacttcgttatgggagagggctactgaacgggcgcaaacatgattctctgttcgtaaagctaggtcatctgaataatccccttcatacttcccaagtgctaatacaccaaataacgtgaccgttatttcctgtccagagtccttcaccaaagcacagtattgggttaaggagctacaaaagcatgggagcccaggtatagtgatggccttggttggtaataaagccgaccttcatgaaaagcgcgaaata

SEQ ID NO: 17695 - DNA, 461 bp, Gossypium hirsutum
  Clone ID: GOSHI-09MAY01-C5497_1
gccggcagctaacagagctgcgaaccctttcaatcttttttattgttttctgaaaagaagggaaagagacctcttcaagttctttgagatccgggcattgcattctcagatgggaaagaaagggaaatggttgtcctctctaaagaaagccttcttctcagagtccaagggaaagaaaaaccagaaatcaaaagaacaatttttggagaaggtgcatttgatcccactggttctgatgcagccaagttatccccacttcctcagcctgatgaggtgaaattaattgaacctgaacttgagcagagcatgcagacttaccctgtggcagccgccaattctcctgccgttccagctctcgctgctctgcaggccattcgacatcaacttagtacagaggctaggttagccggaaaatctaacgaggactggacttgaatcaaaatccatgcagctttacgagc

SEQ ID NO: 17696 - DNA, 600 bp, Gossypium hirsutum
  Clone ID: GOSHI-09MAY01-C5457_1
cccacgcgtccgctaagctttacccagagttgaaaagacaatatagaaacaaaaaaatatggtaatgaagcttgttttattatgggttttgggtttatggagtgtttctgggattgatttgagccgagctgagagtttcctttcgtatttagatgaagaagttacaatgtcccctggtagtaccaccactcttatagttcctctcactctcattcaaggagctgcttctaaaggagctgtttgtttggatggaacgcttcctggttatcatcttcatcgtgggttcgggtcaggtgcaaacagttgggttatccatttagagggaggtggatggtgtaataccattcgaagttgtgtattccgcaaaactacaaggcgtggttcatcgaaatttatggagaagtccataaatttcactggaattttgagcaacaaagctgaagaaaatcctgatttctacaattggaatagagttagggtacgttactgtgatggggcatcttttgctggtgagggccaaaatgaggctcacaagctttattttagagggcacaggatctggttagctgccctggaagaattaatggccaaaggaatgca

SEQ ID NO: 17697 - DNA, 964 bp, Gossypium hirsutum
  Clone ID: GOSHI-09MAY01-C5417_1
ctccattttctcagatctactacaatcacctgcggaaagcatcatagaggaattttattttaaggaaataaaatttccttcccatttcacaaacttcacgccattcttcccttttctaagatctaaaaaaataaaatcatggctggggccgtagagatcaaaactgcttcaccgaacgttaccaggaggaacttcgatcccactgctgtagtaccggaaccgttgcctccggttgttacggccgcaaacggtgaagatgcaggcgtggataagctggataagaagagcagggagattgtgttggggaagaacgtacacaccacgtgcttcgctgtcacggaaccggaagcgaacgatgagtttaccggtgacaaggaggcttacatggctggtgtcttggctcgatatcgcaaaagcctcatggagcggaccaaacatcatttaggctacccgtataatctggactttgattatggtgcactagcccagttacagcatttctcaatcaacaatcttggagatccgtttatcgagagcaactacggagttcattcaaggctgtttggatatggttgtgcttaattgatttgttcgtttgtgggaatttaataattaatggtttcctgtggtcgtatttcatacttgtgtcacactgagacattcttacgtatattctttatctctgtaatgctatcgctgtggatcttcatattatcatggtctacgtattctattctctatttatcgctattattctctatctcgtacgcgtgctgcactctttcttgtcttattttctctcattttgtattctctattcgttctacttcttgcttgtagtataatgaacgtagtcatgtcatattatatcttattgtcgtcttcttgctatatatgtatctctgtcttagtccttgaagatatacttatattctcatgtagctcattcattctatctattgcc

SEQ ID NO: 17698 - DNA, 1159 bp, Gossypium hirsutum
  Clone ID: GOSHI-09MAY01-C5407_1
gttatgaagttctgaattcatttgcattagcttgaagatggtaccaatgagcgttttcagttccgggtctattcgggtttcaatgatttcgatgagcattttgaagttctgaaattcatttgtattggctcgaacatggcagcaatggcgttttcgggttcgggtctctttggcttcgacctatagatgctccacattgtgccaaatcaaagcagtgggaaatgaggatatcaaaggtttattcatggttttatggttattatccttggatggttgtttttgctacaactttagtattgtttggaagcttcccacgcgcccgcaacaatcaagatgaagttcctttgaaagcttcaaagtttcagaaaccattgaggctcccaaataaagggtatggttatccacctgttcttgcttattggattagtggcagcaaaggagatagtaataaaatggtgaggttgctgaaagcaatatatcatccaagaaaccagtttctgctgcaacttgattcaggttcatctgattatgaaagggaaaatttgggattcttgattgaatcccccacgcggccgcaaacattcggaaatgttagtgttgatggtagaagttatgcagttaataagatgggatcttctgctcttgctgctacacttcatgctgctgctttgcttcttaagattaattcagattgggattggtttatacctttaagtgcctcttcttatcccctaatgaatcaagatgatctcctccatgcttttactttccttccaagggatctcaacttcattgattatactagcaatccgggttggaaacagaggggagagataaaccgaattgttgtagaccccaacttatattataagagcaataccccaattaactatgatgttgaaactcgaaaaccagacgctttcgagatttttggaggttcaccatgggtgattctttcaagaccattcatggagttttgcatctatggatgggataacattccaagaaagctattaatgtatttcaccaatgtagcttaccctcttgaaacctatttccacacagtgatttgcaattcatttgagtttcaaaacacaacattgagcaatgatttaaggtacgacattattccgaaatcccctaagcccaagattttaaa

SEQ ID NO: 17699 - DNA, 724 bp, Gossypium hirsutum
  Clone ID: GOSHI-09MAY01-C5427_1
aggagggttaacaatgctgggttttatagtgatagatttatcaatgttccgaaaagtcttcggttgccaaacagtccgaaaatgtttgcgagcaagccaacgcttgaacgttttatcttatcacatttcccgactgcagatgttaatgcgttttttgcttcgtttgtttggaagatccctgcaactttggaacctcctgccaaagtgacaccagtagcggttggaatcgaggaggctaaaaaagaaagtaatttggaggatgctaaaattgaaagtaacaaaaagactccccgtagcagccagaggaagaggaatcccccgcctaagcctctcactcccagaaatggtcaaaagaagcagaagacaagtagaggatcaggatcagcgtcagccaaaggatcagcatcagccacacctaagcgacaaccaactcggcagcgtgttaaaactcctgccccacccccactggaaaccgaagatagaaatggcggtcttgaactatctttcttagatgatgaaacaacaagagcggaattcgacaactatctcaatgcattggatgacatgctcactcagcctttgcctgaagaaccgtattcccatcccgtgttgtataactactttgctgcagaaagcgaaatggctgaagctcgaatgaaactgtcttcatttcttgacatggatttcccttcgttgatttgcttcaaagacctcgatgaactca

SEQ ID NO: 17700 - DNA, 638 bp, Gossypium hirsutum
  Clone ID: GOSHI-09MAY01-C5787_1
cttcaaattcaaagccaactaaacaatcctttctttatatatatatagtcgaaattactcatcaaagtgaataccgtgaagtgaaatttacttcttctcgcctctcatcgcatttttttaaggtattgtaataatctcgtctccgggcgtataatggcgctttccgaatcggaaagtgttgcctatgggggcatcaagaaaacaggatcaccgacgcaagcaccggaatcgccacatgaagaatcaacgccggatcggtcgaattcttccccgaacaaacagaattccatcttctcacttaccctcgacgaaattcaactcaagagtgggaagacttttgggtccatgaacatggatgaattccttgcgaatttgtggaacgtcgaggaaaaccagcaagttctgtcgcaacccgaacctattgatggtgacaaagggatgggatgccaaccgagtttagcaagacaaggctcgttctccgttcctaccccactttgcaagaaaacggttgatgaggtgtggttcgagatacaaaaagagttaccgcaaccacgagaagctaacgatgtggcggatcatgaacctcctcaacgtcaacaaacactcggcgagattactttggaggattttctcatcaa

SEQ ID NO: 17701 - DNA, 469 bp, Gossypium hirsutum
  Clone ID: GOSHI-09MAY01-C5717_1
ccatctctccctccgtgagttatttttttggtggatctctttcaattgtgcagattttcggttcgttctttttgtttttttttcttttttgggttcgtacgattcttggttttttttttgttggtacaaacgattcttggtagttgatattagctaaggtctccaggttttcgattagtcggttagattctaggattgggatttcttgaacaacgatgtgattctggagagattagctttagatcttaaaatatgtagcccatgttttattgatttctttccttcgaattttgggctgttaaatacattgaatgggtattagcatcacaaaagaaacaaaacgcctaaaaacaatgctattgcattggtactgctttgatgaaatctgccttcattactagcttaacttgaacttgaattttggccaaatatcccttaattaatctggattctttatgcactttttttt

SEQ ID NO: 17702 - DNA, 1082 bp, Gossypium hirsutum
  Clone ID: GOSHI-09MAY01-C5707_3
cacggatgtattcctcattttctctgcttcaacaacgattagccattccgtttcaaaagtgacgattagctgattggttctgttttatcctccccaaccaaaatctgctgctccaccccaccctctccctcccaacatcaacagcaggtttcttcgaaccaaatctccaccgtctcgcgtttgggaagcgagaaagtgcgaggtttatgtgccgaccggggaagaaagtcgttgatgtcgcgttcaaagcatcaaagaacattgattgggaagggatggctaagcttttgatctccgatgaggctcgcaaagagttcgctacttttcgtcgcacttttgatgaagttaactctactttacaaaccaaattcagccaggaacctgaacccattgactgggagtactatagaaaaggaattggctctcgcctggtagatatgtacaaagaggcatatgagagtgtagagatccccaagttttgttgacaccgtcactcctcaatacaaaccaaaatttgatgcattgcttgtagaattgaaagaggcagaggagaaatccttgaaagagtctgagcgattggagaaagaaattgccgaggttcaagaacttaagcaaaagatcagcaccatgaccgcagacgagtactttgagaaacatccagagcttaaaaagaaattcgatgatgagatccggaatgactactggggctattgacatctttaagcttttggtctcgactagaatttctgaaccgtttctgttgttttaacccctttttctcttgtgcggtgatctgggttggaaagattaggctgtaatgattagaaaataattgtgtgaggaaaatttatccaatcatttgagaaacaaggtggatcttgtaatacatgcattctatttagcaggcaaccgcagtcataaaaaaaaggcaaaatttttactgcctgccctcttcattccattctgttttatgtttattatttgaatattatctagatacaattgaatttggacacctatttatctagatccattctatatgtattttttaataagtggttatttatattattagtattttg

SEQ ID NO: 17703 - DNA, 645 bp, Gossypium hirsutum
  Clone ID: GOSHI-09MAY01-C5707_2
gaaaaattgtctcacttagatattgaaagggaatttttttttaatataaactgaaaaaaaaaagaaaaaaaaggaaaagaaaaaagaagaggaggggaaatataaactgaaaaaagaaaagccccaaaatatggaggatgaaaaagaaagcaaccgtcaagactcgccggcggctggtggtagtggttctggtacggtggtgatgagttggagcttattgtggctgagtcggagcttggtggcggtgggggcagtgatgttggtggtggtggtgggagtactataataataataatacaagagtgaaagggccgtggtcaccggacgaagacgcggtgtcgagtcggttggtggcgaacttcggggcgaggaattggagtgtgatcgcccgacgaattccgggtcggtctgggaaatcgtgtcggcttcgtgggtgtaaccagcttgacccttgccttgagcgcaagccttttactggtgtagagatccccgagttggtggacgccgtcactcctcaatacaggccgagtatgggatgcatggcttgtccaattgagacaggacgacgagagatcctggaccgactctgagcgaagggagaacgaattgcggaggttcgcgaccttggccggagatcggcggggc

SEQ ID NO: 17704 - DNA, 855 bp, Gossypium hirsutum
  Clone ID: GOSHI-09MAY01-C5707_1
tttcaaaaaagttgtggagaaaaaaatattacgtttgggaagcgagaaagtgcgagaaaatgagcggagcaggaaagaaagtagtagatgtggctttcaaagcaggaaagagcattgattgggaagggatggcgaagcttttggtctccgatgaggctcgcaaagagttcgccactcttcgtcgcactttcgatgaagttaactccactttacagaccaagttcagccaggaacctgagcctatcgattgggaatattatagaaaaggaatcggctcgcgattggtggatatgtacaaagaggcttatgagagcgtagagatccccaagtttgttgacacagtcactcctcaattcaaaccgaaatttgatgcattgttggttgaattgaaagaagcagaagagaattctttgaaagagtccgagcgtttggagaaagaaattgccgacgttcaggaactgaagcaaaagatcagcaccatgacagcagatgagtactttgagaaacatcccgaactgaaaaagaaatttgatgatgagatccgcaatgacaattggggctattgagacatgtttggtaatataagggtcaggctataaaacagtcccaaccagtatttctgagttggtcttatcatttcttttgttgttttaaccccaaatgatgattaccgaaactctgttttttgtggtaatttcatcgggaactaataatatgataattcacttgagaaccaaagtggatactgcaagacatgcttttcatttaagtggcatccatgttcatgaggaacattcttttatatcatctgcttcatttgcgatgcgcaaagcgaatgaataaatccttattttt

SEQ ID NO: 17705 - DNA, 393 bp, Gossypium hirsutum
  Clone ID: LIB3146-008-Q1-K1-D3
cccacgcgtccggacccacgcgtccgcccacgcgtccgcccacgcgtccgcccacgcgtccgcccacgcgtccggcagatgagtactttgagaaacatcccgaactgaaaaagaaattcgatgatgagatccgcaatgacaattggggctattgacatgtttggtaatataagggtcaggctataaaacagtcccaaccagtatttctgagttggtcttattatttcttttgttgttttaaccccaaatgatgattaccgaaactctgttttttgtggtaatttcatcgggaactaataatattataattcacttgagaaccaaagtggatattgcaagacatgcttttcatttaagtggcatccatgttcatgaggaacattcttttatttc

SEQ ID NO: 17706 - DNA, 585 bp, Gossypium hirsutum
  unsure (1)..(585): unsure at all n locations
  Clone ID: LIB3829-028-Q6-K6-B6
aaaagttgtggnanaaaaaatattacgtttgggaagcgagaagtgcgagaaatgagcggagcaggaaagaagtagtagatgtggctttcaaagcaggaaagagcattgattgggaagggatggcgaagcttttggtctccgatgaggctcgcaaagagttcgccactcttcgtcgcactttcgatgaagttaactccactttacagaccaagttcagccaggaacctgagcctatcgattgggaatattatagaaaaggaatcggctcgcgattggtggatatgtacaaagaggcttatgagagtaagttttttttctgtcatggttgagttttcattctatactatttcctagttgccccctttattcttagatctgttgtagggttcctaaaagcataaaaatggtctacttacctcatgtttgaagtcttcacatggttgcagtttcctcgatttgtgaattgaattaactgttgtttaagctgtgcttcctgttatgagatgataattttatgagtcggatgatgatatggtcaccttgactagctacaatgttcctttttcgtttttattgtctcaaaat

SEQ ID NO: 17707 - DNA, 376 bp, Gossypium hirsutum
  Clone ID: LIB3493-020-P1-M1-H4
caagagtgaaagggccgtggtcaccggagaaagacgcggtgttgagtcggttggtggcgaagttcggggcgaggaattggagtttgatcgcccgaggaattccgggtcggtctgggaaatcgtgtcggcttcgttggtgtaaccagcttgacccttgccttaagcgcaagccttttactggtgtagagatccccaagtttgttgacaccgtcactcctcaatacaaaccaaaatttgatgcattgcttgtagaattgaaagaggcagaggagaaatccttgaaagagtctgagcgattggagaaagaaattgccgaggttcaagaacttaagcaaaagatcagcaccatgaccgcagacgagtactttgagaaaca

SEQ ID NO: 17708 - DNA, 599 bp, Gossypium hirsutum
  Clone ID: GOSHI-09MAY01-C5197_1
cagacacttaactttcctttgactactattggtttcgaatctttcaatcgtttctgagacaagcaaagccaccaagacacctttcctctctgtttcttcctaataatgtcaatggcaagttaagcaaacaaacccttgcctgttgatcacccaccatactcaaatcctgtttaagcttcatcttcaaggacagaaataagggaaaaagagagccatgttagatatcttcatatggcttatttctttcttcatcatcattgccattattgttctcctcatttatcagctcacatgcttggctgatttagagttcgattacatcaatccgtatgactcttcatctcggataaacaaagtcgtcttgccagaattcttcgtgcaaggatttttatgcttattctatctagtaacaggacattggttcatgtcactgttatgcactccatatttatactacaatgtcaaagtgtaagtgcttttttctctcttcttctaattcgaataataagttttcgttagcttcagttgacggttaagcccctgtctggttgatcgatttaattcgaagaacttgtttgataccgtgaataatcaaaaga

SEQ ID NO: 17709 - DNA, 744 bp, Gossypium hirsutum
  Clone ID: GOSHI-09MAY01-C5087_1
gtcaaacatgagaagaagacattggagatgattggaaagaagttgaaaaagaacagtgtaacgcttgatattgtaaatttcggtgaagatgatgaagggaagacagagaagctcgaagcgcttcttgctgctgttaacaataatgatactagtcacatcgttcatattcctgctggtcctaatgctctctctgatgtacttctaagtacacccatcttcactggggacggggaaggtggaagtggttttgcagcttcggcagcagcagctgcagctggtggcatctctggttttgagttcggcgtggatcccaaccttgatcctgaactggcccttgctcttagagtttcaatggaagaggagagagccaggcaagaagctgctgctaaaaaggcagcagaagagtcatcgaaacaagaaaagggtggggaagaacaggatgcgacgatgacagaacgtgctagtgagggagcttcagaagctgataataagaaaaatgaatttttgcaggctcttgcaatgtcgatggatgagcctgcctccagccatgatttacaggatactgagatgtcagatgcagctactgaggatccagagctggcattagctcttcaattatccgtgcaagacagtgcaaaagattcatctagtcaggcagatatgagtaagttattggcagaccagtcattcgtattcttcatccttgtatcgctttctggggtagatccaaacgattccttcatt

SEQ ID NO: 17710 - DNA, 1114 bp, Gossypium hirsutum
  Clone ID: GOSHI-09MAY01-C5017_1
cccacgcgtccggctttccaaatcagtgttggaatggctggtacttcgaacaagacggtgaagcttccggagaattttacgttgctcggtcccggaccaggatatacttgcggtccggcgaaagttgtcccttccaccacttttctcacccaggatcgccgcagaaagactcaggctctcaattgacctgtttgacgcacgctcccgtgacatggaatgtgacctgcacttactcgcagttcctagctcgaaaaaatccgagttgttgcgtctctttctcatctttctacaatgaaaccatcactccttgcccaacttgtgcttgtggatgccagaacaaaaacagctgtgtcaagagtggctccaaggttcttaaaagggctggcgttaacactccacggaaagacaataccccattgcttcaatgcacgcaccatatgtgcccggttcgggtgcattggcacgtgaaggtcaactacaaggaatactggcgtgttaaggtctccattatcaacttcaactataggatgaactatacactgtggagtctcgctgttcagcaccctaatcttaacgatgtaacacaagttttcagctttgattacaagcccctcgttccctacgaatcaatcaatgatacggggatgttctatggcatgaagttctacaatgacctattaatggaagctgggccatttgggaatgttcaatcggaggtgcttcttcgaaaagataaagataccttcactttaaagcaaggatgggcctttccaaggaaagtgtatttcaatggcgatgaatgcatgctgccaccacctgatacttacccttttctaccaaattctgccccccatcaacaactattctccggtttgacagccattgctgctatggttttcttgttggtcactgtttggtgattgttatatatactcccatggagtatgaaagttttggattctgaaaatattaattactgtagtaaatttaaggagatatgcgagaataaaatagcaattaggtgaggtgattttaagaacagtgttactgtatatttgaaacataaaactattttgtctaataataaataaattttagttagtacattcatttt

SEQ ID NO: 17711 - DNA, 985 bp, Gossypium hirsutum
  Clone ID: GOSHI-09MAY01-C5027_1
cccacgcgtccgcccacgcgtccgggagaaccgatctgcgagtctcatgaaaacaagttgctggagcggatggcaataagcgtggaatacttgaacaaaaaggttaaggaatgtttcttggatttgggatcatttccagaagataaaaaaattccccttgatgttctcattaacatgtgggttgagatacatgacattgatgaggaggaagcatttgccattcttgtcgagctttctgataagaatctactcactttggtgaaagacccaccggttggagatgcgtacagtagttattatgaaatttgtgttactcaacatgatgtgttgagagaccttgctcttcatctcagcaatcaaggggatgtgaacgagcgaaagcggttgcttatgcctagaagagatactgaactccccagagaatgggaaagaaacacagaccggccattcaatgctcagatagtttcagttcatacaggagaaatgagggaaatggactggtttcgcatggaattcccaaaggctgaagtactcatcctgaatttttcctccaatgaatacttcttgcctcctttcatatacgacatgcccaagcttagggcacttattgtcataaattatggtacaaatgaggcaatacttgagaatttttcagtcctcaccaatctggcaaatttgcgaagcctatggcttgaaaaaacgtgggttcctcaattgaccaatcccactgttcacatgaaaaacttgcggaaactgtctatggttcttttgcaaggttaataacagctttaatccatcagtgatagacctgcccctgatcttccctcgtttattggagctcattattgatcattgtcatgatttgattaagttgccatcgagcatttgtgaggtgaattcactccagaacctgagcataaccaactgccaccgactatgtgaattgcctgctgatttgggtatgctgaagaaactacaggtactt

SEQ ID NO: 17712 - DNA, 536 bp, Gossypium hirsutum
  unsure (1)..(536): unsure at all n locations
  Clone ID: uC-gsronu33B018g08b1
gcgggcncgcgccgcggtattcggggcgcgccacacgcgcgcgctttcgtcctgtatttgccattcttgacagagctttctgataagaatctactcactttggtgaaagacccacgggttggagatgcagtacagtagttattatgaaatctgtgttactcaacatgatgtgttgagagaccttgctcttcatctgagcaatcaaggggatgtgaacgagcgaaagcggatgcttatgcctagaagagatactgaactccccagagaatgggatggaaacacagaccagccattcaatgctcagatagtttcagttcatacaggagaaatgagggaaatggactggtttcgcatggaattcccaaaggctgaagtacttatcttgaatttttcctccattgaatacttcctgtctcctttcatagacgacatgcccaagcttagggcacttatagtcataaattatggttcaaatgaggcaatacttgagaattttcagttttaccaatctggcaatttgtgaagcctatggcttg

SEQ ID NO: 17713 - DNA, 647 bp, Gossypium hirsutum
  Clone ID: GOSHI-09MAY01-C5397_1
ggttgcaaaggcaaagaatttattgaggtctaaagatgaagctaaggttacccctccaaagtctggtaagctcgaaaatggatcaaatgttacaaataataaaatgtctcatcaacgcggatcacaaactgtagtccgtgctccaaatgatcggaaaaagggagtgaacaagatgaaaacggctaaaataactaacgagagattagaacacaatggagatggtattgtttcggaaggaaagaagattgatcctatatcggaaagcgatacagttttcgaaagatatagcattgaaactgatattatggttgaagaatgtcgtgataacagcgaggattctgtttgtgacattaccctggtgactaccgattatcaaaacaaccgaaaatgtatcggtccaaatgaaactgaccacgaatgcttcactagaggggccaaactaaaagcactgctattgagctgtccggctttcctcaatcacgccgactatcttttttatcttcatgtgaatcttcctacaacttcaccaaaatttgacatcaacgaattcacagatgccaacagaagacttttcttagactgcgcaaatgaaattgttcgaagaataagctttcccgattttcaaccggttcaaccttcgttattta

SEQ ID NO: 17714 - DNA, 1128 bp, Gossypium hirsutum
  Clone ID: GOSHI-09MAY01-C5317_2
gcagaatttcgcaccagccaaaagagttccatgtttttcgctgccatttccaaagccgattctactttagaaattttgatacaagtaaagtaatagaatcttaaagaaaaaaaagtgctaaaaaagctaactttttttttctttctattgttccttctttactctgggttcgtttttcaaagcataaaaacctaatttctaacagagcagctgcaactatcatcacccatggcggcaccgatctgggtatgggctttttacgtagccctaactctatttccttccgttttgggaaactcagaaggcgatgctctttatactttgagaagaagcctatcggatcctgataacgtgctccagagctgggatcccacccttgttaacccttgtacttggttccaaatcacttgcaatcaagataatcgagtcactagagtagatttaggtaattcaaacctatctggacatttggtaccagagctcgggaagcttgagcatttgcagtatctggagctttacaaaaataacattcgaggaaccatccctactgagcttggcaacttgaagagccttatcagtttggacttatataacaacaacatctccggcaccattcctccttcactcgggaaacttaagtctcttgtattcttgcggcttaatgacaacaggttaactggacctatccctagggagcttgttggtatttcaagcctcaaagttgtcgacgtctcaaacaatgatttgtgtggaacaattcctaccagtggtccatttgagcacattcctttgagcaacttcgaggaaaaccctcgtctcgaaggcccggagttgttggggcttgcaagttacgatacaaactgctcgtgaagaaaccgattgatgctacaaaagtttggaatttaaatatgtagtcacaagattttaagtgtattatcagagtataatggggtaattgtggaaatgcaatctcgtataagtatctgtaaatcagaatttattagcatatgtaacaaaaactatcatgctcttcctatgatgttttcagacaaactagtatttgatgtaatggtagcgacaaggttacttcttgtgtgcaaaaaaaaaaaaaaaaaatttttatttttt

SEQ ID NO: 17715 - DNA, 1214 bp, Gossypium hirsutum
  Clone ID: GOSHI-09MAY01-C5317_1
cccacgcgtccgcccacgcgtccgcccacgcgtccgcccacgcgtccgcattcccaaagccgattctctttggaaatttggtagaagaagtggtagtgggtaagaatctttaaaaaagcttactttttccccccttcacttccattctcatcaatttctcttttgtcttcctctttttccaatatcatcaaaaaccagccctaacagagcagctgaacctaacatcatcatcatccatggcggcaccgatctggctatgggctttctctgtagccctaactctggttccgtctgtttttggaaactctgaaggagatgctctttacacgttgagaaaaagtttgaccgatccagataacatactccagagctgggatccgaaccttgttaatccttgtacttggtttcacatcacttgtaaccaaaataatcgagtcactcgagtagatttaggtaattctaacctgtctggacatttggtacctgagcttgggaagcttgagcatttgcagtatctggagctttacaaaaataacatccagggaaccatcccaactgaacttgggaacttgaagagcctcattagtttggacctatataacaacaacatctcagggaccattcctccttcactagggaaattgaagtctcttgtatttttacggcttaatgacaacaaattaactggacctatccctagggaacttgtcggtatttcaagcctcaaagttgttgatgtctcaaacaatgacttgtgtggaacaattcctaccagtggaccgtttgagcacattcctttgaacaactttgagaaaaatccccgactggaaggtcctgagctgctggggcttgcaagctatgacacaaactgctcgtaaagggcatgttgacgctataaagctttgaattagatatgaatccgcatgaagtaatatgtaaatctgtataccagctcgactgtattagcatctgtaactcaattaccctactcctaaaatgttgaagacgactagtattggtgaatgtaacggtagcgacaagtttccttctggtgtgcatcgttggttttcgtggccctaaagaatatatataaactagagtatcttgccaaaaaaaaagggaaatttttttctgtttcaaaaacaaataatattttcttaaaaaaaaaaaaaaaaaaaaaaaaaaaaaaaaaaaaaaaaaaaaaaaaaaaaaaa

SEQ ID NO: 17716 - DNA, 667 bp, Gossypium hirsutum
  unsure (1)..(667): unsure at all n locations
  Clone ID: AI055005.1
gccgattctctttgaaattggtagaagaagtggtaatgggtaaagaaacctttaaaaaagcttactttttccccccttcacttccattctcatcaatttctcttttgtcttcctctttttccaatatcatcaaaaaccagccctaacagagcagctgaacctaacatcatcatcatccatggcggacccgatctggctatgggcttttctctgtaaccctacctctggtcccgtttggtttttggaaactctgaaggaaatgctctttacccgttaaaaanaagttgacgcgatccaaatacttcctcaagatgggaatccaaccttgtaaacttgcacttggttacactatatttgtacccaatatatcgatacctcagatataataagggaatcaaacttgtgggatattgggaccctgactggaaacttgacattgcaaatctggaaccttccaaattgcattccaggaccattccatgaacttggaaactgaaagcctattattggactatttacacaacatctaggaccattctctactagggaaatagattgtgattcagttatacacaatactggcctccttggagaatggtttgtttaccaacaattgttactacatggtgtgggaacctcgagtgcgttcttttttaccatagatccg

SEQ ID NO: 17717 - DNA, 545 bp, Gossypium hirsutum
  Clone ID: LIB3829-034-Q1-N6-F12
ggggggggggtttttttttttttttttttttttttttttttttttttttttttttacacgcaagaaggaaccttggggctaccattacatcaaatactagtttgggtgaaaacatcatagggggggcgtgagagtttttgggacatatgcggggggggggggggttacagatacttatacgaggtggcgtttccacaattaccccattatactctgggaatacacttaaaaatcttggggctacctatttaaattccaaacttttggggcatcaatcgggttcttcacgagcaggttgggggggaacttggaaggcccaacaactccgggcctttgagacgggggggttcctcgaacttgttcaaaggaatgggctcaaatgggccactgggaggaattggtccacacaaatcattggttgagacgtcgacaactttgaggggtgaaataccaacaagctccctagggagagggccagttaacctgtggtcattaagccggaagaatacaagagacttaagtttccccagggaaggaggaatggg

SEQ ID NO: 17718 - DNA, 572 bp, Gossypium hirsutum
  unsure (1)..(572): unsure at all n locations
  Clone ID: LIB3825-002-Q1-N6-C2
aagaaaattattatatgtatatgaaacagaaaaaatatatacatnatttttttgtcaagatactctagtatatatatattctttagtgccacgaaaaccaacgatgcacaccagaaggaaacttgtcgctaccgttacattcaccaatactagtcgtcttctattttttaggagtagggtaattgagttacagatgctaatacagtcgagctggtatacagatttacatattacttcatgcggattcatatctaattcaaagctttatagcgtcaacatgccctttacgagcagtttgtgtcatagcttgcaagccccagcagctcaggaccttccagtcggggatttttctcaaagccaattagacaagcacaatgacagagtccatcaaactgtgcttccatcaaagccagttcaagaagagatgatgtagaaacctataggcagattatcgataataaacacttaaaaatgatagaagctatactcgcccaagactcatccccgtgcactatggtgtaaaggatatcagaacacagaagatatttttgcaaaagtgtccattaacaacc

SEQ ID NO: 17719 - DNA, 1532 bp, Gossypium hirsutum
  Clone ID: GOSHI-09MAY01-C5337_1
ctcatttttttgctttaagcacgacacttgcatctgcagacaacaatctctctgctgctgtagtgggatcccgaaccgcgccgcctcagaaggataaccaaccgaatcttccacacatatcagttggtcgggagaattggggagattccaatatggcagatggcagccctaggactgatacgtcaacagacgacactgaagagaagaatcaaaggtttggaagaggtcaaacaaatgctatcgtggcttccgattctagtgacagatcaacggacgcgtcggcccacgcgtcggcgcgcgcgctggctcaaaatcgggaggctgcaagaaaaagccggttaaggaagaaggcgtatgtgcaacagctagagagtagccgactgaaactgactcaacttgagcaagaactgcagcgagctcgtcaacagggtatattcatttcaagcacgggagatcaatctcattcgatgagtggaaatggtgccttggcatttgacgttgagtattcacggtggctagaggagcacaataagcatataaacgagttgagggctgcagtcaattcacatgctggtgacgccgaacttcgcactattgtcgacagcgtcacagctcattttgatgacattttccgtttgaaaggtattgctgcaaaagctgatgttttccatatcttatcgggaatgtggaaaacaccagcagagcggtgttttctgtggataggtggcttccgttcatccgagctccttaagcttcttgcaagtcagttggagcctctaactgagcaacagtttatgggtatccaaaacttgcagcaatcatcccagcaggccgaagatgctttgtcacaagggatggaagcattacaacaatctttggccgagacattggccaatggctcacctgctgccccctcgggaccatctgggaatgtggcaaattatatgggccaaatggcaatggccatgggaaagctaggaaccctcgaagggttccttcgtcaggccgataatctacgccagcagacacttcaacagatgcaccggatcttgacgactcggcaatcagctcgtgcccttcttgcaataaacgactatttctctcggctccgagctctgagttctctctggctggctagacctcgcgagtgagaagcaagataataaaatccatctcctatgaacaaactgattgcccgcaccgcagccgctgccgctgctcttcctcaacatcaagcatcgaaatcttcccgagaaacatggatacattgtgtcttaatgtttttttggtaacaataacatgacatttataaatgttggcaaaaagttggtgtatgttaattacttaaaatgttgtaaaaacatttagggcaaaaataataatgtgatttagtttgatgctttagaattaagaaacaaaatgaagatagggagtggtatatgtaacaaaggttaaaaaaaaaatagttgtgaatgtgtattcatgatagcatgatgaatatttatatatgaacaatttacttgtgtttttgt

SEQ ID NO: 17720 - DNA, 489 bp, Gossypium hirsutum
  unsure (1)..(489): unsure at all n locations
  Clone ID: uC-gsflnu33B133h09b1
atttaagcacgggagatcaatctcattcgatgagtggaaatggtgcgtaagctttattttcatcatcggaatttgaaaactggtattatgatttagtgctaggggctcggagttcaagtaattatggatgcctttgtttgacctggcccgaacatttatggactgctatacaggtgccttggcatttgacgttgagtattcacggtggctagaggagcacaataagcatataaacgagttgagggctgcagtcaattcacatgctggtgacgccgaacttcgcactattgtcgacagcgtcacagctcattttgatgacattttccgtttgaaaggtattgctgcaaaagctgatgttttccatatcttatcgngaatgtggaaaacaccagcagagcggtgttttttgtgataggtggcttccgtccatcgagcttctaagcttcttgaagtcagttggagccttaactgagcaacagttatgggatt

SEQ ID NO: 17721 - DNA, 1221 bp, Gossypium hirsutum
  Clone ID: GOSHI-09MAY01-C5327_1
cccgcgccatccccaaaatcgatatcttcagattaattgatccatcaaagccctctgcgaaaatccctactttcaagtttcgatccgatcgacgctgctgttgttccttctgccgattactgataaaggagaaatgccatcgcagaagattgaaactggccaccaggacacggtccatgatgtggccatggatttttatggtaagcgtattgctaccgcctcatcagacagcacaattaagatagttggggtgagcaacaacacacatcagcatttagcgactctgacaggtcaccagggaccagtatggcaggtggcttgggctcatccaaagtttggctctttacttgcttcttgttgttatgatggacgtgtgattatttggaaggaaggcaatcagaatgattgggctcaggctcatgtatttgatgaccataagtcatctgttaattcaattgcttgggctcctcatgaactgggactttgtttggcatgtggttcttctgatggaaatatatcagttttcacagcaagggcagacgggggctgggatgtatcaaggattgatcaggctcacccagtgggggtaacatctgtttcatgggctccatcaacagcacccggtgctcttgttggttcgggtttgctggaccctgttcagaaactttgttctggtgggtgtgataacactgtaaaggtgtggaaactctacaatggaatctggaagatggactgctttccggctctccaaatgcatactgattgggtacgggatgttgcttgggcacccaatttggggctaccgaaatctaccattgcaagcgcttcccaggatgggaaagtaattatatggacagtggccaaggaaggggatcagtgggaaggtaaagtattgcatgatttcggtacccctgtgtggagggtgtcgtggtcattgactggaaacatattggctgtggctgatgggaacaacaatgtgacgttgtggaaagaagctgtagatggggaatggcaacaggtgactgttgttgagccataatcttctaatttttttttattgtaatatttgcaatgttttatacagctgcatggttgaatcgtttatgcctggaaattctagaaccgaaattttcaacttgaactttttattggatgtagtttgcagacccatcatgttgttgttaaagaaaattatgagctacttgaaagagttaatttttt

SEQ ID NO: 17722 - DNA, 393 bp, Gossypium hirsutum
  Clone ID: uC-gsronu33B048d02b1
caaatgcatactgattgggtacgggatgttgcttgggcacccaatttggggctaccaaaatcgaccattgcaagcgcttcccaggatgggaaagtaattatatggacagtggccaaggaaggggatcagtgggaaggtaaagtattgcatgatttcggtacccctgtgtggagggtgtcgtggtcattgactggaaacatattggctgtggctgatgggaacaacaatgtgactttgtggaaagaagttgtagatggtgaatggtttcaggagactgttgttcgagccataattttttaacttttttctatcgaaatattacgcttctctttattactttgttcttttgttatttcgtttattcacttttattttcctatatttcttattttt

SEQ ID NO: 17723 - DNA, 331 bp, Gossypium hirsutum
  Clone ID: LIB3149-020-Q1-K1-G7
ggtcaccagggaccagtatggcaggtggcttgggctcatccaaagtttggctctttacttgcttcttgttgttatgatggacgtgtgattatttggaaggaaggcaatcagaatgattgggctcaggctcatgtatttgatgaccataagtcatctgtgtaattcaaatgcttgggctcctcatgaactgggactatgtttggcatgtggttcttttgatggaaatatattggattttacagcacgggcctacggcggctgggatgaattagggattgttcaggctcagctggacgtgatctcatttgcctcattgactccttcaacagca

SEQ ID NO: 17724 - DNA, 467 bp, Gossypium hirsutum
  Clone ID: GOSHI-09MAY01-C5277_4
cttacacgatcatcttcttcagtgtccttccttaaactgatctacgcaaatcccaggaaaaccccacgtgtcaaaagagtaggagatggagatacggagattgcatcttcggcttcttcttcaagggtttatgttgttctctgtgatggggaattgttacgcgagatttgtggtggaaaagaacagcttgaggctgacttcacccgagaagattaagggtacctatgacagtgcaattggcaactttgggatacctcaatatgggggaagcatggctggtgccgtggtttaccctaaggagaatcaaaagggttgtaaaagttttgatgactttgggatttcctttaaatccaagcctggggctcttcctacttttgtcttggtcgatcgtggagattgcttctttgctttaaaggtctggaatgtacagtacgcttgtgcttcttctgtgcttagttgcttgtgat

SEQ ID NO: 17725 - DNA, 2271 bp, Gossypium hirsutum
  Clone ID: GOSHI-09MAY01-C5277_1
ttcgtcttttgatttaatatttaatggccaggggcactatttttatttttaaaaaacccattcaattttacatgtttttcatgcacgaccttcatcttcttcaccagtatcgtccttaaaactggatccaatccaaatccaaattcaacaacaaaaacccaaagtaaagatatggagctacgaacattccatcatcatcttcttcaagggtttatgttattatctttgataagcaattgttacgcgagattcgtggtggaaaagaacagcttgacggtaacatcgccggagaagattaaaggaacccatgatagtgcgattgggaactttgggatacctcaatatggtggaagcatggctggtgttgtggtttaccctaaagaaaaccaaaaggcttgtaaaagctttgatgactttgggatttcgtttaaatccaagcctggttctcttcctacctttgttttggtcgatcgtggagattgcttctttgctttaaaggtttggaatgtacagcaagcaggtgcttctgcagtgcttgttgcggatgatattgaagaagcattaataaccatggacaatcctgaagaggacagttcatctgccaaatacattgaaaatataacaattccatccgcccttatcgagaaacattttggtgaaactcttaagaaagctatcagtggtggggatatggtcaatgttaatcttgattggcgagagtctgttccacaccctgatgatcgtgtggagtatgagctatggaccaacagcaatgatgagtgtggagttaaatgtgatatgctgatggaatttctgaaggatttcaagggtgctgcacagatacttgaaaaaggtggctatactcaattcacaccccattatataacttggtactgccctcaggctttctcgctaagcagacagtgcagatctcagtgcatcaactacggaagatactgtgcacctgatcccgaacaagattttagctctggctatgagggggaaagatgtagttattgaaaatttgagacagctgtgtgttttcaaagtggcaaatgagaaccaataagccttggttgtggtgggacttatgtgacagattttcagataagaatgccccatgaagggagaaaaaatataacaaggaatgcgcagatgttgttatcagagctctcgggcttgatggtaaaaagattgagaagtgcatgggagaccctaatgctgatgaagataatcctgttctgaaagaagagcaagaagcccaagtgggaaaaggatctaggggtgatgttaccatactgcctacgcttgttgttaacgatcgccaatatcgaggaaagctggccaaaggtgctgttctggaggccatctgtgctggtttcgaggagactactgaaccagccgtttgcttgagcggtgatgtggagacaaatgaatgcttggataacaacggtggttgttggcaagataaagcaaccaatctcacagcctgcaaggatacatttcgcgggagagtctgtgaatgtcccttggttgatggtgtacaatttaaaggagacggttacagtcactgtgaagctagtggccctggaaggtgcaatattaacaatggaggttgttggcatgatgcacgagacggacacgcgtactccgcttgtgtggatgctggagatggtaaatgccagtgccctcccgggtttagaggtgatggtgtcaacaattgtgaagatattgacgaatgcaaagagaagaaagcctgccagtgccctgaatgtagctgcaaaaatacttggggaagctatgaatgcacttgcagtggagatcttttgtatatccaggaccatgatacctgcataagtaagagcagtaccgaagtaagatcatcatgggcagccgtttgggtcattttaatcggcttggcaatggccagtggtggggcttatctcatttacaaatatagattaaggtcatacatggactctgaaatccgagctataatggcacagtacatgccattggatagtcaagcggaagtaccgaaccatgtaagcgatagtcgagcatgaagacgaaaaactccagtatttgcagggagtagatgtggttcttcttgttatacattgattcaattggatttggtgcaaggattttattgatatgtaaaatatatggagcaataaaggaatacagaatagaaatggctttttgttctttattgttagaatccctatttatctttgaccaataatttatatggctactttgtctctg

SEQ ID NO: 17726 - DNA, 581 bp, Gossypium hirsutum
  Clone ID: LIB3825-011-Q1-N6-G6
gacagaattgccatttaaattatggagcaaaacccaaaaacaagcttctgaggatttagaatctgtaaagaaaaaaagaagaagctacagtcagatccttaagatctgcccctgatctcaaccttttcggcatgaatacggtgtttacgcgaacagatagtcgacttctattctggactcttttttttttgtccgatacattttttctaatcgaaataacatccatgctcaaaaaatctaactaaaggcataacaagaaccatatcaaacctgaatgatctgaactccgtgaaaatattggagtttttcgttcttcatgcacgatcattgcttacatagtttggaacttctccttgactatccagaggcatgtattgtgccattatagctctgatttcggaatccatgtatgaccttaatcgatatttgtaaacaagataagcaccaccaccagccattgccaagccgatcaaaatgaccgacatggcagcccatgctgatcgtacttcagtaccgctcttacttatgcaggtatcatggtccctgatatacaaaagatctccattgcaagtgcactcgta

SEQ ID NO: 17727 - DNA, 644 bp, Gossypium hirsutum
  Clone ID: LIB3543-012-Q1-K6-H3
cccacgcgtcgggacgcgtgggtttttagaaacagacaaaatggattctatcattaaaacaaaaacagggcacatgttacagatgccttcacgggcaagacacatgtgaagcgtaagccacaagaagtcaaaagcaccaaagatggaaaggaagacaaataacctaaacaactttccttcaaaataaaaatacagtaagaacaaaaagctcagttaaaccctaaatggcacaaaatgcattacaaagttgccacaaatggtcttaaattacaaggaacaaagaccacctttctaatcccaatttctttttcgtccattatattttacatatcaatactgtcggatgcttgaaatccaaatgaattaagtgtgcaacaagaaccacatcgatttgagttgtttgttcatgcacgatcttcacttacgtggtttggaacttcggattgactatccaaaggcatgtattgtgccattatagctcggatttcggaatccatgtacgaccttaatctatatttgtaaacaagatatgcaccaccactagccatcgccaagccaattaaaatgacccaaacagcagcccatgccgattttacttcactaccacttcttacttatacaggtatcgtgggtccctgttatac

SEQ ID NO: 17728 - DNA, 361 bp, Gossypium hirsutum
  Clone ID: LIB3148-050-Q1-K1-D8
gtactatgaaatccgagctataatggcactttacatgccattggatagtcaagcgggggtgccgaaccatgtaagcgatagtctagcatgaatactaaaaactccagtatttgcagggagtagatgtggttcttcttgttatacattgattcaattggatttggtgcaaggattttattgatatgtaaaatatattgagcattaaatgaatacagaatataaatggctcttttgttttttaacatattttttggaaaaaattattttttaccttatttaaatattctttaattttttttctttttattttatatttggttttattttatttattttttctttaatcattatattttttttt

SEQ ID NO: 17729 - DNA, 1185 bp, Gossypium hirsutum
  Clone ID: GOSHI-09MAY01-C5267_1
ctactctttccaggtctcaagccagatccattaaaaatccttcaaaatacgaaaccgttaaagactttccgttagatctgaaaaaaagttccctccacggtggcgccgtcggggccgcaagccctctctcgcagaaaaccaccaccttcttcaagtccaggtgcgagcagagaagatcgaacagaaccttctagaaagagtccgacggtcgattatccattttggcaacagaattggtttatcggattactattcctgatggcgatgggattcttaggtttcgctctcttcctcttcctatctctcgatctcgatcaaggttccccttcctccgcatccgccgcctcctcctcctccacctcccaaaacgtcgagattacttatgggacggttctaaagctaatgcacgagaaaacgaaatttaggctgcattcacacgatgtgccgtacggttctggaagtggacagcaatctgttaccggctttcctaatgtagatgattccaacagctactggattgttaggcctgaacctgatacatctgctaaacaaggagacaccattcctagtggaacaattattaggttgcaacacatgagaactagaaaatggctgcatagccatttgcatgcatctccaatatcaggaaacctagaggttagctgctttggaggagaatcagaatcagataccggtgattactggaggctcattattgagggaagtgggaagacttggaagcaagatcaaaagatccggcttcaacatgtggacactggtggttacctccatagtcatgataagaaatatgccagaatagctggtggacaacaggaggtttgtggtgttcgagaaaaacgtgccgacaatgtatggttggctgcagaaggtgtttatctccccattaccgaaagtaagtagtatatatgtttaacggatcactacttcagaaaagcaggtacatgggttttttggatttgtaggtggttggtgcctgtttatttagtacctataaccatcttatgaaatcaagtagtatatttgcaggacaattctctgctaagtactttataatgcatgcttatgtaacttgagagttgagactatgtattcatgagtttaattttttcactaaaaagcagctttttctcattttccttaatatataattaaaataatttaatt

SEQ ID NO: 17730 - DNA, 647 bp, Gossypium hirsutum
  Clone ID: AI055369.1
cttcaagtccaggtgcgagcagagaagatcgaacagaaccttctagaaagagtccgacggttgattatccattttggcaacagaattggtttatcggattactattcctgatggcgatgggattcttaggtttcgctctcttcctctttatatctctcgatctcgatcaaggttccacttcctccgcatccgccgcctcctcctcctccacctcccaaaacgtcgagattacttatgggacggttctaaagctaatgcacgagaaaacgaaatttaggctgcattcacacgatgtgccgtacggttctggaagtggacagcaatctgttaccggctttcctaatgtagatgattccaacagctactggattgttaggcctgaacctgatacatctgctaaacaaggagacaccattcctagtggaacaattattatgttgcaacacatgagaactagaaaatggctgcatagccatttgcatgcttctccaatttcaggaactatatgttagctgctttggagagaccagaatcaatccggtgatactggagctattatggggaagggaagacttgagcagataaagatccgttaacatgtgacctgtggtacctctagctgatagaatttccaatatgtggcagat

SEQ ID NO: 17731 - DNA, 612 bp, Gossypium hirsutum
  Clone ID: LIB3828-018-Q1-K6-F9
cggccgcgtgggcaaatttcctccacgtggcgtcgtcggggtcgcaagccgtctctcgtaggaaaccgtcttcgtcgtctgcaacaagtagtggtccgagcaaagctgagcaaagagaacatttgaggaaggatctgaaggtcgattatccattttggcaacataattggttcatcggattgctgttcttgatggcgatggggttctttggtcttgctctcttcctcttcctcactttcgatttcgatcaaggttctccttcctccacctccgcctccgcctccgccgcctcctcctcctcctcccaaaacgtccaggttacttatgggacggttttaaagctgatgcacgagaaaacaaaatttaggcttcattcacacgaggtgccgtatggttctggaagtggacagcaatctgtcaccggctttcctaatgtagatgactccaacagctactggatagttaggcctccacccgatacatctgctaaacaaggagacaccatccccgatggggcaattattaggttgcaacacatgaggacccgaaaatggctgcatagccacttgcatgcatccccaatatccggaaacctcgaggtcagttgctttg

SEQ ID NO: 17732 - DNA, 556 bp, Gossypium hirsutum
  Clone ID: LIB3584-049-P1-K2-C2
gaaagatgagagtcccgagaagattcaagaaaaaacgggagaggttgaggaagcctcaaatttcaaagcaaatacatgcgaaaaggctttagacaatgaattactcactgaaatagaagatgctgcaatcaaagagaatcttgccaaagcaagggatgggtcaaggagtgaagtaaaccagtgtgagaaaacaaatgaaggaaatgaaatcccactgaatgaagtttcggtagaacaggtcacaaagaacaagaaacttactgaaacaacttattcaacttcttgttcggaagatctgattacagatggctcacgggatgaggaggagtattgagggatgtaccgttatccgttcgctactgagatgtatgctcttgatgattatggatgtgcgttatcagggctgaatacctcgcataatgtactagttacaggtatttgctatgaataaagcgcacggtgaaattatcagcatctactggattgttaggcctgaacctgatacatctgcaaaacaaggagacaccattcctagtggaacaattattaagttgca

SEQ ID NO: 17733 - DNA, 899 bp, Gossypium hirsutum
  Clone ID: GOSHI-09MAY01-C5207_3
ctacagagtttgcctcatacttccattattgttgttcactaaggtttgatgataagccagacgatgcttatcttaaaagaatctttcgtgacctctttattcgtgaaggcttccagttcgattatgtctttgattggaccattttgaagtatcagcactcacagttgaccaatcctcccgctcgagcccttggcctcggtgctggaacaagttctcccctgccacctgccattgcgaatgctgacagacacacagctgcggaggacacacgagcagctggtttgtcatccatggattcttctcggcggagagcatcaggacccttgatgagttctggaaattatgcgaagcagaagagtccagttgcaaatgatcattttattgggcagtcaggtggatcatcttcaaggcaagctggtgtttctagcagtcgtgatgcatttgctggtagcgatgttgacccacaacgttctcgtacagcctacgctagccccggagcactgcaaaagaattcaagtcgacagagaagtcccattgattctgccgaccctaagcgttcaatgtctgcaagaaacaccagtcatgtcaagaactatgaagcggccctcaaaggaatcgagggcctgcaatttgaaagcgacgagagaattcactattaaacgcttggatatacaaaatttgttgtaaaaccgtaaaaatggttgatgtactaatacattttccaacagagtatttggggaaggtccgagttatcgaaggaatttgcaacttggagctgttcttgatttggactagtggggtgggcaagtgcacacctgaaaagcataaaatttgtgatccacttggatgatggaaagctttgtgaagtaaacaaacattttgagtgcttaaaattgaat

SEQ ID NO: 17734 - DNA, 791 bp, Gossypium hirsutum
  Clone ID: GOSHI-09MAY01-C5207_2
ctggaagatatgcaagcatgaacacacacttgggcatcgagcaaagccgtagggatgatttggagtctcttggatacgtgcttatgtacttcctaagaggaagtcttccttggcaaggtctgaaagctggaacaaagaaacagaagtatgagaaaattagtgagaagaaggtttctacttcaattgaggccttatgtcgaggttatccaacagaatttgcatcatacttccattattgccgttcactaagatttgatgataagccagactattcttatctcaaaagaatctttcgtgatctctttattcgtgaaggcttccattcgattatgtctttgattggaccattttgaagtatcagcaatcacagctgaccactcctccagctcgagcccttggccccggtgctggaacaagtgctgccgggccccctgcttttgccaatgctgaccgacaagcagccggtgataacctgcgagcagctggtttgtcatctatgaattcatctcggcggaaaacatcaggacccttgaattccggaagtcacgcaaagcagaaaggtccagttgcaaatgatcctgcaattactaaagaacgcctatgttatatggggcaatccggtggatcctcttcaaggcacattgctggtagccgtgaagcttttgctggtagcgaaggccgacccccaacgttctcgtacaaccgatgctagccatgggggggggggcgggcgctcaagccgacaaagccccgttgaatcttctgaccctaagcgggcctcgtccatgaga

SEQ ID NO: 17735 - DNA, 1503 bp, Gossypium hirsutum
  Clone ID: GOSHI-09MAY01-C5207_1
gggattccaaatgttagatggtttggagttgagggagactataatgttatggttatggatttacttggacctagtcttgaagatctatttaatttctgcagtaggaaactctcattgaagtcagttctcatgcttgctgatcaaatgatcaatcgtgtcgaatttgttcattcaaaatcatttctacatcggggcggacgcacgcgtccggagatatcaagccagacaattttattatgggcttgggaaggcgtgcaaatcaggtctatatgatcgactttggtcttgctaagaaatatagagacagttcaacccatcagcacattccttacagggaaaataagaatctgactggaactgcaagatatgcaagcatgaatacacacttgggcattgagcaaagccgtagggatgatttagagtctcttggatacgtgcttatgtacttcctaaggggaagtcttccttggcaaggcctgaaagctggcaccaagaaacagaaatacgagaaaattagtgagaagaaggtttctacttcaattgaggccttatgtcgaggttatcctacagagtttgcctcatacttccattattgccgttcactaagatttgatgataagccagactatgcttatctcaaaagaatctttcgtgacctctttattcgtgaaggcttccagttcgattatgtctttgattggaccattttgaagtatcagcaatcacagttgaccaatcctcccgctcgagcccttggcctcggtgctggaacaagttctcccctgccacctgccattgcgaatgctgacagacacacagctatggaggacacacgagcagctggtttgtcatccatggattcttctcggcggagagcatcaggacccttgatgagttctggaaattatgcgaagcagaagagtccagttgcaaatgatcatgtaagtacttaaagagtattgtaattctttcattatacggttgtgtccctatgcatatatagttgttcaatatttttttgtcaatcttccatttaagtaacgcgctggcttccttttataattaagaaatatatccgggtaaagtgccattgaaggccctatattaagagaccgaatgcattttggcctctatttaaaaaatgagataactagtccctgtacgttagatcaaagagcaaaccgggcctgctgttaaaaatttcatctatttttactgctaaaaactagtccctgtacatcatcatgaggtacacgggacatgccaatatcactgtcgggttatttggtcagccatactagttttaacaatacaaaaggttgagttttaacaaaaggacatttggtctttgactacatacaggattaattacccattttgagtaaaagcaaatgcaattgactctggatagagcttctagatttatccattcggaggttattttgttatattggacacataactaagccatatttcatatttttgggcacagtacttttttta

SEQ ID NO: 17736 - DNA, 993 bp, Gossypium hirsutum
  Clone ID: GOSHI-09MAY01-C5237_3
ctgacgcgtgggcggacgcgtgggttcaaattctgctaaagttttgccttttgaaatcgaataattgagaaaatagcttaggttagttgattgcctgaaatgactgataacaattcaccccctgggtctcccaaagtaaacccagatcataattctgaggctaacccgttgcccaaagatgatagctcacttgaaaacatagttcgaaggtttcaggattcaatgtccttagcaaagaaacacaaattttgggaaactcagcctgttggtcaatttaaggatgctggggacacaagtttgcctgaaggtccgattgagcccccaaccccattgtctgaagtcaaacaggaaccttataaccctccgagtccgtatgaatggaccacatgtgatatggattcggaagagacttgtaatgaggtttacaatcttttgaagaacaattatgttgaggatgatgagaatatgtttaggttcaattattccaaggagtttcttaggtgggctttgcgccctcctggttattgcaagagctggcatattggggtccgtgctaagacatcaaagaagcttgttgccttcattactggtgtgcctgcgagaataagggtgcgtgatgaagttgtgaaaatggcagagatcaatttcttatgtgttcataagaagctgagatcaaagagacttgctcccgtgatgattaaggaggttactagagagttcatttggagaatatttggcaagcagcttatactgctggagttgttcttccaacaccaattactacttgccaatactggcataggtcactaaaccccaagaagcttattgatgttggcttttctaggcttgggcctaggatgacaatgagccgaaccattaaactttacaagttacctgatcaaccagccacccctggatttagaaagatggagcttcgtgatgtccctgctgtcactaggttgcttaaaattacttgagccagtttgttgttca

SEQ ID NO: 17737 - DNA, 439 bp, Gossypium hirsutum
  Clone ID: GOSHI-09MAY01-C5237_2
tcggcgagagccaatggcaacatgaaagagggggtcattttgacacctgtttacgaatcgaagaggcgactttcattcccattaacgcaagggatagtcggatcgtttatttggtgtaaagggtcgtcgttgttttcgggcgtggattctaggtcacagagggggttagataagcatcaaacattgcaatcgttggggaatttgagtgtggattctactggttctatgcctgctacgatgggaagaaagccatttaatagatttgtgtgatttgttgttcaatttggttatttttttaaaaattgagtgaatgatgatatgttgaatttataaaattttttcatgttaaataaaaaagaacagaaacttaaggaaaatggtgctttgaatgttgaagactttggggtatggagagatattatagtaatttttttaaaaa

SEQ ID NO: 17738 - DNA, 819 bp, Gossypium hirsutum
  Clone ID: GOSHI-09MAY01-C5237_1
cccacgcgtccgcccacgcgtccgcttttgaagaacaattatgttgaggatgatgaaaatatgtttaggttcaattattccaaggagtttcttagctgggctttgcgtcctcctggttattataagagctggcacattggggttcgtgctaaggcttcaaagaagcttgttgctttcattactggtgtccccgcaagaataagggtgcgagatgaagttgtgaagatggccgagatcaatttcttgtgtgttcataagaagctgagatcaaaaagacttgcacccgtgatgattaaggaggttactaggagagttcatttggagaatatttggcaggctgcttacactgccggagttgttcttccaacaccaattactacttgccaatactggcatcggtcgctgaaccccaagaagcttattgatgttggcttttctaggcttgggcctaggatgacaatgagtcgaaccatcaaactctacaagttacctgattctccagccacccctgggttcagaaagatggagcttcatgatgtccctgctgttacaaggttgcttagaaactacttgagccagtttgtcggttctccagattttgatgagaacgatgtggagcactggctgcttcccaccgagggcgtcgtggacagttacttggtcgagagcccaaagacgcatgacataactgacttctgtagtttctacacacttccgtcatcaattcttggcaaccagaactattcaattttgaaagctgcctactcttactacaatgtctccaccaagactccattgcttcagttgatgaatgatgca

SEQ ID NO: 17739 - DNA, 424 bp, Gossypium hirsutum
  Clone ID: uC-gsflnu33B092d12b1
gcccgcctggcacgcggacccgggaacggacattgccggacccgacccacgcggacatttgcttcgctgtaaattagaggaggcatctatgggagtatttttggagaattaatggcgggcagctgatacagtttgagatgcggtgcctacaccaatgactacttgccgagactggcgtatgtgacttaacccccagaagctcatagatgttggctttttcaggcttggacctatgatgacgatgagccgaaccattaaactttacaagttacctgatcaaccagccacccctggatttagaaagatggagcttcgtgatgtccctgctgtcactaggtggcttagaaattacttgagccacggtggtgtgtctccagattttgatgagaatgatgtggagcactggcttcttcctactgaggat

SEQ ID NO: 17740 - DNA, 305 bp, Gossypium hirsutum
  Clone ID: uC-gsflnu33B092c10b1
ccctgcttccgaagggggttagataagcatcaaacattgcaatcgttggggaatttgagtgtggattctactgtttctatgcctgctacgatgggaagaaagccatttaatacatttgtgtgatttgttgctcaattaggcttatttatgaaattttgtgaaggatcatatctagaattactataatccgatcctgtaaactttacaagattcctgatcaaccagccacccctggatttagaaagaaggagctttctgattgtccctgctgtcactaggttgtttagaaattactttgagccacc

SEQ ID NO: 17741 - DNA, 422 bp, Gossypium hirsutum
  Clone ID: GOSHI-09MAY01-C6967_1
aaaaaaaattcttctctctgcttacaactcctgataattatcttcaaattttggaatatagaaatggaaggagtgggctccaccaggctgggccgagcttccgctaggtacggtggttcaacggcggtgttcaatggaccggtgaggaagtggaagaagaagtgggttcacgtgtcgccttcatccaccgctaaactctctcagtccaacgggaacggttccgccgcctccagcatccttctttgtaggtggaccccactctcctttgctgattccgggtcctccgccgtcgatggcgaggacgaggagcaacccccaaagcgcaagtaccgctatacccctgttgctgtgttagaggaagagcgtagaagggcagctgctgcgaaacaggttgaaaatgaagctaggacagatgagaataa

SEQ ID NO: 17742 - DNA, 726 bp, Gossypium hirsutum
  Clone ID: GOSHI-09MAY01-C6587_1
tccggaatggccgggccgacccgccccacgcgtccgcagaagtggattgaagtgaagaaagaaacaaccaccgaaaatgtcggcagcgcttcctccaccagcttcatctctcaaactaacggcgacaacctcattcccaacctcacgcgcactcttcctcgctttacgcaaaccccaaatttccattataccacgtgccactcctgactccgacgctgactcatcaacggaacccgactcctcgccctcctcggagacctcagccgactccgacccattcgaatcccgtctctcccaggtccgcctccgttaccgaatcggagccggcaagaaagcggagcgccgaaaatcaaagaaatccggatccgtatcaacttcgtcttcctcctccatctacctccctccggtgcctttaaaagaggcgatttcaaatgggttgaaagtggatttcgggtttagcccatatagcgagagaataaacggacggatcgcgattctcgggttgacggctttggttttagtggaattggctacgggtaagagcgcgataagttatcatacgccagcaattatctttattcagatttattttgtagctgcagttggggctttgttcgttaagtacgagaaagaaaaagttagtgtttggccaccttctcaatcttcttcacctcaaaattgaaaaaaaaaagaatttttttggggtttttaggtaatatgaaagta

SEQ ID NO: 17743 - DNA, 401 bp, Gossypium hirsutum
  Clone ID: GOSHI-09MAY01-C6547_1
cccacgcgttcgcccacgcgtccgcccattcgtccgcggttttgaaaagaaaaaaaaaaaaaacctctggcaagaatgaatttaacaatggacgaagcaaaattaaaggagctaaaggagttcattgatcagtgcaaagctaatccttccattctaagcgatccttcactctccttcttccgtgactatctccaaagtctcggagcaaatcttccatcttcagctagcggccatgaagccggagactccaaatcgaagagttatgtgatggaggagagtgaccaggtagtggcggacgatggagagaaagttaatttacaggacgtggaagaagagattattgaatctgatatcgatctcgaaagcgatgtcgttgaacctgataatgatcctcacagaag

SEQ ID NO: 17744 - DNA, 452 bp, Gossypium hirsutum
  Clone ID: GOSHI-09MAY01-C6507_2
aacacattgcactatccttcaccacacattccccatagctacatgctactactgtgtcattgaccctactctttgccttgttgtattcaccaaatttcttgtttttgattacacaaaatctcccataccttatcttcagtttcctggattctcgtccaatcacttgcgtctctcttgtatcctgttttgattctaagctttgtttgcttacttgtgtgtctgttcatcacatcatctacatttccctccactgtttctctcttctatatttccccaagattatttcctctttccggtttttcctccctattttttttttctcgggagacttttttttaggtatacccagatcttgtttagttccaagctttaggttgtcatcgttttctcgaggttttaaactatgggctcttgaatttgtgaaacaaagggagatatattggttaaaaact

SEQ ID NO: 17745 - DNA, 1424 bp, Gossypium hirsutum
  Clone ID: GOSHI-09MAY01-C6507_1
tgcttctattgtttcattgaccctactctttgccttgttgtattcactaaatttcttgtttttgatccgcaaaatctcccataccttatcttcagtttcctggattctcctcctttttgatccacaaaagctcccataccttatcttcagtttcctggattctcctccaatcacttgcttctctcgtgtatcttgttttgattctaagctttgtttgcttacttgtgtgtctgttcatcacatcatctacatttccctccactgtttctctcttctatattttcccaagattattttctctttcctttttttcctccctattttttttctcgggaaaaaaagactttttttccggtatacccagatcttgtttagttccaagctttaggttgtcatcgttttctcgaggttttaaactatgggtatctcttgaatttgtgaagcaaagggagaaatattggttaaaaactagtagcagtgtattgaatcaagttttacaaaaaaagaagttaaaaagaaagatgaaaatccagtgtgatgtttgtgagagagctccagcaacagtgatatgttgtgcagatgaggctgcactttgtgctaaatgtgatatcgaagttcatgcagctaacaagcttgctagcaaacaccaaaggcttctccttcaatgcctttctaacaagcttcctccttgtgatatatgtcaggaaaaagcagctttcatcttttgtgttgaagacagagctcttttctgccgggattgcgacgaaccgatccatccagccggcagccttgctgcaaaccatcaaaggttcctcgccaccggaatccgagttgccttaagttcgcctcccgtccgaaacactgaaaacaatgtgttggagccacccaacaagagtgcacctcagacttcaatgaagaggcctgcgcatcaacaacactcgagcttttcatctccatgggctgttgatgatctgttagaactttcagatattcaatctctaaacaagaaagagcactctgagcttggagagcttgaatggctagcagacatcggtctttttggtgatcaattgccacaggaggctttagcagcagctgaagttcctcaacttccgatatcgcaatcaagcagtacaaacttataccgacctaccaaatattccatggctcttaaaaagcctagaatcgaaaccccggatgaagatgacgagttcttcacagtccctgatctaggttgagttggataacgagactcgtgtgtcagtagttcgaccaaactatagtgtttcatatgttgagtacacttatgcacgtactcatcttatcacgctttactatgttgcctttgtttttaagtatccgacatatgttcaaacattgatatgttgatataatcttttatatacttttcaaatacttaaaat

SEQ ID NO: 17746 - DNA, 324 bp, Gossypium hirsutum
  Clone ID: LIB3165-005-P1-K1-A2
ggaccgggacggacaggccgggccgacgcgtccgcccacgcgtccgcccacgcgtccggttcatcacatcatctacatttccctccactggttctctcttctatattttcccaagattattttctctttcctttttttcctccctattttttttctcgggaaaaaaagactttttttccggtatacccagatcttgtttagttccaagctttaggttgtcatcgttttctcgaggttttaaactatgggtatctcttgaatttgtgaagcaaagggagaaatattggttaaaaactagtagcagtgtattgaatcaagttttac

SEQ ID NO: 17747 - DNA, 966 bp, Gossypium hirsutum
  Clone ID: GOSHI-09MAY01-C6537_1
aatcccttctctgagaaaaaaacacctatattttaataaaaaaccataaaaagtaaacaaataaatttgaagagcaggaaaagaaaggtaggctgaagattcccattcagagccctccccctcgccaaaacagagctcaggatcagcagccatgggaatcattacggtagccggtggagacgccttgtgaacctggatgtgggtattttccatgccgctcttaaagattttcacctccaaaatcgtcgggttcctcggcgcccaaacgttgcctttggcgactcttatggtctcgacggtcttagtcagtattttagtcatgattttcagctttatcggcaacgttttcggcggcgcaagcttcaatcccgcggcttctatgactttccacgttgcgggtctcaagaaaaacgactccatcctctccatggccgtcagattcccagctcaagccgccggtggagtcgcaggcgtcaaggcagctctgggtttgattcccgcggaatacagcaacaccctgaccggaccttccctgaaagtggacttacacaccggagccgtcgcagaaggactgtttacattcggacgaagccttgcactgctgctgataatgtttatgggtccaaagaacgggtgggttaagcaatggttggtgtctttagcgacggcgattttggttctaacgggctccagattcacgggagctcccatgaatcctgcaagtgcatttggatgggcatatgttaataatcgacataattcatgggaactgtattatgtttattggattggtgctttgtttggggcaactttgggagcctgggttttcagattcatggtttctttgccacttccaccaccaaccaagcagaaaaaagcttgatttttaggtaaatgattgactagttttattaaaaataaaaaaccttcctttattaataaatcctggcatttatgattcaaaaa

SEQ ID NO: 17748 - DNA, 658 bp, Gossypium hirsutum
  Clone ID: GOSHI-09MAY01-C6487_2
ctcgcaaaaagggcccatagagcgtagcaaaacaatcacatttgcactacgtttggttggatggaattgctattccattccgccctaattccgtgcgctacagtaaatcagttgtttggttcaccatttaggtgattccacggaattgctattacagtctcattccctcagctcaccgtttaggtattcaggggttgggggtctgaacgcctattcaacaccacaccgtttaggttttgagaccagaatagcctgcctctcttcttcccaaaattctcttcagatttcttcctccccaaatcaagcatccattcgcccttcatcttcatctccccaaatattgtaaagggctgctcgcaagtcagcaccgacaacatgaggtgtgaagaagcctcaccgatatcgccctgaaactgtagctctgcgtgaaatccgaagtaccagaaaagtactgaactccttatcaggaaactgcctttccaaaggctcgttcgtgaaattgcccaagactttaaggcaattacctccgccggaacaaagaaaggtgatcttttcttggctgatgttaatagccaactgaagtctaagaatgttataactgatatcaaagctatcaaagtagacatcagctccaatgtaaggacgtcatcggacatga

SEQ ID NO: 17749 - DNA, 870 bp, Gossypium hirsutum
  Clone ID: GOSHI-09MAY01-C6487_1
cccacgcgtccgcccacgcgttcgccttgtcgtatcagacgcttttctcctcttctctgaaattcccttgctatcgttctctggaagaaaattttttgagatggcccgtacgaagcaaactgctcgtaagtccaccggcggcaaggctccaaggaagcagcttgccactaaggctgctcgcaagtcggcaccgacaaccggaggcgtgaagaagcctcaccgatatcgccctggaactgtagctctgcgtgaaatccggaagtaccagaaaagcactgaactcctcatcaggaaactgcctttccaaaggctcgttcgtgaaattgcccaagactttaagaccgatctgcgtttccagagccatgctgttttggcgttgcaagaggcggcagaggcataccttgttggattgttcgaagataccaacctgtgcgccattcatgctaagcgtgttacaatcatgcccaaggacattcaactagctaggaggattcgtggtgaaagggcttaataaattcacctctctgatttgctgatttgttgctaggatatttgctttctttgatgtttaatgaattcaggatggtctgatgctgtaaaaacctataatatagtttgtgttttttattacgaatcacgaagagaagttgttgaagctaaggacgagaagtataagattaaggattttgttatgtttatggcacatgaaaagcaaccgccttgtacctttgttaactactgcaagaattcaacaacttgtgactttgagggtttgttagaaattgattaaaagcccaacctcttttaacttaatggttttgtatcttgactccacctcttatttttaattatgttttaaatttgattagg

SEQ ID NO: 17750 - DNA, 450 bp, Gossypium hirsutum
  unsure (1)..(450): unsure at all n locations
  Clone ID: LIB3148-047-Q1-K1-G6
cgtccgnccacgcgtccggaggcataccttgttggttttgttcgaagataccaacctgtgcgccatgcatgctaatcttgtgagagtcatgcccaaggacattcaacttgctaggaggattcgtggtgaaagggcttaataaattcacctctctgatttgcttgtttgttgttaggatatttgctttctttgatgtttaatgaattcagaatggtctgatgctgtaaaaaccttaacctataaatatagtttgtgctttttattacgaatcacgaagagatgttattgaagctaagaacgagaagaattacgactcacgactttgaggcacatgaaaagcaaccgccttgtacctttgttaactacttgcaagaatcaaccaacttacgaatttgaaggtttgttgaaaaaaaaataatattttatttatatttatttttttattaattt

SEQ ID NO: 17751 - DNA, 405 bp, Gossypium hirsutum
  Clone ID: LIB3272-019-P1-K1-A9
gtcgtatcagacgcttttctccccttctctgaaattcccttgctatcgttttgtggaagaaaattttttgagatggcccgtacgaagcaaactgctggtaagtatactcccggcggggctgctacgaggaagcatgtcgccaatgatgcttgcacgaaggcacccacaaccggaggcgtgaagaagcctcaccgatatttgcctggaactgtagctctgcgtgaaatccggaagtaccagaaaagcactgaactcctcatcaggaaactgcctttccaaaggctcgttcgtgaaattgcccaagactttaagaccgatctacgtttccagagccatgctgtattggcgttgcaagaggcggcagaggcataccttgttgggttgttcgaagataccaacctgtgc

SEQ ID NO: 17752 - DNA, 461 bp, Gossypium hirsutum
  Clone ID: GOSHI-09MAY01-C6477_1
gactggccgactccgacccacgcgtacgccccctctcctgtttgtgctctgtttttctcttctgagttgttttctgatttagggtttagccactctgggtatttattatttcatctaaagaaacacttttggggattaaagtgggtagtttattattattactttttggtcggagttaaaacggtatatatatagggggtatttattttgattttttgaatggcccggttgattcttccttgcaaaagttcgtgtttggcaaggaccagtcttttgggttaaaaggagtgtctgttcagtgaagagtatatctgggtataggtgtttctcggctctagaggccacgcatagaagaaattacaggtttccacattcttcgccttatagggcaagagaaaccagcagaaggctgatttgttcagttgcaacggaacctttacctaagcgagttgaagaatccg

SEQ ID NO: 17753 - DNA, 486 bp, Gossypium hirsutum
  Clone ID: GOSHI-09MAY01-C6407_1
ccctctcgtccggaatatcaagttctcactcaaagcttttgcccgactgagtcactctcagccagccctctataaaccacttgtacctaccgtggcggatcggctctgtcaatcaaaccagcaaatacaacatcctttcccttctcttttaatctttcttgtcttctctttcacctcgctttgttgtccatcagttgaggattcttgtcaacaaataacgcatggcagaggaagaacccaagaaggttgaaaccgtaaccccctcggagcaaccacctcccgaagcccccaaagacgttgcggaggaaaaatcggtaatcccacctcctacctctgaagaaaaacctgctgagtccgccgcactccaaaaggcggtggaaccgactgaggaaaagagcacggagagtactgtggaccgagatgctgtgcttgctagagttgcgacagagaagcgaatttcactgatcaaagcttgggaagagagtg

SEQ ID NO: 17754 - DNA, 395 bp, Gossypium hirsutum
  Clone ID: LIB3083-065-Q1-L1-A4
catatatagagatagatagagagagagagagagatacagggagatagggagagacagtacatcctttcccttctcttttaatctttcttgtcttctctttcacctctctttgttgtccatcaattgaggattcttgtcaacaaataacgcatggcacaggaagaacccatgaacgttgaaaccgtaaccccctcgcagcaaccactttccgaagcccccaaagactttgcggaggacaaatcggtaatcccaccttctacctctgaacaaaaacctgctgagttcgccgcactccatactgcggttgcacctactgaggaacagatcacggaaagtcctgtagaccgatatgctgtccttgctagagttgcgactgagaatctaatttcactgat

SEQ ID NO: 17755 - DNA, 895 bp, Gossypium hirsutum
  Clone ID: GOSHI-09MAY01-C6647_1
cccacgcgtccggttgggcattttcaccattcttgatacatcagttttgatggccgtcggtgttttactccgtcggctctttggggacagtctggtttgctttatggctaaataaggcttacagttcacctattgaggatcctgaacttctgccccaagagaaaaagcttattgttaccaactgtatttccaagcagccagttaaaacaataccttggaagttaatcttgtcaaaaccacctgtatgggcccttatagtgtcccatgcctgcccccacgcgtccgcgtttattctcttaacatggatgcctacgtactatcatcaagtcctgaagttcaacctcacagattcagggctcatttgtgttttaccctggcttacgatggcattttctgcaaatcttggaggatggattgcagacacacttgtgagcaaaggcttatctgtgacaactgttcgcaaggtcatgcaatccattgggtttcttggccctgctttcttcctaactcagctgagccatgtcaattctcctgctatggcagttttgtgtatggcatgcagtcagggaactgatgcattttcacagtctggcctttattcaaaccatcaagatattgcccctcgatattcaggtgtattacttggtttgtccaacactgctggagtactagctggggtctttggaacagctgctactggttacattctgcaacatggttcttgggacaatgtcttcgaggtttcggttgggctatacttggttggaaccgtggtctggaacctcttttcaactggtgagaaaatactggactgactcagatatttagatgtttagcatgagttagctcaagccttcatgggctcgagctaattgaaagagtcaatttattgaat

SEQ ID NO: 17756 - DNA, 659 bp, Gossypium hirsutum
  Clone ID: GOSHI-09MAY01-C6607_1
aaaaatacctgtggctctcactctccttaaacatgtcaagaaatcaaataaggtgttcactaggatcatcattatcaacaacacccaaaaaagctgtaccctcaccaccaccttaacaatgaatgacacagtggacaggcttgtgatctttctagccaagagagatggcattgacaagcttgtgaagaccttccaatacgtgtttaagcttgttaactggcaagtagaaaccacacacccagacctagcaaacaggttcaaacaatgggaggtctcctccggtcttagcagaaaagcctttagaacaggcaggttcctcactggtttcaatgggttgagaaggaaccctggtgccaccccaacattcaagttcctagctgtacttgctaatgcaggagagatggtgtatttctttttcgaccactttctatggctatcgaggattggaacattggatgccaagttggctaagaggatgagcttcgtatctgcatttggtgagtcattcggttatattttcttcattgtttcagatttgatcgtcatgaaacaaggcgttgaggccgaaaggaagctcatggctttacaagaagaagaagaaaattcaaacgatgcaaaagagaagatatgaaagataagaggggatagggtgatgaggc

SEQ ID NO: 17757 - DNA, 924 bp, Gossypium hirsutum
  Clone ID: GOSHI-09MAY01-C6187_1
gatgcgtcagaattttagctggacttgccattccgttggttcttataaaaaaaagccaatgactgctgctgccttttctgctgatggttctgttcttgctgttgcggcagaaacccttattacattatggaacccctacaagaatgtcctcttggcagtacttggagaaactctcacgccaattgtgaacctgtcattcgttgggaagtcagataatcttgtagctgcatcatgtggttcaaatccacaactttctgtctggaacatgtcaaagttatctgtatcatggtcatataagcttcatatagaagctgtagcttctgctgccctcgcgccccctttgctgctctggtccttcttcctgagtcatctaagaaaacaacttttaaaggaatggatggtgtaatcttattattcaatgcaactgatcctgttcctactgttatttggtctgtgaggaaggccaagggtggggctctttgttttgttcaagtaaatccatcttccgttgaagagatcagtatagatggcaaagcacctgaggtgcttcttgcatatatgaatggtgatcatgaatatgttctgtttgatccatactgcaaagatgcccgtgaggttagcgtcagccaaaaggaaggtcttgctgcccatgaccacaaaggacaagcagggcaatatggttatgcatccatctatggagagttaccagagtttgacaggaagagacctgaggctccttgggttccatcatttccatctgacagaccttgggaaaccatattcagtggatcatctcataatcttccgcctctcaccaaactgtgttcagctttccttgaatccttattggaaaagagaacagctgctgctgaatgaacatagagggcatttgtttaatattcatatacgacccttttggaatgc

SEQ ID NO: 17758 - DNA, 835 bp, Gossypium hirsutum
  Clone ID: GOSHI-09MAY01-C6147_1
attaaacccctccaaaaaagcttacttttagcactctgttgttgctctcaaactcgaagggattcggaagtatttgatatggcgcttgaagctctgaactcgccggcgacgcctttcaccaacaaatacgatgacgtggacaacaattacgtcgagacatggaagaaaggcaagcgttcgaagcgccaacgcggcgactctcctgctgctgttgaacttcaacccacccaccgaagaagagtacctcgctctttgtctcatcatgctcgctcgcggctcttccggggctgatcgtgatgttattcgtcggtcttccccttcgtcgtcaccgcctccgccgccgcctgctttgaagttgtcttacaagtgtagtgtttgtgacaaggcgttcccttcttatcaagctttgggcggtcataaagccagccaccgcaaacccctttccgcgacgccgttaccaccaccggcgccgtcaacgtcgataacccatcaacaaccagcaccggcgccaccatcaccagcagcggtaggcttcacgagtgttccatctgccacaagagtttccctacgggccaagccttgggtggtcataaacgctgccactacgaaggtggcaacaacaacaacaaaaataacaacaacagcggtagcgttagcgttagcgttagcggggttacgtcttcggatgggggggcgttgagccacaaccaccgtgcagtcgactttgactttgacctcaacttgccagccttgccggagttcagtcaaatgtacccagatgaagaagaggttcaaagcccattgccgaccaagaaaccacgtctcttgatcgcca

SEQ ID NO: 17759 - DNA, 393 bp, Gossypium hirsutum
  Clone ID: GOSHI-09MAY01-C6167_1
gtatcttttggcagccaggatggccgaaagagaattgtggatccgacggtgttgaccacttgctcacaggagtcgttatccatcgtagtatcaattactggcaaatgcatatgtcccgaaccatcatctcggccatcgcttgaggacgttctttggaacttacagtatgcagctcaagttcaggctgcagccgatgccgatcagaaatccgattctacatcgtagtcaattgtatatggttggtacacaccggatgttttgttttcggagaaacctgctgatactgctcggataaagctcttggaatgtgctttcctatataaaatgagttagagctagagatgtaaagctgaaaatgtcatattttagaccttataaatggaaaattttggt

SEQ ID NO: 17760 - DNA, 1115 bp, Gossypium hirsutum
  Clone ID: GOSHI-09MAY01-C6117_1
cggccgcgtcgacggaaggtatcctcaatattttgccgcatataatgaactacaggctgctggagttgaatttcctccctagaagagaatactgtaccattatttactccacctcagacccacccagtaagtcaccaccctgcttctacatatgaggatgctgctattgaggcctctctacagtctgatgcttctggcctcagcttgccggagattcaaaatgcttctggactagcagaaatattaatggaaatgcttagtgcattggatcccacccccccggccgctgtgaagcaagaagtcattgttgaccttgttgatcaatgccgttcttaccaaaagcgtgtgatgcttcttgttaatagtaccacagatgaggaacttttgtgtcaggggttagcactaaatgacagcttgcaacgtgttctttgccggcatgatgacattctgaaaggaaatactgttccgactggagcagtagcagagactcctgttgtgccatttgttaatattaaccatgaggatgatgagtcggaagatgaatttgctcagctatctcatagatcatcaagggataattctcaaggacatggcaggagagcgcctaaaagtgagactgggcgagttgatccatttcttcctcctccacccccgtcaaaaagtctggttgctacaaatgccggcatggttgattaccttagtggtgatacctacaaatctgagaaggcccctgaaacaagagaatctgcagctcattctgttcgcactcgtacatcatcacctccttacccttcaggtgactctggttcctcaccgatgctcagtgggcagcctatatacgacaaaccggcttccctgagcaaatctgctgattctgagttgctgcctccagcaccctgggacactgctgcaggaaaccttccaccaccgccttcgaagtttaatcagagacagcagttctttgaacaacaacatggttatcctggtggttcttctaactccagtaacggatcaggttcctcctatgatggcttggttggacaaactcaaaatctttcccttaactcaacgaccccaaccaaacaagaaaaaccagaagatgctctcttcaaaga

SEQ ID NO: 17761 - DNA, 254 bp, Gossypium hirsutum
  Clone ID: LIB3272-034-P1-K1-F6
caaaagcgtgtgatgcttcttgttaataataccacagatgaggaacttttgtgtcaggggttagcactaaatgacagcttgcaacgtgttctttgccggcatgatgacattctgaaaggaaatactggtcccactggagccatagcaaaaacttctggtgggccatttggtaaaattaaccattaaggttattagttcgaaaaataaattgcttaacttttttattaaatcttaaagggttatttttaaaggcc

SEQ ID NO: 17762 - DNA, 718 bp, Gossypium hirsutum
  Clone ID: GOSHI-09MAY01-C6107_1
gaggatgagattgagaagatggttaaagaagctgagttgcatgcgcagaaggaccaacaaaggaaaagtctgattgatgtaaaaaacaatgcagacaccactatttatagtgtagagaagagcttgaatgagtatagggagaagattcctagtgaaattgcaaaagaaatcgagggtgctgttgcagatttgagaaaggcaacggaaggagaggatgttgacgagatcaaggccaagatagatgcagcgaataaagctgtctcaaagattggggagcacatgtctggtggttctggtggtgcccaaggaggttcttctggaggtgctcaaggtggtgaccaggcccaagaagccgaatacgaggaggtgaaaaagtgagtgatgaggcactaattctgttcacagcttgtatttttttttcaagtggaaaaaaaggccactggagagatgatcgttttgtttgatgatgatgcatagggtgtttactgttttgcagttttatatctaaatgaagaaggttgaatgtaaaataatagcctgttaggaattggagtccacagacctttcaacatgagataaatttttccttgaagaaatggagaaataaggagattcctttattagtagaaattttggctggatggtatataaaaacgtgatgctgtcaatgctttatgtgattaatggttctgcctgcgctggtatatcagcgtttctt

SEQ ID NO: 17763 - DNA, 613 bp, Gossypium hirsutum
  Clone ID: GOSHI-09MAY01-C6127_1
gtgaaactcaattggaactaaaaccttggattttgtgctgccgggaaaccaaagtttgaaagcggcaatggccaagacgccgatagggctagaaccagtggtgggatccctatcatcctctaagaagaaagaatacagagtcactaatcgactccaagagggcaaacgccccctgtacgccgtcgttttcaacttcatcgactctcgttacttcaacgtgtttgccactgtcggtggtaatcgggtgacggtataccaatgcctcgaaggaggtgttatagctgttttgcagtcttatgttgatgaagataaggatgagtctttctacactgtaagttgggcctgcaacattgatggtacaccatttgtggttgctggaggtattaatggcataatccgtgtaattgatgcgagcaatgagaaaatacacgagagttttgttggacatggtgactctataaacgaaatcaggactcagccactgaaaccatcacttatagtgtctgcaagcaaagatgaatcgggtagattgtggaatggtcatactggaatctgcattctgatatttgctggagccgggggaacccgcaatgaagttttgagtgtggatttg

SEQ ID NO: 17764 - DNA, 559 bp, Gossypium hirsutum
  Clone ID: LIB3585-047-Q6-K1-G2
ctttactttagctgtttgcacttctttccttaaggaaaaccttttttttttggggactaaatttcatgaatgagattaaccctttttgatattttgttgtttaggattaccagatgttctgttctttttttaagtctttccctttcagtattcatttttattttggattcttattttgattagaaaattttcaatctttaccagttttgtttgcttttctaccaccttgatccatccattgaagtgatgttagtgattgttaatttgcccttttgtttacaggtgacggtataccaatgcctcgaaggaggtgttatagctgttttgcagtcttatgttgatgaagataaggatgagtctttctacactgtaagttgggcctgcaacattgatggtacaccatttgtggttgctggaggtattaatggcataatccgtgtaattgatgcgagcaatgagaaaatacacaagagttttgttggacatggtgactctataaacgaaatcaggactcagccactgaaaccatcacttatagtgtctgcaagcaaaaatgaat

SEQ ID NO: 17765 - DNA, 557 bp, Gossypium hirsutum
  Clone ID: LIB3585-047-Q6-K1-D12
aaaatagtctcacggaagcagtgaaacaagtggatgtagttatttgttcaatcccatcaaaacaagctgttgatcaaaaactacttcttaaggttattaaagaatctgggtgtattaagaagttcattccttctgagttcggtgtagatcccaacaaaattcagttatataacttggctcatcgtttctatgctggaaaaactgagattagacgtcttatagaagctgaagacattccttatacttgcatttgctgcaacctattcatgggttatttacttccatcgttagctcaacctggtttaaaggctcccccgagggacaaggtcactattttcggagatggaaatgctaaagccgtctttgtgaaggatgttgacgttgctgcatgcaccatcaatgccatagatgatcctcgaacgcttaacaagacattgtatttgagaccccaagggaatgtatactccatcaatgagcttgtaacaatgtgggagaataaaattggtagggaactcgagaagattcatgttccggaagaggagcttcttctgaaaaat

SEQ ID NO: 17766 - DNA, 494 bp, Gossypium hirsutum
  Clone ID: LIB3585-047-Q6-K1-E4
gacccacccgtccggtcaaatttcccgagcgacaactctcaccacctctctagattcttttcataaacactccttatcgagagcttgctgacctatcagccttatctttcccactcaccatcaaggccctgtaaaaacaatcttgcctaacttgttgtttatgttcttaaatcaaatcattattatttaactctcatcattgtttctattcttaaaacacttaaattatacatcttatataagctgaatacattccttatacttccatttgctgcaacctattcatgggttatttactttcatcgttagctcaacctgatttaaaggctcccccgagggacaaggtcactattttcagaaatggaaatgctaataccgtcttttgtaatgatgttgacgttactgcatgcaccatcaatgccatatatgatcctctaacgcttaacaatacattgtatttgaaaccccaagggaatgtatactccatcaattaa

SEQ ID NO: 17767 - DNA, 691 bp, Gossypium hirsutum
  Clone ID: GOSHI-09MAY01-C6047_1
ggggttctaaagcagctgaattcgtggcaggcaatttagataaggtcgcaatggcggaggtatcgaaaagatgtggagatgcaattgaagaagccattaaagaggcatacttaaccacggacatggattttctcaaggaagatgtgggtggtggtacctgttgtgttactgcaatgattcacgaaggtgatcttgttgtatcaaatcccggtgattgccgtgctgttttgagccgaaacggtgtcgcagaggccttgacttctgatcaccaggtttcgaggcaagatgagagagctagaattgaagctttgggtggttatgttgatttttgccatggtgtttggagaattcaaggttcccttgctgtttctagagcaatcggaaataaacatcttaaacaatgggtaattgcagaaccggagacgaaatcgttaaagattcggccggagtgtgagtttttgatcctggcctcaggtggtctttggaacaaggttactaatcaagaggctgtcgatttagttcggcctttctgcgtagatattgataagcctgagccgttttctgcttgcaaaaaacttgctgagctatcgtcatggagaggctcatttggtgacatcagtgtgatgataattcaactagaacgctgttgagcttgaagatcgcttcggccaccagacttgcaaaaattgct

SEQ ID NO: 17768 - DNA, 729 bp, Gossypium hirsutum
  Clone ID: GOSHI-09MAY01-C6077_1
ggagttttgtataataataatgggggattcaactgggcataaacaaaacacttggagttcacattggcggctgtttctgaactgtcttcctcttcatcggtttcttcttcttcaacaccggtgattgctcgattcagtgctgatgatggagttgccgcgcttcggtttcatcaaggttcggaatttattgacgggttcaatgtcgatcttggaacctctcagctcttcaagttgggacctcttcaatcactttgtgtctcagagagtgctgataccaataaagagaaatcatattctcggggagtctccatccggtttagaaatgaggaggagagcagggacttccattctgcattcgaacaatggcagatggaaagcaaaggaacacatttgcctaatggagacatttctgtttctaagagcaagttcgataataaaattgagccatcttctgctaaaatgtacttccattattatggacaattgctacatcaacagaatatgttacaagattatgtgagaacaggaacctattatgctgctgtaattgagaaccgagtggattttacaggttgtgtggtggttgatgttggtgcaggcagtggtattttgtcattatttgctgctcaggctggtgcaaagcatgtttatgctgttgaagcttctgaaatggcagattatgctcgtaaacttatcactgggaacccgacattaggtcaacgaattact

SEQ ID NO: 17769 - DNA, 559 bp, Gossypium hirsutum
  Clone ID: uC-gsflmaxxa028c03b1
gtagttcactttggcggcagtttctcagttgtcttcttcttcgctttcttcgtcttcgtcttcttcttcttcggtgattgctcgtttcagcgctgattctggagttgcagagctgcggtttcaccgagattcggaatttattgatggcttcaatgtcgatattggaacctcgcagctcttcaagctgggaccggttcaatcgctttgtgtttcagagagttctggtgccagtaaagagaaatcatattcacgggcagtgaccatccagtttagaaacgaggatgaaagcagggacttccattccgcatttgagcaatggcagaaggatgttattcaagcaggaattcatttaccaaatggggccattgctgcttctaagagcaagtttgattataaaattgagccatcttctgctaaaatgtatttccactattatggacaattgctacatcagcaaaatatgttacaggattatgtgagaacaggaacctattatgctgctgttatcgagaaccgtgttgatttacaggtcgtgtggtggttgattgttgaactggaa

SEQ ID NO: 17770 - DNA, 678 bp, Gossypium hirsutum
  Clone ID: GOSHI-09MAY01-C6017_1
gaatagggtgtgtcgggaaagcaacgatgtgcggtcaccatatccaatagcaacttcgggcatgatccatgcccaaatgtattaaaacgtctatcggttgaagctgtttgtgctcccatgacttcaacaacagcacaaccgggtggtaattaaatcgaaagggtccaaaatgattccgtaacttgtgcatcaagtaactataagcaagagaaagaaaagaaaataaagagagtgcaaagaataggcatttagttaggttaggttagtgccacagcttctcaaatggagggctttggctaaagctgttgtccattgttgtagttgtttaagtggggttattgacccctgtaaattagtgacactataagatggttaaaggtttcgaaattcttggggtcgggttcggatcggtagggtgaaatttctagcctgtgccgccgggcttttaaccggatatgggcaccgaagaaaatgatctttgttggtgtgattgattgattgatttctgtttgaatgagtgggggaaagttgaacttcctatacaaggttcaagtatggccattgttttatgtgtagttactaactaaaagtgccttgaggttcaagtttccaaagccattttgattgcattgtgtactagttttaaaatatgggtcaagcttgggttttaactttcgc

SEQ ID NO: 17771 - DNA, 591 bp, Gossypium hirsutum
  Clone ID: GOSHI-09MAY01-C6037_1
cccacgcgtccgcccacgcgtccggttttaaaaaaaaaaaaaaaaaacctgagcagccttttttgtttctctcagcctccccacctccggcctgggcactggcgagcctccgctgcgatgagcacgtatatgagtcgcttggttccaaaatctaatttcagcatgttgttatgtagtggacaagccattaaagctgaagttttacgcttaagagaacaaacgttgttggttgatgcagggattgggagccctaggatttgtacccaagacgagaccacattaaccagatcggaaatcaatcgatttgaggataaggtgggattcttcgataaaggagtgggcggcggtgaatcactggtgagaaagcggtttttggagagattcttcgtcgatttagtgagcggtgaatcgatcgccaaagagcgagctgccgttaggtttaacgatttgttgggatcgagatcactggacgtggtcgccggcgagccgactcttcttaatccacggaggttcaggcaaaccctagtttggcaagaattgaataagcattggcgaaacaattcgaaggtcaagggcttttttattgataaa

SEQ ID NO: 17772 - DNA, 601 bp, Gossypium hirsutum
  Clone ID: GOSHI-09MAY01-C6397_1
cccacgcgtccgaagcggtagaccaggtccagcgtatgccagaagtacctttggggattcggcgttgcccggctaactgctaaccgagagacactgctcatcagctccatgagtcattgctgttcactactctctcgtcgttctctcacgtcaatgctccccccctccccctgaccttgcttccttcatctctgcttccttcaatcaccttaatggatcctaatctttcaaagttccccattttgtcctacatcttctcccaacaagatccttacaattacccatcactccctccccaaatccgccaggatttactcacccgtttcccccatttacccgatccatcaatccttgcttcactttcccgatccatccccacctccgtcacccaaacccattccctcctacgctccctaggacctcggcccgatccatcagctgtctccgccgctcgttccaagattacccacattcaagaaacccaatcttccttacaggaggccgacatatataagaccgtgcttagattggaaggcttgcacgaggattatgagagacagttgactgaggtggaggagaatctgggtcgtctgtattgctc

SEQ ID NO: 17773 - DNA, 1049 bp, Gossypium hirsutum
  Clone ID: GOSHI-09MAY01-C6387_2
tttgctttaattagcccccccgtccgctcatgtgaaatcctctctcaattcttcttcttcttcttctcctgcgctgctaaatcatagtcattatccgcatattatgttagcccttcaaagctccgtcaacaatggcgaaaacgacccaaaccacgaccaacatcacgatcacgacgatcaagacggtgaacgtatcagagacatccatgctttaaccccaccacaccctcccgccgtcaacgcccgtcgtcgttgggaaaccggaagcagccgtgcatcgtcatcgagcgaagtagctccgagtgaaaacttcaccaccatgagccgagaattcaatgctctggtcctcgccggatcttctatagaaaacaacgattccgattccgtacatactttgaataacaatcagttgactaggatcggtgaagatcatgaactgcaagaggaaactaaccctttagctatagtacccgataatggtccgtacgatcgagaatcagatcagccaagaagggtagagtcgggtgggttagaaacggcggcgactgcggcggtggggagtggtggtagtagcggcggacatggggaagtcacggtgctgagagtgaagaaagaggaggtggaatcgaaaatatgtgcttggcaaaacgcgaagattgcaaagattaataataggttcaagtgagaagatgctataattaatgggtgggaaggtgagcaagtacaaaaggctagttcttggatgaagaaagttgagaggaagctagaggagaaaagagcaaaagccctagaaaagatgcaaaacgacgtcgcaaaagcacacagaaaagcagaagaaagaagggcatcagctgagtccaagagagggaccaaagttgcaaaaatccttgaaattgccaatttaatgagagctgttgggagaccacctgctaaacggtccttcttttaaaaaaaaaaaaacaaccctttaatcttcccttcatataattcccatatatatgcatacatatatacacatacacatacatatatatatgaatgcatgtgag

SEQ ID NO: 17774 - DNA, 576 bp, Gossypium hirsutum
  Clone ID: GOSHI-09MAY01-C6387_1
gagagaccaaagttgcaaaaatccttgctctcgcctccgtcctcgcggccggtggggggccacctgctagacggtccttcttttaaaaaaaaaaaaaaccaaccctttaatcttcccttcatataattcccattatatatgcatacatatttacacatacacatacatatatatgtgaatgcatgtgagtaccttcatcttttcaattgtagggtaccccttttacgtaagagggcatgcaagcaagagttgcaccaaatcaaaactattttatgtgtgcatgcatgtatgtatgtgtgggttcatgttggagtgtttggaagtgtgatgggattgtttgtgaggtttgtgttgggggggggatttttttaaggtctacagttggaaatatattaattattaaccttttatttgggttgggtgcttaaattgtggcaatattgtagtttttttaaagctaattatgaaaaataaatattaatacttttgggcttcaaaaaaaaaaaaaaataaaaaactcaagggggccccggacccaattgcctatatgagtcgattacaataactgccgcggtt

SEQ ID NO: 17775 - DNA, 398 bp, Gossypium hirsutum
  Clone ID: uC-gsronu33B139b05b1
tttacgcttgggtttcgctcgtgcatttaacaggattatacatatattatattaacattgtatatacatgcattcattcatagtagttttacatcattattttgtaatgggattttgagtaacagtcccaatatgcatatgtgtgtgtatatatatatatacacaaatgtgaatcggatttattttctctatatatttgcataagtagaggaagctagaggagaaaagagcaaaagccctagaaaagatgcataacgacgtcgcaaaagcacacagaaaagcagaagaaagaagggcatcagctgagtccaagagagggaccaaagttgcaaaaatccttgaaattgccaatttaatgagagctgttgggagaccacctgcttaaccggtcttttttt

SEQ ID NO: 17776 - DNA, 1072 bp, Gossypium hirsutum
  Clone ID: GOSHI-09MAY01-C6377_1
aacagaacttacccacacccaatgccacaaacaagctttgcttatatgaatcacctccacttcaaccgccccccccctccgcccgcccaaaataagaagaaaaacaaaaatggccatggcaatggcgcttcgacgactctcctcttccattgacaagcctctccgtcctttcttcaatgccccttccctctattacatgtcgtctttgccaaatgaagctgtgtacgagaaggagaaacctggcgtcacttggccaaagcaactgaatgctccacttgaaaccgttgatcctgaaattgctgacatcatcgagcttgaaaaagcgcgccaatggaagggacttgaactcattccatcggagaacttcacttcggtgtcagtgatgcaagcagttgggtctatcatgaccaacaagtacagtgaagggtatcccggtgctagatactatggagggaatgagtacatcgacatggcagagacattgtgtcagaagcgtgctttggaagcattcaggttagatcctgaaaaatggggagtaaatgtgcagcccctttctggttctccttccaattttcaagtttacactgcactcttaaagcctcatgacagaattatggcacttgatcttccccatggtggccatctctctcatggttatcagacggacaccaaaaagatatctgctgtgtccatattttttgagacaatgccatatcggttgaatgaaaacactggctatatcgactatgatcagttggagaagagtgcaactcttttcaggccaaaattaatagttgctggtgccagtgcttatgcacgtctgtatgattatgcacgcattcgaaaggtttgtgacaagcagaaagcaataatgttggcagacatggcacacatcagtggtttggttgcagccggtgttatcccttcacctttcgagtatgccgatgttgttaccaccacaactcacaaatcacttcgtgggcctcgtggagccatgattttcttcagaaagggagtgaaagggattaacaaacaagggaaagaggttctgtatgattatgaagacaaaatc

SEQ ID NO: 17777 - DNA, 419 bp, Gossypium hirsutum
  Clone ID: LIB3165-016-P1-K1-C7
cccacgcgtccgcccacgcgtccgcccattttttcggccaatggaagggacttgaactcggtccatcggagaacttcacgtcggtgtcagtgatgcaagcagttgggtctatcatgaccaacaagtacagtgaagggtatcccggtgctagatactatggagggaatgagtacatcgacatggcagagatattgtgtcagaagcgtgctctggaagcattcaggttagatcctgaaaaatggggagtgaatgtgcagcccctttctggttctccttccaattttcaagtttacctgcactcttaaagcctcatgacagaattatggcacttgatcttccccatggtggtcatctctctcatggttatcagacggacaccaaaaagatatctgctgtgtccatattttttgagacaatgc

SEQ ID NO: 17778 - DNA, 1412 bp, Gossypium hirsutum
  Clone ID: GOSHI-09MAY01-C6307_1
ccgggacatcggacgggcccgaccacgcgtccgcccacggagataagagaaagcactgaaaaagcaaaaccatggcctctgcttctctcctcaagacttcaccagttttagacaagtctgagtgggttaagggtcacacccttcgccaaccttccacttctgtggtgaggtgccaccctgttgcaccctccggactaactgtgcgtgcaagctcatatgccgatgagcttgtcaagactgctaaagctattgcttctcctggccgtggaattttggccatggatgagtccaacgctacctgtgggaaacgtttggcctcaatcgggctagaaaacacggaggctaaccgccaagcctacaggacgttgcttgtttcagctcctggccttggtcagtacatctcaggtgccatcctctttgaggaaaccctctatcaaaccacaattgatggcaagaagatggttgatgttcttgttgagcagaacatagtccctggtatcaaggttgacaagggtcttgttccactggctggttcaaacaacgagtcatggtgccaaggtcttgatggcctcgctccacgttcagctgcatactaccaacaaggagctcgttttgcaaaatggcgtactgtggtaagcattcccaatggaccaaccgaacttgctgtgaaggaagcagcctggggacttgctcgctatgccgccatctctcaggacaatggattggttccaattgttgagccagagatcttgcttgatggtgatcacggaattgacaggactttcgaagtagccaaaaaggtatgggctgaggttttcttctatcttgcccagaacaatgtgatgtttgaaggtatcctcctcaagccaagtatggtcactcccggtgcggagtgcaaggacagggctactcctcaacaagttgctgattacaccctcagcctcctccgccaaagaatccctccagctgtccctggaatcatgtttttgtctggtgggcagtctgaagttgaggctaccttgaacttgaatgcaatgaaccaagctccaaacccatggtatgtgtcattctcatatgcaagagcccttcaaaacacttgcctgaagaagtggggaggcaggcctgagaatgtgaaggatgctcaggaagcgctgctcatccgagcaaaggccaactctcttgctcaactcggaaagtacactggcgaaggagagtcagaggaggccaagcaaggaatgtttgtcaagggttatgtctattagcatgtttgtatcttcaacaggtcaatgaatttcctgcactgaaaatttaattgaaagagcagaacactgatctttcattataaaatattaggattcccccttttttcccctcttaataattatgttaaagcataagaattagaccaatcc

SEQ ID NO: 17779 - DNA, 405 bp, Gossypium hirsutum
  Clone ID: LIB3165-046-Q1-K1-C5
atccctccagctgtacctggaatcatgtttttgtctggtgggcagtctgaagctgaggctacctgtgaacttgaatgcaatgacaccaagctccaaacccatggcatgtgtcattctcatatgcaagagcccttcaaaacacttgcctgaataagtggggaggcaggcctgataatgtgaaggatgctcaggaagcgctgttcatcctagcaaaggccaactctctagctcaactctgaaagtacactggcaaatgagagtcagaggaggccaagcaaggaaggtttgtcaagggatatgtctattagcatgtttttgtctggtgggcagcctgaacatgaagctaccttgaacttgaatgcaatgaaccaagctccaaacccatggcatgggtcattctcatat

SEQ ID NO: 17780 - DNA, 387 bp, Gossypium hirsutum
  Clone ID: LIB3165-042-Q1-K1-B8
gagataagagaaagcactgaaaaagcaaaaccatggcctctgcttctctcctcaagacttcaccagttttagacaagtctgagtgggttaagggtcacacccttcgccaaccttccacttctgtggtgaggtgccaccctgttgcaccctccggactaactgtgcgtgcaagctcatatgccgatgagcttgtcaagactgctaaagctattgcttctcctggccgtggaattttggccatggatgaatccaacgctacctgtgggaaaacacggaggctaaccgccaagcctacaagacgttgcttgtttcagctcctggccttggtcagtacatctcaggtgccattctttttgaagaaaccctctatcaaaccacaattgatgg

SEQ ID NO: 17781 - DNA, 356 bp, Gossypium hirsutum
  Clone ID: LIB3165-033-P1-K1-B2
acacagcaaacccacggcgtttcttttttttttcccctccctccccatacacacaaatattaatggcttaaagttcacaccctttattacctccttccactttttgcaatcacttcgtcacatttttgcacccttctaaactaactgtgcgtgcaagctcattattatatcttttatttaaacttgcttaaactatttctattcctgaacctataattaatagctcatgcataatttacaaccttacctgtgggaaacgtttggcctcaatccggctagaaaacacagaggctaacctccaagcctacaagacgttgcttgtttcagctcctggccttggtcagtacatctctggt

SEQ ID NO: 17782 - DNA, 325 bp, Gossypium hirsutum
  Clone ID: LIB3165-041-Q1-K1-G1
gaaagcactgaaaacgcaaaaccatggcctctgcttctctcctcaagacttcaccagttttaaacaatctgatgggtaaaggtacaccttcgcaccttcaatctgcgggagggcacctgtgcaccttgactactggctcagctaatccatgagctgcagatgtagctatgtttctgccgggaattgcctgatgatcaacctccgggaacttgcctaacgctaaaacaaagctaccgcagctcagagtgctgttactctgcctggcagacatttgtgccatctcttgagaaccttataacacatgatgcagagatgtgatgtctgt

SEQ ID NO: 17783 - DNA, 407 bp, Gossypium hirsutum
  Clone ID: GOSHI-09MAY01-C6337_1
cccacgcgtccgcccacgcgtccgcccacgcgtccgcaaaattggaggtatggggcaaatgaagaagtttgggtttgtgttgttggtgttaagtgcgtcagtagtagagcaaatagaggggaaagggtatgagaagccgctcaactgtggccaccttgaatgtgctccatacacacttattcatagccagcctgaattcgagattagaagttattcaaaggctacgtgggtggctactacccccatctcctctccctcctacacatttgctgtttcaattggcttcaaaattctctttgcttacatccggggcaacaatgatgcagcagtgaaaatgaatatgacagcaccagttttggttaatatacatccaaggacaggacatctccagaattcaacctatgtag

SEQ ID NO: 17784 - DNA, 585 bp, Gossypium hirsutum
  Clone ID: GOSHI-09MAY01-C6327_1
agccttccgcggccccttggccggccccgtgggttctggaccaacggtattaatcattgtaaattctgggtttcaaagtatatgaaataaacaaactggtaaccctttggatccaactcggctttgttgcaaaaaatcaatctgtcatggcaaccatctcggctaccaccacccctgcagctcttgttcacaagacattgcccaggattgcatccccagtccccattgggtcgccaacaatgggaaagagggggaaggtgatgatgatgtgtagcatggagaagaagagtgagaatgggtcaaacatggggatgagtgcatcattgctggcagcagcctgtgcagcaaccatgtcaagcccagccattgctctggtggacgagagaatgtccactgaaggaacaggacttccctttggtttgagcaacaacctcctcgggtggatcctgtttggtgtgttcggcctgatctgggctctttacttcatctatactgcctccctggaagaggatgaggagtctgggttgtccctctaaaacccaaaccttatttccttcctttgttcttcattgcaaatatcatgta

SEQ ID NO: 17785 - DNA, 570 bp, Gossypium hirsutum
  Clone ID: GOSHI-09MAY01-C6287_2
cccacgcgtccgcccacgcgtccgcccaaaagaaatctccaacccaaacccttcctccgccggcatttgtttgcaaaaaaaaaaaaaaaagaagttcaaattgaagaatgcctgtattttcttcaagagctatgttcaggaactacgacaagcatagaaagcaaaaaagtgaccctaaaggcaaattgtccgacgtgttcaggagctatgctgattctaatggggagctaaacaaggaaaagctgaaagacgcttttctacatctggatgctgccatgccgtaccggcaagccgaagaagccctccgtgtcgtcggcaaaagctattacattaacatcaaggatgaaaccgaccttaacacccttgtcgactatgcttacaataagggttacgggtattcaatttgattagctaatttataagcttattttctttttctttttcacttttaatcatctaatatgttttttttaaatatatgtaagtttcgtcccaaaagacattattatagaataaaggttttggggctcatgaatgtgatgtagtttttgcatgtactttgcaaagact

SEQ ID NO: 17786 - DNA, 655 bp, Gossypium hirsutum
  Clone ID: GOSHI-09MAY01-C6287_1
cgacccacgcgttcgtccacgcgtccggttaaaaaaaaaaatctccaagccaaaccatttctccgctggcatttgcttacaacaaaaaaaattcaaattgaagaatgcctgtatttgcttcaagagttgggttcaggagacacgactacaagaatagatcaaaggaacgaaacgatgaccgtaaagacaaattgtccgaagtgttcaagagctatgctgctaatgggctgctagacaaggaagggctgaaagacgcttttctacatctagatgctgccatgccgtaccggcaagccgaagacgccctccgtgtcgtcggcaaaacctataacattaacgtcgaggaggaaaccgagcttaacgcccttatcgactatgcttacaataagggttacgggtcttcaatttgattagctaatttataagctaaatttctttttctttttcacttttaatcatctaatatgtttttttatatatatttaagtttcgtcccaaaagacgttattatagaataaaggtttcgtggcttatgatggtgatgtagtttttgcatgtactttgcaaagactacaatatatatatgtttgtgtagcaatgaacatgatgatgttctttatcaattataatgatctgtgtcgattgttattattat

SEQ ID NO: 17787 - DNA, 520 bp, Gossypium hirsutum
  Clone ID: GOSHI-09MAY01-C6277_2
gatctccaacgttgaaaccttatctacaaagtgtagaagctctcattcactaagcttgggctttcgctttcaatattatatcctataaggaattgtttgataatagttgtatcctcttctacctagtgttttctatatatgaatgtgatcccttggcggcaataatgtccacggcttcggtctccggcttctgcctctcttccaataccacctctccttctaactcactccggcaacccacattgcggcggccctctatcatcgccaacctcaactcttccacttctcctcctacactcatccgaaatcaaccagttttcgcagcacctactcctttgctcactccttccaattggaaagaaaccatgggagacgagtcatacgaggaaagccattgaagctctcaagaaactgctcaatgagaaaggagaattgaagagtgcagcgacggcaaaggtagagcaagtgacagctgagttgaagactgctgcttcctccgatgagtctgttgaccgcttga

SEQ ID NO: 17788 - DNA, 525 bp, Gossypium hirsutum
  Clone ID: GOSHI-09MAY01-C6277_1
attggagggccgggcccggcccacgcgtccgcccacgcgtccgcccacgcgttccacggctttggtctccggcttctgcctcacttccaactccacctctccttctaactcactccggcaacccacattgcggcggccgtctatcgtcgccaacctcaactcttccacttctcctcctactctcattcgaaatcaacccgttttcgcagcacctactcctttgctcactccttccaattggaaagaaaacatgggagaccagtcatacgaggaagccattgaagctctcaagaaactgctcaatgagaaaggagaattgaagagtgcagcgacggcaaaggtagagcaagtgacagctgagttgaagactgctgcttcttccgatgagtctgttgaccgcttgaaacaaggcttcatttacttcaagactgaaaaatacgaaaagaatcctgctctgtatggtgagcttgccaagggtcaaagcccaacgtatatgatagtggcatgctcggactcaagggtgtg

SEQ ID NO: 17789 - DNA, 853 bp, Gossypium hirsutum
  Clone ID: GOSHI-09MAY01-C7967_1
taaaaatgatgacccttttaactccactctcccataactctttatcctctccacaattatcaacgaaacgccatggttgtcctcttcatcaaccccatgtacctctcagaatcacctgttcttcttctgctagcaaacgtgttcccaaatccgaggaatctccctttaaggaactgaggactgtagcttgtggccttcttgctgtatgtaccgttgccactgcctcgcctgtaattgctgccaatcagaggcttcctccgttgtcaacggagccgaaccgatgcgagcgtgcattcgttggtaacaccataggtcaggcaaaatggtgtgtacgataagccgctcgatctacgcttctgcgattacactaacgagaaatcgaacctgaaggggaaatctcttgcggctgcacttatgtcggatgctaagtttgatggtgcagacatgtctgaagctgtgatgtcaaaggcttatgctgttggagctagcttcaaaggtacagacttctcgaatgcggttttggattgagttaatttcggaaaagcgaatctgcaaggagctatattcaagaacacagtgttatctggttcaacattcgacaatgcgccgcttgaagatgcagttttcgaagataccatcatcggttacattgatcttcagaagctttttaccaacacaagcatccgtgctgaaggaagagttgagttgggttgccgatgactgatttatatacccatatatattccatgttcttactttctttttcttttctaattttcatgttgagattaaaaatggtactggaaaacagttatttctggtttcgctgcgtcttttatctgctttgggctgc

SEQ ID NO: 17790 - DNA, 934 bp, Gossypium hirsutum
  Clone ID: GOSHI-09MAY01-C7917_1
gactggtaataaaagactccacgctgacgctccctcccttcctttcctctatctatcgggtggcttctcttagctgcctttcgattcttggattgagttgttaaggcactagaaatcatcgtttctgaatctaattcaaacccatatttgttgaggattcgatcgttctaagtttgggatttttcccaggtaaaggaaacaatttgtggttcgaaaagccagaatagaatatgagtacaagtacggccacgtccggtacatgtttgatcatatgctccaatggaaaatcatctctcgaaaccaaaacctccacgatgattacgttgaaatcgtcgtcgtttccttcccgtttaaccgccgtttctataaaggtgaggacgagagttgtttcctgccaagctgtctccaccgcttccgtcgacaaggacgagaaagacgcgtcgatttcgggatcggaggaagacccagaggcggctaaagttggggcaaaggttagggtaaaagtgcctctcaaagtttaccacgtgcctcgcgtccctgaggtggatctgaacggcatggaaggagtgattaaacaattcgtgggggtgtggaaagggaaaaggatttcagctaatctacctttcaaggtggagttcgtcactgagattgaagagcgaggacctgtcaagttcttagcccatcttaaaggggatgaattggaattccttgattaaaaccctgattcttatctgtatgcccggcaaaaaccttcttttcttataactaaaaaaacccccataaaggccccctgttgtatgtaatttttccccccttttaaagcccgctgccaagttaactgcttatttggggaaatgctttggccttgttttccccccttccctagggttgggggatactaatatttccaatcccccccggaatttgttttttt

SEQ ID NO: 17791 - DNA, 453 bp, Gossypium hirsutum
  unsure (1)..(453): unsure at all n locations
  Clone ID: LIB3135-002-Q1-K1-G11
atcgctagaaacatgtgaagtgtatggctaacccaataacgaaagtttcgtaaggggactggagcaggctaccatgagacaaaagatcttctttctaaagagattcgattcggaactattatatgtccaaggtccaatattgaaataatttcagaggttttccctgactttgtccgtgtcaacaaacaattcgaaatgcctcgactcttttagaacaggtccgggtcaaatagcaatgattcgaagcacttctttttacactatttcggaaacctaaggactcaatcgtatggatatgtaaaatacaggatttcctctatctaacggttagcttctcttagctgcctttcgattcttggattgagttgttaaagcactagaaaccatcgtttctgaatctaattcaaacccatatttgnagaagattcgatcgttcttagtttgggatttttc

SEQ ID NO: 17792 - DNA, 786 bp, Gossypium hirsutum
  Clone ID: GOSHI-09MAY01-C7857_1
aaataatgtgacaaaggaataaagacagagaacgattgagaaggggagttcaaatcaaatctcttattctttaaaatttctgggaggaattgtatctctctctctctctctctcctctcagctggacgagaaagaggaaatttcggttggtataaaaatgcaggtgtttgatagaatgactattccaattcgcagagtttggaccggtgtcgccacccgcttcggcgttcgtaaaagtgctcatatgaagcttcgaaaagatataagcacttgcgaatacgaggatgtgcgagtgatgtgggaaatgctgagcagaaacgaagcagaaaccattcgatccccaacaacaagtaaaggaagatgcagaaagagaccaatgtggaattgctttgaatgggcaaagcgagctccttttctttgtcgaagcttctgaataactgtcagagagtgtgtcttgttgccactcagggttttcagtttatcatcctatcttagacctttgtttggatatcatcgatccagtgataataaaagaaaaaaaaataaaagggagagaatggagggatttgtttgtgagattgcccctcttcttccctttggtgtttttttttctgttatgtatgtctcagttatctgtagatatcaaccgtctgtcatgtccatgcttttatctctggttctatgtaataagctgctatatatatgtccatgttctcctccaggctctttaatcttgagggtggtacattgatgaagtttgtaaaaagatgggtctctttcattttc

SEQ ID NO: 17793 - DNA, 323 bp, Gossypium hirsutum
  unsure (1)..(323): unsure at all n locations
  Clone ID: LIB3083-102-Q1-L1-C2
ctctctctctctctctcctctctnccccccctttttntnnttttnnnncttggtataacaaatgcaggtgtttgatagaatgactattccaattcgcagagtttggagcggtgtcgccacccgcttcggcgttcgtaaaagtgctcatatgaagcttcgaaaagatataagctcttgcgaatacgaggatgtgcgagtgatgtgggaaatgctgagcagaaacgaagcagaaaccattcgatccccaacaacaagtaaaagaagatgcagaaagagaccattgtggaattgctttgaataggcaaagcgagctcctttttttt

SEQ ID NO: 17794 - DNA, 450 bp, Gossypium hirsutum
  Clone ID: GOSHI-09MAY01-C7847_1
cttttatctcttccttccctcccctactatccatctttagacgttatggttcccatcgtgttgacccagatggctaccggtttgggtgtattggccggggccgtttttgtcaaatcggtcatggaccagaaacccatggccggaccgttccagagatgccccacttgcaacggcacagggcgtgtctcgtgtatttgttcccgctggtcggatggcgatgtcggttgtcggacttgctcggggtcgggtcgcagggcttgtagcagttgcggcggatcaggtacgggccgccccattccggtccaactcattgtgcgtcaaccaaccaatcgaagcttctaattatcgagattttgctgtccttgaatcacgacagtcgtaagaactcttagcttactataaattgatctatatatatatatttttaggaattttattgtgaaatatata

SEQ ID NO: 17795 - DNA, 607 bp, Gossypium hirsutum
  Clone ID: GOSHI-09MAY01-C7817_1
aaaccggggcggccccacgcgtccgaggctctttaatttacacccaaaaaatatattatttttcattttttttaaaaaacccgggggggctttaccaatcacaggtcataaccaacgaaaggaaacccccattctcccattatctgtaagagaagagaagctttggaataggtcttcaatggctgcttctacttcggtttcagtagctgggtttaagggaagtttagggaagagttccttcaatggaggtgaagattatgccatgttggcggctaaatcgactcccaacgtcgttcgaatcggaaagccagttcgagctcagccgatgatgaagaacgttaatgaagggaaaggggtgtttgcgccgcttgtggtggttactcgccaaatcgtcggcaaaaagaggttcaatcagcttagaggaaaagctattgccttacattctcaggtaattaacgaattttgcaaagcacttggggcagatggtaaacaaaggcaaggattgattcgtttggcaaagaagaatggtgagaagcttggattccttgcctgatttatggccttacacgtggactttcgttttgtctttatttacaaaatgtttcat

SEQ ID NO: 17796 - DNA, 715 bp, Gossypium hirsutum
  Clone ID: GOSHI-09MAY01-C7837_1
catgtttctgttgtagagttcatttttaacgtagaattgtttttgcaggagatattagatagttttgttgatacagagttctggtatgttgaccatgggattctagctcaggaggctgctggatcaaccccatttcggaaagcccttcagcgtcaagaggaaaaatggtggcttccagtgcctcgagtgcccacaggaggccttgatgaaaattcaaggaagcaattgcggcatagacgtgactgtgcgaaccagatcctaaaagctgccatggctatcaacaacattactcttgctgatatggaagtccctgaatcatattttgagtctcttccaaaggtaaaagaaagtggatggtaattagatgtactgtgtacgtgttctaggaagtgctggttgttaacttctgctagaatttgtttcagaatggccgagcaagcttaggagatctcatttatcgctatgtttcatctgatctgtttactcccgaatgtcttcttgattgccttgatttgtcctccgagcatcaagccggacgcgtcgccaaccgagtggaggcctcaatatatctgtggcgcagaaagaccaataccaaacctgtcaacaacacattccgctctagttcaaagtcgtcatgggacatggttaaggatctaatggttgatgctgaaaagagagaaatacttgcaaatagagctgaaagcctctgctttgc

SEQ ID NO: 17797 - DNA, 432 bp, Gossypium hirsutum
  Clone ID: GOSHI-09MAY01-C7537_1
agaatcctgaagtgaaacgaaccattttcatttatttcacttgtctcgctgtaccaaaaagagcaaatcaaaagaatcagcaatggcttcaatcccgtgtacttttcaaataccctttacttcaaaacccgtgaattctcttccatctctgccaaaactcagctccaagtttctgggctctcaaaaaactctatcttggtcaaggccctcacgaattggaccctctaatggttcaagaactcaatgctggttcaagtttggtaagaacggcgttgatgctgaacgtgctggcatttatggcagccagggcagggatgattttgacagggatgatgttgagcagtacttcaactacatggggatgcttgccgtcgaaggttcctacgataagatggaagctcttttgaaccacaacatacacccagtagacat

SEQ ID NO: 17798 - DNA, 544 bp, Gossypium hirsutum
  unsure (1)..(544): unsure at all n locations
  Clone ID: AI730776.1
aaagctgaagactgtaggnttctttcagctcacccaacacttgtgcaatagtgggtctccgtgaagcatctctttccacacaccgtacggtgactaaggctgtttttctcatgctttcaacatcgaaggttccctttaagttgtcatccactatctccaatgcacctgcctgcaagtacggctttgcccatagcactaaattgaaggaatctggagttccggaatgagtcagcggttctcttccgcatatgagctttaaaagaacaaccccaaaactatagacatcacttttctcagtcagttgttgggtggaataatactcaggatctagatagccagcagtgcccttgacaacagtggtcacatgagttgcatctgccagagttacttgcttagagaggccgaaatcgcagaccttcgcattcatctcacaatccaaaaggaggttactgcactcgacatcacggtgtatgattcttggatcgctcccattatgcaaatagtccagcccttttgcagcatcaacagctattttcagtctccg

SEQ ID NO: 17799 - DNA, 521 bp, Gossypium hirsutum
  Clone ID: LIB3829-007-Q6-N6-B6
aaataaataaatgtttatttattaaagtccatgtacaatagcctgtgggcccaaaaccaaatactatagcctaactgccctataccggttacaacccaatacctaattatactattaccctgtacccattacaccctacctagcccaggactaaagtggcccaactggcccaaactattacaccaaggtaggaaaccctagggtttctgccttctttctcctcaaaccgccgctaattctggaaggttcagggagcgtcgtccagctcccaaatcgaggccaccatcgatcatgtccaccatcaacgccgtgattccaggcctcagatcaggctgtagttgaagccaaattaacgcttgttctgtcgaaagagttcgaaaagtgatgtctatagttttggggttgttcttttagagctcatatgcggaagagaaccgctgactcattccggaactccagattccttcaatttagtgctatgggcaaagccgtacttgcaggcaggtgcattggagatagtg

SEQ ID NO: 17800 - DNA, 428 bp, Gossypium hirsutum
  Clone ID: LIB3165-016-P1-K1-G12
agagaaatctaaaattctctcagagctcttttctgtggccatcctggctcgtcccggggcaccaccgccttcggccacacgagcttcacgcgcctcacgcgccaccgtctgagccattgtgcccgacagctaatggctttcaaaaccctattctttttgcaacgaatcaaaaggtatcgaactctttcgacagaacaagcgttaatttggcttcaactacagcctgatctgaggcctggaatcacggcgttgatggtggacatgatcgatggtggcctcgatttgggagctggacgacgtccctgaaccttccagaattagcggcggtttgaggagaaagaaggcagaaaccctagggtttcctaccttggtgtaatagtttgggccagttgggccactttagtcctgggctaggtagggtgtaatgg

SEQ ID NO: 17801 - DNA, 466 bp, Gossypium hirsutum
  Clone ID: GOSHI-09MAY01-C7447_1
gttcacttctgcttctgcctgcctgcctgcctgcctgtaatggcttcctacaaactctgtgccctctttctgctcttcactcttcttttccactcaacattcaccactgcttgcaattcatgcaaacccaaacctccaccatgccctccacctttcttgccctaaggacacattgaagctcggtgtctgtgctgacgtgcttggacttgtcaacgtgattgttggaacccctccttccagcaaatgctgtgctttgcttcaaggattggctgatttggaagctgccctttgcctttgcactgccattaaagccaatgtacttggaatcaacctcaacatcccagtttctcttagtctaatccttagtgcatgtcagaaggaggttcctccaggcttcaaatgtgaataaaaaagatatattatcatgttgttggctaaagtttggtctaaagtactttcatttcta

SEQ ID NO: 17802 - DNA, 852 bp, Gossypium hirsutum
  Clone ID: GOSHI-09MAY01-C7417_1
cccacgcgtccgaaatcatccagactatcatgtgacagatcttatttgccttggatggtgttgattcaattggaattgtgcacagagatattaagccacaaaatattattttctctgaagggtctcgtacatttaaaatcattgatctaggagctgcagcagatttgagagtgggtatcaactacattccaaaggaatttcttttggatccaagatatgctgcaccagagcaatatatcatgagtacacaaactccttctgcaccttctgctccagtggcaactgctccgcccccgcgtccgggcagatgaatctgccggatcgatttgacatctacagtgctggtctcattttccttcaaatggcatttccatctttaaggacggacagcgcattgattcaattcaaccgtcagctaaagaggtgtgattacgacttggttgcatggaggaacaccgtcgagcctcgtgcaagccctgacctccgcaaggggtttgagctgctggattttgataatgggataggatgggaacttctgacatcaatggtccgctacaaagcaagacaaagaatcagtgccaaagcagcactggctcacccttactgtgacagggaagggctattagctttgtccttcgtacagaatctgaaggtgcaagtctttagggctacacagcaagattatggggaagctgccaagtggataataaattaatggcaaaatctggaacagagaaagagggtggtttcacagaagcacagcttcaggatctcagagatatagagcctaagaagaaggcgagtccacaaagaaatgctcttgcttcagctcttaaacttcaaaggaagatt

SEQ ID NO: 17803 - DNA, 481 bp, Gossypium hirsutum
  Clone ID: GOSHI-09MAY01-C7437_1
gtccgcccagacttcactcccctctcactgcaacactcatagcacactatccacacttgctttctttgctttgccttccagtacagccccattttaaagccttggaaagcagacagacagcattaaggaatctcgaatctcaactgggtatggcaattactgcaacggctatgactatgactgtcactacgggattacagtttgctggttctctcaatcataaacagacttcttttttaggagttcccttgaggctgtcaatgtcaaaccctcagccatctttaccctctgtcttcctcaatgttcaagccaaagctcgcacccgaacagaagatcgtgaggcccgccattctcgcattaggaagaagattgaagggacaccagatagaccaagactgtgtgtcttccgttccaacaagcatctctatgtccaggtcattgatgactcaaagatgcacacactagcttttgctttaacaat

SEQ ID NO: 17804 - DNA, 882 bp, Gossypium hirsutum
  Clone ID: GOSHI-09MAY01-C7427_3
attttcaaatacggtgtgttttgttcattagagggggggggacttattgggggggggggaaaaattagtcctttttttccggaggaaaaccttactccccgttgggctagggtcaagcttttaaggtggtcagcagtttgggatccctcatctttttgatcttcccattagaccaaccctttctgcttctggtgatagtggaacacctgaagtggtggctgatcctcaaggtgaagttgcccagacgtttcagaaccttggagtatgtgttgtgcaacagtgtgccaagattcgccagcaagtatcaacagcagttacatatgacaaatccatcaaggccataagagttaaggtaccggattcagaggaagaattccttctgcatcctgcaacagtaagacggaatgaccactctgcccaaagtgtggtaagtatgtttttcttactagttaatggattttatttaaatctttctagttgaagaaacgatagcctcagcaagtcctccacgtggtggaacttagctgtcgacagaagtttcaactttaactattgattcatcctttaatttatctgctcaatctttctttttcttgatttaaaacatgatgagtggaccggagagcataagctgcaatccggtgactttccagaagattttgaacctgaagaaattcgacctatgtgaaactatgctgtgtcatttaccttgtcagatagatttagccatgtgatacttaacttgctactgtcttaatttgatatggattgactatgattattttaacggttacataggtattatcttttataattaataaatatatatcctattggtattttatataatgtaagttctgtatatttaaatgatcaacgaag

SEQ ID NO: 17805 - DNA, 636 bp, Gossypium hirsutum
  Clone ID: GOSHI-09MAY01-C7427_2
attttcaaatacgtcttgctgggtaaaacatataggtaccatgtgttgctgtggttgaaaatatgagtcactttgatgcggatggcaaacgctactacccgtttggtcgaggttcaggctctcaggttgtccagcagtttgggatccctcatctttttgatcttcccattagaccaaccctttctgcttctggtgatagtggaaccccacgcgtccggtggctgatcctcaaggtgatgttgcccagacttttcagaaccttggagtatgtgttgtgcaacagtgtgccaagattcgccagcaagtatcaacagcagttacatatgacaaatccatcaaggccataagagttaaggtaccggattcagaggaagaattccttctgcatcctgcaacagtaagacggaatgaccgctctgcccaaagtgtggatgagtggaccggggagcaaaagctgcagtacggtgacattccagaagatattgaacctgaagaaattcgacctatgggaaactatgctgtgtcaattacgtggccagatggatttagccagatcgctccctatgatcagctccagatgatagagcgtttagtggatgtttcctcaaccgacagccgtccaatcattgatgataa

SEQ ID NO: 17806 - DNA, 511 bp, Gossypium hirsutum
  Clone ID: LIB3829-015-Q1-N6-F10
gttgtaaagtgaagcttcttgaacctttgcgtagagttcttgagaaaattacatctgaaagattttcagtctaatacatacatgcatatgcctataaatacatagaagctctagtcttaaaattgaggttattatgcttcaagcaatgtcctaaactccctttagtttcatttgactccaacaagctttttagtagaaatgcttgatattccttgttcgggggaatcatggtattgatctgaataggcctcaaatgaaatgaggaaacttatcatcatgattggacggctgtcggttgaggaacatcgactaaacgctctatcatctggagctgatcatagggagcgatctggctaaatccatctggccacctaattgacatagcatggtttcccataggtcgaatttcttcaggttcaatatcttctggaatgtcaccgtactgcagctttttaggaaacctataattgatcttgtgtaatgtcaatttacctcgatctttcaatcacat

SEQ ID NO: 17807 - DNA, 271 bp, Gossypium hirsutum
  Clone ID: GOSHI-09MAY01-C7797_2
cccacgcgtccgccctcgcgcccggttggcacttcccgggattacctagcgaagctgcttttctggtgtatgctattaggtcatcatttgagaggcttggagaacagattgcaactaagttgtgtcgtcggattattgtagagtaaggtttgtgaaattgtatagcctatctttttcttgtctttcttgtggtatttttggtttatcaggtaatgtacattcttcttcatgaagctattagtgaacttatattgttccaactctatttttt

SEQ ID NO: 17808 - DNA, 1217 bp, Gossypium hirsutum
  Clone ID: GOSHI-09MAY01-C7797_1
agcgggaaactagaaggaaggaaaagaaagagctccagaagctctcatcttcgatggcatcggcagccacggcccgagctgtcatcctctcccgcatcactgccctttcagtcaaacctctatcaccttctctctctcgcttcctccctagccctcgcaaccgtcctccttcagccttgaccgtgagctgctgcttaaaggacggcggagcctacgacgactactccgtttcgacgcagaaatcgaatttagatcgtggattcatagtaatatctaacatgttaaagcacatcgaaccactcgacacttccgttatttccaaaggggtttctgattccgccaaggaagctatgaagcgaactatctccactatgctcggaattctcccttctgatcagttctccgttttggtttccctctcgaaacctcctcttcatcgtctcctcttctcatccatcatcacagggtataccttgtggaacgcggagtatagggtttcattgatgagaaatctggaaagagcggcaccggcggaggacctagtgaaggagacggaggagggcgctagtcaccggcacggagaggtggtgaagaataatattgaggagggagagggtggaaatggtgaatatgaagaactagagaagataagtccgagggtttttgaggatttgtcgccggaggctttgaagtatattgagaagctgcaagctgagttatctgatatggaggaggaactgagtgctcaaaagaaggaaaatgtgcgaatggagtgtggcagggaaaacatgaatggtttgttagagtatttacgatccttggatgctgacatggtgacagaattatcccaaccatcatcggtacaagtggaggaaatgatccatcagcttgttcagaatatattgcaaaggttcttcaaggatgcctgtatgagagattcagggatagtaaacacgggaaatcttcaagatgctgctgatgaaacttgtggcacttcacgtgattaccttgcaaagctgcttttctggtgtatgctattaggtcatcatttgagaggcttggaaaacagattgcatctaagttgtgttgttggattactgtaaagtaagttacgtatgacatatgtgtattcttttcgtttttggtcctttttgttacagttttggttaatccgataacatacattcatttgcattgacggggctcccgctgtcccc

SEQ ID NO: 17809 - DNA, 597 bp, Gossypium hirsutum
  Clone ID: LIB3828-007-Q1-K6-B8
tccggaaagaagaactccagaagctctcactcttcgaggcatcggcagccacggcccgagctgtcatcctctcccgcatcactgccctttcagtcaaacctctatcaccttctctctctcgcttcctccctagccctcgcaaccgtcctccttcagccttgaccgtgagctgctgcttaaaggacggcggagcctacgacgactactccgtttcgacgcagaaatcgaatttagatcgtggattcatagtaatatctaacatgttaaagcacatcgaaccactcgacacttccgttatttccaaaggggtttctgattccgccaaggaagctatgaagcgaactatctccactatgctcggaattctcccttctgatcagttctccgttttggtttccctctcgaaacctcctcttcatcgtctcctcttctcatccatcatcacaggggtttcattgatgagaaatctggaaagagcggcaccggcggaggacctagtgaaggagacggaggagggcgctagtcaccggcacggagaggtggtgaagaataatattgaggagggagagggtggaaatggtgaatatgaagaactag

SEQ ID NO: 17810 - DNA, 1372 bp, Gossypium hirsutum
  Clone ID: GOSHI-09MAY01-C7767_1
cttatccatacgttttgactgaaaatttccagtcacaacacatcatcaagcgttagattcacatcaagacaaaccagatcgacggttaaagtccatccttagaccttcaaaaaaccaacaaagaaagagaaagataaaagaagcaacttttgcttaaaaacgcttcattttcatattcggtattttaatctccgttcgggaatagggcttagagtttcaattttgaatctgaatttctgtttttgttgttagaaaaaaaatatagaaatattaagcatggctgaagttttggggaagtcaaatctgtttacagcttgtaactatagtcagaagaagaatcaagaaggtggcgttcctttgttttccaggagaatctctgtgttttgtttgagaaagaatagttttccttctttgaggttggaacctcaagctttgaggagtggttttaatggtcaaagagtggttgttttagagaaaagaagtctaaatgagagaaggttctgtcgagttcccattaaagcacagatgcaaactgggcttattggtaaaacccaaaagtggtgggagaaggggaatcaaccaaatatgaaagaagtgacatctgcacaagacctggtggactcacttttgaatgctggggataaacttgttatagtggattttttctctcctggttgtggtggctgcaaggctcttcatcccaagatttgccaattggcagagatgaatccggatgtgcagttccttaagctgaactatgaggagcataaatccatgtgttatagccttaatgtacatgtgttgcctttctttaggttctatagaggagctcagggtcgtttatgcagctttagctgcaccaatgccacgatcaaaaaattcaaagatgcattggccaagcactcaccagaccgatgcagccttgggccgacaaaaggtctcgaggagaaggagcttttggcattagctgccaacaaagacctttccttcaactacacaccgaaaccagttcatcctgcaccagaagaaatgccggtgctggaagaagttcccccccgcgcccccccccgcccgcgagaaagcgtggagaagaccttggttggtgtggggagatgatcgtcagggatagtttttgccaaccccgttcccactgtacacttactatagcactatctacatgttcgatttgcatgttctaatatatataaatatatatatgtgcatgtacgaaacgaacaacatactggaggggaagccattaggcatcgtcttccttttggagctgcacgctactggatttttttattctggatcccagcctgcttgattgaagcatgcttgaagagacacttgctgcatgtagcatgttatg

SEQ ID NO: 17811 - DNA, 574 bp, Gossypium hirsutum
  Clone ID: LIB3825-033-Q6-N6-F6
ataaaactgcttttacttttctataatattttaaaccatacaatatgaaccatatattttactttcacataagtggtttatccttaaaaatgacaaccaccataacatacacataaagctagttgctcttcaaacatgcttcaatcaagcaggctgggatccccaaaaaataaatccaatagcctgcaactccaaaaggaagacgatacctaatggcttcacctctactatgttgttcatttcttacatgaacatatattagaacatgaaaaccgaacatggagatagtactatagtaactgtacagtgggaacggggttggcaaaaactatccctgacgatcatctccccacaccaatcaaggtcttctcctcgctttcttttagcttgaaggatgaaccggatggaacttctttcagcaccggaatttcttccggtgcaggatgaactggtttcggtgtgtagttgaaggaaaggtctttgttggcagctaatgccaaaagctccttctcctcgagaccttttgtcggcccaaggctgcatcggtctggtgagtgcttggccaatgcatctt

SEQ ID NO: 17812 - DNA, 563 bp, Gossypium hirsutum
  Clone ID: GOSHI-09MAY01-C7727_1
cccacgcgtccggaagatcaaacgaaatcgtttattagccattctttcaagctcctttttttggtctccatcgaccacacagtttaactcaccgcctcgcccatggaagctctcagctctcaacccctcgcccttctctccatcttctctcctaaaccaaaagatttcccggctagaatcatccgctttcccacccattccaaaaaggacggtaacgattccgatatccaatatgatcctaacaacacaagcatcgttcctcttgtcggcaatcaaactttctcccaggatgcagcgatgggattggttctaagcgcggcgtctgtaagaggatggacaacaggatcgggcatggagggtccatctgtacccgcccgaaccgatgatgaccaatctaatacggagcaaggttccacctttccatggtctctcttcaccaagtcgccacgtcgacggatgcgtgtggccttcacttgcaatgtttgcggtcaacgaaccactcgagccatcaatcctcatgcgttcaccgatggcaccgtatttgttcagtgttgtggatgcaa

SEQ ID NO: 17813 - DNA, 459 bp, Gossypium hirsutum
  Clone ID: LIB3584-017-P1-K1-E4
cccacgcgtccgctgaccctgaatttgtgtgttgaagatcaaacgaaatcgtgaaagaaccattctttgaagctgtcttttttttttttgggtctccatcgaccacacagtttaactcaccgcctcgcctatggaagcgctcggctctcaacccctcgcccttctctccatcttctctcctaaacgaaaagatttcccggctagaatcatccgctttcccacccattccaaaagtacttaatatcatcctttaatttcaatctttcttccttttttttttccgtttatgtctttccttggctgtaataatcgttttaacaccaatattttcctctctctctctctctctcttttctgtttttaattatcagaggacggcaacgattccgatatccaatctgatcctaacaacacaagcatcgttcctttcgtcgggaattaaacctttctccaagatgc

SEQ ID NO: 17814 - DNA, 1145 bp, Gossypium hirsutum
  Clone ID: GOSHI-09MAY01-C7197_2
cccgccccttggctgtcgagaaaagaaaaaaagaatatggaaaccgtaactttgacaggattacttcacaaggctgcggccgagttccctaccaggcgagctttatcagtttccggcaagttcgatttgacgcatgctcaattacaacacatcatcgatcatgctgcttctctcctcatcgcctccggcatccatcccggcgatgtcgtcgctcttactttcccaaacaccgtggagcttgttattatgttcttggctgtaattcgttgccgtgcaaccgccgcgccgttaaactcagcttatactgccgaggagtttgagttttacctttctgattcagaatccaagctgttattaatcccagccgaaggcatcaagccggctgaagccgccgcttccaagttgaacatccctctcgtatccgccgctctccaggatgaaaattccaaaataactctctcctccaaccccgagtcaaatattgattcagtcaaacaactcgttaacgaccctgccgacgtctctcttttccttcacacttccggtaccaccagtcgtcccaagggtgttcctttgactcagctcaatttggggacttcagttttgaacattaaatcggtttacgaactcactgagtcagactcgacggtcattgtgctcccgttatttcacgtgcatggcttgttagctggcttactgagttcactcgtttccggagctgccgtcactctcccggccgccggcagattttctgcatcgacattttggacggacatgattaaatacaaagccacatggtacactgctgtccccacgatacaccagatcatattggaccgccatgagagcaatcccgaacgtccacggtaccccaagctaaggttcattagaagctgcagtgcatcattggcaccgagtatattagaacggctagaggcggcatttgacgcaccagtgctcgaggcttacgccatgacagaggcgtctcaccttatgacatcgaacccgttactaaacaatggcccacataaagctgggtcggttgggaaaccggttggtcaagaaatggcgattttgaatgaacaaagggagattcagccaccttattctaatggggagggttgtattatgggattgaatgtaac

SEQ ID NO: 17815 - DNA, 676 bp, Gossypium hirsutum
  Clone ID: GOSHI-09MAY01-C7197_1
tgcgacccactcccccgcgtccgctttatttggttgtcgagaacggaaacaaagaatatggaaaccgctactttgacaggattacttcacaaggctgcggccgagttccctgccaggcgagctttatcagtttccggcaagctccatttgacgcatgctcaattacaacacatcatcgatcatgctgcttctctcctcatcgcctccggcatccatcccggcgatgtcgtcgctcttactttcccaaacaccgcggagctatgtttatttatttatgttcttgtttatttttttgcgtttcaatcaataaaaccttcttgaatgaatcattaggatcagattctgtttggttgatgagaaaatacggaggaagaaaataaattgctgctcttaattattttacgtgttaaactgtttgtcttatttcccttcaaataaaaaaacccttcttttgtaaaaaaaacaaagcaaaacgcatataaaatgtctttgtctattaggttataaaaagatcaaattttcttttctttttaattttaatttttcgtgatacttttttttcatggttttggtttccatcatttactgagctgccaaacagaggctacgagttgccttgtttatttttctattattagttactgaaaaaaaattcttttttttttcatatatagct

SEQ ID NO: 17816 - DNA, 611 bp, Gossypium hirsutum
  Clone ID: GOSHI-09MAY01-C7177_1
cccacgcgtccgctttaaagaaatattctttaccaccatttgtgagttgataatttctgagttgtactttgatggctgttgcagcagctagctgcttcggcagcacttgcttcattactgggaggcccaatagttcaatctcaaccaccaactttcccttatctttttcttatccaatcttcaacggctgcaatgggatttcagtgaccagaattgggtctagctcaaaaacatacgccaagtttgagaaatttcaaggtgacccttcagaagctaatggtgaagatattatagtatcttctctacaaacccaggaacaaaccattgaagaagaagaagaagatgacagttgtttgccatctgacttggagggtgcagtgaggcaatcaggtgaagcaagtgccttgtttgtgtcttcaggaggaatgagagctattgttgagctcctaattcctcagttacagcttcttgatgatgaaggtgctcaagctgagctttgggaattatccagaattttctttgatacacttatgcaagaaactggatgtcagaaattaaagctatattttctgatgctggagctgctgcatactgaaatatcgatggaagat

SEQ ID NO: 17817 - DNA, 586 bp, Gossypium hirsutum
  Clone ID: GOSHI-09MAY01-C7087_1
cccacgcgtccgggggtcttatgtatctctcagcacatttgggaacttggagaggacaacagaatggctggaggttgttttcaacatcattgttcttactagtggacttcttctagtcacaatgttgattggtaacatcaaggtgtttttgcatgcaacaacgtccaagaaacaagcaatgcaattgaagatgaggaacatagagtggtggatgaggaagaggcgcctgccttctggattcaagcaaagggtccgcaattatgagcggcaacggtgggcggccatgcgcggtgtcgatgaatgccagatgatcagaaacctccccgaggggctccggagagatatcaagtaccatctttgcctggatttagttagacaggtaccattgcctcaacacatggatgatttggtcctagagaacatttgtgatcgtgtcaaatctctaattttcaccaaaggagaaactattacaagggaaggcgacccagtacacagaatgctatttgtagtaaggggacatcttccaagcagccaagttcttagagatggtgtgaaaaagttgctgcatgttaggggccccgaaatt

SEQ ID NO: 17818 - DNA, 396 bp, Gossypium hirsutum
  Clone ID: GOSHI-09MAY01-C7017_1
cacaaacgcagtaccaattttctctcgacaatccaaagccctttcaatggcgtgcagtacgaccgcattcggttccggcgtatcaacaacagctttggggttgagcagcctcaagcgaagccccactgttggtgtcgctaccattatttttccaaagcctcgccgctcgtcggctatggtagtcagagctgagggtcaaaccataaacccagagataaggaaaacggaggagaaggtggtcgactcagttgtagtcactgaactctctaagccccttacagcttattgcagatgttggaggtcaggtactttccctctttgcgatggaggacatgtgaaacacaacaaggctacaggggacaatgttggtcctttgctcttgaagaaacagtaacc

SEQ ID NO: 17819 - DNA, 455 bp, Gossypium hirsutum
  Clone ID: GOSHI-09MAY01-C7007_1
cccacgcgtccgcgagctctgtatagattcttctagttccgaccaaaaaaacaattgctcatctttccttcagagaatatttgttttgagtgaaaaaaaaaatgttgggagtattcagcggagcgatagtgtccccgccggacgagctggtggcggccggttgcaggacgccgtcgcctaagataacggcggacgctcttgtgaaacggttcatcgaggcaaacccctccaccgtgtccttgcagatcggagatcatgtccaattcgcgtattctcaccgtaacgagtctgctttacttcccaggtcattcgcggtgaaagatgaaatattctgcatgtttgagggggcacttgataacttagggagtttaaagcagcaatatggacttggtaagtcagcaacagaggtggtgttggtgatagaagcttacaaggctcttcgtgacagagcacct

SEQ ID NO: 17820 - DNA, 470 bp, Gossypium hirsutum
  Clone ID: GOSHI-09MAY01-C7207_1
cccacgcgtccggcaaaacggatttttgttaaaaaatgagtcagtgtgttccgagttgggaactggatgacaacaatccactcaccactcgccatcactcgttccgcttcaactcaaattccactgcccctgaggttcccttgttagattatgaagtagctgaatgaacgtgggaaaatgggcaactagccatgcacagcttaggtccaccgcgtgtggtggctaaacaactaaacgccaccacttgggataaaccaagagccagtggcggtggcggtggcactttagagtctatagtgaaccaggctacttgttttccatatggtagtaaggattctgtcggtgttgggtggggatgaattggtatggttggaccaccaccgtgtttcggcggcggcgtcgtcttcatcagccaccatggctatggatgctttagttccttgttcagaagacaagaccaccaccgtaca

SEQ ID NO: 17821 - DNA, 896 bp, Gossypium hirsutum
  Clone ID: GOSHI-09MAY01-C1987_1
tagagatcaattctataggcatgacgattatagctcattgttgatgtattatggatgatcggttgctggagttttaaaccgatgacagattggcttgggtgtgaagcagattggtcctacttacttaaattgttattaactggtgtttaaatgtgcagactttggttttatctagcgtcggccgtcgcgtcgggccggttgcaattttgaagtcacttcccaatctttcttgtttgaagttggatggtaatccactaagacagattccatctgatggattccaagcaatctctatgatccaaatactagatataagtggtaatgccacttcattacctgagaatccagcattttccaacttaccacacttgaaggagctttatttgagacgaatgcagctacgagaagtcccatcagaaataatgagcttacggcagctgcaaatcctaggcttgagtcaaaattcccttcaatcaatcccggatgtaaaatgttctcttactatagctggcatctattgcaagtcattaatatttggcgtaaaccgacttagtaacactttatgaacatccactaaatagttgttatagccacttgttttctccattgatcacatgcgagtgttcttatagtaatgtgaagttgaaatttttcggaaacttgatttactgtaccttcatccctagtgtgtagtgtcttgttgtataaatcctaaggtttttgctacggttctcatataatcacggtttttaaatatcgacctgtgtttcaatattggatttccctaacatgtgaggtgttgaactaagacatgtgaggtgttgagctaagacacgtaccatatgtttgtgttcttggttcttattattggcctgcatcatatattcttttccctc

SEQ ID NO: 17822 - DNA, 1102 bp, Gossypium hirsutum
  Clone ID: GOSHI-09MAY01-C1957_2
atcataaaaattccaattataggaaaatttcctaagaaaataatttgccacgtcacctcgaatatggccgccaccgccacaagcaacgccacattccgtcttggcaatcccctttcctcttcctcttcctcatccgtttactcctccaataaattgcctgtcaatttcagaaaatttgcgcttcagacgtcgcctgtgaaaagcttttctgtttcttgtactctaactagaaaaccagtcccagctgctccggtttccatggattcggacccgaacggatggcgacgacccgactcgtttggtcggtttggcaaatttcgcggcaaatacgttcccgagaccctactgtctgctctctatgagctggaaacggcttggcatgggctctgcaaagatgacaaatttcaggaagaactagctgggattttgaaagactatgttggtagggaaagtccacttattttgcagagcggctgtcggagcattacaagtgtcccgatggtggaaggtcagttatataacttcagaggaggatcttaaccatactagtgcccacaagatcaataatgccgttgcttaggcattactcgctaaacatttgggcaagaaccggattattgcagaactggggctggtcagcatggagttgcaacagctactgtgtgtgcaaggttcggtttgcagtgtgttattgacatgggtgctcaagatatgtgaaagacaggcacttaatattttcagaatgcagcttcttggtgcggaggtaagtgttataatgaagattctttatcagattcttgggttagagtacttcattcaggcaccgcgacgctgaacgatgctacatcggaagctatccaggattgggtgactaacgtggagacaactcattatattttgggattgattgctggtccacatccgtatcttatgatggtcagagagtcccatgcactggttggtaaagaagcaagaaaacaagcgctggaaaaatggggatgggaaaccggatgtattggttgcacgcaatgatggaggttcaaatgctatgggacttttcaatgagtttgttaacgacaaggatattaggttgattggtgta

SEQ ID NO: 17823 - DNA, 1576 bp, Gossypium hirsutum
  Clone ID: GOSHI-09MAY01-C1957_1
accgccggaacccggtcgaccgcgcgtccgaaagccctaaaattgaaatgccctcgaatatggccgccaccgccacaagcaccgccacattccgtcttggcaatcccctttcctcttcctcttcctcatccgtttactcctccaagaaattgcctgtcaatttcagaaaatttgcgcttcagacgtcgcctgtgaaaagcttttctgtttcttgtactctaactagaaaaccagtcccagctgctccggtttccatggattcggacccgaacggatggcaacgacccgactcgtttggtcggtttggcaaatttggcggcaaatacgttcccgagaccctaatgtctgccctctctgagctggatgcggcttttcattccctctccaaagatgaaaaattccaggaagaattagctgggattttgaaagactatgttggtagggaaagtccactttattttgcagagcggctgtctgaacattacaagcgtcccaatggtgaagggccagatatataccttaagagggaggatcttaaccatactggtgctcataagatcaataatgctgttgctcaggcattgcttgctaaacgtttgggcaagaaacggattattgctgaaactggagctggtcagcatggagtggcaacagctaccgtgtgtgcacggtttggtttgcagtgcattatttacatgggtgctcaagatatggaaagacaggcgcttaatgttttcagaatgcggcttcttggtgcagaggttagagcagttcactcgggtacggcaacactaaaagatgctacatcggaagctatccgggattgggtgactaacgtggagacaactcattatattttgggatctgttgctggtccacatccatatcctatgatggtgagagagttccatgcagtgattggtaaagaaacaagaaaacaggccctggaaaaatggggagggaaaccagatgtattggttgcatgtgttggaggaggttcaaatgctatgggacttttccatgagtttgttaatgacaaggatgttaggttgattggtgtagaggctgctggttttggtgtggacagtggcaagcatgctgctactttgaccaagggagaagtgggagttttgcatggagctatgtcctacttattacaagatgaagatgggcaaataatcgaaccccattccattagtgcaggcttggattatcctggggttggaccagaacacagttttctgaaagacgtaaggcgagctgagtaccacagtgtcacagatgaagaagcattggaagctttcaagaaattatctcgactggagggcataatcccagctttggagacatctcatgcactggcttatttggagcagctgtgtccaactctaccgaatgataccaaagttgtggttaactgcagcggcagaggcgataaagatgttcagacagtgattaagcatttgcaggtatgattacgatgcttttcgtggaaataaatggttgccctttatttctacaaccatgctgtcagtctttctctctgtttctttatatgtactactacttgctttgc

SEQ ID NO: 17824 - DNA, 776 bp, Gossypium hirsutum
  Clone ID: GOSHI-09MAY01-C1977_1
cccacgcgtccgcccagtttcagaatcaactgctaaaaaacaagctatggagagtggtgagcctagcaagaaatcttcttttcagcttcagaatcaacctcctccacgtcctttctctataaaaagtatcatctttgtggcttccattgccgccggtatccaattcgggtgggccttgcagttatccctccttacgccatacgttcaactcctcggtatccctcacaaatgggcttctcttatttggctctgtggacccatctctgggatgctagttcaacccatcgttggttaccacagtgaccgttgcacctcccgtttcggccgtcgccgcccttttatagctgcgggagcagtgctggcggctacggcggtggtccttataggcttcgcggctgacttaggttatctctttggggacaacctggctactgagacgaagccgcgggccattgtggtgtttgtgatagggttttggatcctagatgtggctaacaacatgttacaaggtccatgcagagcgttactggctgatatctccgggaacagccagaagaaaacgcggacggcgaacgccttcttttcgtttttcatggcggtggggaacgtgctcggtttcgcggccggttcctacacccacctccataacatcttccctttcaccaccacgaaagcttgtgatgtttactgtgcgaatctcaaaagctggttctttttctcaattctgcttttgctgacccttacaaccaatcgttcttacaaacgtgcatgaaaag

SEQ ID NO: 17825 - DNA, 497 bp, Gossypium hirsutum
  Clone ID: LIB3583-008-P1-K1-D7
cccacgcgtccgcccacgcgtccgcccacgcgtccgcccacgcgtccgccagtttcagaatcaactgctaaaaaacaagctatggagagtggtgagcctagcaagaaatcttcttttcagcttcagaatcaacctcctcctcctcctccttcttcttcttctcctccacgtcctttctctataaaaagtatcatctttgtggcttccattgccgccggtatccaattcgggtgggccttgcagttatccctccttacgccatacgttcaactcctcggtatccctcacaaatgggcttctctcatttggctctgtggacccatctctgggatgctagttcaacccatcgttggttaccacagtgaccgttgcacctcccgtttcggccgtcgccgcccttttatagctgcgggagcagtcctggtggctactgcggtggtccttataggcttcgcggctgacttaggttatctctttggggacaacctggctactga

SEQ ID NO: 17826 - DNA, 1606 bp, Gossypium hirsutum
  Clone ID: GOSHI-09MAY01-C1917_3
ctgaaaccttataaaagccagcttgtcttcaacattctctactcatctcctctcactttccttccatttcctttcttctcttttcggttgggtccctctctctttcaaaacccaaacttgggtcctcgttattaaatcttctctcccaagcaaatcctttcctcctcacctcctttcatttcccctgttttcctctgtttttcttggtcatggctgagttgatggacgatgctgagttttggttgccggcgaagtttttaaccgacgatgatgttcttatgaagaaagggaacctcgagaacgaaatccgtggaaaaatgggtactgagttgttggtatctagtcatggtttcccttctgagttcccttacgagtttgactccttctcgcccctgagttcacccgttgaatctgttgttgggtctacggagactgaaagtagtgatgaagatgagtttcttgctggattgactcgacggctcgcttactcaacgagtcagaagcttactgttcctgctaccttttccatggacaaaaacgagaaaaacggagctttagcgagttcaccaaggtcgacactgagtggactcggtggatgttggtcatcttcaagcaacggtagtcctaatggtccttctcaagtaccatctccaccaacaacaccttttggtcctcaaaatgacacttgggatctcatttatgctgctgctggtcaagttgctaggctaaaaatgagcaatgaagtgcctaaatataccaactttaaccatggtagaaccttatccaaaccgcaaaatcattcctttatgaaaaacaaccccacccctcccccctcgcgtccggaccaaacccttcctttcaatcagtttaatggaaggcaagttaaggcaagtaactggcaagcacaggttcaacaacagcaccagcaacagcaccagcaccagcaccagcaccagattcagactagattaaggaacaatgttgttggtgggagaccactggggctaccacaatcttcatggcctccacttcaagctcagccccaacagcagaaacattcacaaaatgggatgagagctatgtttcttggtggatctagtggggtcaagagggaatcaactggcactggtgtgtttatacctcgcagatatggcaacaccaccaacaccaccactcgggcgcctggaaagaaatcaggctggtcaacagtgttactaccagcaaagggtggtcaagctctaaatctcaacttcgatgataccaaaaaccatgttcaacctcaattcaatcccacttttgcatcaaactatgatgctttggtagcaagaagaaatgcactggtgacaccagccagaagaaattattgaccagatgggagcttaaacttgcctcaagaatggacttactgaaaatttaatccaaattttgtccaaattttctctcaaaatagtggttattttgatggaaaaagatagtagggtagtagcttttatgataggggatatgggattttgggttatatatatatatatatatatataaagaagaattccagaatgtgagtgtagtttagaaattaattaaattaaattgtgtttttaaggtt

SEQ ID NO: 17827 - DNA, 1265 bp, Gossypium hirsutum
  Clone ID: GOSHI-09MAY01-C1917_1
accaagtcgacactgatggactcggtggtgttggtcatcttcaagcaacggtagtcctaaggtccttctcaagtccatctccaccaacaacaccttttggtcctcaaaagacacttgggatctcatttatgctgctgctggtcaagttgctaggctaaaaatgagcaatgaagtgcctaaatataccaactttaaccatggtagaaccttatccaaaccccaaaatcattcctttatgaagaacaacacaaccaccaacagcttgtattcagaccaaacccttcctttcaatcagtttaatggaaggcaagttaaggcaagtaactggcatgcacaggttcaacaacagcaccagcaccagcaccagattcagactagattaaggaacaatgttgttggtgggagaccattggggcttccacaatcttcatggcctccacttcaagttcagccccaacagcagaaacaggcacaaaatgggatgagagctatgttccttggtggatctagtggtgtcaaaagggaatcaactggcactggtgtgtttatacctcgcagatatggcaacaccaccaacaccaccactcatgaacctagaaagaaatcaggttgttcaacggtgttactaccagcaaaggttgttcaagctttaaatctcaacttcgatgataccaataaccatgttcaacctcaattcaatcccacttttgcatcaaactatgatgccttggtagcaagaagaaatgcactcttgacacaagcaagaagaaattatagaccagatggaagcttaaacttgcctcaagaatggacttactgaaaatttagtccaagttttctctcaaaatagtgtttgttttgatggaaaaagatgtagggttagtagcttttatgatagggtatatggtattttggtttatatatatataaagaagaattcaagaatgcgtgtagtttagaaataaataaaataaaatagtatttttaagttaacaaattatgggttttttttttctctaccattcaaggagatttgaagatttgcagcttttggggggtgattaactctataggaacaagaattaggggaaggaatggttttttttggttgtaataaatggtttttttttaaatattttatataattttatgagggtaatttggatttcttgcctttgaaatttgggagaaaattgtagaaggaagaaaaaatccagacccttctttgtaatatccctttggaagttaataattttggtttatat

SEQ ID NO: 17828 - DNA, 739 bp, Gossypium hirsutum
  Clone ID: LIB3583-017-P1-K1-C2
cggacgcgtgggcggacgcgtgggcggacgcgtgggttttgtagggatttttttctaagttcttttcttggctttgttctttaggctgttcaacagtgttactaccagcaaaggttgttcaagctctaaatctcaacttcgatgataccaaaaaccatgttcaacctcaattcaatcccacttttgcatcaaactatggtataaaactataactccaaagattcaaattccttgtttatgttaaaaccaatgttcttattgttcaaattttgtgtagatgctttggtagcaagaagaaatgcactgttgacacaagcaagaagaaattatagaccagatggaagcttaaacttgcctcaagaatggacttactgaaaatttagtccaaattttgtccaaattttctctcaaaatagtgtttattttgatggaaaaagatagtagggtagtagcttttatgatagggtatatggtattttggtttatatatatatatatatatatataaagaagaattcaagaatgtgagtgtagtttagaaattaattaaataaaatagtatttttaagttaacaagttatggggttcttttttctctaattttcaaggagatttggaagatttgcagcttcttgggggtgattaactctattggaacaagaattaggggaagggaattgggtttttttttgggtgggaaaaaaaaggttttttttaaaaatttttatattaattttta

SEQ ID NO: 17829 - DNA, 513 bp, Gossypium hirsutum
  Clone ID: LIB3583-015-P1-K1-G7
ccctcgcgtccgccctcgcgtccgaaggtatcaactggctctggagagtttatacctcgctgatatggcagcacctcctacaccaccactcaagtacctagtaagatatctagtaccaaaaacataaatttgaccatttccaagttccattttgtaaggatctttttcctaagttctgttcttggctttgttctttaagtagttcaacggtgttactaccagcaaagagttagttcaagctttaaatctcaacttcgatgataccaataaccatgttcaacctcaattcaatcccacttttgcatcaaactatggtataaaactataaccccaaagattcaaattctttctttatgttaaaaccaatgttcttattgctcaaactttgtgtagatgcctaggtagcaagataaaaagcactcttgacacaagcaagaagtaattatagtccagatggtagctttaacttgcctcaagaaaggacttactgaaaatttagtccaagttttctct

SEQ ID NO: 17830 - DNA, 379 bp, Gossypium hirsutum
  Clone ID: LIB3146-057-Q1-K1-F9
cccacgcgtccgcccacgcgtcctccaaggtcgacactgagtggactcggtggatgttggtcatcttcaagcaacggtagtcctaatggtccttctcaagtaccatctccaccaacaacaccttttggtcctcaaaatgacacttgggatctcatttatgctgctgctggtcaagttgctaggctaaaaatgagcaatgaagtgcctaaatataccaactttaaccatggtagaaccttatccaaaacgctccacaaaatcagtatataagcaatggcatagcagccaggggagggcagggagaagaaaaacaacacatacacacacagcggaattagattaattgagaaaaacgcaatggctcaaaagatgttgatga

SEQ ID NO: 17831 - DNA, 884 bp, Gossypium hirsutum
  Clone ID: GOSHI-09MAY01-C1937_1
gtgaatcagaatcagaatcagaataaaaacgtaaaagctgaggatattctctgccccctggctgaatatgaagaatgtgatttctcaaagctgttagagaagcctaggcttttgaatatagacagacagagatcacttgatgagaggtcgctcagtgaattatcgattgggatatctccgcgtcatgctaccagagccattgatcttaattcatctcgcttttttgagcaattggattctatttgttcaccgttgggtagaaggtcaggttttagtacaccgaggtcacaaattggttttgacccgcatccgatggttgccgaagcttgggaagccttgagaaggtcattggtgtattttcgtggtcaaccggtcgggactattgcagcattggatactactgaagaaaacctaaactatgatcaggtctttgtgagagactttgtccctagtgcattggcttttttgatgaatggggaaccagaaatagtaaagaacttcattttgaagactcttcgccttcaatcatgggagaaaaagatcgataggtttcagttaggagaaggagtaatgccagctagttttaaagtgctccatgacccagttaggaacaatgagacattaattgccgattttggtgagagtgcaataggaagagttgctcctgttgattctggattttggtggattattttacttcgagcatatacaaagtctactggagacacttcattggctgagttgcctgaatgccagaagggtatgcgcctaattctgagtttatgtctctcagagggattcgacacatttccaacccttctctgtgccgatggttgctgcatgattgatcgtagaatgggtgtatatggctatcccatcgaaat

SEQ ID NO: 17832 - DNA, 755 bp, Gossypium hirsutum
  Clone ID: GOSHI-09MAY01-C1927_1
ggaaaggctccgtattccagtgttataacgcatggatttgtattggatgagaagggtttagagatgagcaaatctttggggaatgttgtacatcctcataccattattgagggagggaagaaccagaaggaagcacctggctatggagctgatatcatgagactctgggtttctagtgtagattatactggtgatgtgatgattggggccacagatcctccgtcaaatatcggccgtatataggaagctgagaggaacattgagatatctccttgggaatctgcatgactggaaggttgaaaatgctgtctcttaccaggaactgcccatgattgatcggcatgcactgtttcagcttgaaaatgttgtaaagaatataagggagggttatgaaaattatcagcttttcaaaatattccacgtctatatattttaaattgtatattgaattcatgatttctggcaagtttagcttcaagcaaactggcattttggagttttagttattccctaaagtgcaacaatcagtgaaaagttgttggtcacagaaaatgctttctacacactttcctctctgttagtttttctcaatgataatggcaccctaacatagatcctactatgtttttcttcttattgagatcctactattattggacaatgtaacaatactgtgaggaaaaagttgaaatcacaacatggttcaaccttcagctttttgttgcgtacagtagtcttgggtgtttctggtagct

SEQ ID NO: 17833 - DNA, 387 bp, Gossypium hirsutum
  Clone ID: LIB3493-006-P1-M1-C5
gctgagaggaacattgagatatctccttgggaatctgcatgactggaaggttgaaaatgctgtctcttaccaggaactgcccatgattgatcggcatgcactgtttcagcttgaaaatgttgtaaagaatataagggagggttatgaaaattatcagtttttcaaaatattccagatcgtacaacggtttgtgaatgttgatttgtcaaatttctactttgatattgccaaagatcgactttatgttggcggcacgacaagttttacaaggagaagttgtcaaactgttcttgctgcgcatctcctttccctatccagggtaattgctcctattttgccacatttagcaaaaggatgtgtggcaaaatcttccttttcagtatacca

SEQ ID NO: 17834 - DNA, 819 bp, Gossypium hirsutum
  Clone ID: GOSHI-09MAY01-C1897_1
ctaatggcctttcacactcatctgcagcgtggccccggccaaatgttccaacacttcatctccctggaagcagctttcaatcaagtcgcttgagatcctcccttagtgcccgagatatcccacgcgagggcttcgacatgtggcctgattttgatgctcatgaacagattctaaatgatttaacctgtgtttcccagtctcataacagtccagtgtctgtgagtcgctcttgtcgatccaaaacattaactccttcaaaccttgaagagctattttctgcggagatctcttcatctcctagatatactgatcaggcagctgcctctgcgatattttcccctacccataaatcagctgtccttaatcagtttcaacagcaacagagcaagttatctccaatcaatacaagtgtttttgcacccagaaatgttgaacacccactgttgcaggcttcattcggtgtcgggtctcctggaagaatgtcacctagaagtactgagccaatctcccccatggctgctcgcttgtccgcacatgttcagcttgagaagcaacgacagcagcagctaagctgccttagctctagggaacttggatctcctgtgaattgtccttggtccaagtggggttcgcctaatggaaagttgaactggtcagttagtgcagacgaactaggtcaattactaaaatcatcatacgagcttcgtaacagtagcgaggggcccgacttatcttggggccagtctcttgtaaaggaatccccacctgagatgataaaagagaagctggtagcttctgctccacatggtgcatcatccc

SEQ ID NO: 17835 - DNA, 796 bp, Gossypium hirsutum
  Clone ID: GOSHI-09MAY01-C1847_2
cccacgcgtccgcccacgcgtccggttttattaattagttttcgagtttcgagtttcggtttcgtttttgttttctcatttgttgtcttctgttttctgttcctgttgttttccaccaagatgggagtcagggttcctctgctgtttctataaatcatttctcaattccctttcttttttttagtcagatcctggattttgaaaaaaaataaaaatcttctgtcttcggatttcctcacgttttcttaaatcatcgatcgacgccgacctagaacaagaataaaacgaggaacaaacaacctctgattgtcgaattaactagaaaccaaaagcaaacgcgtaaagaaatcatgggttctgaacagaatgaaggaactagcttccctccatcggcgccaaaactttgtgccaacggctgtgggtttttcggcacggcggcgaatatgaacctctgttccaagtgttaccgtgacctccgtgccggggaggagcaagctgccaaggcgaaagctgccatggagaaatccctcagcgttaatacgaagcaggaagatgtcgttgacgagactgtgaagcctgttcttgagcttcctcatgtgggttcctcatcgacggtggtcgagatacaaccggctgctattgtctccgatgataaaccggcggaatccaaggcggcgaacaggtgctttatctgcacaaagaaaggttggattgaccgggttcaagtgcaagtgcggaagtacattctgcggcgagcatcgttacccggaaaaacatgagtgctcccttgatttct

SEQ ID NO: 17836 - DNA, 662 bp, Gossypium hirsutum
  Clone ID: GOSHI-09MAY01-C1847_1
attccgtgaaaatcaagaaccgaaaggacctttaatcttttgaaccaaacaccccccctaatcagaaccctaactttttttttcttctaatctttgattgtagaaaccaaaagcaaacgcgtaaagaaatcatgggttctgaacagaatgaaggaactagcttccctccatcggcgccaaaactttgtgccaacggctgtgggtttttcggcacggcggcgaatatgaacctctgttccaagtgttaccgtgacctccgtgccggggaggagcaagctgccaaggcgaaagctgccatggagaaatccctcagcgttaatacgaagcaggaagatgtcgttgacgagactgtgaagcctgttcttgagcttcctcatgtgggttcctcatcgacggtggtcgagatacaaccggctgctattgtctccgatgataaaccggcggaatccaaggcggcgaacaggtgctttatctgcagaaagaaggttggattgaccgggttcaagtgcaagtgcggaagtacattctgcggcgagcatcgttacccggaaaaacatgagtgctcctttgatttcaagggtactggacgtgatgcgattgccaaagcatatcccgtcgttaaagctgacaaggttgagaggatttaaagaagtattagtggg

SEQ ID NO: 17837 - DNA, 461 bp, Gossypium hirsutum
  Clone ID: LIB3585-003-P1-K1-A6
gaaaggaatcagggttcctctgctgtttctataaatcatttctcaattccctttcttttttttagtcagattctggatttggaaaaaaaaatatcttctctgtcttcggatttcctcacgttttcttaaatcatcgatcaacgccgacctagaacaagaataaaacgaggaacaaacaacctctgattgtcgaattaacgaggtatgtatgtcttaacaggtttttgtttttcgattttgattttgattttctgggtttcatgttcaccgattgaagaaatgttaggaaaaatttcattttcatattattatcattatatgactcataattattatggtgaccgttcgatttaattccgatggaccgctgatattaaatagggatatttaacgtgttaatttaggggatgatttgaattttaagttttaaccggattcttccggaacgattctgattatcg

SEQ ID NO: 17838 - DNA, 390 bp, Gossypium hirsutum
  Clone ID: LIB3145-007-Q1-K1-C12
aaaacctttggtttggtttttagttttgttaattatttttcgagtttcggtttcgttttggttttcccatttgttgtattctattttcttctcctgttgttctccaccaagaaaggaatcagggttcctctgctgtttctataaatcatttctcaattccctttcttttttttagtcagattctggatttggaaaaaaaaatatcttctctgtcttcggatttcctcacgttttcttaaatcatcgatcaacgccgacctagaacaagaataaaacgaggaacaaacaacctctgattgtcgaattaacgagaaaccaaaagcaaacgcataaagaaatcatgggttctgaacagaatgaaggaactagcttccctccatcggagccaaa

SEQ ID NO: 17839 - DNA, 597 bp, Gossypium hirsutum
  Clone ID: GOSHI-09MAY01-C1877_1
cttaattcccttgtttgcctatgcgttcgtccacgcgttcttattggccgccttctccagtgtctgcaacaaaatctctagttgggcagggacattagcagcttctcctcgattctctcctttatttttctcttctcaacctcgtctctcactcttcagctccactcccatttctcactacgttaaaaatctaccagctattttggccatggattcttctaaagctggtacagtgaaggaattgccagtggggctagatgaagctaccgaggatgaatatgcttcccagcggaaattacttcaagagtttactaatatctcttgcatcgacaaggcatgggtttttaaggctggaagtggaataggctcccaagtaatgttttcaattagccaaccgaatcttttggcaaacaagagaagaaagtttatgttgtcaactagtattttgaaagaaagtaacaataatgtaaacttccaatgggcaccatttcctgttgagatgacaggagtgtctataaatattccttcaccatcaggttccaagcttcttgtgattagaaatcctgaaaatgaatctcccacacaatttgaaatatg

SEQ ID NO: 17840 - DNA, 547 bp, Gossypium hirsutum
  Clone ID: GOSHI-09MAY01-C1837_1
ctctgagtgtcaagtgaaaggaatagataaaaaacaggatgctgatggaggggttgctttggaaaggcactcattgtttggacatcaacctgatggtacagggaacaaagctccaggaaatctgccaacaaaaaccgctgaaaagtctgataatggaaaaccaactgcctttatgggttctcaacatcaaggcatgtttacatcagtgcatagccaacatatacaatttccagtgtatccaactccttcaaccatgggttactaccatcagaatcctgtatcttggccagcaactccagcaaatggttttagtgccttttcctccaaacccatatctttatactggccctcttggctatggtttaaacggaaactcacatttatgtatgccatatggtactctgcagcatttagctgctcccccatttaatcctgatcctgttccagtttatcaagccagtttcagaagccaatggcttgtatgcagaggagcgaactctgattccaaagcctggtaaaacaagtgaagctttcactgaatttaatg

SEQ ID NO: 17841 - DNA, 646 bp, Gossypium hirsutum
  Clone ID: GOSHI-09MAY01-C1597_7
cccacgcgtccgatttcgattgatggtgacactgaaattgcgtttactgagaatgttgatacacgttttgaggggctagggtggcatgttatctgggtcaagaatggaaacactggctatgatgaaattcgcgctgcaatcaaggaagcaaaggctgtcaaagacaagcccactctgatcaaggtgacaaccaccattggttatgggtctcctaacaaggcaaactcatatagtgtacatgggagtgcactgggtgccaaggaagttgatgctactaggaaaaaccttggatggccatatgagcctttccatgtaccggaagatgttaaagctcactggagtcgccatacccctcagggtgctgctcttgaaggtgaatggaatgccaagttcgctgaatatgagcagaagtataaagaggaagctgctgagctcaaggcaatcatcactggtgaactaccagctggttgggagaaggcacttcaacatacactccagagagcccagctgatgctaccagaaatctctctcaacaaaatctcaatgcccttgtgaaagtactccctggccttcttgtggaagtgctgaccttgcttcttcaacatgaccttgctcataatgtatggggatttccataaggcacccc

SEQ ID NO: 17842 - DNA, 543 bp, Gossypium hirsutum
  Clone ID: GOSHI-09MAY01-C1597_4
gttggagattgccgctaaacccgcccgtccgcccacgcggccgggcaagaccgttagggttgtctcctttgtttcttgggagctctttgatgagcaatcagatgcctacaaggaaagcgttttaccatctgctgtatcagctagggtgagtattgaggctggatcaacatttgggtgggcgaagattgttggatccaaggggaaggctattggaattgaccggttcggggcaagtgcaccagcaggcaaaatatacaaggagtttggcttgactcccgaggctgttgttgcagcagcaaaagaactttgctaagcttgcttagaagtgtcgggagaaatttgtggttctgggttggaggttacactgaagagagaccattccatttgtgacagtctcgtttgtttttaataagaatcagaatccacttatattttatgttgcctgtgattcatcaaaaagcaaaacatagagagaaagggagggtagaagttgtgtatgatcatcaatttggaatttactctcggactttttcccagagtttt

SEQ ID NO: 17843 - DNA, 664 bp, Gossypium hirsutum
  Clone ID: GOSHI-09MAY01-C1597_3
caaggaaagtgttttcccatctgccccacccgctcgaccgcgcgttcgggctggatcaacatttgggtgggggaagatagttggatccaaagggaaggcaatcggaattgatcggtttggggcaagtgcaccagcagggagaatatacaaggaatttggcttaactccagaggctgttattgctgcagccaaagaactttgctaagcttggttcaaagtctctgaggaaacttaaggttttcgattgaagatgtcgctgaagagctgttccaattgtgacagtctcttctgttttgttttctttaataagaaacagattcaaattttcttttgttgcttatgattcatcaatagcagcagtgagcaaaagggaggttagagtttctttatgtttatggatttgtaacttctcctgggacttatccggatttctgctttggcctgagttaaaatgagtttgtataattttgcttttcagaataaacagtttgattcccccaaaaactataatatagacataacaatacttagtaatatattttttaaaaaaaaaaaaaaaaaaaataaaggaaaaaaataaataattatataaaaaattatgggggggcccctttaaaaaaaccaaaattttttaccgctggttgccaagtaatatttttttttt

SEQ ID NO: 17844 - DNA, 2445 bp, Gossypium hirsutum
  Clone ID: GOSHI-09MAY01-C1597_2
cccacgcgtcccccgcgcggccccttcaccatcctcaccctctcaatcaacaatggcctctacttcatctgtcaccctatctcaagccctcctctctcgcgctatctcttcccatgcctccgcccaatcctccgaccaccgcccctccctctccactatctcttttcccggtttctccggcctcaaatcttctatccctcgcgcttcctcatcccgtcgacgccttccctcccgctccaaccacaagcgccaggtccgtgctgctgccgtcgaaacaattggcaccgccgccgagacttccttggtcgagaaatccgtcaacaccatcagattcttgtctattgatgcggtcgagaaggcgaattcaggtcatcctgggttgcccatgggctgtgctcccatgggtcacattttgtacgatgaagtcatgaggtataaccccaagaacccttactggttcaaccgtgaccgtttcattctgtccgctggtcatggttgtatgttgcagtatgctctgcttcacctcgctggttacgacagtgtcctggaagaagatttgaagagttgccgtcagtggggaagcagaacccctggacatcccgagaactttgaaacaccaggagttgaagtcacaactgggcctcttggtcagggtatcgcaaatgctgctggattggctcttgctgagaaacacttggctgctagattcaacaagccagacaatgagattgttgatcactacacatatgttatcttgggagatggttgtcaaatggagggtatttcaaatgaagcttgttcacttgctggacactggggacttggaaagcttatagctttctatgatgacaaccacatttccattgatggtgacactgaaattgcgtttactgagaatgttgatacacgttttgaggggctagggtggcatggtaatggaaacactggctacgatgaaattcgtgctgctattaaggaagcaaaggctgtcaaagacaagcccactctgatcaaggtgacaaccaccattggttatggatctccaaacaaggcaaactcgtacagtgttcacggtagtgcattgggtgccaaggaaggggacgctactaggaaaaacctggcgtggccacacgagccattccatgtacccctcgcttccggtgaaagggcactggagtcgccgtgtccctcagggggctgccctggaggccgaatggaatgctaagtttgctgcatacgagaagaagtacaaagaggaagctgcagagctcaaattaatcatcaccggtgaaccaccggccggatgggagaaggcacttccaacatacactccagagagccccgctgatgctaccagaaacctctctcaacaaaatctcaatgcccttgtaaaagtactccctggtcttcttggtggaagtgcagaccttgcttcttccaacatgaccttgctcaaaatgtatggtgatttccagaaggacacccctgaggaacgcaatgttcggtttggtgttagggaacacggaatgggagccatctgcaatggcattgcccttcacagccctggcctgattccatactgtgctactttctttgtcttcactgactacatgagagccgccattaggatttctgccttgagtcaggctagagttatctacgttatgacccatgattccattggtcttggggaagatggaccaacccaccagccaattgagcacttggcaagcttccgtgcaatgcctaatgttttgatgcttcgtccagctgatggaaatgaaacggctggtgcatacaaggttgctgtcctcaacaggaagacaccctcaattcttgccctctctagacaaaagctaccccaactacctggaacttccattgagggggttgaaaaaggtggctacattatttcagacaattcttcaggcaacaatcccgatgtaattctgattggaactggttctgagttggagattgctgctaaagctgccgatgaactaaggaaggaaggcaaggctgttagggttgtctcccttgtttcttgggagctctttgatgagcaatcagatgcctacaaggaaagtgttttaccatctgctgtatctgctagggtgagtattgaggctggatcaacttttgggtgggagaagattgtgggatcgaaagggaaggcaatcggaatcgatcggttcggggcaagtgcaccggcaggcagattatacaaggagttcggcttgactccagaggctgttgttgcagcagcaaaggaactttgctaggcattattaggtgcctttggtgactgtttttgtttttaataataaaaggaatcatccaattttcttatgttgctttgtgattctatgtgtatgaatttgtaattcctctttgaactattttcccatagtttttgcatcaaaaaaaaaaaagtcgacgcggccg

SEQ ID NO: 17845 - DNA, 1274 bp, Gossypium hirsutum
  Clone ID: GOSHI-09MAY01-C1597_1
gcagcatccgccaagaaagtcccacccacgtcggagcctactcatcataggcttataattttctcttcgtctgttggtaaaaaatctaaaagaaagaaagggatatggaagggaactctggcggcggcggcggagcagacagaggaggaggcggcggcggagaaagaggaggaaacgatgtggagctggtttgcaaaacacttcaggtagaacacaagctgttctacttcgatctcaaggagaacccacgcgggcgttatcttaaaatctcggaaaagacatcggctaccaggtcaaccatcatcgtcccttcttccggcatctcctggttcctcgatcttttcaattactacgtcaactccgacgaccacgacctcttcagcaaggaattgcagcttgacactaaagtcttttactttgacattggcgagaaccggaggggtcgtttcttgaaggtgtctgaagcatctgtgagcagaaaccgcagtaccattattgtaccagcaggaagtaccagggatgaagggtgggcagccttcaggaacatattggcagagatcaatgaggcatcaaggcttttcttattgccgaatcagcaaagttctgaactttcagaacgtcttgttgggctttcagatgatgtaggggcgggcttcttacctggtcgcaaccagcctagctcaacttctgaattgaatgtagatagatcaattgaattgccaccacaggatgaaactggtaacatgggggtttcaaaggtgatcagagctgaccagaagagattcttctttgatcttgggagcaacaacagaggacatttcttgaggatatctgaagttgcaggttctgatcggtcttccatcattctcccactgtcaggattaaagcagttccacgaaatagtgggtcattttgtggagataacaaaggatcgcattgaaggaatgatgggtgcaaatcttcgaacggtggatccgccacaaaggtgaatggcaggcagtggaagatggtaaaaataattgtcaagtttggtttaaagcctctaattgtagagatgcaattgtggtgtcattcaaggtttggaataatccgatttttgtctgtttgattaacagagaaatattggagataagttgtgaagggaaataatggacaaattggttgtaatttgtgagtttgatggtgtggcctctcaataatgtctacttctgtttagtatcaaacactgcttgaatgtactaatattaattaattaattaattaattaattactt

SEQ ID NO: 17846 - DNA, 485 bp, Gossypium hirsutum
  unsure (1)..(485): unsure at all n locations
  Clone ID: LIB3828-007-Q1-K6-C5
gggatcgaagggaaggcaatcggaatcgatcggttcggggcaagtgcaccggcaggtagattatacaaagaattcggtttaacaccagaggctgttgttgcagcagcaaaggaactttgctaggcattattaggtgcctttggtgactgtttttgtttttaataataaaaggaatcatccaattttcttaaaaaaaaaaaaaaaaaaaaaaaaaaaaaaaaaaaaaaaaaaaaaaaaaaaaaaaaaaaaaaaaaaaaaaaaaaaaaaaaaaaaaaaaaaaaaaaaaaaaaaaaaaaaaaaaaaaaaaaaaaaaaaaaaaaaaaaaaaaaaaaaaaaaaaaaaaaaaaaaaaaaaaaaaaaaannnaaaaaaaaannaaannaaaaaaanaannnnnaaaaccccccanaaacccccccncaaaaaaaccccaaaaaccccaacccccaccacacaaaccaaaaacccccaaaaaacaccaccccc

SEQ ID NO: 17847 - DNA, 395 bp, Gossypium hirsutum
  Clone ID: LIB3165-008-P1-K1-G10
cccacgcgtccggggtggcatgttatctgggtcaagaatggaaacactggctatgatgaaattcgcgctgcaatcaaggaagcaaaggctgtcaaagacaagcccactctgatcaaggtgacaaccaccattggttatgggtctcctaacaaggcaaactcatatagtgtacatgggagtgcactgggtgccaaggaagttgatgctactaggaaaaaccttggatggccatatgagcctttccatgtaccggaagatgttaaagcctctaattgtagagatgcaattgtggtgtcattcaaggtttggaataatccgatttttgtctgtttgattaacagagaaatattggagataagttgtgaagggaaataatggacaaattggttgtaatt

SEQ ID NO: 17848 - DNA, 370 bp, Gossypium hirsutum
  Clone ID: uC-gsflnu33B046d05b1
tcttatctgagctagagaccgctgataaagccgctgatgaactaccgaaggatgggaaggctgtaagggtagtctcccttgacatcatgggagctctttgatgagcaatcaattgcctacaaggaaagtgttttcccatctgctgaacacctagagtgagtattgaggctggatcaacaattgcgtgggtgaagatagttggactccaaagggaaggcaatcggaattgatctgtttgtggcaagtgcaccagctgggagaatttacaatgaaattgtcttaactccatacgcaattattgctgcagtcaaagaaccttctctaagcttggttcataaatctttgaggaaacttttatgctaataattga

SEQ ID NO: 17849 - DNA, 359 bp, Gossypium hirsutum
  Clone ID: uC-gsronu33B057f02b1
ccctctcttttcgcccacgcgtacggaaaagtcaaaagtgagagttcatcttttgacaaaaaaattatgtttctctaatgaaattatctgcgaaggtgtctgaagcatctgcgagcagaaaccgcagtaccagggatgaagggtgggcagccttcaggaacatattggcagagatcaatgaggcatcaaggcttttcttattgccgaatcagcagcaaagtttctgaacctccagaacgtcttgttgggctttcagatgatgtaggggcgggatttatatctggacacaaccagtctacctcaacttctgaattgcatgtagatagaacagtttgaattgccaccacacgatgaaactg

SEQ ID NO: 17850 - DNA, 356 bp, Gossypium hirsutum
  Clone ID: LIB3165-060-Q1-K1-B11
gctcccatgggtcacattttgtacgatgaagtcatgaggtataaccccaagaacccgtactgtgctacattctttgtcttcactgactacatgagagctgccattaggatttctgccttgtgtgaagcaggagttatctatgttatgacccatgattccattggtcttggggaagatggaccaacccaccagccaattgaacacttggcaagcttccgtgcaatgcctaatgttttgatgcttcgtccagctgatggaaatgaaacagctggtgcatataaggttgctgttctgaacaggaagagaccttctattcttgcctctctaggcaaagctgcccaactccttgaacttca

SEQ ID NO: 17851 - DNA, 625 bp, Gossypium hirsutum
  unsure (1)..(625): unsure at all n locations
  Clone ID: LIB3583-047-P1-K1-G11
nggnatgtcgaggaacgttttaaggggcttgggtggcatgttatttgggtcaagaatgggaatactggttacgatgagattcgtgctgctattaaggaagcaaaggctgtcaaagacaagcccactttgatcaaggtgacaaccactattggttatggatctccaaacaaggcaaactcgtacagcgttcacggtagtgcattgggtgccaaggaagtggatgctactaggaaaaaccttgtgtggccacacgagccattccatgtacccgaagatgttaaagggtgaggagatttgtagaggtttcaatatatgcatttgattatgttttcttgtttggtgttcgaaactttcttaccatatttgcaggcattggagtcgccttgtccaacagggagctgcccttgaagcagaatggaatgcaaagtttgctgaatacgagaagaaatacaaagatgaagctgcagagctcaaattaatcatcaccggtgaactaccggccggatgggagaaggcacttccaacatatactccggagagccccgctgatgctaccagaaacctctctcaacaaaatctcaatgctctcgtaaaagtactccctggtttttttgggtggaagtgc

SEQ ID NO: 17852 - DNA, 275 bp, Gossypium hirsutum
  Clone ID: uC-gsflnu33B098b01b1
actaatgacccatgattccattggtcttggggaagatggatcaactcaccagccaattgagcacttggcaagcttccgtgcaatgcctaatgttttgatgctccgtccagctgatggaaatgaaacggctggagcatacaaggttgctgtcctcaagaggatgacacccttaatttattgtctttactagacaaaagttacttttatttgctggatctcctttgtgggtgctttttaaggtcttttctttcttttaatctattttattttttttt

SEQ ID NO: 17853 - DNA, 258 bp, Gossypium hirsutum
  Clone ID: LIB3165-039-Q1-K1-D4
cccacgcgtccgcccacgcgtccgtctagatcgcgagcgccgccctttttttttttttttgaaaagcaaaattatacaaactcattttaactcaggccaaagcagaaatccggataagtcccaggagaagttacaaatccataaacataaagaaactctaacctcccttttgctcactgctgttattgctgcagccaaagaactttgctaagcttggttcaaagtctctgcggaaacttaaggttttcgattgaagat

SEQ ID NO: 17854 - DNA, 635 bp, Gossypium hirsutum
  Clone ID: GOSHI-09MAY01-C1587_2
acgccactcactgccaccttctttaccacctttcaagctgaagttctagctctaaagcatggacttcactgccacactcttgttctttgctcttttcatatcctccatccaagctgtagacccttgtggttctcggccacaaaacaaagacctatcggtgattccaatctacgggagatgctcaccattcaaaccacccaaaccagagtcatgggtcgacactgtcatcaacatggcttcaaaagacccagcaaggctcaagtacttgtccagcctcgtagcccaaaagaccactgcggttcccattgcttcaggccaacaagtcctcagcattggcaactacgtggtcaaggtcaagctcggaaccccggggcaggtcatgttcatggtgctggatactagtaacaatgttgcttgggttccctgctccggctgcactggttgctccgccaccactttcttgccctctgcttcttcgagttatggctcgttggattgctccttgccacaatgcaaccaggtccatgggctctcatgcccggctacggcggctgctgcttgctttttaaccaatcctacggtggtgattcgtctttctccgccaacttggctcaagattccttaacattagcaaa

SEQ ID NO: 17855 - DNA, 1558 bp, Gossypium hirsutum
  Clone ID: GOSHI-09MAY01-C1587_1
cggccgactcgatccttcgaagtcgtagctttggaagcatggacttcatagctactatcctgtttctagctcttgtcatctcctccaccaaagctttggacccttgcggccctcagccagatgactcggaccttttggtcatcccaatctatggcaaatgttcaccattcaacccacccaaacctgactcatcgttcaacacagtcatgaacatggcatcaaaagacccagcaagggtcaagtacttgtcgagccttgtagcccaaaagaccactgcggttcccattgcttcaggccaacaagtcctaaacattggcaactatatcgtccgggtaaagattggcactccgggtcagctcatgttcatggtattggacactagcaatgatgtggcttgggtcccatgctccggctgcaacgggtgctcagccaccactttctcacccaacacttcttccacctatggttcgttggattgcggtttgccccaatgcgcccaggtccgtgggctgtcgtgcccggctacggggtctgcggcttgctcttttaaccaatcctacggtggagattcatcattttcggccaacttggttcgagattccttaggattagccaatgacattgtcccagattttgctttcggatgtataaacgtcatctctggtggatcagtaccaccgcaaggactgttgggtttgggtcggggacccatgtcacttatttcacaatccggggccctctactctggtgttttctcatattgtctacccagtttcaagtcctactacttttcgggttctctcaaactcgggccagttggacaacccaagaacattcgaaccaccccactcctaaaaagcccacaccgaccttcactttactatgttaacctaaccggaataagtgtaggccgggttcaagtccccattgccccggaatacctagcgtttaaccccaacaccggggcagggaccataatagattcgggtacggttgtaacccgattcgtccagcccatttacaaggcaatccgagatgagtttgtgaagcatgtgaaaggtccatttactgccattggagtatttgacacatgctttgatgctacagcagaagctgaggcacctttaataacattacatttcgaagccttgtcgatgccattgccaatggaaaacagcttcttacacaccagtgccgggtctcgggcatgcttggccatagcaccggtccccaacaatgtgaacgccgccatgaatgtgatagccaatttgcagcagcagaatcataggattctctttgatgtcatcaattctcgcttgggaattgctcgtgaagcttgcaattagtttcttattggctttattttgttttgtttgttctttgtttgctttcttgtctttatgcgtaagctcttttttttagtgtttttatatgatgaaaaataggtttagttaataaacatcacaaaaaaaaaatcaccattttgtgattatatatgtattttcttttaagtttttaattgtgaaaaggaatggaggtaacttaactatactattag

SEQ ID NO: 17856 - DNA, 883 bp, Gossypium hirsutum
  Clone ID: GOSHI-09MAY01-C1557_1
cccccccgccccggaagcgactttcaactttgaagaggaagacttgttaaaggaaagaagctgtaaaagtgagatagagatgttgaggttcacgttatattattgggtgttaatagttattttaattccatctgcctcctttgtgattgtatcatcatcgaaagaacagctaagttcaaagcaatgtgaggatctgggtttcacgggtttagccctttgttctgattgcaacactttttctgagtatgtcaaggacaaagagttgatatctgactgcttgaaatgttgcacagaagactcagatgattctacaagtaagattacttattcaggtgcaatactggaagtttgcatgaggaaactagtattctatccggaaattgttggtttcattgaagaagagaaggacaagtttccaacagttaaagttcaatatcttttcaattctcctcccaagttgatcatgttggatgatgagggccaacataaggaaaccataagaattgacaattggaaacgtgaacacatgctgcaattcctgcagaagaaagttcagccctattccgcaagctcatagacagtcgttcacattcctgttatcgcaagataaagtaaaaccgaactcagcaagattgaactatttattcgtgttagccttgtcgttttaaattatgtgcttgagcttactgattttctgtctttaaagagagaataattatgaataaaggagtatacagttgatcagatggtatcactataagccaagtgacataatttaagagctcgctcatgtatcatgcccattaagagaattctaagtgaattggattggctgtactttgatcggttggtgcctggtggaaaggtttgacaattcttggcc

SEQ ID NO: 17857 - DNA, 539 bp, Gossypium hirsutum
  Clone ID: LIB3493-050-P1-M1-D6
gtcaaggacaaagagttgatatctgactgcttgaaatgttgcacagaagactcagatgattctacaagtaagattacttattcaggtgcgatactggaagtttgcatgaggaaactagtattctatccggaaattgttggtttcattgaagaagagaaggacaagtttccaacagttaaagttcaatatcttttcaattctcctcccaagttgatcatgttggatgacgagggccaatataaggaaaccataagaattgacaattggaaacgtgaacacatgctgcaattcctgcagaagaaagttcagccctattccgcaagctcatagacagtcgttcacattcctgttatcgcaagataaagttaaaccgtactcagcaagattgaactatttattcgtgtaagcctgtcgttttaaatattgcttgagctactgatttctgcttaaagagagatatatgaataagagttcagtgtcaatgttacttagccaggctattagagtgtatgtatgcgtaagattaggatgatgtgctg

SEQ ID NO: 17858 - DNA, 731 bp, Gossypium hirsutum
  Clone ID: GOSHI-09MAY01-C1547_3
cggacgcgtccgtttcttattaataatcactcataaattttttaaaggaattgagtatagtttaattaaaaataaattcatttataattatatttactatctttgaaaaaaagtaccaagttaatttaatacgatattaattgttttcttttgagtgttgttgtgatgaagagcaataggttttatttctgactttgaggagaggcctcttgatgcttgaacccataatctctatattccttgtggtaatgggatcgtttgttcaagtataaagaggtacctcttggcagaatcttgagataaaattttgtgctgctctccagtgcaataatattctgaagaaaacgatactttggtcttatcagtatgataacaaaaatagttttcaaaattagattataccaagttacttcaactctgattaatttttcattcttagaaaagcttatttataaacaattacttacaagctgacgactctttgtctaatttctttttcttaaagaaattttgtttttaaaaccaatttactctttggtataaatgaaattaaatgaacttaacgttacttagaaagaagtaattaatattaatattggtagataaatttatcattttggtaacgtcttttaagtcgtagtctgattaaaaactggttctaacttaaagtgcattgaaatgaatttggttatatgttatacttgcaatataaagttgaacagaacatctgc

SEQ ID NO: 17859 - DNA, 1364 bp, Gossypium hirsutum
  Clone ID: GOSHI-09MAY01-C1547_1
cggacgcgtgggccgtcgcgcgggccggcgcgtgggcaaaaatagtttccaggattagatttataccaagttacttcaactcggattaatttttcaatcttagaaaagcttatttataaacaattacttacaagctgacgactctgtctaatttctttttcttaaagaaattttgtttttaaaaccaatttactcttttggtataaatgaaattaaatgaattaaatgaacttaacgttacttagaaagaagtaattaatattaatattggtagataaatttatcgttttggtaacgtcatttaagtcgtagtctgtattaaaaactggttctaacttaaagtgcattgaaatgaatttggttatatgttatacttgcaatgaagagttgaacagaacatctccaattgctgtgattcatatagagaaatagtgcagtttctacttttttttcaagatgcattgaaatctcccttaatttccacaatctctcaacttgaaattcatcattgattcaaaagtgctgccaatactacagctggaaagtactttctattgatggccattcgcgttaaaaggtttacaccatttatgggtcaaattaccagtgtctctatcatgattgttctatttcaaggtttatttccatgtcatatcatttggcctgcaaccactttaattccctttaattcctatggtattttatctgtatatttttgctagtgcattaccgaactctgtacttgtaggagaatgccatatgcaggttgaggcatgtatttttgtgtgtattgctttttgtagttctttaggcccttgcatgggcttcttttttagatggattgaaggttgggacttcactagcactagatattggaaggtgtaccatgtcaagcatgttggccaatgttaacactggaaatcaaggcctacagggtgaactgtaaatctagctttgccaagtttcaagatttatgtccgaagacatggttagacataagaggcaagggatcaaagctttggagggctcctagtcgggatgatcatctcaaattcacatgcagtagcgggtctattcctggaagattattcattagttgctaatttgaagcaagagttaattgtttgaatcccctcttggtttacgtggtgcagagctcaacttagtgttgaagaactactgttagttgttgaagttggtcatacgaggtacatgtctaccgtgtaacaagttcctttacatagtgaaaattttcagcggactacggtcccgtggtttttccccttgaaatatcaaggggttctccaccgtacattctgttgtcttggtatacattcatattgcacataatggtgctcattgca

SEQ ID NO: 17860 - DNA, 492 bp, Gossypium hirsutum
  Clone ID: LIB3585-049-P1-K1-G12
cccacgcgtccgcccacgcgtccgcccacgcgtccgcaagtttcaagctttatgtccgaaggcatggttaggcgtaagaggcaaaggatcaaagctttggagggctcctagtcgggatgatcatctcaaattcacatgcagtagcaggtctattcctggaagactactcattagttgctaatttgaagcaagagttaattgtttgaaccccctcttggtttacgtggtgcagtgctctacttagtgttgaagaactactgttagttattgaagttggtcatacgaggtacatgtctactgtgtaacaagttcctttacatagtgaaaatttttagcggactacggaactactgttagttattgaagttggtcatacgaggtacatgtctactgtgtaacaagttcctttacatagtgaaaatttttagcggactacggtcccgtggtttttccccttgaaatatcaaggggttttccacgtaaattctggtg

SEQ ID NO: 17861 - DNA, 210 bp, Gossypium hirsutum
  unsure (1)..(210): unsure at all n locations
  Clone ID: LIB3145-052-Q1-K1-B4
cccacgcgtccggttggtcatacgaggtacatgtctactgtgtaacaagttcctttacatagtgaaaatttttagcggactacggaactactgttagttattgaagttggtcatacgaggtacntnnnangaaaaaaaagtataaaatgatataatttatgaaattaaaggtgtgacagatcatnaagatcttacaatgaataggggggg

SEQ ID NO: 17862 - DNA, 823 bp, Gossypium hirsutum
  Clone ID: GOSHI-09MAY01-C1567_1
aattcccggtcgcccgcgcgtccgcttctcttcaacttcattaaacactcttctaagaagagaagggaaaaagggaaggtgcctgctttccgtcattcccgattccatggcttgtaaaatctcaaattccctgttcctttgcttgggtcctagtcaaaggccaattaggagccaaacaattgctattcattcttctactgcaagtatctgtcatttgaattgggacaatcttcttgttaagggaattaaccataggaagggtataattcccttaagaaggaataaagtcatacaagctgtggcggttccagtaagaccatcttcagcagacagtgctgagtacagaaaacagttagcggaaacttatggattcaggcaaattggagagcctcttcctgataatgttacattaaaggatgttatagacacccttccaagaaaggtgtttgagattgacgatgtgaaagcatggacttcagttttaatatctgtcacttcctatgcattggggatcttcatgatttcaaaagccccatggtatctacttcctttagcttgggcatggacaggaacagcaataactgggttctttgttataggccacgattgtgctcacaaatcattttcaaaaaacaaattattggaagacattgtgggaactctggcctttctaccactaatatacccatatgagccatggcggtttaagcatgacaggcaccatgcaaagacaaacatgttatcagaagatacagcttggcaccctgtttgggaaaaagagtttgagacttctccttttctacgcatagcaatcatgttcggt

SEQ ID NO: 17863 - DNA, 1140 bp, Gossypium hirsutum
  Clone ID: GOSHI-09MAY01-C1517_1
aacattttaaaaaacaaaatctaatattgagaaataggattggaaagagattccgggattcgagcatttcgaggcggaaaaagaattacttctcactgttacgtaacaaaattccgaaagagtgcgaaaaagcaaagttcgactcctcactccaacggaatttaatcgttggacttggaagcttttaagagtgaaaaaaagagatagagagagtagtagactccagagaggtgttagggatttgagtttgaagatgacagaggtgagattacatatatatgatgtgaccaacagtggatcggataaaaccaacagcactattgttcaaatcaacaagatattcaaggacggaataggcctcggcggcatcttccacagcgccgttcaggtttatggagaagaggaatggtcttttggcttctgtgagcaagggtcgggggtgttcagttgtccttctggcaaaaatccaatgtatacatatcgcgagtccatggtccttggaagaactaactcttcaaaattgaacgtaaaccagatcttgcaggagcttagtagagagtggcctggaagttcctacgacttgttatccaaaaattgtaaccatttctgtgatgagttctgcgaaaggcttggtgtccaaaagcttccaggttgggtaaaccgatttgctaatgctggtgatgccgctatagaaatagcagaaaacactgccttacggttgagacaagccaagactgagatagtatcagctagcaaagtggcatatcgttttcttgtgggtgttacgtctagttctagtggtggcaatgatagccccggcaattcaaatagaggaagccccagatttcaagcagcttggtttaaaaacatcatcactactggtgccaaaccatctagcagttctgaaatcgagactcagggtggcagtggttttcagaaccatcggctacagaattctgcacagacaatgcaacaaaatttccaagatccccaaagatccccgtgacaattcaaataatttggaataaccatggtgacagaattcatggcatgatatgtgatggaaacgatttttggaagccctgttgtgtaatagttgaaactctacattgccaattaagatgtcattcattgtgtatc

SEQ ID NO: 17864 - DNA, 416 bp, Gossypium hirsutum
  Clone ID: LIB3148-054-Q1-K1-C11
cccacgcgtccgtggtttaacatttgtttgtgaactgcagtcttatcctgaatgtaaattttgcagtaaatatttttgcagtacacttgtcagccttctgctttctagtcttttgagcatgctgtactaaatttgcattaaaaattgccctgaatctgaaatgccgactatattgttgttgagaatgtgaattgacaagcatagaaggcagaaactggaatattgcagtaaccttctttgtacggtttggttttttatgcatgttttaagtgtcccaagcctagaagctttaaaccttgctatggtcagtgcttaaaattagtgtagcgttaattattgcagttgagacaagccaagactgagatagtatcagctagcaaagtggcatatcgttttcttgtgggtgttacgtctag

SEQ ID NO: 17865 - DNA, 539 bp, Gossypium hirsutum
  unsure (1)..(539): unsure at all n locations
  Clone ID: LIB3543-020-Q1-K1-D1
acaaattctaattttgagaaacaggattggaaagagattccgggatttgagcatttcgaggcggaaaaagannnnccctcactgttacgtaacaaaattccgaaagagtgcgaaaaagcaaagttcgactcctcaatccaacggaatttaatcgttggacttggaagcttttaagagtgcaaaaagagatagagagagtagtagaatccagagagctgttggggttttgagtttgaagatgacagaggtgagattacacatatatgatgtgaccaacagtggatcggataaaaccaacagcactattgttcaaatcaacaagatcttcaaggacggaataggcctcggcggcatcttccacagcgcagttcaggtttctcttttcacttttacatttctattactttctttattgttgtgcttgaatgagatctagggttcttggcatgggacttttttttttggtgttctttttcttggattttaacttgtaagttatatgaatatttgaccctgattntaaacaagatgtgccgttc

SEQ ID NO: 17866 - DNA, 388 bp, Gossypium hirsutum
  unsure (1)..(388): unsure at all n locations
  Clone ID: LIB3148-055-Q1-K1-C11
accaagcgtacgacctaaaccagactatcagtttgaagatcaattgtgttgtgaaatgtgggtttgataaaaaaaaaaaaaagagaaaaaaaaaaaaaaaaaaaaaaaaaaaaacaaagctgtactaaattagcattaaaaattgccctgaatctgaaaatgccgactatattgttgatgagaatgtgaattgacaagcatagaaagcagaaactggaatattgcggtgaccttctttgtacggggtggttttttatgcatgttttaagtgtcccaagcctaaaagctntaaaccttgctatggacagtgcttaaaattagtggagcggtaattattgcagctgagacaagccaagactgagatagtatcagctagcaaagcggcata

SEQ ID NO: 17867 - DNA, 400 bp, Gossypium hirsutum
  Clone ID: GOSHI-09MAY01-C1507_4
ttagattgtgtaattgttgggaagggagattggtgtgggcatcatcgctattaaagaaagctggttatatgtgttttgaaaataagttcatatcgaattgtgacgtgaatattaccaatccaactagattagacatgagtctgaagcaaaagaaatacaaaacccccaaatatgacattggaatcaaagaggatcgataaatggtgacgaaactaattgcatgaccttgacatttggcatatgaaggttctttgacatcactgcaacagcaaataacatatcctgcaacgccaaagtatcctaagatcactcaataatagactgaataaccccggctccaaccgtcttccctccttctctgatagcaaaccgcatcccttgctcacaagccacaggcatg

SEQ ID NO: 17868 - DNA, 524 bp, Gossypium hirsutum
  Clone ID: GOSHI-09MAY01-C1507_3
cccacgcgtccgcccacgcgtccgggcattacagctgaagatgtgaatgctgcttttagaaaggcagccgagggaccattgaagggtgtattggaagtgtgcgatattcctcttgtctcagtggacttcaggtgctctgatgtttcttccaccattgactcttccttgaccatggtcatgggagatgacatggtcaaggtggtggcctggtatgacaatgaatggggttacagccaaagggttgttgatctggcacacttggtggcaagcaagtggccgggcatgcctgtagctggaagcggtgaccccttggaggattactgcaaggcaaacccagcagatgaggaatgcaaagtttacgaggcttaaatagttgcaactttatgattatttttaattttttttttacttgcagatggtatagttggtggccaagggttttccaatgttcatgttaacagaaaaaataaacaggtcattttgtaatgacagcagagtgacatgaacatataacatttcaatgc

SEQ ID NO: 17869 - DNA, 734 bp, Gossypium hirsutum
  Clone ID: GOSHI-09MAY01-C1507_2
cccacgcgtccgcccacacgttcgcaaccacccactcttacactggagaccagaggctctgaggggctttacaccgtgacttgaggagagccagggctgcagcattgaacattgtaccaacaagtacaggtgctgccaaagctgtctcccttgtgcttgctcagctcaagggcaagctcaatggcattgcacttcgtgtgccaaccccctccgcccacgcgtccgcccacgcggccgatgttgagatgaagggtatcacagctgaagatgtgaatgctgcattcagaaaggcagctgaggggccattgaagggcgtattggatgtgtgtgatgttcctcttgtctcggtggactttaggtgctctgatgtttcctccaccattgactcttcattgaccatggtcatgggagatgacatggtcaaggtggtggcctggtatgacaatgaatggggttacagccaaagggttgttgatttggcacacttggtggcaagcaagtggccaggcatgcctgcaggaggaagcagtgaccccttggaggatttctgcaagacaaacccagctgatgaagaatgcaaagtttacgaggcttaaatgattgcaattttcatttttttttaaaatgtttgttttccatgctggtggtatagttagtggtcaagattttccagtgttcatgttatcaataagctcattttgtaataacaccagagtggatgaagagaatttatc

SEQ ID NO: 17870 - DNA, 1768 bp, Gossypium hirsutum
  Clone ID: GOSHI-09MAY01-C1507_1
ttctatcgcgtccgcccacgcgtccgcttcttcattttccaaagccaaaggccaaaaccctcctttcctctcctctcctctcctctacaaggaaatggcaatttcatcaacagcggcagccactgccgcttcttctaagcttagatacccacacgcctcccctttcccaactcactcctcaaccaccacctctgcctttttctcctcaattccctctaaactaacccctacccacctctcctcttccttcctccctcctttcctcactaccgtcgccaccacttccgtattccctcgccgtcgcggttctttcaccgtcaaagctgcccgtggcaaattcgaacgcaaaaagccccacgtcaacatcggcaccatcggccatgtcgaccacggcaaaaccaccttaactgccgctctaactatggccttagcctccatgggtaacagtgccccaaaaaagtacgacgaaattgatgccgcccctgatgagcgtgcccgtggcatcaccattaacaccgccactgttgaatacgaaaccgaaaatcgccattacgcccacgtcgactgcccagggcacgctgattatgtcaaaaacatgattaccggagctgcccaaatggacggtgctatcttggttgtttccggagccgatggacccatgcctcagactaaagaacatatcttgttggctaaacaggtcggtgtccctaacgtggttgtgtttttgaacaaacaagaccaggtagatgatgaagagcttttgcaattagtggaattggaggtgcgtgaattgctctctagttacgaatttcccggtgatgatgtccctattatttctggctccgcacttttagctttagaagctttgatggctaagcccagtattcctagaggtgaaaaccaatgggtggataagatttatgaacttatggatgctgttgatagttacattcctgttcctcaaagacaaacagatttgcctttcttgttagctgttgaggatgtgttttccatcactggtcgtggtactgttgccactggtcgtatcgagagaggtactgttaaggttggagagactgttgacattgttggattgaaggatacaaggaacgtcacagttactggtgtggaaatgtttcaaaagacattagatgacgccatggctggtgataatgttgggttgttacttagaggtgttcaaaaggccgatattcagagagggatggttttggctaaaccagggacaatcactccgcataccaagttcagcgccattgtctatgtgttgaagaaggaagagggtggcagacattctcccttcttcgcaggttataggcctcagttctacatgaggaccactgatgtcactggaagggtggcttccattatgaatgataaggatgaggagtctaagatggttatgcctggtgaccgtgtaaagatggtagttgagcttatcatgcctgtggcttgtgagcaagggatgcggtttgctatcagagaaggagggaagacagttggagccggcgttattcagtctattattgagtgatcttaggatactttggcgttgcaggatatggtatttgctgttgcagtgatgtcaaagaaccttcatatgccaaatgtcaaggtcatgcaattagtttcgtcaccatttatagaacctctttcattccaatgtcatatatttggaggtttgtatttcttttgcttcagactcatgtctaatctagttggatgggtaatattcatgtcacaattcgat

SEQ ID NO: 17871 - DNA, 453 bp, Gossypium hirsutum
  Clone ID: LIB3120-001-Q1-K1-H8
caaggaaatggcaatttcatcaacagcggcagccactgccgcttcttctaagcttagatacccacacgcctcccctttcccaactcactcctcaaccaccacctctgcctttttctcctcaattccctctaaactaacccctacaagggttgttgatctggcacacttggtggcaagcaagtggccggcctggctggagctggaaaccgtgaccccttggaggattactggaagacaaacccagcagatgaagaatgccaagtttacgaggcgttaatagttgcaactttatgaatggttttttcttttactcgcagatggtatagttggtggccaagggttttccaatgttcatgttaacaaaaaaaataaacagctcattttgtaatgacagcagagtgacatgaacatataacatttcaatgcatgcagctgcaatcatcttttgaataa

SEQ ID NO: 17872 - DNA, 379 bp, Gossypium hirsutum
  Clone ID: LIB3165-004-P1-K1-G8
cgaacttcccaaaaccaaaccccaactctctgcttatggatcctctcctatgctcggcgagcggggggcactttcatgaacagcggcagtcactgccgattcttctaagcttagatacccacacgcgtgccctttcccaactcactcctcaaccaccacctgtgcctttttctcctcaattccctctaaactaacccctacccacctctcctcttgcttcctccctcctttcctcactaccgtcgccaccacttccgtattccctcgccgtcgcggttctttcaccgtcaaagctgcccgtggcaaattcgaacgcaaaaagccccacgtcaacatcggcaccatcggccatgtcgaccacggcaaaaccaccttaact

SEQ ID NO: 17873 - DNA, 315 bp, Gossypium hirsutum
  Clone ID: LIB3165-014-P1-K1-C10
gatcctctttgcatgaccttgacatttggcatatgaaggttctataaatggtgacgaaactaattgcatgaccttgacatttggcatatgaaggttctttgacatcactgcaacagcaaataacatatcctgcaacgccaaagtatcctaagatcactcaataatagactgaataaccccggctccaaccgtcttccctccttctctgattccaatgtcatattttggagttttgtatttcttttgcttcagactcatgtctaatctagttggattggtaatattcatgtcacaattcgatatgattttattttc

SEQ ID NO: 17874 - DNA, 577 bp, Gossypium hirsutum
  Clone ID: GOSHI-09MAY01-C1497_2
ccaaggatagtaagcagctcgatgctgaagttcaccgcaactacatttacggtggtcacgtagccgcatatatgaggattttgatggaagacgagccagaaaagtatcagtctcacttcagcgagtatattaagagaggaatcgaagcagataacattgagtccttgtacaagaaggttcacgctgctatccgtgcagatccctctgcaaagaagtctgaaaaggctcctcctaagcaacacaagaggttcaacttgaagaagctgacgtacgaggaaaggaaagctaagttgattgatcgattacacacccttaatgccgctgctggtgcggattccgaagatgaggattgaacgtagtatgctgatttcgaaaaatactgaacttgtttacctgcttttgtttttactgttctataaagaactatttgaagttaatttcttttttgtttaggttagcttatttacttctcaatttcaattttgttattaggagttctgtactttttttttaaacagtttctgaaggcgactgaatgatcagattcttgtgaaatgcgaattcggttttgagtcct

SEQ ID NO: 17875 - DNA, 1209 bp, Gossypium hirsutum
  Clone ID: GOSHI-09MAY01-C1497_1
ctcctccttcccctctagccgtctctccctccttcactttcagatcaccaaaaccttcaaaatggcatttgtcaaggctcagaaaaccaaagcttactttaagcggtttcaggttccatacaagagaaggagagagggaaagactgattaccgggctaggattcgcttaaccaatcaagacaagaacaagtacaacacgcctaaataccgattcgttgttcgatttagcaacaaagatatcaccgcacaaataatttctgctaatattactggtgatatggttcttgcttcggcttactcacatgagcttccacgatatgggcttgaagtgggtcttacaaactatgccgcagcttattgcactggattgcttttggggcgccgtgtgcttaagatgcttgaaatggatgatgagtatcaaggcaatgtggaggctaccggagaggatttctcagttgagccaactgacacaaggaggcctttccgtgctctccttgatgtagggctgatcaggacaaccactggcaatcgtgtttttggtgctctaaagggagccttggatgctggtttggatattcctcatagcgacaagaggtttgctgggttctccaaggacaacaagcagctcgatgctgaggttcacagcaagtacatatatggtggccatgttgctgcatatatgaggactttgatggaagatgaacccgagaagtatcagtctcacttcagcgagtatattaagaggggaattgaggctgataacattgagtccttgtacaagaaagttcatgctgctatccgagctgatccaactgcaaagaagactgaaaaggagcctcctaagcagcacaaaaggttcaacttgaagaaactaacatacgaggaaaggaaagctaagttgattgaacggttacacacccttaatgccgctgctggtgctgattcagaggaagaggattgaatgtaggaatgctcatttcaaagcactaaaattattccatgcttttctttattatacattgctgttgactgcagttttgtccagaactgagttgcattttgtaaggggttgaacttatttcgcattttgtttcaattttgttaagaatttttgttattttttgcaattctagtgtaattgaattattaggtttttggatcaaaaaaaaaaaaagaaaaaaagatccgaaaaaaaaacacgaacagact

SEQ ID NO: 17876 - DNA, 485 bp, Gossypium hirsutum
  Clone ID: LIB3582-011-P1-K1-G5
acgacgctcacgcgtacgcgtacgcgtacgcgtacgcccacgcgtacgcccacgcgtccgcccacgcgttcggcaacacaagaggttcaacttgaggaagctgacgtacgaggaaaggaaagctaagttgattgatcgattacacacccttaatgctgctgccggtgcggattccgaagacgaggactgaacgtaggatgctgattacgtaaaatactgaacttgtttacctgcttttaattttactgttctactgctgttctataaagaactatttgaggttaatttcttttattgtttaggttgagcttatttacttctcaatttcaattttgttattaggagttctgtacttattttttgaaacagtttttgaaggcaactgaatcatcagattctcgtgaaatgcgaatgtggctatgagtcaatagaagcttacaaggcccttcgtgaccgagcgccttatcctccaaaccatgtggttg

SEQ ID NO: 17877 - DNA, 452 bp, Gossypium hirsutum
  Clone ID: LIB3145-024-Q1-K1-B11
cccacgcgtccgcccactcgtccgcccacgcgtccgcccacgcgtccgcccacgcgtccgcgcacgcgtccggcttactttaagcggtttcaggttccatacaaaagaaggagagagggaaagactgactaccgggctaggattcgcctaatcaatcaagacaagaataagtacaacactccgaagtaccgattcgttgtccgatttagcaacaaagatgtcaccgcacaaatagtttctgctaatattgctggtgatatggttcttgcttctgcttactcacatgagcttccacgatatgggcttgaagtgggtcttacaaactatgccgcagcttattgcactggtttgctgttggggcgccgtgtgcttaagatgcttgaaatggatgaagagtatcagggcaatgtagaggctactggagaggacttctcagttgagccaactgacac

SEQ ID NO: 17878 - DNA, 238 bp, Gossypium hirsutum
  Clone ID: uC-gsronu33B077c06b1
gcatatctagcctgtgactggctaaaattgcatttcacaagcaactaaatatccaaaaatctaataattcaattacactagaattgcaaaaaataacaaaaattcttaacaaaattgaaacaaaatgcgaaataagttcaaccccttacaaaatgcaactcagttctggacaaaactgcagtcaacagcaattaaaagggtttatgaaggtctcaaagtaaaaatttagttacatttt

SEQ ID NO: 17879 - DNA, 794 bp, Gossypium hirsutum
  Clone ID: GOSHI-09MAY01-C1457_1
caaaactgtttgcggaccacgaggaacgagaaattcaaaggttatcagccaatatcataaatcatcagttgaagagattggagctgaagcttaagcagtttgcagaagttgaaacgttactcatgaaagaatgtgaacaagtggagaaaacaaggcaaaggtttgctgctgagagggctcgaattgtatcagctcaattcggaaccaccggagtcgcttcacaaatgagtgtacctgtgatttcttctcccatggttaataacattggcaacaacaggcaacaggtattgtcagcctcaccttcaacgccaagcaattctggatatgttaacaaccaaccagtacactccccatgatgccacttcactgcaacgccaaccaatgtttcctatgggtccgaggatgccccttacagccatgcaagcatccacatcagctcctcctaatgtcatgttcaactcccgagggaatgcacaaccaactcttaaccatccactaatgagggtcggtttccgggactggatctggtctaggttgaaatggaagagtcaaaaaataaaatttggattttattgatggaattcattggtgttgttgattttctgcgcttcggagacaaccagtagcttggacgaacagttgaagcatcttcagcttcaaaatatagaacctgaagcaatttttagggtttgtaacatcatacaattaatgtagtttggggtttaattatgaaatattgagactaattaccaaaattaattttgtataaataaattatctaaaaattttagagc

SEQ ID NO: 17880 - DNA, 796 bp, Gossypium hirsutum
  Clone ID: GOSHI-09MAY01-C1447_1
caaatttgtctcaatggtctttaggtctccactaaggaaaagaaataccaatttatccaataaacaaaaggcgcagcctttgatgaagtgctttagctttgaggagatctcaactgctacaaacaacttccatccagaaaatatagttggtcgaggcgggtattcagaagtttacaggggtgacctttctgatggaagagctgttgcagtgaagaggttggccaaggacaacagggatgaaaacaaagagagagaattccttactgagttgggcactatcggacatgttcgccaccccaatactgcaaccttagttggctgttgcgtggaaaatggactttatttgattttcaacttctccgagaaaggaactctggcctctgccttgcatggtaaaataaatgtggttttggattggccggtgagatacaagattgcccttggagttgctagaggtcttcattatctacacaaatgctgcaaacaccgaataatacaccgtgacataaaagcttctaatgtccttcttggaccaaattacgaaccgcagattactgattttggccttgctaaatggctccctaacaaatggactcaccatgctgtgataccaatagaaggaacatttgggtacctagcaccagagtatttcatgcatggaatcgtggatgagaaaacagatgtttttgcatttggggttcttcttctcgagatcatcactggtcgccggccagtggattcgtcaaagaaaaaccttctcttatgggccaaagccacttatggaatctgggaacat

SEQ ID NO: 17881 - DNA, 1089 bp, Gossypium hirsutum
  Clone ID: GOSHI-09MAY01-C1467_1
cccacgcgtccgcgaacaaaatcgaaaaaccttgactcagccagccaccaagatcaatggcgacgcatatcctgagacgacaagtgagtcagatcctttcccatgccagccctaaccctaatcctgcctcgtatttctctttagctagacatttctcttcggcaaccgacaccattcgagccactctcttccccggcgatggcatcggccccgagatcgctgagtccgtcaaacaggtttttagaactgctgaagtgccaattgaatgggaagaacattatgtcggggaccaagttgatccaagaactcaaagttttctaacttgggaaagtctagaatcagtaagaaggaatcgggtaggcttgaaaggtccaatggctactccaattggtaaaggtcatcggtctttgaatcttacactaaggaaagaacttaatctgtatgccaacgtcaggccttgttacagtctcccgggttataagactcggtacgatgatgtgaatcttatcactattcgtgaaaacactgaaggggagtacagtggactcgagcatcaagtagtgagaggtgtggttgaaagtctcaagattattactcgtcaggcaagcttaagggtggctgaatatgcttttcattatgctaagacccatggaagagagagagtttctgcaattcataaggccaatattatgcagaaaacagatggtctttttcttaagtgctgtcgtgaagttgcagagaaatatcctgagataacttacgaggaagtagtcattgacaattgctgtatgatgcttgtgaagaatccggcactttttgatgtattggtgatgcctaacctctatggtgacattatcagtgatctttgcgctggattgattgggggcttgggcttaacacctagttgcaatattggtgagggaggaatagcacttgctgaggctgtccatggttcggcacctgatatctctggaaagaatatggcaaatccaactgccttactattgagttcggtctcaatgttgcgccacttaaatctccatgacacggctgttaggattcaggaagccattctcagcacaatctcag

SEQ ID NO: 17882 - DNA, 482 bp, Gossypium hirsutum
  Clone ID: LIB3585-057-P1-K1-E2
cggacgcgtgggcggacgcgtgggcggacgcgtgggcggacgcgtgggcgacaccattcgagccgctctcttccccggcgatggcatcggccccaagatcgctgagtccgtcaaacaggtttttagaactgctgaagtgccaattgaatgggaagaacattatgtcggggaccaagttgatccaagaactcaaagttttctaacttgggaaagtctagaatcagtaagaaggaatcgggtaggcttgaaaggtccaatggctactccaattggtaaaggtcatcggtctttgaatcttacactaaggaaagaacttaatctgtatgccaacgtcaggccttgttacagtctcccgggttataagactcggtacgatgatgtgaatcttatcactattcgtgaaaacactgaaggggagtacagtggactcgagcatcaagtagtgagaggtgtggttgaaagtctcaagattattactcgtc

SEQ ID NO: 17883 - DNA, 368 bp, Gossypium hirsutum
  Clone ID: uC-gsflmaxxa094b06b1
cggtctcgtgggcggacgcgtgggatcaatggtgcgcaatatctgagacgtcacgtttgtcagaccctttcccatgtgagccctaactctaatcctacctcgtatttctctttagctagacctttctcttcggccaccgacaccattcgagccactctcttccccggcgatggcatcggccccgagatcgctgagtccgtcaaacaggtttttagaactgctgaagtgccaattgaatgggaagaacattatgttggggaccaagttgatccaagaactcaaagttttctaacttgggaaagtctcgaatcagtaagaaagaatcgggtcggcttgaaaggtcccatggctactcctattggtaaagg

SEQ ID NO: 17884 - DNA, 341 bp, Gossypium hirsutum
  Clone ID: LIB3272-019-P1-K1-G10
accggacggaaggccgggcagccacccgtaaggcatcaatgacgacgcatatactgagacgacaagtgagtcacatcctttccgatgtgagccctaactctaatcctacctcttatttctgtttagctagacctttatcttaacccaccgacaccattcgagccactctctttcccggcgatggcatcggccccgagatcgctgagtccggcaaacaggtttttagaactgctgaagtgccaattgaatgggaagaacattatgttgtggaccaagttgatccaagaacctaaagttttctaacttgggaaagtctcggatcaagaaaaaagaatcgggta

SEQ ID NO: 17885 - DNA, 1575 bp, Gossypium hirsutum
  Clone ID: GOSHI-09MAY01-C1407_1
gttttctgtgttctctcggagttcagacaagaaaataaaagaaccggcagcggttttctgaactttttttttttttttattatcttgagtaacagtttttttatataaatattttagattttttttggaaaagaaaattatgttggttggacagaaaaaaaaaaagtttcgaagtactttgctacagggaaatgcgaacaggtctgagaagaatagtgtcagtgaagagtttgttctggtgcggtgcttagaagttacaggtgaccggcttggagtctgctaagtataatttaatatttgcatggagacaaattcaggtgttacagtgataggagcagaagctccatcagcttatcaaatggcacctaggaccgaaaatgttagccagattggtgtcggctcaacaacagaggatgtttcaccacgtagtgtagggttaactggtagtatagaaaagaaaaagagaggtaggcctaggaaatatgggccagatgggacaatggcgagggcattgtcaccaatgcctatttcctcatccgtcccgcccagcggaggtgagttctcaagtggtggcggaaagcgtgggagaggaccaggtagccggtaccagattaaacatcagaagggaatggacttggagaatttaggtgaatgggctgctacttctgtcgggtcaagttttacgcctcatgttatcacggtctatgccggcgaggatgtgacaatgaaggtgatatcattttctcaacaaggaccgagagctatttgcatcctatctgccaatggagtaatttcaaatgttacacttcgtcaacccgattcttctgggggcactcttacgtacgagggtcgctttgagatactttccttgtctggatccttcatgcctacagaaactcaaggaacgagaagtcgatctggtgggatgagtgtatctttggcaagtgctgatggccgtgttgtaggaggaggagttgctgggcttctttatagctgcctgccctgtacaagttgttgtcggcagctttttacctggcaaccagcatgatcaaaaacccaaaaagcagaagatcgagtccataccagctactgttgcaccaaacccgagtattgccgctgcaccagcttcaaatgctgagaaagaggatggcatagatgttgtttcgccgcaacaaaattcgaatgccctgaaaccaagcctcaccggtgctaccttccggagagaaaattgggcggccaccatgcaggagccaaggaattcagcaacggatatcaacatttcgttgccagcaggttaatcttataaaatcagactcggaggctgactagactaaaatccctgatgtttttcgttcatcaaagagtacggagtgttatgtgttgttgaatattactgtaggatgatgaggtaggattaatatccagctaggttttaatgtctcaggcaaagacaatcttttcttctttttttagcctgattgatgagatttaccctagattttaaaagatcttccgattatgtagtagtgacatttttatcagttctattcatatggtttcatttatcattcaact

SEQ ID NO: 17886 - DNA, 545 bp, Gossypium hirsutum
  unsure (1)..(545): unsure at all n locations
  Clone ID: LIB3543-036-Q1-K1-A8
ccccgcgtccgcggncgcgtgggcgggcgcgtgggcggacgcgtgggcaagtggcgggggcaaagcgtgggtacagacgaggtatcgggtaccagattaaacatcagnaagggaatggacttggagaatttaggtgaatgggctgctacttctgtcaggtcaagttttactcctcgtgggtggggcagtcaatgctggcgaggatgtgacaatgaaggtgatatcattttctcaacaaggaccgagagctatttgcatcctatctgccaatggagtaatttcaaatgttacacttcgtcaacccgattcttctgggggcactcttacgtacgagggtcgctttgagatactttccttgtctggatcctttctgccttcagaaactcatggaacgagatgtcgttctggtggaatgagtgtttctttggcntgtgctgttggccgtgttgtttgatgaggagttttttggcttttttttgctgcctgcccttttccagttgtttgttgccgttttttccttttttcttttgttttttttttttttt

SEQ ID NO: 17887 - DNA, 458 bp, Gossypium hirsutum
  Clone ID: LIB3543-022-Q1-K1-C7
agaccttcgataggctataatcgtggtctctaaggtgatcattatctacttctttccttatatttgattttgtggtgtttaaggatgtgacaatgaaggtgatatcattttctcaacaaggaccgagagctatttgcatcctatctgccaatggagtaatttcaaatgttacacttcgtcaacccgattcttctgggggcactcttacgtacgaggttaggcaattttgaaattactatcacattctgaaatatgaggagtttccaataacatatagtctaatttatatgcaaaaacggtagtctaatctgtaatgtgtttgattatggaaattgaatcaatgttttgttgcatgattctaatgtttgcagtactgtttaatataagtttgtcaaaggatttcataagatacaagacattctttaaaatatactcattaattttaaaggatgttatgc

SEQ ID NO: 17888 - DNA, 597 bp, Gossypium hirsutum
  Clone ID: GOSHI-09MAY01-C1437_1
attgcttacacaacaactcattcattgcagacatccgcagaatcattggttagaaaagaaaaagaacaatcatgtctgaatcctctttcgctcgaccaagattggtcactaagaagtttcttcccaagcatcaacgcgagggtgacggtgctgttgtccgcagatgcattggaaggagtgaattgaagactttggatcctttcctcatgatggatgattttacagtgtctcctccggctggatttcctgatcatcctcacagagggtttgaaacagttacatacatgttacagggaggtatcactcatcaagattttgcagggcataaaggtacaattcataccggggatgtgcagtggatgacagcaggaagaggaataatccactctgaaatgcctgctggagagggtgttcacaagggtttgcagctttggatcaatctctcatcccaagacaaaatgattgaaccaaggtatcagagctcttaagtaaagacattccaagtgcagaagaagatggtgtagaagtacgagtgatcgccgggaatcgatgggagtccaaatctctgtctacacccgaaccccggcgatgtacttg

SEQ ID NO: 17889 - DNA, 373 bp, Gossypium hirsutum
  Clone ID: LIB3585-017-P1-K1-H2
agaaaagggacaagttttcaaattacctgtttttatctgcaaaagtcatgaaaattcatcacatcttctacaatatttcctgtttagcaaaatcccatactatttctattcatatttgaaaatacgtcaaacatgaatgttgaacatgaatattttgaaaaaatcttgccaggattgaaccaaggtatcaggagctattaagtaagggcatttcaagtgcacaagaagaaggtgtagaagtaccagtgatcgccggggaatcgatgggagtccaatcttctgtctacacccgaaccccggcgatgtacttggatttcagtttaaggccaagtacacaagtttaccagcacattccaaaatcatggaatgcatt

SEQ ID NO: 17890 - DNA, 622 bp, Gossypium hirsutum
  Clone ID: GOSHI-09MAY01-C1797_1
cggacgcgtgggatcccttttcgacttcgatttcaacgaagcgaaagtagaaatcgatggcttgttcgcaaggtaaggcacttctgtcactgttctttttatttgttttttacaataacaataatgaatgactcaagcagaaaacaaaacggttcatagaaagctaaagagattccgagaacaaagaaatcacctctgctatttgattgcttttttttatcctctgtgttcgtaaaaaaagcgtttacaatcgaaaataaaaggctttatagccaaataatcaaaagaaaaaaacaacaatttttgttctcctattggctgctactccgctgctgttttcttattttcttttgcaggtacggagcgtgtgctggcactaggcgtgagggtggcgtacagcctgttgatgtggaggcacgagcggcgttggggctgtacggcggctgaaggctgcgggccaagggagagaaaccctagggtttctatttctaaagtcttttaggctatttgggccttgtaactttgggtctgggtttatttgtaaatgggctatgggccattgcaatagttttggactttggactgttataaggtttggattttatatttattttttgtttat

SEQ ID NO: 17891 - DNA, 237 bp, Gossypium hirsutum
  Clone ID: uC-gsronu33B138h09b1
atttcagggagcggctattcaccatttgattcgggggactacaatgcactagcaacgaccagattccatccgcctcgtggccatgcgaggaaaccaggtacggagcatgtgctggcactaggcgtgagggtggcgtacggtctattgacgtagtggcacgagcggcgttggggctgtacagcggctgaaggctacagcgcaagggagagaaaccctagggattgtgactctaaaggc

SEQ ID NO: 17892 - DNA, 905 bp, Gossypium hirsutum
  Clone ID: GOSHI-09MAY01-C1787_1
caaagatacgcaaacttgctagatcatgtaaggtaccctttgagttccatgctgctgctacccccgcctccgccctcccgcccggaaaaccttggtattcaacctggtgaagccattgctgtaaattttgccatgatgctgcatcacatgccagatgaaagtgtggacactcagaaccatcgggacagactgttgaggttggccaagagtttgtccccaaaggtggtgacgctcgttgagcatgaagcaaatacaaataccgcccccttcattccccgtttcctagagacaatgggttatttttcgtctatctttgaatcgattgatgttagcctgccaagagaacacaaggagcgaatcaacgttgaacagcactgtctggcccgggagattgtcaacattatagcatgtgaagggcaagagagagtggaacgttatgaactttttgggaaatggagatcaaggtttattatggctggctttacaccctctccattaagtccatttgtaaatgctaccatcaaaactctgctgcaaagctattgcgataagtatactcttgaagagagagatggcgttctttatctcggctggatggatcgagctataattgcttcttgtgcatggagatgttaaccgaaggatagctgttatttacatttcatctttggcatactcaggattagcacttaatttgatgagaatgtccttttcagggatgtaatgaaaacaagtcctttgtacaactaaatgttagtcgtaaattctagtggttaactgttgcagcttgtcttgcatacgcgttttacactgtaatgttcaaattgttggacttatcagcaaaacaaacttgttttcttttcatttcatggaaataaaatggtggtagcttgttcatttgcctg

SEQ ID NO: 17893 - DNA, 438 bp, Gossypium hirsutum
  Clone ID: LIB3135-044-Q1-K1-B2
cccacgcgtccgctgaaagatttgggatgatggcaagggtaaatcctcctgatagtaacaggacgggagaggagtcagatgacgattggcattttcgtgaagttgcctacgaacatctaattgttgatggctttattcggggtataaaaaatggattttccatggagagtgtacacctaatagaatctcttcaacgattaatccagcttatccttatagtgcttaccatcagtctgttagagaagatgacatggagatgttaaccgaaggatagctgttatttacatttcatctttggcatactcaggattagcacttaatttgatgagaatgtccttttcagggatgtaatgaaaacaagtcctttgtacaactaaatgttagtcgtaaattctagtggttaactgttgcagcttgtcttgcatacgcgttttacac

SEQ ID NO: 17894 - DNA, 410 bp, Gossypium hirsutum
  unsure (1)..(410): unsure at all n locations
  Clone ID: LIB3166-018-P1-K1-B1
ggtcgatccggaggacctccaagcatccgtataatatgcattgatgaccctacatcagcttgtggcagaggaggaggacttgaaatagtgnngcanaaactacgcaaacttgctgagtcatgtaaggtaccctttgagttccatgctgctgctatttctggcactgaggttcaacttgaaaaccttggtattcaacctggtgaagccattgctgtaaattttgccatgatgctgcatcacatgccagatgaaagtgtggacactcagaaccatcgggacagactgttgaggttggccaagagtttgtccccaaaggtggtgactctcgttgagcatgaatcatatacatataccgacttcttatttcccgttttctagagacaatgggttattttttgcttatttttgaa

SEQ ID NO: 17895 - DNA, 1578 bp, Gossypium hirsutum
  Clone ID: GOSHI-09MAY01-C1767_1
aataataatagcatcttcctgttaattttatccatcttcttcgtcttcttcatttcaccacatttgttttagcaaagacaagtggttgatggaaaagttagagaagcgtcggcagtaggcttggattcttgtgggaaaaaaaatatagctaaaggggacctttatgtttttgtctttacaatattgttgtgtgttataataacagcggaaggttggcggaggttttttgcaggattgaaaatcaatgtcaagttcatctccttttcttctttttcattgccttaacctctagggaactagcttgaaccctttttttttctttttccatttagttttgggggtgtgtttaatggctatggagatgcagagcggggggaagatgatggggttcttggttatcttgttggttttgtttatagagatggcagcacccactagtgctagcagaaacagcttttctacccaaattcttgaggttcaaaaccagttgaagctcttgaacaagcccgctgttaaatctattaagaagtccagactggagatataagttgactgcatcaaactttcacatcaaccagcttttgaccatccaatgctcaaaaaccataaaatccagatgaccccaaactttcatccggaaggtgtttttggtgaaaacaaagttgcttcaaagatgaaaccaggttcatcaaggaatgttacccagatgtggcacttgaatggaaggtgtccagaaggaactattcccattaggagaactagaaaagatgatttgttaagagcaagctctatcaaagcctttggtaaaaaaaggcacaaaaccatccctcaaccaaagtctgcacttgggggtttggactttggagctttgatgtagcatgcaatagcttatgtggatgaagaaaagtactatggagcaaaggcaaccattaacgtttgggaacccaaaatacaacagcctaatgagttcagcttgtcccaaatctggatcttgggtggttcttttggtgaagatctcaatagcattgaagcaggctggcaggttagcccagatttatatggagacaaccacactagactcttcacttattggactagtgatgcatatcaagccactggttgctataatctactttgctcaggcttcattcaaatcaacaatgaaatagcaatgggtgcaagcatctaccctgtttctagctatcatgattcccaatatgatataagcttacttgtgtggaaggatcctaaggaggggaactggtggctacaatttggtaatagctatgtgttgggttactggccagctttcctattttcctacctatcagacagtgcctccatgattgagtggggaggtgaggttgtaaactcagaatcagatggacagcatacatccacacaaatggggagtggccatttccccaaagaagggtttggcaaatctagttacttcaagaatattcaaattggtgatggctccaacaatctcagggttcctaaagacattgcaactttcactgagcaatcaaactgctatgatgtacaaactggaaaaggtggcaacttgggcagcta

SEQ ID NO: 17896 - DNA, 551 bp, Gossypium hirsutum
  Clone ID: LIB3583-018-P1-K1-F5
accagatgaccccaaactttcatccggaaggtgtttttggtgaaaacaaagttgcttcaaagatgaaaccaggttcatcaaggaatgttacccagatgtggcacttgaatggaaggtgtccagaaggaactattcccattaggagaactagaaaagatgatttgttaagagcaagctctatcaaagcctttggtaaaaaaaggcacaaaaccatccctcaaccaaagtctgcagatcctgacctcatcactcaaagtggccatcaggtagtatatactgctactgcctcatttctttttacatgaaactggttttggtgtatgttgaactgatatatgtggttatatatgttccatttcttgggtgtttggactttggagctttgatgtagcatgcaatagcttatgtggatgaagaaaagtactatggagcaaaggcaaccattaacgtttgggaacccaaaatacaacagcctaatgagttcagcttgtcccaaatctggatcttgggtggttcttttggtgaaaatctcaatagcattgaagcaggct

SEQ ID NO: 17897 - DNA, 621 bp, Gossypium hirsutum
  Clone ID: GOSHI-09MAY01-C1737_5
cagctaccaagatttccaccctatttataatttattaaacatggcattctatttcatgattcccttatttgcttccattttctttatttttctcttcaattctctgcttaatttgttcaaatccaaaaaatcccgggatttacccctcccgccaggcaccttgggttggccgtacatcggtgaaacctttcagctctactcccaaaacccaaatgtcttctttgcttccaagcagaaaaggtacggctccatattcaagacccatatactcgggtgtccctggctgatgattttgagccaccacttatccctgctaagacgattcctgatccagacgataagaaacctgaggactgggatgagagagccaaaattccagacccaaatgctgtaaagccggatgattgggatgaggatgctcccatggaaattgaagatgaggaggctgtgaaaccagaaggatggttagatgatgagcctgaggagatagatgatcctgaggccaccaagccagaagattgggatgatgaaaaggattgcaagctggagcacctacctccagaacggctggcccatatgcatattaattcactgatcccaactcagctcaaatgtttacac

SEQ ID NO: 17898 - DNA, 562 bp, Gossypium hirsutum
  Clone ID: GOSHI-09MAY01-C1737_4
ccccccagaagaaaaatttacaatcatcatcagatctattgttcttagactgatgatgataatgaggctttacgctcttcttctcctattagctttcgcttcgctgcaactcctctgcttcgccgctgatgttgacgaggtgttctatgattcatttgaagagtcatttgatggacgatggatcgtttctgataaagatgattataaaggcgtgtggaagcattccaagagcgaggggcatgatgactatggtcttctcgtgagtgagatggcaaagaagtatgcaatagtgaaagagcttgatgaggctgtgaatctcaaagaaggtaccactgtgcttcagtttgagactcgcctacagagtggactggaatgtggtggtgcatatttgaaatatcttcgtcctcaagatgctggatggaagcctaatgagtttgacaatgaatccccttactctatcatgtttggacccgacaaatgtggggccacaaacaaggtgcacttcatcctgaggcataagaatcctaaaagtggggaatacattgaacaccatctgaaatac

SEQ ID NO: 17899 - DNA, 796 bp, Gossypium hirsutum
  Clone ID: GOSHI-09MAY01-C1737_3
ccaagatttccaccctatttataatttattaaacatggcattctatttcatgattcccttatttgcttccatttgctttatttttctcttcaattctctgctggggtgggggcaaatccaaaaaatcccgggacttacccctcccgcctggcaccctgggttggccgtacatcggtgaaacctttcagctctactcccaaaacccaaatgtcttctttgcttccaagcagaaaaggtacggctccatattcaagacccatatactcgggtgtccctgtgtgatgatttccagcccggaagctgcgaaattcgtgcttgtcaccaagtctcacctcttcaagccaacgtttccggccagtaaagagaggatgttgggcaaacaagccattttctttagccaaggacagtaccatgccaaattgaggaagcttgtgctccgtgccttcgtgcctgaggccgtcaaaagcttcgtttccaacatcgaatccattgccaaagattctctccagtcattggaaggcaggctgattaccactttccaagaaatgaaaacgtacacattcaatgttgcgctgctatcgatattcggagaggatgaagtgaagtacagagaagatctgaagaggtgttattacatattagaaaaagggtataactcgatgcccattaacattccgggtacacttttcaacaaatcgatgaaagcaaggaaagagctagctcacatcctggccaaaatcatatcgaccagggaggaaacgaagcaagagtacaatgacttggtggtttttttcat

SEQ ID NO: 17900 - DNA, 1871 bp, Gossypium hirsutum
  Clone ID: GOSHI-09MAY01-C1737_2
cgatttgaaggggtaaaagaacttcaatagtttgagtttagggtttttagatcgaagattatggggcgttttgctcttctccttttactagctttcgcttcatttcaagccctttgcttcgccgctgatgatgatacggtcttttatgactcatttgatgagccttttgacggacgatggatcgtgtccgataaagatgattacaaaggtgtatggaaacattcgaagagcgaaggacatgatgactacgggcttcttgtgagcgagaaggcacggaagtatgcgatagtgaaggagctcaatgagcctgtgagtctcaaggatggaagcactgtgcttcagtttgagactcgctttcagaatgggcttgaatgtggtggtgcatatttgaaataccttcgtcctcaagaggctggatggaaggctaaggaatttgacaatgaatccccttactctatcatgtttggacctgacaaatgtggagccacaaacaaggttcacttcatcttgaagcataagaatcctaaaagtggggaatacgtcgaacaccatctgaaatacccaccctctgtcccatctgacaagcttactcatgtctacactgccatcttgaagcctgacaatgaggtcagcattctgattgatggtgaggaaaagaagaaggctagcttcctttcagcagaagattttgagcctccacttatcccttccaagacaattcctgatcctgatgataagaagcctgaggactgggatgagagagccaagattcctgatccagatgccgtgaagccagaggattgggatgaggatgcacccatggaaattgaagatgaggaggctgtgaaacccgaaggttggttagatgatgagcccgaggagattgatgatcctgaggcaaccaagcctgaagattgggatgatgaagaggatggtgagtgggaagcccccaaaattgataacccgaagtgtgagacagcccctggttgtggcgaatggaagaggccaatgaagaggaatccagcttataaaggaaaatggtctcctccactaattgacaaccccagctacaagggtatttggaagcctcaggagattccaaaccccaactactttgagcttgaaaagcccgactttgatcctattgctgccattggtattgagatttggacaatgcaagatggtatattatttgacaatattttgatagccaaaaacgacaaggttgccgagtcatatcgggagaccacgtggaagccaaagtttgaggttgagaaggaaaaacagaaggctgaggatgaagctgccgattctgccaggcttgcaggctttcagaggaaggtttttgatgtcttatacaaggttgctgacattcctttcttaagcaaatacaagcatcaaattctcgatcttattgagcatgctgagacacagccgaacctcaccattggtgtcttggtctctattgtggtgattattctcacgattttcttcaagctcatttttggtgggaagaaacagccaagagtagagaagaaaccagaggttgctgaaacatcaaatggtgaaggaagcagtggagaaaaggctgaagaggcggagaaggaagaagctgctgccgctcctcgccgaaggcgccgtgacaattgagcaaatcttaaaacaaaggtggctggtggcgactagcagtttgagttttggctaatttttgcactgtaggtggttttcgtagctgagatattatttgcctttggcattattttagttttactttttaatatgattagattgtatggtttgaaggatgtaaacgagacaaatttctgcatcaaagcaaaaaccaagtagaaaggaatttgaagcttgcttgt

SEQ ID NO: 17901 - DNA, 1387 bp, Gossypium hirsutum
  Clone ID: GOSHI-09MAY01-C1737_1
cggacgcgtgggcggacgcgtgggcggacgcgtgggcggacgcgtgggcggacgcgtgggttctgattgatggagaagagaaaaagaaggctaacttactctcagctgatgattttgagccaccacttatccctgctaagacgattcctgatccagacgataagaaacctgaggactgggatgagagagccaaaattcccgacccaaatgctgtaaagccggatgattgggatgaggatgctcccatggaaattgaagatgaggaggctgtgaaaccagaaggatggttagatgatgagcctgaggagatagatgatcctgaggcaaccaagccagaagattgggatgatgaagaggacggtgagtgggaagcccccaaaattgataacccgaagtgtgagacagcccctggttgtggtgaatggaagaggccaatgaagatgaatccagcttacaagggaaaatggtctgctccactaattgataaccccaattacaagggtatttggaagcctcaagagattccaaaccccgactacgttgagcttgataagcctgactttgagcctattgctgctgttggtattgagatttggacaatgcaagatggcatattgtttgacaatattttgattgccaaaaatgacaaggttgctgagtcatatagggagaccacatggaagcctaagtttgaggttgagaaagaaaaacagaaggctgaggatgagtccactgattcagatggactttcaggcgtccagaagaaggtctttgatgtcctttacaaggttgctgatattcctttcttaagtgaatacaagcttcaaatccttgatctcattgagaaggctgagaaacagccaaacatcaccattggtgtcatcgtctccattttggtgattatcctcacagttctcttcagacttcttttcggtggcaagaagcaaccaaaagtagagaagaaaccggaggttgctgagacatcaaacaatcaatcaaccagtggagaaaaggctgaagaagaagaagaagaagaagagaaagaaggaaccgctgctgctcctcgcagaaggaggcgtgacacttaaaacagaggtgaatggtgataatctgtttttagtatgggaaaatttttgggctttagaagtggtcttcatagctgaaacattcatggtacctggtgatttttgtttttttttagttttacttgatgaaacattattagattgtattaattgaagagtgtaaacagagacaatttttcatgtcatgtgcctcaaaagcaaaaaccaagtagagggagttgaagtttatggtatgatggtgttgaagcccccaaccttaatggatatgctggaacttgtagaattttgttataactagtcag

SEQ ID NO: 17902 - DNA, 632 bp, Gossypium hirsutum
  Clone ID: AI054959.1
gaaaagaaggggtaaaagaacttcaatagtttgagtttagggtttttagatcgaagattatggggcgttttgctcttctccttttactagctttcgcttcatttcaagccctttgcttcgccgctgatgatgatacggtcttttatgactcatttgatgagccttttgacggacgatggatcgtgtccgataaagatgattacaaaggtgtatggaaacattcgaagagcgaaggacatgatgactacgggcttcttgtgagcgagaaggcacggaagtatgcgatagtgaaggagctcaatgagcctgtgagtctcaatgatggaagccttgggcttaatttgagaacttgttttaaaaaggggctaaagtgtttgggcctatttgtaaaaatactttttcctctaaaggttgattggaaggtttgggttttttcacagtatattgcttactttttattgttggacttaaaaattggggtcccatatggtcactttatttgagttttaattctatagtggtatttttatcaatatttaatattcaccttctgcgattttatgtattagtgtcctggtattgagttgtaatggttaatttgtttgtataatatataagtttttcttctattg

SEQ ID NO: 17903 - DNA, 299 bp, Gossypium hirsutum
  unsure (1)..(299): unsure at all n locations
  Clone ID: LIB3147-038-Q1-K2-E8
gattttcttcattctcatttntgggtggaagaaacaaccaatagtanaaaacaaggccggatttaaagaaacatcggagggtaaaagaagcantggataaaaggctgaaaaggcggagaaagaagaagctgctgccgctcctcgccgaaggcgccgtgacaattgagcaaatcttaaaacaaaggtggctggtggcgactagcaagttgagttttggctaatttttgcactggaggtggttttcgtagctgagatattatttgcctttggcattattttagatttacttactgaatatt

SEQ ID NO: 17904 - DNA, 390 bp, Gossypium hirsutum
  Clone ID: GOSHI-09MAY01-C1697_1
gtttcaaagcaacattatgaatacagttgttgaaatttaccggagattagaaagcgatctgaagttggcaaagactcatcaaacattggaggatcataaagcgattgcgagaaactttccgagatgccaatctgaagttggccaggttaaagaagaaacaacggctagagtaattgctgcttctcgttatttcgttcaagtaatagcagtctaagaatcttttactggttaactggaatgttgatgaactgctagtaatgtatgcttttgtgtgagcgcttgtctttgaatcaggagaatgttaagaactcatgtggtttgatgcttttggtattttaaagctgttttgtgtgtggaaaaaaaaaaaaaaaagaaaaaaaaaaaaataat

SEQ ID NO: 17905 - DNA, 1057 bp, Gossypium hirsutum
  Clone ID: GOSHI-09MAY01-C1687_1
cggacgcgtcggcttttatctttggttccgtggccattgtttctttcactttttgcttcaccattttcatttgttctcgcagagctcacccagcggcacacatgacttttaccagaatttcccatttctctctctttttctcctctttctttttcctatcatcaaccctttcttctcatctttatcctgcttctgcaactactcctgaaaaagatggcaaaacgagatctttgtattcagaaatattaaggaacgaggcagctgcaaggcttaatgatcttggaaaggtgagtgatgctgatggctaccttgagagaacatttatgagcccagcttctgtgagggcaggctttcttattcgtgagtggatggaggatgctggtttgagaacgtgggtggattctatgggcaatttacatggtcgagttgagggaatgaatgcgagtgctcaagctctgttaattggctctcatttggatacttggtgttgacgcttgggatgtttgatgggtcattaggtataatttctgctatatcagcattgaaagtcttgaaaagcattggcaagttgggagaactaaaacgaccagtcgaggttattgcatttagtgatgaggagggagtgaggtttcaatctacctttcttggcagtgctgcagtagctggaattttacctgttacagcattgaagatatctgataagagtggtgtgacagtgcaagatgctctcaagggaaattccatagaaattacagaggatagcctgttggggttgaagtatgatcccgcatcgatttggggttattttgagcttcacattgaacaaggacctgtactagaatgggttggttttcctcttgctgtagttaaaggcattgcgggacaaacacgaatgaaggttacggtgagaggttcacaaggacatgccggaacagtgccaatgtcaatgcgtagggaccctatggctgctgctgctgaattgattgttttgctagaaagtctatgtaaatatcctcgagatttcttatccagtggcgggagctgcaatgagcaaaca

SEQ ID NO: 17906 - DNA, 750 bp, Gossypium hirsutum
  Clone ID: GOSHI-09MAY01-C1667_1
tctttcgccggtttattacatgagatggtctggtggggggctcatatgttgcaacatcaaatcctcatcaaaaggcttgatatccccacagttaatgtcaccgcaacaacacaggctgcaccattcgattcaaccatctttggcacatttgactgcgttacaatctcagctgtgtagtgggggtgcttcttcgcataaaatgatgcttggaacggctgatcatagggaacaacggacaaaatcatcaagaaacaggcagagcatgcggttttctcagcaaagttctgataccagtagccagaaaaacgagagtgggttggtacaattccgatccaagcatatgaccgctgaagaaatagagagtattcttaagatgcaacatgctgcgacgcacagtaacgatccttacgtagatgattattaccaccaagcctgtcttgccaaaagatcatcgggatccagggctaaacatcttttttgcccgtctcacttgaaagaatcacattctcgatctcgtaacagtagtggagagcagcatttgcatgttcatgttgatgcacttgggaaagtccccatccctaccattcgtaaacctcgtcctttgcttgaaattgatcctccattagttgatggaggttctgaacagaaaaccgagaagcctctagaacaggaaccgatgcttgcagctaggatcaccattgaagattctctaggccttcttttcgatgttgatgatattgacaggctctt

SEQ ID NO: 17907 - DNA, 978 bp, Gossypium hirsutum
  Clone ID: GOSHI-09MAY01-C1617_1
ttatttcagccaccctcgcgcccggtttcttttctctatatctcctctcctttcacaaatttcacccttaaatattttctctctctccaaacgccccccaaaaaatcaacagcataagaaagaccagtgttttagactctttttaatgtacatttgattttcgtttacccgttggtctttgtttccaaggtcgaagaaagctatgagatttttgtagctttttgttcttgaagagtggcggcagggagagagggaggattttggacggctgagatggatcgggaaggaggatcccacggcggatcttgttattactacgttcttggaattcgtaaggatgcctctttctctgatatccgcactgcttatcggaagctcgctatgaaatggcatccagacagatacgccagaaacccaggaatcgccggagaagccaaacgccggtttcagcaaatccaagaagcttattctgtcctctccgacgagagcaagcgatcaatgtatgacgccggcctttacgatcccttggaagaagaagaccaagacttctgtgattttatgcaagagatgatgtccatgatgaataatgtgaaagacgagggtgatagttttgaggatttgcaaaggatgtttgcagaaatggttgatggcatcagcttcgacataaacaccgatccaacggtgacgaagacagcacgcgtcactgcatcaaaaggcaatgcggctaggaacagctctcggtgtggatgttgcgtggtagctttaccatctaaactcaatttgtgtttgattaatcccatgattagtaactacaattagggctaatttctttcataattatgggagaaaaaccaagtgttgcttagttttaggaaccaatttgggaatcatgtggaatctcttgagcttttaatagttaaataataaatttatgttttttttaaaaaattaatttgattttagaaaaatgggtttgac

SEQ ID NO: 17908 - DNA, 622 bp, Gossypium hirsutum
  Clone ID: GOSHI-09MAY01-C1627_1
aattttcccgcattttctttattgtttttcacactatccaaacagtatcttaacatagtagattaaagtgtaaaagttcttcaatggcgatggaggataataaaggaaacaagagagctcgagtagagtttgaggagtttgaatcggggggtaacttggagtcggtccataattcaaagctcgctcgagttgactcggagaatacgggctcgaactctcctgaggttacttacgcggaacctgatcctgacgacgagggaattcagtcgccggatgtgaagcgtatccaggaggatttgcttgatatcttggacgattcggatccggttattggacttgatccggagattcagggtctcgacttggttatcaaaagcttcgaagaagagatctcggtccccgctcaggatccggtacaggaattagattccggcgagtcccggcgggagctagggtttggtttagaagcttcttgataccagttggatttacagccggattttgaggagaaacttgcgaccgttgatgtggaggaaggtggagggacaggagcagttggattagcggatatgatggggtatgaatttccgattccgagttacgaatcggtcgagttttgagt

SEQ ID NO: 17909 - DNA, 386 bp, Gossypium hirsutum
  Clone ID: GOSHI-09MAY01-C1197_3
cccacgcgtccggaactttccccgaaagcctcgaataactactatgttaaataaaaagagctacattgggtaaataaggtgagacgttagattgaactaagaagtatgataacttagatgttgatgtttcctgtttctctaaagagcgagtatgggggacaaagctttatgtttctgcctgtaaggatgggtgatttgccttggatcatatgatgaaaaggtatattatgttgttaatggcattggtgtgttttaacctttgatgcgaacaaatacctcattgcgagcacatttcgttggcatgcaatttatcttttttgtgatcaaaaaaaaaaaaaagtgagggttaaaaaaaaaaaaaaaaaaaaaaattgaaaaagatctaa

SEQ ID NO: 17910 - DNA, 1315 bp, Gossypium hirsutum
  Clone ID: GOSHI-09MAY01-C1197_2
cccactcgtccgccctcgccccccctttttgtgtgtgtgtgtgtgtgtgtttctgctgctgttttatttatagtcgctggcggctaaaaaatgttgcaaagggctttgatattctcttcttcaaatccaatctgttctcaattgccaacgacagctccgcctgacaacaccgtgttccccaaacgaaacggcggctggatcatccctttctcatcctaccagctaccggcatttcgtttgcgaaattacaggcgtacccttcttcctccactctgctcagcgagtgactcagctgcaaatcgaccaaatatggcgtctcaagatgaacaagaccctcggatttccaacatttcttctgcgattcgtgtcatccctgacttcccaaaacctgggataatctttcaagacataacaactttgcttcttgataccaaagcatttcgtgatactattgatttgtttgttgagaggtacagagggaaagatatatctgtcgttgcaggtatagaagcaaggggattcatttttggcccacctatagcattggctattggggcaaagtttgttcctatgaggaaacccaataaattgccgggggaggttttatcggaggagtattctttggagtatggaaaggacacaatggagatgcatgttgatgctgtcaaagcaggagaacgtgctttgataatagatgatcttgttgccactggtggaaccttgtctgctgcaatcaggctactcgaatgcgtaggggtgcacgttgtggagtgtgcttgtgttattgaattacccgagctaaagggacgggaacggttaggagggaaaccactgtttgttcttctaagctccacttgatcatcttacatattttattgtgcaagagcttgtttattggccttcattgagtgttgcaacatggctagaactttccccgaaagcctcgaataactactatgttaaataaaaagagctacattaggtaaacaaggtgagacgttagattgaactaagaagtatgataacttagatgttgatgtttcctgtttctctaaagagcgagtatggtggacaaagctttatgttcctgcctgtaaggatggttgatttgccttgtatcatatgatgaaaggtatattatgttgttaatggcattgctgtgttttcaaactgaattcaccggttttaacctttgatgcgaacaaatacctcagtgcgagcacatttcgataaattatgcccaagtaaaaaaacatttcacattttatcacctatgagccaatgattgaagtatggttacatataacaaataaga

SEQ ID NO: 17911 - DNA, 915 bp, Gossypium hirsutum
  Clone ID: GOSHI-09MAY01-C1197_1
gcaaaacccaaaatcaataccatccgagtcgacccgtccccgtgttgagtttcatcagcgagtcactaactcagttacaaaatcaacaaaacaaaaaatggcgtctcaagatgaacaacaacaacaacaagaccctcgtatccccaaaatttcttctgcaattcgtgtcatcccaaacttccccaaaccagggatcatgtttcaagacataacaactttgcttcttgataccaaagcatttagtgatactattgatttgtttgttgaaaggtacaaagggcaaaatatatctgttgttgcaggtatagaagcaaggggattcatatttggtccacctattgcattggctattggtgccaagtttgttcctatgaggaaacccaataagttgcctggggaggttatctcggaggagtattctttagagtatggaaaagacaaaatggagatgcatgtcggtgccgtgcaagctggagaacgtgctttgataatagatgatctcgttgccaccggtggaaccttgtctgctgcgattaggctacttgagcgagtcggcgtgcatattgtggagtgcgcttgtgttatcgaattatcaggtttaaagggtcgggaacggttaggagatacaccgctgtttgttcttgtaaactcggcttgatctcacaagtgttgtggtggtggtagatgggcattgtttgttgcactttttaaagttttcaatatatagctacaactttgcctaaaggcctaacaagtctatttggttgaataaaaaaggctgcatttggtaaaagttttagtggattgaaccatgataatataaggtttaggtgttgttgatgatgatattcttccaggcgagtgttcattgcatttgtaataatattttgagcaaaagtggctttgagtgaaggc

SEQ ID NO: 17912 - DNA, 1237 bp, Gossypium hirsutum
  Clone ID: GOSHI-09MAY01-C1187_3
ggccggcgcgtaacaaaagagaaagctttaaaggagaaggaggctggcaatgctccatataacaagaacggtggtgctgctgctcttaagcatgacaccatatcaatggaacttgatcattgaaatatttcgtacatcactaatccctctgctgtttatttggaaatgggcaagtacgaccattagcattaatgatcgtcacaaggctgttgaaagaggtagagagctcagatcagactataaaatgatagcaagagctttgactaggaagggaactgctttggtgaagatggcaaaatgctcgaaagattatgaaccacctattgagactttccagaaagctcttactgagcatcgcaatcctgacacgttgaagaaactaaatgatgctgaaaaagccaagaaggatctggagcagcatgagtactttgatccaaagatagctgacgaggaccgtgagaaagggaacgaatgtttcaagcagcacaagtatccagaggctgtgaagtattataccgagtcattgagacgattcctcaaatatgcaaaagctatacatctctttagcagcatgctacacgaaattgggcgctttgcctgagggattgaaagatgctgagaagtgcattgagctagatccaacattttcaaagggttacacaagaaagggagctgctcagttcttcatgaaggagtatgacaaagctttagaaacataccaggaagggttgaagcatgatccgaataaccaggagttgcttgatggtgttagaaggtgtgtcgcgcgggttaacagagctagtcgaggtgatttcagccctgaagaattgaaggaaagacaggccaaggcaatgcaagatccagaaattcaaaacattctatcggatccagtcatgagacaggtgttggttgattttcaggagaacccaaaggcagcgcaggagcacaccaagaatcctatggtgatgaacaagattcaaaagctggtcactgctggtattgtccaactgagataaactggaaccaaaatttcaacttttttcttctttttatcctttttcccattttgtcggttgaacttgaatggattgttcataaaagtagttcctgctggaaatgttcaatagttgcctgttatttaaatggtttgtttttgagccgtcaaaactgtcgctggattctattatatcattgattttcaggttttaaaaaatatatgcgtgtatatctcaatata

SEQ ID NO: 17913 - DNA, 666 bp, Gossypium hirsutum
  Clone ID: GOSHI-09MAY01-C1187_2
ccagaaccagcaaagtctcttgcttggtcctctaaatacccaaaaccccaaaaatccaaattcctcccccggccccgtggcttctaaacttgttttgcaatggccgatgaagctaaagccaaaggcaacgccgccttttcttccggcgatttcaacaccgctgtcaaacacttcaccgaagctataaacctttccccgaccaaccacgtactttattctaatcgctccgccgcttacgcttccctccatcaatacgatgctgcattatccgacgctaagaaaaccgtcgaccttaaacccgactggtccaaaggttacagcaggctcggtgccgctcacctcggtttgcaccaatacgaagacgctgtttcggcctataaaaagggtattgagattgatcctaacaatgaagcattgaaatccggcttggccgatgctcagtcgactgcgacggcttcggcttcccgagctagggcagcgccgccgcccaatctatttggtgacgcttttcagggaccggagatgtgggctaagttgacggcggatccgactactagggtttttttacagcagccggattttgttaaagcgatgcaggagattcagagaaatcctagcaaattgaatgagcatttgcaagaccagagagttatgcaagctctgggg

SEQ ID NO: 17914 - DNA, 1949 bp, Gossypium hirsutum
  Clone ID: GOSHI-09MAY01-C1187_1
cccacgccccccccgtccccccctcaaatatccgatatcgtctttcccaaaaccagatccaaaagccagcagattcatccaccgatggccgacgaagccaaagccaaaggcaacgccgccttttcctctggtgatttcaacgccgcaatcaaacacttcaccgatgctataaacctttcccccaccaaccacgtcctttactctaaccgatccgctgcgtatgcttctctccatcaatacgaggccgcattgtcggacgccaaaaggaccgttgagcttaaacctgactggtctaaaggttacagcaggctaggcgcggctcacctcggtttgcaccaatatcaagatgctgtttcggcgtataagaagggtctggagattgatcctaataatgaagctttgaagtctggattggctgatgctcaatcggcggcgacggcttcggcttcggcgttctagggctgctccgccacctaatccgtttggtgatgcttttcagggaccggagatgtgggcgaagttgactgctgatccgactactagggtgtttttacagcagccggattttgttaaggcgatgcaagagattcaaagaaatcctagcaaattgaatgagtatttgcaagatcagagggttatgcaagctttgggtgttttgttgaatgttaagtttaaggcacatggtggtggcgatgatatggagattccagaggcggattcacctccagctccgtctccttcacgaccagctaaggaggaggtgaagaagcctgagcccgagcctgaaccagaaccgatggaaattacggaagaagagaaggagaaaaaggagaagaaagagaaagctttaaaggagaaggaggctggcaatgctgcatataagaagaaggattttgagacggctattaagcattacacgacagcaatggagcttgatgatggagatatttcgtacatcactaatcgggctgctgtttatttggaaatgggcaagtacgaggattgcattaaggattgtgacaaggctgttgaaagaggtagagagctcagatcagactataaaatgatagcaagagctttgactaggaagggaactgctttggtgaagatggcaaaatgctcgaaagattatgaaccagctattgagactttccagaaagctcttactgagcatcgcaatcctgacacgttgaagaaactaaatgatgctgaaaaagccaagaaggaactagagcagcaagagtactttgatccaaagatagcagacgaggagcgtgagaaagggaacgaatgtttcaagcagcagaagtatcccgaggctgtgaagcattatacggaatcattgagaagaaatccgaaagatccaaaggcatacagcaacagagctgcatgctacacaaaattgggtgcattgcccgaggggctgaaagatgctgaaaagtgcattgagcttgacccaaccttttccaaaggttacacaagaaaaggtgctgttcagttcttcatgaaagagtatgacaaagctttagaaacataccaggaagggttgaaacacgatgccaataaccaggagctgctcgatggtgttcgaagatgcgtagaacagatcaacaaagccaatcgaggtgatttgagccccgaagaactgaaggaaagacaggctaaggcaatgcaagatccagaaattcagaacattctctcagatcctgtaatgagacaggttttgattgatttccaggaaaatccaaaggcagcacaagaacacatgaagaaccctatggtgatgaacaagatccaaaagctggtctctgctggaattgtgcaaatgagataaattgtgaaagtgatcaattttaacttaattgctttttttccttcatagtaaatttgtacttgcaattgtccgaatttgagtggattaatccataaaaaaactagttttcagttgg

SEQ ID NO: 17915 - DNA, 572 bp, Gossypium hirsutum
  Clone ID: uC-gsflnu33B059g03b1
atggttacagcaacagagctgcatgctacacaaaatggggtgcattgcccgaggtgctgaaagatgctgaaaagtgcattgagcttgacccaaccttttccaaaggttacacaagaaaaggtgctgatcagttcttcatgaaagagtatgacaaagctttataaacataccaggaagggttgaaacacgatgccaataaccaggagctgctcgatggtgttcgaaggtatacacagtattcttttttatttttggttttctcttcctaattcagcagtaccttattttaagtatttggttatctcaattattttgcagatgcgtagaacagatcaatcaagccaatcgaggtgatttgagccccgaagaactgtatgaaagacaggctaaggcaatgcaagatccagaaattcagaacattctcttaaaatcctggtatgagacaggcaagagcttataaattggttaaaaatatgactttagtccttgtacattttggaaattaggaacgtctttttattttcaatattgaaattcaggtggataattacacggtttttttttaattgttg

SEQ ID NO: 17916 - DNA, 988 bp, Gossypium hirsutum
  Clone ID: GOSHI-09MAY01-C1157_1
aatttccgcgcggccgcccgcgagtggagcgcttcaaatatctctccgaattctccacctcttaacatagatttgatttctcttttagtcaagttatgtcagggaagagaccacgtccgatgatggggaaattgtctgaattattggtttccggcaaaaaacccggatttttggatgctgttgttacaagccctaggagtccactagatttgaagacaccatcacctagaagttcgaagagatatgatgttggtggggttggactagggatcgctgttgcactggataacaagtgtagtacccattcctgcaggcatactatttgtagctcaaatgtaattgttgtgaaatctggtgggaagaatttagagatggaaagcttggaggattttacgtatgtgactacccatggatctggcaagtcgtctacaaaggtgttttatgatggaggtgaagaaaggagaaaaagtaactgtgaaaccccagctccagcaccaagatttgtggaagaggttgcttacccaacttcagattttctcagttgttgtcacctatgcaggaaaaagctgcatggccaagacatttacatgtatagaggggaaaaagcgttttgcagttcagagtgtaggtcaactcaaataatgatggatgagaggaaagaacagtgcagatcagaagtttcaagatctgcaaaagtctcaacctcctcttatgagtctggggatatcttcttctcaactgggattcttgcaatttagcctccggtcctcatttgggctcttcctgcgtatgtaattatatctatcggagaaataccatatacctttatgaggattaagaataactttattaagaataataaaaaaagaaattttggtcgtatatacatatatatattatgctgtaatgagaaatattgggtttgataagaaatgaacatcccttcgcagtttcctttttgaagattaaacaaaaaaaaggaaactcg

SEQ ID NO: 17917 - DNA, 157 bp, Gossypium hirsutum
  unsure (1)..(157): unsure at all n locations
  Clone ID: LIB3828-010-Q1-K6-E10
gcggnacggcgccctttttttttttttttattattcttaataaagttattcttaatcctcataaaggtatatggtatttctacggtcctcatttgggctcttcctgcgtatgtaattatatctatcggagaaatccatatacctggatgaggatcaa

SEQ ID NO: 17918 - DNA, 561 bp, Gossypium hirsutum
  Clone ID: GOSHI-09MAY01-C1147_1
tgaaagggccactcaacttttaagttatccttctggaaattgcagcatgccaaattatgctttctggagggcgtcatttgatgaatttttcactcttcttaccaagtattgcgtgaataaatatgagacgatcgggcaatcaatacagaaccagtctccaacaatggaagtgattggttcagaggcaatgaggcaagaaatgccttgtgagcttcttcgttctagtcttcctcacacaaatgaagctcagaggaagcttttaatggacttttcccagcgttctgtacccatgaacggagccaattcccatgctgggagtaccagccaaataaactctgaatcagtgaggggttaagaaagggagcaggtcagtgtgaaaaatgtgcactcgatggagtgtggaatgggagagcagaaactagggctgtgtgttttacttgaggagtctggtttaaaggggccaccattatcttatctgcagttcatcgcgagatgagttccctttcgattcagccttccatccattcaagaaggctgagtatggtaaagaagaaaagatga

SEQ ID NO: 17919 - DNA, 843 bp, Gossypium hirsutum
  Clone ID: GOSHI-09MAY01-C1177_1
cagctcgtgccgcgagttttttttttttttttttcttctactttccctttgccttacttaccactgaaaacaatgaaggagtccaagcatgaggctttcacactctctttcaccctgcttctcatgctgctgggtttggcatccagtgatgtgaaccaagacaaagcggaatgcactgatcagctagtcgggcttgctccatgtcttccatacgttggtggacaggccaaagcccccaccctggattgttgcggtgggctgaaacaagtgttggttaagagcaagaaatgcctgtgtgtgttgattaaagatagagatgaccccagtcttggcctcaacatcaatgctagtcttgctgcaaccctccctcacacttgtcatgacactgttaacattacggaatgcatctcccttctgcacttggcacccaactcccaggaagctaagttattccaaggatatcaaaagctgacagagaagcattccacatccccacctgcgagtggtaactccacaagcagtgctgcagagaagagtgatggaggaatgggaaagaagcgcgtgggagtagtaaagatagctatcggattttcactatgggttttcaacatacaccaaaactctgttgtgtgaatgatagaagtttacacacagctgcggctatgtttgttatatccataatttaagagtttggaccaggatccagttatgtttttatcttaaaatcctttttagtttgtctttgatttttttttttgcaattatatattcttacattttctctcctcccccccggggtgagtaagcacatcattttatgatatgaaaaattttttggtttgc

SEQ ID NO: 17920 - DNA, 680 bp, Gossypium hirsutum
  Clone ID: GOSHI-09MAY01-C1137_3
taacatggaagaacagcttaattagcttcggagatgcactcaaatcgtggagttcattagatgctactccatgcagatggtttgggattcattgcaactcacaaggcgaggtagttgagataaggctgaaagcaatagagttgcaaggctcattgccttctaatttgcagtctctaaaatccttgaagacccttgtgctttcatcaaccaatcttacaggcacaatccctaaggagctcggtgatcagtatgagctaagttatgttgacctcagtggcaattctctcactcgttgccttgatattggcatctctgctctccgctctaatgtccccgccattgacgtccgttgaactttgttgtgagagaactggaaacagacccgctgttcaactccgggcgtgggtctgctcttacggagaaaggaacagtggaaatggaagccagcattatggacgcattcttatttgaccaccccgggagccgaagagtttgccaagaaacagggcgtggagatggtggacaatgattacttcatcacagaagataacgtggggatgcttaagttggctaaagaagcaaactcaatcctgtttgattaccgtatcccgacagttggcacctgcggtgcagctgtggacagccatttgcagatgaacgggcttccgatcagcgtctac

SEQ ID NO: 17921 - DNA, 1208 bp, Gossypium hirsutum
  Clone ID: GOSHI-09MAY01-C1137_2
cccacgcgccaacgaagagggcttaaagcgaggcgctaggcgagagcgagagtgagaggcggaaaagggaggaatgggagcctgggctatcgctgttcatggtggcgctggtgtcgaccctaatctccctaaggaaagacaagacgaggctaagagactcctcactcgttgccttgatattggcatctctgctctccgctctaatgtccccgccattgacgtcgttgaacttgttgtgagagaactggaaacagacccgctgttcaactccgggcgtgggtctgctcttacggagaaaggaacagtagaaatggaagccagcattatggacgggcctaaaaggagatgcggtgccgtttctggcttaaccacggttaagaacccaatctccctcgcccgtctcgtcatggagaaatcaccgcattcttatttgaccaccccgggagccgaagagtttgccaagaaacagggcgtggagatggtggacaatgattacttcatcacagaagataacgtggggatgcttaagttggctaaagaagcaaactcaatcctgtttgattaccgtatcccgacagttggcacctgcggtgcagctgtggacagccatttgcagatgaacgggctcccgatcagcgtctacgcaccggagacagttgggtgtgtggtggttgacaaggagggtcggtgcgctgcaggcacttcaactggtgggctcatgaacaagatgtcaggaaggatcggtgactcgcccattataggtgcagggacctacgcatgtgagttgtgcggggtgtcgtgcacaggggaaggagaagcaatcatccgaagcaccctggcaagggatgtagctgcggttatggagtacaaagggttgaatcttcatgaggcagtggattatgtgataaagaacaggttgaacgaaggtaaagcaggcctaattgctgtgtcgaagaatggtgaggtggcttgtgggtttaacaccactgggatgtttaggggctgcgccaccgagggtgggtttatggaggttggtgtctggtaaaataaaatgttattattaggattgcattacaattttttcttgtggtgttcccccaagagggtttgcttttttcgtgatttcagtcatgtgcttcacgcacgtgttttcttttttgggtttcatcccatgtgattgagatgtcgaataaatatttagtatcttc

SEQ ID NO: 17922 - DNA, 1199 bp, Gossypium hirsutum
  Clone ID: GOSHI-09MAY01-C1137_1
cccacgcgtccggccaaggcgagcaagggcgagaggcagagcgagaaacagagtgagagagagggagacaattatgggagcctgggctattgcagtgcatggtggcgctggtgtagacccaaatctccctaaggaaagacaagaggaggctaagagactcctcactcattgccttgatataggcatctctgctctccgctctaacctccccgccattgacgtcgttgaacttgttgttagagaactggaaacagatcctctgttcaactccgggcgtggatctgctcttacggataatggaacggtggaaatggaagccagcattatggatggcccaaagaggagatgcggcgccgtttcaggcttaagcactgttaagaaccctgtctcccttgcccgtcttgtcatggacaaatcaccccattcttatctggccttctccggtgccgaagactttgccaagaaacagggagtggagttggtggacaatgaatattttattacggaagataacgtggggatgcttaagttggcaaaagaggcaaactcgatcctgtttgattaccgtatcccaacgattggcacctgtggtgcgggggcagccgccatggaaagtcctttgcagatgaacgggctccccatcagcgtctacgccccagagacggttggctgcgtggtggttgacaaggagggtcggtgcgctgccgccacctccacaggtgggctcatgaacaagatgaccggaaggattggtgactccccgcttattggctccggaacctacgcttgtgacttgtgtggggtgtcatgcactggggaaggagaagcaatcatccgaagcaccttggcgagggaagtaggcgcagtgatggagtacaaaggattgaacctgcatgaggctgtggattttgtgatcaacaataggttggatgaaggcaaagctgggctgattgctgtttcaaagaacggtgaggttgcttgtgggtttaacaccaccgggatgttcaggggctgtgccactgaggatgggttcatggaggttggtgtctggtaaaatgtcttggggttacaatacattaagctagttgtttttaggttatgttactcttgtacttcacaatatctctttgtttggttataactaagtgaagtgcattttgtaattgaaatgccccaataataaactaggttgcagtatc

SEQ ID NO: 17923 - DNA, 453 bp, Gossypium hirsutum
  unsure (1)..(453): unsure at all n locations
  Clone ID: LIB3543-043-Q6-K6-E2
ccccgcgtccgcccacgcgtccgcggtagcgtgggcggacgcgtgggcagatgctttgttcaactcggggagtgggtatggtttcacggataagtgaaagctgtaaatgtagagcatcattttagatggcccaaagaggagatgcggcgccgtttcaggcttaagcactggtaagaagggtgtgtcccttgcccgtcttgtcatggacaaatcaccccattcttatctggccttctccggtgccgaagactttgccaagaaacagggagtggagttggtggacaatgaatattttattacggaagataacgtggggatgcttaagttggcaaaagaggcaaactcgatcctgtttgattaccgtatcccaacnattggcacctgtggtgcgggggcagccnccatggaaagccctctgcagatgaacgggctccccatcaacgtctacccccc

SEQ ID NO: 17924 - DNA, 377 bp, Gossypium hirsutum
  Clone ID: LIB3148-027-Q1-K1-E4
ggaagggtcactgaggaggaagaatcaaatccaatcggttcgattcgaggggttcatggaggttggtgtctggtaaaatgtcttggggttacaatacattaagctagttgtttttaggttatgttactcttgtacttcacaatatctctttgtttggttataactaagtgaagtgcattttgtaattgaaatgccccaataataaactaggttgcagtatcgatccaatttcaactttttacattttcaatctgatctgatcattgttatgtaggggataaactcggttgagcaacaaacaagtaaaataacgaaaaaattgaaaagatcaaatatatatattttttgtaaaaaaatctctctaaagaggataaaaa

SEQ ID NO: 17925 - DNA, 384 bp, Gossypium hirsutum
  unsure (1)..(384): unsure at all n locations
  Clone ID: LIB3829-030-Q6-N6-C2
ggatcgatactgcaacctagtttattattggggcatttcaattacaaaatgcacttcacttagttataaccaaacaaagagatattgtgaagtacaagagtaacataacctaaaaacaactagcttaatgtattgtaaccccaagacattttaccagacaccaacctccatgaacccatcctcagtggcacagcccctgaacatcccggtggtgttnancccacaagcatcctcaccgttctttgantcaggantcancccagctttgcctttctccntcctattngttgtctctttttctcctccctcctgcnggttctttcctttgttctccctcactgccccttcttccctcgccnggtgcttnttttgattgcttctcct

SEQ ID NO: 17926 - DNA, 610 bp, Gossypium hirsutum
  Clone ID: GOSHI-09MAY01-C1127_2
ggggcccaagccttccgccaacccttccgtttaaatctttttttcttctggcccttttttctgtttctgtgttcatacgatcttcaatctcttcaaacattttagtgttatttgtccatgaaggcaatgaagcccggagtgtcttcattgaacccatatgcagcatcatacatacctcttgccaaaagggaggccagtgataatgtgacagccaaagatattaaacacggcaatgagaatgcttggttcaaaccttcctcacactttgcatataacccgcacagtagcaatgcttttcttggctcttcagcctatggtactgaaaagcaccaggttgcagaaggttctgcagtgaaaagccatcctgctcatggttctttgatgcacaatcctggtgaaatgactgacaagcagattgtggatgaagaatttgacatggatttggagtatcttcgcatgacatttcctggtttgtccaatgagtctcttttggatgtctacttggcgaatgatggagactttgaagccactgttgatatgctgaaccaacttgagatgcacactgttgagtcatctgaaactcttcccgacactttggatatcggtgatc

SEQ ID NO: 17927 - DNA, 658 bp, Gossypium hirsutum
  Clone ID: GOSHI-09MAY01-C1127_1
ccacgcgtccggtaggtctgtttccaaactggacgcggacgtcactgcttgtcaagtagtggcctctcccctcctcggtaaaaagcatttcattattgctttccattctaatcgccgatctcttcaatcttttttttcttcttgcccttttttctatttctttcttcagacgatcttcaatctcttcgaacattttaggcaatgaagcccggagtttcttcattgaacccatatgcagcatcatacatacctcttgccaaaagggaggccagtgataatgtgacagccaaagatattaaacacagcaatgagaatgcttggttcaaaccttcctcacactttgcatataacccacacagtagcaatgcttctcttggctcttcagcctatggtactgaaaagcaccaggttgcagaaggttctgcagtgaaaagccatcctgctcatggttctttgatgcacaatcctggtgaaatgactgacaagcagattgtggatgaagaatttgacatggatttggagtatcttcgcatgtcatttcctggtctgtccaatgagtctcttttggatgtctacttggcgaatgatggagactttgaagccactggtgatatgctgaaccaacttgagatgcacactgtgagtcatcttgaaactc

SEQ ID NO: 17928 - DNA, 521 bp, Gossypium hirsutum
  Clone ID: GOSHI-09MAY01-C1097_5
gaatgctattcggccgcgggggccttaacgcggatcttcaaaagttaagaactttccctttcctgggttttcgcttttttctttttcgggatttgatcgacagctccatcgtcttcttttaaagttttcttctttgtcaatggcatcttcttcagactcatggatcaaagactatcatgaagcaggggaaatggctgatgatatcaatgccatgatatctggaaggagttccctgcctgcttcgggtccagaaactcagcggcatgcatcggctattcgaagaaagattactattttagggactagacctgatggattgcagtcccttttgtctagaccgaccgggaagcccttaacggggaaggagatgaatcgtcgcaaggacatggttgcaaacctgaggtcaaaagtgaaccagatggcttctgcattcaacatgtcaaactttgctaacagagatagcttgttggggcccgaaagtaagccggatgccatgagtaaaacggttggtttggataatt

SEQ ID NO: 17929 - DNA, 874 bp, Gossypium hirsutum
  Clone ID: GOSHI-09MAY01-C1097_4
cccacgcgtacgcgtgggtcttcaacgacaaatagtgaaagagcaagatgagggtcttgagaagttggaggagacagttataagtacaaagcatattgcattggcagtcaatgaagaacttgatctgcataccagactcattgtattatactgtttttttcttctatacactgttgcctctaaaataagtgcttagtgaagattactcatcttttgtgaattttacattatatgtgtactccctctatgcaggatgacctggaccaacatgtggaagttaccgattctcgcctacgggtaaaacacttataattaattaacattttaaatgcacagcaaaatatcttccttttctttttgaatgaaacaaaatccaatgactgctgtttaatatatttatccagtacccctactagagatgggcattcctggaaagtggtatgcgtctctttttttattttcacttcagggtggtgaatttaagcctcagaatctaccaaacatgtcatgtggtgggaaatctttggttatgaatctcgtcagggaggaatgatagaattcatttgtcattcaagctgtgtgtttgaatagataaagatctcctcaagtaaactaagaattagatgacttttaaccactgaattatgttagaaccaatctgtttgtgtagcattctttggctgctaagacttgaagcaaattaaagcaagaaggaatgtctgataatgttaaaagtttccgtccaaggtgtgagaaatgatggattatttgcaatttgcttgttcaaatggatgcttgtttttccttaactgcttaaagtctagaaaagtttaactttctagctctttaacactataaaatatacacatgagtt

SEQ ID NO: 17930 - DNA, 918 bp, Gossypium hirsutum
  Clone ID: GOSHI-09MAY01-C1097_1
ccccgcctcacgttcaatccaacgcgcccgcttgacccgatctttcaagcttttcgttttctttggggtttgattagctgctcattcaattttacttctcctcgttgtcaatggcagcttcatcagacccttggataaaagaatataacgaagcagtaaaaattgctgatgatatcaatggcatgatatctgaaagaatttccttacctgcatccggaccggaaactcagcgtcatgcatcggctataagaagaaagattacaattttagggactagacttgatggattgcagtcccttatgtctagacctactgggaagcccttaacagagaaggagatgaaccgtcgcaaggatatggttgcaaatttgagatcaaaagcaaatcagatggcttctgcattcaatatgtcaaattttgcgaaccgagatagcctgttggggccagaaacgaagccagatgccatgagtagaacggtaggtttggataactctggccttgttggtcttcaacgacaaataatgaaagagcaagatgagggtcttgagaagttggaggagacagtaataagtacgaagcatattgcattggcggtcaatgaagaacttgatctgcatacccgactcattgatgacctggaccaacacgtggatgtttctgattctcgtctgctgagagtgcagaaaaacttggcggtattgaacaggcgaaccagagacagttgttcctgtatgtgcatgcttttagctgtgatcgggatcgtgattctggctgtcatcatatacctactcatcaaatacttgtaatacccacatacaccgtacccaacatactgctccttttgttttgttggtggtagaatttgttttttcaactttaatctcttgatatatgctggaaatttgttcggtttccccc

SEQ ID NO: 17931 - DNA, 600 bp, Gossypium hirsutum
  unsure (1)..(600): unsure at all n locations
  Clone ID: AW186981.1
gatgaggatcttgagaagttggaggagacaatagtaagtacgaagcatattgcattggcggtcaatgaagaacttgatctgcggacccgactaattgatgacctggaccaacacgtggatgtttctgattctcgtctgcgggtaaaatagtcattattaattaacaattttatatgcattgcaaaatatcctcctttcttttttcgaattaaacaagatccagttactgcttttgaatatatttctatagtccaactacatgtgatcctaaagtggtatgtgtctttttttatattttcactcgacagtcatccaagctttattagtaatagatgaaatcctcctcaagtttactaagaactacatagtctttgattattgaattctgttggaaccaaaccggttatcagtagtattctttgtcagctgttagatgaagcagaataaagcaatacagagctgttgatatgaaaatgttgcttttgctttacttccatattgtttgtgaccattgatatgttggtantgtgagcaaggttggatcatttgaaatattccatgttgaaagtgatgtgcgcgtattttcttagtgcctcaagt

SEQ ID NO: 17932 - DNA, 535 bp, Gossypium hirsutum
  Clone ID: uC-gsronu33B136b02b1
gttttccttttttttaaagaaagtttttatttgttggattctttttgacattaatttaagagtcaaaataaatttacagagttgtaaatacagctcactcaacaagacaactacttcacattttgttacatggactctctcattgttctaaaatacctgtgtccagccattgtgacctttgaaaaaaattgagcatacccacaattatatccgacatttacttcgagtccaagtgatctagaaaatattcaaagaacaggggggaaaaccgaacaaaatttccagcatataatcaagagaataaaagttgaaaaaacaaattctaaccacaaacaaaacaaaaagagcaagtttgttgggttcggtgtttgttggtattacaagtatttgatgagtaggtatatgatgacagccagaatcacgatcccgatcacagctaaaagcatgcacatacaggaacagatgaaggagctaatatatcgggaagcgcttgcattcagcccggatatgtgcaaccgtgatgatttacatgcca

SEQ ID NO: 17933 - DNA, 529 bp, Gossypium hirsutum
  Clone ID: LIB3585-050-P1-K1-E4
ctgggttttgcttccagtttccctctgtgtcttttatttattctattgaggttaattcgattgctaagtttttcatgtctggtatataaatattcatccagctgtgaataattgggagcataccctgttcgaaaaagggttttttttcttaaagtttaattaaggtctcttaagaacccattacatatagatttttctttgaattcgacttattttagcatgatctaaaggaaaagcggaattctgtcgatggccctaagtaaagttaattttacaaggtcaatggcagcttcatcagacccttggataaaagaatataacgaagcagtaaaaattgctgatgatatcaatggcatgatatctgaaagaatttccttgcctgcatccggaccagaaactcagcgtcatgcatcggctataagaagaaagattacgattttagggactagacttgatggattgcagtcccttatgtctagacctactgtgaagcccttaacagagaaggagatgaacccgtccaaggata

SEQ ID NO: 17934 - DNA, 470 bp, Gossypium hirsutum
  Clone ID: GOSHI-09MAY01-C1047_1
accacgcgtccggaagtacactcgacagttccagcttaaagctttgttttcttttgggtgtctctctaaaaccctttcttcaatggcttacgaaggcatcctcttgggcatgggaaacccgcttcttgatatctctgctgttgttgatgaagacttcttaaagaagtatggcatcaagttgaacgatgccattctcgcagaggataagcacttgccgatgtatgaggagatgactaaaaagtatgaagtggagtatattgctggaggtgccactcaaaactctatcagagttgcccagtggatgcttcaaatcccaggcgcaactagctacatgggttgcattggtaaagataagttcggagaagaaatgaagaagaattcaaagcttgctggtgttaatgtgcattactatgaggatgggactgcaccaacagggacatgtgctgtctgtgttgtcggtggcgaaagat

SEQ ID NO: 17935 - DNA, 983 bp, Gossypium hirsutum
  Clone ID: GOSHI-09MAY01-C1077_1
ttccctacgcgtccgcccacgcctccgaaaaaaagtgtctcatttttagcaaagttacagtcgtcctcatcgaacaactatggcagccatcaaagtccacggaagccctatgtccactgctacacagagggttcttgcatgccttcacgagaaaggtactgattttcagtttgttcccataaacatggctgccggtgaacataaatccgaaaactacctttccctcaatccattcggtcaagttccagcttttgaagacggggacttaaagctcttcgagtcaagagcaatcacccattacattgctcatgaatacagcgacaaagggacccaactcttaatccctggctctaacaaggatatggctgtcttagaattatggaaggaagtggaagcccaccagttcgattctccatcttcaaaaatagcctgggaggcgttttacaagccatttttcggcatggttaccgactccgcggctgtggaggaaaatgaaggtaagcttgccaaagttcttgacgtgtacgaggctcgattgacacagtcaaaatacttggcaagtgactgcttcaccttggccgacctgcatcacattcccaacattcaatgcttgttggctacacctgccaagaagctgattgattctcgtccgcatgtttgtgcttgggtgaaggagatcactgctaggcctgcttggtctaaggtcctcgctatgcaaaaacagtgaaaggtttcggcgatttggcgcccacccgagctgatatcagtagtccaatgttgaataagtccttcgcatgtttatttcggtgtttaaagtctaattcgcatagactttttttgagtgtggtctgcattcttggggccctcttcttatgttttttggccttttatgtgtcgattgactttgtgcttgtggttggttcatcgctcatctacgactaatatactacaataatttacacctgctgttgaatatgtttctt

SEQ ID NO: 17936 - DNA, 642 bp, Gossypium hirsutum
  unsure (1)..(642): unsure at all n locations
  Clone ID: AI054936.1
aaaaaaagttatctcatcttgagcaaagttacagtcgtcctcatcgaacaactatggcagccatcaaagtccacggaagccctctgtccactgctacacaaagggttcttgcatgcctttacgagaaaggcactgattttcagtttgttcccataaacatggctgctggtgaacataaatccgaaaactacctttccctcaatccattcggtcaagttccagcttttgaagacggggacttgaagctcttcgagtcaagagcagtcacccattacattgctcatgaatacagcgacaaggggacccaactcttaattcctggctctaacaaggatatggctgtcttacaattatggaaggaagtggaagcccaccagttcgattctccatgttcaaaaatagccctggaggcgttttacaagccattaatgggcatggttaccgactccgcggtcgtggaagaaaatgaaggtaagcttgggcaattcttgacgtgtacaagctcgatgacacggtcaaaaactggcagtgactgcttcacttggccgacctgataactttccacattcatactggtgctacacttcgagagctgatgatctcgtcccagctggcttggtgaggagacactgtaggctgtgn

SEQ ID NO: 17937 - DNA, 1177 bp, Gossypium hirsutum
  Clone ID: GOSHI-09MAY01-C1067_1
gttctctccacactgactcttttcttctccattataaaaagtaactaaatcttcctaaaactttcaattctaatcaagatttccagcattcgtaaacgccgccgtctccaccccaagatgttgctcagaatccgcagccgagacggcctggaacgtgtccaggtcggcggtcctcatgtttcaatctcccaattgaaagccttaatcgaatcccaattccaaatccccattcataaccaaaccctttccaccgatcgcaatcttctcttggctaaaacccccgccgatcttctccgtttcaccgacatgtccgacccctcccgtcccctctcctccttgaacctctcccacggctccgtcgttttcctctactaccagggtgaacgcaccgtccgcggcggaccccccgtctgtcccgccggatccttcgggcgtaagatgacgatggacgacctcatcgctaagcagacacggatcacccgccaggaatcgcctcactgcgattcggtttccttcgaccgcgattccgccaatgctttccagcggtacgtcaacgaaacgctggtgttcgccgtgaaacgcggcggctttatgtacggcaccgtctccgaagaaggtagggtggaagtcgatttcatttacgagccgcctcagcaagggatggaagatgatttgattctcttgagggatcccgaagaagagaaattggttgatgccattgctgctgggttaggtaggaagagggtagggtttatttttacccagacgataatgcaggacaaaaaggactataatttttccaacaaggaggttctacaggcggctgagcttcacgctgagagtgggctgaaggagtgggtgactgttgtggtgaagctggaagccaatgaagatggggatgccgatgtacattttgaagctttccaaatgagtgatatgtgtgttaagttatttaaggaaggatggttcgtgaccgagttcggggaagacgatgatccaaagctttccaagatgaagaaagaagtcgtcgtaggtgggaaggatgttaaggaggttgataatgatttcttcttggtggtggttaagattatcgaccatcagggacctctttcatcaacctttcctattgagaaccggaacaacctcgcgacgatgaggacactgaaaagtaaaatca

SEQ ID NO: 17938 - DNA, 628 bp, Gossypium hirsutum
  Clone ID: GOSHI-09MAY01-C1017_3
ggcggccccccgggccgtccccgcgcccgggcaaaagagaaataaaaacagtttcatttccattctaagtttgtgtttttgatttgccttttgtgggtttttttttataaaaaagttcagcaaaaatgtttattgagaattttaaggtggagagccccaatgtgaagtacacagagaatgaaattcagtctgtttacaactatgaaactacagagcttgttcatgagaacaaaaatggaacctatcaatgggttgttaaacccaaaactgtcaaatatgaattcaagactgatatccatgtccctaaattgggggtgatgcttgtgggatggggaggaaacaatggttcaaccctcaccggtggtgttatagctaacaaagagggtatctcttgggctactaaggacaaggtacaacaggctaattactttggttcattgactcaagcatcaacgatccgaattgggtcttacaatggagaagagatttatgctccatttaagagtcttcttcctatggtgaacccaaatgatattgtgtttggaggatgggacattagtgacatgaacctagctgatgcaatggctaaggccaacgttttcgacattgatctgcaaaagcaactgac

SEQ ID NO: 17939 - DNA, 1898 bp, Gossypium hirsutum
  Clone ID: GOSHI-09MAY01-C1017_1
ccccgcgcacaaacccaaaaaacaaagcagtgtttcaagaacagaatatcggcaaaaatgttcattgagagctttaaggttgagagtccaaatgtcaagtacacagacaatgcaatccagtcggtgtacaactatgagactactgagcttgttcatgagaacagggatggaacctatcaatgggttgtcaagcccaagactgttaaatatgaattcagaactgatatccatgtccctaaactgggggtaatgcttgtgggatggggaggaaacaatggctcaaccctcaccggtggtgttatagctaacaaagagggtatctcttgggctactaaggacaaggtacaacaggctaattactttggttcattgactcaagcatcaacgatccgagttgggtcttacaatggagaagagatttatgctccatttaagagtcttcttcctatggtgaacccaaatgatattgtgtttggaggatgggacattagtgacatgaacctagctgatgcaatggctagggccaaggttttcgacattgatctgcaaaagcaactgagaccctacatggaatccatggtcccactccctggaatctacgatcctgatttcattgctgctaaccaaggtgaacgtgccaataatgtcatcaaggggaccaagaaagaacaagttcagcaggtcatcaaagacatcagggagttcaaagagaaaaacaaggtggacaaggttgttgtactctggactgcaaacactgagaggtacagcaatgtcattgtggggctaaatgacaccgtggaaagccttatggcttctttggagaagaatgaatcagagatttctccttccactttgtatgctattgcttgtgttcttgaaaatgttcctttcatcaatggcagcccacaaaacacctttgttccagggttgattgatttggctattcaaaggaactgtctgattggaggagatgacttcaagagtggccagaccaagatgaaatctgtcctcgtggatttccttgttggggctggtatcaagccaacatcgatagtgagttacaaccatctgggaaataatgatggcatgaatctgtcagcaccccaaaccttccgttccaaggagatctcaaagagcaatgttgttgatgacatggtttcaagcaatggaatcctctatgagcctggtgaacatcctgatcatgttgtggtcatcaagtatgtgccgtatgtgggagacagcaagagagccatggatgagtacacatcagagatattcatgggaggcaagaacaccattgtgttgcacaacacatgtgaggattccctgttggctgctcccattatcctagatttggttctccttgctgaacttagcaccaggatccagttcaaggctgatggagagggcaagttccacactttccatcctgtggctacaatcctcagttacctcaccaaagcccctcttgttccaccaggcacaccggtggtgaacgcactgtccaagcagcgtgcaatgctggagaacatactaagggccagcattggcttggctcctgaaaacaacatgattttggaatacaagtgaaaaagttgagagaaaagtggaacaaagctttggttcttagaactttaggaccattttccctttctctgtcgttttcataaaagctgtggttactgttgtcacagattgtaacggttgtatgatggtttatgctatgcttctttttttctcatttattttcaagtggcgctcatgtttgtagctcactcttgagccaagcacctcttttgtggaaatagatatgatagtatgaattttcgtaaaaaaaaaaaaaaaaaaaaaaaaggcgccgttaaggatccaagttagtagcgtgcaggacgtcatag

SEQ ID NO: 17940 - DNA, 661 bp, Gossypium hirsutum
  Clone ID: LIB3583-017-P1-K1-C4
actagttctagatcgcgagcggccgctcgcgatctagaaccggacgcgtgggcggacgcgtgggcggacgcgtgggcggacgcgtgggcggacgcgtggggtcctgggccactaaggacaaggtgcaacaagctaattactttggttcacttactcaagcatcaactatccgagttgggtcttacaatggcgaggagatttatgctccctttaagagccttcttcctatggtgaacccagaggatattgtatttggaggatgggacataagtgacatgaaccttgctgatgcaatggctagagccaaggtctttgacattgatcttcaaaaacagctaaggccctacatggaatccatggtcccactccctggaatctacgacccagatttcattgctgccaaccaaggtgaacgtgccaataacgtcatcaagggtaccaagaaagaacaagttcagcatatcattaaagatattagggagttcaaggagaaaaacaaggtggacaaggtggttgtactttggactggaaacactgagaggtacagcaatgtcgttgtggggttaaacgacaccatggagaaccttttggctttttttgagaagaatgagtcagagatttctcctttcactttaatacggctatcgtttgtgttttttga

SEQ ID NO: 17941 - DNA, 423 bp, Gossypium hirsutum
  Clone ID: uC-gsflnu33B083f03b1
cccacgcgtccgctagatgtggatctccttgctgagcttagcaccagcatccagttcagggctgatcgagagggcaagttgcactctttacatcctgaggctacaatactcagatacctcaccaaagcccctcttggtccaccaggcacaccggtggtgaacgcactgtccaagcagcgtgcaatgctggagaacatactaagggccagcattggctaggctcctgaaaacaacatgattttggaatacatgtgaagaagttgaggagagaaaagtggaacaaagctgtggttcttagaactttacgaccatcatccctttctctgtcgtattcataaaagctcgaggtactgcagtcacagacctgaacgtgtgacgatggtatatgcttgggtatatgatgcttcctttcttctcatctat

SEQ ID NO: 17942 - DNA, 282 bp, Gossypium hirsutum
  unsure (1)..(282): unsure at all n locations
  Clone ID: LIB3189-052-P1-K1-B6
gccagccgtgcgctcttttttgtgtactctttactacaaacacttttatttacactaacatcattgttataactaaatgacggcgtttaaagccttatgggttggttgganaacaatgaatcatagatttctccttccactttgtatgctattgcttgtgttcttgaaaatgttcctttcatcaatggcagcccacaaaacacctttgttccagggttgattgatttggctattcaaaggaactgtctgattggaggagatgactttaagagtggccagacc

SEQ ID NO: 17943 - DNA, 257 bp, Gossypium hirsutum
  Clone ID: LIB3493-028-P1-M1-D3
tttattttggcactacgactgtggctggcctttgtatttgtgtttggattagggagttcaaggagaaaaacaaggtggacaaggtggttgtactctggactgcaaacactgagaggtacaggaatgtcgttgttttgttaaacgacaccatggagaaccaattggcttcttttgagaagaatgagtcagagaatttacctttcacctttcacaggttcacattgagtttttgaagatgttcttttactataatgtga

SEQ ID NO: 17944 - DNA, 560 bp, Gossypium hirsutum
  Clone ID: GOSHI-09MAY01-C1037_3
tctttgtctaacctttttttctcggtgctgagaaattcagagaaaaaaatgattctcccagtttgttacttttctctttaatctacgtgactctctctcttcctgttcctttttctttgccgatctcctgtattctgaatctcaaattagctgagtactgataggaaattatcaaatccgaggcaccatggaagcagacgacaagtttttgaacatgggtattctcatagtagccactctagtagtggccaaactcatatcgttcctcataatgcccagatctaagaggcgggtgccgccagtaatcaaaagctggccggtaattggtgggctccttcgattcatgaaagggcccatcgtgatgatccgggaggagtacccaaagctcggcagtgttttcacgttgaacctgtttaacaagaaaataactttcttgatcggacctgaggtttcagcacacttctttaaggcttcagaatcggacctcagccaacaggaagtttatcagttcaatgtgccgactttcggccctggtgtgtgtttgatgtggattactcaat

SEQ ID NO: 17945 - DNA, 806 bp, Gossypium hirsutum
  Clone ID: GOSHI-09MAY01-C1037_2
cggacgcgtgggcggacgcgtgggcggtcgcgtgggcggacgcgtgggcgagaccggggcgcaactatttataatttggtcatttcttttgtgtggtggttctctcactttttgagtttgctgcgcttgtctgtagtccatgtgactctctttcctttgctttcgtttcccagtctcttactttttgaatctcagatcaggaaattatcaaatccgagccgccatggaggttaacgacaagcttttgaacacgggtattctcatagtagccaccctagtagtggccaagctcatatctttcctcataatgcctagatctaagaaacgggttccaccagcagtcaaagcctggccggtaatcggtgggctccttcgattcgtgaaagggcctatggtgatgctccgggaggagtacccgaagcttggcagtgttttcacattgaacttgtttaacaagaagataactttcttgattgggcctgaggtttcatcccacttctttaaggcttcagaatcagacctcagccaacaggaggtctatcagttcaatgtgccaaccttcggtcctggtgtgggttttgatgtggattcccctataagggcagagcagttccggttctttacagaggcccttatagtaataaactttaaggttatgttgatctaatgttacagaagctgatgactacttcttcaaatggggggatagtggtagtggacctaagtttgattggagcatgaatctactgactgctatatgtgtccttgggcaagattcttataaactattgagagttctgcctccg

SEQ ID NO: 17946 - DNA, 1736 bp, Gossypium hirsutum
  Clone ID: GOSHI-09MAY01-C1037_1
cccacgcgtccggttccatgtgactctctttcctttgctttcctttcccagtcccttacttttcgaatctcaaatcaggaaattatcaaatccgagccgccatggaggttaacgacaagcttttgaacacgggtattctcatagtagccaccctagtagtggccatgctcataccctcccgcacgccgccgtccgctaagaggcggttgccgccagcagtcaaaacctggccggtaatcggtgggctccttcgattcatgaaagggcccatcgtgatgctccgggaggaagtacccaaagctcggcagtgtcttcacgttgaacctgtttaacaagaagataactttcttgatcgggcctgaggtttcagcacacttctttaaggctttagaatcagacctcagccaacaggaagtttatcagttcaatgtgccgactttcggccctggtgtggtgtttgatgtggattactcaataaggcaagagcagttccggttctttacggaggcccttcgagttaataaacttaagggttatgtagatcagatggttactgaagctgaggactacttctctaaatggggggatagtggtgaggtggacctcaaatatgagttggagcatctgattatcttgacggctagcaggtgtcttttgggtcgagaagtacgtgataagcttttcgatgatgtgtctgcactctttcatgatcttgataacggcatgctccctatcagtgttatcttcccttacctgcccatccctgctcatcgccgccgtgaccgagctcgaaagaagcttgcaggaatctttgcaaatatcatagcttcccgtaaaagtgctggcaagtcagagaatgacatgttgcaatgtttcattgaatctaagtataaagatggtcgcccaactaccgaggctgaagtaactggcttactgattgctgcgctctttgccggacagcataccagttctatcacctctacttggactggtgcctatctccttcgtcacaaggagttcctatctgctgtgattgaggagcagaagcaaataatgcaaaagcatggaagcaaggttgatcatgatatcttatctgagatggacaccttgtatcggtgcattaaggaagctctgagacttcaccctccactgattatgcttctacgtagttcacacagtgattttagtgtaaaaacgcgagatgggaaagaatatgacatcccaaagggtcacatcgttgcaacatctccagcatttgccaacaggcttccttacatttacaaggatccagacacatatgatcctgatagattctctgttgggagggaagaagacaaggcagctggggctttctcgtatatttcctttggaggtggcaggcatggttgccttggtgaaccgtttgcttaccttcagataaaggctatatggagccatttgttgaggaactttgagttggagcttgtgtcacctttccctgagattgactggaatgctatggtggttggtgtgaaagggaaggtgatggttcgttacaagcggcgacagctttctgttaattagccaactaatgtttgtgagttcgttagcagttttaatttatcttttttaaaatgttggcctattttgatctgttttggaacttttgattttatttgtgagcattctctggattttattttctagttaatataatattcatgattcggtcatgagcacttcctcttcttcctttt

SEQ ID NO: 17947 - DNA, 515 bp, Gossypium hirsutum
  Clone ID: GOSHI-09MAY01-C1397_1
gaaagcttaaatccgatctacaaaaaatctcaaatttgaaatttgaacttcgaagggttaaaacaaaacggtggttcctctaatctcgttttaacttcgtgatagcgattcgatttgattcgaatcggtagcttagcaaggatgggcgatttcaacctggctctggtaatcgtcgccatagttgtgtgtgtcctagtgttcttgttcaatgtctacctccttgtcaattaccagcatccggacgacgctaaccaagcgtatttccccaaattcgtcgtcgttttcgggctctccatcgctgccatttccatactcatgttaccggctgatgttgccaaccggcaggcgtgtaggcacgcgatatacaacggtgcctgtaatctcaccttgcctatgaaagagcttggctcgccgtttatatcatcgatgctgtgctcgttttttttgttatccccttcgctatgttctactacgaaggagaccaggacaagagtgttgggaaacggataaagagc

SEQ ID NO: 17948 - DNA, 927 bp, Gossypium hirsutum
  Clone ID: GOSHI-09MAY01-C1387_1
cccacgcgtccggcattttcggaccctttcggaaacattttgatttcagaaactttttaagtcaaaagaaaaacaaaaaaagcatgcagccggagaatttcgagctctaccgtttcctcgccgaaaacggcgtcggatcctacggcggctttccttccggttccgagtttccggctatgcaaagcttctccagttcctcgacgtattaccctttggagatgtccggtgttaccaccgaaacgacaccgcatgataaagcacttgcggcgttgaagaaccacaaggaggcggagaagcggcggagagagagaattaactcgcatctcaacaggcttagagcccttctcccttgtaattctaagacagacaaggcttcacttttagcaaaggtggtccaacgagtaaaagaactaaaagagcaagccctcgagacaactgagctcgacaacttgccatcggaaactgacgagatcaccgttctctcgtgcgattactcgggcgacgggaggttgatattcaaggcctcgttgtgttgcgaggaccgatccgatcttttacccgaattaatcgacatcctaaagtccttacacttgaagaccctgaaagccgagatggcgacgctcggtgggcggattcgcaacgtattcatcgtcgctgccgacagggttcatagcatcgagtcagtccatttcttgcaaaatgcattgaaatctttgcttgaacgttcgaatccgagtgataggtctaaaaggagaagagtattggatcataaaataataatgtagtagtgaccatatatataattatccatagccattgtttaaaagtttcattttaagggttcttttttttttaattttagaggggtttttttctagggacatgattttatttcatgagggcttgcttattatgttttctttgatg

SEQ ID NO: 17949 - DNA, 767 bp, Gossypium hirsutum
  Clone ID: GOSHI-09MAY01-C1347_1
gcaagagactggaaccttcactaatgcactagaaaaagtggaatcttggattttctctcgaatagttgagtcagggtggtggcaggctcttactccatatatgcaaattcctcttgagggttcacctgtcagcaaaacaataagaaagttgttggggccagccttaggagaccaacaacaaggaagtttctctatcaacttatggataaatgctttccaagatgcttttcaacgactttgtcctgtaagagcaggtggtcatgagtgtggttgcttgccagttattgcaagattggttatggagcagtgtgttgcaaggctagatgtacaatgttcaatgctattttgagggagtctgcccatgagatcccaacagatcctatatctgatcctattgtagattcaagggttctgcctattcccgccggagatcttagcttcggatctggtgcacaactcaaaatgctgtacgtattatatcagcggacttctgcttttgtttttttttccattttatatctgtggtatattcagttgtggctagtcgttgcactgtacttcttcacaataggcaactattgttctgaatctgagtaactctcgtgcttgttatatgaacttattccgtagttctcatgttttaatggaacattgcctctgaggaatttacgtcaccctattggtggagatcctgtgatatactgctattggttgaaaagagtggttgttgtgatggaatatgcttcattatctggaaacttatgatg

SEQ ID NO: 17950 - DNA, 536 bp, Gossypium hirsutum
  unsure (1)..(536): unsure at all n locations
  Clone ID: LIB3585-029-P1-K1-C8
gcaagagactggaaccttcactaatgcactagaaaaagtggaatcttggattttctctcgaatagttgagtcagtatggtggcaggctcttactccatatatgcaaattcctcttgagggttcacctgtcagcaaaacaataggaaagttgttggggccagccttaggagaccaacaacaaggaagtttctctatcaacttatggataaatgctttccaagatgcttttcaacgactttgtcctgtaagagcaggtggtcatgagtgtggttgcttgccagttattgcaagattggttatggagcagtgtgttgcaaggctagatgtagcaatgttcaatgctattttgagggagtctgcccatgagatcccaacagatcctatatctgatcctattgtagattcaagggttctgcctattcccgccggagatcttagcttcggatctggtgcacaactcanaaatgctgttggtaattggtgtagatggctgactgatatgtttggcatggatggtgattataatttaaatgaag

SEQ ID NO: 17951 - DNA, 885 bp, Gossypium hirsutum
  Clone ID: GOSHI-09MAY01-C1377_1
gggtcgcccacccgcccgtccacaatccctaatttattgtcagtacgaaaagaaacctttgattatttaattcccgttttctaatctttttggagaaatcggtagcaaaaaaatgtcgtcgtcggggaggaagatcacccttaagagctcggacggcgaatcattcgaggttgatgaagcggtggcgttggagtcgcagacgattaagcatatgatcgaggacgattgcgctgataacgggataccgttgcctaatgttacgagcaagatcttagcgaaggtgatcgagtactgcaagaaacacgtcgaggctcctaagacagacgatcgatccgccgatgacgagctcaagagttgggacgctgactttgtcaaggtcgatcaagccactctctttgatctcattctggcagcgaactatttgaacatcaagggcttgctggatctcacttgccaaactgttgctgacatgatcaagggaaagaccccagaagagatcaggaagactttcaatatcaagaatgacttcaccccggaagaggaagaagaggttcgtcgggagaaccagtgggcattcgaatgaagggtcaatttcgagtgccggttcaattgtatcaaactcatctatatataaaaatgtagtttgttgctctgacttttcatttgtactcttggatattctgtgagctcttttgaaactcttcaaagtgtcttcttctatgttctttgcctgtcttcactaaaaaccagtctgttgtatccaagtaatgtcctttaatcgtggtctgtgatatgaatgagaatggttgtctaaattatgcttgccaaccactgaaagaaccaaaaaaaaaaaaaaaaaaaaaaaaaaaacaaaaaaaaaaaaca

SEQ ID NO: 17952 - DNA, 427 bp, Gossypium hirsutum
  Clone ID: LIB3147-032-Q1-K1-F12
cccacgcgtccgcccacgcgtccgcccttgcgttcgcccacgcgtccgcccacgcgtccgaaaaggtgtcgtcgtcggggaggaagatcacccttaagagctcggacggcgaatcattcgaggttgatgaagcggtggcgttggagtcgcagacgattaagcatatgatcgaggacgattgcgctgataacgggataccgttgcctaatgttacgagcaagatcttagcgaaggtgatcgagtactgcaagaaacacgtcgaggctcctaagacagacgatcgatccgccgatgacgagctcaagagttgggacgctgactttgtcaaggtcgatcaagccactctctttgatctcattctggcagcgaactatttgaacatcaaaggtttgctggatctcacttgccaaactggtgctgacatgat

SEQ ID NO: 17953 - DNA, 309 bp, Gossypium hirsutum
  Clone ID: LIB3146-026-Q1-K2-H5
gcgtatcgcgcacgatatagcggctgatctgttgcctaatgttacgagcaagatcttagcgaaggtgatcgagtactgcaagaaacacgtcgaggctcctaagacagacgatcgatccgccgatgactagctcaagagttgggacgctgactttgtcaaggtcgatcaagctactctttttgatttcattctggtattgatcaacatcaacttcttgctcttgatggactccttcgttgaagacaccgatttccagttcttcttcgccgccggctgcaccttcttgcacgttttcatggccgtttgtag

SEQ ID NO: 17954 - DNA, 226 bp, Gossypium hirsutum
  unsure (1)..(226): unsure at all n locations
  Clone ID: LIB3189-047-P1-K1-D8
atttaattcccgttttccaatcttttttgagaaatctgtagcgaaaaatgtcgtcgtcggggattgatatcacccttaagagctcaggcggcgaatcattcgaggttgatgaancggtggcgttgcagtctcatactttttaccctattttccttccacgggggcgcttattacttttttctttttcccttatttcctatcaaaatcttatccaatgttttccctc

SEQ ID NO: 17955 - DNA, 1039 bp, Gossypium hirsutum
  Clone ID: GOSHI-09MAY01-C1317_1
cccacgcgtccgcccacgcgtccgcgccttctgccaatttgattaaaaactaaaaaaaggaaaagcctccaaaaaaaatggagaagatgatggcgttgagatccgtttatagagcagcgtgtttcagatcttcccgttttacccccatcgccgtcacggccgccgtcaaccacaatcgccacttggtttcccggagtttcttctctatctcatcgcctatcgcccctaatccgcctagaaacaccccttctggtgggaggtcgtcctttgcgttgagatcgggaagcatgcgctattttagtgaagatgcagctcatttgcctgacataaacgacactgagattctgaatgttttcaaggacttaatggctgcaagttgggatgagcttccctattcggttgtacaagatgcaaagaaagccttatcgaaaaatactgatgacaaagccggtcaggaagctttgagaaatgttttccgtgccgctgaagctgttgaagagtttggcggtattctaatcaccatgaaaatggaactcgatgacagcatcggagtgagcggagagaatgtaaaacctttatcaagcgagtttgctgctgcacttaagacagtgttccaacgatacgcgacttacttggatgcattcggtcctaacgaaacctacttgcgaaagaaggtagagaatgagttgggatcaaagatgatctacctaaagatgagatgtagtggcctaggttctgagtggggaaagattactgttcttggaacctcgggactctctggatcttatgtggaacaaagagcttagcagtaaattgttgagacatttcatgtgaactcttttttttgttctgttttagatcatgtttatgaatagtaggagacaagttggtgttgttctcctagaaaaccttgggagtttgcttggaaagctaaataaaaaggcttatgttgtcaaaaaaacaataaatcaaaatgtaaaatcatgtttctgaaatttttttcatgggaaaattttgcatgaaaatttttatgggaaaa

SEQ ID NO: 17956 - DNA, 263 bp, Gossypium hirsutum
  Clone ID: LIB3197-044-Q1-M1-D4
gatactcggctgactctgcttttctctgtacgggctgtctgccaattccactatcccctataccatgcttgacacccagatcaaatggagaagatgatggcgcaatgatccgtatactatagcacgaagttgtaaatcgtcccgttttacccccatcgccgtcacggccgccgtcaaccacaatcgccacttggtttcccggagtttcttctctatctcatcgcctatcgcccctaatccgtctataaacaccccttctggtg

SEQ ID NO: 17957 - DNA, 675 bp, Gossypium hirsutum
  Clone ID: GOSHI-09MAY01-C1307_1
cggacgcgtggggtaaagggaacctgtttcactcatcctgcccttatgttggacgtaaaccggaagcagcagagaatttccagtggaaaggaagttactttgcgaagttctttatcggttctcgacttaaaccagagggacaggctttatggtggaaaagaggccgctgctcaaagcataaaaccgatttttgacctaaaccagatttcggtaaatctgttattatcataaacatttgcatgctataacctttttatcatgagataatgtccccgacatatcattcaatgcagagggaggaagaagaactagaagctcaaactaattcagtgagaattgaggaatttaaaagaagttcaaccagaatcggaagtgatgagcagcaccaggatgtcaaaatatcagcctgcaggaacactggaaatgggccaaacagaacaggaaaaagaaagatctcatggcaagatcaggtggcattgagggcttaactctcttgcctgtcatagaggtgctcactggttaggttgagggatttggaataattgtcagtttagcttggctccctccttttcttcttaattgctccatgttctttactttctggctttttatctcttatggaaagaaaatatagttgcatctgttggatttataaagataaatataataattgct

SEQ ID NO: 17958 - DNA, 559 bp, Gossypium hirsutum
  Clone ID: GOSHI-09MAY01-C1297_1
gcattctggatgcacgtttaaccatcgatatgtgaagtctaatcctcaagaagtagaaaatgcaacatggatgctaactgtatttcattgttttggtcaatacttctgtctccattttgaagcctttcagctcggagtggctcctgtttacatggcattccttcgtttcatgggcgatgagattgaagctcgcaactacagttatagcctagaagttggagggaatggtaggaaactcatttgggaaggcaccccgagaagcataagagatagccaccgaaaggttcgggatagccacgacggccttattatacagcgtaacatggcgcttttcttctctggaggggacaggaaagagttgaaactgcgagtaacggggcggatatggaaagaacaacaaaaccccgaaggtggtgcctgtatacccaacctttgtagttcaaaatgtcacccccataatattgttggctgcatatttcctggaatactaatagccacctgccattgaatgttgaggatttttgaactctgcatgcacattgaagccttaagccctttc

SEQ ID NO: 17959 - DNA, 540 bp, Gossypium hirsutum
  Clone ID: GOSHI-09MAY01-C1277_1
ctcagcgcccacaaaccacatatcaaaagtagcttatatacaagtaagttaaaccgtcgaaacaaaatgctacctccatgccgacgctctttcaccgccaccactcatggtaccacccaaggctgatcttctaacttattatttcctaaatctgccgttcttttttatatataatagataggagaattgaagacaccagcgataccagattcttacctcttttttttttatttcccaatttaagccaatgacggaaacgccgttctcgaagctccctgaggacgtcgttttaaatatattttcgaagctcgaagaggatctcgctagctgggcaagtcttgcttgtgtctgcaccagattctcttctctgattcgtaatacctgcttgaagcttaaatgttccaaaaccatacccgccgtttccgccgaccttctctcctcttcctccgccccacccggcggttgggcttctcttcataagctgtctgtcttgctgtcaagcctccttcacgccggtgtccttcttgacaactctgattt

SEQ ID NO: 17960 - DNA, 1193 bp, Gossypium hirsutum
  Clone ID: GOSHI-09MAY01-C1217_1
cccacgcgtccgcccacgcgtccgcccccgcgtccgccccgcgtccgttcctttataaatcctttacccacatttccttttaccacagtctcttcatagtatcttctcatttgattcaatccgagttctgggtttagtttctttaacttcaaaatccattacccatattgggtttcttagggttttttgttttgttgttataaaacaaatcaaagatcttgatgctcaacctttttgtgttaatgtttgagattcatgtttccaattctcagtgaaatcttcttttctgggtttatgataaattccacattcatacgcaggacccatcttgttcaatctttctctgttgttttcctctactggttatattacgtttcataaagaaataatcatcttttttaacttatttatctttactactaagttttttttttttaattttatttgggtcctgctattatatatcataaataataactcctacaatggctacatcctcgggttcatcagcaacacaaatcaactcaggctcagaagaagcattaatggacgaaaggaaaaggaaacgaatgatatcgaacagggaatcagcaaggagatcaaggatgaggaaacaaaagcatttagatgatctaatgactcagttgactcagttgcagaaacaaaaccatgagatcatcacaaacataaacttcaccacacaacacctcttgaatgttgagtcagagaactcggtgcttagagctcaactcaatgaactcactcataggttacagtccttgaatgaaatcatcagcttcttgaatgatgatcatggcgatgacgacgacgatgatgataaaacaagcattgacttcactcagcctgctgtagctgatactgccttccttaatcctttccatttggctttcttgaatcaacctatcatggcctctgctgataacacgtttcagtattaattttctataatgccataattttaatgggatttttaatctcagtttatatatatatatatatatatagttgtacaagcagtagtatgaaataaaatatgtgaaaatcataaagctatggtatggttaatggtagatttttttccgctttgtggtgtttccaaaggttgttgataacagttgtttttgaccgatgaataatatgaaagaacatataatgctcaatttccgaacttg

SEQ ID NO: 17961 - DNA, 550 bp, Gossypium hirsutum
  Clone ID: LIB3584-050-P1-K2-G11
cccacgcgtccgcccacgcgtccgcccacgcgtccgcccacgcgtccgtctttttttaacttatttatctttactactaaggttttttttttttaattttatttgggtcctgctattatatattataaacaaaactcctataatggctacatcctcgggttcatcagcaacacaaatcaactcaggctcagaagaagcattaatggacgaaaggaaaaggaaacgaatgatatcgaacagggaatcagcaaggagatcaaggatgaggaaacaaaagcatttagatgatctaatgactcagttgactcagttgcagaaacaaaaccatgagatcatcacaaacataaacttcaccacacaacacctcttgaatgttgagtcagagaactcggtgcttagagctcaactcaatgaactcactcataggttacagtccttgaatgaaatcatcagcttcttgaatgatgatcatggcgatgacgacgacgatgatgataaaacaagcattgacttcactcagcctgctgtagctgatactgccttccttaat

SEQ ID NO: 17962 - DNA, 584 bp, Gossypium hirsutum
  Clone ID: GOSHI-09MAY01-C1207_2
cggacgcgtgggcggacgcgtgggaaagtttccggtactgagggttggggttgtgttattgttatgtaatccaaggccccttacaaaagtctgccatacaaatgcaggcagatctggaagcagtttggagtaaaatattgattgaaacgtacgagctagcagaagaatgctgaggaatcggctatcttggttgatcatggagataaagaaaatccacaagaaactaatgatcgtgacaccgccagtttcgatgaggaattgcataaagatggagcaaagcaggaaagtagtgaagaaccagcagcttctgtgctagacaaaaagattgtgggaagtaagttagatgagccgcaagtggaagagatggaggacagaaccccggacgactaagcttttcggctcctgcgccaaccctatgcgtaataagtgctgggttttggtttgtgaataataataataataataataataataataataataatgtgaggaatgagtaagcaggggatttagttttgtttgcagtttgtaaattgtatgtagacaacaacagtatagtctgcttaattactagttattgcatc

SEQ ID NO: 17963 - DNA, 2314 bp, Gossypium hirsutum
  Clone ID: GOSHI-09MAY01-C1207_1
cggacgcgtgggcggacgcggggcggacgcggggcaaccacaagaaggaaaaaaaggaatggcggggggagtattaaaaccggatctgagggaaatcctgctattcctcataattcaagagtcaagttccgattcaagcatggtgatggccctcgcgtccgcagaatgcctgcttggattaagtatgccactgtagaccctaccagatttggagctccatatgatggtgtgcattgggatcctccaccttcagaaaggtatgaatttaagtacccccgtcctccaaaacctaaagccccaagaatatatgaagcgcatgttggaatgagtagctctgaaccacgtattaattcatacagagaatttgctgatgatgttttaccccgtattcaggcaaataactataataccgtacaattgatggctgtaatggagcattcctactatgcgtcatttggataccatgtaacgaactttttttctgtaagcagtagatctggaacttctgaggacctcaaatttttaattgataaagctcacagcttaggtctacgggtcttaatggatgttgttcacagtcatgcaagtaacaatgtgactgatggacttaatggctttgatgttggccaaagttcccaggaatcgtattttcacactggagaaagccgtttcctcctgttgggggttagtcgactgttcaattatggtaattgggaagtccttcgcttccttctttcaaacttgaggtggtggcttgaggagttcaaatttgatgggtttaggtttgatggagtgacttccatgttgtatcatcaccatggtatcaacatgccattcacaggggatttcaacgagtatttcagtgaggcaactgatgttgatgctgttgtttatttaatgctggccaattctctgataaatagcatcttgccagatgcgactgtaattgctgaagatgtttctggtatgcctggacttggtaggccagtctctgaagggggaattgggtttgactaccgcctggctatggccatccctgacaagtggatggcgtccctgcggttcgccccgcgtccggagtggtcaatggcgggcttatcctgtagcttgacaaataggaggtgcactgagaagtgtatatcctatgctgagagtcacgatcagtctatcgtaggtgacaagacaatagcatttttcctaatggataaagaaatgtactctggcatgtcatgtttaacagatgcttctcctaccattgaccgagggattgcacttcacaagatgatacattttattactatggcattaggaggagagggctaccttaattttatgggaaatgagtttggacatcctgaatggattgactttccaagagaaggcaatgggtggagttatgaaaagtgcagaaggcagtggaccctggtggataccgatcacttaagatacaagttcatgaatgcatttgatagagctatgaatgcacttgatgataaattttcattcctttcattgacaaaacagatagtgagctgcactgatgaagaaaacaaggttatcgtctttgagaggggagatcttgttttcgtgttcaactttcattcagaaaatacttatgatgggtacaaagtggggtgtgacttgccagggaagtatagagttgccctggatagtgatgcttgggaatttggtgggcatggaagagtgggtcatgatgtggaccattttacatccccagaagggattccaggtgtacctgaaactaatttcaacaaccgccctaattctttcaaagtactctcaccagctcgcacatgtgtggtttattataaagtggatgaaagtgtagaagaaactaatggtatcaatgtaattagtgtcagtgagacattagaaatggatgcatcaaagcagaagaatgctgaggaatcggctatcttggttgatcatggagataaagaaaatccacaagaaactaatgaccgtgacaccgccagtttcgatgaggaattgcaaaaagatggagcaaagcaggaaagtattgaagaaccagcagcttctgtgctagacaaaaagattgtgggaagtaagttagatgagccgcaagtggaagagatggaggagagaacaccggacgactaagcttttcggctccagcgccaaccctatgcgtaataagtgctggtttttgttttgtgaataataataataatgtgaggactgagtaagcaggggatttagttttgtttgcagtttgtaaatcttatgtagacaacaacaatatagtctgcttaattacttagttattgcaccg

SEQ ID NO: 17964 - DNA, 448 bp, Gossypium hirsutum
  Clone ID: GOSHI-09MAY01-C1227_4
ctagactgagatcgctccaagctccctttgattcccatcatcacaatcatgacccgcgcgtccgcgacccataaatcctaaatctcccaatttcccaattctttatctgtagggttccgttcttagcttcaaatttgcaaatttagatctcaatcactcaaatcactgaaaaaacaacccagcaaaatgtacggattcgaagctatgacgttcaacatccacggcggttacctagaagcgatcgtgagaggtcaccgggccggtctcttaaccgccgccgattacaacaatctctgccaatgcgagacccttgacgatatcaagatgcacctctccgccaccgaatacggtccttacctccaaaatgaaccttcaccattgcatacgactactattgtggagaaatgcactcttaaactcgttgatgagtataagcatatgctatgcc

SEQ ID NO: 17965 - DNA, 812 bp, Gossypium hirsutum
  Clone ID: GOSHI-09MAY01-C1227_3
gaaatttggaacactctctacaaagcataccttgaagatttttacaagttttgtcagaaactactgcaactgctgagataatgtctgacctcttaccttgaagctgataggagagctgtcaatattacaattaacagcattggaactgaacttactcgtgatgatcgtgtgggagtatgcggtaagttcggtctggtttatgcttattggcacagggaacttgttgtctgtgaagatattgaccaggttcgtggtgcaatggaaaaatatcctccctatcaatcgattttctctaaattgtcatatggagatagtcaaatgcttgacaaagcattttacgaggaggaagtgaaaaggctttgcttagctttcgagcaacagttccattacggtgttttctttgcatacatgagattaagggagcaggagataaggaacctgatgtggatctctgaatgtgtggctcaaaaccaaaagtctagggttcatgacagtgtggtctttatattttaaatgatccatctgaccaccgagccgaagtgggttaggaataatgaatggtaatgtcttttacttgatcagctgtacattgtctgtcctccctcaaattctccacccatattttcatttaagtggtgtgtttagccgctctttatcccaacaatttgtgtgctgaggaataaatcccttcatatattattatatgttttctttggtaattgaggatatatatgttgtgttcttgagcttattttcaatcttttattgaaggcatttccaggaaaaaaaaaaaaaaaaaaaaaaaaactcga

SEQ ID NO: 17966 - DNA, 626 bp, Gossypium hirsutum
  Clone ID: GOSHI-09MAY01-C1227_2
cccctcaaagaaacataattctccgcaatttcccaaatctgcatctttagggttctgtttttaactttcaattcccaaactcaaatgcaaaaggtacggactcgaagctaggacacttaacatccacggcggttacttggaagcgatcgtgagaggtcacagggccggactcttaaccgccgccgattacaactatctttgccaatgcgaaacccttgatgatatcaagatgcatctctccgccaccgagtacggcccttatctccaaaacgaaccttcaccattgcatacgactacaattgtagagaaatgcactcttaaacttgttgatgagtataagcatatgttatgccaagctacggagccattgtccaccttcttagaatatatcacatatggtcacatgatagacaatgttgtcttgattgttactggaaccttgcatgagagagatgttcaagagctcttggagaagtgccatcctttgggcatgtttgacagtatcgcaaccctggcagttgctcagaacatgcgcgaactctacagattggttcttgttgacactcctctggctccatacttctctgagtgtattacctctgaggatcttgatgacatgaacattg

SEQ ID NO: 17967 - DNA, 1913 bp, Gossypium hirsutum
  Clone ID: GOSHI-09MAY01-C1227_1
ctagctctcgactgtgagcatcacgcacataccatgatcaggacccataactctaacatgcgacaattctttatctgtatgagttgcgctcttagctacaaaactcccacatttagatctcaaccactcaaatcactgaaaaaacaacccagcaaaatgtacggattcgaagctatgacgttcaacatccacggcggttacctggaagcgatcgtgagaggtcaccgggccggtctcttaaccgccgccgattacaacaatctctgccaatgcgagacccttgacgatatcaagatgcacctctccgccaccgaatacggtccttacctccaaaatgaaccttcaccattgcatacgactactattgtggagaaatgcactcttaagctcgttgatgagtataagcatatgctatgccaggctaccgagccattgtccaccttcttagagtatatcacatatggtcacatgatagacaatgttgtcttgattgttactggaaccttgcatgagagagatgttcaagagcttttggagaaatgccatcctttgggcatgtttgatagcattgcaaccctggcagttgctcagaacatgcgtgaactctatagattggttctcgttgacactccactggctccatacttttctgaatgtattacatctgaggaccttgatgacatgaacattgaaattatgaggaacactctctacaaagcataccttgaagatttttacaagttttgtcagaaactaggcggtgcaactgcagagataatgtctgacctccttgcctttgaggctgacaggagggctgtcaatatcaccattaacagcattggcactgaacttacgcgtgatgatcggaggaaattatactcgaattttggtctgctttatccctatggccatgaggaacttgctgtgtgtgaggatattgaccaggtccgtgctgcgatggaaaaatatcctccctaccaatcaattttctccagactatcttacggagagagccagatgcttgacaaggcattttacgaggaggaagtgaaaaggctttgcctagcttttgagcaacagttccattatggtgttttctttgcatacatgagattaagagagcaagagatcaggaatctgatgtggatctctgaatgtgtggctcaaaaccaaaagtctagggttcatgacagtgtggtgttcatattttagatgatggaggattgggtaggaataattaatcgggttgaatcagctgtaaattttcgttgctcggcgggatttatcaacatcccatattataattggagtggtttagctgctctgtgtcggagcagtgtgttgttaaagaataaatgccatatgattattatatatatgtttgatatggttttttgggggtaaaatgttgtattcagattgattaaaatgtattgttgtcttgaatttgaggttgttttcaatgatttaatgatgaagtttctaggaaaaatataacttttttaatatcttctttacttctcttaacctatatttatttttattttctttttctttctttttttttactccttttatttttttcctctttttctttttctttactttttatccttcttccttctttttttcctcttttttttactcctttttctttttcatttatttttcttccattatttttactttttacatttctttttctctccattatctttttactcttttctttatttcttttactccctcttttattacttttattttaattttttttttcttatttttcttctttttcatcattttttttatttcttctctcatttcttttatcttttctttataatcttttattttttttttttttcttttttcttcttttatttttcttattttctattttttttatattt

SEQ ID NO: 17968 - DNA, 355 bp, Gossypium hirsutum
  Clone ID: LIB3120-048-P1-K1-B6
ctgggtctacttcagggacgcctagcgcattggcgaccatcactgatgatacagcccagcatggggtacgtattcgaagctatgacgttcaacatccactgtggttacctagaagcgatcgtgagaggtcaccggtccggtctcttaaccgccgacgattacaacaatctctgccaatgcgagacccttgacgatatcaagatgcacctatccgccaccgaatacggtccttacctccaaaatgaaccttcaccattgcatacgactactattgtggagaaatgcactcttaaactcgttgatgagtataagcatatgctatgccaggctaccgagccatgtccaccttttagag

SEQ ID NO: 17969 - DNA, 534 bp, Gossypium hirsutum
  Clone ID: GOSHI-09MAY01-C2997_3
cccacgcgtccggcaagtttcaccctcgcgtccgatgaacggtgatgttaaatgccttgcaacatccaagaggggatctgctggtccgtgtttggctcaagaatgttatcttcagaagtgcaatagctcaaaatcagctgctgagcttccactcctagtggagaacttagaacaagccaaggatcgtccgaaatcccattgtaggatatcagatacagaaaaccctggcaggaatggtaatgtcaagctttttggtcagatactaaattctagttcccgggatgataaggtatcccatttttcgaaacagaacacagaaccatcaaattcgaaacccattggtaataatgttgatggaaactcaaagttcgatgcaaataatcatgtagtggaaaatgttccgaagaggagttatggtttctcagatgggaaaaggatttaaaccgggttgtcatctttgcccgactcatccattttaatggctaagtacccctccgcatttgccaattatcctcccacatcctcatctcagat

SEQ ID NO: 17970 - DNA, 863 bp, Gossypium hirsutum
  Clone ID: GOSHI-09MAY01-C2997_2
cttgcatttcctaggtttaggattctggtgggctgagtccaaacctgctactagtttgtatgaaccatgaacaaaatgcagtgcagaaccctagcagccaaagtattatgtaggatggatcgaataaagccacggatgaatctgttggtaaaaactcttgttcaagttttagcttggaggtgcgcaaagggtttgcattcagaactcctcctgatttggattctgccaagaagccttccgttaggtaaaataactcttctgctaatggttctgcattgcatgattcggactgcacttcgatgtgagaaaaattttgcaacctaggataggcctgtcatcaacacttgattacgaggagaatgaagccaaacaagcccaaaaatctgtccgtgaagatgagtctggtcgtctattccggaaagacctctgtgaatgttaccgaaccccgccggatcttaaggggttatcccttgcaagtttcaactttgaaagaaatgaacggtgatgttaaaggccttgcaacatccaagacgggctctgctggtccgtgtttggctccagaatgttatcttcagaagtgcaattgctcaaaatcggctgctgggcttccactcctagtggagaacttagaacagcaaggatcgtccgaatcccattgtaggatatcagatacagaaaaccctggcagaatggtaatgtcaagctttttggtcagatactaattctagttcccgggatataaggtatcccatttttcgaaacagacacagaccatcattcgaaaccattgtaataatgtgatggaactcaagttcatgcaataatctgtatggaaatgtccgagagagtatggttctaaatgg

SEQ ID NO: 17971 - DNA, 1153 bp, Gossypium hirsutum
  Clone ID: GOSHI-09MAY01-C2997_1
ggatgaacgtaatcctaccagcaaaataattttgccaactgacctgaatgtaccagacgaaaacgatcggaagctagtagatcatagagattctgaggcagtgcaaactgtggattctgatgcgggccgggctgagctgattactgaatgtagtgtggatatgaatattgatagcaaggctgggtcactgcaggttcagaaaagtgttgttgctttggggaacctaaatgcaggaagggatgttactgaacagggtgtttctgttgcagtatcagcatttcttggggcagcagcttatccttgcattcctccctcgcgtccggtggctgagtccaaacctgctactagtttgtatgaacatgatacaaaatgcagtgcagagactagcagccaaagtatatgtaggatggattcgaataaagccacggatgaatctgttggtaaaaactcttgttcaagttttagcttgagtgccaaaggtttgcatcagattcctcctgatttggattctgccaagaagccttccgttagtaataactcttctgctaatggttctgcattgcatgattcggatgcacttcgatgtgagaaaatttgcaacctagataggctgtcatcaacacttgattacgaggagaatgaaaccaaacaagcccaaaaatctgtccgtgaagatgagtctggtcgtctatccggaaagacctctgtgaatattaccgaaccccgccagatcttaaggggttatcccttgcaagtttcaactttgaaagaaatgaacggtgatgttaaaggccttgcaacatccaagacgggctctgctggtccgtgtttggctcaagaatgttatcttcggaagcgcaatagctcaaaatcagctgctgagcttccactcctagtgggagaatttagaacaagccaagggatcgtctgaatccccattctaggatatcagatacagaaaaccctggcagaatggtaatgtcagctttttggtcagatctaattctagttccgggatgtaaggtatcccatttttcgaacagacacaaacctcaattgaaactatgggtatatgtgatggaactcaagtcgatgcaatatcatgaacagaatgttcgaaagagtatgttctggatggaaagatcaccggtgt

SEQ ID NO: 17972 - DNA, 700 bp, Gossypium hirsutum
  Clone ID: GOSHI-09MAY01-C2947_4
cgagaacttccttgaacgccgcttgcaaacacttgtgttcaagactggtatggccaagtctattcaccatgcccgtgtcttgattaggcaaaggcatatcagggtcgggaggcaggttgtcaacatcccatccttcatggtaagggttgactcgcaaaaacatatcgatttctctctcactagtccgtttggaggtggccgacctggaagagtgaagagaaagaaccaaagagcagctgccaagaaggctgctggcagagatggcgatgaagaggaagatgagtaaaaccttagaggggtactaccacccttagttacccttaaatagttttggagcttgccatttccttctcccctttattagatatggtacgtatcttgcttctagacctttatctttagcgtatcttggtatatgtttttcatttaatattatgttcttttttcttggattggaagttaatgaaaggttattttgttcatttaaactagttagatagttcatatgttgcatgaactgggatgtaatattggatactgagtatgtgtccaatatggggtacgtttaaatttttgagtattttcatgtactccaaaaagtttttggaggatcatactttggtttgatgtggtcagtgtatcaattaaggattgatggcatcatatgttcctaacgaactttgtgagattttgttgtcat

SEQ ID NO: 17973 - DNA, 949 bp, Gossypium hirsutum
  Clone ID: GOSHI-09MAY01-C2947_3
cggtcgcgcgcgttcgctttctggcctccgagaagaagccgacgccgccatggttcacgtcagtttctaccgcaattatgggaagacatttaagaagccaaggcgtccatacgaaaaggaacgtttggatgctgagttgaggcttggaggagaatatgggctccgatgtaagagggagttggggggggttcaatatgctttgagccgaatcagaaatgctgctagggatcttctcactcttgatgagaagaaccctcgtcgtattttcgaaggtgaagctcttcttcgtaggatgaacaggtatggacttttggatgagagccagaacaagctcgattatgtcttggctttgactgttgaaaacttccttgagcgtcgtttgcaaactctcgtgttcaagactggtatggccaagtcaattcaccatgcacgtgtgttgatcaggcaacgacacataagggtcgggaggcaggttgtgaacatcccgtccttcatggtgagggtcgactcccaaaagcatattgatttctctcttactagtccgtttggaggtggccgccctggaagagtgaagagaaagaaccagagagcagctgccaagaaggctgctggtggagatggtgatgaagatgatgaagagtaaaccttaggctactatcaaccaccactaggaaccctttaaaagcctttgtttggaacttacaatatcctccattggtagacatggttttgagttttgtttccagaactttgttgtagtggatcttgatatatgttttgcatttactattgctgttttggtcggatttgaagttaattaagtgtgctgttttaagattaaaaaaaaaaacatctttattattgtgttctctatgctatcaagctccacccgtcgcggccgtaatagatatgtattttgtataatcaacatgcagaagatatatttaat

SEQ ID NO: 17974 - DNA, 978 bp, Gossypium hirsutum
  Clone ID: GOSHI-09MAY01-C2947_2
cttcccctttccctccaactttaatctaccacaactgtaacgacgccatggttcacgtcagtttctaccgtaactatgggaagacctttaagaagccaagacgtccatatgagaaagaacgattagatgcagagttgaggcttgtaggagagtatgggctccgatgtaagagggagttgtggagggttcagtatgctttgagccgtatccgtaatgctgctagggaccttctcacccttgatgagaagaaccctcgtcgtatttttgaaggtgaagctcttcttcgtaggatgaacaggtatggacttttggatgagagccagaacaagctcgattatgtcttggctttgaccgtcgagaacttccttgaacgccgcttgcaaacacttgtgttcaagactggtatggccaagtcaattcaccatgctcgtgtgttgattaggcaacgtcacatcagagtcggaaggcaggtggttaacatcccatcctttatggtgagggttgactcccagaaacatatcgacttctctctgataagtccgttcggaggtggccgtcctggaagagtgaagagaaagaatcagagagcagctgccaagaaggccgctggtggagatggcgatgaagaggaagacgagtaaaccttaagctagtattggcaatagggcactcctaaaagagcctctgatgggaacttaccatttcctacattattagacatggtttgagttttgtttcaagaccttttatgtagtggatgttcgcatttgtatttgtctcggattttatgttacattgagcaattttgttattttgagattaaaatggttaaaatataattcaccaaaaaaaaaaaaaaaaaaataaaaaaaaaaaaaaaaaaaaaaaaaataaataaaaaaaaaataaaaaataaaaaaaaatattaaaaaaaaaaaaaaaaaaataaaggggggccccttttaggggaacaaagtt

SEQ ID NO: 17975 - DNA, 968 bp, Gossypium hirsutum
  Clone ID: GOSHI-09MAY01-C2947_1
cccagcgtcccccgccgccgtcttcccttccttctatctttattttctcgcctctgacgagaagccgacgctgccatggttcacgtcagtttctaccgcaactatgggaagacctttaagaagccacgacgtccgtatgagaaggaacgattggatgctgagttgaggcttgtaggagagtatgggctccgatgtaagagggagctgtggagggttcagtatgctttgagccgcatccgtaatgctgctagggaccttctcactcttgatgagaagaaccctcgtcgtatttttgaaggtgaagcccttcttcgtaggatgaacaggtatggacttttggatgagagccagaacaagctcgattatgtcttggctttgactgttgaaaacttccttgaacgtcgtttgcaaacactcgtgttcaagactggtatggccaagtcaattcaccatgcacgtgtgttgatcaggcaacgacacataagggtcgggaggcaggtggtgaacatcccgtccttcatggtgagggtcgactcccaaaagcatattgatttctctcttactagtccgtttggaggtggccgccctggaagagtgaagagaaagaaccaaagagcagctgccaataaggccgctggtggagatggcgatgatgaggaagacgagtcgcccttgcgctacttttggccggcgcccctagggaaccctttaaaaaccctttgtttggaaactttacaatatccctccactgggttaaacatgggtgttggagtctttgttttcccccaaactttgtttgttgctgggattctcgaaaataatggtgcgggccagtttcctatgtggccggtctttggttccgagattgcaaggttcaaattaaattgttcctgtttttctgggaattagaagcaagaggcctcccttttgttgttggagggagaacaaaaaaattttccgccggccca

SEQ ID NO: 17976 - DNA, 444 bp, Gossypium hirsutum
  Clone ID: LIB3147-007-Q1-K1-F5
tcttgagcgtcgtttgcaaacactagtattctagactgggatggccaagtcgattcaccatgcttgtgtgttgattaggcaaaggcacattagggttggtaggcaagtggtcaacatcccatctttcatggtgagggttgactctcaaaaacatattgacttctctctcacaagccccttcggaggtggccgccctggaagagtgaagagaaagaaccagagagcagctgccaagaaggctgctgggggagatggtgatgacgaggaagacgagtagatgttaaggccattaccctgcaactaggaacccttgaaagcatatgtttggaactttgccatcacctccattgttagacatggtttgagttttgtttccagatctctactgtagcggatattggtatatgtcttgcttagtaatctgtgtttttttaaccctgattt

SEQ ID NO: 17977 - DNA, 421 bp, Gossypium hirsutum
  Clone ID: LIB3135-007-Q1-K1-B8
cccacgcgtccgggacttttgtatgagagctagaacaagctcgattatgtgggggctttgggtgttgttaacttccttgaacgtcctttgcaaacactcgtgttcaagactggtatggccaagtcaattcaccatgcacgtgtgttgatcaggcaactacacataagggtctggagacaggttgtgaacatcccatccttcatggtgagggtcgactcccaaaagcatattgatttctctcttactagtccgtttggaggtggccgcccctgaagagtgatagagaaagaaccatatagcagctgccaagatggctgcttgtcgagatggtcatgaagatgatgactagtataccttacgctactatcatccaccagtaagatccctataaatgcctcagcctgtaacatacaatatcctc

SEQ ID NO: 17978 - DNA, 354 bp, Gossypium hirsutum
  Clone ID: LIB3146-051-Q1-K1-A6
cccacgcgtccgcccacgcgtccgcccactcgtccgcccacgcgtccgcataacctggggagaaaatggtggcagttattccttaaaaaaaaaaaaaaaaatgccaagaaggctgctgggggagatggcgatgatgaggaagatgagtaaacgttaaggccattaccctgcaactaggaacccttgaaagcatatgtttgaaactttgccatcacctccattgttagacatgggtcgagttctgcttccagatctctactgcaccggatattggtatatgtgttgcattgagcaatctgtgttattatatccctgatttaaagctatttaagtaattatgctggtttaaaccaa

SEQ ID NO: 17979 - DNA, 281 bp, Gossypium hirsutum
  Clone ID: LIB3145-041-Q1-K1-G1
cccacgcgtccggccacgcgtgcgcccacgcgttcgctttattttgtcgcctgtgacgagaagccgacgctaccatggcccacgtcagtttctaccgcaactatgggaagacctttaagaagccacgacgtccgtctgagaaggaacgatcggatgctgagttgaggcttgtaggagagtatgggctccgatgtcagagggagctgtggagggttcagtatgctttgagccgcatccgctatgctgctagggaccttctcactcttgatgagaagaaccct

SEQ ID NO: 17980 - DNA, 1510 bp, Gossypium hirsutum
  Clone ID: GOSHI-09MAY01-C2967_1
gctgcacaatctgctcccaccgagtcttcactatcctctatggttgctgaaatcaattcaggaattagagacttagttagtatgcagggagataaccaggatgcgtcaggtagtcagcagcctaataatatggttgctagtggagctggggattctactgttgctttaccagcaaaccttgaaactgaagaactgaagtcacaacctgaacatgctgaaggaagaactgataatactgagagtggtgagagttcacaggatatatcacttggcacagttggatgccctcctagttcaagtggagaacctttggtgaagttggaagatccatcaggaagtgctcctagatccagtgaggaaaatgccaaacctgtaccacttggattggggttggggggtttggaacgcaagagacgagtcaaaccaacgaaatcttcaattgccggtgttaatggaacagctagttcttcacttgatcgcaatctgagtgctagaacggctggtcaacagattttgcagtcacttgcttctcagagctcttctctgagtagggtagattcttcctcaggtaatcaaggtgttctgggtagtagattatcaggagggcagggttcagatgatcaattagctgctgctaatgctgtctctcaagttcttcaaagtcctgcgttgaatggcctattggcgggggtttctcagcaaactggtgctggttctccagatgattttaggaatatgttgcagcaactgactcaaagtccgcaaatcatgaacactgttagtcaactagctcagcaggttgatagccaggatattgggaacatgttttcaggttttggaggaggccaaggtggtggtattgatctgtcacggatggtccaacaaatgatgcccattgtttctcaggcgcttggttgtgggccatctgcaactccatccttccctgctgtagaatctaaatcacaggatgacattcaacaaattgctcagaggatcgagcagtctaatgtaccagatgacgtcttccatgctgttgccgaaaatgcagttcaggtatatggcaatgggaggaatgctgaagaacttctaaatgagttgtgtggtaatgaaggtcttgccaaggattacacagagatgctaaagcaggacttgcgtcaaaggtttcaggataaatctgagaaggataagttctagctctcttgattctgaaaattaaaacttagttcttttgaatttctaaaagtcgtgcagctaattactgggtcatttcttacccagattctatcatgaacttaggcttctgggggattgtttgatcttatatttgttatgaaagtgctctttgtttagttgttgcatcaaattggaattaccatgataaaagtatgttctgttttctcgaaagatacaagttccactagcctttttctttaggttggtttcttcgatatgaaaatgtaaacatctattaccagttttttcaattaactacctatcctctattgaggtc

SEQ ID NO: 17981 - DNA, 281 bp, Gossypium hirsutum
  Clone ID: LIB3584-017-P1-K1-F10
tggaagggcctatgggcggggattttcagcaaactgggctggttctcagatgatttagggatatgttgcagcaactgactcaaagtcgcaaatcatgaacactgttagtcaactagctcagcaggttgatagccagggatatggaacatgtttcaggttcgaggagccaagtggggatgactgcacgaggtcacaatgagccatgttagcgctgtgggtattgactcatctctgtggactaaaagtgcataaatgtaagacacagctatgacaatagctca

SEQ ID NO: 17982 - DNA, 676 bp, Gossypium hirsutum
  Clone ID: GOSHI-09MAY01-C2917_1
gcgcccacgcgtccgcctttttggatgatgatagagaataatagtaatagtaataataataataatgtgcaggaccagtgtgagtctgatggaccaccaaaatcaaagctgcctcagagtcagaggccaacaccagaaatgtaccataatacgtaccagtcagatgataggcatcacaaaacaagcaatcccacattgcagaagggcataggtgcaattacatcatcccttaattacattggtaatgctgttgaggagggtcttacaattgtggagaaccggactgcaggcatcattcaagaaacccgcaaacatatcaagaaaaagtctagtggttctgtggcacaaaatgagcatgctaaacagccacaaatgcagcagcaagtacgaactccggtgcaagctgatcaagaaatccaattgaaggcatctcgtgatgttgcgatggctatggctgccaaggcaaagctccttcttcgagagagaaaaaccgttagtgctgatttggcttttgcaaaggagagatgtgctcagcttgaggaagaaaatagagtccttcgtgagatcgtgacagaggtgcaaacaaccagaaatgatgagttgatacgtcttcaactggagacactgttggcagagaaggcacgactagctcatgagaactccatctatgcacgtg

SEQ ID NO: 17983 - DNA, 534 bp, Gossypium hirsutum
  Clone ID: GOSHI-09MAY01-C2907_2
catcttttttgtctctgggtctcgtaagtgggtgaatggggttgtaattagtgccaatgggtgggattgggacctctgcagctcacattgtgttggcaatatttgctgtggccatgtttgttgtgtccgggaccatggcacaggatattgctccttctcctgcaatggctaccggagcaggctctgctttgccggtttccgctgtcttcttatgctcttccatgttggtctctttaattgctctcttggtgcattgaattcaaagcttttcaagactatatgacattggctacccttaatttcattctcactggtgatgaggggagtagcctctaatcttcttcgagataatatttgggtgttatcaattttcaatttctctattcctaaagttttagatactttgctttgctttttgtaataataatattttttttgggtggctgaataagttggttgagattaaaggtggtaatattgttacgccattgtttaagttttttttaaaaaaagtgatattagaattacaagctt

SEQ ID NO: 17984 - DNA, 656 bp, Gossypium hirsutum
  Clone ID: GOSHI-09MAY01-C2907_1
tcgagttttttttttttttttttttaccccacgcgtccgctcaatttccccatctctctcgtctctgggtctcgtaagttggtgaatagtgttgtaattagtgccaatggctcggattgggacctctgcagctcacattgtgttggcaatatttgctgtggccatgtttgttgtgtccgggaccatggcacaggatattgctccttctcctgcaatggctaccggagcaggctctgctttgccggtttccgctgtcttcttatgctcttccatgttggtctctttaattgctctcttggtgcattgaattcaaagcttttcaagactttatgacattggctacccttaatttcactctcactggtgatgaggggagtagcctctaatcttctccgagataatatttgggtgttatcaattttcaatttctctaaagttttaaatatctctatatatatcatgttacattagtgacataaatttgattttgtaatgtaattggtgtgattttcttatatatcatagatatataagggtattgatcctatttcttttgtattcatattatgcagtttgctttgctttgccttttgtaataataatttttttttgggtggttgaataaaaaaaaaaaaaaaaaaaaactgcagcaaccc

SEQ ID NO: 17985 - DNA, 380 bp, Gossypium hirsutum
  unsure (1)..(380): unsure at all n locations
  Clone ID: LIB3189-041-P1-K1-H5
gacctatctctctcgtttctgggtctcgtaggttggtgaatagtgttgtaattaggcgcaatgtctcgtattgggacctctccanctcacattgtgttggcaatatttgctgtggccatgtttgttgtgtccgggaccatggcacaggatattgctccttctcctgcaatggctaccggagcaggctctgctttgccggtttccgctgtcttcttatgctcttccatgttggtctctttaattgctctcttggtgcattgaattcaaagcttttcaagactttatgacattggctacccttaaggggacgtggacgggtgaatattacacttccctttaatttttcttcgagataatatttaggttgttatcaaattttc

SEQ ID NO: 17986 - DNA, 370 bp, Gossypium hirsutum
  Clone ID: uC-gsronu33B158h01b2
cggtctcttgggcggacgcgtgggcggacgcgtgggcgggcgcgtgggtttccgaatgaaggttctatgtcttcttatgctcttccatgttggtctctttaattgctctcttggtgcattgaattcaaagcttttcaagactttatgacattggctacccttaatttcactctcactggtgatgaggggagtagcctctaatcttctccgagataatatttgggtgttatcaattttcaatttctctaaaagtttaaatatctctatatatatcatgttacattagtgacataaatttgattttgtaatgtaattggtgtgattttcttatatatcatagatatataagggtattgatcctatttttttg

SEQ ID NO: 17987 - DNA, 348 bp, Gossypium hirsutum
  Clone ID: uC-gsronu33B032c04b1
gcgcccactctttcgatttccccatctctctcgtctctgggtctcgtaagttggtgaatcgtgctgtaattagtgccaatggctcggattgacacctctgcatgttacattgtgtaggttacctttcgctgccataatttctcttccaatatccaatcaataccgttgtcattaagacccctggtgggaaattggtctatcatacaactaagaaatgagcatgtggtcctaattgttctgtcactggctagagaactcatggtatcccttacttgagacctgctgaattcaaaatgttctagattgccaatgaaccgtcggactgtgaattgtgcttatggtggtgtt

SEQ ID NO: 17988 - DNA, 1010 bp, Gossypium hirsutum
  Clone ID: GOSHI-09MAY01-C2937_4
ctcattttaactataaatactcgtttctcttgccattttcgtttccccctgtccgcccacgcgtccgagaacaaacggcgaaactgaaatctctaagtctaatattcttctcccatctctttctggttggcctcttccgccgccgtattccctgtcttagacgacctacgtcttgccgggtcgagttttccgtcggtgcaagcaaagaaattgataagggagttgaatttgtttcctaaagaggaagttaacctggtcgatcgaggccgagtttcgttaccccaggattcgaagctggtggaaaagcggttcaagttccccggtttggaagcccttggtggggtttctgttgacgatttgggtcatcatgctggctattacaagcttcctaattcttatgatgccagaatgttctatttcttctttgaatcacgcagtaacaaagaggaccctgttgtaatctggttgactggaggtccaggttgcagtagtgaactggctttattttatgaaaatggccctttctccattgctgataacatgtctcttgtctggaatgagtttggttgggacaaggcgtctaaccttctgtatgtggaccaacctattggtactggctttagttacagttctgaccgaagggacattcgtcataatgaagatgaagttagcaatgacctatatgatttcttgcaggcattctttgcggagcaccctgagtttgcaaagaacgaattttttataactggagaatcatatgctgggcattacattccagcttttgctgctcgagtccaccgtggaaacaaagccaaggagggaattcatataaatctaaaggcgtgttactaattatatgatcttttacatgttactttctaatttcttgaagctacaacttgtatggaattatttctttttgcttacttcaactttaaagtgggtaacaaggaattgctattggtaatggtctgactgaccctgtaatccagtataaagcttacacaaat

SEQ ID NO: 17989 - DNA, 898 bp, Gossypium hirsutum
  Clone ID: GOSHI-09MAY01-C2937_2
gctttttgtggtccaacctctagctggctggtgggggggggcgtaacatattcaatggcatatggcacttgctggcgatacaaatactatgacgttagaaagaaagtgaagggagcctttgctatgacttctcaaacatggagtcatttctgaacaaaaaatctgttagggatgccctgggggggggggacatacatttcgtgtcctgcagccctactgtgtatcaggccatgctggttgactggatgaggaatctcgaagttggcattcctgttctcctcgaggacggaatcaagcttctcgtgtatgctggggaatatgatcttatctgcaactggcttggcaattcaagatgggttcatgcaatggaatggtctggtcagaaggagtttgtagcatctcctgaggttcctttcatagtagacggtgcagaagccggagtcttgaaaactcatggagctcttggtttccttaaggttcatgatgcgggtcatatggttcctatggaccagcccaaggcagcattggagatgctgaaaaggtggaccaagggtacactatctgacgccagtgattcagagaaactggttgccgagatgtgagttccattacttcagtgctagaatcaaatcttgttggcctttataatgggaataagcatagtgtaaaatatctggactttctgcgtagtttctttgagtacctgtaaatatttccatggggatgcaatagaatccttgtcttcatgttcatcatgttgttgttgtttttaccttgaaaagaacattacctactgatatgaatcaaagaacttttgttgataataaatttggatacaaattcggatttggatagcacaaagagtccgataaagaaagggggccgctcgcgatctaga

SEQ ID NO: 17990 - DNA, 2110 bp, Gossypium hirsutum
  Clone ID: GOSHI-09MAY01-C2937_1
ccggaatttcgggatgaccctcccgtccgcccacgttcgcccacgcgtccgaaaagaagaggaaaaaccaaaaaaatggcgaaaccccaacttttatttctattttccttttcccttctctgtctcatatctttttccgccgccgattcctccatcacagccgacttacgtctcgccggttccagtttcccgtcggttcatgcaaagaagctgattagggagttgaatttgtttcctaaaggggaagtcaatgtcgttgacgaacaccgggtttcgttgccggagggtcccaaactggtggagaagcggttcaagttcccaactttggaagtgcccggtggagtttcctttgaggatttgggtcaccatgctgggtattacaagcttcctaactctcatgatgccagaatgttctacttcttcttcgaatcacgcaatagcaaaaaggaccctgttgtaatctggttgactggagggccaggttgtagcagtgaattggctttgttttatgaaaatggccctttcacaattgctgataacatgtctcttgtttggaatgagtatggttgggacaaggcttctaaccttctgtatgtggaccaacctattggtactggctttagttacagttctgaccgaagggacattcgtcataatgaagatgaagttagcaatgacctatatgatttcttgcaggcattctttgcggagcaccctgagtttgcaaagaatgacttttttataactggagaatcatatgctgggcattacattccagcttttgctgctcgagtccaccgaggaaacaaagccaaggagggaattcatataaatctaaagggatttgctattggtaatggcctgactgaccctgcaatccagtataaagcttacacagattatgctttggacatgggggtaattaaaaagtctgactatgatcgtatcaacaagctggtcccagtttgtgaaatggcaataaagctttgcggcactgatggtacaatctcttgcatggcttcatattttgtctgcaataacatattcaatggcatcatggcacttgctggcgatacaaattactatgacgttagaaagaaatgtgaagggagcctttgctatgacttctcaaacatggagtcatttctgaacaagaaatctgttagggatgcccttggtgttgggaacatagatttcgtgtcctgcagccctactgtgtatcaggccatgctggttgactggatgaggaatctcgaagttggcattcctgttctcctcgaggacggaatcaagcttctcgtctatgctggtgaatatgatcttatctgcaactggctcggcaattcaagatgggttcatgcaatgcaatggtctggtcgaaaagaatttgtagcatcgccagaggttccatttgtggttgatggctcggaagcaggagtcttgaaaactcatggacctcttggttttcttaaggttcatgatgctggtcacatggtgcctatggaccagcccaaggcagccttagaaatgctgaaaagatggaccaagggttcactagctgaaggtggtaaggcagagaaactgtttgctgaaatgtgattttttttttcacttttcactgcttgcaatcagtgttagttacccgctgctcttagagtgggaacaacaaaacaaagtaactttgaatacctgtatatatatgtatgtggatgccataggatcctggttatcttggtgttttgattataacctactaaaaataatgaagtgatttgaactttttgttgtttaaaaaaaaaaaaaaaaaaaaaaaaaaaaaaaaaaaaaaaaaaaaaaaaaaaaaaaaaaaaaaaaaaaaaaaaaaaaaaaaaaaaaaaaaaaaaaaaaaaaaaaaaaaaaaaaaaaaaaaaaaaaaaaaaaaaaaaaaaaaaaaaaaaaagggggggtggtttaaaaggaacaatttttaattaggtggtttggaaaaaaaaaatttttttttttggggacctaaatttaaataaagggcccggttttaaaaaccggcgaaatggaaaaaaacccggggttccccaaattaaaccccttggaaaaaatcccctttttccca

SEQ ID NO: 17991 - DNA, 529 bp, Gossypium hirsutum
  Clone ID: LIB3583-024-P1-K1-F1
cattgatattatggaatatctgcatatatggtttgtgctcactcttgtcttggttataattcttgaaaagtagatcatgcttcatttcctagcagtattgaactatcttttgtataaaatgtctggagaaatgtttttctgtaaacaatggaatttgcctgatgggaaaagaaaaacatgagaacagttttattagtgatagagtagggcctgatattgatctttatgtcattgatgttattcttttctctaaatttccatggaaaggatacctcagcaattcttcccattgctaaacaaacctattatgagctgctgatgtgattctttgaatgaaatttgagatgcactaatcttttccatctgcagtactatgacgttagaaagaaatgtgaacggagcctttgctatgacttctcaaacatggagtcatttctgaacaagaaatctgttagggatgcccttggtgttggtaacatagatttcgtgtactgcagtcctactgtgtatcacgccatgctggttgact

SEQ ID NO: 17992 - DNA, 538 bp, Gossypium hirsutum
  Clone ID: uC-gsflmaxxa042c07b1
ccccctgcaggtaccgcggcggaaccggggggtcgccccacgcgtctgtttgatgcgggcactccatataaatggcgaaaccccaacttgtatttctattttgcttttcccttctctgtctcatatgtttttgcgccgccgatccgtgcatcatggacgacttacgtctagccggctccagtttcccgccggttcatgcaaagaggctgattagggagttgaatgtgttgcctaagggggaagtcaatgtcgttgacgaacatcgggtttcgctgccggagggtcccaaactggtggagaagcggatcaagttcccaactttggaagtgcccggtggagcctccgtcgaggatttgggtcactatgctgggtattacaagcttcctaactctcatgatgccagaatgttctacttcttcttcgaatcacgcaatatcaaacaggaccctgttgtaatctggtcgactggagggccaggctagagcagcgaattggctttgttttatgaaaatggccctttcacaattgctgataacat

SEQ ID NO: 17993 - DNA, 342 bp, Gossypium hirsutum
  Clone ID: LIB3272-050-P1-K1-G6
agatgacctcatctcttattgtataacgattccaccaaacaatgcaactggggtagactacctacgtattgcctgatcgagttctccgtctgtgcacgcaaagaaattgataagggagtggaatttgtttcctaaagaggaagttaacctggtcgatcgaggccgagtttcgttaccccaggattcgaagctggtggaaaagcggttcaagttccccggtttggaagcccttggtggggtttctgtttacgattagagtcatcatgctggctattacaagcttcctaattcttatgatgccagaatgttctatttcctttttgaattactcattatcaatga

SEQ ID NO: 17994 - DNA, 284 bp, Gossypium hirsutum
  Clone ID: LIB3197-057-Q1-M1-E5
gaaaaaccaaatataagtcgaaaccccaactgttatttctatgtgtgcttttaccttctctgtttcatatctttttccgtcgacgattcctccatcatagacgacttacgtctatccggttacagtttcccgtctgttcatgcaaataagctgattagggagttgaatttgtttgctaaaggggaatttattgtcatttacgatcattggttgttgttggcggtagggttcattactgactgtgtaatgatttaagattacagctttggaagtgcccggcggag

SEQ ID NO: 17995 - DNA, 252 bp, Gossypium hirsutum
  Clone ID: LIB3146-038-P1-K1-H7
attatgctttggacatgcaggtcataaaaaccactgactatgatcgactaaaccaagcgtgggcgggctggctaaagggccatcaagctatgcggcactgatggtacaatctcttgcatggcttcatattttgtctgcaattacatcttcaacggcatgacggcactcgctggcgatacaaattactatgacgttagaaagagatgtgaagggagcctttgctatgacttctcacacatggagtcatttctg

SEQ ID NO: 17996 - DNA, 948 bp, Gossypium hirsutum
  Clone ID: GOSHI-09MAY01-C2887_2
aatcccttcttctttttgcatccactgattttgcgttctttgttttgtggaatcaaagcttcgccgttgaccatgattctccggtcagtattggtcttggttctgttggtgggggttttattccgtgcatcgcaatctttgcgtttcgatctgcaatcgggacaaactaaatgcatcgccgaagacatcaagagcaattcaatgactgtcggaaagtaccacgttgttaaacctaacgaagatcatcctttgcccgattctcacaagctcaccgtcagggtaacgtcttcgtatgggaataattttcactcggcagaaaaggtggagaatgggcagtttgcattcacggcgacggagcaaggtgattacatggcttgcttttgggcgccggagcattcgccgccgatcacggtcaccgttgatttcgattggaggactggagtccacaccaaggactggactaacgttgccaagaaaggccaagtcgatgcgatggaacttgagctgaagaatctgtatgataccattcaatccattcatgaggaaatgttttatttgcgtgagagagaagaagaaatgcaggaactgaacaaagctacaacctccaaaatgttctggttgtcgttcctctcactgtttctttgcctatcagcagcgggatgacaattttggcattggaaaactttcttcgagaagaagaagcttatttaagtttgtaagaccataggtttctttcccctgtactgttgcaaaatattctgacacaaataattttctaggtctcatagctggaataggtctctgtcatgtgaactgtgtaatatctgtggggctaccttctataatggatgaagcttggggagagagtgaggtcaggggatacacaatgacaagcttggcagttgtcatcattacctatgttattcatactcttctttttttttaaag

SEQ ID NO: 17997 - DNA, 744 bp, Gossypium hirsutum
  Clone ID: AI055730.1
caggcactgattttgcgttctttgttttgtggaatcaaaccttcgccgttgaccatgattctccggtcggtattggtcttggttctgttggtgggggttttattccctgcatcgcaatctttgcgtttcgatctgcaatcgggacaaactaaatgcatcgccgaagacattcaagagcaattcaatgactgtcggaaagtaccacgttgttaaacctaatgaagatcattctttgcccgatactcacaagctcactcctatggtaacgtcttcatatgtgaatatattttactttctctgtaaatgtggtataatgggcactttccatttacagtcttcttaactttgttgttatccttggtactccttataggcacctctatcacatctcacctcttatatttcgtcatggtatatcttattcattagtggtctttgtttacctccattgcgtcttcttcaatacttcctacttatagacgattcatttcttagtaatgactcccttacacctcatattattcatacatacttctcgtagtatctcttttctccagttttagctacttgattcatctgtaattattaattcatcgttgtcacattatgcttctattctcccttcattattctttctgaattatccttcttaacttcgttttccttcttgttactcttctactcatactcctctattctgatttatttcacatttgcctgcatagcgctatctctctcttttcc

SEQ ID NO: 17998 - DNA, 586 bp, Gossypium hirsutum
  Clone ID: GOSHI-09MAY01-C2857_2
gggtacacggatcctgcaaaacctgatctgcctcggttgcatgaatggcaatttagatccggtcttgaccgctatatatggataatcggaatgatatatgcttattatcatcccagtggcgagaaatggatggaaaagttggaggaatgtgaacccaagagaaagttctcaatcaaagcaagcgttatttcggtttctctattcgtcgggtatctgtggtatgaatatatctataagctggacaaagttacgtacaacaaattccatccctacacatcttggattcccatcactgtctacatttgcttgcggaattccacccagcagcttaggaattactctttgactctgttcgcgtggcttggcaagataactctggagacttatatttctcaatttcatatctggttaagatcagacatacctaatggacaaccaaaatggctactttcatttatcccggaatatccactactcaacttcatgcttacaactgccatttatgtcttggtatctcatcggcttttccaattaacaaatacgctcaaatccgctttcattcccacaaaagaaaaccggcgactac

SEQ ID NO: 17999 - DNA, 665 bp, Gossypium hirsutum
  Clone ID: GOSHI-09MAY01-C2857_1
ctttagcctagcacgttttgctcagatgatgtggcgactaaacttcttcgtggcattttgctgcattgttctcaacaatgattatatgctttactacatctgcccgatgcacacgcttttcaccctgatggtgtatggagctcttgggattttcaacaagtataatgagaagccatcggtgatggctgtgaaatttcttgcatgctttctcgtagttatctttatttgggaaattcctggagtttttgaaatattctggagtccattggctttccttttagggtacacggatcctgcaaaacctgatctgcctcggttgcatgaatggcaatttagatccggtcttgaccgctatatatggataatcggaatgatatatgcttactatcatccccatgtcgagaaatggatggaaaagttggaggaatgtgaacccaagagaaaattctcaatcaaagcaagcgtttgtgcggttgctctattcgtcggctatctgtggtatgaatgtatctacaagctggacaaggttacgtacaacaaattccatcccttcacatcttggattcccatcactgtctacattgttgcgattgtctcagcacttcgaatacagttgacttttgctggctgcagataccttgagactcattacaattctattgttg

SEQ ID NO: 18000 - DNA, 551 bp, Gossypium hirsutum
  Clone ID: GOSHI-09MAY01-C2877_1
ctttcattcgacttcgacgagaacaaaaatggaaaaacctgtaacagaaaaccgaagctcttaacccgactcagatccaaccccagaaaagcaggacaagtgtgaatacaaaataatggacaagaaacgaagtaatccaatggagtggttgaatcagatggtaggagagccgtattatttcttccatttcctagctttcttctcttatttcatcgttcggagctctgcttctaatgtcctctcccctcaaatcactcaactactcttttatagggaaattcaagcggttttggccttctttatgctgattgcatacaagatggcaagagaagaaacatgggaggctttcattgctgatacattgtttttgggaaagatctttcttaattgcccttactctaataatggactatcacttgactttgtggtatttagtgggtgttttcagtgatatatgttttaacacagcaacctccttacgaagagcttggttctgcaagtaaactgacaccattgcaattggaagccttgctaactgaagggaacacatc

SEQ ID NO: 18001 - DNA, 1025 bp, Gossypium hirsutum
  Clone ID: GOSHI-09MAY01-C2807_1
ccctcgcgtccgcccacgcgtccgcttttttgtttcttatcttgttgttggtctggaaatctctgcactctctctttttgcttccaagttttgctgctaacagtatatctttgaaagtcagttgatattacaattattcccttcccaaaccttgcatcatcaatcatggttcctttcatttatgttgttcttttcttagccatgtctggccattcaagtgccaactattgcttatgtaaagatggagtgaatgagcaaacacttcagaaaaccctggattatgcttgtggagcaggagctgattgtactccaattaatcaaaatggtccttgttataatcccaacactgtgaaagatcactgcaattatgcagtcaatagctatttccaaaagaaaggtcaagctcaaggaagctgtgatttttcaggcactgctactgttagtgttaatcctccttcaaatattccctctacttgcagttttccttccagtggtacaagcacaacaccatccacagggactccgacgactccgaccacagggacgccgacaactcctactacagggactcctacaacacctaccacagggactcctaccacaacaccaaccacagggactcctaccacaccaacaacggggacaccgacaacagggacaagcaccgggattccttccacgacacccaccacggggacaaccaccggcacaaccaccgggtctccaacggtgtttggtggtggcaccacctcacttagtccgtcgggaacaaccaccggcatcaatgatccaagtcatgctgtgcctctcttcacgagcaccagcaacaacattctcttcagccttgctgtcacactttggattctggcatactattgggcttgaaaaggttttaacattcatgcacttcgacattcatgcatgcatgtatgtatgtatttatgtatgtagtgatcattttagtagtagaggtaaaaaagatgcgtttttgggcatgaccagtaatattaatatttaattaagct

SEQ ID NO: 18002 - DNA, 1299 bp, Gossypium hirsutum
  Clone ID: GOSHI-09MAY01-C2837_2
tgacagcactatgcttggggagggtcacttccaactcaacacctgacctctctttctccatttgatgtgagaaggatctttctttctttattctgcacatcttaaccttaaccacatcataagatagagatctcttaaacggtcgagttatggagactgtcttttcagcagcaagtagatccatttccaagctcattagcttcaccgctttgcttcttttcttgttttcctgctctactttcacttctactgaagcttatgatgcgcttgatccaactggaaatatcactatcaaatgggacgtaataagttggaccccagatggctatgttgctgttgttacaatgtacaatttccaacagtatcgccatattcaggcacctggttggacattggggtggacatgggccaaaaaggaagtaatctggagcatgatgggaggccaaaccacggaacaaggggattgttcaaaatacaaaggaaacgtccctcattgctgtaaaaaggatcccacagttgtggatttattgcctggaactccttataaccagcagattgcatattgctgcaaagggggggtattaaattcatgggttcaagacccggccaatgcagcaagctcatttcaggttagtgtgggcgctgcaggaacgacgaacaaaactgtgagagtgcctagaaactttaccctgaaagcaccaggtccaggatatacttgtgggcctgccaagattgtgaaacccactaaattcataacggctgataaaaggagaataactcaagctatgatgacatggaatgttacatgcacatattcccaatttctggctcaaaagactcctacatgttgcgtctcgctctcttccttctataataacactatcgtgaattgcccgacatgtgcttgtggctgtcagaataactcaactgaatctgggagttgtgtaagcgaaaggtcttcacatttagcttcagctgttccgggcaaatctaccaatgcaccacctctgcttcagtgtacgagccatatgtgtccagttcgaattcactggcatgttaagctcaactacaaggaatactggcgtgtgaagatcacaatcaccaatttcaattacgcattgaactacagtcagtggaatctagttgtgcaacaccccaactttgacaatcttacacaacttttcagcttcaattacaaaccattaactccttatgctggcttaaatgatactgccatgttatggggacttaagttttataatgatttcctcaacgaagccggtcctcttgggaatgtgc

SEQ ID NO: 18003 - DNA, 1110 bp, Gossypium hirsutum
  Clone ID: GOSHI-09MAY01-C2837_1
aattgcccgacatgtgcttgtggctgtcagaataactcaccggacccggccggtggtgcgggcgaggcgtccgcgcatttagcttcagctgttccgggcaaatctaccaatgcaccacctctgcttcagtgtacgagccatatgtgtccagttcgaattcactggcatgttaagctcaactacaaggaatactggcgtgtgaagatcacaatcaccaatttcaattacgcattgaactacagtcagtggaatctagttgtgcaacaccccaactttgacaatcttacacaacttttcagcttcaattacaaaccattaactccttatgctggcttaaatgatactgccatgttatggggacttaagttttataatgatttcctcaacgaagccggtcctcttgggaatgtgcagtcagaactattattcagaaaagatgcatcaacttttacttttgaaaagggatgggcttttccacggagaatatatttcaatggtgataactgtgtcatgccacctcccgatgcctacccttggttgccgaatactggtttgaagccagttatctctctgtttcagccagtcatgacgatcttggcatcatgtgttttcttatgggctaatatgtgatgaatgctgtctgcggaaaccgctaaagctatttgttcgacatcctgcaatttgcatctgatttcatattatcacactgaagcttttgatgatcgattcaatggtgttggaatagtttggtgcggcaatgtaacacgctaaagagtggatcaaggtgcacaatctctggtccctatagcatgtggtgtattatttatatgttggggtttgtaatttacaccatttccttttggagttaactgctttgttgtatgtttcattcacatcatacacatgatcgatttatttgtagaatatccttggaacaagtttatagcattgtattcaggaacatctctgagaaatcatagtgatatatggtttgctttgttccaaagaaacccaatgtactcaagaaactgctactggaaaaaaaaaaggaccaaaatgaattcatatctcgctgttgagcttcacaatgtcatgacctatctctgtgag

SEQ ID NO: 18004 - DNA, 574 bp, Gossypium hirsutum
  unsure (1)..(574): unsure at all n locations
  Clone ID: uC-gsronu33B090g05b1
cctacgcgtccgcccacgcgtccgcccacgcgtgcgcgcactcgtccgcgtgaattgcccgacatgtgcttgtggctgtcagaataactcaactgaatctgggagttgtgtaagcgaaaggtcttcacatttagcttcagctgttccgggcaaatctaccaatgcaccacctttgcttcagtgtacgagccatatgtgtccagttcgaattcactggcatgttaagctcaactacaaggaatactggcgtgtgaagatcacgatcaccaatttcaattacgcattgaactacagtgagtggaatctagttgtgcaacaccccaactttgacaatcttacacaacttttcagcttcaattacaaaccattaactccttatgctggcttaaatgatactgccntgttatggggacttaagttntataatgatttcctcaacgaagctggtcctcttgggaatgtgcagtcagaactattattcagaaaagatgcatcaacttttacttttgaaaagggatgggcttttccacggagaatatatctcaatggtgataactgtgtcatgccaccttct

SEQ ID NO: 18005 - DNA, 408 bp, Gossypium hirsutum
  Clone ID: uC-gsflmaxxa107g02b1
ctttttcgtccggccagttatctctctgtttcagccagtcatgatgatcttggcgtcatgtgttttcttatgggctaatatgtgatgaatgctgtctgcggaaactgctaaagctattttgttcgacatcctgcaatttgcatctgatttcatattatcacactgaagcttttgatgatcggatcaatggtgttggaatagtttggtgcggccatggaacacgctaaagagtggatcaaggtgcacaatttttggtccggattgcatggggtgtattatttatatgttggggtttgtaaattacactcatttcttttggagttatctcccttgactcatttcttcaattctccttctataccctgtaccccatttatttgtatatttcttcttatttaacacgttttt

SEQ ID NO: 18006 - DNA, 1382 bp, Gossypium hirsutum
  Clone ID: GOSHI-09MAY01-C2827_1
ggagacttttttatcttgcacttccaccatcagtgtatccatctgtttgtaggatgatcacccacgcgtccgcccacgcgtccgccctcgccgccgggactcggatagttgttgagaaaccatttggtaaagatttggactctgcagagcaactaagttctcaaatcggagagttgtttgatgaaccacaaatctaccgtattgatcactatttgggaaaggaattggtccagaacctgttggtacttcgttttgctaatcgcttcttcttgcccctttggaatcgcgacaacattgataatgtacagattgtattcagagaggattttggaactgagggtcgcggtggatattttgatgaatacggaattatccgtgatattatccaaaaccacctattacaggttctttgtcttgttgctatggagaagcctgtctctctcaaacccgagcacattcgtgacgagaaagtgaaggttcttcaatctgtacttccgattaaagatgaagaggttgtactcggacaatatgaaggttacagggacgacccaacagttcccaaccactcaaacactcccacatttgcaactgttattctccgtatacataatgaaagatgggaaggtgtcccgtttattctaaaggcagggaaagcattgaattcaagaaaagcagagatacgtgttcaatttaaggatgttcctggtgatatatttaaatgtcaaaagcaagggagaaacgagtttgtcatacgcctgcaaccttctgaagccatgtacatgaagctaaccgtgaagcagcctggtctcgagatgtcaacagtgcaaagtgaactagatttgtcatacaggcaacgctatcaaggtgttacgatcccagaggcttatgaacgtcttatactcgacacgataagaggtgatcagcagcattttgttcgccgggacgagttaaaggcggcatgggagatattcacgcctcttctacacagaatcgacaacggtgaaatgaagccaattccataccgaacaggcagccggggtcctgcagaagcagatgagctctcggctaaagccggttatgttcaaacacacggttatatttggattcctcccaccttatagaaacattatatatatttatatatatatagctttgcgatatcctatcaccattgccatagaaagaagttgaggtttgtaacagatacaataaaatgcttagcctaagagctttgtaacttttccctttaaatcatgtttggaacacttttataaagggtctttccttgttatatttacaacttattccaattcggtgagaaaaaagaaagattaaaagaaaaaaaaatacggtaaaggagaaaaacccatggatagataaaa

SEQ ID NO: 18007 - DNA, 640 bp, Gossypium hirsutum
  unsure (1)..(640): unsure at all n locations
  Clone ID: AI055328.1
gctaatttgacttattggtttgtttccaggagttccctttatactaaaggcagggaaagcattgaattcgagaaaggcagagattcgtgttcaatttaaggatgttcctggtgatatattcaaatgtaatacaataaacctttaagattctttgtaactttgcttatattattgcttattcccaccgagctgcttatgtagtctcttcgataaaatcatgaagagatgtgatgaatctttattcaggtaaaaagcaagggagaaatgagttcgtcatccgcctgcaaccttctgaagccatgtacatgaagctaatggtgaagttttataatcttattgtgntcgatctgaaagctattataaactttaaaaacactgcatatatgttcctctgctaaacttgcatattgactagtacttcatcaccgatgcacgtgaagcagcctgaactggagatgtcaactgttcaaagtgaactagacttgtcatacaggcaacgctatcaagtgtacgatcccagaggctatgaacgtctcattttgacactatgatcctgcccttttattctgaatatantgttgcatgctaccctacactgtagtttgtagtgatcaaaacttgtactattcctttcggttat

SEQ ID NO: 18008 - DNA, 450 bp, Gossypium hirsutum
  Clone ID: LIB3584-044-P1-K1-H5
cccacgcgtccgcttccaattaaagacgaagaggttgtactcggacaatatgaaggttacagagatgatccgacagttcctgatcactcaaacaccccaacgtttgcaactgttattctccgtatacacaacgaaagatgggaaggtgttccctttatactaaaggcagggaaagcattgaattcgagaaaggcggagattcgtgttcaatttaaggatgttcctggtgatatattcaaatgtaaaaagcaagggagaaatgagttcgtcatccgcctgcaaccttctgaagccatgtacatgaagctaatggtgaagcagcctggactggagatgtcaacagttcaaagtgaactagacttgtcatacaggcaacgctatcaaggtgttacgatcccagaggcttatgaacgtctcattctcgacacttatgatccttgcccattttta

SEQ ID NO: 18009 - DNA, 389 bp, Gossypium hirsutum
  Clone ID: LIB3272-002-P1-K1-D12
ctttattgtcagggatttttaccaccagatgaggtgcacatatttggctatgcaaggactaagatttcggatgatgatttaaggaaccgtattcgtgggtatcttgtcaatgatagaagtgcttcaccctcagaagacgtgtcaaagttcttacagctgattcaatatgtaagtgggtcatatgacggagctcagggctttcagctattagacaaggaaatcacaaagcatgaaatctcaaaaagtagccaagaagggtcatctcggagactcttttatcttgcacttccaccatcagtgtatccatctgtttgtaggatgatcaggaaatattgcatgaataaatctgatcttggcggctggactcggatagttgttgagaaaccatt

SEQ ID NO: 18010 - DNA, 604 bp, Gossypium hirsutum
  Clone ID: GOSHI-09MAY01-C2597_1
gcgttcgatcaccaagaagcatagaaaaacctgagttatttgtcatgaagccccaaagagaaggaggagggagcagtatctatggtgatgatgtgaaagaaacccttctacgattgcaaaaggaagggtctgaacaagatgctgcttatatacttatgcagaggattttcccagctgtttctcccacatttttgattcgtgatggcatttgtcataaagatcatgccatatcagagcttgcggtatacagtgcttacttaaggaacaaggagagtgtcatcatgaatgaccaatgtggctacttgatgaggaccaaggtatcatcatcgaacgaaggaggggttgcagctggatttgcagtcttagatagtatatatttgacttgatgaaccaagttttgtggttaccactcatggagttatttacaggggacacagtctggcaaataatggtcctcgttatcttgaaacatcgagaagagctcttcaggtactgtcttgatattaactgttgcgtactaatattggaaaaaattgaaatagtatcaaaattgtatcattgttattttggtttggtttggtttaatgtcattgttatttttggt

SEQ ID NO: 18011 - DNA, 839 bp, Gossypium hirsutum
  Clone ID: GOSHI-09MAY01-C2587_1
accacgcgtgccccccgcgtccgcccacccctccgaatccattcaactcgttgctgaacatgctgctgcaaagaacggcgttttcatgatgaatctttctgctccattcatctgtgagttctttacggatgtgcacgagaaagctctaccgttcatggattatgtcttcggtaatgagactgaggcccgaacattttcaaaggttcatggttgggagaccgataatgttgaggaggttgctctaaagatttctcaatggcccaaggcttcgggaacacataagagaattactgttatcactcagggagctgaccctgttgtggtcgctgaggatggaaaagtgaaaaaattcccggttatcttgttaccgaaagagaagttggttgataccaatggagcacgggatgcatttgttggtggatttttgtcacagctagtccaagagaagcctatcgaagaatgtgtcagagccggttgctatgcagcaaatgttatcatccaaaggtctggctgcacatatcctgagaaacccagtttcaattagaaagacttgcaccggttggctccgccatttattttccggtgatccacagattttatcttacagtattcacaagtacctactatgccaatccgcattgtctacagttctttgttatttttcatagtcttatgtactctgtacttgattgagaatatatgtgatgttatttacaaacaagtggtttcaacatctctcaaaatgtactttactatcttattccgactttgatttttttcaaaatattcatgttggacacaaattggaatatgagtaggatggtactatctttcaagtt

SEQ ID NO: 18012 - DNA, 496 bp, Gossypium hirsutum
  unsure (1)..(496): unsure at all n locations
  Clone ID: LIB3828-026-Q6-K6-F8
gcgtttggctgcacatatcctgnanaaacccaggggggagtgggaagacttgcaccggttggctccgccatttattttccggtgatccacagattttatcttacagtattcacaagtacctactatgccaatccgcattgtctacagttctttgttatttttcatagtcttatgtactctgtgggggggggggaatatatgtgatgttatttacaaacannnnnaaaagggggaaaaaaaaaaaaaaaaaaaaaaaaaaaaatttaaaattataaaaaaataaaaagttatcaaatgatataaatttgtttattgttaatagttttgtttggtgtaaaaaaaaaaaaaaaaaaaaagggggggccctttttgggggtccctttttttcgccccggggttggcgggttttttttttttttttggggcccctttttttttttcccggggccgggtttttccaccggggggggggggaaaaccccggggttccccccct

SEQ ID NO: 18013 - DNA, 1042 bp, Gossypium hirsutum
  Clone ID: GOSHI-09MAY01-C2547_1
ccccgcccgcgtgggaaaaagggttatcttcaacaatttatcttctttattctggttgctctgccattcatgtttatttctccaactcattcctctttagctaatggtaatgttaatatattgcctcctaccaatacaagcgataaggtcactttggctctgtactatgaaactttatgcccatattgtgccgactttatcacaaatgaccttgtaaaggtcttcctcagtgatctgtataccattgtcaatctaaaattagtcccttggggcaatgctgacattcttggcgatgaaccccattgccagcatggagaagatgaatgctacttaaatactatacatagctgtgtcatctactactggcctgatgtgaaaaagcactttgattttattcgctgcacggagcaacaaagctcaaagaaacggctggttaagaacagagcagcaatgtggaaacaatgcagtgaaaagctgggaatgagtgctcacagaatcaacaaatgctatacttctggatatggacttaagcttctgctacaatatgctaatgagactgcaaagctaaagccaccccatgagtatgtgccatgggtggtggtggataatcagccactcaaagatgactttgaaaattttgtgaaatatgtctgtgaagcttataaaggtgccgataaaccagaagcatgcaaaacacaagcaaccagtgtcagctcaacccatgataagatggcaaacagaatacatccaggatgctatgctagtgaaattgcaaatttgggatagaaccttgaaagaggccagaacttgtgctttgtccattacagctgcttcacaattcaccaactacatgtaataaaaccagcctctagttatcattatcgttgatatcttttacatatatgacatgttacaggtgatatgtttacggtgtcttctattctatgaatgaaagatcaacatccttttggttggtttgtttgaaaaaaaaaaaaaaaaaaaatttaaaaaaaaattaaaaaaaaattaaaaaaatttattt

SEQ ID NO: 18014 - DNA, 642 bp, Gossypium hirsutum
  Clone ID: LIB3543-045-Q1-K6-A6
ccccgcgtccgtagtacgcgagcgggcggtcgcgatctagaactagggttaatatattgcctcctaccaatacaagtgataaggtcactttggccctgtactatgaaactttatgcccatattgtgccgactttatcacaaatgaccttgtaaaggtattcctcagcgatctgtgtaccattgtcaatctaaagttagtcccttggggcaatgctgacattcttggcgatgaaccccattgccagcatggagaagatgaatgctacttaaataccatacatagctgtgtcatctaccactggcctgatgtgaaaaagcactttgatttcattcgctgcacagagcaacaaagctcaaagaaaccgctggtcaagaacagagcagcaatgtggaaacaatgcagtgaaaagctgggaatgagtgctcacagaatcaacaaatgctatacttctggatatggacttaagcttctgctacaatatgctaatgagactgcaaagctaaagccacctcatgagtatgtgccatgggtggtggtggataatcagccactcaaagatgactttgaaaattttgtgaaatatgtctgtgaagcttataaaggtgacaataaaccagaagcatgcaaaacacaagtagcca

SEQ ID NO: 18015 - DNA, 602 bp, Gossypium hirsutum
  Clone ID: LIB3543-038-Q1-K1-A2
gtcgacccagcgtttttcccgcgtccgtttaaaaaagggttgtcttcaacaatttatcttctttattctggttgctctgccattcatgtttatttctccaactcattcctctttagctaatggtaatgttaatatattgcctcctaccaatacaagcgataaggtcactttggctctgtactatgaaactttatgcccatattgtgccgactttatcacaaatgaccttgtaaaggtcttcctcagtgatctgtataccattgtcaatctaaaattagtcccttggggcaatgctgacattcttggcgatgaaccccattgccagaaaaagcactttgattttattcgctgcacggagcaacaaagctcaaagaaacggctggttaagaacagagcagcaatgtggaaacaatgcagtgaaaagctgggaatgagtgctcacagaatcaacaaatgctatacttctggatatggacttaagcttctgctacaatatgctaatgagactgcaaagctaaagccaccccatgagtatgtgccatgggtggtggtggataatcagccactcaaagatgactttgaaaattttgtgaaatatgtct

SEQ ID NO: 18016 - DNA, 377 bp, Gossypium hirsutum
  Clone ID: LIB3189-015-P1-K1-A12
gagcactcattcccagcttttcactgcattgtttccacattgctgctctgttcttgaccagcggtttctttgagctttgttgctctgtgcagcgaatgaaatcaaagtgctttttcacatcaggccagtggtagatgacacagctatgtatggtatttaagtagcattcatcttctccatgctggcaatggggttcacagaatcaacaaatgctatacttctggatatggacttaagcttctgctacaatatgctaatgagactgcaaagcttaagcccacttaatgagtatgtgccatgggtgggggtggtaatcagccactcaaagatgactttgaaaattttgtgaaatatgtctgtgaagcttataaaggtga

SEQ ID NO: 18017 - DNA, 380 bp, Gossypium hirsutum
  unsure (1)..(380): unsure at all n locations
  Clone ID: LIB3189-018-P1-K1-F9
cccacgcgtacgntaatctgagcgggcgctctttttttttatgtcccataaagagccgactttagcacaaatgaccttgtaaagggatttctcagagatcagcactccattgtcaaactacaactagatcctcggggcaatgctgacattcatggcaatgaaccccattgacagcatggagaagatgaatgctacttaaatactatacatagctgtgtcatctactactggcctgatgtgaaaaagcacttagattttaatcgctgcacggagcaacacagctcaaagaaacggcttggtaaaaacagagcattaatgtggaaacaatgcattgaatagctgggaatgagtgctcacagaatcaacataagctatacttc

SEQ ID NO: 18018 - DNA, 1502 bp, Gossypium hirsutum
  Clone ID: GOSHI-09MAY01-C2517_1
gaaattttactgcatttttgctggggtcatgaatggtaggcctgagtttactgaccatttgacacataaactgttgcaccatccaggacaaattgaggcagcggctataatggaacacatacttgaggggagctcttatgtttaaagcggctaagaagttgcatgaaatggaccccctgcagaaaccgaaacaagatcgctatgctctgaggacatctccacagtggcttggtccacagatcgaagtgatcagattcgcaaccaaatcaattgaaagagagatcaactctgtgaatgataaccctttgatcgatgtttcaaggaacaaggcgctacatggtggcaacttccagggtaccccgattggagtgtcgatggacaatgctcgtttggctattgcagctattgggaaactaatgtttgcccaattctctgaacttgttaatgatttctacaacaatggtctcccatcaaacctctctggtggtaggaacccaagtctggattatggtctcaaaggcgctgaaatagcaatggcttcctattgttctgagctccaataccttgctaatccggtcactagccacgttcaaagtgctgagcagcacaaccaagatgttaactccttgggactaatctcttcaaggaaaactgctgaggctgttgatattttaaagcttatgtcctctacatacttggtggcactttgtcaagctattgatttgaggcatttggaagagaatttgaggagcacggtgaagaacaccgtgagccagatagctaagaaagtcctcactactggtgccaatggtgagcttcacccttcaagattctgtgagaaggatctactaaaagctgtggacagggaatatgttttcgcttacatcgacgatccctgcagtgctacctacccgttgatgcaaaagctgaggcaagtacttgttgagaacgcattgacaaatggtgaaaatgagaagaatgcaagcacttcaatcttccaaaagattgcagcttttgaagaagaattaaaggctgttttgccaaaggaggtggagagtgcaagggcatcagttgagaatggaaatgctgcaatccctaacaagatcaaggaatgtagatccttcccgctgtacaaatttgtgagggaagagcttggaactgggctgctaactggagaaaacgttatgtcacctggtgaggagtttgacaaggttttcacagctatgtgccaagggaagatcattgatccaatgctggaatgtctcgaggaatggaatggtgcccctcttccaatctgctagtttgctttattttttatagttgagatgtgtaatccaaatctttcgcatttgttgttggaatttccttgtaaaacaagttacttaactaaatgaatccattttcacatctcaacaaaaaaaaaaaatacatacaaattaataaaatatgcaaaaaaaaaaaaaaagaaaaaaaaaaaaaactaaactaaaacacataaaggg

SEQ ID NO: 18019 - DNA, 331 bp, Gossypium hirsutum
  Clone ID: uC-gsronu33B046c04b1
gagtttcattacttggctaatccagtcaccaaccatgttcaaagtgctgagcaacacaaccaagatgtgaattctttgggactaatctcttccagaaaaactgccgaagctgttgatatcttgaagctgatgtcgtctacattcttggtggctctttgctaagctattgattagtggcttgtttaagagtattctaggaatttaatttctatttttttcttttttctttttgtatttattaaattcacttttttaattctttgttttttattttttttttttattttttattttttaactttctttattttattctcttcttcattttctt

SEQ ID NO: 18020 - DNA, 653 bp, Gossypium hirsutum
  Clone ID: GOSHI-09MAY01-C2527_1
aacctatgtacgtaataaatgaaaaataaatttcctctccctccaagacggcaaaaccttcatcaaacaccgtcacttgagttgtgaagaacatctctaataacagtaggtttacagggaagagggggtaggagaataaacctaagcttttgagaggttactccgagattacacagctattgaagtttgaaagtagattttcactgttttgacttcgaaactcctaggtcttgattcgatcgtgagattccgtgggggctgatcttgacatacttcacatacagtcttgccaagggtgtgcttcttctttttttccgaagttatactacgaatgattttctatcatgtgaataaagcaatatactcatgacttccatttactgttaggagataatgcggacgcctgataactcagatttacgtagttgtgtcttgttttttcgtggttcattttgtgctttttttttctattctagaaatgtcatgactgattctgtttttggttggtttatcataagtgtgtgcattgctgtgtgggctattccaaagtatcctttaaacatgtaaggtatatatttatgttctatacttgtacttgaatcctaccaacatattttcattctctttgaaagttgaggacactcttttttccc

SEQ ID NO: 18021 - DNA, 1476 bp, Gossypium hirsutum
  Clone ID: GOSHI-09MAY01-C2497_1
ctctcacgcgtccgcccacgcgtccgcggacgcgtgggggctcacctcttcagagaaagaatcttcttcttcttcttcttcttcttcttcttcttcttcttcactttacatccatcaaggctgaagaaaaaaattaggttattctgagtgatgggtgtgagctgccgttgttcccacacctcccatatcactgaaatcatcataaccagcttctttcgtcataagtcttaaaacaagtgaacaactttgtgttctttaaaatccaaaagccagagtagtctttctttctcttctttttcttttgttttttatgttaaatttttatatcatttgatgatatggtgaagatgatttcttgaacaagatcgatcatttagcttgaaactctcatggcgggtgggagggtcgtctcttgtaataatactaatagtgttggtggttctagtaatctctctgttttacttcaaagtcaaagggttccttcttcttctgagcctatggatcctcttttcattccaagaccaggctcttccccttattctttctttgtttcaggtacgagatcgatggtaagctttgaagacgtccatggaggaaacagatcattctttagaagttttgatgaagaagagaatggagatgaagatcttgatgagtattttcatcaacctgagaagaaaaggcgactcactgttgaccaagtccagtttctagagaaaagtttcgaggttgaaaacaaacttgaacctgaaaggaaaactcaactagctaaagaacttgggttacaaccccgtcaagttgccatttggtttcaaaaccgccgtgctcgatggaagactaagcagcttgaaaaagactatgacactttacaagctagctttaataccctcaaagatgattatggtaatctcctcatagagaaagataaacttaaacaggaggttcttcagcttactgatatgccggttatgaaagaaaagaacaactcagagttatctgatgtgaacacagtgtgtcaagaaccaccacaaaagcctgttgattcagacagccctcattcatcttatccattcgaaccagatcagtctgatacatcacaagatgaggaagataacttgagtaagtgctttgtttcaaccatcttcttacatcttcccaaaattggaagacaatgattactccgacccgcctgcaagttcttgtagttatggatttcatgttgaagatcatgctttctggtcttcggcttattaagttacacatctatatgttacatacatacataaataaattatgatgttgtttgtatattattacttcttgtttcactcactttgtaactttgtactaataattatgaattaagtaataaaaaaaaaccaatgattggcattgtagtaccagtgtggtgtaattctaacgagtaaataacatccttctcataagagtttgtggaatctattattttggtaaaaa

SEQ ID NO: 18022 - DNA, 672 bp, Gossypium hirsutum
  Clone ID: AI055726.1
ctcgcctcttcagagaaagaatcttcttcttcttcttcttcttcttcttcttcttcttcttcactttacatccatcaaggctgaagaaaaaaattaggttattctgagtgatgggtgtgagctgccgttgttcccacacctcccatatcactgaaatcatcataaccagcttctttcgtcataagtcttaaaacaagtgaacaactttgtgttctttaaaatccaaaagccagagtagtctttctttctcttctttttcttttgttttttatgttaaatttttatatcatttgatgatatggtgaagatgatttcttgaacaagaacgaacatttaacttgaaactctcatagccgttggaagggctcctcttttggaaatacccctaatggttgtgggggttataaaatctctgtggtacctttaaaactcaaggggtcctttttttttgagcccttgggacccttttttttcccaaaacaggctttccccctaatttttttttgttcgaggccaaaccatggaccctttgaaaccccttggaaaacaatctttttataatttgagaaaaaaagtgttaaaattctgagatttctatcccctgaaaaaacaccttttttgccacccattttaaaaattttgtgggaaccatttccctgagagaactcttct

SEQ ID NO: 18023 - DNA, 729 bp, Gossypium hirsutum
  Clone ID: GOSHI-09MAY01-C2457_1
ggaatcagctggatattgcagatgcaaatattcagagattgaatacactgtcacttagaaatagaccgtgtgggggttcatcaagtgatgaaagtgatacttgtaaccctttgggtcagcttatttttgaatacttggaacatgatcaaccatttagtcgtgagcccttggctgacaagatctcggttctggcatctcagtttccagcactgaggacatataggagctgtgatctgtctccttcgagttggatttcagttgcatggtatccaatatataggattccgatgggtccaactctgcaaaatcttgatgcctgctttttaacctaccactctctttctacacccttaccatgtaatggcacggatgggttacctttccgtggctttaatgttagggagtttcatgatgctgacatgtccttaaagctaccattgcctaccttcggacttgctttctacaagttcaaagtttctgtttggaatcccgatggggttaatgaatcccagaaagctaattcccttttgcaagccgctgataactggcttcggcttttgcaagtgaatcatccagatttcaggttctttgtttcccacaatacatactggcggtgagcagagctcaaccacttaactcggaacaaaatcccagtatctcagcagattgacctccaaactgtcccatccgtgttacctcatacatgatattgcacacaccgggctcata

SEQ ID NO: 18024 - DNA, 622 bp, Gossypium hirsutum
  Clone ID: GOSHI-09MAY01-C2477_5
gatgctagcaagcaagcatacatgcgtggcaggaggatccttgagataaacccaaggcacccaatcatcaaggagcttcgtgagagagttgttaaggaccccgaggatgagggcgtgaagcaaacggctcagcttatttaccagacagctctaatggagagtggcttcattttatccgaccccaaggatttcgcctcgcgcatctacagctcagttaaatctagcctaaatatcagtccggatgcaacaattgaagaggaagatgatgtggaagaaactgagacagagcccgagacaaaagcaggtaaggatggtgcagatgcagagtcttccggtctcaaggatgagttataaaatgggtgaagccttaggtaatatggttttttgaagggaatcgaaagaagttaagtctgaaactttgataaaagaacatttgatggtagagttgatgtaaccagtcaccaggaattttgtctttagcatctaattatattattatgttgctcaattaagttgtttgccttcttttttctcttctaatgcatcgcaatgctttcagatttttctcataataatgccacttgtttttaacgaggaaagcagaatctgttatgttggtttg

SEQ ID NO: 18025 - DNA, 797 bp, Gossypium hirsutum
  Clone ID: GOSHI-09MAY01-C2477_2
acactccctgtgtggtcgttacatcaaaatacggatggagtgctaatatggagagaatcatgcaatctcaaaccctatctgattctagcaagcaagcttacatgcgcggcaagaggatcctagagattaacccaagacacccaatcatcaaggagcttcgtgagagagttgccaaggactctgaggatgagggtgtgaagcaaacggctcagcttatttaccagacggctctaatggagagtggtttcaatctacccgatcccaaggattttgcttcacgcatctacagctcagtgaaatctagcctaaatatcagtcccgatgcaacaattgaggatgatgatgatgatgtagaagaaaccgagacagaatcggacacaaaagacagtgcagtcaaagatgagttgtagattgcctgaaacctcggggacatgccttttgagttagttttaccctctgatgacaagccgaaggaactgtaacatgcattttcaagtctgaaacttggataaagggaaacattacaaacattacttagtagaatatatgtaaaccgtagtcgactgtgaaattaatctgtctgcaatttttgctcttttaatgcatcgcagtggttttaagattttcgcgtattaatatatggttgtttcgatcttattatctgtcaacatgttcaacttccattgcttaagattatatcttgtattggtatgcaatttcagtggatgaagggaaaccgttttacttgaaaaaaaaaaaaaaaaaaaaaaaaaaaaaaaaaaaaaaaaaaaaggcaa

SEQ ID NO: 18026 - DNA, 1802 bp, Gossypium hirsutum
  Clone ID: GOSHI-09MAY01-C2477_1
cccacgcgtccggaagccgacaaaagcgaggatgaagacactgaaaagaaaaagacggtgaaggaaactacttatgaatgggaacgtctgaacgatgttaaggctatatggttgcgtagtccaaagcttgtcgcgtccggagattccgcgaaattctatcactctctggcgaaggactttagtgatgtgaagcccttggcctggagccacttcactgctgaaggtgatgtcgagttcaaggccgttttgtttgtgcctcctaaggctcctcaggatctgtatcagagttactataactccaataaagccaacttgaagttgtacgttcgacgagtttttatctctgacgaatttgatgagcttttgccaaagtatcttagcttcttgaagggtcttgttgattctgatactctgcctctcaatgtgtcacgagagatgctgcaagcccacagcagtttgaaaacaatcaagaaaaaactcatcaggaaagcccttgatatgattcgtaaaattgccgaggaggatcctgatgagtcgagtggcaaagatgagaaagaagtggaaacatctggtgatgatgatgagaaaaagggacaatacaccaagttctggaatgaatttggaaaatccattaaactcggcatcattgaggatgcaaccaatagaaatcgcttggcaaaactccttcgatttgagagcaccaagtcggatggtaaattgacatcacttgatcagtacatctcaaggatgaaatccggacagaaagatatattctacattacaggaaccagcaaggaacaattagaaaaatctccattcttggagaggcttaagaagaaaaattatgaggtaattttcttcactgatcctgttgatgagtacctgatgcaataccttatggattatgagggaaagcagttccaaaatgtatccaaggagggcctgaaaatcgggaaagaaaagaacaaagaactcaaggagtcatttaaggaactaactaaatggtggaagaatgcacttgctagtgataatgttgatgaagtgaaaataagcaaccgtttggacaacactccttgtgtggtcgttacatcaaaatacggatggagtgctaatatggagagaatcatgcaatctcaaaccctatctgattctagcaagcaagcttacatgcgtggcaagaggatcctagagattaacccaagacacccaatcatcaaggagcttcgtgagagagttgccaaggactctgaggatgagggtgtgaagcaaacggctctgcttatttaccagacagctgtaatggagagtggtttcaatctacccgatcccaaggactttgcttcacgcatctacagctcagtgaaatctagccttaatatcagtcctgatgcaacaattgaagacgatgatgatgtagaagaaaccgagatagagtcggagacaaaagaaagtgcaggcaaagatgagttgtagattgcctgaaacctcggggatatattgcctgaaacctcggggatatatactctttgagtttgttttaccctctgtagacattcacgattgaactgaaacatgcattttcaagtctgaaactaggataaaaagaaaatttacgtagttctttcatttcgggtgttgagaagtctcatcgattttgtctgtggaatgtgtttttgttgacagcccacactggtttgcatgattagcttgtttgggaggtaaaaaaaaaaaaaaaaaaaaaaaaaaaaaaaaaaaaaaaaaaaaaaaaaaaaaaaaaaaaaaaaaaaaaaaaaaaaaaattc

SEQ ID NO: 18027 - DNA, 634 bp, Gossypium hirsutum
  unsure (1)..(634): unsure at all n locations
  Clone ID: AI055408.1
aaccaatagaaatcgcttggcaaaactccttcgatttgagagcaccaagtcggatggtaaattgacatcacttgatcagtacatctcaaggatgaaatccatacagaaagatatattctacattacaggaaccatctaggaacaattagaaaaatctccattcttggagaggcttaagaagaaaaattacgaggttattttctttactgatcctgttgatgagtacctgatgcaataccttatggattatgagggaaagcagttcctaaatgtatcctatgagggcctgaatattgggaaatattaaactatgaacttcaggagtcatttaaagaactaaccaaatggtgtataaatgcacttgcttgtgataatgttgattatattatgataatcttcctgtttggacatcacttcttgtgtgtctgtacgataaaattcggaggatttcttttttgattaaatcttcaatcctatccctttttgtctatcatctagttacatcctttttttagatccttgtattacccattaaccatttttaaggacttgtgagaatttctcgggctttaggataggggtaatcatcgctattttctccaacggtttgtgtaagtttgtattacccaccaan

SEQ ID NO: 18028 - DNA, 558 bp, Gossypium hirsutum
  unsure (1)..(558): unsure at all n locations
  Clone ID: LIB3585-028-P1-K1-C3
agatgagtcaagtgatgaggaggaaacctccgatagcttctcttccaaggaaggaaaaaatgaatatgctgataaaagngaggatcatgatgctcaaaagaaatcaaattcatataatgcgcgggtaactacttatnaattttaacttcttaattatnttaaagccgggggggtgcgcattccaataaatgtgacagatcaataatacacgaaattctatcactctctagctaaggactttagtgatttgaagcccttggcctgtaaccacttcactgctgaaggtgatatcgagttcaaaaccgttttttttgtgcctcctaaagctcctcacgatctatatgagagttactataacaccaataaaaccaactttaagttttatgttcgaccagtttttatctcttaagaatttgattaacttttgccaaagtatcttatcttctttaaaggtctttatttattcttatactctgcctttcaatatttcactaaaaattcttcatacccacaacaattttaaaacaattcaaaaaaaaacttattattaaaacccct

SEQ ID NO: 18029 - DNA, 460 bp, Gossypium hirsutum
  Clone ID: LIB3583-040-P1-K1-A1
tgagagagtggccaaggactctgaggatgagggtgtgaagcaaacagctcagcttatttaccagacggctctaatggagagtggtttcaatctacccgatcccaaggattttgcttcacgcatctacagctcagtgaaatctagcctaaatatccgtcccgatgcaacaattgaggatgatgatgatgtagaagaaaccgagacagagtcggagacaaaagacagtgcagtcaaagatgagttgtagatttcctgaaacctcgaggatatatactctttgagtttgttttaccctctgaagacattcccgattgaactgtaacatgcattttcaagtctgaaactaggataaaaagaaattttacgtagttctttcatttcgagtgttgagaagtctcatcgattttgtctgtggaatgtgtttttgttgacagtatatactggtttgcatgattaaaaa

SEQ ID NO: 18030 - DNA, 372 bp, Gossypium hirsutum
  Clone ID: LIB3146-024-Q1-K1-H3
ctagcctaaatattagtcccgatgcaacaattgaggatgatgatgatgatgtagaagaaaccgagacagaatcggacacaaaagacagtgcagtcaaagatgagttgtagattgcctgaaacctcggggacatgccttttgagttagttttaccctctgatgacaagccgaaggaactgtaacatgcattttcaagtctgaaacttggataaagggaaacattacaaacattacttagtagaatatatgtaaaccgtagtcgactgtgaaattaatctgtctgcaatttttgctcttttaatgcatcgcagaggttttaaaactaaaaatttcattagaaaaaaaaataatgaacggctcgatagaaaggtc

SEQ ID NO: 18031 - DNA, 331 bp, Gossypium hirsutum
  Clone ID: LIB3135-013-Q1-K1-D2
cccacgcgtccgcccacgcgtccgcccacgcgtccggaaaggtggtgatggctcctttcaagtggacaacagttctaggagcctatatttccattaaaatatacttagcgcttgatgtgctacaagggcccagaatttaacttatgtgttgacggtaaggcgcattcattatatcagtgtagctgctccttttactggctctaaagaaaagtacctgtgacattatctgctcggttatgagggaaagcagttccaaaatgtatccaaggagggcctgaaaatcgggaaagataagaacaaagaacggcgggcgttatttaaggaactaact

SEQ ID NO: 18032 - DNA, 231 bp, Gossypium hirsutum
  unsure (1)..(231): unsure at all n locations
  Clone ID: LIB3149-062-Q1-K1-E2
gccgaaggaactgtaacatgcattttcaagtctgaaacttggataaagggaaacattccaaacattacttagtagaatatatgtaaaccgtagtcgactgtgaaattaatctgtctgcaattnttgctctttaatgcatcgcagtggttttaagaaaaaaataataatatttaaaaattatttaatttttattttatttaaatttttataatataatttaatttaattaat

SEQ ID NO: 18033 - DNA, 645 bp, Gossypium hirsutum
  Clone ID: GOSHI-09MAY01-C2467_4
agctgagcctctagatgctttcagctaggagtagctagcttctgatgagtagagctagcttttcaccttagtctttggtatagtaagtcgcataggtagagttcctcttctttttcagcccttttggttcttggttagagtggttgggtgttgagctcctgctgccttttgctgtttagagctatttcttccattgtctagtttgtgaagtggggtgaaggtcttctgtctcgatctttctctttcattgatgtatagtgttgtccgcgcgcccggattgactaagtccgttttccgagagcctgtgttcttcggtagtgttgtgatggtgtgcttgttcgtgatggcggtgattgtgctttgctttgaagatataaagcttccgatccaccatatccctggtccagagggtgtccgtggtcgttattcagacaatacattgatctaagttaaatcttggttgggcccctactatgaggttgtaggttgcgctgtgtttttctcccctctcgattttcccagtttaaaaagatttgtatgacctctggttttggaaaatggttttcctccattgcctgtagagtaaaaaagtctgaagtcattgcttttggccggttattacctagtttcattcagttcctgatt

SEQ ID NO: 18034 - DNA, 921 bp, Gossypium hirsutum
  Clone ID: GOSHI-09MAY01-C2467_3
ccctcgcgtccccccccgccgccgcccccgcgtcccagaatttgcttcctttccttcttccattattttctctcgtcaaagttctcaacttttaactctttttcaggatgggcagtactgatggaaccagctatggtgcttacacctatgatgctctggagagggagccttactggccatctcagaaactccggatttccatcactggtgccggtgggttcattgcttcccacattgctcgacgtctgaagagtgaaggccattacatcattgcttctgactggaagaagaacgagcacatgacagaagatatgttttgtaatgaattccacctcgttgatcttcgagtcatggagaattgcttgaaagtttccaaaggagtggaccatgtcttcaacctcgctgccgatatgggtgggatgggtttcattcagtcaaaccactctgtcattatgtacaacaacactatgatcagtttcaacatgcttgaggctgctaggattagtggagttaagaggtttttctatgcctcgagtgcttgtatctaccctgaatttaagcagttggacactaatgtgagcctaaaagaatccgatgcctggcctgctgagcctcaagatgcttatggcttggaaaagcttgcaactgaggagttgtgcaagcactacaccaaagattttggaatcgagtgtcgtattggaaggtttcacaacatttatggtccttttggaacatggaaaggtggaagggagaaggctccagctgccttttgcagaaaagctattacttccattgacaagtttgagatgtggggagacggtcttcagacccgatctttcaccttcattgatgaatgtgtcgaaagtgtacttagattgacaaagtcagatttccgcgaacctgtgaacattggaagtgatg

SEQ ID NO: 18035 - DNA, 784 bp, Gossypium hirsutum
  Clone ID: GOSHI-09MAY01-C2467_2
cccatgctatcgcccacgcgtccgcccacgcgtccgcggggctttttaccacgcgttcggtgttgtggggagacggtctttagacccgatctttcaccttcattgatgaatgtgtcgaaggtgtacttagattgaccctcgcggccgcccgcgcgcctgtgaacattggaagtgatgagatggttagcatgaacgagatggcggagattgtgcttagctttgaagataaaaagcttccaatccaccatatccccggtccagagggtgtccgtggtcgtaattcagacaatacattgatcaaagaaaaacttggttgggcccctacaatgaggttgaaggatgggctgagaattacatacttctggatcaaggaacagattgagaaagagaaggctcaaggcattgatctatctgtttacggatcatctaaggtggtaggaacccaagcaccggtccagctcgggtcacttcgtgctgctgacggcaaagaatgaagtaaacttgctttggaaccaagttttattatgatatagctatgctagtggcattgaatccaaaaagtatcaaccaatatcaggttaagattatttattttgtcgtatttagtttgtgcactatgatctttgtccaaggggaagcttttatatttccactgtatccaaaatagcttgctggtgtaagttgatatgcttaggcttttatagcctttatataataaaatttctttcggcttgtgagtattggtctcttgtacagcagtgtactttatatttgttacctattt

SEQ ID NO: 18036 - DNA, 1464 bp, Gossypium hirsutum
  Clone ID: GOSHI-09MAY01-C2467_1
tttccccgcgcccccgctcctgtctctgttttgctcccatttctttcttcaattatcttttctcttcaaagatttcaactcttttctcagaatgggaagtactgatgggaccagctatggtgcttacacctatgatgccctggagagggagccttactggccatccgagaaactccgaatttccatcaccggtgctggtggcttcattgcttcgcacatcgctcgacgtctgaagagtgaaggacattacatcattgcttctgattggaagaagaatgagcacatgacagaagatatgttctgtcacgaattccatcttgttgatcttcgagtgatggaaaattgcttgaaggttaccaatggagtggatcatgttttcaacctcgccgctgatatgggtggcatgggcttcatccagtccaaccactctgtcattatgtacaacaacacaatgatcagtttcaacatgctcgaggctgctcggattagtggagttaagaggtttttttacgcctccagtgcttgtatctaccctgaatttaagcaattggacactaatgtgagcttgaaagaatccgatgcctggcctgctgagccacaagatgcttacggcttggagaagcttgcaacggaggagttgtgcaagcactacaccaaagactttggaattgaatgtcgcattggaaggttccacaacatttacggcccttttggaacttggaaaggtggaagggagaaggctccagctgccttttgcagaaaggctattacttccattgacaagtttgagatgtggggagatggtcttcagactcgatctttcactttcattgatgaatgtgttgaaggtgtacttagattgacaaagtccgatttccgtgagcctgtgaacatcggaagtgatgagatggttagcatgaacgagatggcggagattgtgcttagctttgaagataaaaagcttccgatccaccatatccctggcccagagggtgtccgtggtcgtaattcagacaatacgttgatcaaagaaaaacttggttgggcccctacaatgaggttgaaggatgggctgagaattacatacttctggatcaaggaacaaattgagaaagagaaggctcaaggcatagacctatctgtctatgggtcatccaaggtcgtgggaactcaagcaccagtccagctgggctcacttcgtgcagccgatggcaaagaatgaagaagtaaaggtcttgtagttgctttaaagccaagttttattggcagatggggggaatgcataaaccagtttcaggtttagtatttaattttggtattgtagtgtgtgtactgttgtttaaaggggattgtattcgaagttagctttccatgatatgcaaggcttaaataaatgcctttccgttccctaaaaaaaaaaaaaaaaaaaaaaaaaaaaaaaaaaaaaacccacgcggccggcga

SEQ ID NO: 18037 - DNA, 400 bp, Gossypium hirsutum
  Clone ID: LIB3146-025-Q1-K2-E8
tgaaatttgaaaggaagagaaaaagcgcatggcatagacctatctgactatgggtcatccaaggtcgtgggaactcaagctccagaacagctgggctcacttcgagcagccgatggcgcagaatgaagaagtaaaggtcttgttgttgctttaaagccaagttttattggcagatggggggaatgcataaaccagtttcaggtttagtatttaaaactggcattgtagagggtgtactgttggttaaaggggattgtattccaagttagctttccatgatatgcaaggcttaaataaatgccattggtgttccgctttatgtaataaattatgaaaaacctatttctactagaataataataaaagtagcacgtttgatgtaaaaaaaaaaaacaagggc

SEQ ID NO: 18038 - DNA, 285 bp, Gossypium hirsutum
  Clone ID: LIB3148-041-Q1-K1-H2
cccacgcgtccgcccactcgtccgcccacgcgtccgcccacgcgtccggtaaacttgctttggaaccaagttttattatgatatagctatgctaatggcattgaatccaaaaagtatcaaccaatatcagtttaagattatttattttgtcgtatttagtttgtgcactatgatctttgtccaaggggaagcttttatgtttccactctatccaaaatagcttgctgttgtaagttgatatgcttaggctttcatagcctttatataataaaaatttctttctgc

SEQ ID NO: 18039 - DNA, 197 bp, Gossypium hirsutum
  Clone ID: LIB3146-052-Q1-K1-H8
cccacgcgtccgcccacgcgtccgtgaatgtgtcgaaggtgtacttagattgacaaagtcagatttcctcaaagctaagaacaatttctgccatctcattcatgctgaccatgtaatcacttccaatgttcggcatgattgagatggcagaaattgttcttagctttgaggataaaaatctttgaacgggctcagat

SEQ ID NO: 18040 - DNA, 930 bp, Gossypium hirsutum
  Clone ID: GOSHI-09MAY01-C2407_1
tcggccgcgcgggcgtgaatcttggcggaaatgatatagtgcaaggaaataaaaaactcatagttgcttttctatggcaattaatgaggttcaatatgcttcaactcctgaagagtttgagatctcgctcccgaggaaaggagataactgatgcagatatcatgaattgggcaaaccggaaagtcaaaagtacaggaagaagtactcaaatagaaagcttcaaggataaaagcctttccactggactgttcttcctcgaacttttaagtgctgtggagcctagagtggtcaactggaaccttgtaaccaagggtgaaagtgatgaggagaagaggctgaatgcaacatatatcataagcgtggcacgaaagcttgggtgttccattttcttgttgcctgaagacatcatggaggtgaaccagaaaatgatccttacattaacagccagcataatgtactggtgccttcaacacgcagcggaagagggtgaggtggctctatcccctgctaatggcaacggaagcacttacacatcagatacatctccggcaccatccattagcggtgaagacgaaaggtcctcgctgtgtggtgaaatctcaagcttgactatggatgatgccgcctcggacattacagtctcatcatctcaatgtgagaatgaagatactgaaattgcaacagcggaatcccatgcatgatcacatggcagagtgaatatggttgcagttaggcagaagaggtcataaactcatacaattagaccctcaaaagaggaattcctccttttctttcttttttgtttgttatcagtcaattgtattctaggtagtattctttagcaataagtacagcataaatctcaatacccacttgctatggaaactgttcaaaattgcaaataatgaggcgattttgttttgttttttt

SEQ ID NO: 18041 - DNA, 629 bp, Gossypium hirsutum
  Clone ID: GOSHI-09MAY01-C2427_2
accgaattgcagttccggcccagacctacgcatagaccacaaattggataatataatgttttagatgcttttgttgttattgtatgcaatttttttgctgatggcataatgcagtttggctgctctatgttgctgctgtgtgttggaggactgctgcttcttcctatgatataattcatgacggatgagttatttcatttacatttctggttctgctatgcttcgctgctactgtttgggagggaggagaaatgccgctaataatgagttctaccccgcatttatggtagttgttactgttctataaacagttggttgtagcgattccctgcctaatccaatttgatagtttatctacttttgaactttgtcaacagaagcttgctttataaatacatttgctgggtgtatcgattatctgtacaatttgcttcaactttcatcaaaaaaaaaaaaaaaaaaaaaaaaaaaaaaaaaaaaaaaaaaaaaaaaaaaaaaaaaaaaaaaaaaaaaaaaaaaaaaaaaaaaaaaaaaaaaaaaaaaaaagggggggggccttttaaaagaaccaaatttaatttcccgggcattgaaaggaaaaaatttttttaaagggcaccaaaaataaa

SEQ ID NO: 18042 - DNA, 966 bp, Gossypium hirsutum
  Clone ID: GOSHI-09MAY01-C2427_1
gaaatggcaggaaatgattggaacaggcaacttgcaaagcgatcaaaactcaaaacacaaaacaggtctccgcgcgcgcaggatttgggctgttccgttagagtttcggaagaagaaggtaatagaatagaacctctcaaagagtgagacacagacagaaaaagcatcgaaatgagttacgagagaggtcctcaagatcattatcctcctcctggttattcctctccttatcccccaccgggctatccatcagcccctcctcccccatcttacgaaggctatcctcctccgccaactggatatcctgcctatcctcctcagccgcctcgccagccctacgacggttaccaaggctattttgctgaagggtatccacctcctccgccccctcaacctcatcctcaatatcaacactaccaccactatgacccctaccattaccagaaccagtctgattctggctgtttctctttcttgcaaggctgtttggctgctctatgttgctgctgtgtgttggaggactgctgcttcttcctatgatataattcatgacggatgagttatttcatttacatttctggttctgctatgcttcgctgctactgtttgggagggaggagaaatgccgctaataatgagttctaccccgcatttatggtagttgttactgttctataaacagttggttgtagcgattccctgcctaatccaatttgatagtttatctacttttgaactttgtcaacagaagcttgctttataaatacatttgctgggtgtatcgattatctgtacaatttgcttcaactttcatcataccgatgtctctgatggctcatttctctaatgactttctatgaaggatagcttttgtttctcctttgcaaatggttttttaacgtagaagaaatctttcatgatcattcagcaatgacattatgtaatggaagttttatctgttgactt

SEQ ID NO: 18043 - DNA, 331 bp, Gossypium hirsutum
  unsure (1)..(331): unsure at all n locations
  Clone ID: LIB3083-031-Q1-L1-D9
gataaactatcaaattcccgttagtttatttaatacggtacggccacactataatanaacagtaacaactaccataaatgctggtagaactcattattagcggcatttctccttcctcccaaacagtagcatcgaagcatagcagaaccagaaatgtaaatgaaataactcatccgtcatgaattatatcataggaagaagcatcagtccttcaacacacagcaacaacatatagcagccaaacagccttgcaagaaagataaacagccagaatcagactgtttctggtaatggtagaggtcatagtggtggtagtgttgatattgatgat

SEQ ID NO: 18044 - DNA, 571 bp, Gossypium hirsutum
  Clone ID: GOSHI-09MAY01-C2767_5
tccttcgcgtccgaattcaccatgaccctcacttttggggagatgatgtgcatcattttaaacccgagagattcgctgaagggattgcgaaagctaccaattataccgcggctgcatttcttcccttcgggttgggacctcgatcttgcgttggtgtgacatttgcaacactagaaaccaagatcgtgctctccatgattctacaacgttacaccattaccctctcccctgcctatatccactctccgatatccattctcagcattagaccacaacatgaaattcaggtgatacttgaaccactgcatcataatgcttgaagtacatagctgttaagaactaagggtttaacgtggttcatgtattttaggtttaagagatgagcacttaacatgtttaaggttccagcattggcatccccttccctatcctacgctatacccacctttatacataatggaattcaagtagctactgatttccaagatggtaaaacgcaatcatacagaagaatatgttgaggcaagtttcgtgaacagtgacttgaaaactgacatctgcactcggtacg

SEQ ID NO: 18045 - DNA, 639 bp, Gossypium hirsutum
  Clone ID: GOSHI-09MAY01-C2767_3
gaaactctaagattatatggtccatcaattgccatgatgagaagagctgaaagagaagttcagttagggaagctagtcttgcctgctaatctagatcttctggttctacattctgccactctcaccatgaccctcacctgtggggagatgaggtacatctttttaaaccagagagattcgcagaagggattgccaaagctaccaactacaatgcggctgcattttgtcccttcggattgggacctcggtcttgtgttggtatgtcctttgcaatcaccgaaacgaaggttgcactctccatgattctacaacgctacaccatttccctctcccctgcctatgtccactcaccaatgccttttctcgccattcgaccacagcatggaattcaagtaatacttgagtcactgcataacaatgcttaaagtacacaatagctaagggacttgaggtttaactcaatttgtttatgtattcacctttaggtgttaaagcacttttaacattagtaaccccttcctattcctatgctataccctactcaacgcaaaaacatggtaaaacatgcaatccataaatatatatatgtgtatgtttccagtattgttgatcaatatatatttttactagttatgcctt

SEQ ID NO: 18046 - DNA, 1321 bp, Gossypium hirsutum
  Clone ID: GOSHI-09MAY01-C2767_1
cccacgcggccgcccgcgcgtccgcccgcgcccccggcgaagcatcgcaagttgacgaatcatgtttttcatggggaaagtttaaagaacatgacaccagctgtaattgctagtgttgaaacaatgctagagaagtggaaaggcaaagaaggcaaagagattgaagtgtatcaagaatttagattattgacttcagaagtgatatccagaacagcttttggtagcaattacttggaaggggagaagatttttgccatgttgaacaagttgtcaataattatgagccgaaatattttcaagactacgattcctttcatcaacaagttatggaaacctgctgatatgctagagtctgaaaaacttgcaaaagaaatacaagattgtgtgatgaagattgttaagaaaagagaagacaaagttgtgaatggagaagctgatagcttcggcaatgattttctgggattacttgtaaatgcctatcatgatttggacgataaaaacaggctttcattggaagacttggtaggtgagtgcaaaacattctactttgctggacaagaaactgttaattccttgcttgcatggatagtcttgcatttggcaatccatggagattggcaagaaaaagcaagaagagaggtgattgacatatttggtaaccaaaatccacatcttgaaggcattgccaaactcaaaattatgaccatgatcatcaatgaaactctaagattgtatggtccatcaaatggcctgccgagaacagttgcaagagaagttcagttgggaaagtttgtcttgcctgctaatatagatattctgtctctaaatattggaccccaccgtgaccctcacttgtggggggatgatgtgcatctttttaaaccggagagattcgccgaagggattgccaaagctaccaattacaccgcagctgcatttttcccctttggattgggacctcgatcttgtgttggtatgacccttgcaaccatagaaaccaagattgctctctccatgattctacaacgttacaccattaccatttcccctacctatgtccactctccaatagctattatcaccattcaaccacaacatggaattcaaataatacttgagccgctgcatagctgctaagaactaggggcttaatatagttagttcgtgtatggatgacatttaatatgtctaaggttctagcatttgcagccccttccctattcctagctatgcccatctttatacataattaaatgcaagtagctactactttccaagatggcgaaacatgctaccaataaaaaaaatgtttgcttttatt

SEQ ID NO: 18047 - DNA, 549 bp, Gossypium hirsutum
  Clone ID: uC-gsflnu33B084e12b1
tcgtgtaacgggcttgtgacagtcgagggtgaaaaatgggtgaagcaacggacgttggggaattatgcttttcatggggaaagcttaaagaacatgacaccggcagtaattgccagcgttgaaacaatgctagaaatgtggagaggctatgtgggcaaagagattgaactgtttcaagaatttagattattaacttcagaagttatatcgagaacagcttttggtagcagctacttggaagggcagaagatttttgacatgttgagcaagttggcaataattttgcaccgaaatcttttcaagaccagaattacttggatcagcaagttatggaaacctgctgatattgttgagtcagaagaacttgcatatgaaatacagggttgtgtgatgaagatgattaagaaaagagaagacagagttgtgaatggagaagctgatagctttggcaatgattttctaggattacttgtaaatgcctatcatgatttggacgacaaaaacatgttttaattgggagatttggtagatgagtgcaaaacattttac

SEQ ID NO: 18048 - DNA, 530 bp, Gossypium hirsutum
  Clone ID: uC-gsronu33B021b04b1
ttttaatgaaactttaagattatatggtctacaagaatggcttaataagagaagttgtaagagaagttcagattggaaatctagtgttacctgctaatatagatctttatattgcaaatgttgtacctcaacatgaccctcaactatggggagacgatgtccatctttttaaaccagagaggttcgcagaaggaattgccaaagctaccaattacaatgcagctgcattttgtccctttggaattggacctcggtcttgtgttggtatgagctttgcaaccatggaaacaaagattgcactctccatgattcttcaacgctataccatttctctctcccctgcttatgtccactcaccaatatctgttctcggcattcaaccagaacatggaattcaagtaatactcaaatcactggacagcaatgtttaatgtacatggttgctatgaattcaaggtttaaccttgctggtttatgaattcttgtttaagagattacatttaatatgttaattaaatgcttactttaaa

SEQ ID NO: 18049 - DNA, 449 bp, Gossypium hirsutum
  Clone ID: LIB3145-007-Q1-K1-B7
gttcagttagggaagctagtcttgcctgctaatctagatcttctagttgtacattctgcgatctcaccatgaccctcaactatggggagatgaggtacatctttttaaaccagagagattcgcagaagggattgccaaagctaccaattacaatgcaggtgcattttgtccctttggattgggacctcggaattgtgttggtatgaactttgcaatcatcgaaacgaagattgcactctccatgattctacaacgctacaccatttctctttcccctgcctatgtccactcaccaattccttatatcaccattcaaccacaacatggaattcaagtaatactcgagtcactgcataacgatgcgtaatgtaacatagctgctaagaattcagggtttaaataagtttagctgctataaatttggggtttaaataagtttattcatgtat

SEQ ID NO: 18050 - DNA, 579 bp, Gossypium hirsutum
  Clone ID: GOSHI-09MAY01-C2717_6
cccactttttcgaacatgttcttgggcggcattaacaccggcgcgcttatagtgatctgggcagtggcggagctggcgagaaagccaaatttatgaagaaagctcaggacgaagttcaggggtggtggggaagaaaggaagagtaacagaaaccgatctggatcaacttcaatacctgaagatggttcaaaagagactctaagactgcatccacctgcgcccatgctgatcgccagagaagccatctcacacttcaacatcaatggttaccacatttatcccaaccctccgacgaccacgtcaacttgctgctccgccctctcccacgctgacatgcgttgcctatgctcatataagaactccaagctcttgccttcccttggtattgacccaaaccttgccatgaaattgcctagcttgtgcaagcttcctcatcctgcagactgttagttcctggctctccatatttgatctcatatgtgagggaaaatcatgcttattataatgcctctatcttctcatttatcttgttacctgatgctctcgggtttctttttggccatcctccctgttttggtc

SEQ ID NO: 18051 - DNA, 588 bp, Gossypium hirsutum
  Clone ID: GOSHI-09MAY01-C2717_4
tcctcgcgtccgcccacgcgtccggtctgcagcgactaatattggcaaaggtgggggttatagccatcgctacaactgatgctcaaagcatttgcaacatgccagcttcacgattgatggcatgcaaaccagcaatgacccacgcgtccgccaaccctccgccgcccacgtcaacttgctgctccgccctctcccacgctgacatgcgttgcctttgctcatataagaactccaagctcttgccttcccttggtattgacccaaaccttgccatgaaattgcctagcttgtgcaagcttcctcatcctgcaaattgttagttcctggttctccatatttgatctcaaatgtgagggaaaatcatgcttattataagcctctacttcacataattgtactgaccttcgggttttctttttcctttatttctttttatgtgttgtgtttcgattggtatcttatagtcgtgtgatttctcaccaataatcatatattagtattgtttccaaagcaaaagcataccttgtgaaaaaaattaaaataaataaaacgaagaacaatccatgcaaactatgtttctataataaa

SEQ ID NO: 18052 - DNA, 1937 bp, Gossypium hirsutum
  Clone ID: GOSHI-09MAY01-C2717_3
attcccggtccccacgcgtccgtagccagccctttccaccagtaaaagagaggctgaggctttgcaaaactcaggtatgatgcctttgattagctcacttgtttgggttccttttctccttcttcccctgctgctgctgctgctactctccaagcagaagacccatcaagttaagaaagaacacaattacaagcttcctcccagtcctcccaggctaccaattataggtaacctgcaccagcttggtgaattgccacacagttctctttcccaactttctcgcaaatatggtccagtcatgctccttcatctgggtcgtataccggtgcttattgtttcatcagccgaggcggcgaaggaagtcttaaaggtcaatgatcttgcttgttgcagcaggcctcggctggctgctgttgggaagctttcgtacaattatttagacgtagcatttgcgccatacagtgaatattggagagaactgcggaagatatgcgttctcgagcttttcagtgtgaaaagagtgaagtctttccggttcattagagaagccgaagttggttccataatggaatccatctcatcatcgtcaacccatccggtgaacgtgacagagaaggtatttgctttaactggaagcataatatttagaattgctttcggcaagtctttccagggaagtgagtacgatcgtgctaagttctacgaattggttcacgatgccgagacggtggccggagctttctcctccgaagaatgctttccgagattcggttggattatagataggttaaacggtcataatggaagagtcgagaaagttttccgtcaattagatgcgttgttccaacaggtgatcgatgagcatcttaaacctggaaggacacaggatcacgaagacattattgacgtcatgcttaaaatagaaaaggagcaaattgatgaacatggtcatgcttggctcaccaaaaatcatatcaaggcagtacttttgaacatgttcttgggcggcgttgacaccagcgcgcttatagtgatctgggcaatggcggagctggcgagaaagccaacatttatgaagaaagctcaggacgaagttcgaggggtggtggggaagaaaggaagagtaacagaaaccgatctggatcaacttcaatacctgaagatggttttaaaagagactctaagactgcatccacctgcgcccatgctgatcgccagagaagccatctcacacttcaacatcaatggttaccacatttatcccaacacacttatccaaatcaatgtatgggccattgcaagggacccaaagtactgggaaaaccctcaagaattctccccagaaaggtttatcgataacgccgttgacttcaaaggacagcattttgagctgttgccatttggaggtggcagaagagggtgtccggggctgtacatgggaaccgtcacaaccgagcttttactcgcaaatctcttgtattgtttcgattgggttttgcctgatgggatgaatgaggcagatattaacatggaggaatgggctggtaagtgccttaccctctccaagaagacacctcttctccttgtgccaatcaaatacctccatgcccagccatctgtgtagacaaatttaatggaagccaaagtcctttgcttgatgtttgtataataagacccggccccatctaaacgagcacttaggctccttaaataagagggatgagtgacccagtgctttactggctgtgcttgtaaggaagtcctggtctagatgaaaaataaataatgggcgagaagtgagcagactaggtatgctgctattagagttaaaagtttagggtgtaatgtcagattgatgagtaatatagttcattagctctatttcctgttaagtcttcttcttactgcttgtataatataacctacaaatattttgc

SEQ ID NO: 18053 - DNA, 580 bp, Gossypium hirsutum
  Clone ID: GOSHI-09MAY01-C2717_2
ttctttcgcccgcccccacgcgtccccttaggcgtagctctcgatccacatcataaaaaaagtaaaggagaaaatgaagggtctgcaggcacttatattggcaatggtaacggttatggcgatcgctacaactgatgctcaaagcatttgcagcatgccagcttcaggtttgatggcatgcaaaccagcagtgacccctcccaaccctccgccgcccacgtcaacttgctgctccgccctctcccacgctgacatgcgttgcctttgctcatataagaactccaagctgttgccttcccttggtattgacccaaaccttgccatgaaattgcctagcttgtgcaagcttcctcatcctgcaaattgttagttcctggctctccatatttgatctcaaatgtgagggaaaatcatgcttattataagcctctacttcacattattgtactgagcttcgggttttctttttcctttatttctttttatgtgttgggtttcgattggtatcttatagtcgtgtaatatcacatacgtgtgatttctcaccaataatcatatattagtattgtttccacccatg

SEQ ID NO: 18054 - DNA, 562 bp, Gossypium hirsutum
  Clone ID: GOSHI-09MAY01-C2717_1
ttcttctcgcgtccgcccgaaaatgaagggtctgcaggcacttatattggcaatggtaatggttatggcgatcgctacaactgatgctcaaagcatttgcaacatgccagcttcaggtttgatggcatgcaaaccagcagtgaccccccccaaccctccgccgcccacgtcaacttgctgctccgccctctcccacgctgacatgcgttgcctttgctcatataagaactccaagctcttgccttcccttggtattgacccaaaccttgccatgaaattgcctagcttgtgcaagcttcctcatcctgcaaattgttagttcctggttctccatatttgatctcaaatgtgagggaaaatcatgcttattataagcctctacttcacataattgtactgaccttcgggttttctttttcctttatttctttttatgtgttgtgtttcgattggtatcttatagtcgtgtgatttctcaccaataatcatatattagtattggttccaccacgcactacgttgcttcaattatttttttaataaaatatgttctccatttttt

SEQ ID NO: 18055 - DNA, 418 bp, Gossypium hirsutum
  Clone ID: LIB3148-053-Q1-K1-D10
cccacgcgtccgggccgcccttttttttttttttttttttaaatacaatagaatcatagggtggtgtttcataaatatcttgagagtaccaagaacaatttgtcacaaaattataaaacatgataaaaaaaaaaatagaacaggtagcagacaagctatttgttactttttgttttgcttccaaaccttgccatgaaattgcctagcttgtgcaagcttcctcatcctgcaaattgttagttcctggctctccatatttgatctcaaatgtgagggaaaatcatgcttattataagcctctacttcacattattgtactgagcttcgggttttctttttcccttatttctttttatgtgttgcgtttcgattggtatcttaatagcctgtaatatcacaaacgtgtgaattctcacca

SEQ ID NO: 18056 - DNA, 429 bp, Gossypium hirsutum
  unsure (1)..(429): unsure at all n locations
  Clone ID: uC-gsronu33B155d08b2
tttatttttttttattcgttcgaacttaaattgtgtgtttttttttaatattgacccaaaccttgccatgaaattttttaaattgtgcaaaatgccctatattgcaaattgttagttcctggttctccatatttgatattatatgtgagggaaaatcatgcttattataagcctctacttcacataattgtactgcccncngggttttatttatcctttatttctttttatgtgttgtgtttcgattggtatcttatagtcgggtctcttttcacccattattcgctttttcttcatttttcctcgctcagctttttcttttacatctataaaaaaaaaaaaaaaattcctctaggtccttctttttaataggtccaagtttactttacccgggcatgcaacgataaaacttttttattgtgtcaccta

SEQ ID NO: 18057 - DNA, 741 bp, Gossypium hirsutum
  Clone ID: GOSHI-09MAY01-C2707_1
tctttacctttcagactcactgaattgaagcagagaacgaagcaaatatgaaattcacggactcaccggtgatacagcttcaagtgcgtgattcccaactctctatccaacaagacaatggctccttccacgttggtacctccgtctggccttgttctttggttctagccaaattcgtagagcgctgggcaccatcttcgcccaccaccaccaccagcgataacccttattatgacctccttgattttcacacccgccgtcgtcgcgccatcgaattgggaactggttgtggagctgctggcatgactttccgcctattgggtctccaagacatcatcctcaccgatatatcccctgttatgcctgcgctcaagcataacctcaaacgtaataaacccgttctgggtaagaacatgaagacctcgattctttattggaacaacaaggatcagatcaggggcgttaatcctccgttcgatgtggtgatcgcggcagatgttgtctacatcgaggaatcggtgggtcatttagttggggctatggaggcgtttgtttccgtcgatggggtgtttctgtttgggtaccagctgaggtcaccggaagcggataagttgttttgggaaatgtgtgaaaaggttttcgtgatcaaaaaggttcctcatcagatttgcaccctgattatgcctatgaggagaccgatgtttatgttttcagaaagaagatgaacaataacaattagtc

SEQ ID NO: 18058 - DNA, 786 bp, Gossypium hirsutum
  Clone ID: GOSHI-09MAY01-C2737_1
agctctcctgtggttcttgcgctttcggagccaaaggcatgaacgctgtgctcgacaattgtctagcactcgaggaactctccgtgaaacgacttcgtggcatcacagacggcgctgcagctgagccgattgggcctggggtggctgcggcggcgttgaaaacaatttgcttaaaggagctttataatgggcaatgttttggtccgcttattattggttcaaagaatctgaaatctttgaaactttttagatgctctggcgattgggataagcttttcccactcatagtggaacgggtcgcgggtatggtagagatccatatggagcggatccaagtcagcgatgtcggtcttgcggctatctccaactgttcaaacctagaaattcttcacctcgttaagactcccgagtgtacaaacgccggactcggagctgttgcagagaaatgcaacttgttaaggaagcttcacattgatggatggaaagcaaatcgaataggtgaccaagggttaattgctgttgcgaaatcttgccccaatttacaagaattagttcttattggtgttaatcccaccaaactgagtttggaaatgttagcttctaattgtccaaatttagaacggttagccttatgcggtagcgatacagtgggtgatgcagagatatcttttattgctgtgtaatgtattgctttagagaagctttgtttcatgaattgccctgttttcggatcatggcattggatgcgcttgctagtggttgccctaatttggttaaagtgaaagt

SEQ ID NO: 18059 - DNA, 894 bp, Gossypium hirsutum
  Clone ID: GOSHI-09MAY01-C2727_1
tcgcccacgcgtccgcttccttacctggtgcgcgctgaggtgtttggctcatacaagcggagcaccaatagcgaggccacttttcttctcatttcctgcttacaaggagtgctatgggttgagcaccccacgcgtccgcggaagcagtcttatggtgtctccagtgcttgagcaggggagggcgtcgggcaaagcactcttcccacccggttcttggtacaatctctttgatatgacacaaaccatagtgtcaaagggacagtacttcatgctcgatgcgccgttgcatgtggtcaatgtacatttgtatcaaaacaccatactaccaatgcagcaaggaggaatgatctccaaggaagctagaatgacaccatttactcttatagtaaccttccctgccggggctagcgaagcagaagccaaaggaaacctttatctcgacaatgacgagcttccagaaatgaaactcggaaacgggtattcaacatatgttgacttatacgccacattgaagcagggatcagtgaagatctggtcagaagttcaggagggtaagtttgctttagacaaaggttggaaaattgagaaaataacagtgttgggattgagtggaagtgtagacacgtctggacttgaaattaatggaagtccagtagccaatggtgcttccaacatagaattgagttcaatgaaacagatgcatttgcaggatgttgaagatggcgttggcaagaagaagtctttaatggtcgaactttcaggcttgaatttatatgttggaaagaactttgacatgtccatgaaaatgggggtacaaggttgatgattatggtgttatgtacttttttttttcccattttcattgttgatggtttactgtttgtcttaattggg

SEQ ID NO: 18060 - DNA, 401 bp, Gossypium hirsutum
  Clone ID: LIB3493-043-P1-M1-B3
gtcagaagttcaggaggttaagtttgctttagacaaaggttggaaaattgagaaaggacggtgttgggattaagtggaagtgtagacacatctggccttgagattaatggaagtccggacactggtgcttccatcatagaattgacctcagtggaacagatgcatttgcaggatgttgaagatggggttggcaagaagaagtctttaatagtgtcactttcaggcttgaacttatatgtcggaaagaagtttgacatgtccatgaaaatgggggtacaaggttgatgatcatggtgaagcgatgagctttaaactgctgcagtaatgcaaatttgatgttataatttcagttgttttaagtaatggaaattgaaatccaactttcccttggtttaattttg

SEQ ID NO: 18061 - DNA, 314 bp, Gossypium hirsutum
  Clone ID: LIB3493-047-P1-M1-C7
gagaaaataacagtgttgggattgagtggaagtgtagacacatctggccttgagaggaatggaagtccggtagccaatggtgcttccaacatagaattgacctcagtggaacagatgcatttgcaggatgttgaacatggggttggcaagaagaattctctaacagtgtcactattatgcttgaacttatatgttgctcatgaagtcttacatgtccatgaaaatgggggtacaaggctgatgattatagcgatgttggactcattgtatgcaaacacactctccttaccgctattgatgatactttcctggtc

SEQ ID NO: 18062 - DNA, 1150 bp, Gossypium hirsutum
  Clone ID: GOSHI-09MAY01-C2657_1
gcccacgcgccgagaaaggcctgagagtctagaatcagaaaagggggagcccaatccagacgtaaatgtcaaagggctgaatcagcatacatatgaagctggaaaagaatgcaagacacagattgcaagtgaaaaccaaagcagccatcttgcagatgggaaatctgttgccatggaagaggaagaagttattctcttgaagcctcttacaagacataattcagcaccaccctatgggaaaattcatagcgaaaaagaccctgcgtctccaaacgaaatggaggaaactgttccccccgcggccggtttgcgccgtgctacgtccctactaatagcgcaaaaccaggccaattctgatgcttcagattttcaatctgacatctcgaatttcaggcgcagcaaacctgtcaagcaacatgagccttttgtaaaagataccgcggctttcttgttttcggaagcccccatctctgctgggccaccgtcacttagttcttgggttctaaaccaaggaagtttaagcagtactgaaaagacaagaggtgatgttagtagaccaagcttgagccctattgcagaccctgcctccgcatcccttagcgatctttcgatccatcaaaccgaggattctgtcaattcatcaagatctgaagctttaaccaattacttttactcacctccaccatattcggctccaattccttctgcccctttattgcctgatgatgctgcttggtttaatggtaatcagtctagtttttccggggcgaatggctcagagttcattaacaaacccgagaatttctacaatgcatcaaggataagtggttaccccaattggtcccctgatggcgaacgtattaatggttctggtattccaggtttcattgataaataccctccatttagcgggatgacttcttcagaatggcttcggagatacagagaaagtcgcaatcctgatcatgccaacagccatgtgcagcctctcaactattacgctcccgggaaccccattcccacacatgatggttcccgtgttggtcttttcaatcaatacggagttccatctgttccaaatccaacaatttacacagagagttcagtattgcatcaaggatttccccgtgtttacggcatggaggaacca

SEQ ID NO: 18063 - DNA, 430 bp, Gossypium hirsutum
  Clone ID: LIB3048-022-Q1-L1-B6
attccttctgtccctttattgcctcatgatgcttcttaatgtaatgtttataaatctagtttggtcccctccaatggctcacatttcattaacaaaccctagaatttctacaatgcatcaatgataaatggttaccccaattgctccccttattgctaacgtattaatggttctgttattccaagtttcattgataaataccctccatttaactatatgacttcttcagaatggcttcagagatacataaaaagtcacaatcctgatcattccaacatccattttcaacctctcaactattactctccctttaaccccattcccacacatgatggttcccctgtttgtcttttcaatcaatacctagttccatctttttcaaatccaacaatttacacatagagttcagtatttcattaatgatttcccc

SEQ ID NO: 18064 - DNA, 525 bp, Gossypium hirsutum
  Clone ID: GOSHI-09MAY01-C2647_7
tccgcccagcgtccgccccgcgtccgcccagcgtccgcccccacgcgtccgaatttggatacaacaatggtggtgaaggtgtatggcccagcctttgcttctccaaagcgagtgattgcatgtcttattgaaaaggagattgaattcgagactgtccctgttgatttgcttaaaggagagcacaaagaccctgaatttctcaagctccagccttttggaacagttcctgtcactcaagatggagattatgttttatatgaatcccgtgcaatcataaggtactatgcagaaaaatacaaatcacaagggactgatctactgggaaagacagtagaggaaaggggtcaagtggaaaattggctagaagttgaggcacacaatttcaacccatcaatttacgccttgaccctacatgtgatgtttgcttccaagatggggttccctcctgatgaaaatttgatcaaggaaagcgaggaaaagctaggcaaagtgctggatatttatgaggagaggctgtcaaagaac

SEQ ID NO: 18065 - DNA, 637 bp, Gossypium hirsutum
  Clone ID: GOSHI-09MAY01-C2647_4
gtcattcagctccttctctttggccttctcttcctctttctttttcttttgagaagttttactcgggtcgggtttcggttgtacggattgcttaagattttggacgtatttttgaacatttttgctcttattcttgttcttaagaccgaaggtcttgtcctctatgatcttctgcttcttcgctaaatctgctttcgaggcttgcttgggcggcatctcttatcaccatagaataacacctcgaaatctcccctcttattttttcaaattttctcgagaaaagcaatctaattgatcagattttgggttcgttattggagttttttattttagggttttcggaaatgaattgaaaaggctggaatctggggatgggatctttgcaatgatgtctgctttgtggtttagcagtttggtttggtttggggtctggtctttgtttgaagaggccaactagttatcctatgttagttatagttcaataaaatgttgatacgggtagggggccgggttacagttatccttgtgtttgcctatgtttgatgttatgaataaagatgaaaaaaatcatggagatatcaaagagaatcaagtgctcaattggatgtgcttcaaaggcaatttttttcttttaaaa

SEQ ID NO: 18066 - DNA, 1249 bp, Gossypium hirsutum
  Clone ID: GOSHI-09MAY01-C2647_2
cccacgcgtccgtattccccccattcagcaccgattagggcatccttacccgtttcttattttcgtttcctttttctgccctcatcgatttctgcttcttcttccataggtattgcagagttaatttctgtcctcatttcttctgctttcataacaaatcctcaaatatatctcttcaatccaaatctcctcccatttctttactggttctctctctcggtctcttttgaatttttttcctgtcatttttttagctttgggtaaccaaaggccaaaacacacacacgctagaatctgttttttgtggtttttgaaatccactgcttcattggagactgattttgagtggatttatttctctgtcgtttctttgttgcgatttttgtaacccctgcttcatcggaggctgatttcagaatcccgtgcaatcataaggtactatgcagaaaaatacaaatcacaagggactgatctactgggaaagacagtaaaggaaaggggtcaagtcggaaaattggctaaaggttgaggcacacaatttcaacccaccaatttatgccttgaccctacatctgatgtttgcttccaagatggggttccctcctgatgaaaatttgatcaaggaaagcgaggaagaagctaggcaaagttctggatatttatgaggagaggctgtcaaagaacaagtacttggccggtgatttcttcagccttgctgacctgagccacctgccatttactcagtactttgtgggtcaaatgggaaagaatacatgataaccagcagggagcatgtgagtgcttggtgggatgatattagcagcagaccgtcctggcagaaggttctccagctctatgctcctcctttctaagaattgagaatgatgcaatctggggatgggatcttttcaatactgtctgctttgttgtttagcagtttggtttggtttggggtctggtctttgtctgttttaagaggccaactaggtatcctatgttagttacagttcaataaaatgttgataggggtaggggggttacagctatcgttgtgtttgcgtatgtttgatgttatgaataaagatgaagaaatctctggagatatcatagcagaaaaaaaatcgtgtgaactacaaaatgttaaaaaggcttattattgctcaatataagaaatctccttgaagaagatgatgtttaccacatctaccttatagtatcgtaagcctataagacccaaaaagggggggcc

SEQ ID NO: 18067 - DNA, 983 bp, Gossypium hirsutum
  Clone ID: GOSHI-09MAY01-C2647_1
cggacgcgtggccaatttggatacagcagtcagccaaggactacaacaatggtggtgaaggtgtatggcccagcctttgcttctccaaagcgagtgattgcatgtcttattgaaaaggagattgaattcgagactgtccctgttgatttgcttaaaggagagcacaaagaccctgaatttctcaagctccagccttttggaacagttcctgtcactcaagatggagattatgttttatatgaatcccgtgcaatcataaggtactatgcagaaaaatacaaatcacaagggactgatctactgggaaagacagtagaggaaaggggtcaagtggaaaattggctagaagttgaggcacacaatttcaacccatcaatttacgccttgaccctacatgtgatgtttgcttccaagatggggttccctcctgatgaaaatttgatcaaggaaagcgaggaaaagctaggcaaagtgctggatatttatgaggagaggctgtcaaagaacaagtacttagccggtgatttcttcagccttgctgacctgagccacctgccatttactcagtacttggtgggtcaaatgggaaaggaatacatgataaccagcaggaagcatgtgagtgcttggtgggatgatattagcagcagaccgtcctggcagaaggttctccagctctatgctcctcctttctaagaattgaaaatgatgcaatctggggatgggatcttttcaatgatgtctgctttgtggtttagcagtttggtttggtttggggtctggtctttgtctgttttaagaggccaactaggtatcctatgttagttatagttcaataaaatgttgataggggtagggggggttacagttatcgttgtgtttgcctatgtttgatgttatgaataaagatgaagaaatcatggagatatcaaagagaatcaagtgctcaattgaatgtgcttcaaaggccattttttcttttt

SEQ ID NO: 18068 - DNA, 651 bp, Gossypium hirsutum
  unsure (1)..(651): unsure at all n locations
  Clone ID: LIB3543-064-Q6-K6-H10
ctatgcagaaaatacaaagggggcccgctggggtactgaaaaaaaagtanaggaaaggggtgcaagtggaaaattggctagaggttgaggcacacaatttcaacccaccaatttacgccttgaccctacatttgatgtttgcttccaagatggggttccctcctgatgaaagggggggggggggaagcnannaaaanctangcaaagttctggatatttatgaggagaggctgtcaaagaacaagtacttggccggtgatttcttcagccttgctgatctgagccacctaccatttactcagtacttggtgggtcaaatgggaagggaatacatgataaccagcaggaagcatgtgagtgcttggtgggatgatattagtagcagaccgtcctggcagaaggttctccagctctatgctcctcctttctaagaattgaaaatgatgcaatctggggatgggatctttgcaatgatgtctgctttgtggtttagcagtttggtttggtttggggtctggtctttgtttgaagaggccaactagttatcctatgttagttatagttcaataaaatgttgatacgggtaggggggccgggttacagttatccttgtggttgcctatttttgatgttatgaataaagattgaaaa

SEQ ID NO: 18069 - DNA, 528 bp, Gossypium hirsutum
  Clone ID: LIB3828-031-Q6-K6-G6
gaatttttcaattgaaaatggtttctgggttttgcttgaaaatggattctgtagttttcaatttgtgagtgctcactctttagcaaagaaagatgacattctaaaccactttcttaaaaacaaatctttcttactttaatattcataataattaaatagcaccaaatgatgatttttccagtgggggtttttgtagaatcccgtgcaatcataaggtactatgcagaaaaataaaaatcacaagggactaatctactgggaaagacagtagaggaaaggggtcaagtggaaaattggctagaggttgaggcacacaatttcaacccaccaatttatgccttgaccctacatctgatgtttgcttccaagatggggttccctcctgatgaaaatttgatcaaggaaagcgaggaaaagctaggcaaagttctggatatttatgaggagaggttgccaaagaataagtacttggccggtgatttcttcagccttgctgacctgagtcacctgccatttactcagtacttg

SEQ ID NO: 18070 - DNA, 654 bp, Gossypium hirsutum
  unsure (1)..(654): unsure at all n locations
  Clone ID: LIB3543-055-Q1-K6-C1
cggccgcgtgggtttggctacagcagtcagccaagnactacaacaatggtggtgaaggtgtatggcccagcctttgcttctccaaagcgagtgattgcatgtcttattgaaaaggagattgaattcgagactgtccctgttgatttgcttaaaggagagcacaaagaccctgaatttctcaagctccaggtcaccttcttaagcttccccccccccccgctttttttttttggttaagaaattccagttctcagtgaaaattaatgttaaacaatcaatcatctcaatctcttctttgcagccttttggaacagttcctgtcactcaagatggagattatgttttatatgaatcccgtgcaatcataagatactatgcagaaaaatacaaatcacaagggactgatctactgggaaagacagtagaggaaaggggtcaagtggaaaattggctagaggttgaggcacacaatttcaacccaccaatttacgccttgaccctacatttgatgtttgcttccaagatggggttccctcctgatgaaaatttgatcaaggaaagcgaggaaaagctaggcaaagttctggatatttatgaggagaggctgtcaaaaacaagtacttggcccgtgatttcttcagccttgctgatctg

SEQ ID NO: 18071 - DNA, 456 bp, Gossypium hirsutum
  Clone ID: LIB3135-003-Q1-K1-C1
cccacgcgtccgcccacgcgtccgcccacgcgtccgcgagactgtccctgttgatttgcttaaaggagagcacaaagaccctgaatttctcaagctccagccttttggaacagttcctgtcactcaagatggagattatgttttatatgaatcccgtgcaatcataagatactatgcagaaaaatacaaatcacaagggactgatctactgggaaagacagtagaggaaaggggtcaagtggaaaattggctagaggttgaggcacacaatttcaacccaccaatttacgccttgaccctacatttgatgtttgcttccaagatggggttccctcctgatgaaaatttgatcaaggaaagcgaggaaaagctaggcaaagttctggatatttatgaggagaggctgtcaaagaacaagtacttggccggggatttcttcagccttgctgatctgag

SEQ ID NO: 18072 - DNA, 436 bp, Gossypium hirsutum
  unsure (1)..(436): unsure at all n locations
  Clone ID: LIB3585-064-P1-K2-H4
ccggaacggaaggtccgggtcagagcgtcgggtcacgctgtncgtgtcactcaagatggggataatgttttatatgaatcccgtgcaatcataagatgctatgcagaaaaatacaaatcacaagggactgatctactgggaaagacagtagaggaaaggggtcaagtggaaaattggctagaggttgaggcacacaatttcaacccaccaatttacgccttgaccctacatttgatgtttgcttccaagatggggttccctcctgatgaaaatttgatcaaggaaagcgaggaaaagctaggcaaagttctggatatttatgaggagaggctgtcaaagaacaagtacttggccggtgatttcttcaagcttgctgatctgagccacctaccatttactcagtacttggtgggtcaaatgggaaggggatacatga

SEQ ID NO: 18073 - DNA, 331 bp, Gossypium hirsutum
  Clone ID: LIB3146-010-Q1-K1-E2
gtgagtttgcaaatgttgctaggggaaaacagggttctggaagtgatccataatacatgacaaccagcaggaagcatgtgagtgcttggtgggatgatattagcagcagaccgtcctagcagaaggttctccagctctatgctcctcatttctaagaattgaaaatgatgcaatctggggatggggtctttttaatgatgtctgctttgttgtttagcagtttggtttggtttggggtctggtctttgactgttttaagaggccaactagttatcctgtgttagttatacttacaataaaatgttggtaggggtagggggttacaattatc

SEQ ID NO: 18074 - DNA, 519 bp, Gossypium hirsutum
  Clone ID: GOSHI-09MAY01-C2667_2
cgaactatcaataaacaaataatagcactccactttttctcttcatttttactataaacgtgcagtttctttatttatataaaggaaaacaatatttcttgcttagtccttctttgggttgtttttttctttggtttttcctcagatttctctcccgtttcttaaatttcatcgccttcttcttcttcttcttctttttatatctttctttccttcttgtttatatatagagagctgaagccagttctggtttgctttaaaccacaataaaaatggcttcttcactctcttttccatgccccaagatctcttcttttttgaaaacaaaccagcaaacccaaactcacaagggttctttgtctcttcctccaacttcaaatttcaactccaaatcttgcttgtcatttggatcttcaatccgcgtacctgcatcttcagcacctcagtggcctaatgatgggaaacaaactacagtcttcgcaagccatacgcagcttaacgaggttgctgcagagaaat

SEQ ID NO: 18075 - DNA, 718 bp, Gossypium hirsutum
  Clone ID: GOSHI-09MAY01-C2667_1
cggccgcgtgggcggccgcgtgggcggacgcgtgggcggacgcgtgggtttggtttgtccgcagatttctctcccatttcttgaatttcatcgccttcttcttcttcttcttcttctttttatatctttctttccttcttgtttatatatagagagctgaaaccagttctgggtttgctttaaaccacaataaaaatggcttcttcactctcttttccatgccccaagatctcttcttttttgaaaacaaaccagcaaacccaagctcacaagggttctttgtctcttcctccaacttcaaatttcaactccaaatcttgcttgtcatttggatcttcaatccgcgtacctgcatcttcagcacctcagtggcctaatgatgggaaacaaactacagtcttcgcaagccatacgcagcttaacgaggttgctgcagagaaatcatcgaattctgtagcggttgttgacatgaaacctaaagttgcattgcctgaggaagatgataaaaaatccgcagagaaggctattccagatgctgcggcaatttcagaattcatggcacaagtttcagaccttgtaaaacttgttgattcacgagatattacggagctgcaactgaagcaatcggattgtgagcttgtcctaagaaagaaggaaagctttgcagcagctggaatcagcatctccaattgtcttgcagcagtacatgcctcaaccg

SEQ ID NO: 18076 - DNA, 597 bp, Gossypium hirsutum
  Clone ID: GOSHI-09MAY01-C2607_3
cggacgggcgggaaaaagcagctcactttctccttcatcaaaccccaaaaacctagctttgcctcctttttaatttcttggattttggtgaactttatgaatccaagatcagagtataaaggattcgagttttaaccccagaattaagtacatctgctctttttgatctttgggttgaaattgtctacacaaagagggtgatttagaaatggatgctgatccatggactctttgtctttcttcaactgctaggagatatcaatcagctcttcagtcacgatctgatatgtttatggggtttgaagaaatggatggagaagacgatgtaagagaggagtttccatgccctttttgttcagagtatttcgatatcgtgggcttgtgctgtcacattgatgatgaacatcctgtggaggctaacaatggggtatgtcctgtctgtgcaacgagggcgggagcagatatggttgcgcatataacgcaacaacatggacatatattcaagcgtcagcggagatcacgtcgaagcggatctgattcaacgctgtctcttctgaggaaagagctgcgagacggaaacctgcagtccctcttcgg

SEQ ID NO: 18077 - DNA, 839 bp, Gossypium hirsutum
  Clone ID: GOSHI-09MAY01-C2607_2
gaattttttttttttttttttttctagttcaaatctcgaatctccataattagctattcaaaagcaagcatctacctttgtccataaacaagcgaagtcacgaacatttttctgaggtttaatggtacaaacaaaaataaatagagatgaaatgcgtataaactactccttagaggatttgttgataagtgatttgtgaatgtgtggaatgacaccaccgcccgcgccgcctccggggatccaggggaatcagcttcttcttcttcttcctcacactcacagccaacaccaaagacctaactaccttcatactctgtaatttcttgggtttttatttattcagtgatttactttttaaaaaaaatctatgaccagagctctaaacaattcaaggtttaactccagaaattattgtttacactttgggtccaaaataattaaaaataataagagagggtgatttaaaaatggatgctgatacatggagtgttcgtctttcttcagcttctaagagatatcaatcatctcttgaatcacgatctaatatgttaatggggtttgaagaaatagatgaagaagatgatataagagaggaattcccatgccctttttgttcagagtatttcgatatcgttggcttgtgctgtcacattgatcatgagcatcctgtggaggctaaaaatggggtatgtccggtctgtgcattgagggtgggggttgatatggttgcgcatttacgctacaacatggaaatatattcaagatgcagcgcaagaggaaatcacgtaaaggtggatctcattcaacactctcccttctgaagaaagaattgagggaat

SEQ ID NO: 18078 - DNA, 1271 bp, Gossypium hirsutum
  Clone ID: GOSHI-09MAY01-C2607_1
gaccgtcccgactcctgcccggacgccctcgcgaagagggacaacaacaggcagctcttcttccttttctgcgtctcatcatcaaaccccaaactcttaactagcctcttcctcctcctctttactttaatttcattttgctttcacaaatctaagaccagagctccaaaagattgaatttttaacccctcaaattaaaatccttcctttttcgcgttttcggttgaaaatttgtataaaaaagagggtgatttagaaacaatggatgctgattcatggagtgctcgtctttcttcagcttctaagagatatcaatcggctcttcaattacgatctgatatgcttatggggtttgaagaaattgatggagaagatgaaataagagaggagtttcgatgccctttttgttcagagtatttcgacatcgttggcttgtgttgtcacattgatgatgagcatccagtggaggctaaaaatggggtttgtccagtctgtgcaatgagggtgggcgttgatatggttgcgcatataaccctacaacatggaaatatatttaagatgcagcgcaagaggaaatcacgtaaaggtggatctcattccacgctttctcttctgaggaaagagctgcgagaaggaaatctacagtccttcttcgggggttcttcttgtacagtgtcttccaattcagcacctgatccgttgttgtcttcatttattttacccatggttgatgactttgttagtgtccagcctaacttttctcgtgaaacaagaacaactaagaaaagttcggacgtgaataagtcagaaagaaatgtgaagtcgtctcccctttcggtaaaggatcaggaagagaaggcaaaaagatgcgagtttgttcaagggctgctgttgtccacaatgcctgatgaaattttataaaacagcgttctcgggttcaaatcggttgctgcaatggaatcgtgaacctgaatcccatggggaaattgggttgacgatgaagagccccccggcaagcaaacttgcaaatctacagttcattactgtgtttgtagtgaaaatgttgaaataaggttggtaggaatgaatgtaattttttgcatatgtggactcttttagttgttgttagacctgatcatggtttccacttcatcttttattctcaggtcatatgatatgataatatttaaaaaaaaaatgttgttttcaacatggaatgccccccccacccgcttatactcggcatatgatgatgcatgtatatcagtggt

SEQ ID NO: 18079 - DNA, 297 bp, Gossypium hirsutum
  Clone ID: LIB3146-058-Q1-K1-H10
aactttcttttgaaacaagaacaacgaatttatttccgcgtgaataagggggaaaggaggtgttgtctctccctttcctcaaagccacgaatagaaagctaaaagaagcgagcctctcaagggctgctgattccacaatgcctgatgaaattcataaaacagcctactcgggttcaaatcggctgctgcaatggaatcgagaacctcaatcccatggggaaattttgttgacgataaataaccccccggccagcaaacttacaaatctacagatcattactggggtttggagtgaaa

SEQ ID NO: 18080 - DNA, 1143 bp, Gossypium hirsutum
  Clone ID: GOSHI-09MAY01-C2197_1
agttctacatcaccagcggctgccctcttttttcaaaatttgaaccccatctagtggttggggctggtgggtatgtttcttttcctgtctgtttagctgctctgctgaaagggatcaaggttgtgatccaagagcagaactccgttcccggtattgctaataggtttctctctttgtttgctgatttggtgtttgttgcattcaattcaacggttcaaagtttcccaagaaaagaaaaatgtgttgtttgtgggaatcccgtgagattgtctttgaaaaattcggtttcaaaggcattgtcgaggttgcatttttttccatggctagaaaaaatggagggttcttcagaggagatcaaagtgattttggttcttggaggttctttaggagctaatgctgttaacattgccttgttgaatgtgtactctcagttgctgttggaacatgagaattggtttattatatggcaaacaggggtggagtcgtttaatgaaatggagagcttggttaggagccaccctcggctgcttttggcaccgtttttgcattcaatgaatatggcatatgcagcagctgaccttgttgtttctcgagctggtgcaatgacttgttctgagatcttggctactgggaaaccttctatattggtaccatcaccaaatgttgcagaagggcatcaacacaaaaatgcttttctaatggcagatgtagcgggttcaagggttataactgaggatgaacttgattcaaccacccttgggttagctatatgcgaaatattaggggatgagagattactagcagagatgtcccagagggctctgaatgctgcaaaacctgatgcttctgcagagattgcaaaacacatcctttctttagttaaggaggacagctaagggaagtttgatggataataatttttcgtgtctaacgacggttgatctgatgtttgttgttcatggaaatcaatcaataatttcacaaaatgctttgttgtaatgcatattcaggagtgtgtgagatcataaattactctcttttgtttgtcttgcacggatcttcacaatgtaaaaaaactctactcattcttgggtgttagatcaaaaagaaacaattgactggataactaaattcttggtggtt

SEQ ID NO: 18081 - DNA, 669 bp, Gossypium hirsutum
  Clone ID: AW187932.1
gccttgttgaatgtgtactctcagttgctgttggaacatgagaattggtttattatatggcaaacaggggtggagtcgtttaatgaaatggagagcttggttaggagccaccctcggctgcttttggcaccgtttttgcattcaatgaatatggcatatgcagcagctgaccttgttgtttctcgagctggtgcaatgacttgttctgagatcttggctactgggaaaccttctatattggtaccatcaccaaatgttgcagaagggcatcaacacaaaaatgcttttctaatggcagatgtagcgggttcaagggttataactgaggatgaacttgattcaaccacccttgggttagctatatgcgaaatattaggtactaatttgcctattttttgagtaaaggggggcaaaatgcaatctaactcctattacaagaaccttcatgatatttatcactgttacagggtctaccctaatattggaaaatgcttgaatttggttttatatcatgtgtgcccattgtgacaggggatgagagattactagcagagatgtcccagaaggctctgaatgctgcaaaacctgatgcttctgcagagattgcaaaacacatcctttctttagttaaggagaacagctaaaggaagtttgatggataataatttt

SEQ ID NO: 18082 - DNA, 794 bp, Gossypium hirsutum
  Clone ID: GOSHI-09MAY01-C2187_1
ggaagattatagagaaccaaacagcatgctcacctgccagggaggcctacaggaagcagttggctgagaccttgaacatgaaccgcacccgaatcttggctttcaagaacaagccaccagcacccgtcgaactcttcccttccgagcactcaacggcttcagctcatccgaccaaatcctcaaagcctaggagacacattccccagagctctgagagaacattggatgctcctgatctcgtcgacgatttttacctgaatttattggattggggcagcagcaatgtactagcaatagcactcggaaacactgtgtatctgtgggatgcttcagatagttctacttcagaacttgtcacggttgatgacgaaaatggacccgtaacaagtgtgggttgggctcccgatggtcggcatatagccatcggcttgaacaattccgaagtacaactatgggattcagcttccaaccgacagctacgtactctaagaggatgtcacaggtcaagagtgggttcaatggcatggaacaatcacattctcacaactggaggaatggatggtcagattgttaacaacgatgtgagaattaggtcccatgttgttgaaacctatagagggcatcagcaagaggtttgtgggctgaaatggtcggcttccgggcaacaactagccagtggaggcaatgataatgttgttcacatatgggataggtccatggcatcttcaaattcaccaactcaatggctacacaggttggaggagcatacctcagctgtcaaagccctttgcctg

SEQ ID NO: 18083 - DNA, 1110 bp, Gossypium hirsutum
  Clone ID: GOSHI-09MAY01-C2157_1
cttggaagctgaagagacagaaaaaatgccctgggcatgcagtttttgctctctattggtgccgcacatgcatgctcacaaattcatcctgcagtcaaggtgtaaatatctacaagccttgtttctatcaggaatgcaggaaagccattcgcaaagcatcaaggttcctgtgagctgggaagcattaatcaagttagttcgattgatttatagtcgcaagctgccagatcctccctttggatgtttgtgggacaacatggacaccaaggaaaggctatacgagttgaaaccttatgtagaagtgtactggctggctgagttttggattttggaagatgttcaagaagcttgcttcacaaccattatatcttgcttggattctgatagacaattagctcttgaagttatgaaacttgcagctggtttctctctgtggaagctagcggaggtagcggcagattatatggcccctatttatcataaactccgagactccggtgttcttgaacaacttgatgaactgttaattgaactggttcgtgatgcttctgtcaggctttctcaggggagtggtggtttttccggatgataccacctcatctataatagatgaaggcgattactgaatccgttgttattagggtaagaagtcttcaaactcgttctcatactgccagaatcatctgatgcggcaccagataccggctctctttgcatgtaggatttacaaacactattttgccgatctttaaaactgcataagccccggcaacctggtttgtctagtccggttcctaatagaacaggacggttcaactctgaatttggcaagtagcttttagttgtaattgatatacttttgatatgatggaagtgaatgtgtagtattaaggatgtgattcttgtagtagcgtccaaagtgacccgtttggtgattagctcggcatagtttttggctaaggattgatctgtatttgtctctaaagaattatatcatccatatgtatactttcttatttagatgacatcgtgtggtaaagaaacattaaatgtatactcattgggtattctttaaccattggttctggttatgtttttttgttttgccat

SEQ ID NO: 18084 - DNA, 804 bp, Gossypium hirsutum
  Clone ID: GOSHI-09MAY01-C2167_1
cagaccggatatctctgacaattgtccgagcgatatacaaaaaggtcagttccacggttgcagttggagaagcgtgcttcactttggagttgatatcagttcagataattctttaacagctcgttctactgcataaataatcattttccgtcgcgggggccgccgcgtcgcttgcaagtaaggttttgaaggaaataaataagtcaaaacatcaacgaaaggatgtgcctacctcaagtttgtcttctctggctctatggttcttgggtagttgcctgaactcctctgttaaacggaggcattcctggatattctctggagaaacgaagtccaaggcgactttggtgcatgactggaaaacattgctatgagagaccataaacatgtgttgcacaacatggaacgattatgtatgtattaattaaataccttcaggtttctaacttggtgtggacatccagccggaataaaaacagcctctccgagattttgctcaaacgtccacggttcaactcctaggaatcacgtacacacttgcatgaggaaaaagatgaaaaaacacgtctccttttgtgctccgcagttaggtaaaatgattggtcatgaatcggatggattacctgatcataaacgcaaccatcaagaacgttgagtgactaccacttaaaggagtgtttcgttcaatgcagatggccaaagggtttagcattattacgatttaaaaaacttcttttgagaagtacccagcagtaagcttgtcgatttaattctaaaagtgctcccccatggcttaccttttcaact

SEQ ID NO: 18085 - DNA, 605 bp, Gossypium hirsutum
  unsure (1)..(605): unsure at all n locations
  Clone ID: LIB3582-014-P1-K1-F2
agggattagatctctcaatggaagggaagatgatgagtttttagggaagctgttataaggtctacgaggagtttataagatggaatagtaaaaatgattggcatctattgtaagcaagttcagctgtgtgttccaaaagttgcatacaaataggtcaagttaaactccggggaaaagaaaagaaattctcagctcggatagtctttaaaaattgtccgagcaaatacaaaaaggtcggttccatggttgcagttgtcgaagctggcttcagtttggagttgatatcagttccgataattctttaacagctcgttctactgcataaataatcatcttcctaatctgtttacacgaaaccgtttgcaagtaaggttttgcaggaaataaataagtcgaaacatcaacgaaaggatgtgcctacctcaagtttgtcttctctggctctatggttcttgggtagttgccggaactcctctgttaaacggaggcattcctggatattctctggagaaacaaagtccaaggcgactnttgtgcatgactggaaaacatagctatgagagaccataaacatgtgttccacaacatggaacgatgatggatgt

SEQ ID NO: 18086 - DNA, 850 bp, Gossypium hirsutum
  Clone ID: GOSHI-09MAY01-C2087_1
tccccagtgacctttcagatgatggaggatatgagaaatcagtttatagatctgttatcagacataggctttgtagacaaatcaccgggtgctagcgcttacaaccaatacagccatgatttggagatggtatgtgcagtcctttgtgctgggctttacccaaatgttgtgcaatgcaaaagaagaggaaaacgtacagcattctacactaaagaagtcggaaaagttgacattcatcctgcatctgttaacgcgggggttcatctctttccattgccttatatggtttacagtgaaaaggtcaaaacaaccagcatttttgtccgagactcaacaaatatttctgattacgctttacttctgtttggtggtaatcttattcctagcaaaacgggagagggtattgagatgcttggggggtaccttcatttttctgcgtcgaagagtgtactggacttgatacggaaactgcgtggggaacttgacaagcttttgaacagaaaggttgaagaacctggatttgatatatctgttgaaggaaagggagtagtgtctgctgtggttgagttattgcacagccaaaatgtacggtactgaattcgtattcttttaagttctttatggtaggatggattgctcttcattttgtgagataatataagcaaaatgcaactttttaggggtgatttaatctattcgacattcctgttaggatgttgaaagcttttttcgtagcaaattaaggtaaaaatgggaaggcatgatcctaagtttgtttgacttatcccattgttcaccatttggagacttaatgataccttaggccgcaaccattttaattatttcattt

SEQ ID NO: 18087 - DNA, 871 bp, Gossypium hirsutum
  Clone ID: GOSHI-09MAY01-C2047_1
caataaaaacccagcaaaaagtggttgatcaggacgtaaacaacaagagccatcatcccagtttcaagatgcatgtcctgggatccgacatgtcctaaaggatgtaaactgcaaagccaagccatgggaaatcctcgccattgttggtccaagtggagcagggaaatcttcctggcttgaaatcccttgctgggaaattcaccccacaaagtggttctattttcgtcaaccaaagccccattgataaagctcagttcaggaaaatctctggctatgttacccaaactgacaatctttttcccctccttacagttgaagaaaccctcatgtttagtgccaagttacgtttaaggcttcctcaagctcagttgagtagtagggttaagtccttgatccaggaacttggactagagcatgtagccatggctcgagttggtgatgatcgggttcgtgggatatctggtggtgaaagacgacgggtttctataggtgtagatgtgattcatgatcccaaagtgttgattcttgatgaaccaacttcaggtcttgatagtacgtctgcacttcaaattatcgatatgctcaaggtcatggctgaaaccaggggaagaacgataattctcagtattcaccagcctgggtttcgggttggttaggttatccagttcgatgcttttgatggctgatggctcgattttacatcatggaacagtggaccagcttggtgcaaatttgaggggaatggggttacagcttccgcttcatgtcaatatcgttgaatttgctatcgagtctattgaaaccattcaacagcaacgaaaaggacagcttcaagtgcaaagaacaagggatttcagcccccaccacaaca

SEQ ID NO: 18088 - DNA, 1867 bp, Gossypium hirsutum
  Clone ID: GOSHI-09MAY01-C2077_1
attcatttcctttttactttcccttctccacacgttttaacgcttagcgctagcaaatcttgaagatcccttgaaatttccttccgtttccttaacgtccactgttcttcgcatttgtctacactttagattaagaaaggaagtacgctacgaaaccagatctctgctgattcattttccagttgggcccaacaatggcagaatctaagtcggacactgactttttgaaggaattctacattcctgcgtatatatttaatgatgaaacaaaattttctgatgttcgtgatgcacctaagtttccagtgcttgtgtttatcaactccaaaagtggtggtcaattgggtggcgatcttcttaatacatatagaagtgtcctcaatgagcatcagattttcgatgtgggggaagaggcccctgataaggtgcttcgcaaagtttacaccagattagaaaagctgaaacaagaaaaagatgaatttgccacgaatattcatgagagattaagaataattgttgctggtggtgatgggacagctggctggcttctgggggttgtttgtgatcttaaattgccacatccacctcccattgctacagttcctctgggtaccggaaacaacctgcctttttcatttggctggggaaagaagaatcctgggactgatcggaattctgtgctgtcattcttggaacaagtaatgaaagcaaaggaaatgaaaatagacaattggcatattctcatgaggatgagagctccaaaggaaggtccatgtgatcctattccacctctggaactaccacattctttacatgcatttggtcgagtctcttcaacagatgaactgaacatggaaggttaccatacatttcgtgggggattctggaattacttcagcatgggaatggatgctcaagtatcttatgcttttcactcagagcggaagttgcatcctgaaaaatttaaaaaccagttggttaatcagagcacttatgcaaagcttggctgtacccaggggtggtttgctgcttctgtttttcatccctcttcaaagaatgttgcccagcttgcaaaagtgaaaatcatgaagaaacacggtcaatggcaggacctccacataccacagagcataaggtcgatcatatgcctcaacttgcccagcttttctggtggtctaaatccttggggaacaccaagtggcagaaaaaagaatgaaagagacttgactgcaccttatgtagatgatggccttctggaagttgctggctctagagatgcatggcatgggctcgcgttgctggctccaaagggacatggaactcgcctggcacaggcacaccgaatccgctttgagtttcacaaaggtgctgctgaccatacatatatgaggatcgatggggaaccgtggaagcaaccactgccaaaagatgatgacgcagttgtagttgaaatttcccaccttggacaagtcaacatgctcgcaacccaaaattgccgatcgaaaagtgtgagcgatgtttcctcatcaactagtcatcataatggtgaagaagatgatgattttagtgatgaagatgactctagagctgagccagagttcaggaaatttggtgcagcagacacgttcagaatcccagatgagattgatatttctcaacttagttaaacatctgataattccatttcttgtgttcattacttattcactgtaataatgtttggtgttcatttggtttaaatattgccgtaaaaggttataactcatagttaaattgccgcttttaaaccagaaaccaaatgatcccatcttaatgacgccattagcttcccagtaatttgattttgctttggagaaaaaaagcactt

SEQ ID NO: 18089 - DNA, 387 bp, Gossypium hirsutum
  Clone ID: LIB3166-049-P1-K1-H6
ttcagcaaagcttatcgaatctatcttttcactctttgtttggtgttgtaattgtcaattctgcaactgggagaaagcctttctaagcttcagttcaacagtaaccaaattcgttggcaacaatggcagaatctgagtcggactctgactttttgaaggaattctacattcctgcgtatatatttaatgatgaaacaaaattttctgatcttcgtgatgtacctgagtttccagtgcttgtgtttatcaactccaaaagtggtggtcaattgggtggcgatcttcttaatacatatagaagtgtcctcaatgagcatcagattttcgatgtgggggaagaggcccctgataaggtgcttcgcagagtttacaccagactagaaaagc

SEQ ID NO: 18090 - DNA, 959 bp, Gossypium hirsutum
  Clone ID: GOSHI-09MAY01-C2007_1
caaaaaatcaatatatccaacgaattaaccaattctttttaaaacccactgatatttagttgaagtcaatttcggttttttttttcaattattccgtggattttcttttataaattaattatatttgctcaattaatttttattttccagcaggcaaaattcccagtttggttcaactcgtcccaaaacaaagtttcttttaagactaatccccaaaaatttcgcataaaacacctcttcgttgccgcccccgccatctaatttagctttgaaatcagtgaaaaaaaaaagaaggaaggttctcaatggcgattctttacgcagtggtggctcgaggcacggtggttctagcggagttcagtgccgtaacggggaacaccggtgcggtggcacgacggatcctcgagaaactcccgcaagaagccgattcaagactctgtttatcgcaggatcgatatatctttcatatacttagatcggatggcctcactttcgtctgtatggctaatgatacatttggaaggagagttccccctcccgtccgggaggatattcacatgaggttcatgaaaaattatggtagagtggctcgttatgcaccggcatacgcgatgaatgatgagttctcacgggtatcgcatcaacaaatggagtttttctccagtagtccaagtgcagatactctcaatcgtgttagaggtgaagtgggtgagatacgttcaatcatggtggaaaacattgagaagatactcgagagaggtgacaggattgagcttcttgttgacaaaactgctacaatgcaggatggtgcttttcacttcaagaaacagtctaaacgccttcgtcaagcactttggatgaaaaatgccaaactcttggccatgctaacatgcttgatcgtgcttatactctacctaataattgctgcttgctgtggtggtatcactctaccatcatgc

SEQ ID NO: 18091 - DNA, 690 bp, Gossypium hirsutum
  Clone ID: GOSHI-09MAY01-C2027_1
gatccaaagaaagtaaacccatttgaatctatattaaaaagcaaagaaatttgagtgaaaaaaaaaaaaaggattttgatttagtttttcattttggtccttttgagggattgtttttggttttgattgtttgaaagttcaaaaaatggccatacaagctcagttatattcagataatattggtttcccattatgcagttcctacgattataatggtggcaatggtagtgatggtttcaattcatttcattttggtcctcaatggaaaccacagctacaatttcaagaacagcttcaaaatcatgagattgatgagttcatcaaatcacaggatgagagattgagattattattacaagaacaaagaaaccaacaagtttcaaccatggtgaaaaagcttgaatccaaggcatcttttttagaagaagagatcacaaaggccaaaaacagaacaatggagcttcaaattttaatgaataagctagaaatggagaaccaaacatggcaaagagtggcacaagagaatgaagccatggttgtctctttgaacaacatgctccaacaattacaacagcaattagacaatggtgtcgatgatgcagggtcttgttgtgaagaaacagaggaaaacagaggatttggtgtcgttgaaaggacaatgatggtgtgtagatgttgtgattctcgaaa

SEQ ID NO: 18092 - DNA, 549 bp, Gossypium hirsutum
  Clone ID: GOSHI-09MAY01-C2397_1
atcttctctaggttttattgattaataacaagaggagagggaagaaaaagaaaacagaagaaaaacagagaaaaaaaagaaatctgtaaaaaaaggtttttttttgtgggttttagctgttctgtttagagagatggcgcagattcaagtccaggggcaaaatgggagtgttaacaatggagctggaggagggaataaccagtttgtaccgacgtcgctttatgttggggatctggattcaagtgtgacggaagctcagctttatgattactttgcccacgtgggtccagtgcttacggttcgggtttgcaaggacttgtcaacccggaggtctctgggttatggttatgtcaattatggaaatccacaagatgctgcaagggcatgggaccttctgaacttcactcttctgaatggaaggcctatcaggattatgtattctaatcgagaccctagtcttcgtaaaagtggggctgggaatatttttatcaagaatttagacaagggaattgaccacaaacccttgcatgatacgttttctgcatttgg

SEQ ID NO: 18093 - DNA, 426 bp, Gossypium hirsutum
  unsure (1)..(426): unsure at all n locations
  Clone ID: LIB3585-001-P2-N1-E9
cgccactacgacatacagtcatatggcgacgctgtgtcacgcgtgcatgtagccggtcatgcatatagacgcggtcgacctacgctgttcgtccacgcgtncaggctttatgttggggaatctggattcaagtgtgacggaagctcagctttatgattactttgcccacgtgggtccagtgcttacggctcgggattgcaaggacatgtcaacccggaggactcttggatatggccatgttgattatcgaaattcacaagatgctgccagggccttggaccttctgaacttgactcttattgatggaaagcctatcangattatgttttctaatcgagaccctaaccttaaaaaaagcggtgctgggaatatatatatcaagaatttttacttgggaaccgaccacaatggcttgcattatacaga

SEQ ID NO: 18094 - DNA, 596 bp, Gossypium hirsutum
  Clone ID: GOSHI-09MAY01-C2367_1
cgctttctctctctatcggccatctagggttttttttttttttttgaggtttaatcgctacatcggagggtttctggtgaggataaggtgacgatatattttttttcggggaaaatgaggcctgtttttgtggggaatttcgagttcgagactcggcagtcagaactggagcgtttgttttccaagtatgggaggatcgaccgagttgatatgaaatctggaacttcttctgaaggaaattgagcttctatatgggctcgccaactttctgcaaaaaaaatcttgtctgcttgcctatctactctcctgccacccacagatggcatcatcctgcattttcttcactcgattatgttactcaccatcctcactggctggtggtgaccaatcaaactatcatgtcatgccttgtaccactgactatagaggacaactgaaatctgtcatgccatgccttcaatttctgaactcctgctgtctgaatggcgaaacatgctttgcaataatgtcttcagaccctgaaaacttggatttaactttaatatgccaccatcttgatttagtgcatcatgcaacgcttctacattcttatgtgc

SEQ ID NO: 18095 - DNA, 921 bp, Gossypium hirsutum
  Clone ID: GOSHI-09MAY01-C2247_2
gggctgcaaaaatcagcacctcactgtctctatatttctcctcagatctctctgtttttctttcacccaaataaagcattccctcttttttctctccatttctctctcattttccctcttgccaaacaggtttaaaaaatcaagaaaatgcattctatttgctttcaagctactggagttcctggatcgaattacattttcgattcttgttctcctgctttagctatatccaagccgatcaatctccgtttctgcggacttagaaaggaagccttcggtttctctggtttgactcactcgagttctggccgagttcatttctcgagtcgtggacattctaagaaagtctctgcttccgctgaaagcaacggaagtcctccaaaatcgttcgattatgatttgattatcatcggtgccggcgtcggtggacatggagctgcgttgcatgccgtcgagaagggattgaaaactgctattatcgaaggagatgtggtgggaggaacgtgtgtgaacagaggttgtgttccttcgaaagctctcttggctgtgagtggtaaaatgcgtgaactccagagtgagcatcacatgaaggctttgggtttgcaggtgtctgctgccgggtacgacagacagggagttgctgaccatgcaaataatcttgcttcgaagattcgaagcaatttgactaactcaatgaaggcgcttggagtagacatattgaccggtgttggtaccattgtgggtcctcaaaaagtgaaatatgggaaggttggttttcctgataacatagtaactgcaaaaaatataatcattgccacgggttctgtcccctttgttcccaagggcattgaagttgatgggaagactgttattaccagtgaccatgccctgaaattggagtctgttcctgattggattgcg

SEQ ID NO: 18096 - DNA, 1296 bp, Gossypium hirsutum
  Clone ID: GOSHI-09MAY01-C2247_1
cccacgcgtccgattttaactggttttggtactattgtgggtccccaaaaagtgaaatatgggaaggttggtttcactgacaacgtagtaacccacgcgtccgcaagatatcctcgcggccgcgggttccgtcccctttgttcccaagggcattgaagttgatgggaagactgttattaccagtgaccatgccctgaaattggagtctgttcctgattggattgcgatcgtaggaagtggttatattggtcttgaattcagtgatgtatacactgcacttggaagtgaggtcacctttattgaagctctagatcaacttatgcctggatttgatcctgagatcggtaagctggctcaaagggtgttgatcaaccctaggaaaattgactatcatacaggagtatttgcaacaaagatcactcctgcaaaggatggaaaacctgtcattattgagcttattgatgccaagaccaaggagcccaaggacaccttggaggtagatgcagccttaattgcaaccggaagggcaccattcaccaatggtctcggcttggagaatgttaatgtagtaacacaaaggggtttcgtgcctgttgatgagaggatgcgagtaattgacacaaatggcaatctggttcctcatttgtactgcattggtgatgcaaacggtaaaatgatgcttgctcatgcagcaagtgcacaaggaatttcagtggtggaacaagtgacaggacgagatcatgtgcttaatcaccttagcatccccgcagcctgcttcactcaccctgaaataagtatggttgggttaacagagcctcaagcaagggagaaagcccagaaggaaggatttgaagtaggcgttgccaaaacaagtttcaaggctaacacgaaggcacttgccgaaaatgaaggggagggacttgctaagttgatatacagacccgacaacggcgagatactcggagttcatatatttggcttacatgcagcagacctcatccatgaagcatcaaatgccatagctttaggaacacgtatccaggacataaaattcggccgttcacgcacatccaacactttctgaagttctggacgaactatttaaatcagccacagttaaagctgctgcttcgagccacggtccagtaagtgaaccggttgcagtctaaacccttaatcgacagttttcggattaaaaaaaataggtataaattttttgaagaactttgcttgtattaaggactgtcaagaaacatcatggaggaatttacttataaatctaagatgatcgttgtg

SEQ ID NO: 18097 - DNA, 433 bp, Gossypium hirsutum
  Clone ID: LIB3120-011-Q1-K1-B4
tcgcggactcgtgggcggactcgtgggactaactcaatgaaggcgcttggggtagacattttaactggttttggtactattgtgggtccccaaaaagtgaaatatgggaaggttggtttcactgacaacgtagtaactgcgaaagatatcatcattgctactggttccgtcccttttgttcccaagggcattgaagttgatgggaagactgttattactagtgaccatgccctgaaattggagtttgttcctgattggattgcgatcgtaggaagtggttatattggtcttgaatttagtgatgtatacactgcacttggcagtgaggttacttttattgaagctctagatcaacttatgcccgggtttgatcctgagattagtaagttggcccaaagggtgctgatcaacccaaggaaaattgactaccata

SEQ ID NO: 18098 - DNA, 642 bp, Gossypium hirsutum
  Clone ID: GOSHI-09MAY01-C2217_1
cggacgcgtgggatggaaaccaaattgcacccttttgactcagtagaggataatgaattgcctgccgggggattaaaagatgggcctcgtgggattatgcacactcgctcagatttggaactaaggcctcaatggagaaagagtttacggtcagcggttaaggttaacacaaataagaacttgctggcaatgccagttggtattaaacaaaaagaacatgttgatgatgttgtgaaaaagtttcgtacagagaattttaccattgttttattccattacgatggaaaagtggatggatggtgggatcttgattggtgtgacagagccgttcacatagtggctcattaccaaacacagtggtgcctggctgtgcgctgtctacatccacatattgtgtctacttatgactacatatttctttgggatgaagatttgggggtggagcatttcaatccaggaaggtatctagaaattgtgaagtcagaaggtttagagatttctcagccagctttagacccaaattcaacggaaatacaccacagaatcactatacgctctagaatgaagaagttccataggagagtctatgaactcagaggtaaaacgaggtgttcaaatataagcgaggggccaccatgctct

SEQ ID NO: 18099 - DNA, 987 bp, Gossypium hirsutum
  Clone ID: GOSHI-09MAY01-C2207_1
catatgatgatttagagagcatccatatggcaccatatctggactgtatttctcagggggtttccaccattatggcatcatattccagttggaatggacgtcaacttcatgctgatcatttcctcttgacagaaattctaaaagataaactaggtttcaagggttttgtaatttccgactgggaagcactcgatcgactcactgaacctcgaggctcaaactatcgttattgtatttctactgctgttaatgctggtattgacatggtatagaatgtttcttgaattctacaataaatctttcttttgttcatatcttcattccttgtttctggtatcgtcctggtaatggtgcctctcagatataaacagttcatggatgatttgacgtttctggttgaatctggggaagtactgatgtccaggatagatgacgccgttgaacgaatattgagagtgaaatttgttgccggtcttttcgaatatcccttctccgatagatctctgctggatatagttggcggcaagctacacagggaactagctcgtgaagcagttcgcaaatccttggttctattaaaaaacggaaagaaccctgaaaatccgtttcttccattagaccgaactgctaaaagaattcttgttgctggctcacatgctgacaatctcgggtaccagtgcggtggttggaccagtacctggtttggaggcagtggtagaataacaattggcaccaccatcttggatgccattagagaatctgcaggagacaaaacagaggtgatttatgatgaatgcccctcaacaaacacctttagcaggccggtactcttttgccattgtagttgtaggtgaaccaccttatgccgaaaccttaggcgacaacaaagagcttgtaatcccctttaatgggagtgatataatcagttccgttgctgacaaaatccccacattggcaatcttgatatccggaagacccttggtttta

SEQ ID NO: 18100 - DNA, 682 bp, Gossypium hirsutum
  Clone ID: GOSHI-09MAY01-C3977_1
ctcatatgtaaacatgctcataagagcattacctggttcgatggatgaagaagcagactttgggggtactggaaataaaattgtacgaatagctgagactgagggtcaacaaattgcattgctagcaaatgcttcattgttggcagatgaacttcttccccgtgcagccatgaagctgtccccaagtcaggctagttacaaggatgaccaccgtagaagaacttcagatagacaaaaccgtcaccctgagcaacgagaatggaagaggcgccttgtgggttcagttgagagactaaagaatacattttgtcaacagcatgccctggatctcattttcacagaagagggtgatagccatcttactgcagaaatgtacattaatatggatggtactgcagaggaggtggaatggtttccatctccaatatttcaggaactctttgcaaaactaaacagcattgctagcttggcagcagatatgtttgtaggaagggaaagatttgctacatttgctatggatgcgacttacagaaactgtcatcatatggctttcggaagatcaaagcttttgggatgatattgaggaaggaccaaggcctttaggtccattaggtttacagcagctttatctggatataaaatttgtcatatgctttgcttcccaaggtcggtacctatcaag

SEQ ID NO: 18101 - DNA, 1367 bp, Gossypium hirsutum
  Clone ID: GOSHI-09MAY01-C3967_1
gcccaatttcagatacccttcccgcgcgctttttttgcccactatctgtctcgctctctctctctttcacttcacttccacagccttctcttctccaccaatccaaaaaaaccaaagatgcagtacaaaaacctgggcagatcaggcttaaaggtgagtcaactatcgtatggagcatgggttagtttcggtaaccagctcgatgttaaagaagcaaagtcacttctccagtgttgtaaagacaacggagtcaactttttcgacaacgccgaggtttatgccaatggtcgagccgaggagatcatgggtcaggctattagggaacttgggtggaaacgatcggatatcgtggtttctaccaagatcttttggggtggtcctgggccaaatgataagggtttgtctagaaaacatattgtggaaggaaccaaggcgtccttgaagaggcttgatatggattatgttgatgtgctctattgtcataggccagacacacagactccaattgaggagactgtgagggcaatgaattatgtgattgataagggttgggcattttattgggggacaagtgagtggtctgcacaacagattacggaagcatggggagtagctgagaggttggacctggtaggcccgattgtggagcagccagagtataatctattgactaggcacaaggttgaatccgagtaccttcctctgtatactaactatggtctaggtcttacaacatggagtccgcttgcttctggagtgcttactggaaaatacaacaaaggaaatataccatctgacagtcggtttgctttggaaaatttcaaaaatcttgctaaccgttcactaattgatgatgtgttgaggaaagttaatggactgaagccaattgctgatgaacttggtgtaccgttagctcaacttgcaatcgcatggtgcgctgcaaatcccaacatatcatcggttattactggtgctacaaaggaatctcagattcaagagaacatgaaggcacttgatgtaatcgcattgctgactcctgctgtcatggagaagattgagacagtttttcaaagcaagccaaagcgtccagattcttacaggtagacgccggttcctgttgcttccttagcatgtcattggcatagctgtgttttggagcagatgtgtgagcatcaatttatgtacttggtttggtgttttatagtactttgcaactttagttgtatttggcacccttatcattgtggaaagaagacttgggagatgaaatgaatttggaactggttgtgattgttggtggattgtgaatgtacgtacaactctaatttatttatctcttttctatttccccctctcgtttgtttccc

SEQ ID NO: 18102 - DNA, 728 bp, Gossypium hirsutum
  Clone ID: GOSHI-09MAY01-C3927_1
tctgttaaaataatggcggatcgtttctttcccaacgtattgccggacttcgtacccgaaacaacacaaaacgaacagcaagaaattggagatactctgatcaaacttctatccatgccttactcttctctatctcaacatttcaaacgcaccgctttggacctcaaagaaaccgtaacgctggaaacgtgggggataactttgcaaaaagtctccgactttactctctattgtggcagtctcggtactgctttcttgctcttcaaatcctatcaacttaccaacaacaccaacgacctctccctctgcttagccattgttgatgcttgcaactccgcttccttatcttctcgggatgcaacctttttatgtggtcgagcgggtgtttgtgctcttggtgctgtggccgcaaagtattctggaaatcaagagtcgcttaatcactacttaaccccgtttagagagattaagctctcaagggatctccctgatgaattattgtatggaagagctgggtttctatgggcttgttttttcttgaacaagcatcttggtgaagggactatcccttctacaactacacgtgcagtggttgatgaaattatcaagaatggcagggcgttggggaagaaaggaggaggaagtcctttgatgtttgaatggtatggagaaaagtattggagtgctgcgcatggattggcaggaattatctatgtggtaatggacac

SEQ ID NO: 18103 - DNA, 486 bp, Gossypium hirsutum
  Clone ID: GOSHI-09MAY01-C3857_2
cccacgcgtccgattgtgtttgtgctccaatgaaattggacaggcagatgggcaggaccatgacctattcaagtacaaaaacttttccatatatgacaatgaagattcaaacatcagcagtatctttgaagaagtttgtgattttattgatcacgtcgggcatacaggtggaagagtcttagttcattgctttgaagggaaaagtcggagtgccacagtagtgatcgcatacctgatgctacggaagaacttaactttattagaagcatggaactccctcaagcgagctcatcgtcgggcccaaccaaatgatgggtttgcaaggatactattggatcttgatcggaaactgcatggaaaggtttcaatggaatggcatcagcgaaaaccaatgatgaaagtatgtccaatttgcgggaagaatgctggtttgagcagcagctcacttcaatctttatttgcagaaagcacacattaagctatctt

SEQ ID NO: 18104 - DNA, 751 bp, Gossypium hirsutum
  Clone ID: GOSHI-09MAY01-C3857_1
cccgattccgattcgaccacgcgtacgcacgcgatggctggcatggaaagttctacaaaggtaatggagagccacataggagcttacgtttgacgggcaagcttcgagacttcaataagtttgccaaggttgatgcggaatcaagcaaagagttggagcaatggaatgaaatgcttaaaaatgatgctgttaaactctgccaggataacaatttcaatacaggatttttcgagggtagtgataataacagtgtcgtagatgcttatgaattgaaggttaggcttgagcatattcttgacaggatagcattgatatccgaggccgctaacacagagaaaccatctttaattacgagttgcttgttcattggtggagcactggctgcgagatctgcttacacactgcagcattttggaattactcatatattgtgtttgtgctccaatgaaattggacaggcagattctcaataccatgacctattcgagtacaaaaacttttccgctcatctccatgtagatccgaacctcggcagtatttgtggtcgatataaccacagtggaaatggaaagtggtaacagccattttgtttttatacacaaatcttagactcggcactacggaagtgttgaatgcagaactctctgattctgtgtctcggttttctgctacctgcatggaaattcttctataacatatgcgatgtgccgtattgaaacagatatatgacaatgaagattcaaactcagca

SEQ ID NO: 18105 - DNA, 581 bp, Gossypium hirsutum
  Clone ID: GOSHI-09MAY01-C3847_1
gggggatcaagcttggtatggattttgatgctgttaggcaaggctcttcaattgttcatgtattccccttcaactcagagaaaaaacgaggcggtgttgcaattcgattgccggactctaaagttcatattcactggaaaggggcagctgaaatagttttagctgcatgcactcggtaccttgacactaatggtgaagctgtagcaatggatgaagaaaagatggcctttttcgagaaggcgattgaaactatggcagctggtagtttgcgctgtgttgcaattgcacccagcatcatatgacagtgacaaggttccgactaatgaagaagagcttgctaaatgggccttacctgaggatgaccttgttttactggctgttgatggcataaaggatcctcgtcgtcctagtgtcaaaaaatcagtgcagttatgccaaaaggctggtgtaaaggtacgcatggtcactggtgacaatcttaaaacagctagggcaattgctttagagtgtgggatattatcatcagatgctctcgagtctattctcattgaagggaaagttttccgttcactatctgattc

SEQ ID NO: 18106 - DNA, 807 bp, Gossypium hirsutum
  Clone ID: GOSHI-09MAY01-C3867_1
gtcgtgatggagatcgttatggcagagattatgaagaccgctacggcagagatggtgacagggatgatgactaccgaggtagaagtagaagtgttgatgattatcaatatggcacaagatctaggagctctgatagagaccgtgcttttgatgaggatggtgcttcttctcggggcagtggtgatagagctgatgatcactctcaagatggaaggcggcatgagcggaaacaatctgaacaaaatattggtgctcctcctagttatgaagaagcagtaactgagactcagagtcctgtccgtggcgaaagggttggccaaacttctgtagcagctgctcctggggcttctcctcctcctcctaccaataatcctaaccaagcagcctctgatcttagtaactcagcttctcctccaaatcaacaagcagaggcttttgatgaatttgatccccgtggttcattttcagttgccccaactcctgctcctgttcctgctcctgctgctgttcccactgccacagctgtccctgctactgctgttcccactgcttcgaccaatgctgaaataaacttgttggatgctctgtcagattcttttgccattgtgccagttacacctgaaatccctgctactgaggctgatgcccctgcaaactctggtgctatgcccacctttgctgctaatcagtcggcatctaattttggaaatcagggttttgatgatccatttggtgataatccttttaaagctgtcgcttcaactgactctgccccagctgtacaacaaatttccacttccatgccta

SEQ ID NO: 18107 - DNA, 398 bp, Gossypium hirsutum
  Clone ID: GOSHI-09MAY01-C3817_2
aagcagcttgccttaaccacatttccagagaatcctctgacgttagacgccttgctaatttctacaaagaggtaatttctttagaaaatttctttaattctcttttgttttaaaggtttttagctgtttttatacgttaaaaaacgatcgagcatttatgtttttgctttagatctttgggttcgaggagattgagagcccagatttcggggagttcaaggtaatatggttgaatcttccgggatcttttcccatgcatttaattgaaaggaacccactcacgaaacttcccgaaggtccgtacagttccacggcggccgttgctgaccctagtaatcttcctagaggtcatcatatttgcttcaccgtttccaatttcgattcttttgttcagtctc

SEQ ID NO: 18108 - DNA, 606 bp, Gossypium hirsutum
  Clone ID: GOSHI-09MAY01-C3817_1
cgagagtatctgaaaatggcggtggcgaaagcagcttgccttaaccacatttccagagaatcctctgacattagacgccttgctaatttctacaaagagatctttgggttcgaggagattgagagcccagatttcggggagttcaaggtaatatggttgaatcttccgggatcttttcccatgcatttaattgaaaggaacccactcacgaaacttcccgaaggtccgtacagctccacggcggccgttgctgaccctagtaatcttcctagaggtcatcatatttgcctcaccgtttccaatttcgattcttttgttcagtctctcaaggataaaggaattcagacttttcagaggtccctccccaatgggaaagtcaggcagatcttcttttttgatccagatggtaatggattggaggttgccagttgggaagctccatgattaggatggatgaacatggaaattttgtatgttaaaaaacaattggatgatttagcctaataataaaaagggtaccgaatttctctatcatcctgttgtaagtgtaatgttatatttgcctgagattgtcttcctcctaatagcatcaattggtatttcctg

SEQ ID NO: 18109 - DNA, 547 bp, Gossypium hirsutum
  Clone ID: GOSHI-09MAY01-C3807_1
cccacgcgtccgaacttcactgagaaataaggaaaacatagacggtctttatagaaggcaagcaagctgagggcagaggtgaaaggcatggcgttacagtgtcgtttaagcggggcgacgtttcaatccctaaaattggcgacgattccaatctcatcttcatcgtcgcgcttcatcttccgaacacttcctaaaaccctaaacctcgctttattttcccgccattctgctccaaaagcgcctcccttttctgttctcattagaaccctttcagctccggctgtggctgctgctcccgccgcagaaacctctgatattaaagttgtaaagccccagtggaatgcggccatagatttcaagtggataacggataataaagaagccgttgccgctaatattatgaataggaattccaatgcagatttggagcttgtgcttcaactctatgataaaatgttgaatcttcaaaaagaagttgagcggcttcgaggagaaagggataatgttgccaataagatgaaaggcaaattggagcctgctgagcgtc

SEQ ID NO: 18110 - DNA, 583 bp, Gossypium hirsutum
  Clone ID: GOSHI-09MAY01-C3827_1
atgaaatccaactaaagaaatctggaaaagacaaaagcaaccctcccctccccgacacatcgcatcggttctccacagctgtcttcaactctcccggtcggaaattaaatcactcccacacttaacgacgccattttcatcagagaaatctaaatatctccccccccccaaattcctagggttctctctcgattcccttctttccaattccgtattgttagggatttgacgcgggtccggatcgggtaacgaaccggaagatgatagacaattgcttgggagctcaaagatctagaaagatccagagagctctccgtcattgcaaggtcaccatcctctgcctcgtcctcaccctcgtcgtcctacgtggcactatcggagccggtaaattcgggactccgggccaggacctcgccgagatccgcgaccacctctattcccggaaacgtggcgagccgcatcgcgtcctcgaagaagtccaaacgatcgtccttcagataaccacgacggcgccgacaccaacgccggcaccaataactacaacgagttcgacatcaataagatcttaatcgacgagggaccc

SEQ ID NO: 18111 - DNA, 607 bp, Gossypium hirsutum
  unsure (1)..(607): unsure at all n locations
  Clone ID: LIB3543-038-Q1-K1-D1
ccgtccgcccacgccgtccgcccacgccgtccgccattcctcttgcctcgtacctcaaccgtcgtcgtcttacgtgtgcactattcggagccggttaaattcggggactccggngccaggnacttcgtcgngaatccgggnnaccatcctctattcccggnaaacaagggcgaaccgcgatctgcgtcctcataagaagctccaaacgagcgtcgttcagataaccacgacggcgnccgacaccaacgccggcaccaataactacaacgagttcgacataaataagatcttaatcgacgaggaaccagacatctcgaaacgcgatcccaacgcgccctattcgctcgggcccaaaatctccgattgggacgagcaacgctctagatggctgcaagacaaccctaattacccaaatttcatcggtccaaacaagccgagggttctcttagtcactggttcatctcccaaaccttgtgagaaccctgtcggcgatcattacttattgaaatcgatcaagaacaagatcgattattgtagattacacgggatcgagatattttacaacatgngcgctgttggatgctgaaatggcagggttttgggcgaa

SEQ ID NO: 18112 - DNA, 1010 bp, Gossypium hirsutum
  Clone ID: GOSHI-09MAY01-C3577_1
cccacgcggcgtgaaccagaggaagagaacccaaagaaaatggcactcctttgtgcttcaacctcagtcatcttctcttcttcttcctcttcagagaggccttcctttgcttcattgaaaaggactagtcccagtaaccaaagctcatttcttgggttcttccctgtagtggcattgtccaaaccttcttctgctcggacaacaaccttgtctttctccaaacgggatttcagggtttgctgccgggacctctctcttgtccctgaaaaccaacgttggatgttcgaggaatccgaggctgatggccctgacatttggaacaacacatggtatcccaaagctaaagaccacattaatactgaaaaaacatggtatattgttgatgcagctgacaaaattctgggaagactggcatcaacaattgctgtgcatattcgtggaaagaatttgcccacttatactcctagtgtcgatatgggtgcttttgtgatagtggtaaatgctgaaaaagttgctgtatctgggaagaaaaggacccagaagctctacagaaggcattcaggaagaccaggtggcatgaaagtggaaacgttcaaccagctgcagcagagaattcctgaaagaatcattgagcatgctggtcgtggtatgcttcctaaaggacggcttggtagagcattgtttaaccacctgaaggtttacaagggcgctgatcatccacatgaggctcagaagcctattgagctgcctatacgggacaaaagggtgcagaagcagagataaccgaacttaaagcagggtcaggatattgggagcgagagggagagagagcaagcaatgttgatttccattttctcgtgtttttggggtataagtttcattatgttgttaagtggaatgctaaactcgtgggaatttaatgctttaggtttcagttgctttaatctgtaatcttgtagctggttgatgtttgaaccaactttgatatgttaatcaaatgattcaccctc

SEQ ID NO: 18113 - DNA, 627 bp, Gossypium hirsutum
  Clone ID: LIB3825-010-Q1-K6-G12
gaaagaacacacgatcttcccttccccttccccttcccccatcctttttggacatttggaacaatacatggtatcccaaagctaaatataacaaaaatacagaaaaaaaaacatggtatattgttgatgctacggataaaattctgggaagactggcatcaacaattgctgtgcatattcgtggaaagaatttggccacttatactcctagtgtggatttgggagcctttgtgatagtggtaaatgctgaaaaaagttgttgcatctggaaagaaaaggacacaaaaagctctacaggaggcattcaggaagactaggtggcatgaaagtgaaacattcaaccaactgcagtggataattcctgaaagaattattaagcacgctgttcatggtatgcttcctaaatgaaggcttggtagagcattgtttaaccacctaaaggttttcaagggtccagaccatccacatgatgctcagaagcctattgagctgccaatacgagacaagagggttcagaagcagagataatcaaaatataaagcagggtctggcttgagagtgagcaggtttgttgaaattacggaatggtccgatcaaccatcagtgaaggtggcggtcacagttgat

SEQ ID NO: 18114 - DNA, 407 bp, Gossypium hirsutum
  Clone ID: LIB3145-040-Q1-K1-B6
aagaaaaggacacaaaagctctacaggtggctttcaggaagaccaggtggcatgaaagtggaaacattcaaccagctgcagcagagaattcctgaaagaattattgagcatgctgttcgtggtatgcttcctaaaggaaggcttggtagagcattgtttaaccacctaaaggtttacaagggtccagaccatccacacgatgcccagaagcctattgagctgccaatacgggacaagagggttcagaagcagagataatcaaaatataaagcagggtctggcttgagagtgcgcaggcaatgcttcacatcctgcttgccatttactcatgtttttggtcctccgagtatgagcttctttctttggctctccatgacagcatgctgcacttgtttatattttgattg

SEQ ID NO: 18115 - DNA, 343 bp, Gossypium hirsutum
  Clone ID: LIB3120-054-P1-K1-F4
aaagaaaatggctatcctttgtgcttcaacctcaaccattttctcttcttcagagagaacttcgtttggttccttgaaaaagactattcccagtaaccaaagctcatttcttgggttcttccctgtagcagcattgtccaaacctggctctgttctgccaacaacactgtctttctctaaacgagatttccgggtttgttgccaggacctctctcttgtccttgaaaaccaacgttggatgttcgaagaatccgaggctgatggccctgacatttggaacaacacatggtttcccaaagctaaagatcacataattccagaaaaaacttggtttgttgttgat

SEQ ID NO: 18116 - DNA, 596 bp, Gossypium hirsutum
  Clone ID: GOSHI-09MAY01-C3527_2
cggcaatgaagaggccagtaagcgatttgctgacattaacaacgcttacgaggtgttgtcggatagcgaaaagaggggcatatatgataggtatggtgaggagggcctgaacagcatgctgccagcggaagcagaggaggaatgggggtcaatattcaggacattttcagctcgttttttggcggaggctcggtagaagaggaagagagaatggtgaagggcgatgatgtaagtgttgaattggatgcaacacttgaagatttgtacatgggaggtactcttaaggtttggagggagaaaaacatcttaaaaccagctccaggtaaacgccgctgtaactgcagaaatgaggtctatcataagcaaattggtccagggatgttccaacagatgactgaacaggtttgcgagcagtgccaaaatgtgaaatatgaacgagagggatactttgtcacagttgatattgagaaaggaatgcaagatggacaagaggtggtcttttatgaagatggtgagcctattatagatggagaacctggagatttgaagttccggtttcattcggcaccccatgaccgattcaggagggaaggccc

SEQ ID NO: 18117 - DNA, 1036 bp, Gossypium hirsutum
  Clone ID: GOSHI-09MAY01-C3527_1
ctctcttgaatatcaaccttttttatttttcgtgttgtaaattgtggatctgatacaaatttggagacattgcttaagttctggagagatccaatttctctcctgatctcaaatccatggcgcttcctcgatcgaagctactttttctgctgttcgctttgtcttttgcgatcgtcgccattgcagggtatgcctcaatctctcccgtctccctctctctcaaaaaatgcgttcatatatgttcgtggtggtgtttttgctgcaggaagagttattacgacatattgcaagtgccgaaaggagcatccgatgagcagatcaaaagagcgtatagaaagctggcattgaagtaccatcctgataagaaccccggcaatgaagaggccaataagcgatttgctgacattaacaatgcttacgaggtgttgtcggatagcgaaaagaggggcatatatgataggtatggtgaggagggcctgaagcagcatgctaccagcggaggcagaggaggaatgggggtcaatattcaggacattttcagctcgttttttgacggagggtcggtagaagaggaagagagaattgtgaagggcgatgatgtaatttgttgaattgggtgcaacactagaacatttgttcatgggagggactcttaaggtttggagggagaaaaacatcttaaaaccagctccaggtaaacgccgctgtaactgcagaaatgaggtctatcataagcaaattggtccagggatgttccaacagatgactgaacaggtactgtggcttgtcttttttctttttgattgattttatgtttatactggtatgtatttatctgtttccttggccttttacactgtcaaagtgtcatgtccgattgtgctattatcaggcattattactactaggctccaatctcttttctcaggctgcgagcaatgcaaaatgtgaaaatgaacagaggatctttgcacagtgatatgagaaggatgcagatgacaataggttttaaatattttcttaattgatatttccc

SEQ ID NO: 18118 - DNA, 356 bp, Gossypium hirsutum
  Clone ID: LIB3189-014-P1-K1-H4
caatattcaagacattttcagctcgttttttgtctgagaggtcattctgacgaggaagagagaagggcccaaaacctacaggcctgggtctcactcattccaacactataagatccgtacatcggaggtactcttaaagtttggagggagaaaaacatcttaaaaccagctccaggtaaacgccgctgtaactgcagaaatgaggtctatcataagcaaattggtccagggatgttccaacagatgactgaacaggtttgcgagcagtgccaaaatgtgaaatatgaacgagagggatactttgtcacagttgatattgagaaaggaatgcaagatggacaagaggtggtctttta

SEQ ID NO: 18119 - DNA, 616 bp, Gossypium hirsutum
  Clone ID: GOSHI-09MAY01-C3497_4
cccacgcgtccgcggacgcgtgggtccggactcgtgggtgaagacccaggacattctcgaaagacgtggaggctacctttagccgctaaactacatcgaggacatctgtcatttgaaacaactctcctgattctgaggttaacaaagtttggtaaaaaatcccaagagatccgccagattgtaaatgaaatttttgatggcatctgtaggttccacagttttttgtaaaattcttttatttcggtttgtaataaatagtaactaggatccgagttagcaatttgtaatagtttataggcactgcggactgagaacccaccagataattctcctttccaaacctgaaaatcttcatgctcaatctctgcggggggaatttgaagaattttccgagcaatgtcctcttgaaagctattatcaaccagatccaatgtacattctctattagaagaatcaaaaaaaaaaaaaaaaaaaaaaaaaaaaaaaaaaaaaaaaaaaaaaaaaaaaaaaaaaaaataaaaaaaaaaaaaaaagaaaaaagaaaacaaaaaatgggtacaaatattgctcaaagtgctttttagaaggtatacaaatgtacatataatgttgaaaa

SEQ ID NO: 18120 - DNA, 551 bp, Gossypium hirsutum
  Clone ID: GOSHI-09MAY01-C3497_3
ctcgaggcatcggcacacaaaggaaaagagaaggttattgaggaataatcgagcaaaattcgggttgtagaagtcaagtattgagccaacatccaaaaccatgacccggcttcagcaaattttggtgataatcccgtcctacaaggccagacgctgaactgaaagttttactggtgtacgctgcatcaaagtggatcctgactctcgaaccatatccaccataacgcgtaacagaatagtagacattggccgttgtcgctcctcttgaagacccaggacattctcgaaagacgtggaggctaccttcaacctcagaactgcatcgaggacatctgtcatttgaaacaactctcttgattctgaggttaacaaagtttggtaaaaaaatcccaagagatccgccagattgtaaatgcaatttttgatggcatctgtaggttccacagtttcttgtaaaattcttttatttcagtttgtaataaatagtaactaggatccgagttagcaatttgtaatagtttataggcactgcggactgagaactcaccaga

SEQ ID NO: 18121 - DNA, 1336 bp, Gossypium hirsutum
  Clone ID: GOSHI-09MAY01-C3497_2
ccccgcgtccgccccgcgtccggtttttgatttttgcttttcctgtgaaaactttcatcaatctggtttcttgaccaaattcctgccgaggcagaagcgtggctctccagatctgctcctcccagataagtattttctcctttctcaagcgcattctttgctaatctgtgagcatccatgttctccgatctatgggtatactgaaaaatgagttcttgaaaatcggctttcttgttctgaatatctctaataatggctccgatgactgatttatctgtggaattctcctggcattttttattactgtttttgaatcccccataagaattaccgactggatccttagtaaaacccctagctttgcaccgtctaaacatgcatatgcctctgccgcaaaagaagaaggaacgtttctatggataaccgtctttaaaaccttaacatttcccctcagatcccgtcctacaaggccagacgctgaactgaaagttttgctgtcgtacgctgcatcaaagtggatcctgactctcgaaccatatccaccataacgcgtaacagaatagtagacattggcccttgtcgctcctcttgaagacccaggacattctcgaaagacgtggaggctacctttagccgctaaactacatcgaggacatctgtcatttgaaacaactctcctgattctgaggttaacaaagtttggtaaaaaatcccaagagatccgccagattgtaaatgcaatttttgatggcatctgtaggttccacagttttttgtaaaattcttttatttcggtttgtaataaatagtaactaggatccgagttagcaatttgtaatagtttataggcactgcggactgagaactcaccagataattctcctttccaaacttgaaaatcttcatgctcaatctctgcaaggggaatttgaagaattttccgagcaatatcctcttgaaagctattatcccatatgggtgtccgatctcctctgtctactctccagcacatccctctttggagaagaccctttgcagcccatatgctttttccaggtaaaagaaggaataaagagctagagaatactaccaatagccgattgacttaatgaagagatccctgagagacgtggaagatcaaacaatagaaataaaaaaaaataaatagaaaaaccaagaaaaaaatcacagaaacctaagactcgtgccaaagacggcagacagaaccgtgctagggtagcagaccttttagcgtttcagtaattaaaattgaatgtgtatgtaataaggtataaattataatatttgataaatcttgaacacatcgatattaagt

SEQ ID NO: 18122 - DNA, 799 bp, Gossypium hirsutum
  Clone ID: GOSHI-09MAY01-C3497_1
cgcaaagatagattccaacccatctctataaaatctactccaatcatcatttttgtctcacataagtcattatgtcctgaacggccacagaaaaacataacagcgttagacgttcatacttaaacttgacatatgaacatactctgtttgacataacttgcttctttcttcttaatggcttgctaacgtcaatctgcactctctcatataattgcgattttccttgcccagaattgaaccatcatactctaagaaagctccaataaagttccccctagcttcactagattctcagagaataaaccaattggaacatcgtggatttgtacccaaaccgaaacataaactaaaggtattttaagcggatcttcacctcttttcaatttgctcagaattaataaatgattgttaaacgtccacggaagaccctttaaaactctccatatccatgctatgaaaaaacttgaaaagatacattttctcccccaaatcttggatctgtaccccacagatggaatgccataaatttgctaaagtactcattatagccgaaaaattaacgatactagctgttaagaaacaccccacaagctggtaatctcccacaactgtttgcgtccttgaatcagcctggatctgtaaccccctttcttcttcttcatttttggtaactgtgctaattcaatctccatgattgcaggaataaagagctagagaatactaccaatagccgattgacttaatgaagagatccttgagacccgtggaagatcaaacaatagaaataaaaacccaaacc

SEQ ID NO: 18123 - DNA, 568 bp, Gossypium hirsutum
  Clone ID: GOSHI-09MAY01-C3457_7
ccggtcgaccccgcgttcgccccgcgtccgccccgcgtccgccccgcgtccgccccgcgtccggatcaattaaagtggagtttcagtggggcctttgaggcaaggcaatcccttatcgtcagaggtcttgtccctatgctcgctgatccacgacatcctgcagagtctacaagcgcatcaaatgagtcagttttgaaggttgcacttgaccacgggaaggctgccggagttattaagtcacatgaccgagtcgtagtttgccagaaggtcggagatgcttctgttgtgaagattatcgagctcgaagattaaacttatgttagtttctctcctttccgaatctgatttttgaaagcgatgaatgactttatgtagcacctgtgaggtattggctccaggttttggtggatttgaatttgtgttaagaatgcatacactattttaagtctcataaaagggaaatatggcccataatcccataattagctaatgggaaaaggcaaaagaacaaccccattttttccttgattcagtggtaaataaagatattggatccggtagagtactg

SEQ ID NO: 18124 - DNA, 598 bp, Gossypium hirsutum
  Clone ID: GOSHI-09MAY01-C3457_6
caggtttccttccttaattaaaaaaaaaaaagttattctttggtttctaggtttttaatttctacttaccagggcaaaagcatatatataaatatataaacccttcgttctcttaacgctaaagctcagaggtttctcaacaagggaacctaattgattcccctgtttcttttttggtttaaacggggaggaaaaaaaatgcactcgagtcatctgcttctggaagagccaatcaggatggcttcaatcctggagccatcaaaggctacttttttcccggcaatgacgaagatagtgggaactttaggtccaaggtctcgatccggtgaggttctttctggttgccttacggctggaatgtctgtggctaggttcgatttctcgtggcatgacccggagtatcatcaggaaacattagagaatctaaaggcagccgttaaactcactaaaaagctttgtgcggttatggcggatactgtgggccctgagttgcaggttgttaataaatgtgagaaagcgacttcacttgaggcacatgctacccgtattttcgacacccgatgaaggacaggaggcatcttctaacttattgcctatc

SEQ ID NO: 18125 - DNA, 479 bp, Gossypium hirsutum
  Clone ID: GOSHI-09MAY01-C3457_5
agccttccttccacccttccgctacacgttcagggaatagagagaatcggctctgaaggtggcgctagaccatgtgacgagtagcggattatgaagtcacatcatcgattcgctgtttgccagaaggtccgagatgctcttgtggtcatgatatcgagatcgaagattaaactactgatactactctttgctttgggattatcattggaatctgatctgtgaaagcgatgaatgactatatatagcacctgtggggtattggctccaggttttggaggattcgaaattgtgctaagagtacctcataaaaattatgaatgccatggctaatatggcccataatcccatatttagcttatggaagaacaagccttttttctcttgaattagtggtaaactgaaatgcaacgcacgctggaatctgtattctactattattcccatgtaatttcgcatcattagaccatatctataaatat

SEQ ID NO: 18126 - DNA, 433 bp, Gossypium hirsutum
  Clone ID: GOSHI-09MAY01-C3457_4
ggaaaaaacaatggttgtggtggaccggcaccaggtttccagtacttccccgaaaagagaaagttttactctcaagaacaaaagcatattctttgatttcaaagcgtttaatttttaagggaaaataatcaaggctcttcattagaggattctctgtcaaaggaaaatcgaactgtttttctttctgttttaatcggcgaaaaagaaaatgcattcgactcatctgttactcgaagagccaatcaggatggcttcaatcctggagccatcgaaggctagcttttttccggcaatgacgaagatagtgggaactttaagtccaaaatctcgatccattgaagtcatttccggttgccttaaagctggaatgtctgtggctaggttcgatttctcgtggcatgatcccgcgtatcatcaggaaactttagaaaat

SEQ ID NO: 18127 - DNA, 1061 bp, Gossypium hirsutum
  Clone ID: GOSHI-09MAY01-C3457_2
cccacgcgtccgctcgagctttgttgagactttaaactgagctttgctgaattttcgtgatcgtcgagaaagaaaattatgggaaggaaattcttcgttggcggcaattggaaatgcaatggaaccactgaggaagtgaataagattgtgagtactttgaatgctggagaggtgccttctcaggatgttgttgaggttgtggttagccctccatttgtgttccttcctttggtcaaaacttcactgagacccgatttccatgtcgctgcacaaaattgttgggtcaagaaaggaggtgctttcactggtgaagttagtgcagagatgcttgtcaatttgagcattccttgggttattattggtcattctgagaggagacttattttgaaggagtcaaatgagttcgttgcggataaggttgcttatgcacttgctcaaggcttgaaggtgatagcttgtattggggaaacacttgagcaacgtgaagcaggatctactgtggcggttgttgctgaacaaactaaagcaattgcagcaaaaatatcaaactggactgatgtcgttttggcatatgagcctgtgtgggctattggaaccgggaaggttgctactccagctcaagctcaggaagtacattttgagttgaggaaatggcttcaggctaatgttagtcccgaagttgctgcatcaacccggattatttatggagggtccgtcactgctgcaaactgcaaggaactagcagctcagcctgatgttgatggtttcttggttggtggagcttcacttaagccggagttcattgatatcataaaatcagctgaggtgaagaagaatgcctaaggttttcggttggaagctttgagagtacttgcagtagctgttgcttgggaatggaaggtttaggatctgttccataataagagttttataaagaaaattaaatactaattttcaaggaataattcacgcttttattcacaccagtaccttaaactggattttctgtactattaacaattttagtgtttcccgagaaatgctttttcatttcaatttac

SEQ ID NO: 18128 - DNA, 1884 bp, Gossypium hirsutum
  Clone ID: GOSHI-09MAY01-C3457_1
ctaaaaaaaaaaaaatttcactcgggacaaaagcatattctttggtttcacagcgtttaggttttacggaagccaaagaataaaaaaaaaatcccttcgtcctcttaacgctaaagctctttggttaaacgattctctgtcaaaagaagggaaatcgattttttcttttgttgtaatcggcgaaaaagatgcattcgactcatctgctactcgaagagccaatcaggatggcttcaatcctggagccatcgaaggctagcttttttccggcaatgacgaagatagtgggaactttaggtccaaaatctcgatccgtggaagttatttccggttgccttaaagctggaatgtctgtggctaggttcgatttctcgtggcatgatccggagtatcatcaggaaactttagaaaatttgaaggctgccgttaaactcactaagaagctttgtgcggttatgttggatactgtgggtgctgagatgcaggttgttaataaaagtgagaaagccatctcacttgaggcagatgctaccgttgttttgacaccggatgcaggacaggaggcctcttcagaattattgccaatcaactttgatggactgtcgaaggcagtgaagaagggagacactattttcattggtcagtacctgtttactgggagtgaaaccacgtctgtatggctggaggttagtgaggtaaaaggagatgatgtggtttgtgtgattaagaactctgcaacattggctgggtcattgttcactttgcatggctctcaaattcgtattggtttgcctaccctcactgataaagacaaggaggttataagtacttggggagttcaaaacaaaattgacttcctctcactatcatacacacgacatgcagaagatgttcgccaagctcgtgagttcctttcaaagttgggtgacctctatcagactcaaatatttgcaaagattgagaacatagagggattaaaccattttgatgagattcttcaggaagcagatggtatcattctttcccgtggaaatttgggcattgatctcccacctgagaaggtgttcttatttcaaaaagctgctctttataagtgtaacatggctggaaagcctgcagttgtcactcgtgttgtggacagtatgactgacaacttgaggccaactcgtgctgaggcaactgatgttgccaatgctgttcttgatggaagtgatgcgattcttcttggtgctgagaccttgcgtggattataccccgttgaaaccatttctactgttggcaaaatttgtgctgaggcagagaaggtattcaaccaggacatgtatttcaagaagactgtcaaatatgttggagagccaatgacccacttggaatccattgcttcctctgcggtacgagcagcaattaaggtgaaggcatcagttattatatgtttcacatcctcagggagagctgctagattgattgcaaagtacaggccaacgatgccagttctctcagttgtcatccctcgccttaagacgaatcaattaaagtggagcttcagtggggcctttgaggcaaggcaatcccttatcgtcagaggtcttttccctatgctcgctgatccacgacatcctgcagagtctacaagcgcatcaaatgagtcagttttgaaggttgcacttgaccacgggaaggctgccggagttattaagtcacatgatcgagtcgttgtttgccagaacgtcggggatgcttctgtggtgaagattatagagctcgaagattaaactaatgttactttctctgctttgggattatttttggaatctgatttgtgaaagcgatgaatgactatatatagcacctgtggggtattggctccacgctttggtggatttg

SEQ ID NO: 18129 - DNA, 468 bp, Gossypium hirsutum
  Clone ID: uC-gsflmaxxa096c06b1
cggactcttgggcggacgcgcgggtcttaagggacagggatcatttttagacatttgtggattctcatgccaacaggaaatatctgaacctgcttgttcatttcgtgattaaatactgcgagaaaagaaaatgcgtccgactgatcatgttactcgaagagccaatcaggatggctacaatcctggagccatcgaaggctagctaatttccgcctttgacgaagatagtgggaactttaagtccaaaatctcgatccattgaagtcatttccggatgccttaaagctggaatgtctgtggctaggatcgattcctcatggcatgatccggagtatcatcaggaaacataagaaaatttgaaggctgccgttaagctcactaagaagctatgtgcggatatgttggatactgcgggagctgagatgcacgaagatctttacattgagaaagctatctcacttgaggcag

SEQ ID NO: 18130 - DNA, 560 bp, Gossypium hirsutum
  unsure (1)..(560): unsure at all n locations
  Clone ID: uC-gsflmaxxa003d03b1
ttctcgcgtccggctctttacaagtgtaacatggctggaaagcctgcagtcgtcactcgtgttgtggacagtatgactgacaacttgaggccaactcgtgctgaggcaactgatgttgccaatgctgttcttgatggaagtgatgcgattcttctcggtgctgagaccttgcgtggattataccccgttgaaaccatttctactgttggcaaaatttgtgctgaggcagagaaggtattcaaccaggacatgtatttcaagaagactgtcaaatatgttggagagccaatgacccacttggaatccattgcttcctctgcggtacgagcagcaattaaggtgaagtacattttgagttgaggaaatggctttaggctaatgttagtcccgaagttgctgcatcatacccgattatttatggaggggtncgtcactgctgcaaactgcaaggaactagcaactcagcctgatgttgatggttttttggtcggtggagctttacttaagccggagtcattgatatcataaaatctgctgaggtgaagagaatgcctaaggtt

SEQ ID NO: 18131 - DNA, 393 bp, Gossypium hirsutum
  Clone ID: LIB3149-031-Q1-K1-F12
aaaaaattacactaagaacaaaagcatattctttggtttcacagcgtttaggttttacggaagccaaagaataaaaaaaaaatcccttcgtcctcttaacgctaaagctcggttaaacgattttcagtcaaaaaaagggaaatcgattttttttttttgttgtaatcggcgaaaaagatgcattcgactcatctgctactcgaagagccaatcaggattttggagaagattaagaaattgctttcagtcaaagaactaaattctataaaagaagacaaaatgacaaaagaaaaaaaaaagaaaaagagtgtgttttggaacatatattttgggcttttttggaattaagtaggttcaaatacagttgttaagggagacaaaagcttttagatt

SEQ ID NO: 18132 - DNA, 428 bp, Gossypium hirsutum
  Clone ID: LIB3147-035-Q1-K1-C5
cccactcgttctcgtacgcatgtacagattcttgttatgagcctgtatcgtctattggggccgggaagggtgatactccacctcaaactattgaagtacattttgagttgaggaaatggcttcaggctaatgttagtcccgaagttgctgaatcaacccctattatctatggagggtccgtcactgctgctaactgcgaggaactatcatctcatcctgacacccatgaataattggatgctggagcttaacttaagccggagttcattgatatcataaaatcagctgaagtgaagaagaatgcctaacgttttcggatggaagctttgatagtacttacaatacctgctgcttgggaatggaaagtttaagatctgttccataataagagttttataaagaaaattaaatactaattttcaaggaat

SEQ ID NO: 18133 - DNA, 393 bp, Gossypium hirsutum
  Clone ID: LIB3166-022-P1-K1-E1
agccttccgctggtcaaacctttgtgagacctttttcttaacctcgcttgattttccgggtcgggggggaaggaaatggttgggagggaattcctcctccggcggaatttggaattccattggaccccctgaggaagtgattaaattggggagtctttgaatgctggagagggcccttctccggatgttgttgagagtgtggttagccctccatttttgttccttcctttggtaaaaacttcactgagacctgagttccaagtcgctgcacaaaattgttgggtcaagaaaggaggtgctttcactggtgaagttagtgcggagatgcttgtcaatttgagcattccttgggttattattggtcattctgagaggagacttattttgatggag

SEQ ID NO: 18134 - DNA, 370 bp, Gossypium hirsutum
  unsure (1)..(370): unsure at all n locations
  Clone ID: LIB3145-009-Q1-K1-E10
aattaacccnaattatttatcttacctcctttttttctgcaaactacaacgaaccccgcccttattttgatgttgatgctctcttcattaatgtaactacacttaatccgaagttcattgatatcataaaatcacctgaaatgaacaagaatgcctaatgttatcgatttgaagctatcacagtacttacattagctgttccttgccaatagaaggtttattatctgttccataataaaacttttataaagaaaattaaatactaattttcaaagaataattcacgcttttattcacaccaataccttaaactggattatctgtactattaacaattttaatgtttccccagaaatgcatttttcatttc

SEQ ID NO: 18135 - DNA, 301 bp, Gossypium hirsutum
  Clone ID: uC-gsronu33B018a04b1
atcttttaaagcaaaggaggaggtaaaggatgagaccccggaggtgcagacagaaacagttacagaggagttcattgatatcataaaatcagctgaggtgaagaagaatgcctaaggttttcggttggaagctttgagagtacttgcagtagctgatgcttgggaatggaaggtttaggatctgttccataataagagttttataaagaaaattaaatactaattttcaaggaataattcacgcctttattcacaccagtaccttaaactggattttctgtactattaacaattttagtgt

SEQ ID NO: 18136 - DNA, 246 bp, Gossypium hirsutum
  Clone ID: LIB3120-053-P1-K1-F8
cccacgcgtccgatatttaactatagcattcactactacattttcttctagctctggagggataattatggggaggaaattcttcgttggcggcaattggaaatgcaatggaaccactgaggaagtgaataagattgtgagtactttgaatgctggagaggtgccttctcaggatgttgttgaggttgtggttagccctgcatttgcgttccttcctttggtcaaaactttactgatacccgattt

SEQ ID NO: 18137 - DNA, 726 bp, Gossypium hirsutum
  Clone ID: GOSHI-09MAY01-C3417_1
cccacgcgtccggcaattctcagtcccacattcaaagttcgggagtttcaggtcaatgagatcgtccctttcccaatttcactatcatggaaaggatctgttccagatgctcagatgggagaagcagagcaagagcaacttgtttttccaaagggaaatccaataccaagtgtcaaggcttgtgacattccataaaacgagtaccttcagtgttgatgttcaatattctgatgtgagtgatttgcaggccccggcaaagatcagtacatacacgattggtcctttcccaacattaagaagtgaaaaaccaaaattgaaggtcaaagttcgtttgaatttgcatggaattgtgtctgtggactcagctacactcttggaagaggaagaagttgaagttccagtttcaaaagagccggcaaaagaagatgctaagatggagacagatgaaaagcctaatgatacttctgcccctggtgccaacgagacagatgttaatatgcaagatgccaagggtacagccgaggcagctggggtcgaaaatggtgttcctcagtctggagacaagcctgtgcagatggagactgataccaaagttgaggctcccaagaagaaggtgaagaaaacaaatgtcccggtggcagagttggtctacggtgcaatggtgtctggtgaccttcaaaagcagttgagaaggagtttgaatggctttcaagatcggttatggaa

SEQ ID NO: 18138 - DNA, 653 bp, Gossypium hirsutum
  Clone ID: GOSHI-09MAY01-C3437_1
cttcggtatcccctcttcttccaagccaacaagcgtaaaggttgaatcttttcccccatttctccactcctaaagtcagggtttcgagcaacaatagaacaaaaatggggttctcaatgcagccttatggcatacaatccatgctgaaggaaggtcacaagcatctctcaggtctcgacgaagctgttctcaaaaacattgatgcttgcaagcaactatccaccatcacccgcacttccctcggccccgaaggcatgaataagatggtaattaatcatttagacaagctctttgttaccaatgatgctgctactattgtcaatgagctcgaggttcaacatcctgcggccaagattttagttctagctggtaaggctcagcaagaggagatcggagatggcgctaacttgacgatttcttttgccggtgagcttctccaaaatgcagaggagcttattaggatgggcttgcaccccagtgagatcatcagtggatatactaaatccattagcaaggcaattgaggtgttgggggaacttgtggagaaagggtctgaaactatggatgttaggaataaagagcaagttgttactcgaatgaaagctgctgttgctggaaacacatggacaggagacatattatgtcccttatag

SEQ ID NO: 18139 - DNA, 729 bp, Gossypium hirsutum
  Clone ID: GOSHI-09MAY01-C3427_1
aaggctcaaactgaagtggcagtatcagagttgacttcttctgtcaactctctgagtttgtcaactccatgggctggggttgtctctagtttagaacccaaagtttctagagtaagtaaaaaagagcagatatttctgagtcagctattgtgaaacccgaaagttctttaatttcagtgagtaaaaagagtccattacatgatctgttggcagaagaagttttagcaaaatctagggaaagagatgcagatgttcctggcactatttctacatcttctgcccatgttaccactacaaatgtcgaacccactgataatgacaattttattgaggctaaagaaactaaaaggagtcggaaaaagtctgccaaagctaagggcgcgggagcaaaagtttccggtcctcctagtactgctgatgcggttcttgttagtgcaagtactgttgagaaaggcaaaagttctcgtccagcacaggcggagatggaattattgccttcaattccctcaggtccttctttgggagattttgtaccttggaaagaggagcaagtaaacccttcccctgctccagcttggtctgctgattctaagaaactccctaaacccacatcattgcgggacatccaaaaggagcagaagaggaattcctctgtccagccaacaaatccaataatgactcctcataaatcccaatcaagtcagtcaacccctgctggtgtttcatcat

SEQ ID NO: 18140 - DNA, 661 bp, Gossypium hirsutum
  Clone ID: GOSHI-09MAY01-C3767_1
gcataatctccgattttgtgtgtgtgtgtgtttgtgtatgtatatatgtatatatatatagatatcaccagcttttgaaagctgctccaggactttatataaaggtgggtgtggggcttttggggatttacaggtacagaattggtgagactaattacttattattagtgtaattagtttgtgtttagtgggactaagttatgggtaggcagccttgctgtgacaaactgggtgtgaaaaaagggccatggactgccgaggaagacaagaaactcatcaactttatcctcaccaatggccagtgttgctggcgtgctgttcctaagcttgccggcctccgccgctgcggtaagagctgccgccttcggtggactaattaccttcggcctgacttgaagagaggccttctttctgagaccgaagaacagttggttattgaccttcatgcccgtcttggaaataggtggtcgaagattgcagccaggttgccaggcagaactgataatgagatcaagaatcactggaacacccatatcaagaaaaagcttattaaaatgggaatcgatcccgttactcacgaacccttgaacaaagaagctaggacccaagaaagttcatcccatgctcatcattctgcagataaccataccacagaaaacga

SEQ ID NO: 18141 - DNA, 839 bp, Gossypium hirsutum
  Clone ID: GOSHI-09MAY01-C3627_1
atgaaacctaaactatcagtcccattgattgcttgtcgcaaacgcagctcgattgctgccaaatcgtcaacatcatcttcagggcaagagaaaaaaggcagctgctagcttcattgatgaacgagaaaccagctctaggttggaagcagcatgataaatccattgaggaaagtcctgtagcaaagaagagaacaagagaaagttcggcctcgggtttaagaaaagcaagcaaaaatgcaaaggctcggagtaacacaaacacaaacaagaattcaggtaccaatgccaatgctgccatttcaagcaaaggtggatcctcaaatgataactcggaatccaagggtggtgagaaggagaagagcaacagcaaaactgcgagttcaaagaagccaagtgcagcgaatttcttgaatagaatgaggagctctttatccggtaatgagccattgacagagacactgaagggtgtgattagttctgataagggtaaaggaggaggagatgcaggtgagcataagaaaaacagcactagcagcaaaggtgatcaacagaaggatcgaactccgactccacggacacgttctggcggaaaaagaacgagtcctgcatagaggagtacaggaagaccgcctaaaagagtgcctgccacccaatcagctcctcctggtaagcggggaagggaagctgttgagaaccattcaggtggtggacaggcaaagaagcgttcaagaaaatgaaggacagtttgagtattcctttttagtattgtaagattttttttccagcatcataggcagttaaaataattttgttcaatgaatttatatgtgtccaccggc

SEQ ID NO: 18142 - DNA, 904 bp, Gossypium hirsutum
  Clone ID: GOSHI-09MAY01-C3187_1
ccctggaagtttcttcttatgcgaaaaccacccatttccaccaccttctaacaacaattcaggcagtggtggtgccaatggaagcgaagacaacaaccaacatgaaaagcaacctctgcaagactccaccaacaacaagagagggggcgaatcggatcatgaaatgcatatatggaccgaaagagagaggaggaagaagatgaggaacatgttctccaacctccatgccttgcttcctcatctatctcctaaggctgacaaatcgaccatagtcgacgaagcagtgaagcacatacaaaccctagagaaaaccctccaaaagctgcaaaaacagaagctagacagactccaagaaggactcaatcccattgatttgggtcaccaggatacaaccagggaagcattcatggcggatcaagtattatctggaaacgatgctgcagccaaggatttaataataaaatccaattctgttatggtcgctcaaccccgtttgcagtttcaaacatggacctcctccaacgtggtgttgaacatctgcggcaaggaacacagataagcgtgtgttcccccaagaaactagggttgtgcaccactgtttgctgcatcttggagaagcaccacttggaggtcatatctgcccatgtgtcctcccaatctaatcgttccatcttcatgattcaagctcatgtgggaagtagtggagcttataatcatcaggtgtcagaagtggacgaaatattcaaacaagctgcagctgagatcatgttctgcctcacctcttgattatatgccctcttttacatgcatttatagataaatatctcacagtttttctgtaaaagctcccatatatgtatgcatgtatgtatatatatgagtaaaaagctctttttttctgcat

SEQ ID NO: 18143 - DNA, 652 bp, Gossypium hirsutum
  unsure (1)..(652): unsure at all n locations
  Clone ID: LIB3582-059-P1-K1-F2
tcgnaaaaaggaacaaaatccctnaaacataagcgtttcnntcctcaaaccgtgtagnatagctaaaaccccttnntctttccagttcccaatttaaaccccctaaattcctaatnnagcaaaatctaaacnnaacaaagcaatggtagagggggncaggnnagaagaaaagaagaaaatttcaatctgggatttgccagatgtgccaatgggtcaacttccgccgcatcttgaactccaacgaagtcgtgtttcatgcaataaggacgcccctatccatatattgaataaaagagcaattgaagcatcagataaggaaaggccaactccggaccttaggaccggtgatatcgtagagatcaaattggaagttccagaaaatagacggaggctttccgtgtacaaaggtatagtcatatcaaaacaaaataccggtatccacaccaccattcgaattcggagaatcattgctggcattggagttgagattgtattccctgtcttcctacaatggcaattgaaaaagttctcattgcaaacaacacatcaataatccaagatgaagttcttgctcataggttgggcctcgttccaatccgtgttgacccaaggctttttgattatctttcagaaaatgatcagccaaatgaaa

SEQ ID NO: 18144 - DNA, 510 bp, Gossypium hirsutum
  unsure (1)..(510): unsure at all n locations
  Clone ID: LIB3583-016-P1-K1-B11
tgctactaaagcantaggtttttgaaactccttttgtgctttctctctgtcaaaaaagaacagaatccctaaacataagcgtttctcctcaaccgtgtagacaactaaaacccctttcttttcagttcccatttaaaccctaaattcctaacagcaaaatctaagcaacaaagcaatggcagagggggtaggagaagaaaagaagaaattttcaatctgggatttgccagatgtgccaatgggtcaacttccaccgtatcttgaactccaacgaagtcgtgtttcatgcaataaagacgcccctatccatattgagagtattcaatattctggcgcttatgcatcgatgggaattgataatagttcacaacttgaccgattctctaacaactttagagttgaagtggttcgactcaatgaagatgacatggagtttgatatgatcggtattgatgcagctattgccaattcattcaggaggatccttatagctgagcttcctacaatggc

SEQ ID NO: 18145 - DNA, 422 bp, Gossypium hirsutum
  Clone ID: LIB3272-029-P1-K1-E8
aaaatctccaactttccctttgtcaaaaaagacttctgttctgttcggtatttgcagggaaaaaaaaagataatgtgtttgactgagagtattcaatattctggcgcttatgcatcgatgggaattgataatagttcacgacttgatcgattctctaacaactttagagttgaagtggttcgactcaatgaagatgacatggagtttgatatgatcgttattgatgcagctattgccaattcattcaggaggatccttatagctgatcttcctacaatggcaattgaaaaagttctcattgcaaacaaaacatcaataatccaagatgaagttcttgctcataggttgggcctcgttccaatccgtgttgacccaaggctttttgattatctttcagaaaatgatcagccaaatgaaaagag

SEQ ID NO: 18146 - DNA, 1223 bp, Gossypium hirsutum
  Clone ID: GOSHI-09MAY01-C3107_1
ggaaagcgatgctttgtggtttcatcaaacggaacgaccgggagcaggcaaagaaaccgcttcattttggattatttcccattgggcttaccaactggagccaaaaacaaagatggcttgggttcaacttaaacatattggattctggaatggattttccacgaggtggatcaaacttactatgtgaatgagatgggttggtggaatggatactctctctatgattggaccgctgagtttagattctattgggtgaactcgaagctcgaagagagcggtgcttgcaatgcaccttcacattatcataaatttagggtcagtgctgtgccagtgtataattgtgattcgagtggcctatattcagcatacactggagttgtgccatatgctaaggatggattactgttttataacaagcatgcactctatcaaactggcaatacacctctagcattagtctggaaggatgaaaactgtagtcaatatgttattgacactgatggtaaaggagagattccaagccaacaacaggtagttttggagctgcaagatgatagaaaactggtaacatcagatgaccctcccgtgctgtttggctgcttagacggggatatggtggaaaagtcagggctgcatacagggaaccttttacggcttgctattggtgatggaggattgagttttgcagatgggaagcttgagaaggctgatttgatttatcttggcaagtccaaccgggcacgtgcttttgcagatagttactcaaaggttttgttccagttcatggttcgacattctcctctaaagatagatgatcttctagcatcaattaactccgcaaatgatcaagaaaagacaccaagtgacatcgagatggttggttgactatatatatatatattaattatacgaggttcgatatttgtgttctgtgcgggccaagtttaaaacccattgtggagtagagggaaactgaagatgccttgttgggttactaccagatgaattgcatgcacaatgcaggagatagatgtttttttggcataaattaggtatgtaattgaacttggctcagccaagggtgtggagggtttcaatagagatcttatgttgaaagccaaattgttgtctttttgtgtgtaggaaactattgagagagattgtatcatacatgagtgactgtaatttactgttccagcataccagagtatctatgcctgact

SEQ ID NO: 18147 - DNA, 736 bp, Gossypium hirsutum
  Clone ID: GOSHI-09MAY01-C3097_1
accgaccaacaccaacaccatcatcatcaacaacatcaccaccatcaaatcccagaaaacatccatcatcacactgctttatctggcgttggattcaccacacctggtgtattctctgggtttcgcgttccagcacgaattcagggcgaagaagatgagcacgacagcattgccaataagctgtcctctgcttcatctgattctcaccattgatcgagtaaatcggagaaaaggccaaaatctttcccctctatcagcactagttgattgttgactgtgaactggatgagaagataactatactatgatggatccaagaatcaaagactagttcgagggaagattttggtcaactttgaatcaatggcctataccgtgggaagaagaaatctgggtggatttcaggtttttcaatccccggtttgtttagtttctatcagttgattgtgttgtagcttaaatttatatttgagtgagctcttagagcttaacaatggtttctttttcttgttggacttgtcatgtttttcatgttaccaatcaatgtttgctactgtttcctagagttactactgagatgggaacctagtttgtcctatgctgatttggttttccctctaattttctttagatatattattttttttaatttgtggattttttctttttttagctttcttatttttcattttgtctgtgttttttttatttgttttctctttttttctaacttttt

SEQ ID NO: 18148 - DNA, 1528 bp, Gossypium hirsutum
  Clone ID: GOSHI-09MAY01-C3007_1
cccacgcgtccggctattcccacatccagaagagatgcaaaggaaattggctgccaaaggtaggcatatggtgacaattgtggatccgcatattaagagggatgagtcatttcacttgcacaaggatgcttcccagagggggtattatgtaaaggatgcaactggcaaggactatgatgggtggtgctggccaggctcctcctcctacccagatgtgtgaaatcccgagattaggtgcatggtgggctgagaagttctcctatgataattatgtcggttcaactccttcattgtacatttggaatgacatgaacgagccttctgtgtttaatggacctgaggtgacaatgcccagagatgctttacatcttggtggagtggaacatcgggagttacataatgcctatggatattacttccacatggcaacagctgaaggccttctaaagcgtggagatggtaaggacagaccttttgtcttgtccagagcattctttgctggaagtcaaaggtatggagcagtctggactggtgataattcggcagattgggatcatctcagggtttcagtcccaatggttttgacgcttggtcttactggaatgacattctctggggctgatgttggtggattttttggcaatcctgagcctgagttattagtgcgttggtatcaacttggtgcttattatcctttctttagaggtcatgctcatcatgacacaaaaagacgagagccttggttgtttggtgaacgaaataccgcacttatgagagatgccatacgaattcgttacaccttgcttccatacttctacacattattcagagaagcaaatgttagtggtgttcctgttgtacggccattatggatggagttcccatctgatgaagcagctttcagcaatgatgaagccttcatgggtgggaacagtcttttagtacaagggatctatactgcaagggctaaacatgcatcagtatatttgcctgggaaggaatcgtggttcgaccttagaacaggaactgcatataagggaggaaaggtccataaacttgaagtttcagaagagagcattcctgctttccaaagagctggcacaatagtgccaagaaaagaccggttccgtagaagctccacacaaatggtgcatgatccttatacactggtaatagctctgaacagttcccaagcagctgaaggcgaactctatgttgatgacggaaaaagctacaacttcaaacatggggcatacatccatcgccgctttgtgttctcgaatgggcatctaacatcctctcccgttggcaactctaggttttcgtctgactgcattatcgagcgggttattcttcttggatatacccctggggctaaaaccgcacttgtcgaaccaggaaatcagaaggctgaaatcgaacttggtccacttcggttcggcggacaacatgctgctgttgctgtaaccatcccgaagcctgccgtgagggttgctgaagattgcaagaaaaaaattttgtatgatgt

SEQ ID NO: 18149 - DNA, 407 bp, Gossypium hirsutum
  Clone ID: LIB3048-028-Q1-L1-A4
gcaaagtaaaaaaaaaattccctttttcaatttttgccgttacctctccctatagaatgaagaagcactagaacgatcatcttctccctcggttcactgtcaaaaaaacttgcaaaatttgtcatcggccaacaaaaggcaaagaaggtgttagctgtggcagtttacaaccactataaaggatataccattccttcaagaaaaacgaggcatctgaattgggtgacaatgataaacatgttgccaatgattttgttgagctggaaaagagcaatgtactgttaataggtcccactagttcaggaaaaacattacttgtagacactagcacgcattgggaatgtaccatgtgtcattgctgatgcaacaagtataacacagatgaccatgcccagagatgctttaca

SEQ ID NO: 18150 - DNA, 401 bp, Gossypium hirsutum
  Clone ID: LIB3272-043-P1-K1-C12
aaaaaattccctttttcaatttttgcccttacctctccctatagaatgaagaagcactagaacgatcatcttctccctcggttcactggtgttagctgtggcagtttacaaccactataaaggatataccattccttcaagaaaaacgaggcatctgaattgggtgacaatgataaacatgttgccaatgattttgttgagctggaaaagagcaatgtactgttaataggtcccactagttcaggaaaaacattacttgtagacactagcacgcattgtgaatgtaccatttgtcattgctgatgcaacaagtttaacacagatgacaatgcccagagatgctttacatcttggtggagtggaacatcgggagttatataatgcctatggatattactttc

SEQ ID NO: 18151 - DNA, 340 bp, Gossypium hirsutum
  Clone ID: LIB3189-053-P1-K1-D5
cggacgcgtgggttgcaaaactgcatttccatgaagatggaggtgaagttatttctgagtattgggggtctacggtggctgcactgcgaaaaccatggaaattcgatagtattttttttgcaaaaaagcaatcataccttgttcttatatgtggatgtgtatgtgaacttgtaaaaattgcatattagcaggcaaaatagcacaaatgactaaacttttgttgtggttagatgacaatgcccagagatgctttacatcttggtggagtggaacatcgggagttatataatgcctatggatattacttccacatggcaacagctggaggccttctaaagca

SEQ ID NO: 18152 - DNA, 482 bp, Gossypium hirsutum
  Clone ID: uC-gsflmaxxa045b09b1
tcttttactcattcccgtgcaaagtaaaaaaaaaattccctttttcaatttttgcccttacctctccctatagaatgaagaagcactagaacgatcatcttctccctcggttcactgtcaaaaaaacttgcaaaatttgccatcggccaacaaaaggcaaagaaggcgctagctgtggcagcattacaaccactataaaggatataccattccttcaagaaaaacgaggcatctgaatcgggcgacaatgataaacatgtcgccaatgattttgctgagctggaaaagagcaatgtactgctaataggtcccactagttcaggcacagtcttatatgctgaataacttcttgctgcttctattgattattctctagctttttttttgttccgcttaaattcttaaaccttaattatgaggacaggacaaacattacttgtcgacactagcacgcattgtgaatgtaccatttgtcattgctg

SEQ ID NO: 18153 - DNA, 304 bp, Gossypium hirsutum
  Clone ID: LIB3493-037-P1-M1-G6
cccacgcgtccgcttcaagaaaaacgaggcatctgagtggggggacaatgataaacatgtggccaatgattttgttgagctggaaaagagcaatgtactgttaataggtcccactagttcagatgacaatgcccagagatgctttacatcttggtggagtggaacatcgggagttatataatgcctatggatattacttccacatggcaacagctgaaggccttctaaagcatagggatggtaaggtcggaccttttgtctggtccagagcattctttgctggaagtcaaaggggtggagcagg

SEQ ID NO: 18154 - DNA, 1178 bp, Gossypium hirsutum
  Clone ID: GOSHI-09MAY01-C3397_1
gcataattcaatctcttaactttctctcttcaattggggtcgctttttttgtagtttaaacttctctcagtctacgacatgtcaaaggtcacgcaaatggaaagtctgacccgaaacgatgggttctacttctcggacagtttattgggctttgcactgcaagctatggttgtggagtccgccattattgctacaaagtctgtcgcttggttactcatgatgatgggaagtctgcctgatggaattgatagccatatcaaagagcctgaagcatatacagggtttccgcttgctcagcttcatgcagtgagaaaacctagtcctgagaacaaggatgcctgtgacactgaggatgatgaggatgaggatgagaaagatgaagcaggagatgatcaagatgaagatgcagatgaggaggatgcatctggtgaagatgaaggagatccagaagatgaacccgaggccaatggggatggtgccagtggagacgaggatgatgaggacgaggatgatgacgacgacgacgacgatgatggtgaggaagaggaggaagaagaagaagaggaagacgaggatgaagaggaagagcttcagccaccggctaatatgcgaaaatgagcttgaatctcttgttgttttttattatcttgttgaggttaggggtatggtgtagttggaagttagaatgagccgattcaagttacggactaagggtgtctgtctaaattagggtagagaacattgtgaaatttctggagaatcagacttgtttgatactttcctaatatacggttctagcaccattgtattataatctttgcttcaattcttttctcctaatctcttctgtatgactctgctccctcaggatttcatctatgcatcaccaccttaaatatgtaaaaatgggatgggtgagaagtaaggtggagagatgaaaggaaggcactgcctgatctttgaccgactaaattcattcagggaggaaattcctaccggttattgactgttgatgttagaaatatttttgtcatttctcttttttttattctccttgcctcttctagccttcggtttttagtgaagttgcttacgcattcgaagttacaatcctccttttttactcaactgaactacaagagaagtggcaaaatatttatgttttaagtttttagttg

SEQ ID NO: 18155 - DNA, 406 bp, Gossypium hirsutum
  Clone ID: LIB3146-046-Q1-K1-C2
gttttcccagatgggaagtctgcctgattgaattgatagccatatcaaagagcctgaagcagatacagggttagttgcagtcttttgcatctttcttaacttgttcttttatacgtggattgggaaaattggtctatttgctttttcaggtttccgcttgctcagcttcatgcagtgagaaaacctagtcctaagaacaaggatgcctgtgacaccgaggatgatgaggatgaggaagatgaagcaggagatgatcaagatgaagatgcagatgaggaggatgcatctggtgaagatgaaggagatccagaagatgaacccgaggccaatggggatggtgctagtggagacgaggatgatgaggacgaggatgatgacgatgacgacgacgatgatggtgaggaag

SEQ ID NO: 18156 - DNA, 724 bp, Gossypium hirsutum
  Clone ID: GOSHI-09MAY01-C3357_2
gctatatctaaaatttggtgccaacctctgtttttcttcacaaattcccaatctaatcgcttcctccccttctttttccacatctcatagaagagttggcagtttgctctgctgtgtccacagtttgtcaaagtggagggcattaattttgaatcgtcttttatgtctgaacgggcctctctctttttatcatcaattggtttgctcggtgaatactgtcccacttctagaaaaaaggaaggtatctgcatgcatattgaggtcagtaatacagaaaaatttggttgccattttatgcgacctattccaagtgcaagaaagcagtctggtaaaggatttgttatcacaattggaatcactagtatctgatccctcctttgtgattaagagtttgttccacaagttcgatcgagatggctttgcagaatattggtgcttccaacagtgatgatgccttttataggtataagatgcccaaaatgataaccaagattgaaggacgaggaaatggcatcaagactaatgtggttaacatggttgagattgcgaaggctttggctagacctgcttcttaccctgtaaagtattttggttgtgaactgggagcccaatccaagtttgatgagaagactggaacttcactggtaaatggtgcccatgaaactgccaagcttgcagggcttcttgagaacttcatcaagaagtatgttcagtgctatggttg

SEQ ID NO: 18157 - DNA, 1956 bp, Gossypium hirsutum
  Clone ID: GOSHI-09MAY01-C3357_1
ctggtgcttttcttcattctctcccatcaaatccatacattctcttctcaactccccaagctttctaaaaaccctccttttcccatctaataaaaggaagttggcagcttaatctgctgtgtcttctgcttgtcaaagtggagatagatacgattgaatcttcttttatgtctgaacgggcctctctctttttgtcgtcatttggattactcggagagtactgtcccaagtctagaaaaaagaatataatttcctcttctgaaataatctgcatgcatattgaggctaataacacacactgtctcggttgccattgtgcaaggaggctgtctggtaaaaacttttgcattgcgatcgaaaacacaagtatttgatctgtcctttctgattaacgctcacctacggttctgatcaagatggctttgcaaaatattggtgcttcaaacagtgatgatgccttttataggtataagatgcccaaaatgataactaagattgaagggagaggaaatggcatcaagactaatgtagttaatatggttgagattgcaaaggctttggctagacctgcttcttacactacaaagtattttggttgtgaactgggagctcaatccaagtttgatgagaagactggaacttcacacgtaaatggggcccacgacactgccaagcttgcagggcttcttgagaacttcattaagaagtatgttcaatgctatggttgtgggaaccctgaaacggagataattattaccaagacgcagatgattaccctgaaatgtgctgcatgtggatttgtttccgatgttgacatgcgagataagcttacaacattcattcttaaaaacccacctgaggcaaagaagtcaacgaaagacaagaaagcgatgaggagagctgaaaaggagagactcaaggagggtgaggctgctgatgaagagctgaagaagattaaaaaggaggcaaaaaagaaaggttcctctactacttcaaaggttgttgcttccaagggtgcagtaaccaagaagaaaagcaagcattctgatgaggatcattccccttcacaaagccaggttgatgagaatgaacaggtagccagtgatgacgacgatgatgtccagtggcaaacagatacttcactggcggctgctcaacaaaggattcaagagcagttaagtgctgttactgcagatatggtgatgctatctaccaatgaagagaagaaaaagtcagtgaagaagactccggagcctgatgtcaaggtacatgagaaatgtttcaatacccacgagaaacttgttaacgagataaaggaacatctcacgaaagggtcttctccaactcagcttaaatccttcctaggttcactctctggaacttcccaagaaatcatggatgctcttttcacagcactctttgaggatgttgggaaagggtttgctaaggaagtaactaaaaagaagaactaccttgcagcaggggcggcggcagcagctgcagccaatgaagagggatgccagatgatgcttctacattctatggagttattttgcggcaaggccagccctgaggcagcaaaggaggtggctttagttatctaagtattgtatgatgatgacatattggaagaagagttcatcatggagtggtaccagaaaggtataggtggtagtaataagagctctcagatatggaagaacgtcaagcccttcatcgagtggctccagaatgctgagtctgagaccgaggaggagtgattctctagctcttggtatggttgcatggctacttctaggtacaaatatgtttctctcttgatcttgttttttaaataaagtacagtgagcacggccctacatgctctctgtaatttgagtgtctggatttttcagctgcttatccttaagactcttttccgtttgctttatatgagcaagttgaattcagtttgct

SEQ ID NO: 18158 - DNA, 419 bp, Gossypium hirsutum
  unsure (1)..(419): unsure at all n locations
  Clone ID: uC-gsflnu33B072e11b1
ttcacgcgtccggccacgcgtccgcccacgcgtccgcccacgcgtccgaaaggtataggtggtagtaataagagctctcagatatggaagaacgtcaagcccttcatcgagtggctccagaatgctgagtctgagaccgaggaggagtgattctctagctcttggtatggttgcatggctacttctaggtacaaatatgtttctctcttgatcttgttttttaaataaagtacagtgagcacggccctacatgctctctgtaatttgagtgtctggatttttcagctgcttatccttaagacatcttttccgtttgctttatatgagcaagttgaattcagtttgctattttatttttttatatattttttgtgccgttattttggttgatcaaaaaaaaaaaaaaaaaattttaantt

SEQ ID NO: 18159 - DNA, 839 bp, Gossypium hirsutum
  Clone ID: GOSHI-09MAY01-C3327_1
gaatgatgggtttattgttcaagctggaaagtataatgatattctcaattcaggtactgattttatggaacttgtgggtgcacataagaaagctttgtcggcccttgatactgttgaagcaagttcggtttcggaacgaactaccagtgaaggagaatgtgatataggtactactaatgggaaagtgcagaaagaagaaaaccaaggtaacgaaagcggtaaagtagatgatgtcggaccaaaaggacagcttgttcaagaagaagaacgagagaaaggacaagtcgggttttcggtctactggaagtacatcacaacagcatatggaggagctcttgtgcctttaatactgcttgctcagattctctttcagatttttcaaataggcagcaactattggatggcttggggatcaccgatgtcggcagacataaagcctcctgttgggagctttacactaatcatggtctatttggctttggccattgcaagtgccgtttgtgtctttgccagatccatgcttcttcgtacagctggatataaaactgccactcttctctttaaaaagatgcatctttgcattttccgcgctcctatgtctttcttcgattctacaccgagtggaagaatcctcaacagagcttctacagatcaaagtgcagtagatatggacatcccgtatcaagtcgccgcttttgctttctcagttatccagctacttggaatcattgcagtcatgtctcaagctgcttggcagatctttgtcatttttattccagtggttgctacctgcatttggtatcagcaatattacatatcttctgcacgagaactttcgc

SEQ ID NO: 18160 - DNA, 579 bp, Gossypium hirsutum
  Clone ID: GOSHI-09MAY01-C3287_1
tttcaaataaaagaaatctctctctagcgttcagagagaaggtgaaaaatgataaaaatcctctgcacataattatatttataaatattttactatatatatgaatgagattcctaagcttaaaaaaaggagagagagaatttggggggtaatcgaagctgtagagtaatgcgaattaggggttttgttttttttttctttcctttgaatttttgctcacagatcggttttcgtggaaatttctgtgagcgaaagaattttgtcggattttgattcacttaagggattagttgtgtactgcacattctctcaaatggtgttccgagattcacttaagcagccaaagatgaaagtagaaggcgtagaacatgaatcacctgtaatggctggtttgcaaagtcatgtctcattgcagcttccactgccttccaatcagaatttgagaatttcaccagatgattggcatttattggcatatcttctcttagctcataaaactaatacaaaaggtgttgggcaaggtttgctggacaaggaagtgcgtgctttaacttttggctacatgggactaaatggaaa

SEQ ID NO: 18161 - DNA, 642 bp, Gossypium hirsutum
  Clone ID: GOSHI-09MAY01-C3257_1
atggcccatactgcaacacggaaaattcgacggtaggatgctgaacactgagaaaagacccagggcactctcgaaaaagatgttccatggattcagacccaaaaccacaccgaggacacactgaagtactcgttagccgtctaagtaacatattagcgcgagtagctaggaagttccacgagatcttccaaactgtaattttgatttttgagggtatatcgagaagccatagttttctatagaagtccttgtagtcaatttgtaaagcataagctctaggatcatatgcaatattttgtaatagtttataggagctgcgtactgtgaactcccccgatgcttcgacactccaaacttgaaagtcttcgtgtggtttttcagccagcgagatactgagaatcatctctgttacatcctccgggaaggtatgctctatcaactcctttttccatgttctactgtttgaatcaattaattccgcaaccttgctatcattcaaattcgaattcataactggtagtataacacgcggtaaaactggaatccaattatcacggctgatcgaaatatttgtgcctttacccaccctccagcataatccctcagctaagacacccttagtagcccaaatactctttcatg

SEQ ID NO: 18162 - DNA, 528 bp, Gossypium hirsutum
  Clone ID: GOSHI-09MAY01-C3247_2
cgtaatcttggtgttcatatatcgaaggttaggtcgcttactcttgatgtaaaagtgtgggacccatctgttataagtttgtttcaatctctgggcaatacctttgctaactcagtttgggaggaattgttgcactccagaaatgctttccacgttgatcttaccccaagcttttccaagtctgataaaccgcagctgctgcttatgggaaaaccttgtcattctgattctatatctgtaaaggagaagttcattcatgcaaagtatgcagaaaagctttttgttcgcaagccgaaagatgagcaacatcctcaatcagttgcacaacagatttgggagggtgttcgtgccaatgataagaaggctgtataccgttatattgttaattgtgaagtagatttaaatgcagtgtatgaacaatcttctgggtcttcattaacccttgccaaagtgatgcttctgcaagaacatacaaatgtctgtaacaacagctccagttacattacaggggattcatcagacagatct

SEQ ID NO: 18163 - DNA, 1028 bp, Gossypium hirsutum
  Clone ID: GOSHI-09MAY01-C3247_1
cgatccggagttccgggctacgcgtacgcgcacgcgttcgtaaaccggagctgctgcttatgggaaaaccttgtcattctgattctatttctgtaaaggagaagttcattcatgcaaagtatgcagaaaagctttttgtttgcaagctgaaagatgagcaacatcctcaatctgtggcacaacagatttgggagggcgttcgtgccaatgacaagaaggctgtataccgttatattgttagttgtgaagcagatttaaatgcagtgtacgaacaatctcccgggccttcattaacccttgccaaagcgctgcttctgcaggaacatgcaaatgtctgtaacaacagctccagttacatcacaggggattcatcagacagatcctctgctagctctttcaacttggtgggtaccagtgaagggcaaaccacagacgatttagatggttgtaccctacttcaccttgcctgtgaaacgggtgacattggcatgattgaacttctattacaatatggagcaaatataaatgtaatggattcaagaggtcaaacaccacttcatcgatgtattctcaagggcaaggctgcagttgctaaattactccttaccaggggagcagatccgcaggtgttaaatagggaaaataaaacccctgttgagctagcagtggaatcagattttgatgacagtgaggtccttgctttattatcagactcaaacgggtaactacggtgaaaagaaaataaattggagtttgagctgtacctgaagtgaaatttgaaaatgcattcgtgttggtttttttggtgtatttataacaatatctaaaaattaaagccggtggtagttgaaatggatgtcccccatatttagaggggtactaaacaaaaaacaagtgggaggttgtgctacccccaggccgaccccttgggtgttatgtgaaaattattccccccaaggacaaagatggttttaaaaccaagtttaatggccccatcagctgacagccttgcttcaaagggaggaggg

SEQ ID NO: 18164 - DNA, 770 bp, Gossypium hirsutum
  Clone ID: GOSHI-09MAY01-C3277_1
cccacgcgtccgctagaaacagcaacgcacaatagagaagaaagacagagaaaaaaagaaaatgggttgggtgtggaaagatgaaccaaatgacgccgtcgaatccactgctcgcgacggtgatcattgctctaccagaaaggtgatccaatcgaagtgcaagaccgaagaagtcgagcccggaaagttcgttcgaaagtgcgagaaaactgaagaagttcttagagaatgctttggaaggccggtcgaagtgctgcaatcaaccaaagagtatactgaagacgatgtcacagaacaaatgctaaaagggagtttctcatctggatcacacgtagaaggttcgtttgattttcccgggctacgtagtgacatggaggcaatcgaacgccagttctttggtgggataaaccgtttctttgatgctgctgaggagatgaaaaataatttcttcgacatattcggagatgcttatggcagaggatcatcatcagcaccatctacaaggcgaggaatacccattgaagatcacaaacaaaaggaagattctcctaaaccaactgaatctgggcatattgatttgtcgggtttagctaaagatatttgaagtggtttcgtatttgttgtcttcaaaatttcttcattagaagtagcataaagaagtggatcttgatgtgttcttatgtagatatggattggtttcagtgggagttagctctctttgcatttgcctcattcctcttataaatatgcaacttttgagctttataatc

SEQ ID NO: 18165 - DNA, 464 bp, Gossypium hirsutum
  Clone ID: GOSHI-09MAY01-C3217_4
accatgagaagggatgtgtgagcaggttcaaattccgacgctcagcaattcaacaaaaagctcaacgcagcagcaaccaatctccagaagcaacaccctgatctcaagattgtggtttttgacatttacaaggcccttcttgatgttgttaataccccttcaaactatggtttcgtagaagcaacgagaggctgctgtggcacagggactgtagagacaactgaattcttatgcaatccgcatacactgggaacttgtcccaatgcctcccagtatgtgttttgggacagtgttcatccatcgcaggctgctaatcaggtccttgcagatacattgattgttcagggcattcccctcctttgattcgccaggacaccgtgtctacttgccctttttaaactgtactaagatctgtcactactcctttttctattatcttaatcaaaaagcggccccgtgggtag

SEQ ID NO: 18166 - DNA, 641 bp, Gossypium hirsutum
  Clone ID: GOSHI-09MAY01-C3217_2
cccacgcgtacgaccacgcgcccgcccccgcgcccccccacgcctcccccctggtgaaagtgaaaatggaggtttacagcagaaggctaatggttctggtgtttgcatttgcactagtaagcatagggtacgcgcaagagtcgaactcgaccactctggttccagcaatactgacttttggtgactcagtggtagatgtgggcaataatgattatctccccaccatcttcagggctaattaccctccttatgggagggacttcgccaaccaaaagcctactgggaggttttgtaatggcaagttggccactgacatcactgctgaaactctggggtttactacttatccaccagcatatctaagccctgaagcatcagggagcaaccttcttattggagccaattttgcttcagctggatctggctatgacgatagagctgcctctttgaaccatgctatcacgttgagtcagcaagtagagtatttcaaggagttacaggcaaagctagcaaaggtagctggtagtacaagtcagcagccatcatccaggatgcactctatgtattgagtgcctggagccggtgactttctccaaaactactatgtccaccctttggttacccatccctatactccaaat

SEQ ID NO: 18167 - DNA, 1408 bp, Gossypium hirsutum
  Clone ID: GOSHI-09MAY01-C3217_1
tctaagtcaatgctcaaagctgcccctgaggaccgtccgagtcccggtcgccacgcgtaagcaaaaatggatggttattgtagcagaagggtaatcatgtttttggtgtttgcatttgcagcaataagcagagggtatggacaagaatcaaccactcttgttcctgcaatcatcacctttggtgactctgtggtagatgtgggcaataatgactatctccctaccatcttcaaggctaactatcctccttatggacgggactttgccaacaaaaagcctactgggaggttttgcaatggaaaattagccactgacatcactgctgaaactctggggtttacaacttatccaccagcttaccttagcccagaagcatcagggaagaaccttctgcttggagccaattttgcttcagctggctctggctatgatgacaaagctgccatggtgaatcatgccatcacattgacccagcaattagagtatttcaaggaataccaggcaaagctagcaaaggtagcaggcagcaccaaatcagcatccattaccaaggatgcactgtatgtattgagtgcaggaagcggtgacttcctccagaactactatgtcaaccctctacttaaccatgcctatactccagaccagtacggctcattccttattgataccttcacaaacttcgtcaagaacctctatgggttgggagctaggaaaattggggttacctcacttccaccgttaggttgcgttccattagcaagaacattgttcggttaccacgagaaaggatgcatctccaggttcaataccgatgctcaacaattcaataaaaagctcaacgccgcagcagccaatctccagaagcagcatcctggtcttaagattgtggttttcgacatattcaaggcactttacgacattgttaaatctccctctaactatggttttgttgaagcaacaaaagggtgttgtggaactggaacagtagagacaaccgcatttttgtgcaatccaaaggcaccaggaacttgttccaatgccagccaatatgtattttgggacagtgttcatccatctcaggctgctaatcaagtccttgcagatgcattgattgttcagggcattgccctcatttgattctgttggggcctttctcaactcttctaagcctgcctgccactactcttttaccattaccttattaaaatttgattcatattgcaccctaccccctttataatcatgtgtgccacaaaattcaatgtctttgaaggtactttttatttacttttgtgacattattattatttaagagtttgagacaatgtttgttgaggaaagggctatcttatttaaatataaatttattagttatttatataaaatatcgcatcattttaataatttt

SEQ ID NO: 18168 - DNA, 428 bp, Gossypium hirsutum
  Clone ID: LIB3197-005-P1-M1-G4
gtgaaagtgaaaatggaggtttacagcagaaggctaatggttctggtgtttgcatgggcactagtaagcatagggtacgcgcaagagtcgaactcgaccactctggttccagcaatactgacttttggtgactcagtggtagatgtgggcaataatgattatctccccaccatcttcagggctaattaccctccttatgggagggacttcgccaaccaaaagcctactggtagagccaattatggctagtcggcctctgacataactgcgctaaactctggagcattctcaccaccaaagaaacctatgaaccctatgtcacccctgttagattccaccctgatgagccctataacagcatccccgaatccttcaacaataaagacacttactactacaacaagaatgcctacgaagtcactaagcag

SEQ ID NO: 18169 - DNA, 618 bp, Gossypium hirsutum
  unsure (1)..(618): unsure at all n locations
  Clone ID: AI727391.1
cattccgtcggcttataaggcctaagtcaatgctcaaagcttccccaatactatcccctggtgaaagtgaaaatggaggtttacagcagaaggctgatgtttctagtgtttgcatttgcattagtaagtatagggtatgcacaagagtcgaactcgaccactctggttccagcaatactgacttttggtgactcagtggtagatgtgggcaataatgattatctccccaccatcttcagggctaattaccctccttatgggagggacttcgccaaccaaaagcctaccgggaggttttgtaatggaaagttggccactgacatcactgctgaaactctggggtttactacttatccaccancatatttaagccctgaagcatcagggaacaaccttcttattggagccaattttgcttctgctggatctggctatgacgacagagctgcctctttgaatcatgctatcacgttgagtcagcaagtagagtatttcaaggagtaccaggcaaaactagcaaaggtagctggtagtancaagtcagtatccatcatcaaggatgcactctatgtattgagtgctggaagcggtgactttctccagaactactatgtcaat

SEQ ID NO: 18170 - DNA, 373 bp, Gossypium hirsutum
  Clone ID: LIB3146-008-Q1-K1-A4
cccacgcgtccgaggattcttgggtcgatttatttgtacgcggacgcgtgggtttagaggttgacaaggcccttcttgatggtgctaataccccttcaaactatggtttcgtagaatcaaccataggctgttagcgcacagggactgtaaagacaactgaattcttatgcaatgcacatacactgtgaacttgtgccaatgccttccatgatgtgtgttgggacagtgttcatgcatcgcaggctgctaataaggtccttgattatacatttttttttcaaggcattccccttctttaattcgtcaggacacctagtatacttgtcctttttaaactgaactaatatctgagactacttacttgttctattat

SEQ ID NO: 18171 - DNA, 288 bp, Gossypium hirsutum
  Clone ID: LIB3189-008-P1-K1-G6
agaagataggaatcgaagaactaatgccatagctattctctttcggcaaacacagaagaattgtggttagatcaacgatgcaacagggagattacagctcctattatcaatatccttacctttcaaaccccaactccaaccccaaccctaaccagcaataatgactatctccctaccatcttcaatgctaactatcctccttatggacgggactttgccaacaaaaagcctactgggaggttttgcaatggaaaattagccactgacatcactgctgaaactcttggg

SEQ ID NO: 18172 - DNA, 626 bp, Gossypium hirsutum
  Clone ID: GOSHI-09MAY01-C47_1
caagcgagcattttccttacagtttgttttcttgtgactaattgatatggctagctcaatgtcccttaagcttacatgtgtggtggtgttttgcatggtggtgggtgcacccctggctcaaggggccataagttgtggtcaaatcacaagcgccctcgcaccctgcattgcttacttgaaagggaatggtgctggttttgctcccccagctttctgcaacggcatcagatctctcaactcctgccgccattacaactccagaccgtcaaacagcttgcagatgcatcaaaagtgtggcctccggcatttttggcatcaggtatagctttgcagccggactcccaggcaagttgcggtatcaacatcccttccaagatcagcccttcctctgcctgcaaaagcattaagtgaagtgtggtcatggaagttgggatcagtttatggaagggaaatagtcatgtctaccgaataaaaatgaatgttaagtatccacagcggcacgattcaatgttggagttatcctagttttatagttactggtaatggtcaaggtcgcatatgcgtctatattattctatctttacagtctctcaatattaatatcatactcttgagttgtttcctgt

SEQ ID NO: 18173 - DNA, 644 bp, Gossypium hirsutum
  Clone ID: GOSHI-09MAY01-C47_2
tagtgtagtgatggaaatcatcagcaggatcaaaccagagattgatctctcttctctgccagcactggtgcttccattgccataaatattggtctgaatcctccaattttttcctctaatgttacccaagaactcaaaatctatttcatcatggttcttctcgaacatatcaccatttgacatatagaaagcaaccacaactccagcagtgtaatcagcaggtaactttattgaagcactgaagtaaccatgcaagtaaaggtcttgtgacacaaaccccgaccctgttctttcgttcaaagacaagtgaacagctttaccatctctatggataactagattatcatccccaaacaactgattatatccttcatcgaatgaaagaattgggagcccttttccagacccagaagcaacaatagaaaccaaactaaaaaaaaccaaaaacaaacaagaacccagataaggtaacttcatcaccattttttaaaaaaaaatcctctctggaatatgtggttggtaaatttagggtggtttgaaaataaagattatatatgaagagaaagagtattatggaagaagagggggaagagattgttgagaatgaaagaagaagaaaggaataataatatgaataatctctc

SEQ ID NO: 18174 - DNA, 643 bp, Gossypium hirsutum
  Clone ID: GOSHI-09MAY01-C47_3
ctccaagcaaccattttccttacaagtttgtttttcttgtgattaatccatatggctagctccatgtcccttaagcttgcatgtctgctagtgttgtgcatggtggtgggtgcacccctggctcaaggggacgtaacccgtgctgatggcgtagtcatccttccacgctgccttcctttattgatagggaatggtaatggtgctgatgctgatgttgatgccccagcttgctgcgacatcgtcaggggtctcttgagctcgctgctctgtggtggtgtttaggaaccgatctagcttgaaatcgggttcggattcgggtggagtttcaaattggtgtgttatggaatcccaacttaatcgtgtttaggggtgggatccaattgtgtgatacattacagagcatggttgtggattgttttctcatatgttttgattgacttgcttgatacattggatgattcgataaggtgaccggtttacctgggtatccaaccatcatccgattactttttaataattatttgtctcttctttatgtcgtatggctttttgtgtcttgatctataacattatattggcccaaattttcgcattttccatatgtagcttatatatgtatatatatattcaatagagtaaacaa

SEQ ID NO: 18175 - DNA, 1535 bp, Gossypium hirsutum
  Clone ID: GOSHI-09MAY01-C47_4
ggataacagtcatcaccaaattcaatctttgtaaaaaaacagagagacaaacatcaatgataaaaatggaactatacacatcacacacccacatcatcaaacatatattatgataagaaacaactctatcaccttctttgagataaatatttgttgctctcctgctcctcctctctctctatacacaaaactgacccccaactattttataaatcaaaccgagaggaaaataatgccccaacaagtaatgaaatcaaatctaccaatggcctattattttttagatggtatcagcttcggaccggcttgctctgctgcggtggtgtcgcttcccatggtgacgcctgcctccaaacgtgactggatcgaaccttttcagtctttcggcttcacggggattgatcacacactctacaggtggaactttgtatctggtctggtcatagcagtaagaatatgtcatgtgcttcctcctaaagctatccattttgcttctttgtgatggggtgatagtggcagaaagttccaaactttgagaggtggtgtcacacttcttcgacgaaaattcaatgggatccactgcgcagccgtggaggatcaggtcagaaaattcggctacgtaaggagcgtatttgtaattgactctatatttgccaccattagtagcccaatcagacccatcccatattgtagcatacaacgacatcggcttagagggaaagtccccacccattgcagctgttcttttaaactctctaatggggatgttgtctatataaaatatgatttgagaatcagtccagagaatagtgtactgatggaaatcatcagcagggtcgaaccaaagattgtatctttcttctctgccaacactggtgcttccattcccgtaaatattggtctgaatcctccaatctttgcctctgatgttacccaagaactcaaaatctatttcatcgtggttcttctcgaacatatcaccatttgacatatagaaagcaaccacaactccagcagtataatcagcaggtaactttattgaggcactgaagtaaccatgcaagtaaaggtcttgagacacaaatccagaccctgttctctcattcaaagacaagtgaacagctttaccatttctgtgaagaactagattatcatctccaaacaactgactatacccttcatcaaatgacagaattggtatcctttttccaaacccacaaacaaaaacagaaaccaaagtcaaaaccagaaacaaagaaggtaacttggtcatcgtattatcccttgaatctctctttattttttttcctttgatatatggtcgtatttttgttgctctatcaccctgagattatataagacaaagagaagagtataaaagaaggaggattttttatatgtattatgagagaagaagccaatttttgagaaagaaagaagaaaggaataatctctagagctatgggaggggggcgatggagagccggaaaaggctattgaaatgaaagcatagcgcaggtcattggcgagtgaga

SEQ ID NO: 18176 - DNA, 691 bp, Gossypium hirsutum
  Clone ID: GOSHI-09MAY01-C47_5
accctcaacccctaaccacgcaacaatcagcaatactccaagcaaccattttccttacaagtttgtttttcttgtgattaatccatatggctagctcaatgtcccttaagcttgcatgtctgttggtgttgtgcatggtgatgggtgcacccctggctcaaggggccataacccgtgctgatggcttagtcggcctcccacgctgccttccttttttgtcagggaatggtgatggtgctgatgccacaggttgctgtgccatcgtcatgaatgccttgggatcgctctgtggtgatacataggaaccgatctagcttgaaatcgggttcggatttgggtggaatttcaaattggtgtgttatggaatcccaacttaatcgtgtttaagggtgggatccaattgtgtgatacattacagagcatggttgtggattgttttctcatatgttttgattgacttgcttgctacattggatgatttgataaggtgaccagtttacctgggtatccaaccatcatcggattactttttaataattttttgtttcttgtttatgttgtctgtctttttgtttcttgatctataatattatatttggccaaatttctcattttccagatgtagcttatatatatattcaataaagtatattggtttagcaaaaaaaaaaaaaaaaaaaaaaaaaaaaaa

SEQ ID NO: 18177 - DNA, 433 bp, Gossypium hirsutum
  Clone ID: GOSHI-09MAY01-C47_6
gccgccggcattcctggcatcaactttggccttgcaagcggactaccaggcaagtgcggtgtcaacatcccttacaagatcagccctagcactgactgcagcagcgtcaagtgaaattttggcatggaattttcatcagctagtggaagccaaaataatgatagctacagaataaaaatggatgtttaaaatccatccgtagggatagcagaggagttatcctaattttagagttgtgcgttgtgtactaggtcgctttttgcgactatgtaatactatctttatctacaaattaatatcactcattattttgtgtttcttctatatgatatttatttatatacccttctctcaagcattttatatcaacattcacgtggtctaataataatgaaaatcatgattactcaaaaaaaaaaaaaaaaaattctgc

SEQ ID NO: 18178 - DNA, 581 bp, Gossypium hirsutum
  Clone ID: GOSHI-09MAY01-C47_7
gcaatactactactactccaagcaagcattttccttacaagtttgtttttcttgtaattaatcgatatggctagctcaatgtcccttaagcttgcatgtgtggtggtgttgtgcatggtggtgggtgcacccctggctcaagggaccgtaacctgtggtcaagtcacaggctccctcgcaccctgcattaattacttgagagggaatggtgctggtgccgttccccaaggttgctgcagcggcatcaaatctctcaactccgccgcccaaacaacaccagaccggcaagcagcttgcaaatgcatcaaaaattccggcgccaaccgcggggaactccaattccccccaaaatgaatcctaataagcccgcccactgggcgtccttttaaaaactccttaacgggaaaaacccggcgttaaccaacttaatccccttggaacaaatccccccttccccaactggggttataaccaagaaggccgcaccgaatgcccctcccaacaattgcgcaacctgaattgccaatgggacacgccctgtaaccgcgcattaaaccccgcgggtgttgttgttacacccc

SEQ ID NO: 18179 - DNA, 1775 bp, Gossypium hirsutum
  Clone ID: GOSHI-09MAY01-C47_8
ttttttttttttttttttttttctccccaacttgtcacatctaaccctccttagattccaactacccaatggcatatacatattgatcagcaacatgctaacagacatagagataaccccaaactttggacattaaatgcaacaattttgggtgctgcagatgtctctttgaaccaccaagagggaaagcagaaaatgatacttaaattaactttttaaaaaataaagatgttttaaatctgctaaagtattttattgcatcaataacaaaaatggacagcgaaacctaaaacggtatggaactatacacataccctccacatcattgaacatatataatgactcatatcaccctcaatatatatatgtatatgtgctgtgctctgcagtcttccccctctctctatacacaaaactgatccccaagctgaatgaaaaggagaggaaaacaatggtcaaaggtctttcatcagatggaatcagcctcagaccggcttgctcgcatatggtggtgtcgtttcccatggtggcgcctgcctcctccaaatgtgacagggtcaaacttcttcagtctttcagcttctcggggattgatcacacactccggaggagcaaccttgtatctggtttggtcatagcagtaagagtatgtcatgtgcttcctcctaaagctatccatcttgcttctttgtgatggggtgatactggttgtaagttgttcccaactttgcgtgccgtcacacctcttggacgaaaactcgattggatcaactgcgcagccgtgcaagactaaatcggagaattccgctacataaggagcatattggtaatggactttatattgccaccattagtagcccaatcagatccatcccatattgtagcatacaatgacattggcttagaggggaaatctccacccatttcagctgttcttttgaactctctaatggggatattgtctacataaaatatgatgtgagaagcagtccagagaatagtgtagtgatggaaatcatcagcaggatcaaaccagagattgtatctctcttctctgccagcactggtgcttccattgccataaatattggtctgaatcctccaattttttcctctaatgttacccaagaactcaaaatctatttcatcatggttcttctcgaacatatcaccatttgacatatagaaagcaaccacaactccagcagtgtaatcagcaggtaactttattgaagcactgaagtaaccatgcaagtaaaggtcttgtgacacaaaccccgacccagttctttcactctaagaagagtgtacaacgcggccctgtgggcgggggtacaagacggcatttctggcatcaactatggtattgcaagcggactcccaggcaagtgcggtgtcaacatcccttacaagatcagccctagcactgactgcaacagcgtcaagtgaagttttggcatggaaagttcaccagctagtggaagccaaaataacgatagctacagaataaatatggatgttaaaattccagagttgtgggttgtgtactatgccgctttatgcgactacgtaatattaactttatctacaaattaatatccatatttattctgtagctatcgttattttggcttccactagctggtgaactttccatgccaaaacttcacttgacgctgttgcagtcagtgctagggctgatcttgtaagggatgttgacaccgcacttgcctgggagtccgcttgcaataccatagttgatgccagaaatgccg

SEQ ID NO: 18180 - DNA, 669 bp, Gossypium hirsutum
  Clone ID: GOSHI-09MAY01-C47_9
acggtatcgatgagcttgacatcaaattcggcattaggcttacacgtttgtttttcttgtgattaatcgatatggctagctcaatgtcccttaaacttgcatgtgtggtggtgttgtgcatggtagtgggtgcacccctggctcaaggggccgtaacctgtggtcaagtcacaaactccctcgcaccctgcattaattacttgagaggcagtggtgctggtgccgttcccccaggttgctgcagcggcatcaaatctctcaactccgccgcccaaacaacaccagaccggcaagcagcttgcagatgcatcaaaagtgcggccgccggcattactggcatcaactttggccttgcaagcggactcccaggcaagtgcggtgtcaacatcccttacaagatcagccctagcactgactgcaacagcgtcaagtgaagttttggcatggaaagttcaccagctagtggaagccaaaataacgatagctacagaataaatatggatgttaaaattccagagttatgcgttgtgtactatgccgctttatgcgactacgtaatataatctttatctacaaattagtatcactcatgtctccattccccttctttcaagcatcttatatcaacattcacgtgatccatatttcattccttaaaaaaaaattaag

SEQ ID NO: 18181 - DNA, 1077 bp, Gossypium hirsutum
  Clone ID: GOSHI-09MAY01-C97_1
acaaagttttcttttataatctctctattctctgaccaaagatcatataaaatctcacaattttccagcaatcgctaaaaaataataaaaatctcaaatccgatcccatggcttctcgtcggcgtatgctgttaaaggttataattctcggtgatagcggggttgggaaaacatctctcatgaatcagtatgttaatcgtaagttcagtaatcagtacaaagctacgattggagccgattttttgacaaaagaggttcagtttgatgatagattgtttacattgcagatatgggatactgctgggcaggaaaggtttcaaagtttaggtgtggctttctatcggggtgctgattgctgtgtacttgtgcatgatgttaatgtcatgaagtcctttgataatcttaacaactggcgagaagagtttctgattcaggcgagtccgtctgaccctgaaaactttccatttgttgtgttgggaaacaaggttgatgttgacggtggtaacagtcgcgtggtttctgagaagaaagcaaaggcatggtgtgcttcaaaaggaaacataccttactttgagacctctgcaaaagaaggattcaatgtcgatgctgcttttgagtgcatagccagaaatgctctcaagaatgagcctgaagaagaaatctaccttcccgaaaccattgatgttgctagtggaggacggccacagagatctacaggctgcgaatgttaaatgagtcattggatggatcttgttttgtcagagttgcaaaaacagctgccaaagatttcgcatttctatcagttaatattgcaggctctgactattagtaataaactagtgatgacataagacttggatttttgtatcataaattggttagaaaagtaaagttgggttgatcctcctcttgttgatttttcattcaacttccaactaaaaaaattcatgtttaaaagtaattgtaccatgcctcctacttactacgctgtgatcactcatattctgtaataataaaatatggagcttctgttgtaaaaaaaaaaaaaaaaaaaaaaaaaaaaaaaaaaaaaaaaaa

SEQ ID NO: 18182 - DNA, 577 bp, Gossypium hirsutum
  Clone ID: GOSHI-09MAY01-C57_5
ccttatcagtgctcgggttctctcatcttcagccgggggcatggggaacgttcctaagaccaggaagacctactgcaagagcaaggagtgcaggaagcacactttgcacaaggttacacagtacaagaagggcaaagatagtttggctgctcaagggaagcgccgttacgatcgcaaacaatcaggttatggtggtcagaccaaaccagtgttccacaagaaggccaagaccaccaagaagattgtgctgaggctgcaatgccagggttgcaagcatgtatcccaacatccaatcaagaggtgcaagcattttgaaattggtggcgacaagaaggggaagggaacatctcttttctaaatggtgtttatttatttcatgtcatgtcatgttgttgggaaccttttaagacagtatggaatttttgtttttctaatgtaatgttttccgagggatatggtgttctttaagcacttaatagttaatggcatcggttgatctcattgtcgccatttgttttaaatactgtattttaatttaattgtttttggaaacttcaataatctttgctatattttt

SEQ ID NO: 18183 - DNA, 846 bp, Gossypium hirsutum
  Clone ID: GOSHI-09MAY01-C57_4
cccgggttgatcttccctccccggacgcgtgggtacaccgaaaaagagcttgggtcatctctcaccagccgcaaccatggtgaacgtacctaagacgaagaagacttattgcaagagcaaggagtgcaggaagcacactttgcacaaggttacacagtataagaagggtaaggatagtttggctgctcaagggaagcgacgttacgatcgcaaacaatcaggttatggtggtcagaccaaaccagtcttccacaagaaggcaaagaccaccaagaagattgtgctacggctgcaatgccagggttgcaagcatgtctcacagcatccgatcaagaggtgcaagcactttgaaattggtggagacaagaaggggaaaggaacatctcttttctagatgtgatgatattcatgtcaaattttatgttatgggtttttacttggaacttcaggcagaatggagttttgttaagtttgatattagtattctaatgttgtttttaagaggatattgtgttttttaaggttaatggcatcggtcacactcattgatagcaattgtctaattggttcttgttatatcaatatcttgtgagctcgcatcacttccttgagatcttgtaggtcaacgcccttaacgaagaaacttatgaaatcaagaccttgcaagcttcgtatcattgggatcatgcatttgacatggataaagtatctgtcacttgcatgttacattattcattttttagatggcaagatacttagtaggatcttacaaccttaccttgaagtatagtccagaaggaaggatcctttgtgagtctcgctcacaaaaatagtttggtaatacct

SEQ ID NO: 18184 - DNA, 866 bp, Gossypium hirsutum
  Clone ID: GOSHI-09MAY01-C57_2
ggagtggccgcctcctagtttacagttctcaggttctctcgattcagccgtagccatggtgaacgtacctaagaccaagaagacttattgcaagagcaaggagtgcaggaagcacacattgcacaaggttacacagtataagaagggtaaggatagtttggctgctcaagggaaacgccgttatgatcgcaaacaatccggttatggtggtcagaccaaaccagtgttccacaagaaggcaaaaaccaccaagaagattgtgctgaggctgcaatgccagggttgcaagcatgtgtcgcagcatccgatcaagaggtgcaagcactttgagattggtggagacaagaaagggaagggaacatctcttttctaaatgttgtgttcttgttcttgtgtttttgttggttttgagttcaatgctagtatggaatttttgtccaagttttgatttttaattttctcatgttataaaaacattaatgtgaaattcacattttattgttaaaaaaaaaaaaaaaaaatcttattaaaaaaaaaaaaaaaaaaaaaaaaaaaaaaaaaaaaaaaaaaaaaaaaaaaaaaaaaaaaaaacaaacaaaaaaaaaaaatataaaaaaaaaaaaacctaaaatacaattaactaaaccaaaaataaacaaacataaaaagggggggacatctttgaagataccaattttaatccccctggcttaaaaaaaaaatttttttttttggggcccccaaaataaattccaggcccatggttttaaaacaccggtactggaaaaaccctgggttttcccaaattaattgtttttgcaacattaccctttttgccagtgggggaaaatcccaaagggcccccc

SEQ ID NO: 18185 - DNA, 977 bp, Gossypium hirsutum
  Clone ID: GOSHI-09MAY01-C57_1
tttcacgcgtccgctttactatctttcctcctcaagaaactctctactacccagtataagccatgagtcgtcatcctgaggtgaaatgggcacaaagaaccgataaggttttcattacggttctattacctgattcaaagaatgcaaaagttaaccttgagccggaaggagtgtttaatttctctgctactgctggaactgacaataacacatatgagttgaagttggatctttttgataaggtcaacgtggaggaaagcaaaattaatattggagttaggagtatattctgcatcttggagaaggctgaaaaagtgtggtggaaaaaattattgcgcggggatggcaaagccccccattacgtcaaagtggactgggacaaatgggtggatgaagatgaagacaagggtcttggtgatcttgacttaggaggaatggacttctcgaacttcgggggaatgggcggcatgggcgacatgatgggcggcatgggcggcatgggcggcatgggtgacatgatgggtggcatgggcggcatgggtggcatggatgaatttgaggacagtgatgatgaagggcaagaagtgacaaagccagatgacaaggccgaaggagatgcaaagcctgaggagcatggcatcggatcttcagagaaaaaggaggctgaaccgagcacatgaaatcattttagctgaaacctgaaatgctgttaactatagttatgggtgatattttgctctttccctgtcatggatgggggagaggggatcaaagcctgatgtgtttttaactgcgtgagattaaaaaatttgcggaaagatgtgttgttgtgtcaggtggagaaacagtgttagctctttgacatgacttaggatggatggtgtacctgtccctttaaatttgtttgatggtgatcatttagatatgagataatggatttcacccttgttgcaacccaagttttctaatcagctttt

SEQ ID NO: 18186 - DNA, 565 bp, Gossypium hirsutum
  Clone ID: LIB3584-026-P1-K1-A8
ataaaatggacgaaatgaagatggatttaatcattaaaaaattagtagaatcaaataaaaatgggtaggagaccatctgattgaagagatggatttaagtttgtataaatatttagttttgttgttatataatttatagaagagatcattatgtttattatttttcttaattttatatctactaaaccgaaaatcggttgtctggatcacggagcaggatcttacaaccttaccttgaagtatagtccagaaggaaggatcctttgtgagtctcgctcacaaaagtagtttggtaatacctcccccaattccaagattctatcccatattccccccttctccaaaaccgttacccagagatctgcaaccatgaggggccttatttcaagcaccaaacgcctcatttcttccgctaccatggcctccttatcgccttccgtccaccggaaatacagcctaatacctatggtgatcgagcactcttcgcgtggcgagagagcttacgacatattctctcgtcttctcaaggaaaggatcgtctgcataaatggatccattaacgacg

SEQ ID NO: 18187 - DNA, 426 bp, Gossypium hirsutum
  Clone ID: LIB3146-041-Q1-K1-B6
gctcgggtactctcatcttcagccgcagccatggtacttccccccccccccccgggtgaacgtacctaagacgaagaagacctactgcaagagcaaggagtgcaggaagcacactttgcacaaggttacacagtacaagaagtgacaaagccggatgacaaggccgaaggagatgcaaagcctgaggagcatggcatcggatcttcagagaaaaaggaggctgaaccgagcacgtgaaatcattttagctgaaacccgaaatgctgttaactatagttatgggtgatattttgctctttccctgtcatggatgggggagaggggatcaaagcctgatgtgtttttaactgcgtgagattaaaaaatttgcggaaaagatatgtgttgttgtgttaggtggaaaaacaatgttagctctttgacatg

SEQ ID NO: 18188 - DNA, 415 bp, Gossypium hirsutum
  Clone ID: LIB3147-024-Q1-K1-A4
cctacgcgtccgaaatttttgcctagaaatgtttgtacttactaaggttaagccgtctaagggactgccgtgcttaaatgtgcactcggatcaggatctgggtttatgcatggaactgacccgatatcggaccgcaaaaaaatggatgatcccaggaagagcgggtaatgatttttagactgcaggagctggcttaagcgcatagatatgatatatgctgcgattggatcatggcagcgtggtggaacgcggcattgatacataagccaggagtgcagtctgttgcttggagaaggctgaaaaagtgtggtggaaaaaattattgcgcggggatggcaaagccccccattacgtcaaagtggactgggacaaatgggtggatgaagatgaagacaagggtcttggtgatcttgac

SEQ ID NO: 18189 - DNA, 340 bp, Gossypium hirsutum
  Clone ID: LIB3148-054-Q1-K1-E11
atttattcttgccaaagatgcgtgaatggcataaaagatagttggaataaatcaggagaggggatcaaagcctgatgtgtttttaactgcgtgagattaaaaaatttgcggaaaagatatgtgttgttgtgttaggtggagaaacaatgttagctctttgacatgaattaggatggatggtgtacctgtacctttaaatttgtttgatggtgatcatttagaaatgagataatatgggatttcatccttgttgcaaaaaaaaaaaaatgaaataataaaaaaaaaaaaaaaattaaaaagaacatgaaagaaattatatatgtattggagataaacatta

SEQ ID NO: 18190 - DNA, 848 bp, Gossypium hirsutum
  Clone ID: AF034131
tgaaaaaatctgggccactaaagaatggagcaaaatttgtcccttaagagattcgacgtcaacaagggagcatggacagctgaagaagatagaaaattggctgaggttattacagttcatggtgctaaaaggtggaagacaattccatccatagcaggtttaaataggtgtggtaaaagttgcaggctgagatggatgaattatcttaggcctaacatcaagagaggaaatatatcagaccaagaagaggacttgatacttaggcttcataaactccttgggaacaggtggtctttgattgcaggaaggttaccaggaagaacagataatgagatcaagaactactggaattctcatttgagcaagaaagtgaaccagaaggagaaacacagaggagcatcagctaggcaaggctgcaaatttgctcaacagagattggtggagaatgccaaagaacaagtgagagaagagaatacatctactggatttggggagtccaatataagcttcgatgtggatgacttctttgatttctccaatgtggatacccggaactttgagtgggtgaacaggtttcttgaagttgacgacggttttaagttttaactgaagctttatggatggaaccccaagagctttctgttgtttgtttatcttctatcatcatgattcatgaatttgatgcaatccatgttaatatgtaaaaccttgttatcttccctgaatttggctacatacgttttttgtgtcggctatatgccctagttgccgacatagtgaactgtagcacagactcttgttattggtgtcaatcaattagaccaacaagttgaaccccaaaaaaaaaa

SEQ ID NO: 18191 - DNA, 380 bp, Gossypium hirsutum
  Clone ID: uC-gsflnu33B009c11b1
taaagttggaacactattgcaagcaaagcaggtaactaatccaagtaattgaatagatttctttttcctttgttttaaccttgtttttgcaggtttgaagaggtgtggtaaaagttgcaggctgagatggatgaattatctgaggcctaatattaagagaggaaatatatcagagcaagaagaggacttgatccttaggcttcacaagctccttggaaacaggtggtctttgattgcgggaagattaccaggaagaacagataacgagatcaagaactactggaattctcatttgagcaaaaaaataaagcagaaagagaaacaaggctgcaaagatgaaaagagatcagtggagaatggcaaagaggaattgagacaag

SEQ ID NO: 18192 - DNA, 450 bp, Gossypium hirsutum
  Clone ID: GOSHI-09MAY01-C17_14
atcctgttcaaatgccgaggatgattttagaccaaggtcttgttatgaacttctggaaggattcttttcttctttgctttgctttccttttcagctgtctcggcatttgcacaggatgaggaagaccaaggtcttgttatgaaacttctgcaaggattcttgtcctcaggctgaagacattatcaaggagcaagttaagctactgtacaagcgacacaaaaacactgctttttcttggctgagaaacattttccatgactgttctttctagtcatgttattactttatttcttttatactttttattattgattttttattgactatttatttattcatttcattattatgatttctctcaattataattcaattctcttattatttatattttttttctattcaaattattttattcttttcttttatgttttaatattttttttatat

SEQ ID NO: 18193 - DNA, 711 bp, Gossypium hirsutum
  Clone ID: GOSHI-09MAY01-C17_10
aaaacaaataacaataataaatacgaaaattgtatagaaataagataaacaaataaacaaaattgaaaagagaaacaatgacatgcaaagtatcaaataaataagcaaaataaaaaaaatatgaaaatataaatcaacaactactacaggaacatactggacaacaagggtttgttgattgtggatcaccaactggcttacgacaaaaggaccagaccttatgtgaagaaaatggccaagagccaagactatttcttcaaggagttctcaagggccattactctcctctctgagaacaatcctctcactggtagcaagggtgagatcaggaagcaatgcaatcttgcaaacaagcccctctgaaatccgccctcgcctacgagaaagccgagtgtggccgaataaaatggttgtttactcagtttcttttccaagagacgagtttgttaatgtgcaggtgagtaatggtgcaatggtactggtttgttacgatcgacccattgcatttttcttttagcataagccaggttgccttctcttgatgttggtcatgggcgtggtggatgtagggatggatgtaatgtatgtatgtaaggtggccgttgactgtgtatgatgcatggatttcaatgatttaaaagttatcatgattcatgcggacgtgacacatagagtgaccgttagactagcaatcggactgggccgcccttt

SEQ ID NO: 18194 - DNA, 425 bp, Gossypium hirsutum
  Clone ID: GOSHI-09MAY01-C17_7
caccaggagagatgatcatgacgaatttgactactggggacaaagttgtgctttattttcaaccatgtggctggtttggagctggtcgttatgaagtggatggttatgtttataatgctgctgaggaacctaaaatattgatgacagggaagtggaatgagtcaatgagttatcagccatgtgatatggaaggagaacctcttcagggcacagaattgaaagaggtgtggcatgttgctgatactccaaaaaacgacaaattccagtttacatattttgcacacaaaccgttcttgggtgacttcgaagtcatcaacatatctaccgatggtcagttgcgcaccctttctaatacaagctatgattgttacaacacaccatggaatcggttattttactacttcttgctttctgaattttcaata

SEQ ID NO: 18195 - DNA, 663 bp, Gossypium hirsutum
  Clone ID: GOSHI-09MAY01-C17_5
cccacgcgtccggtaactgttcttatttttataccagatctgttacactctgaattatttaagcagcacgtcacaagggatctagagcaaggttagtgaccttgggttgagtgtagagatgaggaaaatcatgggtgccaaagttcttttcttctttgctttgctttccttttcagctgtctcggcatttgcacaggatgaggaagaccaaggtcttgttatgaacttctacaaggattcttgtcctcaggctgaagacattatcaaggagcaagttaagctactgtacaagcgacacaaaaacactgctttttcttggctgagaaacattttccatgactgtgctgtccagtcatgtgatgcttcactgctgctggactccacaagaaggagcttgtctgagaaggagacagacaggagctttggcctaaggaatttcaggtacattgagaccatcaaagaagctgtagaaagggaatgtcctggagttgtttcttgtgctgatatccttgttctgtctgctagggaaggcatcgtttcgttgggaggcccttatattcctctcaaaactggaagaagagacggtagaaggagcagagcagatgttgtggaggagtatcttccggaccacaatgagaccatctctggcgttcttgacaggtt

SEQ ID NO: 18196 - DNA, 845 bp, Gossypium hirsutum
  Clone ID: GOSHI-09MAY01-C17_3
gtcgattccggtcgcccacgcgtccattttttttaccagatctgttacactctgaattatttaagcagcacgtcacaagggatctagagcaaggtttgtgaccttgggttgagtgtagagattgggaaaatcatgggtgcccttgttcttttcttctttgctttgctttccttttcagctggctcggcatttgcacaggatgaggaagaccaaggtcttgttatgaacttctacaaggattcttgtcctcaggctgaagacattatcacggtgcaagttaagctactgtgcaaccgacatgctttgggacactcatggatgatggcgggaaaggtaggcagatgccagttcattacggttcaagcaagcacaacttcgtcactgtttcatccccgattgcaactcagcttcctcaagctgcaggcatggcatactctcttaagatggataagaaagacgcttgcgttgtcgcctttatcggtgatggcggtaccagcgagggagattttcatgctggtttgaactttgcagcagtgatggaagccccggttatttttgtttgtcgcaacaatggctgggccattagtacaccaacatcagatcaattttcgaagcgacggtgttgttgttaagggccaagcttatggaatcccaagcattcgagtcgacggtactgatgcacttgctgtttatagcgccattcgtgcggctcgtagtatggctataaatgagcaacgaccggtcctagttgagtctcttgcatatagagttggacaccattccacatccgacgattcgaccaaatatcgtctctcaatgaaatcgagcacttggaaacggatcga

SEQ ID NO: 18197 - DNA, 1586 bp, Gossypium hirsutum
  Clone ID: GOSHI-09MAY01-C17_2
tccacgcgtccggcccattcattttatcttgcagtattgtttacccgatccaagacctccagtcacatggccctagttcggagttttcagttggcattctccttgaggagcatctctctggatcaagaaggagagctgctacgcggtattcttgaacaaatttacccacgcgtccgcaatatgggaagtccaaataaagatcagaataaagggtttttctcagcgatgacctcgggttgatctttgtttggcaacgccatgcacagatctgtcaacgggttacttggttatgaaggggctagaagtcataaatccagaaggaggaaaagaagatgctgaggaggaagctcatagaggaagatggaagcaggaggagcgagagagctactggaaaatgatgcacaaatatataggttcagatgttacatcaatggtgactcttcctgtcctcatatttgaaccgatgactatgcttcaaaaaatggccgagttgatggaatactcctacttattggaccgagcagacgaatgtgaggatccctatctccggctggtatatgcctcatcatgggctatatctgtgtactatgcctaccaacgtacatggaaaccttttaatcctattattggggaaacatatgagctggttaatcatgaagggattacattcatttctgaacaggtcagtcatcatcctccaatgagtgctgggcatgctgaaaatgaacattttacttatgatgtcacttcaaagttaaagacaaaatttttaggaaattctcttgatgtttatcctgttggaagaacacgcgttactcttaaaagagatggggtcgttttagatttggtgcctcctcccaccaaggttaacaatctgatttttggacgaacttgggttgattcaccaggagagatgatcatgacgaatttgactactggggacaaagttgtgctttattttcaaccatgtggctggtttggagctggtcgttatgaagcggatggttatgtttataatgctgctcaggaacctaaaatatcgttgcctgggaagtggaatgagtcaatgagttatcagccatgtgatatggaaggagaacctcttcagggcacagaattgaaagaggtgtggcatgttgctgatactccaaaaaacgacaaattccagtttacatattttgcacacaaaataaatagctttgacactgcccctaagaagttgctagcatcagactctcgtctccggcctgatagatttgcacttgagaagggtgatttatccaaggccggttctgagaagagcaggttggaagagaggcagagagcggaaaagaggacacgagaggccaagggacatcagtttactcctagatggtttgatttgacagatgaaatctcagccacaccttggggtgacctggaaatctatcgcttcaatggcaaatacactgagcatcgggctactgtagatagctcagacggcattgatgaggttgacttggcttcaatcgagttcaacccatggcagtatggtaacttgtcaactgaataggtattggtgttctaatgtatacttctaaaacttg

SEQ ID NO: 18198 - DNA, 1442 bp, Gossypium hirsutum
  Clone ID: GOSHI-09MAY01-C17_1
gcaccccacgagccccctctccccccgtgcgtcccacgcgtgaccttgggttgagtgtagagatgaggaaaatcatgggtgccaaagttcttttcttctttgctttgctttccttttcagctgtctcggcatttgcacaggatgaggaagaccaaggtcttgttatgaacttctacaaggattcttgtcctcaggctgaagacattatcaaggagcaagttaagctactgtacaagcgacacaaaaacactgctttttcttggctgagaaacattttccatgactgtgctgtccagtcatgtgatgcttcactgctgctggactccacaagaaggagcttgtctgagaaggagacagacaggagctttggcctaaggaatttcaggtacattgagaccatcaaagaagctgtagaaagggaatgtcctggagttgtttcttgtgctgatatccttgttctgtctgctagagaaggcatcgtttcgttgggaggcccttacattcctctcaaaactggaagaagagacggtagaaggagcagagcagatgttgtggaggagtatcttccggaccacaatgagaccatctctggcgttctcgacaggtttgccgccatgggtattgacacccctggagtcgttgccctcctaggagctcacagtgtcggcagaactcactgtgtgaagctggtgcatcgtttgtacccagaggttgaccctgccctcaaccccgaccatgttccacacatactccataaatgccctgatcagatcccagaccccaaggccgtccagtatgtgagaaacgaccgtgggacacccatggttttggataacaactactacaggaacatactggacaacaagggtttgttgattgtggatcaccaactggcgtacgacaaaaggaccagaccttatgtgaagaaaatggccaagagccaagactatttcttcaaggagttctcaagggccattactctcctctctgagaacaatcctctcactggtagcaagggtgagatcaggaagcaatgcaatcttgcaaacaagcttcactaaaatgcctcgccaaagagaaagccgagtgtggccgaataaaatgtttgtttactcagtttcttttccaagagacgagtttgttaatgtgcaggtgagtaatggtgcaatggtactggtttgtaacgatcgatccattgcatttttcttttagcataagccaggttgccttctcttgatgttggtcatgggcttggtggatgtagggatggatgtaatatatgtatgtaaggatggtgttgactgtgtatgatgcatgaatttcaatgatttaaaagttatgatgattcatgcataatcccttccttctccattacgatgcaatactatgagcaatattattgtatttggatcaatttaatggggaagagacggggaggcacc

SEQ ID NO: 18199 - DNA, 511 bp, Gossypium hirsutum
  Clone ID: uC-gsflmaxxa048c08b1
ttttaaacccaatttccctttctatattcgtccctttgctttgattcgctgaacaaatagcaattcaattgagcttttaagttgaattcttgaacaaatttaaaaaggaatttacaatatgggaagtccaaataaagatcagaataaagggtttttctcagcgatgacctcgggtttatctttgtttggcaacgccatgcacagatctgtcaacgggttacttggttatgaaggggtagaagtcataaatccagaaggaggaaaagaagatgctgaggaggaagctcatagaggaagatggaagcaggaggtatgcatctttaactgtgttatttagatctctcttttatagaccaattcaacagatgctcttgtttttgctttgctctctctatctctgggaacttttaggaatagttaattgtacttgtaaccttttcttacgggcgatggagatcaagagagacattcgttaatttcactagttttcgaagctgatattttgactact

SEQ ID NO: 18200 - DNA, 512 bp, Gossypium hirsutum
  Clone ID: LIB3829-032-Q6-N6-E11
gaataatcatatgtttaacaacagcgaaatacctgcactgtacacagggaacaccatccttacctacatatatcacatcactttatacatacaccattcgcatgaccaaaatcaagaagaacggatatcctgtcttcaccgctaactgaacaatatgacccggaacgcatcgttactacaccaaaaccattgctacccttactaacctcgaacattaacataacttgtatcttgaacaaaaaactgagtagacaagcattctatttgtacaccctctgttttccttttggtcgaggcattttatcgaagcttgtttgcaagattgcattgcttcctgatctcacccttgctaccagagagaggattgttctcatagaggagagtaatggcccttgagaactccttgaagaaatagtcttggctcttggccattttcttaacataaggtctggtcctttgggcgtacgccagatggtgatccacaatcaacaaacccttgttggccagtatgt

SEQ ID NO: 18201 - DNA, 469 bp, Gossypium hirsutum
  Clone ID: LIB3828-007-Q1-N6-H1
tttatgtagatcgcgttgtttttctcttccgttgtgaatcattctgctcttctgttatatgattccgtgtgtatcttgaagatggatcgtgctcgatcctgatttgaacatgttaacatttaatagattcaaattttaaattcatccatacatgcacgagccgcatgaccaacatgaagacacggcaacctgtcttaggcgagaagaaaaatgcactggggcggtggttacaaacgcgatccactgcaccattactcaggcgcggcagtaccagaggagcctgctggagaacaacctcagtcaacaaacattgcattcggccgcactcggctttctctttggcgaggcatttgagtgaagcttgtttgcaagattgcattgcttcctgatctcacccttgctaccagtgagaggattgttctcagagaggaacagaatggcccttgagaactccttgaagaaatagcct

SEQ ID NO: 18202 - DNA, 443 bp, Gossypium hirsutum
  Clone ID: LIB3585-030-P1-K1-G12
cccacgcgtccgcccacgcgtccgcccacgcgtacgcccacgcgtccggtagagatgaggaagatcatgggtgccaaagttcttttcttctttgctttgctttccttttcagctgtctcggcatttgcacaggatgaggaagaccaaggtcttgttatgaacttctacaaggattcttgtcctcaggctgaagacattatcaaggagcaagttaagctactgtacaagcgacacataaacactgctttatcttggctgagaaacattttccatgactgtgctgtccagtcatgtgatgcttcactgctgctggactccacaagaaggagcttgtctgagaaggagacagacaggagctttggcctaaggaatttcaggtacattgagaccatcaaagaagctgtagaaagggaatgtcctggagttgtttcttgtgctgatat

SEQ ID NO: 18203 - DNA, 419 bp, Gossypium hirsutum
  Clone ID: uC-gsflmaxxa009e09b1
ctaaaattacagatcctaccctcctcttcttcttcttcactctaaaatattttatcaattctcgaaacccaatttccctttctatattcgtccctttgctttgattcgctgaacaaatagcaattcaattgagcttttaagttgaattcttgaacaaatttaaaaaggaatttacaatatgggaagcccaaatcaagatcggaatgaagggtcttgtgtcagcgtaagacgctggtggacatcacaagaaggagcctgtctgagaaggagacagacaggagctttggcctaaggaatttcaggtacattgagaccatcaaagaagctgtagaaagggaatggcctggagttgtttcttgtgctgatatccttgttctgtctgctagggaaggcatcgccccggtgggaggcccttatat

SEQ ID NO: 18204 - DNA, 559 bp, Gossypium hirsutum
  Clone ID: uC-gsronu33B038g08b1
cccattcgtccgcggacgcgtgggctgaatttaaacatattactaagtggaggaaaagaaagtaacaacgattcctttagtaacggcgagtgaagaaggatgaagtgcaaaattgaaatcataaatctctgagggtttatgaattgtagtttatatattttttttaaaaaaagtgaaggaagaaaacaatgaaataattttgattggaaaatcatttcatagaaggtgataaacctgtaattgtttcttctcttccacatcgttttaaaagaaagtattatagagccaagactatttcttcaaggagttctcaagggccattactctcctctctgagaacaatcctctcactggtagcaagggtgagatcaggaagcaatgcaatcttgcaaacaagcttcactaaaatgcctcgccaaagagaaagccgagagtggccgaataaaatggttgtttacttgtttcttttccaagagacaagtttgttaatgtgcagtgagtaatggtgcaatggtactagtttgatacaatcgacccattgcattttttttagcataag

SEQ ID NO: 18205 - DNA, 586 bp, Gossypium hirsutum
  unsure (1)..(586): unsure at all n locations
  Clone ID: LIB3583-023-P1-K1-B9
ttccgcgggtcgacgccacgccgnntccgcccacgccgnntccgtgacnccttgggttggagtggtagnnnagatgaggggaaaatcnaatgggtgnnncaaagttctgcttctgtgctttgctttttgctttcnncttttcagctgtnngtcggcatttgcaccaggatgannggaagaccaaggtcttgttatgaaccttctacaagnngattcttgtcctcanggctgaagacattatcaaggagcaagttaagctactgtacaagcgacacaaaaacactgctttttcttggctgagaaacattttccatgactgtgctgtccagtcatgtgatgcttcactgctgctggactccacaagaaggagcttgtctgagaaggagacagacaggagctttggcctaaggaatttcaggtacattgagaccatcaaagaagctgtagaaagggaatgtcctggagttgtttcttgtgctgatatccttgttctgtctgctagagaaggcatcgtttcgttgggaggcccttacattcctctcaaaactggaagaagagacggtagaaggagcagagcagatgttgt

SEQ ID NO: 18206 - DNA, 472 bp, Gossypium hirsutum
  Clone ID: uC-gsflmaxxa038h12b1
ccttgggttgagtgtagagatgaggaaaatcatgggtgccaaagttcttttcttctttgctttgctttccttttcagctgtctcggcatttgcacaggatgaggaagaccaaggtcttgttatgaacttctacaaggattcttgtcctcaggctgaagacattatcaaggagcaagttaagctactgtacaagcgacacaaaaacactgctttttcttgtctgagaaggagacagacaggagctttggcctaaggaatttcaggtacattgagaccatcaaagaagctgtagaaagggaatgtcctggagttgtttcttgtgctgatatccttgttctgtctgctagggaaggcatcgtttcgttgggaggcccttatattcctctcaaaactggaagaagagacggtagaaggagcagagcagatgttgtggaggagtatcttccggaccacaatgagaccatctctggcg

SEQ ID NO: 18207 - DNA, 463 bp, Gossypium hirsutum
  unsure (1)..(463): unsure at all n locations
  Clone ID: uC-gsronu33B002b06b1
attttgggttacccatggttnaggaccacatctacaaccgggacatactgatcagcacgttccaagctctcaccaatgggtctctgagttgagaaacaaggaccaaaccttatgcgaagaaaaaggacaactgccaaaactctatctacaaggagttgtgaagggccattactctcctctctgagaacaatcctctcactggtagcaagggcgagatcaggaagcaatgcaatcttgcaaacaagcttcactaaaatgcctcggcaaagagaaagccgagagtggccgaataaaacggcagtttacttgcatctttaccaagagacaagttggttaatgtgcagtgagtaatggtgcaatggtactagtttgatacgatcgacccattgcatttttttttagcataagccaggttgccttctcttgatgttggtcatgggcgtagtggatgtagggatggatg

SEQ ID NO: 18208 - DNA, 435 bp, Gossypium hirsutum
  Clone ID: LIB3272-013-P1-K1-C4
gctggcacgcaccgggccccagattcccggttcgacgccacgccccccgcgggcgtgggcgtatacatgaggaaaatcatgggtgccaaagttctcttcttgtttgctttgctttccttttcagctgtgtcggcatttgcacaggatgaggaagaccaaggtcttgttatgaacttctacaaggattcttgtcctcaggctgaagacattatcaaggagcaagttaggctactgtacaagcgacacaaaaacactgttttttcttggctgagaaacattgtccatgactgtgctgtccagtcatgtgatgcttcactgctgctggactccacatgaaggatcttgtctgagaaggagacagacaggagctctggcctaaggaatttcaggtacattgagaccatcatagaagctgtacaaagggaatgtcctgga

SEQ ID NO: 18209 - DNA, 432 bp, Gossypium hirsutum
  Clone ID: LIB3582-022-P1-K1-A11
cggacgcgtgggcggacgcgtgggcggacgcgtgggcggacgcgtgggcggacgcgtgggtgagtgtagagatgaggaaaatcatgggtgccaaagttcttttcttctttgctttgctttccttttcagctgtctcggcatttgcacaggatgaggaagaccaaggtcttgttatgaacttctacaaggattcttgtcctcaggctgaagacattatcaaggagcaagttaagctactgtacaagcgacacaaaaacactgctttttcttggctgagaaacattttccatgactgtgctgtccagtcatgtgatgcttcactgctgctggactccacaagaaggagcttgtctgagaaggagacagacaggagctttggcctaaagaatttcaggtacattgagaccatcaaagagctgtagaaagggaatg

SEQ ID NO: 18210 - DNA, 345 bp, Gossypium hirsutum
  Clone ID: LIB3189-012-P1-K1-G6
tgatggtttggtttacttggttcagagtaaccgaatgccacaggtctcatgttcgagggccgtgagagagagcagagtgagatcaggaagcaatgcaatcttgcaaacaagcttcactaaaatgcctcgccaaagagaaagccgagtgtggccgaataaaatgtttgtttactcagtttcttttccaagagacgagtttgttaatgtgcaggtgagtaatggtgcaatggtactggtttgtaacgatcgatccattgcatttttcttttagcataagccaggttgccttctcttgatgttggtcatgggcttggtggatgtagggatggatgttatatatgtatg

SEQ ID NO: 18211 - DNA, 1611 bp, Gossypium hirsutum
  Clone ID: GOSHI-09MAY01-C37_1
cccacgcgtccgcgagaatcatcagaatcagaaaaaagggaaaagggtgattaaagaaaagactcccatccccactgattctggccttgcttcccaacacgtagcatctaaccataacgcctgaaatccaccactcctctatttatttcaaaaccacttggattaaactccccctccgctccattccactctcccaaaaccaacacgccttctttgcctcgtgtttcatcagctggcgttaaactgctttctttaaagcctgcaaaatgggtgccggtggtaggatgctagttgacggtaaaaaggaggaaaaacgaggctcggtcaatcgagttccgatcgagaagcctccgtttacgctcggtcagatcaagcaagccattccgccccactgttttcgccgctccctccttcgatccttctcctacgtggtccatgacctatgcttagcctctctcttttactacattgcaacatcatattttcactttctcccacaacccttttcctacattgcttggcctgtctattgggttctccaaggttgcatcctcaccggtgtttgggtcatcgcacacgagtgcggtcaccacgctttcagtgactaccaatgggttgacgacaccgtcgggttgatccttcattccgcccttttagtcccgtacttctcgtggaaaatcagtcaccgccgtcaccactcgaacaccggttccatggagcgtgacgaagtattcgtgcccaaacccaagtctaaattatcatgctttgcgaaatacttcaacaatccacccggtcgagttctatctcttgtagtcacattgactcttggttggcctatgtacttagccttcaacgtttcgggtcgatactatgatcgattagcttcccactataacccttatggccccatttactccgatcgcgagaggctacaagtttacatctccgatactggtatatttgcggtaatttatgtactttataagattgctgcaacaaaagggctggcttggcttttatgcacttatggggtgcctctacttattgtgaatgccttccttgtgttgatcacctacttgcaacatactcactcggcattgccgcattatgactcgtccgaatgggattggttgcgaggagcattgtcgacgatggatcgagatttcggggtgttgaacaaagtgttccataacatcaccgatacgcatgttgctcatcacctcttctcaacgatgccacattatcatgcaatggaggccactaaagcaatcaaaccaatactcggcaagtattatcctttcgacgggacaccgatttacaaggcaatgtggagggaggcaaaagagtgcctttacgttgagcctgacgttggtggtggtggtggtggtagcaaaggtgttttttggtatcgtaacaagttctaaagaccgaccaactgcctgatagctggccggcgaaatcaacgtaaaacgtacttattagactagtgttaactagggaagttaataattaatggtaggaaaatgtggaatagctgcctagtagttttatgtattaagtgttgtattaataaactatatggtagaaaaaaaaaaaaaaaagggcggccga

SEQ ID NO: 18212 - DNA, 354 bp, Gossypium hirsutum
  Clone ID: LIB3196-025-P1-M1-B3
ggcattcgcaaatttattgtttatatctaagaaatggttgcttaattttggaaaacaaaagttattgtagttagttttgcttcttgcgtgtccagccagcaaaatgggtgccggtggtaggatgccaattgacggtataaaggaggaaaatcgaggctcggtcaatcgagttccgatcgagaagcctccgtttacgctcggtcagatcaagcaagccattccgccccactgttttcgccgctccctccttcgatccttctcctacgtggaccatgacctatgcttagcctctctcttttactacattgcaacatcatattttcactttctcccacaaccctttttctacattgc

SEQ ID NO: 18213 - DNA, 494 bp, Gossypium hirsutum
  Clone ID: GOSHI-09MAY01-C27_23
ttgctcttgctccaagcagcatgaaaatcaaggtggtggcacccccagagagaaagtacagggtctggattggaggacctatcttggcatcactcagcaccttccagcagatgtggatttccaagggtgagtatgatgagtccggtccatccattgtccacaggaagtgcttctaaatttacaagtcatttattgagatgatgggtctttggagctggtgggcggcagacaaatgggggcttatttccatccttcccatgcatctttcaaccatgttgctgagtagaatgtagctggagagattgtgttgcttctttattctatttttcttcaaattcaaggctcccccccccccaccgcaaacattaatgtcaatagctattgtacgagaaattttaaaattcgatgggaattatattttatacttggttttgaaaaaaaaaaaaaaaaaaaaaaaaaaaaaaaaaaaaaaaaaaaaaaaaaaaaaaaaaaat

SEQ ID NO: 18214 - DNA, 525 bp, Gossypium hirsutum
  Clone ID: GOSHI-09MAY01-C27_20
cggacgcgtgggttcagtttcagcgtctctgtcaacaacaagttgttttttattttcttcctatttttttttttgcttaaacaaggttaacaagagatggcggatgaggatattcaacctcttgtgtgtgacaatggaactggaatggtcaaggctggttttgctggtgatgatgcccctagggcagtcttccctagtattgtcggtcgtccacgccacacaggtgtcatggttgggatgggtcaaaaggatgcttatgtaggtgatgaagcccagtcaaagagaggtatcctcactttaaagtaccctatcgaacatggcattgtcagcaattgggatgacatggagaagatttggcgccatactttctacaaatgggcttcgtgttgcccctgaagagcatccagtacttcttacagaagctccactcaaccctaaggcgaatagggagaagatgtcccagattatttttgaaacattcaattcttcggctatgtatgttgcttttaggcagttctttcactt

SEQ ID NO: 18215 - DNA, 921 bp, Gossypium hirsutum
  Clone ID: GOSHI-09MAY01-C27_19
tgacaacatcgtgggaaaaatgcataattccgatgaggaaagttctcttaatggaattgatgatttaaggtctgtaagacctgatacaaatatgactagagagtctggtacagaaaacctgtcttcagagaatcccccccggccggctgtttgggatattttccggagggaggatgtacccaagttaatggagtgcttacagaagcatcacatagaattctatcacatcagtaatcttcccgtgaattttgttattcatcctattcatgtgctgaccctccatctcaccgaaagacataaaaggcagctgaaggaggagttcaatgttgaaccttggacgttcgagcaacatgttggtgaagcttgtttcattcccgcgggatgccctcatcaagtaagaaatagacagtcatgcattaaagtagcccttgattttgtgtcccctgaaaatgtgcaagagtgtataagattgacggaggagtttcgcttgcttccaaaaagccatagagctaaggaagataaactggaggtaaagaagatggcggtatatgcagcaacccttgcagtaagtgaggccaaagatctgagtacaaaactcaagtaaggtcatgtttgctcttcattcacctcttatatcctaccgcgattgtgtagtttttgtaaagaatgtgcttttcgatagttgttagatgacctgcttaagtagtagcagctacgctgaagtcgctagccagctcaaatgaatgtgtttttgactcgagtaagttcaccatttctttacttagcacttagcatggaagcttcaccatctgcaaaaatacgcagattccttagagagcttccttttaactactagagggaatcttcagtatctgaaacaatttaagattccttgaagctttgctgttactgcaatttgac

SEQ ID NO: 18216 - DNA, 531 bp, Gossypium hirsutum
  Clone ID: GOSHI-09MAY01-C27_18
ttcagatgcataagtgcctgttatctttcacttctaacacattgcatttacgcctccagcagctgcaccacggagactacagcgaagagactgaaaaaggggaaaaaaagcgtcgtcgtttttgcttcttcttcttcttcttcttcttccctctctctctctctcttactctgaagctcctctttcgttctttcgttcactcagtattgtaaaagatggccgacggtgaggatattcaacccctcgtctgtgataatggaactggaatggtgaaggccggttttgctggtgatgatgctccaagggcagtttttcccagtatcgttggtcgtccccgacacactggtgttatggttgggatgggtcagaaggatgcctatgtaggagatgaagcacaatctaaaagaggtatccttactttgaaatatcctattgagcatggtattgggagcaactgggatgatatggaaaagatctggcatcatacattctacaacgaactccgtgttgctcctgaggagcaccctgtgc

SEQ ID NO: 18217 - DNA, 430 bp, Gossypium hirsutum
  Clone ID: GOSHI-09MAY01-C27_12
caccattaagttgatgggccctaaggagatggcggtggacggacaattggtgcttaattccttccttacaatccatctttgaaccatgctgcttaaatggatgtttggggctggggactggattgtgctgcttgctttatttatttaatattcaagggttttgagaacattaatgttaatagctattattgcacgagattttttcaaaaaaacgttagtgccagtttgcgcggtccgtcttctgggaaaattaggggcaatgaaatcatattgtgaatcctttttgttaaaagcattgatcgctgcgtttctaagtattggcaggtgaatagcatgattggtcagatgctcaatgctggtggtcggtcttcgattgtaatcagagtcattgtcattcttcttccatcttgaattcgttaaaatgttaaac

SEQ ID NO: 18218 - DNA, 444 bp, Gossypium hirsutum
  Clone ID: GOSHI-09MAY01-C27_10
gcgttcggccaacccgtccgcccacccgtccgctgggtcagggctctaatggctgccaacaacatgccggctggaatagacaaagagcaggcctttggcatggcggaaacagagatggaatatagggtagaactttttaacaggcttgcacaaacatgtttcaacaagtgtgttgacaaaaggtacaaggaatctgagctaaacatgggggaaaacagttgcattgatcgctgcgtttctaagtattggcaggtgaatagcatgatcggtcagatgctcagtgctggtggtcggcctccgatgtaaaacacagtcattgtcatcctcccatcttgaattcgtttaaaatgtaaaacaaggctaagtcctgcaattgacattagcaatttatctttggttgggacagctaatcaaaacctcttataaaccaagctttcatccatg

SEQ ID NO: 18219 - DNA, 1650 bp, Gossypium hirsutum
  Clone ID: GOSHI-09MAY01-C27_8
tttttcttttctcctccataggctatataacttcagcttctccggcttctctgtctccttctcgccgttgctctgtgttttcttgcttaaacaaggctaaccagagatggcggatgaggatattcaacctcttgtgtgtgacaatggaactggaatggtcaaggctgggtttgctggtgatgatgcccctagggcagtcttccctagtatcgtcggtcgcccacgccacacaggcgtcaatggtggggatgggccaaaaggatgcctatgtaggagatgaagctcaatcaaagagaggtatcctttccttggagtcccctatcgaacttggctttgtcggcaatggggatgccatggaaaggttggggcaccttactttctacaccgggcttcgtgtcgcccctgaagaacatccggtacttcttacagaagcaccgcttaaccccaaggctaatagggagaagatgactcagataatgtttgaaacatttgatgtgcctgctatgtatgttgctattcaggcagttctttcactttatgccagtggtcgtacaacaggtattgtgttggattctggtgatggtgtgagccacactgtgccaatttatgaaggctatgctcttccccatgccattctccggttagaccttgccggtcgtgatcttacggattccttgatgaagatcttaaccgagagagggtactctgttacgacgactgcagaacgggaaattgttcgtgacatgaaagagaagctcgcatacgtagctcttgattacgagcaagaattggagactgccaagagtagctctgccattgaaaagagttacgaattgcccgatggtcaagtgatcacaatcggagcggagaggttccgttgccccgaagtactcttccaaccatctctgattggtatggaagcagccggaatccatgaaactacatacaactccatcatgaagtgtgacgttgatatcaggaaggatctgtacggaaacatcgtgctgagcggtggatcaaccatgttccctggtattgccgataggatgagcaaggaaatcactgcacttgcacctagcagcatgaagatcaaggtggttgcacctcctgagagaaaatacagtgtttggattggaggttccattttagcttctcttagcaccttccagcagatgtggatttccaaggctgagtacgatgaatcaggtccggctatcgttcaccggaagtgtttctaatttggatgatatgaattatcaagtctacatttatcggcccgtgtcgttgcgagttcagtgcgctggcccccgcgccgcccttttttttctttaatcaatctggtatatatatattatattatcggtggcattgagtggcttgtaaattgtaatgctttggtctatctttcgtttaggccacaaagtcttcattttgggaattttccgttagagcattgaatgatttttttttattaaaaagattgattgcaagatatataataagaatcagaagtacgttttttgtttgattaaattttaattttaaaaatgttttatatcttttccgagtgtgttgtaaaatcaaagttattcacaaaatatttacatgccaataatatttgatgcattggtataaaaaaaaaaaaaaaaa

SEQ ID NO: 18220 - DNA, 842 bp, Gossypium hirsutum
  Clone ID: GOSHI-09MAY01-C27_7
cccacgcgtccgcccacgcgtccgaaaaaacactctggttgtggagatggcacaggcaatggcatcaatggctggtttacgtggctcttcacaggctgtcctggacggcagccttcaactcagtggccaaacccgcttcaacattcctagcaacaaccgagtgcccacgcgtccgtctggtttcactgtcagagctcatcagacaccggccgagcctgagactggacgcagagccatgttgggtcttgttgctgctggtttggccactggctcctttgttcaagctgtgcttgccgatgccagaagcatcaaggttggcccacctccccctccctctggtggactgcctggaactctgaactctgatgagccaagagaccttgttctgccatacaaagacaggttcttcctccaaccagttactccagctcaggcagcacagagagcaaaggaatcagccaaggacattctgggtgtcaagaacttgattgacaaaaaagcctggccttatgtcatgaatgatctccgtctcaaggccgagtatctccgctatgacctcaacaccgtcattgctgccaagtccaaagatgagaagaaaactctaaaggacctcaccaagaagctcttcagtaccatcgatgatcttgaccatgcagccaagatcaaaagcacccctgaagcagagaaatcttacgctcagaccatatctagtctgaatgatgttcttgccaaactgtgctaaaagaatgcttaattgtattttgatgtaagatagctttggtcatcgtttgtagacacactttcatttttatgctatctgaaagaacctttaccacttaacg

SEQ ID NO: 18221 - DNA, 1689 bp, Gossypium hirsutum
  Clone ID: GOSHI-09MAY01-C27_6
gacgcacgcgtgcgatccacacaacatcgtccttgtacgagagatagaaagaaaaccaaagcgtcgtggttcttttcttgttaagtacactgtaaaagatggccgatactgaggagattcaaccccttgtctgtgataatggaactggaatggtgaaggctggttttgctggtgatgatgctcccagggcagtttttcccagtattgttggccgaccccgacacactggtgttatggttgggatgggtcagaaggatgcatatgtaggagatgaggcacaatctaaaagaggtatccttactttgaaatatcccattgagcacggtattgtcagcaactgggatgatatggaaaagatctggcatcatacattctacaatgagctccgtgttgctcccgaggagcacccagtgcttctcacagaggcacctctcaaccccaaggccaacagagaaaagatgactcagatcatgtttgagaccttcaatgtgcctgccatgtatgttgccatccaagctgttctctctttgtatgccagtggtcggacgacaggtattgtgctggattctggtgatggtgtatctcacactgtgccaatctatgaagggtatgcccttccacatgccatcctccgtctagaccttgctggtcgtgatctcactgattctttgatgaagattcttactgagagaggttacatgttcaccaccactgctgaacgggaaattgtccgtgacatgaaggagaagcttgcttacgttgccttggactatgagcaggaactggagactgccaagagcagctcttctgttgagaagaactatgagttgcctgatgggcaagtcattactattggagctgagagattccgttgtccagaagtcctcttccagccgtctcttattgggatggaagctgctggaatccaggaaactacatataactctatcatgaagtgtgatgttgatatcaggaaggatctctatggtaacattgtgctcagtggtggttcaactatgtttcctggtattgctgaccgaatgagcaaggagatcactgcccttgctcctagcagcatgaagattaaggtagttgcaccacccagagagaaagtacagtgtctggattggaggatctatcttggcatcactcagcaccttccagcagatgtggatttccaagggcgagtatgatgagtccggtccatccattgtccacaggaagtgcttctaggttttataagttctttgatggtgagttacattttcatttacttggctttttcgtgtcctgtgtcaaaattgaaatcaaggtccggtttatatggggaaagtgttgaaggtgggatcactgaaggaggatgtactttgatcttgatgtactattatggctttcatttgtttccacaaccattgagatgatggccctctggatgtggtagtgggcaaactattgatgctctattccttcctttccatgtatcgttcaactatgttgtttaataggatgtttgtagctagagagtgattgtgatgcttatttcttatattttctttattttcacattcaaggtttttttctccaccgaaaacattattgtcaatagctgttgtatgaaggaattttaaattagtgtcagtggtatgatctttcaagttgaagatttgttcttacttatgggttcttgtt

SEQ ID NO: 18222 - DNA, 1559 bp, Gossypium hirsutum
  Clone ID: GOSHI-09MAY01-C27_5
ctacatttcagtttcagcgtctctgtcagcgtctctgtcaacaacttgccgttgttttttattttcttgcttaaacaaggttaacaagagatggcggatgaggatattcaacctcttgtgtgtgacaatggaactggaatggtcaaggctggttttgctggtgatgatgcccctagggcagtcttccctagtattgttggtcgcccacgccacacaggtgtcatggttgggatgggtcaaaaggatgcttatgtaggtgatgaagcccagtcaaagagaggtatcctcactttaaagtaccctatcgaacatggcattgtcagcaattgggatgacatggagaagatttggcaccatactttctacaatgagcttcgtgttgcccctgaagagcatccagtacttcttacagaagcaccactcaaccctaaggcgaatagggagaagatgacccagattatgtttgaaacattcaattctccggctatgtatgttgctattcaggcagttctttcactttatgccagtggtcgaacaacaggtattgtcttggactctggtgatggtgtgagccatactgtgccaatttatgaaggctatgccctcccccatgctattcttcgtttggaccttgctggacgtgatcttacagattccttgatgaagatcttgactgagagagggtactctttcacaacaactgcggagcgagaaattgttcgtgatatgaaagaaaaacttgcttacgttgctcttgattttgagcaagaattggagactgccaagagtagctctgccatcgaaaagagttatgaattgcctgatgggcaagtgatcacaataggggcggagaggttccgttgtccagaagtactcttccagccatctctgattggaatggaagctgctggaatccatgaaactacttacaactccatcatgaagtgtgatgttgatattaggaaggatctttacggaaacattgtgcttagtggtggatcgaccatgttccctggcattgctgataggatgagcaaggaaatcactgcacttgcccctagcagcatgaagatcaaggtggttgcacctcccgagagaaaatacagtgtctggattggaggatccattttagcatctcttagcaccttccagcagatgtggatttccaagggcgagtatgatgaatcaggcccagctatcgttcaccggaagtgcttctaatttgaatgtatcggaagcctacatttttcagtcatctgtctgtgtgagttcagtttgttggacatctgaagctttggtttttatgaatggaggaaagtttatggtatatacagtctgtctctcattagatttcaggttttagattccaaaagtacttttggcatggagtggcttgaatggatttcgaacttgagagttgctttggtcttttttatttttgtagtagggccaagacttttcatttctggatgcattttgttaaagaccatctaccccttaaacaatgatttccttttggattgttggcaaattaatgagaactagaattttctaatcat

SEQ ID NO: 18223 - DNA, 1450 bp, Gossypium hirsutum
  Clone ID: GOSHI-09MAY01-C27_4
acttcaacactccgtctaagggagagaatccacaagcaaaggcaatagaaaatggcagaaaacgaagacattcagcctcttgtttgtgacaatgggactggaatggtcaaggctggatttgctggagatgatgctccaagagctgtattccctagcattgttggtcgcccacgtcacactggtgtgatggtcggtatgggccaaaaggatgcttatgtgggagatgaagctcaatcgaaaagaggtattttgactttaaagtacccaattgagcatggtattgttagcaattgggatgacatggagaaaatctggcatcataccttctacaatgagcttcgagttgcccctgaggaacatccggttctcctcacagaagctcctcttaacccaaaggccaatcgtgaaaaaatgactcaaattatgtttgagacattcaatgcccctgctatgtatgttgctatccaagctgttctttccttgtatgccagtggccgtacaaccggtattgttttggactctggggatggtgtgagccacacagtccctatctatgaaggctatgctcttccacatgccatcttgcgtctcgacctagctggtcgtgatctcactgatgctctcatgaaaatattaacggagcgtggttattctttcacaactacggctgagcgggaaattgtgagagacatgaaggagaaactagcttacattgctcttgactatgaacaagagttggagacagcaaaaaccagctctgccgttgagaaaagctatgagctacctgatggacaggttattaccattggggctgaacgattccgttgtccagaagtcctcttccagccatccatgatcgggatggaagctgctggcattcatgaaacgacatacaactcaatcatgaagtgtgatgtggatattaggaaggatctctacggaaacattgtcctcagtggtggcaccactatgttccctggaatcgctgacaggatgagcaaggaaatcaaagcattagccccaagcagcatgaagattaaagtggttgcaccaccagagaggaagtatagtgtttggataggaggctccattttggcatccctcagcaccttccagcagatgtggatttcaaaggcagagtacgacgagtctgggccatcaattgtgcacaggaaatgcttctagagaagagctatacatacagtacacgttttgtatcacagcaaagcttataaatcaagtgggtgctttcttttcttttctgctccgttaatttatttcccccccttttccttttttctttttttttttttgccctctttgaggtggttcccaatgttgctttatggagggatacccccctttctttttttcttttattaggggagaaaaggcggggttttgattgattttgtacccgatatggtttggattgaacaaaaaatctttt

SEQ ID NO: 18224 - DNA, 722 bp, Gossypium hirsutum
  Clone ID: GOSHI-09MAY01-C27_3
ctaatttgagatccaatttaacggacctagtgaagcctgaaccggtttccttttcccatttctcgttttcggcggatctttaaaccctaacaagaaccaggcttctcttcaatcagaggaaaatcatacaaggttctaatggctgccaacaccaccccagctggaatagacaaagagcaggccttcggcatggcggaaacggagatggaatatagggtaaaactcttcaacaggcttggacaaacatgtttcaacaagtgtgttgacaaaaggtacaaggagtctgagctaaacatgggtgaaaatagttgcattgatcgctgtgtttcaaagtattggcaggtgaatagcatgattgggcaaatgctgagtgctggaggtaggcctccaatgtaagatgcggccatcttcgattctcaattctgatttacatgtaaaagccatggctttgtcttgctggttgcctgagaatgtggagactgaaattcagcttacaacatgtctttaatgtgttatgaaatcacattttgttctgataattgtagcagttttgtattacttactactatacaataaggattttggtgttgaagagcttcttggttactggttaaattttttaaagaggaattgccatttgaattcataaaataaaaaaaaaaaaaaaaaaaaaaaaaaaaatataaaaaaaaaataaaaaaataaaatagtaataaaaatat

SEQ ID NO: 18225 - DNA, 1749 bp, Gossypium hirsutum
  Clone ID: GOSHI-09MAY01-C27_2
cccacgcccccgcccccgcccacgcgtcacctccactgcagcaggagcagagggaaaaaggataaaagcatcgtcgtgttctcgcttcttcaactctgtctctacgtctctgaacctcctcctttcgttcttttcttattcagtattgtaaaagatggccgatgctgaggatattcaacccctcgtctgtgacaatggaactggaatggtgaaggctggttttgctggtgatgatgctcccagggctgtttttcccagtattgttggtcgaccccgacacactggtgtcatggttgggatgggtcagaaggatgcctatgtaggagatgaagcacaatccaaaagaggtattcttactttgaaatatcccattgagcatgggatcgtcagcaactgggatgatatggaaaagatctggcatcatacattctacaatgagctccgtgttgctcctgaggagcaccctgttcttctcacggaagcacctctcaaccccaaggccaacagagaaaagatgactcagatcatgtttgagaccttcaatgtacctgccatgtatgttgccatccaggcagttctttctttgtatgccagtggtcgtacaacaggtattgtgctggattccggtgatggtgtttctcacactgtgccaatctatgaagggtatgcccttcctcatgccatcctccgtctagaccttgctggtcgtgatctcactgattctctgatgaagattcttactgagagaggttatatgttcaccaccactgctgaacgggaaattgtccgtgacatgaaggagaagcttgcctatgttgccctggactatgagcaggaactggagactgccaagagcagctcttctgttgagaagaactatgagttgcctgatggacaagtaattactattggagctgagagattccgttgtccagaagtcctcttccagccatctctcattggaatggaagctgctggaatccatgaaactacctacaactctatcatgaagtgtgatgtggatatcaggaaggatctctacggtaacattgtgctcagtggtggttcaactatgttccctggtattgcagaccgtatgagcaaggagatcactgctcttgccccaagcagcatgaagatcaaggttgttgcaccaccagagagaaagtacagtgtctggatcggaggatctatcttggcatcactcagcaccttccagcagatgtggatttccaagggtgagtatgatgagtcgggtccatccattgtccacaggaagtgcttctaaatttacaagtcatttaatggtgagttacattttctgttagttggcttttcgtgtcgtgtgtcaagtgaactcaaggtcgggttgatgtgggaaatggattattgaaagagggttgtactttgatcttgatgtaatattagcctttcattctgctgtgatttgtgatgcccgctggtgtcactgtgatagagatgatgggtctttggagctggtggtcggcagacagtgggtgcttatttccatcctttccatgcatctttcaaccatgttgctgaatagaatgtagctggagagattgtgttgcttctttattctatttttcttcaatttcatattcaaggctaccccctcccctcttcaaacattaatgtcaatagctattgtacgagaaattttaaaattcgatgggaattatatttaatacttggttttgaattcttaatgtgaatcatttttatctg

SEQ ID NO: 18226 - DNA, 1836 bp, Gossypium hirsutum
  Clone ID: GOSHI-09MAY01-C27_1
cccggtcgcccaccgtccgggacctgggcggaccgtccgcggcggcctccagcagctgcaccacaactacagagaagagagtaaaggggaaaaaaagcgtcgtcgtttttgcttcttcttctacttcgctctctctccttctccgaagttcctctttcgttctttcatttattcagtattgtaaaagatggccgacggtgaggatattcaacccctcgtctgtgataatggaactggaatggtgaaggccggttttgctggtgatgatgctccaagggcagtttttcccagtattgttggtcgtccccggcacactggtgttatggttgggatgggtcagaaggatgcctatgtaggagatgaagcacaatctaaaagaggtatccttactttgaaatatcctattgagcatggtattgtgagcaactgggatgatatggaaaagatctggcatcatacattctacaatgaactccgtgttgctcctgaggagcaccctgtgcttctcacggaagcacctctcaaccccaaggccaatagagaaaagatgactcagatcatgtttgagaccttcaatgtacctgctatgtatgttgccatccaggccgtcctctctttgtatgccagtggtcgtacaacaggtattgtgctggattccggtgatggtgtttctcacaccgtgccaatctatgaaggatatgcccttccacatgccatcctccgtcttgaccttgcaggtcgtgatctaaccgatgccttgatgaagattcttaccgagagaggttacatgttcaccaccactgctgaacgggaaattgtccgtgacatgaaggagaagcttgcttatgttgccctggactatgagcaggaactggagactgccaagagcagctcatctgttgagaagaactatgagttgcctgacggacaagtcattactattggagctgagagattccgttgcccggaagtcctcttccagccatctttcatcgggatggaagctgctggaatccatgaaactacctacaactctatcatgaagtgcgatgtggatatcaggaaggatctctacggtaacattgtgctcagtgggggttcaaccatgttccctggtattgcagaccgcatgagcaaggagatcactgcacttgctccaagcagcatgaagattaaggtcgttgcgccaccagagagaaagtacagtgtctggattggaggatctatcttggcatcactcagcaccttccagcagatgtggatttccaagggtgagtatgatgaatccggtccatccattgtccacaggaagtgcttctaagttttgtaattgcttttgatggtgatctacattttgcatttagttggctttttttgtgtgccgtgtcaagtgaactccaaagtctggtttatgtggggggagttagggatcattgtaggatggtgtacttgatattgacgtattattattttagcctttcaccgtatcaccaccattaagatgatgggtcctatggagatggcggtgggcggacaattggtgcttaattccttccttacaatccatctttgaaccatgttgctgcttaaaaggatgtttggagctggagactggattgtggtgcttttttattttattttatttattataatattcaagggttttgagaacattaatgttaatagctattattgtacgagatttttttttgaaaaattagtgtcagtttgcggtcaaacttctatggaaattatatttaatacctggttttggaatattgtgaatccttttttgctttgataaaaaaaaaaataaaaatatgtttttaaataaat

SEQ ID NO: 18227 - DNA, 580 bp, Gossypium hirsutum
  Clone ID: AI725724.1
gcctgatggacaagtaattactattggagctgagagattccgttgtccacaagtcctcttccacccatctctcattggaatggaagctgctggaatccatgaaactacctacaactctatcatgaagtgtgatgtggatatcacgaaggatctctatggtaacattgtgctcagtggtggttcaactatgtcccctggtatcgcagaccgtatgagcaaggagatcactgctcttgctccaagcaccatgaagatcaaggttgttgcacccccacagacaaagtacagtgtctggattggaggatctatctcggcaccactcatcaccttccagcagatgtggacttcccagggtgagtatgatgagtccggtccctccattgtccacacgatatgctcccaaatttacgactcactctatggtgagttacctttcctgtccactcgggcttttcctgtcctgtgtcacttcacccactggtccggttgattctggaaatgcaccattgacggagggttcttctttcgaccttgacttcctactacccttcccctctgccctgaatcgtgaagccccccc

SEQ ID NO: 18228 - DNA, 470 bp, Gossypium hirsutum
  Clone ID: LIB3135-004-Q1-K1-G8
agaaaacttctgctgccatttccttgtttcggcgaatccttaaaccctaacgaaaacaaaggtttgatccaatcagaggaaattcttggtcagggctgtaatggctgccaacaacatgccagctggaatagacaaagagcaggcctttggcatggcggaaacagagatggaatatagggtagaactttttaacaggtaaggcagaattgcccaaattttgatgaatatgtttagggttaaacaagaaatgtcataattgctatgcgaaatgcatgtaaccttcgtttcgccgtgtaaaactccctgtatgctcgatattatctgctgagcaaggaaaatttcttagtagagaactttgaaagaggacctcaatggcccggtttgcttctgtgttatcaatagtgtggcagtattttctgttactttgcaagcttttatgccaccaatccttgaatttctgaattcagcat

SEQ ID NO: 18229 - DNA, 452 bp, Gossypium hirsutum
  Clone ID: uC-gsflmaxxa061a08b1
ttgttcttctaaattcacaagtcatttaatggtgagttacattttctgtttagttggctctttcgtgtacctgtgtcaagtgaactaaaggtctggttgatgtgggaaatggattattgaaggtgggttgtactttgaccttgatgtaatattagcctttcattctgctgtgatttgtgatgcccgctggcgtcactgggatagagatgatgggtctctgtagctggcggtcggcagacaaatgggtgcttatttccatgctttgcatgcatctttcatccatgttgctgagtacattgtagccggacagattgagctgcttatttattctatatttctctaaattcaaggctcccccccgcgcaccgaacacattaatgtcaatagctattgtactagaaattataaaattgagtgggaattatcttacatactggtttttgtgtttgcaa

SEQ ID NO: 18230 - DNA, 428 bp, Gossypium hirsutum
  Clone ID: LIB3147-004-Q1-K1-B12
accacgcgtccgatataactaagataacttctgctgccatttccttgtttcggcgagtccggataccctaacgaaaacaaaactttgatccaatcagaggaaattcttggtcagggctgtaatggctgccaacaacatgccagctggaatagacaaagagcaggcctttggcatggcggaaacagagatggaatatagggtagaactttttaacaggcttgcacaaacatgtttcaacaagtgtgttgataaaaggtacaaggaatctgatctaaacatgggggaaaacagttgcattgatcgcttgcgtttctaagtattggcaggtgaatagcatgattggtcagatgctcagtgctggtggtcggcctccgatgtaaaacagattcattgtcatccttcttccatcttgaattcgtttaaaatgt

SEQ ID NO: 18231 - DNA, 399 bp, Gossypium hirsutum
  Clone ID: uC-gsflmaxxa061a07b1
ttgttcttgtaaattcacaagtcatttaatggtgagttacattttctgtttagttggctctctcgcgacccgtgtcaagtgaactaacggtctggttgatgggccaaatgtattattgacggtggcttgtacatagaccttgctcgaatatttgccttgcattctgctatgattggcgatgcccgctggcgtcactggaatacagataatggggctcattagctgctcggtcctggacatatggtagcttattttcatgctactgatgcatatcatcacccataatgatctgtacatatgagctcgacagattgagctgattatttagtagatcaataccaaggtccatggctcccccatgagaaccgaacacattaacgtcaacagctattgtgctag

SEQ ID NO: 18232 - DNA, 577 bp, Gossypium hirsutum
  Clone ID: LIB3585-052-P1-K1-C7
atattgacgtattattattttagcctttcaccgtatcaccaccattaagatgatggctagctctccccacataaaccagactttggacttcacttaacatcgcacacaaaaaaagccaactaaatgcaaaatgtagatcaccatcaaaagcaattacaaaacttagaagcacttcctgtggacaatggatggaccggattcatcatactcacccttggaaatccacatctgctggaaggtgctgagtgatgccaagatagatcctccaatccagacactgtactttctctctggtggcgcaacgaccttaatcttcatgctgcttggagcaagagcagtgatctccttgctcatgcggtctgcaataccagggaacatggttgaacccccactgagcacaatgttaccgtagagatccttcctgatatccacatcgcacttcatgatagagttgtaggtagtttcatggattccagcagcttccatcccgatgaaagatggcttggaagaggactttccgggcaacggaatttcttagctccaatagtaatgacttgtccgtcaggcaactcatagt

SEQ ID NO: 18233 - DNA, 334 bp, Gossypium hirsutum
  Clone ID: LIB3147-005-Q1-K1-F8
ggattattgaaggagggttgactttgatcttgatggaatatacacacctttcattatgttgtgatttgtgatgcccgctggtgtcactgtgatagagatgatgggtctttggagctggtggtcggcagacaaatgggtgcttatttccatcctttccatgcatctttcaaccatgttgctgagtagaatgtagctggagagattgagtcgctttattatactatttttcttcacatgaaaagcttccaccccctgctgataaacatgaacgcagttcgctattgtacaagaaattttaaataacgaagggaatcttgtttattactgggttttg

SEQ ID NO: 18234 - DNA, 644 bp, Gossypium hirsutum
  unsure (1)..(644): unsure at all n locations
  Clone ID: AI730536.1
ggaaaaccaaagcgtcgtggttcttttcttgttaaggactttatttatcattaccggttgcaagtactttttgcttcaccgacgatctcagtccttgtttgtaatacagtacactgtaaaagatggccgatactgaggagattcaaccccttgtctgtgataatggaactggaatggtgaaggctggttttgctggtgatgatgctcccagggcagtttttcccagtattgttggccgaccccgacacactggtgttatggttgggatgggtcanaaggatgcatatgtaggagatgaggcacaatctaaaagaggtatccttactttgaaatatcccattgagcacggtattgtcagcaactgggatgatatggaaaagatctggcatcatacattctacaatgagctccgtgttgctcctgaagagcacccagtgcttctcacagaggcacctctcaaccccaaggccaacaaagaaaagatgactcaaatcatgtttgagaccttcaatgtacctgccatgtatgttgccatccaagctgttctctctttgtatgccagtggtcggacgacaggtattgtgctggattctggtgatggtgtatctcacactgtgccaatctatgaaaggtatgcccttccc

SEQ ID NO: 18235 - DNA, 478 bp, Gossypium hirsutum
  Clone ID: uC-gsflnu33B133b07b1
tctcgcgtccggctatccaagctgttctttccttgtatgccagtggccgtacaaccggtattgttctggactctggggatggtgtgagccacacagtccctatctatgaaggctatgctcttacacatgccatcttgcgtctcgacctagctggtcgtgatctcactgatgctctcatgaaaatattaacggagcgtggttattctttcacaactactgctgagcgggaaattgtgatggcccaaaaaggaggagcaatattgaagagaaacaggagatggttactgcaacaaacaaggctggactttatgcgtacgagtgtaaaacctgtaaccggtctttcccatcattccaagctacccaccaccaactctgatgcacccgtcatgctggaccgaatcttgcgttttctggttagctacaaacttctcaatggtttcttgcgtaccttaccttgggggcaagtggaaagactctt

SEQ ID NO: 18236 - DNA, 480 bp, Gossypium hirsutum
  Clone ID: uC-gsflnu33B004b08b1
ttaagtgtgatcgtccacttatgcgggcacctttaccgaccacatctgtcccttatggattggatcgaccatgactcaatgaggttgctgataggatgagcagggaaatcactgtactacccaatatcagtatgcagattagggaggaacaacatccagagagaatatacatggtgtgattgggaggatccattttagcatctcttagcaccttccagccgatgtggatttccaagggcgagtatgatgaatcaggcccagctatcgatcaccggaagtgcttataattcgaatgtatcggaagcctacatttatgagccatctgtctgtgagagttcagtttgttcgacatctgaagctttggtttttatgaatggatggaaagtttatggtatatacagtctgtctctcattagatttcaggttttagattccaaatgtactcttggcatggagtggcttgaatggatttcgaacttg

SEQ ID NO: 18237 - DNA, 471 bp, Gossypium hirsutum
  Clone ID: uC-gsronu33B167f11b1
tccctttcgtccgcccacgcgtccgcccacgcgtccgcccacgcgtccgcggacgcgtgggagattccgttgtccagaagtcctcttccagccatctcttattgggatggaagctgctggaatccatgaaactacatacaactctatcatgaagtgtgatgttgatatcaggaaggatctctatggtaacattgtgctcagtggtggttcaactatgttccctggtattgctgaccgaatgagcaaggagatcactgcccttgctcctagcagcatgaagattaaggtagttgcaccaccagagagaaagtacagtgtctggattggaggatctatcttggcatcactcagcaccttccagcagatgtggatttccaagggcgagtatgatgagtccggtccatccattgtccacaggaagtgcttctaagttttataagttctttgatggtgagttacatttgcatttac

SEQ ID NO: 18238 - DNA, 388 bp, Gossypium hirsutum
  Clone ID: LIB3149-055-Q1-K1-F4
cgaccacgcgtccgcccagcgtccgaaggaatcactgcactggcccttagcagcatgaagatcaaggtggttgcacttcccgagagaaaatacagtgtctggattggaggatccattttagcatctcttagcaccttccagcagatgtggatttccaagggcgagtatgatgaatcaggcccagctatcgttcaccggagtgctttaattgaatgtatcgaagccacattttcagcattgctggtagtcagtgtgacattagcttgtttataatgagaagtatggttcagctgttataattagttaatcaatcttgctgtgtgagatactaatgtgcttattggtgcacttattgtcatgaactcctaaatctgtggatagatattat

SEQ ID NO: 18239 - DNA, 370 bp, Gossypium hirsutum
  Clone ID: LIB3189-017-P1-K1-E10
gaattgcctgatggacaagtaattactatctgtttctgagagattccgttgtccagaagtgctgttccagccatctctcattggaatggaagctgctggaatccatgaaactacctacaactctatcatgaagtgtgatgtggatatcaggaaggatctctacggtaacattgtgctcagtggtggttcaaccatgttccctggtattgcagaccgcatgagcatggagatcactgctcttgccccaagcagcatgaagatcaaggttgttgctccaccagagagatagtacagttgcctggatcggaggatctattttggtttactttatctcccttttattatttgttggatttcctagtggtgagtt

SEQ ID NO: 18240 - DNA, 442 bp, Gossypium hirsutum
  Clone ID: LIB3165-011-P1-K1-B2
agataaaaacactttggcggtggagatagcaacaacagagtggctgtgggtaggtctggtttcactggctcctttgttcaagctgtgcttgccgatgccagaagcatcaaggttggcccacctcccccttcctctggtggactgcctggaactctgaactctgatgagccaagagaccttgttctgccatacaaagacaggttcttcctccaaccacttactccagctcaggcagcacagagagcaaaggaatcagccaaggatattctgggtgtcaagaacttgattgacaaaaaagcctggccttatgtcatgaatgatctccgtctcaaggccgagtatctccgctatgacctcaacaccgtcattgctgccaagcccaaagatgagaagaaaactctcaaggacctcaccaaaaagctcttcagtaccatcgatgatc

SEQ ID NO: 18241 - DNA, 498 bp, Gossypium hirsutum
  unsure (1)..(498): unsure at all n locations
  Clone ID: LIB3145-004-P1-K1-F9
gtggatattaggaaggatctgtactgcaacatcgtcctctccggtggcaccaccatgttccctgggatcgctgacaggatgagcaaggagatcactgccctggctcccagcagcatgaagatcaaggtggtcgctcctccagagaggaagtacagtgtctggatcggaggatccatcctggcatccctcagcaccttccagcagatgtggatcgccaaggccgagtacgacgagtccggcccatccatcgtccacaggaaatgcttctaattctttgggcccgagaaatgcaagccgtgggggagccgttaccgtcgccagcctctcctgcccccgttttcgttgccgtttcttcattagcgcgaacaaagttttgtgccggtctatcggccgtcgctttcctcccctattcatcaagactgcaataactgtcgctacctatgctnctaacctgtatttttggacacaatatgttaaggtccattcaattctaatgag

SEQ ID NO: 18242 - DNA, 446 bp, Gossypium hirsutum
  Clone ID: LIB3585-044-P1-K1-B4
tttcaaattctcagtcaaaattttctttttcatatcctctcatttcaaaaagcacagaagcgaggcggttttttttttgcttaaacaaaggttaatacgagatggcggatgaggatattcaacctcttgtctgtgacaatggaactggaatggttaaggctggttttgctggtgatgatgcccctagggctgtgttccctagtattgttggtcgcccacggcacacgggtgtcatggttgggatgggtcaaaaggatgcttatgtaggtgatgaagcacaatcaaagagaggcatccttaccttaaaataccctatcgaacatggcattgttagtaactgggatgatatggagaagatttggcaccatactttctacaatgggctgcgtgttgcccctgaagaacattcggatcttttttacagaaagcaccagttaaactctaag

SEQ ID NO: 18243 - DNA, 403 bp, Gossypium hirsutum
  Clone ID: LIB3149-016-Q1-K1-F8
cgattccgttgtccagaagtcctcttccagccatccatgatcgggatggaagctgctggcattcatgaaacgacatacaactcaatcatgaagtgtgatgtggatattaggaaggatctctacggaaacattgtcctcagtggtggcaccacttactccagctcaggcagcacagagagcaaaggaatcagccaaggatattctgggtgtcaagaacttgattgacaaaaaagcctggccttatgtcatgaatgatctccgtctcaaggccgagtatctccgctatgacctcaacaccgtcattgctgccaagcccaaagatgagaagaaaactctcaaggacctcaccaaaaagctcttcagtaccatcgatgatcttgaccatgcagccaagatcaagagc

SEQ ID NO: 18244 - DNA, 398 bp, Gossypium hirsutum
  unsure (1)..(398): unsure at all n locations
  Clone ID: uC-gsronu33B148f11b1
gggggtcntatccatgttccctggtattgcggaccgcatgagcaaggtgatcactgctcttgctccaagcagcatgaagattaaggtcgttgcgccaccagagagaaagtacagtgtctggattggaggatctatcttggcatcactcagcaccttccaacagatgtggatttccaagggtgagtatgatgactacagctcatgcatggtacacaggaagtgctgacaagatctgtgaacgctgctgatggggggttacaattagggtggacatgattacttatcatgtttgaggctgtgggatcatagttttgttttcaaggttcttttcttaagtgcagattgggtttaggactggccatgaactcgcttttttgtttaatgcaaccccaaattag

SEQ ID NO: 18245 - DNA, 397 bp, Gossypium hirsutum
  unsure (1)..(397): unsure at all n locations
  Clone ID: LIB3149-039-Q1-K1-B11
atggaattgatgatttaaggtctgtaagacctgatacaaatatgattagagagtgtgtggcagaaaacctgtcttcagagaatgaactcggtggtgctgtttgggatattttccggagggaggatgtacccaagttaattgagtacttacagaagcatcacaaagaattctatcacattagtaatcttcccgtgaattttgttattcatcctattcatgatcagaccctttatctcactgaaagacataaaaagcagcatgaagatcaaggttgttgcacccccccaccgcaaacattaatgtcaatagctattgtacgagaaattttaaaattcgatgggaattatattttatacttggttttgtaaaaaaataaanctataaataaaaaactaaa

SEQ ID NO: 18246 - DNA, 308 bp, Gossypium hirsutum
  Clone ID: LIB3083-118-Q1-L1-F6
ttcttgttaagttcactgtaaaagatggccgatactgaggagattcaaccccttgtctgtgataatggaactggaatggtgaaggctggttttgctggtgatgatgctcccagggcagtttttcccagtattgttggccgaccctgacacactggtgttatggttgggatgggttagaaggattgcatatgtttgatatgtggctcatttttataaatgtttttctttctttgatttttcttatatagcattgaatttgtttgcttcttgttttatttggatatattatttgtcttttttactttttt

SEQ ID NO: 18247 - DNA, 209 bp, Gossypium hirsutum
  Clone ID: LIB3196-042-P1-M1-G5
ggcgcgctgatgctcctgctccggcctttccggatcgaccaactcgtccgaccacgcgtccgatccgatggagcgtggtattgggagcaactgggatgttttgcaaaagatctggcatcatacattctacaacgaactccgtgttgctcctgaggagcaccttgagcttccaacggaagcacttttaaaccccaaggccaatagagaaa

SEQ ID NO: 18248 - DNA, 507 bp, Gossypium hirsutum
  Clone ID: GOSHI-09MAY01-C957_1
cccacgcgtccgcggacgcgtgggtagctatatacgaaatccttgattaataataagataaataaattcttttttggaactacatagatctatggaacttttttggaactacatagatctatggaatcggttaatatatcctgaatcgcacaaaagagataaaaaaactgtgaatattgtgtgattagtttcgtcggtgtcaaaaatatagaatttgagtaggcaagagaagattgaatcaaaataattccttttttttaagtaaagttctatttctgtcagagggcaatatgaatggtatatcaaacgcactaaacgggttatacgatatctctggtgtggaagtaggccaacatttctattggcaaatagcaggtttccaagtccatgcccaagtacttattacctcttgggttgtaattgctatcttattaggttccgccgttatcgctgttcggaatccacaaaccattccaaccgccggtcaaaatttcttcgaatatgttc

SEQ ID NO: 18249 - DNA, 533 bp, Gossypium hirsutum
  Clone ID: LIB3583-055-P1-K1-A8
cctgagtcaggttcttgtcattcatcaaagttggaagcagaaaaagttccaggatcggcctataattatcaccgagaagttcattgcagtaatcagttataattataggccgatcctgagtcaggttcttgtcattcatcaaagttggaagcagaaaaagttccaggagatgatccttgtaaatgaggttctgaaaataataaaggccgttgatttgaatttggaaacgtgggtgaaggcatatggcaatgctaccttgtcatgtgtttttgccatgaactgccactggcatctatacaaacatttaaagggaacaaaacttggagagctcatgggagattcttggttgaaagaacatgaacagtacaaggagtattattctgctatcttcttaagagagagctggggtaagctccctagtcatttaagccgtgaagggttaattctgttctcaggcagccgtgccacagctcgtgatcttgtaaagaaaaggctcaagacttttaatgaagctttcgatgagatgtttagaa

SEQ ID NO: 18250 - DNA, 472 bp, Gossypium hirsutum
  unsure (1)..(472): unsure at all n locations
  Clone ID: LIB3583-036-P1-K1-G6
cagaggcagagccctcctcctcaggatgggagcatnccaagattggtgagttttataactgattactgcaatgaacttctcggtgataattataggccgatcctgagtcaggttcttgtcattcatcaaagttggaagcagaaaaagttccaggagatgatccttgtaaatgaggttctgaaaataataaaggccgttgatttgaatttggaaacgtgggtgaaggcatatggcaatgctaccttgtcatgtgtttttgccatgaactgccactggcatctatacaaacatttaaagggaacaaaacttggagagctcatgggagattcttggttgaaagaacatgaacagtacaaggagtattattctgctatcttcttaagagagagctggggtaagctccctagtcatttaagccgtgaagggttaattctgttctcaggcagccgtgccacagctcgtgatcttgtaa

SEQ ID NO: 18251 - DNA, 800 bp, Gossypium hirsutum
  Clone ID: GOSHI-09MAY01-C977_1
cgcggtggtggacgatctaaactacggatgcctggtttcgtcgagagagaataacagagggaaagcttaagcaatggcggccgaggaggacagcggagagttttacctccgctactacgtgggccacaaagggaaattcgggcacgagtttttggagttcgagttcaggccagatgggaagctccgatacgctaacaactccaactacaaaaacgacaccatgatccgcaaagaggtcttcctcactccttccgttcttaaggaatgccgccgcatcatcgccgacagcgagataatgaaggaagatgataacaattggccagaaccagaccgtgttgggcggcaagagcttgagatagtgatggggaatgagcacatctctttcacaacttcaaagattgggtcccttgttgatgttcagagcagtaaggatcctgaaggtcttcgcatattttattatctggttcaggatttgaagtgctttgtattctctcttatctcactccacttcaagatcaagcctatttgaagaatgaatgatgatattgaaatcctccactatagaggggagagtggtgtgtctgtcacaattggcgtttctgcgtttgatataaagctttgttttccatttccttttgttctcttgaattgatgagctaagtctgtgtatggtttggttgtgtgagtaatttttttggaattacataatgtcactctgtttctgttgtgaaagcttttatgattgtgcacttgttttcgtcgtcgcggcccaaataagaagttcttttagctttggcatt

SEQ ID NO: 18252 - DNA, 358 bp, Gossypium hirsutum
  Clone ID: uC-gsronu33B072b01b1
tccacgtgtccggagagaataacagagggaaagcttaagcaatggcggccgaggaggacagcggagagttttacctccgctactacgtgggccacaaagggaaattcgggcacgagtttttggagttcgagttcaggccagatgggaagctccgatacgctaacaactccaactacaaaaacgacaccatgatccgttaagaggttttcctcacttcctttcctcttaaggaatgccgtcttattatcttcttcagttttattattatttctttttttttcaattttttttatcttattctttatcttttttttctttttttcttcatttttcttctttttcttttattttttttttt

SEQ ID NO: 18253 - DNA, 736 bp, Gossypium hirsutum
  Clone ID: GOSHI-09MAY01-C837_2
gtcgcacagttgccgtgggataacctcaaagcttttgcataagaatggagataagtcgatacttgaggcagcatgcacgcacaatagctgggaagtcgcaactttttattaattcttatgcaaaagctcttgaggttgtcgcacagttgccgtgggacaatgctggatttgatgctactgatgtgctgaacaaattaaggcagaaacatgcgcttccatctggtgagggtgcttcttatggagtggacatcaacactggtggaatagcagactcatttacaaactttgtctgggagccatcagttgtaaagagcaatgccatcaacgctgctaccgaggctgcttgtcttattctaagtgtggatgagactgtaaagaatcccaagtcggagagtgcacagggagaagctgctgctagtgccatggctggcagggggcgtggccgtggacgaggaatgaggaggcgttgagacttcacagtttttatgttcaacttgtcttattgttgtctaatgaaaatgaggatggaagattctaattaattaggttttgttcatcttgtatttgttcagtgtttttggccaaattgtttgaagatgtgtgctttttgattgtcattattatgcaactccatgatcataaccttccagcatcggtttcacacaagctttttgttttattaacttccaagtttgcaatatatgtttatatataaaggccagtcatttgttatcat

SEQ ID NO: 18254 - DNA, 1251 bp, Gossypium hirsutum
  Clone ID: GOSHI-09MAY01-C837_1
aaaaagtttctaaatcccaagatacttctgttgaacattgagttggaactgaaatctgagaaggaaaatgctgatacactttccgatccatcacaatatcaatcaatagttgatgcagacatggaatatcatttatgacaagttggataaatgtgtgaagagtggtgcaaaagttgttctttcacggttggctattggtgatttggcgacacagtattttgcagatagagatattttctgtgctggtcgtgtagctgaggaagatcttaatcgggttgctgctgcaactggtggaaccatacaaacatctgttaacaatataattgatgaggttctaggaacatgtgaggtttttgaggaaaagcaggttggaaatgaaagatttaatatattcagcggttgcccgtcaggacggacagctactatagttctacgcggtggagcagatcagttcattgaagaagctgagaggagcttacatgatgcaattatgattgttagaagagctttgaagaactctactgtagttgctggaggtggtgctatagatatggagataagtcgatacttgaggcagcatgcacgcacaatagctgggaaatctcaactttttattaactcttatgcaaaagcacttgaggttattccacggcagctttgtgacaatgctggatttgatgcaactgatgtgttgaacaaattaaggcacaagcatgcacttccatctggtgagggtgcaccttacggagtggacatcaacactggcggaatagcagattcatttgcaaactttgtgtgggagccatcagttgtaaagatcaatgcaatcaatgctgcaactgaggctgcatgtcttattctaagtgtcgatgagactgttaagaatcccaagtcggagagtgcacagggagaagctgctgcaagtgccatgggtggcagaggtcgtggaggtggtttccctggccgtggacgaggaatgaggaggcgttgagatagctgtttcatttttttgttatcaaattttatttccttgtacgtcgtagatgaactaccattttaagggccaaaatgtgaaggtgcctatttagatgtggcatccgaatgaccaaaatctgggattgaatgttggattttttgtgaaccgtggctggtgctttcgtttgctgtagaaaattacacttgttccttaaatttatttttcaaaggaatttttgtttgtgagtgaaggaaaatgaaaatctgtttttaatt

SEQ ID NO: 18255 - DNA, 536 bp, Gossypium hirsutum
  unsure (1)..(536): unsure at all n locations
  Clone ID: uC-gsflnu33B062e08b1
cgtggtgcccctgcccggactggccgggtcgtcccgggcgtacccaaacatgtgatggtttcgaggaaaggcgagctggaaatgaaggatgtaatgtattcagcggttgcccgtcaggacggacagctactatagttctacgcggtggagcagatcagttcattgaagaagctgagaggagcttacatgatgcaattatgattgttagaagagctttgaagaactctactgtagttgctggaggtggtgctatagatatggagataagtcgatacttgaggcagcatgcacgcacaatagctgggaaatctcaactttttattaactcttatgcaaaagcacttgaggttattccacggcagctttgtgacaatgctggatttgatgcaactgatgtgttgaacaaattaaggcacaagcatgcacttccatctggtgagggtgcaccttacggagtggacatcaacactggcgngatagcagattcatttgcaaactttgtgtgggagccatcagttgtaaagatcaatgcaatc

SEQ ID NO: 18256 - DNA, 472 bp, Gossypium hirsutum
  Clone ID: uC-gsronu33B036e09b1
ttataatgacctacattatgtccatatttgtggaactacttgttggtgttgatgcatgccaatgcattaccagggctgtaaagctctttcattgcttttgtgtgtttttgcagtcggagagtgcacagggagaagctgctgcaagtgccatgggtggcagaggtcgcggaggtggtttccctggccgtggacgaggaatgaggaggcgttgagatagctgtttcatttttttgtatcgaattttggttgtgttatttccttttatgccgtagatgaactaccgttttaagggccaaaatgtgaaggtgcctatttagatgtggcatccgaatgaccaaaatctgggattgaatgttggattttttgtgaactgtggctggtgctttcgtttgttgagaaaaatacacttgttccttaaatttatttttcaaaggaatttttgtgagtgaaggaaaatgaaaaactgttttta

SEQ ID NO: 18257 - DNA, 678 bp, Gossypium hirsutum
  Clone ID: GOSHI-09MAY01-C827_7
atccacgatcaatgcctcggtcaggaaaccccacagattagtaacagttgaagaagcgtttccacagcacggtgtcggtgctgaaatctgcgcatctattgtggaggaaagttttgcatatctcgatgcaccggttgagagaatcgccggagctgatgttcctatgccatatgcagcaaatctcgagagaatggctgtgccacaggtcgaagatatagtccgtgctgcaaagagaacttgctatagatcggtatcgtaggctgctgctccataatcaaaaccagtccaggcagctttcttttcctaacacatgaatcaagagagattgattctcaacactgtggggggaggagctgatttctcaagccaagatttatgttttgtagcataaggtaatagaattaatacgagtatcacatgaaaattaccatgtcttgaaataaggtttactgtgcgaaaggaactaatgttgtaatgagctcataaatggcaaaccaacgggctcggctgggtttcagattggattgttttgaaactccataaatgggtgttcaatcctcgggtttagactgtttcatatttaaatatttaggggagttagatatatggatgtcagcctatgtcgatttttaaccatctttgattcagatttttttccaagtggaaggtttttttttc

SEQ ID NO: 18258 - DNA, 627 bp, Gossypium hirsutum
  Clone ID: GOSHI-09MAY01-C827_6
aggttataaatttgcgttctattaggccactggatagatcaacaattaacgcttctgtcaggaaaaccaacagattaataacagttgaaaaagggtttccacagcatggtgttggtgctgaaatctgtgcatcagttgtggaggagagttttgcttatcttgatgccccagttgagagaattgctggagctgatgttcccatgccatatgcagcaaatcttgagaggatggctgtgccacaggttgaagatattgtccgtgctgcaaagcgagcatgctacagagctgtaccattggctgctgctgcataattgaaccaatataggaactaaaggaatgcacgattgtttgtcctctcaactgttttgggaaggagccgtttcatttaataactgagacattgttggaaaggctggaaatttggtgacttcatttgtcatgtgaacataacctgttcaaccctgccgaagcccaagggctctgctactgtttttgaactcttgtgtttcaatcttacgtttgttcagccgaatgatttttaaatgcattgatttgatgtgtggtttgagaattactaccaaagtagttctgccataattaccattcagccttggcctaacggtcgcc

SEQ ID NO: 18259 - DNA, 562 bp, Gossypium hirsutum
  Clone ID: GOSHI-09MAY01-C827_5
gtcgacccagcgttttataatttgcgttctattaggccgctggggagatccccaataaacacatcagtcaggaaaaccaacagactaataacagttgaagaagggtttccccagcacggtgtcggtgctgaaatctgtgcatctgttgtggaggagagtttttcatatcttgatgcaccagttgagagaatcgctggagctgatgttcccatgccatatgcagcaaatcttgagagaatggctgtgccgcaggttgaagatattgtccgtgctgcaaagagagcatgctaccgatctgtaccattggctgctactgcctaattgaaccaatccaggaattagagggatactgatttttgcctttgtcgacacttgggtgcaggaagaagtgctttaacttaataacacagaaattgttagaaatgcctggaaattttgacttatttgtcattggaacataacctttcccacattttaagtagttttctctactgtttctgagcttgtatttcaaatattatggcgctgaacacaccttgcaaccatccttcgcattttaact

SEQ ID NO: 18260 - DNA, 682 bp, Gossypium hirsutum
  Clone ID: GOSHI-09MAY01-C827_2
cccacgcgtccgtcccttttcattttcagccatctccttgccgattcattcctaagaaaattttcaacgttatttcaaaaagcagagaaaagaacgttaaggaggaaagatgttgggaatagtaaggcaaaaaatgttagggcagtcattgctgaagattcgtcctgcaatatcggtgttacgaagctactcatcagcagcaaaacagatgacagtgagagaggcattgaactctgctcttgatgaggaaatgtcagctgatccgaaagtctttttaatgggtgaagaggttggagaatatcagggtgcatacaagatatccaaggggcttttggagaagtatggacctgagagggttcttgatactccaattactgaggctggttttgctgggattggggttggtgcggcttactatggtctgaagcccgtagttgagtttatgacatttaacttctccatgcaggcgattgaccacattattaactctgctgcaaagtccaactacatgtctgctggccagatgtctgtacccattgtttttagaggacctaacggtgctgctgctggtgtaggtgcccaacactctcagtgttatgcatcatggtatgcttcttgtcctggattgaaagttctgtccccataccagttctgaagatgctcgtggactgctcaaagctgc

SEQ ID NO: 18261 - DNA, 1321 bp, Gossypium hirsutum
  Clone ID: GOSHI-09MAY01-C827_1
aaattctattttctttatcattattgaaggaaaaaaaaaaaggaggaattagaaacctaaattgaagaaggaaaagatcttgggaattgtaaggcaaaagatgttggaacagtcattgaagaagattccacccgccgtgtcggtgttgagaagttactcatctgctgcaaaacagatgactgtaagagaggcattaaactctgctctcgatgaggagatgtcagctgattcgaaagtctttttgatgggtgaagaggtcggagaatatcagggtgcatacaagataaccaaggggcttctcgataagtacggacccgagagggttcttgatactccgattactgaggctggttttaccggaattgcggttggtgctgcttactatggtgtaaagcctgttgtggagttcatgacatttaacttctccatgcaggcaatcgaccacattattaactctgccgcaaagacaaattacatgtcttctggccggatatccgtacccattgtttttagaggtcctaatggtgctgcagccggtgtcggtgcccaacactctcagtgttatgccgcatggtacgcttcttgtcctgggttgaaagtgctggcaccgtacagttctgaagatgctcgtggacttctcaaagctgctattagagatcctgacccggttgttttccttgaaaatgagttgttatacggtgaatccttccctgtttctgatgaagttcttgattccagtttttgtcttccaattgggaaagctaagatagagagaaaaggaaaggatgtgactattacagctttttcaaaaatggtgggctatgctcttaaggcagctgagatgcttgaaaaggagggaattgatgctgaggttataaatttgcgttctattaggccactagatagatcaacaattaacgcttcggtcaggaaaaccaacagattaataacagttgaagaagggtttccacagcatggtgttggtgctgaaatctgtgcatcagttgtggaggagagttttgcttatcttgatgcaccagttgagagaattgctggagctgatgttcccatgccatatgcagcaaatctcgagaggatggctgtgccacaggtcgaagatattgtccgtgctgcaaagcgagcttgctacagagcggtaccgttggctgctgctccataatcgaaaccagtccaggcagctttctttaactagaagaatacacgattgtttgccctctcaatggtttggggaggagttggttcatttaataactgagacattgttggaaaggctggaaatttggtgacttcatttgtcatg

SEQ ID NO: 18262 - DNA, 549 bp, Gossypium hirsutum
  Clone ID: LIB3585-007-P1-K1-C5
cggacgcgtgggcggacgcgtgggtaatttttagatttaagatttaggctgtgttctttattccatctgagatgggcttttacatgcaaaaacacttttctgtcaaaagtaataaagaacacactgcatctcttgcaaatttttaacttacttgaagttttttttgggcagatgaaaaaacaaatttttttaccgttttcagccaaaaattgcttttgggctgatcttttactttttttagccacacaacacacaacaacgtttttcattgctggttctttgtttctgccgtttctttgttcctcttcttcactgaagaagtatctggttctttgttcctcttctccaccaccgcacagcagatgcgttagctcaccgcccccacctgcgtctctccaatttcagtattggtcatctccctgccgattaatttcctttcagaaaacactaattccacactctctttttcttttttttttacattacatcaaaagcaggtacgtttttcttatcttcttgatccgatttgattttccatccattaccgtt

SEQ ID NO: 18263 - DNA, 558 bp, Gossypium hirsutum
  unsure (1)..(558): unsure at all n locations
  Clone ID: uC-gsflmaxxa096e04b1
cggacgcgtgggtttcagcacaacagatgcgttagctcaccgcccccacctgcgtttctccaatttcagtattggtcatctccctgccgattaatttcctttcagaaaaccctaattccacactctctcttttttttttacattacatcaaaagcagagaaaagcaaagtggaggaggaaagatgttagcaatagcaaggcaaaggatgttggggcaatcatttaagaagattctgcctgcagtgtcagtcttgagaagttactcatctgctgcaaaacagattacagtgagagaggcattaaactctgctcttgatgaggagatgtcggctgatccaaaagtctttttgatgggggaagaagttggagaatatcaaggtgcatacaagataaccaagggacttttggagaagtatggacctgaaagggttcttgatactccaattactgaggctggttttactgggatgggngctggtgctgcttactatggtctgaagccagtagtggagtttatgacatttaacttctccatgcangcaattgaccacattatta

SEQ ID NO: 18264 - DNA, 422 bp, Gossypium hirsutum
  unsure (1)..(422): unsure at all n locations
  Clone ID: LIB3145-026-Q1-K1-G2
gattaatatgaaactgggattagcattgcagggaacaattaacaaatagctggttgtattgttgttcagagaaaagcaaagtggatgaggaaatatgttagcaatagcaaggcaaaggatgttggggcaatcatttaagaagattctgcctgcagtgtctgtcttgagaagttactcatctgctgcaaaacaggtaccgaatgctaagtcgaccatatgcttttaattgcatactaagattgaggacatctactgaattcaagcctggccattcttatggtcactttttcccagatccacaatatgaaaatgttcagcacatcatttgttgtgatttttttgcaacatatgcttatgattttgatttcgctaataatgtttgattttacagatattaattactcngtacaatttcgttcttt

SEQ ID NO: 18265 - DNA, 869 bp, Gossypium hirsutum
  Clone ID: GOSHI-09MAY01-C587_1
ggttgagatcacccaccacatctgctgaatcaaagaagaatttggtatatttcctgcgtgaattttgtagtttaagcaagagcctgcacatggtgcagcagcttcaactatttagggatcttataaatgaaggtatctttgacattatcagtgatgctctgcagagtccagataaaaagctcgtactaactgggacagacatcctcatactgttcttgaatcaggatccaacccttctgcgctctcatgttgttcgccaggaagggattcctcttttaggacttttggttaaagggatgataacagattttggggaggatatgcactgccagtttcttgaaattcttcgtagtttattggattcgttctcattgacaggagctcagagagataccattattgatattttttatgacaagcatttgggccagctaattgacgtcataatattatcatgtccttctgatgaggctggccagtcaaccagtaacttggcaagcagtgccggaagagttgaaagtcaaaatagcgcaaagcctgaaattctctcgagcatatgcgaattgctgtgcttctgtgttgtgcaccatccttatagaataaagtgtaattttctccttaacaatgttatagacaaagttttgttactgactcggagaagggaaaagtacctagtagttgctgcggttcgctttgttcgcaccattctctctcgtcgtgatgaacatctggtaaatcattttgttaagaaaaaccttctcaaaccagttatagatgcttttgttgctaatgggaatcgttacaatgtgctgaactctgcagtcctggaactttttgaatatatccgcagggaaaatgtgaaggtattg

SEQ ID NO: 18266 - DNA, 683 bp, Gossypium hirsutum
  Clone ID: GOSHI-09MAY01-C577_9
tttacgcttgggcggacgcgtgggtgaaaatgggttggaatggagattgctactacaaggggttgccctgacaagcaagtgtcatggtttccattaaacctcagagtattagactgggaaaatacccacagatttccatgtactttgagtgtccggaaactagtgatgagtaatcaaaggttggcttatttgagtatagattctagtagaaagcaacaaagggtgaaatacttcaaaatctggctgagttccagttctcttgtgtcatgttcaatgcgggtttggagaatgcttgtagtgagcaaggagcaaggatgtccgctttggatagctcaagcagaaacgccggcgacatgcttgatcgctttaactcttacatataacagaacccgtcaagcatcaattaccactgaactgattgagattatatccggagcatcggcattggaaggttgaacaaaaagaacaagtgctatgttttcgggacagtgacgaaataaaatccgagtgaacaactgctatgttcggacttgttcatggtgctactttgtgaaacagtttggtggagctagtgcgaataatgacctatccattgtcaagtgcaatgtaaatgtgattttatttttgatcgatcattcattgacatcagcataagttggtaagcatttagagattggacgaat

SEQ ID NO: 18267 - DNA, 791 bp, Gossypium hirsutum
  Clone ID: GOSHI-09MAY01-C577_7
gatatttctattttgggttcttttttacatgaggcctgatagtctaaacgtttattcttgtctttggatttttcttatgtagcccgtttcggcaataagagttgccgatagtctaatctggctacggtttgtgtcatttgatgctacttgattattctcatgagatccatgaattttttttatgctagttgattaatgaaaattttggccacttgggcactttatgcttaaaaaaaagaaaaagagaaaaataaacaaagaactttgtcattgatacacgaacaatttctagggtgtgtccgtatcggtaaccgatggcgatggctgctctcaaaccccaagggaggcgtttcgcccctatgatctctccccgccctattactgccctccggtcctctcccctcgctccctctctccaggatgagtgtccccttggagttcgttatatttccaccccagtggtcagaaaccctatgaggagtgtctagagtattcacaaaatcaccaaggctatgaagatggttgcagcctcaaagttgagaccaattcaaactaaagctgagaattcccgtggcctctggcaaccttttactgcacttcttggcgatctacccagtgctaatgttcaagaagatccttgttgtgaccatctcctcagaacaagtctctgtggtgaaattaattccacatcagttcaacattaacaaggggctccaccaattgaaatccggttcctgaaaaaaaaaacaaaatattttattttttgggaaaagaaggcacaggctccactt

SEQ ID NO: 18268 - DNA, 614 bp, Gossypium hirsutum
  Clone ID: GOSHI-09MAY01-C577_6
aaaccggagtcccgatcattttattaggaacagtaaaacacttccctactggagctggtagcaattacgtcaaaacgcccaaaattttggaaaaaaaaaacactttcatccacgacagcaaggatttctagggtttcgtctgaatcggtaagcgatggcgatggctgctctcagacgcgaagggaggcgtttcgcccctctgatctctcctcgtccgataaccgctgtcagatcctctcctctctatcctactcttgaggtggagggtcctcttggacttcgtcatatttcgactcaaagttgttagaaaccggatgaagagtgtcaagaatattcagaaaatcacaaggcaatgagatggttgaccctaagttgagagcaattcaacaaaactgagaattcttgtggcctctgcagccatttactgacttgggcgacttccatgtctgatgtaaaaaacgtttggtgtcacatctctcaacaaggcttggggggaataactctactctgcagatagcagggctcataagtgacttgcacaggctgaaagaacaattgtatttggaagaggcaagttatagtcgatctaaagactgatatctacgacgcagatc

SEQ ID NO: 18269 - DNA, 643 bp, Gossypium hirsutum
  Clone ID: GOSHI-09MAY01-C577_3
cccacgcgtccgccccccctcccgcccccggcagcaattccccccccacgcgcccaattttgggaaaaaaaaacactttcatccacgacagcaaggatttctagggtttcgtctgaatcggtaagcgatggcgatggctgctctcagacgcgaagggaggcgtttcgcccctctgatctctcctcgtccgataaccgctgtcagatcctctcctctctatcctactcttgaggatgagggtcctcttggacttcgtcatatttcgactcaagttgttagaaaccggatgaagagtgtcaagaatattcagaaaatcacaaaggcaatgaagatggttgcagcctcgaagttgagagcaattcaaacaaaaactgagaattctcgtggcctctggcagccatttactgcacttcttggcgatcttcccagtgctgatgttaagaagaacgttgttgtcaccatctcttcagacaaaggtctttgtggtggaattaactctacatctgtcaagataagcaaggggctccataagttgaactctgccacaggtcctgaaaaagaaacaaaatatgttattttgggagagaaggcaaagggctcaattaggtcgtgattctaaaaaggacattgagttaatcataac

SEQ ID NO: 18270 - DNA, 1054 bp, Gossypium hirsutum
  Clone ID: GOSHI-09MAY01-C577_2
ctgtgttgtcctgacaagcaagtgtcatggtttccattaaacctcagagtattagactgggaaaatacccacagatttcaatgtacgttgagtgtccggaaactaatgatgagtaatcaaaggttggcttatttgagtatagattctggtagaaagcaacataggagccctattgtctgtaagacatatgccatccatgctggtttggaggaatcctcatctctacagtcagaagatccttttactgaagatgagcatacttccgaagattcaccagagcagcttcttgctaaaccactaagcagtgaagagcagctgaaatccctactggctgactctgagagggcaaagctcaccaaaaaactaagtgaagctaaccagcaaaaccgcttcctaaaacgacagttacatatgaaagaggaagcactagtcaacttcaaaagtgaacttgctgtcatggaactagaaatccaggcattattcttgctagcagaagaaatatctaaagctggcattccacaaggttctaaaaaaatcaatgggagatacattcagtctcatcttcatacccgcttagaagctgtacttgagaaactgaaggaacagctaaaggatgtggatgccgtccaatccaaggaaatacccttattctggtgtggcatggctgagagcgtacaagttatggggtcattcgacggatggagtcaaggggaacacttatcaccagagtacaccggttcattcgccacgttctccaccacattattgcttagacccggaaggtatgaaatcaagttcttggtggatggagagtggcatctatcaccagaataccctaccattggtgagggattaatgcaaaataacttgctcgttgtagactagagtcgagtatttgatacagctttatgttagacagatatgcgtaagtcttttttgtagtcacattcaaatatgtgttgaatacaagtacatatattattagggaaaatgaaaagattttagctactttgatgcaatgattatgagctttccaatagtaaaagattttaga

SEQ ID NO: 18271 - DNA, 1323 bp, Gossypium hirsutum
  Clone ID: GOSHI-09MAY01-C577_1
gcgtaaaacacactgacctcagaaagagcacccaaaagaaaaaacactgatcaacgaaggatttctagggttttttttcggtatcagcaagcgatggcaatggctgctctcagacgcgaagggaggcgtttcgcccctctgatctctccccgtccaattactgctgtccgatcctctcctatcgttcccactcacgaagatgagggtccgattggtgttcgttatatttcaacccaagtcgttagaaaccggatgaagagtgttaagaatattcagaaaattacaaaggctatgaagatggttgctgcctcaaagttgagagcagttcaaactaaagctgagaattcccgaggcctctggcagccatttactgcacttcttggtgatcttcccagtgttgatgtcaagaagaacgttgttgtaaccatctcttctgacaaaggtctctgtggtggaattaactctacatcagtcaagataagcaaagggatctataagttgaactctggccctgaaaaagaaacaaaatatgtaattctgggagagaaggcaaaggctcaattggttcgtgactcaaagaaggacattgagttgatcataactgagctgcagaagaatcctttgagctacactcaggtctctgttcttgctgatgagatcttaaagaatgtggagtatgatgccttgaggattgtcttcaacaagtttcactcagtagtttcatttgtgccgacagtctcaactgtattatcacctgaaattgttgaaagggaatctgaatctgggggaaagcttggtgaactagactcctatgaagttgagggtggtgagacaaagggtgaaattctttcaaaatctggctgagttccagttctcttgtgtcatgttcaatgcggttttggagaatgcttgtagtgagcaaggagcaaggatgtctgctatggatagctcaagcagaaacgccggcgacatgcttgatcgcctgactcttacatataacagaacccgtcaagcttcaatcaccacggagttgattgagattatatctggagcatcggcactggaaggttaatttcaaatatttttcactgctagatttttccagacagtaatgaaataaaatgtcagtgcactgtttttttttttctctatacttaatttttgagtgttttgctgaggctcttcaataatctcccccagtattaaatcttcatttctgggaattaaaattactttttcgatggtttcaactagccttttggttcatgcaacactgaaaattcaatgatattggaaggatatatcctgttttttttccccctc

SEQ ID NO: 18272 - DNA, 567 bp, Gossypium hirsutum
  Clone ID: LIB3582-045-P1-K1-E11
ggttcttgtactaggagtccgattgtattttgcctctctgctcaaagaatgggtaaattagtcattgtacgttagattaaaaagcatgtccttttgttaaaaatgtcatccatttctaccgttaaaaactgatttttgtacatcaagatgaggtactagtagaaataaccaatatactctttgatctaatatacagggattaatttgcccttttttgtgtaaagggggtaaaatacaatctgattcctagtacaagaccctccatgatgcttttaccgcaaaattgctcattcattatgcctgtgattgttttgtcaattgttccaactggttaagtcatctaagcatatatcttggccaaaacccttttaaagttaaagcttctgttattagatttgcacattgtttttcatttacaggcattagtcttgctagcagaagaaatatctaaagctggcattccacaaggttctagaaaaatcaatgggagatacattcagtctcatcttcatacccgcttagaagctgtacttgagaaacttgaggaacagctaaaggatgtggatg

SEQ ID NO: 18273 - DNA, 580 bp, Gossypium hirsutum
  Clone ID: LIB3828-018-Q1-K6-E8
attttgtgtatattttccccctttgcttaaaaaagacttttttttaaagtaagtatggtttcatttatctgtaattaaattaatggtttacgttttctggagatggtttctttttttttttgcgatgaaatacgtatctgaaataaagcttaaacagttggtagtggcgttttcaattattcgatttccctgaagaatggacaaagatgaaaatatcaaaattttgattgaaccttgtaagattaataatgaaattcatatgttcgggttttttatgtgatgtgaagtactaaataaattaatttggatgacagatatgagggtccgattggtgttcgttatacctcaactcaagtcgttagaaaccggatgaagagtgttaagaatattcagaaaattacaaaggctatgaagatggttgctgcctcaaagttgagagcagttcaaactaaagctgagaattcccgaggcctctggcagccatttactgcacttactggtgatcttcccagtgttgatgtcaagaagaacgttgttgtaaccatctcttctgacaaaagtctttgtggtggaattaact

SEQ ID NO: 18274 - DNA, 405 bp, Gossypium hirsutum
  unsure (1)..(405): unsure at all n locations
  Clone ID: LIB3585-048-Q6-K1-B6
gtcgaccacgcgtccgaaaagaaaacgctgattaagaaagaatttctagggttttnttttcccgtatcagtaagcgatggcaatggcttgctctcaaacccgaagggaggcgtttcgcccctctgatctctccccgtccaatttctgctgtccgatcctctcctatcgttcccactcacgaatatgacggtccgattggtgttcgttatatttcaactcaagtcgttagaaaccggatgaagagtgttaagaatattcagaaaattacaaaggctatgaagatggttgctgcctcaaagttgagagcatttcacactaaagcttataattccctatgcctttggcaggcatgccattcttcttggtgcttgaaccttgcgtgggttataccctgttgaaaccctt

SEQ ID NO: 18275 - DNA, 364 bp, Gossypium hirsutum
  unsure (1)..(364): unsure at all n locations
  Clone ID: LIB3829-017-Q6-K6-H9
tagaaacgaatgatttgagccaccgcctctgctccgccgccagccataaaggtttctattcttgctgatgagatcttaaagaatgtggagtatgatgccttgaggattgtcttcaacaagtttcactcagtagtttcatttgtaccgacagtctcaactgtattatcacctgaaattgttgaaagggaatctgaatctgggggaaagcttggtgaactagacccctatgaagtcgagggtggtgagacaaagggtgaaatacttcaaaatctggctgagttccagttctcttgtgtcatgttcaaatgcgnntttgagaatgcttgtagtgagcaaggagcanggatgtctgctatggatagct

SEQ ID NO: 18276 - DNA, 1014 bp, Gossypium hirsutum
  Clone ID: GOSHI-09MAY01-C517_1
gcgtcatgcagttaaagcaaagaacgcggcgtatgatcggatgacccttctgcaatcttacacttactttctttgtctcctcctcttgtttctctcttacaatctcaccttctttctccctttcgccccctatttttggccttctcttggccactgtgtcttctttcaacaacaatcaacatatataaccatattatatacatacatacacaaggtctttccttctaaggaagccatgactggcaaagaaatcctccacaagatgaaggagaaagttcaagaaaaagttggcttaaacccttctagtaatgctgaatctggaaaagggaagagtaagatgtcgaagaatataacgcatggttatcatttagtgaaggggaaagcgaatcatccaatggaagactatgttttcgcggagtttaagcaagtcaatggcagtgagctcggtttatttgccatatttgatggccatttgagccatgttattcccgattatttgaaggcgaacttgtttaacaatatcttgaatgagcccgacttttggacggaaccagagaatgcgattaggaaagcgtatcgtttaacggatacaaatatattggaacaagccattgatttgggcaaagggggttcaacggcagtgacagcaatattgatcaactgccagaagctggtaatagcaaatgttggcgattcccgggctgtgatttctaagaacggcgtggctaagcagctttcagttgatcatgagcccgcttctgaaagggagagcattgaaaatagaggcggttttgtttcgaactttccaggggatgtcgcgcgtgttgacggtcagcttgcggtggcgagagcatttggtgacaagagtttaaagaaacatcttacttcggagccagatgtgagcattgaaacaatcgacgatgataccgacctcataatattggctagtgatggtttatggaaggtaatgtcaaaccaagaagctgtcgatgctatcaaaggcattaaggatgc

SEQ ID NO: 18277 - DNA, 554 bp, Gossypium hirsutum
  unsure (1)..(554): unsure at all n locations
  Clone ID: LIB3584-015-P1-K1-B6
cccacgcgtccggtggctaagcagctttcagttgatcatgagcccgcttctgaaagggagagcattgaaaatagaggcggttttgtttcgaactttccaggtaatgggtgcctgatcttttggggatgacgctcaaggttacaccagcttttcctgatattgtttttgtttcaggggatgtcgcgcgtgttgacggccagcttgcggtggcgagagcatttggtgacaagagtttaaagaaacatcttacttcggagccagatgtgagcattgaaacaatcgatgatgataccgacctcataatattggctagtgatggtttatggaaggtaatgtcaaaccaagaagctgtcgacgctatcaaaggcattaaggatgctcgatctgctgcaaagcacctaactgaggaagctgttaagagaaacagcaaggatgacatttccatcattgttgtaaaattttagtgatctgtaagtgtggcaacttcacctgtttccgtatgataacgaactctnttttgtacctttcttatngtggatagaatgttatgcata

SEQ ID NO: 18278 - DNA, 1740 bp, Gossypium hirsutum
  Clone ID: GOSHI-09MAY01-C507_1
gttcgtaaattgattcacctgcaaatggggcgaccatggtttaaggttgtaacaaaaataaaatatctgaaactgttaacggtgatgcttcagtaaaaatttctggcagggaactccagtctgaaaagcagcatgatctatcaccaccagtagatcatgtatcagatgcagacaattgcctgttatgaagcttcgagcacagctctctttggtgcttcaatcaacccccgcggccgctgatatgcaaaaaattctggaggacatcaagcatgctgcacaggatgcacgtgacaccctggacgagcgctctgtcaatggtgtctctgaagtgaatggctttgatggcacatgcaacgagcatgccttttctggagatggtaacttaactggagagaaaacaattgctatgcccccaggtgataaggtgaaatctgcaaccgcgcaaattataagtccagaattagctgctgcaatttctcatattcataacttcgtactgtccctcagaaaagaagcaagggctgttgatgacatatcttttgatggcaatggattaagccacaaaattgatgagttctttgtcacccgcaataaggtcttaagcagcaatgcaagtttggatgatttaatttttgatctttctactgttttagccaaagccggagaactaagattcagtgtgcttggctacaagggtaatgaagtggaaattaatagtcctcattgcatagataaggttgctttacccgagaataaggtaactcaagatgattcatctggcgcgatatatcaaaatggcagtgccatcatttcaaatccagcttccaatcctgaggttcctgatgatggaaacctggtctcagaatatgaatcaaaacaaacgagcaaattctcttctgaagagttcaaggaattaaagttggaaaacgaaaacatggcaagggatctttctcaatgcactgaaaatctggagatgaccaagtctcagttacacgaaaccgagcagcttctagcagaagctaaatctcaattggcttatgctcaaaggtcaaacagcttggctgagacacagctcaagtgcatgacagaatcttatagatcacttgaaacacgtgctgaggagttagagaccgaggtgaaccgtctccaggtaaaaatagaagctcttgaaaatgagcttcaagatgaaaagagaagtcatcaagatgcttttgcccgatgtaaggaactagaagagcaattgcaaaggaatgagacctgttctgtatgttcttcagcagccaagaatgacctcaagaacaagcaggagaaagaattagcagagaaactagcggaatgtcaagaaaccatattccttcttggcaagcaattaaaagctttccgtcctcagacagatataatgggatcacccttcaacgagaggagccataagggtgacgatggacccactaccagtggcatcaacttgcaggatttatatcaggcaaagatggacagtatcgctgctgctgctgcttctggcattggaagcagaggtggtgcagagtctgccctggagtcagttaacacaccaagcagcccatatgatagtgaagcaaactctttgagaacacccatcaaatcaaaacacaggtctacaacatcaatgtcttcatcttcttcttctaccccaactccagataaacattcacgaggctttagcagattcttttcctccaaagggaagaatgataattaaat

SEQ ID NO: 18279 - DNA, 497 bp, Gossypium hirsutum
  unsure (1)..(497): unsure at all n locations
  Clone ID: LIB3584-005-P1-K1-F7
tcgcggccgcgtgggcggccgcgtgggcgggcgcgtgggtgaggttcctgatgatggaaacctggtctcagaatatgaatcaaaacaaacgagcaaattctcttctgaagagttcaaagaattaaagttggaaaacgaaaacatggcaagggatctttctcaatgcactgaaaatctggaggtgaccaagtctcagttacacgaaaccgagcagcttctagcagaagctaaatctcaattggcttatgctcaaaggtcaaacagcttggctgagacacagctcaagtgcatgacagaatcttatagatcacttgaaacacgtgctgaagagttagagaccgaggtgaaccgtctccaggtaaaaatagaagctcttgaaaatgatcttcatgatgaaaagagaagtcatcaagatgcttttgcccgntgtnaggaactagaagagcaattgcncaggattgagacctgttctgtttgttcttcagcagccctagatg

SEQ ID NO: 18280 - DNA, 513 bp, Gossypium hirsutum
  Clone ID: GOSHI-09MAY01-C537_4
ggaaagctgggaaacttttaaacatatttttgataccaacatgcttgaagcatcgaatgtattggcataagtattcatttattctcttgacattggatatcaaaagattattgggcacatttgtgagagaacgaatatgcatttcctctaatattaacttgcagttactcttgttgcactatcctatctcctgttcttgtgcggacgcgtgggcggacgcgtgggacttaagtgattttagtctaaaatttgcatgttcatcagcttttttgggagttaatcagactcatgaaactttgggccaatggtgtgttgtgttcatgtcattcggggtgaaagagatggatttaggggaagatgttgatgctgttgatggtggtttgttgcatgggccaagagcgataactagttttcattcatcccgggtttgttttatccttaaataagtcactgcgcctggcatggaagttgcctcctttacatcatggcctggaatggatcgcggcatatggt

SEQ ID NO: 18281 - DNA, 527 bp, Gossypium hirsutum
  Clone ID: GOSHI-09MAY01-C537_3
cccacgcgtccccttcatgtgtgtcttatatggttctcttatattatgatattgcatgtgctgatgtggttctagtgcagttaaagcacaccagttcttaacagaggaaagctgggatacctttaaatagatttttgataccaacatgcttgaagcgtcgaaggtattggcataagtagtcatttattctcttgacattggatatcaaaagattattgggcacatttgtgagagaaggaatatgcatttcctctaatattaacttgcagttactcttgttgcactctcctatctcctgttcttgtggtatttatgctggtcataaatataacttaagtgattttagtctagaatttgcatgttcatcaatttttttgggagttaatcagactcatgacaagtatttaggagtattggaatttgaaaattgcagagactagttcagcatcagccaacacagaacccaacattgaaagaactaagcataggaatgatcaaattcaaggcctttgatttgggtggtcatc

SEQ ID NO: 18282 - DNA, 884 bp, Gossypium hirsutum
  Clone ID: GOSHI-09MAY01-C537_1
tgtttattatcatgtaggtagggacgtatgtttggcatggatttttatttttttattttttccccttttatttgagaaatcgtacctcgtgcctagtacgggtacttgaaaatggttggtctgggaacataggtaatttataatgaatcttcgttagtttttactgaaattgttgatgcaatccttcatattaaggatgattacttgatgtgaattggttgaaacattatcgaaaacgaaagagttcttagtttggaggtggatattataaaggtttgattatatgaatcagttgagctaagtttcaagttcttcaatttgggtttatctatggaatctcaattgtgacgcaggtcgatgctgtggtgtacctggttgatgcatacgacaaggaacgattcgcagagtcgaaaaaggagctcgatgccctcctttcggatgaatcactagcagacgtaccattcctcatcttggggaacaagatcgacctaccgtacgcagcgtcggaggacgaattacgtttccatatggggttgacaaacttcacaacagggaaagggaaggttaatttggaaggcaccaatgtgcgtccactcgaagtttttatgtgcagcattgtgcgtaagatgggatatggggatggtttcagatggctctctcagtacattaagtagaaaaaaaaaagtgccatttttagccggctagaattttcctgcaagaaaaatatgtgtgcgctttgttgtaaatgttcatcttaatctaatatttaggattggagctttgtttgttttgattatgttgcttattgagaggatggtaaagttaatttggttgccagtttggtgagatcaaatatagaccaaaaaggaatcaagattttgtgt

SEQ ID NO: 18283 - DNA, 538 bp, Gossypium hirsutum
  unsure (1)..(538): unsure at all n locations
  Clone ID: LIB3583-031-Q6-K7-D1
gnaatttaaaaaatatgtttcttgtagattggttttatgggattttagcgtctcttggtttatatcaaaaggaagcaaagatcttgttcttgggacttgataatgctggcaaaacaactctgcttcatatgctcaaagatgagagactagttcagcatcagccaacccagtacccaacatcggaggaactaagcataggaaagatcaaattcaaggcctttgatttgggtggtcatcagattgctcgtagagtctggaaggactattacgccaaggtcgatgctgtggtgtacctggttgatgcatacgacaaggaacgattcgcagagtcgaaaaagagctcgatgccctcctttcggatgaatcactagcagacgtaccattcctcatcttggggaacaagatcgacctaccgtacgcagngtnggaggacgaattacgtttncatatggggttgacaaanttnacantagtggaagggaaggttaatttggaagggannaatgtgngttcgttgngggtttttatgttttttttt

SEQ ID NO: 18284 - DNA, 2346 bp, Gossypium hirsutum
  Clone ID: GOSHI-09MAY01-C527_1
gttggaggacccgtcacagattgctgctgagtctagtgatgaagatgacaagggggaagatgcggatgatgatgatgctgatggggcctgggagaagaaactaagcaagaaagagaaactgatggatcgcgagtttaagaaagatcctagtgagatcacctgggatactgttaacaagaagcttaaagaggttgtcgctgctaggggaaggaagggaactggaaaatttgaacaggtcgagcagcttaccttcttgacaaagggtgccaagactcctgctcagaagcttgagatccttttcagtgttatctctgcacagtttgatgttaatccaggtcttagtggacacatgcctataaatgtgtggaagaaatgtgtacagaatatgcttgtcatattggacattcttgttcactacccgaacattgtggccgatgataggcttgagcctgatgagaatgaaacccaaaagggagcagactatgatggtacaatccgtgtttggggaaatttggtggccttccttgagagaatagataatgagttctttaagagcttgcagtgcattgatccacacactcgtgagtatgttgagagactgagagatgaacctttgtttttggtccttgctcaaaatgtccaggagtatttagagcgtattggtgatttgaagtctgctgctaaggttgctctaaggcgggttgaacttgtctattacaagcctcaagaggtttatgatgctatgaggaaactggctgagctatcggaagatggagaaacagatggcgatgagactaaagtggaggaaacacggggtacatctgcgtttgttgttactcctgagctcgtgtcccggaagcccacattccccgagaatagtagagcattgatggatatcctagtgacgctcatatacaaaagtggagatgagaggaccaaagcccgtgcaatgctttgtgatatttaccatcatgccctttttgatgagttttcaattgctcgtgatttgctactgatgagtcatttacaggataatattcagcatatggatgtttcaacacagatactttttaaccgggcaatggctcaggttggcctctgtgccttccgtgttggactaattgctgaaggacatggctgcctttctgaactgtattctggtgggagggtgaaggaattgcttgcacaaggtgtttcacaaagtcgacatcatgagaaaaccccagaacaggaaaggttggaaaggaggcgtcagatgccctaccatatgcacataaaccttgagcttctggaggctgtgcatttgatatgtgctatgcttcttgaggttcctaacatggcagccaactcccttgatgccaaacgcaaggtgataagtaagacattcaggcggttgcttgaggtgagtgagaggcagccatttacaggtcccccggaaaatgtgcgagaccatgtaatggctgcaacccgggccctctgcaagggagatttccagaaggccttcgacgtcattaattctcttgatgtttggaagctccttaggaatagagagagcgtgcttgaaatgctgaaagctaagatcaaggaagaggctctgaggacttacctttttacctactgttcttcctatgatacactaggcctggaccagctgaccagaatgtttgacctctcagatgcccagattcatagcattgttagcaagatgttggtaaatgaagaactccatgcaagctgggaccagccaacacgatgcatcatcttccatgatgttgagtactcaaggttgcaggccttggcattccagttgacagaaaagctttcaatacttgctgagagtaatgagagggcagtcgaggctagaaccggtggtggtggattggatctgccactaaggcggcgagataaccaggaatatgctcctgggacagctggcggcggcggcggtaggtggccagacttgtcctacggtcagggtaggcaaggtagttctggacgtgccgcgtatactggcggtggcagaccattggcattaggacaggcttcaagggatcggtcaagtcaatcacgaggaacaggcggatactctgggagagccggttcaggaatgagaggttaccagatggatgcttcagctcgcatggttagtctcagtcggggtgttcgcggttagttgtatttcttagcagtaatcttaacctaattttgtcaaagttatttacttggggttgaacttgattattggattttgtgttttgccatttatgcaatagctgttggactcaaaaaaaaaacaaaaagcaaaaagaaaagaactaaaaaaaattagattttttcacctataaa

SEQ ID NO: 18285 - DNA, 476 bp, Gossypium hirsutum
  Clone ID: uC-gsronu33B137f04b1
tgtacgcgtgggcggacgcgtgggcggacgcgtgggcggacgcgtgggttcatagcattgttagcaagatgttggtaaatgaagaactccatgcaagctgggaccagccaactcgatgcatcatcttccatgatgttgagtactcaaggttgcaggccttggcattccagttgacagaaaagctttcaatacttgctgagagtaatgagagggcagtcgaggctagatttggtggtggtggattggatctgccactaaggcggcgagataaccaggaatatgctgctgggacagctggcggcggcggcggtaggtggccagacttgtcctacaatcagggtaggcaaggtagttctggacgtgccgcgtatactggtggtggcagaccattggcattaggacaggcttcaagggatcggtcaagtcaatcacgaggaacaggcggatactctgggagagccggttcaggaatgaga

SEQ ID NO: 18286 - DNA, 662 bp, Gossypium hirsutum
  Clone ID: GOSHI-09MAY01-C497_1
ctttaaattctctgtttcctgtctctggctttcttcttccatggcaacagctccttcagccaaactcacaccgctcttgaaagatgagctcgacatagtgatccccaccattcgaaacctcgatttcttggagatgtggagaccctttttcgagcaataccatttgattatcgttcaagatggcgatccatccaagaaaatcagggttcccgatggctttgattaccaactttataacaggaacgacgttaacaggatcttgggttccaaggcttcttgcatttccttcaaggactctgcttgtagatgctttggttaccttgtttccaagaaaaaatacatcttcaccattgatgatgattgttttgttgccaaagacccatccgggaaggaaatcaatgcgcttgagcagcacattaagaacctgttaacaccatccacaacccatttctttaacacactctatgatccatacagggaaggtgcggactttgttcgtggttaccctttcagtctccgagaaggtgtccccactgctgtttcccatggcctgtggctcaacatccctgactatgatgccccaacccaacttgtcagccctcttgagagaaatactaaggtatgtgggtctcagtgaagacgtttccaaagggaactccttt

SEQ ID NO: 18287 - DNA, 585 bp, Gossypium hirsutum
  Clone ID: LIB3582-043-P1-K1-E2
ctttaaattctctgtttcctgtctctggctttcttcttccatggcaacagctccttcagccaaactcacaccgctcttgaaagatgagctcgacatagtgatccccaccattcgaaacctcgatttcttggagatgtggagaccctttttcgagcaataccatttgattatcgttcaagatggcgatccatccaagaaaatcagggttcccgatggctttgattaccaactttataacaggaacgacgttaacaggatcttgggttccaaggcttcttgcatttccttcaaggactctgcttgtagatgctttggttaccttgtttccaagaaaaaatacatcttcaccattgatgatgattgttttgtatgtcccttttcatgtttttctctgcctatgaaattataacagtttcagtctttgattctttttattttgttttttttatgtttaggttgccaaagacccatccgggaaggaaatcaatgcgcttgagcagcacattaagaacctgttaacaccatccacaacccatttctttaacacactctatgatccatacagggaaggtgcggactttgttc

SEQ ID NO: 18288 - DNA, 1009 bp, Gossypium hirsutum
  Clone ID: GOSHI-09MAY01-C457_1
ggcccgaccgacgcgtgcgtcggcggctcttactctgttcatccatggcttcctctatcataacttcctgcaaggtataccctggggcttctccctccctcgaaccctcccttttccttcgctctactttccttcctttcccttcttccatcactttaccttcatttccttccaaatcatgccccaaatccctcctcatttcctcttctttgaaccctaaccctccctgctcccagcgccgtcccccttacattcccaaccacatccccgatcccaactatgtccgtgtcttcgacaccaccctccgcgacggcgaacaatcccccggcgcgaccttgacttccaaggaaaaactagacattgctcgccaactagctaagctcggcgtcgatattatcgaagctgggtttccggccgcctcgaaagacgatttcgaagctgtcaagactatcgctaaagaagttggaaatgcggtggatgggaatggatatgtgcctgttatttgtggactttcaaggtgtaatgagaaggacattaagacggcttgggaggcggtaagtatgcgaaaagacctagaatccatacgtttatcgcaacgagtgcaattcattgggagtataagttagggaagaagtaagaggagggttgtggatattgctaggaatatgggttcgatttacttggagtttaggttgcaatgatgcccggtttagccctgaagacgccgcaggatctgaccggaggttctgtatgagaatttgggtgaaggatcaaggctggagcgacaactctgaacatacctgatactgtgggcatactatgccaagcagttggggcatgattgtgattaagccaatacccccttgagtggagatgtatattcacacactggcaaatgatcttggttctaccgcacactatgcggagactgtgctgcagagcgtgatacatcatggcttgaaaagacggacgctcatttgaggagtgaggctaaaagttggacgtgtta

SEQ ID NO: 18289 - DNA, 712 bp, Gossypium hirsutum
  Clone ID: GOSHI-09MAY01-C407_1
gcgcggaactgctggtgtttggagaattaaagcctctggaggaatccggaggctggcttgggggactactgtagaggacatggacatagctgttcgtgcgcatcttaatggttggaagttcatcttcctcaatgacgtggaggtcctttgtgaagtccccgagtcttatgaagcatacaggaagcagcaacaccgctggcattcgggacctatgcacctattccgcttatgccttccagcaatcataacttccaagatagcaatatggaagaaggcaaatttaatactgctgttctttctgttgaggaagcttatccttcccttctactccttcacattgttttgcataattcttcctctaaccatgttcgtaccagaggccgagcttcctgtttgggttatttgttatgtacctgtttttatgtcattcctcaacattcttccatcccccaaatcgttccctttcattgtcccttatcttctatttgaaaacaccatgtctgtgaccaaattcaatgcaatggtatctggattattccagttgggtagctcctatgagtgggttgtgaccaaaaaggctggcaggtcatcagaatctgacttactggcttctgctgagatggaatcgaagataatgaaccaactgcaaattcagagaggagcttcggaaagtgaactcactgagttaaaccgattgaaggaacagaaagag

SEQ ID NO: 18290 - DNA, 560 bp, Gossypium hirsutum
  Clone ID: LIB3582-049-P1-K1-D4
ccgggaacggaatggccggaccgacccacgcgttctatatgagacattcactggaccgtgcctccatgacgacaagtctgctttagactcaaactacggtaaggtcatcaaacagagaaagacctacaaaaacaaaaggatggtatgatcataggtgatgaaatagaggaaatagttttggatagtaatttggagcagcagataactaatgctattgattcacgctttctgctgcaattgactaatgtgttgcttggagggatttccgctgcttgtgatccacataatgaaggaccagatgataaggaggtggcagctgttactgctgcttgtgcttttctgcatgttactttcaatactttacctctagagagaatcatgactgtactggcctatagaactgaacttgttccagtgctttggaattttattaagcgatgtcatcataatcaaaagtggtcacccttgcctgagcgttttcatatctcttgggaaatgcacctggttggctgctacctctggccggattctgaccagtgtataagcacatgcttatgata

SEQ ID NO: 18291 - DNA, 548 bp, Gossypium hirsutum
  Clone ID: LIB3582-049-P1-K1-D10
atttcgagcaggccatggaccttgcagctgttacaactttcttgttggatgctcttcctcctataaaatcatcaagcagagaaagtcctacagttgcagaggatggtatgatcataggtgatgaaatagaggaaatagttttggatagtaatttggagcagcagataactaatgctattgattcacgctttctgctgcaattgactaatgtgttgtttggagggatttccgctgcttgtgatccacataatgaaggaccagatgataaggaggtggcagctgttactgctgcttgtgcttttctgcatgttactttcaatactttacctctagagagaatcatgactgtactggcctatagaactgaacttgttccagtgctttggaattttattaagcgatgtcatcataatcaaaagtggtcacccttgcctgagcgtttttcatatctcttgggagatgcacctggttggctgctacctctggccgttttctgtccagtgtataagcacatgcttatgatagttgataatgaggagttttatgag

SEQ ID NO: 18292 - DNA, 1059 bp, Gossypium hirsutum
  Clone ID: GOSHI-09MAY01-C747_1
gcgtccgcccacgcgtccgcccacgcgtccttttactcttccgccattttccaccacaagcgtgtccagaaggttcagagattttagagagaacaaacaacaatggctgctacatctggggctgtactaaatggattaggctcttcatttctttgtgggggaaagaggagccaagcccttttgggtgccagcattggggccaaaggctcgccctcccctactgctggaactagaaagttgatcgttgtggcagccgccgcacctaaaaagtcttggatccctgctgttagaggtggtggcaacttcattgaccctgaatggctcgatggatcgctccctggagactacggatttgacccactaggtcttggaaaagacccagcattcctcaaatggtaccgagaagctgagctgatccatggacgttgggccatggctgctgtcgtcggcatcttcgtcggccaagcttggagtggcattccatggttcgaggcaggagctgacccaggtgcgatagctccattctctttcggctcactccttggtactcagctcatccttatgggttgggttgaaagcaagcggtgggttgatttcttcaacccccaatcacaatcagtggaatgggcaactccatggtctaagaccgctgagaacttcgccaacgctacaggtgagcaagggtacccaggaggcaagttctttgacccattggggctagcaggaaccatccagaatggggtctacgtccctgatattgacaagcttgagagacttaagcttgctgagattaagcatgctagaattgcgatgttagccatgttgattttctactttgaggctggccaaggaaagacaccccttggtgctcttggattgtaaaagaaaactttaagggtctgtttggatgtagataactgagttatgtcttggacgtaaggagagttgagccagaaaaaaaactggaaatgatgtttgttgagctgatgagttccctcaatagttcaaaattctaaagtaaaatgtctaatgttcattgattaaatacagattctgtct

SEQ ID NO: 18293 - DNA, 459 bp, Gossypium hirsutum
  unsure (1)..(459): unsure at all n locations
  Clone ID: LIB3120-004-Q1-K1-B1
gngaaagaggatccaagactttttatgtgcggcggctgccacaacgatcaactttctagttccagcagcaggggagggcgagcctttggccccaatgctagcacccaaaagggcggaatctgctgaacatacagggatattgagattgaggggtttgccattttctgctggaaaagatgatataatggagttctttaaagattttgtgttatccgaagatgctgttcatatagtattgaattcagaggggaggccaagtggagaagcatttgtggagtttacaaatgcagaagattcaaaagctgcaatgtccaaggataggatgacacttgggagtcgttatattgagttgttcccttcattttctgaagagatggaggaagcaatttcaagaggacggtgattcttcagacaatgtcttntgttttattttctattctataccaggtatgatttctt

SEQ ID NO: 18294 - DNA, 511 bp, Gossypium hirsutum
  Clone ID: GOSHI-09MAY01-C767_4
cccacgcgtccgctcactgctcttttttttttcctctccttttagttgttgttgcttcttcatcttcattattattattattattatttttcttcttctatggccacactatgatctatcgctacgcttttgtctagttagatcgtttgtttttgttggttttgttcctcggcatggctgacgataaggaaatgtctacccctgttgttgaccggaacgatcccgtcaccggtcacataatttccacaactattggtggcaaaaatggagaacctaaacagaccattagttatatggcagagcgtgtagttgggacaggatcattcgggattgttttccaggcaaaatgtttggaaacgggagaaactgtggctataaagaaggttttacaagacaggatatataagaatcgtgaactgcaattgatgcgtgtgttggatcacccgaatgtgatttccttgaagcattgtttcttttccacgacaaccaataacgagcttttcctcaactt

SEQ ID NO: 18295 - DNA, 709 bp, Gossypium hirsutum
  Clone ID: GOSHI-09MAY01-C767_3
cccaagtcttcgttgtacagctcttgaagcatgtgcacatcccgtctttgatgagcttcgagaacctaacgctcgcctaccaaatgggcgacctttaccacccctattcaactttaaacaggaattatctggggcttcaccggagctcataaataagttgattcctgatcacgtgaaacggcaaataggacttcaacatttcatgcatccgcctgggacatgagacttcaaaaccgttttcaaattcgatgtctgtagtttgatgcgtgacacaaaaagaattactatctttggattatcatcggttgatttgaggcctatccggcatcattttgtacgcttccataacacatacagcctttggtagtgtggtggctgccttctctcgatccatatatgtcaatgatgtctctcttgctcttgtattctatgagtctactttttgtcaaaatgcttttttttttagttgtgtacatgtaacatgttagatactaaaaaggtagatggatgaaccggaaagctgctagtcgaggaaaagttaagaagtctatttgtggttaggaaatgtacccaaagctaaaaggggatggcttttcggtttggttactttcatctgttctttgttttaagttaattctggtggctgactaaaattgcagacaattgttgttactatttgttccaagtaatgttattatctttttctccc

SEQ ID NO: 18296 - DNA, 586 bp, Gossypium hirsutum
  Clone ID: GOSHI-09MAY01-C767_2
ggaaatggaaagcagagacagaagaccaagaaacggacgaaaataaatataagaaaagaaaaagaaaagaagggaagaatggagggagaggtggaatcacatgcgcattagttcactgtcgttctcctaggtcctcgtttgcttgttctaattcttgttaatcatcatcatattcctttttgctcgtcatggctgaaaataaggaaatgtcggcccctgttgttgacgtcaatgatccggttaccggtcacatcatttccacaacgattggaggcaaaaatggagagcctaaacagaccatcagttatatggctgagcgtgtagtcggcactggatcttttgggattgttttccaggcaaaatgcttggaaacgggtgagaccgtggctataaagaaagttttacaggacaggagatacaaaaatcgtgaactgcagttgatgcgtgtgctggatcatccgaatgtgatttccttgaagcattgtttcttttccacgacaacgaaaaatgagctttttcttaacttggttatggaatatgtaccagagagcatgtatagggttttaaaacactacagcagtgcaaa

SEQ ID NO: 18297 - DNA, 1685 bp, Gossypium hirsutum
  Clone ID: GOSHI-09MAY01-C767_1
aatcacatgcgcattagttcactgtcgttctcctaggtcctcgtttgcttgttctaattcttgttaatcatcatcatattcctcgcttttgtctagttagatctttttttttttttgttggtttttttcctcggcatggctgacgataaggaaatgtctacccctgttgttgaccggaacgatcccgtcaccggtcacataatttccacaactattggtggcaaaaatggagaacctaaacagaccattagttatatggcagagcgtgtagttgggacaggatcattcgggattgttttccaggcaaaatgtttggaaacgggagaaactgtggctataaagaaggttttacaagacaggagatataagaatcgtgaactgcaattgatgcgtgtgttggatcacccgaatgtgatttccttgaagcattgtttcttttccacgacaacgaaaaatgagcttttccttaacttggttatggaatatgtaccagagagcatgtatagggttttgaaacattacagcagtgctaatcaaagaatgccacttatatatgtgaaattatacacatatcagatattcagggggcttgcatacctccatagtgttgttggagtttgccatagggatctgaagcctcaaaatcttttggttgatcctctgactcaccaggctaagatttgtgattttggaagtgcaaaagtgcttgtcaaaggtgaagctaacatttcatacatatgttcgcgtttctatcgggccccagaacttatctttggtgcaactgaatacacaacctccattgatatctggtcagctggttgtgttcttgctgaacttttgctgggccagccattgtttcctggagagaatgctgtgggccagcttgtagagattattaaggtcctaggtacccccactagggaagaaattcgctgcatgaatcccaattacacggattttaggtttccacagatgaaagcgcatccgtggcataaggtttttcacaaaaggatgcctcccgaagcaattgatcttacttcacgactcctgcaatactcacctagtcttcgctgtacagctcttgaagcatgtgctcatcctttctttgatgagcttcgagaacctaatgctcgcctaccaaatggtcgacctttaccaccacttttcaacttcaaacaggaattatctggggcttcaccggagctgattaacaagttgattccggatcatgtgaaacgacagatagggctccaacatttcatgcatccagccagaacataaaacttcaaaattgatacaagactcggtatctcctagtcgacatgggacacaaaggaaagtactatcgttggataaccaccatcgatctgagcctgtctcaacggcacgtaagtctcaggcagcctcttttgctcctttattctatatgagtattagctgtttgtgaaaatgccttatttgttatatgtacatgtaaacatggtttgatagtaaaagataaaagacttttaaggtgaaaaagacagtaaaaaggtgctggtgaggaaaaaagtaccatagaaatggcccgaaggtaggctttagattggttcttgtgttttttagttattgtggtagctgacttcaaatggcagacaatttattgttactgttagtgtgcaaagttaatattattactcttttct

SEQ ID NO: 18298 - DNA, 298 bp, Gossypium hirsutum
  Clone ID: LIB3272-044-P1-K1-D6
gaaatatgggaccatgttggcgatgtgaacgacacaaacagtggtcacgtggttgccaccacaattggaggcaaaaatggtgaggccaaacagaccatcaagtatctggccagagcgcgtaggcggcaccaggatcttttgggattgctttgcaagcaaaatgcttggaaacgggagagactgtggctataaaaaaagttctgcacgacacactatataaaaatcgtgaactgcacatgatgcgtgtgctggatcatgcaaacgtgattgcctcgaagcactgcttctttcacacgac

SEQ ID NO: 18299 - DNA, 697 bp, Gossypium hirsutum
  Clone ID: GOSHI-09MAY01-C717_3
cacagcttttccaagccagaaaatccagcaccaagtcagcagattctagtcttgactttggaaatgaagaagtaccggttgaacccaaaacagatcttgggctttccccttcatttatttcctctagtgaaaacctgaatatgagttccgaaagttgttgttcagaaaatgcaaccttcagtactaacagttcacctctgccaattggcagacctttgcaagtagataattctttgaaaagccgaatccggtaccaatgtgcccccaccagctaagagcagagagacttcaacagttcacctctctgacgagtatttgagcttctgttacacttgcaagaaaaaactagagaaggatgaagaagtttacatgcacagaggtgaaaaggcattttgcagttttgattgccgcactgaggagatttttgctgatgaggaaatggagaaaacttgtaataattcctcatccaacagttctccagaacagagcaatgatgaagatgtcttcctaatggccattgatgatcggagcattcggagcataaatcacaattcatggatagcacagcatagagtttaatttataatccgaagatagatataatatcattagactggtgcattataattttgattaaatgaattagtaacggcaggaaaccccatctcatcaagtttccttttattatatctttttg

SEQ ID NO: 18300 - DNA, 982 bp, Gossypium hirsutum
  Clone ID: GOSHI-09MAY01-C717_1
aaaaataaattaactaaaaaatttaataaaaatggcaggaaaaaatatattttgagagtttatatatggttttgctaagccagactatcatctcattctcatctgcattttgggtgttcttttctcctctctccttccaagttttaagagaagaaaaccagtaaggagttgctggctttcttgctaaaaggttgtggttttatagataatgcagtgtgagaaaacatacttcataggcaagttcaatggatggtagtgtgatggctgatcctgatccagactcgtctacattgggtttaaggcatattagcagctcactattcaatattcctggtttccttgttgggtttagcactaagggttcttcggattctgatgctgtacgaagccctacatctcctcttgatttgagagggtttgcgaattttagcaacccctttactgttaggtctcctagatcatcatctcaaagtggttgtcaaaagaagtgggattgtagtaagataggcttgggcattgtgaatttgcttgccgatgaaattaaaccagatggtggagaccttgattctccaaagagaatgaatattgtatttggaccacaggtcaagactaagtttccttattcatcaaggtattcccgtgaataccttggtaattccatgaaatccaattctttgcctaggaattacataatttcacagcttttccaagccagaaaatccagcaccaagtcagcagattctagtcttgactttggaaatgaagaagtaccggttgaacccaaaacagatcttgggctttccccttcatttatttcctctagtgaaaacctgaatatgagttccgaaagttgttgttcagaaaatgcaaccttcagtactaacagttcacctctgccaattggcagacctttgcaagtagataattctttggtaagtaaaccaagttcacttcctatactcctcagccatagcatggtgtc

SEQ ID NO: 18301 - DNA, 575 bp, Gossypium hirsutum
  Clone ID: LIB3543-029-Q1-K6-F3
ccccgcgtccggaagaacaaaataaataactaaaaaattaataaaaatggcaggaaaaaaatatattgagagtttatatatgtttttgctaagccagactatcatctcattctcatctgcattttgggtgttcttttttcctctctccttccaagttttaagagaagaaaaccagataatgcagtgtgagaaaacatacttcataggcaagttcaatggatggtagtgtgatggctgatcctgatccagactcgtctacattgggtttaaggcatattagcagctcactattcaatattcctggtttccttgttgggtttagcactaagggatcttcggattctgatgctgtacgaagccctacatctcctcttgatttgagagtgtttgcgaattttagcaacccctttactgttaggtctcctagatcatcatctcaaagtggttgtcaaaagaagtgggattgtagtaagataggcttgggcattgtgaatttgcttgccgatgatattaaaccagatggtggagaccttgattctccaaagagaatgaatatagtattcggaccacaggtg

SEQ ID NO: 18302 - DNA, 602 bp, Gossypium hirsutum
  Clone ID: LIB3582-047-P1-K1-B4
actcaccataactaaagatacaatcccactctcatgcttttgagcccatctaatgaactcctgtgtttgattcacatgctttttgcttccagcatttattgatcccttgtagatgaatccatcagagcttgcagcaaaaaattctttccttatttgatccaatgctatccccataatggcacatgggaatgtcactgttcttaactttgttccatccaacaatccccaaatcttaatcgtgcaatccaacgagcttgatattatggtagagttgcactgtgccataatagagtctattgctgtcactgagccatcatgtgcaacaaatctctgcaacatcaagctggtggagctcttatcaggaaacaggcttgttatgtgctgaatatgatgcgagtatctcccctgaaggaactgagagagcatgtacagaacctgaaaggccaccagcaaacaaatacaagccatcaagggtagctgacaagggtgcaacaggttctggaacaagaaaattgtccagagctgttgaagaccaccaattgtagagatgaatagaggctgaagaagtctcagcagatatatgagaagtagcaatgaatgag

SEQ ID NO: 18303 - DNA, 526 bp, Gossypium hirsutum
  Clone ID: LIB3543-033-Q1-K1-D3
caggaccttcttcagcctcttttcatctctacaattggtggtcttcaacagctctacacaattttcttgttccagaacctgttgcacccttgtcagctacccttgatggcttgtatttgtttgctggtggcctttcaggttctatacatgctctctcagttccttcaggggagatactcgcatcatattcagcacataacaagcctgtttcctgcctcaaaataagtgaagatgggtcacttttgatatctggtggtgatgatggtacaatttcttttgttccaatctttcaaatcatcgaggcatcacctgataagagctccaccagcttgatgttgcagagatttgttgcacatgatggctcagtgacagcaatagactctattatggcacagtgcaactctaccataatatcaagctcgttggattgcacgattaagatttggggattgttggatggaacaaagttaagaacagtgacatttccatgtgccattatggggatagcattggatcaaataaggaa

SEQ ID NO: 18304 - DNA, 993 bp, Gossypium hirsutum
  Clone ID: GOSHI-09MAY01-C727_2
cccagcgtccggtgaggatgacattgaggacatccagaatgaaatttctgttttgtcacaatgccgctgtcaatacatcacagagtattatggttcctatcttcaccaaactaaactgtggttgataatggaatacatggctggtggttcagtcgctgacctactccaatcaggccctccactagatgaaatgtcaattgccagtatttcaaggaaagattcacagagatatcaaagggtgtttttcttcactcgtgttacccacttataagttataagatataggtgcacatagatacgaataattttagagcatttggtctacagacttgtatagttataccctgcttcaagtcattcttctcatttttcttttcagccatttgattttctaatgttgtttgtacctagcaatttactttgttcattactggaaacatttttgctatcacttttggcagcggcaagcattttattgactgagaatggtgatgttaaggttgcagattttggtgtttcagcacaattaacaaggacgatatcgcagagaaagacttttgtaggaacaccattctggatggcaccagaagttattcagaattcagatggatacaacgaaaaggtacttctaaagctgtgtgtacagcctaatttatgcccgggcccaacaagcagagacccaaggatcaaacctacccaaacaagcccattacagcaaggcccaacaaaggtcagcatagggtttcagcttttctgaaaccctagctaaggcgccgcacgtccctgggggctcctaacgtctaccgccgctctagtttctgccaccaacgccaccagctatttccatcaattacctgcaaggacagcacgcaaagcaaaggcaaaaacaatgcaaaataatagaaatagaaagatgtattaaaatcggctatataaggagacaaacaaaatgtaacaggggtcttttttttcggtaattaagaagaacttaat

SEQ ID NO: 18305 - DNA, 748 bp, Gossypium hirsutum
  unsure (1)..(748): unsure at all n locations
  Clone ID: LIB3582-047-P1-K1-D3
cttttacttttcttattcctcgattttctttcaaagctctgaaaaatccacgctatcgaaacaacgaaagagaaagatctgcaaaaacccaacagggattgggtttttgatgatggttttggctatttagaagtaggtgttgaattgtaattgaagaatgggtggaatgtgaatgttttgaggggttgattttggggtggctttgatctttggtgtccaaggagtttgtacgtagaaatggctgatatagaaggtttacaaccagcagcggggtctagatttagtcaggtggagttgattggcaggggagcctttggtgacgtctataaagtgtttgataaggaattgaaaaaagaagttgctatcaaagtgaggatgacattgaggacatccagaatgtattgccttactttactgggagctagtatcctaagttttcaacgagtaggttactaggtttttcatatgttttgtttttgttccaggaaatttctgttttgtcacaatgccgctgtcaatacatcacagagtattatggttcctatcttcaccaaactaaactgtggttgataatggaatacatggctggtggttcagtcgctgacctagtaggtcacttctacttccttctgcatgtntgttgcatgatgcttggctgaagattaaaaaatttgcttccctattaacatgaactctnttgtgttttcttggtttcacactgtttctgatcaagatatttggaattttg

SEQ ID NO: 18306 - DNA, 752 bp, Gossypium hirsutum
  Clone ID: GOSHI-09MAY01-C697_2
cccacgcgtccgcccacgcgtccgctcctagttactgctcttccactttcgctcttccccagatctgatctcaaaagaaaatttcaggcaatttcagaacgctaagcctagatcttttcttcacacttcaaaagtaagatggaaaagatgggtcgtggagttagcagtggtggtgggcagagctcattgggctatctgtttgggagtggagaagctccaaaaccagttacaaacaaatccgaagctgctccaattgaagcacaggatgtgtccaaacctgctcctgctcctcaacaagttgccaagcaaattcctgcgggtattaacagtacgcgtgctgatggtcagaacactggcaatttcattacggatcgaccatccaccaagattcatgctgcccctggaggtggatcttctctggattaccttttcggtgggggacctggcggtagcaaatgagatcgaatgacttaatatatcttgataatggtagtattttggttgttgattcttagggaagccatagattccagatgttgctgttttcagatattatcacattaagcaatggaaacttaccgtcatgtagtgtaatattgcagatcttgtggctactgttggtttattcggagaagtctccagatagatgcgagcacgtctattgccgggctcagttactctaatcagcagtgttatatatttcatctgcaataatcaaaattataaataaaatataaaaaaaataatttttt

SEQ ID NO: 18307 - DNA, 602 bp, Gossypium hirsutum
  Clone ID: GOSHI-09MAY01-C697_1
ccagttctgatctcaaaagaaaatttcaggcaatttcagaacgccaaccctagatcttttcttcgcacttcaaaaggttcagtgtttgcttccaatttgtttactgtatctctgatttgattatatttccctcactggctactcatttttatgcttcatttaatttgtttgatgtttacgttttgcaaagtggagagtccaaagcttgtcatgcgacgtcattaatttgttttacattgcattcgagaaatggaagaggcggggcgaggggatttgaagtataggaataacattgctgactatagtcttcatcaaggattgtgatggaagctcgggcgatatgcttgtttttcttcccttttttctgcaattcatccataattttatgttcattccacctccccttgctccaatcccttttggattattgcttttttggctatacttatagattcttactttgtgctgttttttccccccagcctgtgtgattttttattttttttttacttcatttccagtaagatggaaaagatgggtcgtggagttagcagtggcggtgggcagagctcattgggctatctgtttgggagtggagaagc

SEQ ID NO: 18308 - DNA, 469 bp, Gossypium hirsutum
  Clone ID: LIB3582-047-P1-K1-A5
ccagatctgatctcaaatgaaaatctcgggccgtttgagagcgccaaccctagatcttttcttgccacttgagaaggtgcagtgtttgcttccaatttgtttactgtatctctgattatgattatatgaacctcactggctacttatttttatgcttcatttaatttgtttgatgtctacgttctgcatagcggagagtccaaagcttgtcgtgcggacgtattcatttgtgttacattgcattcgcaacatggaagatgcggcgcgaggcgatttgaagtatcggaataacgttgattgctatagtcttgattgaggattgtgatggaagtgcgggcgatgtgctggataacattacttattttgtgcaagctagccatgaatttatgctcatactaccttctctagatacaatcgcttgaggatgattgctttatcggctatacttatagatacttactatgtgctg

SEQ ID NO: 18309 - DNA, 354 bp, Gossypium hirsutum
  unsure (1)..(354): unsure at all n locations
  Clone ID: LIB3147-059-Q1-K1-C11
aacgaccggccgaccgacgcgtcccngactcatttcggactctgttttgacgtttgggcggacgcattaaccgaggggtggtgtgactcttggagtcgtggagttagcagtggtagtgggcatagctcattgggctatctgtttgggagtggagaagctccaaaaccagttacaaacaaatccgaagctgctccaattgaagcacaggatgtgtccaaacctgctcctgctcctcaacaagttgccaagcaaattcctgcgggtattaacagttcgcgtgctgatggtcagaacactggctatttcattactgatcgaccatccaccaagattcatgcttcccctggaagtgga

SEQ ID NO: 18310 - DNA, 393 bp, Gossypium hirsutum
  Clone ID: GOSHI-09MAY01-C607_2
ttagaataagatattgacattaactttttagctacgggtcagacaatggagagactgagatctcacgagactggtatttttaagaagaagccagctgatttgatgcaaatctttaaggatgtacagtctaaggtgagtgatgttgttcttggaaaggaaaaacctgttgaagagtcaaatcctgaatatgagaaacttaaacactatgtttttgagcttgaaaatcatttggctgaagctcagaagcatgcttatcgtcttgtaaagagacacagagagttggggcaatcactatctgattttggtaaggcagccaagcttcttggtgcttgtgaaggacaagtccttgggaaggcattttctgatcttggggccaaatctgaggtgctatcg

SEQ ID NO: 18311 - DNA, 901 bp, Gossypium hirsutum
  Clone ID: GOSHI-09MAY01-C607_1
cccacgcgtccgaacgaagcttatcggggtcgtcgcagagccccagatctccgtcgtcacaaccgtatctatcagtttccgtgacggatcccgttaaattaggcaatggcgtccaagcttacatatcctatcgtgtcatcaccaagaccaatttccctgaataccaaggcccggagaagattgttattaggcgttacagtgactttatttggttacgcgatcgccttttcgagaggtacaaaggcatattcattcctcctcttcccgagaagagtgctgtagagaaatttcggtttagtgctgaatttattgagacgaggcgccaagcattggatgtatttgttaatcggattgcttcccataatgtgcttcagcagagtgaagatcttagaacctttctgcaggcagatgaagagacaatggagagactgagatctcacgagactggtatttttaagaagaagccagctgatttgatgcaaatgtttaaggatgtacagtctaaggtgagtgatgttgttcttggaaaggaaaaacctgttgaagagtcaaatcctgaatatgagaagcttaaacactatgtttttgagcttgaaaatcatttggctgaagctcagaagcatgcttatcgccttgtaaagagacacagagagttggggcaatcactctctggttttggtaaggcagccaagcttcttggtgcttgcgaaggacaagcccttggcaaggcatttgctgatcttggggccaaatccgaggcgctatcggctaagctgcagaaggaggcccatcaactcttgatgagttttgaggaacccttgaaggattacgtccgtgctgtccagtccataaaggccacaataggagagagagcgaatgctttcagcaacagtgtgaactg

SEQ ID NO: 18312 - DNA, 682 bp, Gossypium hirsutum
  Clone ID: GOSHI-09MAY01-C637_10
ttcacttgttcgcccacgcgtccgggcttttacctgcaaatataagtgggaggttctcaacgctgccgatcgacatcatgtgaccttgctcggtctcgactaccgatcttcaccacctgctccattgattgattcttaagagttaaccaaatggtcgttttacagggcagtgattgccgagttcattgctacacttctcttcctgtatgtcactgtgttgaccgtgattggttacaaggtccaaaccgaccctgcttagaacactgttgacccctattgcgggggcgttggtattcttggtattgcttgggcctttcgtggcatgatctttatccttgtttactgcactgctggtatctctggaggacacatcaacccggcggtgacgtttggactggtcgtggggcggaaagggtcacttgtcccaacccctgtggaccttggggcttcatgcttgggtgccatccgggggtgttggttggtgaaagctttccaaaagacttactaccatagctattgaagtggtgccaacgagctccaagatgggttcaacaagggcaccggcttgggtgctgagatcattggcaccttcgttcttgtctacactgtcttctcagccactgatcccaagaggagtgcaagggattcccatgttcctgtgttggcaccactttccattgga

SEQ ID NO: 18313 - DNA, 952 bp, Gossypium hirsutum
  Clone ID: GOSHI-09MAY01-C637_6
gcgtccgtccacgcgtccgcccacgcgtcgtctcccagctccctttttgtctctgcatttttcctagtgtaaaaaaagaaagttagatatgggtaaggatatagagagtagtgtagagcaagggtcaggcaaggactaccatgatccgccaccagcaccattgattgatgctgaagagctgactaaatggtcgttttacagagcagtcattgctgagttcattgctacccttctcttcttgtatgtcacagtattgactgtgattggttacaaggtccaaaccgatcctctcaagaacacagttgaccctgactgtggtggtgttggtatcctgggtattgcttgggcctttggtggcatgatctttattcttgtttactgcactgctggtatctctggaggacatatcaacccggctgtgacctttggactgttcttaggacgaaaggtatcactgatccgagccatcatgtacatggtggctcagtgcttggtgccatatgcgggtgtgggttggtcaaggctttccaaaagacttactacacacagctatggaggtggtgccaacgagctccaaggtgggttcaacaagggcaccggcttgggtgctgagatcattggcaccttcgttcttgtctacactgtcttctcagccactgatcccaagaggagtgcaagggattcccatgttcctgtgttggcaccacttcccattggatttgccgtgttcatggttcaccttgccactatccctatcactggcactggcatcaatccagcaaggagctttggagctgctgtgatttacaaccaagaaaaagcttgggatgatcaatggatattctgggttggacccttcattggtgctttcgttgcagccttttaccaccaatacatcctaagagcagcagcgaaagcaccaatgaaggctttccaaaagacttactacaat

SEQ ID NO: 18314 - DNA, 1048 bp, Gossypium hirsutum
  Clone ID: GOSHI-09MAY01-C637_5
cccacgcgtccgcccacgcgtccgcccacgcgtccgctcttcacccatagcttaaacgaacattttcacagcttaaaacacaatatgactaaggatattgagaccacggcggagcaaggcggcggagcggagttctcagcgaaggactaccaggacccaccaccggcaccgttgattgacttggaagaactcaccaaatggtcgctttatagggcggcgatcgctgagttcattgccacccttcttttcttgtatgtcacggtgttgactgtgatcgggtataaagtccaaaccgacccggtaaagaatactattgacccggattgtggtggtgttggtatacttggtattgcttgggcttttggtggcatgatctttatccttgtttactgcactgctggtatctctggaggacacatcaacccggcggtgacgtttggactgttcgtggggcggaaggtgtcactgatccgagccctgttgtacatggtggctcagtgcttgggtgcaatctgtgggtgtgggttggtgaaggctttccaaaagacttaccacttcccattggatttgccgtgttcatggttcaccttgccactatccctatcactggcactggcatcaatccagcaaggagctttggagctgctgtgatttacaaccaagaaaaagcttgggatgatcaatggatattctgggttggacccttcattggtgctttcgttgcagccttttaccaccaatacatcctaagagcagcagccattaaagcccttggatctttcaggagcaatgcttaaaaacatttcaccttcattacaataagaaaacaatgatgtaataacaaatgaggaatgagagcaagtttatgtcttgtgggaggggttcccttttgcagtttattttctataccaattgagatggggggccattggaaaggtaattatataagaataaaaaaaatttttggataagggtggttctttcaattccctgtttttatattaatttttaggaggcttttttaaaaaggtatatattcattatttaa

SEQ ID NO: 18315 - DNA, 604 bp, Gossypium hirsutum
  Clone ID: GOSHI-09MAY01-C637_3
gaaaatctccattattttaaatccctctttgcatttcttttaacggcaatggctctctctcgtttcgtttacttaatcatgctggcattgcttttttgctccgttatagcacaatctccgacgccgtctcctgtttcttcgccgaagaaatctccgtcatctactccgacaccgatctcttcacctcctacaatatctgctccgtctccgtcggaggttccgtcagcgactacaccgtctccagcaactgttgagtcacctccatctccttctgctctgtcaccgaatgccagtcccacgtcaatttctgaacctcctgccggagctccgggaccagcggagaatagtgccgttaggtttggtgctgctggatctgttgcggttggagtgttgatggtcgctatggtactgtaggcatatccagatcttccttctctcgatgatagtataaataaaatttagcttatgtattctccttaggtttattttgcaattttgttctttatataatggcgaatttatacaatctcctatattactgcctatggattatgtattatgcttgcgatttcaattactgtattcgtatataatataatagtat

SEQ ID NO: 18316 - DNA, 1275 bp, Gossypium hirsutum
  Clone ID: GOSHI-09MAY01-C637_2
cccacgcgtccgattccctctctctctttctcccttataaacccttcttctccccctcccctctcgtccgcccacgcgtccgcacaaacccaaatctccaattgatctgtttcatttttcagcaaagctagaaaaacaatgactaaggatatcgagactgcagagcaacatggaggggagttctcggccaaggactaccatgatccaccacctgctccattgattgatgctgaagagttaaccaaatggtcgttttacagggcagtgattgccgagttcattgctacacttctcttcctgtatgtcactgtgttgaccgtgattggttacaaggtccaaaccgaccctgctaagaacactgttgaccccgattgcggtggcgttggtattcttggtattgcttgggctttcggtggcatgatctttattcttgtttactgcaccgctggtatctctggagggcatatcaacccggctgtgacattcggtttgttcgtgggacgcaaggtgtcactcatccgagccctgatgtacatggtggctcagtgcttgggtgccatatgtgggtgtggattggtcaaggctttccagaagacctactacaacaactacgggggtggtgcgaacgagctccaaccagggttcaacaagggcactggactgggtgctgagatcattggtacctttgttcttgtctacactgtcttcgccgccactgatcctaagaggaatgcaagagattcccatgttcctgtgttggcaccactccccattggattcgctgtgttcatggttcaccttgccacaattccagtcactggcactggtatcaaccctgctaggagttttggagctgctgtcatttacaacaaagagaaggcctgggatgaccaatggatcttctgggtcggacccttcattggagctgccgcagctgcattctaccaccaatacattctcagagccgcagccatcaaggctcttggatctttcaggagcaatgcttaagtccagctttcattttcttacgaacttcaaccaaaaaagaaatggagaaccttgagttcagtgtggaccattgaaatgtaaataaatatttatgaacaagggtgtcttattttcttgctttcaatgtattttatttcgtccgtttttgtcatctttgttcatccttatcctctcttcttttttccttttttttttccggtggtgcttttcatgttatttttttaatgcataattctacaagtaaaatatattgtttgttttagtgtc

SEQ ID NO: 18317 - DNA, 1028 bp, Gossypium hirsutum
  Clone ID: GOSHI-09MAY01-C637_1
ggtttgtcaaatacagccgccgaaaaaaacacacagcgaaacgatgggggcgaaggcgaggaaagcgtggaagaaagcaataaagagggcttcttctcaatttcctaactctgattccaagactgcttcagctgatttcctgccgttggaaggtggtccgcgtgaaattccagagaccaaaccccttcaaaaaatgctactgtcctgtatgttggtcgaatcccacatgggttttatgagaaagagatggaagcttattttcagcagtttggtgccattaagagattaaggattgcaagaaataaaaagacaggaagatcaaagcactttggcttcatcgaatttgagaatccacaggtggctgaagttgtagctgattgtatgcataattatcttttgttcgagcatcttttgcaagtccatcttattcctccggagcatgttcatccaaaattatggagaggtttcaattataaattcaagccagtggactatgtgcagattgaacgaaagcagcataataaggtgagaacattggaagagcacaaaaagttggtggagaagatcataaaacgagacacaaaacgtagaaagaggatagaggctgctggcattgattatgaatgcccagaaattgtgggtagcggtcagtctgctccaaagaagataaagttcgacgaagattaggcaccattaagttttactaccaaatgctgactatgaaggtaatggcttacacaatatagtcctcctgagatgctaaaaaattgcaagtttaatgtgtagctgagctggtgacaagctgtattgcctttggctctgcaacaagtaggaaggtttatatttataatgtcggatcctgttaagaccagacctcctgttggaatcaaattttgttatactgtaattgcaatcaatgttgtttgttatatgctcccggcggtgacgtttggactgttcgtggggcggaaggtgtcactgatccgagccctgttgacctggtggctcagtgcttggttcaatctgtg

SEQ ID NO: 18318 - DNA, 524 bp, Gossypium hirsutum
  Clone ID: LIB3583-005-P1-K1-E5
cggacgcgtggggcgtgaatgagttgattcagaattttatttaatttgttctatttttgttattcaggtgagaacattagaagagcataaaaagttggtggagaagatcataaaacgagacacgaagcgtagaaagaggatagaggctgctggcattgattatgaatgcccagaaattgtaagaattcaaccttctacttgctttaatttgtatctatgaaaatagataaatcattaggagcacattggttgaaggtgaatgaacatttagtattacaacacttgtgcatgaagaatgaacatcggggctttaatttgtgcaataaaagttccatggtgtctgtttaattcttaatatggcgcaccactttcattctcactttaaccatctggattgttgatcctccttggatttgacatggaagatattgatccttataaatgactttaaggatgatttagttatgaacagaaattaatattgaggcccttgtactaggagtcgaattgtatctttccccctc

SEQ ID NO: 18319 - DNA, 484 bp, Gossypium hirsutum
  Clone ID: uC-gsflnu33B092f05b1
aacggcaatggctctctctcgtttcgtttacttaatcatgctggcattgcttttttgctccgttatagcacaatctccgacgccgtctcctgtttcttcgccgaagaaatctccgtcatctactccgacaccgatctcttcacctcctacaatatctgctccgtctccgtcggaggttccgtcagcgactacaccgtctccagcaactgttgagtcacctccatctccttctgctctgtcaccgaatgccagccccacgtcaatttgtgaacctcctgcatgggctccggcaccagtggatataccagccatacagttctgagagccgcagacatcaaggctctgggatctttcaggagcaatgcttaagtccagctttcattttcttacgaacttcaaccaaaaaagaaatggagaaccttgagttcagtgtggaccattgaaatgtaaataaatatttatgaacaagggtgtcttattttct

SEQ ID NO: 18320 - DNA, 537 bp, Gossypium hirsutum
  unsure (1)..(537): unsure at all n locations
  Clone ID: uC-gsflnu33B092f11b1
tatttttctaatttgcattaaaaaattttgaaaggtgttggcaccactccccattggattcgctgtgttcatggttcaccttgccacaattccagtcactggcactggtatcaaccctgctaggagttttggagctgctgtcatttacaacaaagagaaggcctgggatgaccaagtaaataataatttcccatcctatataaatatacaattttccatttgatgttataaattgttgctcataatgtatatatatttcatgtggtgttgttatacagtggatcttctgggtcggacccttcattggagctgccgcagctgcattctaccaccaatacattctcagagccgcagccatcaaggctcttggatctttcaggagcaatgcttaagtccagctttcattttcttacgaacttcaaccaaaaaagaaatggagaaccttgagttcagtgtggaccattgaaatgtaaataaatatttatgaacaagggtgtcttattttcttgctttcaatgtattntatttcgtacgttt

SEQ ID NO: 18321 - DNA, 465 bp, Gossypium hirsutum
  Clone ID: LIB3272-020-P1-K1-A10
cggtactcggaattctccgggtccgagcccaccggcgtccgggattgagtcaaggtctattccaggaagtacctacatacatacatactactggtgggtgagtgtcgaacggaggctccataccaggtgttcaacatagtggcacttggacttgggtgaccgatgatcaaattggtaccttttgttcttgtctacacttgtcttcgccgccacttgatcctaagaggaatgcaagagattcccatgttcctgtgttggcaccactccccattggattcgctgtgttcatggttcaccttgccacaattccagtcactggcactggtatcaaccctgctaggagttttggagctgctgtcatttacaacaaagagaaggcctgggatgaccaatggatcttctgggtcggacccttcattggagctgccgcagctgcattctaccaccaatacattctcagagccg

SEQ ID NO: 18322 - DNA, 971 bp, Gossypium hirsutum
  Clone ID: GOSHI-09MAY01-C197_1
cggaatcccggtcgcccacgcgtccggcctcactcgccaacacaaccgcaggtgccgttgccggcgcccggaaaatttccaacggaaaacctattcccatcatttcttccaaatccctctcctttccctctttcaggccttccatttcctcactgaaacccttaatccccaccaaattctcctctctttcccctctccaatgctcccctaatccctccccttctacctccccgccttccctcaaatctcgcctccgcaacggcgaaaccctctacggcatcttcctcctctcattctcccccactttggctgagatcgtcgccttctctggctacgactttgtagtcatcgacatggaacacggccccgggggaatccatgagtccctccaaatgctccgcgctgtcgccacgaccaacaccccagccatcatccgcctccctgagtcctccgcagtttgggccaaaaaagcccttgaccttggtccacaagggatcatgtttccaatgatcgactcccctaaagacgctagaaaggcggtgtcgtattgccgtttccctcccaacggaatccgtggatccgctcacacggtggtgagagcttccaactacggaatcaacgaagggtatctgagcaactacaaggaggatctgttaataatgtgccaagtcgagacggtagatggtgttaaaaaagtggaagaaatcgccgccgttgaaggtgtagactgtattcaaatgggtccattggatttaagtgctagcttgggttacctctgggacccgggtcacaaaaacgttagggagatgttgacgaccgcggataaagaagtgcttaactccgaccggaagacggcggagctttcttggccggtttcgcaatgccacatgatccaccggaagcgctcgggaagcccgggtaacatatggtttccggtgcccatgattttgggttgttcccaaatgcggcgc

SEQ ID NO: 18323 - DNA, 799 bp, Gossypium hirsutum
  Clone ID: GOSHI-09MAY01-C187_1
caaagatcgacttgattatttctacaatcaaggccgggacgagttttttaaatcgaaaatccagaaatacaactcgacagtgtttcggaccaacatgccacctggtcctttcatttctcaagatccaaaggttgtcgctttactcgacggtaagagcttccccgtccttttcgatgtcaccaaggttgaaaaaaaagaccttttcaccggcacttacatgccttcaactgacctcaccggcggctaccgaatcctctcatatctcgacccttccgagcccaaacacgctaggctcaaacaactcctctttttcctcttgaaatctaggagagatcatgtaatccccgagttccaagcctcttacagtgagttattcgaaacgttagagaaagaagtcgccgagaaaggcaaaagcagctttcagacagctaacgatcaagctgggtttaacttcttgtgccgggctttcttcggttcaaacccaccggatactaaactaggaaccgatggtcctagtttgatcagtaaatgggtactgtttcaactcggtccggttcttaaactcggtctcccaaagtatgttgaagaactcttgatccataccttccctcttcccccggctttggttaaaaaggattaccagagactgtatgatttcttctacgaatcatctggttccattcaagatgaagctgagaaactgggtatttcacgagaagaagcttgccataatctgttatttgctacgtgtttcaattcattcggtggcatgaagatcttcttcccaacatgcttaaat

SEQ ID NO: 18324 - DNA, 372 bp, Gossypium hirsutum
  Clone ID: GOSHI-09MAY01-C147_8
cggccgcgtgggcggacgcgtgggaaactgtaagctaagagagagtaactgtgattgtgcggcataaccttcgctgcaatttagttttgttttctgtctggttatattttgttagcatggatgctttttcacccatatgatgtacgttcgtttttagacgtttgtgttttgatgatgatcatgatgtactacaatcgacatcaaaacacaaacgtctaaaaacggcgttcatcttatgggtgaccaagcttccgtgctgacaaactatatccagaccgatgtctactccaaatcgcagcgaaggctactgccgcactatcccagttactctctcctagcctacagtttcccacgcgttcgcccacgcgttcg

SEQ ID NO: 18325 - DNA, 902 bp, Gossypium hirsutum
  Clone ID: GOSHI-09MAY01-C147_5
tgcaaggaagaattttatgggtggtgctggagaatgcgtgcaagtcagaaccccagttgtctcattttccgtgaaacttgtccttagaaggtcttgcaggactgtgtatgtagcaagtctcccaaccaagcacaacgcggtgtggggcatggaagctcgaccctttggaggaaggtctggctgaagccattgatgaaggtcgtattggtccaagagatgatcccaaggttcgttccaagattttggccgaggagtatggttgggacaaagatcttgctaagaagatttggtgtttcggccctgagaccactggtcctaacatggtggttgatatgtgtaaaggagttcagtacctgaatgaaatcaaggactctgtagtcgcggggttccagtgggcatcaaaggaaggtgcgatggccgaagagaacatgaggggtatctgctttgaagtctgtgatgtggttctccatgctgatgctatccacagaggtgggggtcagatcattccgactgccacgagggttttctatgcttctcaagttacgggcaaaacaaaggttctggagcctggttaccttggtgagaatttagatcccttgcacgggcctttgggggttttacaggtgtttaacgcaaaccgagcactgtttctgaggaatctaggggccggtacccctttctaaactttagggcttccttccatatttgattcttttgattttcaagtttttggggctaaccttcggaaggttttccaaaatggggtttatacccgggttagaggtttagttccttggaccggttctcagctatagccttttttatatatccttaaggaaggtttggatgccttatcccccttctttgttcaggaactcttgggtgaaatccattttgccctt

SEQ ID NO: 18326 - DNA, 607 bp, Gossypium hirsutum
  Clone ID: GOSHI-09MAY01-C147_4
acctggccgacctggtccacagaggggttgagacattcacaggtggaggttctatctctcactacagccaagccaaggcttcttgaacctgtttacttggtccagatctcaaccccggagcaggcacttggtggtatttacagtgttcttaaccagaagcgtggacacgtcttcgaggaaatgcagaggacctggcactccactctacaacatcaaggcttaccttcctgtcatcgagtccttcggattctccagcactctgagggctgcaacatcaggacaggctttcccacaatgtgtgttcgatcactgggatatgatgccatcggatccattagaacccaattctcaggcagcaattcatgttgcggagatccgcaagaggaagggattgaaggagcaaatgaccccgctttccgagtacgaagacaagctgtaagctaaagaatcaaatgaagggtatgggggtgctttctctcccatttgtcaatttagtttttccttagactatgttcttttttcaattttcttacaatgaatcggataattgccatgggatgttactattttcattttttttggatggtatatcacataattccaatcg

SEQ ID NO: 18327 - DNA, 636 bp, Gossypium hirsutum
  Clone ID: GOSHI-09MAY01-C147_3
tttctccacgcgtccgattccaactgctaggagggttttatatgcttatcagctgactgccaagccgaggctgcttgagccagtgtacttggtggagatccaagccccagagcaagcacttggtggtatttacagtgttcttaaccagaagcgaggacatgtgtttgaggagatgcagaggcctggtactccactatacaacatcaaagcataccttcctgttatcgagtcatttggattctcaagcaccctgagggctgcaacttcaggacaggctttcccacaatgcgtgtttgaccactgggatatgatgtcatcagatccattggaacctggttcccaggcagccaaccatgttgctgagatccgtaagaggaagggattgaaggagcagatgaccccgctctccgattacgaggacaagctgtaagctaagcaacaaaataataattaattgaagaggttacgttacccattttatgcaatgctgctagttagttccttctatattttgtttactgttggacttagatggtttttacaatggacacgattgttatgtttttttgtattcaaatagacaattggctttgttaatgtttttgacctccataatcttcattttctgacttattt

SEQ ID NO: 18328 - DNA, 650 bp, Gossypium hirsutum
  Clone ID: GOSHI-09MAY01-C147_2
tcgtccacgcgtccgattccaactgctaggagggttttctatgcttctcagctgactgccaagccgaggctgctcgagcctgtgtacttggtcgagatccaagccccggagcaggcacttggtggtatttacagtgttcttaaccagaagcgtggacatgtatttgaggaaatgcaaagacctggcactccactttacaacatcaaggcataccttcctgtcattgagtcctttggattctctagcactttgagggctgcaacatcaggacaagctttcccacaatgtgtgtttgatcactgggatatgatgtcatcagacccattggaacctggctctcaggcagcagcccatgtcgccgaaatccgcaagaggaaaggattgaaggaacagatgaccccactttccgagtacgaggacaaactgtaagctaagagagagtaactgtgattgtgcggcataaccttcgctgcaatttagttttgttttctgtctggttatattttgttagcatggatgctttttcacccatatgatgtacgttcgtttttagacgcttgtgttttgatgatgatcatgatgtactacaatcgacattacgttgaacttttttatacatctcttaatcttcatatgccaacttcatttct

SEQ ID NO: 18329 - DNA, 1896 bp, Gossypium hirsutum
  Clone ID: GOSHI-09MAY01-C147_1
cccacgcgtccgaaggacttgatggggaagtccctaatgaagcgtgtgatgcagacctggcttcctgcaagcaatgctctcctggaaatgatgatctttcaccttccctcacctagcaaggctcagaagtatcgtgttgagaacttgtacgagggtcctcttgatgatatctatgccaatgctatcagaaactgtgatcctgagggtcctcttatgctctatgtttcaaagatgattcctgcttctgataagggcagattctttgcttttggtcgtgtcttttctggcaaagtctcaactggattgaaggttaggatcatgggtccaaactatgtccctggggagaagaaagacttgtatgtaaagagtgtgcagagaactgtgatttggatgggaaagaagcaggagacagttgaggacgttccttgtggtaatacagttgccatggttggtttggatcagttcatcaccaagaatgctacattgaccaatgagaaggaagttgatgcccacccaattcgtgccatgaagttttctgtctcccctgttgtccgtgttgctgttcagtgcaaggttgcatcagatcttcccaaacttgttgaagggttgaagcgtttggccaagtctgatcctatggttgtctgtaccattgaagagtctggtgaacacattgttgctggtgctggagagctccaccttgagatctgtctcaaggatttacaagaagatttcatgggtggtgctgagatcatcaagtcagaccccgttgtgtccttccgtgagactgtccttgagaggtcttgcaggactgtgatgagcaagtctcctaacaagcacaaccgtctgtacatggaagctcgacccttggaggaaggtcttgctgaggccattgacgaaggtcgtattggtccaagagatgatcccaaggttcgttccaagattttggccgaggagtatggttgggacaaagatcttgctaagaagatttggtgttttggccctgagaccactggtcctaacatggtggttgatatgtgtaaaggagttcaatacctgaatgaaattaaggattctgtagttgctgggttccagtgggcatcaaaggaaggtgcgatggctgaagagaacatgaggggtatctgctttgaagtctgtgatgtggttctccatgctgatgctatccacagaggtggtggtcagatcattccaactgctaggagggttttctatgcttctcagcttacggccaagccaaggcttctcgagcctgtttacttggttgagatccaagcccctgagcaggcacttggtggtatttacagtgttcttaaccagaagcgtggacatgtgtttgaggagatgcagaggcctggtactccactttacaacatcaaggcctaccttccagttattgagtcttttggattctccagcactctgagggctgcaacctccggacaggctttcccacaatgtgtgtttgatcactgggatatgatgtcatcagatccattggaacctggttcccaagcagcagcccatgttgctgagatccgtaagaggaagggattgaaggagcagatgaccccactttctgagtacgaggacaagctgtaaggttgagaataactcagcttctgccgctatattttctgctgcaatttagttttgtttcggtgtctgtctcttaatgtttttgttagtagttttggggtgccttcacccatacaatcttatcatgcaaggtcatttcagtcttttttagacgcctttttacaatgtacttcgccctccatctgtgttgttaatttttattgtttcgatgaaatgtatttgagtcaacattgatcgtcttaaacctatatttttctttaccttcaaaaaaaaaaaaaaaaa

SEQ ID NO: 18330 - DNA, 455 bp, Gossypium hirsutum
  Clone ID: LIB3147-002-Q1-K1-G11
cccacgcgtccggtcatcagatccattggaacctggttcccaagcagcagcccatgttgctgagatccgtaagaggaagggattgaaggagcagatgaccccactttctgagtacgaggacaaactgtaaggttgagaataactcagcttctgccgctatattttctgctgcaattttttgttttcggtgtctgtctcttaatgttcttgttagtagttttgggtgccttcacccatactgtcttatcatgcaaggtcatttcagtccttttcagacggtttttacaatgtacttcgctctccatctgtgttgttaatttttattgctttgatgaaatgtatttgagtcaacattgatcgtcttaaacctatatttttctttaccttcaaaaaaaaaaaaaattaaaaaaataaaaaaaaaaaaaaataaaaataatttaataaaaaaaaaatca

SEQ ID NO: 18331 - DNA, 365 bp, Gossypium hirsutum
  unsure (1)..(365): unsure at all n locations
  Clone ID: LIB3189-013-P1-K1-F4
cgggtccgaccaacccttccgaatctgtttcgaagtctgtgatttggttctccatttttatgcaatccacagaggtggtggtcgtgtgattctaactggtcgacgatgtgtctatgcatctcancttacggccaagccaaggcttctcgagcccgtttacttagtcgagatccaagctcctgagcaagcacttgttggtttttcagtgttcttaaccagaaacgtggacacgttttctaggaaatgcatagtgcctggatcaccactctacaacataaaatttttcctttcattcatcgtgttatatttcttattcagcacactaatggctgttacatgtgtgacttgctttcccactatttgtt

SEQ ID NO: 18332 - DNA, 353 bp, Gossypium hirsutum
  Clone ID: uC-gsronu33B108g12b1
cttatcgtccgggttctttgctttctgtaccgtggggtctagtttaaaagcaactggtgggaaagacaaaatcatgggtccaaactatgtacctggggagaagaaagacttgtatctaaagagtgtacagagaactgcgatttggatggtaaagaaccatgtgacagttgaggacgttccttgtggtaatacaagtgccatggttggattgtatcatgtcatcaccaagaatgctacattgaccaatgagaaggaaggtgatgcccacccaattcatgccatgaagttttctgtctaccctgatgtgcgtgttgctgatcattgcaaggttgtatcaaatcttcccaaacttg

SEQ ID NO: 18333 - DNA, 553 bp, Gossypium hirsutum
  Clone ID: GOSHI-09MAY01-C177_1
taatttttcaaattggtaggattagcagttttaggaagcaacaccaattgagtcctatttgtggctcccaaagaattgccattattaaggatatctcaacaaaagtcacaagtatccttaccaatgatgtgccagtacttctggtagaaaattgccgggaaaccatcaatacctgaagcttttgtaggccccattccttttaacacctcaataatttctcccccagcataagtggccaacaaaattcgattcatgctttctgaaatacacgaatgcaccctaaaaagtatgtgatacatattccctattcctctagacataaaatgatcaaaaaaataccccttagcaacgggctccacctccctactatccatagcaagagagccgtcagatctttgtagacctcaaatctggttaacatgccttctctaggatgtgtacttatggaataatgcagtatttttatcacccattttcagccaattagcacgagcatgtttgttcccaatacctctcttttctatctatctccatatttagatggagtttgacc

SEQ ID NO: 18334 - DNA, 495 bp, Gossypium hirsutum
  Clone ID: GOSHI-09MAY01-C107_4
ggtctctacctttgttcatgcatgtgaaggtgatgcagtgacaaagcttaccaatgagaaaataccttactttaatgctaatatttatctgcagaacaagacccaaatagggaaagttgatgaaatctttggtcccatcaacgaatcctatttttcaatcaaaatgttagaaggttgagggagcaaactgagagttgagctgctgctgactacgttatgttcacaactttggtatgatgttcgtgtatgtgttggctacaaaccagttgagtcattttgttgacaattatggcgcttagttcttaattttatatcttaactctggtgttggagctttatttaagttcaaatatttgagtattcttgtttcatgaatgtcttgttactttgcatcaaattaagttggtctttgtcggcgttctataatgctgcatatttagcaataatcgggatcaggtattttgcttgaaaatgacttcttttgtttattattgt

SEQ ID NO: 18335 - DNA, 508 bp, Gossypium hirsutum
  Clone ID: GOSHI-09MAY01-C107_3
cgggacgacccacgcggccgcccacgcgcgcgaagagccgctctgcttcgcggaccacacaccggctcaacctaactacaatgacgaagagaacgaggaaggccggaattgtcgggaaatacggtacccgatatggtgccagggtgaggaagcaaattaagaagatggaggtcagtcaacacagcaagtacttctgcgagttctgtggaaagtatgcagtgaagagaaaggctgttggaatctggggctgcaaggattgcgggaaaatcaaagccgggggtgcttatactttgaacactgctagcgctgtgacggtgaggagtaccattagaaggttgagggagcaaactgagagctgagccaataacattagcatacccaactttcgtaggatgtttttgcatgtttaatctaaacgtattgaaatctttcttttgacaatgatgttattttgtatcaggatctggtgttgaaactttatatgagatattgagttgttggtttcttc

SEQ ID NO: 18336 - DNA, 690 bp, Gossypium hirsutum
  Clone ID: GOSHI-09MAY01-C107_2
gtcgagcgcgcgtacgcggacgcgtgggcgacgagccgtttctcacttcagcgaccagacagtcagagatcctcccaatcaaacaacaatgacaaagagaaccaagaaggctggaattgttggaaaatatggtactcgttatggtgccagtttgaggaagcaaattaagaagatggaggttagtcaacacagcaagtacttctgtgagttctgcggaaagtatgcggtggagagaaaagccgtcggtatctggggctgcaaggattgcgggaaagtcaaagcaggcggtgcttatactttgaacactgctagcgctgtgactgtgaggagtaccatcaggaggctgagggagcaaactgagagctgagccaccactggtgattgatttgtattctactttcataggatgttgttttgcatgttttagctatgagacttaattgagacttttttttgacaatgatgttcgtactatgtgttctcatttttatatctgagtctggttttagaactttatttaagttcaattattatgctccattcgacattatcctggtaacttcacatccaattattgcatccttgatactccatcttgctcaactaaataaatctactcgtgaaagtagatctaatttctcaaatggttaagccccaagtgctgatgaggaataacaagattggggtgcc

SEQ ID NO: 18337 - DNA, 714 bp, Gossypium hirsutum
  Clone ID: GOSHI-09MAY01-C107_1
cccacgcgtccggtttctataaaaacccgaaccagaaaaccctaactcgtcgttgttattttctctcgaagagccgctcctcactttccgaaccagacaggcgcagatcctctcagcccagcgaccatgacaaagagaacgaagaaggccggaattgttggcaaatatggtacccgttatggtgccagtttgaggaagcaaattaagaagatggaggtgagtcaacacagcaagtacttctgcgagttttgtggaaagtatgcagtgaagagaaaggctgtaggaatctggggctgcaaggattgcgggaaagttaaagctggtggtgcttatactttgaacactgccagcgctgtgacggtgaggagtactattagaaggttgagggagcaaactgagagttgagctgctgctgactacgttatgttcacaactttggtatgatgttcgtgtatgtgttggctacaaaccagttgagtcattttgttgacaattatggcgcttagttcttaattttatatcttaactctggtgttggagctttatttaagttcaaatatttgagtattcttgtttcatgaatgtcttgttactttgcatcaaattaagtgggtctttgttcggcgttctataatgctgcatattttgccataaccgggaacaggtattgctcgaaaaaaaaaaaaaaaaaaaaaaaaaaaaaaaaaaaaaaaa

SEQ ID NO: 18338 - DNA, 392 bp, Gossypium hirsutum
  Clone ID: LIB3149-039-Q1-K1-F10
gcgaaagaaaaaaatgcgaccacctatggtcggcggaggttttaggggcggaagggacggtggtcgagggagaggaggtggccgaggaggctttggtcgtggtggaggacgtggtggcggtgggttccgtgatgaaggacctcctgctgaagttgtggaggtctctacctttgttcatgcatgtgaaggtgatgcagtgacaaagcttaccaatgagaaaataccttactttaatgctaatatttatctgcagaacaagacccaaatagggaaagttgatgaaatctttggtcccatcaacgaatcctatttttcaatcaaaatgttagaaggtattgtggcaacttcgtatgctccaggtgataagttttatatcgatccgagcaagcttt

SEQ ID NO: 18339 - DNA, 228 bp, Gossypium hirsutum
  Clone ID: LIB3272-054-P1-K1-G11
agccgctcctcactttccgaaccagacaggcgcagatcctgtcaacccatcgaccatgacaaagagaacgaagaaggccggaattgagggcgaatatgttacacaccttagtgccagattgaggatgtatattaagaacatggaggcgtgtcaacagtctgcacttctgggagagctggggaaagtattcattataaaaaacgaatgtattatgagatgatgtgggga

SEQ ID NO: 18340 - DNA, 611 bp, Gossypium hirsutum
  Clone ID: GOSHI-09MAY01-C137_3
cccacgcgtccgctggagacttcttcttctcccccccccccccgcccggcttgatccatttgcataatctggaactcccctatccaggtaaaactcttctcctcttctcaatgattctgttgctatgatatgagcaagaccatttgcggatctaggtatatactgaaatctgatgttttcaagtccatagatttcctgttgaatgtcaaaaatgtatactcccaccatagatctatcttgactcttcgatttacattttttgactattgtgagggagtctccttcaaggatcaaatgtcgccatcccctcctgattcccatttgaacgcctttccggcaggcaattgcttcagcagcaaaggctgatggaataccacaatgaatctctgaatatgaaaaaagaatagtaccattcgaatctctggccacaatacccacacccgactgattctctactttatcgtaagcaccatcaaaaatgtatctctcatgaaacttctctgtggcggcgaccatctgttttcctttaagagtgcacaacaacatacgcctactctgatcaccgttagacctgctctattgcctaacttcttctacacatcaggggctgc

SEQ ID NO: 18341 - DNA, 701 bp, Gossypium hirsutum
  Clone ID: GOSHI-09MAY01-C137_2
gttcgtctcctttgctgtccaaagcctatctttcttcattcttactctctgaagacttctaatcttcttcacatctcccatccagccgagcttggtccatggcataatctggaactcccctatccagcgcctttccggcaggcaatcgcttcagcagcattggctgatggaataccaaaatgaatctctgaacatgaaaaaagaatagtaccatccgaatctctggccacaatacccacacccgactgattctttactttatcgtaagcaccatcaaagttgatcttcatgaaactttcctgtgggggcgaccatctctttttctctaagagtgcacaacaaaatacgcgactttgatcaaggttgagctgctctattgcctagcttcttctccacatcaggggcagctcggatttactactaacttccgatgttgaagattcacctttgtaggcagataattcctagatagcttccatattgtaaccttaattttagctggtagattcaggcaccatagttttttataaaaattcccatagatggtctgtaaagcataagctctaggattgtcagtcaatttttgtaatagttgataggcacttctgaccgtaaactcacccgaccgttcgcctccccagataagaaaatcatcatgcggcgtttgtgccagagggattctgaggattctagctgcgtcg

SEQ ID NO: 18342 - DNA, 783 bp, Gossypium hirsutum
  Clone ID: GOSHI-09MAY01-C137_1
cccaatcaaaagaagcttgggaaaccgtcttcagtcttttctgtcatctcttttcattatgacgatttcatgtccaagatatgccaaaagaaatcgccgagcttggtccatggcataatctggaactcccctatccagactattgtgtgggagtctccttcaagaatcaaatgctgcaatcccctcctgattcccatttgaacagctttccggcaggcaatcgcttcagcagcaaaggctgatgaaatattaaaatgaatctctgaacatgaaaaaagaatattaccatccgaatctctggccacaatacccacgcctgactgattctttcctctatcaaatgcgccatcaaagttgatcttcatgaaacttgcctatgaggacgaccatctctttttttctacgagtgcacaacaaaatacgcgactttggtcaaggctgagctcctctattgcccagcttcttctccacatcgggggcagcttggatttgctactaacttttcggtgctggagattcacctttatagataacaaaatcatcatgcggcgtttgtgccacaggaattctgaggattctagctgcgtcgcctttcaggaaggagtgaattctgagcaatcgtggataccatgccccaacttgccatatccaaaacagtaagtcggcaacttttcatacttaaagggaatccaagatttattcccactccctattgaaacacaaatacccctacgaagaggtttctgaacatttaacagcactctaagccgacaaaatcaccaa

SEQ ID NO: 18343 - DNA, 503 bp, Gossypium hirsutum
  Clone ID: LIB3583-037-P1-K1-B3
cccacgcgtccgcccacgcgtccgcccacgcgtccggttcaaagcctttctttcttcattctttctctctgaagacttctaatcttcttcacatctcccatccagccgagcttggtccatggcataatctggaactcccctatccaggtaaaactcttctcctcttcttaacgattctgttgctatgatatgagcaagaccatttgctgatctaggtgtatgttgaaatctgatattatcaagtccaaatatttcctgttgaatgtcataaatatatacccccaccatagatctatcttgactctttgatttgcatttcttgactattgtgagggagtctccttcaagaatcaaatgctgcaatcccctcctgattcccatttgaacagctttccggcaggcaatcgcttcagcagcaaaggctgatgaaatattaaaatgaatctctgaacatgaaaaaagaatattaccatccgaatctctggccacaatacccacgcctg

SEQ ID NO: 18344 - DNA, 304 bp, Gossypium hirsutum
  Clone ID: LIB3135-046-Q1-K1-H4
catttttcttctctggagacttcttcttcacttcccccatccagccgagcttgatccatttgcataatctggaactcccctatccagtctccttcaaggatcaaatgtcgccatcccctcctgattcccatttgaacgcctttccggcaggcaattgcttcagcagcaaaggctgatggaataccaaaatgaatctctgaatatgaaaaaagaatagtaccattcgaatctctggccacaatacccacacccgactgattctttactttatcgtaagcaccatcaaagttgatcttcatgaaac

SEQ ID NO: 18345 - DNA, 3737 bp, Gossypium hirsutum
  Clone ID: GOSHI-09MAY01-C127_1
caattcttcatttgcaagtctgatttcggatagaaagctcagatcgtggttattttggttaactctttcagttggaactcaattaagcggcgtttatcgaacatttgaagaaaatattaaacgatttgcgatcaacaacttactcttgaagtggaggattaattgaagtgaattgctacattcatctaaaaggcatgcacatctcttattgatatttggacgacctgttatatcccttgttctcagataaagaaagaagcacgtgacaatggaatcggaaggagatattgggggcaagcccatgaagaatcttggtggccagacatgccaaatctgtggtgacaatgttggcaaaaatacagatggtgatccattcattgcttgcaatatatgtgcatttcctgtatgcaggccttgttatgaatatgaaaggaaggacgggaatcagtcttgccctcaatgcaagaccagatacaagtggcaaaaaggcagtcctgctattcttggagacagggaaacgggtggtgatgcagatgatggcgccagtgatttcatttactcagaaaaccaagagcagaagcagaaacttgcagaaaggatgcagggctggaatgcaaagtatggtagaggggaggatgttggtgctccaacttatgataaagaaatttctcataaccatattcctctgctcaccagtgggcaggaggtttctggtgagctatctgctgcatcacctgagcggctttctatggcatctcctggagttgctggtgggaaatcgagtattagggttgtggatccagtgagggagtttggttcatcaggactaggcaatgtagcctggaaggagagagttgatggctggaagatgaagcaggagaagaatactgttcctatgagtacatgccaggctacttctgaaagaggtcttggagatattgatgccagcactgatgtgctcgtggatgactctcaactgaatgatgaagctagacagcctctatcaaggaaggtttccgtttcctcatctaaaataaatccttatcggatggtcatcatactgcgtcttgttattctctgcattttcttgcactaccgaataacaaaccctgttccaaatgcctatgctctatggttgatatctgtgatatgtgagatttggtttgcaatatcctggatattggatcagttccccaaatggcttcctgttaatcgtgagacgtatcttgataggcttgccttaagatatgatcgagaaggagaaccgtcggaattagctgcagttgacatatttgtgagtactgtcgacccattaaaggagcctccacttgtgacagccaacactgtactatccattcttgctgttgactacccagttgacaaggtctcttgctatgtttctgatgatggtgctgccatgttaacctttgaagcactgtctgagacatcagagtttgccaggaaatgggtacctttctgcaagaaatataacattgaacctcgggctccagaatggtattttgcacagaagattgactacctgaaggataaagttcaaacatcttttgttaaagatcgtagagctatgaagagagaatatcccacgcgtccggaagaatctaacgttcgaattaatgggcttgtcgcataggcacacaaagttcctgaagaaggatggattatgcaggatggtacaccatggcccggtgataacaccagagaccatccaggaatgatccagggtttcttaggccagagtgggggccttgatgctgagggcaatgagctgccaaggttagtttatgtttctcgtgaaaagcgtccaggcttccaacaccacaagaaagctggtgctatgaatgcacttgttcgagtgtcagcagtccttactaatggacctttcttgttaaatcttgattgtgatcactacataaataatagcaaggctttaagggaagctatgtgttttctgatggatccaaaccttggaaagcaagtttgttacgttcagtttcctcaaaggtttgatggtattgatcggaatgatcgatatgccaacagaaatactgttttctttgatataaacttgaggggtctggatggcattcaagggccggtttatgtcggtacgggatgtgttttcaatagaacagcattgtatggatatgaacccccccttaagcccaagcatagaaaaacagggatactatcttcattgtgcggaggttctcgtaagaagagttcaaaatcaagtaaaaagggatcagacaagaagaaatctggcaagcatgttgattctactgtaccagtattcaatctagaggatatagaagagggtgttgaaggggctgggtttgatgatgaaaagtcattactgatgtcacaaatgagcctggagaaacggtttggccagtctgctgtttttgttgcctctacacttatggaaaatggtggtgtccctcagtctgctacccccgaaacacttcttaaggaagcaattcatgttatcagctgtggatacgaggacaaaacagactggggaagtgagattgggtggatctatggttctgttacagaagatattcttactggattcaaaatgcatgcccgtggttggcggtcaatttactgcatgccaaaacgcccagcctttaaaggttctgctcctatcaatctttcagatcgtctgaaccaagtgcttcgatgggctcttggttctgtggaaattcttttcagtaggcattgccctatctggtatggttatagtggtaggctcaagtggcttgaacgattcgcatatgttaacacaaccatctacccagtcactgctattcctcttctcatgtactgtacactgccagcagtctgtctgctcactaacaagttcattattccacagattagtaaccttgcgagtatatggttcatatccctctttctttccatctttgcaactggtattttagaaatgaggtggagtggtgtgggaattgacgagtggtggagaaatgaacagttttgggttatcggtggtgtgtcggcacatctttttgctgttttccaagggcttctcaaagttcttgctggcattgacactaacttcacggtcacttcaaaagcatcagacgaagatggggatttcgctgaactttacatgttcaaatggacaacccttctcatcccaccaaccactctcctcatcataaacttggtgggggttgttgcaggaatatcgtatgccatcaatagtggctaccaatcatggggtcccctctttggtaagctattctttgccttctgggtgatcatccatctctaccccttcttgaaaggtttgatgggacgccaaaaccgtacacctaccattgttgttgtatggtcaattctgcttgcctccattttctctttgttgtgggtgcggatcgatcccttcacaaccagagttaccgggccggatgtagaacagtgtggaataaactgttgagagagaacctataaagactgaagatttgttttggtgtcactaagcttccaatgccaaaggtttgtttagttgtaatttgtgtatttcagttcacatcatgtgcagaatatacggttgttgatatatatatatgtcatcttgtttctactttgatgtaatattttggagttgggacacaacttatcgatagtgctttctcctcaggaaaacactacttcgaagtagatatatgttttggaatttaaaaaaaaaa

SEQ ID NO: 18346 - DNA, 579 bp, Gossypium hirsutum
  Clone ID: LIB3585-052-P1-K1-H6
cgtcaaagttcttgccggcattgacactaacttcaccgttacctcgaaagcatcagatgaagacggagattttgcggaactttacatgttcaaatggacaacccttctcatcccaccgactactctccttattataaacttggtgggggttgttgcaggaatctcttatgccatcaacagtggttatcaatcatggggtcctctctttggcaagttgttctttgcgttctgggtgatcatccatctctaccccttcctgaagggtctgatgggacggcaaaaccggacaccgaccatcgttgttgtatggtcaattctgcttgcctccattttctctttgttgtgggtgcggattgatcccttcaccactagagttactggaccagatgtagagctgtgtggaatcaactgctaagttcatagaaaaggtgggaatgaacgaattatgatgttgctgtctctaattaaaactcagttcacatcatgtgcagtatatatatataggtcatataatatcatgttttatcaggaatgtgatgtaacattttggacatgccttatggttacagcctgtggaaa

SEQ ID NO: 18347 - DNA, 602 bp, Gossypium hirsutum
  unsure (1)..(602): unsure at all n locations
  Clone ID: LIB3828-018-Q1-K6-G6
cggccgcgtgggttcacggtcacttcaaaactcagagaagaggggatttcgctgaactttacatgttcaaatggacaacccttctcatcccaccaaccactctcctcattataaacttggtgggggttgttgcaggaatatcgtatgccatcaatagtggctaccaatcatggggtcccctctttggtaagctattttttgccttctgggtgatcatccatctctaccccttcttgaaaggtttgatgggacgccaaaaccgtacacccaccattgttgttgtatggtcaattctgcttgcctccattttctctttgttgtgggtgcggatcgatcccttcacaaccagagttaccgggccagatgtagaacagtgtggaataaactgttaaagagagaacctataaagactgaagatttgttctggtgtcacttaagtttccaatgccaaaggtttgtttagttgtaatttgtgtatgtcagttcacatcatgtgcagaatatacggttgttgatatatatatatgtcaacaaccgtacacccaccattgttgttgtatggtcaattctgcttgcctccattntctctttgttgtgggtgc

SEQ ID NO: 18348 - DNA, 411 bp, Gossypium hirsutum
  Clone ID: LIB3135-056-Q1-K1-F5
cggacgcgtgggtgattacccagttgacaaggtctctcgctatgtttctgatgatggtgctgctatgttaacttttgaagaactgtacgagacatcagagtttgccaggaaatgggtacctttctgcaagaaataacgttaagctctgggctccagaatggtattttacatggaagattgactagccgaaggataaagttcaaccatcatttcttaaagatcatagagctttgaaggtaagggtcagtttggttgtgctatatcactacatataaaaatttttcatcatgtttgcttctttgtttctgttacagatagaagatgaagactttgaagtttgagttagcgggcttgttgcaagacacagaaagttccttgaagaaggatggattatgcaggatgggacgccat

SEQ ID NO: 18349 - DNA, 486 bp, Gossypium hirsutum
  Clone ID: uC-gsronu33B111a04b1
gtcttcgttcatctttttgctgtttttcaaggggggctcggagttcttgacggcgttggcgctaacttcaccgttacctcgaaagcatcagatgaagacggagattttgcggaactttacatgttcaaatggacaacccttctcatcccaccgactactctccttattataaacttggtgggggttgttgcaggaatctcttatgccatcaacagtggttatcaatcatggggtcctctctttggcaagttgttctttgcgttctgggtgatcatccatctctaccccttcctgaagggtctgatgggacggcaaaaccggacaccgaccatcgttgttgtatggtcaattctgcttgcctccattttctctttgttgtgggtgcggattgatcccttcaccactagagttactggaccagatgtagagctgtgtggaatcaactgcttagttcatagaaaaggtgggaatgaacgaaatatgatg

SEQ ID NO: 18350 - DNA, 419 bp, Gossypium hirsutum
  unsure (1)..(419): unsure at all n locations
  Clone ID: LIB3146-020-Q1-K1-E4
cccacgcgtccgtgggacgccaaaaccgtacacctaccattgttgttgtatggtcaattctgcttgcctccattttctctttgttgtgggtgcggatcgatcccttcacaaccagagttaccgggccggatgtagaacagtgtggaataaactgttgagagagaacctataaagactgaagatttgttttggtgtcactaagcttccaatgccaaaggtttgtttagttgtaatttgtgtatttcagttcacatcatgtgcagaatatacggttgatatatatatgtcatcttgtttctactttgatgtaaatatttggngnngnnacataactttatttatttgtgctaaatattaagaaaacactactttgtaaattaaatattattattttgtttttatcttactatatttttttt

SEQ ID NO: 18351 - DNA, 1075 bp, Gossypium hirsutum
  Clone ID: GOSHI-09MAY01-C367_1
cggagatccgctgccccccggcgtgcccccccctccgagccgaggtggggtgcgtctagccccccctgggggtcgggtcgtcccgcaacgactcaccacgggggtgagtcggtcgccggcggtggtggtcggggtgacaattttccggccggtcaagcccgcccatagaaatgtagccaacgactccaggaccaagttccctattcgggcaaagatctcttggggtggcttatgcattgctatgggctcgagcttggcttgccgttttgcccccgtcacgtttagggatgccttgtgcatcccaagtcggcgaccacacggtgccttggccttgccaagcccttgcccgcattcgaaactgcccgcgaccccagtaccaagtccctttgacggcaacggcccactggggggtgtaagttgagtttgtaggctcggtcttggctcgaccaagtcccggtgggacttttcccctcgtagttctcgtgccaagcggttgtggtgcgccctcgttcgttgttccttccgctcccctaccattcggttgggtgggctgttgggcggtgtgcgtgggcgctactactagtacgcaataggcatatgagtggtgttttggttgtgtgtattggcaggctccatgctactcgcatcgaactgtcgagccgcactcctcttcattaactccccttgttgtaatcgaactcaaggggtgcgatcgggatcctgtgctgcgtacctaagccagatggaattatggatgtgttgccgtcccttctccatcccgtgcccttcggggtgcgtggtggacctcaatcgtgccttgtgtcccgagtgcgcccccttaaatcggtgtggcctcgtcggtgcactggtgctcgatcgtgctttcggatgcggaaaatgtttttgagagtagggttcatgccctcatctctcgatgcctatgcattttgtctcttgacacggacgatgctcgtgctctgttatgacctcttcgtagctcacggggcatgttgagggccatgcaaagccgacgtcatggaggaatgctacctggttgatcctgccaggagtcata

SEQ ID NO: 18352 - DNA, 1983 bp, Gossypium hirsutum
  Clone ID: GOSHI-09MAY01-C297_1
gtcctctcctgctgcacttggggcttctgctgttcgtggtgcaccaattgctggccttgggccttgcttacctgctcgtccagtgcctaagaagacatcgacatcacctcctcgaggatcagctgtatcaccaaataataagctggataagcaccaaatgaatgtagcacatgaaactggttccaaaaacaagaaccagttgccaaaactcgtgctgaagccttcgagtggttcttcaaaagcaactgataatccgaataaggatggcctgagagaaaagtctttttccacttctatgcgtgggcaggttcctgaggttgcaattcaatggaggccattgaaacttgtttacgatcatgacattaggctttctcaaatgccggttaattgcagcttcaaagtgttaagagagattgtgagcaaacgttttccttcatccaagtcagttttgatcaaatataaggataatgatggagatttggtgactattacttgcacaacagaactcagattggccgagtcttctgtagatgctcttgttccaatagagcctgaagccgataaaactagtggattcagaacattgagattgcacattgttgaggtgagtccagagcaagagcctccactaccggaagaagaggaggagaagcctttggagagccagggagctaagtcagatgaaagtgtgtcgcactcgtctcttggtgattctgtttcagaaggtgttgatgtggagattgaaaagacagagaaagaagcttcaaagaggaaaattggggctaccgaagattcagagtgcaaggaagtggagatggatgattggctttttgagtttgctcagcttttccgcacccatgttggtattgacccggatgctcatattgatttgcatgagcttggaatggagcactgttcagaggctcttgaggagacggttacaactgaggacgctcaaatcctctttgacaaagcagctgctaagttccaggaggtggctgctttggctttctttaatcggggaaatgttcatatgtgtgctgcaaggaaacggattcccttagacgagtctgccgggaaggaggtagtgtcagagaaacttcaaacagcctacgattgggttcgtgaaaagtattctttggcaagagagaagtatgctgaagcactctcgatcaagccggacttttatgaagggttgctagcattgggacagcagcattttgaaatggctaaacttaattggtcttttgcacttgcaaagaaaatagacctctcaacatgggatcctgcggaaacacttcaacttttcaacagtgcagaggagatgatgaaagacgcaacagaaatgtgggagaagttggagcagcagagagtaaatgagttgaaggatccaaattcaagcaagaaggaagagttgttgaagagaaagaagaaactgggaagcggtgctgaaaatgagttcccaggaacaggtaatcagtgtgagctttcagccgaagaagtagcagaacaagcagctgtgatgagatcacaaatactcttttctggggcaacatgctcttcgaacgatcccaagttgaatgcaaattaggaatggatggttggaaaaagaatctcgatactgccgttgaacgcttcaagcttgccggcgcatctgaagctgacatttctacagttttgaagaatcattgctcaaatggagatgcagttgaaggttattttaataaggtagttggagatgtgaataaaatatctgcagtaaaaacaaaatgaatagttaccataatccatgtgatagctttattgaatgaaaagtgctttttcctcaccttgcaaatgaacaattgggtccctatattgatgagtgttgtacttgaaagattttgggtttcgaggttatgtttactctgaccccttttttcatttccttgaatattgtttggacaccattgagccttgcaataaactacttcatttgatttc

SEQ ID NO: 18353 - DNA, 633 bp, Gossypium hirsutum
  Clone ID: GOSHI-09MAY01-C257_1
ccacgcgttctgccacgcgttcgcccacgcgttcgcccacgcgttcgcgctcattaaattccaacaaggaaaacttccgatcccatctccggcgacatgtttccggccgttttgactcaggtggccaccggcttaagcgttttagctggtgccgtcttagtcaaatccgtcatggatcaaaaacccatggccggtccgtttcaaagatgcccgacttgtaacggcacgggtcgcatcacgtgcatttgcactcgttggtccgatggagatatcggttgtcggacttgcgccgggtccggtcgaatggcgtgtagcagttgtggtgggtctggtaccggtagaccgattccggttcagatttctgtacgtcaaccaacgaatcggaactcttaatttaccgggtttggactctttaaactcttatatatttttataaatatattttttgaaatttaattaatgtaatataatagtgagagtaaaattaatagttgctgaattgtaatctttacaacgaaactgttttagattcttatagcttaattgttgtttagtttttgttaagaatttgaagaaattgttgtaaaagattaacaattcatgggttaaaatttgtatattaaattccaagtc

SEQ ID NO: 18354 - DNA, 606 bp, Gossypium hirsutum
  Clone ID: GOSHI-09MAY01-C38994_1
taggaagctggtatgcgcttgttttgatatcaatgtataatgtttgggatcttattgggagatacattccactcataaaacctttgaagctggaatcaaggaaagctctgacaacggtgataatttctcgtgttttacttgtcccggcattttatttcatgtccaaatacggtgatcaaggctggatgatcatgctaactagcatcttaggcttaagtaatggccgcctcaccgtatgcgtccttacatctgcacccaagggatacaagggacctgagcagaatgcactggggaatttgcttgttttgtttctcctaggaggtatctttgcaggggtcacacttgactggttatggctcataggcaagggatggtaaagtttaggttcaaagctggttttaggaatgaaaaatcaggtttattgagttgaaattggaaataatgatcccttgcattttgatttgaacacagtaaatgatgaaattgttccatagtcgtaggctacacgcaccaatgctgagatttcatattcattaaaattcctttgtattcatcaacaccatgctttaagattactgaatgtgtcattgtcttctattctctctc

SEQ ID NO: 18355 - DNA, 759 bp, Gossypium hirsutum
  Clone ID: GOSHI-09MAY01-C38954_1
ttttcccccgccttcggtttctactctccaaaacatcatgcctcagggaaagcttcaagttgtccttgttagtgccaaaggtctcgagaacacagattttctctgtaacatggatccttacgtgcttcttacttgccgaacccaggagcagaaaagcagtgttgcatcaggaaaaggatcagaaccagaatggaacgaggatttcatattcaacatctccgaaggtgcttcggaactcgcactgaaaataatggacagtgatgctggttctcaggatgatttcgtgggagaagtagctataccactggagcctgtatttatcgaaagaaacattcccctgactccatatactgttgtcaaggatggagaatatcgtggggagattaaatttggtctcactttcacccccgaggaacgtgaaagcagggattttgaagttgaagaatcttttggagggtggaagcagtcttcatacactgattaggcaggccacttatagttttcagccttaattcccgtttcaagaagtaactattaagtttgattttcggaccatgtttggttggatgttattaccatgttgtctttttactgccgttaattgtgacactgggaaattgtcactgattgaaatgtttgcctaatttgtactctggagatttagtgacatgttggttcttggatttgagcaagagatacggtttggttggtttttaagtaagcccgtacattttgaacacggaaaaaaaaacacggttt

SEQ ID NO: 18356 - DNA, 445 bp, Gossypium hirsutum
  Clone ID: LIB3147-007-Q1-K1-F6
cccacgcgtccgctcagggaaagcttcaagttgtccttgttagtgccaaaggtctcgagaacacagattttctctgtaacatggatccttacgtgcttcttacttgccgaacccaggagcagaaaagcagtgttgcatcaggaaaaggatcagaaccagaatggaacgaggatttcatattcaacatctccgaaggtgcttcggaactcgcactgaaaataatggacagtgatgctggttctcaggatgatttcgtgggagaagtagcgtgagtgtcgtatatggatagatatatactggactcgggtttctctgttttttaatattttttatgtatttgaagggtcatatgctatactcatccaaaattactttggatatacaagtgttttacacgaatacaataagaaaaatggaaaataaaataaatattattaatttaaaa

SEQ ID NO: 18357 - DNA, 416 bp, Gossypium hirsutum
  Clone ID: LIB3146-015-Q1-K1-F8
acggttgcaaccattatagcgggcgacatgtttttataccactggagcctgaatttatcgggggaaacattccccttactgcatatactgttgtcaaggatggagaatatcgtggggagattaaacttggtctcactttcacccccgaggaacgtgaatgcagggattttgaagttgaagaatattttcgagggtggaagcagtctttatacactgattatgctggccacttatagttttcaacctttattcccgatttcaagaaatatcttttttgtttgattctcggaccatggttgaaaggatgtgatgaccatgctatcatttttactggagataacttgttacactgggaaaattttttatctttttgaaaaaatttttgccttaatattcttcctcctggagaatttaat

SEQ ID NO: 18358 - DNA, 643 bp, Gossypium hirsutum
  Clone ID: GOSHI-09MAY01-C38854_1
cccacgcgtacgcgcatttccaaaagatcaactttgactttcaccatgttccaggccaccgacgccggccctggaacttgggggtacatcaacatcactaaccttaaaggcggaaaagcggggttcggggctgaagacaacgtgggacaactcggtgctactggcgttaaatacataaaagagattccttacaatatctgcatcgagcaaatcagtcatgctttgaattcagatgaagctgaagcaccaacggcggcaccaagccagcttaacctaacggaaatcatgtcgtagcaaggatgtaaagctcttgcggattcgctgacagcttcgggagccgatgacaaatgtaacgaaaacatggacgcgggtttaacggtgttttgcccgaccgacggtgccgtcaaaagtgtcatgcccaaatacaagaatctggcgtcgccgaagaaagtgtcgctgctgttgtaccatgggattccggggttcatgtcgttgcatatgctgaagaccaacaatggagttatgaacacgttggcaacggatggagcgaacagctacgatttctcggtgagcaacgaagacgaggtggtgtccttggatacgactgtcgtgacctcaaaggttttggggtttttgaaggagg

SEQ ID NO: 18359 - DNA, 591 bp, Gossypium hirsutum
  unsure (1)..(591): unsure at all n locations
  Clone ID: LIB3825-027-Q6-K6-F2
gcgttcgggnaagagaagggcttttccgccatggnatacaatgcaaaaaagtgcttctggtggttgtgtactttgcaagaaatgtggtatctactacaacttcatgctcgagcatgcaaagaatctgaatgccatgtaccacgttgcagagatctaaaggaacatttgaggaggcttcaacagcagtctgattctcggcgaagggctgctgtgatggagatgatgagacaaagagcagcagaggttgctggtaactctgcgtaactaaaaccaaattgtaaatataaatttggattttgatgaaaatgctccctcctagaaaggcaggtagaaaatagttttcgtgctgctccattggttcacttcttgcaactaggcgctgatggggaaagccggtggatctctagaagctcagaagggtatataggcatagaaaactacaaacagattgattagtgatggcttcttagcgcacaattctttcattcataaaacacgtgaccagattccctaaaaccaagttgatgaagtttttatagatctgatcagcctgcaacagttgcttactatgccgncttgccttgcctcgcc

SEQ ID NO: 18360 - DNA, 336 bp, Gossypium hirsutum
  Clone ID: LIB3147-001-Q1-K2-G10
gaaaatgtggtatttgctgcaactccatgcacgagcatgcaaagaatctcaatgccacgtaccacgttgcagagaccttaaggaacatttgaggaggcttcaacaacagtctgattcacgacgtatggctgctgtgatggagatgatgagacagagagctgcagaggttgctggtagttctgggtaaaagaccaaagtgttaatatgcattttggtgctttgatgaaaaaatgcgcccttctataaagggatgtctaagattgttcactgcttggaactaggcggtgatgagaaaatctggctgatctataaaaggtcacagggggatatgcatat

SEQ ID NO: 18361 - DNA, 510 bp, Gossypium hirsutum
  Clone ID: GOSHI-09MAY01-C38594_1
gatcacgccacctcataactagaagcgctcaagtcacggagcactgctgccgaagctaggctggctgctgctaacgagcaagccgagtctgcacaagaagaagcggaggagtggaaaatgaagtatgactgtgctgatagagaggcaaatgcagctctcgagaaggcagcaagtgtgcaagagcggtcaagcaaggaaactcaacttagggaagatactctgagagaagagttttcacatacattggctgataaggaagaggaaataaaggagaagtcagcatagattgaacatgctgagcagtccttgacaactctgaagtcggagtcgaaggctgctgaggcaaagattaagagttatgacacagaagcatcctcactaaaggttgaaatcagggagttaattgacaaggtagaaaatactaatgccaaggccctgtcatttgaaagagaagcgaagatattggaacaggagaagacacatttggagcagaagtactcatccgagttt

SEQ ID NO: 18362 - DNA, 563 bp, Gossypium hirsutum
  Clone ID: uC-gsflmaxxa090c09b1
gtgacccccggggggcccgggcgcaatatcccgggcacgccacacgccggcggtaataaggccctcaccccatttagacattctgggagccaaaccacaaagaccaaaccttagccgacacttttgggctactcatgggaatcatcggcgttcacgcctccacctctgacgtggttcacgacccaagtcgcgtaaatacaagaggagaccgcagtacctgcttgtggttagatatacaagccggaggatggcctacgacaatcgaaaccgcaggcttgcgaggagtcaacgaattcaggggttttccactatggagcaagcttgcagacctcgggcgttagacgtgctgacaccatgtgaggagtggcgatgcacaaagtacatgaggctagggtttctggtcggctcaataagctttagatatatgggccgttcgggccttaggttagggacggttgattatgggcttcgtctggattgataaaaacttagattatatttggttatgttattcatgtacttttgagtataatgggcctggtcaaaaaggcctcttacaatta

SEQ ID NO: 18363 - DNA, 369 bp, Gossypium hirsutum
  Clone ID: LIB3145-056-Q1-K1-A2
gcgcccacgcgtccgcccacgcgttcgcccacgcgttcgaacaaatccctaaccccattttgattttctctcaaccaaacccaaagaccaaaccttagccgtcacttttgggctactcatgggtatcatcggcgttcacgcctccacctctgccgtggttcacgacccaagtcgcgtaaaaacaagaggagacccctttacccccttttggttagatatccaagccggaggatggcctccgacaatcgaaaccgcaggcttgcgaggagtcaacgaattcaggggttttccactttggtgcaagcttgcagtcctcgggcgttagacgtgctgacaccatgtgaggagtggcgatgcacaaagtagatg

SEQ ID NO: 18364 - DNA, 590 bp, Gossypium hirsutum
  Clone ID: GOSHI-09MAY01-C38524_1
gttacacagacagatataattatgcctgatcttagtcaaatatcggaaatggtcccagaaagcattgttgatattcctactgaaatggggaatgatggattgattgatcccgatacattggctgtaaatggtttgttatccatagaacttgatgacattggttctgatcctgacatagatgccttactggttaactctcctttttttcatgacctttttccaagtccagtatgtgaggaaattgagtcaacctcaatggagggtaaaagcaaggaaaatgaagggcaggcgatggacgatggatgggacaaatctcagcatatggataagctcacggaacagatgggtcttcttagatcagaaaacaaggggatctaatcttttatttccatttatttgaggtgaacctgaaagttgtatttttctgacttttattttggtcattggaaaacgagtaatgtcttcttatgtattctggttttgttttgggtattgttccacctaactggaaattttcttgcactccaccattttgtgagtttggtattggtggttagtgaacattgatatgaagtggttcggagactgtc

SEQ ID NO: 18365 - DNA, 421 bp, Gossypium hirsutum
  Clone ID: GOSHI-09MAY01-C38484_1
cccacgcgtccgggctgatagaggatcttcttggatgtcaagccaaccagataattgaacactaacacagcttcaaggaccctcagcattggttcccagtcagatgggttctggaaatcagccccctcggcctgcatcgttgactcctgagatggagaaggcactacttcagcaggtaatgagcctcactccagaacaaattaatctcttgcctccagagcaaaggaatcaagtacttcagctccagcagattcttcgccaatgagaaggtctaatagcagaaaagattaatctctctcccccccgcccccccccgggcacattgcatgcgaggaattgatgatcgagattgaaggaattgtttagcatttgctgacaaacttatgcgagccctagatatttatttgaaggtttatagata

SEQ ID NO: 18366 - DNA, 673 bp, Gossypium hirsutum
  Clone ID: GOSHI-09MAY01-C38404_1
taacctttaacacccccacctctttatatatatagcaccaccattatagtctccaaaaaccagtaagaatcaaccacttcgataatggccatgcataacctagttcaagctcttgtttttgttgctgtttttttcaacacattggcacccacagtcgcaaatgttgaaggggatgctttgtatgcattgaggagaagtgttaaagaccctaaaaatgtgctcaagagttgggatccaaccttggtggatccttgtacttggtttcatgttacctgtgatgctgataatcgtgttactcgtctagatcttggaaatgcaaaattgaagggcagattggtacctcagttgggaaagcttgaacgtcttcaatatttagagctgtatatgaacaacttggagggttccataccagaagaaattggagggttaaaaagcttagtgagtttggatctttacaataataaccttactggatctattcctgcttctctttccaagctctccaatcttaatttcctccgattgaatggtaatagactgacgggaagaattcccagacaacttaccaagctcccaaatttaaagatctttgatgtctcaaacaatgacttgtgtggtacaatccccaccacgggttccttctctaagttttcagaggaagggttaaagatat

SEQ ID NO: 18367 - DNA, 872 bp, Gossypium hirsutum
  Clone ID: GOSHI-09MAY01-C38794_1
ttcagcaccgtttttcctattttccattttctgccctcagcatcttctcttacgtttcccgttttttttggcattcattgcagaggtaatttttttccttctttatgatttttccttctttcgtttggctacttagaaactgaagcaaaggcttttctgcccaggttcatcttctccttcgtttattttctacaatttatcaggaacgaaaaactctttgcttaaaacccatttcttgggttagggcaaggaagaacattttttcttttctttttactcttaactccacaataatctgatctggaatattttgcaggtgagttttgcttcacctctaatcgggaatatttgttatactattcaccaaagcaaaccgcgtccacttcctttgtcttgatctgaatcttttgttctcctaattttgattctttttaaagtatttcatttttagttcaagatatatgatttccattgggcttttctttgtctgattctattgcatgttcgattgaacagatgaaaagttctcttcttgttctttgactatttttcgaatggcttgtgattttgactagttgagttttctttatttgcatttcttgaattttttttaatgataaaattgtgggttttaatattaagaggatattaacatgaagtttatgttttggtttctatattgaattaagttgaggtttttctttagaggatttttttatttctctggttcgttttacaggaaaaagagaccagcactgaccatttgttttcagatacaattcttctttcttggatttatagtgaatcatttctggacaaattttccagtttttatatcaatcaattgaagttatttactgatatttctgttt

SEQ ID NO: 18368 - DNA, 919 bp, Gossypium hirsutum
  Clone ID: GOSHI-09MAY01-C38784_1
cggacgcgtgggcccacgcgtgcgcgcaaactctctctagaactacagaaaaactagggaaaatgactgaggcagtgataaggaagaagccaggaatggcgagtgtgaaggacatgccacttctccaagatgggcctcctccgggtgggttcgcccccgtcaggtacgcccgtcggatacccaacaagggcccaagtgctatggctatctttctagctgcttttggtgccttctcgtatgggatgtaccaagtcggccaagggaacaagatccgcagggcactgaaggaagaaaagtttgctgcacgtagagcaatattgcctgtgcttcaagctgaagaagatgaaagatttgtcaaagagtggaagaagtatcttgagtatgaagcggaagtgatgaaggatgtccctggttggaaagtaggcgaaaatgtatacaattctgggagatggatgccccctgcaacaggtgagctccgccctgaagtttggtgatacctttttttatcaactctttgtccatagttgagctgttttcagttcatggatgcttggtcttgttcacattaagcaaaataaaagatattgggaattaagaaacttctgtatggagagtattaccaataccggatatgattctttccttctttctttaccttctacatcttctgcatggaaggctaacactcgccattgccattgctggcgaaatatagctgggaagccatcccactgttcggatgggggtaataaaggttctcttcttgatgtttgtaacaacttttggtggaatttatttgagtttgtttttctttgaaaaaataattttaatgtaatatatttaaattatttataatcatattatattatttaaatatataaaaaacttaagggggcccggcccaattccctttggaatg

SEQ ID NO: 18369 - DNA, 388 bp, Gossypium hirsutum
  Clone ID: GOSHI-09MAY01-C38764_1
gctgctataagatttgatgcgggcttatttagtttttattttttactttagcccatacactgggactatcatattcccatatctatgcctgaaaatgtgttcagcatggatgtcaaacaccgaccaaagagtcccaacaacttagctataaaaattaaattattaactttgtactgcatgtttcagtcaagtgtgtttcattcccaacccaaatctatcataggagccccagcctacattgcaccagaggtcttgtctaggaaacaatatgatgggaagataattcttattccctgtttctgtactttttggtctataagacatactattccgagttgagctgagtagaacttcatatgaatgaaaacttagagactttttggaaaaa

SEQ ID NO: 18370 - DNA, 585 bp, Gossypium hirsutum
  Clone ID: LIB3828-014-Q1-N6-H9
cacttaaattatacacttttcttttgatgttatttaaattacacattatttatgacttttttttgttaaacctcaatgacttttgtagtaggcccaatttgctcgggcccaaaaattaaataaaagctcaaaattaaatagttcaaatttacaaaaaaaatccactgcccaaatattcaaacccaaaataaataaataaaaaatctagcccaaaaattacaagctcaaatgattaaacagtttcagcagaagcaaaaaccctagctcccatgtacgccgctcttcctcggacgcaccgcccgcgcctcgtctcaaggcctgactagaggtactcatgggccgggccgggcccataaaaaatttcagctctgatcctaggcccgggcccggcccaaaatatgggcctaaaattttgcccaagcccggcctggaaaaaaaaatataagcccgggcccggccggccgaaaaatagtgcccgaggccaggcccgttttctaaacgggcctcattttttttgcccaagcccatatttcgggcctatatttttacccaaatcctcccatatttcgggcgggctgtcgggct

SEQ ID NO: 18371 - DNA, 292 bp, Gossypium hirsutum
  unsure (1)..(292): unsure at all n locations
  Clone ID: LIB3145-051-Q1-K1-H10
cccacgcgtncgcccacgcgtccgcccacgcgtccgaattttttaaagttttttaatttttaaaataaaaatgggccgggccggccgggcccgggcttatgattttttttttccaggccgggcttgggcaaaattttacgcccatgagtacctctagtcaggccttgagacgaggcgcgggcggtgcgttcgaggaagagcggcgtacatgggagctagggtttttgcttctgctgaaactgtttaatcatttgagcttgtaatttttgggctagattttttatttatttat

SEQ ID NO: 18372 - DNA, 516 bp, Gossypium hirsutum
  Clone ID: GOSHI-09MAY01-C38044_1
agttagaataaagacatggcagagaggacatggatacgcaagacatataagatttgaacgtatatcgtttagtaatgtaattaggcctattattattgatcaatatagttgtcctcctcatcaacattgcaagaattatagtacagctgtggaggttagcaatatcttgtataatgatttaagagggacaacaagtggtgaaattgcggtggaactttcatgcagtgagtcagttccatgcaaaaatatccgcatgaaagacatacaattggattacggaataaatggtaaaatatatgatgggcaccccaaatctcattgtttgagtgttgttcagagttgggatgaaggaaatgtttatccaaatgttccttgtttaacgaaaaaattaagttattaacttttttattttggatgtaataattaggttatattttggttgggactaaggaaatgattatccaaatgtcccttcatgttgcagatataaaataagtaaatgctcttttttatatc

SEQ ID NO: 18373 - DNA, 550 bp, Gossypium hirsutum
  unsure (1)..(550): unsure at all n locations
  Clone ID: LIB3828-011-Q1-K6-C6
tgggactaagtgaatgattatccaaatgtcccttctgttgcagattaaaatataacctaattattacatccaaaataaaaagttaataactggtaaaatatatgatgggcaccccaaatctcattgtttgagtgttgttcagagttgggatgaaggaaatgtttatccaaatgttgcttgtttaancgaaaaaattaagttattaacttttttattttggatgtaataattaggttatattttggttgggactaaggaaatgattattacatgcaaaaatatccgcatgaaagacatacaattggattacggaataaatggtaaaatatatgatgggcaccccaaatctcattgtttgagtgttgttcagagttgggatgaaggaaatgtttatccaaatgttgcttgtttaacgaaaaaattaagttattaacttttttattttggatgtaataattaggttatattttggttgggactaaggaaatgattatccaaatgtcccttcatgttgcagatataaaataagtaaatgcatcttttttatatc

SEQ ID NO: 18374 - DNA, 394 bp, Gossypium hirsutum
  Clone ID: LIB3145-049-Q1-K1-H2
gacctattattattgatcaatacacttgccctcttcatcaacattgcaagaattatactacagctgtggagattagcaatatcttatataatgatttaagagggacaacaaacggtgaaattgcggtggaactttcatgcagtaagtcagttccatgcaaaaatatccgcatgaaagacatacagttggattacggaataaatggtaaaatgtatgatgggcaccccaaatctcattgtttgaatgttgttcaaagttgggacgaaagatatgtttatccaaatgttccttgtttaacaaaaaaattaagttactaaactttattattttggatgtaataattaggttgtatcaaaaggttgcatatataaaataaataaatgcatctttttta

SEQ ID NO: 18375 - DNA, 948 bp, Gossypium hirsutum
  Clone ID: GOSHI-09MAY01-C38334_1
ggcgatttgatcgtcaaatttcaattgataaacctgacattaaaggccgtgagcagatatttctggtctacttgagaaagataaagcttggtcatgagccatcatattactctcaaagacttgcagctcttacccctggctttgccggagctgacattgctaatgtttgtaatgaagctgctctaattgctgcaaggagtgaaagggcacagatcacaatggaccattttgaggccgctatagacaggattattggtggtcttgagaagaagaacagggtaataagtaaacttgaaaggaaaacggttgcttatcatgaatcaggtcatgctgtttctggctggttcttggaacatgctgaacccctcttgaaagtaacaattgttcctcgtggtacagcagcacttggatttgctcagtatgttccgaatgaaaaccttctcatgacaaaagagcagctttttgatatgacatgcatgacccttggtggtcgagcagctgaacaggttttgttgggaaagatatcaacaggtgcgcaaaatgacctggaaaaggtgactaagatgacgtatgcccaggtggcagtttatggctttagtgacaaggtaggtctcctctcttttcctctgagagaagatggatttgagatgtcgaagccctatagcaataagacgggtgccatcattgatggtgaagtgcgtgagtgggtagctaaggcgtatgaaaaaacagtacaacttatagaggaacataaagaacaagtagcccagattgctgaattgttgcttgaaaaggaagttcttcaccaggaggatctggttcgagttttgggcgaacgaccatttaaatcaagcgaacttaccaactatgacagatttaaacaaggttttgaagatgaagaaactaagagcatgcaaacaccggagggtgggattgcggacgatgatg

SEQ ID NO: 18376 - DNA, 414 bp, Gossypium hirsutum
  Clone ID: GOSHI-09MAY01-C38224_1
aaacgttaaaccctagaatttgttaagagtgaaattagacgtgtgtttgtttgggtgaagaataatgagtgaaaggcaagagcttcaacccgatccacagattcaatcgccccagggttcatcaagagatgacatgatttcctgggtggtggcgttagagacggctttgctcccctgcttgccagccagagagcttcaagctatcgaccgttctccgcacccttctcatcagattgatgtggagagacatgctagagatttcatggaagctgccaagaagcttcagctatatttccttggcttgcaacgcgaggatcatccaaccaaggctggaatgctcagaaaagagattgcaacaatggaagaagagttgaaaacgaagaccgagatgatgaagaatcaggagagactgat

SEQ ID NO: 18377 - DNA, 467 bp, Gossypium hirsutum
  unsure (1)..(467): unsure at all n locations
  Clone ID: LIB3147-019-Q1-K1-C10
atttccttcttttcttgttttacacattcctcgaaactagtcttgtgactttggccttatggggtcatttcatagcattctttagtgatgtataaattccaggaacccctggaaccttggctaccactttcctttcctttgttttgaatctggcatttgcattaagtgtcttgggctttttgatcatgcacatatctttggtggccgctaatacgactactattgaggcctatgagaagaaaaccactccaaaatggcgttatgaccttggtcggaagaaaaattttgaacaggtgtttggtacagacaagcgatactggtttattccagcttattcggatgaggatttacgacggatgccagcgctgctgggccttgaatatccatcaaagcctgattttgattcgcaggagttctaaaaggttgatataataggaacaataaanacctcctccgtgccaaacaat

SEQ ID NO: 18378 - DNA, 430 bp, Gossypium hirsutum
  Clone ID: uC-gsronu33B155a09b2
gtttaaaccacctcgctgccatcattgttctgtttgtgggcggtgtgtgctaaagatggaccatcattgcgtgtgggttgtcaattgtgttggtgcattaaattacaagtatttccttcttttcttgttttacacattcctcgaaactagtcttgtgactttggccttattgcctcatttcatagcattctttagtgatgtagaaattccaggaacccctggaaccttggctaccactttcctttcctttggtatggacttcttggtctgttcttctgatctattttactttagtgactatgcagtatgtacaaatgtatgactatgttctgctgtggcagttttgaatctggcatttgcattaagtgtcttgtgctttttgatcatgcacatatctttggtggccgttaatactacttctattgaggcc

SEQ ID NO: 18379 - DNA, 656 bp, Gossypium hirsutum
  Clone ID: GOSHI-09MAY01-C39924_1
caggatgttacaacttgctttgttctggttttgtccaaaccaacaacaaggttgccattggagcagcaatctcaccaaggtcctcttacaatggcagacagttcgatatcggattaatggtttggaaggatccaaaacatggacattggtggttagaattcggaccaggattattggtgggatactggcctgcctttctttttagtcacttgagaagccatgccaacatggtacaatttggaggagaaattgtgaacactagatcctcaggattccacacatcaacacaaatgggcagtggtcattttgcagaagaaggctttagaaaagcagcttatttcaggaacttactgacagttgattgggacaataatttggtcccattgacaaacattcatttaaaggctgatcgtgccaattgttacgacatcagacaaggaagaaaccgtgtttggggaacttacttttattatggaggccctggaaggaatgtaagatgtccttaactatttcatcttttaaccctttaattttttttctctctttttcttttaccccaatttttctgtcccaggtcttaataaggtttgggttattcttagatttttttttttttctttgcttttggcctcgcaagtaatgcattttttggtccc

SEQ ID NO: 18380 - DNA, 632 bp, Gossypium hirsutum
  Clone ID: GOSHI-09MAY01-C39584_1
gaaatgcttaaatttccaccttctttattagctgctgctgctattttcactgctcagtgtactattggtgggtttaagcattggagcaagacctgtgagtggtatacaaactacaaagaagagcagcttatggattgctcaagaatgatggttactttccatcagaaagcaggggcagggaatcttacaggcgtgcaacgcaagtattgcacatctaagtacggttatgctgcaaaaactgaaccagcaacttttctccttgaggcaaaatcctagcacaacttgaaagcatttgcttttttattgaccaaataaagccgccaagaaacctaactatgaactgagaggggataggggagcaaaagagcaacgcaagttgccccagggcttatgaatatgacgctgtctaactcagtgtttgcctttttttagttttatatcttatttgaacttaaccagattatgtttgtttttcattttctctttcccagagagaataaattgtagaactgttccaacaaaaccatttttatttgtttatatatcacaagcaacttagacttaagccccccgcccccgcgattggataaatgatttgtgttgaatgttaaaaaaataaaaaatacatacat

SEQ ID NO: 18381 - DNA, 645 bp, Gossypium hirsutum
  Clone ID: GOSHI-09MAY01-C39464_1
cttggtaaagacgggtcttgtatgcaagtaccatttttagcagaatgggtgcgagataaaggacaccgtataaaatcacaagtaaaggctgctaaaggtgctgttagtttaattcaaatacaagacgagctgaggagactgaaccaaggagcagacagagaagagaacatactgaaagcccttgaagaaaagaaggatgccatgcttcaatccctttggcagatcaacgtggtcgacatcgagtcaactttatctaatgtctgtttagaagtacttagagacgctagtgtttcggaagaagttctagtcttgcgagcgaaaggtttgaagaaactcggagccatttttcaaggagcgaaatctgcttatagtagagaaaacagtctgcgccgtgtaaatgtcgaaacggaaactgccggttcttagccatctcagcactctgatggatgttcacgttgggttagtcaatgtattcttgtgtgtgtcagacttttgaacatatgttcatcacaagtggtgtcagctccgtagcctaattgaaggaaaggcgatgagcttgaacaatgcgaataacgtgtggcggtggatacgcactttcgtatattttattgctcagcgtcaaagtgtgtataagtttttcattta

SEQ ID NO: 18382 - DNA, 534 bp, Gossypium hirsutum
  Clone ID: GOSHI-09MAY01-C39754_1
aggtcagcagcaaggatgtttgttcttggtggcctctctgagaaacatcatggattgtccaacttctggggggcggatcgaattaatgagatagattcggaggcattgcagatagtaaacatatgctacgagcgagccaaagagatcttacagcagaaccgaaagctgatggatgcagtggttgatgaactggttgagaaaaagagtttaacaaaacaagaattctttggacttgtggaattgcatgggtcacttcagccaatgccacccagtatagttgacattagggttgccaagcgaactcagttccaagaaatgatgatgaaccccaatgtgaaggttacagggagtagttcttcataaaccaccacctatctacttcctattcacatgtataactttgcatcaatcacttccaggtcataccatcaggcattgcttggtataagattttgatttctttttcttgtacttagaaatttcacttattttatctttttaaattaatttacaactttttacatgtttgctttc

SEQ ID NO: 18383 - DNA, 706 bp, Gossypium hirsutum
  Clone ID: GOSHI-09MAY01-C39724_1
tggaatttgtggttccctagaaagaagttgtgccgttgtttaattagatcttgttttcatttacagatggatgctctaatctcgcatagctcaagaagctactatgcttgtgttggagagagtactcgtgcctatcagagcccttcgaaagacctaactgctatcaacaatcacctgaatggtggcaggaagatcagaggggcgctcaacttcgacgatgttgatgtcggtttggttagtgattctatggttgcaaatagcctttacctgcaaaatgggagctgtgcatcctcatccggtgcacctttaaaatccgagcaaccagaatcttagcccagcacgcttgtattccttgtatattctgccccactcccgtattcttgttagatcgtacgtatgaatggaagttcatcacacggggtacgtatgagcggtgagttactgtagaatagccgccacctccccaatgtgtttactgatgttagctaacagtactttgaagcttggcctaacaaattgaataaatttttgcctttgccggattgtagccaaatagtaccactgatcatttatattggaatcacagtgctccttcaagggggtaattttctttgggaatgttttaggagatttttagaggtcaatttcttttataacagtgtcttttaaggtaaaggtgatattggatgtatatatatatcacttc

SEQ ID NO: 18384 - DNA, 499 bp, Gossypium hirsutum
  Clone ID: LIB3825-034-Q6-N6-C10
aattaagcggccttattacatttaaaaaaaacccaaaacttcaaacgtaaataaaaggatgtccagttcaccagaaaaaaaatcaaattttcagagccactccgaattccctcacagctccaagctcactatgattggggatttcctgtttgcgactatatgctgacgagatccacacacgaactgccgctcatatgtaccccgtgtgatgaacttccattcatacgtacgatctaacaagaatacgggagtggggcagaatatacaaggaatacaagcgtgctgggctaagattctggttgctcggattttaaaggtgcaccggatgaggatgcacagctcccattttgcaggtaaaggctatttgcaaccatagaatcactaaccaaaccgacatcaacatcgtcgaagttgagcgcccctctgatctttctgccaccattcaggtgattgttgatagcagttaggtctttcgaagggctctgataggcacgagtac

SEQ ID NO: 18385 - DNA, 578 bp, Gossypium hirsutum
  Clone ID: GOSHI-09MAY01-C39174_1
cccacgcgttcgcccacgcgtccgctgtgaacgaatctcatgaaagtcgcaaggggcaaccaactcagaggttggtgattcctgacaggcctaaggaagaggattacttctatgcgaatccagaagaatgcttgcagccatcatatagtcgattagatctttctgttgggggattgtgacatttaccagtactggtatacggctaggataatacctgaaagtaaaatgtagttttcttccaaggaggctactgcggagatgattgggggacagagaactcaaagaaagcccaagggtcctgtgaagcagctggagggcaaaaaatatataatatatgcaaataatcagaagcatatgtagaagagctgccctgcctttataggctactaccagatcaaaatgtgttgtacaaaagagggatgcaagtttaaattcggattaacgatactggacatggaaggttaatccctctcccttcttgcactatttctttttggtttcctttttagattgcttaatgatctcagtttctagcatatatcactgtctagaaataaattcatcttgtcacagcctac

SEQ ID NO: 18386 - DNA, 491 bp, Gossypium hirsutum
  Clone ID: GOSHI-09MAY01-C39384_1
cccacgcgtccgccccttgaaccatacatgatgcctccccgaaaagtgcgagaaatgaggcctcgtataagaagagctttgattcgagctcaaaagaaggctgaggagcaagaacaaggtgggagccaaagaaaaggcagaaagagggaggccaaaacagaagtggcagcatgaaaagtgatttgtgtccagtatggaagaaccgcaagtgcgggtgtagatcactttcattagaataatagtgtctttctcacagtttagcaaagtttctttatagctcaaacatagcatttactgttctgctttttgaggtactaatagttaggtgcagcacaagacgtggcttttgcctgcatttgttggctgcagccctctggttcccgaaagtctgaactcctttaaacataaattaaactatttctttgtttagtactattcgcctagcctataatttgaagaccatatcacaacttcagtttctatttgatttg

SEQ ID NO: 18387 - DNA, 411 bp, Gossypium hirsutum
  unsure (1)..(411): unsure at all n locations
  Clone ID: LIB3147-022-Q1-K1-A5
cccacgcgtncggatgagactgtgccaactgttgtaacttatccttattgtcacagccaggtaatattacatccagaccaagaccgagttctcacagtccgggaatgtgcaagattacaaggttttcccgattattatagattctgcgggacaattaaagataggtattgtcaaattgggaatgcggttgcaattccggttggtcgagccttgggatacacaatgggaatggcatttcagaaaggaagcgggaatgaaccactgatgatccttcctcctaagttttctctttccaccaatatccagttagcaaaatcattgtcccaaagcactgatgattgaaccaaaactgatttcttaactttatatgtgtatctctgacataaaagtttcatgcaaaagctcttatgc

SEQ ID NO: 18388 - DNA, 307 bp, Gossypium hirsutum
  Clone ID: LIB3147-008-Q1-K1-B12
gggatacacaatggggatggcatttcataaagggagcgggaatgaaccactgatgatcctccctcctaagttttctctttccaccaatatccagttagcaaaatcattgtcccaaagcactgatgattgaaccaaaactgatttcttaactttatatgcatgcttgcactgcaccattcataatgtgtatctctgacataaagttttcatgcaaaagctcttatgcttgcatctttgtatccttgacctgccaaagcttgcagcctctactgtagtctctcaaatgtaatgaaatggtttcatttct

SEQ ID NO: 18389 - DNA, 478 bp, Gossypium hirsutum
  Clone ID: GOSHI-09MAY01-C39204_1
cgcttttcttctctcaattttctctatatataaatacattgattacgcacctttcgaaatctttaaaaaagaaaaaaaaactgaagcaccacaaagatggcgaaagctgatctgatggttatttctttgttgttactagtaacactgtgtttcacggcggttgacggttacggaaggatggtgggagggagaacggagataaccgacgtgaagaccaacgaggaggtacaagagctggggaggttcgcggtggaagaatataaccggagccacggcctggggcggtggcggggatttgtaagtagtagtaacggaagacgggcggagttggttttttcccgggttttagaggcgcaaaaacaggtggtttcggggataaagtactatctcaagatcgaagcaatggagaataaagcttagcaagacgtttgaatcggtggttgtggtgaaaccttggcttcattccaaggaattgctt

SEQ ID NO: 18390 - DNA, 627 bp, Gossypium hirsutum
  Clone ID: GOSHI-09MAY01-C39224_1
cccacgcgtacgagagaggagctacatgttgtcaagagtcaggacgcagggcaaccttatatggccatgattattagataatgttcgtcctgatatgagaatagcatgggacgagccatttggacccggtttgcctgacataaggagtacttcagtcgaagaaggaattcatcattgtaatgctagcaactttggcctgcaaggttgtgtctgtacaagagatataagcgaagcaattctgatcagcgacgcaacggagactggtacagttcagatcaattctgctccggcacgtggacccgatcattttcctttccagggtctcaaggatagtggcattggatctcaaggaatcaccgacagtatcaatatgatgacgaagatcaagaccaccgtaattaacttaccaacaccttcctacacaatgggttgatatgaaaaattttcataaattcgaccgatgaaataatgtactagcttgtaaagtcaaccaacattatgagctcatatgcttgttgtctgtaggaaatgaaatgagtagtaagactataacttgcataagttgaaatcttccaacttccaactttgttaatccacctcctttttctctaaaaaaaaaaaaaaaaa

SEQ ID NO: 18391 - DNA, 390 bp, Gossypium hirsutum
  Clone ID: LIB3585-063-P1-K2-E11
gaagcctcacgattcttcacctaagccgctgcttgaatgttaacagtgttgagtggttagaatatcttggcaagcttgaaacactcgaagatctgtctattaaaaattgtagagcaatcggggaaggtgatttgataaagctaggaccaagttggcgaaagctaaaacggttgcaatttgaggtggatgctaattaccgttatatgaaagtttatgatcggttggctgtagatcgatggcaaagacagtggattccatgtgaaaatatgcaggagcttagcttggtcaattgcatcatcagccctggaagagggctggcttgtgtattagggaagtgcaggaacttggagaaaattcacttggacatgtgcgttggagtacgagactctg

SEQ ID NO: 18392 - DNA, 318 bp, Gossypium hirsutum
  unsure (1)..(318): unsure at all n locations
  Clone ID: LIB3145-008-Q1-K1-G8
gacggacgcgtacgcccacgcctccggngatttgagatttctagttccgagcaggcgaaagcnaaaagggggcgatccgatgtggatgctaattaccattatatgaaagtttatgatcggttggctgtagatcgatggcaaagacagaggattccatgtgaaaatatgcaggagcttagcttggtcaattgcatcatcagccctggaagagggctggcttgtgtattagggaagtgcatgaacttgtagaaaattcacttggacatgttcgttggagtacgagactctgatatttgaagcttagcacataaatctagt

SEQ ID NO: 18393 - DNA, 917 bp, Gossypium hirsutum
  Clone ID: GOSHI-09MAY01-C34964_1
tcgcttttgtcacttattgtatcactttcgtccaagagcggagaataggagagactatggggaatcaaccatttcatccttgcacttatctccctcacctgtctcttctccttctcaacctctaccgatgcacctccacccctttttgatgcttctggctccgcttctttgaaactttatgatatgattgagatcatgtcagaatcaccatctccatttgcattcgatggtacaatattggaaagtattgaggatgtgttaagcatactacctggcggtgtcgaccctgcccttcaggaaatttgtgggaacactgaccaccccgtcgaatgtataaaagcaactatgccattcctagatgagaaagctcctattgagcctctttctgtccttaaagctggggttgaagcaatggataaccagaccaaaaatgcattggctgaggttacaaagctctcaatgaaccctactacccttaaaaatgttgttcccatccttcaaacatgcatcgacgtctacaataacattcttaacagtgaccagaaatcccttgaagccatctccaatcgtaaccttgtccagttgagcacagagctaggcgctaatgtggaaaacgtactcggctgtgacaatgcattcaaacaggctaagctcgaatcgccgatgaaaaagatggatgcaatgcttggcaaagatcattagcaacaccttgaccattggtgtctcgacatggtccactttttaaaggaacaacttattaatagtttgggattaggccaataaaatagatgccatgtcagcgttcttctaatgatttaacggaagagcgattaaagaaaccaattgttgaaaatattaatgatgaaattgaaaacttgtctttgcttggtgaccaaaataaaaatattccaataatt

SEQ ID NO: 18394 - DNA, 431 bp, Gossypium hirsutum
  unsure (1)..(431): unsure at all n locations
  Clone ID: LIB3145-008-Q1-K1-E9
gacccacgcgtacgatttattcctttgctttcgtccaacactattataatagaacgggccatggggatcaaccagttcatccttacacttatctcttccccttatctcttgtccttctcaacctctaccaatgcgcctccatccctttctgacgcttctagccctacttcttcagaactttatgatatgattgaggttatgtctgaatcaccatctccatttgcatttgatggtataacattggaaagtattgacaatttattaagcatactacctagcggtgtcaaccctgcccttcagcaaatttgtgggaacactgatcaccccgtcgaatgtataatagcaactatgccattcctagatgagaaaactcctattgagcctctntctgtccttaaagctgggattgaagcaatggataaccagaccaa

SEQ ID NO: 18395 - DNA, 519 bp, Gossypium hirsutum
  Clone ID: GOSHI-09MAY01-C34914_1
agcatacaaagggaggaaagggaaatcctcactcgaaagacatgaaaatggtgcagagttccggactgctgcattgggggaaatcaagtcgaagaaatgttatatgcagagaggcagaattgggaccaagtgcagcctttgagaagaaccggcagagcaagggtgatgctaacaaacccggagtatttcgagtggtgactaccaagaacaaagaggttcatttcatgtgcgaaggcgggtccgaaatggcaaagctatgggtgagaggaataaagcttataacaagagaggctatttttggtagccagaaagaaaagtaggtaaaaatgagttagaaagtgtactgtatagatactggggagtatgatatggtggtggtagttagaatttatggtatttcgctgtaaaggttttgatctgccgtagttagtaactgctttgtcatctgaagatgaccaaagccaaaactctatttgccatcatcctcgcataaatctgtggagcatatttcattactgc

SEQ ID NO: 18396 - DNA, 578 bp, Gossypium hirsutum
  Clone ID: GOSHI-09MAY01-C34834_2
ccccgcgtccgcttcaatctagattcttggccaaatttctccgggcaaaatatggcgatccagttcttctcccctcagataagtagtctctcctttttcaagcgcattttttgctaatctgtgagcatatgagttctttgatctatgaatattctataaaatgagttcttgaaaatcagatttcttgctctgaatatctctgataatggctccgattgctgatttgtctgtggtagtctcctgacatttccttattactgttcttgaatcccccataagttttactgagtgggttcttagtgaaatccctagctttgtaccatctaaacatgcatatgcctctgccgcaaaaggagaaggaacattgctatgaataactgtctttaacactgttaagtttcccctcagattccatcctaccaggtcggaagctgatctgaaagttttgttgtcgtacacagcatcaaaaaggatcctgactctcgattgatttctggagaaccatatccaccacaacgcataacagaaaagaagacattgacagctgttactccttctggaaacccagttgtcatagg

SEQ ID NO: 18397 - DNA, 810 bp, Gossypium hirsutum
  Clone ID: GOSHI-09MAY01-C34834_1
ctcacgcgtccgggccgcccttttttttttttttgtttttttttttttttttgggacaagtttaacaactgtgtaataaagcaaaagggtgaaggaacattgctatgaataactgcctttaacactgttaagtttcccctgagattccattctaccaggtcggaagctgatcttaaagttttggtgtcgcacacagcatcaaaaaggatcctgactctcgaaccatttccaccacaacgcattaacagaaaagaagactttgacagcgtgtgttactcctcttgaaaacccagttgtcatagggcaatctcgaaagacgtggaggcttccttcaacttcagatctgcattggggacatctgtcatttgtaacaactctcctgattctgaaattagcaaagtttggaataaaatcccaagagatccaccagattgtaaatgcaatttttgatggcatctataggctccaaagtttcttgtaaaattcttttgtttcggtctgtaataaatagtttctaggatccagattagcatcttctaatagtttataggctctgcggaccgaaaactcgccagataattctcctttccaaacctggaaatcctcatgctcaatctctgcgaggggaatctgaagaattttccgagcaatgtcctcttgaaagctatcttcccatatcgagatgttgtcccctctgcccactctccaacacatccctttttggagaagaccctttgcagcccagatacttttccaagtaaaagagggattgagaaccagaaaaacccttcactctaccattgatagatg

SEQ ID NO: 18398 - DNA, 442 bp, Gossypium hirsutum
  unsure (1)..(442): unsure at all n locations
  Clone ID: LIB3145-013-Q1-K1-D9
acgagtttataagctctgcagaccgaaaactcaccagataattctcctttccaaacctggaaagccttgtgctcaatctctgtgaagggaatctgaagaattttctgagcaatgtcctcttgaaagcaatctttccatatcgagattttatcccctctgcccactctccaacacatccctttttggagaagaccctttgcagcccacatacttttccaagtaaaagaaggagcaaaaggatatgacgtctactcccaaaatctgccaacatttctggtaaaatactgctggaaatccatcctaccctgaagccttccttggtcccatatcaaaaattgcttgcttgatttcctcccttgtatatggtgctgcaagattttgattgccctctacttgaatacatcgttcaatccctgtttgttcaaatgntacaccttttttt

SEQ ID NO: 18399 - DNA, 420 bp, Gossypium hirsutum
  unsure (1)..(420): unsure at all n locations
  Clone ID: LIB3583-031-Q6-K7-A11
atcctcctgccggcgctgactgaagttttgttgtcgtcgcagctcaaaaggttcctgatctcgagaccataaccaccataacgcataacagaaaatagacattggccgctgttgctcctcttgaaaacccagttgtcataaggcaatctcggaagacgtggaggcttgcttgagcttcagatctgcatcgggggcatctgtcatttgtagcaactctcctgattctgagattagcaaagtttggaataaaatcccaagagatcctccagattgtaaatgcaatttttgatggcatntaaaattctcctttccaaacctggaaatcctcatgttcaatctctacaaggggaatatgaagaatttttngagcaatgtnctgttgaaaggtatnttnnnatatngagatgttgtgnngtgtgt

SEQ ID NO: 18400 - DNA, 564 bp, Gossypium hirsutum
  Clone ID: GOSHI-09MAY01-C34514_1
cggacgcgtgggcggacgcgtgggcggcaaacgaagatatctttccatattatttgaatttctacccccaagaatattggaaacaactcacctagactcttccgaagtgttgctactatcgtaattgaggtattgccccgagcatctttcatattcccttaagattgatttcaaaacttgtgcacccctatcgctagcttctccaaacaatgtgctgacatcagcaaacagtaaatgagaaaccgacggagccccttttcttttcctttgctcccttaatcgacccctccctcaaggccatcctcataagcctcgaaaggccctcattataaattaaaaacaagaaggtattaatagggtcccttgtctattcctctcgccggtttaaaagctcgttatgtaaataaatattttaaatattttaacatgtgtttaaaaatattttgttcaaaactatgtaatttttttaatttatagatgttgctgtataattattttatgtattttcaaaagtatttcatattaggttaaaacattatttaatttgaaatgtaatatgcttat

SEQ ID NO: 18401 - DNA, 1001 bp, Gossypium hirsutum
  Clone ID: GOSHI-09MAY01-C34504_1
atacaaattcttcaaataagggttcataaaaacacccacttccattctcatataaatgtcataccagtgattttattaattcagcaatattatttcatttcaatttattattcttaattatattttcttttgggatcccaagttcccaacacttttgttttttgtgctctttatcttgtcgaagttttaaaatggctgcgcccaggactgtgttgagggacaaagaaagtgccgcagcggcattgttgaacaacagcatcaaggaagatgacgattccccatctgggaaaaggttaaaatcggaaaagtttcacgtctcgaggtgagaattggctgacttttctggggttttcttgattttttctaccggtttgttctgcatctacctttctatgcccgcctccgagtacgggaaactcaggatcccgcgttccatctccgatctgcgcttgctgaaagataatattgcaacatatgcaagtgattatcccacacaattcattttgggttactgctcgacttatatcttcatgcaaacctttatgattcctggaacaattttcatgtctttgctagctggagctctctttggtgtaaacggcgttttcttggttgtctttaatgccactgctggagcatgctcttgcttttttctgtcgaagctgataggcaggcctttgcttacttggctgtggcctgataaattaagattttttcaagctgacattgctaagcgaagggacaagttgctgaattacatgctctttctgagaattactccaactctacccaacctatttattaatttggcttcacctatagttgacataccgcttcatgtgttcttcttagctacttttggtggcctaataccagcctcctatataactgtcaaagctggtcttgcactaggcgatcttaagtctgtcaaagacctgtacaatttcaagactttgtctgtgctttaacttatcgggatggtctccatatttcctaccctt

SEQ ID NO: 18402 - DNA, 491 bp, Gossypium hirsutum
  Clone ID: GOSHI-09MAY01-C34534_1
caaaatctctcttcaaaccaagaaaacaagagaaaaaaagatgtctaagctttgttcacttggcggagctgcccttctttttaatttcatgctaagctatgctgctaggcccgagccaactttgtccttaacccaacatgagggagttgaggcagagaaagttgatgctgatgagaactgtgaaggaattggcaaagaggagtgcttgatgagaagaacccttgctgctcatgtggactatatttatacccagaatcacaagccatgaagttgaattgttatggaagaaaaaaagacagtaaaatattggttcaatcgtagcatcaaaagccataaataaaatcacatatatttccattaatgttggcgggggattctccccagggttttgttctttctttttcttctttttttcatgcatgtgaaccccagatgatccatttctttgtagatgcaaacttagaaaatgtttgaaaaatcattcaattggg

SEQ ID NO: 18403 - DNA, 597 bp, Gossypium hirsutum
  Clone ID: GOSHI-09MAY01-C34524_1
acagtatacaatccattttgatcgagcggcgaagagaggggacaagagaggtagagaaatagtgtgatggcatccgggtggggaatcaacggtaacaaaggcaggtgctacgatttctgggtcgacttcagcgagtgcatgtcccgttgcagagaacccaaggactgtggtcttctccgtgaagattatctcgagtgcctccaccattctaaagagtttcaacgaaggaatcgaatttataaggaggagcaacgtaaattaagagctgccgcacgaaaagacaaggaaggcgaaaatggtgttcatcatcatgcatagtcataatttgtgatcctttaatttgccaataataataatgcgtggagattgttgtatttatgttgggattggtattttaactctttgctaaattaccttttgggtttccctttcgttggaatggacatttgttgttttccgcctgtggctgtgggagcaaagttaaattggagtgagcgaaacttttttactttgaaaaaatttcgaattttaaattaatcgaatcgaattatttggtttttcgagtctaaaaaaaaaaaaaaaaaaaaaaatgtctac

SEQ ID NO: 18404 - DNA, 515 bp, Gossypium hirsutum
  Clone ID: GOSHI-09MAY01-C34454_1
gaaaagaaaaaaaaatgaaacagattcgaagaacaaaaatataaggtgcttgaaatcatctttcaataattttttatgctcttctattctctatgcatatgtgtgtaaaaaaaatacaatcgattccccctggctttatagccgaatgttcaaaataaaaaaaatacaatttttctttatttgctttcgtattggctattgttgctgctattgtttgtctgtttctttgcaggttcggtggcccgttggcgcggtggttcgtggcgcttgacgtggggcgtgactggcggagcgctggagggctcggagccaggctttgggcgcatggaggccgtacatagggcgttggctgcggcgcacctaagaaacctagggtttctgaaattgctttaacctttgggcccctgtgccgcgtaatcttaggctaggatatttatttgggttttgggttagtgattgggtcaaagtctgtaaatggacatttaatggactattaagatttagattttttgttt

SEQ ID NO: 18405 - DNA, 426 bp, Gossypium hirsutum
  Clone ID: LIB3148-053-Q1-K1-D5
gcaaaccctagcccccttttaaccccatcattgatccaccaccaagaacggctaccgctggttttggggctccgacgaatcgattttcagcctgaaaatcccttcttgacttcaatttgaacaaagcaaaagaggatcagcggcctattcacaaggtacggaggcccgttggcgcggtggtacgtggcgcttgacgtggggcgtgactggtggagcgctggagggtacggagccaggctttgggcgcatggaggccgtacatagggcgttggctgcggcgcacctaagaaacctagggtttctgaaattgttttaacctttgggcctctgtgccgtgtaatcttaggctaggatattaatttgggtattgggttagtgattgggtcaaagtctgtaaatggacatttaatggactattaagattta

SEQ ID NO: 18406 - DNA, 821 bp, Gossypium hirsutum
  Clone ID: GOSHI-09MAY01-C34714_1
tttagatagacgcatctgttattttctctctcccaaacagagccccctcctctttttgaaagccggaaaatcaaacaaaacccttttaaaactttccggcaaaaatttcgaagccagcggagaatggtgccccctgaaaaccccagttactggtctcacttcgactactcaaccttgatcgacgatatccctgttcccgacggaccttacaccggtttttcttggtccacgcagccaaccaacgctccttctactgctgtcaatgtggaagttgacaactcgttgggggatctggatggccttacggaatctggttcaaagaagagggggtagatctgaatcatgcaacccttctagctccaatgcatgtagggagaagttgcgtagggataggctaaatgacaagtttatggagctgggtgctattttggaacctggaaggcctcccaaaacagacaagtctgctattttggtggatgctgctcgaatggtgacccagctacgagatgaagcccaaaaaatgaaggattcaaattcaagtctccaggaaaggattaaagagttaaaggcggagaagaatgagcttcgtgaggaaaagcagaggctgaaagccgagaaggaaaagctggagcagcaactcaaaaccatgaatgcacaacctagcttcatgcctcctgcgccagcaatccctgctgcatttgctgctgctgcccaaggtcaagctcctgggaacaagttggttcctttctttggttatccaggagtggcaatgtggcaattcatgccacctgcagcagtggatacctcacaggatcatgtac

SEQ ID NO: 18407 - DNA, 395 bp, Gossypium hirsutum
  Clone ID: LIB3145-016-Q1-K1-G9
ctgaaaactatacaaactggtcgcatttacttcgctgaccattgagaggataaatcggtggtacagacgggacagtcgacgaaacatttctggactcacttccattgacgccttttgcacgagacaaggtcatatttgacaacgtatatttggatggtggatcgattgcaagaaattgtatgactgaaaagaggtagatttgaatcacgcgacctttttataatgaaatcatgtgggggggtgttgcgtaaggataggctaaatgacaagtgtatggagctgggtgctattttggaacctgaaaggcctgccaaaacagacaagtctgctattttggtggatgcttgtcgaatggtgacccaactacgagatgtagcccataatatgaaagattc

SEQ ID NO: 18408 - DNA, 375 bp, Gossypium hirsutum
  Clone ID: LIB3145-005-Q1-K1-A9
cgataagatatacgcacctcttataccctttcttcccacacagaggcaaagccccctgcggcctttttaaaccggagaatcaaccaaaaccattttaaaactttccatctaaaatttctaagtcagcgcagaatggttccccctgaaaaccccaattactggtctcacttctattactcaacctagatcgacgatatccctgttcccgaccgaccttacaccggtttttcttggtccacgcaatcaaccaacgctcctaccgctgtcaatttggaaatttacaactcatttaacgatctggatagccattcagaatctttttcaaagaacacaggtacatctgaatcatgcaacccttctatctcaaaaacattt

SEQ ID NO: 18409 - DNA, 579 bp, Gossypium hirsutum
  Clone ID: GOSHI-09MAY01-C34704_1
gggaaatcgtagtagtcgctccgatcaagagaaattgtgtcaatcaagggtgccacacgacaaaattctttaaaagaggcattacctactgagatggaggtgtcattcaatgagtatgctaatactgggatttctcaagattcaggggatgtaactagggaagatgatcaaccgaaaatggcaaaaggaggtgaatcattttttgcagatattatcaagaagagttttagggatttctcaagatttaatcaaacagaggaacgtgggaaaagtaacatttcagttaacggacatcctattcctgaacgtgtggttaaaaaagctgaaaagatagctggaccggttcttcctggacagtattggtatgatttccgagctggattctggggtgttctcggcggaccttgtcttggcataattcctccttttatcgaagaatttaaccatccaatgccagagaactgtgctggtggaaccactggtgtttttgtaaacgggagagagctccatcagaaagatttagatttgcttgctaatagagggcttccacctgacagagatagatcttatatcattgag

SEQ ID NO: 18410 - DNA, 435 bp, Gossypium hirsutum
  Clone ID: LIB3148-045-Q1-K1-F3
gaaatcgatcgctaactcggagctccgaacctaaccctaatcggaccttacactatatccaagaagtagaagaacaagatgtcaggcgtaaccaaccaagaggaagacaagaaacccgctgatcaaacggctcacattaatcttaaagtgaaaggccaggatgggaatgaagtgttttttaggattaagagaagtactcaactgaagaagctgatgaatgcgtactgtgatcggcaatcagtggatttcaactctattgctttcctgtttgatggccgccgtctgcgagtggaggaaactccagatgagttggaaatggaagaaggggatgaaatagatgcaatgctacatcaaactggtggtgctatggcctaagtagctagtttttaggttacgtaatgcagtaggatttaaacggtagtacttacgaaatca

SEQ ID NO: 18411 - DNA, 360 bp, Gossypium hirsutum
  unsure (1)..(360): unsure at all n locations
  Clone ID: LIB3145-005-Q1-K1-D2
tcgnccacgcgttcgnccacgccttccgaaacccgctgatcaaaccggttaaatttatttttggggtgaaaggccaggatgggaatgaagtgttttttaggattaagagaagtactcaactgaagaagctgatgaatgcgtactgtgatcggcaatcagtggatttcaactctattgctttcctgtttgatggccgccgtctgcgagtggaggaaactccagatgagttggaaatggaagaaggggatgaaatagatgcaatgctacatcaaactggtggtgctatggcctaagtagctagtttttaggttacgtaatgcagtaggatttaaacggtagtacttacgaaatcaggatcta

SEQ ID NO: 18412 - DNA, 493 bp, Gossypium hirsutum
  Clone ID: LIB3585-040-P1-K1-C2
gcggatctatttcctcggacaagtgatctggctcggtcgaactctttatatggtccaacgactccggcgtatagtggacacaacagtgctgcagcgaatccttcatacaggatcaatatgtccgcaatgcaacgatatgctcctcgtctagatgagttgaactacacaaggatggctggtgcaaggcctgaaccaccactgatggctaatacaaatgctttttatgatcctagaccaccatttatgattgatcctcgagcaccacgacctccatatactctgagtttctctcctggtccataccacccttattcacatcacaactcggctggttgactcaatgaatagttagttgctcgtcatccatcaactcgaggacctgatctttagaaatttggttgttcgaacccttttaactgattctgttatatgggttctgctgcataacattgaaacttaccttttaaatattttgctcctgtctcttaattag

SEQ ID NO: 18413 - DNA, 288 bp, Gossypium hirsutum
  Clone ID: LIB3145-005-Q1-K1-C10
cataccacccttatttacaagacatctttttagggggactgaggcatataattctttatcgtcatccatcaactcgaggacctgatctttagaaatttggttgttcgaacccttttaactgattctttactatgggttctgctgcataacgttgaaacttatcttttaaatattttgctcctgtttcttaattaatacgattatgttttgtgcatttttagactagaaatttttcttgatcattaagataaattaggtaccttttttatacaccttaaataaaatttt

SEQ ID NO: 18414 - DNA, 384 bp, Gossypium hirsutum
  Clone ID: LIB3145-002-P1-K1-C8
ctaaagcttacgcgacagcaatactttcattataactctcgtatacttcagcatgggcacgcgctccgtactaggacgctaaactacaccttcacttgctaacggccatccattcatacggatgcattgtctgcaagatagactacaaacagattcatgctgacgaacacagcttcgggagactatcagcacctactaccatacaactctaagcctacgtgctgatgaacgtccgaatgctgtctacatatgagactataggaatgttgaaaattactagctgatcaggatcgtcctgattgtacgggcttaatacaccatagggatgataagcaagtagattgaatcgagattaaagtgataaggctacgagagattttcaca

SEQ ID NO: 18415 - DNA, 336 bp, Gossypium hirsutum
  Clone ID: LIB3145-002-P1-K1-C7
ctaaaccttacgcgtccgcaatattttcattataactcacgtatacttcagcatgggcacgcgctccgtactaggacgctaaactacacctccactagctaacggccatccattcatacggatgcattgtctgcaagatatactacaaacagattcatactgaccaacacagcttcgggagactctcagcacctactaccatacaactctaagcttacttcctaatcaacaacgctatacgtctcaacatatatgactatatgactgctgacaatcactatctgatcaggatcttcctgattgtaccggcttaatacaccatagggatgataagca

SEQ ID NO: 18416 - DNA, 1116 bp, Gossypium hirsutum
  Clone ID: GOSHI-09MAY01-C34674_1
tgacagaagttatgaagaagatttgaaggaaggagagggatatgagcgaccgaatgagggggctgttgtcaaagtgtaaattggtgtggggaaactgcaggatggtaccgtcttcttgaagaaggtcaagatgaaggacaagagttgtttgagttcaggacagatgaagagcaagtcattgatggtcttgataaagctgtgatgactatgaagaagggtgaagttgcactgttgactattgctcctgagtacgcttttggatcatccgagtcaaagcaggagctggcttcggtaccccctaactcgactgtgtattatgaggttgagatggtgtcatttatcaaggataaagaatcatgggatatgaacaccccggaaaagattgaagccgcaggtaaaaagaaggaagaaggaaatgtattgttcaagtctggaaaatatgcgagagcttctaagagatatgaaaaggcagtaaagtatatcgattatgattcttccttcagcgaagaggagaaaaagcaagccaaggcattgaaggttgcttgcaatctgaacaatgctgcttgcaagctgaaactgaaggatttcaagcaagctgagaaactgtgcaccaaggttttagaaatagaaagttcgaatgtgaaagcgttgtatagaagggctcaagcatacatccatctggcagatttagatttggctgagtttgatgtcaagaaagcccttgagattgatcctgataatagggagataaagatggaatacaaattattgaaggagaagatgaaggagtacaataagaaggaagccaaattctatggcaatatgtttgcggcgggatgaataaaacagctcccaaagaacccgcaccaatgaccatagatagcaaagcgtaggtggtggacacgtgacggtttgatgccttgggtgtttttttttttttccctaaaaatgggaacagagaagttggtttgagttgcaatggattcttctgtgtccgagtacgaggattgttgacgttaaagaatgttctgtttattcttttcccttttttcagaaataattatttttcagcatgagggaggttccaaagatgggaatttttgggcttccattttt

SEQ ID NO: 18417 - DNA, 582 bp, Gossypium hirsutum
  Clone ID: GOSHI-09MAY01-C34384_1
cagctgatttatcagtgagtagtccattgagtacggacaagcctttatgggaagttcatctgtgtaacagcgcataagcacgttgtgtttaggatccaccattctttaggtgatgggatctctttaatgtccatgttaatggctagttgtaggaaggtgagtgatccagacgcgcttcccatgatggttccagagaagacgaccgagaaaaaaagggattcgccatggtcgtttggttccatgtgggggtttttaaagatggcttggctcactttcgtattcgtgttggagtttttgctgaggagtctctttgtttctgaccggaaaacggcggtttctggtggcgatggcgtggaactctggccgagcaaactagccaccgctaagttcttgcttgatgacatgaaagaggtcaaaaaggccattcccgatactacgattaatgatgtcctgtttgggatagtgtcatgtggactatcaagatacttggatcaccgaacaccaaatgccttgcatgaaggccttcgtatgacaggtgtagctatggttaatttaagagcaaaaccagggttgcaggaaata

SEQ ID NO: 18418 - DNA, 542 bp, Gossypium hirsutum
  Clone ID: GOSHI-09MAY01-C34354_3
cccacgcgtccggctgacttgggagaagttacagtatcctttcaagatggtggaactgcacaacaatgtgcgatttcacgatgatacctacacctaaagccccaaatggtgctaatggacaaccatcgcctgatgataatctggtcaattcctcaagcttgatgttgactggaccaaagaaaagaaatctggaagctgaaggagaaggcatcaagaaacagagccggccccggctaacggttgaatcatcaaatttggtagaagagaatacggaagagcgtattcagagatacaatgaggggactccaaaaaacaaggtatggtatatgtttatatatgatatttgtttatatttctgttaaatttcaggaatacacagcataaagactctaggaaaagagggatgggatatatatgtatatacctatattggtaggggatgaactgtaacagttctccagcatttgaaaacttggattttgaaatagtgaaaatataaatgtaattattttctcaaatccataatatgaatttatcaaatg

SEQ ID NO: 18419 - DNA, 924 bp, Gossypium hirsutum
  Clone ID: GOSHI-09MAY01-C34354_2
gttgaaacttttaaggaaacaaaatgcatatttcttttcctcttttttttcaagtctcaatgtctgaagtcattcgtagacttgcccttgtttacacctttgatcatttgtttataactcttaaatttcaggaattgagcacggaggctctaaaaaaccagcttctttctgtgatgccaactatggaagaaattgctgcaagtttgccatctcttgaagcattaccacctccttctagtgattgtgacaacgacaaaggtctccatggcatgccattggggaacactattaacaatggaatgcttcaagagggtggaagtgaggtgtttggagcacaaaacatcttgaacgcaccaccattgtcgcagagtgataattggatgaacttagtgcgcagtgcaagcaacaaaagagatggggaattggttttccgtaacttgtcagaagctgaagggaaagatactgaaattaatgatgttgttattcctattgatcaacaccgcgaaagtttgctgacttgggagaagttacagtatcctttcaagatggtggaactgcacaacaattgcgatttcacgatgatacctacacctaaagccccaaatggtgctaatggacaaccatcgcctgatgataatctggtcaattcctcaagcttgatgttgactggaccaaagaaaagaaatctggaagctgaaggagaaggcatcaagaaacagagccggccccggctaacggttgaatcatcaaatttggtagaagagaatacggaagagcgtattcagagatacaatgaggggactccaaaaaacaaggacaaaactgcactttcggaagctagagtacaaggtattgccattaatgatgttattcctattgatcaagacaatggaagtttgctggctcgaaagatgatgcggcgtg

SEQ ID NO: 18420 - DNA, 757 bp, Gossypium hirsutum
  Clone ID: GOSHI-09MAY01-C34354_1
cattttcctctggctctcggctagcgtggtggagattctcacacttgcttgcttgtctctatttttgttgctgagattaggaaaaactttgattgttttagattcagaaatttgatttgagataacattttcagatcctttcaagatggtggaactgcacaacaattgcgatttcacgatgatacctacacctaaagccccaaatggtgctaatggacaaccatcgcctgatgataatctggtcaattcctcaagcttgatgttgactggaccaaagaaaagaaatctggaagctgaaggagaaggcatcaagaaacagagccggccccggctaacggttgaatcatcaaatttggtagacgtgcgtccgcatgcgcggtcgcagagatacaatgaggggactccaaaaaacgaggacagggctgcactttcggaagctagagtacaaggtattgccattaatgatgttattcctattgatcaagacaatggaagtttgctggctcgaaagatgatgcggcgtgaatatagttcctggaatttccaacattttaatgaagacaatgacagctttcctgccttagaacaagcaccgcaagttactgagtttctccgtcaaaatattgaagttttggtttccggtacaatcaaagagatgcaagagtggcgtacacctaaggattccggctgggatcaattgaaaaagtggaaggccgcgctcaacttgggtaagacaattggtgttgaagtgaaagct

SEQ ID NO: 18421 - DNA, 533 bp, Gossypium hirsutum
  Clone ID: uC-gsronu33B051h04b1
gtggtgcgagtcttttaaggaatcgagcccacagacaatttaaagccgtaaggaatcttataattgaccttcaagaagctaatggcttgccccagcaactcatacatctaaagtcatgggaacctaaattcaaaagaataaagcaagtcatcgcaaatatcccgtctttaccacaatcacaggcgaggctgaaactgctcgaagtagaatggtccttggagcaatgcctaaaactaagatcagaggtacgcagagaactagcaaaagcacgccgagtacaatcacaggtccataaacttggtgaagtcctccttaataatggggaattgagcacggaggctctagaaaaccagcttctttctgtgatgccaactatggaagaaattgctgcaagtttgccatctcttgaagcattaccacctccttctagtgattgtgacaacgacaaaggtctccatggcatgccattggggaacactattaaacatggaatgcttcagagggtggaagtgaggtgtttggagcacaaaaca

SEQ ID NO: 18422 - DNA, 1043 bp, Gossypium hirsutum
  Clone ID: GOSHI-09MAY01-C34344_1
gcatgacttaagagctaaattgtgaataaaggttaaattttaagaatcattgaagccgaacaaagattgagccctgggtattaaagccaaacacgattttattttcctagatttcattttttgagctccatatgttttgtttgttgtatgctcccaaaaaggggtaaagagatgatttcggtttgtcgaaccaaaccaactcggatccaagccgactcactcgaaaaaagcccgtctccatttcgggtgccattattaattgtcacagtaattttcaaaccctagaaaccgcagacactctctcgccccccccccgcccctgcgactttttggtgctgtttacttcatctcctacccatggcggacgtggatgccgatgtcgccgcaccaggtgtaccgaagaagagaacgttcaagaagttcagtttcagaggtgtcgatctcgatgctctcttggatatgtccactgatgaactcgtcaagctctttcccgcccgtgcacgccgaaggtttcagagaggtttaaagaggaagccaatggctctgataaaaaaattacgcaaggctaaacgtgaggcgccacctggtgagaaacccgagccagttaggacacacctccgcaacatgattatagttcctgaaatgattggtagtattatcggtgtttacaatggaaagaccttcaatcaagtggaaatcaagccagaaatgattagccactatttggctgaattctcaatctcctacaagccggtaaagcatggaagaccgggtattggtgccacccattcatccaggtttattccactcaaatgaaaaagattatgcatgtgtctttattcttggtcttgttggaatgttttgctattgaattttgatcaatgcgtctagtgttgatgcttctcttttgagtattcaatttagaaaaggactctgtcaagctttgcatttctctcctatttccccctattctgaactattactaaaaaaattaaggtttttgttattgaattttgatcaatgggtctggcctggctttgatg

SEQ ID NO: 18423 - DNA, 361 bp, Gossypium hirsutum
  Clone ID: GOSHI-09MAY01-C34324_1
tcgaaatgatgtagcttttaattatggttattgttgtaaaaatagtgtatccatgagctattgatttgcagggattcattcaagttgattaactgcagaataagatggaaaagtcctgcaaaatctgaaacaaagcccttccactctttctctagagggcttcttctgtgattctgttatctagaagtaaaagcttttcttgggttttccatttttcttttttcctttctaaattggtttccactttttttagcaagaatgaagcatggatctttttctcgacccttattggcccaaaaaaaaaaaacacttcataaaaaaacctaaaaaacaaaaaaaaaaaaataataaataaaataat

SEQ ID NO: 18424 - DNA, 809 bp, Gossypium hirsutum
  Clone ID: GOSHI-09MAY01-C34204_1
agattgagttagccttttatgcttgtgatttcaattttgagttttgacttatttgtggtcatacttaaaatgcactgagttttgacttgcggctttaatagctactgttacattgggtgaagaattctacttgggagggtaagccttaacttttaacccatacattgttgcctacaatcatactttgcagggtaggagtgactttgaatatagcttgcaaaatatgtgaaactggcagggtagtaggagcagcattgataatggctggattgtatctggttatcctaggaaaaagtgaagagagcaagtatctgtctgaaaatgaaccaatctattcagtgtctgaaaataatgacatggaatccaccttcattcggccgttgctgggaaataaattgcagagctgaggcaaatggatgaattttcatatcagctccatggcaaagtcaagtcatccaatctacactaatgccatttgaagcagcttgctgctattgaaattgaaggacaacaaacgtgaatgatggagtttccaacaattgaaatgggacaaagaaaagttgaattgttttgatcaacatgcatcatggatggcatatgaaatattttttattattaattttgaatggaacacagagggtgccttctctgagctctaacaaccatgcttatgtatttatttatgtttatttgaccctgttggtttggattatcattttgtgaagaaattcaatggtaatgttgtaacttattgatgttgtaaaattttataacatatggattatgacatataaattaataaaatcatg

SEQ ID NO: 18425 - DNA, 442 bp, Gossypium hirsutum
  unsure (1)..(442): unsure at all n locations
  Clone ID: LIB3145-037-Q1-K1-E5
cccacgccgtccggtgtgagtttaacggttttcctttgatttggaaagtgcnttgatgtggtgcgagggacgtcgtanacttcagcgaatgggtgtgtgtgctatanncaaatatatgtgtggtaataagaggaaggcgcctttgtgctgtcttcaatgtantttgcgctctgcaaaacacttacttgcggcgtttaataagctggtgttacattcagggtgaagaattctancttgggagggtgaagccttaacttttaacccatacattggtgcctacaatcatactttgcagggttggagtgacattgaatatagcttgcaaaatatgtgaaacttgcagggtagtaggagcagaattgataatagctggattgtatctggttatcctacgaaaaagtgaagagagcaagtatctgtctgaaaatgaaccaatttattc

SEQ ID NO: 18426 - DNA, 371 bp, Gossypium hirsutum
  unsure (1)..(371): unsure at all n locations
  Clone ID: LIB3135-018-Q1-K1-A1
aatttattcagtgtctgaaaataatgacatggtatccaccttcattcggccattgctgggaaataaattgcagagctgaggcaaatggatgaattttcatatcagctccatggcaaagtcagtcaatccacactaatgccatttgaagcagcttgttgctattgaaattgaaagacaacaaacgtaaatgatggagtttccaacaattgaaatgggaaaaagaaaagntgaattgcatttatatatgtttatttgaccctgttggtttggatcatcattttgtgaaaaaattcaatgatagttgcaactcttttatgttgtaaaatattataacatatggattatgacataaaaaactaatgaaatcatgt

SEQ ID NO: 18427 - DNA, 428 bp, Gossypium hirsutum
  Clone ID: GOSHI-09MAY01-C35984_2
cttcaaagaatttttgagggaggttgcaataatgaaacgtctacgtcatccaaacattgttctttttatgggagcggtcacacagcccccaaacttgtctatagtgacagaatacttatcaagaggtagcttgtttaggcttttgcataagcctggtgtgagggaggtgttggatgagaggcggcggttaagtatggcttatgatgtggcaaagggaatgaattatcttcatagacacaatccccctattgttcatagagatttgaagtctcccaatctgttagttgataaaaaatatacaggcaaggtttgtgattttgggctttctcggttgaaggcaaacacatttctgtcatccaagtcagcagctggaactcctgagtggatggctccagaaggtcttcgcgatgagccatcatacgagaagt

SEQ ID NO: 18428 - DNA, 610 bp, Gossypium hirsutum
  Clone ID: LIB3825-015-Q1-K6-H7
catggaacaggacttgcatggtgagcgctataaagaattttgagtgaggttgcaataatgaaacgactacggcatccaaatattgttctttttatgggagctgttactcatccccccaacttgtccatagttacagaatacttatctagaggtagcttgtataggcttttgcgtaagcctggtgtaagagaggtgttggatgagaggcgtcgcttgagtatggcttatgatgtggcaaagggaatgaattatcttcatagacgcaatccccctattgttcacagagatttaaaatctccaaatcttttggttgacaaaaaatacacagtgaaggtttgcgattttggtctttctcgtttgaaggcaaacacatttctttcatccaaatcagcagctggaactgtatgctaatctagtttttaataatatttttgctatttctatttgatttaccataggtcactgtttatgctgtaaagtattaacaaatacatctatttttatattagcccgagtggatggctccagaagttcttcgtgatgaaccatcaaatgagaagtccgatgtatacagttttggtgtaatattgtggggagcttgcaacattgc

SEQ ID NO: 18429 - DNA, 475 bp, Gossypium hirsutum
  Clone ID: GOSHI-09MAY01-C35944_1
cccatttcacttcctttctctttttagatcaacacccaagaaaaaaaaacacagttcgaatttacaaaaatcatggtgaagtctcaaaggccgccatctggccgtacaaatctggcatcatgtattgtagcaaccattttcttgatctttcttgtaatcattgttctcattgtttatttcaccgtttttaaacccaaagaccctaagatttacgttaattccatccagctcccttctttttccgtcggcaacaactccgtcagcttcactttctctcaatacgtcaccgttaacaaccctaacagagccgctttttcccactacgacagcactattcagctcctttactccggatctcaagtcgggttcatgttcatacccgccgggaagatcgagtcgggtcagactcaatacatggccgccacttttgcagttcagtcatttcccttggcgcaaccgaatcaaagcgcggcgg

SEQ ID NO: 18430 - DNA, 1569 bp, Gossypium hirsutum
  Clone ID: GOSHI-09MAY01-C35974_1
tgaggttttgggtgcaaatattgtgaagagtggctccaaaacatttgctgtttattccatatctgttacagatgtaaacaacaataatagctggtcaataaagagaagattccgacattttgaggagttgcatcaacgtcttaaacaatttccagagtataaacttcacttgcctccaaagcattttctctcaacaggtttggacgttcatgtaatacgagaacggtgtaaattgcttgacggatatttaaagaatctcctgcagcttcctactatttcaggatcaattgaagtttgggacttcctaagtgttgactcccagacatatgtattctcaaattctttttctatcattgagacattgtcagttgaccttgacagtaatccatctgaaaagagcaacaaggcctcaagtgttttggtgcctctggtgggtcctttatcttctaagggagaacagttagacactgaaagcaaggaatctgcacggcagatgaagccaaatcttgcaatggatggattaagaaatgcaaaaaatatgtcttatcctccaaaagttctcactaaagaacagggtaactccattgaagattcaggcagtaattctgatactggaatgtcaaagatttcatttgtaagacacacagagaagaatgttaaaggaaaagcgaatgacggaatggaagatgcttctgagttggttcttgatgctgtttcgcacccaacctttcctacagagtgggtgcccccaaatttaagtgtccccattttagatttggtggatgtcattttccagctccaagatggcgggtggatcagaggaaggctttttgggtggccaaacaaatcctacaacttggaatgggtgatgcttttgatgattggctgatagaaaagatccaaatgctgcgcaagggctcagttgttgcttcaggaatcgagcgtcttgagaagatactttggcctgatggtatattcataaccaaacatccaaggcaacaacgtccgccatcatccagtggcccttccaaggcttcaccttgcagtccgctacctcctgaaacatgttcatctagattgggtgatgagcagcaacaactagaagcagaacgtcgtgcaaaattcgtatatgagctaatgattgacaatgcaccagctgctattgtgggtcttgttggtcgcaaggagtatgaacaatctgctaaggacctctatttcttcattcagtctagtgtttgtttgaagctgctggcatatgatcttcttgagctcttgctgttgtctgcatttccagagatggactatgtattcaagcagttccatgtagaaaaacacaagtttggtgagtttaaatcaaactaagtcgcattttcatatagacaagcctggcttcattgttaactctaatcattaaatccttccggcttggatacaagaatatgaagaagtccggagacaatacttcaattgtatcttacgccttcaaattctgtctttctttttgtcatggaaattgtaagtaaatcttgaaattatatggagggatggaaatcaatcaagcttgcattt

SEQ ID NO: 18431 - DNA, 439 bp, Gossypium hirsutum
  Clone ID: LIB3145-046-Q1-K1-C9
cagcaacaactagaagcagaacgtcgtgcaaaattcgtatatgagctaatgattgacaatgcaccagctgccattgtgggtcttgttggtcgcaaggagtacgaacaatctgctaaggacctctatttcttcattcagtctagtgtttgtttgaagctgctggcatatgatcttcttgagctcttgctgttgtctgcatttccagagatggagtatgtattcaagcagttccatgtagaaaaacacaagtttggtgagtttaaagcaaactaagtcgcattttcatatagacaagtctggcatcattaaatccttccggatcatctctcatgcccatccggagacaaatacttcaattgtatcttacgcctccaaattctgtctttctttttgtcatggaaattgtaagtaaatcttgaaattatatgaagggatggaa

SEQ ID NO: 18432 - DNA, 336 bp, Gossypium hirsutum
  unsure (1)..(336): unsure at all n locations
  Clone ID: LIB3583-042-Q6-K7-B4
ctcgttggtggtagcatctttctttaaattgacagtgaggttttgggtgcaaatattgtgaagagtggctccaaaacatttgctgtttattccatatttgttacagatgtaaacaacaataatagctggtcaataaagagaagattccgacattttgaggagctgcatcaacgccttaaacaatttgcggagtataaacttnanttgccaccaaagtattttntntnaagaggtttggangttnatgtaatatgagaanggagtaaattgtttgatagatattaaaaggttaaaaaattaaaattattatttaatattggatgaatatatgttttt

SEQ ID NO: 18433 - DNA, 731 bp, Gossypium hirsutum
  Clone ID: GOSHI-09MAY01-C35964_1
gaaaatagctgcgcatggtcgtgtcttgttttttgcaattttgaattccgcctgaaatttgtctctgcctcaatatttctctttcaaattcttattaggaatttttttccttttaaattcctataagtataattcttttgaagatctccttaaccctctgagaatctcccaaattttaactcttttgaatttttttgagatttctcaaagaacaaaaacgaactggaattgaaaagctggggtttttggctcctgtgtattctttcggttatgatttagccctgttagccttgagtatcacttctcattatgaacaaccaatatggtgaagatggagatgaagccactgttatggggtttgaagtgccgagatcacctgattcaagttataataatgtgtaccccgtatatgaagacgatgcacgtgacccgcctgttgtccctcctcacctacatcgtaccatgcttagctgccctgcaagcataaatgcttccgggagtcttccttttacccggcaatgtggttttaaaccatctttacattgaaaaccgagaggcaccaagatcggtagtggcacttggattcactcaacgattccgttcgaagtatgttaccgtcatactatacaaaccggttccaagaagagggagtactggtacttaaaacatacgggaacccggtacagtgctccctgtcggtcacttcggttggccgagtgatgaattagttt

SEQ ID NO: 18434 - DNA, 458 bp, Gossypium hirsutum
  Clone ID: uC-gsflnu33B142h01b1
tttagattctcccaaattttaactcttttgagttttttttgagagttctcaaagaacaaaaaaggctccctgtgtattctttcggttatgatttagccctaatagccttgagtatcacttctcattatgaacaaccaatatggtgaagatggagatgaagccactgttatggggtttgaagtgcccagatcacctgattcaagttataataatgtgtaccccggatatgaagacgatgcacgtgacccgcctgttgtccctccgcacctacatcgtaccatgcttagctgccctgcaagcataaatgcttctgggagtcttcctttacctgggaatgtgagtttaaaccacttttacattgaaaacccggaggcaccctaaatccgtagcggccctttgattcacttaacgattccgctcaaaggttgttcctgcatacttatcaaaccggttccaaa

SEQ ID NO: 18435 - DNA, 414 bp, Gossypium hirsutum
  Clone ID: GOSHI-09MAY01-C35594_1
gatgatttatgcaggatattttctgctttgcctatggtggtcaacaacgggtcagtggagctgatctatcaaggtgtttgccttggcaaatgggtgtgcgttcaaaaaagttaggtggtgatggtgctgtatgcatgtgtaagccctcaatgctactagcaatttctcaaagtgcagtagtcctgaaacgttggcgggatagtaggagagaatgtagaaagttgtgcttttgattttgttaacatgtggtttggtacttcctactcttatgctagtcggatcatggtggaactgtttcaagggttgtagctttgtgcaagaaatttattttttgattatgctggctcatcttttgtcatatgaataaataaaggcatctgacatttaaaaagaaaaataaataaatattattta

SEQ ID NO: 18436 - DNA, 670 bp, Gossypium hirsutum
  Clone ID: GOSHI-09MAY01-C35554_1
tgattctggtaaagatgccggacgcttcaccgccgcttgggagctttacaaagcacaaggggatgttgttgctgcatgcaatgagtttggaatcaaagttactcttttccatggtcgaggagggagtattggtcgtggtggtggcccaacttacctcgccattcagtcccaaccacctggttctgtaatgggcacacttcggtcaacagagcaaggggagatggtgcaggcaaaatttggtttgccacagattgccactagacagctagaaatatatacaacggcagtgctgcttgcaactctgcggccccctcaaccacctcgagaacagaaatggtgtaatctgatggaggagatctcaaaaatcagttgccagaactaccgaagcacagtttacgagaacccggaattcctggcttatttccaagaggctacaccccaggctgaattggggtatcttaacatagggagccggccgacaagaagaaaagcaacgacaggaataggacatcttagagcaattccatggatatttgcatggacgcagaccagatttgtactaccagcatggcttggggtaggagcaggtttaaagggggtatgtgagaagggacatacggaagacttgaaagcgatgtacaaagagtggccgtttttccagtccacggtg

SEQ ID NO: 18437 - DNA, 513 bp, Gossypium hirsutum
  Clone ID: GOSHI-09MAY01-C35434_1
ccctcttgtccgcccacgcgtccgttttattttaaggacagaaaacgttccttctccagcccgccctcgcgtccgtctcctcttagcctcccccatggccggacatgggttcatcggaaggtgactccacgttcgctccgcgaacggcgaccggtatcacacgaggcgggcttcccttgtttcttctccgaacggaggtcgaagacagagcctttgcggcccaccacaacggaagagaagaggaaaggcccccgtcggctcgtcggagcaccccaaacagtgaatcggagtttcatcttgcaggtgtcagacgcgtggaaggccggcgggtggtgccccacgcggtgatcgtggtgcgcgtgatggccaacggcagaggggagtcgcggctgaaatctcggggggtaggttttgtgctgctgaaaaatgtttagcttggtgggctaggtgggctgtagtgttctggattatgtgagtcatataattcttgggttgggctattcaatgtggaaa

SEQ ID NO: 18438 - DNA, 366 bp, Gossypium hirsutum
  Clone ID: LIB3145-014-Q1-K1-E7
aaaaaaactaaaagaactttggagttctctcctcctctcctctcaaaacttccttcatatgcggcctatagggccgttcgatagtccgacgcaaccgccggtcgacaatggcggtgaccgctgtatacggcggaagagcgcaacccagtttcatcttgcaggtgtcagacgcgtggaaggccggtggttggtgccccaagcagtggtggtggtgcgcgtgatggccaagggcagaggggagtgacagctgaaatcttgatggctaggtttttttgctgctgaaaaatgtttagtttgttgggctaagtgggctttaaggacttagatcatcagggtcattagttttgggtgtgagctattcaatgt

SEQ ID NO: 18439 - DNA, 501 bp, Gossypium hirsutum
  Clone ID: GOSHI-09MAY01-C35424_3
gcataacagagggagtaaacaacttgaacatcatggattcatcaccttcaaacaacaccaccaggaagaaccgttttcaagtctccaatactaaaaaacccctctttttctacgttaatcttgctaagagatatatgcagcaatacaatgaagtggaactctctgctcttggaatggctattgctacggtcgctaccattgccgagatattgaagaacaacggactggctgttgagaaaaaaattatgacttctaccattgatatgcgagaggaatcgggggggccgacctgttcaaaaagcaaaaattgaaatacttctggcgaaatcggagaaattcgatgagttgatggcagctgctgcggccgaggatgctttgggaaacgaggagcaaagctaagattgttactttgatccttttaaacagttgtttttttcttgggtttgactgtaatggggacccaggtatgggatgattattttaaaatttttttttaaggaa

SEQ ID NO: 18440 - DNA, 600 bp, Gossypium hirsutum
  Clone ID: GOSHI-09MAY01-C35424_1
cccacgcgttcgatcgattctatcgaaaaccatggaaaaccccgataaaagaggaggggtagtggtgagatggggttgaattcaagggtttttgagccctgaaagatcaaatctcccatctcccccctccccttgtgtttcgtggtgatcaacagtttagggtttttgttctctttctgaacaacaaaaatggtggggactactgagggagtggattcctctgcctccaacagcaagaagaaccgtatccaagtctccaatacccagaaaccccttttcttctacgttaacctcgccaagaggtatatgcagcaatacaacgaggtggaactctctgctcttggaatggctattgctactgttgttaccattgctgagatattgaagaacaacgggctggctgtcgagaaaaaaatcatgacttctaccattgacatgagagaggaatcagggggacgaccagtacaaaaagcaaaaattgaaatactgctggggaagtcagagaagtttgatgagttgatggcagctgctgcagaggaagccttagatgatggaggtaaagctattagttaaagaataagactgttcgtcagctttagc

SEQ ID NO: 18441 - DNA, 503 bp, Gossypium hirsutum
  Clone ID: uC-gsflmaxxa004g08b1
tcggattgatcaaatctcccccctccccttgtgtttcgtggtgatcaacagtttagggtttttgttctctttctgaacaacaaaaatggtggggactactgagggagtggattcatctgcctccaacaacaagaagaaccgtatccaagtctccaatacccagaaaccccttttcttctacgttaacctggccaagaggtatatgcagcaatacaacgaggtggaactctctgctcttggaatgggtattctttttttgcttttcttcacacttgcattctatttcaccttgttttctgtttagattttgagggatttgaatatgtcatttacattgatagcttccttacaaggaacaaagtgaacgttttgttttataaaacataggttgaaatacaacacattaccttgacatacatacatacatgctatgtgtacgtcatttatggcatgtaatttatgctactgttgcaatgccagattagtactcttagtttagaatg

SEQ ID NO: 18442 - DNA, 396 bp, Gossypium hirsutum
  unsure (1)..(396): unsure at all n locations
  Clone ID: LIB3145-019-Q1-K1-A9
cccacgcgtccgctaattccttgttgagttcattgccttcgctggctaatataaatggcacaggaagtgggaatatagtttcatcccagataggccctttaattcgtgtaggaaatgacaactcatctgtagttcgggatggaagggtttccaccagcagtcctcttgctactgctggagtcatgcatggatctcctttatctgatgattcatctcaacattctgattctgggattttgaatgatggtattagtaatggagtcattcgtcattcaaggtcaaaacctttggacaatgcaatgtattcacagtgtgtaccggctatgtgtactttagctaaggacccttctncacgcatagcaactctaagcaggcgggttctttccattattggga

SEQ ID NO: 18443 - DNA, 291 bp, Gossypium hirsutum
  Clone ID: LIB3145-019-Q1-K1-A10
ctctacccttggtgtaacaaatatttggcatttggattcaacttatttttggcccttcagagtatgcatcagcagaatttttatatgatttgatgatgagaaacgaattaatgtttagcttcttaaacagaagatcgggatggaaggggttacaccaacagtactattgctactgctggagtcatgcatggatctcctttatctgatgattcatctcaacattctgattctgggattttgaatgatggtattagtaatggagtcattcgtcattcaaagtcaaaaccgggg

SEQ ID NO: 18444 - DNA, 862 bp, Gossypium hirsutum
  Clone ID: GOSHI-09MAY01-C35754_1
cggacgcgtgggctccttaaaaaaaatctctccaaaaaaatggtcccaattccctttctttttctagcattgaaaattctgaaaaaattattatgaggcttcagcttagcaatctcattatatttgcagatggaaggcaatgataattccacttctaaggattactacaaaattttggaagtagattatgatgcaactgatgagaacatcaggttaagttaccggaagcttgctctgaagtggcatccagataagcacaagggtgatagtgctgttactgcaaaattccaagagataaacgaagcttacaacgtgttaatcgatcctgataagcgctttgagtatgatttaactggaatatatgaaattgataagtatactttgagggaatatcttgccagatttaagggaatgattcttacctgcaatgggcttggttttagtcatacatcaacatggacagaacaactaacagacagaaatgaatttgctgaggaaggttagctcttgtttacaatttacaaagactgccatgcttatttctgagcgactcaggccctgcgagtgacagggccactgtatgagtaacgatatggatctttttttctacttgtcgaacctgaaaatggatctcatcttctcagtattattacatctgtaatcgaaatgagtattcctcaagtaaggagatatgtaatggtgatggtgatgttgagatgtgttccaatgaggcatcatttatagcttgtatgagtttgatagcgtaaccaaatgtataattgatataatatagacatgagagctgtaattatagagaatattattcataatttatttaggtccgcatgcgaagtatactatc

SEQ ID NO: 18445 - DNA, 1102 bp, Gossypium hirsutum
  Clone ID: GOSHI-09MAY01-C35764_3
caaatacaactgccccgaaaagtacgatccccatgatatgcaagaacgataccaacgatgggtggcccgacatggccgaaagtacaagagcaagaacgaatgggcattgcggttcgggatatacaaatccaattctcagttcattgattgtgtcaattcacagaacctatcattcaagcccacccgtcccgaattcgcagacatgacaaatgatgagttcagagctatgtatttgggttaccaaagcataagatctccatgtgagagcaacagcaaaggcttcgcatatgacaaatatcacaatttgccaaaaagcatagattggagaaagaaaggtgctgtcgctccaatcaagaatcaaggccaatgtgggagttgttgggcattctcagcagtggcagccatagaagggatcaatcaaattaaaacagggaacttgacatctctttcggaacaagagctcatcgattgcgacaccgactctatcgaccaaggctgcaacggtggacacatggtccaagcgtatgaatttattataaagaacggtggaatcaccactgagaaagactatccatacacgggaagagatgacacctgcaagcggacacaagctaaaaaccatgcagtaacaattagtgggtataagagattacctaccaacaatgagacagtctctgcaaatagcagtttcccagcaacctgtatcggtcgccatcgatgcagcagggctcgaatttcaattctatttcgggggtgtgttcactggtagattgtgtgaaatgaactcaaccatggagttgcaatagttggctatggagaagttcttaataaaaagttctggatagtgaaaaattcatggggtactgaatggggtgaagctggctatgtaaggatggaacgtggagtctctgataaaaggggtctttgtggtattgcaatggatactagttaccctgttaacaagtgaacagctttttcagtgaaattggcctaggaattctgcttgcttattgaaatatttcacttccttttatatgttctataattataatttaagaatacatgttgaagaaaaatatgtgtggacctgcaaaacatgcaa

SEQ ID NO: 18446 - DNA, 624 bp, Gossypium hirsutum
  Clone ID: GOSHI-09MAY01-C35764_2
tcgcggacgcgtgggcggtcgcgtgggtcctcccaccaatgtgccagctctgctaattgctgtttctcagcaccctgtttcggtcgccatcgatgcagcagggctcgaatttcaattctatttcggaggtgtgttcactggagattgtggaaatgaactcaaccatggagttgcaatagttggctatggagaagttcttaataaaaagtactggatagtgaagaattcatggggtactgaatggggtgaagctggctatgtaaggttggaacgtggagtctctgataaaaggggtctctgtggtattgcaatggatactagttaccctgttaacaagtgaacagctttttcagtgaaattggcctaggaattctgtttgcttattgaaatatttcacttccttttatatgttttataattataatttaagaatacatgttgaagaaaaatatgtgtggacttgcaaaacttgcgatgtgaccatgcatgaatgtaatatagagaggtagttagataatctttttcttcatttaactgatttaatgttttctttaattgattatacgcctattaataccataatatatattccattcattggataaataattataattatttaag

SEQ ID NO: 18447 - DNA, 823 bp, Gossypium hirsutum
  Clone ID: GOSHI-09MAY01-C35764_1
gaaaacaattataaattttgtttatttataagcacaaaagaaattcctcttctctatcttgaatacccagctttgggatcaaagttggcaaactgcagtggtgatggagaatcctagtttcactcttttacttgtctgtgccttgtgcatgtcctcagtggtacaatgcaaatacaactgccccgaaaagtacgatccccatgatatgcaagaacgataccaacgatgggtggcccgacatggccgaaagtacaagagcaagaacgaatgggcattgcggttcgggatatacaaatccaattctcagttcattgattgtgtcaattcacagaacctatcattcaagttgaccgataacgaattcgcagacatgacaaatgatgagttcagagctatgtatttgggttaccaaagcataagatctccatgtgagagcaacagcaaaggcttcgcatatgacaaatatcacaatttgccaaaaagcatagattggagaaggaaaggtgctgtcgctccaatcaagaagaaagggaaaagcgtgaaagggaaagggaaagggaaagagaaagggagaagagggaaagagaaagagaaagggaaagggaaaaagagagggagagggaaaagaaggcgagggaaaaggagaagaggagggaatataatagtgatgatagcaaggaggagaaggaacgacataggaagcggcgaaggagggaacgcgatgacgaagatgactgtaacaatgattataaggagagggagagtaaatcgaataggggagagagtcctgttaggaaaaagagtggtgaagatgagttggaga

SEQ ID NO: 18448 - DNA, 398 bp, Gossypium hirsutum
  Clone ID: LIB3145-058-Q1-K1-F7
gatgagatttggggcattcaatttggaagttattcaagcagctataagaattgccaaacaacagggtgtctctgtttcgttggatttggcaagttttgagatggtgcggaattttagagtacctcttcgacagttactggagtcaggggatattgatctctgctttgccaatgaggatgaggcaacagaattgctaaggggtgaagggaatgcacatcccgaagctgcagttgaatatctgtccaaatattgcaggtgggctgtggttacattagggtccaatggatactagttaccctgttaagaagtgaacagctttttcagtgaaattggcctaggaattctgtttgcttattgaaatatttaacttccttttatatgttttataattataattt

SEQ ID NO: 18449 - DNA, 508 bp, Gossypium hirsutum
  Clone ID: GOSHI-09MAY01-C35714_2
ggcatatagcgaatctagagatacaagcccgctcattgtatagtaatgattttaagctattttggcagtcataaagcaccgttgctaaaagacatatatagacttacgcattaacaaggttctttcatttgctttttactgtttttgtatgcaacttggttaacaagtccagttcttgacaaagtagaaatagaaacagagggttaataacaagtgcgactagaatggcatttatttgttgtaagttctcaaaatttcttttacatattaatttttgggagttgcaatgtaaataaaaagaattcccggttattatactaatggttttagagaatccatttgtatatttcatttggtgctgtaagttttgttctttgcctttctatggatgcaagcattgttgtaatgttttaaaattttcattcttctgctctccagtcgggtgagccctcgatcatcattttgggcttaaaaaaaaaaaataaaaaataaaaaaaattaaaaatag

SEQ ID NO: 18450 - DNA, 467 bp, Gossypium hirsutum
  Clone ID: GOSHI-09MAY01-C35714_1
ccggattccggccggacccagcgtcgggaccgtgggcggaccgtggcggcgcgtggcagccatggaatattaacatggatgaaagacgaatggtggattttcccggttggactggtaatgtgtaagcttttccaatcacaacttataaactggcatatagcgaatctagagatacaagaccgctcattgtatagtaatgattttgagctattttggcagtcataaagcaccattgttaaaagacatatatagacttacgcattaacaaggttctttcttttactttttactgtttttgtatgtaacttggttaacaacattaacaaggttctttcttttactttttactgtttttgtatgtaacttggttaacaaatccagttcttgacaagtagaaatagaaacagagggttaaaaaaggtgcgacttgattaaaatatatatttaaaaatttaaataatttataa

SEQ ID NO: 18451 - DNA, 494 bp, Gossypium hirsutum
  Clone ID: GOSHI-09MAY01-C35734_1
cccacgcgtccgcccacgcgtccgaagagaagccccttcactcctgctaagagtgatggcactagaagctgcctaaggggttactcagaccatccaaatttcatgtcttacactgaatcgtcaaaacctaaggtaaggtcttgcagtgctccataacagaggcctcattatgaaagttctagttccacaaagaggtactccattcatggttttggtgaattgaaatcaactacccaaaggtctgccatgcatgccaacttcgccagcaaagcttaccccggttcgggtaggttggacaggctaggaatgccccttgggtatagatactaaataatggttttaccatttggctaaggaatgttatgtagtttatgtttagatgttaacgatgatgactctcgcctaccctaatgtatccatcctttaatgttttagtgcatgtgagttccctagataaaaaccaataaaaaaattaagggcgtccgctctccaac

SEQ ID NO: 18452 - DNA, 521 bp, Gossypium hirsutum
  Clone ID: GOSHI-09MAY01-C35664_1
gaaatttggattcgtcttggttacgatggcagtggtcctagcaaccaccctgcctccgatggcaaccgccgctcgcaaagaggcagtggctctcctcgtcgactcaagctcaaccaccgctttggccaacattttcgacgttaaaggaaaacctgatgcgaattgcatccctaagtatgagttttgcttgtttgcgaaaaaggaatgttgtagtaattgcacatgcttcggactatgcatccccgtataatgtaattgtttatattgtataagaaaaaatgatgaagggggtgtctcattaatcaaatggtttttacaccccattaatcatatctattgtctctcatgtctggtttaataatctaattacttatttcaaaagcggtaaatgttaattgccttttgttggtcgtaaaaagacttggtatttgcccttcttactgtggtcatgtattgtcgatgttgcaatgataaatattatcaataataacatattatttgctatgtttttaagagacgtg

SEQ ID NO: 18453 - DNA, 834 bp, Gossypium hirsutum
  Clone ID: GOSHI-09MAY01-C35604_1
ccccgcgtccgcccacgcgtccgcaccctccccccttataacatcaagtcatcaatgtacctcttaatttctcaattttttttttttaatttccatctaccttaggctcaatactcttcaactccgcaaattcatgagaactgggaatataacattgaaccaaagctgaccagcgaaataatggagagcacagattcatcgtcggcgtcggcgtcggcgcaacccgcaactcccaccggggtttccgattccaccccacccgacgaagagctggtggttcactacctcaaaaagaaggccgcctctgctcctctgcctggtccaatcatagctgaagttgatccttacaagtttgatccaatgggacctgccaagtaaggcaactttcggggagcaagagtggtatttttttagtcctagagacaggaaatatccgaatggagcgaggcctaatagagctgcaacttctggttattggaaagccactgggaccgaggagccgattgtaacttcaaatggaaatcaaaaggttggggttaaaaaggctctagtgttctatagaggtaagcctcccaaagggattaaaacgaattggatcatgcatgaatatcgcctcatcgacaacaattccacttccaaacctcaaattgttgatcttgccaacaggaaagcttctttacggcttgatgattgtgtcttatgccggatttacaagaagaacaatacccagagacctatggagacagacaaagagtacaccatggagggcatgctggcaacacaactgccaacttctagccatcaaaatctaaacgcttttacattaaaagctac

SEQ ID NO: 18454 - DNA, 517 bp, Gossypium hirsutum
  Clone ID: GOSHI-09MAY01-C35164_1
ggctacattgcagtgcacttgtcactttcccctgtagcctgcgagcaacctgctggggctctcttcctcttcgttatacttcagcggattcacatttacttgcatatcttaacaaatccctttgcagcatttttacacagattccatctgggtctttctcattcaatggagaatccacactcacccatttctatcccagaggcttctcctaagccttacaagaaaagctttgttactactctaatggaagccgctagtcttcgctctccttttaaggaagatacctattttacctcccatttgaaagcttcagagaagaaggcgttgcaagagctcaaggacaagctcatggcttcttatggcccggacggtgaatgcaccatgtgggggattcctttacttgctgaagacgaaaaagctgatgtcgttttgttgaagttcttgcgagctagggacttcagggtgttggattccttccgcatgttgcaaaaatgtcttgcttgggagaaagagttta

SEQ ID NO: 18455 - DNA, 602 bp, Gossypium hirsutum
  Clone ID: GOSHI-09MAY01-C35014_1
ggtgctacagcttcctgcatcacaactccattggacactattaagactcgcttacaggtgatggggcatgagaagcgaccttctacaaggcaagtcgtaaaaaacttaattgcagatgatggttggaaaggtttctacagagggttgggtccaagattcttcagtatgtcagcgtggggaacctcaatgatattagcttatgaatacttgaagcgggtatgcgtgaaagatgactaaatgtgaccgacaaagtcaaacaattttggttcttgtcacatgaagagcagaggatataggaccttgagctgactgagagtcattatatttcagaaggcagctgttgtcagattattattttcttgcattctcccaagtagcctgcgattgtgcagcaaatttggttacctatcttcttacaaaacaccaatttaactacttcattaaacagattagctactgatcttaagagacgctttgtatctgtggctaagattctttgatgcttttgaatattttttgtttacatgagaaaagaactgaaaatagccatttgtatgtctcacaaaaggcaataaaatcttgtatacaacaaattttcattt

SEQ ID NO: 18456 - DNA, 1048 bp, Gossypium hirsutum
  Clone ID: GOSHI-09MAY01-C35004_1
agacaactgagatggcaaacaaggatctcgacagatactacaacgcacttgacaaagcacttatgcgcttccattctatgaaaatggaggaaataaacaaaattataagagaattgtggcagcaaacatacagaggacaagatatagattatattagcattcattcggattctgaaggtgctggaactcgttcttacagctacccgcccccggtgctgaccggtgatgctgagcttgaaatgagagggcgatgtagtgcaggtcaaaaagttcttgcttctctaatcatacggttggctttagccgagacattttgcctcaactggggaatcttagcattagatgaaccaaccacaaatttggacggcccaaatgcagagagtctagctgcagctctccatagaatcatggaggacagaaaaggcccggagaattttcagctgatagtaatcactcatgacgaacgctttgctcaacgcacgccgtcatcggcaacacgcagagaaatattatcgtgttgcaaaagacgaccatcagcatagtataattgaagcccaggagatatttgattgaattctttcaacgggttttcctcgatacttcatccccagagcgccgtttcatcgagattgaatctgtacatgcatcccgatgctgctcctgaaatcaaagtgaggggtttgtttgttatatgtagagtttataaatgtagtaactaaatacattatccattttccttgtcatacaggttgtgttgtgtatttcaagttcttgccatggaaatgcaaaaaaaaaaaaaaaaaaaccactgtaggattatgtttaggcacagtgcatgctttttgaacttagtagcagtggagcataatgtagaaatcagtgaaaaatatagaaaactttcacaaaattgtgaatgtgaaatgttcttcagattggtcgggccgtagccgatttcttctccaaggttttactgaagcccgaatcaaaccgaacttattattccaaaaatattgaaaatactttttatagtaaaattaaaataaaacaa

SEQ ID NO: 18457 - DNA, 1120 bp, Gossypium hirsutum
  Clone ID: GOSHI-09MAY01-C35384_1
cggtatccttggcaaatatcacggagatccacgaaggattggacttttcttctaatgatcgaaggtattcttttggaatattctctgtgaaattttcaactgatggacgagaacttgtggctggaagcagtgatgactcgatatatgtttatgatctggaagcaaacaagctttcccttcgaattatggcacacacggctgatgttaacacggcaacctttgccgatgaaagcggcaatttgatatattctgggagtgatgattatctctgcatggtgtgggataggcgttgctttggagcaaaagataagccggcaggagttttggtgggacacctggaaggtattacattcctcgacagtcgtggggatggtcgttacttcatatcaaacggtaaagatcagactatcaagctttgggatatccggaaaatgtcctccgatacctcttgcaatttagggtatcggaatttcgaatgggattacagatggatggactaccctccacaggctagagatttgaaacacccaagtgacggatcagtggctacttataaaggtcactcagtgttgcgcactcttattcgctgttatttttcacccgaatactgcacgggccaaaagtacatttacaccggatctcacgattctcgggtttatatttatgatgtggtcaccggagcccaagttgcggtactgaagcaccatacatcaccagtaagagactgtagttggcacccgcattaccctgtgttggtcagctcctcttgggacggggacgtggttaagtgggaattccctggtaaaggagaagcgccggtccttgcgaacgagaggagagtcaggaggcaatatcacgattgaaggcggcgatccgtaagctataagcatactacgtatacggtatttgataactgtatctacatgtttttttaagtagcagctccggtatatcttacattattttatccaataaggtgtaatcatttaacgaaatgattacacatccatgtataaaaaattttagctgcatagtgcatataaataaaccatacgactcccttgttttgctaaaaaaaaaaaaaaaaaaaaaaaaaaaaaaaaattaatttattaataaa

SEQ ID NO: 18458 - DNA, 1023 bp, Gossypium hirsutum
  Clone ID: GOSHI-09MAY01-C35344_1
gggatgaatattctaggtgggagaaagatgatctgagaagggatgattattctaggtcagttaggtctggaggagagattgactgtgacaatggtagacaaaatggcagacttcaaagtaagatcaccgaacctgatagtggatcgatgagagaggatcaggattatgatgactggagaggtggacgggagcgtggtagggatgaagcggagcctcgagggagagaacaagaaagagatgagattgaccataaatatagaagtcgtggaagggatgaggaggagcaccatggaagccgtacgcacagaaaaggggaggaagatgatcgagggaacaaaggtcatgtgcgggatagacaattggatcattctgagaaaatggcatataatgatactcggtctagtgacagaagatcgcgtggagatggccgacgttgatggttgtggcagcatactggctgcaagtacgaaatggaaccacttcaaattgtctccaggcttttcgaaggcgggtgtcctgttttctgaatgttgtggaaattgaatgttctttttgtgcgtgtgttttgtttccccatcttcctttcatttccgttggtacttggtaagggagtttttcatattctgactaatgaataagccatgtgtatgtttggaggaagtagtagtatttattatggctttttggttgcatgtccaaacttgttcttctttaatgtatatttggtatttgttagatgctatcccattaagcaagtagtgagacgtagtttcttcttcccctcagtatggtccaagaggattagcttgaagctttaaattggaaggttcttagagggtcattcttgtacccctctcgatatcgtgttcgggtatgtgttgaacatagttacctagaagaatagggcggtgtttgaagtgcaaaataggcttgaagaaagaaaatttgtagctaacagttaatgataggccggtgttcttgttatccttctgattgagtggttgaaatgatagtggcttgcat

SEQ ID NO: 18459 - DNA, 392 bp, Gossypium hirsutum
  Clone ID: GOSHI-09MAY01-C35314_1
gttttattagacatgaggcgtctctaccaagagaactgaggcggcatctaaattctctggaagagaggcttttggagagcatggtgtgggataaaggttcctcaatgtacaattctttgatagttgcaaaacccgccctatctgctgaaataaatcgtcttggcttattggctgaaccaatgccacctttggatgcaattgcgacacatgtgaacttttctggaagtacacctccagtgccttctttgcagaaacacgaaacatcaacgggtaatgctggtagctcaatcttaggacaaaatggggatgtcaggtctcccatgagaccttgcactgagttgacgagtgtgttggttgaacggaatgcttttacatcgccagtgaaggatcgc

SEQ ID NO: 18460 - DNA, 450 bp, Gossypium hirsutum
  Clone ID: GOSHI-09MAY01-C35304_1
gtcgttaacattttataccagcagagggaagtacggtccattcggtgaggaggtaggcacatatttcacttcaactacaacacaggggaaggtggtggggttccatgggagatgcagctcttacttggatgctattggagttcatatgcagcactggctgggaaatcagaaagcctctaagatgtctctcttcaaaactttcagtcgaatatctattgctctgctcttttggttcagtataattaagatgaaactggtaccaaataatgaattattactatcttgattcacacacacacaaaaaggaagcccaatccaattccaggctcactctggtcctgttgacttgaaggattgttattggaatctctatctctgagctgataaaataaatgaaagtgtatgctctatgcttgttaaaaaaaaaatttgcaatctgaattgctactt

SEQ ID NO: 18461 - DNA, 563 bp, Gossypium hirsutum
  Clone ID: GOSHI-09MAY01-C35264_1
cccacgcgtccgcccacgcgtccgacaaaccccaaactctttcttcttccccacttcctcttttttccagtcgcaaataaggctaacaccaagctttcgatcgcctcaatgactgattgcggcgaccgaagcaaggcttccccgtggtggagtgcgacgtctggtgagtttctctcggatcgtcttttacacataaaagaaaaaaggaaagaaaaatagtaaaaccgtaaaaggaaaaaaaaaacttcaagaatcacctttaacaagtgttgttattatcgatctctgcttgcttttgattttgtatctatattctctctaaccaaaagtaaaacaaaaaccccccgtacaaacaaaaaatcaaagcttttatagccaaatacaaacggttttctggccattttcttgcttcaatatcgcaggctgtggagttgtggaggagtgcatgatcgtggggcgtggacgcgcgagccagggggtcgtgctcggtgtgccgacgcacgtggtggaggggagcagccgctcgtcccttttttttgtgaaaagttagtctaatattgggc

SEQ ID NO: 18462 - DNA, 442 bp, Gossypium hirsutum
  Clone ID: GOSHI-09MAY01-C35204_1
accgcggacgcgtgggcggacgcgtgggtgacaaaattacaagaaacaacggtatcacaacaaaggctcatcagctgatgactccgatgagctttcttatttcctatttgcagtagattgtagaggccacttaaaattacctgccacatactttgggaactgtactatagcacgcaccgtagcagttaagagaagtgcgctgatgggagaaaatggaattgtggtggctggcaaggccattggaagagaagttatggaaacgtacaaaggaccactgaaaggggcagaaagggaaaagctcaaaagtcgacaccctcctatcatggtttcaccatcaccaaaattcgaattatataaggtagattttgggtggggaaggcctagaaagacggaggtcgccaacattgggtcgtgggatctctttctctgttttctattgcag

SEQ ID NO: 18463 - DNA, 660 bp, Gossypium hirsutum
  Clone ID: GOSHI-09MAY01-C36984_2
tcgcgatctagactaggaaacattgttgtgaaaggtcgattttaagaccagaagctcgcttgtcaggccccaaaccaccaggcctgttgctgatttgaagtttcgaatgttgaacgccgcatcgaactagattgttattctcgttgaattctggaaaactagattagccataaagcaatacagaaaaggcgaaattgtttcgcagttcctctcttgaaaacccacggcattgacagaaaatataaagactattttcaacccaagaacgacaacggggacatctgtcacttgcagaaactcttctgtatctgagattagctagatgagggatgaaatcccaagagattcgccaaataattatagtgatttttgaaggaagctgtaaaccacataattttttatagaaatctgtagtttctgtttgtattaagaaattactagatctggattagccccttgtaatagtttataggcgctgcgaactgaaaattccctggacagttctcctttccagacttgaatatcttcatgacccgtctctgcaagtgggatctgtaaaattttctttgcaatttctgctgaaaaggtattgtaaatcaaatccgtattccactttttgttcgaaatgttaatgagatccgaaactgattgtaactcctc

SEQ ID NO: 18464 - DNA, 956 bp, Gossypium hirsutum
  Clone ID: GOSHI-09MAY01-C36984_1
cttcttgacctcttcctccggtcgaaggatgtcgattcaactcctctcctccagaaacattgttgtgaagggtcgactttaagaccaggagctcgcccgtcaagccccaaaccaccaggcttgttgctgatttgaagtttcgaatgtcgaacgccacattgaactggatcgttattctcgatatgtccttctgacctctgtgattcttgtttgtgttgaaaggattcggagtttctctcaccccttcattttctgccatatacctctgtattcgatgagcaagttctctacctgtcttttccttcctctcgtgaatgagttgatttctagaaaaccagattagccataaagcaatacaaaaaaggcaacattgttccccagttcctctcttgaaaacctagggcattgacgaaaaaaataaggactgtttcaacctaagaacggcaacagggacatctgtcacttgtagaaactcttcggtatctgagattagctagatgaaggatgaaatcccaagagattcgccaaataattatagtgatttttgaaggaagctgtaaaccccataattttttgtagaaatctgtagtttcggtttgtattaagaaattactaggatccggattagcccattgtaatagtttataggcgctgcgaactgaaaattccccggacggttctcctttccagacttgaatatcttcatggtccgtctctgtaagtgggatctgtgaaattttcttcgtaatttctgctgaaaaggtattgtaaatcaaatccgtcttccactttttgttcggaatgttaatgagatccgaaactaactatagctcctcaaaaaaaaaaaaaaaaaaaaaaaaaaaaaaaaaaataaaaaaaaaaaaaaaaaaacaaaaatataaaaaaaaaaaaaaaacaaaaaatcttaaataataaaaaaaatactaaataaataa

SEQ ID NO: 18465 - DNA, 1466 bp, Gossypium hirsutum
  Clone ID: GOSHI-09MAY01-C36954_1
gaaattggggtatgggtcgagggattttagcacccataatgctgatacatgaatatctgaggaggaggagaaggaggaagagataagggaaactaaccatatatcctagataagctacgtacttcaatcttctcttttatgaaatgcttcaagttgcacacaaaagcacaggaaaacaaatctattattagttgaactttgagcttgtttagcttggataaaatatcataaaaaagtttgcttctcttttttgtttttcaaccaacgacccctcgcgtccgggaagtgagaggccaagaacatgatattaaaacgccagggtcttcagcctttggtcttcactcgcctggagtagagagaagaagagatggtaaccataatggtacggccgttctcacttgcactcaaaccctagatcatgttcatcgtctccagaggcagcaatcactcggtcaagggagatccccacatccggatcgagtcgctgccgccactggtgctgcagctgttgcacccatttcagttggttcaaacgcaaagccgtccagcttcgtcagataccgagagtgtctcaagaaccatgccgccagcatcggcgggaatgtgtacgatggctgcggcgagttcatgcctagtggtgaagaaggaacactcgaggccttgaaatgtgctgcctgtgactgtcatcgcaactttcatcgcaaggaggttgatggggagacccaaatcggggctaatcccagtagaacttcgatacttaacccacttcagttgcctcctccgttgccatccccaaccatgctgcaccctcatcataagtattcaattcatacaagtccgtccagtgcaatagttgcatcgatgaataacatggcgttcggaagcggcggtggcggtgggaacgagtcttcaagcgaggatcttaacgtgttccaatctaacgccgacggagtgccgccgcctccgccttatgtgttgtcaaagaagaggttccgcacaaaatttacgcaggagcagaaggataagatgttggagttagccgagaaagtgggttggaggatcaataaacaagacgaagaggaagtacagaaattttgtgctgagtatggggtgaaaaggcaggtattcaaggtttggatgcataataacaagaacgtgaagaagccgccaccggagtaagagttgttaattttcatggttgctaaacgagtagaatgacatgtgagacatgtatatacaagaggcagcctggattaatgagacaacttgttagtgtgaggagggagctggccttgagcttgaatggttttgtatgattcttcactgtaaaccacggttatatctttgcattgagcacttatctcttgtattaattgttttctctttaaattatgctagtttctttctcattatttctgaaaacaaggaaatttgaaatggggaaatgatggtgtctcgttcttcgt

SEQ ID NO: 18466 - DNA, 612 bp, Gossypium hirsutum
  Clone ID: GOSHI-09MAY01-C36804_1
tctatatgttgccaatgttggagactcaaggactataatatccaaggctggaaaagctatccctctctctgaggaccataaaccaaatagaaccgatgaacggaagagaatcgaaagtgctggtggggttgttatgtgggcaggaacttggagggtaggaggtgtgttagctatgtctcgagctttcggtgatcgcatgttgaagcaatttgttgttgcagaaccagagattcaggacagagagatcgatgaagagtttgagttgcttgtgcttgctagtgatgggttatgggatgtagtgcctaatgaggatgctgtttccctagcaggagcagaagaagaacccgagaaagctgccagaaagttgactgaagcagcgttcacacgtgggagtgcggacaatataacatgcattgtggtgagatttcaccatgagaaggctgctccagttaatcccaagcatgagtagtggtccttatatggtttgcattttcatgtgtagatttattggcaatttggtttaattttgaaatttgcatgtgccttttatggccaatgtgcattatatcaaggacaatttgtttattcattgttttgtgttttcggtttcct

SEQ ID NO: 18467 - DNA, 402 bp, Gossypium hirsutum
  Clone ID: LIB3148-034-Q1-K1-H10
cccacgcgtccgattagaactttaagctaatagaggatggcgatggataagaatgattagaggaggagttggaggattcgagtaagtaaatgtttttatatctttgttaccgtagccaatctcaaatctattgagattaaggtttgttggttgatttggtttaattgtgttgtttgttgatttggcatttgcctttatatatatatatatagagagagagagggagagggagagtaaattaagaagaatgtttaattagcttgatctcaaagttaatcttacagtaattaggattgagaatttctagtgttttttactttaatttttccaggatgattcttacctggatagctacatcagtacgatcggtgttgatttcaaaatcagaactgtggagctgga

SEQ ID NO: 18468 - DNA, 331 bp, Gossypium hirsutum
  unsure (1)..(331): unsure at all n locations
  Clone ID: LIB3145-033-Q1-K1-C11
cccactcgtccgccgaatacgattatctgttcaagctttngctaatcggcgattcctccggcgggaaatcctgtttgctcctcagattctcttatgattcttacctggatagctacatcagtacgatcggtgttgatttcaaaatcagaactgtggagctggatggcaagacaatcaaactgcaaatttgggatactgctggacaggaacgttttctgactattacaagcatttattaccgaggagctcatggaataataattgtctacgatgtttactgagattgaaagcttcaacagtttcaagcaattggttgaatgagattgacaga

SEQ ID NO: 18469 - DNA, 888 bp, Gossypium hirsutum
  Clone ID: GOSHI-09MAY01-C36544_1
gatggtcacatcatgctcacggattttgacttgtcactcagatgtgatgctaatccagtgctgctcaagtccgcttcacccgttgctgagcctgcagagaagatgtcaagtccatgctctcagtccagctgtatagacctttgtgcctcaatccatcctttcaagtaccatgcttcactcctaggcttctatcgcttgcttccagatcaaggaagataaaatctgatctagccactcagattagccccatgccacagcttgtactggagccaaccagtgcccggtcaaactcatttgtcggaactcatgaataccttgctccagaaatcatcaaaggtgagggtcatgggaatgccgttgattggtggacgtttggaatctttctgtttgagcttttgtatggtaaaacacccttcaagggttcaggaaacgatgaaacactatccaatgtggtgtcacacagccttaggtttcctagcagccctatagttagttttcatgcaagagatctgataagagggcttttagttaaggaacctgagaaccggttaggatcagtgaaaggagctacggagatcaaacaacaccctttctttgaaggcctaaattgggctttgatacgatgtgcaataccacccgagatgcctaggttctgtgactcgagcatctgtttgccaactgcagctttgcagaaaaaagacagctccagaggcgacgagttgccgggtactggagaccatgttgagtttgatatgttttagcttaggttttatccaatgtgcaaaaaggaagatattttagcttctctttttaacagtgagtttgttttacgatcctgttgtaactgatcatatatatatactcatacatatagcatgtgtatagtgt

SEQ ID NO: 18470 - DNA, 624 bp, Gossypium hirsutum
  Clone ID: GOSHI-09MAY01-C36564_1
cccacgcgtccgcccacgcgtccgctctcttgctctcggtcacttttcaacgttttcctgttattcttttgtagctttgggtatccacgggccaaaaaaacacatgctatagaaggaagagagttttcgtgagagagaaaccctaagttttctctggcgtttctggtttttgtgatttttgaaattcgctgcttcaacggagactcatttcagatttgacaaaatcatcaacaaggaaataccactaccgtggtgtatgagatgataagcttttttgtaaccgacgcccgaaagaattcaaagacacattatactgtgattttctctgcgtttctgttatgggaatgtttgattcccttgcttcatcaggtatgaatctttgcttcaacattgctttttccgttctctctttgaatttatgaattatgcttttgtacttggtagttccaaaattatggtgcttagaaatcatgaaaatttatttcattcagagtttaacagcttcacaactaggaataataattgcatatgactttaaatcattatcaacttcttaaaatacacgcactgtattactggaccctttgtgttaaaattttaagaagatagcttttatacactttt

SEQ ID NO: 18471 - DNA, 864 bp, Gossypium hirsutum
  Clone ID: GOSHI-09MAY01-C36494_1
tcggaggtcaaaatcaaccatttttgccggttttggatagctttgtaagaatcaaactgggagaggccaaaatgtaccaagcacaaggctgatgatgcaagaagagatgctgtatagcctcaaaagaattgctatcacaatgggtgaaaagactgtagatgagttcaagagttgaataaaaaaacttcgcttggtcgaggctgaagaaatgcgttaacaaaagtttgaagagtttcaagcatctataaagagctctacagggcatgctatgggatgaagacaagaatggaagctgatattaaagatcttctgttgaaaatggaagccacaaagcgaaaccttgccatgtgatgtgctaaattgaatggttctttgctttcaattagaattggtattgtaaggaatgtcaaccaaagccacagttttgtgcgagtaccatgatgcctcccaaacctctcattattggcgattggggtgctgcaaatgaagagcttctaatgtgccccagttgaagatgttctcattcaggcttctgcaaaatactctcacttaaaccagaggcagagagtgagctcccaagggttgcctgtgtatatgtttgagggcctgccatcctcatctaagcattgggtggctgtcgaaatgaaccagtcaagtcaatgatgctcttgactccatttcatagaccaaaaggtctttagtcttcgtttaccataaacaaacacacatgcagtggtgtcaaggactgacgtttcgttttggtaaattacataaaatacaccgctcctatgagtgacctgatcttgggttggtgtcttggcaattggcattaatgtttgataaacatatatgaggtagagctta

SEQ ID NO: 18472 - DNA, 617 bp, Gossypium hirsutum
  unsure (1)..(617): unsure at all n locations
  Clone ID: LIB3828-019-Q1-K6-H3
ctttcttgccgtttaaagagaatagaacgctttgngaactgtacacacatttagtggtgcatcaagatgattggattttatgctgccatcatcttgtacggtagataaatggctggttgcattagaatattctaaaaatattgtagcatattttagagaaagaatgaaagggtgggaaagtagtaaccgaaatgagagtgaatggttcaattatattagtgaggatttcggtaggatcttaagggatgtggctcatatatgggctaaaagtaacaagtgtatttacacgcaagatccgataaagtctatattcatcactaatttcggtgggagggtaaagtttttacccaatttaaatgcatctgaccaaccaatcgaaggtgatattgatcagttaaaatatttgatgaactacatcgtcaatatgccattcagatctattattcaaaattatcagaaattcaatatgccgaatgagctatcatgttttcttaccgagcttaattttcgacacttgaaatacatgagtcccgcatttctattggatgcgcctttattttggagacctgttgataagttccattttattataaatctagatcacatgctgaagtgca

SEQ ID NO: 18473 - DNA, 431 bp, Gossypium hirsutum
  Clone ID: LIB3145-026-Q1-K1-E7
gtaggatcttaagggatgtggcttgtatatgggctaaaagtaataagttcatttacacgcaagatccgataaagtctatattcatcactaatttcggtggaagggtaaagtttttacccaatttaaatgcatctgaccaaccaatcgaaggtgatatagatcagttaaaatatttgatgaactacatcgtcaatatgccattcaaatctgttattcaaaattatcagaaattcaatatgccaaatgaactatcatgttttcttacccagctcaattttcgacacttgtaagttatctttcacatttttacttttactttaaagttcgataactcatatggtctacttcattaatttcataatcttttttttacttatttgcctatgtctaaatggataggaaatacatgagtcctacatttctactggatg

SEQ ID NO: 18474 - DNA, 684 bp, Gossypium hirsutum
  Clone ID: GOSHI-09MAY01-C36734_1
cttggacagttcattacttatggagaaaatttgatgatagattcatgagaccagtttttggaggaaaagggtttgttccttttgtgcctggttcacccactggtgcctctaatgaagcttcaagaactttaagaacaatcacatctatgttactctgactctttataggtatgaagatatgaccttctagagatcctcctaatacaagaagaaaatacagaaaattgagcatactcatatgtgaagataaaccagagtcccagtaacatagctatgtaggtattaaaagttatttatttatttattttattttttggtttgttgatgatgctatagtaagtgtttttcctatccccctatcaaatattatgttttttttttttttttttttgtaaaatagtgccagtgtagttacgaaagcatcagcgtacaagttttgttcaattctaagaataaataattatcttgtgaaagtcgtgttatcctcttctgctttgcacacaagcaatagccaataaaggtatcatagacaaagacttgctattaagaaaaagtaaagcatttctgccaagtaacatacatttccttgcttccaagtaaagcattgctgaaatgagttaaaacgttcccttttattcccattggcagatcaaatttataaaacaaccctttaccccttttttg

SEQ ID NO: 18475 - DNA, 696 bp, Gossypium hirsutum
  Clone ID: GOSHI-09MAY01-C36644_1
ttttcttatctatcttttcgctttcttctttgccaacaactgcaattattccaaaggctaatatttccctttcggtaccttcatcacaactagtagaaaatttatgcaatggcaaggcagttcaaaatcgcaggttttgtctgaaagcgctttccactcccgaagttattgcggctatggatacaacccaactaggaaccctcattatgaaattaggagcagcaaatgccaaggcaacgttgaatttatataatgaaataattaagaaaccaggttctccccaggctttgaaagctcttaatatatgcgttgaggcttacaaatatgcaatcttatcatttgaaatggtatcttcagaatttgttgaagatccccaaaccgcaaactatgatgtagccggtataggtcctgaaattgctaattgcgaaaaggaactgattaacgcaaaggttcaagcacctcgactccttgctgggaatcgatttgtgaaatattatgtctaaatgggatatgaaataacttcaccttctagccttgaaattccaaatgagttttaggcaaaaaattaagggaatatgtatagatagtaatgtgtgaatttgttatctagattgataaaatataatattgagggcataggtgtgttgccattgttgttgttggagacactataaattaattaaaaataattagttg

SEQ ID NO: 18476 - DNA, 397 bp, Gossypium hirsutum
  Clone ID: LIB3148-042-Q1-K1-E10
cttcatcgcaactagtagaaaatttatgctatggcaaggcaattcaaaatcgcagggttggcctgaaagcactttccactccagaagttattgcggcaatggatacaacccaactaggaaccctcattatgaaattaggagcagcaaatgccaaagcaacgttgaatgtatataatgaaataattaagaaaccagaattggttgaagatccccaaaccgcaaactatgatgtagctgttataggtcccgaaattgctaattgtgaaaaggaactgattaacgcaaaggttcaagcacctcgactccttgctgggaatcgatttataaaatattatgtctcaatgggatatgagataacatcaactctcgagcttgaaaatccaaatgagtattaggc

SEQ ID NO: 18477 - DNA, 770 bp, Gossypium hirsutum
  Clone ID: GOSHI-09MAY01-C36664_1
aaatcactagacagggagagtgatcgacttcgttcagagatttcactattggagtcaaagctgggtcatggtgattattcagcttcaaatacaaaagttctgcgaatggtaaatactcttgctgttgataatgaggcaaaacaaactattgaggcattaaaaactgagttacaaaagacaaatgagaaggtacaagctcttgaagaattgaaaagtcaatcaggtgacactgggaagctggttgactcgtatatatctgagaagataacgaaattaaaagaacaaattgcgacacttgaaaaacgtgaagagagatacaagactgtttttgcggatagaatttcagtttttagaagagcatgttgcgagctttttggttacaagatagtaatggatgagcaccagcgtcctaatggaatccctgtgacccattttaccctccaatcaatttatgcacaaaatgatgatgatgttgactgatttgagtatgaatctggaaataccaatatattggcaaatgattatactgctcagcctgagatatcccatcaggttgatatctttgttcggaagttgaactcaattccagctttcactgctaatctaacagttgaatcttttaacaggcgaaccctttcgtaagataaatctatatccagaaaagatagaatatgccttagcatttatcattgtcaacacatgattacttatgtggattggggatttaataattctcatgcatggaatgaatgttttgacaatgaaaacaa

SEQ ID NO: 18478 - DNA, 426 bp, Gossypium hirsutum
  Clone ID: GOSHI-09MAY01-C36174_1
cagtgcgcggtttgtatggacgagttcgagcaaggggctgaagcgaagcaaatgccctgtaagcatctttatcacaaggactgcatacttccgtggctggaattgcataattcctgccctgtttgtcgtcacgagctgcctaccgatgatcctgattatgagaggagggttcgtggggcgcaggctactggtggaggtaatgacggcgatagtagtggcggtgataatgagcagaggtcgggggataatcggacggcggagaggagttttaggatatcgctgccctggccgtttcgggctcgtgggtcgggttcaggatcaggatcaggtgataatccgcagaccaggcaagaagatttggattgaagactccttgaagtgctgccaaatatcagcatttctatcatgagacatggtaatagatcg

SEQ ID NO: 18479 - DNA, 587 bp, Gossypium hirsutum
  Clone ID: GOSHI-09MAY01-C36164_1
aaaaagctcccaacttttttctttctctataattaaaaggacttttaggacatattttggaaccaagaaaaagaacagaaagacaggcatgaagttcttgtttcagtgtccttgctgttcttgtttctgcttcatgaagcctaagaaagggaaaccaaagatgaaggatgacaaggctgagacaaaaaaggaagtgaaggctgaaaaagagaaggaagcgaaggctgagtgaaaatgatgatttacttacattatattcttcactgctgctcaagtaaattgtatgtaacttttgtttgaatgaaaaatgctgccttgccttggttattgtagtattatttgcttgtactgataataaacttgacatttctattatgttttgtctttgtattttgatgtcatttatgttctgcaaatgttgcttgatggtatagatatcgacggctctggtttgttctgattttatgagatgtacttgaaagaacagccagatctgcttgtatacctacatttactgaggaatttgatgatacaacccacggagcgcttttcgacaaattaaatttatttaaaatcttttccaaact

SEQ ID NO: 18480 - DNA, 420 bp, Gossypium hirsutum
  unsure (1)..(420): unsure at all n locations
  Clone ID: LIB3145-023-Q1-K1-D8
gacaggcatgaagttcttgtttcagtgtccttgctgttcttgtttctgcttcatgaagcctaagaaagggaaaccaaagatgaaggatgataaggctgagacaaaaaaggaagtgaaggctgaaaaagagaaggaagcgaaggctgagtgaaaatgatgatttacttacaatatattcttcactgctgctcaagtaaattgatcgaattcatttactaaggaatttctatccagcggcattgaagaattcaaacattcattagctattgcaatagaaagataaataataatctgggttgtaataagatcaagagttttcaatgaagtcaacaaatcatccagctatccagagagatgatagtgcaacagagcccttacaagggccatgaagctntccaatggttggtatcgtgacaatga

SEQ ID NO: 18481 - DNA, 665 bp, Gossypium hirsutum
  Clone ID: GOSHI-09MAY01-C36114_1
ttcgtttcctctcctaatcaaataacttacgaattcacagataagagagaagaaagggaaaagaaaatgtcttcacttcgttcagatccggttcacagaattcatcctgagccgatcgatcacttcgaccgtcttcccgattctcttctccctttagtcttcaacaagatcggtgacgttaaagctctcggccgatgctgtgtcgtttcgcgtcgtttccgttccctcgttcctcaagtcgaaaacgtcgtcgttcgtgtcgattgtgttatctctgacgacgattgttccccttcttcgtcttcctacgataagtcacgcgccgccggtccgatttctaacctcttacgtatccttcttggaggcattgtcaaaccttttcaagctttggttcagtttcttggtccaaaacggcccgttatcaatgaaacccttaacacccaccctgtctcttcctctttatcagtcggtcccggtgccgatgttaatgatggggaaatggagcaaggtggggtgacccatcattcaccgacgcaagtacttagaaatttcaacgagattcgtttcctccggatcgaattacccagcggtgagttagggatcgatgatggggttctttttgaatggagagccgattttgggtcaactcttgataattgcgtcat

SEQ ID NO: 18482 - DNA, 713 bp, Gossypium hirsutum
  Clone ID: GOSHI-09MAY01-C36054_1
gaaacccagaagaaatgaagagagtccaacaggagctggcggaggtggtggggctcgacagccgtgtggaagaatccgatttcgataaactaacctacatgaagtgcaccctgaaagaaaccctaaggctccaccctccgatccccctcttgctccatgaaacggcggaggacgccgcggtggcggggtaccaaatcccggcgaagtcgcgcgtgatgatcaacgcttgggccattggcagggacagaaactcatgggaggatcctgatagtttcaagccatccagattcttgagggaaggagtcccggacttcaaaggcagcaacttcgagttcatcccgttcgggtcgggccgcaggtcgtgtccgggtatgcaactcgggttatatgctcttgatatggcggtggctcatttgctccactgttttacgtgggaattgcctgatggaatgaaaccgagtgaattggacatgagcgatattttcggactcactgcacctcgggcgaaccgactgtatgcggtgccaaagaaacgcctcgtttgcccactcttttaatggaaaactctaaaaaaatcaaaacaattccattgagtcttgaattgcaacttatgcagagtaatcccgaggaatgcccgagaagaaggtgacagaggtggcttttacaagccggacctttggttttcttttatcatcatcatataatcaatatat

SEQ ID NO: 18483 - DNA, 671 bp, Gossypium hirsutum
  Clone ID: GOSHI-09MAY01-C36024_1
ttcattcgtccgcccacgcgtccggcagaccaggaaaacctatgaacaaaaatgttctcaaatgagaaaccgcaacactaaacgagatggcctctattctggtgacaaaactcgagctgaagtaaaagacttgcatagcagaatcttggttgcaatacgaagtgcagaaacaatctccgaaagaattgaaaaactgagggatgagggggtgcagccacaacttactgagctgctacacggactaatgaggaactggcagataatgttggaatcacacgaaactcaaaaccgaatcatgtttgaagtaaagtctttcaactgtcccacttacggaaagttttgcaacgactctcaccgtcttgccactcttcagctcgtggcagaacttcataattggcgttcttgctttgttgcgtatttatgttcacaaaagtcatacattgaagctcttagtggatggcttgcgaagttcgttgcacccgaagtagaattatgctccaagaagaggtcttcggcccctacgctaagagtcaatggaccaccgttattggcaactcgtcatgaatggttggctaccttagagaagttgccaaaagaagctgtaagttgtgcattaaaaagctttggaaaggatatgcgtgcgctttgggttcaacaaggtgaagagcaaa

SEQ ID NO: 18484 - DNA, 648 bp, Gossypium hirsutum
  Clone ID: GOSHI-09MAY01-C36314_1
cttagacaagacaccatgaagctacctgctctgttcaagcctaaagaacccacctccaagcaaccatggcaatggccttcatgcaagcaccccaagaccctttctttccgagcaggtgacgacgttttcaagaccgttaactccatgttcttcgaccctaacagcaacaatgacagtggtgttgaaaccccacagtcatggttcaccaactcttccgactcacccagtttatccaccaccgccaccaccgactcagatcatcaaggctttgatggtgagtctttagagacagtcgtccgtggagctcgttccgagaggctgttcttcgagccaggcggtgacacgagttccatcctcgaagaagccaaagcagccggtggtggtggtgatgggttgttcccgttcaaagaaagcgtgattctagctatggaatctgatgatccgtacgtggactttcgtaagtcgatggaagagatggtggagacacatgggatgaaagattgggaatggttagaacaactgttgggatggtatttgaaggtgaatgggaagaacaaccatggatttataatcggagctttcattgatctgcttgtagctatcacttcttcctcttgatccactttcttattctctgctctctcttct

SEQ ID NO: 18485 - DNA, 627 bp, Gossypium hirsutum
  Clone ID: GOSHI-09MAY01-C37874_1
agagtaacgaatgatcgatcatcgccaaagtcaacgaaccgctcaaaataatggctggaaacttaggatgcgtcgtcgtatccgttgatggcaacgaaggaagcatggacgccttacgatgggcgctcgataatattaagctccgaccatcttctccggactctactcaaccgcccggtcacttcctcatcctctacgtccaacctccaccgtccatcgctgctggcctcaatcccggcgccatccccttcggcgggcccacccatctagaagttcctgcattcacggcagctatcgaggcgcatcagaagagaatcactgatgcgatcttgaaccatgctcttcagatttgcgctgaaaagaaggcaaacgtgaaaactcaagttgtgattggggatccaaaggaaaaaatttgtgaagtaattgaaaatgtgcatgctgatttgcttgtgatgggttcccgagcttttggccctattaaaagaatgtttttgggaagtgtttagcacctattgcgccaaccatgcacaatgcgctgttatgattgttaagaacaaggaagcttcctccaaatcttacgagacttgtcaccaagacaacttgttaggagctatgttacgctgcgct

SEQ ID NO: 18486 - DNA, 336 bp, Gossypium hirsutum
  Clone ID: LIB3145-047-Q1-K1-E5
gaacaaggaagcttcctccaaatcttaagagtattgctgttttcttttctctatgaggtttgtttcagacttgtcaccaagacaactttgttaggagctatgttacgctgcgctgtcaataaatctatcccctgagaaagtttcactatttaaaaaaaaaaaaaaaaaaaaaaaaaaaaaaaaaaaaaaaaaaaaaaaaaaaaaaaaaaaaaaaaaaaaaaaaaaaaaaaaaaaaaaaaaaaaaaaaaaaaaaaaaaaaaaaataaaaaaagggggggggccgttttaagggatccaagttttactcccggggcttgcaaggttatagtttttttt

SEQ ID NO: 18487 - DNA, 1101 bp, Gossypium hirsutum
  Clone ID: GOSHI-09MAY01-C37834_1
gcaaaattcaaagtctccacttcgacccaacaatgggaaacaatctcactccaatgaccaagaagtctgcaatggacatatctgaaataaagagatcaacaccaaaatcaagtcacaagtcaatcaacttcacccatgcaaaagaattcagtaaatttacttcccccgcctccggaaagattgatggttcaagaattgattcaaattctaaagcatctaaagaatgtcctacacctttaaggactccgaaccaggtgtctataagtggaaaactgaaaaaatcctcggccaccccttggtctgaaaaccgaagtgctagaacaccacttaattcctctgccagtgtcagcaaaacagctcgtggaaaatggaactttcttcctacagattgttcaaagattttgagtgcctgcagaaacaaatcacagtcacctggtatatttgcatctttcaacttgagaactgaagaaagagctgctagaagaaaacagaggcttgaagagaaattcaatgttattcaggagcaaaaagtacaacagcaaacaacactcaaggaaaaagcagggactgaattcaagaaactacgacaaagcttttgcttcaaggcaagaccattgccggatttttataaagaaagaacacctaaagatcagattcaaaaggttccattgacaaaacctgaatcacctggcataggaagaaaatctactccctgcaaaacaagcattgttgaaagcaaaagctctgttcctccccatcggaagtcttcgattaagaacagttgcttcatgcatgtctcagaaaagaaaaaccgaacttcagctcgttctcttgcttcacgaattgcaatgtctgctcatgagaacacatctccaaatatccagcataaggtttgactaaattgtagaatttggcatgtccattgtatgaatcccacaatactactcaatgcctggaattggatgaaatggagaggctgtacaacaaaagaaactactcctaaagcttagcaaattcatattagtagagtactatttagttacatattgtcaaaacttgttccttcgaacgtatcgaatgttgatatgagatatgttcttc

SEQ ID NO: 18488 - DNA, 483 bp, Gossypium hirsutum
  Clone ID: GOSHI-09MAY01-C37584_1
gtgtctattagcggtggccccgtctatgtcagtgaggcgcctgggagacacaactttgagcttctgaagaaactggtgttgcctgatgggtccattcttcgtgctcgtttgcctggacgccccacacgcgactgcttgtttacagatccagctcgtgatggcgttagcttgttgaagatatggaacatgaataagtacaccggagttctaggtgtttacaactgccaaggtgcagcatggaacagcgcggccaggaagaatactttccaccaaaccaagacagactccttatcaggccacgtaaaaggccatgatgtccatctcatttcagaggcctcattggaccctgaatgggccggtgactctgcagtttactgtcaccagactggtgaacttatcacccttccatacaatgctgccatgccagtgtccctcaaggtccctgagcatgaaatcttcacaatagcacctatcaagaatttg

SEQ ID NO: 18489 - DNA, 410 bp, Gossypium hirsutum
  unsure (1)..(410): unsure at all n locations
  Clone ID: LIB3825-024-Q6-K6-H11
ggggggaagacaacccctgcaggggccgtatctttaacatctatcatcgatccttgcgagactttcacgggaagagctaaagatggccttggaaaactgncttcattttagctttttttgcaccactagancttttgttttggttgtcggggggcatcaancnncatccgctgagaatattcatttgccgacatttccagggttcaacaaacccaatctgtcattctcttcggcttttgctcattcattcaatggcagatgccaaaaatccaggctcatctgcaaagctagtgaagctgttgatcaagttgaagcggtgacagaagctatctggggagagcttgtgctggggagtgagaccccagtcttggtggagttctgggcaccatggtgcggaccttgccgcctga

SEQ ID NO: 18490 - DNA, 305 bp, Gossypium hirsutum
  Clone ID: LIB3145-043-Q1-K1-D8
cccacgcgtccgcaaaaatttcctatagaaaaaaggctccccctgcaagggccatgtctttaacatctatcatcgatccttgcgagactttcaggggaagagctaaagatggccttggaaaactgttttcaattgagctcagtttgcaccattagagcttgtgtgatgcaaagctaccgccatcaattttcatctgttgagaagattcatttgccgacatttcgagggctcaacaaacccaatctgtcattctcttcgtcttttgctcattcattcaatggcagatgccaaaaaatcaggctcat

SEQ ID NO: 18491 - DNA, 433 bp, Gossypium hirsutum
  Clone ID: GOSHI-09MAY01-C37444_1
ttttcaactgggagggaaagaagaggaggaaagggctctccagattggtaaagggggggatgatacattcactcatggattatagtgcagctccttatcggcgttttcttgctgtttgcgcgatctgccttacaagctttggtacaaaattggcttagtgaatgattttacttatgtttatgtgctatcatatacatatatatagtaacaagttgtgctacatgttttaatataatattttttttctacttaaatgtcacttgaaaaacgtttggagagccttggcttggtgagacacaatcaaaatcatgtacacgtggtctctttgcatctaataacatttgctgaaattattggtttaaacacctcctgggattggttgttgcaaaaaaaaaaaataaattattattttttaataatttttataatttat

SEQ ID NO: 18492 - DNA, 756 bp, Gossypium hirsutum
  Clone ID: GOSHI-09MAY01-C37474_1
cggccgcgtgggctgaaagtaactgctaacaaatctccctatttcttttgcagatttacctcctttgttatgtaacctgttgttcctatcaccccaaatggcccagactgcaacacagaaaatccgacggtgggatgctgagcactgtgaaaaaacccaggcactctcaaaaaagatgttccatggattcagatccagatccgcaccgagggcacattgcagtactcgttagccttctaaatagtagattggcacgagtagcaaggaaattccacgagatcttccaaactgtaattttaatttttgagggtaaatcaagaagccaaagttttctgtagaaatccttagtcaagttgtaaagcataagctctaggatcatatgcagtattttgtaatagtttataggagctacgtactgtgaactcccccgacgcttcagcactccaaacttgaaagtcttcgtgtggtctctcagccaacgggatgctgagaatcatatctgctacatccatcgggaaggtggtatctgagtgcaactgctcaacccatgccccattcttcaacatctccacaaacttcagatctaaggaccccaccaatagcaggcagtaaatctttcttatcaaattctagggaacacgattcaatttttaaccaaaaaggggatgaattttatatcttggacgaaagagttgtgaatcaagaccctccggtggggtaattgctatcttcaatcgttgtagatggtgagtagat

SEQ ID NO: 18493 - DNA, 588 bp, Gossypium hirsutum
  unsure (1)..(588): unsure at all n locations
  Clone ID: LIB3825-027-Q6-N6-F8
tcgcgggggggatcaaagagatagcaatgactgctgcggcttgggatggaagcaagtggtggcgtagaccgagagagaagggataagatctctcttcttgctgaagaactaattcaattatcagtcaaaggctcgatggtggtaccaagttccaaacctacactgatatgtacggtttggacagggaaagtttatagcccagatggctttagggctcatatgaaaagtatatggaagactaggaagaagttttctgtagaaatccttagtcaagttgtaaagcataagctctaggatcatatgcagtattttgtaatagtttataggagctacgtactgtgaactcccccgacgcttcagcactccaaacttgaaagtcttcgtgtggtctctcagccaacgggatgctgagaatcatatctgctacatccatcgggaaggtggtatctgagtgcaactgctcaacccatgccccattcttcaacatctccacaaacttcagatctaaggaccccaccaatagcaggcagtaaatctttcttatcaaattctagggaacacgattcaattnttaaccaaaaaggggat

SEQ ID NO: 18494 - DNA, 568 bp, Gossypium hirsutum
  Clone ID: LIB3825-027-Q6-K6-F8
aatatcaacctaattaaaaatttattaatactatatatatcttttaaatcatagacatctatggattcaatattttgtaaaaaaaagttaatttaagatattaaaaatatctttgatctcccaagagtgcttggcttagaaatcctagagatagcaatgactgctgcggcttgggatggaagcaagtggtggcgtagaccgagagagaagggataagatctctcttcttgctgaagaactaattcaattatcagtcaaaggctcgatggtggtaccaagttccaaacctacactgatatgtacggtttggacagggaaagtttatagcccagatggctttagggctcatatgaaaagtatatggaagactaggaagaagtttgagatacaggtggcgggacaaaattaatttctaataatttttgagttggaagaagatctggaatcgattttagaggggaggccttggctttttcggaaaaatttaattctgtttgacagattaaataaagagatggagagagataagatccagcttactttatcccctttttgggtaaaaaatgaa

SEQ ID NO: 18495 - DNA, 510 bp, Gossypium hirsutum
  Clone ID: GOSHI-09MAY01-C37784_1
cccacgcgtccggcacgtcaagatgctgctattgaggtctctcgacagtctgatgatgcttctggcttgagcttggcagagacccacgcggccggtggactggcagatatcttaatggaagtgcttagtgcattggagcccaagactcccgagtctttgaagcaagatgtgattgttgacctcgttgagcaatgccgttcttacaaaaaacgtgttgttcttctcgtgaatcatacaacaaatgagcaacttttatgtcagggattagcgctaaatgatcgattgcagcatgttctttgccagcatgatgacattctgaaaggaaacaccggtagtgctaccacagcagtagcagaaactcgtgttgtgccgattgttaatgttaaccatgacgatgatgattcggaagatgactttgctcagctggctcacagagatcgtcaagggataatgctcaaagacaggtccaaagagcacaaaaaagtgaacctgctcgagctgttcctcttc

SEQ ID NO: 18496 - DNA, 586 bp, Gossypium hirsutum
  unsure (1)..(586): unsure at all n locations
  Clone ID: LIB3828-023-Q6-K6-H9
gcgtttcgtattaatccattttccggtttcacatgggcgcaatggtgaaatcttggttttttccttgctgcggcatggtaaattgattcttcattttgaccgtnttattggacttattgcataaattggtcttggtagatattttaaataggctgattttttttgcttaagcccatttttcgggtttaacagttttgtcctaagcttcctgaatattgaatgagactttgggcttgggcaggttgtgtggtctttgcacggttctagatgaaaagcaaccctggaagctaaatatgtgcccacttatctatcaacaccaaataagaaataaagaagatntatctaaaaaatattacatactgtccaatgtggtccttatgcatgccagggattaaataanttcaaatcaaatgattaggcttactgttttggatgttgttcagtctttgaagcaagatgtgattgttgacctcgttgagcaatgccgttcttacaaaaaacgtgttgttcttctcgtgaatcatacatcatatgagcaacttttatgtctgggattagcgctcaatgatcaattgcagcatgttct

SEQ ID NO: 18497 - DNA, 447 bp, Gossypium hirsutum
  Clone ID: LIB3583-023-P1-K1-A3
gcgcgtccgcccacgcgtccggcacgtcaagatgctgctattgaggtctctcgacagtctgatgatgcttctggcttgagcttggcagagattcaaaatgctagtgcactaacaaatgtctggctggcagtgcattaggctttgaagcacctgtactacagtcaatatgcatctgatgatgatgatgaggatgacagagcaatgccgctcttacaaaaaacgtgttggtcttctcgtgaatcatacaccaactgagcaacttttatgtcagggattagcactaaatgatcgattgcagcatgttctttgccagcatgatgacattctgaaaggaaacaccggtagtgctaccacagcgagggcaacactcgaggtggcctataggccacgtgacgagagaaagaaatatggtccgaggctacagcttcaaactgttctacagcaatc

SEQ ID NO: 18498 - DNA, 503 bp, Gossypium hirsutum
  unsure (1)..(503): unsure at all n locations
  Clone ID: uC-gsflnu33B046a07b1
attaaggtttcggagtagcagctctcttatcccattttctttgcagccaaccttttaacaaatatttacaacctaaaatcaacctgctagagcctgcttttgcagccgctgaacccaccattcaatttgatggtcgaaggtgcacgagcaaagatccgatcttgcccacaaagatcacccatggaaattaggtaaattaatccctctccttttcttcttaaaaaaaaactcaaatcaagcgttaatctctttaaaaacaaagcagaaattcaaaagaaacaaacattcgaccctcgcccgaatctctatattttcgagatatttgggtattcatcagtgtcgattcacatactaaaagaggaaatcgagccaacgaaaaggaaaataaatcngaagagaaggaacaaagaagcttgaaatcatctttactgtttttgatttctttntctctgtcctgtgtgcgtaaaaaaaatacaatggcagtgttcttggctgtataagcc

SEQ ID NO: 18499 - DNA, 602 bp, Gossypium hirsutum
  Clone ID: LIB3829-019-Q6-K6-G12
gcgttcgaatattagggtttcggcatagcaactctctcttatctcattttctttgcagccaaccttttaacaaatatctacagcctaaaatcaacctgttagagcctcattttacagtcgccggacccatcattcaatttgacggtcgacggtgcacgagcagagatccgatcttgcccacaaagatcacccatggaaattaggggcagttgtacagaaaagatggccctggtgacgtggaggaggccgttcggggaaactgctcgtgggagccgaccttctggcactgttctggcatattccagaagcttctggtgttcacagctgctgagcttctctttgggtcttgttgggcctcaggtttgggccattgaaactgggtctagggttttaatggttgggtcagattcatgtaattgggttaagtctagatttaaggagtttgggttcaatttaatttaatcccaaatatttgtaaccggacattggactcctaaatttggattctttatttgcttttttttttattttaatttacttggacttatttgtttggcttattttaatgctttaaataggcccgagcaaaatgggttaactac

SEQ ID NO: 18500 - DNA, 440 bp, Gossypium hirsutum
  Clone ID: LIB3145-045-Q1-K1-H9
caattattagggtttcggcatagcaactctctcttatctcattttctttgcagccaaccttttaacaaatatctacagcctaaaatcaacctgttagagcctcattttacagtcgccggacccatcattcaatttgacggtcgacggtgcacgagcagagatccgatcttgcccacaaagatcacccatggaaattaggtaaattaatccttctctttttcttctttttaaaaaaaactcaaatcatacgttaatctctttaaaaaacaaaatagaaattcaaaagaaacaaacattcgaccctcgcccgaatctctatattttcgagatatttgggtattcatcggtgtcgattcacatactaaaaaatcgaaccaaacaaaaagaaaataaatcgaccgaaaagaaaaaaaactgtgaaatcacctttgctattttga

SEQ ID NO: 18501 - DNA, 1038 bp, Gossypium hirsutum
  Clone ID: GOSHI-09MAY01-C37674_1
cccacgcgtccggaacttgcttctttttcaacctacttttccttctccatgtctcataaaatggtgatggtttggcttttattatggttcctagtagttttaaagttgatgtatcgggaaatagtacgtttgggatttctcttggatttggaaaaaaacaacaaaagcggtattgttgctgtagaatttgataccttcagagatgccaagcatggtgatttgaatgaaaaccatgtgggcattgatgtgggtagccttgcatcagttaaagctagaaatttatcctctctcaatttggtactaagcaatggagaaaaattacattcgtggattgattatgaagcaagttctaagagactagagattaggttgagtcaatctagtagtaccaggccagatgatcccttgctttcatactcaatcgacttgtcaaaactatggaatgatgaacaagtgtttgtgggcttaagttcttcaaatggcaactcttcgcagacatgctttattcacttatggagttttaagctaaggcaggttcctaattggatgcattcccaaccacttgatcctgaagctattacaaaaaaccccaaacctcttacaacaccgcacaagagtagcaaatgtttttggaaagtgcttgttgtgtttgtcttcggcggtgcttgtggagccttgacagcttcttgcgtgctatacctatggaacatgtttggtgataggcgacctgtggtgcctgaagagtgtggtgcagaaggtgtggatttcgagtacaacaaggtcaaagtagtagtagtagacaacgctgtcaaagatggcaagaagtaaatcttagagttgggtttttttttttttttgtgtctgattgatgttttattatgttgtaaattgatgatcttttgtaattgtagttgcaggttttgtgtgtgcttgtagctaatgaccaattgtgaaaaatgtatgctcttggttacacagtgttttaacgatggaatcattgaggttttaccttataatataaactgaatgttgcttgcc

SEQ ID NO: 18502 - DNA, 560 bp, Gossypium hirsutum
  Clone ID: GOSHI-09MAY01-C37634_1
gtttgttgagatactgaacaagtacctttatttctttgagaaggggaacccccagatcactgttgctgcaatccagagtctgattgaattaataacaaccgagatgcatagtgactctagcacactagatccagcagcggatgctttctttgccagcactctcagatatatggagtttcagaaacagaaaggtggagctataggtgaaaaatatgaacctatcaaggtgtgatggcgagagcccctgtgagtgtttttttttttccttaaaaaaaaggttgtagacttttgatttgttttgtccacaaaagaatttaaccggattaatagtatatgctcccattggcctctttggctaacgtagcaaattcttgcatcatatcatggattgatgcaaggtaagaaatgtgtaagtttattcatgcgactgctgtttaacagtttagatgttaaaaagttggttttaaacagactaccacttactgttttcagggatgaattttaactcaaatattcagttttgaatcatttcaaggttaccttcgttaatggctttaaaa

SEQ ID NO: 18503 - DNA, 642 bp, Gossypium hirsutum
  Clone ID: GOSHI-09MAY01-C37194_1
gtttcaattatgaaaattcatttattacttaccctttttctagttctatttgcttctttcctttcttcatctaattgctatactttctatgtggactgggttttgcaccctaaagagaagtacaatgagtgggctggtaaaatgaggtttcaagtgaatgacactatcatttttaaatatgaaaaaggatcagactcggttctcttggttcaaaaagatgattatgataagtgtgaaaggaaggaacccttgatggaaatgaacaatggaagctccgagtttaagtatcctcattccggtccattttatttcattagtgggaaagaggggcattgccaaaagggtcagaaaatgatcactgttgttatggctgtgagacatgggactccatccattcatccacccacagcaccctctcccaagcaccatggccctgttactccagggccggcgcactccccttatcaccatggtccagttgcaaagccacccacaggatcatctccggttcctgctctggctcctggtcctattgcaaagccacccacaggatcatctccggttcctgctctggctcttggtcctattgcaaagcctcctacagcattaactccaggtccagcacagtctccttatcaccat

SEQ ID NO: 18504 - DNA, 723 bp, Gossypium hirsutum
  Clone ID: GOSHI-09MAY01-C37184_1
cccacgcgtccgcccacgcgtccgggatcgtcaaaaaagcggtgggcaactatgcggcgtgcttgataggtagggcgttgacgtgtaattattatagaggagataattacttggagattgacgttgacgttgctagctcggcggttgccaacgcgattttacacctcgcattgggatgcgcgacgagcgtagtaatcgatatgggatttgtagtggaaggacagaccgaggatgagttgccggaaaaattaatcggtgcggttagagttagtaagatggagatgtcgtctgcgaccgtagttgatgcacttacgccatcggttcaaacagcggctgggcgtggaataggagtttgtaaggtaaatgaccataaatctgatgatggcgaaagcgatgataatgacaaatgatggggcggaggttaacgcacttacgccatcgattcagagagagacgggccgtagaactggactttcaaaggttaaaccccataaaagccagcggtggcgatgctaatgacaaatgatgcgacgggggttaatctcaaaaccattttttatcttttaattttaattcgttcttttctttttccacgttacgataattcgggtcccttttggaggagttttgtagataataagatcaatagcaaatgggttcccattttttgtaatgagaaaagaatccccttttgcatggatggacttaaatgtttaacaaaaa

SEQ ID NO: 18505 - DNA, 989 bp, Gossypium hirsutum
  Clone ID: GOSHI-09MAY01-C37104_1
cccacgcgtccgcccacgcgtccgctgttttcaaagtgtttctccacctagcctcttccacaagaaaatggcaagctcaagtgtgggaatggcctgtcttgggctagttttatgcatggtggttgggccaagcttggccacggtttacactgttggtgacacctctggctgggcaaccggtgtcgattatagtggttgggctaacgacaagaccttcaaagttggggattccctcgttttcaattacccaacaagccatacagtggaggaggtaagttctagcgattacagtacatgtacggtggggaaagcaatctcgacggatagcaccggagccaccaccatcaatctgaagaccgccggtactcactacttcatttgtggtgtggctggtcattgtgagagcggcatgaagcttgcgatcaaagtggagtcttcttcttcttcatcttccactgataaaccatcaaccacttcaccatctactactacgacgactaagatcccggattcatcttcttcatggaatctttcaccggttctggcttttgctacaacttgggtcgcattgtgcgtgatgatggttgtttcataagcttttggtggctaaaatggtggttggcttggccaggatagaggcagtgctttgtttgtattgaggattattgcttttatcttatgaatgagaaccttacttgttctgttttctaaaataaactacaaaaaaaaaaaaaaaaaaaaaaaaaaaaaaaaaacaaagatataaaatgatggctttccttaaaaaaaaaacaaaaaaaaatattaaataaaaaaaaaaaaaaaaaaaaaaaaaaaaggggggggcccctttaaaagaacaaaattttttttccccccttttcaaagcttaaaatttttttttgggcacacataaattctttttcgggccctggatttaataagggggaacgggaaaaacccgggggttacccattttaatcccgttg

SEQ ID NO: 18506 - DNA, 265 bp, Gossypium hirsutum
  Clone ID: LIB3083-049-Q1-L1-F11
cataagcttttggtggctaaaatggtggttggctgggcgaggatagaggcagtgctttgtttgtattgaggattattgcttttattttatgaatgagaaccttacttgttctgttttctatggtattaagtacattatatatatggggaggtgttatgtgaatcatatcgaaatcgatgggctatcaatttagaaagtaactttgaattgatggggttgagaattgatacaaattgattcaattgaaatagtttaattaattttt

SEQ ID NO: 18507 - DNA, 258 bp, Gossypium hirsutum
  Clone ID: uC-gsronu33B062a08b1
cttccgcgtccgctcatttcaaagtgttggtgggcctagtttattccacaggagactgtcttgctcaagtgtgggaatggtctgtcttgggctagttctatgcatggtggtcgcgccaagcttggccacggtttacaatgttggtgacgcctctggctgggcaaccggtgccgattctagtagttgggctagcgacaagacctttaaagttggagatcccctcgttcttaattacccatcaagccatacggtggagga

SEQ ID NO: 18508 - DNA, 656 bp, Gossypium hirsutum
  Clone ID: GOSHI-09MAY01-C37124_1
gctgaaatcaaggggcatcgtcgaacctatattggtgctatgcctggaaagatggggcagtgcctgaaaaatgtggggacagcaaaccctcttgttctaattgatgagatcgacaagctggggaggggacatgctggcgatcccgcaagtgcgttgcttgaactccttgatcctgagcaaaatgctaactttttggaccactatcttgatgtgccaattgacctatcaaaggttttgtttgtttgtactgctaatgttgtggacaacataccaaaccctctcttggacagaatggaggtcattgctattgctggttacatcgctgatgagaaaatgcacattgctagagattaccttgagaaaactgcacaagaaacatgcggtgtcaaacctgaacaggttgaggtaactgatgcagctcttcttggcttaatagaaaattactgccgagaagcaggagttaggaaccttcaaaagcacatagagaagatctatcgtaagattgctcttcgacttgtgagagaaggatcatccaatgaatttgtcattagtggagaggtagtccaacctgctgaagccaaagcagaagttgatgaaactgatcagcatgcagctccaaatgagactgctactgaatcctcagttcagacaagtga

SEQ ID NO: 18509 - DNA, 668 bp, Gossypium hirsutum
  Clone ID: GOSHI-09MAY01-C37094_1
ggacactgagtatgaaggaaatgttgaggcaactggggatgacttcactgttgaaccagcagagagcaggatctttccgtgctctccttgatgtcggtcttgtccgaacgaccaccggtaaccatgttttaggtgttctcaagggagctttggatggtggagttgatattccgcacagtgagaagagatttgctggatttaacaaggacagtaagcaacttgaccccgaagttcaccggaaatacacttatggtggtcatgttgccgcatacatgaagaatttgatggaagatgagccagagaagtaccagtctcacttcagcgagtacataaagagaggcattgagcctggcagcattgagggaatgtacaaaaaggttcatgctgctattcgtgcagatcctgaagcaaagaaatccaagaaggaacctccaaaggagcataagaggtacaatctgaagaagctgtctcatgaagaaaggaaggctgagttgatcgataggttgaaagctctgaattcactgctggagttgacaatgattccgatgaggatgatgattaggttgctgaagtaaatgaagtgaactctccaccttacgattttgggagttgtcttgccccctttcctttggtttttggtgctgaaatttgccttgaaaacccaattg

SEQ ID NO: 18510 - DNA, 496 bp, Gossypium hirsutum
  unsure (1)..(496): unsure at all n locations
  Clone ID: LIB3828-034-Q6-N6-F8
agcacaaatgatgttctttcattaatagaaaaaaattgaatataatagtagtaaagattttaaaaaataaaaatcacatgttntctttattcttctgctgtataccagaatcatggctacaatagtaaccatttgctgaaattttaatgtaaccaaaccaagttaggcctttggtttaagaggcttgacaatctcccaagtgaaatctttgtcatcacgtccaaaatgaccataagcagcagtcttttggtacctaaatttgcctcccctcttcaaatcaagattgatagagatcatccctggcctgaagtcaaagatctccttaatcaattgcaatatatccttgtctgggatcttgcctgtcttgtatgtgtcaacaaataccgacaatggttcaggcacaccgattgcataggatacttgcacaatacagcggcgtgcaagccctgaggccacaacactctttgctgcttgcctaacaatgtaggcaccacta

SEQ ID NO: 18511 - DNA, 406 bp, Gossypium hirsutum
  unsure (1)..(406): unsure at all n locations
  Clone ID: LIB3145-037-Q1-K1-D2
cggacgcgtgggcggacgcgtgggcggacgcgtgggtttggcattaatcaangaagcttgcgacttcangccgggaatgatgtctatcaatcttgacttgaagagaggaggaaagtttaggtaccaaaagactgctgcttatggtcatttcggccgtgatgatcctgatttcacttgggagattgttaagcctcttaagcccaaggcctaagtactagttactaccatagccataatgtcatgtggtacgtatctgtcaatttgtttcattttacattctttacttttcagggcgtaatttatttccccagccatctattgtttgtcatggatatattcttttaagattttcctgtctacttattcaatccaaaatattttcttttattatagaagtactttcatc

SEQ ID NO: 18512 - DNA, 1008 bp, Gossypium hirsutum
  Clone ID: GOSHI-09MAY01-C37074_1
attcgcctcttttggcggagcatcttattgtttcgaggggttgttcttcagtttcaaggtttcttgcttttttgtttttacaagtttcagtctgcagccatgggaaaagcaaaaaaggcccccaaatttgctggcatgaagaaaatagtcactcaaaaagctattaaacattacaaggaccaagttttgaaccctaacaagaaggacctcagcaaggacaaactccccagaaacgtgccgaacgtgtcttcagctcttttctttacacacaacacctccttgggaccgccttatcgtgttttggttgataccaacttcatcaatttctccatccagaacaaattggatctggagaagggaatgatggactgcttatatgcaaaatgcactccttgcatcacagattgtgtgatggctgagcttgaaaaattgggccaaaagtaccgtgtagctttgaggattgctaaggatcctcgttttgaaagattgccatgtgtccatcaaggaacctatgctgatgactgtattgttgagagagttacacagcacaaatgcttcattgttgctacatgtgatcgggacttgaagagaaggattcgtaaagttcctggtgtgccaattatgtatatcactcagcacaagtactcaattgaacgacttcctgaagcaaccattggtggagctccaagattttgacatgcaagtattgatatttcagtagcagtgatctctgggttcaattttgatacgatgagataaagtagttgaggttgtagatgggctatatattatatatagctaaacatttatttgcccaacctatgtaatcagcacctctcccagtgttttatttactcttttccagattaacatagtgcatgtcttcgatgggtgatcttaatgggtgataatttgagaggcgtatactattttaacagtataatacactggacttgtttatgacaattgtagtcatatttcttacttcgaatatctgaatttgctact

SEQ ID NO: 18513 - DNA, 547 bp, Gossypium hirsutum
  Clone ID: LIB3829-015-Q1-N6-E7
cataaacaagtacagtgtattatactgttaaaatagtatacgcctctcaaattatcacccattaagatcacccatcgaagacatgcactatgttaaatctgggaaaagagtaaataaaacactgggaagaggtgctgattacataggttgggcaaataaatgtttagctatatataatatatagcccatctacaacctcaactactttatctcatcgtatcaaaattgaacccagagatcactgctactgaaatatcaatacttgcatgtcaaaatcttggagctccaccaatggttgcttcaggaagtcgttcaattgagtacttgtgctgagtgatatacataattggcacaccaggaacctgccaataaataagttttatccatcagagttcagttcaaatgcaatgccagctcgactaactaatcatacatactttacgaatccttctcttcaagtcccgatcacatgtagcaacaatgaagcatttgtgctgtttccaatgaaacacatagttaattagaagtaataatttgcagaatgaat

SEQ ID NO: 18514 - DNA, 261 bp, Gossypium hirsutum
  unsure (1)..(261): unsure at all n locations
  Clone ID: LIB3145-042-Q1-K1-C12
tctngcttctctgaagacaaccattgggggtggagctccannagattttganncatgcaagtattgggatatttcanngtagcagttgaaatctctgggtntnncaattttgatacccgatgagaaataaagtagttgagggttggtagaatgggcttatanntattatatanntagctaaacnnatttatttgctcgcaaccttatgtagatnncagcacctttctcccacgtggttttagtttaacttcttttctcaga

SEQ ID NO: 18515 - DNA, 623 bp, Gossypium hirsutum
  Clone ID: GOSHI-09MAY01-C37064_1
gctaaactctgtgtctcctgaactccagtactcaatgctggtcatcccctgattccagaagctcgtactgagtgttcaactgcagtcatatttacatccaaattgctcccccaaggcttcttcactttgtgccttgtttcttgttctacgttgttgaaaatgtcttctttcaggtttacagctcttatgattgctttacttgttaccatgtcagcggttgtatctgaaagccgggttgcgagaaaagacctcggcctggatcttggtggcataggacttggggttggagcagggataggccttggcttgggaggtggtagtggttcaggatcaggagctggggctggttccggttctggttcagggggttctagttcaagctcttcatctagttcagcatcatcctccagttcatctggtgggtctggtgcaggttctgaagctggttcatcctcaggttcttacgctgggtctcgagccgggtctggtgcaggttcagaagccggttcatctgccggttcctatgctggctctcgagctgggtcaggacgaggccgtgggagaggcaacggcaactaattaaattaagcactccttgctaaaaaaattgtatgcggggaatc

SEQ ID NO: 18516 - DNA, 722 bp, Gossypium hirsutum
  Clone ID: GOSHI-09MAY01-C37004_1
ctcatcctcagtttcatcggatacgagacaaccatctctagccaggcttccgtttgtggatgcattcttggcaaaggcgaagaacaataaaagtcttttatcaaacaggaagatttattcgcgtagatctaccattttgcccgaattcgttgatcaaactgtacggatttacaatgggaaaaattttgttcgctgcaagatcactgaaggcaaggttggtcataagtttggcgagtttgccttaactcgtaaaagaaaacatttgaggagcaaggctgagcctgcaaaaaagaagggcaaaaaataagcatttgcaaccaaagatcacatctcatttcgagagagtggtgattcaggagaaatatgggctgaaaggaaagcaatgaaacacggaagaaaatggttttgaagcctcatttcttttgttaaatgattgtaggattttgtttggtcagctcttggcctgcacaattgttatgaaaaattgatgtttttagttatccttacataatggtatactgatctgaactcagaattttcagttgacaaacaacggttgggttttagttttacaataaaattgttgaattgagatattgtaagcgagtttgatttgaatacaccgacgaaggtgatggtggcatcaaaatgttgccatccagctcttttatcaaaaaaaaaaaaaaaaaaaaaaaaaaaaaaaaaaaaaaaaaaaaaaaaaa

SEQ ID NO: 18517 - DNA, 446 bp, Gossypium hirsutum
  Clone ID: GOSHI-09MAY01-C37394_1
ccccgcgtccggaacaacttgggcctgacgagcacgtggtcttacaaactgtcggctcatctccggaataactaccttacggtgttcaccattgctgccttggagatattccggcgattccaatggattttcttccgcgttgaaaacgagtggaataaaatcaacttcaggccaaatgtgcggctctccatgaatgatccaagcgatgatgaagtcaaattactttcttcttcagctggttacaatgtataaactgttcgaattattttgtcgacagattcatggaggtttaactccttaaatttttttctccaaaaacaaaggtttaatcattcaattctataattctatatatttatatatattgatcaagaaaaaaaaaaaaaaaaaaaaaaaaaaaaggaagaaaaaaatgaaaaaagtaagaaaggagaaaaaggagaaaa

SEQ ID NO: 18518 - DNA, 689 bp, Gossypium hirsutum
  Clone ID: GOSHI-09MAY01-C37314_1
atctatacaaaaacttctccaacgtgttgatggagcgttcgcctgatgcatctagagatggaacattgcaatcattaaaatctgtcaatggagattcaatggctgatgacatcgaagaaccatcaaccatggaggtggatgatgagaatgaaagaccaaagaaaagtcaatcaaatggcggtaagacgactaaatggttacaatgtaagggaaaaagaacagtggtgtttatcaactctccggctatgtcaaggctttctcacggcaatatgcatctgagatatggcctcacatcgagaagctggatgcagaggtattcactgaagatgcccatcctcttttccggaaagctgtttattctggccttcgccggctgagcaatgagctgtaactgcatgacttgctgtgtaacttaatccagtctcaacatcaatcggtactacccttctttcaccctacaatttttttcatgtacatgaagaaaagtgaaagattctatctagctacatgatcgattgccgtagtttagtttatctcgccagaagtagacatgaccgttttgatatcttggcgaatgaaaagtaccattcgatgtcaagatgttatcgtatatgtatcttttttcaagtagttgagttgcctgataagcctagtttgaactacaattctaatggaattcttttgtccct

SEQ ID NO: 18519 - DNA, 436 bp, Gossypium hirsutum
  unsure (1)..(436): unsure at all n locations
  Clone ID: LIB3829-024-Q6-K6-E1
attgcaatcattaaaaatctggggggtgggagnaggcaatggactaaataacaaatcgaagaaccagtcaaccatggnaggtgggtggagggaggagatgaaagaccaaanaaaagtcannatcaaatggcggtaagaacgaaactaatggttacaatgtttttgttataaaanaacangtggtgtttatcaactggtgggggggggggaaggctttctcaaggcaatatgcatctgagatatggcctcacatcgagaaactggatgcagaggtattcactgaagatgcccatcctcttttccggaaagctgtttattctggccttcgccggctgagcaatgagttgtaactgcatgacttgctgtgtaacttaatccagtctgaacatgaatcggtactacccttctttcaccctacaatttttttgatgtgcat

SEQ ID NO: 18520 - DNA, 514 bp, Gossypium hirsutum
  Clone ID: GOSHI-09MAY01-C37294_1
ttttaaaattcaatccgggtgcccgcaccttcttccttctggatcggttgcgctgtggatcctcccttcctttaccaggtatgccccttccctcctctttagtgcttctttcgctaaattaagggcttcaacattctccgctctgtgaataaactggaaactcacctctggaaggctggttcttttgctctgaatatctcgaataattgctccaagaactgatttgtctatttcttgcgattgacatttcttaataactgttttcgagtctcattgtattactactgaggataaacccattgatattactaatttgatagcctctaaccctgcatgagcttctgctacgaacaaagaagagatgttttcatggagagtcgacttttcagctgctacctcgcccctttggtcacaaacaattaaacccgaggccgatctaaaatttcgtttgtcaaggctgtatcaaactggaccgttacacttgttgtctcccctgcttggttatggatacttt

SEQ ID NO: 18521 - DNA, 1132 bp, Gossypium hirsutum
  Clone ID: GOSHI-09MAY01-C37264_1
gctcaacatagctagatcggggtgtctggaccagtgttcattttggggatatgaggcgtgctttatctggtatgattagatggtgttgcatgagtaaattcttttttattttagctatcacatatcaagatcaataaatgtaaagataattgaaatttattattgtgcattccttctctcattctcattccttgcaacagaaagggttcagaaaattatttgcactatttccagttttagcatttggtcttccttctttttcgtgtcagttcaaagcttttggtttcagcgattaagttcattatcctttttctccgcttttgaatttcctttctcaaacctgctttaggtaaaatttcgtcttcgttttgctcatgaagttgtatggcttaatgcattttgatgtaatgtcaaggtttatgtacttctattatgacccacgcgtccccatatttccagcatgtgaacgccttattcttctaagaaccgatccgaaggaaatgagagattatagcattctcctctatcattgtggattgtacgagcaggctctgaaatttctcaaattgtatcaagacatgaagagttcttccgcacaaaatccgtcaacagatccagttagcaacctagaagaagatactgtgaagaaattgattgttcgtctcaatctcattgcaatggagggaggttggacccggccatggtatgtcagaaattatcttggcaataactctgagccatggtaagaccttcacacattttcctgtggcgttttaaatttcaacattaccttctccgagatggagtcaacttaagagtgagtttacagaagttcacatgtcccttaactgtgcagtttaggatccccacgcgtccctgcacatagcataagacggattgatccgtccttaggattcgacctaggcgtattgcaaaatgatgaaatatggtaatagataattgcatttggcatcgggttctaacatatggctaatttagtatacgagttttttaggctgccttagtagtattatctgatccctgtacagcaacaaagattttgttttggcttaccttaaatggtcgtaaatgattgttatttggacctgttgtgtatttaacagagtatgaa

SEQ ID NO: 18522 - DNA, 456 bp, Gossypium hirsutum
  Clone ID: GOSHI-09MAY01-C37234_1
cccacgcgtccggataattgtgacacgaaccgagatcgatatgcagtatataaaagccgggtgccccgggaaatataaaaagaccttgaacgatgcagttcactcagacacatcgggccactacaggacttttcttctctctcttttgggaccaaacaattagacatcgtaagtgtagttgtgtgtgtaaatatgttataatgatgtttcagtgaatccagttcctttcgtatcggattggtgtattcgtggcagattggtagaatcgaaagtgattgcatagctgattaggtgaaccatgttaaagctctttaaactgcagttgtgtgaatgtgagagagaatgcgagagagaatgcatgtagttgggaggcttttcccctctggtcacaagtaatgtgccattaacataaattatgttaaatttgaaataaataataaatttctccttggtttt

SEQ ID NO: 18523 - DNA, 772 bp, Gossypium hirsutum
  Clone ID: GOSHI-09MAY01-C30914_1
cccactcgtccgcgaacatcatcgtttctaattgttagacggcatcgacatggatgtgcccgcccacccggccgcccgtgtcgtgaccaatgctttctcaaaatccatatgggttatcttccaactcttcttctatgcgctccgacctttgtttctcaaaccgaaaccccctggttgctgggagttcataaacttattcgctcagctcgccctcgatgcgaccatggtttactttcacgggtggaaatctttcgcttatttgatcctttcgacattcgttggtggtggaatgcacccgatggcacgccattttatctccgaacattatgtgtttaaacccgaacaagagacttattcttattatggtcctcttaatcttttgacatggagtgttggctatcacaatgaacatcatgatttccctaggatccctgggtataagctacataaggtgaaagaaatcgcacccgagtattacgaaggcttggaatcgtataaatcatggagccaagttatttacatgtacatcatggatcaaaccgtcggaccgtttagccgaatgaagaggaagatctcgaaaaaatcccgataggtgatgagttttttccccctacccatttgggatctttctgttttctggtttgcctttctgtgtttcagtatggggtttacttgcattttaaggctcaaatatgttattcgtttcccaacattgttgaagtattaagattctattatgtagtttttaaaaaaaaaaaaaaaaaaggcggtc

SEQ ID NO: 18524 - DNA, 630 bp, Gossypium hirsutum
  Clone ID: GOSHI-09MAY01-C30894_1
aaaaaaaatggcagctgcccggtctctctcaaatccatcttccaccacctcactaatttcccaatccagaaaccaatcaaaacccacttctcctccttcatttctaaagccccacagtctacaaagtccttggcttggcttcaaaatttcctttcagccatcaaaaaccagaccctacttgcccaaccatcgcaccatcactgcaactatctccttaagtctccccacttcgaaaacagatagggttgcttcagctgggaaagttcccaaatggtcaaggagagcgataaagtcatttgctatggctgaattggaagctaggaaactcaagtatccaactactggaactgagtcgttgctcatgggcatattgattgaaggaactaatctggctgcaaaatttttgcgtgcaaatggtatcactctttccaaggttcgtgatgagactgtcaaattattaggaaagggtgacatgttctttttcagtcccgagcatcctcctttgacagaagatgctcaaagggcacttgattgggctgttgatgaaaaactaaaatctggtggtgatggggaaattacaacaactcatttgcttcttggcatttggtctgaagtggaatcacctggtct

SEQ ID NO: 18525 - DNA, 563 bp, Gossypium hirsutum
  Clone ID: GOSHI-09MAY01-C30814_1
cttatggtcgagcaggtagtataagtgagggtttgcgcagtatcatgcagtctatcctggagaagttggcgttaatcgcgccttagtgaaccgagatagcttccagcgctacaatatggatggaattgctgagatattattagcacttcagaggatcgaacaagatgaagagttgacatatgagcaattacttgttctagagaccagcttgttccttaatggcctagacttttatgaccagcatagagacatgagactggatatagataatatgtcatatgaggaattactagccctagaagagaggatgggtaatgtgagcactgggctatcggaagaagcattgtcgaaatgcctcaaaaaaagcatctatgacacagcatcttcggagtttgcaaatgtgagctttgagggcgaaaaggatgatgtataatgcaccatatgtcaggtactttttctatatgactttccactaccatgctttttcatttcttctactcatctatgtatggaaagggatgattttgcacatttgcaggaagagtacgtgaatggagatgaaa

SEQ ID NO: 18526 - DNA, 517 bp, Gossypium hirsutum
  Clone ID: GOSHI-09MAY01-C30554_1
cctcacgcgtccgcttttcttttccccgtgaaatctttgatttatagtataagtgctaacatggcagctgttatctcttgtaactcttactctcctttagctgcctctaaatggattaacccaacactccccactaaagcttcaacctttctagcaactcccaaatataatcctcacaagcatgttcagtgtaagcttcagaatgagcagaaagggaggccgttttccctgaaggaatgtgcaatctccatcattttggcagctgagttaataactggaatcccatcacttgatgcatatgcagctaatcctccattgccagatttatctggtttaatctctgggcctccaattaaagaccctggagctttgttgagatatgcattgccaattaacaataaagctggtagagaagggcaaaaaccacttggagatataaccgagtctctcaagattgccggtgtcaaggcactcgattctgtcgagagaaatgtgaggcaagcgtcttgagctctta

SEQ ID NO: 18527 - DNA, 737 bp, Gossypium hirsutum
  Clone ID: GOSHI-09MAY01-C30544_1
cccacgcgtccgcccacgcgtccgaaacatgtcggtagcattatcctcttctcatcaaactttcatagccaatgctttctcatttaatcgaaaacccaaagcaaagcttcccaattctcctactttcattacttgcaggttccactcagacgaccacgacgattcctcctggagaaatgagaaacagttagcaaagctagcaatggtgacactggcagccggggtattgactctgggttcggtgggtgacgcatcagccgccaaatccggtggtagagttggcggccaagcattccggtcggcggctcctcgctcagcaccaagagccaacaacaattccaggaccaacatttacattaatccgcgggtcgccccacctctagtcggaggctacggatacggttacggcgtgccgttctacggtggttggggctggtcaccgttctcattctttgctcccggccctagcgttgcggtcggcgtcggaggcggattcgatacactcctcttgtttatgtttttgggtgcagttgcagctgttgtaaggagattctttggatcaagaaatgaagatgaagatgaatattagtgaaataaataaataaataactgaaagcaacaaaaagttttgagacttttagataaaatgataaaaatagagatgtttctatttacatatgggcagccattgttgtttttaactcgtgtataaatgtataattttatgagttattttt

SEQ ID NO: 18528 - DNA, 598 bp, Gossypium hirsutum
  Clone ID: GOSHI-09MAY01-C30534_1
tatgcaccggttaatgcaatgaagctattacattcaagtgatcagaaaagccaatggccggccaccggagcaaagggttcactgttaaggtacgcactcgcacaccagcagctcgaggccgtcattcaattggaatacaccattggattccatgatgggtacattcaagtgaacgcacgtgtcgataacttacgcttccacgtggccagactagggttcagcaaaaaaaacgacgaaatggatgattgcttgaacgagaaacacttcccgtcgaggatccgagtttgggtcggaccggaagtcgggtcaacgtacgtgtccgggttaaccttgggtcggtccacgaacaatggtgaaaacgaagtcgaaacacaaaggatccttaaagggagattcgggaaatattcaaaggattcctcccatgttaaagcaagagcaagggtttccatgaagaacaagatgaaaaactggaggtgggatcaagacgcggaagggaacgccgtggtgttcgacgcggtgctttgcgacaacgtgacgggccacgaaatcgcaacttggaaatcgttgaacaaaatagcaacggcagcagccatggttt

SEQ ID NO: 18529 - DNA, 578 bp, Gossypium hirsutum
  Clone ID: GOSHI-09MAY01-C30774_1
ccccgcgtccgcccagcgtccgcccagcgtccgggcgtcctaagcctatggagccgaccagaatccactcaaatggcgattctctgtttcaggacattaccttagctccggatattccagtctacgcgacaacagctgcttacaacaaggacccctgccccaataagctgcatttgggtattggtgtttatcgaacagaggagggaaaatgccatacattaaatgttgttaaacaagtggagcagacactagctaatgatctgtctgctgacaaggagtatcttcctataacaggaatgccggaatttaataaattaagtgctgagctaatgtttggctctggcagccctgccatcaaggaaagtagagtggttactgtccaatgtgtttctggttgtctatcactgagggttggagctgaatttttagcaaaacattaccaccgacatgtgcgttaccttcctgagccaacatatggaaatcatcctaatctgatatctgcggcagggttaactttgaagacttaccgatattatgaccccaaaacacttgtgctagactttcaaggccttttggaa

SEQ ID NO: 18530 - DNA, 527 bp, Gossypium hirsutum
  Clone ID: GOSHI-09MAY01-C30724_2
cccacgcgtccgcccacgcgtccgcccacgcgtccgagatgttaggcctcagagagagaaagaaacgaaatacccacgaaacacacagcctgccaatgccattgccattgccagggtgatcggtgattggtgatgcttcgcagttgcctcttccttcatcacccattaatcaacaataccttccaattttagctttgcgcgcaaatatgagttggttatcaattttgtgcggcttgctgttgcttttatgcatcttgaaacccggaattcgttcgtcggcagataggttagatgggagggtgttggagttggacgattccaactttgactccgccatttcctctttcaattacatcctcgtcgacttctacgctccctggtgcggccactgccaacgcctttccccccagttagatgaggctgccccaattcttgctggattaaaggatcccatagccgtagccaaactaaatgctgacaaatttaccactgttgctcgtaaatatgaaattgatggatatcctaca

SEQ ID NO: 18531 - DNA, 784 bp, Gossypium hirsutum
  Clone ID: GOSHI-09MAY01-C30724_1
attattttttggaattgttcatcaaattaatttgatgatgatgggattagaatcaaagtgatacatttataatttgtgaagatttattcagtagatagagacatttatgcgggtgggttgtattaataaataaaaataattatggaaatatgtagcgaaggtactcaagttatgcatctgtttttagtattattatattttgaggaactaaagtttggattgatcaaagtaaattagtcccagcaaacgctgtttcttaaggaaactgggaagacaaagaaaaaaaaaaaagggaaaaaaagagagaaagaagcaaggtctccaattccaaccatgcgtttgcccatgatcatattgctggtgttaacgatctggaaagcaggaaatggttcgagagcgaatgagttaaaggcggatgggaaagtgttggagttggatgaatccaactttgactccgctattttatcattcgattacatcctcgtcgacttctacgctccctggtgcggtcactgcaaacgtctttccccccagttagatgaggcagctcctgttcttgctggattgaatgagccaatagttttagctaaagttaatgctgacaagtttacccgtcttgcttgtaaacatgatattcgatggctattctaccctcaagttctttatgcatggagttcccatggagtataatggaccaaggaaagcatattaatttgttcaatatctgaaaaaattcgtggttctgatgtgttaattttagttcaaatttgccattatgattttg

SEQ ID NO: 18532 - DNA, 698 bp, Gossypium hirsutum
  Clone ID: GOSHI-09MAY01-C30324_1
atttctctttttcctttcactcgctgaactgagaaaggaaaggagaaatggagatggcaattagcttccataactcttccttcaaatctcctttcattaactctagctctaaccctaagcctaaatttctatttcccacgcagctttccggtctcatctcttctccactttcttccttcaactccaaaaggacatgtctcaaatttggttctaggactttcactaaaccggtcaagtgctctgtttctcaggcggctcaacctgcaatcgagaagaggagtcagttaaagaggcgaagcgatataaggaacatagcaatcgtggcgcatgttgaccatggaaagactactttggtggatgcaatgttgaaacagtcaaaggtttttcgggacaatcaattcgtacaagagagggtaatggactcaaatgatcttgaacgggaaaggggtattacaattcttagcaaaaatacatctatcacatataagggcacaaaaattaatataatagatactcctggacattctgactttggaggtgaagttgaacgcatcctcaatatggttgaaggagttcttctagtggtagtgcttctcactttctcttttttggaatttcatcttttcaagtggtgctcctgtaaagtaattttttttcttgtgaactcttcatcttccaatttactagggttcaagctc

SEQ ID NO: 18533 - DNA, 616 bp, Gossypium hirsutum
  Clone ID: GOSHI-09MAY01-C30214_2
gctgttatctgtttgtgctggtctggtgcgcttgcattgggccaaatcatgacatctcttgtggctggtgcgattcttctcttgctgtcgttgaccggaattgtctcagccggtagagatgtaaccggagacatactccggttaccttcagaagctaataagttcttccatgggggtgacgatgatgaagttgaaggcacgagatgggcggtcttgattgccggatctaatggatattggaattacaggcatcaggctgatgtttgtcatgcttatcaactgttgagaaatggtggcctaaaagaggaaaatatcattgtttttatgtatgatgatattgcctacaatgaagaaaaccctagacctggaatcatcattaacaatccccatggcgatgatgtttataagggtgttccaaaggattacactggagaaaatgttactgttaacaacttttttgctgctatccttggaaacaaatctgctcttacagggggtagtggcaaagttgttaatagtggccccagtgatcatatcttcatatattactctgaccatggaggtcctggtgtacttggcatgcctaccttaccttatctttatgctgatgatttga

SEQ ID NO: 18534 - DNA, 654 bp, Gossypium hirsutum
  Clone ID: GOSHI-09MAY01-C30214_1
tcgccaccacgcgcgcttttatctgtgtgcgctgggcaaattcgattgcataaggacgattcggttgcaaatactagcccaattaggagaagcattactgttgatggagatgttcaggatgttatagttggtactgggtttaaattgtctgtatcatgttgtttctatgtgcttcttgtgcaagttgtggtgctaggatttgatggttttggtttgataagagaggctggtgatgggaaagttttggattgggctagtgctgccttgcgtggtacgtaagcatgcttatgaactgttgagaaatggtgggcctaaagaagaaaatatcattggttttatgtatgatgatattgcctacaatgaagaaaaccctagacctggaatcatcattaacaatccccatggtgatgatgtttataagggtgttccaaaggattacactggagaaaatgttactgttaacaacttttttgctgctatccttggaaacaaatctgctcttacagggggtagtggcacagttgttaatagtggccccagtgatcatatcttcatatattactctgaccatggaggtcctggtgtacttggcatgcctaccttaccttatctttatgctgatgatttgattgatgttttaaaagaaaaacatgc

SEQ ID NO: 18535 - DNA, 675 bp, Gossypium hirsutum
  Clone ID: GOSHI-09MAY01-C31194_1
cttctattctactaccacttccacacaacaacagcaatggcaattagaaaaccatccaaactgcctcaaaccgcagttctgaagcaaatcctgaagagatgttcaagcttaggcaggaaacatggatatgacgaagatgtgctcccacttgacgtaccaaaaggtcactttgccgtttacgttggtgaaaacagaagcagatacatagtccctatctcattcttgacccaccctgagttccaatgtttgcttcgacgagcggaggaagagtttgggtttaaccatgatatgggccttaccatcccttgtgaagaagttgtttttcgctctctggcatctatgcttagatgaaaatgggaaaaaagaatatattgagttgcgaaatgaaggggttctgcctttgcatttttggagaaagatggccaagagaagcatagcaaccatatatattgaatagctagtttctcttttttctaacatcatttcttcattgtgattcttgatcccttttggggttctttcttttctttttactacttcgaacccggggtttttaatgttttattaattagttattagtgactctaactagacctaagaattataacattttctgggtccaaccatttgtataaacttgtgtttcctcacaaattttgtgagagaagttgaatg

SEQ ID NO: 18536 - DNA, 761 bp, Gossypium hirsutum
  Clone ID: GOSHI-09MAY01-C31184_1
cccacgcgtcgcaaacatcaaagtgtaaagcatttgagcattaaaatcatacatgacatagctttttacatgtcatcttcaacatcttcactgcaatggcaaccatgctctcactctctccaaatcctcccatcacaactttaccctctcttcgttccagtttcaagggaaatctgaggaatttaaaaccaaacccttttcacattattcgtatcaggaccaagcagcaaggggtagaggcacgaaaggggacacggtctttagtggttgtgaaccaagcagcaacaacccaagtgtcggttacagcttctaatatgaggtttcggttggacaacctgggacctcagcctgggtcaagaaagaaagggaagagaaaggggagaggaatatcggctggacaaggtgggagctgtgggtttggaatgaggggtcaaaaatcacgttctggcccaggtgttagaaagggatttgagggtggccaaatgccactctataggcgtatccccaaattgagaggaattgccggaggtatgcatgcgggattaccaaaatacataccggttaactcaaaagacatcgcaacagctggatttcaagagggagatgaggtgccgttcggagactttaaaggagaaggggttgatcaacccttcaggaagagagaggaaactccctatgaagattcttggtgactgggagctgaatgttaagctgaacttgaaggcccgtgccttttcagcatctgcaaacgaaaagctcga

SEQ ID NO: 18537 - DNA, 444 bp, Gossypium hirsutum
  Clone ID: LIB3120-017-Q1-K1-A7
cggacgcgtgggtttggctagggcttcatatacccatcatcgttgccgtgcgaccaccgcgccaccaccgtattcggtggccagcgatgcgccaaaatgggcccttagcctcatcttgaaacaccctagagaaaccagccctcaaaacccgaaaaaaaagagttgaatagaaatggttctcaaccccttcgggttcgattttgacaatggaggaggaccctccggcactgcaaccgtgggaaaccagtgttgcgacgcgtgggaggggcaatgttcaggggcgtggtggctgaggggaggccaaaagtcgagggggagtggcggctgaactttggtggctagggttagggtgactgctgaaaaaaattaaagatagttggctagggtttagtttatttcgggcctggtaattgcgtttgagtttgggtctgattttgtaatgga

SEQ ID NO: 18538 - DNA, 357 bp, Gossypium hirsutum
  Clone ID: uC-gsflmaxxa004h02b1
tggcatttgctattctgtcaattttaagaccggatcgggagcgactcactctcagactcagctgagttaaaatcgctcaagcgatgtggctatggagctatggggcgccaaaaaggaggctttagactgcgtcttgcagcactatatagaaaccagccctcaaaagctgaaaaaaaagagttgaatagagatggttctcaaccccttcggggttcgattttgacaacggaggtggaccctccggcgttgcaaccgtggggaaccggtgttgcgacgcgtggaaggggcaatggtcaggggcgtggtggccgaggggaggccaaaagcccagggggagtggcggctgaactttggtgg

SEQ ID NO: 18539 - DNA, 297 bp, Gossypium hirsutum
  Clone ID: uC-gsronu33B114d07b1
ttctctttctggctagggcttcatatacccagggtcgacttcgatcgactgttgctttaccaccgcattcagtggccggcgatgcgccaaaatgggcctttagcctcgtcttgaaacaccctagagaaaccagccctcaaaacccgaaaaaaaagagttgaatagagatggttctcaaccccttcggggttcgattttgacaacggaggtggaccctccggcgttgcaaccgtggggaaccggtgagtctcttcttctccctttttgtttatgtttctatttaaaatcgtttttgat

SEQ ID NO: 18540 - DNA, 592 bp, Gossypium hirsutum
  Clone ID: GOSHI-09MAY01-C31064_1
cccacgcgtcgcccacgcgtcgagctggatgagaagaaactctcatgtccagttctgtagtagagatggaattcataaacaacaaccatcaactataaccccaaaagaaaccgatttcgtaaacaacatagaggaagaatgaaggggatatcttatcgaggtaatcggatttgtttcggtagatatgctcttcaagcacttgaacccgcttggattacatctagacaaatagaagcggtgcgccgcgcaatgacacgaaatgtacgccgtggtggaaaaatatgggtacgtatatttacagacaaacccgttacggtaagacctacataaacacgtatgtgttcggtgaaaggatcttccgagtattgggtagctgtcggtaaaccgggcagaatactttatgaaatgagcggagtagccgaaaatatagccagaaaggctatttcaatagcggcgtcaaaaatgcctataaaaactcaattcattatttcaggataggaatatagaaccaaaggaaagaagtcttgtcttgggaataaaaaaacaattgcgagtttgcttttttttttttggacaacaatatttttttttt

SEQ ID NO: 18541 - DNA, 780 bp, Gossypium hirsutum
  Clone ID: GOSHI-09MAY01-C31004_1
gaagcctacgatgttgtgtacgacataaatggacgataggcggccgaagttgaaccgatactggatgcactcccgaacttagaacagttcatatattgctcctcagcaggtgtttaccttaagtctgatatgttaccacattgtgagatcgatgctggtccgccgaagagtaggcacaagggaaaacttaataccgagagcttactggagtcgagggatgttaactggacatctgtgagaccagtctacatatatggacctttgaattataaccctgttgaagaatggttcttccaccgattgaaagccggtcgccctattccaattcccaactctggagtgcaaataacccaacttggtcatgtcaaggacttggcaacggctttcattgcggttcttggtaatgaaaaagccagcaagcaggtgttcaacatttcgggagaaaagtacgtgaccttcgatggattagcaaaggcgtgcgccaaggctggtggatttcccgaacctgagattgttcactacaacccaaaggagtttgacttcggtaaaaagaaggcattcccgttccgagatcagcatttcttcgcatcactcgagaaagcaaagcatgtgctaggatggaaaccggaatttggcctggtcgaaggactcacagactcgtataacctatatttcggcaggggaacattcatgaaggaagcttatttttcgaccgatgacatgattctgggcaaaacttttgttctccaatcataaggcatttatctcatcatcactttc

SEQ ID NO: 18542 - DNA, 466 bp, Gossypium hirsutum
  Clone ID: GOSHI-09MAY01-C31394_1
ctagcctatccatctttttctcctcagccgaaccctatccctttagcactagcgccgatctgccttcacaaacggcaaccgacaaattcgggcttttgatgataattttcggccttgtgattcccctttcaactccgatttcaacgaagccaagaggaatctgtggccgattcgcaaggtaagatcgcgccctttattttctctgttggtatcttacatacaatagcgttataaaatcaaaaaagaaaacaagataattcgacggagaactttaaggaaaatggaaaatcaccttcaagaatatctttcaaaatgccttttctaaatatttagtgtgcgtaatatgcgtatttcagagtgcgtgcgtagtatgcgtacactgtgcgtaagattacagagatgaaatcgacgactttttatagccagatttttttagaataaataaaaataaaaattacatttattt

SEQ ID NO: 18543 - DNA, 443 bp, Gossypium hirsutum
  Clone ID: GOSHI-09MAY01-C31374_1
cccacgcgtccggttttcgccacatagaactgtttgacactgttaaaaacgagtttactgagctaactcggcatgtttctcctacaacccatcacttaaacccgttcatatcacccggctcagcccgagttgggtaccataagtgtaggggagaaagtaatggagcaaaagctactcaattattgcttgaaaatgttaaaagcccagtgccgaatctctctcttttcagaatgtacggttcattcccatctttctcacccgcgggtgaccgaatagcctacgtggatttccccggtgtttatgtagtgaaccgggacggttcaaacctgcgccaggttttccacttgaatgcttttggaagcgcttgggacccggtccgaaagggaattgtatacacaagtgctggaccggagttttcgtgggcgggtactgaagttgatatt

SEQ ID NO: 18544 - DNA, 386 bp, Gossypium hirsutum
  Clone ID: GOSHI-09MAY01-C31284_1
cgaccacgcgtccggaactttaagctttttctcattgagaaaccacatcagagggaaaaaaactaatgatttcggggattctcgatatatgtctgtggtgacaatgaccactgttggttatggagaccttgtccctcacgatttcctttcacaactggtctgcactggtttcatcaccgtagggatgcttctgtttggaatagtagcgaaactagctgctaaatacttggttttcaagcaacaaaaggtgctgattaatgccctgcacacagctaggataatgggtccgatggaagcccttaacgagattgaaagcatagaaatagactacaccaagtgtttaatatcattgatcgctatggcggtgcattttgtcatcggaatct

SEQ ID NO: 18545 - DNA, 437 bp, Gossypium hirsutum
  Clone ID: GOSHI-09MAY01-C31204_1
cgtccggcgatgccaaaggttcgaaggtttgagagcttgactcagctggagccagtggacttggagaaacgaattgcaatggcagagcttgaagatgaatcatcactcctccgctcagtctctgtcaacaacaatggcatgtctgaagagaaactgcttaagttactgaaagcgaaattcccatcagagattttcaagtttagggctgataatctattgttagatttcttttgggagacattcatggtggaagataaaggcgaacgacatgacatggcgtttgaagattttggggtcaaatctttgaaggtggtagaagattgcgttaaatgggaattctcaggaatttttctaggatgggagctgcatgatagcagaaaagcatccctgaaagatatggaaagaaatgaaaactggagaaacttcaatgaagaaaa

SEQ ID NO: 18546 - DNA, 302 bp, Gossypium hirsutum
  Clone ID: GOSHI-09MAY01-C32994_1
gtggctctatcacagcatcgtggagtcaaagaagtaagtgaagggatgtcaaagactagtggtatcccatttcagagatttgcgagcaccggtttttgttgtacaacaaggatgcttctcagcacatctttgaagtatctgctgggcgtgactctcttgttcttggagaaggtcaaatccttgcacaagttaaacatgttgtcaaagttgggcaaggtgttgttggctttggaaggaacatgactgggctggtcaagctcgcatttactgctgggaagcgtgttagaacagaaactaacatt

SEQ ID NO: 18547 - DNA, 395 bp, Gossypium hirsutum
  Clone ID: GOSHI-09MAY01-C32984_1
aaaatttcttggttttcctcccaaagcaacatgatgttgcaaacagcttgcagctcgttttgcatggctgttgaatgttggcaaccagaaagatggactgttcccagcatctttctcatttctggttgccatatagggaatttcactcttgtactcattttggaaggcgaggaaaccgatggctcctttaccacctggtccccgtgggttgccaatcctggggtatcttccatttcttggattcgataatctccatctggtctttacggagttgggtggagtttatggtcccatttacaagctttggcttgggaacaagcttaaccgaagtaatagctttccatcgcttggaaaagagtggttcgtgaccatgatatagcttttcagagcgagac

SEQ ID NO: 18548 - DNA, 431 bp, Gossypium hirsutum
  Clone ID: GOSHI-09MAY01-C32844_3
cccacgcgcccgcacgggttccactgcggttatcttcaaagtactagtaaaagattagaaggctaaagcagtgagagggggcgcagcaatcaaaaatcaaatcgaatattgcagagaagaatagagaggaaagagaaggaaatggctttaaatggaaatggttgctgttggattcaggagcgtattttaagtagaaatggatgtagtgtgttcctcactcccaggagtaggtcttctgctgccattttgccccgcaagtcaaccgctctctccttttcctcttcctttcaattccaaggatttgtggtggataggaagcagagctcctcctctatgcaaacggctgcagtccgccatttggtgggatctgttaccaaaactcaaggccttcgctttgctgtggttgtcgctcgtttcaatgagattgtgac

SEQ ID NO: 18549 - DNA, 1015 bp, Gossypium hirsutum
  Clone ID: GOSHI-09MAY01-C32844_1
tttaattctctcacgggttccactgcgattatcttcgaagtaaaagattagaaggctaaaacagtgagagaggcccacgcgtccgcgcagcaatcgatagtcaaatcgaacattgcagagaagaacagagaggaaagagaaggaaatggctttaaatggaaatggttgctgttgggttcaggagcgtatcttaagtggaaatggatgtggcgtgttcctcactcccaggagtaggtcctctactgccattttgccccttaagtcaacggctctctccttttcctcttcctttcaattccaaggatttgtggtggataggaagcagagctcctcctctatacaaacggctgcagtccgccatttggtgggatctgttaccaaaactcaaggccttcgctttgctgtggttgtcgcccgtttcaatgagattgtgacaaagccgctcttggagggagctctggacactttcagaaagtattcagttaatgaagaagacatcgatgttgtttgggtcccgggtagttttgaaataggtattgttgcagaaagactgggcaagtctcgaaattatcatgcaattttatgcattggagctgtgataagaggagatactactcactatgatgccgtggctaattctgttgcatctggggtgctttcagctggcctaaactcaggtgttccttgcatatttggtgttttgacttgtgaggacatggaccaggcattaaatcgagctggtggtaaatctgggaacaaaggtgcagagtgtgctttgacagcgattgagatggcttccttgtttgatcaccatcttaagtagcctcagcattatccattacatgatgaacttgtgttgttgctgtgggatcattctatctggggagtttacgcaaaagcaaaacggtaaacatagattgatcccggaactctaattcgcaattttcttggtatacactattcttgttgatctaataaatgaccaatgcttttgctttcttttatttatatgttg

SEQ ID NO: 18550 - DNA, 534 bp, Gossypium hirsutum
  Clone ID: LIB3582-040-P1-K1-F2
gttttatggaagttttcatgtattaaaatggagttgcccattgattacttggctattggtctcttccctctatttttcattttttattattccttgtgatttgaacctgcaatttatcaactttgcaggtgttccttgcatatttggggttttgacttgcgagaacatggaccaggcgttaaatcgagctggtggtaaatctgggaacaaaggtgcagagtgtgctttaacggcgattgagatggcttccttgtttgatcaccatcttaagtagtggcagcattatccattacatgatgaactgttgctgtaggatcattctatctggggagcttacagaagcaaatggtaaacatagatagtgtggttgatggaataaattgttcttttaaagagtaaattgttttttttagtttcattcatttgtattgttaaaaattagtgtggttgatggaataattagataatggcatatgatgtggacatgtacattatgttgatgaacaaggaattttagatgaaaattttaacaac

SEQ ID NO: 18551 - DNA, 377 bp, Gossypium hirsutum
  Clone ID: GOSHI-09MAY01-C32764_1
cccacgcgtccgaaacattctcaaccgcaacgccattcctcaccacgtccaccactttgtccctttctctttcaacccatctccaccgtctttccagttccttatcctctacttgtttcccttttaagccaaacctccacagagtccgtagaagcccatcacttcttgcttcctatggaaacccacacttatttaaccacgaagatcatcattccacctataaatcattgctatccaccagaattcttggacccaaatccaatttctggcaaatgggtccttcagaacctagctgtagcagagaaattttagtcaaatcctctgcatcagacagtagtaacactgtcttctccactctatcttaaaaagtgttgggg

SEQ ID NO: 18552 - DNA, 615 bp, Gossypium hirsutum
  Clone ID: GOSHI-09MAY01-C32714_2
ttttcctttaaaaaaaaaattaaaaaaaaaaccaaatccaaattccccccctttaagtacccctctgccgtctccctcactctcaccacaacccccactcttgctctctcttctcttcccttcttctctacccctcgcctccgccgtcgcgtgggttttaattatagtgttgaagttgttggaggaggggcaaaaatggcagtggcgagtgtagtagcatgcattttgctgtttatctcctccacaatgtggatgggtgaagctagaattccaggagtttattctggtggcgcatggcaaaacgcccatgctacgttctatggtggttctgacgcttcgggcaccatgggaggagcttgtgggtatggaaacttgtacagccaaggatatggagttaacacggcggcattgagcactgcgttgttcaacaatgggttcagctgcggtgcttgctttgagatcaagtgtgctagtgatccacagtggtgccattcagggagcccatccatattcatcactgcaaccaacttttgcccaccaaactacgctctcccaagcgacaatggcggctggtgtaaccctcctcgtcctcactttgacctcgccatgcccatg

SEQ ID NO: 18553 - DNA, 1185 bp, Gossypium hirsutum
  Clone ID: GOSHI-09MAY01-C32714_1
ctcagccctatcttcctttttgtttattaggaaaaaaagatagagtttgagtaactgaagaaggaaaaatgggtattgcaggtgcagtgtgcattattgtgggttttatctcatcaatgtggttggctgaggcaagaattccaggagtttactccggtggggcatggcaaaatgcacatgctaccttctacggcggttctgatgcctctggcaccatgggaggagcttgtggatatggaaacttgtacagccaaggttacggagttaacacggcagccttgagcacagcattgttcaacaatgggttaagctgcggtgcttgctttgagataaagtgcgcaagtgatccaaaatggtgccattccggaagcccttccatcttcatcacggcaaccaacttttgccccccaaactacgctctcccaagcgacaatggcggctggtgcaaccctcctcgctctcactttgacctcgccatgcccatgttccttaagattgctgagtaccgtgccggtattgttcccgtttcctaccgccgggtgccatgccggaaaaggggagggataaggttcacaatcaatggattccgatacttcaacttagtgttgatttccaacgtggcgggttcagggaatatcgtgaaggctagtgtgaaaggatcaaggacagggtggatgagcatgagtcgaaattggggtcagaattggcagtcaaacgttgtgctggttggtcagtcgctctcatttagggtcacaggcagtgacagacgcacttccacctcttggaacatcgtccctgcccattggcaatttggtcaaacattcacgggcaaaaatttcagagtttgatttctcaaagaaaaagaaaaatagaaaattattagccccataagttaggaaaagccatttccagttttacccttgatggtccaacttttgttttgttagggtgatgtctctttttgacaaattgggtacttggggtgtcttctttattttactctttggttctgattttggggttaatcggtttgcatttggggtgcggggggggaggaactgagcggctgccacaaaattgtagcccgcagcctaaatattaaacttttaaatgttattagctatacttggggaaagtgtattggttttaacttccaactcaaattatactttatatttggttatt

SEQ ID NO: 18554 - DNA, 406 bp, Gossypium hirsutum
  Clone ID: LIB3135-014-Q1-K1-A2
cggacgcgtgggcggcggcattgagcactgcgttgttcaacaatgggttcagctgcggtgcttgctttgagatcaagtgtgctagtgatccacagcggtgccattcagggagcccatgcatattcatgactgcaaccaacttttgcccaccaaactacgctctttcaagcgacaatggcggctggtgtaacccttctcgtactgactttgacctcgccatgcccatgttccttaagattgctgattaccgtgccggaattggacccgtttcctcccgccggattgccactatgtttccttacaacttttttttttcctttttttttataataaaatgggaaagaaggctaccggttaaattaatttaatggtaagtaccttaaattgttacaaacttaatttaaaa

SEQ ID NO: 18555 - DNA, 372 bp, Gossypium hirsutum
  Clone ID: GOSHI-09MAY01-C32154_1
tcgagctctgaagagggtgaaaatgacgtcttctttgattctttggattgcttgtcgatcgaagagcctgttttagcgaatcaaggattagagtgtgggaaattagagtatgaaatttggatgaatgaacctggaaatgttaaggagcggcgtgaaagatttcttctcggaatggatctagttgagtttgcatattcatcaaggataaaggatttgcagaggatcacagagtgcagtgatgctgtcttgagttcttcgtgttcgtctgctggcaatggtgaaggaagtattgctgattgtgataggaaactgatgtgtgaagccaatttgttgctcgatgaatcaacagcatcagctctcgagagcgagaat

SEQ ID NO: 18556 - DNA, 458 bp, Gossypium hirsutum
  Clone ID: GOSHI-09MAY01-C32164_1
tcgtccacgcgtccgccaagtttctccttcttgagttccctttgatcttcaatggctactacttctccaatggcaagtcggctgaagagcagttttacatcatctcttacaagaaaactagttggcccaaagggaatttccggagccccatttatattctcacccggcaagacccgaactccctgtttcactgtcaaagctgttcaatcagacaagccaacatttcaagtaattcaacccattaatggtgacccattcattggaagtctagagacaccaatcacatcaagtcctttaattgcttgggacttatccaaccttccagcttatagaacagcagggaacccacttctaagaggcatagaagttggtttagcccatgggttcctcttagtaggtccatttgtcaaagctggtcctttaaggaacacagctggtgcaggtcaagctggttcatt

SEQ ID NO: 18557 - DNA, 430 bp, Gossypium hirsutum
  Clone ID: LIB3120-027-Q1-K1-F5
gttttcagaatttggcttccttcgccgcatcagacgcataaacatggctgaagacgctgctcgcaaatccatatatcacttcagtgtcaaggacattcgtggaaatgatgtaagtttaagtgactacagcgggaaagttgttctgatagtgaatgttgcttcaaaatgtggtttaacgcaatcaaactacaaggaactcaatgttttgtatgaaaaatacaaaaaccaagggtttgagatattagcatttccttgcaaccagttcgcagggcaagaaccaggcaccaatgaacagattcaggaagttgcatgcacaatgttcaaagctgaattcccaatttttgataaggtggaagtaaatggaaagaatgctacaccactttacaagtttctaaaatcagaaaaaggtggatactttggggatgcaatc

SEQ ID NO: 18558 - DNA, 256 bp, Gossypium hirsutum
  Clone ID: LIB3147-019-Q1-K1-H3
catccccaaagtatccacctttttctgattttagaaacttgtaaagtggtgtagcattctttgcatttacttccacctacaatggtcagatcatatgacagtattacaaaacataagtttgtataccaatcaactggtttcattttcatgctaaggaggtgattgctggcataaggcactcaatcaaacatatttataaccttatcaaaaattgggaattcagctttgaacattgtgcatgcaacttcctgaatct

SEQ ID NO: 18559 - DNA, 511 bp, Gossypium hirsutum
  Clone ID: uC-gsflmaxxa067h08b1
attttctttttccccattttattctacacaatactgctcaaaacagcttagggtttcttttgtttttccttgacataaaatccccagatttcttcataatccagttcagattgggctctttctcaagccaggaaaagccgagttttaaggaatcctagttcaagaggcttattggagttgaaagttgcttaagtgcattcttgtttaccattattattcctcaaaagatgggaatgtgatatgccttatgctttggttcaagtctagggtggataactgtgggcttcaataatttctttggtttaattttgttgagatttgaccatgcctggttcctgataagcgtgtggagtttcatactttgatgaaaatcttaaactagattactgaacaaccttagtgtgccaacagaaaatagctaatacgggtgcgctttgttgtgtggccgctgggccacatggaacaaaatcacccactaacggtagggactgttccatggatcgttatgaac

SEQ ID NO: 18560 - DNA, 460 bp, Gossypium hirsutum
  unsure (1)..(460): unsure at all n locations
  Clone ID: LIB3120-026-Q1-K1-E5
agtgggagggacaagattatcatttccttctatgatgttttaggagtttgaagccaggaaaaggcgagttttaaggaatcctaggtcaagaggcttattggagttgaaagttgcttaagtgcattcttgtttaccattattattcctcaaaagatgggaatgtgatatgccttatgctttggttcaagtctagggtggataactgtgggcttcaataatttctttggtttaattttgttgagatttgaccatgcctggttccttgataaagcgtgtggagtttcatactttgatgaaaatcttaaactagattactgaacaaccttagtgtgccaacagaaaatagctaatacgggtgcgctttgttgtgtggccgctgggccacatggaacaaaatcacccactaacggaaaggactgttccatggatcgtaatgaaccacattggaggacanatacta

SEQ ID NO: 18561 - DNA, 768 bp, Gossypium hirsutum
  Clone ID: GOSHI-09MAY01-C32274_1
ggggaaaagaaaaaagaccctagctaagcctcctgtgatccttcttcaacatgggagattacaacgatgccttcatgcgcaaccaaaacgccgccgccgccgttcaggctcgcgttaaaccccctcagaaccgcgccaatattcagcagctcaagctgattggccaaagccatcctactggtttaacagctaaccttttgaagctctttgaaccacgacctccgttggagtttaaaccgcctcctgagaagagaaaatgccctccgtatacaggaatggcacaatttgtgagtcactttgctgagccaggagatcctgagtatgccccgcctgttcaggaagcagaaacacctgcacaacggagagcaagaattcataagttgcgactagagaagggcttggagaaggctgctgaggagctgaaaaactatgatccaaataatgacccaaacgtttcaggtgatccatacaagacattgtttgttgctagacttaattatgagacatccgagagtagaattaaaagggagtttgagtcttatggaccgattaagcgggttcggttggttactgataaatccacaaataaaccaagaggctatgctttcatcgagtacatgcatactcgggatatgaaagctgcttataaacaagctgatgggaggaagattgatggcagaagggttcttgtggatgttgagcgcggtaagacagtccctaattggcgccctcgtaggctaggtggtggacttggaactaccaagattg

SEQ ID NO: 18562 - DNA, 676 bp, Gossypium hirsutum
  Clone ID: GOSHI-09MAY01-C32204_1
cccccatcaagattagaggtgatattcatggtcaatattctgatctggtaagggggtttgagtatggtggatagccaccacatgccaactacttatttttaggggactatgttgatcgaggcaagcaaagtctggagaccatatgtcttcttcttgcttacaagataaaacaccctgaaaactttctcctcttgaggggtaaccatgaatgtgcttctataaaccgcatatatgggttctatgatgagtgtaagagaagatttaatgttaggctatggaggacattcacggaatgttttaactgccttccagtggcagcattaatcgatgagaagattctgtgcatgcatggaggcctttctcccgatctgaataatttggatcagattcgaagtttacatcgcccgactgatgtaccagacacaggtttgctctgtgatcttctctggtcagatcccagtaaagatgttcaaggttggggaatgaacgacagaggtgtttcatttacttttggtcctgacaaagtgtcagagtttttacagaaacatgacctacatctcatttgccgtgcccaccaggttgtggaagatggatatgagtttttcgccgaccgacaacttgtaactatattttcagcacccaattattgcggggaattcgataatgctggagccaa

SEQ ID NO: 18563 - DNA, 683 bp, Gossypium hirsutum
  Clone ID: GOSHI-09MAY01-C33844_1
cgattacaataactcctaacttcccggttgacactgggaatgggttatccgctggagctattgctggtattgtgatcggttcatgtgtgattctcatcttgctcttgatcatcctccgactgatgggttacttggggggcaaacacgatgaatacagtgaacttcatggtctagaacttcagactggctatttcagtttaagacaaataaaggctgcaacaaataattttgattctgcaaataagatcggcgaaggaggatttggaccagtttacaagggtatactgccagatggtagagtacttgcagtcaagcaactatcttctaagtcaaagcacggaagtcgggaatttgtgactgagatagggatgatttctggattgcaacaccctaatcttgtgaagctttatggctgttgtattgaaggaaatcaattgttgctaatttatgagtacttggaaaacaacagtcttgctcgtgccctttttggtcgtgatgaacaacgccttaacttgcattggtctacgagaaagaaaatatgcttgggaatagcaagaggccttgcttatcttcacgaggagtcaagactcaaaattgttcacagagatataaaggcgacaaatgtgctgctcgataaggatctaaatgctaagatttccgacttcggattacccaaccttgat

SEQ ID NO: 18564 - DNA, 452 bp, Gossypium hirsutum
  Clone ID: GOSHI-09MAY01-C33544_1
cccacgcctccgatccaatattcagactcggctacctctaagaaaattgggagttagctgcgtcacagagaaacagagtggaaacaaagcagaaaggaagagaagaagagctaaaaaatatatagatatttaaaaaaaaattcatcaatggagataacgaaccctaaaccatcttcgaaacgcctgctattcgaccggcgttatggtggggtgttggatgaatggaaagacccatcggaagaaagctctggctgctgcccgaggaaggtaaggtttctttcttttcttcccttattaaatcaaatattagcaattgctgtacttaaccactcttcttttttgcgttttttcttgggggtcattttcgaaagggtttgcataattcctctaacaaaagctttcttgaagaccggtacaaattcgatcaattttgtgggaaggtctactgtaaa

SEQ ID NO: 18565 - DNA, 422 bp, Gossypium hirsutum
  Clone ID: GOSHI-09MAY01-C33494_1
aattaacctaaaattctctgcaggagaggaagtgaagaaccctccaagctccggcctccggccttcatcgcccacgcgccatacgcaccaccgcccacggcggttggaaggtgaaaagcctccaatttttcaggcgaaacacaggtgacgacaagagaatgggcaacaatcgtacgttgatgatgcgaatctgccggtggtgggattggcacaccgattgcggcgtgaatttaagatcctttgtctgacgcttgcggtgcccagggtttctgaaaccctaggccttctgtcttctgttaatgatttgggcccccttgggccgtgtttaggcgttgcgttgggtgtaaccgggtatttgggttttaaactaattgggctatgtacatgggctactgtaaaaggacttttattcacaaattaaa

SEQ ID NO: 18566 - DNA, 857 bp, Gossypium hirsutum
  Clone ID: GOSHI-09MAY01-C33784_1
taactggaaaggtacaaattgctgcggggacagggggggaaccttgatgggaacagaaacacctacccctaacaaaaagaggtcccctacggcagaattctggtgcaataggttctggtgaaacggtagaagaagcagccatcacaacagcctataaagttgctgaagctgaaagtaggtcgtttttagccgctgaggccgtgaaggaggcagaaagagtctccaaaatggctgaagataccgattcaatgcttcagctagtgaaagaaatctatgaacaatgttcacgaggggaaactgttattttggtttgagtctttagctgcctaggatgtaagtgatagttgtctttttctttataaattttggaatctgtgtatgtatgtgaattgtggatccattgatcttgttcaatgaatcaatgcatgggcattgaaatgcatttatgaccattcaaagatccatgatgaatcatgtagttagtatattacaaggtattattgtacaattagcccgttataattagagtggaaaccagttttgacttttggaagcaacatgtagacaagggggaatgtacattttagaatcataataatgaagaaactcttttagccccatcccatggcattagtgacgaaaagcctacatttctatggatactaggggatgggatctatgatatttgggcggaatgttgggtatgcgtatgtgtatggtattggggtatatatatttcaaagttatttttactatatgtatttatgtggattctatttaatgaggtaacagtatataaattcatagatgatcagtgaattatgtgatgtaacaattaaaaagtttattttttatgt

SEQ ID NO: 18567 - DNA, 425 bp, Gossypium hirsutum
  Clone ID: GOSHI-09MAY01-C33744_1
cccacgcgtccgcacagatcacacgctatcacgggccttgtcgctaagtggcatgtatgtgcgacaatcggctctttcgacgaagctgatggtgaaacacccatggctcaaatcgcttctccgccgttgcttccggtggccgtcgattgggaatcgggtgaagaagatgaaggggatgatttggataacacgaagcttgtccccatttttgcgcacacggtttctttccaaaagagacaggcgttagcgacatatctagagcacaacagagctaggaatgaccgggtacggcgtcatggtccacagaactgtgaatccgcaccatatatcggcatcgagactaactttactgctttggctactcaacaagacaatagtgaacttgacatgaacaccatatatgacggacagaacttaacccgaca

SEQ ID NO: 18568 - DNA, 399 bp, Gossypium hirsutum
  unsure (1)..(399): unsure at all n locations
  Clone ID: LIB3146-022-Q1-K1-F6
cgaggaatgccacaaaaatcacttacagatcacaggctatcacgggccttgccgcggctgcgcatgtatgtgcaacaatcaactctttcnacaaaactgatggtgaaacacccatggctcagatcgtttctccacagatgtatccggtggacgtcgattgggaatcagatgaagaagatgaaggggatgatttggataacacgaagcttgtccccatttttgcgcacacgtgacatatctagagcacaacagaactggaattacagtgtacggtttcatggtagacaaaacttggatccacaccatattccggatcgaactagctttactgctttggctactcaacaagacaatagtaaacttgacatgaacaccatatatgacggacagaacttaacc

SEQ ID NO: 18569 - DNA, 988 bp, Gossypium hirsutum
  Clone ID: GOSHI-09MAY01-C33604_1
cgttactgagaaacctgaagagatgtggtcaccgcagacaccctctaatcaagaaactcgtaatgaatcactcgatcacaacaaaggctcaaactatgtcaaatttgtgaatggagtggctgttgttcgaggaagaacccgtagtctggttgagagatttgaacgaagagacttattaaactgcagtggtgatctggcaactgacagtatagctcctgctgtacctgaagcagataaaacaccggccataatcgaaggagggacaaaaatatctaaaacacaacctatatcggccaatgatgtaagtactgccgaaagtcaaagttctagaactgaaccagcttctagctgcgagggaggcattactgctagtccgattcctacaagggaatcgacgcctacttccgttgggatcattactggaaatcaaatttctagaagggaatcaaccttcactcccggtaggatgattgctcgaaatcagaattctagaaaagaatcaaccttcgcctctgataggatcattaccataaatcgaatttctagaagggaatcaacctctacttctgatggggtcattaagaaaaaccaaattactcgaaacgaatcgacttccatttctgatggaatcatttctagaaatcaacattctaaaaaggaagctgctgctgctaatgatgtgagtggaccaaacggtctatatactgaaaatcagatttctaggaggggattcaattccggtaatgatcggaatgttactaatatcgaaagccgaatttcaaaggacgagtcgatatctactaatgacggaaacctgaccgaaagtctcatgcaaacgcatgatacattcgtaagtactcttcggtcacgcttgacaaagttacaggtggtgcggcatttttgggaaaagaagacattaaaggttccattggtgcactgcgtaaactgccagatcattctgtgcaagctgatgttatcggtgttctca

SEQ ID NO: 18570 - DNA, 261 bp, Gossypium hirsutum
  unsure (1)..(261): unsure at all n locations
  Clone ID: LIB3135-006-Q1-K1-A8
cccacgctnttctttactctttgtcatacgcttatttaaaatcaaatttctatgaccagatccaattcctttaatgatcggaaggctactaatatctaaagccaaatttcaaaggacgagtctatatctactaatgacggaaacctgacctaaagtctcattcaaacgcattatacattcgtaagtactctttcttcacgcttgacaaacttacaagtgtgtccgcatttttgcgaaaaaaatgacatttaaggttccatt

SEQ ID NO: 18571 - DNA, 704 bp, Gossypium hirsutum
  Clone ID: GOSHI-09MAY01-C33624_1
cccacgcgtccgcgattttctagcattttataagttcttaatccggatagttgcttcatagcattttggtgggaaagacaccacactaaaccctagcgtggactcttccacataaaaaaagacctcctcgctatggagataaaactctcttgcatcctgcagtaacaagcttgtaggatgtttttttaagtatggggaaagcctcccacacctgaatatccttctgtcacatattaacctttcagtcaacaactgctgactctgccaccccaaaccctctttgacgggtcctgcagttgtagatgggacactttatgttgtctatgagatttttggaaatttaatgatgtgccagaaggatattagggcataggtggctatttggaggcttccccatacatagaacaccaccaccctacaagcttgttgctgttggaaagaacttttatctcgtaaggatggggggggggtgtagcagagtaatagttgatgttagcactgcaggcaatatgaaagggatgatggcgagtgcttatgtaccagcactcactgcaaatgatgaggttattataagctgtaaacatttcactgcaaatggtagattattgtaacttgtaaatgtttggccatctgaaaacattgattgggcttggatatcttctaatgctatacaacacctttcagttttttgccggacgcgtggg

SEQ ID NO: 18572 - DNA, 1027 bp, Gossypium hirsutum
  Clone ID: GOSHI-09MAY01-C33194_1
cttgttttctcagctcagttcccatggctttcgcttcggttttccgtaaatcagctaacgcgttggctccactcgcgattcgactcacccgagtccagaggaactaccactcctccatcttcagggctttgaaccatgggttacagtctcagaaaccggccgttaaccgtttttacccaaatagcttccatttctctaccgccgttgcttccaagaaaccctcttctgatgagtctctcgtccgagttcttgagtccgagattcaatttgctgagggtgataactctgagcaggttgtaggaactcctagtggattcccttttgaagtcgaagataaccctgggactcaaactgtaacattgaaaagagaatataatggtgagctcataaaagttgatgttcacatgcttgatcttaacgaagacgagcaagatgaagatgaagttgaagacaaggatggggataataccaatgctagaatcccgttcgttgtcaccgtttcgaagaaagatggtccgagtttggagttcagttgcactgcttttcatgatgggattggaatcgacagtttgagttttagaaatcccaaccctgaggatgatgaacttgcttatgaaggccctgatttcaatgatttggatgagaatttgcaaaagggtttttacaaatacttggaggttagaggaatcaagccaagtacaacaaattacttgcgtgagtacatggccgataaggataacagagagtatcttttatggttgaaaaatctcaagaaatttgttgaagaatgaagggtttataatagtttcttatattattgtttatgaagagaaactaggattatgaactgaaataacacaatatgcagattgttttatattatggctcagagattttgctttgagtgggaacattgtttaccttttgaataagaaaaaaagccatttttgtggaagtatatatgtagtaaggatttgaggtactgtttaatctttgtttgatgggaattataaatcaattgattgac

SEQ ID NO: 18573 - DNA, 447 bp, Gossypium hirsutum
  Clone ID: GOSHI-09MAY01-C33164_4
gtctgagtggttggtagcgcgacggacactcgtagaaccctagtatatcggcggttgccatcagcggactggcttcgtgcacaaatgggtacttaagtttgattagcctggcgtgattggtcgtgtcgttgtgggcacggttaacgtgaccgctgagaaaagtaacatgagaacttgtatgatacgctgaagagttacgtcgtatatttcagcggggttcggctggtgacttgggagttttactgcggttgcggcacggctgaatggtgtcgggtcgtatggcctagtttgccgttagacctcgtgtcggtgtatgcgatgacgatgaggggtttggtggtttggatcgtgagattaatgacgttgagtgtattagattaattgatactgctaattgcttggggttggacattatgctcggttgtacggtcgccggcatcggttggt

SEQ ID NO: 18574 - DNA, 476 bp, Gossypium hirsutum
  Clone ID: LIB3120-057-Q1-K1-E10
agggtgcaccgggtttctcagacgtacgtcgtgagtgggggttatcgcgaggggcacccggagaaccttagtatatcggtggttgcctccacggaatcggaacctgacgcgggtgtagcagattggtacgaatgaggatggggctactggttccgacttgagtctggcattaagtccgacgtacagtccgagcacctcacagcgctattcaaacagtccggtgcaactacggctacagtcgcccttcgcgcgaaaccgccacttgtctataaccttatataatacatgagttggaagtacaaagcgcaaagttcggggcgttcaacgagcgagtcaatctataccaaccgtgccgtgtctatcgtttgtcccttagctgggaaattcgctgcgttagtcgtaccaacgaactggttaatgtgtggagagaggttgcccgtgcaacgggtgtctccctgtccatccgtctatcgatc

SEQ ID NO: 18575 - DNA, 460 bp, Gossypium hirsutum
  Clone ID: LIB3120-057-Q1-K1-G12
tttctcagagtacgtctgagtggttgttagcgcgacggacactcgtagaaccttagtatatcggtggttgccatcagcggacttgagtctggcattaagtccgacgtacagtccgagcacctcacagcgctattcaaacagtccggtgcaactacggctacagtcgcccttcgcgcgaaaccgccacttgtctataaccttatataatacatgagttggaagtacaaagcgcaaagttcggggcgttcaacgagcgagtcaatctataccaaccgtgccgtgtctatcgtttgtcccttagctgggaaattcgctgcgttagtcgtaccaacgaactggttaatgtgtggggagaggtggcccgtgcaccgggtgtctccttgtccttctgtctatcgatctgtcgtgtctggctgcctggtcgtggtgagtggcactagtctatctaaaggtggcaaca

SEQ ID NO: 18576 - DNA, 453 bp, Gossypium hirsutum
  Clone ID: LIB3120-057-Q1-K1-C10
ttctcagacgttcgtccgagtgggtgttagcgcgacggacactcgtagaaccttagtatatcggtgggtgtcatcagcggactacttctcatattcttggaatgatggctgtgttgaagggtgcgtcgccgagttattacgttactgttgatggtccggatgggtcggtgtaggttcgggtgcggatactggttgacattgcggtttatggttctttgtcgccttatatttatggttcgacttctggtgcgtcgggactatcctatactggtctgtgctcggcttatattggtaaattgattttgtagtgccatgttgagattgttgttattacgcatcctggtgcgttgatggctcggatttgtactatttgtgatgagctgcttgttatggtgtcgcttctggtgtggtcgtcggctagtggtagtgtcttgccgttggcgttggcgcctg

SEQ ID NO: 18577 - DNA, 461 bp, Gossypium hirsutum
  Clone ID: LIB3120-057-Q1-K1-D11
cgggtttctcagacgtacgtctgagtggttgttagcgcgacggacactcgtagaaccttagtatatcggtggttgccatcagcggactgttgttatggcgatattgtagaagccggtgtgccggtcgttatgttgtttcgttgtggtgacctcgattgtgggtgcgggggttgtggtgccgtttggccgcgaacgtggtctggccttgactgtttgatggtcgcctggtgttgggattgctggggtcgtggtgtcgatgcctacgtcggttgtatttgtgactaatttggccgcttcggcagttatggttgccgtgccctttggtgagttgtcgtcggcgtcggtgtggcgctcggtgctaccgtctattgtggcgataacgggcccttcgcggatatgtcctggaagattcgaccgggctattaggatgccgttcgtgtttgtgtttgatgatgagctct

SEQ ID NO: 18578 - DNA, 464 bp, Gossypium hirsutum
  unsure (1)..(464): unsure at all n locations
  Clone ID: LIB3120-057-Q1-K1-F11
gtttctcagacgtacgtctgagtgggtgttagcgcgacggacactcgtagaaccttagtatatcggtggttgccatcagcggactgttcatattttgggtgcagtttaggctagttgtgtgactgtcgttgacgtgatgtcggttaagaagcatattcgggttaattggtcggcggttgctgctagcgatggtagtgttgcgtcgggttctggtgacactggtttggttgttctgtcgttggctacggagggtaagagtgtgtcgcctaagattcctggtggttcggatctgactttgactgcgtcggatattaaggattttgatgagactgctgagatgtcgacttggtcgtgtttgatgcctggngtggcgaattcggaggatactctggtgttgcgtcgtcctgagactgagtgttgcgctactgacgtgccggatcgcttggctacgtatgatgattagt

SEQ ID NO: 18579 - DNA, 416 bp, Gossypium hirsutum
  Clone ID: LIB3120-057-Q1-K1-G9
tacgtctgagtggttgttagcgcgacggacactcgtagaaccttagtatatcggtggttgccatcagcggactggcgtttcgttggttggtgctgtgtcggtttcatctggtcttgctgttgtgcgtgtgtttgtattgctgcttgttgattctgatgattcgtagattggacctgattgggtctgtcttgatagtgagccggttggcgatgtggtgatggtgtcgattggattgctgtgttagctgtaggctgttgtgtcgattctgactgttgttgagtgcctggtttatgttgatgtgtcggttgttgagactattaggtcgattgtgggtgagggtttgatgatggtgattagtatgattttgattatgatggtgttcgatttggtgatggtttttattgctgttaaggctg

SEQ ID NO: 18580 - DNA, 453 bp, Gossypium hirsutum
  Clone ID: LIB3120-057-Q1-K1-F12
ttctcagagtacgtctgagtggttgttagcgcgacggacactcgtagaaccttagtatatcggtggctgccatcaacggactcctgtggggtaatccgtgtttgcgactgggaagggtaccgattactttgtgtaagtgtttgcgtgtgtttggtccggtggtaattaaggggcctggaacggtgcggggctgccttgctctgggcctttgttgtcgtagtagacgagttatgatgattctgctggtcggactgggttgatatccgtaagtcactctgggggtcgagatctcgtttggtcgggtatacatttgactcgggtattaagtccgatgtacattgagagcaccacacagcgatattcaaacagtccggtgcaaatacggatacagtcgcccttcgcgcgaaaccggcacttggctataaccctatataatacatgagttggaagtac

SEQ ID NO: 18581 - DNA, 412 bp, Gossypium hirsutum
  Clone ID: LIB3120-057-Q1-K1-D9
ctttctcgtcgtacgtctgagtggttgttagcgcgacggacactcgtagaaccttagtatatcggtggttgccatcagcggactattgatcctggcgttcatggattgcattggagtcggcttggcattgatatgactcctcatgtgatgatgatggtgtcgctgtgtcttggatttgctattggtatttcggcatccctgatggcggggactgtcctggtgatgggtgctctctatgttggtcgggttgcatcggttgctcatcattattgtccgtgttatcgcggaggtgagtatacagatcccctttgacctgaggtggcggcttaggtttctgacttggttcctggcgtttacggataggttgtcgctggatctaaatgtattgctggacggtgcggctgtttgagaa

SEQ ID NO: 18582 - DNA, 415 bp, Gossypium hirsutum
  Clone ID: LIB3120-057-Q1-K1-E11
ccgggtttctcagacgtacgtctgagtggttgttagcgcgacggacactcgtagaaccttagtatatcggtggttgccatcagcggactgctgacgctattttgggttgggcgtgtgacgtgtcggatgatggtgctactgcgtcggctgttggaccttagggtgctagttaggatagtaaggacgctattattacgggttgtggtggtctggacattattgttgctgtgtcggttgtcgtgtcgaatgttgatgctcgtgagactcatattgatgctgatcgtactcctattgctgatttttgtactgcgtttaatgtttgttattcggattatgctcttcccgacgagacgccggagacggttcgtcgtggcgttaaggcgtcgacgtcgtgtcgtgcggaacatgtgtgttg

SEQ ID NO: 18583 - DNA, 403 bp, Gossypium hirsutum
  Clone ID: LIB3120-057-Q1-K1-F9
cgtgtttctcagacgtacgtctgagtggttgttagcgcgacggacactcgtagaaccttagtatatcggtggttgccatcagcggactagtcctatgtggtcagtggtagcggagtcggtattgtatgatacctgggctaatggtcctattcatagtgttatgtaatcttaaggaccttgatggcgaggttgctccgtgtggtgtggtcgtattggattcatttccctggaatgaccctcctggctctacgtttacgaattggccgttatggtttagtcgaccatgcgttgattgtggcgccttcggttcttgatgatctggtgacgactattggtagtaatactattgcggatggtggtgttattgctaagcatcggttgtcgacgttatactgacgatgct

SEQ ID NO: 18584 - DNA, 365 bp, Gossypium hirsutum
  Clone ID: LIB3120-057-Q1-K1-H12
tttctcagagtacgtctgagtggttgttagcgcgacggacactcgtagaaccttagtatatcggtggttgccatcagcggactcatagttagggtatgtcgtatttgtcgtttgttggtatttcgtagggggcgtttgtgtacgttgagctggcggttggaccggctgatgaggtgattgctgtatggacagttgatgaattttgttgtttgtcgaatcggtggttgggtgtggactttctggctgttgagtcgactggggattgtcctggtgtttaggctgctattaggctggcggaattgtcgtcgattggcgctcatgttgggctggttgctattactggggcgtgtgtggtgcctttggtg

SEQ ID NO: 18585 - DNA, 387 bp, Gossypium hirsutum
  Clone ID: LIB3120-057-Q1-K1-B10
cgtctgagtggttgttagcgcgacggacactcgtagaaccttagtatatcggtggttgccatcagcggactgatagtacatactgtcgtccgtggtgtagtgggcggatttggccgcgtaggcatcggcgtgtgaatgagacgcgttgtgttcgtctggtgatgcgaactagtacgataagtcttacgaatggacgtacggatccatttcatcataagatgcctcctcgggcgcggctgacggggcttcggcgggttagaatcttgaagacacatgggacggggaatggattcggacttactgatacgactggccgtagttatcatagtagtctgggtacattgggcatgcttatatctacgtgggctagtacccatcggggtacta

SEQ ID NO: 18586 - DNA, 317 bp, Gossypium hirsutum
  Clone ID: LIB3120-057-Q1-K1-G10
tacgtctgagtggttgttagcgcgacggacactcgtagaaccttagtatatcggtggttgccatcagccgactgctgatcggggcgattggccttgcgtgttctgatacagttgacttgagtctcgcattaagtccgacgtacagtctgagcacctcacagcgatattcaaacagtccggtgcaactacggctacacgtcgacgtcgcgcgacacggccacatgccgataaacattatatagtacctcacgttggaagtccaacgcgccaagttcgcggcgttcaccgagcgagtccgtgcataccaaccgcgccgc

SEQ ID NO: 18587 - DNA, 328 bp, Gossypium hirsutum
  Clone ID: LIB3120-057-Q1-K1-H11
tttctcagagtacgtctgagtggttgttagcgcgacggacactcgtagaaccttagtatatcggtggttgccatcagcggactgccaccggacatactgcagatgcggctggtccccgggtgttagatgcatatttctctgtaggtatactacattggagtgattcaacactcggaccatgataggttactgtaaagctgagcactgaggagtttgacaagttgacagtgtcagcggcctatagttaaggacttgacacccgcgttcgtactgcgtgtggtggatatcgggctgattagtacctagagggctacaacgacttgagtct

SEQ ID NO: 18588 - DNA, 330 bp, Gossypium hirsutum
  Clone ID: LIB3120-057-Q1-K1-A10
tttctcagagtacgtctgagtggttgttagcgcgacggacactcgtagaaccttagtatatcggtggttgccatcagcggactagtaagtgcgcgtagattgacgttacgacggtgtactcgatttggtcgtaggagactgttgactagtatgatggcaattgcgtgtcgggaatgtttggtcattaggttagttctgatcacgcggctaatgtgtcgtgtgataagggccctgaggcgtaaattttggaccctgaggcgtgtactttgcctgttgaggattttaatggctgaggcgctaggtattttggcggtggtttcgttgacgagt

SEQ ID NO: 18589 - DNA, 270 bp, Gossypium hirsutum
  Clone ID: LIB3120-057-Q1-K1-H10
agtacgtctgagtggttgttagcgcgacggacactcgtagaaccttagtatatcggtggttgccatcagcggactggtggcgcgttgattatatctggggctagctcgttgtattcctcgcttgttaaggctgaggtgcgtgttcatcctgcggcggctgaggtatcgattaatgcggttaacaatgttcatcttggttagcgtcgtgatatagcttcttctgatctgacactgaacgtctcgcacgctatgcggcctgatcatcggtgt

SEQ ID NO: 18590 - DNA, 263 bp, Gossypium hirsutum
  Clone ID: LIB3120-057-Q1-K1-C9
tttctcagacgtacgtctgagtggttgttagcgcgacggacactcgtagaaccttagtataatccggtggttgccatccagcggactgattgcggttattttcacgctggcgatggcgatgcgcttcctgatgctgtaagttcgtttggccatggaaagtcccttggttattgggctaataacgcttattagggtaagggtgctgccttgggcaaatggaactagggtgacccaatttcggggaaggggtttaagttggggaa

SEQ ID NO: 18591 - DNA, 245 bp, Gossypium hirsutum
  Clone ID: LIB3120-057-Q1-K1-C11
ttttctcagagtacgtctgagtgggtgttagcgcgacggacactcgtagaaccttagtatatcggtggttgccatcagcggactccgctggtgcatacgcgcattcgattggatatgccgtgtgtggtgtggttgacggctcggaccaggtcgtgtggtgattgtaggaagtttcttccgctggtggcttaggaccgttattagtgatattcctggtaggcttaagtttctatgaagtaggccga

SEQ ID NO: 18592 - DNA, 232 bp, Gossypium hirsutum
  Clone ID: LIB3120-057-Q1-K1-E9
cgggtttctcagacgtacgtctgagtggttgttagcgcgacggacactcgtagaaccttagtatatcggtggttgccatcagcggactgaggagatttagatgaccgcggctggtgcactgtactattaggtttagtgtatgacttcgactcgtctggaggtgtactataccacgttgtagggagtttttgtaatcggagacgtcgtcctgtatcagaatattgacgtttat

SEQ ID NO: 18593 - DNA, 565 bp, Gossypium hirsutum
  Clone ID: GOSHI-09MAY01-C33104_1
cccacgcgtccgaacaaatgctgttatacagtttgatccttataagaaacagtggaccagattatcgagtatgcaaacaccaagatctcactttgcatgctgtgttatgtcagggaaagtttatgtttctggtgggcgcaacttatcttatcctcgagggctttctcttgctgaagtttatgatccgctaggtgatcgttgggaggatatgccagaaatgccgaatccacaaatggactgcctaggtatatcatataaaggcaaatttcatgtttggagtgaccaggtacgcttggcagagcagaacccatccgaaattttcgatccatcaaataaaacatggtgcacagtctatgacatatggcctttttcgagggcaatgcaatttgctgttcaagtgatgggggatgatcaagtttattccgtggtggattggggggagagctttgttaaaactagagattctttaagaggagaggggcacaatgttggtgctgtttcctccggttcttcttcctgatcactggataaaaactttggcgccttttggttattttttttttca

SEQ ID NO: 18594 - DNA, 599 bp, Gossypium hirsutum
  Clone ID: GOSHI-09MAY01-C33124_2
cccacgcgtccgaacttcttctctccaatctctctatctttcatccccattcctccatggctcaacgtccctccctcttctctcaaaacccaactcttctccccctcaccaacccctccgatccccggcttttctccctccaatcagggcaatgaaatccatgcaaggccaggtcgtttgtgccacaaatgacaagacagtggcagtggaagtggtgcgtttagccccgcatcccaagtacaagaggcgtgttaggaagaagaagaagtttcaggctcacgacccagataaccaattcaaagttggcgattatgtgcagcttgagaagagccggcctattagcaagaccaagactttcattgcggtggctgtaccaagtaggaatgggaagcaggagaaggaggaggcaggggagcttgggattccattggagtctaaacagactcaagagcagccgcaggcttagtgttaagcccttcgcgtgggctccttttgttgttggtaaatttgtaatcttttgcaagtgatttcactgtttcaaaaactgcttttccttaatgtaataattgttgcttttcaagggtatggattgttttttg

SEQ ID NO: 18595 - DNA, 1946 bp, Gossypium hirsutum
  Clone ID: GOSHI-09MAY01-C33124_1
ctcccgttaaaatccctaaatttttttttcttttagttcaagacctttgcttcaatggctgatgcaggtggttcagccgtctctaagaggatgtggtgctcggttcccgaaagactccagctgcatatggccatgttggccttgcagttcggatatgcagggttccatgttgtttctcgagctgcccttaacatgggcgttagcaaactcgtcttcccagtctacagaaacatcattgctttccttctcctcctcccatttgcatatttcctcgaaaagaaggaccgaccagccattacactaaattttcttttacagttcttcctcttagctcttgtcgggataacagcaaatcaaggtttctatttgcttggtttggataacacatcaccaacctttgcatctgcaatacaaaactcagtccccgccattacttttctaatggctgctttgcttaggatagaaaaagtgaggcttgatcgaaaagatgggatatcaaaggtaataggaacagccttatgcgtggctggtgcatcagtgataacattataccaaggcccaaccatatacagtccaagaccatcattaaatacccccacaccacctatgtttgtttctttgggtgacgcaaatggaaagaattggacacttggttgtttgtttttgatcggtcattgcttgtcttggtctggttggctagtgttacaagcaccggtgctgaagaagtacccggctagactctcggttacgtcctatacatgtttctttggtctcattcaggtccttgttattgctgcggtttttgaaagggatgctcaagcttgggtttttcactctggtggtgaactcttcactattctctatgcgggagtggtggcatcggggattgcatttgctgtacaaatatggtgcattgacagaggtggccctgtcttcgttgctgtttatcaacctgttcagactcttgttgttgctattatgtcttcccttgctttaggtgaagagttctatttgggaggtatcataggggcagtgctgatcataacgggattatatttagtgctatggggtaaaagcgaagaaagaaaattcgcagctcaagaaaaagccgcaattcagtcgtcaacggcggagcacggcaacagcagagcatcgagccatatcaaaacatcccttactcagccacttttgccaccttcaacggaaaatgtttgacccctaaagaaaattcctaaactttcaaccattctgctttgctgcaaaaaatgaaagaaacaaatggggaaaaaaccaagcactaccctatatcagaaagtttgtgtgtgtatgatttttttttaatttcttttctttttctttttcctttttaatttagtcgtcaatggctgttctctgagtagcagagagggtttttgaaagatgatgatgatcactgtcacagctgtgtatgatggcttatggggggcctgaaattctccatatgcttttttatatgttagtcttatggcttgttttaaagagccccgcataccaagtacaagcaggcgtgttaggaagaagaagaagtttcaggctcacgacccagataaccaattcaaagttggcgattatgtgcagcttgagaagagccggcctattagcaagaccaagactttcattgcggtggctgtaccaagtaggaatgggaagcaggagaaggaggaggcaggggagcttgggattccattggagtctaaacagactcaagagcagccgcaggcttagtgttaagcccttcgcgtgggctccttttgttgttggtaaatttgtgatcttttgcaagggatttcactgtttcaaaaactgcttttccttaatgtaataattgtcgtttttcaagggtctggattgttttttgagtttgtcatgacattcattctctgctctatttttgattggtttatttg

SEQ ID NO: 18596 - DNA, 595 bp, Gossypium hirsutum
  Clone ID: GOSHI-09MAY01-C33064_1
aaagtctcaaactttcacgcttttcagttcagttcttccgcatacaaacagagagagaggcccgtaactttatgatttcatatgtgtgaagtgaacaattgacaacatggcttccacattgtttagaactattcaaatccacccattttttctctacccaactgcattatttagcagaaggaatggcgtcctttactgcacagtgaagagtcgtcaaactcaaacagcttcacaagaaatgcagcaccctcccaaagccaaagttccacaacatgccctgaaaaaaacagttgttaagatcacaagagactatgaggcattctttggaatagagacacatgtccagctttcaactctcaccaaggccttttgtagctgtccttacaattatggatcccaaccaaataccaatatctgtcccatttgcatgggattgcctggtgccttgccagttttaaactcgaaagtgattgaattcgctgttaaattgggtcttgcacttaattgtaagctatctctaaactcgaagtttgataggaagcagtacttctatccagaccttccaaagggttaccaaatatctcagtttgatatc

SEQ ID NO: 18597 - DNA, 899 bp, Gossypium hirsutum
  Clone ID: GOSHI-09MAY01-C33324_1
aaagaacttattgctaccctaaaacctttcctatttctgcccatatcaaccttttttttttgcctattgccaccccctctcctccattcgtggtggtgccgataatctcctttttctccctttcccattctctttttgtgccaattttggctgttgtatttttagccaagaaaacacattgtgccagccttaaaaatcatgtttttggatgtccccaactagccttgaaaaatctcttttggtgccttgcaaaatcgtccccttcgtggccaataatggtggtgtgccgccctaaaccaccattaggggctactgaattttattatttttaccacctttttccaaaaagtttttaatccgtattaccctactttaataagcatttaatcatgtgttatttaggaataattgatccctatcattcgacaactcagatctgggtaacgggtagagtaaaatgcagatttatgcgagatcttgcactgttttgattttgtttggagttgttgctttgtcaaaatgttctaaggccttaatgtggatttttttactgacttttgagtattaaatatgatgtaggtgctggtttgaacatctcgaatcaatagtgaagttgggtttcgttcgcattctcgtttcgcatcaaatcagtgtacgtttaaggtgttatatcggaaacataaactcttacggtttagtgttgtgaaggcgtaattaaggtgtgggtttttaacttattagatataagtgttaaattttatatttttaatgattaaattgatatttaagcttgttggtcggcttatttaaaattttaaataagtgatttaaatgtggccgaatcaggtacaattcgagcctaattaaatagcatgaatacaaaactactatggttgact

SEQ ID NO: 18598 - DNA, 428 bp, Gossypium hirsutum
  Clone ID: LIB3149-033-Q1-K1-B2
gtttttaatccgtattaccctactttaataagcatttaatcatgtgttatttaggaataattgatccctatcattcgacaactcagatctgggtaacgggtgctggtttgaacatctcgaatcaatagtgaagttgggtttcgttcgcattctcgtttcgcatcaaatcagtgtacgtttaaggtgttatatcggaaacataaactcttacggtttagtgttgtgaaggcgaaataaggtgtgggttctaacttattagaataagtgttaaatttatatttttaatgattaaattgatatttaagcttgttggtcggcttatttaaaattttaaataagtgatttaaatgtggccgaatcaggtacaattcgagcctaattaaatagcatgaatacaaaactactatggttgactaaataattgtatg

SEQ ID NO: 18599 - DNA, 548 bp, Gossypium hirsutum
  Clone ID: GOSHI-09MAY01-C33244_1
caccaatttaccaacccctctccccctaaaagaaaatcaatacctgcgaattgtcttagctggttcttgtttggttgttgagaaaatgcaagaaagtaaagaccctgggatcaagttgtttggtaagaaaattcatttacctgctgatggagagatttcaactctctctgttgatgaattcgacaaggctcagtgtgggaacagagtagtagatgatgaagactatgaagaatttgatgatgatgatgatgatgatggtggtggtggtgatggtgatgaagaagaagatgaacagaaagacaaaacagagctggattctttagcagaacagattgctgatactggacaagaagatgacaacatccagccgtcaaatagagaggaatcaactaatccagagacttcgccagagcctaatgtaaacccgaaaactccctctattgacgaagaaaccggaaaatcgaagaccggaaagactgataaagaacagagtgatggtagcaaatcacaggagaaaacactttaaagccagatcaaatactttcatg

SEQ ID NO: 18600 - DNA, 574 bp, Gossypium hirsutum
  Clone ID: GOSHI-09MAY01-C33214_1
cccacgcgtccgcccacgcgtccgcccacgcgtcccccacttccttgttattattgaaaaaaaaaaaatgagagatgggtttcacagagaagccagaagggttggtgaaagaatcatgggagggtttgaagccagatattcctcacttcagcttgcgtttcttttcactgatattggagatagcaccaggtgcgaagaacatgttcagtttcttgagggagtcagaggagattcctcaaaataatccaaagctcaaagctcatgctgtcaaggttttcaagatgacatgtgagtcagccatacaactgagagagaaaggggaagtggtagtggctgatactactttgaagtatttgggcactgtccatgtcaagagtggtgtcaaagacccccatttcgaggtggtgaaagaggcactctttaggacaattgaagaagcatttggagaagagaaatggaatgaagagatgaagaatgcttggggtgaagcttatgatcaattggctgaagctattaaggctgagatgaagaaccaccatgatgaaactgcttaattacccttttacttcttcaa

SEQ ID NO: 18601 - DNA, 308 bp, Gossypium hirsutum
  Clone ID: LIB3148-011-Q1-K1-A1
ggtagtggctgatactactttgaagtatttgggcactgtccatgtcaagagtggtgtcaaagacccccatttcgaggtggtgaaagaggcactcataaggacaattgaagaagcaattggagaagagaaatggaatgaagagatgaagaatgcttggggtgaagcttatgatcaattggctgagatgaagaaccatcatgatgaaactgcttaattactcttttacttcaattttattgttgtttgccaatattttcacaattttaatgaataaattttagtaataaagactattttgtttttctatc

SEQ ID NO: 18602 - DNA, 427 bp, Gossypium hirsutum
  Clone ID: GOSHI-09MAY01-C28544_1
acgaccaacttcaacactgtttcatcatattgatagtttctctgcaaaggagaaagcatggtcaaggactcaaccttattgtgttacagaaaacaaaccctgtattgggtggcttcaaagatacttcagagactgtctttgtaatttaaaagatgaattttcttttgggtttgggattattagtttggtttgttggggtgttgcagagatccctcaaatcattactaatttcaaaaccaagtctgctcatggtgtttccctcctttttctcctcacttgggttgctggtgatgtgtttaatcttgttggttgtcttcttgaacctgcaacattgccgactcagttctacacagctctgctctatacaataagtactgtggttctagtgttgcaaagtgtatactatgattatatcaacaggtggtgg

SEQ ID NO: 18603 - DNA, 525 bp, Gossypium hirsutum
  Clone ID: GOSHI-09MAY01-C28514_1
tagaacctacttctttttttgtgttgttaggcttcaaattagttaggctaaaacttcgcacgctggcactgatggatcttagaaagcttcaaaaccatgctgcctttcatgttactggcccttagaaaaagggttttcacactacattgaccacaaataccatacattagaagtcttacatacagttctttctttattcttttgctaccaaaccttcctactcccttccttaatttccctgtatataattccctttgcgtctaaacaacctccaaagccatcaccacttccgacatgggacttacagagtattatgtcaacatttttggttctcttgtgctgcttgctttccttggattgatcctacgtttggatcatgagctggtggtgaagccaatgaagctccgagcaagattactcaagcaaggcatcaaaggaccgtctccgagtctgctaatcggaaacataagagagataaagaaggcacaatccagcattgttaaggtttctagcatgcacccccct

SEQ ID NO: 18604 - DNA, 359 bp, Gossypium hirsutum
  Clone ID: LIB3048-035-Q1-L1-H1
aaccatttctttttttgtgttgaaggcttcaaatgattaaggtaaacttggcaccttgactatggatcttagaaagcttcaaaaccatgctgcctttcatgttactggccctaataaaaagggtcatcacactacattgaccacaaataccatacattagaagtcatacatacagttcttactttatgctttagctaccaaacctttcctactccattgcttaatatccctgtatataatttcatatgcgcctaaacttcctataaagccatgaccacttgcgacatgttacattacatagaaccatttctgcatgtaagttactattgaactgcaagcttcaacaagattgatcctac

SEQ ID NO: 18605 - DNA, 434 bp, Gossypium hirsutum
  Clone ID: GOSHI-09MAY01-C28264_1
gtgacttcattccattgctacgacccttattgagagggtgcttgaacaagtgcagggacttgcagaccaggaggctggccttcttcaacaactattatgttaagaaaagaagggaaataatggctgctgagggggacaagcacaagataagctgtgccattgatcacattatagatatgctcaaatgaagggagagattagcgaagaaaatgtgctctacattgttgaaaacatcaacgttgcagcaatcgaaaccacactgtggtccatggagtgggccatagctgagctggtgaaccatccccacgttcagcacaggatccgccaagaaatctcccgagtcctcaacggagaggctgtgaaagaatccaacctccatcaactgccctacttgcaggccacagtgaaagagacattaaggttgcacaccccaa

SEQ ID NO: 18606 - DNA, 328 bp, Gossypium hirsutum
  Clone ID: GOSHI-09MAY01-C29504_1
aactggtctgagcttctggcaggcctataccttggaacctggggctgagggtgccaaagcttaaagaaatttacgaagaactgcagaagaaaccggttagtactggctgctgactaggattcttaatggtttattgaataatttgggtggatggccctccttaactgtactttggtcggggcaaggaagaaattatggaaatgcagaaaaatcaggtaatgctcatttcttccatttccaccatgcacttgtattagcattcacaacagcaactagctttcagatgggtttcaaagcctaaagattactggatttttgcaaattgtag

SEQ ID NO: 18607 - DNA, 571 bp, Gossypium hirsutum
  unsure (1)..(571): unsure at all n locations
  Clone ID: LIB3827-001-Q1-K6-D8
atttgtgttcactgtacgttaaaacatgtgtacgatngaaaaagaaaaacttgtcagcatcaatggtgattcaagtgattttaactctgtcaaagccgtgtttgacgaaatgtctgaaagaagataataaaaagccatcttctttaccattcttttgaagcaactcatcatggcctcttcagttggttttgcacaccccacttcttctttgatcattaacaagaaagataaatgcctctcagtcgtcccttcaacttcacaactctcgatttacaaatgcaagaaacccatttccaacaacatttcgatggcaatggccacgcgacaatcagagagaaaaccagccaccactggctcagttactgtttttttttttaaccattgatctacatatatttcgattgaatttgggaattttgtaaacgtttttcatatattccatttggatttcagatgaagagtccaatgacgatgacagagaagctacttgcaaaaggggcggagaaagcagaggtgaaagcaggcgacaacgtttgggtgaatgttgatgttttcatgactaatgatataa

SEQ ID NO: 18608 - DNA, 290 bp, Gossypium hirsutum
  Clone ID: LIB3048-051-Q1-L1-A8
cagttggttttgcacaccccacttcttctttgatcattagcaagaaagataaaagcctctcagtcgtcccttcaacttcacaactctccatttacaaatgcaagaaacccatgtccaacaacatttcgatggcaatggcgacgcgacaatcagagagaaaaccagccaccactggctcaatgaagagtccaatgacgatgacagagaagattcttgcaaaaggggcggagaaagcagaggtgaaagcaggcgacaacgtttgggtgaatgttgatgttttcatgactaat

SEQ ID NO: 18609 - DNA, 823 bp, Gossypium hirsutum
  Clone ID: GOSHI-09MAY01-C29604_1
aaacaaatgccccaagaaaatatcaaacacgacaatgcggaatccaatgcgtccgtaccttcttctatctctagttttcttcttcaacctgtatcattcaatggcagtttcagatcctactcatcaagccctccttcaatgtttaacccaatccattcccaccgacacagcttcctccattatcgtctctaaatccaaccctccatatacttctgttctacgtgcttacactcgtaacgcccgtttcaacacttcttcaacccctaaaccactcatcatcatcactcctttagatgaaccccatgtttccgccgccgttatttgttcccgaaagcttgggtttcaactcaaaatccgtagcggcggccatgatcacgaagggttgtcttatggttttgataaaacccttttttggtctcgatatgtttaaatctccggtctgtttctgttaatatgaccgatgaaacagcttgggtcgacgccggtgctacactcggtgaacttttttataacatttggaaaaacagtaaagttcatgagtttcgggcgggggtttgtcctactgtcgcgtcggtggtcatttaacggtgctggacggtttgttggttgatcatgtcgtaaatgctaaattagtcgacgttaacggaaaaatccttgaccggaaagcatgggcgaaaaattttttgggggctataaaaaggcggcggagcagcccgttcggcgttattatcttatgaaataaaattcatccctgtaacggaaaccgtcaccgtcttcagaatcgaaagatcgttaacgaaacgtcaccccccccccccccccg

SEQ ID NO: 18610 - DNA, 406 bp, Gossypium hirsutum
  Clone ID: GOSHI-09MAY01-C29014_1
ccctcacgctcgttcttgaagctgttataaatatagaaggttgatgaggagcccaattgtgccgagctcatatccttctttgagagcctcattgctccatgcataccattgagaccaattagaattgatggagctctcaagggtgggcacaagcgcggaagattagccattaatttggaagaagatgagcaacccaagaaataagtacgactgggtattcctgctactcagtgggtttctgtttacaatgcacgacgtcccatgaagcagcgatatcactacaacgtagcagattcaaggttgcatcagcatgtagagaacggtaatgaagatggatcgttcattagttgtgtggcttcagcagcatatctctgggccctgatcatggatgcaggaacagggttct

SEQ ID NO: 18611 - DNA, 421 bp, Gossypium hirsutum
  unsure (1)..(421): unsure at all n locations
  Clone ID: LIB3048-041-Q1-L1-H7
accgaaccgtggtttctgcaggttttcatcttcccagtattattgtggcatattgggagaacacttcccattattgaggtctcatatgtgatgacgaaacatatatggtgttcaaagttggaaaatggtccactcaaatcagattgcctctctttgatgttgnttttatggtgcatgcttctttgttaaaatatgagatattgagccatgaggtttacaaattgttctgcatagagtttgttctttgtcgggtagttctcaaatgttgttccacgtttccgtaactttttatcaatcttgtagatatcactacaacgtagcagattcaaggttgcatcagcatgtagagaagggtaatgaagatgcattngttattaattgtgtggcttcagcggcaaaattttgggccctgatcatggat

SEQ ID NO: 18612 - DNA, 661 bp, Gossypium hirsutum
  Clone ID: GOSHI-09MAY01-C24994_2
gaagggtagcatgagaaggaagaagaaggctgtccacaagacaaccaccaccgacgacaaacgattgcagagcacccttaagagaataggagtgcccgcgcgtccgccgacgcggggggtcaacgtattcaaggatgatgttgttatccagtttattaatcccaaagttcaagcttctattgctgcgaacacctgggttgttagtggctctcctcagacatagaaattgcaggatattctccctggaatcatcaaccagttgggacctgataacttggacaacttgaggaaattggcagagcaattccagaagcaggcacctggtgctggtgagggtaccggtactggtgcagtcgccactcaggaagaggatgatgaggaggtaccagatcttgtacctggtgagactttcgaagctgcagcagaagaagtccaagctgctgctaaatagtgtttttctctttaattttattgttatatgttttggtggtttttggtgctctttccttgtactcttaatggtttggttcagagtaaaccattttgttttctagaattcctattattattggcaatggattagatgcatttttcccaaaggccaatagtttgtcttggaatccctccctttgcagtaaatcttatctacagtttaagttgc

SEQ ID NO: 18613 - DNA, 813 bp, Gossypium hirsutum
  Clone ID: GOSHI-09MAY01-C24994_1
tttccggggtgcccccctgggttaagtaaaccctattttgttaccctatcttttccagctgtagttgcagtcgaagtcgcggcatatccagtttaatactcctaccgtaaagatgaacaaggaaaggctcatgaaaatggctggtgcagtccgcactggtgggaagggtagcatgagaagaaagaagaaggctgtccacaagacaaccaccaccgacgacaaacgattgcagagcacccttaagagaataggagtgaatgctattcctgcaattgaggaagtcaacatattcaaggatgatgttgttatccagtttattaatcccaaagttcaagcttctattgctgccaacacctgggttgtaagcggttctcctcaaacaaagaaattgcaagatattctccctggaatcatcaaccagttgggacctgataacttggacaacttgaggaaattggcagagcaattccagaagcaggcacctgctgccggtgctggtgacggtaccggtgcagccactactcaggaagaggacgatgaggaggtaccagatcttgtacctggcgagacctttgaagctgcagcagaaggccaagctgctaaatagagtttttatctttaattttcttttgttatatgtttttgatgaatttaactatttgtttctttttccaaaatttctctatctgtggtttttgtttgctctaccttgtactcttaatggtttggttcagggtaagccttctagaattcctattattattgccaatggattagagatgcattttcccaaaggccaatagttatgtcctg

SEQ ID NO: 18614 - DNA, 607 bp, Gossypium hirsutum
  unsure (1)..(607): unsure at all n locations
  Clone ID: AI727504.1
gcaatccgatacgcattgttaagatgaatgtggagaggctccagaaaatggctggtgcagtccgcactggtgggaagggtagcatgagaaggaaaaaaaaggctgtccacaagacaactacgactgatgacaaacggttacagagcaccctcaagagaataggagtgaatgcgattcctgcaattgaggaagtcaacatattcaaggatgatgctgttatccagtttcttaatccaaaagttcaagcttctatcgctgccaacacctgggttgttagtggttctcctcagacaaagaaattgcaggatattctccctggaatcatcaaccagttggggccaaataatttggacaacttaagaaaattggcagagcaattccagaagcaggcacctgctgctaccggtattggtactggcgtaaccaccactcaaaaaaacgaagacgaagaggtaccanatcttgtacctggtgagacctttgaagctgcagcagaagaaagcgaagctgttaaatagtgtttttagagaatattagtgtttgtcttaatttttctgttatatatatataatttatttatgaataacggttgttttattttcattac

SEQ ID NO: 18615 - DNA, 449 bp, Gossypium hirsutum
  Clone ID: uC-gsronu33b025c01b1
ttaccaaccaccaggctttatcagagacgtgagcagctgctgcaaccaagggcattacttcaaacccaagcttttgttctgccttagctgctgctctcacttcctttgttggaaataatggaagtggtggtggtactgcaagtgaactaggctttgcatcaagctgctacctgcagggaaaaaaacccttatccatggttaatcctcaccagcaacaaaagcagggttgcatgagaagaaagaagaaggctgtccacaagacaaccaccaccgacgacaaacgattgctgagcacccttaaaagaataggagtgaatgctattcctgcaattgaagaagtcaacatattcaaggatgaaggttggtatccagcttattaatccccaagttcaagcttttatttgctgctaacacctgggttgttagtggctcttctcagacaaagaatt

SEQ ID NO: 18616 - DNA, 322 bp, Gossypium hirsutum
  unsure (1)..(322): unsure at all n locations
  Clone ID: uC-gsflmaxxa014d07b1
ctcactcacgcgagcgcagtgccagctgggggcgagacgcgtgaagaagatgcgggatatcctttttagaactccctactgtgagatgaacaaggataggcgtatgaaaatgggccantgcaatacgtagacggttaggaggagtgcatgagaagaaagaagatggctgaccacaagacaactaccacagacgacaaacggttacaaagcacccttaagagaataggagtcaatgctattcccgcaatcgaggaagtcaacatcttttaaggacgatgtttgtatgcagtttattaatcccaaagttcaagcatctattgct

SEQ ID NO: 18617 - DNA, 415 bp, Gossypium hirsutum
  Clone ID: LIB3135-058-Q1-K1-A10
cccacgcgtccgggagaactaaatgagagccatttcttgaattcattcccacacatacagagacagagaaagccatttcttaatatcttacatctgtactcgaaattatacttcatttttacttgtaacaataataaatactactgaaaatagtaccaaaaatggaagactgggcaaccctttttttttttcaaaaaaaaaaaaagaaaaaagaggtttcaacgctttgcaaaatcatttattaaagtacccttctttggagctagttcacatctgacactggctgactgaccctttaagcattaaaaattgggggggggcggtttaaaggatccaaatttaacttccgcgtgggagaaacgaaaaaattttttataggggcacctataaataaattcctggcccgtgttttaaa

SEQ ID NO: 18618 - DNA, 203 bp, Gossypium hirsutum
  Clone ID: LIB3149-001-P1-K1-D2
aattaaatgagagccatttcttgaattcattcccacacatacagagatacaaagaaagccatttcttaatatcttagatctgtactcgaaattacttcattgttacttgtttgttttatgtacattaaatgattgtaacaataataaatactactgaaaatagcaccaaaaatggaagactggacagcccctttttttttttc

SEQ ID NO: 18619 - DNA, 973 bp, Gossypium hirsutum
  Clone ID: GOSHI-09MAY01-C24894_1
cccacgcgtccgtgcatctcttgtactgtttctgtcttcaaaacgcctgcgaaagatctaatctttcaccttcttctaaactcttcaaataaggcaaagaaaaaaaaaacacccaaaaagatgaaaatcgggttccttgtatttgtagctgttgcattgctagcattcttgtgtagcccgaatgccgtgtatggaattagattcgtaattgatagagaagaatgcttctctcacgatgttaagtatgaaggggatacaattcatgtgtcgtttgttgtcatcaaggctgattcaacttggcataatagtcatgagggtgttgatctggtggtgaagggacctaccggtgatcagattcaagactatcgagacaagataagtgagaaatttgagtttgttgctcatcaaaaaggaattcaccatttctgtttcagtaataaatctccttactatgaaacggtcgactttgatgtacatgaaagtcattttacatactatgatcagcatgcaaaggatgagcatttcaaccctttgttagaacaaatatctaagttagaggaagctctttataacatccagtttgaacagcactggttagaggctcagacagaacgtcaggcaatagtaaatgaagccatgagtaaaagagcagttcacaaggccttttacgaatctgcagcactaattggagccagtgttcttcaagtttacctactccgccgcctttttgaacgaaagcttggaatgtcccgggtttagttttagcactgcactgcaatgtttcattagctataggatcatgcagactattgtcatctcaggcacttgatacatacatgaatttatgaaatcagtgacgttttctgtttttaagtctttagatttatcattgttgagtaaacataaactatataaagcatgattggttcaagttatttctgctaaaaaaaaaaaaaaaaaaaaaggcggccgc

SEQ ID NO: 18620 - DNA, 562 bp, Gossypium hirsutum
  Clone ID: GOSHI-09MAY01-C24804_3
cccacgcttccggaaaaatgaacctttcttcgttgcacgacgaatgaggcgtgaagcatgattttaaaaggaaaaaactctttaaaacagattggtcggtgttcatcatctctaattataccccatgttcagtctcatgattttaacttcacccctcgcctccgcggtcgcgtgggtgctgatttacctagctccggtcaggtctttgcagttcccgttgctccaggagatgttatcattgctggcacagatggactgttcgataacttgtacaataacgaaattactgcggtggtggttcatgcactgagagctggtttggggcctcaagtgactgctcagtagatagcagcattggcacggcaacgagcacaggctagagaccgacaaactcctttctccactgctgctcaagatgctggattccgttattatggtggaaagcttgatgacattactgttgttgtgtcatacattaccagctccgaagaaaagaacaagtctagatgaaattagtgaagctggtatggcctgggatccaaatttcggttataagttgatc

SEQ ID NO: 18621 - DNA, 568 bp, Gossypium hirsutum
  Clone ID: GOSHI-09MAY01-C24804_2
cgagcacaggctagagatagacaaactcctttttcaactgctgctcaagatgctgggttccgttactatggtggaaaacttgatgacataactgttgttgtatcatatgttactagctctgatgaagcttcaagcaaaaagagttgaattctgagcagttgccttccggttgacctacatggaaatgaacatcgggagtgacaccatttactcaggcttgatgaggatttggagcttttgtagccaggaaacttgagttggctggcttgatttgtggctatccagttgtcttttgtttgatttggttttttgtcactgattccttttatgttcgtggagtaaagtgagatgatatgctctccatgttcaacacctgtcattattgtaattaatcataaataatacactaatatcattccgttagtatacgaaatcctcagttaacaaaggactattctagtcatttcgcaacaagacgccagaaatcatgcccagtgtaagcagctatttgactgacccaaacgaggcttcactcttgctttatgctgaaactaatattaaaaaaata

SEQ ID NO: 18622 - DNA, 880 bp, Gossypium hirsutum
  Clone ID: GOSHI-09MAY01-C24804_1
cccacgcgtccgcccacgcgtccagcatgtgtcatagcacttggagaccagggacttcatgctataaacttgggggacagtggttttatggtggttcgggatggatgtactatatttagatcccctgttcagcagcatgattttaacttcacatatcaacttgagagtggaaataatgctgatttacctagctccggtcagatctttgcagttcccgttgctccaggagatgttatcattgctggcacagatggactgtttgataacttgtacaataatgaaattactgcggtggtggttcatgcactgagagctggttttgggcctgaagtgactgctcagaaaatagcagcattggcacgagaacgagcacaggctaaagatagacaaactcctttctcaactgctgctcaagatgctgggttccgttactatggtggaaaacttgatgacataactgttgttgtatcatatgttactagctctgatgaagcttcaagcaaaaagagttgaattctgagcagttgccttccggttgacctacatcgaaatgaacattgggagtgacaccatttactcaggtattcataaaaaattactgccaagtttttttcccggagtactgccaaatattttggcttcggagcaaaagaaaattcctcttgttgtgctaacaagtatcattgatgcataggcattaaaattagatgtgataaacaatctgacatttgtatttgttaattatcatttcgtttacattgcattcattgtagttacttgaaaaatgcaaataatacatgttttcttttcttcttgggagaacaaggctgataaggatttggagcttttgtagccaggaaacttgagttggctggcttga

SEQ ID NO: 18623 - DNA, 560 bp, Gossypium hirsutum
  Clone ID: GOSHI-09MAY01-C24834_1
cccacgcgtccgcttgaaccatttgctaagaagtgcttcttttagggctgccattgactatatagggtctgagagaagggatgtttgcatgccatcccatggtggaaatatgggccacgctattcagggacagagagcgttttcaggacacaaaaagtatataactccaaataaaagacatatgcttccttattttctgaactcctcaatgcccgaagcagagttcaacaggatcataaaagaattacaccatgaatctttgggacaaccagaactcatgaccagcaaagctggaagggatgtaaccaagtatccggttccagaatgtatgtgcaatgatgcacattcccacttcatttgatacagaaagcttccaacccgatagctaacattgcaagagtcttcatcgagaatccaaatttctctgtgcttccccgaattcgagccctttgaaaatggagaataatgatttttcagacactgatgattgttgggagcgccatttcaagaaggaccacagccctcacaagcttttctgcaagcgtatcgtattccggtct

SEQ ID NO: 18624 - DNA, 893 bp, Gossypium hirsutum
  Clone ID: GOSHI-09MAY01-C24824_2
atgaaactcaaagcacaagagctacgggagagggctcggaaaaggaaagaagaagaggagaggagaatggaacgagaaagggaaaaggagaggattcgagtgggcaaggagttgttggaagcaaaacgtattgaagaagaaaatgaaaggaaacgtttggtggccctgcggaaagctgaaaaagaggaagagaaacgagcacgggaaaagattcgtcagaagttggaggaagataaggcagagagaaggcggaagcttgggctgccaccagaggagccttcagcagcaccgaaaccttctgcatccattgtggaggagaaaaagagcgcattgccagttaggcctgccacaaaggctgaacatatgcgcgaatgtttgcgatctctcaagcaaaatcacaaggatgatgatgcgaaagtcaagagagcattccagactcttcttacatacataggaaatgtggccaggaatcctgatgaggagaaattcagaaaaattagactaaataatcaaactttccaggatagagttggatctgtaaaaggaggagtggagttcttggagctgtgtgggtttgagaaagttgaaggagaggagttcttgtttctctcaagaaacaaggtcgacatgcaagttctcaactcagctggatctgagctcaactctgctatcaataatcccttttttggggtcctttaactctgaaaatttactttaataaaactatataattaaggcatatgcattcatatatctattttggcttgttcctctttggtttttctttggagaatgtggaattttatctgtgaatttaatgatgtaccaactgggtattttccgctcataactttcacatagtttggtttatttttaccgaacctcatttagct

SEQ ID NO: 18625 - DNA, 684 bp, Gossypium hirsutum
  unsure (1)..(684): unsure at all n locations
  Clone ID: LIB3582-030-P1-K1-D9
cccacgcgtccgatttaaggaaaaaacatagtttccacttttagtataataacccttgatcatactgccaagctccaggtgtctggcctgtcttatgcagctaaaagttcattccaatctctttcatttttatgatatgaaaagtttgaaagttctctagcttgtctttccttgaaggactatgatacatttcagatatatttcaagatgttattgaagacttgtatgtctgtgggacagtgttctcctgcttcatattcatcttattcataaataatagggagagggctcggaaaaagaaagaagaagaggagaggagaatggaacgagaaagggaaaaggagaggattcgagtgggcaaggagttgttggaagcaaaacgtattgaagaagaaaatgaaagaaaacgtttggtggccctgcggaaagctgaaaaagaggaagagaaacgagcacgggaaaagattcgtcagaaattggaggaagataggttctaactctttcttnccgtgtcaatcaatatncactatgttactcgaacttgcatgagtgctngatatgagcatgtgtccagcatggtatgctcgattttttacatgtttttcatgtatttggaagatccttagagggtcatatctccatttctatgtgtgggtatgtgccaaatgcaggtgttgacatgaa

SEQ ID NO: 18626 - DNA, 565 bp, Gossypium hirsutum
  unsure (1)..(565): unsure at all n locations
  Clone ID: LIB3828-031-Q6-K6-G11
naaagngacgcttgccagttaggggggggcgggggggggcataacgcgatgtttgcgatctctcaagcaaaatcacaaggatgatgatgcgaaagtcaagagagcattccagactcttcttacatacataggaaatgtggccaggaatcctgatgaggagaaatcagaagggggggctgagtaatcaaactttccaggatagagttggatctgtaaaaggagtggagttcttggagctgtgtgggtttgagaaagttgaaggagaggagttcttgtttctctcaagaaacaaggttgacatgcaagttctcaactcagctggatctgagctcaactctgctatcaataatcccttttttggggtcctttaactctgaaaatttactttaataaaactatataattaaggcatatgcattcatatatctattttggcttgttcctctttggtttttctttggagaatgtggaattttatctgtgaatttaatgatgtaccaactgggtattttccgctcataactttcacatagtttggtttatttttaccgaacctcatttagct

SEQ ID NO: 18627 - DNA, 967 bp, Gossypium hirsutum
  Clone ID: GOSHI-09MAY01-C24574_1
cggacgcgtggggctggacgcttctagaattctaatgagacctttttttgatattggcgtttcggtctcttcatatccccgtcgcccctgcggtcgccccccctccccttttccataaccttcaacctctcagcatactcaggaacactgctgatcagtaactgctggatatcatggatatatgccccgatcatagatctgtctctatttcttcccttgcatttctttattactactaatgcatctctttcgatgatgatttttggccattgcatgttgataccgattcgagttgctgccctataagcaattgcttcagcagcataagccgatacaacttggtgatagatcttagaaaatgattaaagaactgtgccttcgctatcccttgctacgatccccactgccgattgacaagtagtaccatcatatgctgcatcaaagttaaccttacgaattgacttggtggatgttcccagcgcttggcgacctgaactgtccctgatctactagttttttcatgtattctcttgttcctgtcctcccaaatggcccacggagcgcaatagaaagtcttacactggagtgaagatatctgttcgaaaacccaaggcattcacgaaaaatgtggttcatggtttctgctacttctccacagcgagggcaatgtgtgtcatttgaaagcttacgaagctgcatgttaattcgtgtgggaagataattccacgatattttccaagctgtcatttttatcttagatggtagattgagtagccagaagttttttgtagaattttctgtagtcattttgtagtcagtttataggcactgcgtaccgcatattctcccgatggcttccccctccaggctagaatgtctcgtggggttctcttattatcggaatacgcaaaatcttcatagttatatcttccgggaaaggtgaaaaaaacaaaaaaaaaagataaaa

SEQ ID NO: 18628 - DNA, 656 bp, Gossypium hirsutum
  Clone ID: GOSHI-09MAY01-C24534_1
agaagaatatcccagaagtgaagccgtgagggtaacattggctccgagggccggaactttgtcgcttccacagttgtacgaagcggaaatcatcatgaactcacagttgccatggtctaaacagttggtccacaattggaagtggaccttgtctgtatggacatcgctctatgtatacatgttcttcctcatacttctcgtcggttgctttagacagctattctttccattcacagcatcagcaggtgtcgaaagagatgcaagcgtagaggaattgagagagccagtaatgggcggcagaagaaatgatcgggttgaggtttccgatctaatgagcaaatggcagcatagcagacggaagcggaaggcgatctttctgaacaaaggagtctcagagatagcggggtcatcagcatcaagcatgagcctaactagggaagataagagtgcggtaattgaagaggatgtgggagactcagaatcagtatgtttaggtggttgagtttaaaattttccatgtttatgtttcacctacatatttatgctttgttttcttttgatccttcttagcaaaccttctttcttttccctagtaaataaatagtttactatgcttcagatgagaagtagggcgaaatgttgaattcattgacatc

SEQ ID NO: 18629 - DNA, 394 bp, Gossypium hirsutum
  Clone ID: GOSHI-09MAY01-C24464_1
tgtccatctgctgtattaccagtgttggactcactggtggaccctcttcaaaagacaattaatttcaagcccaaacaagatgctgtcaaacaggaagtagaccgtaatgaagatatgatccgtagtgctcttcgtgcaatcgcatccttgaaccgaataagtgggggagatagcagtatgaagttgaagaatctcatgagtgaaatatcgaaatctccaacattatgggacaagtattactccatccggaacgagtgaggtaatcttctaattgtgtaaagtaggtaaaggtttgatcggattgcattgcgatccgaatccaggggaacattgttgttgtgaaagatgataattgttggatattgagttggtttcatgtatgattgcatcctgc

SEQ ID NO: 18630 - DNA, 1560 bp, Gossypium hirsutum
  Clone ID: GOSHI-09MAY01-C24784_1
caaaaacgcaaaaggggtaactcctgctcagccccctggatttgagaatgttgcagttgctagaagtagtgcactacaatccgaaaggtcttatcatgacaagaacttatctgggataaatgataattctgggatatcagtgaatacaaagaagtatcatagcttaccggacatatctgggctgtctgttcctcatcgagtgcccgagaagagtggccagtgggacagttccattggatatgggttgtccattggtcggacaaattatggaacacccatgtattcaaatgctgggtcaagggtaggtgttccattttcctttgatgagctttctcatttaaagggttatagagatgctttgcctttacagttgggttcaggttctggcactggatccctttggtctagacagccttttgagcagtttggtgtagctgacaaaagtcacactgctggcaatgaagcagttggaagtgggttgaactcagtaactcgggatactgcttctggtgtggatttagagtccaagcttcttcaatcttttcgacactgtattgcaaggctcttgaaattagatgggtctgactggttgtttagacaaaatgatggagctgatgaggagttaattgatcgtgtagcagcaagggagagatttctttatgatgctgaagctagagagatgagccaggttgttctcattcgtgaacctcaatacttgtcttctgaaaggaggtatggttctacacagaagagtgatgaggcaaattttgccaacttctcaatttcatcagtacctcattgtggggagggctgtatatggaaagcggatttgataataagctttggagtgtggtgcattcaccggatccttgatctttcactgatggaaagccgaccagagctgtggggaaaatacacatatgtgcttaatcggcttcagggtgtgatagatcttgcattttcaaagcctcgaaccccaatgtccccgtgcttctgccttcaaatcccccaggaatatcagaagaggttaagccctcctgtttcaaatggaatgttgcccccagctgcaaaacctggcaagggtaagtgtacaaatgcagtcacgctcttggatatgattaaggatgttgagattgctatatcgtgccggaagggtcgaacgggtactgctgctggtgatgtagcttttccgaagggaaaagagaacttggcatctgtccttaaacgctacaagcgtcgattgtccagcaaagcatccaatgttccaacatcatgtacgatgttggctgcttacagttcatagtttttgttccagtttccttctacaggttcacagttatctagctgtttggttttcaatggcagctcattcattagaccacttctcacaggactgtgaaaaccaactcctccttccgtcctttctctgtcttgtgtattaaaagccattgctgcagtgtatgtgatagatacataggataaaaggtttattggatatgttgtaattgcagcagaaagaattaagaaaatggggttccgagaaaggtggaaattgatcgt

SEQ ID NO: 18631 - DNA, 846 bp, Gossypium hirsutum
  Clone ID: GOSHI-09MAY01-C24754_1
tgagatagggcaactctcaacagttccaccaaagcaaagaacacgacaagccatcgaagaattcatcaaaaggaaacgagaccttccacgtgaggctttcaagggaggtttcattttagagaagattgcaatgccactttccactggccacctcaacctaatcaacacaaacatcgacaacaacccttcggttaccttcaactacttcggccacccccgcgacctacgcagatgcgtcaatgggattcggatggctgccaaggttatacaatcggaccgattcacgaacttcaccaagtgtgacaaaccgaccgtagagaggcttcttaacatgagtgtcaatgctaacattaaccttatacccaagcatactaatgacaccaagtccctagaacagttctgcaaagacactgtaatcacaatctggcattaccatggagggtgccatgttgggaaggtggtggaccctaaccacaaagttcttggaaccagaagactccggatcgtggatggctccacatttagtgaatcccctggaactaaccctcaaggcactgtcttgatgatgggcaggtatatgggagtcaagattttgagacgaagactaggcaaagctgctggtgtgtaaggaccggcctttgtttgtggtagtagtgggagtaggaaatgaaatgtgataagtctgtagagaaataggaaatttggtgtttccttttgatttgcgctgtttatttttctgtcatgttgactgtgctctactaatggttggtgccaagattgatgagaagtcaaaaaaaagggaaaaatattttaggacattaggcttagctatgtgtttgcttttga

SEQ ID NO: 18632 - DNA, 479 bp, Gossypium hirsutum
  Clone ID: GOSHI-09MAY01-C24714_2
ggacctggaatgcctctttcaaaagaatctttggctgaagctaaacgtagattggaagcattggacaagaaggatgcagagcgaagaagaacagcagaggtgaaaaataaccttgaagaatatatatatgctacgaaagagaagcttgaaacatctgaagactttgaaaaagtatcttcaaatgatgaacgccaatctgttatcaaaaagcttgatgaggttcaagaatggttgtatactgatggtgaagatgcgagtgcctcggagtttcaagatcgtctaaattcattaaaagcgacagctgatccaatatttttccgatttaaggagttgactgcacggccagaagcggtagaagttgctcgacaatatctctccggcctgaaacagactattcgtgggtgggagacagaaaaaccctggctgccgaaagacagaatagatgagttgtcaacccgtatggacaagttgaagacttg

SEQ ID NO: 18633 - DNA, 420 bp, Gossypium hirsutum
  Clone ID: LIB3189-015-P1-K1-D10
cccacgcgtccgagtacaacggatcttggtacataaagaaaactaaagaagcggacctttaaagttccactgaagatagtggaggagaacaacaggacctggaatgcctttttcaaaagaatctttggctgaatctaaacatagattggaagcattggacaagaaggatgcagagcgaagaagaacagcagagttaaaaaataaccttgaagaatatatatatgctacgaaagagaagcttgaaacatctgaagactttgaaaaagtatcttcaaatgatgagcgccaatctgttatcaaaaagcttgatgaggttcatgtatggttgtatactgatggtgtagattcgattgtcttattttttcaagttctgtttatgtttattttatgttacttttttttttcatttttttttttttt

SEQ ID NO: 18634 - DNA, 435 bp, Gossypium hirsutum
  Clone ID: GOSHI-09MAY01-C24704_1
caaatctgttcttcagggcattctgctttcttcagaaggggaaacgttgaactcgatgaatgggctactctatatgtccccaattgcagttctagttttagtgcctactgcacttgtaatggagccaaacgtgttagaagtcatcatatcacttggaagacaacatagatacatgtggctgcggcttttcattaactccacactcgcatattcagctaacttatcgaacttcttggtgactaaacatacaagtgcattgacactccaggtattaggcaatgcaaaaggtgcagtggctgttgttatctcaatacttttgttcagaaatcccgtcacagctgttggcatcggcgggtatacgatgaccgtacttggcgtcgtggcttatggagaagcaaagcggagggttaaataaatggtgggatggtgtttgga

SEQ ID NO: 18635 - DNA, 877 bp, Gossypium hirsutum
  Clone ID: GOSHI-09MAY01-C24154_1
cttttctatgagagagtgttcttatcattaatgggaacagattgcatctgcctcatgatccgcaattgcagcgttccttgcagttggcttttagaattaaagatgatcaagagaacgatgatgcaaagaggcaacggcatgatgatgacgatgatgatgacgacgatgatgatgacatggaaactgatgatcatgatgaatttgaggagaatcatgcttcacatggggatgacaggggaatatatagggtattagggggctctgccaagagatcgagacaagtccaggtccatgaagatgcgggtttccataattcttcaaactcccaggactgcaacaaaagttctttttcttatccaccacccgcacaagctgatataaatcaagcaccacctgaaaacccaagagcagcttggttacaaaagcagtggattgagtctcgctcacttcagctagaagaacagaaactacaaattcaagttgagatgctagaattggagaaacagcgtttcaagtggcagagatttagtaagaagagggatcgtgagcttgaaaagatgagaatggaaaacgagaggatgaagcttgagaatgagcgaatggcattagagttgaagcgaaaggaactggatgctgattaaaaccatgtgatttttacctcaatcttcttatattcttttacagtggcaggcctggatgcaaatttaatttctgctatattggtatcctgaagtattgaatatagaattggcagactaagttgaaaaatgatgatgcctacttttattgtgtaaacatatgcatgactttttaaaatttgtatgtagttgttttgctctttgtgaattggtattaattagctagaagagttttgtgc

SEQ ID NO: 18636 - DNA, 478 bp, Gossypium hirsutum
  Clone ID: GOSHI-09MAY01-C24114_1
aaagatttaagcaaggccacggaagaagaaaaaagggattcgcttaacagccaacattttgtttccttctgctactggctagggtttaaatcaggggttttccttcttcttctcactgcttcaccactattccaccatcaacaaccaatggatagataccagaaagtagagaagccaaagcctgaatcacccattaacgagaatgagatccgaatcacttcccaaggtgctattcggaactacatcaactatgctattgctcttcttcaggacaagcatgtgaaggaaattgtcttgaaagcaatgggacaggcaatcagtaagacagtagccattgccgagattttaaagaaacggattcctcgcttgcatcaagatacttccattagctcggtgagcataactgatgtgtgggagcctattgaagagggccttgttcctgtggagatgattcgccatgtctcaatgatatctatta

SEQ ID NO: 18637 - DNA, 842 bp, Gossypium hirsutum
  Clone ID: GOSHI-09MAY01-C24054_1
ggttactcaactgtctccttcagttctgaaagctgagggtgtaccagtctatcgggccgtacaacattctggggagtttgttcttacctttccaagggcatatcatgctggatttaattgtggcttcaactgtgcagaggcagtgaatgttgctcctgttgattggctagaacatggtcaacttgcagttgagctctacagtgagcagcatcgcaagacatcactgtcccatgacaagctactcctgggatcagctcggcaagccatccaagctctcagggagttacatgttcttggcagagaaacgccgggaaattcgaggtggaaacgtgtatgcgggaaggatgggatgcttacgaaggcagttaggatgagaaagcagatggaagaggaacgagtaaattgccttccccctgatatgcctgtacgaaagatggaaaaagactttgatttggaaagtgagagggaatgtttctcttgtttctatgacttgcatctatctgcctgcagctgcaaatgctctcctgaacgatttgcttgtcttaaacatgtaaagagtttctgctcatgccaagatgaagacaagtttgtcctccttcgctacaccgttgatgaattgcaaatgctaattgaagccctagaaggaggattaatgctgttaaactatgggcatccaagatctcgggtcggtttcaggtattgattgtgatgcttatttgtctaagtgggttcagacatgaggtattaaattgagcctgctcaaccaaggaaagtttctcttgttcctcaagattggagaaaaaaatggatttatactccttacttgtatggtcatttttctg

SEQ ID NO: 18638 - DNA, 543 bp, Gossypium hirsutum
  Clone ID: GOSHI-09MAY01-C24074_1
tcaaagaattggaactggaattgctgtgtctgctatggcaatggtgattgctgctttagtagagatgaagaggcttcaaactgctcgagaacatgggttggtagacaagccaaacgtgacagttccaatgagggtatggtggttggtcccccaatactcactgtgtgggttatctgatgtgttggcaatagtaggtctccaagaattttattatgaccagatgccaaatgaattaaggagcatcggtattgcactctaccttagcatccttggtgttggaagcttcttaagtagctttctcatctctgtaattgagacagtaactggtaaagatggcagagatagctggtttgcagataatcttaacagggcacatcttgattacttttattggctgcttgctgcacttagtgcccttggattggctctctatgtatattctgcaagatcttatatttatgctaggcgaagcacgtcgtaaatagcttctagcccatgttcctgggatacctaagaaatgaataaaatatatcatttcaacat

SEQ ID NO: 18639 - DNA, 413 bp, Gossypium hirsutum
  unsure (1)..(413): unsure at all n locations
  Clone ID: LIB3585-063-P1-K2-C1
cggacgcgtgggtaagaactgaataaaatatatcatttcaacataaataaataaaagatcttgcagaatatacatagagagccaatccaagcgcactaagtgcagcaagcagccaataaaagtaatcaagatgtgccctgttaagattatctgatgtgttggcaatagttggtcttcaagaattttattatgaccagatgccaaatgaattaaggagcatcggtattgcattctaccttagcatccttggttttggaagcttcttaagtagctttctcatctctgtaattgagacagtaactggtaaagatggcagagatagctggtttgcaaataatcttaacagggcacatcttggttacctttattggctgctngctgcacttagtgcgctnggatgggctctctatgta

SEQ ID NO: 18640 - DNA, 401 bp, Gossypium hirsutum
  Clone ID: GOSHI-09MAY01-C24064_1
agaagatcgaggcatcgtttgacacctggaactgtcaaatttgcagcttttcatgttctctcactggagggaagcaaaggattaacagttctagaacttgcagataagattcagaaatctggacttcgggaccttacaacgagcaagacgccagaggcttctatttcagttgctttgacaagggatgcaaagctttttgaaagaatagctccttcaacttattgtgtacgacctgcctataggaaagatcctgctgatgcagaggccatactagcaacagcaaggaaaaagattcgggcaatttggagaatggatttttaggtgtagaagatgctgatgaagttgaaagagatgaagtggaaagagatgatgttgagagagatgaagactctgaatgtgat

SEQ ID NO: 18641 - DNA, 451 bp, Gossypium hirsutum
  Clone ID: GOSHI-09MAY01-C25974_1
catcatcatttttagcaaaaccactgatgatagcgacagagagggttcaaacaagagagttaaagatattgaggtttgtgttccaattgtttatggaactattgctttttatctcggtcgaaaggctagtgagtcgcaatcacataagtggactgtttacgtgcgtggggcaacaaatgaagatcttggagcagtgataaagcatgttgtatttcaacttcatcccagtttcaataaccctacaagaattgttgaagcaccaccttttgagttatcagaatgtggttggggtgaatttgaaattggcattagcattttcttccatagtgatgtttgtgacaagcatttggatttgtgagttgtttatttggttgctcacttgatttgatgccttgtttactaactaggctctgtatttgtaggtatcacatgttgaagttggatcctgaaa

SEQ ID NO: 18642 - DNA, 401 bp, Gossypium hirsutum
  Clone ID: GOSHI-09MAY01-C25964_1
cacaactccccctcaattccatcgctagggttttctcattttttgttttaaatttttttattttcagagaaaaaattaacataagcgtaaagtgaaaaaggattattctgaggatttttttatataattatactatttaaatttttttttttgtatggaaaattgtcaacaagtagaatcgggcacggctctgtgtaagcgcggtggtggtggtggtggtgatgctgagaataatagtgatggtttgaatcgaggagtggagcttatgaacgtcgatcactgccggaaggttccgttgacggaagattcgaatctcgtcgatgtcgcggttcgtggagatggtggtggtatgggggaggtgaaattggggaatgaagtcaaagtcgttgagatgaaacgga

SEQ ID NO: 18643 - DNA, 877 bp, Gossypium hirsutum
  Clone ID: GOSHI-09MAY01-C25924_1
atttggagtatgtgaagagagaaaaaaatggacaattccaagcatttcttctgaaatatgtaaatagttgggttgtaagcatctattgccataaggtaattaggttgtccgctgccacccaggattaccccagatccatcatctgcaatgttcatggagttaatcccaagttccttgagataggcaaggaaaggtttgagcaacaacatagcagtatccaccaggccttcaccaaaggtgcttactacattgggaagatgatttggaacaaaggctatggggagctacttaaactacttaatgatcaccaaaaggagctcgctggtcttgagattgatctatacggcaatggagaggactccgatcaagttaaagaagctgctaacaagctgaaactgacagttagagttcatccgggtcgtgatcatgctgatcctttattccttgattataaagtgttcttgaatcctagcacgacagatgttgtttgcacaaccacagccgaagcattggctatgggaaagattgttgtttgtgccaatcacccctctaacgacttcttcaagcagtttcccaactgtcgaatatatgacgatgacaatggttttgttgaagcgacatgcaaggcactcagtgaggagcctgtaccattaactgatgcacagagatatgagctgtcttgggaggcagccacggagcggtttttaaaggtttccgagctgaaccaggtctttgcaacagaaagggagaaaaattcgtcaaaggaatttgcatcagtctccttgaacttgtggaaaagcatggaggacacttcagcatattttcaccatctgggattaggatttgaaacaactagaagagcatttggtgcaatttc

SEQ ID NO: 18644 - DNA, 396 bp, Gossypium hirsutum
  Clone ID: LIB3048-052-Q1-L1-F10
aaaacacatttggggtttggcaaacttgaggagtctcacgattcggagcatcagttcagtcacttctcaatgaatggcctagtagcacctgttgcacctggaccttgaagaatgcccctggctccatggattgcccatgatccatcatgggcagtcttcatgggagtcatcccaaattacttggtataggcgcataacggtttcagctacgacatatcagtatccaccaagcctttaccaaaggtgcctactacattgggaagatgattcggaacaaaggctatggggagctacttgaactacttaatgatcaccaaaaggagctcgctggtcttgagattgatctatacggcaatggataggacttccatcaagtttaagaagctttttacaagc

SEQ ID NO: 18645 - DNA, 418 bp, Gossypium hirsutum
  Clone ID: GOSHI-09MAY01-C25854_1
gaagatcgaagacccggagattgtacacgggctagcaagtcacagcaagaaaggtgaagattttacgttgcttaaaacagaatgccaaagagcgctaggagatggtttcaccacattctcggtttttgggctctttgacggacacaatggatctgcagctgctatttacacgaaagagaatcttcttaacaatgttctaagtgccattccggcagatcttaatagagatgaatgggttgctgcccttccgagagctttggttgcaggtttcgttaaaacagataaagattttcaacagagagcaaaaacgtcaggaactactgtaacctttgtgatattagaaggatgggttgtaacagtggcatctgttggtgattcctgctgtatatttgaatcagctgaaggtggaatatatcac

SEQ ID NO: 18646 - DNA, 419 bp, Gossypium hirsutum
  Clone ID: GOSHI-09MAY01-C25814_1
gcagctgccaaaggtggtgtgaccaagaagaaaagtggacatgctgatgaagatcactcccctgaacatagccaggctgatgagaatgaacgggttgccggtgatgatgacgacgacgatgttcagtggcaaactgatacttctcttgcggctgcccaacaacgcatccaagagcagttgagtgctagtactgctgatatggtgatgctctctaccgatgaagagaagaaaaagtcggttaaaaagtctcccgagcctgagaccaaggttcatgagaatggtggtggtgctcatgatgaacttgctgatgagataaaggtatacttcaagaatggatcggctccaaatcagcttagatcctttctaggatcacttactggaacctgcaaagaagtcatggatgctctatttatagcact

SEQ ID NO: 18647 - DNA, 915 bp, Gossypium hirsutum
  Clone ID: GOSHI-09MAY01-C25804_1
attcaccacgagcctagggagaaaaatgcgatgtccgtaagctctctatcagtgttgcttcgtgcagcgatataccttgaaacaactgttgcttgtcgacttgatttggagagaaggatggccttgcaattaggacaggctgttttggatgatctcttgattcctgcatattctgttaccggcgatacattatttgatgtggacaccatgcagcggatcctgacgaactacgttgaatatgaaactgaaggccaccattttggatacaaagaagatgatgagtacatttctcccccaccaagtgacatggaaagggtgggaaagctaatggagagctacctagctgaaatagcatctgaccgtaatctacctatctcgaaattcatcggtcttgctgaactcattccggaacaatccagggtaacagaggatgggatgtacagagccatagatatctacctcaaggctcaccccactataactgacttggagaggaagaaagtttgcagcctaatggattgccagaaactctcccgggaggcctgcgctcacgctgcgcaaaatgaccgtcttcctgtccagaccgtggttcaagttctttactacgaacaacaacgccttcgagacgtcatgaacggaagcatgttcaagtggaacttccccttccatatcttccagagtgaattttataccccccaccagatatccccccagtttcggatgaactttcgagcttgaaacgagagaacgaggacttgaaactagagctagtaaaaatgagaatgagattgaaagaaattgaagaccatcatccgctgttccgtcagcagcaagcagtcctatgggaattattgtccatcatctgatagcctcttttgcagaaatcattcatgatcagttcttagaactggaccc

SEQ ID NO: 18648 - DNA, 916 bp, Gossypium hirsutum
  Clone ID: GOSHI-09MAY01-C25824_2
ggtcttgatgtcaggtggtcctatcgatgtctcattcgctaagaatgatcctcgagttagtgccattatatgggctggttatccaggccaagctggaggaactgcaattgcggatgttttattcggaacaaccaatccaggagggaagctgccaatgacatggtatcctcaagattatgtagctaaagtcccaatgacaaacatgggaatgaggccatcaagaggctaccctggaagaacctacagattctataaaggtccagtagtgttccctttcggacatggcctgagttatacaagttttaaacactctttgccctcggctccaactgatctctcggtacttcttggcaccaatctttttgccaccaaaaactactcaacattgtcaagcaatgccataagggtgaaacatgccaaatgtgattcactttcctccctttttcacattgacgttgaaaacactggcaatatggatggaactcacacattgcttgttttctccacgccacctgctggacaaaaatggtctccgaacaagcaattgataggtttccatagggttcacgtcgtcgccgggtctaaacaacgcgttaagatcaatattcatgcctgcaaccaccttagcgttgtcgatgaattcggtattcgaagaattccaatgggttcacatagtttacacattggtgatctcaagcattctatttctctccaagcaaatttggagggcatcaaggtctaaatgctcaacagagttaaaagaacaatataaaaaaaagacccatactaattacaaagttaatttttattaatcttaagctttctaaagaaatctctctcaaataaaatgagataaaaacctcaaaagtttgggagaggttgaaataccactacacttccaagggaagaaagtggg

SEQ ID NO: 18649 - DNA, 983 bp, Gossypium hirsutum
  Clone ID: GOSHI-09MAY01-C25824_1
ccgcactgttgctgttattgggcccaactctgatgtcactgtaacaatgataggaaattatgcaggagtggcatgtggttacacgagtccattgcaaggtatttcaagatatgcaaggaccattcatcaggcagggtgttcagatgttgcttgcggcacaaacaatctgtttggagcggcggaggttgcagcccacgaggcagatgcaaccgtactcgtaatggggctcgaccaatctatagaagcagaattcagggacagggtagggctgctcttgcctggacgccagcaagagcttgtttcccgagtggctcgagcttctagaggtccaaccgtgctggtcttgatgtcaggtggtcctatcgatgtctcattcgctaagaatgatcctcgagttagtgccattatatgggctggttatccaggccaagctggaggaactgcaattgcggatgttttattcggaacaaccaatccaggagggaagctgccaatgacatggtatcctcaagattatgtagctaaagtcccaatgacaaacatgggaatgaggccatcaagaggctaccctggaagaacctacagattctataaaggtccagtagtgttccctttcggacatggcctgagttatacaagttttaaacactctttagccttagctccaactgatctctcagtacttcttgacaccaatctttttgccaccaaaactactcacattggcaagccatgccataagggtgaaacatgccaaaggtgctcctcctccctccttttacatgaacgtgaaacactggcatatggatggaactacacattgctgtttctcacgccactgctgacaaaatgtcctcgaacaagcattgtagttcccatgggtcacgtgcgccgtctaaacacgcgtagatcatatatgctgcacaccctaacgttgcagaattggatcagaatcatggtccatgttacccctggttcaactc

SEQ ID NO: 18650 - DNA, 603 bp, Gossypium hirsutum
  Clone ID: AI054688.1
gatgttgcttgcggcacaaacaatctgtttggagcggcggatgttgcagcccacgaggcagatgcaaccgtactcgtaatggggcttgaccaatctatagaagcagaattcagggacagggtagggctgctcttgcctggacgccagcaagagcttgtttcccgagtggctcgagcttctataggtccaaccgtgctggtcttgatgtcaggtggtcctatcgatgtctcattcgctttaaatgatcctctagttagagccattatatgggctggttatccatgccatgctggaagaacttgctatggggttgtttattttgtactatcatttagtatgataattgcatatcttatttacctctgtaattttatctatatttcctattattactttggtagtatgcctttagatgctttccttgattaattgttatatataaaggtcactttatttactttagtaattgttcatgttttagttttattatttttatttacatcatatatatttaatattattattacaattctttgtctataatttttaattttcatcattgttttagttgtatttcttatttataataatatttttatgaat

SEQ ID NO: 18651 - DNA, 576 bp, Gossypium hirsutum
  Clone ID: AI054800.1
gatgttgcttgcggcacaaacaatctgtttggagcggcggaggttgcagcccacgaggcagatgcaaccgtactcgtaatggggcttgaccaatctatagaagcagaattcagggacagggtagggctgctcttgcctggacgccagcaagagcttgtttcccgagtggctcgagcttctagaggtccaaccgtgctggtcttgatgtcaggtggtcctatcgatgtctcattcgctaagaatgatcctcgagttagtgccattatatgggctggttatccaggccaagctggaggaactgcaatgtgggatgctttattcggaacaaccaatccaggagggaagctgccaatgacatggtatcctaagataagtatctaatgtccaatgcataatgtgaatgaggtcataagaaggttccttggaaaacctacggattcacaaaggccagtaatttacctttctggacatgcctgtttataccattttaaacctattagctttatttaactgataccgatttcttctgaatccatatttcgctaccaaaactacttaattgtatgtatcctataa

SEQ ID NO: 18652 - DNA, 691 bp, Gossypium hirsutum
  Clone ID: GOSHI-09MAY01-C25554_1
caattatataattaataatatatattcatactttgaaatttataataatatttttttataatttgataatcgatacctagggacattttatgtaattaacccacgaataaaaaaaatttaaaaaaacttaatataaacgccaaggaagtataccctttttcagagtcataaactacttctgcaacaccaacttgattcagtctcgatctttccgccgttaatcagctaccctgtccctccaacgttctatatttgatctctttactctaaacaaatcacgccctccaccttctgttttacttcaataccccctccccatttttctactgcttttggggtaatgctgattgcttgaactgcatccctttgctttcatacatatttcagcttggagatttgaaggggaaccggaagagataccttctttctggggggacaaaatcctataaatatgactggttatatcgttggtgcgctggttcctatggttttttacccttctccttcggagttcaaagaaggtaaagaagcgaggggtgccagtcgatgttggtggggaaccggggtatacaatccgaaacagtcgattcccttcccctgttgaaacatcatgggaaggtatatctactcttgcagaacttttgagcaggcatgtaagcaacacgcagataaaccattgcttggaactagg

SEQ ID NO: 18653 - DNA, 611 bp, Gossypium hirsutum
  Clone ID: GOSHI-09MAY01-C25544_1
cggacgcgtgggaagaattttctcttcgttcggtttgtccaactgctaatattggaggagtgattggcaaaggtggggctataatcaaccagatcaggcaggaatcaagtgcagccatcaaagtagatagctcaactacagatggagatgattgcttaataactatatcagctaaggagttctttgaggatacgtattcacctgctatcgaagctgctgcacggctgcaacctagatgcagtgagaaggttgaaagagactctggaattgtatcattcacaacccgcttacttgtgccaacctcacgtattggttgccttattggtaaaggaggagctattgtaacggagatgagaaggatcacgaaagctaatatccgtatcctgtcaaaggagaatcttccaaaaattgcgtctgaagatgatgagatggttcagattgctggagaccttgatggtgcaaaggatgcccttgtacaaataacaacgcggttaagagcaaatctttttgatagggaaggcgctgttaatgcgttggtgccagttttaccgtatcttcatgtgccaactgaaggaacagacagtttgagttatgaaagtagagagggaaaa

SEQ ID NO: 18654 - DNA, 249 bp, Gossypium hirsutum
  Clone ID: LIB3493-025-P1-M1-B11
ggtttgtccaactgctaatattggaggagtgattggcaaacgtggtgctataatcaaccagataagcaggaatcaggtgcatccatcaaagtagatagctcaactacagatggagatgattgcttaataactatatcacctaacgagttctttgacgatacgtattcacctgctatcgaagctgctgcacggctgcaacctagatgcagtgagaacgaggagctattgtaacggagatgagaaggatca

SEQ ID NO: 18655 - DNA, 532 bp, Gossypium hirsutum
  Clone ID: GOSHI-09MAY01-C25574_1
gtagacattcctgaagaagaagcagtatgcaggatttgcttggttgagctgggtgaaggaggtgagactcttaagatggagtgtagctgtaaaggagagcttgcacttgctcacaaagactgtgcagtgaagtggtttagcatcaaaggaaacaagacatgtgatgtctgcaagcaagatgttcagaatctccctgtaactttattgaaagtgaatgatccaaggattgttatcagacgacctccgactgtgccacagcaggctcaagtttctggttacagggtctggcaggatataccagttctcgtcatggtcagcatactggcttacttcttgtttccttgaacaacttctggtgtctgatttgggtcctcgtgctctagccatctcattaccattctcctgtgctttaggtcttctttcctccatgattgcttccacaatggtgagcaggagttacatatgggcatatggttccttccagtttgcaatggttattctgtttgctcatatcttttatacagtacttgct

SEQ ID NO: 18656 - DNA, 663 bp, Gossypium hirsutum
  Clone ID: GOSHI-09MAY01-C25494_1
tcgcgatctagcttagtccctaatcttcccctatctgttttggggattttgaatctgtagtctttgattggttcagttgcaaaacaatcatgggatctgtggatgaagagagatcgcttttggaagctgaacttgatcaggctgaaagcagtgggctttacactggggatggctccgctgacttcaatgggaatcctgttttgaagcagagtactggaaattggagagcatgccctttcattttgggtaatgaatgttgtgagagattggcttattatgggatagcaactaatcttgtaagttacctgaccaagaaactgcatgaaggaaatgtatcagctgcaagaaatgtaactacttggcaaggaacttgctaccttacacctctcattggagctgtcttagcagatgcatattggggaagatattggacaattgcggctttctccactatttacttcttcggaatgtgtacattgactctctcggcatcaattcctgcactgaaacctgctgaatgtgtgggttctatttgtccctctgctactccagctcagtatgctgtatttttctttgggctttatctgattgcattagggacgggtggaatcaaaccgtgtgtttcatcttttggggccgatcagtttgatgatactgatccca

SEQ ID NO: 18657 - DNA, 438 bp, Gossypium hirsutum
  Clone ID: GOSHI-09MAY01-C25414_2
gttcgaagattttttttcctttttgtggtttacagcttgagatctgagagcaaagaccctgtttttcattgggggttttttccctcgcgtccgcccgcgcgtgccctgattttgttttttaaaataagacttgatttttagttttaatatatctcctttttattattttgagataaatttttcattagtttttttttgggtcttcggaattggaatttttggggaatggaggtttcggttattaggagttgttctcaggcaacaaaccttaaaacagaattagggtttaaggattcaaggtttagtttcgggaaatttaatgagaaactatttttccggaaaccaaacagtgtttcgtttcagagtccattaaggaggggaaaatcttggctcagaataacagcgcaagctgcccaatctgatcccctccctaaatcg

SEQ ID NO: 18658 - DNA, 2083 bp, Gossypium hirsutum
  Clone ID: GOSHI-09MAY01-C25414_1
acagcttgagatctgagagcaaaggccctgtttttcattggggttttttgtttgaagttctttggttgtaaacctgattttcttcagaatcgtgcttgatgtttcgttgtggctgaattttgaatgtaacactaatatatctctttttgactattttggggtaaatttttcgttagttatttttgggtcttcggaattggaattttcggggaatggaggtttcggtaattaggagttgttctcaagcaacaaaccctaaaacagaattagggtttagcgattcaaggcttagtttcgggaaatttaacgagaaactattttctcggaaaccaaacagtgtttcgtttgagagtccattaaggaggggaaaatctgggctcagaataacagcgcaagctgcccaatctgatcgccttcctaaatcgaagtcttctacaaaatcaaaaactcttaatagaataagattatctgctggcctgcctctagatgttgtgtctggtggtacagtcaaccagtttcgagcaatatcagcggggccttaaagctttgaaacttctcggtttggaaggtgttgaattgcctatatggtggggagtggtggagcatgagtcgatgggtaaagtacaactggtctggctaccttaccattgccgagatggttcggaaagcaggtcttaaacttaacgtaacactctgctttcacgcttccagtcaacctaagatcccacttcccgagtgggtacttgacattgggaaaaccaagtccaatatcttcttcaaggatcgagccggaaagccttaccgaggatgtctttcactggctgttgatgagcttgctgttcttaacgggaagactccaatggaagtgtatcaggatttctgtgaaagcttcaagtcggctttttcggctttcatcggttctacgatcacgggaatcacaatgggtctcggaccagacggtgagctccggtatccatctcaccgtgggtttgccaaaagtggcacagttccgggagctggggagttccaatgttacgacaaaaacatgcttcaccttcttaagcaacatgccgaagcatgcggaaagccaaagtggggactaggtggccctcataatgcgcccgcttacagcgagttgccaactgcaaacaccttcttcaaggatcatggtggatcttgggaaagtccttatggtgatttctttctttcttggtactcaagccagctcatagctcatggagatcgcctactctcacttgcctcttcggttttcagtgatagtgcagtgaacattttcgggaaagtcccgttgatgcactcttggcacggaacccgttcacatccttccgagctcacagctggcttctacaacactgccacgagaaaaggctacgaagaagttgcagagatgtttgcaaggaattcatgcaaaatcatcttgcctgggatggaccagtcagataagtaccagcttaaggaatctctctcaagccctgaattattacttgctgaaattggaacagcttgcaataagcacggggtcagaatttccggccagaactcgactgtcggagctcctgatggtcttaagcagatcaagaagaacatgttgagtgagaatcttaatgactcattcattttccagaggattggagctcaattcttcgcaccggagcattttcctttgttcattgagtttgtccggaaactgaaccaacctgaaccgcattcaggcaatctgcctactaaagaaggcaccaccaccgccacagattctgtacatacaaggtcaaatctgagcatccacatgcaatcagcttaagtagagaggacaattatgtgtagatagcatccttgtaaggtaccagaagtcagaagatattggattggaaaaaaaaagattgttccatttgactgagcactgcaaagacatagctaagcaaatgtttacagtacatacaccaattctcttttaactattccttttataaaatgaaaatcgaataaattttggatcgatttttatttaaaaaatacaaaatgctcatagtacaatgttatattgaaagtaacatattagaaa

SEQ ID NO: 18659 - DNA, 1057 bp, Gossypium hirsutum
  Clone ID: GOSHI-09MAY01-C25424_1
gttgagtgcttcagaagtaagaaggttttgaaagcaccgcacatgtgcgagtcagatgatccagacacagcttggtaccggaatttggaagcttgtgtaactccacttcctgaagtaagcagctcagatgatgttgctggtggggcaataaaaaatggccagagcgagcatacgctgttcctcctagaattaggagtggctcaacaccaggcatcacagctgagagattcgtagaggataataaactttggaaggaaagagtacacattacaaacgaatcattagtccacttcccactggacgatatcggaatattatggacatgaatgcttaccttgggggatttgcagcagctatgttaaattatccagtttgggtcatgaatgtggttcctataaattcaaatcatgacactttgggagttatttatgaacgaggcttaattggtacctaccaggactggtgtgaggcattctcaacatatccaagaacatatgatctcatccatgctagtggcttgtttactttataccagaacaggtgtgacatcacttacatcttgctggagatggatcggattctgaggccggaagggaccgttatatttagggacacagtggagctgcttgtgaagatccagagtataacggatggaatgagatggaagagtcagataatggaccatgaaagcggacctttcaatccagagaaaattcttgttgctgtcaaaacatactggactggtgaagcaactcaaaaacagctctaactgggatttcaatcatctctcttttctgcacttcatttgtcacaatttttcatcctgggaacagtcaaaatcactgaagggtaaaagggtgggtttgattaaaattattgatggtataatttcattgatgcactgtaatactaagcagattctgtttgtactacaaatctagcggatactgtcattgtcttaaactcttggtgatatagtatgattagctaaatagatatgtacactgtctgcagtaattgaaaagtaagctctctgtagcctgcccctacagttttg

SEQ ID NO: 18660 - DNA, 453 bp, Gossypium hirsutum
  Clone ID: LIB3493-026-P1-M1-E8
gaacaggtgtgacatcacttacatcttgctggagatggatcggattctgaggccggaagggaccgttatatttagggacacagtggagctgcttgtgaagatccagagtataacggatggaatgagatggaagagtcagataatggaccatgaaagcggacctttcaatccagagaaaattcttgttgctgtcaaaacatactggactggtgaagcaactcaaaaacagctctaactgggatttcaatcatcttttttttctgcacttcatttgttacattttttcatcttgggaacatgtaaaattactgaaaggttaaagggtgtgtatgatttaatttttattttttttctaatatctttgtttcttattgtttacttttttttattaggtcttcttcaacagtattgtgtgttatttatgtttattacttatcatttttatttattttc

SEQ ID NO: 18661 - DNA, 343 bp, Gossypium hirsutum
  Clone ID: LIB3147-005-Q1-K1-D5
gattcttgttgctgtcaaaacatactggactggtgaagcaactcaaaaacagctctaactgggatttcaatcatctctcttttctgcacttcatttgtcacaatttttcgtcttgggaacagtcaaaatcactgaaatttcacccaagataagggtaaaagggtgggtttgattaaaattattgatggtataatttcattgatgcactgtaatactaagcagattctctttgtactacaaatctagcggatactgccattgtcttaagctaataaatatgtacactgtctgcagtattggaaaagaaggcttttttagccctccccctccagttttggatttt

SEQ ID NO: 18662 - DNA, 407 bp, Gossypium hirsutum
  Clone ID: GOSHI-09MAY01-C25784_1
aaaaaacccaaaagcttattctactgatctgtgtttcttcccaactaaagccaagccagttcttgtttgttcttcttcttaaaactctcaaatggataaaagtggtccaaaatcaaagcacccagaaccaggaaaccaaggaaacgatgagaaaaagagcaaaaagggattgcgactattagctcgagcagggaagtgagaagctccttcagctagtctcaaattactctatggtttcaaacttgaaaagataagcatagagaaatgtcgatcacccacactaatttcctgtcctgaacagttctatggtgatgataaataatttgtttgtgggatgaacttgcctaatgtcttataggtttaatagaaagctcatctgtgaaatttgtttgcgtaacctcccttac

SEQ ID NO: 18663 - DNA, 436 bp, Gossypium hirsutum
  Clone ID: GOSHI-09MAY01-C25744_1
aatcacctttacaagttgggttgggagctcaagatcacctccaagcaaaaacgtcttctatatcacatttaaatggggcaactgtggatgactttctgcctcctggctttgaaggatctcgttctacagatcaaatgcagattaacttgacagatatccttgtcgtcaaatggagatgtcctctcagatttgtattggacttgaattggcaagtggttgccggagaggaaagtaaagaggcagatgttcaaaaccaaagagaactgagagtgcttgaagctgtttatccacgcccatctgcaattcctacaaatccttctgtctcagctgacatggcaaactgtcagtatgatgataagcaaactcctcaaatacccatcactcccattgaagacgatgatgccgcaattggaacacaatccaatgccttagcacc

SEQ ID NO: 18664 - DNA, 1046 bp, Gossypium hirsutum
  Clone ID: GOSHI-09MAY01-C25774_1
ctacgatctagtgagtatcatgatcgcaatgctcagtactataggattcaagaggatatgggaatgcggaaggtacacatatacgagtttagtcgattgagcatggtctacacacttctcagcaagcgtaagcttctctggtttgtgcaaaacggtaaagtagacggatgggatgatccccgtttcccaactgtccaaggaattgttcgccgaggtctgaaaatagaggccttgatacaattcatcttggaacaaggggcatccaaaaatctcaacctgatggaatgggacaaactctggacccttaataagaagatcatcgatcctgtttgtcctaggcatacagcagtgattgaagaacgacgggtgctattgaccttaactgatggtcctgataagccatttgttcgcattatccctaggcataagaaatatgatggtgctggagagaaggcaactacatacacaaagaggatatggttagactatgctgatgcagagtgcatctcagtggatgaggaggtaaccttaatggattggggaaatgccatcgtgaaagaaatcatcaaggatcaggatggaaacataactcagttggtaggtgttttgcatcttcaaggatctgtcaagacaacaaaattgaagctcacgtggcttgcagaaactagtgaacttgtcaacctttccttggtggagtttgattatctaataacaaagaagaagctggaagaaggggaggatttcctagatgcactaaacccatgtacgaaaaaggagaccgcagccatcggagattccaacatccgcaatttgaagcaaggagagatattgcagctggagaggaaaggctacttcagatgtgatgtgccctttgctagaccttcgaagcctgtggtgttgttcgcaattcctgatggccggcagcaaagcgtgttgaagtatgccttttaccctatctttcattttgatccttaaagtgactccaatagaagatttgagcccttgctattctctcacatttttggctaacatttagattgttcttg

SEQ ID NO: 18665 - DNA, 401 bp, Gossypium hirsutum
  Clone ID: LIB3135-037-Q1-K1-C4
acaaaattgaagctcacgtggcttgcagaaactagtgaacttgtaaacctttccttggtggagtttgattatctaataacaaagaagaagctggaagaaggggaggatttcctagatgcactaaacccatgtacgaaaaaggagacagcagcaattggagattccaacatccgcaatttgaaacaaggagagatattgcagctggagaggaaaggctacttcagatgtgatgttccctttgttagaccttcgaaaccagtggtgttgatcgcaattccagatgggcggcaacaaagcatgttgaagtaggtcttttaccctatctttattctgatctgtagagtgctgggaagatcctccaactcttttctggctaatacttggacatgcgtatctatgac

SEQ ID NO: 18666 - DNA, 502 bp, Gossypium hirsutum
  Clone ID: GOSHI-09MAY01-C25764_1
cgaactttcaaaaaatttagggatcaatcaacctaaattctctcagtatccattttttggtgtttcgtagaaaaagagaaaaaatcaaattacaaagtgaatatcttcaggtttgcaggtgatatgactcatttgatcagcatcttagtgctgctcctcaaaatctacgctaccaaatcttgctcaggtatttcgctgaagacgcaggagctatatgcgctagtatttttgacccgctacttggatctattcacggattttatatctgtgtacaacaccatcatgaagctggtctttattgccagctctctcgccattgtttggtgtatgagaatgcaccgagtcgtgaggcgttcctatgacaaggacctcgatacatttcgtcattatttcctcattttggctagcctcattttggcgcttttggtacacgagaagttcacctttcacgagatcttttgggcattttcaatctacttggaagctcttgcgattcttcccc

SEQ ID NO: 18667 - DNA, 425 bp, Gossypium hirsutum
  Clone ID: GOSHI-09MAY01-C25704_1
tcggaccgaacccaaaccggtgccatgtgacttagaagttaaagctgaccggttaagaaaagatgatatctcagtcttgcgtcatcaaaataagggtgtgaagaaagccgatgaagctgtaattggcattggacaaacaaatgctgagaacattaacagcgtctcggaaatggactctaataatgacaagcaaaggttgaaatctgcttatgaatggagggaaagagcacggaatatcaaggaggcccaggtttcctcatctcttgaagaaaacaaggataagtatgtgtcagctcaagtggtgaatgagtctgttgaaactggaaggaaaccagaagctgcttaagccgtctgtagtggacgggaaaggaagccctcagagaacagttcaccaggttaaggtaagtcagaatatggagaggaaa

SEQ ID NO: 18668 - DNA, 396 bp, Gossypium hirsutum
  Clone ID: LIB3048-001-Q1-L1-G12
catcccaattttttccctgtgacttattatttaaaactgagccgtttataaaagatggtaacccaatcctaccttatccaaataacgctccctagaaagcccaacaacctttaatacgccattcacaaaccaatcacctagaaccattaaccagatctctgacatggactctaataatgactatcaaacgttgaaatctgcttatcaatgcatggaaagagcaaggaatatcaaagaggcccatgtttactcatctcttgaatacaacaaggatcagtctctgtcatctcaagtggtgaatgagtctgttgaaactggaaggaaaccagaagctgctaatgcgtctgtagtggactgaaaacgaagcactcacagaacagttcaccaagttaaggt

SEQ ID NO: 18669 - DNA, 1233 bp, Gossypium hirsutum
  Clone ID: GOSHI-09MAY01-C25644_1
tcaggcttaatgactagagacacgcgatactgtcgctcttaacaaggtcttgcacgacaagatatacaagaaccgtgaattgcaaaccatgcgtcttctagaccaccccaatgttgtctctctgaagcattgtttcttttcaactaccgaaaaagatgagctctatcttaacctggtgcttgagtatgttccggagaccgtccaccgagttatcaagcattataataagatgaaccaaaggatgccactgatatatgttaaactctatttttaccagatttgcagagcacttgcttacattcataacagtattggtgtgtgccacagggacataaagccacaaaatttattggtcaacccgcacactcatcagctaaaactgtgtgattttggaagtgccaaagttttggtgaaaggggaaccaaacatatcttacatctgttctaggtactatcgagcacctgaattaatatttggtgcaactgaatacaccacagccattgacatctggtctgccggctgtgttttggctgagctattgcttgggcagcctctgtttcctggtgagagtggagtagaccagcttgttgaaattattaaggttctaggtaccccaacaagagaagaaatcaagtgcatgaatcctaactacacagagttcaaattcccccaaattaaagctcacccatggcacaagatatttcataagcgtatgcctccggaagctgtggatcttgtttcacggctattgcagtactctccaaatctgcgtagcacagctattgaggctttggttcatccattctttgatgagctacgtgatcctaacacccgcctacctaacggtcgatttcttcccccactgttcaactttaagcctcacgaactgaagggagttcctacggatatgttaccgaagctgatcccggaacatgcaaaaaagcaatgttccttccttgggttattatggatttatattcctcctttctgcttaaatctttgatgtctgctccttgcagaaatcatgggctattgttgaaaaaaagtagttagtaagcctgtttcagttatatgataaagaagccttgttaatgtttatttgttccctttattaatatttttttctatcaatatttatgttctttttctttctctttttttcttctcccttttgtagaaaaaacaaaacttgagtatctgcccttaaagaccttaatgagtaatgttgaccct

SEQ ID NO: 18670 - DNA, 708 bp, Gossypium hirsutum
  Clone ID: GOSHI-09MAY01-C25674_1
attggacgagtcccatgatggctgaaggacttgataataggcatattcgaggagcaaggtcaaatgggcacctaatgcaacctaatgcaggggtgtttgggtcatctggaaatggaagcttgtcacgtaatggaaaccattacatgtggaacaaactccaactcgccccagcaaaatctgccaactgccatggtttggccaaattcaccatcgtttgttaatggcattcatgctaatcgccttccacatatcccagcatttcctagggctccttctgtaatgttgaatgtaggatcacctgtacaccaccacattggctcagcgccaccagttaattctgcattctgggacaagcggcatccttatatcggggagtctcctgaaacttcaggttttccccttggatctcttggaagcgtgggctttcctagtagctcgctatcacatccggtggaatatgcttcccacaacattttttctcatgttggtggaaattgcatggatttgacaaaaactggtggggtacgctctcctcagcagatgcgccaccttttccctcgcaggaaccctattatgcccgcatctcttgattctcctaatgatcgtgtcagaaacttttcataccgcagaaatgaatcaaattctagtaatgctgattaataacaatatgaacttgatattgaccgaatcatacgccgggaagacagc

SEQ ID NO: 18671 - DNA, 533 bp, Gossypium hirsutum
  Clone ID: GOSHI-09MAY01-C25614_2
aaaggcaccaaattgtttataatcacatgtattaactttttttgtgtttgtaggaagaagagaagaatatgaagagggtttcctttgtcatgatcttgtgtgcggtggcggtgttttcaggtgaaacacgcacggtggaagcagtgacatgcagccccatcgagctcatcccatgcttgccggcaatctcaacaccggcaaagccttcatccgccgcttgttgcaaaaggtgaaggaacagctaccatgcttttgtggctaccttaaggacccaggtgctaagcccttcatcgacactcccaatattccaaaggtggctagctcttgtggagttgcgcatgcatttcctcctaagtgttaaaatgttgctttcattagagcattctcgctcaaggactagtatgaataaattaataattaaatggaaatttatctaatattttaacccattggccaaataattttaatatactctccaccctttttagtatttacatttgttattttgattggtgtttacatttgtgggaaaa

SEQ ID NO: 18672 - DNA, 666 bp, Gossypium hirsutum
  Clone ID: GOSHI-09MAY01-C25614_1
tctttacgcgtccgattatttataatcacatgtattaactttttttgtgtttgtaggaagaagaataaagaatatgaagagggtttcctttgttatcttgtgtgtggtggcactagcggtggtggtgttttcgggtgaaacatgcatggtggaggcagtgacatgtaaccccatcgagctcagtccatgcttagcggcaatcacggtgccgtcgcagcctccttcagccgcttgttgcagtaagttgaaggaacagcaaccatgcttttgtggttacattaaggacccaactcttaaacagtatatgaacaatcccaacattccaaaggtagctagctcgtgtggagttgcatatcctcctaagtgttaaaatgttgcttcattagagcatttccttcttcaaggactaatatgaataaatgaataattaaatgaaacataagtttatctattattaaactcatagtccaaataattttcttaattttaatatatatacatgcataatgattcaaaattcaaataaaggagagagataatgttgaaatctatgttatttaattttttttgaagtatttgtacattttattcttgattataagttttaaaatatgattctttagataaatgaaaaagattaaaaataaatatattttatctcttctc

SEQ ID NO: 18673 - DNA, 153 bp, Gossypium hirsutum
  Clone ID: uC-gsflmaxxa069c01b1
tatttgtttaactaaacgacacataagcttacctagtgggcattctataacttgaagagggatttgctctaacgaagcaacattttaacacttaggaggatatgcaccttcacacgagctagctacctttggaatgttgggattgttcatata

SEQ ID NO: 18674 - DNA, 554 bp, Gossypium hirsutum
  Clone ID: GOSHI-09MAY01-C25004_1
gcatcttcatcttgttctatggcgatgatgagtagctgtgggaacataaccgtccaatcggctgaccaactgaagcaattgaaggacatattcatgcgtttcgacatggattccgacggcagcctcacccagcttgagctggccgctctcttgcgctccttgggtctcaagcctagtggtgaccagatccaccttttgctaggcgacattgatgctaacgggaatggccttgtggagttcgaggaattggtgagcgccattctgcccgacatcacccaccaaattttgataaacgaggcccacttgttggaggttttccaattatttgatcgggatggcaatgggtttattacgcccgcggagcttgctggctctatggctaaaatgggccatcccttgaccttccgtgaactttccgatatgatgaaagaggctgattccaatggagacggcgtcgtaagtgtctttgattttactagtatcatggccaattcagctgccgattttcttggtattaaacttaaccattctgttaagtaatgactatcctcctc

SEQ ID NO: 18675 - DNA, 1020 bp, Gossypium hirsutum
  Clone ID: GOSHI-09MAY01-C25394_1
aagggtctaagctctctccttctcctactctctgttctttgagctagcatcgaacatgtatcatcctagtgcaagatccaagaccttgcttgttcttttacccatttcagcacttgtattggtcttgctttcgttcgtagctcttctaacaaacagccccagagccacacaactccagcatttacacgtccacaatcacctccaaattgctcactcagcatgtgaagggaccttataccccgacctttgcgtctccaccatctctgttctcccagatctcgcttccaaatcactgccggagctcatccaagcaactctaaaccaaacaatgtacgaggtccgtctctcctctgccaactgcaccggcattgaaaagcggatcaaaagttacagcaaacgggaagaggcagcgataaacgattgcctagagctttttgatgacaccctggaggagctgaaagtttcccttgctgatctcgcccctaagaaattagcagtctccaggaactaccacgacttgcagacatttctaagcgccgcgatgaccaaccagtatacgtgtcttgatgggttcgcacgtagcaaaggaaatgttaggaacattatcaaaaagggtcttcacaacatcactcatcacgtgagcaactctctcgtaatgctcaaaaaagtccccggggtcggcgagagccaaatccgagtattttcctcaacagggacgcttggaaaaacgggttcccttcgtggttatcccgcaaagatcgaaaacttctacaggcttcagttaatgaaaccgagttcgacctcatagttgccaaggatggcactgggaacttcactaccatcaaccacgctgttgccgctgctccaaataatagtaacacaaggtttgtgatatatataaaagcagggtcttatcttgaaaatgtagaggtggtaaagaagaagaaaatgctgatgtttgtgggagatgggatcggtaagacagtggtgaaagccagcaaaatgtcgttgatggcttta

SEQ ID NO: 18676 - DNA, 513 bp, Gossypium hirsutum
  Clone ID: GOSHI-09MAY01-C25384_2
ttttccacgcgtccccctcgcctccccgctgagctttctttctagctttagttatagaaaaaaacagtggaattaagggtatggcatttgagaaagatctcaaccttgatgccaccgagctccggctaggcttaccgggaacctccgacgagtcagctaagaaccaaacgccggcaactcttcggagcaacaacaaaagagccttgcctgaagaatctatgtctagtaatgccacagcttccaaaaactgtgaccaagaaactgctccactccccaaggcacaagtgatagggtggccaccgatcagatcttacagaaaaaacaacttgcaacctaagaaaagtgagggtgaaattagtgggatatatgtgaaagtgagcatggacggggctccttatcttagaaagatagatttggaggtgtttaaagggtacccagaattgctttaggccttggaagacatgttcaagttcaaagctggtgaatattcagagagggaaggatataatggat

SEQ ID NO: 18677 - DNA, 1024 bp, Gossypium hirsutum
  Clone ID: GOSHI-09MAY01-C25384_1
cggacgcgtgggcggacgcgtgggcgaagcaggcttggatcgttgacggcgagtccccgcaggtaagaaacccttccttctatactgctattttacaaaaaaaaaacaacttgcaacctaacggacgcgtgggtgaaattagtgggatatatgtgaaagtgagcatggacggggctccttatcttagaaagatagatttgaaggtgtttaaagggtacccagaattgcttaaggccttggaagagatgtttaagttcaaagctggtgaatattcagagagggaaggatataatggatcagaatttgtacccacttatgaagataaagatggtgattggatgttggtcggagatgtaccatgggagatgttcaccaattcttgcaaaaagctgaagatcatgaaaggatcagaagcaagaggcttgggttgtgtttgaaaaaaaatagcccttcagcttagggtatacaaagaagaaattacgatcccatttttttttcttctttgttgattaagcaacaaagaagattaatcttaggatgttgtccaaggcataacccaaaaaatatatattttcatgtatagttttggcatgtttctaatttccttgtggaatttgtacaaaggaaaacatattaagttcataacatgggtttcctttatttttctttgtcatgtatattataaaccaaatccttcttttgcctttggtctttatttacattatccatcactcttgaaagaggaaaaaagaatgatggaatctgtggatttcaaagttaatatatataatgatgaaagatgttttcaaaaagagagaggtaaggaagaaaatggatttaaagtaattcttaactttcagtaggtctaacatataggaaatgatatgataatttgttcatgaaaaaaaatatttgtggctcctattgtgtgatataattcgcacgatgaaaaagttacatgtttgttgaggtcagttgttgtgagacggtcatgcttgttgagtatttataggttttatgacat

SEQ ID NO: 18678 - DNA, 405 bp, Gossypium hirsutum
  Clone ID: LIB3146-027-Q1-K1-E3
tcggtcccacgcgtgcgcccacgcgttcgtgcacgcgtccgagagagggaaggatataatggatcagtattcgtgcccacttatgaagataaaaacggtgatcagtatgttggtcggatatgtcccatgggagatgtgcaccaattcttgcaaaaagctgcggatcatgaaaggatcagaagcatgaggcttgagttgtgttgtttgaataaaaagaatgaaaaaaaaatagcccttcagcttagggtgttcaaagaagaaatgacgatcccttttttctttcttctttgttgaccaagccacagagaagatgaatcttaagatgttgtccaaggcataacccagaaaaatatatattttcatgtatagttgtggcatgtttctaatttgcttgtggaatttgta

SEQ ID NO: 18679 - DNA, 368 bp, Gossypium hirsutum
  Clone ID: uC-gsronu33B108b02b1
atcagtgcaagaggcttgggttgtgtttgaaaaaaaggagcccttcagcttagggtatgcaaagaagaaattacgatcccatttttttttcttctttgttgattaagcaacaaagaagattaatcttaggatgttgtccaaggcataacccaaaaaatatatattttcatgtatagttttggcatgtttctaatttccttgtggaatttgtacaaaggaaaacatattaagttcataacatggttttcctttttttctttttcatgtatattataaatcaaatccttcttttgcctttggtctttaaaaaaaaaaaaaaaaaaaaaaaaaataaaaaaaaaaaaaaaaaaaaaaaaaaaaaaaataaa

SEQ ID NO: 18680 - DNA, 752 bp, Gossypium hirsutum
  Clone ID: GOSHI-09MAY01-C25364_1
cggacgcgtgggctttgagggaaactgtcaagaatcttagaaacaagaacgaaaaagctatgagcaacggagctgatgctgtgagacagtcactgttccaagaagcagacaagtattgtaagcacatatcgggaaagctatcacgtggccatggatgcttaaaagctttggccttcttggtcgttgcatttgctgtaggtgctgctgttgtaactcccaacatcgacccctcggactggagcaaactatccgaagctattggcaccgccgactgggacaaactatccgaagctctcagcaccgctgactggaacaaactgtccaaagttttcagctcttaacgatcttccccatctcataaacttcaaatctaggtactttcttttttcgatctagaattttaactggcaacggagaaaaaggtcgtttgatatggcattttaggagaatactattagaatagcggcttaaagaaggggataaaatggtgcaatgagtttggtttttactacaattacttgtatttcaaagtaatttagtcgcggtgaacttagggtttcaaataatttgaggataattttcatgttgaaaaaccttagacttttctcatagtttttcttaggagcgagcataactcgatttaaaattagtcgaaaaccggtgtgatttggttaaatgggttttcgatcaaagttgtttttgtatttgagttggttatgagcttttattcaagtttggtttgagaagggaat

SEQ ID NO: 18681 - DNA, 482 bp, Gossypium hirsutum
  Clone ID: GOSHI-09MAY01-C25334_1
cccacgcgtccgagttagtggttctgctgaggtgcctaaggaggttaagctgggaaactgggattgtggtaactcattccaggttcaatcagtcaatgtcatgagatgcacctttctcattgcctatgaaggattctaactctgtcgggatccctagttcatcaggtcatacaatgcctggcatgatgcaaatgatgcctaccggaaatagtgaacggtctgggacccagtctgtgaatcctggaaacttaccggttatgttcgggtacttgcctgttcaacttccactgttggataaggataatccctggggtatggtctctcaccctccgcaattcctggcttctttgccgggcagaagtccacctaatgcagataagcagagtgatggactgaaaatatcacaagcttccatgcatacaattgcacgcaattccttttaggctgcacaatatgatggcaggacatttgaaagagtgaaa

SEQ ID NO: 18682 - DNA, 634 bp, Gossypium hirsutum
  Clone ID: GOSHI-09MAY01-C25294_1
cccccttctccgccctcgcgtccggaaaccttaggagcagaaaaaaaagggaaaaaaaatctcagattttctgtcaaggaaaatatggaatccagtaggggccaaggtggaatccagcagttgcttgctgcagaacaagaagctcagcacattgtcaatactgccagaaatgccaagatggctaggctgaaacaagccaaggaagaggctgaaaaggagattgcagaatatcgagctcaagtggagaaggagtttcagaggaaacttgccgagagcagcggggattcaggtgctaatgtgaaacgccttgagaaagagactgaagcaaagattgaccacctgaaaaatgaggctgcaagaatatcagatgatgttgtccaaatgcttctcaagcatgtaacaactgtaaagaattaggccccttgagatggcaaacattcaatatatgttactgttgttcccctgcatgatgtaatatttgcgttgttgccctcacctggtttagactctggtgagtaaattagaccctttttatcagatacatcagtttgagaacatgtaggacaaattgtgtgcctatctatttatgctggggaaaagagcaataaagttttaataatgtcaatatttttgc

SEQ ID NO: 18683 - DNA, 955 bp, Gossypium hirsutum
  Clone ID: GOSHI-09MAY01-C26994_2
ctgatctctctgcaaaaactatggcggcggggggggtattctccccactgacagtgccagaaaaggcgagaccatgaattggaacttgttgaagttgtggcagaccaggttgctgttgctctctctcatgcggctattctggaggaatctatgcgggcccgtgatcagctcatgggggcggatgttgatttagacttggctcgtcaagaggctgagaaggcaattcatgcacggaatgatttccttgctgtaatgaaccatgaaatgcgcacaccaatgcatgcaattattgcattgtgttcccttcttctggagaccgagctaaccccagagcaaagagttatgattgagacagtgctaaagagtagcaaccttttggcgacactaattaatgatgttctggatctttctagacttgaagatggctgcctagagctagactttggaatgttcgatcttcatggaatcttcagagaggccattaatctgataaagcccatcgcgtccgtaaagaagctatctatgactatgatcctggcacctgatttgccgatgtttgctattggtgatgagagacggcttatgcaaactattctaaatgttgtgggtaatgctgtgaagttcacaaaggagggttacatttcaattatagcttctgttgcaaaaccggagactttaagagactggcgacctccagaattttacccagtgtctaccgaaggccacttctatctaagagtgcaggttaaggattcaggctgtggtgttctcccacaagatataccaattctctttaccaaatttgcacagcctcaaagtggaaatagcggtggtgcggggcttggacttgccatttgtagaaggtttgtaaatttgatgggacgccacatatggattgagagtgagggccttgactaaggttgctcattaacgttccttgtcaaactttggatct

SEQ ID NO: 18684 - DNA, 899 bp, Gossypium hirsutum
  Clone ID: GOSHI-09MAY01-C26994_1
ttcagtttactcctatttaggttttgacagtacgatctcaaggcatctctagattgtctgttgctatccaatgctttaaatttcaattcaaatcatgccagttaggatttacattgaaggcatcacctgttgtttgtttattacttacaatccaatgaattactatcatcatgttctcctcgtgtagattgtgtttatcttttctagcttactacgtgatgttcctgttgatcctatcatctggtcttgcaggttaaggattcaggctgtggtgttctcccacaagatataccaattctctttaccaaatttgcacagcctcaaagtggaaatagcggtggtgcggggcttggacttgccatttgtagaaggtttgtaaatttgatgggaggccacatatggattgagagtgagggccttgacaaaggttgcgcagtaacgttccttgtcaaacttgggatctgcagcaatcccgatgattcagctatccatcaagcttcatcgcaagttagagcatatcatggaagtgcagatctgagtggacaaaaacctatattaagagatcacggtcatcgagccatctcatccagtcccaatgcacgataccaaagaagtctttagagttacaatgagagaaatacgacttacactattttcttattttcatatcattttaagtgaggagggctgggtaaagaaacttctataatagtcttatttttattcataaaaaagagctataagtagcgagctagaagcggcattttctttttctttgcttgacatgttatgaattaattggttgccgatgtagtaacaattggaatgatagaattgttgtacggtttcgaggttgtaacccatcttcctcagtttgtaaacgataaaaaattgcgtgg

SEQ ID NO: 18685 - DNA, 530 bp, Gossypium hirsutum
  Clone ID: LIB3829-033-Q1-N6-F5
aaacgttgtaccttttgctccccacttttaatagttttaaagacttctttggtatcgtgcattggctgaaacaccaccatcgttctctcttaatataggtttttgtccactcagatctgcacttccatgataagctctaacacgagacgaaacttgaggacggatcaatgcatcgttcgggttgttacatatcccgagccttatgaggaatgttgccgtgctacctttgttaacaccctcgctttccaaccatatgtgccctcccatcagattcacaaaccttttacatatggcaagtccaagtccagcacctccactattttgactggatccactgcgcggctgtgcaaatttggtaaaaagaattggtatatcttgtgggagaacaccacaaccagaatccttaacctggactcgtaagtagaagtggccttgacttgacactgggtaaaattcaggacgtcgccagtctcttaaagactctggttttgcaactgaagctataattgaaacatagccctcctttgtga

SEQ ID NO: 18686 - DNA, 490 bp, Gossypium hirsutum
  Clone ID: GOSHI-09MAY01-C26804_1
gcgaagaagtgcaaggttcaagatagtgactatgagcgtgatcgtgaccatgatagagaccgtgatcgtgatctagaccgagagcgttatatggagagggagcggcatcgagagcgtgagcagtaatctgtgagcctgatcgtgaccattatagagaacgtgacacgcatcgcgatcacgaccatgatcgtgattatgattctcaatgggatcgagaccgagatcatgatcgcgaccgtcgttacagtgatcgggacatggatagagatcatgaccgtgacgacgttcatgatgaacggaggagttcaagattcaaagacagtaggggatggaaacgatctcctgatgatcgcgatgatggtaatgatactaaatctcgaggtaccaaattacactactctgacatggaaaataaatcatcaacttctgggagagttgaagtagatgctgatgggggaaggtctcagtcacgaccagccaatttagatgc

SEQ ID NO: 18687 - DNA, 395 bp, Gossypium hirsutum
  Clone ID: GOSHI-09MAY01-C26534_1
acagtttggttgcttaaagcttcacgcatcttcggctctcatggcggcctcgctgctcttatcctggacagcgcccaacccagaagcgatggttcccaatatcggggccaataaatcgtctttcctctccggcaccaagctcttcttgttgacgaagccccattatcgaaagcccactgctcaaaaatgcttcaaacctccctttgccaagtcaatcgaccacatccccaagcaattcatagaacaaaatctcaaagatggattgatggaaaattataaaaatgttcctggatatctctatggtcttagtccttcacaaatggacatgttcatgacagaagataatcccgtccgtcgacaatccgaaagtgttaccgaggaaagtatttcatctg

SEQ ID NO: 18688 - DNA, 409 bp, Gossypium hirsutum
  Clone ID: GOSHI-09MAY01-C26524_1
gccaaacccaaagcagaagaaaaacctgtagctgagcctgagcctgagccaaagaaagaagaagaagaaaacaaggaagagaaaaaagaagaaaaagaggaagagacacctgctgctgaaatttcagaagaacccaaggtagaaacggatgcacccgccgctgttgaagtcaaggaagaagagaatactcctcctccaccaccaccagccgatgctcctgcggccgaagtggttgtagtggaaacagaggtagctgaaaaagcgaaagccgtagacgatgatggcgccaagacggtggaggcgattgaggagtctgtagtcgctgttgccgctcctacggcagagaaagaaaaggaggagccctccgccgaagtggctcctcaatccgaagagaccaaagaagcccaag

SEQ ID NO: 18689 - DNA, 434 bp, Gossypium hirsutum
  Clone ID: GOSHI-09MAY01-C26774_1
attcaaaaatcaacaccatgggctcttccggtgaatttcgggtagattctaacccggattacgatcacgaaagtgaagtaaaggcttttgatgatacaaaagccggtgtgaagggaatagtagattcaggtgtcacacaaatccctcgtatattcatagatcaaagccttatccttgagaagaataacaccgattgttccaataatcagctaggtgtcccgatcatagacctccaaggcatcggtggagactcggctcgccatgccgaggtgattaaccaagttcgaaatgcttgtgcggattggggtttctttcaggtagttcaccatgggattcctgcaagcgttttggatgaaatgattgatgggatccgtcggtttcatgaacaagacaccgaggtgaagatacagttctatacacgcgatgcaactcgc

SEQ ID NO: 18690 - DNA, 430 bp, Gossypium hirsutum
  Clone ID: GOSHI-09MAY01-C26714_1
catctttcttcagtttgggttttgtggccatctttcttctggagtagtttcattatagttcagcgtctcccccacaagatcgaagaaatcgagatttggactaagtacggggaaatataaatcaaaatgatcgattcgcgttgaggtaagttcatatggttagtctaagtgatcgattattaaatttgaattgagatgatgttttattttatatatatttgttatttaatcatgactttatgcaagtacaagattagattgaaggatcaatcgtgagaaatgcagggtcaagcacattcgtactacaactcatgatgaattgatggaaaagaccatggttggaccatggcagtgagtgtgccagtgtaagaccatgtctgggacgtggcatcggcacggacataggagagccagtgtaagaccatgtctg

SEQ ID NO: 18691 - DNA, 311 bp, Gossypium hirsutum
  Clone ID: GOSHI-09MAY01-C26694_1
gtccagtgcgcaccgcattgtctcccatcctaggcagggggagaaacaataatcttcttctcaatcttgcaatggtgcatatggatgattcggcaagggcattcaagcatcggggagaagatgattgcgcagccatcgagggctacatggaacaatatggcgtaacggcacatgaggcttatgatgaattcatcaagcatatagagagctcctggaaggacattaacgtagagtttctgaaaccaaccgaaatgccagtacctggtctaaatagaagtctcaaccttgcaagagtgatggatgtgctttac

SEQ ID NO: 18692 - DNA, 398 bp, Gossypium hirsutum
  Clone ID: GOSHI-09MAY01-C26684_1
ggagctcaatggcttgttgttagccggcgaattcatccacgtccatactggcagatgtgtgtgtttctatgtatgggaggcaatagcactacatggatgaacactgcagttctggttacttgtatgcgaaacttcccgaaaaatcgaggcccggtctcggggatccttaagggctatgtcggactcagtaccgcaatcttcacggatatatgcacagctctgttttcttcggacccttcaacgtttctcttcattcttgccgttgttccggccatcgtttgtcttaccgctacatttttcctccacgaaatcccaaccccgactttcaacccgagcgaactccggcaagaaacgctgtattttcacgtcttcaatggcattgctatcatattagccgt

SEQ ID NO: 18693 - DNA, 446 bp, Gossypium hirsutum
  Clone ID: GOSHI-09MAY01-C26644_1
attcagtttacgatctacacacggtggctaccaaaagcatcggtcctccattcattcacgggtcacttttcctgcgggaaatccgatcctggaacctagtgtggagatgaattttactagtaaactacttctaggttcccatggcaggctttacaggaatgctttgaaaatgcctgcattaattttggatgagaaagagaaaaaggtctcgaggtttatctctagtaatggattagttgaagatccatgtgccattgagaaggaaagagctttgatcaatccttggacatcccaggagaaggaaatttttatggataagttggctgcctttgggaaggacttcagaaaaggtgcttcttttcttgatcacatgacatctgctgactgtgttgagttctattaccaaaatcacaaatcagaatgttttgagaaaacaaagaagaatg

SEQ ID NO: 18694 - DNA, 305 bp, Gossypium hirsutum
  Clone ID: AF056950.1
ctgatccatgactattaagttggggtttactttctctgatccatgtgccattgagaaggaaagagctttgatcaatccttggacatcccaggagaaggaaatttttatggataagttggctgcctttgggaaggacttcagaaaagttgcttcttttcttgatcacaagacaactgctgactgtgttgagttctattacaaaaatcacaaatcagaatgttttgagaaacaaagaagaatgacctgagtaagcagcaagggaaatctscagtraatacctacttgttgacatsggaaaaaaaaaa

SEQ ID NO: 18695 - DNA, 1173 bp, Gossypium hirsutum
  Clone ID: GOSHI-09MAY01-C26194_1
gataacatgcttgcttcaaccgctgctgatgatgaaaaggagaaaagcaatataagctctagtaattctggcaagtcaaagaataagaaagagcttgatttgcctcatgggtcttcaaatcgacttgatcagcttgaacctgagccggtggctagtggccttgaacgtgtgaacccttgccaaaaggaagccaatggtccatgtgttttagagaaggaatcacctctgcagttaaatgtttgctccaatccagaggtggcaaagcaaccctctgcttatccaaaagttaaaccgcgccgtgggttagcgaagaccataaagcccattgaagatgaagatattctcagaaagcaaccacaaatgttggagattgataggactagtgacactaaatcagaagtacagcctatgttttcttcagacccgtgcctagagtttagggtgaatgctcctagaggtggggtaccacatgaggatgcttccgctgaaggccttgtttcaactgcagcttccagtgtcctgcaagagaagtatctagggaaaacgaggatggagagcgcgagaaaaaatttagaaaataagaactcgagcaaggtcaagaagatgaaagagcttgacttgcctcgtcgcatttcaaaacgacttgctgggcttgaacatgagccggttggcaatggattgtctgctgaagtagctatccagaatacaaccagaaagtcgggggaggcgcgaagcaaaaccaccatgtgttttggcggataaagcaactcagcagctaaatgttggccttgatgtcacggtctcgaatcaagcttctccagcagttcttggtacagtaatcaataacataagtccccacgaagatagaacaattcttgcagagcaaccacaaatggtgggaacccaggacagtgacagcaagtcagacctacaccctttcttttgttctgacccgtgcctggaatttgcaatcaaaactcttacaggtgcaataccgttagaggatgctatcaacgaaggacttgtttcagcgcctattgctaatatccagccacggaagaatctagctgaaactacaactgaaaacagctgctgtagaaaaactcttattaacacaattagatctaagaagaaggatgccggttcgcaacagcggtcttcaaaacgacttgc

SEQ ID NO: 18696 - DNA, 293 bp, Gossypium hirsutum
  Clone ID: LIB3048-011-Q1-L1-E9
ataacattcttgcttcaaccgctgctgatgatgaaaaggagaaaagcaatataagctctagtaattctggcaagtcaaagaatatgatagagcttgatttgcctcatggttcttcaaatcgacttgatcaacttcaacctgatccgcttactaagatcctttaacgtgataaccctttccaaaatgcacccaatggtccatgtgtcttagagaatgtattacccatgcagtttaattttaactccaatgcataggactccatgcaaccttatatttatccaatagctaaacct

SEQ ID NO: 18697 - DNA, 384 bp, Gossypium hirsutum
  unsure (1)..(384): unsure at all n locations
  Clone ID: LIB3048-007-Q1-L1-F3
gccaattcggaggtttttccctttccggtcttcctagaggggaatcctaatcccaatccaagggggtcgccaacgggttggggacctaagtttttctggcaatcttcttctcttcaattctagaaagaattaactttctatactattacttgcagggtttttcagtgcttcattttccacgattcagcctcaaatttgggcagcaacaacttgactccatatggataactggaacaacgctgttgaggaaagcactgatcttggaatttggagactntgttattgacaatgttgctcgtatactaaatgaaccgatctctntatgtatctggaagagggttttaactgggagtcccataaatatgactggtgggaaaacttaga

SEQ ID NO: 18698 - DNA, 230 bp, Gossypium hirsutum
  Clone ID: LIB3048-014-Q1-L1-G4
ccaaattcgaagtattttccttttccgttctccttagagcgtagtctcattccaattccacggtgttcgcgatcggatcgcgacctcagtttttcttgccatcttctttctcttcaattctagaaagaattagctttctatactattacttgcagggtttttcagtgcttcattttccacgattcaggctcaaatttgggcagcaacaacttgacttcatatggataact

SEQ ID NO: 18699 - DNA, 1467 bp, Gossypium hirsutum
  Clone ID: GOSHI-09MAY01-C26114_1
agatatttggtggtgtaggtattgcttgtttgcctgttgggcttattgcttcatttatacgccgtccaaaggctgttatcactcgctcacaatatattaaggttttcttttcctttcagttgcgtatgatgctgcgatattaagcaatgcactagagttggaaaatagtattgatatttgcatattttgttgtaattgccaatggtcatagttttaattgatgttgtaggaagcaactgaacttggtaaaagggcaaaagaagtgaagaaagctgctgatgcccttcatcaggaagaaagaagtggctctaagggtagaaaatggcgtaaaaatgttaaggctgtggaaaaggagttgcttcagctagaagaagatgtaaaacttttggaagagatgtatcctcaaggagaaaaggctgaaacttcctgggccttgactgttcttggatacttggcaaaacttgtgttgggaatcttagggttgattgtttcagtggcttggttcattcatattgtcatataccttctgagtgatccaccactttctcccttcctgaatgaggttttcatcaagctggatgatatatggggtcttctgggtaccgttgcatttgcattcttttgcttctaccttctgcttgctgtgattgctggagcaatgatgcttggcctgcgattggttttcattacaattcatcctatgaagtggggagctacgctaatgaactcttttctgttcaatgtggggcttattcttttgtgctcaataagtgtcatacagttctgtgccaccgcatttgggtactatgctcaagcaactgctgcccaggaaatattcggccacacattgcagtctcttcgtggaattaaatatttgtacaagtataatgtatttcaaatcgcattcattgttttagcggcattgaccttcgtgtattatgttgcctttggatggagaagaaaaaaacctagcggcaggttccagctttcctcgtaagaatgttcccctagaagacaatgcagcctctcaaataatcatatttctcttttatatcatccctttcagaggtgtttgatatgctcggatgcttacggctgtggaaggttagagagaggcttttttctcgctagttaaattggttgcctgaaggaggagcatgttgagtgccgcaactgcttctctttatgcttgcttgcttttcatctccttttgtatgtagtttctgttattatttttttctttcctatttgttaaatgttacacttaacgcatttgggttgggcatgtaattgagtttccttgtctttgacagttgactcacgtgaactggatttatgcgcaatttatgcttgtcttggaactgagttgtactaaatttatactttggtctttctataaataggtgaaacactcaacacttggtgactccaaaaaaaaagggaaaaaaaaattaatttaagggagtt

SEQ ID NO: 18700 - DNA, 400 bp, Gossypium hirsutum
  Clone ID: GOSHI-09MAY01-C26134_1
gatcttacgccaaggcgcataacagtttcatgagtgacaattaatatattattaatttgcaaactgttcattctttacgagtgaataattttccaatatatgcagacactgactgctattgagctttttgtttacagttatgctgcaaggtgccttaggttcctattttgttgcttcttatgttataattctctttggcagacttgtgtcctgtgctgaaactgaaattcatgcctttgcatatatatcaatggagactgcaaacccaagtatttaaaatttgtcactcttgtaaaccacttcccattaatatgtcttgcttagtggaaccacctttgttgaacttaatgcgtacatgtaagcatttagtaagtgcattgatataactgtgaaactaact

SEQ ID NO: 18701 - DNA, 882 bp, Gossypium hirsutum
  Clone ID: GOSHI-09MAY01-C26124_1
taaatccctcaaatggaacccaaataatttccatttcccacttttcgtattccctgttcttcttcttcatcttcaaacccacaaattttttttaacaaaaatcttatatagtgatagtgcaggcgatgaatctttggtcggacgataacacgtcggttatggaatcttttatgagctcagacatatctgctttatggccaccaccaccacctccgccgccgccgcagcaatctcagccgtccgttcctctcaaccaagactcgctccaacaacgtctccaagctctcctcgaaggtgttcgtaattgttggacttacgctattttttggcaatcctcatacgattacgccggcgccgccgtgctcggctggggagacgggtattacaaaggggaagaagataaagagaaagcaaagtcaaaagcttctttatctacaatcgccgagcaacagcatcgtaaaaaggttctcagagaactcaactctttgatttccggttcaaccgccaacactgacgacgccgtcgatgaagaagtcaccgacaccgaatggttctttttagtttccatgacccaatctttcgttaacggcaacggacttccgggacaagcttttttcaattcatgtccagtatgggtcgctggatcggaccgcttagccaattctacgtgtgaaagagcgaaacaaggacgggttttcggtttacaaacgatagtttgtataccgttggcgaatggtgtcgtggaattggggtcatcggaattcattatccaaagctccgatctagtgaataaggttcgagcgctgtttaatggaattgaagctgaaacttggtctatgagcaacaacactgacgacccatcatcgttttggattagtgatc

SEQ ID NO: 18702 - DNA, 972 bp, Gossypium hirsutum
  Clone ID: GOSHI-09MAY01-C26054_1
cttccgcccacgcgtccgctaaaacaagtgtttctcttcttcttcatgttctcgatcatggcttcttcttcttctttctttgttaggtgtttccctttacttttcttcttcttcttctcacatgtccaagcagtgaaatcaccaattcatcctcgggatgttctacctttattgccgagacaggtttcatggccgatccttaattcacttaacagtgccatcgaccttttaccagcctttgtcggttctgtttcgtcccaaaaccacatcgtgagctggaaaggtgcgtgcttttatgagaacaccgctaggatggagttccataacaagagtggcagtgagttcggtggtggaactctccatatcaaggttagcaaagcccatagttggacgtgtctggatctttatctctttgcaactccatatcgtgtaacttgggattattattttctatctcgggagcatacactcgagattgacaagtgggaagacagagctgagtatgaatatgtgaaaaacaaggggatttctatttttctgatgcaagcagggatgcttggaacacttgaagctctatgggaagtcttcccattatttactaacactggatggggtgagagtgccaatctcgggtttctcaagaaacacatgggggcttctttcgaatcacggcctcagccctggtacaccaacattagtgttgatgatatacattcgggagatttccttgtaatatcaaaaattcgtgggcgctggggcggttttgagactctcgagaagtgggttactggttcttatgctggtcatagtgctgttttcttaaaggattctgaagggaagttatgggttggtgaatcaggacatgaaaatgagaagggagaagacatcattgcagttattccatgggatgaatggtgggatttggagctgaacaaggacgactctaatccccatatcgcagtgcttcctctg

SEQ ID NO: 18703 - DNA, 333 bp, Gossypium hirsutum
  unsure (1)..(333): unsure at all n locations
  Clone ID: LIB3048-006-Q1-L1-E3
ctccattgcatcattgcaacatactgacacagacgggattaatcacaacgtcgttaaacagcttatcatgagttcggtggtggaactctccatatcaaggttaagcaaagcccatanagttggaccggtgtcctggaatctnttatctcttttgcaactccatatcgtgtaacttgggattattattttctatctcgggagcataccctcgaaattgacaagtgggaagacagaactgagtatgaatatgtgaaaaacaaggngatttctattttcctgatgcaagcagggatgcttggaacacttgaagctttatgggaagtcttcccatta

SEQ ID NO: 18704 - DNA, 702 bp, Gossypium hirsutum
  Clone ID: GOSHI-09MAY01-C26004_1
ttctttctctgcactgaactagtattagcagcaatggaagttaatgcaatatggttgctgctgctattgccttgctcctttcctggtttcctcatttcatcatgcatgggaaaccagattgactacctcaacaggttggttgcatcacgcagatcctcgaaccctcctcgcccagagtcatgggctcagctagatgatcaaggaaatagtcatagctctccagtgtttgtaggatctcagaaagggttgatgcaagctgacaagatcgacaaactgccgggtcagcctgaaggggtggattttgatcaatatgcaggctatgtaacagtagatccggtggctgatcgagcattgttctatttttttgtggaatcaccggttaattctccgaataagcctctggttttatggttaaatggaggtccaggatgctcgtctttaggatatggagccatgcaagaacttggacctttcagagttaacagtgacggaaaaacgctttacagaaatgaatatgcatggaacaatgttgcaaacgtgatattcctggaatcaccagccggagttggatattcttattccaaaaattcctcagactatacccaagtaggtgacaagagaacagcagaggactcctatgtttttctcctcaactggcttgaaagatttccccagtataagacccgacatctctttataacc

SEQ ID NO: 18705 - DNA, 440 bp, Gossypium hirsutum
  Clone ID: GOSHI-09MAY01-C26024_1
caagttacggcaccgaggccattcttccattgctttctttctgattcaatcttcaataagttcccaatatggctgggaaattaactacaggaaatatcactggtattgagaaactgcatattgttggtggagctgaagatcgtactgctattacaaacggcaacgctgcaaagaataaacctctagttgtttgcttcggtgaattgttgatcgactttgtaccgacggttggaggggtttctctggctgaagcacctgctttcaagaaggctcctggtggtgctcctgcaaatgtggctgttggggtatcacgattaggaggatcatccgctttcgtaggaaaggtaggtgatgatgaatttggctacatgttagctgacattttaaaacaaaacaatgttgacaactctggcatgcgatttgatcgaactgcaagaact

SEQ ID NO: 18706 - DNA, 1390 bp, Gossypium hirsutum
  Clone ID: GOSHI-09MAY01-C26374_1
cagataacagcggggcccgagattgatgtgtattcgagtcataggagctagtaatcgccgatatgctcatattggtgacgttattgttgctgtgatcaaggaagcagtgccaaatacacctctagaaagatcagaagtgatcagagctgtaattgtacgtactcgtaaagaactcaaacgcgacaacgggatgataatacgatatgatgacaatgctgccgttgtcattgatcaagaaggaaatccaaaaggaactcgaatttttggtgcgatcgcccgggaattgagacagttaaatttcactaaaatagtttcattagctcccgaggtattataagacgagacccaagtatagttagagtatttagagtatttaaatggcatagattaattagtagattgtgtctcacgtatatacctttactaagtaaaaaaaaaaagaccacgttggttatatcaaaattcgggagcaacaaaaattttagtttaccatgggtaaggacactattgctgacataataacctctatacgaaatgctgatatgaatagaaaaggaacgattcaaataggatctactaacatcactgaaaacattgttaaaatacttttacgagaaggttttatcgataacgtaaggaaacatcgggaacgcaacaaatattttttggttttaaccctacgacatagacggaatagaaaaggaccacatagaactattttaaatttacgacggatcagtcgaccaggtctacgaatctattctaactatcaacaaattcctaggattttaggcgggatggggattgtaattctttctacttctcggggtataatgacagaccgggaggctcgactagaaggaatcggtggagaaattttgtgttctatatggtaatctgtccggtatacgaattgtatccgaaactctccatttgtgcaaaaaaaaaaagaaaaaagcacgggttgtctaatagaactcctcctgccctacggtagttgatacgtcaaggaagttttacctggaataaaagaccaaaaaaatggattcataaaggtttaatttaataagtaaatcactcccactctggattcttttagataatgaagatctgattttaggttatgtttcggaagagttttaccaacgtgggatagagtcaccaaaagtgaagtaagtgcttatgattcaaccaggggggcgtataatttatagacttcgcaccaaggattcgaacgattaggtagttttttcaacttcaagatttctttcggggggatccaattcaaatttcaagaaagttattttcttccaataagcgaattcggaaaaattttaaggaataccacctatgaaaataagggctcccgttcgtaaaatttgtgaaaaat

SEQ ID NO: 18707 - DNA, 425 bp, Gossypium hirsutum
  Clone ID: LIB3120-002-Q1-K1-C9
ctttacggctttagatctgagagcaagatcggggttcttttttgttccaagatttcttgtgtaaatctttttatctgggttcataaaatgaagatctgattttaggttatgtttcgggagagttttaccaacgtgtgatagagtcaacaaaagtgaagtaagtgcttatgattcaaccaggggggcgtataatttatagacttcgcaacaaggattcgaacgattaggtagttttttcaacttcaagatttctttcggggggatccaattcaaatttcaagaaagttattttcttccaataagcgaattcggaaaaatttaaggaataacaactatgaaaataagggcttccgttcgtaaaatttgtgaaaaatgtcgcctaatccgtatgaggggacgaattatcgtaatttgttttaacccga

SEQ ID NO: 18708 - DNA, 620 bp, Gossypium hirsutum
  Clone ID: GOSHI-09MAY01-C26304_1
ctgctgtgaaaccttggtctaccgggctaagcggacagctgcagaaagcatttgtaaccggtgtaccaaagctgaagagatcagagctggaagcagcctgcgaagatttcagcaatgtgattagttcttcaacagttggcactgtgtacaaagggacactgtctagtgggattgaaatatccgtggcctacatccctgtgaaatttgccaaagattggtcaaggaatttagaagcacagttcagaaacaagattgaaacattatcaaaggtgaaccataaaaatttcgtcaacctagttggatattgtgaggaagacgagccttttacgaggatgatggtttttgaatatgctccgaatggaacactttttgagcatttacacattaaagaatccgagcacttggactggacgaccaggttaagaattatggtgggcatcgcttcctgcctagagcatatgcaccagctgaaccctcccataccgcataccaacttgtcgtcagctgctgtcaatctaaccgaagactacgcggccaaagtctatgatccgttctcctggaacgagataactgcagctgagagtgaaactgatagaaaaaccattcagatacaccatcat

SEQ ID NO: 18709 - DNA, 393 bp, Gossypium hirsutum
  Clone ID: GOSHI-09MAY01-C26324_1
gtctaactaggatccccggctgagaagcggacgaggaaacagatggctccgtccggctggggggccgcaatcgatccccagatctacccttgaatgaggatgatgataaaattagaagtgcggtggaagtgaagaaaaacgggggagcatttcaaccattccagaaagaaaaaactgcagagatgagtggtcaatctgcaggaggaaaaaccaatggctcagctacaagtacttgtacaacagaaagtgggagtagaggaggagaagccaactgtgcaaattcaagtgaaacagatgagaaagaaggtcaggcttcgagaaagcagacgcggtggtgggcaccggagttgcataggcggcttcttgcatgctctccaacaactagggggttct

SEQ ID NO: 18710 - DNA, 384 bp, Gossypium hirsutum
  Clone ID: GOSHI-09MAY01-C26204_1
cctttcccatatccaaatcactactatctcattcagccatcccagagtttccaaattcgtctctgggtctttctcttcatcccttagtctcaaatgggccgtaggctaaacgacccagaacactcccgtttcagcctctctcatcctgctctcggtggctctcttctcctgtgctttggtctatgcagttgtctcgactttcttgaaccccaatgtaggttctcaagattcgagctttgagtctttcgaaatcgtggcgagtggtgatttgggggagaggaaggacgagtgttgtagaggcatcgagaatttggagttatggggtccagctgtaaagtggggatccgagttcaagttcaattcctctgtggaaatgtgtcaggc

SEQ ID NO: 18711 - DNA, 744 bp, Gossypium hirsutum
  Clone ID: GOSHI-09MAY01-C27984_1
ggcaactgtgttttattacaacaacaacaaaaaaacatcgttctttcgggtctattttttggcaatggagttagggagtgctcttcatttccttgatagcaagtccattttagtcactggtgctgctgggtttctggcaaaaatttttgtggagaaaatactgagggttcaaccaaatgtgaagaagttttatcttcttttacgtgctgcggatcataaatccgctatacaccgctttcacaatgagattataggaaaagatttgttcaaagtcctgaaagaaaaatgcgggaaaaatttcagttcattcatatccgagaaaattacactaattcctggagatatatctcatgaagatttgggcattaaagattgtactttagtgcaagagatgttgaatggggtgtgatgttggggttaaccttgctgctacaaccaactctgacgaaagatatgatgtggcacttggtctcaacacatttggagctcaatttgttgcaaatttcgccaagaaatgtgtgaaactaaaagttttggttcatgtatccacagcctatgtgtcagagaaaaagacaggcttatcttgaaaatcatacgcatgggagaaacactaatgggttcaggctagacataatttgaaaaagttttgacaaaatgatgactaaatgtagtgctcaacaggattctcaacctgaaattggctcaagggcaattatgtgccatcttgttcaagcatgagaatct

SEQ ID NO: 18712 - DNA, 507 bp, Gossypium hirsutum
  unsure (1)..(507): unsure at all n locations
  Clone ID: uC-gsflnu33B093g03b1
ctttttcgtccgaaattacactaattccaggagatatatctcatgaagatttgggcattaaagattgtaatttagtacaagagatgttgaatgaggttgatgttgtggttaaccttgctgctacaaccaactttgacgaaagatatgatgtggcacttggtctcaacacatttggagctaaatttgttgcaaatttcgccaagaaatgtgtgaaactaaaagttttggttcatgtatccacagcttatgtgtcaggagaaaagacagggcttatacttgaaaattcatacagcatgggagaaacacttaatggtgtttcaggcttagacattaattntgagaaaaatgttattgaacaaaaattgaatgaactaagattgctaggtgcttcagacaaggatattactcaagccatgacagatctgggcattcaaagggcaagattctatggatggccatatacatatgtatttacaaaggcaatgggagaaatgctagctggggaat

SEQ ID NO: 18713 - DNA, 697 bp, Gossypium hirsutum
  Clone ID: GOSHI-09MAY01-C27864_1
tatccacctgcattgcatgatgaagtgtggagattggacagaatagccaaagatggagcattacataagaagttgttgaaagctgaaattgtgacggttgaagattttcttcgacttcttgttcgggattcacaaaaactaagaaacatcttgggaagtgggatgtcaaatagaatgtgggagaacacagtggagcatgctaagacttgcatcttgggaggaaagctttatgtttattaccctgatcaaacacataacactggtgttgttttcaatcacatttatgaactcagaggtcttattgctgatggccagttcctatctttggaatcacttaaccacaatcaaaagctttttgttgattccctggtgaagagagcatatgaaaattggcatcaagttattgaatatgacgacaaggttctcaatacccttagaagtacaaaggtagcaaatccgtcagctgcaccggtaaacgataacaactacgatgcagattactatgccacaactgctcaaaagagtagacagcagtatatcacctcagagccaagtccacaatgcccataataataatacccacccaaacagtcctcagtttgattgaatttcctttgaggtctgatcagaatgcagcattgacaatgaaatatcagaaagcattattactagtaccacaccataagtacatgccaat

SEQ ID NO: 18714 - DNA, 373 bp, Gossypium hirsutum
  Clone ID: LIB3149-033-Q1-K1-G11
agaatgtgggataacactttggagctttcttatacttgcatcttgggaggaaagcggggggtttattaccctgatcaaacacataacactggtgttgttttcaatcacatttatgaactcagaggtcttattgctgatggccagttcctatctttggaatcacttaaccacaatcaaaagctttttgttgattccctggtgaagagagcatatgaaaattggcatcaagttattgaatatgacgacaaggttctcaatacccttagaagtacaaaggttgcaaattctacatcttcacctgttaactattaacatctttctattcataatactattcctcaacttctcaaaagagtatacagcattttattta

SEQ ID NO: 18715 - DNA, 432 bp, Gossypium hirsutum
  Clone ID: GOSHI-09MAY01-C27824_1
acatagtacgactggaccaacggcttcttgatgctccagtggctgaagatggagagaattggagtgttggacaaagacagcttgtttgcctggctagggtcctcctaaagaaaaggagaattttggtgttggatgaggcaacagcttccattgatacagctacagacaatgtaattcaggagacaataaggaaagagacatgcagatgtacagtcatcactgtggcacatcggataccaactgtcatcgacaatgacttggttttggttcttgataatgggatgatagtcgaatacgataagccaaagatattactcgaggacaaatcttcttggttctcgaaattggtggctgaatttttgagatcatccaagagcaaccaccctaagaatctggtttgaaggtatgtggacagcttttagaactcaaatg

SEQ ID NO: 18716 - DNA, 591 bp, Gossypium hirsutum
  Clone ID: GOSHI-09MAY01-C27584_1
gtttgatgcatagaggaattctatctgatcctcatcgatagcttgtaaaaaatggccagcttttacagtttcttaggatattaaaggagaaggggaagagacttttcttgctgacaaattcaccgtattactttgtggatggagggatgcagtttatgttggaggattcaacgggcaacagcgattcatggaaggagctttttgatgttgtaattgcaaaagccaataagccgggtttctacacttctgagcatcctttccgctgctatgacacagagaaggatactctagcttttacgaaagtggatacattccttaaaaataaaatatattaccatggatccctgaaatcttttctccaaataactaagtggaagggcccagaggtgatatactttggtgatcacctatttagtgacttgaggggcccttcaaaggctggttggcggactgctgctatcatccatgaattagaagatgaaatacgcatacagaacgaagatcgttatcgatttgaacaggcaaaatttcatatcctacaggaacctggcttgggagattacatgccgtttatacccttgaatttaacag

SEQ ID NO: 18717 - DNA, 550 bp, Gossypium hirsutum
  Clone ID: GOSHI-09MAY01-C27454_1
aaactacagctgccctcaccttgtggaatttgtgtcttctgaatctatacttgtttcgaacattactttccttaacgcacctgcatataacattcatccagtctattgcagccatgtgcacattcatcacataacggtctatgcttcgccaggatcaccatatactgttggtatagtcccagattcttcggataacatttgcattgaggactgtagcattagtatgggtcatgatgcaattgccctcaaaagtggctgggatgaatatggcattgcttatggcatacctaccgcaaatgtccatatcaggagggtccaacttcagtcattctcaggctcttctcttgccttcggtagtcaaatgtccggtggcatttcggacgttcaagtgcagcagctccacctctatgactcattaactggtattgagtttagaacatcaaagggtagaggtggttatattaaagagattgctatatcagatgttgacatgctgaacattaaaacggcattttgtgccaatgggcattttggatccccatccgatgac

SEQ ID NO: 18718 - DNA, 1064 bp, Gossypium hirsutum
  Clone ID: GOSHI-09MAY01-C27474_1
gcgcggacgcgtgggttcgcattttctcatagatttctcccccccttttcttttttctctttctttgctaatatcaagctttatcttcttcttcctcctttcgttctcattttctcttacttcttttttccctagggactatctttgttttgttatcttctgggttttgcatgtttattgagttttccctatatgtatcatctatgtcggaggtttctggtggttaggtggtgctaagcttttattatatctcgtcgtctgttttgcatgtattcttctgggttaggtttggtttctagtcggagtagtagttctgttcttatttgtagatgtgttgagaggttgtgtttccaagagttcctgatgtattgcaacgactctgtgtttcttgtacacaaatcttctgaggccctggatttgtccctcctgcttctgatgtaaacaagctatgcgatattcttgataagatgaagccagaagatgttgggcttagcaaaagtctgcagttcttcaagccaacgggtgctgtgaatgggactccaagggtcacttatactaccatttaccaatgtgaccagttctcgttgtgcattttctttcttccggaaacggctgttattcctctccataaccatccagagatgactgttttcagcaagcttttactggggaaaatgcatataaaatcatatgattgggtcgagcctaaagactcaataccaccctccaaattgaggttggcaaggttgaaagccaatagcgtgtacacggccccatgcaacacctcggtgttgtatcccacaacaggaggcaatatccatcaattcaccgccgtaacaccttgtgcggtgctcgatgtactcggccctccctattctaaagaagacgatcgcgactgctcctattacaaagatttcccatactcagctttctcaaatgagggagaaactacaagagtgagtgaagaagagagagagggacttggatggctagaagaaattgaagcaccagagaatgcaatgatggatagaattgactgggtcctcaaattatagaaaactact

SEQ ID NO: 18719 - DNA, 794 bp, Gossypium hirsutum
  Clone ID: GOSHI-09MAY01-C27764_1
cccacgcgtccggaaagtgatagatactgaagaagagatgaaaagtatggagggaattcaacacaaaacggtgattgtcaatggcatcaacatgcacatagccgagaaaggggaaggtccattgattctcttccttcatggcttccctgagctctggtactcgtggcgcaaccagatcaacggtttagccgccctcggctaccgtgctttggcgcccgacctccgcggttacggcggaacagatgcaccagattccgtcgccgattacacttgctgccacgtggtgggagacctcatcgcgcttctggacacagtggcgccgccggagaaggaggataaggtgtttgtcgttgggcacgattggggtgccatcattgcttggtacttgtgcttgtttagaccggaccgggttaaagctttgttcaatttgagtgtgccgtttattccttatgatcctcggtttaaaccggtcgagacttggaaagctttctatgggaaggatcattacatcgtccggtttcaggaacctggagtaatagaagcagagtttgcagagattggtgtaggacgagcagttttggagctgttatcgtatcgggtacccgacccactttatttaccaaagggaaatctattcgggtatccactagattctccggttaacttgccgccatggctgtcggagaaagatgccgattgctatgccacccagttccaaataaccggcatcccggtgccctcaattattaccgcaattttgatcgatactgggaactatttgcaccatggtggaa

SEQ ID NO: 18720 - DNA, 436 bp, Gossypium hirsutum
  Clone ID: GOSHI-09MAY01-C27124_1
gtgagtttaaaaaatcaacacttggaaaaggtttcgctgttaatacttgcgcaactaaagaatttgaattgtttataatacgccatccttgcttagctaaaagtgaaacattaaattgagccatatttctgaagcccaatccaccctcttctttaggacggcataagtacttccactgacaccaatgaatacctctcataccatgcgttttttgccaccaaaatttagcaaaaatattctcaaattctcctcaaagagtctttggtaataagaagcatgacatagcgtacgttggaatggcctgtaacaccgatttaataaagacttctttacctcttgagataacattctagtactccacccatcaatcctggtagcaatcttttcttttaaatgctgaaaggattttttctttcgtcgaccaaccatgtttgga

SEQ ID NO: 18721 - DNA, 412 bp, Gossypium hirsutum
  Clone ID: GOSHI-09MAY01-C27084_1
tgtaaacaagcctttgtatgccgttttcttcttctgcacatttctttctggttcttatattctcaatgattgaacttttaatatggaagagatggataaggcaattattggaatcatttttcacagaccatttggtcgtgaatattgctgtccttagttttatgcttcatgccatttttggttatgcttttgtagtttaattcctaaactcaattatatgtagaaccctattacacgagtcatgttgaaatttctagcaaatcttctgtaagagttcatccatgtgtttgttcttaccatagccagggggttcttggttgttggcttgttgcagagtagttctgtaaattttgtccttgctatgtatcaatgttcatatctcgacgaattaactaaataaattgataaaata

SEQ ID NO: 18722 - DNA, 669 bp, Gossypium hirsutum
  unsure (1)..(669): unsure at all n locations
  Clone ID: AI054530.1
gaacccccaatttagcttcttctagtaaaatacacatatcctttttgcctattatattcccaaattttatacaaacagtagaccatacatacctttctcttgtataccttgccttttaagcacccctttccttcatttcacctttttcttccttctcttctcttctcttctcttctcttctcttctcttcctttcacccctgagaaaatttgtgttctccatttttgagaacatgctttaatgtccagggaaagggagagatttgatgagataggcaaaaagatcaagagagaagcagatgttgtttcatttggaggtcatcatcatcaaatgggaagaaggcacataatgggttctcatggaaccctaaataccattacaccatgtgctgcttgtaagctattgaggcgtcggtgtgctgaagaatgccctntttctccattatttctcccacatgnaacccanaaagttgcttctgttcacaaantttttggtgctagcaatgtctcaaagatgcttatggaagtaccagagaatcaacgagccgatgccgcgagtagtctttgttacgaggcgaacgtagggctagagaccctgttatggttgatgggtgcatttnagcttttgcacacaagtcaatcttacagctggatcatgcangaagcttgg

SEQ ID NO: 18723 - DNA, 432 bp, Gossypium hirsutum
  Clone ID: LIB3048-021-Q1-L1-G10
ctcaaacccctcctcttattatatatgtatacacatatatgtattaacaatcccaagaatcaactttcagaacccccaatttagcttcttctagtaaaatacacatatcctttttgcctataatattcccaaattttatacaaacagtagaccatacatacctttctcttgtataccttgccttttaagcacccctttccttcatttctcctttttcttccgtctcttctcttctcttctcttcctttcacccctgagaaaatttgtgttctccatttttgagaacatgctttaatgtccagggaaagggagagattttatgagataggcaaaaagatcaagagagaagcagatgttgtttcatttggaggtcatcatcatcaaatgggaagaaggcacataatgggttctcatggaaccctaaataccatt

SEQ ID NO: 18724 - DNA, 424 bp, Gossypium hirsutum
  Clone ID: GOSHI-09MAY01-C27284_1
gggagttggtgagactgcccaagggaaagaaggcaatggggggcaaatgggtatatgcggaggaagaatttcctggtaaaaatgaaattcgatacaaggctagattggtagcaaagggttacgctcagaaagaaggaatagactacaatgaactgttttctccagttgtgaagcattcgtctattcggattttgctagccttggttgcgcaatatgatcttgaactagttcagcttgatgtgaagaccgcgtttttacacggtgatttggaagatgaaatctatatgactcagccagatggattcaaggttgctggaaaagaaaattgagtttgcaaactgacaaagtcgctttatggattgaagcaatctccgaggcagtggtacaagcgatttgatcagttcatgaaagggcaaatgtacac

SEQ ID NO: 18725 - DNA, 1358 bp, Gossypium hirsutum
  Clone ID: GOSHI-09MAY01-C20984_1
cggacgcgtggggaaaaaatgcctccaaaccttactaaacccaacagtggcttcacttcaaagccatcgcctctctgtacttgtgtatccctcattttcctccttattataggtttccccgcgccccccccccctccgggggatcccaaaaaagtccttcttttccagcaaatattcctctcttctgcctccaactccaccatcgcctcctacctgcgttccctcacttcccaccctcatctcgctggcacaaagccttcccttgaaaccatccactatgtcaaaacccactttcaaaaccttggcttggaaacgcatacggtgccgtttcagacccttttgtcttaccccgttcatgcttcggttttaatgcatttcggcaacggcaccgtgttaaacttgcctttaaacgaaatgggtattcctagttatccatcttcaggcttgatacaaccctaccatgcattttctccgtcgggaacggtgcatggtaaggttgtttttgcgaaccacgggagggaagatgactatcgcacgcttgggctgatgggggttaatgttaatggctgcatagtggtaattagaaaagggggggggggggagtggaggggccgtagtgaaaatagctgaaaaaaaggcgctttgggggtgctaatgtatgctgaaggggatgtttcaaagggtagctttgggtctggagttgaaagagggacagttatggagggaggtggtgaccccttagcggcggggtggggtgcggatgaagatggggagaggttgaagttggaggacaagaaggttttgcagaggtttcctggcattccatctctgcccttaccttttgagtctgctcaacttattttagattctcttgggggacctttggcacctcaggaatggagggattccggacgatctaatttatcccatgttggatcgggtctggttatggtgaattttacttacccgcgcgggaagaagtccgctacactttacattgtagtcgctgtcctgggaggattgcacgagccagatcgttatgttttgatggggaatcatagagatgcttggacatatggtgctgtcgaccccaatagtgggactgcaacactccttgatattgctcgaagatatgcccttttgatgcgaaagggttggaaccctcggaggacaatcattttttgcagctgggatgctgaagaattcggaatgatcggttccacggagtgggttgagcagaaccttgtaaatcttggtgctaaagctgtggcatatcttaacgtacattgtgctgtgcaagggcctggtctttttgctggcccaacatcctagctagataatcttattcttgaggtcac

SEQ ID NO: 18726 - DNA, 509 bp, Gossypium hirsutum
  Clone ID: GOSHI-09MAY01-C20584_1
cccacgtttccgctgactcaaattgttggacttgtcctagtggtacaggatttatgataagaggaaagacttacttaaaagataatgccaaaataatgggttcagatccccttctcaaactaatagctgttgactggttcaaagtcgatacagccacagataaaattgcattgcatccaaggtctctagctcagtctgatgccggaaaaaagcttccatttatccttgtgattaatctcgaggtccctgcgaaaccaaactatagtttggtcctctactatgctgctgaaaggcctgtgaggaaagattctttactgggaaggtttgcggatggaacggatctgtttcgtgatgccagatttaaactgataccaagcattgttgagggctattggatggtcaagcgtgcggttggaacaaaagcttgcctacttgggaaaagctgttacctgcaagtacttcaggcatgacaactttctggagattgacgtggacattgggtcatcatc

SEQ ID NO: 18727 - DNA, 626 bp, Gossypium hirsutum
  Clone ID: GOSHI-09MAY01-C20544_1
catttttatagtttgttgaaatggtttaaggctttaaggagagattcaaaatcctactctccggggaaaagagagagataggcatactcttccatgggtctttgcacctccaaaccctccccaaacccttctgattctacaaatgcctctatcaatacccggaataacgatatccaccgcaagcctaactctgtttcggcttctcctttacctgatggtgtaaactccaaggaagatcaaggtaaacaaggagaagaagaaaaagaaagctccaattccaacaatgaaggcaagaaatcgccgtttttcccgttttatagtcccagtccagctcaatacttgttttccaaaaagtctccggcgagatcttcaaccaattccactccaaaacggtttttcaggaggccattccctccgccgtctccggcgaagcatattagggcagtgcttgcgcggaggcacgggtctgtgaagccgaatgaggccgcgatcccggaaggaagcgacgcataggcagcgggagctaccggtaccggactggataagagcttcggcttctcgaagcacttcgggagcaaatatgagctcggagaacaaatagaagagggcatttcggttatacttgt

SEQ ID NO: 18728 - DNA, 708 bp, Gossypium hirsutum
  Clone ID: GOSHI-09MAY01-C20574_1
cggggacatcaccagagcagttggggggaggcgggcatgttggtaatgctgacagtttggaccctgatatgcgtgtgtcagcagaagctagtataaaatctgcaatgcagctgtttattaaattctcggcaggaattgtactagattcactccatgaatctaacagatctcatctcgttgccaagcttgtatttctggaccaactctgtgacatttcaccataccttccaagaagctctcttgaggcccatgttccttatgctattctccgttcaatatatagccagtactacgcgaactctcctttgatgccaatggcattattaagtgcttcaccacgccattcacctgctgtatcattggcccatgcgtcccctataatgaggcagccccgtggagattcgactccacagtacagtgctaatgattcaggttatttcaagggttcatcatcacacagccaagagcagctctatgatgctgaaagtgcaaatctacgaggcgttgaaaacaaacatagaaatgttcgccgctccgggcctctggattacagttcaagccgtaaagtcaagtatgaaggatcgtcgtcaggaggtacaggtcccagtccgctgccaaggtttgcagtatcaggtctggtccatatcatacaattaggatgaattgatggtccacttcaacaaggaaatatactttactaaattatcc

SEQ ID NO: 18729 - DNA, 593 bp, Gossypium hirsutum
  Clone ID: GOSHI-09MAY01-C20514_1
tccgcggcgcgtggggcaatgaccggtcagcttaccattgaaatcggacgtttatagttttggtgttgttttgcttgaaacattactggaaggaaagctatcgacaattcgagagctggtggtgagcaaaatctagttgcctgggctcgtcctttgttgaaagatagaaggaaattcgcgcaaagtggccgacccattacttcagggacaatatccggtaagaggtttgtaccaagctctagctgtggctgctctgtgtgttcaagaacagccgaatatgcgaccacttagacccgatgtagtcactgccctcacctatcctgcttctcagaagtatgatccaggaactcagaccgttcaaggatctcgtaccggttcttccactccgagaatgagacgggaatactttcaggtaacggaaagtaaccatttactcctatgagaagaattgaatctcttggcagctgatgattgagattaagaagcaacaggtttttatatgttttgagatttacaattctcgggcctggagtcccttgccaatctgtccccggatgtggaaatttgtgagtccggatggccggtccgatgcc

SEQ ID NO: 18730 - DNA, 727 bp, Gossypium hirsutum
  Clone ID: GOSHI-09MAY01-C20484_1
cgaagctgctgctcctagaattttgcatagagatgtaaaatcgacgaatattcttcttgataagaactgtagagcaaaaattactgatcttggtatggccaaacgtttaagagctgatggacttcccagctgttcgagttctccagcgagaatgcagggaacctttggctattttgccccagaatatgcaattgttggaaaagcctcacctatgtctgatgtttttagttttggtgtagttcttctggaactgatcactggtcggcaacccatccacaaatcaaacaataaagaagaaagtcttgtcatttgggctacccctcgtttacaagatagtaagcgagtgacctcggagttacctgacacacgtttgaaagggaattttccggaagaagagatgcagataatggcttacctagcaaaagagtgcttgctgttggaccccgatgctcgaccaacaatgagcgaggttgtgcaaatcctctcaactattgctccagataaattgaaacgaagaagtattcctgtaaacttttaccagatgccatccgcctacaaaacgaataatgaagcttttctcgaaagacatcaaaccgtaatcgaggatttatatgacgcagaggaacacatgccaagtacatcgaagtcagcagagagctcgcggccatcaagcatgaatgatattagaatcgccggcaaacaaatagttacctgcctgcgagtgcat

SEQ ID NO: 18731 - DNA, 566 bp, Gossypium hirsutum
  Clone ID: LIB3828-028-Q6-N6-C6
atgcaaactaattatgcaaatcgcttaagaacatcaaggaagttgacaagtaacaatctcatagtttatcaagaaatgaatgaaaaatacaaaaaaagaaaaaggtataccctttttcttaaagggatggggagggtcatttatgatacacgcagccttcaccatgcattatttgcaccaaaaactgtttctgcaactcgaacatgtaaaccaaccattgctacaaggaaacattttttctttttgatattaacccaccttctaagtggagaaagacaattatctatgttccaacggtttgactaattacaagaaaatttaggcctaaaccatccaagaagctacagattgatccttgccaaacaaaatggaccatggaccatgaaccatgaacaacttatttgcagctttgcaagcaatgaaatcagctcagtgaagctatgatcagccccagttcccacaagtttttatcggtttctctattgcaaatgacgacacctcattttctcatcctcaagcttattttttaacgtttcaacccgctcgagtaaagcagcattttcctg

SEQ ID NO: 18732 - DNA, 395 bp, Gossypium hirsutum
  Clone ID: LIB3083-112-Q1-L1-G10
agaattgtctttctccacttagaagctgggttaatatcaaaaagaaaaaatgtttccttgtagcaatggttggtttacatgttcgagctgcagaaacagtttttggtgcaaattatgcatggtgaaggctgcgtgtatcataaatgaccctccccatccctctaagagaaaagtggctgaatctcgtccaacatggtagatactgtcaaaaaatcaatagctggaagtgactaacaaggaaagacacgagacaagtgttcttttttcattctttttctctgttcttttctgcaactgaaaaccaagtctctgagatacaagcaatgatcaaagattgcgacacaatctttaatttcaactgtcaaggcctcaccaatgattgattcttaatttaa

SEQ ID NO: 18733 - DNA, 294 bp, Gossypium hirsutum
  Clone ID: LIB3083-046-Q1-G1-E4
caatgcagatcgcttaagatcatcacggaatttgacaagtaccaatctcatactttatcaagaaatgactgattaatacagcagctcaaagcaggtataccttatctcttatagggatggggagggtcatttatgatacacgcagccttcaccatgcataatttgcaccaaaaactgtttctgcagctcgaacatgtaaaccaaccattgctacatggaaacattttttctttttgagattaaccaagcttctaaatggcgaaagacaattctccatgttccaaaggtttgact

SEQ ID NO: 18734 - DNA, 809 bp, Gossypium hirsutum
  Clone ID: GOSHI-09MAY01-C20744_1
gaaaaaaaatatcaaatttcaaaatcgttaatgactaaatcaattttgatgagcaaataataatacccaactataggtgactatccatgtagggttctttggtcaatatggctaattccaagaccaagacaaacccttgattcaaccgtagcaacaaggaaggaacatggaaaagggcagaaacatgagactgaaatcatattttggacaacaacaaaaaatggttaaaatataaacacggatggaggtgaataaattggaaaccgaatgcccttactttctttttccttctatcttacatttcttgtaactaagacccttctatgttacaaatcaaaattgcagtggagttttcattcaccacagcttgtcgtcttcttcttacattctcaattacaaactgccttctcagccttttcaagcaattataataagaattgcagaagctttatacctctctttcttggaaggcaccatctcagccgagactccgttgccatcgtgtgtttcaaataaatatgtgattgttgacgtggtggatcagttgctttcgacaaatttggtggtcagtcatgcaaaatcattcactgtaacaccggagttcaacaacaaaaagaatgctgaagagaaatcaatccgcccaagggccaaatcctgctgtggtgtaggagggttaaccagaagccagtaatgaagaaaaaaatcagtatggaataacatatgggagagcacaaacatcggtggactctatctgcagagcttctgcccacacctgtggtgcctcatcaatttggaaaaacccacttggg

SEQ ID NO: 18735 - DNA, 674 bp, Gossypium hirsutum
  Clone ID: GOSHI-09MAY01-C20194_1
ggaaaaagttgagatagacatgtttcccataatatgtttctgggtatgtgaacagatccacaaaaacaaaagatcagagtgtaacaaggcaagttgcccttagcatacactgtttaaagcttgaccattagcactagcaaaggacgcttattcttctcaatttaactcttttgtaccacacaaatgctcgcatcaaatgctgctaatctttgttgaggaaagtgatgatgagctcattcacctgctctggtagttgttcttgaacaaagtgattcccttctggcatgaaagtgatgtccagattaggcataaactgcttcactatccctttcttcatgtactcctccattcctgggaatttcataaaatagtccttctcccccattatcagcaatgatggagctgtcacttttggattggttataccataatccaattgagagcacctgtaggggacctgcaatgcggttcggaaaccagaattttgatataaagttgcatagacctcaagatcctcctctgtgaaccatggtggcagtggagtagatggatcaaccaagtccattatctcctcattgtcgccggctacttgtaactcacttctgcagaagagaatataaatgtttctaacgaccgtcttaacatcaaatcggccgcgtgggcggacgcgtggg

SEQ ID NO: 18736 - DNA, 603 bp, Gossypium hirsutum
  Clone ID: GOSHI-09MAY01-C20184_1
atttattttccgttgcaatattaaaaaaatgataatttatttgattgtaaaaagttttaactcccagtccatttataccagtttagtaattattaaaaatataaaattcaagtaagcgacagtaagaaagagctctgaacagaataaaagctttaaagccactaaatcatcagatccagcttattaaattaaatcatccctttcacaatagcagagtccaagtgccaaatatcgcaaggaatactcccaaaatatgacatatttactttaaaaactaggcttcttaactcatcaaccaagcaagttttctagacaaagatggaaaaaagggaaaataaacgtcaaagcccaccattttacacaacttatcataccaaagcaaattgctgctgctgccaaaataatctttgttccatattttcatggagaagcctctgcctaaatttctcacaaccttcatttacaaaattcacgccacaagaaaaagccatatatttaaacgagggagatccacccgtcaagccacgttaatattcttgaaactcgatgtagcatgagcaggtgtgtttgtcatttataacctctacaatatccagaaacaaa

SEQ ID NO: 18737 - DNA, 722 bp, Gossypium hirsutum
  Clone ID: GOSHI-09MAY01-C20164_2
aaagaatagaatttgcaaagggcttctatatctgatggtagtagttggcaaactagtaatgcaagagaaaacaaagtccttgcatcatcacagtgttgcagccttgatagacagaaaatctgagatcttattggtgtagaaatcaggttgaatggaattgctggggctttgaagcattgacaaacttgtcacgcctgagagaacaagaagagttttgcagccaccgttttgcccaaacagaatgtcagtatctaatctgtccccaaccatgcatatctgtgacttgaggatgccaaatttgtttgcgaggtagtccatcataaaagttgagggctttcccacaacaagtggctcacgttgagtagatccacagatggcaccaaccatagaaccgccacctgcccattcctgagcatctgtgagatgagtgacagcatcacgatttgtcgcaatgaaaagacaaccaggattttcacggatacaaagtgtcccatactggactttgtagtacctcaagtatcgatcaaatccaacaacaacagccccaacatctttatcatgccccacgcgtggccctggcttcagttctatcttctttccaccgtcctccggcccaccaaggtattggaatcccgcaagctcaagctcctttaagatgccatcctcaccaatgacataaacttttttatcttttggccgggaaatccgggacggtacgtgca

SEQ ID NO: 18738 - DNA, 829 bp, Gossypium hirsutum
  Clone ID: GOSHI-09MAY01-C20164_1
ttgcgctggaattggcaattatttattggatgatttgatcagcgtaccacaatcttaaaaacggcttgttatttttaaagataatcttcgaatagcgaaagaacaatctacattgcatcattcattgatacaatttaaaactgtttttaaccattgcccttaatacagaaatttttgcatggccagaaaatggaagaaagaatacaatttgcaaagggcttcttgatctgatggtaatagttggcaaactagtaatgcaagagaaaacaaagtccttgcatcatcacactgttgcagtcttgatagaaagaaaatctgagatcttattggtgtagaaatcaggttgtatggaattgctggggctttgaagcattgacaaatttgtcacgcctgagagaacaagaagagttttgcagccaccgttttgtccaaacagaatgtcagtatctaatctgtccccaaccatgcatatctgtgacttgaggatgccaaatctgttgagtaacatgaaaacaatgctattagaaagcattaccttttttttccacctaaccggtttccagtattcatttgtctagcatcaccgcagcccttgtaaattagacattctcccgacagagttcaatcatctgtgaagcaatctattgtttgatgaggtagtcaagtgtgaaaaaacaccaaaaatggaaaaggagaagcatttgacaacagatacaaattgcaatcagaaaaacggtccaggaaaagaaagaggatcatgtcttcagctctttgctaccctatttataagcatacttatatcaagcccacgcgtccgcccacgcgtccg

SEQ ID NO: 18739 - DNA, 701 bp, Gossypium hirsutum
  Clone ID: GOSHI-09MAY01-C20134_1
atccccgaacctcttggaggcgcacatgctgatcctgtatggacttcccaacaaattagatttgcaatcactcgggccatggatgaactaacaaaaatggatacggaagagttgcttcgtcatcgtatgcttaaatttcgatcaattggaggtttccaagaaggcaagcccgtggaacctgaaagaaaacgaaacatgaagccttcggatgctagcatgttaaatgctgcagatatagaatcagatcttgagaagttaaagaagaatatcttggaggctaaggtaccttccgatcctatcacggaccaagcaatagaaaaacttgggcagggtgttgacaacgaggtcacgagagcgtttatttcaatgggattgcatgagaagcttgaatcacttaagttggagttatcccgagcctctgataatcagacccttaatcctaatttgaaggcgaaggcggataaacttatgcatgaatttaagcaaaatttgtcgagaccagtgacctatcttggtttaaaacataagctcgataagctaagcatggttagcagactcattgagcagaaagagaaaggtgagaaactgaaagccgcggttaatcagaagattccattcgagatcaatgaaaagttggaacaattgcaaaccgctcaggctaacttatctaaaggagatccactcgatgaacatttggtggc

SEQ ID NO: 18740 - DNA, 575 bp, Gossypium hirsutum
  Clone ID: GOSHI-09MAY01-C20124_1
gagggaataaggtattaataaattgttgatttttagaggccaacggcccaacagaacttttctcagcccagttaaaaaggggtatatatttgttttggaattagggagggttcaattgttgggggatccagaaagtagagatgtcaatactttgggaaaaaagcgagacatggcggtggctagtgaggaggacaagggactcgaagccgttcttcttggcctttgccaccctctgcggcgttgttccgggtgtcattggctacggcgtcatgcaacttaccaactcccgcaaccctcacttggaggcccggctgcgcgaaaacgcccgccccgaatccctcatgatggggaaagtgaaccaagagcgattagcggaataccttggggagctccagcggaaagaggatacaaatgatcggtatgttgctgctttgaggggagagacattgactaggactccttatcagagaattcagcctgttccaaagcaaaacgctgagaagaagagcaacagcaacgagaaggcttaccatgtagtttggttgctgaaagtgttatcctatacattgttttcc

SEQ ID NO: 18741 - DNA, 489 bp, Gossypium hirsutum
  unsure (1)..(489): unsure at all n locations
  Clone ID: uC-gsflmaxxa061d12b1
cctatatgaaatgtcagccttgtctgtactaatacctgaacagaatcttctaaacacacacaaaaacaaatgccttgtatttaagcctgaagctattgataagttgcttcaagagaattaagaaagctaaggatggtgttaaattactggagaaatgcatgcgtgttctcctctatcgtgatagatcagctattaacaagcttcagatagctaagatcactgaagaaggcatgacgatttccccgccatattcgataaagacctactgggagttctctgcttttgagaatcctactcagggtgctgtaggatcatggtagacgtcgccatcattttatgctttgtggaaacatttcatggtacgagaagaacatcgatgaccccactaggagttgaaataaaaatgatcaaacttttgatgtctgtngtgtagattaacntttttattggaattgttaattattcctatagtttttgtttttggtattt

SEQ ID NO: 18742 - DNA, 334 bp, Gossypium hirsutum
  Clone ID: LIB3083-031-Q1-L1-A5
aaaggaaaaagcatctactttaacattaatcatgaaaacaatcaaccttcaacttaatcgttttagacagccttgaagatgcgtcatgagttcataactcagtttccaaatcaaacataaagatgcatcagattttcatttcaactcctagtggggtcatcgatgttcttctcgtaccataaaatgtttccacaaagcataaaatgatggcgacgtctaccatgatcctacagcaccctgagtaggattctcaaaaacagagaactcccagtaggtctttaacgaatatggcggggaaatcgtcatgccttcttaagtgatcttagctatctga

SEQ ID NO: 18743 - DNA, 423 bp, Gossypium hirsutum
  Clone ID: GOSHI-09MAY01-C21954_1
atgatgaacttttcacatcatcatctatgtgtttcaatgaaataggcgagttcaccgtagctgatgtagccagtgcaatggctacagcctgttctcttaattttagctcattctccacctctttcctttgtaactcactctgccgcaacagacctacaagttccttaagttgttctttcatttccctgatttctatgcctttttcccataactggtaccttgagtctccgagagaattgaacatatattgaagcaagttctttgcatctcccatggagcgcaactgattccaacgtccacggttagtgaacgcacgctcccgctcttctgcctctgaaagttgtgaacccattgctacaagtgaattagatgatatgcccagcatatggtcaagtgaagccattcgtgccacttttggatttg

SEQ ID NO: 18744 - DNA, 366 bp, Gossypium hirsutum
  Clone ID: LIB3083-074-Q1-L1-F4
agaatcatgagtttattactggaatgctcctcaataagtttagactgttaagagtatgccttacatgaaaacctaaataaagccgcatatgtttaaggccttaatagagtttacataaaactaaccgtagctgatgtagccagtgcaatggctacagcctgttctcttaattttagctcattctccacctctttcctttgtaactcactctgccgcaacagacctacaagttccttaagttgttctttcatttccctgatttctatgcctttttcccataactggtaccttgagtctccgagagaattgaacatatattgaagcaagttctttgcatctaccatggagcgcaactgattccaacgt

SEQ ID NO: 18745 - DNA, 718 bp, Gossypium hirsutum
  Clone ID: GOSHI-09MAY01-C21814_1
aaataaggaaaggcacagtaatccagtgaataataacatgaatgatgaaaagcgtgagggtaaaggaaagaaacaagaaattaaaaagaaagaaaagattgatggtctaatattcatgtgcaatgctaggaccaagccagattgtttccgatactgcgtaatgggggtatcagctggtaaaacggatcttgtgctgggtatcagaccagggcttaagttatttctctatgattacgatgtcaggcttctttatggtatttatagggctacctcttctggtgctatgaaacttgagcccaaggcttttggtggggctttccctgctcaggtgcggttcagcgtccattctgattgttttcctctggcagagaacattttcaagaaggctatcaaggaaaattatgatgaaaagaacaaattcaaaactgaacttactgctagacaagttcggaagctcacagaactttttcgaccagttccagttcattcaactgcactaccttttcactccccatcaagggcagcagctcgaatcactgaacaccctgaaaaaagggaagctcatgatagaccaagggaagcaaggccctcatcacacagagaagcatctgttagagacccttatgctaatatcagtgctaggaattatgctggttttcctcatgaaaggaatcagcgagtggcatatggagaggtggcatctaataagagggaggat

SEQ ID NO: 18746 - DNA, 507 bp, Gossypium hirsutum
  Clone ID: GOSHI-09MAY01-C21834_1
aacctctaaaacgggcccccccctttaggttattttatttattatttttttttttttttattttttttttttttttttttttttttattttttttttttttttttttttttttttttttttttttttttttttttttgatcaaatgaaataacacaaatttaagactaaataggagaggaggtaaaagaattgatagagcgggcatctcatctccagtggcatcaagccaaagcttggcacagtaccagtgacacaaaagtactagagaaccactccatcaattacatagcccagaagctgcaagaagttcaatttgggacattccccgtccacattagtgagtaataatgcataatatctttcagggcctcgaagttccatccaactctatgtactgcaagttgcaagaataaacaaaagacaacaacacctagggtaaaccgccaagcgctgcagaggacatatatataatataatggcaaccatcactggaaacatttactggt

SEQ ID NO: 18747 - DNA, 941 bp, Gossypium hirsutum
  Clone ID: GOSHI-09MAY01-C21544_1
ccttctcgtccgcccgccccgcgggttttgctttttgcttctgcctttgctttttgcttcttactctcaaccaaaaatgactgctcaggccgacaaagagatcgaagagatcctggcagctcatctcgaccaacaaaaaatcgattccgagataccagagcaacctgttgttgaagatgacgacgaggaagatgacgatgacgatgatgatgaagatgatgccgaaggtcatcatgagggagaaggagatggaactgttaggtcaaagcaaagccgaagtgaaaagaagagtcgcaaagctatgttgaagcttgggatgaaaccgatctctggtgtcagccgggtcactgtgaagaagagcaagaatatcttatttgtcatctcaaaaccagacgtgttcaagagcccagcatcagatacttatgtaatatttggagaggctaagattgaggacttaagctcacaactgcagactcaagctgcagagcaattcaaggctcctgatctaagccatgtgatatcgaaaccggagtcatcaacagcagtccaggacgatgaagaagtggatgacacaggggtggagcccaaggacattgaattagttatgacacaagcaggagtgtccaggtcaaaggctgtcaaggcactcaaggctgctgatggtgacattgttagtgctataatggagcttactacctaataacggtgttgatttagcaattgttttggttgctgaaagtcgtgtgcttcatttcagatattcctactgtttttttgagaatgttattgtgtcgtttttcttcttgtcggttgttgtattagtaaaaaaaaccatttgtgaggacgtttctgttataaaaatggtctcggttaagaattcttggttgagggagagaatcccgttaccaagaaatttcacaaaaaaaaaaaatagatcgcga

SEQ ID NO: 18748 - DNA, 511 bp, Gossypium hirsutum
  Clone ID: LIB3147-049-Q1-K1-C8
ctggttcttgctaaagcgtttgctactagctgttaactctaaaccaacaataactgggcaggccgacacatagatcgaagagatcctgccagctcatctcgaccagcataacatcctccccaatattccagaaccaccagttattttacattacaaccaggaacatcacgatgacaatgatgatgaagatgatgccgaaggtcatcatgagggaaaaggagatggaactggtaggtcaaagcaaagccgaactgaaaagaagagtcacaaagctatgttgaagcttgtgatgaaaccgatccctggtgttagccgggtcactgtgcacaagagcaagaatattttatttgtcatctcaaaaccagacgtgttcaagagcccagcatcagatacttatgtaatatttggagaggctaagattgaggacttaagctcacaactgcagactcgagctgcagagcaattcatggcttctgatctaagccaagtgatatcaaaaccagagtcatca

SEQ ID NO: 18749 - DNA, 1168 bp, Gossypium hirsutum
  Clone ID: GOSHI-09MAY01-C21574_1
tcgagttttttaaaactttttttttttttttttactttaaaaaaaaaaacaggcggtttattcctacccctccttcgttttgtacattctgtatcaacaaatttcaaggcaacttagtttaattgctgccacaaaactctgtagtatgtataaaccacacatgctcaaacaggggagaagaaatgaagataatataaataaacacttttttaagaggggggaagtgttcgggcttaatgcctgtctctctgaaaaatatccacagaatgtctcttcgacaagttccataatggccatggatgccagcttacataggaaccaaacatacaccaaccatatagctcattaatcctcatttccgaagcctgatgtgagggtacagtcccaatatatgctccggcaggaagtcgtgccgggtcagaattccaacaattggaggcctcccctgactctttggtaccacacacatgtgccggagacctagctgacggaagagaactgcagctttggcaagtgacatggtctcaaccactgtgtacggtgatgtattggtgattggatggagatcaacatacatgtccatttcctcgtctttgatatcaagatcctctagtttgactccctttcctgaccctgccttggcgaagtcaaatttggagattctacgtactacctcatctcctgaaagtaccctatcccatgaaaatatctttcctttaagtaaaacaagtaaatgagatcttagaacaagcccacacaactcgggagcatctgcgaaaggtggttcatcaataacagggaacccgttatgccctgtagttttcaaagcatgtaatatgtttccgaccttctcaacaccagaaaaggtgattaaaggaccagaaacaacatctcgagcaactaaatgtttcatgtacggttctgcatgagcctccatgtatggcaatccttttagttttactatttgcccatagaccccatggttgaacatatcacccacagttttcgagataaggagaaccagcatgacaagtggaagcagcaacagatcattagtgagctcaaccagtataacacacaaggaaactgtcattctcatagtgccaccaagaaaagaagctgccccaaggagggcaaacagaccaaccagacgctgggtcaacccggg

SEQ ID NO: 18750 - DNA, 752 bp, Gossypium hirsutum
  Clone ID: GOSHI-09MAY01-C21514_1
gggagacgaaaggtttggggtgatatatttcatattgttgcttccaagactgaatgagcatgattttgaggttctatcaagccctgaggttattgaaactagagacgcgcttttgcagaagctgcaaaagaataagaatgtacaggttgaaaacagtagtcctgatgcatctcaacagagtggcaattttagtgagacaaaacgagaaacttttgtatctgaggaaaaggtcagtgaaatcgtaaatgcggcagaaggattagagattacctccagcgaggacaacactgagcaatggttagaagaagcagaattttccagtggaagttccctgagcatcaagaaaaacctggaacatgaagaagatgtttcattcagtgatctggaagacgatgataccgatacttctaatagagcatcagtgcgtaagtcaacacagcatgacaaagctctttcatccagtggatccaatgactgggttcagctgaacaagagactagaaactcgtggtgctttgcagaaagcaggccaaacaagttgtcgagataaagattctgaagttgaggagtcaaatgactggctcactgatgatgatttcgtcgacgtggtaagagggaaatgaatttctgattcactgtaaagtttcataaacccttttctacctgtagaacttctgtacttgtgggaatcagaccatcacataattgtgttttaataaagtaaaagcggtcaactttaatcctgttactggt

SEQ ID NO: 18751 - DNA, 532 bp, Gossypium hirsutum
  Clone ID: GOSHI-09MAY01-C21444_1
gtcgacttcttttaagctggagagacccaagagccaccgctttatttgtaattgtctgtctggctgctgctatagtttggtatgtcacacctttccaggttgtggctcttctagcaggattttacattttgaggcatccaaggttccgccataagcttccttcagtgcctctcaatttcttcaggaggttgcctgcaagaactgattccatgctatgaacaagaatgatatcatgtgcagtttcccggaggtggtatggagttgggattttccccatgttgattcagaaaagaagattgagaaacaaaaggagcttgtttctcctctaatgttcagcaacaggtgttgtgttctggaatgatgtgtaatcttcccctgaaggtagtagattttgtggatttgtgttcatttatgttatctatatgatttctgttttaaaactgagtttatcgcgattaatcaatgttcattgtaattttttaggttgtgattggaatttgacgcatgctcaaatgaatcttcactaataaat

SEQ ID NO: 18752 - DNA, 699 bp, Gossypium hirsutum
  Clone ID: GOSHI-09MAY01-C21414_1
ggcaaggcttattcagttctctgtaatgaacaagctcaagagaagagctttcaaggcaatagttgggcgtttctctgtggaggaagttgcaggcataaaagagggattccaattgatggatactgccaatagaggcatgattaacattgatgagttaagggttgggttgcataagcttggtcatacgattcgtgatgcaaaccttcaaatactaatggtggccggcgatgtagataaagatggatatctggactacggagaggttgttgccatttcagttcacttgagagagatgggcaatgacgagcaccttaaaaaggcctgtgagtttttcgatcgaaaccaaagtggttatattgagattgaggaactaagagatgccttatccgacgaagttgaaacaaacagtgaagaagtcattagtgccatcatgcatgatgtggacacagacaaggatgggagaataagttatgacgagtttgcagtgatgatgaaggctggtacggattggagaaaagcttcaaggcaatattctcgagagaggttcaacaatctgagtctgaaattgatgatggatggatcattgcaaatgaacagtgagcccagatgaccaaacaccattgacaaagttctactaatgaaaaatggctgttgatttcagtgttacttttagctgttatttgtttcttcttttgggtc

SEQ ID NO: 18753 - DNA, 1193 bp, Gossypium hirsutum
  Clone ID: GOSHI-09MAY01-C21424_1
tctttcccttctcccccttccccttgcaaagaaaaacaaaatttgcatttaggtaaggcctggagaggaaattgaaggcaacaaacaacaatgaggtccaactccaaacctcattctccttttaacaccaagctcatcctcatctgtgcttctgttgttctcttcgtcttccttctcattaccaccacctcttccttttccaaaccccccatttcacaatcccatctctccaactccacacaccctgtcgacgacagtgaaccaaccccactagattgcccatcccttcccttgaccccaacatgcaccaaaactccaccttctctagccaatgccctcatccactatgccaccaccaacatcaccccacaacaaaccctcaaggaaatctcggtttccgctagagttttagagaagaaagccccttgcaacttcttggtattcgggttaggacatgacagtctgatgtgggcaggtcttaaccatggtggtcgtaccgttttcctagaagaagacaaggcatggatcgaacagatcaagcaaaaacttcccagtttggaatcgtaccatgttgagtatgtaaccaaagtccaccaagcagatgatctgctagagacgggaatgaaggaggagtgcaaagtggtgggtgatcctagattctccaaatgtgacttagcactcaaagggttcccaaacgagatatatgacatagaatgggatctgatcatggttgatgccccaactgggttccatgatgaagcccctgggagaatgaatgccatctacactgcagggctgatggctaggaatagagaagaaggggagactgatgtgtttgtgcatgatgtgaacagagttgttgaagataagttctcaatggcttttctttgtgaaggctatttgagggagcaacaaggattactaagacatttcaccattcccagtcacaggtctcgctctggaagacccttttgtccttgattctttcaatttcgagcctcccaacaaggatttggaagtcgtgctattgttattttattttttcccttttcgattctcagttttatccgacacaattttcatttttaatgccttatctttgagatctatgtttataaagttatagcaattttatttgttttttagttttttatttttttctcctttagtaacaaagaaaaacagagagtaat

SEQ ID NO: 18754 - DNA, 409 bp, Gossypium hirsutum
  Clone ID: LIB3584-039-P1-K1-G7
caaaaatatgtttaacatgggtacttcaagaaagatgatgagtttgagcaacctaataaagaaattaactttttacatcttcaaatgcagaattttatatatctttggtatttggttgtgtcattttctctgaagtattgcatttcaattccagcggttctcgtgaatattttgatgcacccaaattactttcgagatcaagccaagctagtaatgatgaagaaaatgctaagatagcatcagcatctgtaccactatcaatgttacttattccttctctaaaagaggtcattgctgatgattcagaagggtcagttgtgcgtgcagttacgaattccctcataaacatggagcgtgcaaagcctggatcttgtgaagctcttgttcgcaagttgctcgagcgattggc

SEQ ID NO: 18755 - DNA, 275 bp, Gossypium hirsutum
  unsure (1)..(275): unsure at all n locations
  Clone ID: LIB3083-072-Q1-L1-B8
tgaagatagcgcatcanatcttgcagaggcaaaggctgcaattcaagcagggttgaggaaagcaaatgctagggacaggtcttcaaggagcaagcttaatagtcctggccatgaaaacagaaganaagacctaacaagtaactgttctgattcgtctagcggttcttcgtgaatatttgatgcacccaaattactttcgagatcaagccaagctagtaatgatgaagaaaatgctaagatagcatcagcatctgtaccactatcaatgttactta

SEQ ID NO: 18756 - DNA, 999 bp, Gossypium hirsutum
  Clone ID: GOSHI-09MAY01-C21704_1
ccccgcgtccgccccgcgtccggtgtttcttattttatttcttcttcaaaactcttcttcttttatctctctcccccttatcttcttctttgctaaagaccatcgaacccttccctctcttttcagtttcccgatcaacacaacatggctttcgatggttttgtctccgacaataccaaagacatgcaaacccttgctctaaacgaaccaccgccatcagctgctgacatcgatcattgggaaagagctaaatgcaaggccgagataatggggcaccctatgtacgaccagttgctggaagctcatgtcgcctgtctacgtgttgctacgcctgttgaccagctcgctcagatcgatgctcagttagctaggtcccaagatgtgttggctaagtactcctcggccgctgctgccgccggttctgctgaagaagaactcgatcacttcatggcaaattatgttctattgcttggtttcttcaaagaccaattgcaacaacatgttcgtgttcatgcaatggaagcagttatggcttgttgggatcttgagcaatcacttcaaagtttaacaggtgtatctccaggtgaaggcactggtgcaaccatgtctgatgatgaagatgaagttgtagatagtgataccagcttgtttgatggaagttttgatgggattgacagcatggggtttggccccctcgtcccatccgagactgagagatcactaatggagcgtgttaggcaagaactgaagcacgagctgaaacagtgttacaaagagaaaattgtggacattagagaggaaattctacgtaagagacgagctggaaagctaccaggcgatacgacctcgtttttaaaagcttggtggcagtcacattccaaatggccttacccaactgaagaagacaaagcaaaattagtacaagaaacaggattgcaggtaaaggaaattaacaactggtttataaaccagagaaaaaggaattggcatagtaacccc

SEQ ID NO: 18757 - DNA, 858 bp, Gossypium hirsutum
  Clone ID: GOSHI-09MAY01-C21734_1
accttttctgttactttccctcaaaatggtggaaattttgagaagagaacaagtaagtttaaagttttatgctttgcttggcaatccttaagcaagctaaagtgcaaatcatctggaaaaaagaacgaagaaaaagttggaacattgctaagaggcatgaagagagagaaagaaagagagatttatagtgatatttcctaaaaccccaaaccaaaacacatagctgtcgtttatgcctcatggtgaatgccatgtgggcgtcatgtcgttgtccctgccctttcctctacatgctttcttttatttatctcttgttttctctctcttgcatctttggtctgatcggaaattctgtatcagattagatcagatcaccttacctcttttttttggataagagttctgcataaagacccaacttttatttctagggaacacaaatgaaaggaatttttttctttttttcttttagtggtggaatgatctcaaagttgtgaatttgaagctggtttagaggttgaagaaaagggtaaaaaaaaagtggggttcttttttttctttggaagaaatgaagaccaaagtttggaattttacagaggaataatttgaaagtttgggtttttcaaatctactctctaggggaaaggagaaaaaaaaagtgaagaagctgatttagaaaagatcaaagcaagaatttccccaaaatggcgacgcttgtggagccaccaaatggagtgaagccaaaaggaaagcattactattcaatgtggcaaacccttttcgagatcgacaccaaatatgttccaatcaagcctataggaagaggtgcatacggcatagtttgctctgcaatcaaca

SEQ ID NO: 18758 - DNA, 854 bp, Gossypium hirsutum
  Clone ID: GOSHI-09MAY01-C21054_1
cgagcacgagtgatgtttacggttatccccttcagcatcctcataaagaaacctagtggggatatgttaatccgatcggtgagaggagttgctacgatgaaggaaaaaggactgctgaaaccttaaccatggattatcatcgaggtgaccgtgttgaggtgcgaattgctcgtattttcaatacttatggccctcgcatgtgctttgatgatggacgtgttgttagcaattttgttgctcaagccattcggaagcaaccgatgactgtttatggtgatggaaaacaaacacgaagcttccaatatgtttctgatttggttgatggactcgttgctttaatggaaggtgagcacataggaccttttaatctcggcaacccgggagaattcaccatgctcgaattagcggaggtcgtcaaagacacgatcgatccaagtgcaacgatagaatataaaccaaacaccgcggacgatccacatatgaggaaaccggacatcagcaaagcaaaggagctgctgaactgggagccgaaaatacccctaagagaagggttaccccttatggtgaacgatttccggaatcgtattttgaatgaagatgaaggaaagggagcttaaaccgaaaaacgaacagatacgggaaacaagtatgtatagtgtgaactgcagctgtatttttgccaattcatttcattattattattacctgattatttggtcttgtctgcatggcgtagacaaaaaaaacaaagaacaatgaaaacaataaaaacagatgatgagatagactgataatattgaatacagaggcaaggactgacaacgagaaggctgacaaaaaaagggggggggcgt

SEQ ID NO: 18759 - DNA, 534 bp, Gossypium hirsutum
  Clone ID: GOSHI-09MAY01-C21304_1
cagccagccagccagcgagggagcgagcgagcgagcgagcgctagagggtctgcaaattttagggttttggattgggaaggtcaggaagagaaagagccagagacagagtgtgagagatttttttaagagaggatttgtgagatcttttgttttgagtgacttagggatttcaacgcttttcatttctcagctcaatttatcctgtttactcgatggaacggaagcttgtggttttgggaatcccttgggaggtggatactgaaggtttgagggaatacatgagtaaatatggtgatttggaggattgtattgtcatgaaggagcgaactacgggccgatcccgtggttttggttatgtaacgtttgcatcggctgatgatgcgaagaatgtgctatcaattgagcattttcttggtgagagaatgtttggagttaaaatagctactccaaaggaggagatgagagcacccgtaaagaaagttaccaggatatttgtggccaggattccaccatcagtggatgaatcaaccttt

SEQ ID NO: 18760 - DNA, 1003 bp, Gossypium hirsutum
  Clone ID: GOSHI-09MAY01-C21284_1
tggttggcccctcaaaactaatttgggcaggagaaaggttctgagatagcaaaacaattaccacccatggcaacggtctctgattcaccagaagatagtccaaaccctaatccaccaccatcgccgcccagcgatttcccttctaaaagcgaatcgaatgctcccgaacaagtcactccatggatcgattccgctgtggagcaagctcttctataccagaagatcatcgaacagaacgttaacgacgctatcaaagcttctagatctcgactttcagaaattcgctccacctcctcagctcattttaatctaaccattgagtcacttaaagatgtcaaatcacaacttgatgtctacgaggatttggcattcggcaaagttaaagaggggattaatattgcagcttcgaatccattgatcaccggcggtgctgctgttggcttgggattcctggtacttaaaaggccaagacatttactgtattacaagactttgcgtctttttcagagcgaagagtccttgatttccagagctgatattagagtaaaggaactgagacaatcaattgaccgtctcaaggctgaaagtgagaagttagagcgaagtgcatcagtagccgaagacgagctgatccgtggccagacaaaactcaggcaagcgggcagcaatcgaagtgtaattcagtcagcttataagattgaaagacaagcagcaggactaaaagatacccttggagaacttcaagcagaaaaatcttcgttttcatcgcaggtttccaattttgcgtctcaggcaaagcgagaccggaatgttttgaccagagagtttcaaaattagtaatttggattgcagttgatgcatctctgtcctgctattggttagttcacattcactgtttcatcactaccaagatgttgaatgatacattttgtgggagtctatattgattaaatttaatggagcctgagttacactcgggaacatgttaaataccaactcctct

SEQ ID NO: 18761 - DNA, 538 bp, Gossypium hirsutum
  Clone ID: GOSHI-09MAY01-C21214_1
gatcgattctaccatcaatcccaacaagacacgtgttttcttcactactatgtcctctatacattccaagagcaaagactggggcagggaagatgggcttaaatgcttcaacgaaacgaagccagtgatgaagaagaaattctggggaagcggttccaacaaggatatgatgagcgtggtggctggtgtgatcaacaaaatgaaagtccccgtttcggttcttaacattgcgcagcttgcagagtacaggatcgatgcccactcatccatttataccgaaactgggggacggcttttgaacgacgaggaaaaagcagatccaggccgtcatgccgattgcatccattggtgcttgcctggtgttcccgatacttggaatcaaatatttttagcacatttgtagatttctattttcattttttcactccacagaaaccgagaagggaattaatctgcttggtatgcgttaattcaaagttcttttgattggtatattgcacgctgtattcttaagcacatcttgtgcatacaagatgtt

SEQ ID NO: 18762 - DNA, 939 bp, Gossypium hirsutum
  Clone ID: GOSHI-09MAY01-C22944_1
attccctgcttgcttccgcgtgtaaggttcccatttcttccttttcactttcattttcaaaacactctctgaaccttcatacccatttcttctccttctatttcttaattaagctccaatttcctcttctttgtacatagaactgtggttttaagggggaaaaaaacttgaaaagagagagagagagagagagagatgggtttttcgaaggaagagaaatcaagaagaatcctgagaggtttcaaaacagtgttcttcttggtaacaatgatcagctattataatctgtgtttatagtttttgtgatgggcctaaactttccagaggaccataccttggaaccacaatgatatgttgtgtttcatctttgatgtttgtttcggtaaaagcttcatatgcatcgggttggagtagtggtagagaaggggtcagccatggaaactgctcttttcatttgttcactggctctggcaattgcgcatataattgtggcttatagaacaagttgcagagaaagaagaaaactccttgtctacaaaattgacattgaagccattttcagcttgcaagaatgggtttccaaggtatccaaagatcgtgaagtaaataatagaaaagtggtctccatgttaggtttcaggtaatttattttacttgctaccctttttcaatgatcatcaaaccacctccacacttcatttgtttagtacatttcatcacatcagataactgattttatttttcttcttgcagattcttgtaaagaagttggttgtatagaaatgggtgatgatggttgtgcaaatggaagactatgattttgaggataaatcatagctcatacatctaacattctttttattcttcattttcactgtacagtttatatatatataatgttttaaagagatcaaacaaatctaattcttagagtttgct

SEQ ID NO: 18763 - DNA, 329 bp, Gossypium hirsutum
  Clone ID: LIB3083-092-Q1-L1-F4
tttcatttgttcactggctctggcaattgcgcatataattgtggcttatagaacaagttgcagagaaagaagaaaactccttgtctacaaaattgacattgaagcaatttcagcttgcaagaatgggtttccaaggtatccaaagatcgtgaagtaaataatagaaaagtggtgacaaatctcccccctcttttgcctctcccttgttaggtttcagattcctgtaaacaagttggttgtatagaaataggtgatgatgattgtgcaaatggaagactatgagtttgaggataaatcatagctcatacatctaacattctttttattct

SEQ ID NO: 18764 - DNA, 585 bp, Gossypium hirsutum
  Clone ID: GOSHI-09MAY01-C22924_3
cagattttatagctatggtttggagaagaaatatcgagatgatctttataaggattttgagcaacttacccttgatttctatcataaaggcaatctttatggccttgaaaaatactgggctttccatcacttccgagaccagggagagcccttaaaaaaacatcctgaattggataggttactcggggaagaataccggggcttggaagatttccgtgccaaagaaaggaatgctggcacaagagatgacagccaataagccgttgaatcccaattttgatgactggatcacagaggagttcatggtctctctctctctatatatatatctttttcattgactgctgaggagagatggcttttgtatattgtacattgggggaatcggacatctccacgcggctgctcactgctgatgttctgcggttttgattcctaaattctttttttaatcatttttagctcactccccacccccattgatgtacatacggggaaaatggaaaaccttcaaaaaaaatttagaagttgtagaaactgtgaaaattgcacaaataagagattaaaattttaaagttacactgt

SEQ ID NO: 18765 - DNA, 1182 bp, Gossypium hirsutum
  Clone ID: GOSHI-09MAY01-C22924_1
cccacgcgtccgcccacccgtccgccaaggtctccaaggggtgcattaggagtatcaaatctgaagacgggtgaaaatgctgctgggagcagtaatcttgaagaatctggaggatcgagttcccgaaggaagcaaaataaaggcttctccaagcaacagtcattccataagcagagatttttctccggcaattcaaagaatcatggagctagtcgtaattccattgcaataatatcagaaagtccaccaagtaattcagttggatatttctttggttctactccccctgatagtcacggccctaggccgccttcgaagttgagctgttctccgcatgggactctttccagcagtccaccagtcggttccctgccaaagtcattcccaccttttcagcatccaagtcatcagctgttagaagaaaatggttttaagcaacagaagtacctaaagtttcacaagcgctgcctgaatgacaggaagaagccgggaattggttgcagtgaggaaatgaattcgctgtacaggttttggtcgtatttcctcagggacatgtttgtcccttctatgtacaatgagttccggaaacttgctcttgaagatgctgctgctaactacaattatgggttagagtgtcttttcagattttatagctatggtctggagaagaaatatcgagatgatctttataacgattttgagcaacttacccttgatttctatcataagggcaatctttatggccttgaaaaatactgggcattccatcacttccgagatcagaaagaaccgataaagaaacatcccgaactggataggttactgagggaagaataccggcgattggaagatttccgtaccaaagagaagaatactagtagcacaagagaggagcgccattgatgagtgacgtaattgatccctagtgttattgaaccccaattttgacaagcaactctgatgactggatcagagagtaggaaggagttcaaggtctatatgaattatgatttggtttatgaatgcagagggaagatgagttgtgggtaatgtatattggaagggggtcagataaattctggtgcggctgccgattctggaggctatccatttttggggttcctgatatttgtgtaggctttttttgcctcgaggggtatatctttttttcttgagtgatct

SEQ ID NO: 18766 - DNA, 635 bp, Gossypium hirsutum
  unsure (1)..(635): unsure at all n locations
  Clone ID: AI054579.1
ttgaagagtctgttgtacttagttctcggaggaagcaaaataaaggcttctccaagcaacatgcattccataagcaaagatttttctccagcaatacaaagaatcatggaactgctcgtaattcaattgcgataatatcagaaagtccaccaactaattcagttggatatttctttggttctactcctcctgatagttatggccctaggacattntggaagtgaagctgttctccgcatggaactcttctaagcagccaccagnnntggttccctggcaaangtcatttccaccttttcagatcncaagtatanagctgttagaagaaaatggttttaagcacaagaagtacctaaagtttcacaagcgctgcctgaatgacaggaagaactgngaaatgggtggcagtgagggaaatatttcctgaacagggttttggtcatatttcttaggagcagtttgtcccttcatgaaaatgattccggaaacttgtttgaagagctgtgctactacatagggtaaagggctnttagatttatacttgtttgagaagaattcagagacttatagatttgacactaactgattcatataagcatttatgctgaaatctgcttcatactcgaaacagaacc

SEQ ID NO: 18767 - DNA, 575 bp, Gossypium hirsutum
  Clone ID: GOSHI-09MAY01-C22864_2
aaaaaaacaaaaaacatatttccagaaacaaagaggacacgacaaatcccctccgttcttcagtttcttcctgacaaactaagaagaaaaaaatggctgtctcttcggccacattttccacttttgtctcgccccaaacggtgtcgttctcgggcaaaccctcttctctccgtcttcttcatccaactaacgtgcccttggtccgaaccctgactcaaggccacggcttcaaagacggacagcggtccccggaagccgcgtggcatattgaagccccgccctgtgtcgcctgagatgcaagctctcgtgggagtcccggaaatccctcgaactgaagttcttaagcagatttgggcttatattaaagagcacaatcttcaggaccccaataactagaggtttataatttgcgatgaacagctgaacaagatattcggaggcaaagatcgtgtcgaatttcttgaaatcgccgggttgattaatcctcactttctttgatggattctagagaaggcgagagagagcaaatcagtttgcgaaataggcaaataacctttgtctattggagcctatct

SEQ ID NO: 18768 - DNA, 575 bp, Gossypium hirsutum
  Clone ID: uC-gsronu33B159e08b1
ttctctcacaaatccccttcgctcttcagtttcttccccacaaactaagaagaaaaagtgaagaggaacaaaaatggctgtctcttcggccacattttctacttttgtctcggccccatacggtgtcgttcttgggcaaaccctcttctttccgccttcttcatccaactaacgtgcacatggtacgaaccctgactcaagccacggcttcaaagactgacaccggtcccaggaagccacgtggcataatgaagccccgccctgtgtcgcctgagatgcaagctctcgtgggagtcccggaaatccctcgaactgaagttcttaagcagatttgggcttatattaaagagcacaatcttcaggacccctataacaagagggttataatttgcgatgacaagctgaagaagatattcggaggcaatgatcgtgtcgaatttcttgaaatcgccgggttgattaatcctcactttctttgatggattctagagaaggcgagagagagcaaaatcagtttgcaaaatatgcatatatacctgtgtctattggagcctatcttttttggtgaaatattg

SEQ ID NO: 18769 - DNA, 556 bp, Gossypium hirsutum
  unsure (1)..(556): unsure at all n locations
  Clone ID: LIB3543-029-Q1-K6-H8
aaccaaaaaaaaaaatccccgggcgggggggcgccacaaataacattcactcttcatttcttcccccaactaananaaaaatgaanaggaacaaaaaggctgtctcttcggccacattttctacttttgtctctccccaaacgtgtcnttcttgnccaaaccctgggggggggcggctttttctttcaactaacgtgcacatggtacgaaccctgactcaagccacggcttcaaagactgacaccggtcccaggaagccacgtggcataatgaagccccgccctgtgtcgcctgagatgcaagctctcgtgggagtcccggaaatccctcgaactgaagttcttaagcagatttgggcttatattaaagagcacaatcttcaggaccccaataacaagaaggttataatttgcgatgacaagctgaagaagatattcggaggcaaagatcgtgtcgaatttcttgaaatcgccgggttgattaatcctcactttctttgatggattctagagaaagcgagagagagcaaaatcagtttgcaaaataggcaaataac

SEQ ID NO: 18770 - DNA, 448 bp, Gossypium hirsutum
  Clone ID: LIB3146-004-P1-K1-H7
cccacgcgtccgccgtcttcttcattttactatacgtgcgcatggtacgaaccctgactcgagccacggcttcaaagactgacagcggtccccggaagccgcgtggcataatgaagccccgccctgtgtcgcctgagatgcaagctctcgtgggagtcccggaaatccctcgaactgaagttcttaagcagatttgggcttatattaaagagcacaatcttcaggaccccaataacaagaggtttataatttgcgttgacaagctgaagaagatattttgaggcatatatcgggtcgaatttcttgaatatggtcgggtttgattattccttattttcttttatggattttatagtatgctatagtgtgtaattttatgtttcgatttatgtcatattacttttgttttattgtatcctattttttttatgttgttattttttttttt

SEQ ID NO: 18771 - DNA, 1441 bp, Gossypium hirsutum
  Clone ID: GOSHI-09MAY01-C22814_1
aaaaaagaacatttttttccctctccctccctctgataatccattgaatcaggtttaaggatatgggttctgcagcagttgaagatatgatagaggcttcttctggggttcatttttctgggttccacatggatggtttggattctagacatatcaagaagcctatgatgtcaccggctactgaaaatatgcataatcaaccttttcttatcggagttgctggtggagcagcgtccggtaagactacagtctgtgatatgattattcagcaacttcacgatcaacgtgtggtattagttaatcaggattccttttatcacaaactcactgaagaggaacttgcaagagttcatgaatacaactttgaccatcccgatgcatttgacacagagaaattattagattctatagataacttaaggcatggccgagcagtagatattccaaaatatgatttcaaaagttataagcttgatgtttttcccgtaagaagggttaatccttcagatgttataattttggaagggatacttattttccatgatcctcgcgtccgagagttgatgaacatgaaaatatttgttgatacagatgctgatgtgcgtctggctagaagaataacgcgtgatactgttggcaagggcagagatatcggtgctgtccttgatcagtattcaaagtttgtgaagcctgcctttgatgactttatacttccaacaaagaagtatgcagatatctatcattccccgtgggggagataatcatgtagcaattgatttgattgtgcaacatatcaggacaaagcttggacagcatgatctttgtaaaatctacccgaatttatatgtcattcaatcaacttttcagatacgaggcatgcataccctcattcgtgactctcaaacaacgaaacatgactttgttttttacgctgatcggttgattcgtctggttgttgaacatgggctgggacatctgccttttacagagaagcaggtgatcactcctactgggtctgtatatacaggtgtggatttctgtaagaggttatgtggtgtctcggttattcggagtggtgagagtatggagaatgcgttgcgagcatgctgcaaaggtatcaagattggcaagattcttatccacagggaaggtgacaacggtcaacagcttatctatgaaaaattaccacaagacatctccaagaggcatgtgctgctactggatcctatcctaggcacaggcaattcagccgtccaagctatttcattgcttataaaaaagggtgtaccagaatccaacatcatatttctcaatctcatatctgcaccgcaaggtgtacatttggtctgcaaaagcttcccaagactttatatcgtgtcattcctaaattgatatttggttaaacaaagatttttgttttattccctgaattggtttattt

SEQ ID NO: 18772 - DNA, 476 bp, Gossypium hirsutum
  Clone ID: LIB3543-022-Q1-K1-D1
tctctcgctcctcaaaaatatagaaaaaaattcgatatttttcttaatcaggtcttagcatatgggttctaactcagttgaggatatgatagaagcctcatctggggtccacttttctggattccatatggatggtttggagtcaaaaaatattgagaagcctacaacctcgccgggtgctgaaaatgtgcataaacaaccttttattattggagttgctgggggagcagcatctggtaagactacagtctgcgatatgattatacagcaacttcatgatcagcgtgtagtattagttaatcaggattccttttatcacaatctcactgaagaggaacttgctagggttcatgaatacaactttgaccatcctgatgcatttgacacagagaaattattagattctatagaaaacttgaggcatgaccgagcagtagatattccaaactatgatttcaagagttataaaagtaatg

SEQ ID NO: 18773 - DNA, 906 bp, Gossypium hirsutum
  Clone ID: GOSHI-09MAY01-C22514_1
cacagcctaatgttccagccctccatcttccgggaagcaatcttcaatccagtcgcctgcgatcttctcttaatgctagagacattcaagctgaagactttaacttgctgtctgattttgatgtgcagcaacttcagctgatgaatgaattacctggacttactcagccatcaatgagttctagttcttttaatcgatctggtcgaatgaagaccctgaccccatcaaacctagatgacctcttttctgctgagagctcatctccacgatactctgatcaagtgttggctgctgctgttttctctccgacccataagtctgccgttctgaatcaatttcagcaacagcaaagcatgctatcacctattaatacaactttctctcctaaaagtattgagcatcctctcttgcaggcttctctatccggtaggatgtctcctcgaaacgttgagcctatctcaccgatgagctcgcgggtttcaatgttagctcaacgggagaagcagcaacaatttcgtagcctaagctctagggagcttggctctggctcggctgccattgttggttccccggtcaattcatggtcgaaatggggatcctccaatgggaagccagactgggctgtcaatgccgatgggttggacaagcatcgcaggtcttcctcatttgagcttggtaatggggatgaacccgatttatcatgggttcagtcccttgtaaaagaatctcccactgagatcaaagagaaaatagcagcaccagtctcgggtgagggttctagcatgaatgcagatccggtcgataatgcagtgttgggtgcttggctggagcaaatgcagctcgatcaactcgtggctcagcaaaactgaaacccgtttcgctgagccatcctgaggtagagataag

SEQ ID NO: 18774 - DNA, 435 bp, Gossypium hirsutum
  Clone ID: GOSHI-09MAY01-C22504_1
gggaacgaaaaacataaaggaatggatttttatgggcacccatatcgtttttctttgtcttcattttcattggtaagtgatttcattgaaaaagtgaaagattttttcaatttcgctgtctctgccatcattggaaacattttctctgcgatcttaactttcttctttgctttagttggtccattgttaggagccatgactggggctttgataggacaagaaaccgagagtggtttcgttcgaggggctgcggtcggggctatatccggagccgttttctccatcgaagtcttcgaatcatctcttcttctttggcaatctgacgaatccgggatcttatgtttgctttacttgattgatgtcattgcaagccttttaagtggaaggcttgttcgagaacgtatcggtccagcaatgctgagtgccgttcaaagt

SEQ ID NO: 18775 - DNA, 593 bp, Gossypium hirsutum
  Clone ID: GOSHI-09MAY01-C22454_1
gtttttctttttttgtgggtttcgactttaacaatcagttccggcgaatcaaatggcaaaagaagttgttaatcccgatgaactggttgttgttggagaggaattagaccatgtaagaatcatcactttgaacaggcctcgacatttgaatgtcatctcatccaaagtggtctccctgctagctaaatacttagaaaaatgggaaagagatgagcaagctcagcttatactgatcaagggagccgggcgtgcattttctgctggtggagatttaaaaatgttctatgagggaaggaaatcaaaggattcctgccttgaagtggtctatagaatgtattggctttgctatcacattcatacctataagaaaactcaggttgctcttgttcaaggaatttcaatgggaggtggtgcatcattgatggtcccgatgaagttctcagttgtaacagaaaaaactgtctttgcaacaccagaagcaagtattgggtttcatgtggactgtggtttctcatacatgctttcccatctccctggccatttgggggaatatttactttaaccggggctaggttaaatggtaaggaattggc

SEQ ID NO: 18776 - DNA, 990 bp, Gossypium hirsutum
  Clone ID: GOSHI-09MAY01-C22444_1
cccacgcgtccgcccacgcgtccgaatttttaaacgaccgtgtaatcattcctttctatttttgtgtgttgaaaaaatttgctatataaatttctctcatttttcacaatttagaaatgtaagaaaagtattacaaacaatttgtaaataataaatttatatattaataatattaataatatatattaattttatttgtagttttttctccaaacaatcccgcgattacgggttgtttttttggtttctttcaatcgcccgctcgcaaatccatcgtctcgatccaatcccagaaacgtccacttttttcttgagctttcctttcgaatccgtaccgttcaaattgatggggtttccgccgccggcggatcttttcccgttttgttttgtttgaattcgcagattcctagggttttctctggtttcagatcggggttcttttttggaggcaatttcgctgttaaaatcttgcaaagatgttttggcgtatgactggatattcatctgcttctcctattgatgcaattttagtcaaggacaattttacattggaggagcttcttgacgaggatgaaattattcaggaatgcaaatccctcaatgggaagcttataaacttcttgcgggagagggctcaggttgaacaacttattcaatatattgtggtagaacctccagagaatgctgataagaagcaaatttacaagtttccttctattgcatgtgagatttttacgtgtgaggttgatatcatactaaaaacactagtagaagatgagggattaatgaatttgttattttccttcttgaattcgaatcactctcatggcacacaactgacagggtacttcaacaggattgtcatatgtctgctgttgcggaagacatcagcgttcatgcagtatattaagggacatcaagaaattgttgagatgctaattgacctgattggcataacttccattatggaggttttaatacgtctaattg

SEQ ID NO: 18777 - DNA, 1062 bp, Gossypium hirsutum
  Clone ID: GOSHI-09MAY01-C22404_2
aaacccaaagggaaaggagtttgctaacaaattggtggggctagcaagcagagcagccgccaacaacaacgtggtgatcgatgtgtgcttggtcacatcatttgcggtattaggcattcgatctctgaaccagcaaaatgttattgaatccttggaagccgagaaagattccttgaccaaatctaacaaagccctcaaaaaggttatgtgggattggaagcagcagctcttcgccgaagcgtcctccccgtctcctcttgtccctctcgattccctcaaagctatctacggcgaatccccaacccctccaaccggagatgctgcaaaaggtgtaaaatcaccaccagcaaagttcgttgtttgaactctgaatcggattttagtaatctttgcgaggaagctagaacttttgggtattttcgtagttgagaggtgaatatcttcttctttgagatcaaatttctgataataatacagttctgtgatcaactgcagtaattttgtagaatcaaatcaaccaatcaacagatttagagaagagtggaattttcctgccttagcctcttaaaaatcgaagcaataaggcggccgctattcatatatactgaaagcttgaaagtactgtctttgtcgtaaagaaataaagagtcgaagagcttgtgttcttggtaaagcaaacaaatgaagactaaagcatctataaaaattcccatggggaagataaactctagcaggaaaagacttcatgtcttgtaaagcaaaagcaaggaagtaaaaagagaacatgggtttaaaagagtagaagtagtaaactaggagacccaagacagttagcaaggtaaggagaacaagaacaagaatcagaggtcttttgggttgggggtataacatgaagtaaaagtaagcaaatcacacccttgttagccacatgagtgagtgcccaaatcattgcatgcttagaatgtgagctctcatccactgcaggcactctcttccttaacaccaacccattatcaaccccgttgccatacatgttaggcccttccatctgagttaaaactt

SEQ ID NO: 18778 - DNA, 761 bp, Gossypium hirsutum
  Clone ID: GOSHI-09MAY01-C22404_1
gaggcaagacctagtcatagatttttatatcaatggagatcaactacaaaagccaaatctagtcagtaagtagtaataattttatatcaggtgaatagtaattctaagatcagcaagctaataatattattacagcatgcacatgatgatattagacatgtcttaactataagaaccatataattagttgcttagaagaaccttaagctaagctaagagccacaaattcttctgccatctggtgctgataagatagccccccacgcctttgctttgcctcttaaccccaatggttaaacaatctgcattgttgatgcaccgctccacgaactcctctgtgctgctgctcccacaaacacagcttagaaatggagaatgccttttttgacccagtaccaacactgaaacctcaagtttcttcacttggctcatcactgtccccagctttggcccctggattaccagtgcttccacttcaacctcaggtttacaagccttgcaaagtgacccaagagagttagcaaggtaaggagaaaaagaagaagaagaataagaagtcttttgggttgggggaataacatgaagtaaagtaagcaaatcacccttgttagccacatgagtgagtgcccaaatcattgcatgcttagaatgcgagctctcatccactacaaccatcactctcttccttaacaccaacccattatcaaccccattgccatacatgttaagcccttccatctgagtcaaaccccacgcgtccg

SEQ ID NO: 18779 - DNA, 404 bp, Gossypium hirsutum
  unsure (1)..(404): unsure at all n locations
  Clone ID: LIB3145-057-Q1-K1-E3
acgccgtccgcccacgcgtccggaacttttgggtattttcgtagttgagaggtgaatatcttcttctttgagatcaaatttctgataataatacagctctgtgatcaactgcacgtattctgtagaatcaaatcaaccaatcaacagatttagagaagagtgtnaatttcctgccttagcctcttaaaaatcgaagcactaaatgttgtacgattcatatatactgaaagcttgaaagtactgtctttgtcgtaaagaaataaagagtcgaagagcttgcgttcttggtttgaagcctcaaacatatgacaggcttaagattcttgtaggttctggatatagatcgaagaggttctctggcttccgtcggagaaacggtggtctcgaactatatcctgaaagaa

SEQ ID NO: 18780 - DNA, 352 bp, Gossypium hirsutum
  Clone ID: LIB3146-021-Q1-K1-F2
cccacgcgtccgcccacgcgtccgcccacgcgtccgcggacgcgtgggttcttattcttcttcttctttttctccttaccttgctaactctcttgggtcactttgcaaggcttgtaaacctgaggttgaagtggaagcactggtaatccaggggccaaagctggggacagtgatgagccaagtgaagaaacttgaggtttcagtgttggtactgggtcaaaaaaggcattctccatttctaagctgtgtttgtgggagcagcagcacagatgagttcgtggagcggtgcatcaacatgcagattgttaaccattggggttaaaggcaaagcaaggcgtggggggctatctta

SEQ ID NO: 18781 - DNA, 946 bp, Gossypium hirsutum
  Clone ID: GOSHI-09MAY01-C22424_2
gtctcacaggttgggccaatttcaattaatctgattgtctgatatattcttctcagcttggtgttgtgaaggaccttcaaaacgggagattgtgagggagatagactaacagcatgctgttctatcattatcttgagctttctgcttcgttgctgcgtgaccacatgatactatactgaactcagctcatctaggcaaacagatgcgcgtgtacaattaaacggtagaaaatctgcgtcggggaattacagatatgactcgaatgccaagcctcaaagctttactttgtctcaaagttcaagcaataattaccaagctttaagtcttgcatctagcacaaatgatgaaaattttgagggctctattcgtaatctgaaatttgaggaagcagaggaaacagttgtagcttctctagccaaagcttcagaaaatttagaagtagatctgtcattaactactgctgctgctcccaagaacgattgtatcgagtggaacgaaagtagtacagtaattgatactttaacctctgagctattagaggacaattcagcagcaccacttcctcccaatgaatgattgtgtttcatatgaaaatggagatagcttgcctagtgacgccaggattgcctcaagtgttgaagcattagctaccactctagattctactcttgaagaacatggtatgcgaaatgatattcctgatggagtagatgctgctgaggctgctggccacaactctttgactacaatctcagaaatagaaatcgacaattcctgccagagttcctgcagttcagaacttgatggcttgtctccaaattctgagaggaaaaagaagagatccgaggacctgtcagttgctatacctttagatgtggatattactgctgttgaggagcgtaatatgtcagatcacacagatggtgttttagaggaatcgactgtc

SEQ ID NO: 18782 - DNA, 498 bp, Gossypium hirsutum
  Clone ID: uC-gsflmaxxa009d04b1
gtctcacaggttgggccaatttcaattaatctcattgtctcatatattcttctcagcttggtgttgtgaaggaaattcaaaatgggagattgtaagggagatagactaagagcatgttgttttatcattatcttggttatgctgcttgtgtgctgctgcaccaatggagaagatccatacaggttctatacttggaatgtcacgtatggtgatatctaccctcttggagtgaaacaacaggtgatattgataaatggccaatttccgggaccacaaattgaaaccgtgaccaacgaaaacttgatcattaatgtcttcaatagcttggatcaaccctttctcatctcttggaatggcgtgcagcagagaagaaattcttggcaagacggagtatatggcaccaactgccccatccctccctgggggaacttcacctacactcttcaagtgaaggatcagattggcagctacttttacttcccatcgctcgccttacat

SEQ ID NO: 18783 - DNA, 362 bp, Gossypium hirsutum
  Clone ID: uC-gsflmaxxa009d05b1
ttaagttgtaggtatttctgtgctgttaaagaggtcaggcagcagcaaggggcctgttgttctaggtaggacctttgctaccataccatctgaagatctttcttatgcaagagacagttctaacagtttcagaagctctgtcggacatgggagtgtatctgcatcatcctctactgaattcagctcatctaggcaaacagatgcgcgtgtacaattaaatggtagaaaatctgagttggagaattacagatatgacttgaatgcaaagcctcaaagctttactttgtctcaaagttcaagcaataattaccaagctttaagatttgcatctagcacaaacgatgaaaattttgagggctcta

SEQ ID NO: 18784 - DNA, 445 bp, Gossypium hirsutum
  Clone ID: GOSHI-09MAY01-C22134_1
tcgtttttattttatatacgaatccccaatagtttctcccactttccatctctttgtctttcataatcatcaacaggggaagcaagctaaagcagccaccccccttcccctttttctccaattattatctttattcatccattattctctctctgtgtctatgcttttgttcttctcatagtcttcttagtgttgcctaaatggcgtctttgagcttctttttcccttctggttaatggagtcctttggttattggatgatttgaggttatatcagttctaagttgtaacagatactagtagaaactcaaagcttcagtttgatttcggagatttcctcgagtttcggatttgttctgagtcctgtattggaacgatgatgatgtttgaggagatggggatttgtggggatatggatttctttggtgcttctttgggggaaaagg

SEQ ID NO: 18785 - DNA, 306 bp, Gossypium hirsutum
  Clone ID: GOSHI-09MAY01-C22384_1
tgatgatatcctacttttgtggaagataacgagattatttgaaaatggggtggagtgccgtgaggtcctagatgctattattgatagatgtgcagcactgcagaacatacggcaagcagttctgcactataggaaggtgttcaaccaacagcatattgagccgagggtgaggagagtagctctgaaccgtggagccgagtacttggagcggtactttcgcttaattgcttttgctgcatatcttggcagtgaagcatttgacagtttttgcggacaaggagaatgtaagatgtcatttaagaattg

SEQ ID NO: 18786 - DNA, 573 bp, Gossypium hirsutum
  Clone ID: GOSHI-09MAY01-C22344_1
ggaaaaagaagccaattttggatgggctcaaggagaggcaggaacaggagaagagactacaaaaggttgccaaaacaatggaccatctagaaagggcaaagagagaggaagcagcccccttgattgaagctgcttttcaacggcgattggtagaagagaaggtgcttcatgaacgtgagcaacagctggaagttgagttgagcagacagcgccatgatggggacttgaaagagaagaataggctggcacgtatgttagaaaacaagatgattttccaggagagtgtaataagtcgtcggcaagctgagtttgaccaacggagagtggagagagaggagaggatcaaacaaataattcaggctcggaagcaggaaagagatattaagagaaagaaaatattttatgtgaggtctgaggaggagagaataaagaagatgcgcaaagaggaggaggcttgtaaacgtgaagaggctgagagactaaggaaagaagaagctgaacacaaagctaaaatggatgagattgctgaacagcaaaggcaaagagagcgagaattgcaagagaaagagaggc

SEQ ID NO: 18787 - DNA, 434 bp, Gossypium hirsutum
  Clone ID: GOSHI-09MAY01-C22364_2
cgcctagcctaggttgtctgtcgacaacaatgtctcacctgctgaagctctatctctttgcgttacaactctctccaggcttttggctggacaatttctttggtcagaattttgtcctgtttcatagccaccaaatctgtcattggcgcctatgcttctgctggagacttaatctgtttgttacaaacttgtgcgttcttggaagttgtacatggagcaatagggattgttccaagtggagtgttgtttcctctgatgcaatggggtggaagaacacatttcttattagcaatcgtccgccggattcacgaggtacaggaattatctgcagttttcataacattttttgcttggagcctaaccgaggtaatacggtattcgcattatgcattgaacatatctgggcggttgttcgtcttggctcacctacctga

SEQ ID NO: 18788 - DNA, 963 bp, Gossypium hirsutum
  Clone ID: GOSHI-09MAY01-C22364_1
taaaatgtcctttctttttttctttatctccattcattactttcctcaacttaattcaaagctgattattggcaggacaatttctttggtcagaattttgtcctgtttcatagccaccaaatctgtcattggcgcctatgcttctgctggagacttaatctgtttgttacaaacttgtgcgttcttggaagttgtacatggagcaatagggattgttccaagtggagtgttgtttcctctgatgcaatggggtggaagaacacatttcttattagcaatcgtccgccggattcacgaggtacaggaattatctgcagttttcataacattttttgcttggagcctaaccgaggtaatacggtattcgcattatgcattgaacatatctggcggttgtccgtcttggctcacctacctgaggtacactttattcattgtgctgtatcctatgggccttgctccgggtgaaatgtggctcatgtaccaagcacttccatatataaaggagaagaacctctacggggatttcttcgctagtgttcccctcgcctacgataattttgtcacggttgttcttctcatctatccattcctttggttgaacctggacctccatttatttaagcagcgacggtcaaaacttggtaagcaacaccacaagaagaagaaaatttgaaggtcggaggttccgatttcaaaccagtcattgtggaattcaaattacaactactttgatattccatgatactatgtcgatggacttcagtaatttccagtgtatttcttatgtaaccagcaacatgtacttcttgggatgatatgtgcccttattttaagattaaatgttcaaacacatgatcatatcacagcgttctgttgtttgaactcaaaatgaatatatttttgaaggatttttggaaaaaaaaaaaaaaaaaaaaaaaaaaatttaatttttatataatt

SEQ ID NO: 18789 - DNA, 1048 bp, Gossypium hirsutum
  Clone ID: GOSHI-09MAY01-C22284_1
tcgcaaaactgcataatcgaaataatggctactcggctgtatctaaacagtgtgtttcatcttttggggccaaacaggttgaagtttctttttccaaacaaagtgagaagaaagggtcctttttcaattggttctatttttccatcaacattggcgctttgatctcaagcagtcttatagtgtggattcaagacaatgctagatggggtctcggatttggcattccagcattgtttatgggccttgcaattggaagttttttctcaggcacggcactctatagatttcaaagaccaggaggaagccctattacaagaatgtgccaggttttggttgcagcatttcataaacggagcctcaaggtacctgaagacagtactctcctatatgaaactggtgacaagcactctgccatagaaggaagtcggaaactagagcacagtgaggagttgaagtgcctagataaagctgccatagtcactgatgttgaaaccaaaagtggggacttctcaaatccttggaggctttgcactgtaacacaagtggaggaattgaaaatcttgatccgcatgtttcccatatgggttactggaattgtgttctctgctgtatatgctcaaatgtcaactatgtttgtggaacaagggatgatgatggacacaaaaattggttctttcactattcctcctgcttctctctcaacttttgatgttattagtgttattttttgggttcccatctatgataggatcattgtcccaattgcaagaaagttcacacgtaaggagcggggcttctcagagttgcggcgtatgggaattggtctctttatttcagtcctatgcatgtcagccgcagctgtggtggagaccaggagattgcaccttgctaaagagctagatttggtcgataagcaggtcgccgtacccattagtattctttggcaaatacctcaatatttcttgttgggtgccgcagaggtctgcacatttatcggacagcttgagttctcttatgatcagtcccctgatgccatgcggggtatgta

SEQ ID NO: 18790 - DNA, 690 bp, Gossypium hirsutum
  Clone ID: GOSHI-09MAY01-C22244_1
cgacattatggtgggactggaataggattgagcatcagcaaacatctggtggaactcatgcatggggagatcgggtttgcgagtgaacctggcgttggcagtactttctcatttactggagcttttggaaaaggcgaagtaagttctcttgattccaaatggaagcaatatgatccagtggtttcagagttccaaggattgggagcacttattattgataatagaagcatccgtgctgaggtcacaaaataccatcttcgaagactgggaatatctgttgatataacttccagtttggagtcagcatgcacctacgtgtcaagcattttcaccacaagcgcatttgcacatttggccatgattcttattgacaaagatgtttggaatcaagaaacagttcttcagttacgatctttgctcgaacaacataggaaaaattgcaaactaaatgtttcaacaaaccttcccgaaatttttctttttgggtaccttccatgagccccgtggagcgctccaagcttaagacttctggttttgtagataatgtgctgatgaaacctcttcggttgagtgtcttaattgcctgtttccaagaagcccttggaggtacaaagggcaaagtacgtggaaagaaaatgtctacactcgggagcttacttagagaaaagcggattagtcgtcgatgataat

SEQ ID NO: 18791 - DNA, 650 bp, Gossypium hirsutum
  Clone ID: GOSHI-09MAY01-C22224_1
tctttcgcccagcgtccgttcttactggcttcgaaacagggctctctcctctcttctgaaagcttttataattcagaaaccctatttttcggagtttttacggctaatggtatctctccagcaacgcacagtagcaccaaatttccgtacgcccaaacctttgatccattatcaccttctctgatcttccctcgactaacggagatttgaagatggtgtcggacgcgagcaagaagaaggctgctcagaagaaggctgctgccgctgcgaagagaggagggaaggctgctgcagccgctgcatcttccaaggcggcagctgcggcgaccgcggagaacggcgttgataaggtttctgataaagttagtatgctccagatatccgatcggacctgtaccggtgttctctgctcgcatcctctttcccgagatattcgtatagagtccttatcagttactttccacggacatgatcttattgttgattcaacattggagcttaattatggcagacgctatggtttgctaggattaaatggttgtgggaaatccacgctgcttactgcaatagggttgcgtgaacttccaattccggagcacatggatatctatcacctgacgagggagattgaagcttcagatatgtctgca

SEQ ID NO: 18792 - DNA, 570 bp, Gossypium hirsutum
  unsure (1)..(570): unsure at all n locations
  Clone ID: LIB3582-041-P1-K1-D9
cccacgcgtccgcccacgcgtccgttttcggagttttacgtctgattgtatttctccagcagcgcactgtagcaccaaatttccttctagatttgttgtggtggttagatttcaagatggtgtccgacgcaagcaagaagaaggctgctcagaagaaggctgctgccgctgcaaagagaggagggaaggccgctgcatcttccaaggcggcagctgcagcgaccgcggagaacggcgttgataatgcttctgataaagttagcatgctccagatatccgatcggacctgtactggtgttctctgctcgcatcctctttccagagatattcgtatagagtccttatcagttactttccacggacatgatcttattgttgattcaacattggagcttaattatggcagacgctatggtttgctaggattaaatggttgtgggaaatccacgctgcttactgcaatagggttgcgtgaacttncaatttcagagcacatggatatctatcacctgacgagggagatngaagcttcagatatgtctgcattgcangctgtcataagttgtgatg

SEQ ID NO: 18793 - DNA, 359 bp, Gossypium hirsutum
  Clone ID: LIB3493-006-P1-M1-F12
gttttacgtctaattgtatctctccagcaacgcacagtagcaccaaatttccgtacgtccaaacttttgatccattatcaccttctctgatcttccctctactatcggaggtttgttgtggttgttagacttgaagatggtgtcggacgcgagcaagaagaaggctgctcagaagaaggctgctgccgctgcgaagagaggagggaaggctgctgcagccgctgcatcttccaaggcggcagctgcggcgaccgcggagaacggcgttgataaggtttctgataaagttagtatgctccagatatccgatcggacctgtaaccgtgttctctgctcgcatcctctttcccgagatattc

SEQ ID NO: 18794 - DNA, 730 bp, Gossypium hirsutum
  Clone ID: GOSHI-09MAY01-C23914_1
cgataatttatgtctttgattatcctaatctttttcctatagggttttaagaaaggggagcctgatcgttgggaatttgctaatgtgggattcctaagagggaagtttgggcttcaagaggaggttgaagggcttaagagagacaagaatgttctcatgcaggaacttgttaggttgaggcagcagcagcaagccacggacaaccagttgcaagcttatggccagagtgtacagatgatggagcagagacagcagcaaatgatgtcttttcttgctaaggtcatgcaaactccaggtttcttaaaccagcttttacagcagcaaaatgaaagcaataggcaactgactggagcaaacaagaagaggagactccataggcaggatgaagaaaatttaactggtgaaaatggtgccgtatctccaaatgggcagactgtaaagttccagcctttacacaatgagcaccagatgatggaggtgaacacatcaccgaggcgggaacatggcgctcctccttccagtgcattacacagcagtagctcctccagtgagatttcggaagtgactcttccagaagtctcaccagcttcttggcggtcatatctgcaagcagaatcaggggttcccgactctagtctgtcaactgctgctgctcaattaacaactgagacaagtgtgcataaatcacagaaagatgcaattttccgtagcgttcctcaaatgctaggat

SEQ ID NO: 18795 - DNA, 738 bp, Gossypium hirsutum
  Clone ID: GOSHI-09MAY01-C23594_5
cttaaatcgacctccaccctcgccctgcgcaacatcaatagaagctgccagcaaagtcacgtccaccgattctcccacgtttcccttccagagaatactgactttataggagttgataccaaagcttgatcttgctaagaaacatatatcatctcaactccatgtaaatttgccagatatcgaaggtaggccattagtcggcaccggccttcatttggaaaggactaggtgctatttctggtggtattgggccatggatccggacccttactcctgtttgtctacttgttggttagcacaccacttctctatgacttctacaactatcgtcccaatgaaccccaatactctgttctgcttggtgatttcttgcagtgtgttgcgcaatgtggtgcattaattttctttgtggggatgaagaactcgatgccaaagaggcaactaaggaggaaggccccgaagcaaaaagctacttagatgtaatcaaagaagtaaaattttggcaatctcctgtaatactttgcaggtctatctgattggtctatctgattggatcctttctcgatttctagtttttatctgttctttattcactgaaacatttgtacaattgaatcggttgctccttctctattttcccatgacaatttgattgtgttcaaaaaaaattgaggggtttaaatcaaaaacctctatttccttgtttggaatattaatatttgatgcaatcatttatgt

SEQ ID NO: 18796 - DNA, 909 bp, Gossypium hirsutum
  Clone ID: GOSHI-09MAY01-C23594_3
ccccccccccctcttctcaaaaaaaaaaaatccctttcttacttgcttcttgggagaaactaaaccttgaaatctgctctcttaacactgtttttcgctcgaacagtgtggagaaccctgaaattcgctgtatttgtcttttcgcttgaaaccaatgttgtaagaagataaagggggaaaaaccaatggggtttgcttcattcgccggtcgagttttctttgcttctattttcatcctctccgcttggcaaatgttcaatgaatttggggttgatggcgggcctgcagcaaaggagttgataccaaagcttgatcttgctaagaaacatatatcatctcaactccatgtaaatttgccagatatcgaagttagacaattagtcgcaactgccatcattttgaaaggactaggtgctattctgtttgtatttggccatggattcggagccttactcctgtttgtctacttgttggttagcacaccacttctctatgacttctacaactatcgtcccaatgaaccccaatactctgttctgcttggtgatttcttgcagtgtgttgcgcaatgtggtgcattaattttctttgtggggatgaagaactcgatgccaaagaggcaactaaggagggaggccccggagcatataagctacttagatgtaatcaaagaagtaaaattttggcactctcctgtaataccttgcaggtctatctgattggatcctttctcgatttctagtttttatctgttctttattaactgaagcatttgtactatcgaatcggttgccccttctctattttccatgacaatttgattgtgttcaaaaaaaaattgaggggtttaaatcaaaaaaaaaaaaaaaaaaaaaaaaaaaaaaaaaaaaaaaaaaaaaaaaaaaaaaa

SEQ ID NO: 18797 - DNA, 829 bp, Gossypium hirsutum
  Clone ID: GOSHI-09MAY01-C23594_2
gtcgtgtttttactctcaccttctcccactcctcgtaaaaccctagttctcagacgccactaaaaccttagtcctctcactcgtctttcatcatcctcatcaatggagttctggggtattgaagttaaagctggacagcctattaaaacggaccctggtgccagtcatgtcatccatctttcccaggcaacacttggtgagtcaaagaacaaagcagagtcggttcctctctatgtgaatgttaatgggaagaaactcgttctcggaacactttcccaccagaattgcccgcaattgtgttttgatttagtatttgagcaaggctttgagctctctcacaactggaaaaatgggagcgtctatttccttggttacagaacttttgtcccagaggaaggctctgatgatgaatttgatagtgaggaagaaagtagcgaggatgaggaacttcctgtggctgctgaaaacggaaaagctaagacagatgcaaaaacggctaatgctgggaaacctgatgctgtaaaacaagctgtcaagataactgaaccaagtgataacaagaaaaatgaggacgatgatgatgatagtgattccgaggagatggaagtggttctgatgatggagatgatgtcgtggctgtggatgaaagttcagatgatgaggatgaggagacacctaagaaggttgagtcgagcaaaaagagaccggcagaagctgcaacacctgtttctgcaaagaatgctaaacctgcagcgacacctcagaaaacagatggttagaagggtggtcacactgcaaccccacacccatcaaagcaagctgggaaaac

SEQ ID NO: 18798 - DNA, 608 bp, Gossypium hirsutum
  Clone ID: LIB3828-014-Q1-K6-F3
gtttttactctcaccttctcccactcctcgtaaaaccctagttctcagacgccactaaaaccttagtcctctcactcgtctttcatcatcctcatcaatggagttctggggtaacccattctttcttttacttatctctcttcgattttatgtttatgtttcttttactttttgaagctttgattttttttttaaaaaattctaatgaaatgatgctagctttcccttgggttttatttgaacttctctctttcaatgggaagcttgtttttgtggccgtgtttgattgggttttgggtttactgttgtcaacgctaatagcatcagttgctggtttcattatttgagatttatcagtatgatttgacacatggtaattattttgtcattggatggtagcttgttgaaaatgattatatgcaaattatatttttcaggattatacttgagacatggacatattgtttttatttcaaattgggttaatcaaattggatcatcttttatgctactattaggtattgaagttaaagctggacagcctattaaaacggaccctggtgccagtcatgtcatccatctttcccaggcaacacttggtgagtcaa

SEQ ID NO: 18799 - DNA, 640 bp, Gossypium hirsutum
  Clone ID: LIB3582-040-P1-K1-D12
caatactctgttctgcttggtgatttcatgcagtgtgttgcggaatgtggtgcattaattttctttgtggggatgaagaactcgatgccaaagaggcaactaaggaggaaggccccgaatcaaaaaagctacttagatgtattcaaagaagattatacttaagacatggacatgttttcatttcaatttgggttaattaccttggttacaaaacttttgtcccagaggaaggctctgatgatgaatatgatagtgaggaagaaagtagcgaggatgaggaacttgctgtggctgctgaaaactgaaaagctaagacagatgcaaaaacagccaaagctaatgctgggaaacctgatgctgtaaaacaagctgtcaagatagcagaaccaagcaataacaagaaaaatgaggacgatgatgatgatacgtgattccgaggatggaagtggttctgatgatgaagatgattcctaggatgaagacgaagagatgcctgtggatgaaagttcagatgaggatgaggagacacctaagaaggttgagtcgagcaaaaagagaccagctgaagctgcaacacctgtttctgcaaagaaggccaaacctgttatatctggtctttattaactgaaacatttgtata

SEQ ID NO: 18800 - DNA, 512 bp, Gossypium hirsutum
  Clone ID: uC-gsronu33B150a09b1
tatatattgcccgcaattgtgttttgatttagtatttgagcaaggctttgagctctctcacaactggaaaaatgggagcgtctatttccttggttacaaagcttttgtcccagaggaaggctctgatgaggaatttgatagtgaggaagaaagtagcgaggatgaggaacttcctgtagctgctgaaaacggaaaagctaagacagatgcaaaaacagccaaagctaatgctgggaaacctgatgctgtaaaacaagctgtcaagatagcagaaccaagcaataacaagaaaaatgaggacgatgatgatgatagtgattccgaggatggaagtggttctgatgatgaagatgattccgaggatgaagacgaagagatgtctgtggatgaaagttcagatgaggatgaggagacacctaagaaggttgagtcgagcaaaaagagaccagcagaagctgcaacacctgtttctgcaaagaaggccaaacctgcagcgacacctcagaagacag

SEQ ID NO: 18801 - DNA, 441 bp, Gossypium hirsutum
  Clone ID: LIB3135-058-Q1-K1-H1
ggaagaggtgggtggttttgccaagttgggaaccgcttgcggggttaaggcatggaggagttgtagtggcattcagtgatgccagagttataccatggatttggagccttactcctgtttgtctacttgttggttagcacaccacttctctatgacttctacaactatcgtcccaatgaaccccaatactctgttctgcttggtgatttcttgcagtgtgttgcgcaatgtggtgcattaattttctttgtggggatgaagaactcgatgccaaagaggcaactaaggaggaagtccccgaagcaaaaagctacttagatgtaatcaaagaagtaaaattttggcaatctccagtaaaactttgcaggtctatctgattggatcctttctcgatttctagcttttatctgttctttattaactgaagcatttgtactatcg

SEQ ID NO: 18802 - DNA, 860 bp, Gossypium hirsutum
  Clone ID: GOSHI-09MAY01-C23514_1
ataactgttggctttttaagatgaaaacaaaatgatctaaacccgaaatcacccaaaattttccaactttttaaggaaggtgatgagagatagccaacatttggcttgccattgtttactatcaaacaggtcaagcaacggaacacaatccaaatctttgggagtcatattcacataaagctaaacatgggccttcctgaattagatgtcgcgttgttttcaaactaaagaaatctctaactgggaagatgctaaaaaaccgaatccttcaaatccatcttatacatcggctgcctcgaacgggactcggacaaacaattgaccatgcagagtaaccacagctgaagtggggggcggatcgattctagatggcaagctgacaacctcctcacgaagaagcccgggaaccaaagcatagacctcatagcagtcaacggttttttgcacgttaatcttcacccaatcagctggggctccaacatcaacaaccgcggtatccaacctaccaaaagaacgctgtgatttagttgctttaagttgagaaactcggacaccagagtccaaagtggatggctttttacgcttcaataaaccaaaatttttaagttgtctgtcacttttgagcgtcggactagaggtcttgtccttgatgattggatgacagacctcaccgttatcgagaacacgttgagaatgccagctccgcatggcacgagcagcagcatctctctttgccctacctgacccaggagcttgattactaccagcctgagcttcaactccattaggctcaacaaccgaagtatctgcatgagggagcatgccaccgtgtattttatgcttttcatactcgagcaggg

SEQ ID NO: 18803 - DNA, 597 bp, Gossypium hirsutum
  unsure (1)..(597): unsure at all n locations
  Clone ID: LIB3825-009-Q1-K6-D4
gttnctcgaaacggtgaggtctgtcatccaatcatcaagnacaagacctctagtccaacgctcaaaagtgacagacaacttaaaaattttggtttattgaagcgtaaaaagccatccactttggactctggtgtccgagtttctcaacttaaggcaactaaatcacagcgttcttttggtaggttggatactgcggttgttgatgtcggagccccagctgattgggtgaagattaatgtgcaaaaaaccgttgactgctatgaggtctatgctttggttcccgggcttcttcgtgaggaggtgcatgttcagtctgatccagcaggacgtttggttatatccggtcaaccaaaggaactcaaaaatccttggggtgttacacccttcaaaaaggttgtcagcttgccatctagaatcgacccgcaccacacttcggctgtggttaccctgcatggtcaattgtttgtccgagtcccgttcgaggcagccgatgtgtaagatggatttgtaggtttcttttttttagcatcttcacagttagagatttctttagtttgaaatcaacctgacatctaattcaggaatgcacatgtttag

SEQ ID NO: 18804 - DNA, 1773 bp, Gossypium hirsutum
  Clone ID: GOSHI-09MAY01-C23504_1
gttgcttctaagtcgcaaaatcgtcatcttttactattgtaggattgctagaagaggcggacattacaaaggctggaacttacaaagtgtaaagtacatttttttgctgtcgtgaaagcaaggcaacccgcataccgaaccgtggaagcaaaacacttgtcctgtcttttccgctaacactttactgtcctcgcgtcagcttcgttggaggcaatgggttattgcaaggctccttgtgtgtttttactatgcctcttcatcagtttctgccttccccgtcaattgttggctgatgaggttgacaaaaacctgacagctcagctgtttatagatgcttccgaacagtcaagccgtccaatacctcaaacactgtttggaatattctttgaggagatcaaccatgctggtgctggtgggctgtgggcagagcttgtaagcaacagaggatttgaagctgggggtgccaatattccttcaaacattgacccatggtccataattggggatgagtcatctataattgtgtcaactgaccggtcgtcatgttttgaacgtaacaaggtggctctcaaaatggaggtgctctgtaatagtgagggcactcatatctgtccatctggaggagttggtatatataacccatggttctggggcatgaatattgagcaagggaagagctacaagatcgtattttatgttcgctcaacaggagcaattgacatttctgtatcttttacgagctcagatggcttgcagacactatcctccaccaacataaaagcttctgcttctgatgtttcaaactggacaaagatggaggttctgttggaagccataggaaacaaatcgcaattcaaggctgcaactaacaacatcgaaaaatggtgtggtatggtttgatcaagtttcagctatgcctttggacacttacaaggggcatggtttccgaaatgagcttgctgaaatgcttgcagatatcaaacctcgctttattagatttccaggtggctgttttgtggaaggtgaatggttaagaaatgcttttcgctggaaagcaagtgttggaccttgggaagaaagaccagggcactttggtgacgtttggatgtactggactgatgatggacttggttactttgagtttcttcaattagcagaggatcttggtgcattgccaatatgggtgttcaacaatggaattagtcataatgatcaagttgatacatccagtgttctgccttttgtgcaagaggcccttgatggcattgagtttgctagaggtgatgctagttctacatggggtgctgttcgagctgcaatgggacaccctgaccctttcgatttgaaatatgttgctattgggaatgaggattgtgggaagaagaattatcgaggaaattacctcaagttctatgatgctataaagcgggcctacccagatatcgaaatcattacaaactgtgatggatcttctcgcccgcttgaccacccaactgatctttatgattttcatgtttatacatctgccaacaacttgttttctatgtcccataaatttgatcgtacaacacgacagggtccaaaggcctttgttagtgaatatgctgtgtctgggaaagatgctggcactgggaagtcttttagcagcacttgctgaggctgcattccttattgggtctgggaaaagaacagcggtgttgtgcatatggctagctatgcaccactttttgtgaattccaatgacagacggtggaacccagatgcaatcgtctt

SEQ ID NO: 18805 - DNA, 629 bp, Gossypium hirsutum
  Clone ID: GOSHI-09MAY01-C23454_1
tggtcatgaagagaagcttccttggtaccgtgggaaggaatggagttacttaaggggaggtcttacaacacttgaccgtgactatggatggatcaacaacatccaccatgatattggaacccatgtcatacaccatttgtttccacaaatcccacattaccatttagtagaggcgaccgaggcagcgaggccagttctccgaaaatactatcgagagccggaacaatcagggcctttacctttccacctcatcggaagtttgatgagaagcttgaagaacgatcattatgttagtgacactggggatgttgttaactaccaaactgacccagaactcagaaagaatgcttcataaaatagctcagcctcacactaatgggtggaattcaagctcttggcttcagacttgctagcttaaccataagagacctgtgcaatgtgcttcaattgtcatggtagaagacaattggagtagtacaagagtttgatgtaccatgctgtacgaagcaaaagttaggtacatatatatctactgtatagacattctactacataaggaaaaatgcatagtcatatgctgctaacgactaatagtatttgattataccaacaaaatgaaaatgaaaatt

SEQ ID NO: 18806 - DNA, 335 bp, Gossypium hirsutum
  Clone ID: LIB3146-055-Q1-K1-C2
acacctacggccacgcgtccggatgtggcatacactgaagggaggatggctggtcatgcaacatgctatcgagagccagaacaatcagcgcctttacctttccacctcatcagaagtttgatgagaagcttgaagaaagaacactatgttagtgacactgcggatgttgtttactaccaaactgacccagaactcaaaaagaatgcttcataaaatagctcatccccacaacaatggctggaattcaagctcttggcttcagacttgctagcttaaccataatagacctgtgcaatcatctttcattgccatagcagaagacaattggagtttca

SEQ ID NO: 18807 - DNA, 721 bp, Gossypium hirsutum
  Clone ID: GOSHI-09MAY01-C23474_1
tcgtctctttcttcctcttgcaataatcaaacaatttttgccttgatttcagtttgaaccatcaatggcggaagcagttgtgttggacttggcctattcgatcataggcaaattcagctcccttactctccctgaaactgaaccgtggttgaatgtcaaagatgacctcgacgacatcagaaacgccgtctctgcaatcaaagctaagcttctggacgccttagtgcgatctgcgaccagcaatttcacagcttggcttaaaaagctggaagatgcactttgcgatgccaggaacttgctcgaggagttatctttcgaagtttggagggaaaaccttttctgttccggttggccaatcagttttgctattgccgatatgtgcgctcgaattcaggccattaagaagaggttaacttctcttgaaagtgagttcaaaatccctttcatggctggaacgaggcaacaagggaacttttttgtgcataaagatgaagagcgatccgtgaacgatttccgaggacagcttaaagaatatttagaatacatgctctttgacccaccttcgcaagcagtttgttggaattggatgaagacgatggaaaagatacacgatacctatccgtacaagaagatgggttatggcatggcagatccggtgcatcagtctatgtcgaatgggggcaagaaaagaaatctgaaatttgtttccgatgacttgaga

SEQ ID NO: 18808 - DNA, 711 bp, Gossypium hirsutum
  Clone ID: GOSHI-09MAY01-C23464_1
cccacgcgtccgcccacgcgtccgtttttttttccttttcgattctttgatttgagaaaagaaacagaaaaaaaatgggttctttcttttcatccgattcaacgccagaaaagccatcatcttcatctgagccttcaagcgtcctaacctttcattcatcacccagatggcaacttcacttcaactctgtcaaagaaacctcacagcttatggttatagatttctcagcttcttggtgtgggccatgtaaattcatggaacctgttttgaatggcatggctgctaagtttactgaagttcagtttgtaaaacttgatgttgatgaactgcctgatgtggcgcaggaatttggggttcaaggaatgccaactttcgtgttgctaaagaaagggaaggaagtggatagggtggttggagcccaaaagaatgatcttgagaagaaaattgagaaacacagggatctggtagctgctacttgaactttcagcttgtattttctccattaataatgtctaatgggatttccctgaatttgattatgtttaaacactttgttgtggaacaatgattgggtcctttctcttgcattcattttcttttcatcgccccacaatccctcttatgtgttgctttaatgttaacatgttgatttttatgtatcctgtctgatgttgagtgaatctaagtttggaaagtatattatccttttcc

SEQ ID NO: 18809 - DNA, 640 bp, Gossypium hirsutum
  Clone ID: GOSHI-09MAY01-C23644_1
tagaaacaaggaatcggatgaatctattccagcatcaaatattgtttctgacaaaacttctcttcactcacaaactcctgcatctagaccacttgtaccacctggttttacgagcacagttttggaaaggaatgttggaaccaaaagttcaatgcactcccattcttcacaggttgggagttctgaaattgatggcaacctttcagagtccaaaggcagccttcttataaatgggatttctgatgatcttttgggcaaacattctaagcagtgtgaagaggaaactttgagtgagcagaggcttgaaagtaaaaacattcaccttttacacaatattaagagtgtgaaggctccaaataccccatcagctttagatatatttaatgacacaataagcaaggattcccaaatatacaagagttctagtctttcagaagcctttatagcccctgggaatggtgaagtaactgaacttgattccaagaagctcgttgctgataaaattgtgactggagaccaaccaggatgctgccctttcaattctagactagctttttggaactgctgtaacagcaaatggaggtggctccactaatatcactgcgcctaatgacagcaacacagatgagaactgggcctc

SEQ ID NO: 18810 - DNA, 430 bp, Gossypium hirsutum
  Clone ID: GOSHI-09MAY01-C23674_1
cttctctttactctcatcgcggtggttctcgcttcctgtgtgtccatcagcctccgcctctcctcctcagcccggttcgttggcctcacctcatcatctctgcctcctcggctctatcggtcgaccgtcgtccttaccaagtctgtattttgaagtaaccctaaaaaattagcagccacagtcctattaaggttgctggttatgctgttggaggagggcatgttttacatatggtttgtgatctgaccattgctgcggataatgctattttcggtcaaactggtcccaaggtgggaagttttgatgctggttatggaagttacataatgtcccgtttggaagttggtggaaatgcgacacccatattttatggaactgaagaagggaaccggggggaaaatagcatatggggtgaatagacgctcagatt

SEQ ID NO: 18811 - DNA, 431 bp, Gossypium hirsutum
  Clone ID: LIB3149-035-Q1-K1-C8
ggctttttgtagcggtggtgaccaggcgttgcgaaaagcagatggttatgctgattttgaaaattttggccgccttaatgttttagatcttcaggtacaaattaggcgtcttccaaaaccagtgatagcaatggttgctggttatgctgttggaggagggcatgttttacatatggtttgtgatctgaccattgctgcggataatgctatttttggtcaaactggtcccaaggtaggaagttttgatgctggttatggaagttccataatgtcccgtttggttggacctaaaaaggcgcgcgaaatgtggtttcttgccaggttttacactgcctctgaggcagagaaaatggggcttgtgaatgctgttgtaccgctagagaaactggagcaagaaacaattaaatggtgtagagagatcctaagaaaca

SEQ ID NO: 18812 - DNA, 551 bp, Gossypium hirsutum
  Clone ID: GOSHI-09MAY01-C23004_3
tttgactttacaacatgacacacatgaaggtgcactagatatatttatgaggacattctgtgcataaatataaaaatgctctgtgtgctttgcatttctgctgtttataataggtaataaagcagttgagctgctgtaggtagcatgggagcatgaacagttctcaaggctgagagtcactgctgccactctttctgaactttctgtcacaccagaactcctagaaagcactggtggtctgtttgataccagacaatacgtaaatgaaactgctattgttagaggtgtgaagctagttgctgaaagtcttgcgaggcatatctatggccatcagggaaaaaatatccaaatttttgcagatgagagcagtttggctgtcaatcctgcctatatacgatcttggctggatgttttatcacagacacctcgagtagctccatttctttcaaaggatgacccttctgtcatggcattgaaaaaggagttagctggtcatgttgatgaagtgaatgtgcaacatgagactcttgaagggtttttacttttatgat

SEQ ID NO: 18813 - DNA, 986 bp, Gossypium hirsutum
  Clone ID: GOSHI-09MAY01-C23004_2
cccacgcgtccgcccacgcgtccggcattatcggtgggaagtgactgcaactactggcggatacaagtttgttatcccaacagcagaacctaagaaagtcgcatctcccacaatgactaatattcaggggtggttgtctggattaaaaactgatggagatgcaaatcaacttccaaccattgctattgtggcatcttatgatacatttggggctgctcctgcattatcggtgggaagtgacagcaatggaagtggcattgtggctcttcttgaaatatcaaggttattctctcttctctactcaaatcctaagacaagaggaaggtacaatttactttttggcctgacatctggcggaccatataactacaatgggactcagaagtggcttcggagttttgatcaacgtttacgtgagagtatcgactatgctatttgcttaaatagtattggttcttgggataatgaattgtggattcatgtgtccaagcctccagagaatgcctacatcaagcaaatttttgagggtttatctaatgtagcagaggagttgcacctcaaagttggcctgaagcacaagaaaataaacatctccaatcctcgagtagcttgggagcatgaacagttctcaaggctgagagtcactgctgccactctttctgaactttcggccgctcctgaactcctacaaggcactggtggtctgtttgataccagacaattcgtgaatgaaactgcaatcactagaggtgtaaagttagttgctgaaagtcttgcgaggcatatctatggccaccagggaaaaaatgtccaaatttttgcagatggcggtagtttggctgtaaatcctgcttatatacaatcttggctggatcttttatcacaaacacctcgtgtggctccatttctttcaaagaatgacccttttgtcatggctttgcagaaagaattagctgatcataccgatgaagtgaacatgcaacatg

SEQ ID NO: 18814 - DNA, 895 bp, Gossypium hirsutum
  Clone ID: GOSHI-09MAY01-C23004_1
gctggctcggcccgcctgacggaccgggactgtaatggctggatcgacccacgcgttctgttactgctgtcactctttctgaactttgtgtcacaccataactcctagaaagcactggtggtctgtttgataccagacaatacgtaaatgaaactgctattgttagaggtgtgaagctagttgctgaaagtcttgcgaggcatatctatggccatcagggaaaaaatatccaaatttttgcagatgagagcagtttggctgtcaatcctgcctatatacgatcttggctggatcttttatcacaaacacctcgtgtggctccgtttctttcaaaggatgacccttttgtcatggctttgaagaaggagttagctggtcatgttgatgaagtgaatgtgcaacatgagactcttgaagggatttttactttctatgattcaactagcgctaggcttaacatatatcaggttgctagtgtaacctttgacttgctgttactccttgtgttgggatcttatttgatagtgctcttcagttttcttgtcatcacaactaggggtcttgatgatctaatcagtttatttcgccggcccccttctcgaaaggtgaaaacagcttgatcgcataagcagaacattatatgcggatgcattttgtacgaaatgttctctaatgtaaacttaaaactgaatatcccacgaggttccttggttttcacttttttttcttctcctttttagttttagtatgaccggggaccattttaaatgagatcaattttaggtgcgagaaaatttttgctcaatccacccaggattgtattgtattgtattgtattgtattgttgttggttttctagaataatacgtaggggccatccctacatttttaatta

SEQ ID NO: 18815 - DNA, 647 bp, Gossypium hirsutum
  Clone ID: GOSHI-09MAY01-C23254_1
aaaaaagaaaggaattttttgttttattttgaataatttgggctaaaatgggaaagagaaagagggcgagggcttcacgcgatgaagatgaggaggatgaatagttcaagaagaagagggcaatcattcttcttcaaacgaaaagagcttatatgagattcttggagtcgaaaaagcagcatctcagcaagagattaagaaagcatattataagttggcactgagacttcatcctgataagaaccctggtgatgaggaagccaaagagaaatttcagcagttgcaaaaggtcatatcgattctcggtgacgaagagaaacgggctgtctatgaccaaacaggttgcgttgatgacactgatcttgctggggatgttgttgagaatttgaaaagctttttcaggactatgtacaaaaaggtcaccgatgctgatattgaagagtttgaagcaaattatagggggtctgattcagagaagaaagatttgattgatctttacaggaagttcaagggcaatatgaataagctcttctgttctatgctttgttcagatcccaagcttgattcacaccgtttctaagacatgcttgatgagggagtagcagccagagaactgtaggaatccgccgcctatgagagatgggcgt

SEQ ID NO: 18816 - DNA, 844 bp, Gossypium hirsutum
  Clone ID: GOSHI-09MAY01-C23274_1
tggatgcacagagtattgcatgatataaaaccattatacaagtacccgcctgcgtctccgcacatctacaacaagcagaatacactctctccatttgctggtttggcttttcacccagtggacggaatactgcaggcagtacctcatgtgatagcactctccattataccaactcattttacaacacatgtcggactgctgttcctcgaggccgtctggacggcaaacattcacgattgcatccatggcaaactatggcctgtgatgggtgctgggtaccacactattcaccacactacgtatcgccataactatggccattacaccatttggatggattggatgcttggaaccctacgtgaccctagtgacgctcttgccaagaaggtcacgtaattcccttcgtgctcatcttgacatttcctgtttttgtcgtttgagattctctctttttttgaataggtccgcatgttaatggagtctgagatgttgtcgtagcctgtgttggtcgtaggttttttaaattatcctccactgcaaacattgttctgctttaagcttacattggtgtttattatgggagctcggatctcctgttttcttgagttttaaatctagatgttgcttttggaacttgaaactccaatagtcccagcccgtgtttaattagcaatgtccttggaatttgtgggggcacaacccatatttaatatttctctcctaattggagattatgttagccacaacaaaaggttctacttggaatctaatgaacatcaaatttttacttggatggaaatacgaatgcttctgaagcttacagtttccatcgcaattggaatgt

SEQ ID NO: 18817 - DNA, 405 bp, Gossypium hirsutum
  unsure (1)..(405): unsure at all n locations
  Clone ID: LIB3147-023-Q1-K1-F9
ctaatatataggagttaattgactcgtttttaataaaaggataaaatacaaggtgtctttttttgacgcatagcgagtactttttatttaagctaccaggaaatgtagagattccgattggttgggctcaaagtatttaattgatacagctaaatacgagcgggatagggccagttcgggtttggaaatatagagttgagtcaggtgcggcggcgggcaaagcacctgctttatgcattctttctctaagcaataatatgatgatagaaatgtcaaggtttctcannctataatgggtgctgggtaccacactattcaccacactacatatcaccataactatggccattacaccatctggatggattggatgctttgaaccctaccgttcccttttgaccaata

SEQ ID NO: 18818 - DNA, 391 bp, Gossypium hirsutum
  Clone ID: LIB3147-023-Q1-K1-F8
atagtactgttgctccccctacccccctcttttttttttttcttttctttttgatttagatggactgaagcaagtgggtgatagtgattaacaatttgctatttgatatgggtgaaaacaatttgctatttcaggtttggcttttcacccagtggacggaatactgcaggcagtacctcatgtgatagcactcttcattataccaactcattttacaacacatgtcggactgctgttcctcgaggccgtctggacggcaaacattcacgattgcatccatggcaaactatggcctgtgatgggtgctgggtaccacactattcaccacactacgtatcgccataactatggccattacaccatttggatggattggatgcttggaacccta

SEQ ID NO: 18819 - DNA, 574 bp, Gossypium hirsutum
  Clone ID: GOSHI-09MAY01-C23214_1
ggggaaccccagggtttttccccgtcccagggttttaaaacccgggcccgtgaattgaatttgggggccccaaaaaaaaagttttttgttggcaaggccgggggagtaaaatttggttcttttaaaagggggccccccctttttttttttttttttttttttttttttttttttttttttttttttttttttttttttttttttttttttttttttttttttttttttttttttttttttttttttttttttaagaatatgacaataacttattaaccttatgtaaaacttcatatggacaacgatatagagctccaacgatcacaagaacctagttttcctaatacagcatcaaatttcaggcagaaaatatataaacacaatggggacaatggacacattcaaactatcaaaccactcagaggcttgaacaagaaaagaactggatggactgtaatagaaagagcaccactttcatcttattgagattgaaattcaggatcagataatcctgccatgacagctataagaacccaaaacatgagcagacctattatggcagtttcaatacctg

SEQ ID NO: 18820 - DNA, 1035 bp, Gossypium hirsutum
  Clone ID: GOSHI-09MAY01-C98444_1
acaaaattgaggttggacattaaaataaagatacaacattccatattatacaagggagaagttgaacattatggaagcaaagatgtaataagtttattacacagatacagcctaactgcaaatgcctctctaacatacaatgatttttaaagaatttcatctgaactttgtggaaactggaaagttcccatttttaatgcttaggagtaagggaaggaaatgagggtattgactgcaatattaacttccggccactctgaccaccaggggttgaccctaactcacattgaggaggagagatcctcttactgttaggggatgaagtcttaatcccagttccaggagacgaattgcctcgtagaatctcgggcgtttcatcttcagcaatagtttggaaatgcttttcgataatgttttgaggtcgaatgatgctaggcttaccatatctttggccagtatacagtgcggaagatgatccgatggcaatgaaggaccgtggcggtttgcttttcgatgaaaatggcagctggaccaaaggtctgcgcagagaaatattattgaatttatagcaacaatggatatcgattttatcattgaaacaacttgaaaaagttcaaggaaggaacctgcaaagttgtagtggagttgttgggagagcagaagctggattttgctcttcattatttaagatgtcgggcttttcgaagtttttgtccagtgcattcttttcggaaggatccatttcttcttctcctggctccccgtcggtttccacgatagcagatccatccttccgaccgaatgcattcttacacccttcacatctgcagttgatggaacatccaacaccgcccttgaagacgacaaaaaacgtgttctaaatcagtttatgtaggacaacataacaacataagcagagaggtttttttgcggaaaacctgaaagcattcacaatatttcttcaggcaatttgatttcttgcagttgcatcctcgtttatgtcgagctgaagatggtgttgtgcggacgcgtgga

SEQ ID NO: 18821 - DNA, 525 bp, Gossypium hirsutum
  Clone ID: uC-gsflnu33B019c12b1
taagaatgcattcggtcggaaggatggatctgctatcatggaaaccgacggggagccaggagaagaagaaacggatccttctgaaaagaatgcactggacaaaaacttcgaaaagcccgacatcttaaataatgaagagcaaaatccagcttctgctctcccaacaactccactacaactttgcagacctttggtccaactgccattttcatcaaagagcaaacctccacggtccttcattgccatcggatcatcttccgcactgtatactggtcaaagatacggcaagcctagcattattcgacctcaaaacattatcgaaaagcatttccaaactattgctgaagatgaaacacccgagattctacgaggcaattcatcttccggaactgggattaagacttcgtcccccaacagtaagaggatctcttctccttaatatgagttagggtcaacccctggtggtcggagtgggccgaaggtaatattgcagtaataccctaatttctttccttacttctagca

SEQ ID NO: 18822 - DNA, 592 bp, Gossypium hirsutum
  Clone ID: GOSHI-09MAY01-C98114_1
atcaaagttttgtcattataaaatatgaaattgattggccccacacattcccaaagctctaaattacgaaacaaaaagaatagattccttgtaacttgaaattggaatctgtaacacaaatgggtttggtcaaaatttaataactagacattttgcactctactttacacacatacacagtttgatctttcaaccccactattgaaattgaagaaggaatatgtaattagcatcaccaaagataaattaaactagttaaatatgtcaaaagcttggtttgggtccaataatacaaaacatcaagacccaccaaaatcacattctaaccaccatatcttctagaccctaaagactactactccacacatgatttcttttgcgttgaacggaatgcccttgttcatgggttgtaattacgatcgaggacggagagcatccaacggtctatgagcggcggatggagcccaagggttcatgtggaaagctctctgatgggtttgggctagctgatgatgggaccgtggatcaacggcggcggatgatggtgggttgggtggggcccgaaccctctcacatgagtgcacatggagag

SEQ ID NO: 18823 - DNA, 651 bp, Gossypium hirsutum
  Clone ID: GOSHI-09MAY01-C98384_1
gttaacttcacagccgaatagctcgttcgttggagcctcatctctcaactacaaaggagaaaggcagttctcattcttacaaagtgctaattcatcacacccaggagtttctgtttgtcaaccgcttgtcaatgctaatccttcatcaagcaatggtggcatcagccagaaaatgttgttgaatgggttaaatcgaaccgtcgagtctaatcgtgctctctctcttctgtcatcacaaccggctgagactcgggagattagtttgagccctatgatgcagtctggctcaacctcatccttgatcccaaacttgcaatataaaggtctaggaatggagggggagcaagtaggaaccattttggccactgatcaaagtgccaatactgatctccatggaaatggagtgtttcgaatcggacatcccggatcatctgcaagtggtactcaccatagactcaccttctcatgggagtaaatatatgccatttccaactatatgttcaaatcataacgtttttcctttaattatgtagcacttgttttagtaagttcccaaggatgtatgaaccttttgatatggacttgtttatgagccatttccatgtaccttcaaattattatttaatgcaggcaaatgacacagttctcatt

SEQ ID NO: 18824 - DNA, 567 bp, Gossypium hirsutum
  Clone ID: GOSHI-09MAY01-C98364_1
tgcctttgaaacgtgggagagcaaaaaggaccagctgctgaacctgatgctgctgcaggacaagaggctgcagctgagcagggtggttctactgacgaaggcgtggccccaatggatatttaaggataccggcattggggcccatctcatgtttagataaggttttctagcgtgtttttgcggatttgagttagtcactggtagacattattgtgttggatatttcctttcttttgcaaactatgtttttacaattgctgcaagcatgcacatgctagcctgacccaaaacttaaaactaaatttacaggtatacccaagatacagtcattcaagttgtcaacttattttgggtgttagcacaaatttgatgcaggcatcagggtttgtgactgacccaaactttgcatcagtggcagaaaaacgctcgcaaacatatatatagacttttatatttgaaaaaaaaaaaaaaaaaaaaaaaaaaaaaaaaaaaaaaaaaaaaaaaaaaaaaaaaaaaaaaaaaaaggggggggccgttttaaaggatccaattttacttccccttcct

SEQ ID NO: 18825 - DNA, 745 bp, Gossypium hirsutum
  Clone ID: GOSHI-09MAY01-C98334_1
cggacgcgtgggttttttttttttttatttttctgaaaggaaagacatatattgatgaatggtttacacactagatatgctttcactgatatccagtccatcaatgtgtttaaccagttgtagaatataaatgtcagagtaggatacacatcagatggaaaatgtttaaaactgccatctacaatgtcattgcttcttttatttcagtgttaaaacagagtatcttccttgcttcttttatttcagtgttaaaatagagtatcttccttatttgtgttgcatacttactgtggcattcgaacatctcagtttggtgaagttcttgacaccgtcatcagggctccaaggatactggcaccattatcctattgatatggaatttcgaccacaacacatcttcaccaggttcgtgtatgctgaactcgggctcaacaagcctgtcacaaaaacggcaacgcagagaatctgaaacggcagcagatgaagaatcgatcttgggaggtggaaaagacaaatcctcagggaagaaaagtttgcaattgttacaatgcaagagtggatctttcccaggccatctccaaacaggcacaaagaaaagcttcaatactttctcgtactccacaagatcagctctggaaccacagtttatgcaccttcccacaccagatttcacgcacttgtcttgcttgttgctctaatccacccacaaagaaaaagaactcttctgactattctagatccgcga

SEQ ID NO: 18826 - DNA, 616 bp, Gossypium hirsutum
  Clone ID: GOSHI-09MAY01-C99814_1
ttttctcgtccgcccacgcgtccgctttaccttccaccatttcttttcccattaccccttgtctttctcttctcattttagtccctaaccagacacatccaaagccacgttggaagaaccaatgtcaacagtaccatattccctatgggcggccattttaagctggtttaccccaactgtgttctttgtcttccttaaccttacaataggttccttctatttcacttccactttgagttccggcgggccgggtagtgacgcacataggcagtaccacccagatgatgaaacatacccaaagtttgttagatctccatctatgttgcagaggctgaaatctatcaacttgtctgcttacagatctcaagaacctgttgttgctagtgctaccactgcctatgacagtgtctctgatgtgggtgatttccatttctcttttcaacaacaaacccctcaacaacagcgccagccttcctttgagagatccccttctgttttgcaaaggctaaagtccattaacctctacggttacttctccccagagcaaccaaaagccatggaggttacccccattattctgcagaggtcgttcagggtgagggacttgatgaaaagg

SEQ ID NO: 18827 - DNA, 522 bp, Gossypium hirsutum
  Clone ID: GOSHI-09MAY01-C99684_1
ggtgtgagagctaaacaagaccaagggatcgtcacgagggaggaacttgggaattgtttaagggaagtcatgatcggagaaagaagcggagagattaagagtaacgcatcgaaatggaaacggcttgctaaaagagctgttagtgtaggtgggagctcagataggaacatagatgagtttattgcaaagctgctaaagcctgaccagtaagtactaaagagaagagagaaaagagtctgtccatgaaccgacctaggagtgtgccggccaccacaggctggtatttccggtgcacatcactaataaagttcatccatcaaataaacaacaaacctgcaggtaatcaaggacaaatcaggaagtccataattctcaaagtatatatctttataatctaatatgttaattacatgaataatatacagaagtttgaccaattgctaaaggtcaattgtatgtcttgtataatattggaaagttaaaaaagagtgtaaggtcgtatcataaggataaggtttcaca

SEQ ID NO: 18828 - DNA, 641 bp, Gossypium hirsutum
  Clone ID: AI055640.1
tgtcactgaggcaagaacacctgccttcagaaaatatgcaagattgggcagtcactcctgcctgcgtgccagcgcctttccaacatccgttgaacagtagagaactgtttagtcaaaactggtttactggagagcatcaagttccagttcgtggtggatgggctggttcagatggttttagtggccaaagtcagagtatcatgggtgcaagcaatgcagatcagagcttttttggtgttctatctcactgtaaccaatttcattcaagcagcccttatgaatctatgggctctaccgggcaggtcattccacagaggaacaatggaatggtgacggagttgagaatttgaaaatgctttttttgctggatattgatagttaagggtattttccatttttttcatttcgctttttactatagaacaatgttattggttacctacactacattaagttcataagtttgatcatcctttataaaattaattgtaactcatgtgatgaattaattaataaatttcaatttccattattttatatcgtcataattgcgtttgtattttatgttattagctttaatatattattatacaaacgttttccattaatgtgcattactttttcttcaatttaacttgacg

SEQ ID NO: 18829 - DNA, 582 bp, Gossypium hirsutum
  unsure (1)..(582): unsure at all n locations
  Clone ID: LIB3829-014-Q6-K6-C11
gcgttcgggcagggctagnattccagcccccaaaaaactattgatgggagatggtcattttaatgggcaatttcgggagcagttgcagtcatcattgctgttagaggagaggcaaaagaggcagaatgaggtttatatgggacagaacatgccacaaaatatttactccactgggggtaggtacttgtcactgaggcaagaacacctgccttcagaaaatatgcaagattgggcagtcactcctgcccgcatgccagcgcctttccaacatccgttgaacagtagagaactgttgagtcaaaactggtttactggagagcatcaagttccagttcgtggtggatgggctggttcagatggttttagtggccaaagtcagagtatcatgagtgcaagcaatgcagatcagagcttttttagtgttctatctcactgtaaccaatttcattcgagcagcccttatgtatcaatgggctctactgggcagttcattccacagaggaacaatggaatggtgaggggggggccttctggaataattggaaatagtatgcagcaagctgctcttccgttcgattattt

SEQ ID NO: 18830 - DNA, 548 bp, Gossypium hirsutum
  Clone ID: GOSHI-09MAY01-C99394_1
gttaaatgggttgccaaccaaatctatattgtttccactattataaccttgttccaaacagattgagagagagatatacaacagaaatatacagcctcaccagaaataacaaaggaaaaactaagcgtaggaaaaatcaaacctgatgaattaccatttcaatagtttatatagagacatgcctgatgttgacaacagaaaaaggcccaataagttcagcatggcttgatttcaaatccgatactcagtagcgttctagctgattccattgccttctcacctccaaggtctacagcctcaccggtcaattcaccttctgtacccactgaccactttgttgatgtaacttgcttttgctctccatcagctattgcaagttgtaaattgttcatagaagcaggagcagcagcagcaacgagaggagcacttgaagggccatgccgcttttttggtacaggcatgtcatggtcatgaacacctttatatgttataacgacagcatttgtattatctacagctgtctcaatatgcttacgaacaggacaccc

SEQ ID NO: 18831 - DNA, 540 bp, Gossypium hirsutum
  unsure (1)..(540): unsure at all n locations
  Clone ID: LIB3829-011-Q6-K6-B7
gcanaacatactaaactcatgagctgggactaaaaccacatctcctctcagactctcttctcgactcattgctcaactttgctatcgagttcaaggatcgcatcgacacaaaacagattatgcccagcatttcatggaaaaaaatggggtgacgccacagactgtaccagctaattaggtggttggcaatgagaggaacttcttgtttatcctgttgtatctttctgcgcttcgtagatggtgctgcagtcctctctactcttcatgttaagcatggtctgtatgtgccatcaaaatcaaaactcggttatgaatcaattgaacgtgagagagtaatattacttgagctcctgagtcgtgactttttggtccaggaactacttgtgagcttgttttgtatttatttgcttattatgtacgaaacatataagcatttgctataagcaggtgttcagtagtaataatttgaagcgacggtaatgtcttgctcctaaaaaaaaaaaaaaaaaaaaaaaaaanaantttttaaaaaaatataaa

SEQ ID NO: 18832 - DNA, 493 bp, Gossypium hirsutum
  Clone ID: LIB3829-015-Q1-N6-H8
aaaaaaacgcagccattggtgagggccccagttcatgttttaccaaaaaacaaacagggggcaagaacattcccggcgcttaaaattattactactgaacacctgcttatagaaaatgcttatatgtttcgtccataataagcaaataaatacaaaacaagctcacaagtggttcctggaccaaaaaggcacgactcaggagcccaaggaatattactctctcacgttcaattgattcataaccgagttttgattttgatggcacatacagaccatgcttaacatgaaaagtaaagaggactgcagcaccatttacgaagcgcaaaaagatccaacgggataaacaagaagttcctttcattgccaaccacctaattagctgggacaggctggggggtcaccccaatttttttccaagaaaggcggggcataatctgttttggggcgatgcgatccttgaactcgatagcaaagttgagcaatgagtcgaaaa

SEQ ID NO: 18833 - DNA, 1025 bp, Gossypium hirsutum
  Clone ID: GOSHI-09MAY01-C99254_1
tctctttcttcttactttcttttcaatctctgcttctaacagcgtgttttattcaatccacgaaaatacgtgtaaatccttcacatccagggaggccaatgcggtaaccaaattggggctaagttctgggaagtggcctgcgctgaacacggtattgactccaccggagaaataccatggggactctgatcttcaactcgagaggatcaatggttattacaacgaacctaggtgtgggaggtatgttcccagggctgctctcatggatcttgaacctggcaccatggatggtgccaggtctgggccttatgggcagatttatcagaccagacaactttgtcttcggccaatccggtgctggaaacaactgggctaaaggccattacaccgaaagtgctgaactcattgattccgttcttgatgttggccgaaaagagtccgagtgctgtgtctgcttgcacgggtttcacagtttgccactcgcttggtggaggcacaggatcaggaatgggaactcttttgatttcaaagatcacagaggagtacccggaccggatgatgctcactttctctgttttcccatctccaaggtctctgatacagtggttgagccttacaatgctactttatcagtacaccagcttgtcgaaaatgcggatgagtgtatggttctagacaatgaagctctctacgacatctgcttccgtactctcaagctcaccactcctagctgtaagaacatgctcttcctttctgggtttcatttaatctttaatgtggattgaactaatgatctgtttggtcttcttgttggtgcagttggagatctgaaccatttgatatctgctacaatgtctggagtaacatgttgtttgaggtttcctggtcagctgaattccgatcttaggaagctcgctgtgaatctcattcccttccccaggcttcacttcttcatggtcggttttgcgcctcttacctctcgtggatcacagcaataccgagccttaactgtgcctgagctcacc

SEQ ID NO: 18834 - DNA, 476 bp, Gossypium hirsutum
  Clone ID: GOSHI-09MAY01-C99234_1
gctttatcttcgtgaggttcgtgatttgcagtcgaaagcaagagggattagctacgagtaagaagaagcgtaagagaccaccacctcaacaaatcccatctctgcaactgcaagtgccaccaccaccaccaggtgctagttataaaacaatcactatgcatcagcataaaaaaccccatatgcttctcatccttgattgatctatgtggggtactacttatctttaattttgccatatcagtatatgtttagggtagttctttttttttcctatgctttcagtaatgcttttacagatttttgagggggattccttagaatctacttttgatgcaaacagtgttagtattcctcagtaatgactactagtagtactgcaaaaaaaaaaaagtcattctaggaagtgattgtactagcagtttgttgcctaagttgaaccttatgagagcagctaatatgctagatcatggcttttc

SEQ ID NO: 18835 - DNA, 660 bp, Gossypium hirsutum
  Clone ID: GOSHI-09MAY01-C94434_1
ataaaagtaaaatctgctcttcgactggcagcactaacacacagagaagggaagggaagagagaaaaactaagaagatggaggctttgggatggtggttaatgctggtgggttcacttcgattagcatccgtttggttcggcttcttcgatatttgggctcttcgtcttgctgttttctccaacaccactatgtctgaagttcatgggaggacgtttggagtttggacgcttttgacttgtactctctgttttctttgtgcatttaacttggaaaataagccgctctacttggtgacgtttctgtcattcatctatgcatttggtcactttttgactgaatacctcttctatcaaacaatggccctctcaaatctgacgactgtaggcatatttgcagggacatcaattatatggatgctattacagtggaattcacgtcaaccgacacatgtcaagcgtatctgaaaatgaactcctttggtttcagtttgtttaatcttatctcaggcatggggatttatcagtatccattttacattcttgatgagtactaactgataacatctgtttgcaattagattctggagttactgtctaatagactcgcaatgaattgagaacatatatagtttaaaaaagagacatgattttaagcttca

SEQ ID NO: 18836 - DNA, 330 bp, Gossypium hirsutum
  Clone ID: GOSHI-09MAY01-C94424_1
gagatcaaagaactaattttgttgataacttttgctgcttctgtacattacattggtttacagcttttttttttctctttcacaaatggagaaagaaaaaaaagaggaatcaaaattgtgaacgagtggccctttgaatctcttattaggcctgcaatcgagaagtgagatttaggaaggcatcttctctgcaaggaattgttagaccacccatgggatgattgaacccgaactcttcctctgctcgcttaagcaagtcgttgaacgaaggatggttcaacacagttattggaactacgaacctttttctttgcgtctcccccacataaa

SEQ ID NO: 18837 - DNA, 517 bp, Gossypium hirsutum
  Clone ID: GOSHI-09MAY01-C94124_1
caactccggacctccaaattagtgatgatgatttgattctttcgtctgttttgtcactcggagagaaacaaagccgaactggatatacagtctgtgtgcagcatatccctaccgccttaactttccaatcttcaggtgagaggagctactttgctaatcaaatcaaaactctcaatcggttaaaggccaaacttcttgtagtagcaaacgagcaaggagtctccgatgtaagtagcatcaacacagccgccatgatggacatgtggcaaaaggagactcgaaggtacatgtttcatcccagcaagttagtacgggatgtaaaaactggcctcgaattacccgacctaaattccgttctagatggaaacattgaagcccttattgtagctcatatcaacactagacaatctaattttacaatctaaaattccacattgcttgcttgtactccctacaatccaaacattgtacacaaacatatatgcttttgaaaaaataaacctcattttttcggttt

SEQ ID NO: 18838 - DNA, 747 bp, Gossypium hirsutum
  Clone ID: GOSHI-09MAY01-C94034_1
ggaagagagaagcaagaaaagaggagaagcagaagggaggcatagtagaaggtatagctcatcttcggagtcttatgattcgtattccattgataggagcaaacggaggaagagttgaaggcattgacatcttgcgtgttcgttgctggacgccggtgattgacccttcggaaataactccgtatatgtcttctttcctttttccgatgtttataagttacaatagttcccagtagttgtggaatccctttatgaaatcattgtagcttgaacatgtgtctctggatttttcgagttcccggcaagcttatcttctctttgaacttatgattttacgagtttccagctataattcttttttggaacaatttgaataaaaaattcatccttgacaaacgagagattttgttgaatgcatggatcgaagttcaataagaaatgaatccgaagttcagctcagttgatcagttgattatgcaatgtttgattcactgtactcgaacatgctggccaaggctccctgaatgttgttacctcggaaagttagaaagcagatgaccatcaggaggaggtttgcgatattggccaataacgcctgtacttattttctccaaatcgacaagacgcgcccaagacagtacctgaataacaagacctggataaaagctgtagaaaattctgtactatagaaatcggttcaaatcaatccctctactattaagttgataaatttaatcccatattaat

SEQ ID NO: 18839 - DNA, 912 bp, Gossypium hirsutum
  Clone ID: GOSHI-09MAY01-C94374_1
gggctgaaattgttattgaatctaaaataagcacaacacaacaaacaatagagtaaattgtagtcatgcgcccttattacatgatcaagaagaaaactatattttatttatggaatctaaaatacatacatacaaccagcgaaaattgatgtataaaagattataatatgttattccacatcaaccatatgccattgggtgtccacctcatggctttagaaactgaaaacaaaatcaagggttgattctctctgatgtccagtttttcactccattcatatcaagggtagatacaaacttaactctctcattattcttcaaattcaaataatcaacctgatcaggatcaagaacaagcagacaaaaagcagcaaccgggccaattgaaggatctaaacgaacttcctcctcactttggtgctcacttatgcggggcagaccaggattaggtcccaagtattgtagccttgatttaacagagctagcaaaccaagatttctccctttgctggagtttgaagttgtcaggattggatccatccaataacatcaactatttccactgattcgaaactgctcccatgaatcagtaaagtaccaacatatctcagcaaaagggcaatgctttagcttttttatcttgtgagtcctgttatcggtgttgatatggaacttgtcgctgctttcttgaaatcctctaaaaaccaaggtgcgattggagggtcttccgttgcatcccaccgtagcgagttgaaagtaggaagagtgcttgagatgggaattagattccaaagcgttgagaagaagttgcttccatggcgctgttatcgttccctcagtttcttaatattttaatggaaatgagagtgtcatcaaaaaaaaaaaaaaaaaaaaaaaaaaaaaaaaaaaaaaa

SEQ ID NO: 18840 - DNA, 539 bp, Gossypium hirsutum
  Clone ID: uC-gsflnu33B084f05b1
tttctttcgtccgaattcccatctcaagcactcttcctactttcaactcgccacggtgggatgcaacggaagaccctccaatcgcaccttggtttttagaggatttcaagagagcagcgacaagttccatatcaacaccgataacaggactcacaagggtctttaattcacttcccctctttccggattctttcaattctgaaatgggtacaatattatttgttaatttcgcagatagaagagctaaagcattgcccttttgctgagatatgttggtactttaccgattcatgggagcagtttcgaatcagtggaagagttgatgttattgatggatccaatcctgacaactttaaactccagcaaagggagaaatcttggtttgctagctctgttaaatcaaggctacaatacttgggacctaatcctggtctgccccgcataagtgagcaccaaagtgaggaggaagttcgattagatccttcaatcgcccccggttgctgctttttggatgctagttcttgatcctgatcaggttg

SEQ ID NO: 18841 - DNA, 863 bp, Gossypium hirsutum
  Clone ID: GOSHI-09MAY01-C94364_1
gaatcacaaaaaacttgaacattttattgcaatactacaagtcacaaaccaaacaagtttatgaaatcaaatcaataaacaaataaagttggattcctataaacctcgaaaagaacagtataaacatgcacatcgaaatcagtagtaatattggtaaactgcatatcagaatgcaaatacaatacatattcattggtgcttctgcctgagagaatttaaatgtgcggccaaagtatcataatcaggaagcttggggtgaacataacttggcctctcttcggttgaattttgaaccttcgaactttctgcgctacttgatgatacaatcattgggacagaagtagacggctgttcattttctgatgactttgaagatccatcagacgaattcgttttggtctgtggtgccaacttgggagttttgaaagcttttcctgttatctgagttccttttatgagactgaagctccggtagtgcttcatcagcactacaactccttgaggaggaattcttctccccaccataatcggaaactaccgctggctacaaaggacactgtagttttaagagtggaacctcttcgtgaatttgaagaagagtcatttttcttatgagaaacaccagtgcttgaatgagcctttgaacttgattccggaagatcttcatcagaaccactgtttcctggacctaaatatggcatggggtcagaaactacctttgattcagaggaaactgtagttttaagagtggaacctcttcttgcatttggagaggcagttgtcctatgagaaaaaatcatgcttgaacgagtctttgaacttgttttaggaagatcttcatcagaatcactatttcctggacc

SEQ ID NO: 18842 - DNA, 612 bp, Gossypium hirsutum
  Clone ID: GOSHI-09MAY01-C95884_1
gacaaaattatctccatttattcgacattacatatggagaaacgaccagaaattcaatcttttcatgctctttgtttttgtttttgttttttttttactaaaaacctctaccatttgataactgcaatgtacagtttgatatgaaaaccatgtaggatgatcgaaagaccggagctggtcactctctgttgataattagtccaccgcaagaagctggggtgggagcggtctttgcagcctgttcagaagcattggctaaagcctgcaacattctcaaaatctcgcttcggtcttccacgtagtatttggccttgctcggtttctggccgacagtgcaagcaaacacctcggcaactggggagagacggggactggtctttgcacgcatgatcacctcgaacatgtcctcgtctgaccggtcgtctccgatacaaagaacgaaatccggaagctttcctttttgtctcattggcgggagaagatgttcagcgacgagacccttgttcacaccctgaggtttaacttctacaacatgctggccactcttaactgaaaccggctcgttagccaaaaccctttcgaggtgatctaaaagctccttagcctggcaaa

SEQ ID NO: 18843 - DNA, 516 bp, Gossypium hirsutum
  Clone ID: LIB3825-034-Q6-N6-C5
aagggataactttgtaaaaactcacaatagaagctacaacaagcacgatccaaaaggcatttttgacaaaactatctccatttattcgacattacatataagaaagaccagaaattcaatattctcatgctctgttttttttttaactagaaaactctaccaattgataactgcaatgtacagtttgatgtgaaaaccatgtaggatgatcgaaagaccggagctggtcactctctgttgataattagtccaccgcaagaagctggggtgggagcggtctttgcagcctgttcagaagcattggctaaagcctgcaacattctcaaaatctcgcttcggtcttccacgtagtatttggctttgctcggtttctggccgacagtgcaagcaaacacctcggcaaccggggagagacggggactggtctttgcacgcatgatgacctcgaacatgtcctcgtctgaccggtcgtctccgatacaaagaacgaaatccggaagctttcctttttgtctc

SEQ ID NO: 18844 - DNA, 600 bp, Gossypium hirsutum
  Clone ID: LIB3829-012-Q6-K6-E3
cgatccaggcatgagatgcggtagcccataacagagaggattggaagaggaagtggtatttaaattgttatgccaagctgacaaggttggtagtttgatagggaaaggtggttctgtggtgcgggctatgcagaatgacactggtgcagcaatcaagattgctgatacttctcatgattcagatgagcggattgtagtgatatctgcacgagagcatgcagagcaaagatattctccagcacaagatgctgttgtacgagtgcagtccagaattgctgagattggatttgaacctggtgctccaattgttgctcgtcttcttgtacctttgcagcaggttggttacttgttgggtaaaggtggtcatattgtatctgaaatgagaagagctactggtgctaatatacgggtatctttgaaagaacaactttcaaagtctgctggactccagaatgatgaagttgtacaggtcattggtagtttgcagtcagttcaagatgcattgtttcatatcacaggcaggcttcgggagtctatactcccaatgaaacctccctttccaggcattaatccccctccctacttacctccttaccctga

SEQ ID NO: 18845 - DNA, 774 bp, Gossypium hirsutum
  unsure (1)..(774): unsure at all n locations
  Clone ID: LIB3828-006-Q1-K6-C12
ctttttcaagnaggaaggtaaattttgtcatcatgttcatcatggggttatcaatctggtcatcatggtgcagnnnnnnnnnnnnnnnnnnnnnnnnnnnnnnnnnnnnnnnnnnnnnnnnnnnnnnnnnnnnnnnnnnnnnnnnnnnnnnnnnnnnnnnnnnnnnnnnnnnnnnnnnnnnnnnnnnnnnnnnnnnnnnnnnnnnnnnnnnnnnnnnnnnnnnnnnnnnnnnnnnnnnnnnnnnnnnnnnnnnnnnnnnnnnnnnnnnnnnnnnnnnnnnnnnngnnnnnnnnnngngnnnnnnnnnnnnnnnnnnnnaattatcaattcaagagtggttacccgtccgcaatacaggngcgatgacaatgcagtagcccataacagaggaggattggaagaggaagtggtatttaaattgttatgccaagctgacaaggttggtagtttgatagagaaaggtggttccgtggtgtgggctatgcagaatgacactggtgcacaatcaagattgctgatacttctcatgattcaaatgagcggattgtagtgatatctgcctgagaggcatgaggacttaattgtctttttaaattattttgctttatagtctggagaactgcaatattcttacttattgctaattgaaaagctttttgtatttggttgtttgtctgtgaaatctggaacattttgcttgatttgtagatattattaccatatatgttgaaatcatgaatttgatggtggatgaccttttcttcgagacaataa

SEQ ID NO: 18846 - DNA, 784 bp, Gossypium hirsutum
  Clone ID: GOSHI-09MAY01-C95004_1
ctcttcccctccggtctcgccgatggctcagtcgctaagccgttctctgggttcggcttccattaacgagatggtggcctctttaaggaacttacagctaggaaaagtcaaatcctggaaaacccaagttggctgttgctccccttcgtcaccttccagtttcggatcccccagaacagcaatgatccgacccggtttctgcagcttacccagtactccaacccgaaacttaacccgtccaggtatcagctacccggattcatgggataaagtgtgtgaagaagaaccggtaatggaacgggtggaatccggacgtgatttacgtgcaaagatgttcgagaaactgagtaaagaaaattcattggagcgggttaacccggatcaatcttccggaggtccggatttgaattgggtttcggacttggtaaactaaaagtgaaactaaaatcttttttttttatttaattaacttttaatctattttgagatttcttcattgtgaatatagcctctaaaaaggttaaaaaggaagaagaagaaatctgaaaattctaaaaaaaaaaagaagcttaagctctttttttttttgtatagggtaagcaagcaagggggttattgtaatggttgatattgtgttttttattaagtattttgaattatgattatccaagttgctaatctttcttatttgtactaaaaaaaatagtaattaaatattgtaaaattttagagcttatgtatgctcttttatggtccttgcaagttaatgcaatctatttttgcc

SEQ ID NO: 18847 - DNA, 559 bp, Gossypium hirsutum
  Clone ID: GOSHI-09MAY01-C95384_1
atagttatatattttttttttttttaaactaaaaatatttagtaaaaatgatgtaaaataatataagacaactctaaatatttaaccctcaacaaacccatttgcaagctttcaaacatggaatacgaaaggatttagaaccctttatctctcaacgtgtaatcctctaaattccgagaaagcaaaagtatattcgcagcttgataaagctccccgctcttagggaccgttgctaagtggcacctgcatgaaagtaagcagtcctggatggtttaagattgaagcagttagattgccaatgcgagctggctactacctttgtaactcaaggatgggatcataaactaggtcaccgtgttttcatcatttgtgctaacttgggtttcgttttccgtattgggatggtcctctgaaggtagcaccccgtcttcaccatttgcatgatcctctccatcttctttagcttcctgtccgttgttttcatgtacaccgttattaattccaccgttttcagccactgaggtatcaacttccattgcctggtttggggacgttgaat

SEQ ID NO: 18848 - DNA, 918 bp, Gossypium hirsutum
  Clone ID: GOSHI-09MAY01-C96994_1
gaaaaaagattaaatattacttgctatatgtaaccactacaataaggccaatgactctgcggtccctgcatttacagcaaaagtttgttctgttcctatatgaaacttactctaaaaccaggaaataattatcatttgcataaagttaaagaaattcctaatcagtgtccgacctttgctattatacatattttgatatgagtatgaaaaattcagatacatgattgaagtgaaaattgagttatttatcatttaagcaaatccaacatttgaaagcacaaagatagctgaaattttcagttatgacatacctgtggctggtattgttgatgttcccgcagctgctgctaccggtgctgctactacggctactttggctgcttccactgttaatattggatccaccaccttcactctcgctcgatcccgatctcttcttccaccactccttatctacgttcctaccagattcatctgatacagttggctttgcagaaactttggaattatgatttgtattagactcattattcttcttcttcttgttcttacactttgaccctaaggaaaatggaaacaccattttcaaaagaagccctccattatctgtgctcccacttcatataaattgaggcttcggattcttcttcatcttcttcttccccttctctttgttgtatgtatgttggtcgatggtacctctcccttcagcaacactcttctgtctcggttcaacaaccacaggctgttgttgttcgactagatctttcaaagtaagttcgaaacaagactcgggcattctgctgaccatttccataagctccttttggcctctagcgatagcttgagccttggatgacggtgataagcatcggtaatttttgttctttccatgcgaaggactcccggacgcgtggg

SEQ ID NO: 18849 - DNA, 754 bp, Gossypium hirsutum
  Clone ID: GOSHI-09MAY01-C96484_1
ggcagctaatggctgtgatcttgagtatgttgcttatgaatttttcactcaagtgtttgtactgtacgaagaagaaattgcgaactccaaagcccaagtgactgcaattcatctgataattggggctctccagaggatgaatgtatttagtgtcgagaaccgagatactttgacacacaagaccacaggatattcagctcgactattgaagaagcccgaccagtgcagagctgtttacgcatgttcacatcttttttgggttgatggtcaggacggcattagggatggggagagggtcctgctgtgcctaaaacgagcattgaggatcgcaaatgctgctcaacaaatggctagtattgcacgagatagcagtgggccagtcacgctctttgttgagatattgaacaagtacctctattactttgaaaaagggaataaacaaatcaccgctgctgcgatccaacacctgatagaattaatcaacacagagatgcagggtgattctgcaacctcagatgcttttcttgccagtaccttgcgttacattcaattccagaaacaaagaggaggtgtaatgggtgccaaatttgaatccattaaattgtaagtaaatttttgggaatgtaaagaattatcgttgtgaggaggggcaaccatgttgtttagttttgcatagttgatggttgaagttggagagtattttgattttactatcgaactaaacgccttataaaatggtctctatctcgagttc

SEQ ID NO: 18850 - DNA, 583 bp, Gossypium hirsutum
  unsure (1)..(583): unsure at all n locations
  Clone ID: LIB3825-032-Q6-N6-E1
ngacgccgctcggttctagnacgcgagcgccgcccttttttttttttttttttcttaatcaagtaaatcttggtaataaaagnaataatacaatttacatgactcaataatttacagtttaataaaagatataatcaagcaagtatgaaatccaaatccagaataaacgcctatttacatctctaactgccatgcattacttctttacatgacacaacaatttacagtttaatggaatcgaatttaatgtttacatgaaaaaaaatctaaaccaaaggacaagttttgagtccagacctctccccgtcctttatgccatcctgatcatcaacccaaaatagatgggaacatgcgtaaatagctctgcactgatcagccttcttcaatagccgagctgaatactgaccaaagtaacacatatttaagttttgtataaacagttcaatgaagtacaatgaatcagagaagaggaagcaatattactcctgtggctttgtgtgtcaaagtatctctgttctcaacaccaaatacattcatcctctaaagagtcccaattatcagatgaattgcagtcacttgggct

SEQ ID NO: 18851 - DNA, 403 bp, Gossypium hirsutum
  Clone ID: LIB3829-030-Q6-N6-H12
ttttttttcagatttgaaataaaaaattatatagattagaaaaacttgggctggtttccagcgcagacataaaaagaacaaacgtcacaagcaaatatgaaatccaaatccagaataaacgcctatttacatatctctaactgccatgcattacttctttacatgactcaacaatttacagtttaatggattcgaatttctcacccattacaccgcctttttgtttttggaactgaatgtaacgcaaggggctggcaaggaaagcatccgccacactatcagggtttggggaatcactttgcatctcagtattaattaattctatcaacccttggattggggaactggggatttggttatttcctttttcaaagaaaaaaaagtacttgttcaatatcttaac

SEQ ID NO: 18852 - DNA, 768 bp, Gossypium hirsutum
  Clone ID: GOSHI-09MAY01-C96724_1
tgcttaatcatgaactgcactgttggagtggtcagaactcgcctcgaggggccgaaacagtgttctattcatgtattgccatcagaaatgggtcagaaccttaaagctttgttagaatctgaagttggttgtgatataacttttcaggttggggatgaggcatttaaagcacataagttgatccttgctgctcgctcacctgtttttagagcacagttttttgggcttgttggggatcctaacattgataaagtagttgtgaaagatgttgagccttctgtcttcaaggcaatgctcttgtttatttactctgacaagtttccagatatacaagagattacaggctctgggtctacgtggtatgtctaccaacatggtgcagcatcttttagctgccgctgatctgtacaatttagataggctcaaagggttgtccgaggcaaaaattgtgtgagaaacttaatgccggcactgtggcaacgacccttgcacttgctgagcagcaccattgctcacagcttaaggccgtatgtttgaaatttgctgccactccagcaaacttgggagcggtaatgcaatcagaagggttccggcacttggaggaatcttgcccatctttgttgtcggagctattgaaggcctttgcatctgtcgaggagtgtgcaagtatgctatcaagtaagaagaggagtggcagcagtgtgtacaggatagatctagcagcagaagtccatgtggctgaaccggtgaatcccaagacaggcgtgt

SEQ ID NO: 18853 - DNA, 537 bp, Gossypium hirsutum
  Clone ID: GOSHI-09MAY01-C96664_1
ctaaaaattacaagcccaaatgcccaatattaataaaaaccctagaggcctgaatggcccaaaactacaccaactttcaaacacaaaaagaaaccccagccgcatgtttgttgctgccacctcctgcgcacgcccaccgccactgctcgcctatcaccggccacccatgcgtctgacgccttctgacacctgcaaacagagagccacatgcaaccaacaaagcagaaaacaacagacgaacgatccaaataaaaatataaaaaagttgtaatccggctataaaggccaaagcttatcactttttgagggaggatttttgatatttcaaaggagggaaaaacagattgtattttggatgagggatttgaggggaaacggattgtattttgaaatggggggattttttttggagatttcaaaagagaaaaacgattgtaaataggggtttttctttttttgaatacaaagaaaaaacactgtaatacgggcagatccaaaaaatcaaaaaagcaaaatagaaagaaaaggtttcgtttt

SEQ ID NO: 18854 - DNA, 703 bp, Gossypium hirsutum
  Clone ID: GOSHI-09MAY01-C96134_1
tcgcgatctagaccagtctcctctgtgacaatattctaggtcttgcttatccttgtctagtggcggcgccaagacttagggtatccaggctattcagctatctatctgccttcaccggcaatccttcgccacctcgttcattttcgtcactccccaagtccgcgacgatgccgggtgttgacccgccggcggtagagtggcctgcgaagaaggtgcgagacaccttcatcaagttcttcgaaggcaaaaatcacgtttattggaattctagtcccgttgttcctcacaacgatcctactctcttgttcgctaatgccggtatgaaccagtataaaccaatctttttggggactgtggatccgaacactgctatgagcaagctcaccagggcgtgcaacactcaaaaatgcattcgagctggcgggaagcataacgatctcgatgatgtaggaaaagacacttatcaccataccttctttgagatgttgggaaattggtcttttggggattatttcaagaaggaagcaattgagtgggcttgggaactcctcactaaggtttatggcctgcctacagatcggatttatgccacttactttggtggtgatgcaagctctggtcttccacctgataatgaagctagagatatatggctgaagtttctaccccctggacgtgtactgccatttggttgcaaagactt

SEQ ID NO: 18855 - DNA, 745 bp, Gossypium hirsutum
  Clone ID: GOSHI-09MAY01-C96014_1
cattcaattgtgttttttttcaatttatttattatttattctgttataaatatacatacatgtaccatgcgcagtgcccatcatggtaaaacaaaatctaacctgttcaaacaaacattcagctatagttttggcaaacaagtgtaaaaaccagatagatagatagaccagattctgagcattttacaccaaaaatgcacgactatttcggactgacaggggcttcgttaataacccgaataggggtaggcgggatcgattcccaccactctttcaatcgtcgatcacgatctcctccttggttgtttaccatatgctttgctagcggtgatgttgtgatcatggaatgaaacacaacagcaattatgagatacttgaaaggaatcactgcaaatattattgccaatccgatcattgcgagcattaccgtgtttgcatgcttgtgtgcccttgaaaccagaaccgaatgcaatttcagtattgttacattcgcttcctttattatctcacgaaccgtcaaaaatccatattgagctgaaactatgttctctctcgtactcagagtatggtcggaacctgtgcacacaactatttccttttgtttgtccttgagcctttcttgtctagctcgtatcatatttgctaccaccagaagcaagcctgcagataacgccttgccaatccattccttgtataggattagtataattgcagcaaataccagaagagtcgttgtagatcgcga

SEQ ID NO: 18856 - DNA, 405 bp, Gossypium hirsutum
  Clone ID: GOSHI-09MAY01-C97994_1
tccgggaaaagttgaagctgctgctggaggacttaagcgaattggaatggcttttatagttgcaactacaatggtattcggtggggccgccttgatgtttgggattgcagcctccaagttggagttgcacagtcagagtgatgatgtcagaacaaaaggaaaagacctggttcagcctaaatttgacatgattagggaacagcttgttcctctaagaacttgggccgaaaacacatcaaagaaatggcacctggaaagggagcccacccattaaagataaacccatcataaaggagctttctaaaactttaggagcaaaaaccaacaattgactttgtaagtgaacgaaaatttggcatctacaggttcatcgaataaaataaaaagcccggaaacttttcctgc

SEQ ID NO: 18857 - DNA, 689 bp, Gossypium hirsutum
  Clone ID: GOSHI-09MAY01-C97764_1
gttttgaaatagttaatctaaaatcaagttcactggtagagtcccagtaggagtgtaaatcttccgctgctcaaacaccgaagaccaattgtaacacccttaacttgtctccgtcgctagattagggttacggagcattaccgtacaatcaggaaacatttatcaataaatcattaattaaataaatcacattcaaaacataccaaacataagcataccatcactaaatcgagcctttcaagccctaacatttgaggcaatttgggaccaatttgaaacaaaaatagaagttttaagaaaaatatgaaaaaattcaaaatagaggacacacgacattgtggccagcccgtgtaacatttgaaataggaacgcacaataatgtctcagctgtgtccctacccctgtaactcattgagttgggctacaagaccatgtcgtaggccgtgtgccagaccgtgtaactctctaacttgtgacgcacggtcgtgttgcaggccatgtgcgaggctttgtaacacactgagttaaaacacacagccgtgcctcaaaccatgtgaggcacacggccaagtgacataggtgtgtcccaggctgtgtgtacctttttgaaccttaaatgtcaagtttaccatttcaagcttacttggaccctaagtaatccatctaccatcgataaagaatattcacat

SEQ ID NO: 18858 - DNA, 696 bp, Gossypium hirsutum
  Clone ID: GOSHI-09MAY01-C90574_1
ttacaggaaatgaaggagagttggagaagaatccccaatcgacaatatcatcttcccaagtattttttatccatgtttgctgcggactagccttggtcgctgggttttgggtggcccaccatgtctattccctcaatctcgtctttgatcctacaaaaactctttgtttgatctgggctattgaattcccagttgttatccttcttttcagttgctgtagacagaaaccggagaaatgctcgtatttcacagctattgcccgaggtctgctgggacttcctattggggctctattaaatgcgcttggagcattagctttgggtgcacccgtcggcttgcaatacttagaaaagacagttaactggtctcttctgatgtcttcattcacttttgtgcccacagcttgtgtttatggttcaagttggacagattggtgtcgcatatttgcatgtacaaagccaaatggacctttggaatttatgctttgtctaccagcacatggagctgtaattggagcttggtttggtgcttggcctatgccacttgattgggaacgcccttggcaggattggccaatctgtgtgagttatggagcaatggctggttacgtggttgggatggtgggatcctttggtctggcactaataatgcatactggacgaaagcaactcaagcaaagtaaatggtactcttttt

SEQ ID NO: 18859 - DNA, 1006 bp, Gossypium hirsutum
  Clone ID: GOSHI-09MAY01-C90514_1
gtttttcactgtgtttgtgcacctctttacaggtcactctcccaatttcttcttggcagatcaacttactagccaggttcaagcatttagaagcctggagttctacatttgctactatggttggggaaacttcgaaagagacaaacacttgtgaagaaagtgaagtttataaagtgctttacatagttgttgccattattccatactggttcctttttgttcagtgtcttagacgtttggttgaagaaaaagatacagcacacggtctgaatggtctgaaatacttctcaacaatcaccgcggttgccattagaaccatttattcacaccagaagcagaaaacaaaaacatggctggtcttggctgctgctacttctggtattgcaacaatggctagcacatactgggacatagttatagattggggtcttcttaataggaattcatcaaacccttggcttagagataagctcgttgtaccacacaaaggggtttattatgcagccatggtgttgaactgtgtattgagacttgcttggacgcagcaagtgttgggcattcaaactgtgcctttcctacataaaacagctttggttgcagtagtggctagcttggagatcattcgccgcggcatttggaatttcttcaggttggagaatgagcatttaaacaatgtgggaaagtacagagcattcaagtcagtgcccttgcccttctactatgaatacagtgcagataagagtacataaaaatggatacttgtgcccggcacgattactatggtaatattttggaccacattggtttgagcgtattttgtttttcatgtaaaggtttgagaaaagttatagatagaaataaacaatttttttataagcaaagagtatataatagtcggcgagtgaaatttgagtcttgtctgttatttataattttagtaatttacattgtatattaaaaaaaagaatatctaataatagtcatccaatgaaattttagtttcagt

SEQ ID NO: 18860 - DNA, 815 bp, Gossypium hirsutum
  Clone ID: GOSHI-09MAY01-C90474_1
gaaaaaaggaagagagaaaagttcaatttgaaagagaaagtttctaatatcaagtatggtttgacacttcgacggaggctatttggcaggaagattcagtcaatggtggacacatatggtgcctatgatggtcctgtaaaagatatattgagtggaccaacagttataaacttcagcgagaggcatgagaatcctccgggggggccgcccagcccagcatctgtttgcagcagcacaaatgaagaattttggaggcaagtggattatcccagcccgatatcaacacctgatgtgactttaggagaagaaaatgcagtacaacaggttttcaaagagatcagttctaattggagggaggggaggaggcaacttaatgaactcgagtctgatggagtggatgacgtatcaattgaagaggagtctactgaatcagacataggggatatagaggaccacccagaaggctatgttaggggcctgcctgttgcttctggtttatatggtggaatcatgtgacaaatccttaatctagatgggaacccgttagcgaagcctaattggtgatgctgtcctttgaaccagttggaagaattcttttagaaagttgggcgcggggattgttgaggaggataagaaggtagatcgaaaggtgttgctcgatttgttgaatgaagcactctcaaccatacttgggcccccagtgaccctttctcggttcaggagaaagcttgttggttcctccatattgccgcatccacgaggaaggaagttattgaattcagtgtggggaattatccaaaccaatttatatccta

SEQ ID NO: 18861 - DNA, 1015 bp, Gossypium hirsutum
  Clone ID: GOSHI-09MAY01-C90264_1
ccaaaactctcatgtcgtgtctctcccttctatggcaacaagagttctctcatcatcaccgaagctcctcaacaacctccgctccttcatcaagcctctcaactccgcctctgctgcttccgcctcacccctcaatttcgacgaaaaacctgagctttccaccgtcgagaaacagcacccaattgcaacaactcttcatcaaccaaccacaacccttgaccttgatgaccaccagaagcttttcgcttcggttccgacgttgaagcttttacgttcgtcggtcaatctcggcttggctgccaatgagacgttcgtcgatttcgggatgtgggttatgaattccaggcttatggaaacgcctctgctacgtgacatcgtattgaaaaccgtcaaacacaccttcttcgaacatttctgcgccggtgaaacaacgacggaggccggcgagtgcgtgaggaaaatccaggaggctggtctgcgagggatgcttgtttacgccgtcgaacacaccagcgataacgccggatgtgaccggaatttggagggcttttcacagagtgtcgagttcgccaagtcacttccaccttcatctgtaagctttgtgatagcgaagataacagcaatatgtcccattagtctactaaagagaatgagtgatttattaaggtggcaatacaaagactcatcattgaaccttccatggaaactcaacacattgccaattttcaccgactccagtccgttgtaccatacactccaaagaccccagccattaaccccacaagaagaatcggatcttgagttggcacaccaaagactgttaaaactttgccaaaaatgcacgcagtacaacgtgcctttaaccattgatgccgaagacacgtcgattcaacccgccatcgattacttcacgtactcctccgccatcatgtataataaagatgataaccccattgtctacgccacgatgcaagcttacttgaaagacgcgagggagcggctgtttaacacggcg

SEQ ID NO: 18862 - DNA, 766 bp, Gossypium hirsutum
  Clone ID: GOSHI-09MAY01-C91844_1
gtcatacacaaaacttgattcattcaattgtttaagcacaaaacagcatcaacaacctcacacaaacacaataacaaagacttgctatcaagggacctaaaacatcacaatggtcatcatttgaaggggcttttttgcacccaattaggcaatgaacatttagagtcaaagctaagatccttcaaggtttgctttgactttataccctttagtgttggggatctctgctcataagcgttaggcttgcttgtaacagaagatataagacacaacttgttcttatatggtgaatagctttcggattgagtatcacaagttcctggccttagctttggtgaactcattgatcttacctttgctttagtagattgtgttgcagccatgtaagttggaactacaggagatgtaataaaagaactatcttctcctaaagaactctgctttccatgaaatgatcgtcgtcgttgaacccgtaccggagaatccaccccttctgcatcacaatgatactgtctcgaaaaagtcttgagcctcgtaggcttgcggttcgaagtccaaaccgagtctatatcttcgacttcaacatctttacttttagtatctacccattggtctaaccagtacttcaatcttccattacaattgtcccatcttgtttgactgttggtatccaccttaagaatcttatctttcaaagttatcaactctttgttctcatcatgttgttgccaagtgcttctaccatttggaatctccttgcacaaac

SEQ ID NO: 18863 - DNA, 422 bp, Gossypium hirsutum
  Clone ID: GOSHI-09MAY01-C91834_1
acaaagaacaatatttacttgcatttctcagcaaaacaaaaggaataaagtagttcgtcaatgtgaaagagctctctttacaaatcttgaagtattttgatgacgaatttctgtttctttagagaaatgaaatcatgactttaataacagaagctctcgagtgtcttttttttactcagttaagaaaaacaactgtacatgaatgtgtaagctgaccatatattccgagctgctgttggcattgcttctggcaaacaatgggacaccttgctctaaatttacagcccaacggaatgtgcttcgattttgtaacaagccacgagcaatccaacggaggatcggcatctcttagcaccatgcgaccttttcgagtgaatataagatattgtgtctagttaaaagctgatctttgtgcatttgac

SEQ ID NO: 18864 - DNA, 521 bp, Gossypium hirsutum
  Clone ID: GOSHI-09MAY01-C91504_1
gctaaggcagaactgaaacgtgtgctggaagacatctcacaccagtccttacaacttcctggtgggactcaacccggcagataccaagttttgtagatgtctgaggactggagatgtaagcctattattttcagatttgggagcacgttgttttgggttttgtgcattctgatgcattgccttgacctcggattcactagtcctttagtcaattttatatggatggtggtttaaatcctgcttctgagtgcttgctcgagaaattggtgttaactgaaagtcaaatcatggaacaagatgctttagttccagaaccatatgatatgatgaagtttcttttctttatggtcaaaaagtattcgatgatgttcctatactattaaattactcttttgatgaggaatatgatgtattttttttttcttttttcatgtcttaggtgttactgataacattttgctccgtaatgcgaacttccatgctatctcaagaggatcaatctgagattgcatttttggttt

SEQ ID NO: 18865 - DNA, 834 bp, Gossypium hirsutum
  Clone ID: GOSHI-09MAY01-C91394_1
aaatcttaacaaattcaattttatttttgaagcatggagactacaagagagccttttacatctcaaattcaaaaaataaaaaaaaatgaaaaaataattatatttataaaattataatagcaaatgctctagcaagtcaaagcagaaaagctttgaggaaaggataatttacatcttaggttattaaacttaacatcaattttcatataggacacaaatcgttaatttcatcgaattttatcatcatactttttttttattaacaaattaagtaatttatgttaatttcgttaaataactttaatgtcaaagcaagctcggaatgtatatcagaatgaagtttaccgagtcaaaattttccattaaaattacttaatgaaattaacatacagaaattaatttattaataattaaaattgatcgacttaattcgataaaattaaaaatacgtgacgtacatgataattgatgctaaattctgtgacctcaaatgtaaattacccgggtaaggaaaaattcaacccctggaaaatgggttacttggatggttggtgtccggggcattagaagcattattagtagcattgttcattcccaaagtgttctttactgcttcagcagctccttgtgccatgttcttcatttgctctcctgtctgttgaagtaagttggaggcctgagaagtataactagcattctgatcagaagactgagagttcatggatgtttggctcatcttctcatccttcttcatctgagcttgatcagccatttcttcaaccttgtctgtaaattctgaggtgtatttggcttgacatctttttttaatcaaag

SEQ ID NO: 18866 - DNA, 576 bp, Gossypium hirsutum
  Clone ID: GOSHI-09MAY01-C91364_1
ggcaatcatgctatcattaagtcagttaatatgcaagtatctgtacacctaaaactatgattttgaagtttttagttttagaaaataataagctaaaatacatatttcatatgacgataacaaattagtatgtaatgggaccctttgttattcataaacaaattcaaccagccttttgctcgaaaatctcaaacttagaagacaaagtagccggcaacagcagcagctccggtgacagcagccgttaccccaaccatggttgcaccatcactgctaggaggctggccagtagcaacaccactgatagcaccagcaaccgcactgccaacagggccttcaactgtaccaacactagagggtgcacctgcaactttaccaatgtgtccaatgtcaccattactgtcgggtgtagcggcaacaacggtggtggcggcggtcttgatgtcagcagaaaccatcacgaaaagggaaattaagacgagagtaagagcaaggatttggcgtgccatttgttcttctataaggttttatgattaacaaaagagattttcctttttcgataatgttaacaaatag

SEQ ID NO: 18867 - DNA, 462 bp, Gossypium hirsutum
  Clone ID: GOSHI-09MAY01-C91324_1
ttttattctgtccgatttctttctttcaatgggttttatcggttcaatccgtggaaccatttgtttacgacgtcaactttgctggagccgttggagatggagagagtgatgataccgaggccttcaagaaatgcatggaatgttgtctgttgttcgcatgtccctttagggatatttcgtgttccttacggacaaaagtttctggtgcaacccttgacttttaatggtgaatgtcgaccaaaaaatattaccattcagattgatgggatactcattgccccaagtgatccatcttcatggaaatgcaatgatgcaaactgtaacaattggataacctttcaacatttttgatggccctcgtcattcaaggaagcgggagccttcacggtcaaggacaaaaatggtggcaaatgggttgatgcaaaataaagtgctttgttcatttaaaaagcagcgggtttt

SEQ ID NO: 18868 - DNA, 587 bp, Gossypium hirsutum
  Clone ID: GOSHI-09MAY01-C91264_1
actggctaccaaatagcagtaataattctagctttggggatgaaatgtctgcacgtggtgttcacgtaccgaaaaacggaactgcaaatatatcatcagaagaaagtcccaagtctcgggagtgttatgatgtacttttgtattttggaatagtggattttttccaaaattacagtgtgatcaagcgaatcgagcacgcgtacaagtcgttgcagttcgaccgaaagatgattgcagctgtaaacccgaaagcatattcgtctcggtttcaagaattcattagtgacatatttaaagcggacgacacgcccagtctccccaccgagctcacaaatggatgcagataaaaaaggccatgcaatggagtaggttttgagcatgtccagaaattatggaagatgtaaccatgtagacaaatattctgtaaggttgagaattatcccttgattacttgaaaatagaaacaaaaatccaaaccagaaatttatagtttagttgcttgtgcacgctgagcttctgattaaatgaagcttttctataggtgcaatgtatcccaatctctagttttcatacagaaatgcaaacta

SEQ ID NO: 18869 - DNA, 556 bp, Gossypium hirsutum
  Clone ID: GOSHI-09MAY01-C91204_1
accaaaccctcaaaccacccactaacctctacacggtatccatacaccaaatcaattcaacaggctattcaacgatctaagcttggatatgacggttgggacgactgcggtgacattggcggtactgttgtcatgtcctgtcgccatgcctgatgctctatgctgatctcatgatgaagaacactgataagacttctgacagcattttataacaccaacatacaggatcaacatcccatattgttacctttagaaatacgatggtaagatgggcagacttatgagcaatccaattggatattcaagatcataacatggatcataacacaggaatctgtgaccaatattatgctcaactatgttatgaactaagtcttgtgtctaacctactgtctcacctaatatataagctcatatatatacttgcttttataaatgcaaaaatatccaaaatcttatcccaaactttgaccatgactgcaaccatgcctgcaactgaatgaataattgaatgaaccacctttgaatgcatctttgattgcttagataattcata

SEQ ID NO: 18870 - DNA, 655 bp, Gossypium hirsutum
  Clone ID: GOSHI-09MAY01-C92904_1
tattttttgatttaattacttgattaactaagaagttaagttattcataaaatattaatatataacccaatcaaatggactttagatatgagactcaaatttatattcatttatgaaataatgttttttaataacttctcgcttaactattatataaacaagaaggtctgggtcttatttatattttaatagttttctatttatttttttcccatatatatttggatttacatatacttgcattttctatatattttttacatatttttatgatgcaattatatgaaataaagcagagatgggacctacggcagtggaaggtagaaaatgcgagtctccaagtcataaattcaaagggatgtgcatgaatcgtgataactgtgccattgtttgccagacagagggttatgaggatggcaaatgcgaaggctttcgtcgtcgatgcatatgcattaaaccttgtttttaagcaatctattaatatttcatcatccctgaagattgaaccttacacatgttgatatgggctcatgagtaaccagaattgaaagggcttgatattatcaacataattttgtcatagaattaattagtattttaaataatcttttgtgatgttaatgtcacatatataatttctttgcccacgcggccg

SEQ ID NO: 18871 - DNA, 491 bp, Gossypium hirsutum
  Clone ID: GOSHI-09MAY01-C92554_1
tggatgcacaacggcttgtgaaacgggcttcgtacatggaattcaacgatgttctgaaatctacaagaacacaattagaacgagagctctcactggaagatgtctccagtgtgaaagatttaccggcctacaatctcctgagaaggtgaccacagtcttgccttcgaaaaatggatgtgtttcatcattcaaacaatatttgtcatacataattgcttggtagatgagtaataaagcgaagaaaattatacattcattgtagaaatggaatatagttcatggaaagtgtgagaattctgcttttagatatacataatgttgacttaggaagggagatttgtatatcagaaatcaagcttcaagcttcaagcttcaaccaaaatacttatggccattacctgcgtcaccccaaccctaaaaatgttgattttctggtttatattagtctaatattacttcagtgatatggattttctagctctttaaaaaaa

SEQ ID NO: 18872 - DNA, 475 bp, Gossypium hirsutum
  Clone ID: GOSHI-09MAY01-C92544_1
tccagggaatttctccatcacattacaactcatctttatggaatgacccaaaggcaaaagggtgtttagggcaagagcagccattgttagggtcaagctatccaggaggtgttccacaagctttaggtgtactgaaaagagtgttgagcacagtgagaaagaaggttaaattgcttgatataacggtgttgtcgttgctacgcaaagatgggcatccctcggtgtatggatttggagggtcaacaggattggattgtagccattggtgtttagctggtgttccagatacttggaacgaaattcttttcaatcttattttttgagtacattgttaatttgttaaatttagctaataattttcggggaaagagataataatgttataatgatcaatgcttgatttgattattatcgagacttaaatggtggttgtagtttcatgtcattagggggtttctatttcaattttttatac

SEQ ID NO: 18873 - DNA, 882 bp, Gossypium hirsutum
  Clone ID: GOSHI-09MAY01-C92664_1
tgttcttccacgcgtccgcccacgcgtccgccggcgcgttcggtaaaagaagaaattgaagcctgcggaggagaaaaggcggtggagtggaagcgaataatggagagaagctttgagaggatggatatggaagttcaacaatctacggtggactccgtagagaatccgaattgccgatgcgaactccaaactccacagtgcgatgccgtcggatctaccgctgtggttgccgttgtcactcaggataagatcatcgtagctaactgcggtgattcccgcgctgtcttgtgccaaaacggcgtcgctcttcccctctccgacgatcacaagccggatcgacccgatgaactgctccgaatcgaagaagctggtggccgagtaatttactgggatggagctcgagttcttggtgttttagccatgtctagagcaataggtgataattatttaaagcccttcgttataccagaaccagaggtaacaattacagagagaagcagcaaagatgaatgtttaatattaggaagcgatggattatgggacgtggtgacaaatgagacagcttgtggggtggcgcgtatgtgttgacgcgctcataagccagcatcgccacctatggcaccggacagtgacgcggtggttcgcggtgctggagtcgagagttcggataaggcttgttgggatgcttcaattttattaaccaaattggctttggctagacatagtaccgataacgttagtgttgtcgttgttgatttgaaggaaaatcaatagttataaataaaattagaattttagagattactaatatttaactaagagaagaagaaaaagtattaatgaaagaaaatattgtattttttgccattttaagggaatatt

SEQ ID NO: 18874 - DNA, 494 bp, Gossypium hirsutum
  Clone ID: GOSHI-09MAY01-C92044_1
aattaaattaaattttctattaaaattttaactttaaaactaaatataaaaattaatgaatttaagtttaatacataaacattgattcaatatgtaatgtaatacatttaaatttaaaactggtgacagcaaatacagcagctgctagaaaccctacaacaagaactgctgcggcagtaattacagcagttaccattccaagctctaccatcactctgctggatatggaagatgccactggatgaggatactctggtatttttcccacccaagacgtcatgggcatctcaatttcatatcgttgtccagtgtactctcttaaaagatcactctcattcaatctcattgccctttttctgaagctcagaaattgattcaaccataagttggttcacggacgaatatcactcccatttgctcgcaatacgttctctcacatagccaaaccagtgtaaaggaacaataaccatgcctgctacttatgtcatcaatac

SEQ ID NO: 18875 - DNA, 705 bp, Gossypium hirsutum
  Clone ID: GOSHI-09MAY01-C92004_1
gcccggcccataaaccggataaaacaaacaatggtccaaaaaaataatgtccagattacaaacaaaatacagcccaatgcttaacaaactaagcccaaaattaaacaaacccctaacccaactagcctaagcctagaccaaaatatgcctcaaaccccaaaaccctagcctttagcctctatgcgcacagaagcctcagccgcctccgagccgagccacgcccacacacctccgtccatgcgccgcgccaagccgagccgtgccacgtcctcgtaggatacctgcaaaacacacaccgaacgcaagccgacaaagaggacagaaacttcccacaaaccacgcccgagagaaagcagagaaggcagaaaaaaaggcaaaaatcgaaagaaaaattttgaaaaagaaaaaacaaaaaggggcgatttttgtatttttttttggctatataggccattaaattgaatctgtaatgggggaagagagatactgtaacaaaaatcaatacgaaaggtttttttccccattctgtcttccgattctttttttctttccttttgtttaccattacaatataggagcagatagataaagaaaagaaaagaggggagagggggacgagcctgacatctgcggacgcgtggcggacgcgtgggcggacgcgtgggcggacgcgtgggtagttctagatcgctcgcgatctagaac

SEQ ID NO: 18876 - DNA, 597 bp, Gossypium hirsutum
  Clone ID: GOSHI-09MAY01-C92294_1
gcaaattcacttcacggttgaattttggacgcttaaagcaattttgtgttaaatctctttcagtagttcaaggtccctctctcctcaaagtataatgtacagatgcaagctttaaatgcaacaagatcgtgaagctaccaaaacctgtaaaatccctttgcttagtaaccaccaagggtcgtaaagtgcactagaccattagaattattagttcagttcctcacaaaacttggaattctgatttggttccttaaacatctgtacaactgtgtctaccgaaagccgatgatcttccccttgatttgcagccaagacattttttgccaagtaacttctcaccactgcagttcagtcaagcattagttgatttacacactcaactctgtacaagattcatgccgtacggcagcaacattcttattttccgggaatattttcacctgaataaatggtctattgaacatctaactggaatcaataaatggtctattgaacacctaaaccccgatccttggcaaatgacctacctgccacctcacttccttgctcttcaaccttattcctcgaatttctgttctggttccatatttgatccat

SEQ ID NO: 18877 - DNA, 1315 bp, Gossypium hirsutum
  Clone ID: GOSHI-09MAY01-C93984_1
cggctcctttcgtccatgcctgtctcaaagccagtggggttctcaggttaaaatccacaggttattgcttgaatctcgatttcgaaccagaaagaaagaggaagctgatttattctttgtaccagcttatgttaaatgtgttcggatgttgggtggccttaatgacaaagaaatcaatcaaacttatgtcaaggttttgagccaaatgccgtatttcaggaggtcaggagggcgtgaccatatatttgttttcccaagtggtgctggagctcacttatttagatcttggtcaacctatataaatcgatctataattctcactcccgagggagaccgtactgataagaaagacacaagtgcttttaatacatggaaagatatcatcgttcctggaaatgttgatgatgggatgacgaaaacaggggctactgttttccagccgttgcctctatctaagagaaagtatttggcaaactatttaggccgggcgcaaaaaaaggttggtcgtcttaagctgattgagcttgcaaagcaatatccagataagttggaatgtccagagttacagttcagtggtcctaacaaattgggaagagtggaatattttcagcacctgggcaattccaaattttgcctcgcaccacgtggagagtcatcttggaccctccgtttttatgagtcgttttttgtggaatgtgttccagtcatcttatcagaatcaagtcgaattaccttttcaaaatgtaattgactacacagagatatcaatcaaatggccatccacatcaatagggcctgagcttctggattacctggcttcgataccagatgaggtcatagagcagataataggtcgtggcaggcaagtaagatgtttgtgggtttatgctccagactcggagccatgttctacaatgcgagcgttaatgtgggagcttcagaggaaagtgaggcaatttcaccaatcagctgaaacattttggctgcataatggatccgtagtgaataggaatcttgttgaatttgcgaagtggaaacctcctatgcctctgccttgaaaactggctgcctcgttctggttggcacagtgctccgttttgcttcaaatttaacacttgctgtcacaatcctgaatggctgttgggattcactgtttcttctataggttgtagagcaattcttttttcaccttattgttggcaattttaaaacaaagtattgcaattctagatgttgtaaaaatgtcacgaaattattttgtacattatgtagtgatgaaagttgataatgatgatttagctgattgttacaattt

SEQ ID NO: 18878 - DNA, 966 bp, Gossypium hirsutum
  Clone ID: GOSHI-09MAY01-C93514_1
cgtctcgtaaaatcccaaatctgagggaaaaataaaattaccaaccattttcttttctcattcgtttccagaaaatggttgatttagattggaaagcgaagatggtctcttccgatatcccaaacaaatccccaaaactttctaataagcttcaggtttcgattcctacgccgtttcgcttctccaatatttcatctccactttcgacttcagcttcggcttcctccacttacgattattatctccggctaccggagttgaggaagttatgggagacaaaggagtttccagcttggcaaaacgagcgcgttttgaagcccgctttgcatgctctcgagatcacattcaggtttatttcgattgttttgtctgatcctagatcgtattcgaaccgtcgcgaatggaagcgtcgactcgagtcactcaccacgagtcagatcgaactcatcgccatgctttgcgaggaggaaaacgaggacaaaacggcagctggcacggcgccaatcgtcgatctaacttcttcgaacggagtactagctcgtgagagcagctctgccgaggtctggaagcttcatggagaaacaacggtggtcagccgaaccagcaaagacagcttgttgcctcgacttgccacgtggcagaaatctgaagacgccgcgcagaaaatcctttacaccattgagtgcgagatgaggcgttgtccgtacactctaggtttaggagagccgaacttgtccggcaaaccgagcctcgattacgacgccgtttgcaagccaaacgacatccacgcgcttaaaaggagcccgtatgaccactgcatcgagaaccacgagaacgcaacgcttttcacgacgcatcagatcctggaatcgtggatccaaacggcgaaacaagtactgaaacgcatcgcttcgaggattgacgctgaaatcttcgaaaccgccgcgagcgattgttatttgatgg

SEQ ID NO: 18879 - DNA, 981 bp, Gossypium hirsutum
  Clone ID: GOSHI-09MAY01-C93494_1
gcgttcgcccagcgtccgcggccgcgtgggggggggcttgcctctttcaacttggtctttcctccagctttccttcttcctaaaattattaatcattttcatgggtgttttgcgtttttgttccttcactggcaaacacaagtatcaggtatccagatatcatttcaagaaacaagcctatgtggggtgtgtgctatccaaaatcagtgtctcatttccttgagatgggttcagcaataaaacatttcgtggagttagttgaacaagcaggaactgtttttgaagttgcaaacactatacggggtttagttgaaaaccattgggaattccctaaaggcattgatcagaatgtaaataatctgaagagaaaaagagatgaactaaatggtcagaaagaagacgttgaatcaagaataaaatcagagctgcgtccgagaaagaaggtcaagaaagaagttgatctgtggattgaaaatgtaaaaaggataaatggggaaattcctaatctcgaatccaaagttagaggtagcagctttttccctcgtggatttcttgttaagaatgttcgtaagaaggaagaagaagttgaagaattgcttgaaaagggtagattttctgatgatttggttgtcaacgatctttcgtggattggtcaggtgttgccaacaccgagcttagtcgttgaaacagtaaaacgtaaaaagaatgagattatgcaacacttcaggaatgacgaggttcaaaagattggagtttatggaatgccaggagttgggaaaacaagtgccgtcacgcttgtcaacaatgaactcttaaaaggtgaaatcgagttcaagatcatagtatgggtcactgtagcgaggaactgtagtgttattgaactgcagaataagattgcaaaggcaatgaatgtcagtatttccgaagatgaagacgaaacttttaagagcagggattgttgtctgaaattttgagtgaaaa

SEQ ID NO: 18880 - DNA, 975 bp, Gossypium hirsutum
  Clone ID: GOSHI-09MAY01-C93484_1
aattagtgtattgtacagcgtttacactatatttttatatattctttcatgctagctttttctaacttttgtttctaatatatatgtcgattggattgtagataattccagttttctggtcgaatagcaagctggatgtaacttcttcttatctatatgtttactactggataagccataagtattcccgattgtcaaaattttcaaagaaagaaacaaacaaaaaacaaaagccgtggtcaattacgtgggatgctttcattcctttttattttcttctttgaccttgtgaacttatcattccatttccaatcttacattctttgcttttaaactgtgcctaactttgaaagtaactagtactgatacaaaatctgggtttctagtttctttatcaattcacacctgttttccctttttttctttttcataattccttgacgttatgcgttgtaagctcgatttataagtttcttctgctaatacactaactataataatagatatcttttagctggctactgcttataaaccttgttagctgattatgggaagagagaaagtagtgatataaaatatattgaaccgtcatgattgcatgtatctttccttctttttcattacatttgcaaaaggtatagtgagaaaccattgatcacaagtagggcaatggcgtgctggcatgtttttcttttttaattgactccaacatttcaacaactctggaattaagaaaaggaaacaaactttggtgaccaagttacgacataaaactactttcaatatacattatggttctaatagagcactacctaatatcccactactttgctggtttccgtttgtgccgtgattgcatgcaaaataccatgcagaactatataaaaatattatatgctaaaaattaatagtgttatttcccttttttgcttttcttatatcataaacctggctaaatttggaattattttgtat

SEQ ID NO: 18881 - DNA, 383 bp, Gossypium hirsutum
  Clone ID: GOSHI-09MAY01-C93454_1
aggtgatatctatggtgttggctatttggggcttcatttcctatgtctatcagcaatatctcgatgactacatgccgaagaccgaaaacaccggtgaaatttctgaagcttgctcttctagcatatggttatccgaacattcagcactgcagggtgcagctgcctatcattgagtcaaagcctgagactagcttttactcaactttctattattgtgttctatgatatgcttactgcaatatatatgcttaatgcttccttatactgcaaaatggaaatgtgttgattaacgtttgtgatcttgatcgggcttggaagtatgatcggttcatattgcagtaagtacggtgattttgaatgtatcatcttcatctttgtggtgg

SEQ ID NO: 18882 - DNA, 410 bp, Gossypium hirsutum
  Clone ID: GOSHI-09MAY01-C93404_1
cggccgcgtggggtgcaactagtggagtgctgggcgtattataccctcttctcatggcggctttcctgggcgtcggtgatggggttttgaacacgcagctcagtgctttgcttgctctactttttaagcacgacacggaaggagcgtttgcacagctgaaggtgtggcagagttccgcgattgcagtcgtgttctttttgagcccagttgtgacatttgcacacaatggtggagatcatggctggtgcgatttctatttctttggtttcatttttattccttactctgaaggtagagaaagcattctcttcgcaccaagttaccaacatgtaatatatttcaaccaagctatggtacaaccaatgtttcttcaaatttgggaaaacttaattacatgctacttaatcttc

SEQ ID NO: 18883 - DNA, 409 bp, Gossypium hirsutum
  Clone ID: LIB3825-008-Q1-N6-E12
ggtgattaattttcttgtaattaatttttcccaaatttgtaagaacattggttgttccatatctttggttgaatatattacatgttggttacttgttgcgaagagaatgctttctcttgggggggggggggggatttaaatgaaaccaaagaaatagaaatcgcgccagccgtgatctccaccattggctgcaatgtcacaactgggctcaaaaagaacacgactgcaatcgcggaactctgccacaccttcagctgtgcaaacgctccttccgggtcgtgcttaaaaagtcgagcaagcaaagcactgtgctgcgtgttcaaaaccccatcaccgccgcccaggaaagccgccatgagaagagggtttattacgccaagcactccactagttgcaccccacgcgttcg

SEQ ID NO: 18884 - DNA, 789 bp, Gossypium hirsutum
  Clone ID: GOSHI-09MAY01-C93764_1
gttgatacgtcctatccacatagaagcttaccctcttccacacttaccggtggatgctacagccgctatcactttggctgcaggaggggaatggttaagtgaaactctcgacgtcttgtttggtaaacgggatgtttacccaggcgccgtagtcttgcctaaccgttcggccggagatgcctttgtatggtatagcaagctgtttagctacttgtatcgatttgccacagtgtggttagatacaatgcgctggcagcctcagcttggcaggatgggaatgaaggtcgaggaagcagggaagaaaaggttattcgctattggctcacccttgtatcaggccttggtacggcctatacatgattgagtcatgacggttttgacaaagttaagaatggatggtacctataaccagacccaaccgttgcagtacttgagaggaaagaaaaaatgattttcttttgatctcaaggctgctatcgattccttacctgttatcctgacgtcctgtatgattgcagggtttttcggaaatccctttccctttgcaacttcctgggcgttcatacttacttctgtagtctttcaattaccatatagtttatataatcaaggctataggtcatcggttgtgacgttcacgaagggtcaatccctcgattttctagttcttggcctctattcacacttacacatcatacgcttgtgtggatagctgctgagagggtgtatggcacgacgaagctttgcgactatgccattcttggcgacggtgatcgccgacgagaaggt

SEQ ID NO: 18885 - DNA, 1158 bp, Gossypium hirsutum
  Clone ID: GOSHI-09MAY01-C93734_1
atcatcgacatggctagtaaagcctcatttgccgaccaacagaagcaagtgcaggaaaatattcataatcaaattaaaagcctctgcactgtaatggatgcaatccttctcgatgtcaacgagccgcaagaatctcagtccaaagctactccttcccgaagtggtctcagttttgctattgggaggaacggcccaactaataaccatcctgatgttcctaagacaaggccattaaaacgcaccgaactctcacagaggttgaaggattccattgggtacactcttgatgtcaaacagtcgcataccccacagcgaagctggacaaggtgtatttttgaatggtgaagctactgttggatctgtaattgccatataccctggtgttatatattccccggctcagtaccgatacatgcctggatacccacgagtcgatgcacaaaacacgtatctgataacgagatacgacgggactgtcatcaatgcccaaccttggggtttcggaggtgaaacacgtgaattatgggatggctcgaaaatgctagatgcaaagctcaacacggttgcaacagagaaaggctcggatcggctttggaaaatgcttagcaagcctttggagagctcgcgagtggggaacggtgaagttttggaacgtaggaaccctttagccttggctcattttgccaatcaccctgctaaagatacggtgccgaacgtgatgatctgtccttacgacttcccgctgactgagaaagacatgagagcttacattccaaatttatcatttggaaacgctgaagaagtaaacatgaggagattcggcagtttttggttcagatggggttcgagaaacagcgagtcaaatggtccggttttgaagactcttgtattggtggctactacagcactttgtgatgaagaagtgttgttgaactacaggttaagtaactcgaaacgaagaccgtcatggtatactcccgtcgacgaagaggaggatcaacggagatggagctaaattcagggatatgaggtattgaaaaggaaattgcagtcagtgtagggtgtagacatataaactaacgagtgtttttgataattttccatgttttttccccattccaataaattctttatacataagattttgaatgattcgtt

SEQ ID NO: 18886 - DNA, 762 bp, Gossypium hirsutum
  Clone ID: GOSHI-09MAY01-C93684_1
aatgtcaagcagttttcattggatattttacaaactggctcattaacctgataaggaagaaacaaataatactcaataagacagtaggagaccaataagtgatctatcatcatcttcatcatatgatccaccacatcgaccccaactgaagactttaatatatgataacacaaaagaaaaacaaatgaactaaaccaattacgcggacaagcattagcatacagaagcaaaattgatttaaaagcagtaacgcaactggtcttcatggaatggaagacctctcatggcaccagccaccatggatgggagccaaaacataaaagtggctcacattgacattaatgccagtccattatccggcatacccatcccagcagccaactcagcatcgagttgagtatgtggtgcaggccccgacatttgctttaaacgtttcttgtgacgtttcgtcttgaaatgttcatccctcacagtcgaattcgcaaaatatcggtcgcagtgtaagcagtaatattgtcccattccaggcaaatcctcatcgcgaggcaacggcttcttctcggtatcactcttctgcagctcatcataaacgaggtcgtcacctttgaggaggaatttgtcacggcgagctgttttgtgggaaaatcttcgcttctttactttcctgcttggacattttcctcccattgtttcctttagattgggatttgggaacttagggttttgcagtaggactcctcccgcgcgcccgaatcgaacaag

SEQ ID NO: 18887 - DNA, 705 bp, Gossypium hirsutum
  Clone ID: GOSHI-09MAY01-C93644_1
gcttccaaattgattgccattaaagttgattatatacatatatatagatagacagatagatagattgatatacttcaactgatgacacttaatccatcttcagtttgaacaaacaaagcattggaagttccgacaaaaggaaaacattggaaagcctaagataatatcaaagagctaagacaagtagctgggagtttcactccatgaagaacaaaagaatcttaccctttttttcagttctgaattgcttctctgaaaccaagttcttcggcaatcatgacatgttttctttcgtgtcgtgtttatcgcaagtgtaaaacagttgaccaaagagaataacaaccgcaaaatagctcatcccattacagtttcgatttgaatctccagtcacttctaactccatcccattcgtctcctttatattccgacccccaacataaaattcttgatttcacctttatggaaagatttggcactcgaaacttttgtagagatggaaagaatgttgattggaaaaggtggttttaaaccgtaacagaaccttaaatgcttggacacgtgatgcaataagatgaagttgtttgttgatggtcatctaaacatcatttctgcgggtgtattctatcggttcgatgatccaaaaactgcttgaacaaagaatggctgatccaaaaggttgcataccatatcatacactcggacgct

SEQ ID NO: 18888 - DNA, 837 bp, Gossypium hirsutum
  Clone ID: GOSHI-09MAY01-C93624_1
ggaacagaacacagaatattattattatgaatttaagccaagttatacagtgtggactgaattgattatggatgctgttcggctcggtttataaaaataaaaaaaccaaaatgttacacattaaccatagaaaaagaacaaaattaaaccattaccaccctaacttattgcccctcccaaaaaaaaagtgcattagtctgaagacgaagagtttcatatgtcgatttccatgttatctatcagcctaaccttgccaaaccaagcagcaatgcaaaaaacaacaggacccttaatctcttccactgacttcaaattctcctgatcaactatctcagcataatcaattcttcccccagcttgagttattgttaggatagctgaatcctttagttctctacatttaacttgcccttctttagcagcagctttagcctttgacaatgacctgctaatagacaatgccttttgcctttcttcaggggagagatgcacatttcgtgaactcagcgcgaggccatcgctatcacgggttatttcagaccccacaatttcaatggcgaaatcaagatctcgaaccatccgttgtattatcctccactgctgataatcctttttaccaaagacagcaacatcaggttccacaatgtgaaacaacttggtcacaatggtggcaacccttttgaagaacacgggcctacttttcccacacaatcctttctccaatctttcaactctcacccatgtttcatgcccactccctttcctccacacatgaaaccaccccattcccatccccaccaccagcacccaaattctcatttccattcttattctttt

SEQ ID NO: 18889 - DNA, 608 bp, Gossypium hirsutum
  Clone ID: LIB3828-021-Q1-N6-E1
gcaattacattgattctgctataattcacttatgagtccacataaatgttaaatgaacacatacataccatgctatttgctctctccgaatgcaatcaaatcttgtgtttgtgataaacaacttgtggttcctactgcagaaagtttagagcggtggttgatgcaactttggaggcccatctgcactgtccgcagctatatctttatagcacagttgataaggtcgttccgtataggactgtccccctttgctgttaacaccccaacagatatgatttgcagctcttccctttagcattgatgaccagctcaaggttcgacattgcacgttaaaacatgttgcactcttttacctacagaagacattgcttccctctcggagggtctacagaggaattcatgctcacacactgagggcataactggtcgaatgctgccggggtttaacggaaaaacatccggtaatacccatccataatttccagaaagttgcaagtggcggctaccttcggaatctgataaacatcgcgcatgtaagcgtgaaggttggtatactcgagcagctttttcttcgtacatttgaacaaaacatttagacaagatcaaac

SEQ ID NO: 18890 - DNA, 500 bp, Gossypium hirsutum
  Clone ID: uC-gsflnu33B011g06b1
ttaaaaatccacagactggtttgtatgctcttttcagggtattatctcaaaggggaattgcaaaaaagatacaggtgattgcaaaagctagcgtgccaataattaagtttgtagaaaagaaaagcggtgccgcatttgatataagctttgatgtggataatggaccaaaagctgctgagtttatcaaggaagcagtactaaaatggcctcaattacgaccattgtgtttgatcttgaaagtatttttacaacagagagacctgaatgaggtatattcaagtggaataggttcatatgctctccttgcaatgatcgtagccatgttgcagaaagttacagcggtggttgatgcagctttggaggcccatctgcactgtccgcagctatatctttatagcatagatgaaagggtcgttccgtataacactgtcccccttctctgttgtcagaaccccacagatgtgatttgtagctcttcccttagcattgatgaccagctc

SEQ ID NO: 18891 - DNA, 564 bp, Gossypium hirsutum
  Clone ID: GOSHI-09MAY01-C93014_1
tttttttttttttttttaacttgaaggggccctgcccaattcaatgaaaaattcctcacaaacaccaaacctgaaagagacccttaagttgaaacttcgatttcttgaccaaagaagctgaatcttccccataagggcacaaggagcacaaatgtcccagatctgcctcaattgccttctgcccaaagagaggaaaccctccaaaaagataagtatcatatctttttaatccctctctagccaaatagtatgctgcatcatttgcatgttttagtacataatggaaaacacatttttgatatcgttcatgtagcaggcctaatttgccccgcccgctttaaaacaaaaaaataataaaccaaataaaaaaacaattcccaggaccaaccaaaaccctaagacccaacaaaaacaaagcctaatggcccaaaatgcttatgcattttcaacaaaccctaggcccaacccattttgggtgccgcttcagcaaacaacgcgcctcccccgcacgccggacgctactaccccgcgatgtgcgctactccaccacgcccggacgctggg

SEQ ID NO: 18892 - DNA, 564 bp, Gossypium hirsutum
  Clone ID: GOSHI-09MAY01-C93224_1
tccgcttttttctgtttctttcttgtggacagtcgcccccgccgtgcgcattgcgcacaaatgtccaggtctcatataaaacacctgtacaagttactgcacgtaagagaacctcatagctgcgttttaagagctcactcaaaaaatggtccaagtccaacacactgtactgatggaaactaatggaaccggggatggactaaccttgaaatcaacccaaatttcttcttcccacggcataggccattgatttgaagtgaccaaaatcttccctcaaactggcgttgaatcaagagcatcttctcattctcttcactgccaacgatcaaactggtcctataagtaacacttgcttaaataaaacatggccaagctttggactgtttaccagaaactcgattgaacaaggaaagttggggcacaagttatgacctgttcgaggggaaagactttggcttttttacattttattggatcaacggtgagagtctgctgaagcacaggacagcttatttgcgatgctgctcttgacctcttgggcgccctgttaaccgtgctggaacg

SEQ ID NO: 18893 - DNA, 687 bp, Gossypium hirsutum
  Clone ID: GOSHI-09MAY01-C88444_1
ggtaatgaaatcaaacttttttatttattcagacatggggatgtttgagaataactcaagaacgggaatgtaacatcatgtttttgaattcttgaaaatcaaccatgccgtctgaattggtgtcgtaataccaaatcatgctcctgcagtcttttccactattttcaccccacatacccagtcttcccagcacgtattcaagctcctcacatccccccaacccatccccattcaagtcaaacactttgaaagccttcgcaaggtcactgtcttcttcttcaccgccgccgtgaatgaccaattcctcctcctcctcttcgtcaccaccatgtgccagtgggttcgagatggattcataaaagaacaagaattcatccaagttcaaacatggttttcccactaagggctccaattcttcaaggctgaattggacagacccggttctcgtggagcaaccaattcagctcctccagactaacgaagccatctccattcttgtcgagcttctcgaatacgcgttgcaagtcggtcttactaaggggggacattttaccaccaaagaggatatgatcaccattaacatcaaaccttgaagctttacaaattaaggcttcttgcagatacgatgatgatgatgaagacaacataatgatgaagggggctggggaggttgctttgtatttgtat

SEQ ID NO: 18894 - DNA, 586 bp, Gossypium hirsutum
  Clone ID: GOSHI-09MAY01-C88784_1
gataaaacagagtattggccgggatgacggaacagtttcatgcacttctctcgttgataaagttaagaaggtggtgaccaccttcttaaccttttcttcatgagagaagtggcattcttgaaccagttgccagcggaagctacatgttcgtcaggtaaaagcccgcatgacgtcgctaattacgtgcaaagaatcttggccgctacgttagggtttgaatgcccaaattttccaaggaaagataaatacagagtattggccgggaatgacggaacagtttcatgcacttctctcgttgataaagttaagaaggtggtgagcacatttaaaccttttcttcaatgaaagaaaaagaaattttgttctgctaatttataggaataaatttaattaattgggtcttttgggttgtaaattattgaatgttttttgttttggatttttttatttgtggaattgttgaataacttgcaaggatgattgatgttaattaagtttatcatttgtggctaatgttgttcgagcgttccattggaataaatgtcatattacgcatttaactggatcaagaatgtcacttctttca

SEQ ID NO: 18895 - DNA, 657 bp, Gossypium hirsutum
  Clone ID: GOSHI-09MAY01-C88714_1
gttttaattgcctccctgttgctgctctaattgatgagaagatcctttgcatgcatggtggattatctcctgacttgaaaacattggatcagatccgtagcatttctcgccctgttgatgtgccagatcagggccttctctgtgatcttctttgggctgatcctgataaagatcttgatggctggggagagtttgattggggtgcgccatatccatctggcgctgacataggggctgaattccttaacacccacgactcttgatctcatttgccgagctcaccaggttgtagaagatggctatgagtcctttgcaaagcgactgtcggtgaccctaattctccgctccaatctactgcggggaattcgataatgcaggtgccatgatgagtgtggatgatagtttaacatgttcgtttcagattcttaaatctttagagaagaaaggaaagggtggatttggcaacaacacattcagaccaggaaccccacctcacaagggtgggaagcgctgagtaagaccgtaaagttcaatgttggatgaccaatagaccaataggggcggtcttgtctctacttaatgatggtgtttttgttgaatgaaactgtgatggctggctggactattgtttggtgccaaaggaaattggaaggtaaa

SEQ ID NO: 18896 - DNA, 906 bp, Gossypium hirsutum
  Clone ID: GOSHI-09MAY01-C88154_1
ggaaaaacctcgcaaacttgcaggcagagttagatactttgagaagaactgaggaaatggttgaaggtcaagttgaaaagcatgaaccaatgaatgaaaaccctgatgatgagctctcatcaaccatagttgaactaaatgaggcttgtccaaagtctcctcaagatctgaaatctgagaataaaaattacggccatgaagaattggaggtcacacgtcttgacagtgtgacagaaaaggaaataccaaatcctgaaatcaagcaccacgagaaccagtttcgaacagactgggagatcgcagctgcttcagaaaagttggccgagtgccaagagactatattaaacttgggaaagcagttgaaagcattggcatctacaaaggaagcagtccttttcgacaacattgtttctagtccaactttgactgcaatcccaactccaccaaggaagaagatgatgagccaaagatcatctctactagatcagatgatagctgaagataatgctgaaacgaatgatcttgcatctcctaagtccaaagaaaaaggcaatccgacttcatctttcatttctaacaggacggtagcacctccagacagcattgctggtttaagtggagagaaaatccaggaagacaatgctgcagtgaaatctttagcaatcgttcctagcaaaaaacaaggtgggagtttatggaaaaagctcttgtggaggaaaacaaaaagtaagagcaagaaaacatctctcccccctgcttcatagacaaaaataataatgtgttgacgaaaaggggctctcgagcttttgtcacagttttttaatttttggtttttctttcaaattttgtgtggaaatgaataaaattccagcttttcactggtaaaaaaaaaaaaaacaccaaacc

SEQ ID NO: 18897 - DNA, 923 bp, Gossypium hirsutum
  Clone ID: GOSHI-09MAY01-C88394_1
atataaaagatgatctttacttagtaaactttttcaaatatacaaagagaaaaagaaaatggtgcatcataatttaatacttttatgacaaacaggcaggcccccgtcaacagcacatttcaccggttaacttttaatttactttccagaaatctctaatctggcaaagtcattatgagcaagtatttaacaaacctttatatgcaaaaggcacttacgttattacccaagagtatgtgtattgaatcaattactgtggtaaactgatggtcgaacgtggaacgccatctaccaccacccagcatcattcggaggagaaactcaattcatcgatagctacggacgattctgtgttgatcacattaacagtttctttcttttcagtcggatctttggttacattttcttcttttgcttctgctgcagttatacactcctggaatctgaaacaacttgtgagatggtcgtttgttattcccgccacttgcatgaaagagtagatgactgtcggccccacgcttcggaaacctcttcttacgagatctttgcttatgacatctgctttgggagttttaaccggaacctgtcgaggatatctgaatctgctaactataggtttgggggtcacgaaactccaaatatacttggcgaatgacccaaactccgctataaccttaaatatttggtgggcattctcaacgataggacgccacttcaattcccataacaaggaacttggtggacttccaagagctattaacttcttctcaatcaattttgataccgcaagaaggtccaaattccgaaaaacctcccttaatatggggcttttgcttaagaaaaccagccatggaaggtcaaaccatggccccacgagtaccaataggttgaaccggtttttaatattatggaccggaacctcc

SEQ ID NO: 18898 - DNA, 797 bp, Gossypium hirsutum
  Clone ID: GOSHI-09MAY01-C89824_2
cggcagaagagggaaattacggttgaaggtcgtgatgttccaaagcctgtgaagagttttgctgatgtgggatttccagactatgtgctgggggaagtcatgaaagcagggtttgttgaaccaacagccatacaacctcaaggctggccaatggctttcccggcccccggtcttattggtattgctgaaacaggatcacggaagacccttgcctatttattgcctgcaattgttcacgtcaacgcacagccaattttagctcctggagatggtccaattgtattagtattagctcccacacgtgaacttgcggttcaaatacaacaggaggctgctaagtttggtgcgtcatcaaggatcaagaatacatgcatatatggtggggttccaaacggacctcaagtgcctgatctccagaaaggtgtcgagattgttattgctacaccacgaaggttgatagatatgtgggattcacatcgcaccaatctgcgaagagttacttatttagtcttgggatgaggccgatcggatgttcgacatgggggtgtgagcctcagataccaaaaattgtttctcagatccctcctgatcgtcaaactttatacttggactgcaccttgccccaaggaggttgaaccattggccaaggcagtttctctgccatccgtgcaaggggataattggatctgcggatttaaaagctaaccatgcaatttgccaacatgttgacattgtttcggagagtcagaaatataacaaattggtgaagctgctggaggatatcatggatggcagca

SEQ ID NO: 18899 - DNA, 1138 bp, Gossypium hirsutum
  Clone ID: GOSHI-09MAY01-C89824_1
gttagccgctccggcgatcctgcctcctaccgtgaccgtagaagtgactcagggtttggtggggcttcagcatatggtggttcagggcggtccttgtcaagcagaaaggactatgatgctggtgaaccacctaggaagttggatttggatggcttgacaccatttgaaaagaatttttatgttgaatctccttctgtggcagcaatgtctgagatggaggtggaggaatatcggcagaagagggaaattacggttgaaggtcgtgatgttccaaagcctgtgaagagttttgctgatgtgggatttccagactatgtactgcaagaagtcatgaaagcagggtttgttgaaccaacagccatacaagctcaaggctggccaatggctttaaagggccgtgatcttattggtattgctgaaacaggatcagggaagacccttgcctatttattgcctgcaattgttcacgtcaacgcacagccaattttagctcctggagatggtccaattgtattagtattagctcccacacgtgaacttgcggttcaaatacaacaggaggctgctaagtttggtgcgtcatcaaggatcaagaatacatgcatatatggtgggggttccaaagggacctcaagtgcgtgatctccaaaaggtgttgagattgttattgctacaccaggaaggttaatagatatgttggattcacatcacacaaatttgcgagagttacttatttagtcttggatgaggcagaatcggatgttaatattggggtttgagccctaaatcaaaaaatggttttaagatccgcctgatcgtcaaactttatctgaagtgcaacttgcccaagggaggttgaacaattggaaggcagtttctttaattccgtcaagtgatattggatctgcgattaaagctaccatgcattgcaactgtgacttgttcgagagtcgaatttacaatggtgagctgtgagattctggatgcacagatttgatttatgatccaaaaagtggaccaatacagcactccatgatgtgcgtcttatcatggtaagcacaaggttggctttaataactgagaccttagctgaaatttccctgggtatgaaggcatgacattgatcggtttggatttt

SEQ ID NO: 18900 - DNA, 661 bp, Gossypium hirsutum
  Clone ID: GOSHI-09MAY01-C89574_1
cccagcgtccgcccagcgtccgcccagcgtgcgcggacgcgtgggaaaaaaatagctcgagaatcgagatcatgcaccaatcattgaatcaaatactcgaataccagtaagtttttattttcttttttacatatagatcatgtcttacaaagttttctaatcattgaatcagggggggggtaaagaaaaggaaaggtttcctttagtttctttgatcaatgagcttaccagggttcttcagtatctgtatgctccaatccatagtcgccatcacttgtggagctttaatgatgttttacactaaggaagtcacagttttgggtcacggtcatgaaatagcaagcaaactgcaaggttcaacgcctcatgatcaactcttgatccaaacctcagaatccttttctgggttgcttttgttcactattggtttcgtgttgttcatggtggcattcgttaaagatggagagttccaaagcttctttgctaaagggtgtgtgtcggttcatgtttctatggctacttggagagtttgttttgaaggaaagcttctgggttttggtcatgaatggcttagacaagctcttggggatattgctttggcactttcttgggttttccttctggtgtgttcatggagggaaaaatatgattagtttgattg

SEQ ID NO: 18901 - DNA, 945 bp, Gossypium hirsutum
  Clone ID: GOSHI-09MAY01-C89684_1
ttgtttcagaaactttatatctgggtggggggtgcatggatagatacttatctttaaatcctctcaatagacaaaggctgggggggttgggtgtatcttcaatgcttattgcctcaaagttgaggaaatcactcctccaaatgttttttatttttgctatataactgataatgcggggggggggggatgagtggtcaaaatggctccgaatttacttaagtcctctgaagtttgaattgggcaatcctacagttaaaacatttttgaggagattcactagagttgcacaagaagattacaaagcttcaagcttgcagctagagttccttgggtgttatcttgcagcagttgagtttgttggattatggatgtgtaaaatttttaccttccatggttgctgcttctgttatctttcttacaatgtttataattaaaccgaagtgtcatccttggagctctgccttgcaacgaaacttgggttacaaagcatctgatctaaaagagtgtgtccttatcttacatgaattgtatttgagtagaagaggagattcacttcatgcagttagagaaaaatacaaccaacataagttcaaatatgtggcaacaattccagcttcactggagattccagcttcttatttcaaagatgttcaagaagttgagattattgatgttgaagatgttcaagtggtggaagtttgacacatgatttatggtctgtgatttttgtaattcaaggcttgaacgtgggtgaaatgtatatgagaacaagatgggactcttgctgatgcagcacctatgatgcacgtggttgcttgaagatgtatatgtcattgctggtggtagtgtgctaccaactaacatggatagaacttcagtgtattagtgattttcggaacaaccatatttaactatgactgattgattacaagtggtctttttgct

SEQ ID NO: 18902 - DNA, 578 bp, Gossypium hirsutum
  unsure (1)..(578): unsure at all n locations
  Clone ID: LIB3543-036-Q1-K1-E11
naagtatgagaaacactcctccaaagtgagaaatttttgctatataactgataatacatatactaaagatgaggtggtcaaaatggaagcaaatatacttaagtccttgaagtttgaattgggcaatcctacagttaaaacatttttgaggagattcactagagttgcacaagaagattacaaagtaagaaaagtgcctatacatttttgcattgattctaaaattctattattttttatgtgttattgaatgtatggtttcttttgatcctttataggcttcaagcttgcagctagagttccttgggtgttatcttgcagagttgagtttgttggattatggatgtgtaaaatttttaccttccatggttgctgcttctgttatctttcttacaatgtttataattaaaccgaagtgtcatccttggagctctgccttgcaacgaaacttgggttacaaagcatctgatctaaaagagtgtgtccttatcttacatgaattgtatttgagtagaagaggagattcacttcatgcagttagagaaaaaacaaccaacataagttcaaatatgtggcaa

SEQ ID NO: 18903 - DNA, 897 bp, Gossypium hirsutum
  Clone ID: GOSHI-09MAY01-C89344_1
gtaaaaaaagcgataatttttatttaattttcttttcgacggatcttagcagctcaaagttgaaaccctaattttcttgaatttttttctcattcgaaaagaaagatgggattatgggaagcttttctcaattggcttcgaagtctcttcttcaagcaagaaatggagctatcgttaataggcctccagaatgctggaaaaacgtccctagttaatgtcattgcaaccggtggatatagtgaagatatgataccaactgtaggatttaatatgaggaaggtaacaaaaggaaatgtcactataaagttatgggatcttgggggtcaaccaaggtttcgaagtatgtgggagagatactgccgcgctgtttcagctattgtatatgtcgtggacgctgccgataacgataacctatctgtctcgagaagagaactccatgacctgttaagtaaatcctcactgaatggtattcccgtgctggtactcggaaacaagattgacaaaccagaagccttatctaaagaggatttgacagagcaaatggggctcaaatccattactgacagagaagtgtgttgctatatgatttcatgcaagaattccaccaacattgatgcagtcattgattggctggtgaagcattcaaaatcaaagaattgaagtctcaaagttgctgtaacattgtttttttgttttttcagtttgtgattataatcagttagagtttgcttcttcttgttctcttggtccaaggtggtcaaatatggctttgctgttgggtctgtctttgtgtctaacagggttttgtctatgtctgacaccattgtcttgatttttaaacttagctggtatcataaggtatttatataatatatttgtttggtggatgagtggggc

SEQ ID NO: 18904 - DNA, 649 bp, Gossypium hirsutum
  Clone ID: LIB3543-060-Q6-K6-B8
ccgatgtttgaccctgcctggtccaatttgcaactcgtgtatgatctacttcttcggtttatcagctatagttctctcgtgcaaagtggcaaaaaaagcatgtagatcattcttttattttgaaattacttgacctttttgagtctgaggaccctcgggaaagagactgtttgaaaacaattctgcatagaatttacgggaaattcatggtacacaggccctttgtgagaaaagctgttagcaatatcatctatcgatttgttttcgaaactgaaaggcataatggtattgctgagctcttagagatttttggaagtattattagtgggtttgctataccattgaaggaagagcacaagatgttcctatgtagagctcttataccgctacacaaaccaaagtccatcggtgtttatcatcagcaattaacttactgtgttgtacagtttgtagataaggatcaaaagttagctaataatgtgattaagggactgttaaagtactggccaattactaatagccagaaggaattgatgtttataagcgagttagaagagattttggagatgactaacatggtcgagttccaaaagatcatggttcctgtgtttcggcgtattgcatgctgcctaaatagctcccattacca

SEQ ID NO: 18905 - DNA, 419 bp, Gossypium hirsutum
  unsure (1)..(419): unsure at all n locations
  Clone ID: uC-gsflmaxxa091h11b1
aatgtgtggcaaagaagtacgtagatcattcttttatgtgtgggtttttagacctctttgatgctgaggacccccgggaaagggactgtttgaaaacaattctgcacagaatttacgggaaactcatggtgcacaggccctttgtacgaaaagctgttagcaatatcatctatcgatttgtttttgaaactgaaaggcataatggtattgctgaacttctcgagatattcggaagtattattagtggttttgctgtaccattgaaagaggaacacaagatgttttttgggaaatcccttattcctttacacaaaccgaaactggtgggtgtttatcatcagcaattaacattttgtgttgtacagtttatagataaggatccgaagntagccgatagcgtgattaagggactgttaaaa

SEQ ID NO: 18906 - DNA, 891 bp, Gossypium hirsutum
  Clone ID: GOSHI-09MAY01-C89244_1
gtggccgtcaaatctcaagtcaaacctgacgactcctccgatctcgagaatggggaggaagcgttacctggattcagcgagtacagcttggaccaattaagagctgccacagcaggtttctctacggacaacattgtatcggagcatggagaaaaagctcccaatgtagtttaccgagggaccctcgacgaggatcgcttgattgctgttaaacgcttcaacagatcggcttggcctgatcctcgacagttcctcgaagaagcgagagcagttgggcagttaagaagcgatcggttggccaatttgattggttgttgctgtgaaggagatgagagattgttagtagctgagtttatgcctaatgagactctctctaagcatcttttccactgggaaaatcagcatatgaaatggccgatgaggctgagagtcgcactatatctagcacaggcacttgaatattgcagtagtagacggagagcgttataccatgaccttaatgcttatagaatcttgtttgatcaggatggtaatcccagactctctagctttggccttatgaagaacagcagagacggaaaaaggtatagtacaaacttggctttcacccctccagaatacctaaggacaggaagggttatcccggagagtgtggtttacagttttggcacccttttgcttgatcttctcagtggcaagcatataccaccaagccatgcactggacctaatacggggaaaaaactttttgatgctgctggactcatgcctggagggtcaattttcaaatgatgatggaactgagttagtgcggttagcttcacgctgtttgcagtatgaacctcgtgagaggccaaatgtgaaatctcttgtactgctcttaccccacttc

SEQ ID NO: 18907 - DNA, 683 bp, Gossypium hirsutum
  Clone ID: GOSHI-09MAY01-C89224_1
catcctcaacactgaaaaaaaaaatcttcaatcattttcttaaccatttaatctcacattttcataacattgtggcaagagaagatcaatggaaaaagacacttcatattatgatatattgggtgtcaatgttgatgcatctatacctcaaatcaagaaggcttattacctcaaagcaaggcgagttcaccccgataaaaatccagatgatccgaaagctgctgacaaatttcacgcacttggtgaggcttatcaggttctaactgatcccgaaaagcgtgaagcatatgacaagagagggaagaccagagtgataccggacaccatgttggatcctacggctgtgtttgggatgctttttggaagtgatttctttgaagattatgttggccaactagcaatggctactttatcagccattgaagttgaaagtaattccttattagataaggaagctcataggaagaaactcgaggaaaatatgcaggcatttcagaaacaaagggaagacaagctcattgaaatactgaaaaatcgcttgcagccatttgttgaaggtcacaccaatgaattcattcaatgggcgaattcagaagcacgagatctttccaaagctgcttttggtgaggctatgttacataccattggatacatttacacgaagaaagccgcgaaggaacttt

SEQ ID NO: 18908 - DNA, 625 bp, Gossypium hirsutum
  unsure (1)..(625): unsure at all n locations
  Clone ID: LIB3543-048-Q6-K6-H3
cccagcgtccggntttattgattcttataccattgattcttatttacattaaatttgaatccaaatgcaaaacatgttcttatttcttcttaattcacatcgcttgtagattcatgtactatgagcttgttctgtttattgagaaatttttttcattgatttatctttttcttttttgttgattaatttctaatgttaaaagcagtgtggcaagagaagaatcaatggaaaaagacacttcatattatgatatattgggtgtcagtgttgatgcatctatacctgaaatcaagaaggcttattacctcaacgcaaggcgagttcaccccgataaaaatctagatgatccgaaagctgctgacaaatttcacgaccttggtgaggcttatcaggttctaactgatcccgaaaagcgtgaagcatatgacaagagagggaagactggagtgataccggacaccatgttggatcctacggctgtgtttgggatgctttttggaagtgatttctttgaagattatgttggccagctagcaatggctactttatcagccattgaagttgaaagtgattccttattagatgaggaagctcataggaagaaactcgaggaaaatatgcaggc

SEQ ID NO: 18909 - DNA, 597 bp, Gossypium hirsutum
  unsure (1)..(597): unsure at all n locations
  Clone ID: LIB3825-022-Q1-N6-G7
tcgcgatctagnattcataacattgtggcaagaagaagaatcaatggaaaaagacacttcatattatgatatattgggtgtcagtgttgatgcatctataccntgaaatcaagaaggcttattacctcaacgcaaggcgagttcaccccgataaaaatctagatgatccgaaagctgctgacaaatttcacgtaagctaccaccttttaactatgcttttagttgatcaattgtttgaaaaatgtcctaaaagaagacccctttagctttagtactggtttttaactacttgttgaagggaggttcgaccctcacggaaaatattatcctcgtgttggtgttttgcctcccatactttgagcagagactaaagggcttcacggagttaaaggagagcctcggttggcggagataccacctacttgcagggaggaggtgtcggtattgtgtataatattaattatgcatattgcgcctgggggtgttcaaactaccaaggcatataggccttatctttgtaacaatggtacttcgaacccaccgaggtataggatgcataattaatcttacgcacaatactgatacctctcttgtgag

SEQ ID NO: 18910 - DNA, 601 bp, Gossypium hirsutum
  unsure (1)..(601): unsure at all n locations
  Clone ID: AI731214.1
ggggaggatcggatgccacttggtggttcagcagatggaaatctagagagcagaagccaatatctgtgtgcagtgtggaatccggttgagaacacgacgcgatggaaagaaatcaaagcaagagcagccgcaaaaccaaagcagatgaggaaggagaatgttgcagcggagggagaattacaagtacccttcagttcagacctgagatccggctgctcggcaaattatgatcagtcgaagcccctacggcgagacgtagcagtcgatgctagcctctcggatgggttggtttcaccggtgagtcccggataacaggtancgccaataggtgcagcattgcatttgataccctgcagtcggagacggacatgtcggatggcttgttctcggggagaagtcgagaaaatagggtagtcttggatatcagcaagctctagtggtcaaagagtacggtaagagtgtcgaggtcgaacctaggtgaaggcgagtgcatatgcgagggcagcagcgagtgtatgatgcaagggtgtgtgtnagaatgggggtagggtgtgtgggtgtgtgtagtgaggcggtgtctgatgctgggatgcattggagc

SEQ ID NO: 18911 - DNA, 635 bp, Gossypium hirsutum
  unsure (1)..(635): unsure at all n locations
  Clone ID: LIB3582-030-P1-K1-G11
ctgatgaagatgattatggtgatgatgatgacaaacatgtggatgatcaatttgactctctaaacatggattcaacaaagggagcttctttggttcgattggatgatgacaggtccaagaatcaaatgccacttgatggttcagcagatggaaatctaaagagcagaagccaatatctgtgttcagtgttgaatccggttgaaaacacgacacaatggaaagaaatcaaagcgagagcagccgcaaaaccaaagcagatgaggaaggagaatgttgcagcagagggagaatcacaagtacccttcagttcagacctgagatccaactgctcaacaaattataatcaatcaaagcccctactgcaagacatagcagtcgatgctagcctctcaaattggttggtttcaccgagtaagtcccagttcacaggtagcaccaatagttgcagcattgcatttgataccctgcaatcaaagacaaacatatcggatggcttgttctcaaggagaagtcgagaagatagggtaatcttagatatcaccaacctctagttttcaaagattacaataatagtatcaaaatncaagcctattgaattcaagttcatatgcaaaggcagcaacaagtttatgatc

SEQ ID NO: 18912 - DNA, 674 bp, Gossypium hirsutum
  Clone ID: GOSHI-09MAY01-C84864_1
cccacgcgtccgaaaaaacatttcatctcctaaactaaacaaaatcaaactatcctaatccattcatcttcctcaccatatcaaacggcatagatgcatcggacaatattcttttgagagtggcagcctcgcactaggcttcaattaaacctctttcctttttccccacatctctaaaaattgagctcttcagattatctcctaaagacagagattcagcaaaacaacttcgggcatagttcacaaaaaaaaaaccaaactttccaccgtactcctttgtagtgattgcttcgacctctagtggagcctcttccactcagtatcttggctcctcacaccaacatccccaaatggacatttcatgtacagctttgttcaccgagcgtaggacaaattgtgaggatcgtgagtgcatccccttcgacgcagatattgttgaaacccagttcttcgagtagatgacccactcgtaaacaggcatatgcttcaactgttactgggtctgggatgctgttcagcgggtatccttctggagcgagctcaataactaatcctccggattctacacgtccattaatagggtatatgctggccacaatttttaaaggtgctccacacctaaagcgaggatcaaactctcgaccactggttaagatcaaagaaaaatgagattc

SEQ ID NO: 18913 - DNA, 614 bp, Gossypium hirsutum
  Clone ID: GOSHI-09MAY01-C84814_1
cggccgcgtgggcggacgcgtgggcaaaaaacttgtccgaaactgaaactctcccaaagtctccttctgtcttacaatgtctgaatcaggcttaacggtgcttgacggaacccatctccgatcattcaatccctctttgcctgaacttaacggctccgtcagtggagctcaactccttgaaatcgcagactccaaagcctccacctctctctttggcctctcattgcctcaaaaccttaaggcttccgctctttctcgtgtcatcgcgagacccggtgatcatgctgacgtcactttccggcaaacagagctcgacaaagataaagcatccaagtttctctctgattacatctctgccattgctgatgagttgaaagatgatccattagtggtgtcaatactggatgggaatactttgaagatgtttttggaggatgaagatgattatgctatgttagcagagaatttgtttactgatatggatatagaaagataaagggaagatttgcaagaatgagctgagaaatgcacttgttcatatgggtgttgaaatggggatccctcctttttcagaatttcctctgctaaatggcatattaaaaaacatggggccg

SEQ ID NO: 18914 - DNA, 558 bp, Gossypium hirsutum
  Clone ID: GOSHI-09MAY01-C84504_1
tcaatttcacttccattttattaattttagcttcccaagaatggcttctttcggagaaacatcatctgctttagaactcataaatcaacaccttaatgattttgcttcaatggaaacctttcttttcacctcctccaacaccccagtttcataaacaatccaccctaagccaacgtcgaccttctattaacgtcacaattccaccatcgaaagttgaaataacctccaccgccacgaaagccatcgaggaacatgacgagaaaaggcattacaggggtgtaagaagacgaccatggggaaagttcgcagccgaaattagagaccctaatcgaaaaggttctagaatttggctcggaactttcgaaaccgctatcgaagccgcttaagcttatgatagagcctgcttttaagctacgcggaagtaaagcaattttgaatttccctctcgaaatcggaaactcgaactcaactgaatcccaaccctcgaataaaagaaaaagagaagaagaagaacagagaggaagtgtgaaaaggaagagataaccggaaacgtaacga

SEQ ID NO: 18915 - DNA, 864 bp, Gossypium hirsutum
  Clone ID: GOSHI-09MAY01-C84494_1
cggacgcgtgggattgggatcatatttccatgcccccgagctgtagaggcaatggcctctcaattcggggtgagtgttctatgcggaatgtgagaagccgtccagcacttgatcttgaatctaacctagttaggacccatttgtcaagcaatacttcctaccttacaagccacccggttgaacattctagctcagtgaatatcactggtcagagctcgaatgctatgtcaagggactggagccatttgagaatgtctcctagtcatggaaggattccagctgcaggttacttgaatatttttgtgttattattttgatctctcattatctctgagtctgttgctggtgaattgcagattcaaatgtttttaatcatgagacaaaccgctttctgggtggtagtagtgctacaaatgcttctgttgagggcgggggacttcagcataatttcatttctggtagaaatcctgttcttcctcagggtttccatggcaactcagcacaatctgtaaggggtcctcgaacaaattattttcagagatctagcccaaatttcagggcctcttccagcagtgtgcacatgggacatgctgcatcccatgaagaggggatgcaggttgtttctgaaagttattcaaccaggcatcctcggccattaacagctgtaacatggcgtaataatgagcggagtgggaggtcaaggatatctaatgatagataccaatctctagctgatgatgcagctttccatggtcgattttcatctgagggttttatgattgttgaccgctccgctttttatggatctagaaatatgtttgatcagcatagagatatgaggttagacatagacaacatgactta

SEQ ID NO: 18916 - DNA, 447 bp, Gossypium hirsutum
  Clone ID: GOSHI-09MAY01-C84484_1
ttttacattcacttcaaccaaaaccacttctctctctctctctctcttcacatgactcgtccttttaggctccttggcgccgccaactcctcggccactactgagccgccacctgaacaagcggcaaccgtcgactccgacttcgtcgttatccttgcagccctcctatgtgcccttatttgcgtcctcggtctcattgctgtcgctcgttgcgcctggcttcgccgtctctccggtgcctttgctcccaatccctctgcttcatcccgtcccccccctcctgctaacaagggcctcaagaagaagatcctcaagtccctccctaaggctaccttctcacctgatttctccgccaaattctccgattgcgcgatttgcctcacggagttcgccgcaggggacgaaatccgggttcttccacagtgcggcatggctatcacgtcgtct

SEQ ID NO: 18917 - DNA, 642 bp, Gossypium hirsutum
  Clone ID: GOSHI-09MAY01-C84404_1
ccctctcgtccgcaaccccactttgtcatcaaccacttttggatttccatggcgttactctattctttatgttgtgtctcattttcggcactggtgatagtcgcattgtacgtctccccggtcgtttcgacgtcgaggcgagtgttaggagattacggtaagctcgaaaacgggttcagggtcacgctcaagcatgttgattcaagcaagaatttaaccaaatgggagcggatccaacgtgggataaagcgtgggaatcacaggctgcagaggttgaacgccatggttttagcagccagcggtgattcggctgaggttcaagcgcctatcgttgctgggaacggcgagtttctaatggacttatcgatagggactccaccgaatagttactctgcgatcttggacaccggaagtgatttaatatggactcaatgcaagccttgtacccaatgtttcgatcaatctacccccatcttcgacccgcaaaaatcttcgacgttcaccaagttgtcatgctcgagcgacctatgtgaagcacttccgcaatcaacatgcagcgatgggtcatgtgagtatctctacacatacggcgattactcctcgacacaaggggtcatggcaaccgaaacattcaaatttgac

SEQ ID NO: 18918 - DNA, 803 bp, Gossypium hirsutum
  Clone ID: GOSHI-09MAY01-C84424_1
ctgtgatgacaccatcaagggagtctattcttttgctttgacccctaaaggaactcctatcagggatgggctccacataaacgaagagatggaccttcatgacagtgccaaacttgagcagcggagacaagctgatctaagaaggaatttgcgatctggacttggtactcttccacagccaaagaatgagtaccaaatagtcattcagccacccccagaagataatgaagaaccagaggagaagattgaagaagacatgtctgatcggattgctagagaaagggccgaggaagaagcacgacagcaggcattacttaagaagagatcaaaagtgttgcagagggagcttccgagacctcctagtgcctctctggaattaattagagattctttgatgaggaccgatggtgacaaaagttcttttgttccccctacttcaattgagcaggctgatgaaatgataagaaaagagcttttgtccttgctggaacatgataatgctaagtatccacttgatgaaaaggcaaataaggcgaagaaaaaaggtgccaagcgtcctgcaaatggatccattcccagtattgaagatttcgaagaagaggaaattgaaagagcctgattctttgtttaaggaggaggctgattttcttcgtgtggcaatggggcatgaaaatgaatctcttgatgattttgtggaagcacataatacttgcctaaatgatctcatgtacttccctactcgtaatgcttatggtctatcaagtgttgctggaaatatggagaaacttgcagccttgcaaact

SEQ ID NO: 18919 - DNA, 585 bp, Gossypium hirsutum
  Clone ID: GOSHI-09MAY01-C84144_1
gacaaagattatcattattctaaaattgtctatatgtacaaagtaaaaaaattgaattctatttattgaagagaatttaatccaaaagaagagagaattcccctatgatttacctcaacggtaaatctctgatggtagcctcttttgataccactcatcacagcataaacagtgcggggcggaactggtcaaaagttatacatacatacatacatacatatgtatatatattgtgctctccaatataaagattcaattcaagacccatctccaaaaacttcttcaatcatactacatgtaggtaggaagtccatcttggttttctggcaagttgtatatccagaatcccaaactttagtatcacatggttctgaaacatatccatggctgccaccattgtttaacctgtttgggttaccttgccgctgatcacccgtgtcagcagtcactggtgtttcttgtgatgcagcccctgtatcagaagatgtgcacgaatcatcttggacctctagtttctcgtgctttgcttgctcatccttgagattgttttcataaagttgaaccatgggaccttgggtgctaaac

SEQ ID NO: 18920 - DNA, 708 bp, Gossypium hirsutum
  Clone ID: GOSHI-09MAY01-C84314_1
cgaagatatccccgccttctctctctctctctctctctctctttctctctgcctcgcgtgaattgaatgacgctttcatagactcgtaatcttcttcactttctcgcttctcagcacaaaatctgttcatttcccccctccgaaatcctcgatattattagttgaaatgtttcttcggagaaaacattcacagaaggatgattccgatcaacgagattcaaaggtcagtgaactcaggactgctataggacccttgtctggtcgcagtgcaaagtactgcactgatgcatgtttgaggagatatttggaagctcggaattggaatgttgacaaagcaaagaaaatgttggaagagacgttaaagtggcgattgacttataagcctgaagaaatccgttggcacgaagtggcacatgaaggtgagaccggaaaagtttccagggcaaattttcatgaccatcaaggaaggaccgtgcttataatgaggcctggaatgcagaacacgaaatcagctgaaaacaatatccgacatttggtctatcttttagaaaatgctatcatgaatcttgccgagggccaggaacaaatgtcctggttgatagacttcaccgggttttccgtgaacaccagcattcccatcaaagtagctcgtgatattgtttacattctacaaggccattatccggaaagacttgcttgtgctttctt

SEQ ID NO: 18921 - DNA, 1037 bp, Gossypium hirsutum
  Clone ID: GOSHI-09MAY01-C85574_1
cgccatctccactctcacgcgccgccctttaggtgtttctctccgctaccaccgtcttcatcatcatcgttcccctactttggctactttaagctcctcttcttctcaaccaccctcatcaacagcagtaactcctcctcttcctacttcagccggcgaaaatactttgtcgtctcaaactcatcaacacccaaacccaggcagctttaactatgcgttagccaatcctaaaggggcgactcattacttggtaattgctcgcgcccccccgtccaacatcgaaaagataatctttgacttccgtttcttagcactttttgccgttggaggttcgttggccggttcactgttatgctttctaaatggttgtgtttacatttttgaagcttacaaggtctattggacaagctgtgttaaagggattcacacagggaatatggttttacgattggttgaagccattgatgtttatcttgctggaacagtgatgttaatatttggtatgggattgtatggattattcatcagtaacttgaacccggaattgcctgccgatgtcgatcgtgcccttaaaggctcgtcattgttcggaatgtttgctatgaaggtaacaaacacgctcaaagtcattaatcattggtcttgaaaaaaagtctgaaaagtcaataaccattgcaggagaggccaaaatggatgaaaataagttcaccggatgaactgaagacaaaagtgggacatgttatagtgatgattctattggtgaagatgtttgaaagaagcaaaatggtggccataaacactggcatggatctccttagttatgctatctgtattttcctctcttctgcttctttgtacatccttcatcatcttcacaagcctgaatagttccatcactccctctcctctcactttctatatacatgtagacactattttctacacgtcgaactgttactttgtgggatttgtagagagtaacacatgcactacttggttgatattaataagagaatttgagtccttaatttttattt

SEQ ID NO: 18922 - DNA, 722 bp, Gossypium hirsutum
  Clone ID: GOSHI-09MAY01-C85184_1
aagtttgtctcatatggcaacttatcggctgcaactggtgtcagtggttctcaattttcgcaagctattgttgggcacatggggaatagaacccagccagttcgatatgctagtcaatatcatcctgttcaggctgcacctgcatatttgaacccaaattcacaagcagttatgtttgggcatatgggacaactgatttgtgtgcctgtttctcatgacttggttccaaatgcagcagctatctctccagaacctgcacgtcctccattgactccacatcacgtccaatttccgaagccccaaggaagtgcaccagaccaagcatcgcagttttgtgtacctcaacctttcatcgccggtggacagccgccattggcagtgccgagccatattccatatttgcaacctccctttcctgtcaattgtcccatacaaatcccgggatctaatggtctctttagcacaaagcttccctgaaattttgttatttttagtattaccctttgttatttctttttttcctttgttctgtttgaagataaataaaaattttgacctatgaaatttcatattttgggagcatccaactttagtcattgaaagggttatgcattttgctgttgatttctttattgaacagcatatggcatgagtcaagactgacttattgtgctaattattaaaatattgcatgataaaaaaaaatttgttggtttatgaat

SEQ ID NO: 18923 - DNA, 483 bp, Gossypium hirsutum
  Clone ID: uC-gsronu33B160c06b1
gttcgtgacaaaaatcaaggtacagataatggctttgggtagtcttatatacagatttgatgaaaaataaaaattatattttccttctatcatttggctgtatattctgttactgcttcttctcgtgtattcctgtgcaaactcggccatacagagaagcgaggagaagtgcgaaggaggccatgcgaggagccactcgtgggagccccaactctctggcctattccagaagcttctagtgctctcatctgctgtactctttttttgggcgtattgggcctcgggtttgggctattgggctttaggatttatttaattgggtcggattttattggacttttaatggattgattttttatttgtgcattttagtttttggggtttgaaatggactttggacctataaacgatttggcctgcatttatcttagttgctatattaaatctcttatttttggttaaaaaaaagaaaaaaagggcggc

SEQ ID NO: 18924 - DNA, 455 bp, Gossypium hirsutum
  Clone ID: LIB3827-001-Q1-K6-H7
taaaaaaacgaaccaacacgttcgaccctcgcccgttctttttatgaagttttggcctttcatcggcctccattcaaggttcctctcttcaccatttctttttccgaaattgccaggcctatccaaagaaccccaaaattaatttggggaaaacaccctttggccatttttctaccctctgggattcaatgggccggcctgccttgcgtttaaaataccgaggatgaaaacaaccgcttttttttgcccaattttttgaattaaaaataaaaataaaattggcctttatttgctgtattctgttagtgggtcttctggtgtattcctgtgcagactcactcctcccgcggagcgaggagacacgccaaggaggccgcgcgaggagccactcctgggagccccaactctctggcctattccagaagcttctggtgctctcatctgctgtactcttt

SEQ ID NO: 18925 - DNA, 848 bp, Gossypium hirsutum
  Clone ID: GOSHI-09MAY01-C86864_1
gcgcagtgcagtactttcagagtcgcatatgttatttccggaccgttgctagtccccttaagtgtagctttaagtgttctcttgggttggcatatctaccttattttgcaaaataagaccacaattgagtatcacgaaggggtgagagctatgtggctcgcggagaaaggagggactgtctataagcatccgtatgatcttggtgcctacgaaaatctaacaacggtattgggtccaagtatcttctgctggatatgcccattttcaagacacataggtaacggtcttcgttttcgaactgcttacgatagagtatctacttcatcaacatcaaaatgacatatcacttcttttttttcctttacattgccttggcaataacgaatttttcgatgcttgagggattgataaatgcttaccatatgataccctttttaagttatcctaccacacagatgccgtcaccttgcgaaaaagaccattaccgtcgttacaacaaccgataatcgtcaaggatgagaaaaaagggtcctgtaagttgacagttaaaccaggcaaagcagtactaaatttagaaataggatttgatggggttttactcttctttttgttttggtttttcccttctcttaccctttacccttttggggcttatggtttgtgtaggtggtttaatggtaggttttgcacctccacaccttgttcataaagaaggcatcattgtagaagtgatcatatgcaaatcaataggcaacaaagtgtatcaatcatgtaaaagaactgtaaaatcctttttaacactaataaaaattcttaaggtgtttttctttccccccccaacacaaaaa

SEQ ID NO: 18926 - DNA, 758 bp, Gossypium hirsutum
  Clone ID: GOSHI-09MAY01-C86784_1
gccatcaggaattgaagctctgcctccggtctgatttaagacacagaaacaggttgaaaagcctgaagctggtgatagaccttccaatcaatctatgacaccctccacgggagctgaagaaattgcacagaatgctgtggcactgttgctgaagcacactagagggtaccatgcggacgaagaggaattgtatgaaacccctgatatgtcggccagaaatcaatctaagaagaaagagaaaaagctgaaacgagtgcttggtcctgaaaagccttcatttcttgatagcaatccagatccagagtacgaaacgtgggttcctcctgaagggcaatccggtgatgggagaacaacgttgaatgatcgatatgggtactgactctcatgcttatcctataatgttagagttggaggtgcaacattgttgcttgagtcattcatggcattgaaattatggttggcattacccagcacctctgcatgtgggattctgttgacttgaacaggatgattttgatgtccatggaagaaccttgagttattggtgggaactctctatagggaaaatgagtagcaaagaaccgaaattggagcgacagttggtacaaaagaaaggagagagaatcacataaaagtagtataagtttaatgtatgtacagaaagatgtaatatgtgccaacattgtccaatagaaagttcgtgataggcgtttgtagttgaaattctgcccctgaataacaatggctcattattctcc

SEQ ID NO: 18927 - DNA, 1035 bp, Gossypium hirsutum
  Clone ID: GOSHI-09MAY01-C86754_1
ccagcgtccgcgaggtagccccttggtgagagaccgatgacaccacagatgagtcgttcgagtctctatgataacgatagtagcacttttgagccacatgaccgaaccgactgcagatctggcattgaatgcgagatcggaaagttctgccactgccacgaacaggcgcacggcctccatgactgactccttcaaccgacgacgcatcctcaaccagattcacgttcaaacttacatcctgcaacactcgagcttgacggctctcacaattgaccaacgcatctaccaaacgttgtaacggtaaaactccaggtgacaaccgagcagaggaaataaccgcctcaaagtccgacggcaaccccgccagcaccacttcgatcttctcttcgtcggagatacgagatccagacgcatctaacaaagcacacaaatctttaatctggttaacatacgccttaatagaaagattacctttcttcaatgagtgaagctcatgccgaatccttgactgcttggcacccgtatcagctgcaaaaagattaacagtcatactccatatgttgcacgctgtgcaagcatcatcaaaggaggattgatgagaagaagttaccgtagacaaaagccaggacatcaacagctgatcttgctgtgtaaacacctgagccgccagatttggagcacgagaaccatcgggtagaataacaaatcgggatggcggagcaacagtgccatctaagaaacctgtgagtccatagccattaacaatcagttttacctgtttacgctattgaaggtaagtaccttcatcgagtttgaccacttcatgtcgaggaagaacggttgtgactcgatcggcagtaaacacaccagagctaggttcaccagatgcggaatcagcggaagccatgagaagcaatcaccagaatcaattggtgaatgataccatgaaagaacttaataaaacgattgaaaaatatctagccaaatagaatgagaaatagagagaatagaaaataaattcttttctttgtattc

SEQ ID NO: 18928 - DNA, 873 bp, Gossypium hirsutum
  Clone ID: GOSHI-09MAY01-C86704_1
ccctcgcgtccgaagagcctagcatcatctgcttctctatctgcgcagatacttatagattcttctgaaagggctagaggagataataaagttgatttctctagagtagggtgctggctaggtttttcttttgctagtgttcattaaggatcctgtttgctcgtctgccgtcgtgttgctgttgcctaaggatcatctgctgagtttgttgggtttcctgggttttgtgcctatgtgtatggttctcatgtgaaacaagtatgggtacagaaatctagttctggttcttagtgaattttaaaatgaaaattgcttagtcagttgaatttcaacatccgagcgtgcccttgcttttgccggagacagtctcaatttctggtgtaatcaatgttttggccataaagcgaagtagagaaaggctggttcagttgaagaggttgcagatactattttaacttaatacttggttgatgaaaatctcaatgttaataatacttgatggattgaagaaaccttgatcttggtcaaagatggcacagcatataaggaacaaaaaaacatagagaaataaaaggctattatcgtcacagcttcctggtgtggttgaatattcataatcctctgatttgtgccattggggttgatttcttgctttagcttagctggaactgtaaatataaatctagagaatttgtcttttgtctagattatagtcattataattataaagcctcttgtggagctgtctaccatatatgtctatttttaagactataaacagagttggcacttgtctccctggtatttgagtgaaggggaacatttacccacagttttagggaactggagtgatttagacaagtaaattaattt

SEQ ID NO: 18929 - DNA, 501 bp, Gossypium hirsutum
  Clone ID: GOSHI-09MAY01-C86734_1
tggcagaaaacccgagtgagatgagacagtatgaatggtttgccccagcgcccgtgacaatgtggtttgataccacaccaaccaatcaaagcaagcttcatgactatgccaacaagttttggagtggactgctggaagggtactatttgccacgagcttcaagctattttagctatttgttcaaaagcttagagaaaaatgagagtttcaaattggtggaatggaggaaacaatggatatcattctcaaataagtggcaagcaggccttgagctgtacccagtgaaggcccaaggaaatttccttactatagccaaggctttatttgacaaatacctaagttaatcatagtattaagatggaattaaaaatcctgggtttttctttttaagtacaattagaatacagcatgtgatttctttctttttcattttgctttatctatcatttctcacaactgatacaatatggattgcggagccgtggaacttcccactttggc

SEQ ID NO: 18930 - DNA, 618 bp, Gossypium hirsutum
  unsure (1)..(618): unsure at all n locations
  Clone ID: AW187601.1
aagatgtgggtgtctggatgagctctgaattttggggaattatatcattataatatatggcaaaaggttcggagtcggggtcggaatcggaccctaatggatggagccgagctcgaggtttggtagtgaagaccttggttctaattggcggcgcctttttgctcaagaggttgaccaaatccaccactcgttgggaccatgctaaaatcgttgcccgttctcttagcggtgaaaagttctcgagggagcaagcctctagagacccagataattacttcaatttcagaatatttacttgccctgcaacagagatggtggatggttcaaaggttttatattttgaacaggcgttttggaggactcctcagaaaccctttcggcagaggtttctcatggtgaagccttgtccaaaagatctgaaatgcgatgttgaggtaagttcatatgcgattagagatgtggaggactacnagaatttctgtgaccgcccaagggatcaacgtccgctacctgaagaaattattggtgatattgcagaacctctgacaactatataccttaatcgctgtgagaaggggaaacgctgtttatacgaaggttcaactccaccangtggct

SEQ ID NO: 18931 - DNA, 527 bp, Gossypium hirsutum
  Clone ID: LIB3584-009-P1-K1-E5
tcgcccagcgtccgcaaaagttcggagtcggggtcggaatcggaccctaatggatggagccgagctcgaggtttggtagtgaagaccttggttctaattggcggcgcctttttgctcaagaggttgaccaaatccaccactcgttgggaccatgctaaaatcgttgcccgttctcttagcggtgaaaagttctcgagggagcaagcctctagagacccagataattacttcaatttcagaatatttacttgccctgcaacagagatggtggatggttcaaaggttttatattttgaacaggcgttttggaggactcctcagaaaccctttcggcaggtaaactaccatgcaagaagatatactgatcagacatctatgataattgaataccttaagttatatttatgttttttattctgtgttttcctttgatctcttaactcactttcggtggaacacctttacctcatacaagtctgacagtttttttggttgcagaggtttctcattggtaagccttgtccaaa

SEQ ID NO: 18932 - DNA, 796 bp, Gossypium hirsutum
  Clone ID: GOSHI-09MAY01-C87964_1
gaaagttgttaccggaattgcattaccggcaggtatggataagctctatactgggagtaaagatgaaactgtgagggcttgggataccaacactggtcagtgtatgggtgtgattaatcttggtggtgaagttggttgcatgatcagtgaaggtccttggctgtttgttggcatacctaatgttgtcaaggcatggaacacccaaactaatcaagagctcagtcttagtggacctgttgggcaagtttatactatggttgtgggtaacgatttgctctttgctggtacacaggatggtactattttagcatggaaatttaatgccgtcaccaacaactttgaaccagcagcatcacttaagggtcacacccttgcagttgtatcattagttgttggggctaatagactgtactctggttccatggaccattctataaaggcctggagtctagaaactttgcagtgtctacagactttgacagagcacactagtgttgtgatgtccttgctttgctgggaacaatttcttttttcttgttcattggaccaaacaataaaggtgtgggtagctactgagagtggaaacttggaagtaacatatactcacaaagaagaacatggcttgctgaaccttcgtggaatgcctgactcggaatccaagcctgtattgatgtgttcatgcaatgacaattctgtccgcctctatgatctgccctcgttctcggagaagggtaaaatatttgcaaagcaggagattcgtgcaatagaggtaggcccctgggggctgtttttcact

SEQ ID NO: 18933 - DNA, 1398 bp, Gossypium hirsutum
  Clone ID: GOSHI-09MAY01-C87824_1
ctctattttctttcaccttctctcttttcttttttattcccaatagaactgacacaatctttccttctttgtctctcctcaagtttcagaccttcttctttgcgtcttttagcaggaaaaagaaaaaaaaaacaacatggttggtatcttttcgttggtgacagggtggcctgggccaagtggctttggttcctcttctactgctgaacaggttactcaaggaatcgatggaaccaatctcactgctataataactggaggtgcaagtgggatcgggttggagacttcacgagtattggctcttcgaggtgttcatgtcattatcggtgcaaggaacgtgaaagctgcgaatgaagccaaaaagactattcttacagaaatcgaaaccgcacgtgttgatgttttggagctggatctttgctccattagatccattagagcatttgctgacaatttcattgctcttaatcttcctctcaatatcttaataaacaatgctgggatcatgttctgtcccttccagctttcacaagatggaattgaggttcagtttgcaactaatcatattgggcatttcctcttaactgagcttcttctagaccaaatgaagaacacagtgaaaactactggtattcaaggaaggattgttaacttatcatcaatagcccacacccactgttataaaaatgggctccgatttgatcacatcattgctaaagatggttacaatgacaaaagagcgtttgggcagtccaaattagcaaatatattacatgccaacgaactctctcgtcgattgcaggaagaaggtgtcaacgtcacagtgaattcggttcacccaggattgattatgacgcctctatttaggcactctgccgtcctcatgaacttcttgaagttcttcagtttcttcctatggaagaatgtcccccagggggcggcgacgacctgttacgtggccctccacccacggctgaagggagtcaccgcgaaatactttgtagactgcaatgagatgacaccaagttcatatgcaagagatgaggctttggcaaggaaactatgggatttcagtcacaaattgattaactcagtttctaaaccttgaatccaatcacaagctctctctaccagagatgaaaagttattaccaattatatacaaagacagaagcctactgaaacagttgcattctctcccatttcccatcattattgtattagtaaaagtactaaaaaagaaggaaagattttcagcatgggcagttgaagcataactcgagaacaaaatagtagtttcatgcatgtgtcgttcttcaatgtttgtgagggaataaaatcctttgtatccattattaatatgtttttgaattatactcatttatcctttctcaaaaaa

SEQ ID NO: 18934 - DNA, 634 bp, Gossypium hirsutum
  Clone ID: GOSHI-09MAY01-C87594_1
cccagcgtccgccccgcgtccgtaaaaaaaaaaaatctctgagagaggggaaaggaaaggccctccgggctgtggcctctgtcaggccaagctccggtcatcgggcatacacgcgcccatgcaccacctctcacaccgccacacgcggccgttggtggtcaaaaatctcgatttcaggcaaaaaatagaaaggtgaccgcgaggatctcggtgattcaagggccgcttgcgtgatgaagcgccgatggtggcacaatccaaggctaggactactacggggcaatgatctcggcagcgaaaaggttgctggaacagagtcgatcgggccttgattcaggagctggacggtcgtgagagagacaagcttctggacaacacattaatggcgtgtcaatagtgcattgatggcctcgatttagggggttgaacagatgctccccgaggcttccaaaagatgctgcggcgctacagtcttcaggaaaccctaggatttcctatttcccttaagtcatttgggccttttgggctgcttttagatttgggttagcctggtagatcaagtgtttttaggggtctgctatgtaatgggttttaaaatttggcccgagtggggtttgggtcgggttgttatgtc

SEQ ID NO: 18935 - DNA, 1359 bp, Gossypium hirsutum
  Clone ID: GOSHI-09MAY01-C87714_1
cccagcgtccgcccagcgtccgcttggggggaaatgcacatcaaagagtgaggagataggcaatttatcttcagtttcactttccaatacttccatagcagcaacaccactggtgaaatccttctgcgaagaactttcctcattttcagatccactgtcttgggggaaatgcacatcaaagagtggaaaagccatatgtggagggaaaaatctaggaaagaaacagataaccctagtgacaatgagattgaagataatgttaccatgttaaaagggactaatgctgtgagaggtgttgagcctgaatgtaaatcagggaataggaatggaggaaaacaaaagcatgagcttcgtgttggtaatgctttagtgccaaagaagaaaagaggtggtctggcaaaggaggaaggattactggaagctgatcattgcatgattgaagaagtgatattggagcaaaatgaccaaaataagaaactgaccagtaacaagaaatgtaaatacgataatctcttgctggcttcctgtcaagtggatactgaagttggagttaagctaaagaggaaaagaaaagaacaatttgaagagaaaacacttgaaaacaatgttaacaaagaggatgaaacgcacaaaagtggttcaaattataccgagaccaaggatgtagatgtggaggatagggataatcaaaaccaagttaatgacaagaagacgaaaaagaggagtaaggatgaggagggggatgctatgaaggtggaacaacctgtcttaccagcccatgaaaagaagagatctgatgtggaaatgggggctaagaacgctaatgacaaggaaattcagctgtcaaatggaattatcattgaagagttagaaatagggaaaccagatgggaaaatagcttctcttggtaaaaaggttcgtgtccattacactggaaaattgaaggagagtgggcaagtatttgattctagtgttggcagagcacacttaaagtttcgtctaggtgggaaaaaagttcaagaactatggaatgtcggccttgatggcatgcgaattggtggcaaacgtaggctcattgtccctccttcagtgagttatacaaatgaaggaacaagtgagaatattccaccaaactcctggctggtttttgatgttgaattggttaaagtcaagtaatttcttttttgatcgaaaagtcaggtacttggttggcatcatgcaccagttttgtttaggcatacttgccttaattcttcaaagaatgacaagtgcagtagtaaatgaggttggactttgtctctggacttgggattttataatgatatgattagaagtgaaaatatatagtattggctgtat

SEQ ID NO: 18936 - DNA, 534 bp, Gossypium hirsutum
  Clone ID: GOSHI-09MAY01-C87674_1
tggattcatacacaccctacgcaatcatgtttcatgtcatcaattgatctccatactcactactcataccagattatgttgccggaatctgtagcaatcgtaatggcaccaagagatgcttcgagaaaacatggaatttttcgtttgactactccgggtgggatgtccgtcattagacagtgccagaaacgtggctttcatccacacattcaacctccagatggtggccccctttacagtacatgtacagatgtgtatatgaatccgaatctgaactttgacgtcatcgatcttcgatgatctcacaatcatagccatcatatgtgcaaatggttgattgaccatcagtaagtgtaaaaagtgcctgtttgtttaaaaggaaaagagacatttgagaaacaagactgtataccatagtatttgcatgtttaggaaaatacggatttgaggggggggggaacaaaacatcaagtggctttggattccattcttttgttgtattaaacaagagaaattctaattcatttgaagttg

SEQ ID NO: 18937 - DNA, 884 bp, Gossypium hirsutum
  Clone ID: GOSHI-09MAY01-C87184_1
gagaaggagcgttgaaacacaggggacgatgatgatacgataatggcgaaagaacaaataataagcggccgatgaagagcagtaccagcaagatgaagactaagctgaacaagaaacttgtgcagcagcagcagcagcaaagcaatggtgaagaacaagagagcaaagacattgcttgcactagtatttataataataacaattctagtggtgcaaaaaagagaggtcgaggtggtgcactcatggaagggtcgcggtgcagtcgagttaatggaaggggatggagatgttgccaacaaacactcgttggttactctctttgcgagcatcatttgggcaaaggtaggttgaggagcatgactagtgttcgaagccgatctttagcatcaaaggaggagggccagcctaataatggtgataatcaaggtctgatgttgtccaatctttcttcttcgtcccaacaattagcaaagcgtgaattgcatggtgaaagtggtgggaatgatgcagaaggagaggatcagaagccattgatgatgccaaagaagagagcgaagcttggaatggttaaagctcgatccataagtagtttgctgggccaaaaacgacaatgcaattgcagtagcagatgatagtaactagctgagcctgagagtgtatcaaaataaataaatgaaaaggtttgaggttatagtacctattattattattattattatatccctgatgcaactgttcccaacttcgtttttatttgagcttccttaatggacttgtgcttgatcaaatgtttttaatattctccctttctttttttaaatcttctggtcaggcatgatgatgggcttaatgttaaataaatagaatggagcctatttttttcc

SEQ ID NO: 18938 - DNA, 791 bp, Gossypium hirsutum
  Clone ID: GOSHI-09MAY01-C87174_1
ccggtccaaaacccccggtcgacccagcgtccgggaatcttgggaaaccaaggttttttttcttgattttctcgttgggaaagggtatttttctctttggaacccatacttttctaagcaaccgaactgagggtgaagtgtttgcctcatctctggtttgctgttgtctttattgttgaaattacagcattttgactgtgttttgattcccaaaaacttaagcctgtattgctgaaattgttgctacagatatgaggatgagccaccagagcctgagattgaagaaggagccgaggaggaggtggaaaacaataacaatgacgatgttcctgttgatctggttgaaactgaagaaaaagaagacgaagatgctaatgacaaaattagtcgcaaaacatcaaagtacatgaccaaatatgagcgtgctagaatcttgggtacacgtgccctgcaaatcagcatgaatgcaccagtaatggttgagctggagggtgagactgacccgcttgagattgccatgaaggagcttcgggagcggaaaatccccttcaccattcgtcggtacttgcctggtgggagttatgaagactggggagttgatgagttgattgtggaagactcatggaagagacaagtgggaggcaattgatgaccacgttttattcgaggaacatggaaaattactgtttacgtgatgcctttttcttgttctttttaaattatttcatatatttggagcgtcattggagatctttgaactcatatctgagcaagtttagtatgtgggcttc

SEQ ID NO: 18939 - DNA, 719 bp, Gossypium hirsutum
  Clone ID: GOSHI-09MAY01-C87004_1
agggggtgggttggaagatgagccccagtatcagcaagaaggccaaaaggctccccatgaagatcagtttgctgcagggaacagcttcagaaatgatgccagtgaaagtgaggatgaggcccccaggaggtcaaggcatggggaagggaaaaaaaaacggaaaggcttggaaggaaatgttgcccctgcttttgatccctaaatgcaatgcttacagttcggaggatgttaggatcgctgccttgctctcaaccacgtttctcaaccacgttgtcttgcatgccattgttgaacatttttaagcaactgactttgcatatgtagatggtttcatctcccaattgacatattggagagctgcagaaaaacctaggtttagattgtgttttggtgcattagttttgctccaaactgtggaactatattgtttattgtgtatgatcatgccccggatcccgagaagggtgaatatatattgtcaagaaaggtatttagcctacatgctatatcttatgtaagatttcatgttggaagggttaggacatggaagtaaaaggaaaaggcttttccttggcattggagttggatgcatgatatttaatgtttcatgatttatacccatttcagcttccttttgctcttattgccattgttcttttcttttttctttctttcttggtattcctattggcattgttaataatgcaaaattttgaagc

SEQ ID NO: 18940 - DNA, 524 bp, Gossypium hirsutum
  Clone ID: GOSHI-09MAY01-C87024_2
aggtgccataaggaccggtctggatttgatggagcatggactaccaacccacttaccttcgataattcttttttcaaggagctattgtccggaacgggggcagatattatgcagctgccatccgacaaagttttcgtctctgacccagtgttccgtccattcgttgagaaatatgctgctgatgagggtgaattctttgctgattacgctaatgctcacttaaggctctttgagctaggatttgctgatgactaaacaaaaccagtttggtttgcagagtaggcccgagagcagccaacatttgcctcccaaagacacattcgtttttttttctttttttctttttaaaatataaattctcgaaacccccccaattgctaggcagttgttgctcgaacactttttcgcctctagggtggttttcatggtgttttctttttggtaaaaaaaaaaaaagaatccggattgatttccgatgagagtaaccaaaaaaaaaaaaaaaaaaaaaaaaaaacccccaaacc

SEQ ID NO: 18941 - DNA, 1030 bp, Gossypium hirsutum
  Clone ID: GOSHI-09MAY01-C87024_1
cccagcgtccggttcatttgcttgccgctgattgttcattttagaaaagaaatggggtatgcctaaagtggggggttatgcctaaagttatccggtcgtgagcgaggattacaagaagccattgaaagtgcgagggggaagctcagaggtctcatcgctgagaagaattgtgctccgatcatagtccgtttagcgtggcactcagctggaacttttgattggaagaccaataccggaggtccgttcggtaccatgaagcatgccgctgagcttgcacacaaggctaacaccggtctcgatattgccatcaatcttctcgagccgatcaaagagcagtttcctatcatctcttacgcagacttttatcagcttgccggcgtcgtcgctgttgaggtcaccggtggacctgaaattcccttccatcccggaagaccggacaaggaggaagtaccacctgagggccgtcttcctagtgctaccgatggagcggatcgtttgagggagatctttattaatcaaatgggttttaccgataaggacattgttgccctttctggtgcccacacgctgggaaggtgccataaggaccggtctggatttgatggagcatggactaccaacccacttaccttcgataattcttatttcaaggagctattgtccggaacgggggcagatattatgcagctgccctccgacaaagttttcgtctttgacccagtgttccgtcccttcgtttaaaaatatgctgctgatgaggatgaattctttgctgattacgctaatgctcccttaaggccctctgagctaggatttgctgatgactaaaccaaagccgtttggttcccaaagtaggaacgagagccacccacctttgcccccccaaaaaacctcgttttttttttaaaaaataaattctcgaacgaaacataattgctaggccgttgttgctcgaaaagcccctaggatggttttcaggtgttttctttttgggaataataaaaaaaagtgttcggaattatttcccatt

SEQ ID NO: 18942 - DNA, 543 bp, Gossypium hirsutum
  unsure (1)..(543): unsure at all n locations
  Clone ID: LIB3585-050-P1-K1-A4
gaaaaaagaaaaagcatggcttgcttatcctgcagttgtatatccattgccatggccaaagctgttatccatccccgcattgcctctcttaccgacaaaccctccccacaagaaacccaaacaaattcaaaacccaaaacagcaactcgaccaagaaaaaagagacaacgtttgcggcaacaaaagccacaccctcctccttcaatcgtccagattgaacgtgccattggtgctggttccttccgtgacgctgactccagtgatttggaggagcaaaggaggaagacgatattcgatgggcttttgcctgtcactggtggtaaatntgaaggagacattgaaaagaagcttcgcgagactggggagtggattggtaccactactgaagcaaccttccgttcctccggaaaaacaatcctgttggttgtgctacaatggatcctaccaatttggaccttttctctactagttgcttctggggtcataaaactaccattcagcacccccctaatcgacgacctcatcatgtgaaaccactttgct

SEQ ID NO: 18943 - DNA, 526 bp, Gossypium hirsutum
  Clone ID: uC-gsflmaxxa005b09b1
cttacgcgtgggagaaacccaaacaaattcaaaacccaaaacagcaactcgaccaagaaaaaggagacaacgtttgcggcaacaaaagccacaccctcctccctctgtcgtccagattgaacgtgccattggtgctggttccttccgtgacgctgactccagtgatttggaggagcaaaggaggaagacgatattcgatgggcttttgcctgtcactggtggtaaatttgaaggagacattgaaaagaagctccgcgagactggggagtggattggtaccactactgaagcaaccttccgttcctccggtacttcatttttctctctattttctttcaatcgagttcagataagttttagtactgaaaggtgaaagctacttgtaagacggaaagcttaagatgtatatgaagcatatttaggcataagaggtaggcaatatgatttttttctaacactgcttttgatcatagctggcaggatagcgcataacaagcaaccaattgaatgatctagaaactttaac

SEQ ID NO: 18944 - DNA, 881 bp, Gossypium hirsutum
  Clone ID: GOSHI-09MAY01-C80814_1
cccacgcgtccgggagaaagaaaatccggctttattgagccattgtaatggtggtttctttgcggatcaatttgaaaatttggcaaacttcagggctcactatgagggtactgggcctgagatttgggagcagactgatggcaatgtggatgcatttgttgcagctgcaggcactggtggtaccgtggctggtgtttctacatttcttcaggagaagagtccgaaaatcaagtgtttcttgatagatcctcccggttctggtttgttcaataaggtaactcggggagtcatgtacactaaagaggaagccgaaggacgaaggttgaagaatccgtttgacaccataacagaagggattggaatcaacagattgactaaaaattttatgatggcaaagctcgatggagcttttcaaggcacggataaggaagctgttgaaatgtcgaggttccttttgaagaacgacgggctctttctcgggagttcttcagccatgaactgtgttggagctgttcgagtggcaaaggctcttggccctggccacactatcgtaaccattctatgcgacaacgggatgagacatctaagcaaattctatgatcccaaatatttggcgcagtatggattgatgcccacggcaaccggattagagttcatgagcaccaaatgaaccctgcaaaggtttctactccgagacgaacattatccatcaaatcaggtggcatatcgagtcatgttttggtggtcggaatcttcagctttttatttttattttttagtttcacagttagaaaacattagtcctatgtatactgcttttagcagacaattttggagacccaacttataatgaaaatttacacgtatagttaggttttgtt

SEQ ID NO: 18945 - DNA, 1038 bp, Gossypium hirsutum
  Clone ID: GOSHI-09MAY01-C80044_1
ctctaacctccctcccacccccttccctccaaacatcctctccgccatttctgtctcttctcacaacctcaaaaccggaccaatccatggtgaaatccatcctcgaacctccaaggcaaccttaaccgcaccaacgccgcttccatctgtgatgaaatcctttccaactctgattaccgcatcaactcgaccgtcgacgcgttatcacgtggcaagatcaaggacgcacgtgcatggatgagcgccgccctttgctaccaatacgattgctggggcgccctcaagtacgcaaatgacacccaattggtcaaccaaaccatggcgttcttggactctttgacgcagcacaccagcaacgcgttaagcatgatggccgcttacgataattacggggacaacatcaactcgtgggccccacccaaaacggaacgggacgggttctacgagaaagggtcgggcggaacggaactggtgttcgacggcggtttcccgacgggattaaagccggacgtaacggtgtgcaaagacgggagcggagggtgttacaagacggtgcaagaggcggtgaacgcggcgccggataatgcagaagcggggcgacggttcgtgatagagataaaggaaggggtgtacgaggaaacggtgagggttccgttggcgaagaaaaatgtggtgttcttgggggaggggaggggtaggaccgttattacaggttctctaaatgtggcgcagctctggaatgaccacttacgagtctgcgacagtcggagtacttggggatggatttatggccagcggcctcaccatcaagaacacagcaagccccgatgctcaccaagcactagccttccgatcagatagcgatctctctctcatcgagaactgtgaattcataggaaatcaagatacactttatgctcactcgctccgccaattctacaacaagtgccacattcatgggaacgtggatttcatcttctgaaactcaactgctgtatttcaagaatgtgaaatactggttgttccaccggaatttaa

SEQ ID NO: 18946 - DNA, 641 bp, Gossypium hirsutum
  Clone ID: GOSHI-09MAY01-C80364_1
cttactcgtccgcagatagtagcaggggctggggctggagttgctgtttcattcctagcttgccccaccgagttgatcaaatgcagattacaggcccagagtgcattggcacattctggctcagctagtgtggcagtgaagtatggagggccaatggatgtagctaggcatgttctcagatcagagggtggcgtaagggggctcttcaagggattggttcccaccttagctcgcgaggttccaggaaatgctgctatgtttggtgtgtatgaagcactgaagcagtacatggctgaaggaccagacactagtaaattaggaagagggtctttgatcgtggcaggaggcttggccggagcttcattctggatctttgtttacccagttgatgtcatcaagagtgtggtccaggtggatgactacagaaaccccaagtacactggctccatgaatgcatttaataggatattagcctcagaaggggtgaaaggcctattcaaagggttcggccctgccatggcacgaagcattcccgcgaacgccgcatgtttcttggcattcgaagtggcgaggtctgctttgggctaaatcaattgctgttgcactctgattccgattaaaagtttactgttgtttttatt

SEQ ID NO: 18947 - DNA, 911 bp, Gossypium hirsutum
  Clone ID: GOSHI-09MAY01-C80214_1
ctctcgacttctattttggatttcgtaaagtgaactccacatccacaatagaaccggtttccggcccttccctccagacaaccggttcattctagtttcccagaacttttggggattcgggactttgattttatatgtttggctttgatgcctttttagaggtttcgtaattcctgctatttttcaaagggagagcagggattatctatggtctagatgtgtcaaaaaagtttggagatttcttctgcatatagtattgacttttgtgttctctgtaaaatagacggtttgaagcaaatttgctttgcctaagaagataggatgccatctgctttgtttttgaagatgaggagtgcggttcggaatggaatccagagaacagaatgcgagctacaagattcacttaaaattctgattggaaaagggaagctagggttttgtatttacaggttttttcattcttcaagtctctcaggacttgctgatttgcaaggattttttccaagtgggacagttttggctgcatgctcagattctctatcagttaattgtggaaggaacatttctgctgtgggcgcatttcctcgaactgtttttgttccatctgtttcaggccctgcctttcaggcttgtaggtatcatattgattgtgcacttgttgactccagccaaataccaccaactgtgagcaaatgtcagagtaatcctatggctgtttctagttctggagttgtaattggtggatttgttgattcattgaagttaaagcatgggcacctttcatcgtctacaagtagtgctgatatactttatggcaacagaagcataccattccagaataagtttgaaaaatttgagagacctaacaattttgcaatctatggacagctcttgcataatattggaaaaag

SEQ ID NO: 18948 - DNA, 457 bp, Gossypium hirsutum
  Clone ID: GOSHI-09MAY01-C81894_1
cccacgcgtccggcaaaataaagctgcttcagctgcacttagcagtatactcaggaatgagacggagcgtccaatggttagacatgaagctgctgaagctctcggttccattgcagatgatcaaagtgtagcacttcttgaggaatttgctagggatcctgagcccattgtctcacagagctgtgaagtcgctcttagcatgctggaatttgagagagcaggaaaatcatttgagttcctcttcatgcaaactcctgtggtgcattagatctggttaaaacatgagctagggaaaagacagaagctgaaactctgaagtacaacaacatataatcatcttatttgggcaaaattttctccattttgccgcaaattacaaaattttcaccacaggtaatgattatattgtcagaaaagccagaagaacaaatcccggtggaaatgagttgcaaagcta

SEQ ID NO: 18949 - DNA, 612 bp, Gossypium hirsutum
  Clone ID: GOSHI-09MAY01-C81834_2
cccacgcgtgcggccacgcatgaaagtaaaagtccgaggtaagaaaagtgagaagcttcacgagctggtgctcgagcttctcaagaacatctcgcttgtaatgaagacaaggggaatactcatgcagaggagtgcactaggtggagatagcttgggggaactgacatggctgcatgtgaataacattgcgccatctttgcagtcggaggttttccctgatcagggtccagagctcaagcatggcgaaaccggttgtgcaggttccggtgaaacagtttctgttccttcaaatgaaacaaccacccttgaaggggctggtgcgggaagttaaatgttgtgtacagttggatgcctgataagggtttgtgattgccagcatatagagtcgcacacaatacgttgctatttctcgaggttatccgcattgagacatttggacacattaggttatgctgccgctgatattccgcaaatcctagtatcgtttggaggtattgggtgcatattggttaaaaaagtgagccttccttagaaatgtgtgtaagatttttcagttataattaccagttattctagatctggcttggccttccatcttattgctgcctccat

SEQ ID NO: 18950 - DNA, 578 bp, Gossypium hirsutum
  Clone ID: uC-gsronu33B139c08b1
tttcgttacgcgtccgcccacgcgtccgtccacgcgtccgtccacgcgtccgaaaaaaaaaaaaaaaaaaaaaaaaaacatctttgcagtcggaggttttccctgatcagggtccagagctcaagcatggcgaaaccggttgtgcagtttctggtgaaacagtttctgttccttcaaatgaaacaaccacccttgaaggggctggtgcgggaagttaaatgttgtgtacagttgatgcttgaaaagggtttgtaattgccagcatatagagtcgcacacaatacattgctatttctcgaggttatccgcattgagacattaggacacattaggttatgctgccgctgatattccgcaaatcctagtatcgtttggaggtattgggtgcaaattggtaaaaaaagtgagccttccttagaaatgtggataagatttttcagttataattaccagttattctagatctggcttggtcttccatctcattgctgccttcatggaaccttgccaaaatgttgtgttaaaaataactaagttctagtctttgcattggtgtttttttggcttttttttttttg

SEQ ID NO: 18951 - DNA, 717 bp, Gossypium hirsutum
  Clone ID: GOSHI-09MAY01-C81684_1
cccacgcgtccgcggacgcgtgggttttgccaatctccctgctttcatacaattacttgtctggattgtctgaaaaaaaaaacaaaaacaaaaaccccaagggaatgaggaccatcttctccaaatctccatctcctcctacccgtcaccatactttcaccgagtcattaattgaagaaaatattgaagctgctgaacttagcatcactaaatgggattccttacatggcgacgaccatgtctcctactgtaacattgcttctgttttctccgaaaacaatcgtgatgaagccaaacagtatctgagttccattaagggtttgcagaaagctatgcgatacttggcttcgcttgaatccacttccgataaacttgtgcgagcccaaacgctgatgcaaaccgccatgaaacgcctcgagagggagttttaccagtttctgaaggccaaccggaattaccttgacccagagtctgtttccaatcactcatcttctagaccatcaggtttccaggtcgagcttttcagattcagaagaagatgagtctgagaacgattccatcccggaagtggagagaggctcgtcggctgttattgcggatttaagagccattgcggaagccatgatatcagctgggtacgctaaggagtgtttcaaaatttacagaactattcggaaatcgatcgtcgatgaagctctatataatctcggagttgaa

SEQ ID NO: 18952 - DNA, 867 bp, Gossypium hirsutum
  Clone ID: GOSHI-09MAY01-C81314_2
tcttacgcgtgggaaaatgggagaaatgctactgctaactttactactggcatgtggtcactgaaacccattattttttctccatcactttccctagagttttttaagtactcaacaataaagaaattcccagaaagcctacatacccagaagatatgtacaagaaccaactgcaagagttggctcaaagaagttgctttaatctgccgtcttagtcatgcatccgagaaggacctgatcatgctcctcggtttaaagctactgtcaattttaatggagagactttcgaaagccctacattttgctctactttgagacaagccgaacatgctgcagctgaagtagctctaaatacgcttgccaacagaggcccttccaaagcattggctgctagaatcttggatgaaactggtgtctataagaatttgcttcaagagactgctcatagagctggtttaaatcttccagtctacacaactattcgatctggaccaggccatgttcctaccttttcatgcatggttgagctcggagggatgagctttactggggaaccagctaggacgaagaaaaaagcgcagaagaatgcggcaatgtctgcatggtctgccttgagaaagttgtctaggtatggttcatcttcatcttcaccaccttccttggagtctcaaggaagagaagaacaagtgcaaactgtcattgctcgttttctttcatcattacaaccatcagaatcaaagcagtgtttgcaatatgattgccagtatggaaagtctagatcaattcctgtatgtatagacctaacccaatcaaccccgaacctatactcaatgcagagtcaaagttggccttaccgtttctctcctg

SEQ ID NO: 18953 - DNA, 589 bp, Gossypium hirsutum
  Clone ID: AW187596.1
ctctcttccacagatctccctaagcttgtgccctcctcccttttttctcaattcgagttcacttccggcaccaatccacctccgccgatccacctccggtcctccacgcctccacccatttccagaatcataggttagagcgaagctacaaacgtcttctacctttgaatttcaaagatatgtacaagaaccaattgccaaagttggctcaaagagttgctttaatttgtcgtcttcttattcatgcatccgagaaggatcagatcatgctccttggtttaaagctactctcaattttaatcgagagactttcgaaagccctactttttcctctactttgagacaagtcgaacatgttgcaatagctctaaatacgcttgccaaaagaggcacttccaaagcattggctgctagaattttggatgaaacaggtgtttataagaatttacttcaagagactgctcattaagctggtttaaatcttccagtgtacacaactattcgatctggaccaggtcatttcctaccttttcatgcatggttgagccttgtttcttccacgagactgaacactcaaaggccgacatct

SEQ ID NO: 18954 - DNA, 674 bp, Gossypium hirsutum
  Clone ID: GOSHI-09MAY01-C81274_1
tagggtttagggtttcttcttcttcttctctcccctttttttgttttacaggaggagttaccccgaaatcaagcttatgccgagtagccgataacaaagataaaatgagaggattgaagttaccgttgagccaaacccaaagagtaagacttcaaagggcattcgaaaagcttcagtctctatctgctaaggccaattccgacgcttccgttaccgtcgccgatgctattcctgtcaactacgaagacgcttttctcaagggatatggaacaacggacctcaacggcgaattggtggcaactgtgtgcggcgttgtggagcgcgtcaacaaactggtttacgtacgcgccttacgcgctaggtacaagccagaggttggggatgtcgtagtgggacgtgtagtcgaggttgctcaaaagcggtggagattggaaattaatttcagccaagatgcggttttaatgctttcttcaatgaacatgcctgatggtattcagagacggcgaactgctttggatgaactcaacatgcgaagtatatttgaagagaatgattttgtctgtgccgaggttcgtaatttccagcatgatggcagcttacaactccaagcaagaagccaaaagtatggaaagcttgagaaaggccagttgctcataattgatccttacctggtg

SEQ ID NO: 18955 - DNA, 539 bp, Gossypium hirsutum
  unsure (1)..(539): unsure at all n locations
  Clone ID: LIB3829-015-Q1-N6-A1
aaacacaaattggattttcattccttgtgtagaggcccaatttcgccctggcctaagacccacaaaaaataataaacaggaataaaagcccaaattttcatacagtccattacaatatgngaaagcccaatttaaaacccaaaactaataaaaccctaagacccaattacattggcccaaatagcccaaagctcaaaccatgtttgcagcaaaccctagcccttgtgccgcagccaactactccatgtatggcctccttgcgccgcaaccacgaccacctcgccacgttagcacgcccgtacgcctctacgtcgccttgtacctgcaaatcaggctaaaataacagcacaaaatggcaaaaagaatgtatttttctttctttttatttcggctatataaagccatacaaggttgtattttttggttacagagagaatacacgaaaatatacaatcatcagaatcaaaagaacaaaagtttcaaagatctatttaattttatttttactatttttatttcttattttggaatgaatgtgt

SEQ ID NO: 18956 - DNA, 492 bp, Gossypium hirsutum
  Clone ID: LIB3585-016-P1-K1-B10
aaactgctttccccattttttctctaaaaagggtttggggctggccaaaagggttcaatggctctccgtcgtggccccgccgtgaacgacggttagagacacgcggatctggcccttttttaagccctttccaaaccctttcccttttctctttaaataaaaaataaaaaaaatctagatctaggatattcaaaacggaaataagagagaaaaagagggaaaaaatgtaaatagcgaagggaagccttcattttcgttgctttttcgaccctcgtcggaacccgaatgggttttatgaaatttggattgctggaaatccccacaatgaaggaagacgcgcctaaaggtacaaggcgacgtagaggcgtgcgggcgtgctaacgtggcgaggtggtcgtggttgcggcgcaaggaggccatacatggagtagttggctgcggcacaagggctagggtttgctgcaaacatggtttgagctttgggctatttgg

SEQ ID NO: 18957 - DNA, 311 bp, Gossypium hirsutum
  Clone ID: LIB3584-040-P1-K1-A9
cggacgcgtgggctatatctcataattgatacttacggctactgctgtcataagtagaaagtgcgggcacacaggccccaaatcgatgccgacatttgcagaacttatggctgctttgaagccattgctaaagcctataacaaatgcacaagtacctagatcaactatatgggcggagttatagccatgacagaagtgagccacgacagtgtcgacgaagtcagtgtatgtatggtggccaaatcgaattgcacggggctcggatgaaaaagattgacgataaaacacgggtactcccatttgggaatgat

SEQ ID NO: 18958 - DNA, 305 bp, Gossypium hirsutum
  Clone ID: LIB3584-040-P1-K1-A8
cggacgcgtgcgcgatattccagatgacatagatcctgccatagcagaaatcatgcgaaagtgcgggcacacagaccccaaatcgctgccgacattagcagaacttatggctggtttgaagccattgctaaagcctataacaaatgcacaggcgcctagatcaactatatatgcgagtaagacccattacagaagtgagccatgacagtgtggtcgaagtcagagtatgtatactggttacgtcgatgtgctcatagttccgatgagatatgaccgaacattgcacaacgtggtactcccatttg

SEQ ID NO: 18959 - DNA, 634 bp, Gossypium hirsutum
  Clone ID: GOSHI-09MAY01-C82494_1
ttgaatttaaattggacaaaaaggagtggtctcgattaatggaatttcaaatcaggaattgtctgaggatgaatgccaacaactgcgccagagcataataaaaagcgggcagatcaagtggtttactgtgggtgagattctggagaaagcaatggcacttcaagcagtaagggtaaatgactgtctggactcagagattttgcgggttaaaaatctttgcaatcaagcaagcaagaagggggacacgaaagagctcagagaatgtgaagaaaaattgcagcttctgaactcacctgatgaacggcaccgtaggctgcatgaaattcctgacatacaccgtgatccaaataggaatctattttctgatgaagcttctggagagttggatgagaagaaaaaaggaatggagctatctgtaaatagtatcgaggcagataaaatatggcactatcaagatccacttgggaaaatccaagggccattcgctatggcaatgttacgcggatggagcagtagtggtcattttcctcctgaattgagagtacggagagtaagtgaaaagcaagaaaactctattcttttaactgacgctttggttgggcagtacagccaactgcaacaattggttcagcac

SEQ ID NO: 18960 - DNA, 599 bp, Gossypium hirsutum
  Clone ID: LIB3825-005-Q1-K6-G7
gtttttcgatcttaccaaagaccacagggattgatctatggaattcccttatgagagatggaagaaaattacaggaggttgaaggagataaacaagaagatgagaagggagattagagaatgggggagacttgaatgaacttaacattaaggaactgcaagctcttaaagctaaaatggattcttctttgctagctatacgtgagaggaagcctccattgaaaagactcctgacaatgtttctaaggtaccatatcatcaaaactcgaacagacaagcacaagaataaggtaaggaatttggaggaaagacatgcaaatcttgtcatggacttgagaatgtgaagaaaaattgcagcttctgaactcacctgatgaacggcaccgtaggctacatgaaattcttggcatacaccgtgatccaaataggaatctattttctgatgatgcttctggagagttggatgagaagaaaaaaggaatggagctatctgtaaagagtgtcgaggcagataaaatatggcactatcaagacccacttgggaaaatccaagggccatttgctatggcaattttacgcggatggagcagtagtggtcat

SEQ ID NO: 18961 - DNA, 677 bp, Gossypium hirsutum
  Clone ID: GOSHI-09MAY01-C82484_1
cagttttgtctcttagaactacatggttgctttggaattgggcttgtggctgaagttgggagggtgtgaggggggggacaggtcactatgggaggaggtgatattaatgcttctaaggaagcggccagcaaagacgtcggtgatgctgtcaccgtcagtatcagttgttcatccggctccaaattctccgttcagaccaacctggattccaccgtcgaggctggttaaggcacttctggcgcgaaactgcggtgttcccgccgatcaacagcgtttgatttataaaggtcggatcttgaaggacgatcaaacccttcgaagctacggtttggaggcagatcacactgtccacttggttcgttctgttgcaccaagagcgccaccgccgacaaccaatgcagctgggtcaattggttccggtgctttgaacacttctcaaacaaatacaacagctgttgacttagatgatgctggggcattgggagccggaggggctggtctaggtgcttcactgtttcctggacttggtgacagtgctggtttatttggagctgggctcccaaattttgaacaattacaacagcaattgactcgaaaccccaacattatgagggaaatatcgaacattcctgctgttcagaatttgatgaataatcctgagatactgtataacttga

SEQ ID NO: 18962 - DNA, 624 bp, Gossypium hirsutum
  Clone ID: GOSHI-09MAY01-C83924_1
tgaaattctggtactacacgaaacctccctatccatggccgctctcaacagtatcgcctgccgtaaacccatcgttaaatcccagagtttccccgatttctctccaattctcccctccactcgtctctctcacaaaaccagctcaaacctgttaaagctcaaccccaaaaacagaagaaattgggtcattcaatcagtcacagaggacaaagaattggctccaaagaagaacaagtcattcccatgaacataagaagctttttgttcccaaatggctccaaaactttggagggcttcttcttcagaaggttggagggcggccacggtgatgaatgggtgatggccatgatggatgtcgaagaagttgaggtaagtagaagcaatcaatggcctctattgttctttgggatttggcacgcttgctgatatccaagttgcttacaattgatcatgaattactggcatggatggacactttttgaggtactccgatatgttccaaaacatattggattgcatacgacaagctcttaaagccacccagtgatagccaaatggcatagtggatagctattcataggagatggattgcacatgtattaaggaagcctttttcacttgacc

SEQ ID NO: 18963 - DNA, 476 bp, Gossypium hirsutum
  Clone ID: LIB3493-037-P1-M1-G1
cccatctcgcctcacttccctttctttccttctctttgcctggttcctctgtttttcattgtgttcttttggtcatggctaagcagatggatgatgctgagttttggcttccacccaagtttttaatggatgatgactttgttttggagaaagagaagcttcagagaagcaatattggcgaaaacaaccctaagtcgttggtttcggttcatggtttcccaactgagttcccctacgagttcgactattcctctgctctcggctctcctgttgagtccgttgttgggtctatcgaaactgaaagcagtgacgaggatgagtttcttgctgggctgactcgtcgacttcctctctcaattactcataaactcaccgttcctagcttttcttgggacaaaaatgagaaaactggagctttggcgagttcaccccagtcaactctgagtgggttcgtaagctggtcagcttcaagcaat

SEQ ID NO: 18964 - DNA, 348 bp, Gossypium hirsutum
  unsure (1)..(348): unsure at all n locations
  Clone ID: LIB3829-022-Q6-K6-F2
ggttcatgggttcccaactgagttcccctgcgggggcgactcttcctctgctctcggctctcctgttgagtccgttgntgggcctaccttttttttttttttgacnacgatcancnncttggggggggggggggcnactccctctctcaattactcataaactcactgttcctagattttcttgggacaaaaatgagaaaactggagctttggcgagttcaccccagtcaactctgagtgggttcgtaagctggtcagcttcaagcaatggcagcccaaatggtccttcccacgtcccttatncaccaacatctcctttggctgcccaaactgacacttgggatctca

SEQ ID NO: 18965 - DNA, 586 bp, Gossypium hirsutum
  Clone ID: GOSHI-09MAY01-C83444_1
ctggtttcagacacttcctaaatccctttttcgtcgatttccctcacttccagttattcaagctcttaacctgatccgagggtcccaggttgtgatgcgggaggttgctattgaaatagagaatccggaaggtggatcacaaggtatcagtccaatgagacaaccgctagagccactgatacgtggacttccccatgatatcgcgcttttatgcttggctagagtccctccagaatatcatactgtcctgaagtttgtttctaggagatggagggatttggtgcacggtgaacggttgcatgctcatcgtaaaaagcataatttagatgaaacttggatttatgctttatgtcgacacaagttcgagcaggtttgctgttatgtattggatcccaattcttcgagaagatcttggaagctaatgcgggagcttccgtctcgcagcttgctgagaaaaggtgtaggttttgaagtgctgggcaagagactttacttgatgggtggctgccgatcgtctgaagatgctactgatgagacctactgttacgatgcttcgaaaaactcttggactgaagctaatccctta

SEQ ID NO: 18966 - DNA, 339 bp, Gossypium hirsutum
  Clone ID: GOSHI-09MAY01-C83164_1
ttcacgcgtccgggtggacttgctgacatcaaaattgacgagtatatgcgaagcttctctggagatgtcatctcaagagcctgtttcggaagtaattattgtaaaggagaagaaatcttcttgaagctaagagctctacaggaggccatgtccaagaaaggtttatccactggcgtgcctggaatgagatatcttcccatcaaaagcaacagagaagcttgcgaacttgaaaaggaggtacgtgatttgatattgcatgtggtaaacgagagaaagggggcagcaacatacgagaatgacttactgcaaatggtggttgacggagctaaaaacagtgac

SEQ ID NO: 18967 - DNA, 635 bp, Gossypium hirsutum
  Clone ID: GOSHI-09MAY01-C118383_1
aaacagaacagggaagaaagagaagggtaaaaagaatagtgatgatgccatgaaaattgatgttaacgaaactaaaagcaagaacaaagaagttagtgtaagcgatacaacactgcatggggaggagaagcaacttgtagaagatgagggcagtagtggtgaaaaggatgataaattgggaaatggtgataaggtttcaaagcaacctgttgatagaaaagggaatacaaagaaagaaacaaataccaaatcaaataaatcatttaaaggaaagaaagcaaaggcaacggcaaagcattccagcaatgtatgtgagacatgtggagaggaattccaatcgaagaataaattacataagcatctgggagacagtggtcatgctacgttgaaattccgatgataacaatgaggtatcctatatcactatttgatttattatcaaatgcagctaattcaaaagtagcatttccgattttggattttattttttattttttcattaaaaacatgaacattgaccaggtcttgaatggaaagatctattcgtgtaaaatgttacccttattttgagttcaatagattgaatgtggctttaaacagccataaaattcgttattaccctgcttgaaaaaatt

SEQ ID NO: 18968 - DNA, 562 bp, Gossypium hirsutum
  Clone ID: GOSHI-09MAY01-C119593_1
ctcacgcgtccggttttattttcattaaacttgcttaaggagagaagggtgacataaatcaatcagtttcttatttgctgctggggggactgacaggtttcagtaactacaagcgatggcagtggcaaatttccctgcacttcagtttaaaacttgcgatatttttcgttccactccaaaatgtttcaaattgctccccttacaaaagacaaatctttttgttaagacattagtagttgaagcaaaggcaaataccagaacagaaagcgctaaaattaggaacagaagaatgctaaagaagtttaatggcaccccaagaagaccaagactgtcggtattctgttcagagaagcagttgtatgctatgttggtcgatgacaaaaacaagaagtgtttattttatggaagcactttgcagaaatctattcgtgacgatcccacttgcaccaccattgatgctgctaacgtgttggtgaagagctcgtcaaggcttgtattgatcttaacataaacgaaatatcatattatgatcgcaatggatttgcacgcggtgagagaatgc

SEQ ID NO: 18969 - DNA, 420 bp, Gossypium hirsutum
  Clone ID: GOSHI-09MAY01-C119603_2
tcttcacgcgtccgcccacgcgtccggtgatgtgggagacatagtgttacaacaaggcttgaacttggttcaagatatgtcaagcaagacatacaacacgtttagtggctttccggtggtagacagatggagaagctgggagaattttaaaacattaaatagcacagatgcagtggaggaccctgaaaagattaaattactggtgacagtcgaggatacacgtgtgggaattcatttgggtgatcaagatcggattttcactccttttgtgcaagctgacagttcaacttcacgacattatggtgggactggtataggattgagcatcagcgtacatctggtggaactcatgcatggggagatagggtttgtcagtgaacctgacattggcaggactttctcatttactggatcttttgc

SEQ ID NO: 18970 - DNA, 695 bp, Gossypium hirsutum
  Clone ID: AI055728.1
cctgggcggtttcggcaaataattatcaatcttgttggaaattcaattaagttcacgcaggataagggacatatttttgtctcagtgcatctggtagatgaagtgaaaggtgcatgtgatgtgggagacaaagtgttacaacaaggcttgaacttggttcaagatatgtcaagcaagacatacaacacgttaagtggctttccggtggtagacagatggaggagctgggagaattttaaaacattaaatagcaaagatgcagtggaggaccctgaaaagattaaattactggtgacagttgaggatacaagtgtgggaattcattttggtgctcaaaatcggttttcacatcctttgtggcaactctcacattaaatttcacgattttgggggggaattgatatggaagggccttttgcaaccattggggggaacttacctgggagaaaatgggtttccaggaaaccctgtttgggaagactttcaaattaacggattttttgcaagggaaaaggggtttttggtatccaggaggaacattttgacccgggtttcaaatttaagggttgaaacccttggttgtaattaaggaaccttcaactggggccataaaccctttacggatttggaatattggggataaccttggtttggatcaaatccccttttgtgacaacttgggggaaaaggatttt

SEQ ID NO: 18971 - DNA, 954 bp, Gossypium hirsutum
  Clone ID: GOSHI-09MAY01-C119363_1
atttggttgcatttggtggatacaatgggaaatataataatgaggtttttgttatgaaactcaaaccaagagacttatctcatccgaagattttccagtccccagcagcagctgcagcagcggcttctgttactgctgcatatgccttggcaaagtctgaaaaattggattttccacaaataatagatctgaactttaatggagttgaaaacaatgttcctaaaaaggatatcaaccttgaaattaatgcaattaaagaaaagaaggtggtgttggagtcgtcaattgatgaagccagggctgaaaattctaggctgagagagaagattgatgaattaaagcaatcatactgaattgtcgaaggaactccaatctgtccaaagtcagctgatatcggagagatcaagatgctttaaacttgaggctcaaattgcagaactacagaagatgttggaatcattagagtccatagaaaacgaagtgcaaatacttaggagacaaaagtccgcactggagcaggagatggaggtttcatctacccagcaacaaggttcaggtggtgtttggcggtggatagcccggggcacatagaagttgcatatttttcataccatcattgctacggtatctccgaagcaatggctaggtaagttccaatcccactgatatcagagagtgcaatctactcgaatatcacttagattggacatgcgggttacatttgtgttcgttacttttcttaataagtgtttgtgagctttcgagtttgaccattaaaattttctcgaagctatagaatctgaagttgttaaaattgtactttccgttgtcggttgtatcagctcttcttttaattttcaagtctttttattccgtatcctgtaaaccagtatactcacgcatgttttcatatttgattgatcatattataccaaatcttgacattttcctctg

SEQ ID NO: 18972 - DNA, 494 bp, Gossypium hirsutum
  Clone ID: GOSHI-09MAY01-C115813_1
ttttctaatggctcttctacctctcctcttctcttctcttcttgttgtttctttggcagaaatgtcgggcaagattggagtaaactatggtcgagaaggggacaatttgccatcgccatatgaatcaattcagatcatgaaatccattaaagttggccaaataaagctcaatgattccaaccctgaaatattgacactcttgtcaggaaccaagatccatgtcgccgttacggttcctaacgatgatataatccgaattggttcgaacgattccatggccgaacaatgggtgcgaaacaacatcctgcctcactatccggataccatgatccggttcgtgttggtcggcgatcgagtcgtcaactccaacatggatgtcaatgggacaatggagcagagccttgtgcctgcaatgcgtgggattaagagtgccctgactgctcatggtgttaaaaacgtcaaggtctctacgacgttaggaatggacgtggtgc

SEQ ID NO: 18973 - DNA, 550 bp, Gossypium hirsutum
  Clone ID: GOSHI-09MAY01-C115723_1
tcgtttaggccaagatttgaattgccagaagctgtggttatggaaattctaaatgcttccagttaaatcccttactcgcttcaactgtgtttgtaagtattggtgttcttcttttcaaactcctcatttcatttccaaaaattatcacaacaaccttgaaaacaacaaccttaatctacttcttagtcgctgtgatggtaacaccttccaaccttatttatcttcactttcaaatgaaaaagatcaaaactatatagtaaaacaaaacattcacttgcccttttttgaggatgatagcccctctgtttatggtgcatgtcatggattattgtgtttatttgattcttcaaaggataaggctgccatttggaacccatcaacaagagagtttaaaatccttccaccatcttcaatccaaccccctccatatttttccccattcgaagaaacctaccttacttttgatgaacgttcttttaacgacgctgcttttggggtttgattctaaactgatgactacaaattcatacgattggtactcttacttttg

SEQ ID NO: 18974 - DNA, 421 bp, Gossypium hirsutum
  Clone ID: GOSHI-09MAY01-C115713_1
cttcttttccggttcttgaattctcccaaagccaaggacaaagccttccctttcacacttttcaagtttcaatctaaaaaagaacatgggaagcagaatctagggtttgacaacaccaagtcttaacaaggtctgtttttttcttttcttttgggggtattttcccttttgtttgctcattgatcctttgcctgtttctgttcttcttcgccttctagggaaaaagatttgtcccttaaagctaaattcggcttggattctgtttgaaaaaggcccttgtttggtctttggattatctcaaatttgaattttgagtgatgggtctttttttgttttcctttaaagatctagttttttaatgaaacttcgttgctgtttttgtgtggttaattttgggtttggggcttgggttttggggggt

SEQ ID NO: 18975 - DNA, 506 bp, Gossypium hirsutum
  Clone ID: uC-gsflmaxxa040d05b1
tccacgcgtccgcccacgcgtccgggtgttgtgcttttggtgtgcagctaagtacactcctagccataagtgtactaagtctcaattgtatcagttggttgtagagcctcaatctgatatggaaagtgaagtcaagagtctccaatctgaagagtattaagactgtccggatcaatttgaacctaatgactaagaggaggagacatgtacactattgactatatctttgcatgccttacaagggtcgcaaagaccaagaaccatgagggtggttgcacaaatagggaattccaatgtactatactagtggatttaggaagcacccataattttatggatgccaagttggctcgacagtcgaaccttcctgtggaactctctactaagctgcaagtcattattgctgatgggggtatcatgtctactcagaatgtgtttatatttgtacagtggtaggcacaaggtcagcaatttgtaacaaatttattagtcttagctctcaggat

SEQ ID NO: 18976 - DNA, 343 bp, Gossypium hirsutum
  Clone ID: uC-gsflmaxxa040d10b1
ttcttcacgcgtccgatttcagttctcaactttcattgctgcagattgataataagatcaataaaagatcatggagggagaaacttgggaaatgtgatttcacattagcctctttacttctactacataatcaaagttcctctgggtatgagagacatctttctttgggatgcctccttaatccacatgaaattattacttcactgcagcactatggtagctggatagtctggcgtaacactgggggagttgaccattaaccattagggcggttgcacaaatagggaattgcactgtactatactagtggatttaggaagcacccataattttatggatgttt

SEQ ID NO: 18977 - DNA, 602 bp, Gossypium hirsutum
  Clone ID: GOSHI-09MAY01-C115033_1
tctcacgcgtccggtacccgtactggcagttggagtccctcagtgagatgtcctactgtgcgcatcaaaggaagttgaccatcatccctgttcccctactccttggctttgtacttgccgggtttctgaaagaaactgccttggaactttctcctcttctcaaggatgcagaagttccatggcacctgattgcaatagcaatattcttcacattgatcaaactgccaggcccatattacccgtactgggggcggattttcattcctcacattgcaaatggagcattattcaggactctatggtttatgtttttgtggtatcgcagatccaaaatatcaggagctgagttgccaaatagtctggtaaatgtcagagattctgaagttgaataagccgtaatctcaacagctcgcattctgtgtctgagacacgagccaggacaagctgcttgggaaaatatatcagaactggagaaggcttcgacaaacctaaccggctggtgcttgggattttcagcttgaaactttgagcacaaaaaatgccccaatcttttattttttctgtgtgtgtgtcttgtttcatttaaccttgcgttttgggag

SEQ ID NO: 18978 - DNA, 601 bp, Gossypium hirsutum
  Clone ID: GOSHI-09MAY01-C115263_1
aacaggtttattttggggaggcaaaaatggctgcaaagttctttgctgaagtaggatttccatgtccaagtcgaagaaatccatcagaccacttccttcgttgcataaattcagattttgacattgttgcagaggctctgaagggatctaacagaataactgaacttaaaaatacattagatcctttggcacacctaccaacagcacagataaagacatggctcgttaagaaatacagaagctcagattatgcggcaaaggcaagagcaagaattcgagaaatttcaggcattgagggactcgttattgagaaaaaacacagtggtgaagcaaaatggttgactcaactatcaactttgacgaataggtcctttgtaaacatgtcaagagatttggggtattactggttaaggatagcaatctacgtggctttatctatttggggtggctctattttcttcgatgttggaacaaactacaattcaatcttactcgtggggcctgtggcggtttcatatcaggtttcatgacattcatgtccataggaggcttcccatccttcattgaagaactcaaggttttttatcgggaaaggcgcaat

SEQ ID NO: 18979 - DNA, 551 bp, Gossypium hirsutum
  Clone ID: GOSHI-09MAY01-C116983_1
gactaatgcagctgtaatagcaatgtccagaaactgtccaaatttagttgttttccggctatgcataatgggtcgccacaggcctgatcatgtgacgggggaacctatggatgatggttttggagccattgttatgaactgtaagaagctcactcgtcttgctgtttctggtttactgacagataaagcttttgactatattggacgatatgggaaactggtacgcacattatcagtggctcttgctggagatagtgacatggcgcttaaatatgtactcgagggctgtccacaattgcaaaagctcgaaattagagatagtccatttggagatgctgctctttgttctggtttgcatcactactacaacatgaggtttctttggatgtcttcatgtaaactaactcaccaaggttgccaacagattgctcgtgctatgcctcgcctagtggttgaagtgattagatctgctgatggagaagaggtgtatgaccgtgttcaaacattatacatgtatagatctcttgaagggccaaaaaatgatgctccac

SEQ ID NO: 18980 - DNA, 525 bp, Gossypium hirsutum
  Clone ID: GOSHI-09MAY01-C116513_1
gtccattgatcaagtctcatcgccaaagatcaccgctggttttggggtgccttcaatccatccctgaaatctggttccccattccgtccccagctcagctctctttctaaaatacaactcctgatttagctttttaatttttgtggatcaagatgccagagaggtcaaaatcttcttctgtaagtaatcttccactcatcctggacattgatgactttaagggtgatttttcatttgatgcattatttgggaacctggttaacgagctcctgccatctttccaagaagaagaagcagatacagcaggtggacatggccttggtgggactgaggctctaccaaatggacatgcccgtgcctcttccgatgcagcaaaatttgcacaaggagactctatccctctatttccagaagtagatgctttgctatcactgttcacggattcttgtaaagagttgattgatcttcgaaagcaggctgatggaagactccacactctcaaggaggggtttctactcaagatgc

SEQ ID NO: 18981 - DNA, 646 bp, Gossypium hirsutum
  unsure (1)..(646): unsure at all n locations
  Clone ID: AI727772.1
aaccccccatcaccttctccgcaagaagggtgtcatcttccattgaattacctcaagtctatttctcttttctcatttgcccatcaaaaaaagtattaagaaaggaatagggaatgcggaaagatgtctatgcacgctgagaattctctatatcaactccacaaggatgtatccggatctggattacccttattctttctcgatgaggtcggatactcaggaaacagcagattcatgctcggtgttcaagttcttaacagggctgaaaacaaaatctccaccatgttgatgaatgaccttgctgaaaaaggttgagtttttcgtgttataggaagttctcttaagagtacatttacatatatatatattattaatactgcaggagataatactcttttttggagcctgttaggattaaaatattttaaaatggaaaataangggaaggtgttgatgcaaaactatgaattcngaaaaatgttgggccaagggaattttgctaaattttactatgncaagaacattcaaaacaaccaaaacgtggcgattaaggtcattgaaaaagaaaanggtcgtgaaattagcatgatcgatcnaaccangaacgagatatccactatgagcctcgttaagcacccgaatattt

SEQ ID NO: 18982 - DNA, 503 bp, Gossypium hirsutum
  unsure (1)..(503): unsure at all n locations
  Clone ID: uC-gsflmaxxa061a06b1
ctttcccattgaattatcattgcnttttattttgattttgctgatgaatctgtttctccagcgnngaaccatgtgcacgctctgnaattggttctgggtatggaacagtatgtttaatctcacatgaaatctggtatatttgagcaatgaacaaggaaccaaagttagattctgcacgaattaatacaactgcgagcttagatcatgttcttcgactctactaaatgctggtgacgattgaatcagaaaaaaggtttacgttgaacttgctgtgattgttggttgatatggtaccaatgttgatgtcctgcagcagatggtgttgaaatttggagcttttatgactgctcggaggtgataaccatgcatgccaggcgttagaattattgcctaattgactctaatagaattagaaccgaatagggaatgcggaaagatgtctatgcacgctgagaattgtctatatcaactccacaaggatgtatccggatctggattaccct

SEQ ID NO: 18983 - DNA, 533 bp, Gossypium hirsutum
  Clone ID: GOSHI-09MAY01-C116193_1
gcattctctgaggtcaaagctggcatttttattgttcttttatattgcctttgttttttttcttttcccctcacccccttcccttatttactactcttcccaatccttccttttctctcattttctcatccttatttattagtgaaaagaaaaaaaatgtgcagcattctttgagagcaagccaaaataaaaacaggttcatggttgattgagttttggttcttcttcaacaaaacaaaaaacacaatccaaccccaatggctgtttctccttgtttgagtgttaatgatcaaaagaaacactggtggcttagcaaccgaaaggttgtggataagtacattaaagatgcgaggagtctgattgcaacccatgaacaaagcgagattgtttcggctttgaatctactcgatgcagcattggctatttcgcctcgttttgaggttgcccttgagctcaaagctagatctttgctgtacttgagacgatttaaggacgtcgccaatttgctccaagactatatacctagtcttaaa

SEQ ID NO: 18984 - DNA, 695 bp, Gossypium hirsutum
  Clone ID: GOSHI-09MAY01-C116163_1
atcttcgtcaccctttggtaatgcggggatggtgcctcctcctatgcctggaaaccctgcattctcacaagctcaactcagcgctggttttcaagctcagtatcagctatcccaagctcaggcccttgctcaggctcagtcgaaagctcaagctcaagctcaagctcaagctcatgcccaactccaagcacgcttacaagcccaaggtttggcccttaaccaggctcagaatgctggctttgggacattaggttcgtcttcaccctccatgtctactcctggcagtgcaagtgcaaagaggatccttcaaaggccccccatgcgccctcctggtgttcctatgatgaacacaatgtcacctttgagaacaatggaacttacagccgctgcacgtagaaagaagcagaagcttcctgagaaacaactacaggatggagtggcagcaattcttcctgaatctgctttgtatacccagcttcttgagtttgaggcacgtgttgatgctgcattagctaggaaaaaagttgacatccaggaagcacttaagaacccaccttgtgttcagaaaactcttcgaatatatgttttcaacacttttgctaatcagattaagacaattccgcagaagcctaatgcagaagcctctacgtggacccttaagattattgggagaatcctggaagatggagtagatc

SEQ ID NO: 18985 - DNA, 524 bp, Gossypium hirsutum
  Clone ID: GOSHI-09MAY01-C111103_2
gtcgctcacgcgtccgcccacgcgtccggcaaaaagaagtgaaaagagagaaaaaaactgctctattctctcttttactccacacgtcggcactctcccccttttcaactccgactgaagcgcaccaagggcaccgacggcgcaccaccactaaactggaggagaacatgggctatgcgagggcaacgtgctgcgatgttgaggcgattgttgcagcgcggaggaagggaagccagctgttgcgttgttgatttttttttagtttgggttactgtttgggtttggggctgttaattgggccgagcaatttgggcttgtgcaccatgaactgtatatatggtcaaaggacgttgaatagtgcgtagacttgttgcataaatattgccatgatgttttggatactttcatagcttaattgttcttaggaattttggacttggaccttaatatgttgattcttgctcggccaaaataaaaaaaaaaaaaaaaaataaaaactgaacaaaaaaaatgagttaataaaa

SEQ ID NO: 18986 - DNA, 428 bp, Gossypium hirsutum
  Clone ID: uC-gsronu33B044h01b1
cccactcgttcgaaaaaaactgctctattctctcttttactccacacgtcggcactctcccccttttcaactccgactgaagcgcagcaagggcaccgacggcgcaccaccactaaactggaggagaacatgggctatgcgagggcaacgtgctgcgatgttgaggcgattgttgcagcgcggaggaagggaagccagctgttgtgttgttgatttttttttagtttgggttactggttgggtttggggctggtaattgggccggagttcccccgccccgccaccatgaaactgtttctacggccaaaggacgttgaatagtgggtagacttgttgtataaatattgccatgatgttttggatactttcatagtttaattgttcttaggaattttgggattggacccttaatatgctgattcctcgcc

SEQ ID NO: 18987 - DNA, 489 bp, Gossypium hirsutum
  Clone ID: uC-gsronu33B178f03b1
ctttctagtcctttgtttttcgactcttgctgcttggacaaattcaagagatcaactttgctatcaaggtgattccagatcattttcaagtctcaactcctcccagtgaggattctcttcaaaacagacgttcacctgattcacaaccaagtactggaaattcttcgaggataggtcccgcagcagtttatggactcggcgaaaattgagaagggctgcattcacgttgaatctggtcaggttacgtgggttgccatggagtggtgctgatggtcaggaaaaggttcaattgactgctgcagagttggaatcactaaggccggaacttgccgatatagaagagggagaagctcactctgaagctcagttggaacatatcgatgtaattttgcggtcagcacgtctttttggctatttgcacatacgaagcatgtggacagcgttacccggagaacctgctcctattgacgatatagatgttgacgactg

SEQ ID NO: 18988 - DNA, 447 bp, Gossypium hirsutum
  Clone ID: uC-gsronu33B116c10b1
tttggaaattaatttgcttatcacttagacttcagtcttcatacaccagcttttctggaatattgtctcgggttgtaaagccttctgaataactcagggactagagcacttattaacaaactctggacttggaagcttgttaatctcatcttaagcttggttgcactatacgagtatgattgcaatttttggttttattggtaataagtttgtacatcctactatagtgaatataactttatggatgacggttttgggaagatcaaggtgattccagatcattttcaagtctcaactcctcccagtgaggattctcttcaaaacagaagttcacctgattcacaaccaagtactggaaattcttcgaggtcccgtagcagtttatggtctcggcgaaaattgagaagggctgcattcatgttgaatctgttcagtttacgtgggttg

SEQ ID NO: 18989 - DNA, 649 bp, Gossypium hirsutum
  Clone ID: GOSHI-09MAY01-C112533_1
agttgttgcagctttataagaagaaatgtcaaggggggattaatacagagataaagcggggtttaatcagcggaacaggattcggagtttccttcttctttctgttttctgtttatgcaaccagtttttatgcaggggctcaacttgttgagcatggttatacaacattcagagatgttttccaagttttctttgctttgaccatggcagctataggaatttctcaatcgagctcctttgctcctgattctggcaaagccaagagcgctgccgcttccatatttgcgattattgatcgcgagtctaagatagaccccagcgacgagtccgggatgaaactagaaaacgtgaagggagacatcgaacttcatcatgtcagctttaagtatccatcgaggccggatattcaaattcttcgagacttgagcttgtctattcgttccggcaagactgttgcattggttggagaaagtgggagcgggaaatccacagtaatctcattactgcagagattttatgatcccgattcgggacgtatcagtctcgatggtgtcgacatccaaaagctccaattgaaatggctgaggcaacaaatgggacttgtgagccaagaacctgtattattcaatgatacaatccgtgccaacat

SEQ ID NO: 18990 - DNA, 547 bp, Gossypium hirsutum
  unsure (1)..(547): unsure at all n locations
  Clone ID: uC-gsronu33B106e09b2
atcgttacttgtcttccccaacttcgaattcattgtattccaggtatatggaggggaagctaggatttccacactacgaaagctattccccttgatggaagacaaaaagagcctagcctctttggcggaaagggtccatataaaaggaaaagcttctttgttggctgctgttgattactatgtcgggatgcatagtgacatctttgtctcagcttctcctgggaatatgcacaatgctttggtgagtacttctgactcatagaataatgcaccatggattggtgaatgcaatgaattttcctgccttgtgctgggtaaattgtatacatatgaagctgctaatagatgacagttacaatgatgcaaacaggtgggacatcgaacttttgagaacatgaagaccataaggccaaatatggtattgttgggccaactattccttaacaaaaacatcagttggtcgcagttccatcaggcaatggtggagggcatcaaacagacaggggcactcangttaagtaaccaaacagtccatatatacatatct

SEQ ID NO: 18991 - DNA, 532 bp, Gossypium hirsutum
  Clone ID: uC-gsflnu33B126g11b1
tctttgggagatgcccttgtccatcgcctaacgtatcctccaggtcaaagtcaagcaagtagcactgactatctcagggagaccaccgatcaaaatggcaaacaaaatccgcaaaaatttgttgtgttacaccttcgatttgataaggatatggctgcccattcggcctgtgatttcggtgggggtaaggctgaaaaattggctctggccaagtaccggcaaacaatttggcaaggaagagttctcaattcacagtttacagacaaagagttgagaagtcaggggcgttgcccgttgactcctgaagaaatcggattgctgctggcagctttgggtttcgacaataatacccgtctttatcttgcctcccacaaggtatatggaggggaagctaggatttccacactacgaaacctcttccccttgatggaagacaaaaagagcctagcctcttcggcggaaagggtccatataaaaggaaaagcttctttgttggctgctgctgattaccatgtcgggatgcatagtgaca

SEQ ID NO: 18992 - DNA, 405 bp, Gossypium hirsutum
  Clone ID: GOSHI-09MAY01-C112113_1
ccctcgcgtccgttcttcaacttcagcatcttcaggatacttcgtgatcccccgcacttgctcctctcacctaccaccgccacatcacttcactccctttgctttcgcttttttcaaaaatgttgggggctccgatcaaaatatcttcttcgccttcttgctgttcttcttctgaaaatagaaaggcgatcatgttgtcgccggtttgtttagataaatcgaggtcttttcagtttcttttctcgggttctaaattgcggtgctccaaaactttggataccaagcagctctccagcgccaagttccgggtctcccgaggatcgaaatttcgaggtttctgtgactccaagacacaagaagttgcagattagaaggttggtcgcctttactagaaaaggcattact

SEQ ID NO: 18993 - DNA, 343 bp, Gossypium hirsutum
  Clone ID: uC-gsronu33B096h02b1
cccactctgacgcccacgcgtccgatgccgtctctctttttacctatcaccggcacataacgttacttactttgctttcgcttttttcaaaaatgttgggggctccgatcaaaatatcttcttcgccttcttgctgttcttcttttgaaaatagaaaggcgatcatgttgtcgccggtttgtttagataaatcgaggtcttttcagtttcttttctcgggttctaaattgcggtgctccaaaactttggataccaagcagctcttcagcgccaagttcaaggtcttccgaggatcgaaatttcgaggtttctgtgactccaagacacaaggagttgccgatta

SEQ ID NO: 18994 - DNA, 690 bp, Gossypium hirsutum
  Clone ID: GOSHI-09MAY01-C113823_1
cccacgcgttcgtttgccttcaatcttcccaaatagatctcatttcccttctctccggtcgttcttctttgatccgctaagggaatcaatcacttcgaattctctcagcatagaaaagaaagcggcaggaaattttagttatgttggggacaggattggggtttgggagagttcgtggagaagataggttttacaatccggccaaggcgagaaggtcgtaccagaaacagcaaaccgatcaactacggagggctcaaagcgattatacggtcagtcaatcgaatgtgacccgggattcagagaaggggcttggttcaactgaccctcctaagccagttttggttcccgtttcagaaccggttgtctctccattgagtaattcagagcggtttttggactctgtcattccttccgtccccgcactttacctctctaagaggacgatgagagggtggcggacgtatgacggagaatttcagccatattttgtgttgggcgatttatgggagtcattcacagaatggagtgcttatggagcaggagtcccactgattttgaatgtctgtgattctgttgttcagtattatgtaccttatttgtccggtattcaaatatacgcggattccgtgaaattgtcttgcagtccaggcaaccagttcaggatagtgatagcgactttagggactcgag

SEQ ID NO: 18995 - DNA, 638 bp, Gossypium hirsutum
  Clone ID: GOSHI-09MAY01-C113743_1
ttttgttttcatggcttctttacttgtcaagattttttctatcttcttcatcatcatctgcatcttcacaccacaagcactttcagtagtaccagaggaatgtaaaaccgaaaccgatggctgcaccaacaaggaaaaggccttaccccttaagatcatagccattttctccatattgatcgctagtattatcggtgtatgttcgcctttattcacacgttcggtcccagctcttaatcccgaaagaagtttatttgtgatcgtcaagtgcttcgcatcagggattattctggctactggtttcatgcacgttttaccggactcttttgacatgttaacatctaagtgcttgaaagagaatccatggcacaagtttcccttcacagggttcgtcgccatgttatccgcaatcgtgactttaatagtggattccgtggctacatcgatatacagcaagaaaagcaacaatgaggttatcccagaagttgcatcacctgctgggggtacacaacaggacatggctgtggtgaatgttggacactctcatggtcatcatcatggtttaaagcccgcacaaggagctgtagatcaacacttgttgcggtatcgcgtgatcgccatggtgttagcattgggga

SEQ ID NO: 18996 - DNA, 556 bp, Gossypium hirsutum
  Clone ID: GOSHI-09MAY01-C113143_1
tgattgacaagtcacctcctataggatcgattgcacgcaccctgtcgtgggatgatttgtgttcagatacagccacattaaattcatcaaaaccatctaaggtgtccccaggtgccaaggaagaagaacatgattgggttttatcggtccaaacactgttatcatctgctggtctcaatgacaaggagtattttgagtcatttattgatggatggcattcacctgaaagtccattggacccgtccttgagagacaaatatgccaacttgaacgacaaggaacctctacatgaggctaagcgacgacaatggagatcaaacaagacgctcgtgggcgactgtgtgaatgcagccgtggtggatatcacaggttatggatcaaacaatcgcatgaacgagatgtcattgcgcaggtctcatatgagggacatggagagtgcatcgcccacattggttgaccatgtgtgtgcccaaattaaggaatgggcttccggtgaccgtaatcatgtggtggacaatgatataccgtggacagtgacagcctgtggtggaaaagg

SEQ ID NO: 18997 - DNA, 568 bp, Gossypium hirsutum
  Clone ID: uC-gsronu33B136f05b1
ctcactttttttttcatatcaatgtagtgacaacaacaagccacgcatgagaataaaataattgatacaacgtacatgaaatgcagtccagagcatcgccccgcggggtgttgatgctactactgcctttgttgatcccagttgttctatcaggtctggatttgttcataatcattcatgaccatcccaccatttctgataggcaatgtactacttcgcatgactcttttccgcatttaccctgtgtgtgctttcgcttatttctttgctggggttttaatctaggccaccgttgttgtggttcacccactccacacgacacacatataacccccttctctctctgttcaattgcagtgcggatggttcatcttttatcgtttactctctctttgtttccgtttgaagagatttttaagctgtttatcttttctcttgataataagctctaacggcaggaaaaaacaaaaggagggatcttttgaagtggaaaacaagagaatatgatcagattaacatctttgttggttttttttttactttttatttatttgggtttggatatgaa

SEQ ID NO: 18998 - DNA, 526 bp, Gossypium hirsutum
  unsure (1)..(526): unsure at all n locations
  Clone ID: uC-gsronu33B136f10b1
tcggtttcttcatttgttaagttctccttgtgctcagagataaattgattcttgtctttttgaattttgcaatttgagaaatgcactgcaaggtattgattttatttctccctctgatgatgaaatctgtgcaaaatggttaggaataaaagtggttcaacaggggaaaacccttgtgattttgctcttgcttactacttcgtatcactcatttccacatttcaccttgtgtatattttagcatttatctttcctgtcttctaatctgcgccacctttcctatccttcacccactccacacgacacacatataacccccttctctctctgttcaattgcagtgcggatggttcatcttttatcgtttactctctctttgtttccgtttgaagagatttttaagctgtttatcttttctcttgataataagctctaacggcaggaaaaaacaaaaggaagggatcttttgaagtggaaaaaaaagagaataagatcagattaacatctttgntgnttttttttttta

SEQ ID NO: 18999 - DNA, 818 bp, Gossypium hirsutum
  Clone ID: GOSHI-09MAY01-C113293_1
ccgtccggtcttactatctgatggtctatctggtcactgggtgagaataccgaagtgctaatccatggagccaaacattctcatagaactgagactcatggattcggttgctagtgaagctgttcgttcatgacctatggatgatgctctgcttagacgaatgaccaaactgggtcattcagtgtatgctgaaactgcacagaggaccatcttttatggaggacaagagagtgcgatcaacccatatctcctcgacaaagctaaggggagcatgcttttagctggcataggcagttctcaaaacaatagcttgaaccccaatactgcccacatcaatgccccctttacttctaccatagcaacaagtccgattgagtccggtttcggggctcctcctacccctaatttcagcaccacggtaactcaagaatgcatacgatctgctcagcgacccattcccggcgatctaccaattgcaaggagagcttcactccaccggttccttgagaagagaaaggataggatgaccacgagggcaccatacgagataagtaactccacagcatcttcatccaagccaggcgacgacaagtcatggctcggtttggctgctcaatctccgtagtagtcccagccgagttgaaaattttcaccttttttgaggcttatttattaagcctcctagaccttttttagcaggttttaagcctgtctttggtttttcctcagctgtctattggtttctaggtatcggctcttaaatcctaactctcaatcaatatttcattattagataaatgtaattattattctattga

SEQ ID NO: 19000 - DNA, 524 bp, Gossypium hirsutum
  Clone ID: GOSHI-09MAY01-C8918_1
aatttcataccaaggtggtgctgagtgatgcccgtataaatgttgaaggggaaggtgctcctaatgttgctggcctgctcaaaagaagctctgtccgcatatgttctgtaaacaaatatgcctgcgacgtgggctgctcttcctgttatattacttcagcaggttgcaagccaagttattcgttggcttcatgaggaagctcttatggtgggaataaacacaaaccgagattttctgagcttgccttttgatctagcacagggggagagtgttagcctggtggcccatgtggacccagaacacatacaaggcggcatctcttggtggttagtaatggaagatgggtttgcagaggattggaaccttcaaatggaaatgtatgacggcacccctgagtatagaaaatttttgggtcatttaaatttggatgtattatactccacaatgatggacttggtccccttgtgccacggaggtggaacccagtgactctgttaaagtttcatcaacactccttcacactc

SEQ ID NO: 19001 - DNA, 1314 bp, Gossypium hirsutum
  Clone ID: GOSHI-09MAY01-C8908_1
agtcaccattgttcctagtgatgctcctgatgattatatggccttacaagatttaaaagcaaaacctgcttttcgggcaaagtttggggtgaaagatgagtgggtgttgccttttgagattgtacccatcattgacattcctgagtatggagacagggcagctgaaaaggtttgtctggatcttaaaattaaaagtcagaatgagaaagacaaacttgctgaggcaaagagattggtgtacttgagaggttttacagagggaactatgattgttggagaatatgctggaagaagagtccaggaagctaagccgctgttgaggaccaaactgattgagacgggccaggcaataatttatagtgagcctgagaagaaggtcatgtcaaggtctggtgatgagtgtgttgtggctcttacagatcaatggtacatcacatacggggaaccagaatggaaaaaattgtctgaggagtgcttatccaacatgaatctatactctgatgagacacgtcatggctttgaacatacgttaggatggctgaaccaatgggcttgctcacgatcctttggccttgggactcgcattccttgggatgaagaattccttgttgagtcattatctgactcaaccatttacatggcttattacacagttgctcatcttttacaaaatggggacatgtatggaaaaagtgctgatctggttcaacctgcccagatgacagatgaggtatgggaatttctcttctgtggtggtccctatcccaaatcttcaaatatcccagctgctactcttaataagatgaagcaggaatttgaatactggtaccctttcgatctacgagtgtctggaaaggaccttatccaaaaccatttgacattttgtatctacaaccacacagcaatcatgtccaaagatcactggcctcgtggattcaggtgcaatggacatattatgctcagattcagagaagatgtccaagtctactggaaatttcaggacattgcgccaggcaattgaggaattctctgctgatgctactagattctctctagctgatgctggggatggcgtggatgatgcaaactttgtgtttgagacggccaatactgcaattttgcgccttacaaaagagattgcatggatggaagagattctggctgcggaatcgtcgttgaggacaggtcccccatctacctatgctgatcgggtttttgaaaatgagataaacatcgccgtcaagatgactgagaagaattatcgagattatatgtttcgagaggctctcaaaactggcttttatgatcttcaat

SEQ ID NO: 19002 - DNA, 593 bp, Gossypium hirsutum
  Clone ID: AI731620.1
ccttgggactcgcattccttgggatgaaaaattccttgttgagtcattatctgactcaaccatttacatggcttattacacagttgctcatcttttacaaaatggggacatgtatggaaaaagttctgatctggttcaacctgcccagatgacagatgaggtatgggaatttctcttctgtggtggtcccctatcccaaatcttccaatatcccagctgctactcttaataagatgaaacaggaatttgaatactggtaccctttccatctacgagtgtctggaaaggaccttatccaaaaccatttgacattttgtatctatcaccactcagcaatcatgtccaaagatcattggccccgtggattcaggtgcaatggacttataatccccaatcaaaaaagaactccaattccacggaaaatttcaggacctttgccccaggccaattgaagaaatcctctcctgaatgccacctagattcccctctaacctaatagccggggaaggcgcttgaataaatccaacttttttgttctaaaacggccaatacctccaattttgcccccttacaaaacaaaaatgcttggaagc

SEQ ID NO: 19003 - DNA, 653 bp, Gossypium hirsutum
  Clone ID: GOSHI-09MAY01-C8898_2
ttttcctttttgtacagagagaaaaaaagtttggtctcttttttaaaaccggcctctcttgattccctttcatcaacaataaataagaaaattcaaaggtttctttgaaccaaatttatatattgaaagggttcagggggctgatattaatgttaatagttctttttttttctagctttctagaaatttattgttcataaatttgtttttttttcaaaagccaggtttgtgaaatactattaattaaaaagtttatatttgggggaaatttgataaagttggttggaaattcttcaatgggtgttttgggtgattcccaaaaggaagggtttggatcttcatggggtggtttaaagaggttggtaagaagaaaacacgttgattctgctcattccaagcgttctggtcatcatcagttggctaaagagttgacagttccacatctcatagcaattggtgttggatcaacaattggagctggagtttatattcttgttggaacagttgcgagagagcattcagggccagctcttgccatttcctttctaatagctggaattgctgctgcactctctgctttttgctatgccgagcttgctattcgttgcccgtctgctggcagtgcctatcattattcatacatttgtgttggc

SEQ ID NO: 19004 - DNA, 696 bp, Gossypium hirsutum
  Clone ID: GOSHI-09MAY01-C8898_1
agggaaaaaagttctctcttctaaagccggcctctcttgtttccctttcatcaacaataaataagaaaattcaaaggttgctttgaaccaaatttatatattgaaagggttcagggggctgatattaatgttaatagttcttttttttttctagctttctagtaatttattgttcataaatttttttttcaaaagccaggcttgtgaaatattagtaattaaaaagtttatatttgggtggaaattcgtcatgggtgttttggttgattcccaaaaggaagggtttggatcttcatggggtggtttaaagagtttggtaagaagaaaacaagtagattccgctcattccaagcgttctggtcatcatcagttggctaaagagttgacagttccacatctcatagcaattggtgtgggatcaacaattggagctggagtttatattcttgttggaacagttgcgagagagcattcagggccagctcttgccatttcctttctaatagctggaattgctgctgcactctctgctttttgctatgccgagcttgctagtcgttgcccgtctgctggcagtgcctatcattattcatacatttgtgttggtgaaggtgttgcctggttgattggttgggctctgatactggagtatacaattgggggtgccgctgttgctcgtggcatttcccctaatct

SEQ ID NO: 19005 - DNA, 383 bp, Gossypium hirsutum
  Clone ID: LIB3166-007-P1-K1-E11
attttagggttttcccccttttccgattttctaccttgctgtaagtgtttccggaattgggggaaatggggttatattcgaaacgttcaagaaaagctagaggtaaagatttggagatggaggacttcgacgattcagaagatgaggaattattggttaatggcgaagtagaagaagaagctgaaggagaagaagatgatgacgaagaagatattggtgatgatgatgatgatgatgatgatgatgaattagaggataatgatgatgacgatgatggagaagatgaagatggtgaagaagaagatgaggaggatgaggaggcggataatgatggtgagatggaagagcttgaaaagagttcaaggatttttaaaattaggaac

SEQ ID NO: 19006 - DNA, 387 bp, Gossypium hirsutum
  unsure (1)..(387): unsure at all n locations
  Clone ID: LIB3825-016-Q1-K6-A12
tgnataaaccaaaccgacttgccgctcagcctctttgaataaaacagcggtgtttccggaattgggggaaatggggttatattcgaaacgttcaagcaaaagctagaggtaaagatgtggatatggaggactttgacgattcagaagatgaggaattattggttaatggcgaagtagaagaagaagctgaaggagaagaagatgatgaagaagaagagattggtgatgatgatgatgatgatgatgatgatgaattanagaataatgatgatgacggtgatggagtagatgaagatgatgatgaagaagaagaggaggaggataatgatggtgagaatggaagagctcgaaaaagagtcaaggatcttgacaatcaggaacaggatt

SEQ ID NO: 19007 - DNA, 637 bp, Gossypium hirsutum
  Clone ID: GOSHI-09MAY01-C8878_1
cccacgcgtccgcccactcgtccgcccactctttcgcttgactcataatttggggtgtggtaagggaatgaaaaggtctcgttgttcttcaactaaggttgagaggaagatcattgagaaaaacaggagaaatcatatgaagaatttgtactccatgctcaattctctactcccccatcaaaattccaaggagccattgtcactacctgatcaagtagatgaagctgtgaaatacataaagaggctgcaaacaaagttgaaggaatccagggagagaaaggaaagcctaatgggaagaacgagatcctacagatgcacccacagtaatgatagtactaaacctgctgaaatttggattaacgaaatgggttcagtctatggaggtggctttgatgacagggcccggctgtcagtacatgttttatgagatgatccgcatatttcatgaagatggagctcatgtactgaacgccaatttctgggttgttgggaatacaattttccacatcgttcatgctgagattggagaattttgtgtagcgaaaataataaaggagaaattgaacaagtttgtgaatgaagacaggtgcaaggaagaagaacttggacaagagctatattgggactacgaaatccc

SEQ ID NO: 19008 - DNA, 588 bp, Gossypium hirsutum
  unsure (1)..(588): unsure at all n locations
  Clone ID: AW186697.1
ttaacccttccattcccatctcttccctttctttcttttccccttctctacgaaaatccttttattctttttcacattcccacctaatctattttaccttccgccttctccttctctctttcctcttcttctctcttcttttctcttccctgatttcctcggtttcttctgtacggttagctcaagaaggattagcggtcttgctagattatccttctggtaaagttatttaccaccatggaagagtcgggtagtcggtttaacggtgcaaataatgctgtgaggaagaagaggagttctcgtcggcctcgtcctgattcgctgtcttatactgaaagccagaatcactcaccattgtcatcgacaccaccttcggatgatgtgagcaaagtctccagtgatgagaatgccggtgtcgatgctaattcaaagcggaaagaatttaatcttaatcaacatgtttctaggaattctcctgacattggtcttgaaagtgacaaatcccataaaagacagaaacaagatggagggttcaatgcattttacgacaatgagcccgggcgaagcgggtcaaatantaagcgttca

SEQ ID NO: 19009 - DNA, 328 bp, Gossypium hirsutum
  Clone ID: LIB3166-007-P1-K1-C10
cccacgcgtccgcttttttttttctttccattatcttgtttgatctgattttacccgtggtgaattgtagttgcttttgttatgctctgggatctatgcgttttaaatctcatgtattcattttccttcttttaggattagcggtcttgctagattatccttctggtaaagttatttaccactatggaagagtcggttagtcggtttaacggtgcaaataatgctgttaggaagaagaggagttctcgtcggccttgtcctgattcgctgtcttatactgaaagccagaatcacttaccattgtcattgacaccaccttcggatgatg

SEQ ID NO: 19010 - DNA, 372 bp, Gossypium hirsutum
  Clone ID: GOSHI-09MAY01-C8818_1
tttaaacccaagaaaacattcaaattaatcctccgacaactgtccattaatggcgtaccttctataaatcccaacacctcgccgccgtgctcctcttattcttcatcttcaccacctctacatcgccatcttccgccaggctcttgagcgactcgccgccgtccaccacggagacaaccttggaccttgctttagccgatctcgtcgaagtcgaagaccacaaaaccgacgtcgttctcgacgtggcgaaacaacaccctgagcctcaacctcagccatgtgatattcatatggttcccatgaagaaaccccacgtcggaatccttaagtctccgactcaaagactcgcaagaaaatatggtccgatgatct

SEQ ID NO: 19011 - DNA, 602 bp, Gossypium hirsutum
  Clone ID: GOSHI-09MAY01-C8598_2
tacaaaacaaaacagtttattagtcctcactgaacatcggaaggttgaaaaagttgaaaccgaaaagagagagaatggcttggatatggttggaagctgcacttcctcttggaatcatagctggaatgctctgcgttatgggcaacgctcagtatttcatccacaaagcctatcatggccggccaaagcacatcgggaacgatatgtgggacgtcgccatggaaagaagggataagaagctcttcgagaacctctcttcctccgattgatccctttttagtttattactggttaaatgtaggaatcttggccaatggagcgatggagaagaaataaaagtgctttatgatgttttgtcctgctgaaagaagactaaagagtcagatgaacttaagtattttcttttttgtaatgtgaagcatgaattccggaaatgttgcactttttacaacaggtgctaaatgtttacatctcgagtggtgattcgagaattggtgtttcacccccacgcccgaaaccgtcaccggagtcaagcttgaggtgttattaaacttatcttaccttttaaacaactctaaatcacttattttaattttcggaat

SEQ ID NO: 19012 - DNA, 599 bp, Gossypium hirsutum
  Clone ID: GOSHI-09MAY01-C8598_1
cctactcgtccggttgggttaaatccctggacaaaacaaatcagtttatcagtcctcactcagaaaattgggagattggaaaaagagaaacaaagaagagaaagaatggcttggatatggttggaagcagcacttcccctcggaatcatagctggaatgctctgcgttatgggcaatgctcagtatttcatccacaaagcttatcacggccggcccaagcacatcgggaacgatatgtgggacgtcgccatggaaagaagggataagaagctcttcgagaacctctcttcctccgattgatccctttttagttttcttctggaaacttggtcgatggtgtgagagaagaaataaaaagtgctctatgatattctgtaatgctgaagaagactaaagagcagatgaactcgagtattttctttttcatggtaatgttaagcatgaacttctgaaatgttgcacttttggcaacacttgctaatgtttacgctggtggtgtattggagatttgttgcttccaaattccttgtgatcttctatttgcaggtctatgaatcattttggattaaacccgagtttgatttgagttttgaaattta

SEQ ID NO: 19013 - DNA, 258 bp, Gossypium hirsutum
  unsure (1)..(258): unsure at all n locations
  Clone ID: LIB3166-003-P1-K1-G12
gctttatgatgttttgtcctgctgattgattactaaagagcagatgaacttaaagagggtcttttttgtaatgtgaagcatgaattccgaaaatattgcacttttcaacaggtgctaaatgtttacatttcttgtaacacccccacgcccgaaaccgtcaccggagtcaagcttgaggtgttattaaacttatcttaccttttaaacaactctaaatcacttattttaattttcggaatnttnttaattttttatttt

SEQ ID NO: 19014 - DNA, 464 bp, Gossypium hirsutum
  Clone ID: GOSHI-09MAY01-C8548_1
agccttccggttttattttacaccttaacagttcttaattgtattgcaaaggatgctgtttttggtccccatacaaggcttttgataagagagacctagcagaatttggtgcatatatcaatatgggtaattgctggggatctgggtcttccgatagagatgctactagtcatgtttacagctccaccaatcttcctactaccccaggttcatcaaattactgcagcaacaacatgggatcttcagtaaccagtagtattagcaacagcaggagtcaattctcggtatcagtaagtgaaatagtggaggaggaagtaccagatgggcaaatcctggaaacatcaaacttgaaagtcttcacttttgcagagctaaaggctgcaactaagagcttcaatacactgttgggcgaagggggatttggtaaagtttacaaaggttggttggatgagagaacttaacac

SEQ ID NO: 19015 - DNA, 351 bp, Gossypium hirsutum
  Clone ID: LIB3166-027-P1-K1-E12
attgtattgcaaaggatgctgtttttgttccccatacaaggcttttgataggagagacttagcagaatttggtgcatatatcaatatgggttattgctggggatctggttcttccgatagagatgctactagtcatgtttacagctccaccaatcttcctactaccccaggttaattacttgttcttaccttaactgtgttgtgttgtgtttatgctagttttcttttagtcaacgggcttgtttctctgcaacaggtacatcaaataactgcagcaacaacatggaatcttcagtaaccagtagtattagcaacagcaggagtcaattctcggtatcagtaagtgaaata

SEQ ID NO: 19016 - DNA, 644 bp, Gossypium hirsutum
  Clone ID: GOSHI-09MAY01-C8578_2
gttccctgccagacaccctaatgaaggtataggggagagaactcatcatttcacattgcttgatggtgaaatggtaatagataccttgccagactcgcaaaagcaagagagaagatatctcatttatgatatgatggcaattaacactgtttctatcgtagagcggcccttctatgaacgatggaaaatgctggaaaaagaagtgattgagcctcgaaattatgaacggcagaacatttaccagagcaggaatccatattatcgatatgaccttgaacccttcagggtgcggaggaaggatttttggttgctctccactgtaaataaggttttgaaggaatttatccccgaggctctctcatgaggcagatggccttatttttcagggctgggatgatccttatgtacctcgcactcatgaaggtcttctgaagtggaaatatgctcggctgaactctgttgactttctatttgagattggcagtgacgatcgtccacagctttttctctttgaacgggggagaaggaagttgatggatagggatacaggtgaattcagagatggtccagatccccctatcttctttctctgggaaaattatcgagtgttcttgggatcctgatcagcaggtgtggatctatat

SEQ ID NO: 19017 - DNA, 674 bp, Gossypium hirsutum
  Clone ID: GOSHI-09MAY01-C8578_1
cggacgcgtggggtcttatttttcagggttgggatgatccgtatgtacctcgcactcatgcccgcccgcccgcccgcgcgtccgctcggctgaactctgttgactttctatttgagattagcagtgatgatcgtccacaactttttctctttgaacggggaaaaaggaagttgatggatagggatacagttgaattcagagatgtttcagatcctccatcttcattctctgggaagattatcgagtgttcttgggatcctgatcagcaggtgtgggtctatatgcggatcaggacagataagtcgactccaaacgatttcaatactttcaagaaggtgatgcgaagtataagggataatatcacagacgaaatcttattaaatgagattaatgagattattcggttgcccatgtatgccgatagaataaggatggacagcaaggcttcagcacgacgtaagtgacattgggttgtgcagttgcttgagatattggtattggacggcttgggtgtcctgtggtttcttatggcggtaagttaggtgcataatgaggcggttgtgttgagcagatgacgttgatgaatcgggtgggtcactgggatatgatgtattgtaattaaaatctgtcaaaatctttgtggtgagtggtatgatccaggcagcggtgtaata

SEQ ID NO: 19018 - DNA, 593 bp, Gossypium hirsutum
  Clone ID: GOSHI-09MAY01-C8538_3
acgtcttggccttttgttactaatactaccaacccaaatggcagtgaagccctccaaagccgacaaggaaaatcgcctacgatgctaaattatgtcaactcttagacgagtacacccagatcttaattgcggcagccgacaatgtgggttcgaatcagctccagaacacttcgcaaaggtcttcgaggtgagctcagattgttctcatgggtaaatacacagtgatgacacggtccgcccctgtgcgcgctgagaaacccggaacccaggctttcctttaaccttatccccttgcttcagggaaatgttggtttgatttttaccaagggtgatttgaaggaagtcagtgaggaagttgccaagtacaaggttggagctcctgctcgtgttggtctggttgcacccattgatgtggttgtcccacccggcaacactgggcttgacccttcacaaacttctttcttccaggtgcttaatattccaaccaagattaacaagggtactgttgaaattatcactcctgtggagcttatcaagaagggcgacaaggttgggtcttctgaggctgcacttcttgccaagcttggaattag

SEQ ID NO: 19019 - DNA, 646 bp, Gossypium hirsutum
  Clone ID: GOSHI-09MAY01-C8538_2
cttcaacacttttttttttctttcacaaaatcgaacagaggttaaagtgacggcgccaattggctgtccgccttgactgagcttccggcatcgtcttggccctcgattttgcactttaaaaccttttttttttaccactaaacgttttttgtttttagaaatggcagtgaaaccatccaaggccgataagaaaatcgcctacgacgcgaaactatgccagcttttagacgagtacacccaaattttaattgccgccgccgacaacgtgggttctaaccagctccagaacattcgtaaaggtctccgaggtgactcagttgttcttatggggaagaatactatgatgaaaaggtcggttaggatgcatgctgagaagaccgggaaccaagcttttcttaaccttatccccttgcttcagggtaatgtgggtttgatctttactaagggtgacttgaaggaagtaagtgaggaagttgccaagtacaaggttggagctcctgctcgtgttggtctacttgcaccaattgatgtggttgttccaccaggcaacactgggcttgacccatcacagacctctttcttccaggtgctgaatattccaaccaagattaacaagggtactgtcaattatcacccctgtcgagct

SEQ ID NO: 19020 - DNA, 1269 bp, Gossypium hirsutum
  Clone ID: GOSHI-09MAY01-C8538_1
cccagcgtccccacatcagcggttaaagagacggcgccaatcagctgtccgccttgactgaccgtccggcatcgtcttggccctcgattttgcccttttgtaaaccttttttttcaccaattcccgaaatggcagtgaaaccctccaaggccgataagaaaatcgcgtacgacgcgaaactgtgccagctcttagatgagtacacgcagatcttgatcgccgcagccgacaatgttggctcgaagcagctccagaacattcggaaaggtctccgaggtgactcagttgttttaatgggtaagaacactatgatgaaaaggtctgttaggatgcatgctgagaagactgggaaccaagctttccttaaccttatccctttgcttcagggaaatgtgggtttgatctttactaagggtgatttgaaggaagtcagtgaggaagttgctaaatacaaggttggagctcctgctcgtgttggtctggttgcacctattgatgtggttgttccacctggcaacactggtcttgacccatcacagacctctttcttccaggtgctcaatattcccaccaagattaacaaaggtactgttgaaattatcactcccgttgagcttatcaagaagggtgacaaggttggttcttccgaggctgcacttcttgccaagctcggaattaggccattctcatacggtcttgttgtcttgtctgtttatgacaatgggtcagtctttagccctgaggtgcttgaccttaccgaggatgacctgattgagaaattcgctactggtgtctccatggttacggcattgtctctcgccatctcgtacccaaccctggctgctgcaccacacatgttcatcaatggctacaagaatgtattggccgttgctgttgcaactgagtattccttcccccaggctgataaagtgaaggagtacttggcggatccaagtaagtttgctgttgccgctgcccctgttgctggtggtggtggtggtgctgctcctgctgctgcccctgccgaggaggaaaagaaacctgaacctgaagaagagtctgatgacgatatgggattcagtctcttcgactaaggttatttgtattaaagcataaacatataggattattgacagtttacattatctgctttattgtttctcatagttctcgttgatgtactttgattgctctaagttttggatgatttatgaagtcttaatttagtctttttgcctgttctatctacatctcagtttccattttgtg

SEQ ID NO: 19021 - DNA, 620 bp, Gossypium hirsutum
  unsure (1)..(620): unsure at all n locations
  Clone ID: AI054598.1
cttcaacactttttttttttctttcacaaaatcgaacagaggttaaagtgacggcgccaattggctgtccgccttgactgagcttccggcatcgtcttggccctcgattttgcactttaaaacctttttttttttaccactaaacgttttttgtttttagaaatggcagtgaaaccatccaaggccgataagaaaatcgcctacgacgcgaaactatgccagcttttagacgagtacacccaaattttaattgccgccgccgacaacgtgggttctaaccagctccagaacattctaaaggtctccgaggtgactagttgttcttatggggaagaatctatgatgaaaggntcgttaggatgcatgctgagaagaccgggaccaagcttttcttaccttatccccttgttcaggtatgtgggtttngatcttacaagggtgacttannganntaaaggggaaagtgccaagtcaggttgagctctgtcggtntgtctantgcccatttgagtgtgtgtcacagcacactggctgaccatcaagacctttctcagtgctatatcaacagattacagtctgcaaatatacctgtcactataaaaaggcaaagtgtcttagtn

SEQ ID NO: 19022 - DNA, 400 bp, Gossypium hirsutum
  Clone ID: LIB3197-030-Q1-M1-H5
gctcaggatgaacgctggcggcatgctaaacacatgcaagaagccctgcaaaggcggcaagaaaatggcctacgatgattaacgctgaagaacctgaccttgggacgcgcacatcttatttgcgggggtcgaaataccccgtacgctgaggagccagaacattcgcaaaggtcttcgaggtgactcagttgttctcatgggtaaaaatacaatgatgaaacggtcggtccgtatgcacgctgagaaaaccggaaaccaggctttccttaaccttatccccttgcttcagggaaatgttggtttgatttttaccaagggtgatttgaaggaagttagtgaggaagttgccaagtacaaagttggagctcctgctcgtgttggtctgggtgcacccattgat

SEQ ID NO: 19023 - DNA, 374 bp, Gossypium hirsutum
  unsure (1)..(374): unsure at all n locations
  Clone ID: uC-gsronu33B146h08b1
ctcgcccgccggcgcgtacccggacttaattgctggacctacccacgcgtccgttctttcgttcgcccacgcgtacggctaaatacaaggttggagctcctgctcgtgttggtctggttgcgcctattgatgtggtcgttccacctggaaacactggtcttgacccatcacagacctctttcttacaggtgctcaatatttccaccaagattaacaaaggtactgttgaaattatcactcccgttgagcttatcaagaagggtgagaaggttggttcttccgaggctgcacttcttgccaagctcggaattagaccattctcatacggncttgttgtcttgtctgtttatgacaatgggtcaatctttagccct

SEQ ID NO: 19024 - DNA, 327 bp, Gossypium hirsutum
  Clone ID: uC-gsronu33B041c02b1
atttttattggtctccgaggtgactcagttgttcttatggggaagaatactatgatgaaaaggtcggttaggatgcatgctgagaagaccgggaaccaagcttttcttaaccttatccccttgcttcagggtaatgtgggtttgatctttactaagggtgacttgaaggaagtaatgtgagttttatcatcgagtttctatctcatttacattatcaactaaaccttttaatggccgtctcatgatttaactcctatctactactatgatccttttttttcccccaaatattttttttagctatttcgtgccatttccattattttc

SEQ ID NO: 19025 - DNA, 523 bp, Gossypium hirsutum
  Clone ID: GOSHI-09MAY01-C8528_3
gtcggaaaaccggggcggacccaggcgtccgcccacccttccgcccacgcgtccgttcattcgtccctaaaaatcaaaaagccgaagcagctgatttcgctaccgctactgctattgcttctgctttggcgcagttcaccagggtttcttttgaaccccccccccccaaaaaaaaaaaacacacacacacgatgtctcgcgtgtacgtgggtaacctagacccacgagtttcggagcgggatcttgaagatgagtttcgtgtctttggagttattcggagtgtatgggttgctcggaggcctcctggttatgctttcattgactttgatgatcacagagatgctgaggatgccattcgtgaattagatggcaagaatggctggagagttgagctttctcataactctagaggcagaggtggacctggaggcggaagtggtggtggtggcggtggcggtcgtggacgctctggtggttctgatttgaagtgctatgaatgtggtgagcctggtcattttgctcg

SEQ ID NO: 19026 - DNA, 924 bp, Gossypium hirsutum
  Clone ID: GOSHI-09MAY01-C8528_2
aaaatcaaaatccctaatttcccccgctgctactgctagggtttctttctcttctctctcgcaactcaccaggtttctttggagaaaaaaagaaatgtctcgagtttacgtgggtaaccttgacccacgagtttcggagcgagatcttgaagacgagtttcgtgtctttggagttattcgaagtgtgtgggttgctagaaggccaccaggttacgctttcattgactttgatgatcacagagacgccgaggatgcaattcgtgaattagatggcaagaatggctggagagttgagctttctcataattctagaggcagaggaggacgtggaggcggaggcggaggtggaggtggtcggggacggtcgggtggttctgatttgaagtgctacgagtgtggtgaggctggtcattttgctcgagaatgtcgtacacgtggtggttccggaagacgtcgcagccgcagccctagatatcgtaggagcccaagctatgggcgcagaagttacagtcctcgtggacgatcccctaggcgtcgcagtccctctcctcgtggtcgtagctacagcaggtctccaccataccgtggtcgtgaggaattgccatatgctaatggaaatggtgcaagggaacgccgacggagcaggagttaagtgctgcaaggatgtaactcttatgtgaagggactgattaagtgtgtttagtttgttgacttcagtgctactgttttaattgggcaacgcccgcagcatcttggatttggttaagttactttctgtttttccttatttctatgatggttttatttgctttatctatgctaagtactttttatgcgtaggggggaaaacttacgatgacctctataattttattgagaaatcattttttttaatttttatttttattatattttttccttttt

SEQ ID NO: 19027 - DNA, 919 bp, Gossypium hirsutum
  Clone ID: GOSHI-09MAY01-C8528_1
ccccgcgtccggaaaatatcgaaagccctaactttgccggtcgagcctaaaggcggaagccgcagttttctccttcgcgacactcacaacttaccagctttcttttgaatcccaaaaagaaacaatgtctcgtgtgtacgtgggtaaccttgacccacgagtttcggagcgggaccttgaagacgagtttcgtgtctttggagttattcggagtgtatgggttgctcgaaggccacctggttatgctttcattgattttgatgatcgcagagacgccgaagatgcaattcgtgaattagatggcaagaatggctggagagttgagctttctcataattctagaggaagaggcggacgtggaggtggtcagggacgctctggtggttctgatttgaagtgttatgagtgtggtgagcctggtcattttgctcgagaatgtcgcatgcgtggtggttcaggaagacgccgcagccgcagccctagatatcgtagtagcccaagctatggacgaagaagttatagtcctcgtgcccgatctccaagacgtcgcagtccctctcctcgtgggcgtgggcacagcaagtctccaccatatcgtggtcgtgaggaattgccatatgctaatggaaatggtgcaagggaacgccgacggagcaggagctaagtgctgcaaggatgtaactcttatgtgaagggactgattaagtgtgtttagtttgttgacttcagtgctactgttttaattgggcaacgcccgcagcatcttggatttggttaagttactttctgtttttccttatttctatgatggttttatttgcttcatcttatgctagaacatagctttttttctcccggtaggagaaaagaagcctaagcttctataaatttattgagaattcattcctggaactctgct

SEQ ID NO: 19028 - DNA, 367 bp, Gossypium hirsutum
  unsure (1)..(367): unsure at all n locations
  Clone ID: uC-gsronu33B080h03b1
tgggtggtgggcggggggtaggtaggtactggtgacgggtttatatacangtttggctgcaaaaaaaaaaaaacacacacgatgtctcgcgtgtacgtggtcaacctatacccaccagtatcagagcggcatcttgaagatgagtaacgtgtctctgcagttattcggagtgtatgggttgctcggaggcctcctggttatgctttcattgactctgatgatcacagagatgctgaggatgccattcgtgaattagatggcaagaatggctggagagttgagctttctcataactctagaggcataggtggacgtcgaggcggaggtagtggtagttgccgtagccgtcgtaaacactcttgtggtt

SEQ ID NO: 19029 - DNA, 363 bp, Gossypium hirsutum
  Clone ID: LIB3135-060-Q1-K1-H11
ggcgaaaaatatcgaaagccctaactttgccgttcgagcctaatggcggaagccgccgttttcgccttctgtactctcacaactcaccatctttcttttgaatcccaaaaagaaacattgtctcgtgtgtacttgggtaaccttgaccaacaattttcgtaccggaaccttgaaaacaagttccgtgcctttgaagtaatccgaagggtttggtttgttcaaaggcaacctgtttttcctttcattaattttaagaacccaaaaacccccaaaaatccaatccctaattaaattgccaaaattgcttgaaaacttaaccttcttattattcttaaagaaaaagttgaccttgaagttgtcaag

SEQ ID NO: 19030 - DNA, 295 bp, Gossypium hirsutum
  Clone ID: LIB3166-002-Q1-K1-G7
acgaggacaaggaaggtgactggatgcttgttggagatgttccttgcgagatgtatctaagatcagcgattttgctttggaacaaaaagaaatgtctggcgactacgtgggtaacctttacccaaaatcttgcgaaccagatcttaaacacgagttgtgtgtctttggagttattcgaaatgtgtgggttgctaaaaggccaccagggtacgctttcattgactttgatgatcacagagactccgaggatgcaattcgtgaattaaattgcaagaatggctggagagttgagctt

SEQ ID NO: 19031 - DNA, 894 bp, Gossypium hirsutum
  Clone ID: GOSHI-09MAY01-C8458_1
ctcctttgctctttctattggtcttggaaaatggaagcctccaagcctaggatctgacacaaaccaaaaccctaagagagagcgagagagagagagagagaggaccacgcaattttaatctataaatcatccatccccctcgcgtcctccctcccgccccccctcccgcccgttttattctatctcagagtagatcactcccaaggttttctctctttcatctatctaagttgttgagtatggttttctgggtttttggttatggttcactggtctggaaccctgggtttgagtatgatgagaaagtcataggcttcatcaaggattacaggcgtgtttttgaccttgcatgcattgatcacagaggtacacctgaagatcctgcaaggacttgcaccttggagcacattgaaggagccgtttgttggggtgctgcttattgtgttcggggcagtcctgaaaaggaaagagcagcaatgctgtacttggagagaagggaatgtgaatatgatcagaagaccctcgtggacgtcttcaaggaaacagatcccctgcggcctgctctaagtggagttattgtgttcacatctactcctgacaaagtttcaaacaagtattacctggggcctgctccgttggaggaaatggcctggcaaattgcaactgctgttggaccctgtgggaacaatagggattatcttttctcgctggagaaggccatgtttgatataggtcatgaggatgacttggttataaagctggcaaatgaagttaggaaggtgcttggaacaatggcgaaagagaagaaactagtaggttctcctctcaaacctcttaaatcccaaacccagcacagatcccatcaattcagttgcatctgcttcctccggaagg

SEQ ID NO: 19032 - DNA, 494 bp, Gossypium hirsutum
  Clone ID: LIB3585-040-P1-K1-H6
cccgttcgacccactcgtccgaccatcctactttatgagaaagtcattcgcttcatctaagatttcaggcattttacacacctctcgtgctttggggacatttgtacacctgaagatcctccaaagacttgcaccttggaacacattgaaagaaccgcttgttagtgtgctgattattgtgttttgctcaatcctgaaaaggaatgagcatcaatgctgtacttctagatgaaggtaatgtgaatattatcacaacaccctcgtagactgtcttcaaggaaacagatcccctgcggcctgctctaagtgaagttatttacttcacatctactcctgacaaagtttcaaacacagtattaccttgaacctgctccgttggaggaaatggccttgcaaattgcaactgctgatggaccctgtgggaacaatatgcattatcttttctctctcgacaaggccatgtttgatatatgtcatgatgatgacttggttat

SEQ ID NO: 19033 - DNA, 327 bp, Gossypium hirsutum
  unsure (1)..(327): unsure at all n locations
  Clone ID: LIB3166-002-Q1-K1-A2
gattcgtctctctgtactcacttttcccgcctctaccgtcctcagctttctctctttcatttcttactaattttcttacaactatggttttctgggtttttggttacggttcactggtctggaacccggggtttgagtatgatgagaaagtcataggcttcatcaaggattacaagcgtggttttgaccttgcatgcattgatcatagaggtacaccagaaaatcctgcaaggacttgcaccttggaacacattgaangagccgtatgctggggtgctgcttattgtgttcggggcagtcctgaaggggaaagagcacatggagtac

SEQ ID NO: 19034 - DNA, 461 bp, Gossypium hirsutum
  Clone ID: GOSHI-09MAY01-C8478_1
gatttcgacctgccaattgtcacttgatctcatcgtttggcccgtctattcttctcggcgatttagattaattaaatcgtaacagcatgaatttcctgcttggagctttcaagccggcatgcaatatcttgatcacattttccgatgctaaaactcgcaagcaggtccccatgaaaaaggaaaatggccaaatggttatggtaccgcttttccaaagtcaagaaaatattgctgggaagatctccatagaaccacttcaagggaagaaaattgaacataatggtgttaaagttgagcttctcggtcaaatagagatgtattttgacagaggcaacttttatgatttcacctctcttgtacgtgagttggatgttcctggggatatatatgaaagggaaacttacccatttgagttttctacggttgaaatgccatatgaaacttatagtggtgtgaatgtg

SEQ ID NO: 19035 - DNA, 242 bp, Gossypium hirsutum
  Clone ID: LIB3189-010-P1-K1-H6
aaaaaaaaaagaaaatctttagctgatactcgatttcgacctgccaattgtcacttgatctcatcgtttttccgtctattctcctggcgatttagattaattaaatcgtaacagcatgaatttcctgcttggagctttcaagccggcatgcaatatcttgatcacattttcccatgctaaaactcgcaagcaggtatgcttctagatcactgtgattggtcaatttatttttcacgagtcat

SEQ ID NO: 19036 - DNA, 811 bp, Gossypium hirsutum
  Clone ID: GOSHI-09MAY01-C8788_3
ttctgccgcccgcgcctccgatcaaagaggaggtgactgactgtaagcagagaacacagcaaatttttttttttaaatgggtgggaaaatcagcatggctgcattttttgtagttttggctgcaaatgtgttgcagagtacgtatggtgcaacttataaggtgggtggctccactggctggcgagtccctaccaatattgatttttacgaagattgggctgatgataaagtcttcgttgttggggatgctcttgttttcaactttactactggaaagcataatgttgcagtggtgaccgaagctgcttacgaggcgtgcaacaccaccgatactataactatcatatgcgacggaccggcaaggattacccttaacaggaccggcaatttttacttcatttgtgctgtccccggtcactgttccggcgggcaaaagctcaacgtcgaagtaagaaatgggaacaaccgtaccgctgctgttcccgcacctggaccgagtcccaccaccacgcctgtagctaccagccccaccaccagtacgcctccgaccgctgccacgcccacctcgcctggaactccgaccgccaccgcgcctggaacttcaagtcctcctcctgggaccaactcagcttcttcccttgtttctactctgtctcctgtcttcttcatggccattgccttagttttgatgtgctgattatgctattaattccattttgcactttttggtatttggtgttatgtgagatgagatccactgttttactatgatagtgataatcatatttgtaatgttatttggtatttgaat

SEQ ID NO: 19037 - DNA, 649 bp, Gossypium hirsutum
  Clone ID: GOSHI-09MAY01-C8788_2
cccagatccattattctatatatatatatatatatatgttccattggtggagatgaagatatacaaattacacattacatttgaaaactagaggcacagatctaagagaggggcgactgagaagtgaaaacacagcaaattttcaatgagtgggaaaatcaccatggccatggctgcactttttgtagttctagctgcaaatgtgttgcagagtacaaatggtgtatcttttacagtgggtgactttactgggtggcgaaagcctatcaaagaagatttctaccagaattgggctcatggaaaatccttcgttaaaggggatgttcttgggttcaaatccggtcttgaaaaatctgaaaaagttgcagaggtaacggaaaaggcttacgatctgtgcgaaattgccagtactatatcatccgccatccccataccgataaatattactcttaacaaggcccggagcttattacttcatttctactatcgccgataactgttggaacgggcaaaagctcaacatcacagtcggagatgagagcaaccctactgctgctgttcccgcagctggaccgagtctcaccacctcgcctggaacttcaattcctcctcttgtgaccaactcagcttcttccctttgttctactct

SEQ ID NO: 19038 - DNA, 671 bp, Gossypium hirsutum
  Clone ID: GOSHI-09MAY01-C8788_1
gggcggcccacgcgtccgcccacgcgtccggaaaactagaggcacagatctaagagaggggcgactgagaagtgagaacacagcaaattttcaatgagtgggaaaatcaccatggccatggctgcactttttgtagttctagctgccaatgtgttgcagagtacaaatggtgcaacttatacagtgggtgactctactggctggagagtccctgccaataatgatttctacgatgattgggctgataacaaagccttcgttgttggggatgttctcgtgttcaatttcactaccggacaacatgatgttgcagaggtgacggaaactgcttacgatgcgtgcaccactgccaatactatatcaaccgtcagcaccggtccggcaaggattactcttaacaggaccggcgatttttacttcatttgtgctgtccccggtcactgttccggcgggcaaaagctcaacgtcgaagtcagaaatgggaacaacggtaccgctgctgttcccgcacctggaccgagtcccaccaccacgcctgtagctaccagccccaccaccagtacgcctccgaccgctgccacgcccaccccgcctggaacttcaagtcctcctcccgggaccaactcagcttcttccctggtgtctactctgtctcctgtcttcttcatgcc

SEQ ID NO: 19039 - DNA, 401 bp, Gossypium hirsutum
  Clone ID: LIB3146-032-Q1-K1-D2
cttttacagtgggtgactttactgggtagataaagcctatcaaagaagatttctaccagaattgggctcatggaaaatccttcgttaaaggggatgttcttggtgagtttttgagctttaaaatctttgttaattgagcttgttgattcgaaatttgatatttttatgcgtgtggttttgcagggttcaaatccggtcttgaaaaatctgaaaaagttgcagaagtaacggaaaaggcttacgatctgtgcgaaattgccaatactatatcatccgccatccccataccgataaatattactcttaacaggaccggagcttattacttcatttctactatcgccgataactgttggaacgggcaaaagctcaacatcacagtcggagatgagagcaaccct

SEQ ID NO: 19040 - DNA, 313 bp, Gossypium hirsutum
  Clone ID: LIB3166-006-P1-K1-C10
ttacatttgaaaactagaggcacagatctaagtgaggggcgactgagaagtgagaacacggcaaattttcaatgagtgggaaaatcaccatggccatggctgcactttttgttgttctagctgcaaatgtgttgcagagtacaaatggtgcaacttatacagtgggtgactctactggctggagagtccctgccaataatgatttctacgatgattgggctgataacaaagcctccgctgttggggatgttctcggcgagtctttgagctttaaaaccttcgtgaatcgagcttgttgattcggaatttgata

SEQ ID NO: 19041 - DNA, 722 bp, Gossypium hirsutum
  Clone ID: GOSHI-09MAY01-C8708_2
gacaatagtggcggagaaaccgaactccctgaaatcgacccgcgtgctgaagatcgagagctaaggaaccatttattaaggaaatatagtggttacttaagtagtctcaagcaagaactatccaagaaaaagaagaaagggaaactacccaaagaagctagacaaaagttgcttagttggtgggagttacactacaaatggccgtacccatcggagactgagaaggtggcattggctgaatcaactggtttagaccagaaacaaattaataattggttcataaaccaaaggaaacgccattggaaaccttctgaagacatgcaattcatggtgatggatggtctgcatccgcaaaatgcagctttatatatggatgttcattacatgggtgatggtccttactgtttgggaccatgataatgtgcaatacaccattatatatatatgtgcttgttgtttgtttagttacactgcagtcacagtgtatgttctttcgatattacaaacatcctttttataattttgtgcattcgtcgtcattttaccagttacacaagatttgggatgtttgcttttttttgctgctcatgttcgatggtatgctgtcgtgctttgtctgcaagtagaagggcatgtaaggagctttaatcctgtaagagagatggtaattgtgtaattgaaatttcatgtctgtatgtttaagtactacctgttttaagtgt

SEQ ID NO: 19042 - DNA, 1145 bp, Gossypium hirsutum
  Clone ID: GOSHI-09MAY01-C8708_1
atcaccaacaaaaagggaatgaaagctctagtgaagtggaagctattaaagccaagatcatagctcatcctcagtactctaatctccttgaagcttacatggattgtcaaaaagtaggagctccacctgaagtagtggtacgactagcagctgttcgacaagagttcgaagcaaggcaaagatcttcagtaacatcaagagataactcaaaagacccagaacttgatcagtttatggaagcttactatgatatgttggtgaaatatcgggaggaactaacgagaccaattcatgaagcttgggatttcatgcggaggatcgaagctcaacttaacatgcttgccaatggtcctgtgcggatctttaattctgatgagaactgtgagggtgttgcttcatccgaggaggatcaagaaaatagcggcggagagaccgaacttcctgaattcgatccgcgtgttgaagaccgagaactgaagaaccacctattgagaaaatatagtggttatttaagtagtctcaagcaagaactctccaagaaaaagaagaaagggaaactacccaaagaagctagacaaaaattgctaagttggtgggagttacactacaaatggccgtacccgtcggaatcggggaaggtggcattggctgaatcaactggttttggaccagaaaacaaatcaataattgggtcataaatcaaaggaagcgtcattggaaaccttcggaagacatgcaattcatggtgatggatggtctgcacccacaaaatgcagctctatatatggatggtcactacatgggtgatggtccttaccgtttgggcccatgatataatatgcaacagcgcattataaattacctgcctcagcaggaatatatatatatacttagtgtttctctccattacatttcagccatagtatatgttagtcttccattgttttttttcttttttggttcatcccttaggattcagctttctcctacaacataatctagcatctttgaaaaaagcacccttatagtttcctgcctgcctattccttatgatgaatcgcgaggatgtggatccctgttgtcgggtccaggatgcctgcctgtgtttctcatgttcaaaggcaccgtgttgctaagtgtttgtt

SEQ ID NO: 19043 - DNA, 360 bp, Gossypium hirsutum
  Clone ID: LIB3166-005-P1-K1-C12
cccacgcgtccgcagccattttatatgtaagacttccataggttttgggggcattttggctcatccacttaagattcagctatcttctacaacataatttagcatctttgaaaaaagcacccttatagtttcctgcctgcctattccttatgatgatcgtcaaggatgccgatccttgttgtcaggtccaggatgcctgcctgtgatactcatgtgcaaaggcactgtgtcgctaagtgtttgtacaccattacatttcacacataatataatgttaattctttcatttggtatttttctttgttgatttcatccctttaagaatcagattgtcttctacatacataatactatcatttt

SEQ ID NO: 19044 - DNA, 596 bp, Gossypium hirsutum
  Clone ID: GOSHI-09MAY01-C8698_1
caggaggatgcacttctcaaggctattgattttggattatcaatattctttaagccaggtgaaagattcactgatgtggttgggagcccatactatgttgcccctgaagtcttacgaaagcattatggtccagaagcagatgtctggagtgcaggagtaattctttacattctcttaagtggagttcctcccttttgggctgaaaacgagcaaggcatatttgaagaggtattgcatggtgaccttgattttgattctgatccttggcctagcatctctgaaagtgctaaagatttggtgaggaaaatgctcatccgagaccctaggaaacggttaactgcacatgaagttttgtgccacccttggatacagattgatggtgttgctcctgacaagcctcttgattctgctgttttaagtcgtatgaagcaattttctgcaatgaataagctcaagaaaatggctcttagagttattgcagagagcctatctgaagaagaaatacctggcctgaagaattgtttcagatgatagatgctgacaacagtggtccgattccattcgaagaccttaaaccgggactgaaaaagtgggag

SEQ ID NO: 19045 - DNA, 409 bp, Gossypium hirsutum
  Clone ID: GOSHI-09MAY01-C108663_1
aattcccgtgtcgaccgcactcgtccggagaagctggcctttgtggccctagactacgagcaggagctggagaccgctaagagcaggtcctccggcgagatgagctacgagctgcccgatgggcaggtcatcacgatcggcgcggagaggttcagatgcccagaggtgcttttgcagccgtcgctgatcgggatggaagctcccggcatccacgagaccacctacaactcgatcatgaaatgtgacgttgatatcaggaaggacctgtacgggaacatcgtcctcagtggagggacgaccatgttccctggcatcgctgacaggatgagcaaggagattactgccctcgcgccgagcagcatgaagatcaaggtcgtggcgcctcctgagagaaaatacagtgtttgga

SEQ ID NO: 19046 - DNA, 829 bp, Gossypium hirsutum
  Clone ID: GOSHI-09MAY01-C8198_1
gctgatgataagaaactctgagagaaaggcttcttcaattatatctttgcaaaccagcaatttgaggtctgcatttttgggagagaaaaatgggagctgtgtttctagcattcccataactcgcgtaagtttagtgaggaaggctattgagtgtaaggagtcgagaatcgggaagcagccaataacggttccgtccaatgtgacgattactatggagggtcaggacataaaagtaaaaggtcctttgggagaaatggcattgacatatccacgagaagtaaaggttgatagggaggaatccggagccctaaggatcagaaagtcagtggagactaggagagccaaccaaatgcatggccttttcaggactcttactgacaatatggtggtgggagtatcaaagggttttgagaagagacttcaactaattggtgttggatatcgtgcaacgttagaaggaaaagacttggtgttaagtcttgggttttcccatccagtcaggatggcaatccctgatgacattcaagtaaaggtggaagagaacacgaggatcgtcgtaagtggatacgacaaaagtgacgtcggtcaatttgctgttaccattaggaaatggagacctccagaaccatttaaaggaaagggtgtgaaatacgctgataaggttgtcagaagaaaagtaggcaaagcagggaagaagaagtaaatggtggtgtgtattttgtttctcctattttggactctttgtcctatgcatctggaatggaacatattctctgcttgctactaaagcgatttcaccaataatgaagattcattctttttgcctgtt

SEQ ID NO: 19047 - DNA, 695 bp, Gossypium hirsutum
  Clone ID: GOSHI-09MAY01-C8108_1
aaggctaccgattctcctcttccgactgttccaggctatgatgtacgggagtggtggtgaaagttggaagtcaagtgaaggagctaaaggaaggagatgaagtgtatggaaacataaatgagaaagcattagaagggccgagacagttcggttcccttgctcagtacactgctgttgaagagaagctgttggctttaaagcccaagaatctagatttttcccaagctgctggtctccctcttgctatcgaaaccgcctacgagggtcttgagcggaccggcttttcatccgggaaatccatccttgttttgaatggttctggtggtgttggaagcttagttattcagttagcaaaacgagtattcggtgcttcaaaagttgcggccacttccagtactggaaaactggaggtactgaagagcttaggtgccgatttggctattgattacacaaaggagaactttgaagatttgccagaaaaattcgatgtagtctttgatgccattggacaatgtgatagggctgtgaaggcagtgaaagaaggcggcagcgtcgtggccttaaccggtgctgtgacaccgcccggttttaggtttgttgttacttctaagggagaggttcttaagaagctaaaattatatttagagagtgggaaaggtgaaccggttgtggatcccggggaccattcccattta

SEQ ID NO: 19048 - DNA, 695 bp, Gossypium hirsutum
  Clone ID: GOSHI-09MAY01-C8138_1
ctaaagccccccaatttttatttctctagccgatataaaaacgctgtaggactgaatatcgcctccaacttcctcccttacttcccgaggtgctttagctattgagttcagttgacaatggcatctttgcaagttttgcatgcaacaaatctgaagcagtcgccattgcaagggtttcttccactctcatcccgttatgctgtggctgcgcccctgaaatcgactgttttgtcgaggacaaagaccataggccagaagaaccaaaagagatcttttacagtggttgcagcagttggcgatgtatcagctgatggtaccaactatctgattgctggtgcagcccgtgttgctctgggtggaactgctttccctatcttcttctctcgcaaggacacatgtctctgaatgtgacggggctggctttgttcgtaaagctggagcaacattgaggccaaatgctgcacgaaaggaccaggctcaaatcgtatgcgctcgttgtaatgggcttggaaaattgaaccaaattgacaaatgaatacctttgattccgtgattttaatccaaattcctggtgtaaagtccaaagaccctatcttttactgaactcagaaatttctctgcagttcacacaagtttaaattgttgaatgtcctcctccacgtgtaacttatatataaataacagaaacatctttg

SEQ ID NO: 19049 - DNA, 1043 bp, Gossypium hirsutum
  Clone ID: GOSHI-09MAY01-C8088_1
cccacgcgtccgataaatataaccctcatgtgaaaccaaaaatcttcactctttgttttcttctggtttctggttgccacaattttggtagaaaagggacaattaaatgggaatcgtcgaggaagctcgcaacttgaagggactgggttcaggcgatcgagtcatcgttttggctcatgggttcggtacggaccaatcggtttggaagcacttggtccctcacttagtcgacgatttccgtgtcgtattgtacgacaacatgggtgccggaaccaccaaccccgaatacttcgatttcaatcgttatgctactctcgaaggttatgcttatgatttgcttgcgatccttgaagaaatccacgtcgattcatgtattttcgtcggccactccgtttccgccatggttggcgccatagcttctatttcccgacccgattttttctctaaaatcatcatgatctctggttccccaaggtatcttaatgacgtggattactacggtgggttcgagcaagaagagttagaccaactcttcgaagcaatggaagccaactacaaagcttggtgttccggtttcgcgccgttagtggtgggtggcgacttggaatcggtggcagttcaagaatttagccgtacccttttcaatatgagacccgatatatctctcagcgtagctcaaaccatatttcaaagcgatatgagacaaatcctcaaccttgtgacggttccttgccatatccttcaaagtgttaaagacttggccgtccccgtcgtcgtctccgagtacttataccaaaatctcggcggcgaatccatcgtcgaagtcatgtcgtccgacggtcatcttccgcacttaaattaacacaaattcgcaatcccggtgcttcttaagcatattcgttacgatatcagtgttgcatgaaaataaaagcacttcttcgaataattgttgttaagctttttaggtatctgaaaatcttgatctctaaattattaaagagttaattgtgatgtttctttaaggtaacgccgtcggctttttt

SEQ ID NO: 19050 - DNA, 360 bp, Gossypium hirsutum
  unsure (1)..(360): unsure at all n locations
  Clone ID: LIB3165-025-P1-K1-A7
ggaaanaccggcgcgacccacgcgttcgcccactcgttcgcccacgcgttcgaggtcgctttttgtctgccacaatttcggttgaaaagggacaattaaatgggaattgtctaagaagctcacaacatgaaggtactgggttcaggcgatcgagtcattgatttggctcatgggttcggtactgaccaatctgtttggaagcacttggtccctcacttagtcgactatttccgtgtcgtatagtacgacaacatgggtgccggaaccaccaaccccgaatactttgatattaattgttatgcttactctcggaaggatatgcttatgattttgcttgcgtaccttgaatgaaaatccact

SEQ ID NO: 19051 - DNA, 1085 bp, Gossypium hirsutum
  Clone ID: GOSHI-09MAY01-C8008_1
gtagatttctctcaatttcttcacatttcttgattttatacataaacatcccatctccatcacattctcaagcctattcaatggagtttttaatgaaaatatgtctccttttcctttgtggcctcatttctcactttgttaacatgtttttccagaagagaaatcagcaatgctatatgttgggttatgaatgtttcaaggctgccgatgacaggaagctcgacactgatgcgtgcgtgaaagttgtgttgaggaacaagaatcttggtctggaccaatacaggtttcttttaaaaaccattgttagttctggtcttggtgaagaaacttatggtccaaggaatgttattgatggtagagaagagtttccttcggaaaacgatgcacatgccgagatggatgagatcatgttcagcactctagacactctgttcgagaaaacaggagtttccccgtcagaaatcgacatactcgtcgtcgatgtctcgttgttttcacctgcaccgtcgttaacatcccggattataaacaggtacaagatgagggacaacattaagtccttcagtctctccggaatgggatgtagtgcaagcatggttgcaatcgatatggtgcagcagttgttcaagacatacaagaaccagttcgccatcgttgtgagcaccgaatcaatcgctaggcattggtactgcggcaaagagaagtcaatgatgttatcgaattgcctgttccgtaacggagggtgttcaatcctcttaacaaacaaaagggacctgaaggatcgatgcttgttgaagttgaagtgtgccgtaagaaccaatttcggttcaatttatctcggtctgggggtgccattttgtctcaccaggtggaagggcatgatgatggctggtgaagagttggactagtgatatgactagagccactagatgcactatcagattgggaccatcaccgtgggtatgatgtgagacatgaactaaaaagctgaaaagtatagattctgtgacctggactggtatgtcacactgtttgaagatgaagatgtggaaactggttgaggcttgagtccttaaacggatctt

SEQ ID NO: 19052 - DNA, 912 bp, Gossypium hirsutum
  Clone ID: GOSHI-09MAY01-C8358_1
agattagattcatatttcctttatgtacggaagttcccacgcgtccgaaaagatttagccaatttcctcaaagtttcctcccaagtcgaagaagaagtcctaataatttaggactgttggggtggttttcgtttccgttttgtttccttcatttctgcttctgatcccccgtttgtaggagggaaaagaagagagattgaatggagagtgtagtatggcaagggttggctttatctggaattttctcttggattgtaattacttgttatttcgatgtaaccaaaaagattagatctttgctgcaaccttgggtgtctcaccatgttgtctctggcacttctatcatccttaagatccagaaacatcagcataaattcttggatgctctcttttctgggttgtcttgtatagtttctgtgcccttttacactgcgtttcttcctttgcttttctggagtgggcatgggaaactggctaggcagatgaccctgttgatggctctctgcgattatttagggaactgcataaaggatgtggtatcagctcctagaccaaattgccctcctgttagaaggataacagctaccaaagatgaagaagaaaatgctttggagtatgggttgccttcttctcatactctgaatacagtgtgcttatcaggattccttgtatgctatgtgctatcctacacacagtgtgaagatgcttttgtgaaacttggtgcagtcacccttgcttgcttgcttgtgggtttcattggctctggaaggatataccttggcatgcacagcttgattgatataattggtggtcttgtcttcgggtttatgattcttgcaatctggcttacagtccatgaatactgtgacgcctttattgtctctggacaaatgttacatcatttatgggctg

SEQ ID NO: 19053 - DNA, 406 bp, Gossypium hirsutum
  Clone ID: GOSHI-09MAY01-C8348_4
cccacgcgtccgaactcaactccacacaaatggccctctttctttgcgtcttattccttctcctttcttctgcttctgcttgtgatcgctgcctgcaccagtccaaggctgcttatttctccaaagcctctgctctttcaggtttagccgcaatttgtttccttttttcctatcaatttcattaatacccagagttgttttagtgggtgacctttgttttgtgggtttgatattgcagcgggagcttgtggatacggttccttggctttaggtttaagtggtggacaccttgctgctggtgtttcttctctttacaaagatggagccggttgtggggcctgcttccagataaggtgcaagaattcaactctgtgcagcagtgaagggactaggatcacactaactg

SEQ ID NO: 19054 - DNA, 469 bp, Gossypium hirsutum
  Clone ID: GOSHI-09MAY01-C8348_2
cccacgcatcctctcaggtaagtatattgagtttacgagagtttaaacttaaaaaaaaaagaattaatgggtgaaaagtgggcttaaactattttcttgtttgcagcccaggttgggtctgcaaactggaacttcatgtgcaggaaccatggggcggtctgggacacaagcagagtcccaaatggagccctgcaattcacatttggggtgacatctgggtttgttgggaagtggattcgggcaaaaagtgtgcttccagctgagtggataactggagttatttatgattctggagttcaaatcactgacattgcaaaagaaggttgctctccttgtgatgacagccactggagatgagatcttagatgccaattccttaaagtgtgtactgtgaagagataatgggaaagtttcatttatcttaaacaaaaattaaaaaaacctttcttacctcttttttcgatttttt

SEQ ID NO: 19055 - DNA, 938 bp, Gossypium hirsutum
  Clone ID: GOSHI-09MAY01-C8348_1
cccacgcgtccgcccacgcgtccgcccacgcctcccccggcccctctactcaactccacgcaaatggccctctttctttgcgtcttattccttctcctttcctctgcttctgcttgtgatcgctgcctgcaccagtccaaggctgcttatttctccaaagcctctgctctttcagcgggagcttgtggatacggttccttggctttaggtttaagtggtggacaccttgctgctggtgtttcttctctttacaaagatggagccggttgtggggcctgcttccagataaggtgcaagaattcaactctgtgcagcagtgaagggactaggatcacactaactgatctcaatcacaataatgaaacggactttgttcttagcagcagagcattcatggcgatggctaacaaaggcatgggccgagacattttgaaacttgggattgtcgacgtggaatataaaaggataccttgtgaatacaaaaaccagaacctagctgttagagttgaagaatcaagccaaaaaccgacttacttggcaattaaattgatgtaccagggtggtcagactgaagtagtagccatggatgtagctcaggttgggtctgcaaactggaacttcatgagcaggaaccatggggcggtatgggacacaagcagagtcccaaatggagccctgcaattcagatttttggtgacatctgggtttgatgggaagtggatttgggcaaaaagtgtgcttccagctgagtggaaaactggagttatttatgattctggagttcaaatcactgacattgcaaaagaaggttgctctccttgtgatgacagccactggagatgagatcttagttgccaattacacatatagtgaatttgaatgttttagaagattaaagaaaatgaatatatagatagattttccttgtctctgtaatt

SEQ ID NO: 19056 - DNA, 536 bp, Gossypium hirsutum
  Clone ID: uC-gsronu33B057d12b1
tcgtcttcgcgtccgctccacgcaaatggccctgtttgtttgcgttttattccttctcctttcctctgcttctgcttgtgatcgctgcctgcaccagtccaaggctgcttatttctccaaagcctctgctctttcagcgggagcttgtggatacggttccttggctttaggtttaagtggtggacaccttgctgctggtgtttcttctctttacaaagatggagccggttgcggtgcctgcttccaggtttgtataattcagtttttattctttttttcttatgatggaagtttgagttttgatttttcttcatattttggtagataaggtgcaagaattcaactctgtgcagcagtgaagggactaggatcacactaactgatctcaatcataataatgaaacggaatttgttcttagcagcagagcattcatggcgatggctaacaaaggcatcggccgagacattttgaaacttgggattgtcgacgtggaatataaacagtaaacatgaattaaaaacatttcttcatctaa

SEQ ID NO: 19057 - DNA, 346 bp, Gossypium hirsutum
  Clone ID: LIB3166-040-P1-K1-A12
gtctaactcaactccacacatttgttcctctttctttgcttcttattccgggggggttcttctgcttctgctcgtgatcgctgcctgcaccagtccaaggctgcttatttctccaaagcctctgctctttcagcgggagcttgtggatacggttccttggctttaggtttaagtggctgacaccttgccgctggtgattcttttctctacatagatagatccctactttgctccttcttctctgtttttgtgcccgtttttttactttatctcaattatattttatatacttttgtttttccacctcaccttcttcttctatctccattctctctttatcttttcc

SEQ ID NO: 19058 - DNA, 911 bp, Gossypium hirsutum
  Clone ID: GOSHI-09MAY01-C8368_1
gtcaagtccagtccactctccaaattctttcaaaaaatattccagctatcctacgcaccgaagttatccggtgcacgttagcatcaccaccaaccaaaagcaacgaccagcgccaccaccactgccgtcgcagctaccatcatggctactcactctcgacctccgccaccaagaccacttgacctcgacttgacgatcgtgtcagccaagcatctaaagaacgtcaactggcaaaacggcgatctaaaaccctacgcagtcttctgggttgatccagaccgacgtttatcaacccggtcggacgattctggctcaactcgacccgtctggaatgagcgtttcacccttccccttgttgttcctccacacgaaaccgttttgaccctcgagatctttcattccaaaccctctgaaactccgaagcctttggtggctactctccgggttgagctcaaggaattacccgacctggatgatggttccaagatccgaaccttttctttgctccgaccctcgggtcgtccccaaggtaagatccggttgaaacttgggatccgggaacgtcctcttccaccacctcatgattaccattttgcccctccttctagctattattacacaaatgcccctcctccaccaagatactctgctccgccttacgtttctcttcccccgccgcctcctccaccgtcttcctctcctcctccgccaaatccgccttactcctccatccccgagggttaccctccctactactccagccattactattcctctccgccaccgcccatgcctccacgtcctttcttcgaacgagcttccagctatggaaccccatcggcgccagtagattactcgccgtacgatcagaagcctcggggaggttctaaaattggggtaggaactggatc

SEQ ID NO: 19059 - DNA, 488 bp, Gossypium hirsutum
  Clone ID: GOSHI-09MAY01-C108323_1
gtttgaatgatcagtctccctctggctccgaatgaagcttggtagtgcggattggaataaatgaagttcgaagtggaagttgtccttgcttgtttcgttactttgattttgattcagcaagttctttgtgatgagttttctaagtcatctggctcaaacaaatggacatgcacatgctcttccttgcatcctgcaaaacaaagcgacgttcttaaatctaactgttctagatcctgcaattgcagtccagttcaaccaaatggagatagatggaaatgcttatgtgatagtgatggattccccaaagcagcagtcgacaatcgtgatactacctgttttactgcctgcaactgcactgccggatccttttctgaagcgccattgagaaacaactatgctaacacagttgcagtgattgttctattactctgcgtaaatcttacaacgttggcattacttgcttcgactacatgctatttcttcccaaa

SEQ ID NO: 19060 - DNA, 1172 bp, Gossypium hirsutum
  Clone ID: GOSHI-09MAY01-C8308_1
gggattcaacatctatgttggtggtggtatgggaagaactcatagaatggaggccacttttcctcggctgggagaaccgttaggttatgttccaaaagaggacattttgtatgctattaaagccattgttgctacacaacgagaccatggtagaagagatgatcgtaaatatagtaggatgaaatatttgattagctcttgggggattgaaaaatttagaaatgttgttgagcaatattatggaaagaaattcgagcctttccacgagttgccggaatgggaatttaagagttacttgggatggcacgagcagggtgacggtgctttattttgcgggctccatgtagataacggtcggattggaggaaaaatgaaaaagacactgagggaagtgatagagaagtataatttaaatgtgcgaatcaccccgaaccaaaacctcattttgtgtgacattcgtagtgcatggaggcgtcctattaccacagttctcgctcaagctgggttgctgcatcctagatatgtggaccccttgaacttaaccgctatggcgtgcccggctttcccactttgccctttggcaataaccgaagctgaacgaggtatccccgacatcctcaagcgtgtcagagctgtctttgagaaggttggactcaagtacagtgagtccatagtgataagggtaactggttgccctaatggttgtgccagaccatacatggctgagcttggactagttggtgacggtccaaacagttatcagatttggctcggaggaacaccgaatcaaacccaattagcaagaacttttatgaacaaagtcaaagttcaagatctcgaaaaagttttcgagcctttattctactactggaaacgaaaaagacagcccaaagaatcattcggcgacttcacaacccgaatgggattcgaaaaacttcatgagctggtagacaagtgggaaggtccagttcaatcaccggtaaggtataaccttaagccattcgccgataaagagacatacgaagccatggaagagcttgcaaagctgcagaacaagagccctcatcaactggcaatggaagtcattcgtcatttcgatgctgcccactaaaacggtaagagcgaatgagttggttattacgatattataactggctggctgcattgtctaa

SEQ ID NO: 19061 - DNA, 505 bp, Gossypium hirsutum
  Clone ID: GOSHI-09MAY01-C8328_1
cccccacgcgtccgcccacgcgtccgattttctgttattattatttttttgttcatcaatgggattccctgtggtttacacagacgttttcgtacccaaattcttcgttcacacgctatcgtttttgggtttcatcagaaacctaatcctctcactttttaattacctcggactctccgatttcctcgaaaccgacaccgtttggccggaaaacccgacccgaaccacaccttttaaaccgccggtatccgctctcttgatccgtgaaatcctacccgtcgtaaagttcgaggaactcgcgttggtcggtggtggtgatccgccggagagttgcgccgtttgcttgtgcgagttcgaaggaaaggaagagatcaggtggttgaagaattgtaagcatgtttttcatagaacgtgtttagaccgctggatggatcacgatcaggtgacgtgtccgctttggaggacatccgttgtacctgatgagatgcaagctgagtttaataac

SEQ ID NO: 19062 - DNA, 697 bp, Gossypium hirsutum
  Clone ID: GOSHI-09MAY01-C8288_1
gcgtccacgcgtccggaaaaagaaaagaaaagaaaagtccccccttaaaaatcgaccaaaacagaaaacccagatcataaaaagctccctaaaatgttgagtgaaacattgaagaacaagtaccaattatgtgaagagatcggaagagggcggtttggggttatctctcgagtgttttgcccttcaacccaatcctccttcgcctgtaaatccatcgacaaacgcctcctttccgaccccaccgatcgagaatgtctggagaacgaacccaaaatcatgacccttttgtctcctcactccaacatcgttcaaatctacgacatgtttgaatccgatgatacccttcaactcatcatcgatctctgccagccttttaccctctacgacaagattctggaacccgatatgtctgaacctaaagccgcggcttacatgcaacagcttatgttgggtttggctcattgtcacaggtttgggatcgttcatagagatattaaacctgataacatttttttcgacttcagaggtaatttgaagattggggatttcgggtcttccacatggttagggggaagttgggaccgccgatgggttggtgggtacgccttattatgtagcgccggaagttgtgatgggtagggcttacaatgagaaggctgatgtgtggagtgccggtgtggtttgtacgttatgttag

SEQ ID NO: 19063 - DNA, 752 bp, Gossypium hirsutum
  Clone ID: GOSHI-09MAY01-C8258_1
aactgctctctgctaaaatactatttattttcagtgtttccgtcctgtcttctgatatggttttttgttgttttcaaattttgaatcacagcaacactgtgtagagattttcgatttttttttttatttcgtctctctccttttgtttttttttctccgttaaaactcactcctttgtttccttctcttttcttcactcaaaaaagtgtacggagaatggacggaggaacactgcatagcctcagaacagtagaggaagtctttagggatttcaaaggccgccgtgcaggaatcatcaaagccttaaccgccgatgttggagaattttttgaacagtgcgatcctgagaaggaagaatctttgcttgtgtggacttcctactgaacagtgggaagttactttacctgcagaggaagtgcctcctgagctttcggagcccgcattgggtattaactttgctagagacgggatgcaagaaaaggactggttggcacttgttgctgttcatagtgatgcgtggttactagcagtggctcactattttggtgcttggtttggttttgataaagctgacaggaaacgtctcttcactatgataaatgatttccctacaatatttgaaatcgtctctggaagtgccaagaaacagacaaaggagaagtcatcagtttcaaatcatagcagcaataaatccaagtccagtggaaaagctagagggtctggatctgctaaaactcaaagacgtgcactga

SEQ ID NO: 19064 - DNA, 633 bp, Gossypium hirsutum
  Clone ID: GOSHI-09MAY01-C8278_4
gactcccaggatttttcggagaatatgtcggtcttactggtgcaagattggatggtgcagaaatgcttgcatgtggccttgcaactcactttgtcccttcagctgtatgcatcccatcctaaaatttggtttgagttcaaatatatttgagaaaatgtagattcatacccggtggtttatgtttgagaaaacatgatacaggaaacacaaaaaagtgtcagctttgtgtttcttttggctagtaaagttagcatgcatatttattttttactcattttaaattttaaacatccctcgcggccggttatagtgtaaagttactgtccgataaaatcatataaagctatttttctaacaattacctgattcatctttaaaggttttatgaataggcttctctgttgtataaagttacttttgtagttcagaccagatctttcctcgtctgggaaagtaaaaccagatctctatcttcacttattaaagaaactaaaactgaaaatgcattcccttatgaggcaaagctgcagtgggattagtcaaggtacaacataagttttgctttaaaatccttaaagtcttttgtgaatttatatccaaaataagcaagaagaattccttaaaaattttact

SEQ ID NO: 19065 - DNA, 539 bp, Gossypium hirsutum
  Clone ID: GOSHI-09MAY01-C8278_2
cccactcgttcgcccacgcgtccggactctgctgttcgacatgttcttctgagacagggagtactgggcatcaaggtgtcggtgcatgcctcgctcgtgaatatagaatggtttgccatgttatgcgcggagaattcagcaaagactttttcgagggttgcagggctatgctactggataaagataagaacccaaagtgggagccgtcgaaattggagcatattgctgatactacaatagacaggtatttctccaaggtgaaggatgaagattgggaagatcttaagcctccaactagatccaaattcaacttgccaccatatgtcattgcaaagctttagatgaccactgagatgatcatgttaagagtatagagcacacagctgtaatgtctataatgaagcaaagcccattgggtctaaatatatatatatatgcatgtcactccttgatgagtattaagtaagcctgtcctgtgcatttcactgccgacataactctgaatccatatgagaccaaagtcgattgctaaaccccag

SEQ ID NO: 19066 - DNA, 1451 bp, Gossypium hirsutum
  Clone ID: GOSHI-09MAY01-C8278_1
cttttctttacatcctccctctcgtccccttatttctcctcctcctcgtaatccaacctcctactttcaacttccaatccaatccaatgtcttcctccgtttcttcccaacatgatcatgttctagtagaagaaaactccttcgcaagaattctaaccttaaaccggcctaagcagctgaatgccctttcatttcagatgatttctcggttactagaactttttcttgcctacgaggaggatcctaatgtcaagctggtaatgctgaagggagaaggaagagcattttgtgctggtggagatgttgtagctgttgtacatgatatttgggcaggcggatggagagcaggtgccaacttttttatgaaggaattctccttaaactatttgatggcgacctatagcaaaccacaggtttcaattcttaatggaatcgttatgggaggtgggaacggtgtttcaatgcatggtagattccgtgttgcaactgagaactcggtttttgcaatgcctgaaacagctttgggactcttcccagatgtaggagcgtcatatttcttgtcaagactcccaggatttttcggagaatatgtcggtcttactggtgcaagattggatggtgcagaaatgcttgcatgtggccttgcaactcactttgtcccttcagctaaattacctatggtagaagcagcattatgtgatgcagattccagcgatccagtaatcatatcatcaattattgatcagtactgtgagaaaccctcattgaaagagcagactgtgtacaatcgattagatgtcattgatagatgtttctctcaaagaacggttgaagaaattttgtctgctcttgagagggagggttgttgaccaaagggacggttggatctttgctaccattcaaacactgaaaaaggcttctccgactagtcttaaaatttctcttagatcaattagagtaggaagagttcaaggtgtcggtgcatgcctcgctcgtgaatatagaatggtttgccatgttatgcgcggagaattcagcaacgactttttcgagggttgcagggctatactactggataaagataagaacccaaagtgggagccgtcgaaattggagcatattgctgatactacagtagacaggtatttctccaaggtgaaggatgaagattgggaagatctaaagcttccaactagatccaaattcaacttgccaccatatgtcattgcaaagctttagatgaccactgagatcatcatgttaaagagtatagagcagaaagttgtaatgtctgtaatgaagccaagtccactgggtataaatataaatatgtatatatatatgcatgtcactccttgatgagtaataagtaagctgtcctgtgcatttcactgccgacataactctgaatccttatgagaccaataaaaattaccacaattgaatgcttc

SEQ ID NO: 19067 - DNA, 616 bp, Gossypium hirsutum
  Clone ID: LIB3825-019-Q1-K6-E3
cttatcctctcatattttcccacttatttctcctcctcctcgtaatccaacctcctactttcaacttccaatccaatccaatgtcttcctccgtttcttcccaacatgatcatgtcctttccccttctttttcccctttttctgcagtcttgggttttttattattattattttaaattctgtattctaatgtttttcttcactccaaagagttgattttgcatcccgaagatcgtgttttctaggagataacccataaaaccttccctatcctctctctctcattgcttctccatagagcttcaattaactataaaatcaattccaacttcctttattgtctttgtaattgaaataatttcttgttgattttccatttcaattacaaatatgtaaaaattttgtttttttggataatgagaatttctccttgcttcactgcgttaactagctttggtaatatttgggaaggttcacttatatttcttcattacctctgcaggttctagtagaagaaaactccttcgcaagaattcataaccttaaaccggcctaagcagctgaatgccctttcatttcagatgatttctcggttactagaactttttcttgccta

SEQ ID NO: 19068 - DNA, 432 bp, Gossypium hirsutum
  Clone ID: GOSHI-09MAY01-C8238_1
cccacgcgtccgggcgaataaagggatatatggataaagtacgaaacttgaagagcggatatggtagtggcgtgtccgcttctcattccaagcttcttcagttatcggcataagctcaactctcgactgcccgcagtgaacttactgatggcaggctgattgattcgcattcaaggaacaagggatatatgcttgaaagatgatctgaagttcatcctctaaattcataaattttgggtggtttcatttatatttctgtggtgcagggattgctgtaggcagtgatgaaacagccgaatattctgtacagtaatgcctctttcattttcagaaaaaatctttatggacaattcaatcataaaattgcctgtaccttgcccaacttacatcatcatcaaagtcatgttagtctgttgagggccaaaataccat

SEQ ID NO: 19069 - DNA, 409 bp, Gossypium hirsutum
  Clone ID: LIB3166-020-P1-K1-H10
ctcatgcctccacggtaattacttacaaaacaatcctggtccatctcttcagccttggggtgctcagtacttaagctaactgagtggtcctacagtaactgtgaatccctctcgtcaaatgatgattggatggccggaaaaatagtgctttgctttgcttcagactacaatcagagcttgttaaatgatgctatattgtctgtcaaagcggcgggtgggttgggagtgattgtttctaggagttcaagtaattattatccatatgctatgaacttcccatgtcttcaagtaacctatgaaactggaactcagatcctgtattacattcgatctacaagtaatccccaagtaagactgagtccatcaagaacgcatatcggtaagccagtgtcaaccaatgtggcatact

SEQ ID NO: 19070 - DNA, 182 bp, Gossypium hirsutum
  Clone ID: LIB3493-036-P1-M1-D11
cggacgcgtggggtaccctgaagtggcgggggtcatgcctccacgtaactgtgaatccctctcgtcaaatgatgattggatggccggaaaaatagtgctttgctttgcttcagactacaatcagagcttgttaaatgatgctatattgtctgtcaaagcggcgggtgggttgggagtgattg

SEQ ID NO: 19071 - DNA, 837 bp, Gossypium hirsutum
  Clone ID: GOSHI-09MAY01-C9968_1
ctccaagccttcaagttccaaccaattactctctctccgctcgctccactgcccggggaacccccgaagccgtagtcaagaaagatggggaggcggtgtgggcactgccccccgaagaccttactgctagggtcaagaagttgatggaaggtttaagatccgagttcggcgggccacagttcgagccccacgtcacggttgttggggccatcagcttaaccgctgatgatgccttggccaagttctggtccgcttgtgatggccgcaaggcttataatgccaccgtcgatcgtgtggctaccgggactttcttttatcagtgcatctttttgttgcttcatcccactcctgaggtggcggaaactagtgctcattgtagtagccattttggttacaagagctcaacaccatacatgccacacttaagcctcctttatgctgacctcacagaagaagagaagaagaaagctcaagaaaaagctaatatgctggatgaaagcatcagtagcctgagcttccagataagtcgccttgcattgtacaaaacagatactgaggacaaaactctcaaatcctgggaaaaggttgctggatgcaaccttagtcccaactagcttcttacccttctgcagctaatgcaaaaaatagaacctaataagtctcaccgtttcattttgcctacatcaataatcatatatctatgctggttcttggtaattgttactagttacaatgatgaggatgcactctacatgttatctgtaactagtatttaaggttgtgtaccttgaaaaactgctgctatccattaataaataggcaattagttaagtccac

SEQ ID NO: 19072 - DNA, 380 bp, Gossypium hirsutum
  unsure (1)..(380): unsure at all n locations
  Clone ID: LIB3147-037-Q1-K2-H2
agaaagatgtgtattctgtgtgggcacttctttacgaagacgttactgctagggtcaagaagttgatggaaggtttaagatccgagttcggcgggccacagttcgagccccacgtcacggttgttggggccatcagcttaaccgctgatgatgccttggccaagttctggtccgcttgtgatggccgcaaggcttataatgccactgtcgatcgtgtggctaccgggactttcttttatcagtgcatctttttgttgcttcatcccactcctgaagtggcggaaactagtgctcattgtagtagccattttggttacaagagctcaacancaggagagaagaagaaagctcaagaaaagctaatatgctggatgaaagca

SEQ ID NO: 19073 - DNA, 422 bp, Gossypium hirsutum
  Clone ID: LIB3166-019-P1-K1-F2
cccacgccgtccgcccacgcgtctcgcccacgcgtctcgttactatataataatgttagcttttaaggcgagaagccttcttccctcaggtcagactttctccggcacttgccctccggccacctccacgtctctatggggttccggtgctgctctccttttcccggactacgaggtcaaggcccctggttcgtgccgtcatcagtgatgacaaggctgtggaatcagctaaaacctcgccacttgatcaaaaacacagtaatggctcatctgattcttcctctaagcaagtgaaggctgttgtgactataaagaaaaagatgaaggaaaacatcactgagaagattgagaaccaatgggaaatgttgatgaatgggatcggtcgtgggatcttgattcagctcatcagtgaagagattgat

SEQ ID NO: 19074 - DNA, 383 bp, Gossypium hirsutum
  Clone ID: LIB3083-091-Q1-L1-B10
ggagagtctagcttacacaaaaacaccactaccaatgggcgccggtcaaagtgactggtatttataatcacataaagaaaggcttagtttggtggcaattccctgctttccacacttgtattctaatcctatatactactaaaagcttaaggattctgatattcacgatcaccactatataatatgttagcttttaaaccaaagccttcttccctcaggtcaactttctccggcactgccctccggtcacctccacggctatatggggttccggtgctgctcttctttttccggactacgaagtcaaggcccctggttcgtgccgtcatcagtgaatacaaggctgtggaataactaaaaccttttcacttgatcaaaaacac

SEQ ID NO: 19075 - DNA, 1440 bp, Gossypium hirsutum
  Clone ID: GOSHI-09MAY01-C9818_1
ctttcttacaggaaatggtgtgtcctgagttttctcatcctcaatcttcttctcccatggcgaaacctcggaaccggtcgttttggtgtcttcccgatgcctttcttgtctttggtgttgcatttttagctcttttattagtagcgtcattttggtcttttttcactccaacaccaaactttgaacccactgtaaccgacccaccctccaagttgagcatgaatccagtcgattgctcggaaagtgggttcggagttaacttaaaatccgatcccaaagaccccaccttttacgacgacccggagatgggttactcccttgaaaagccggtgaaagattgggatcaaaaacgcgcagagtggttgaagcaccatccttctttcgccgccggagcacgtgaaagaatcgttcttgtaactgggtcccaacccaagccatgtaagaatcccattggtgatcatttactcttgcgtttctttaagaacaaggttgattactgtagaatccatggctacgatattttttacaataacttgttattgcaccccaaaatgggttcctattgggcaaagttacctgtggttaaagcagccatgttagctcaccctgaagctgagtggatctggtgggttgactcggacgccttgtttacagacatggagtttaagttacccttagaaaggtacaaaaaccataacttggttgttcatggttggcctaagttgatttatgagaagaaaagttggaccagtttaaatgctggggtttttctgattaggaattgccaatggtctatggatttgattaacacttggtctagcatgggtccaatgagtaaagattatgagaagtggggtcagattcaacgatcaacgttcaaagataagcttttccctgaatcagatgatcagtcggctctggtttacttgctttatacagaaaaagagaaatattatgatcatatttatttggaaggagagttttattttgaagggtattgggttgagattgttggagggtacgagaacacaacggagaggtacttggagattgagagaggggcgccaaagttaaggaggagacatgctgagaaagtgagtgagcaatatgcagcttttagggaagaattcctgaaggaagctgggaatgggaaagggagttggaggagaccattgatcactcatttcacgggttgtcagccttgtagtggcgaccataatccgatgtatgctggggagtcttgttggaatgggatggtcaaagctttgaactttgctgataatcaggtgttgcacaagtatgggtttgtgcactcggatctagatgattcctccactgttactgaaattccctttgattaccctgcggatgagggtccatggtgaaaaccatacaaacataccaaaagagaagagaatagctagagtgaggcggtgcgcc

SEQ ID NO: 19076 - DNA, 390 bp, Gossypium hirsutum
  Clone ID: LIB3166-018-P1-K1-G2
tcggccaacccttccgccaacccttccgccaacgcgtttttttttggtcttttttcactccaacacggaactttgaacccactgtaaccgacccaccctccaagttgaacatgaatccagtcgattgctcggaaagtgggttcggagttaacttaaaatccgatcccaaaaaccccaccttttacgacgacccggagatgagttactcccttgaaaagccggtgaaagattgggataaaaaacgagcagagtggttgaagcaccatccttctttcgccgccggagcacgtgaaagaatcgttcttgtaactgggtcccaacccaagccatgtaagaatcccattggtgatcatttactcttgcgtttctttaagaacaaggttgattact

SEQ ID NO: 19077 - DNA, 1218 bp, Gossypium hirsutum
  Clone ID: GOSHI-09MAY01-C9838_1
ctctgatgcaattgctagttctcacaaattcttttcctagagatacgtaattgcactcccgatgccccgtaatctccctgacagggtacaatgtctttccctttgatcattacttggcaaaacgattgatgacggaaatcttctctagatcctgacattccaatcttaagtccaagattgaggctctcttgtccagactctgtaaatcattctccagcttcttcgttttgatgacaaaatcttcggcttactttaaggtggactggtttctctccttctgaagcttttcagaagagggtgctttcaccatcaggaagaatagcagtatcactttcaggtatacatgctgtgctgcatgcatctcccaggactgatctggcaacaaaatatgccacagcctcatagcttttgctagcatctgcagaaagaattactcttggaggagcacgaagtagttgctgcataagctgccttgtcaagataagccttctttttgatctaacccctggtggccaatcttcaaacatttcaggctcatcttcaaccttctcaatcaatcgatttgctgcatgcacccattccacctctgccacactgatgttctgagatctttgagaaacttgtttcacttctctatgccatggtagaagctcaaataccatacttttccgctttcttcctctcacaacaaccaaatcctgatttgtgatttcaggaggcagcgagtgagaggagatcagctcactcacaattggctttgagcttttacaggcactatccagctggctaggataagcagcagcattaacctgctcatttgaatgaagtgcatgcatgctgtcagaaggtctatcaacaatgagtgctttttctgcggccttcaacatggcagtttttcgagcatcatatagatgtgacatttgctcatttttaaacgagccataccgatcaaaccaggaaggagcggtgtgggacttatttgagaatgttcacccttgagattagcagctgcattaatgcactggagaaattctgggcatcattctgagcatatgccatcatatcataagaagatacctgtgcctcacagttgtctctagtgtttggtgaaaaccttagcatcttaggatctccagaagaaactaagatacgattaactggagcatctttcatcatggtatctgacccataagataactgctctgccccacgcgaaaa

SEQ ID NO: 19078 - DNA, 514 bp, Gossypium hirsutum
  Clone ID: LIB3829-012-Q6-N6-A10
gaatgaaaggcatccaaaaggctttaataaatacacttaatttttaccttaagaaaatcagctacctgtttcaaaaataattcagactgagctttgttcttcccccattttacccaaaaattatggggtttacccctcactttctctcaagattttcagacaagtatattcaatgataaactcatatatttctcaggaaattgatacaaatggcctgcaatggcaggcaatgatctaagagcctccattgcttttaaattttggagcaaagatgcaccgagggataaaaagataattggccaaaaaaaaaaaaaagggaaaaatcaatcaagtaatgatcaaagggaaagacattgtaccctgtcagggagattacggggcatcgggagtgcaattacgtatctttgggagaagaatttgtgagaactagcaattgcatcagaggacaatgaggtctcagtgccgtcagcttgcccccgaccatggaacttggcaaaacgattgatgacggaaa

SEQ ID NO: 19079 - DNA, 417 bp, Gossypium hirsutum
  Clone ID: GOSHI-09MAY01-C9588_4
atctatctcctcaccactggtgctcgtgagtctgcattcagaaacagtaaaactatcgctgaatgtttagctgatgagcttattaacgcagcaaagggatcatctaacagctatgccatcaagaagaaggacgaaattgagagagttgccaaggccaatcgttgaggaattggtaggagttcgcataaaccatggcggtggacacttttgttttttcattcagtactttataagttacctattttatgttccagacataatatgaatgttccgttatttaagttgagatgttattgaagaaaaccaactggagtttacctcggtgtcaagatggtcaaaaaacacaccatgtgacgataattcaataaccacctatttatagctgataagcgcaggtcaaggattatgtatgatatg

SEQ ID NO: 19080 - DNA, 1065 bp, Gossypium hirsutum
  Clone ID: GOSHI-09MAY01-C9588_2
gtttaatttcctcatctccgagctaccgctaccagtgaaagccgcactattcagtcttcggtcgccgctccccctttctatctattcaatctgaggtatgtcgacggccgtggcagccaccgagaccagcaaagacccaacccaacctacctccgaagtcaagcttttcaatcgctggtcttttgaggatgttcaggttactgatatctctttgagtgactacattggtgtccaagcttcgaagcatgcaacctatgtgccgcacactgctggaaggtactcagtgaagcgtttccggaaggctcaatgcccaattgttgagaggcttacgaactcactgatgatgcacggccgaaacaatgggaagaaacttatggcagttaggattgtgaagcatgccatggaaattatttatctcctgactgatcagaacccaattcaagtcattgtcgatgctataatcaacagtggacctcgtgaagatgctactcgtatcggttctgcgggtgttgtgaggcgtcaggctgttgatatttctcctcttcgtcgtgtgaatcaagccatctatctcttgaccaccggagcacgtgagtctgcattcagaaacattaaaaccattgctgaatgtttagccgatgagcttattaatgctgcaaagggatcgtcgaacagctacgcgatcaagaagaaagatgaaatcgagagggttgccaaggccaaccgttgaggcattagacgagattattacaccgtgggcggggagaatttcaattgttttaatcagtactttatgggctatcttttatttttggtgtcctggacatgcaatgagtgttgtgtttgctatctaagttgacaagttagcttatgtttaaattggagtttttcagtagatattattaaaatgatagaatttttgctgattgatttgatgaaatgcatgtttcattgaattaaaacattcacttttaacttgcttgtgatttataatgcagcaacaattcatgtttccttctaaatgttgagggataatccaaagatgtttgaatccaatgtgaggagggc

SEQ ID NO: 19081 - DNA, 962 bp, Gossypium hirsutum
  Clone ID: GOSHI-09MAY01-C9588_1
cgaagcctagtcactgaaaggaaacaaccctagtcagaatctcagtataaatgtgaaagaagcctagggttttttcccctcccctcccccgcttcgtgcacgattctgaaattttgcctgccgctccatctctacatcacaggaatggcgacagatgttgcagcccccgccaccgccgcacccaaagacccaacccaacctcaccttgaagtaaaactcttcaaccgctggagcttcgaggaagttcaggttgctgatatctccttgagtgattacattggtgtccaagcttcgaagcatgctacctatgtgccacacactgctgggaggtactcagttaagcgtttcaggaaggctcagtgcccaattgttgaaaggcttacaaactcacttatgatgcatggccgaaacaatgggaagaagcttatggcagtcaggattgtgaagcatgccatggatattatttatctcttgactgatcagaacccaattcaagtcattgttgatgctattatcaacagtgggccacgtgaagatgctactcgaattggttctgctggtgttgtcaggcgtcaggctgttgatatttctcctcttcgtcgcgtgaatcaggccatctatcttttgaccactggtgcacgtgagtctgcattcaggaacattaaaacaattgcagagtgtttggctgatgagcttattaatgctgctaagggatcatctaacagctatgccatcaagaagaaggatgaaattgagagagttgctaaggctaatcgttgaggaattggaagaagattaaacaccatgggagtggagaattttgttgttttagtcagtactttataagccgtttttgtattctggacatgctatgaatgtctcgttttttatttgagtaattgacaagttatttttggttaaaagggagttttcagtagatatttttcaaaaaaaaaaaaaaa

SEQ ID NO: 19082 - DNA, 459 bp, Gossypium hirsutum
  Clone ID: LIB3582-039-P1-K1-G10
aagactcataagagaaaggcctgaggctgctaattacctcattccgcacttaagctctctctggtggcggcatctatcatagggatggcgacagccattgtagcccctgccaccggctaactgcaagatccacccacgtctcaccctgacgtcaggctctttaatcgctggagctcataggaagatcaagttggtgatatcacttggagtgactacattggcggtcaaccttgcaaacatgcaacctatgtgccacacactgctgggaggtactgcactaagcgttatagaaaggctcattgccccattggtgagaggcttgcaaactcattgatgatgcacggccgaaacaatggaaagaaacttatcgcagtcaggattgtgaagcatgctatggaaatgatttatctgctggctgatcagaacccaattcaagtcattggtgacgccattatcaac

SEQ ID NO: 19083 - DNA, 315 bp, Gossypium hirsutum
  unsure (1)..(315): unsure at all n locations
  Clone ID: LIB3145-023-Q1-K1-D2
agcggttaaaagccaagcttgaagaaagtcaggcattgcgtaaagaattagaagcttctcttcttgcacaaatggatgtggaggaaagtatcaagaaagagaaagaagaccttgtccgtataaccgaagaaaaagatgggagaatttcaattgttttaatcagtactttatgggctatcctttttttttttggtgtcctggacatgcaatgagtgttgtgtttgctacctaagttgacaagttagcttatgtttaaattggagtgtttcagtagatattattaaaatgatagaatttttgctgattgattggntg

SEQ ID NO: 19084 - DNA, 601 bp, Gossypium hirsutum
  Clone ID: GOSHI-09MAY01-C9518_1
ctaaatccaaaaccaaatagaagaaacatccctgctggctgacccccgtgcttcaccgccgtcgccagtcggccgttccccctgctgctgccagcttcacatttctcctctgtccgccggtttccgcctctactcctcatctgtcggctgccgccaccgtccgtcactctctctcaacgaagaaaaaaaaaaacgggaggtccttcacggcagtgtcaagtttgcaaccaaactcaatccaaatacaaatgcccatcttgtcttattccttactgttctctggcatgtttcaagacacacaaagaaactccctgtgagaagtcggaatccgtaaaagaaaaatctggaacccccagtgtgaatttggggtccaacgataatgctataacaactagtgtcaagccggagtccaccaatgatgcagtaccccccagtgtcgagccgaaatcatctgaaggaagacccactgctagtcgagaatttctggtggggaggaaactagaagttgaggacccaagtgaagtgctacaaattatgcagatgcaggctattgcttcttccaatgacatccgggaagccttgaaagatgagcatcttcaaa

SEQ ID NO: 19085 - DNA, 442 bp, Gossypium hirsutum
  unsure (1)..(442): unsure at all n locations
  Clone ID: LIB3166-015-P1-K1-C6
tgaattcccggggcgcgccgacgcgtccgcccacgcgtccgcaaaaacctaaattcacgaaacttatttagaagaaaacatccctgctggctgacggccgtgcttcacctgcgtggcccgtcggccgttccccctgctggtgccagctttacatttctcctctgtccaccggcttccgcctctactcctcatctttcggctgccgccaccgtccgtcactctctcgacgaaaaaaaaaatgggaggtccttcacggcagtgtcaagtttgcaaccaaactcaatccaaatacaagtgcccatcttgtcttgttccttactgttctctggcatgtttcaagacacacaaaggaacccccagtgtgaatttgnngtccatcgataatgctgtaacaacttgtgtcaagcccggagtcaccaatgatgcagtaccccccagtgtc

SEQ ID NO: 19086 - DNA, 565 bp, Gossypium hirsutum
  Clone ID: GOSHI-09MAY01-C9538_1
aactcttctcaccttgttctcctcgctttcaagctgtctctctattgaagcagtgcaatgggtacgaaaagcaagactcagggcttcgcttttctgctactggtatccactgctcattccttctatctccctggtgttgcacctcgtgatttacaaaggggtgatcctctttatgtaaaagtgaataaattatcctctacgaagacacaacttccatatgactattactacttgaaatattgtaagccatccaagattgtgaacaatgctgagaatttgggggaggtactacgaggtgaccgcatcgagaactccgtctacacctttgaaatgagggaggatcagccttgcaaagtagtctgtcgaataaaactcgatgctgattctgccaagaatttcaaggaaaaaattgatgatgaatatcgagttaatatgatacttgataaccctccagttgcggttcgtagacaaaggagagatggaagtcaatcaacaacatatgaacatggtttccgtgttgggttcaaagggaattatgccgggagcaaggaagagaagtatttca

SEQ ID NO: 19087 - DNA, 428 bp, Gossypium hirsutum
  Clone ID: GOSHI-09MAY01-C9488_1
caaaagttgttagcagctatttccacgggaacattagttgaagaggcaattgatgagtgtaggtccttaagcaagagtgtggctaaagatgaaccagtactcttagagggagaatggcagatgatatggagctcacaggtagaaacagatagttggctagaaaatgccggcaacggtcttatgggcagtcagattgtcaagaatgaacaaatgaagtttctagtgagcatcttacctgggatcagattctccatgattggcaagtttgtcaaatcaggcacaaaaacatatgatgttacaatgaacgatgcagccctgattgttggtccatttgggtaccctttggaaatggagaacaagatcaatatggagcttctatataatgatgacaagatcaggatttccaaggggtacaataatattttgtt

SEQ ID NO: 19088 - DNA, 461 bp, Gossypium hirsutum
  Clone ID: GOSHI-09MAY01-C109773_1
aatgctggagccatgatgagtgtggatgagactttaatgtgctcctttcaaatattgaagcctgctgataaaaaaaccccgatttaactttgggggcacggccacagccaggcctggtagcgcttctgccagtgtctttggcagcacgacaacagcaaagcccggaaatactccagcgggagtcaagtcgttcctcggcacaaggatatgagaggcccatatgcattgtggaaggcagagccaggttatgacatgaacaaaccacaattgcagtaaagacaactttgaggtccttttgatttccatatattatgctcaaatttgtaaaaaagattggaagagaaacaatcattagaaactaattcaaatgatctggtctcttattatataaaatttgggtttgaagatagtaagccatatttttccttctctcccgcttgtacactatctgctacccttgg

SEQ ID NO: 19089 - DNA, 768 bp, Gossypium hirsutum
  Clone ID: GOSHI-09MAY01-C9748_1
gtgagcttatggcaatttcactggcagcagaatcaaaaagagaagaagagaaagcaaagggagtcaattcagataatgcagagaaccctgacattgttccatttgaggacaatgaagaagaggaagaggaagaaagtgaggaggaggatgaaagctttggtgctgcagctcagggcagaggaagaggcagaggaatcatgtggccccctcacatgccactagcccgtggtgccagacccatgcctggaatgcgaggttttccaccgatgatgatgggtggtgatggcttttcttacggaccagttacacctgatggttttgggatgccagatctttttggtgctcctcgtccttttgcaccgtatggacccaggttttctggagattttacgggtcctgcatctggcatgatgtttccagggcgacctccacagcctgggggaatgtttccatctggtggaatcgggatgatgatgggtccagggcgtgcaccatttatggggggtatggggcccacaggtgctaatcctgctcgaggtggccggcctgttggcatgcctccgatgtttcccctacctccagcacctgcctctcagaactctggccgggctattaaaagagatcagaggacaccaaccaatgacagatctagtgcaggatcagagcagggtagaggtcaggaaatgggtggtccagggggtgggttggaagatgagacacagtatcagcaagaaggacaaaaggctcaccattgaagatcagtttgct

SEQ ID NO: 19090 - DNA, 426 bp, Gossypium hirsutum
  unsure (1)..(426): unsure at all n locations
  Clone ID: LIB3166-016-P1-K1-H6
cggattgaangggcgggcccgacgccatgcgttcgttctcactatgcttttttatatatatgtttacattttggctcctgtggatgagaaacccggttaggaagttcttaacttgcccattcgtagaagaacactaaagggtttcaagatctaaacttttgtttttcaattgaatccaaagattggttttcagctttggtaaatgggtttttgtttttgggtttagtttgggtatagcttgctttttgtaagtttacaagctgatgctgcagctgaaggggatgcaattgttgagggtactgtttatattgatgggaaagctcccattggtatcatagattatgatttacgttgtgctactttggattggtggcctcctgagaaatgtgattattggacatgcaaatggggtcttgctggacttct

SEQ ID NO: 19091 - DNA, 287 bp, Gossypium hirsutum
  Clone ID: LIB3272-035-P1-K1-C9
caaagattgggttttcagctttggtagatgggtttttgtttttgggtttgattgggggatagctcgctttttgtaagtctacaagctacagctgcagctgaaggggatgcaattgctgacggtactgtttatattgatgggaaagctcccattggcaccatacatgatcatttccctggcactactgttgattgttggccttctaacaaatctaacattggcacatgcttttggagacaagctatacttctcaatttaactcctaacaattatatattctcaaatgc

SEQ ID NO: 19092 - DNA, 435 bp, Gossypium hirsutum
  Clone ID: GOSHI-09MAY01-C9678_1
cggacgcgtgggcggacgcgtgggctaaaacgctcttccaggtagttagcaattatcatcatcatgaactcaatctttagttcctttgatgctctgtggggtgagttgttgggacaggcagtcaggtcttcctttgcttctacaactaataaagatggtgttaggttgtttagtggcagagttaaggtgacaacagaagaagacatgaagaacaagcaacaaggaaacgttgagaagaagcaacagagggctccccgtttcgctcctgagctcgacggccttcactgctttgagacccttgtttcctactagattctttccttcatgaggttgaagttattcaacaagattgattcttttttctttttaatagcagaagctagaaattcttactgcatatgtaaaaatctgcggttaattggaattccttttttg

SEQ ID NO: 19093 - DNA, 370 bp, Gossypium hirsutum
  Clone ID: LIB3166-021-P1-K1-C2
agaagacataaagaaaaagcaacattgattacgttgagaagaagcaacagagggctccccgtttcgctcctgagctcgacggccttcactgctttgagacccttgtttcctactagattctttccttcatgggtttgaagttattcaacaatattgattcttttttctttttaatagcagaagctagaaattcttagagacccttgtttcctactagattctttccttcatgggtttgaagttattcaacaatattgattcttttttctttttaatagcagaagctagaaattcttactgcatatgtaaaaatttgggattaattgaaattctttatttgaaatcgcctttctttctagctttatggttt

SEQ ID NO: 19094 - DNA, 657 bp, Gossypium hirsutum
  Clone ID: GOSHI-09MAY01-C9668_1
gcgtccaaatgggtgttggccattcctccctttcttcttgttcggttgactcactttgtattattgcttttacagcacaaccaaaaacaagctctttttccaattccaaccggcaaaagcctctctttcccacaaaaaaacactccccttttgctgttctaaaaattgggactttaaactgcgcgagagtagctggggagatggaaatcggaaagggtattgctgcagcaggaaaacccattgttgatcttcatggtattgatgacggcttgattcaaaagattgtatatgatgctcttgtttggagttctcttcatggccttgttgttggtgacagaaatgatcagagatctgggaaactacctggtgttggcatggtgcacgctccaattgctttgttgcccacgtcatttccagaatctcactggaaacaagcatgtgaactagctccaatttgcaatgagctaatcgatcgtgtaagtttagatggaaagtttctgcaagactccctagctaggacaaaaaagtggatgcttttacctctagacttttagacattcattccagatactagaaatgaacaagaaagaggaaattcgcttgggtttgcatcgatcaaattacatgcttgatgagaaaactaaattactcctccat

SEQ ID NO: 19095 - DNA, 745 bp, Gossypium hirsutum
  Clone ID: GOSHI-09MAY01-C9638_1
caaaaccttaaaatcacaaataattaattttctaaaaatttccattttttgttcgtttgaggaaaatggttgatttagattggaaagcaaagatggtttcttcagatattagcaacaaatcctcgaaattgtccattccgacgccgcttcggttgttgaatatgtcgtctccgctttcgacttcggcttcggcttcatcggcttatgagtactatcttcgtttaccggagctgaggatgttatgggaggcaaaggagtttccagcttggcagaacgaggtcgttttgaaaccggctttgcatgctttggagattaccttccggttcatttcgatcgttttatcggatcctagaccgtattcgaatcgccgggagtggacgcgtcgacttgagtcgcttgccacaagtcagatcgaactcatcgctatgatatgtgaagatgaaaacgaagacaaaacgacggcgggaacggctccgatcgttgatttgacgtcgtcgaacggtgtgcttgctcgtgagtgtagctccaccgaggtttggaaggtccatggagaaaccacggtggtgaaccggaccagcaaatccagcttgctaccgcggctcgccacgtggcagaaatccgaggatgtggcggagaaaatcctttactccattgagtgtgagatgaggcggtgttcgtacactctcggattaggagaaccgaacttatccggtaagcccaacttggattacgacgccgtttgcaa

SEQ ID NO: 19096 - DNA, 1376 bp, Gossypium hirsutum
  Clone ID: GOSHI-09MAY01-C9628_1
gcatcggctcggcaattggctaaagccttggaagtgccattggtaaatgatttgggttatacaaagagatatgtgaggtgtcttcagatatctgaagtggttaatagtatgaaagacttgattgattacagtagagaaacaaggactggacccatggagagtttggccaagttccctcgaagaacgagcacttcatctggttttcatgcacaatctcaacagcctgaggaacagcatcagcaacagcagcagacaccacaacagcaaatgatgacccagagctctaatggtgatcaaagttctgcccaggcttctgggatgcagcttgctgctaacaatggtgtggctaatgtaaataactcgcttaatgtagcatctgcatcaacatctgctggcaccattgctgggcctctacaccagaattccatgaactccagacagcagaattctatgaataatgcaagcagtccctatggtggaaactctgtgcagatcccgtcccctggttcctctagcacaataccccaaacacaagcaaatccttctccatttcaatcgccaacaccttcctcatctaataatcctcctcaagctccgcatggtgccttagcagcttcaagtcacatgagttctgcaaattctccagcaatgaacatgcctatgcagcagccagctctttccagtgaggcggatcccaatgaatcccaaagctctgttcagaaaatcattcatgaaataatgtctagccaacttaataacactggcggcatggttggtgctggcactctaggcaatgatgtgaagagcgtaaatggaatgctgccaccgagtaacaacatggttctcagcggtggcaacactttggtcgctaatggaaccatcagcaataattcagttattggtggtgtggggtttggttcaatgagtggtggactagggcagtctgctatggtgaatggaatcagagccacaatgggaaataaccctgtcatgaatggaaggatgggaatggcacaaatggctcgggatcagctaatgaatcaccaacaacaggatatggggaaccagctactgaatggacttggagcagttaatggttttaataattatcaatttgattggaaaccttccccatgaaagagtgcaaaaagctgatggttctttgattacagctgtgctgttgtgtgcagcatgggaatcggctgacttgcctgtggccctgccagattcgtggtacaaacactataatgatagatcaaggtcttcccctcccactgtgtactaatttcaggaaaaaagtgaaaaacaacatatagcatagtgtttttatcaatgaaatgttaaaagcaactttgaagttgctccaatttcctatt

SEQ ID NO: 19097 - DNA, 1388 bp, Gossypium hirsutum
  Clone ID: GOSHI-09MAY01-C9158_1
ggggaaagaatctattttcccttcattttcactacagaaaaaaaatctcttttattttttctcgagagaattcgagttccttttcactctctttcacttcggttcttgaaagagatgtgagtttttaaagaaaaagcttattttattttattttaaatttccactatgagtcttaggtaaaatcttcagatctggtgaattcttgtggatttcatcaagatctctgccttttcatgtagggaattcttcattttttttcccttttttttccttcttttccctggttttctcgggagaaaggaaaacaaaaaaagaaagtaaaactgtgtatgttctggtgggggaaagtataaaacaataaaagatgaattatttcccagatgaagttttagagcacgtgtttgatttcatcacatctcacaaagaccgtaactcagtgtctttagtttgcaaatcgtggtacaaaatcgaaagatacagcaggctcggcctcgcctccgggaactgttattccatcagcccagagaggttgatcgccagattccctggcttgaagtcgctgactttgaaagggaagccgcatttcgccgacttcaatttggtgccacatgattggggaggtttcgtttatccttggatcgaagccttggctaagagccgaatcggattggaagaacttaggcttaagaggatggtggtgtctgatgagagcctcgagctgctttccaaatcatttgtgaattttaagtctttggtccttgttagttgtgaaggcttcactactgatggtcttgccgctattgctgctaattgtaggtttcttagggagctggatttacaagaaaatgaagttgatgatcatagaggtcattggcttagttgctttcctgaaagctgtacctctctgatttccctgaattttgcctgccttagaggagaagtgaacttaggagctcttgaaagacttgtgtcaagatctcccaacctcaagagtttacgactaaaccgtgcggtcccgcttgataccctccaaaaactattgatgcgagctcctcaactggtggacttgggaatcgggtcttatgtacatgatccattctctgaggcctataacaaattgaaaattgccattcaaaggtgcaaatcaatcaggagtttatcggggtttttggaggttgctcctcattgcatgtcggctatttatcccatttgtggaaacctgaccttcttgaacttgagttatgctccaggccttcatggtaataagctgatgaagctgattcagcattgcaggaaacttcagcgtctatgggtatgcccctttaattacttgcaatccagttgtaggtattccatctgaattaattgaatgttgataatgaatatca

SEQ ID NO: 19098 - DNA, 672 bp, Gossypium hirsutum
  Clone ID: GOSHI-09MAY01-C9168_1
gcgccaaatatcgagggtcgagggccatcacggtctttttgtcataagtttatgtgaccggggctacttcacttctccaataggaaaagaaaaaaccctagcggctacactcttccctcactttctaaactaacagaagaaatcaatcacggaaatggagttttctcaagccgacttcgatcgccttttagtcgccgaacacacccgtaaaacctctgaagtcaactacgccaaggaccctcttgatgctgagaatttaaccaaatggggaggggctttactcgaattagctcaatttcagactgtttcagatgcaaagcagatgataaatgatgcaatttcgaaattggatgaggcgttgatgataaatccatccaagcacgaaacttttgtggtgcatgggaaacgctctttccactactgcatttatggctaccgattctgacgaggcaaaagtttcttttgataaggcagctcagtttttccaaagagctgttgatgcggatcctggcaatgagccttatcaaaagtctttggaagttgcagctaaggctccaagactacatatggacttccaaaaggctgcagctaccaacagggtatgggtggggcatcttctgcttcttcaacttcaactgctgccaagaagaaaaaatcagtgatttaagtatc

SEQ ID NO: 19099 - DNA, 609 bp, Gossypium hirsutum
  Clone ID: GOSHI-09MAY01-C9138_1
caaaaaaaaaaagaacaatttagctagattctccacgtagttgctgtgatctcacaatgggttcagcagctcctgagtatcaaccattgctgctgggtctcgactcccattctcggatacccgatttgtcatccgttgcaatcgaagagttcttgcagcacagaccgattgcccttcgatggtggccaaggcttgtagcatgggagtccaggcttctttggcttctatctggttcttctattgttctttccattttcaattacatgctcagctttgtcaccttaatgttcactggacatctaggggctttagaacttgccggtgcttctattgcttgtgttggtattcaaggtcttgcctatgggattatgttagcatggcgagtgcagtacaaacagtatgtggacaggcctatggggcaaagcaatattcagcaatgggaatcatttgccaaagagcaatcatattgcacttaggagctgcagttcttttaacatttctgtattggttctctggtgacgttcttcaagcaataggtcaaaccgaaagcatagcgcaacaaggtcaagtcttttctcgaggtctcatccctcaaatttatgcattccc

SEQ ID NO: 19100 - DNA, 359 bp, Gossypium hirsutum
  Clone ID: GOSHI-09MAY01-C9058_2
gcgtccgcccacgcgtccgcccacgcgtccgcccacgtcttttcctgttcacgcgtccggttgactttcttggttgcagaatcatgtctaatagcgggtgcaactaggaatgcttatcacaccaagtatcgtggaatgatttatgcccagaatttctcctgtgaaactttgaggaaaggtgtctttattgcaggagcagtgtttgtggttgccacaatgattctcaacgtatactactacatgtatttcgccaaagcaaccaccacaatggccggctcacagggcaaatcgaacgaattcaactgtttgggatgactggtttatgcttaaaggttaaaattactcaattaatgaagcca

SEQ ID NO: 19101 - DNA, 756 bp, Gossypium hirsutum
  Clone ID: GOSHI-09MAY01-C9058_1
cggacgcgtgggaaattccacattttcttcactgaatgcagcagctaaacaagggccgctctctttgcctcgcttatccataccctgtcagtgcctgcgtcagctcaaagcagagatgggagaaggaaagggctcaaccctagtgcaccttctggtggtagtccttagcttggtcgcatttgggtttgccattgcagccgagagaagaagaagcgttggcactgttgttaaagatgacataacaaattctacatattgtgtctacaactcggatgttgccactggctatggagtaggtgctttcttgtttcttctttctggcgaatcgctgttgatgggagttacgaagtgcatgtgttttgggaggccattagcaccgggtagtgatcgagcttggtctatcatatattttgtctcatcatggttgactttcttggttgcagaagcatgtctaatagcgggtgcaactaggaatgcttatcacaccaagtatcgtggaatgatttatgcccagaatttctcctgtgaaacattgaggaaaggtgtctttattgcaggagcagtgtttgtggttgccacaatgattctcaacgtatactactacatgtatttcgccaaagcaaccaccacaatgccggctcacaaggcaaatcgaacgaattcaactgttgggatgactggttatgcttaaggttaaattactcaattaatgaagccaggcagataagtttcacatctagttctagtgtgacatcg

SEQ ID NO: 19102 - DNA, 997 bp, Gossypium hirsutum
  Clone ID: GOSHI-09MAY01-C9078_1
ctcgatttttctcgtccaatccaatttgttgaggaatcagacaaaggtttaggttatttgctgataatattttgaagaaaacatgacaactgctgctagaccgacatggcaacctgccaaaggtgggaatgaacagggtggcactcgcattttcggcccatctcagaagtattcgtcgagggaccttgctgctcatactactctaaagcctagaaaggatgggcaggacacccaggatgagttgcagaagagaaacctccgcaatgagcttgaagagcgtgaacggaggcatttctcatcgagggacaagtcctataatgatgacagagatcataggaagggaaaccatcttcttttagaaggggcaaaaagggaggctgaagaccgaattgttccgcgcagtgttgatgctgatgattctgatgtggaagtcaacagtgacaatgaaagtgatgacgacgacgacgatgatgatgaggatgatgaagaagctctcttggctgagctcgaacggataaagaaagagaaggctgaggagaagctccgccaggaaaaactagagcaagaagaacagctaaaagccaaagaagctgagcttcttcgaggaaatccactactcaataatccaacatcttttggtgtaaaaagaaggtgggatgatgatgtggtgttcaagaaccaggctcgcggtgaaaccaagcctcaaaagcgcttcattaatgataccataaggaatgacttccacaggaaattcctgctgaaatacatgaagtaattcgcttggataccctagcagttagcgaatcaagtaaaagaacttactgttttctaatattgtgaatttctagtggatttgacgatgctttacctttcctagaatatgcgatgatgtgtgccggaacgtatgatatctcttgaatgcatgttagaatgttgtatgttttcttgatttggttaaaagacttgctgaaagaaagatctcatggcttttattttc

SEQ ID NO: 19103 - DNA, 885 bp, Gossypium hirsutum
  Clone ID: GOSHI-09MAY01-C9068_1
tggagttgaagagatcgaaacaagataaatcgacaagtcacatttgcaaaacgaagaatggtttactcaaaaagcttatgaactttccatcctttgtgatgctgaggttgctcttatcattttctctaatcgtggtaaactctatgaattttccagttctaacagcattgctgatacactagagaggtacaacaggtgcacctatggagcattggaacctggtcaaacagaaattgagacacagagaaactaccaggactatttgaagctcaaagcaaaagttgaggtccttcaacattcacaaagacattttctgggggaagatttaggagacttgggctctgaggaacttgagcagcttgagcgtcagttggacttctctttgaagaaaatcaggtcattaaagatggagcatatggttgagcagctttctaaacttgaaagaaaggaagaaatgctactggaaaccaacagaaacctgagaaggaagttggatgaaaatgcttcaacactaagatcaacatgggaaactggggagcaaagtgttccatgcaacctccagcatcctcgatttcttgagcctttacaatgcaccacttctatgcagattagttacaatgttccagctgatctgacacatgaaaacattgctactacaacttcagcaccaagtggattcatccctgattggatgctttaatagttttaaaacattttaataatcaaataaatacatgtataatctcttctctatagtgatgaaacaaatagcagaaattggctgtatttaattattaaaaagggtggtcgatgcttggggtaaagctccatttgtaataatttcttggatttttattatcatgaaacctaagttttctataatgt

SEQ ID NO: 19104 - DNA, 587 bp, Gossypium hirsutum
  Clone ID: GOSHI-09MAY01-C109013_1
gataaagtcatgcgtataatagttcatcttgattagtgtgagatggtttgacctgtgaggggttccttcctataaagaaagtagcctttctgctttatggaagagttaatagaaaaagtggtgtataaagggaagtgtatgttgtctgtcttaggctgtcagatattttaagtgttcagcgtgtttgtgaaattccggtgccgctggtcttcgctgctcggcccttcaaccaacaaatttctgacctgatgaagcagttgagtaaaaaaggccggtgattccctattaaaatattaaagagtcgcttggaaccgagtctattgcctaggccaacccccaattattaggaagaaatagaaagaatatcgtccaggggcaaaaagggttaaaataagaggagggaacgcaaagagtgacatagtgttcgtgaccgagaaagagagaaacaggggagttggctgataaagatggacagtaacgattgcgtaatatcaatttttcggcctcgtcatcgaaagcggcttccaattgctcggaaattcttactatatggggggcttggatggtgagcaaaaacaattgatccc

SEQ ID NO: 19105 - DNA, 490 bp, Gossypium hirsutum
  Clone ID: GOSHI-09MAY01-C9398_1
ttggcagcgtttctcaccaaccaaacgctgttaaggaaaaaaacaatgagaaaagcagggccaagaaaggatgggaactacacgaatccatgtttaacgatgcatcagccatgggcttcattgttagtttatgggatcaaacgtatagaaggcaggtcttggcctgctccaatcagaggccgcctttggatacatgctgccggtaaagtcccggatgaatctacgatcaaagcaatggaggatttctatagggaaatttacgcattgaatggaattaccgatattaaatttccagaacattaccctatctcaagactgctagggtgcgtcgaaagtggctggcctgtttgacatgtgaagaaattgggttcaatgggaggcacttacctgaagcggttaggcttagaaggaccaactgatttttgctggctctgtgaacaacccaagaaatttgttggttccattcgagatgccaggataccagcgtatt

SEQ ID NO: 19106 - DNA, 435 bp, Gossypium hirsutum
  Clone ID: GOSHI-09MAY01-C9378_1
cgaaacccggcgaccacgcttcgctttactgtaatttttcttttctccggttatttttatccggaaccgttaaccgcattggcggtcactgcattagcaactgcaccaccgtcagccactggatcgttccgtaccaggcgatccacgaacggggtttctcggttcaggatgtccgtccgatctggctccgtttcaatggctgcggctcccatgttaaccaagcttcagcaagactgcgccactccttttgccggtccttcgcaacgtggccgcctccatgtctgatgatttctcgtgcaggccttgccgttgatggcggcagcgatctcaagatgatcctcagctacgtcgatagtttgcctactggggatgaaaaaggattgttttacgctttggatctgggaggaacaaattttcgtgttttgagggttgaat

SEQ ID NO: 19107 - DNA, 351 bp, Gossypium hirsutum
  Clone ID: GOSHI-09MAY01-C9248_3
tttggtgtttgaaacaaggaggttcagcggcatgatctgggctctacgcatgatctgcctgtacaacgtcacctttggactctacatgctggattggggggagcgttgccttttcagcatccttttttctgcttctcttgcctgaagagatccaatctgtctcaggatttgcacacttcaaaggtggctgaaggattctcttggtcgtctgttccctatcaaaagtcgaagtctgggcatttttttaagcctgtgaccagattatactgatattgttatacaaggagctgccttgcgttgcctagtattttctgatcggttgtggcatcaatttaactcttcccgatgttt

SEQ ID NO: 19108 - DNA, 532 bp, Gossypium hirsutum
  Clone ID: GOSHI-09MAY01-C9248_2
tctctttgcgtccgtggacgcgtgggtctgtgctggggatcctttgacgggatcttgggttttcagaccgtccgcggagtattcattggttaggcatctatttgtagttggttctaggggctagagatatgaattgggcccaacgcaagatctatctctacaatgacacatttggactctacatgttggattggtgggagcgttaccttttcaacacactggttattgtgttgatgtggttcatcttttacaacagctcgcgatatgtcacggagttttacaagaggcatctatcctagggttgcgaggcggcaggggtgatggaagtgtgaaatacttttgaattaccgggctgaaaagcttgcttatatgtgggtttgtcataccccattgtgagcatgtctcacatatattgtcggactgttttcaaagctattccttgcaaaaaatttaaaacattgtcgctgttgtaactattgttgaaactcttctacaattttaaaaattataattagaagtaaaagcacttttt

SEQ ID NO: 19109 - DNA, 432 bp, Gossypium hirsutum
  Clone ID: GOSHI-09MAY01-C9248_1
gaccacagccgtccgccacacccttcgattccaaaaggagctttgtactttcgttccgatcaccggaaccgtaattttcgggaccgtcggcggcgtatgcaggggttaggcagcgagggggatttgtttttaggggttagagatatgaattgggttcaacgcaagatctatctctacaatgtcacctttggactctacatgttggattggtgggagcgttaccttttcaacacactggttattgtgttggtgtggttcgtcttctacaacagctctgcgatacgtaacggtcttttttcaagaggcatctatcctagggttgggaggtggctatggtgatggatgttataatttttttgtttttattttgtttttatattatatattatatttatattttttcttcttttcttttattttttcttatatttt

SEQ ID NO: 19110 - DNA, 370 bp, Gossypium hirsutum
  Clone ID: LIB3189-050-P1-K1-F12
gcttagcaaatcccaaaggagctctgtactctcgatccgatcaccggaaccgtaattttcgtgacgggcggcggcgtattcattggtgaggggttagagatatgaattgggttcaacgcaagatctatctctacaatgtcacctttggactctacatgttggattggtgggagcgttaccttttcatttttaagtccaagtatcactataattcccaattgttagttcctaaaccatggaagacacactggttattgtgttggtgtgggtcgacatctacaacagctcgcgatacgtaacggagttttacatgaggcatctatcctagggttgggaggtggcaatggtgatggaagtgaaaatacttttg

SEQ ID NO: 19111 - DNA, 458 bp, Gossypium hirsutum
  Clone ID: GOSHI-09MAY01-C9208_1
gccatgcgtttgcctctcaatactccaagggatgggtgttgcccagttcgcctgaatcgacgtctatgtgcgttaaggagcggttgtggctgcaagcaagggcctattcatggaagctttaactgtcaatctcgagtttcatcgccgctgggaaggcgggattatgcggcggtggcaggggaagtggcaagcatgcgagagaatagagaatcatcgtacggtggattcaccaacagaggtctcttgggtccaccggcaagaaagtccattgatgtttctggcttttacccttctcaccagtcactttctcaccgcaatttgcaggccagtcaagttcaacaattgaagcaacaacagctaatgaaacaactgaaacatcaacatcagtatcagcagaactacagcctcgtgttccaaaacaaaggaaggaatagtaataataataggcccttgggtat

SEQ ID NO: 19112 - DNA, 829 bp, Gossypium hirsutum
  Clone ID: GOSHI-09MAY01-C4958_1
actcaaccaccaccaccgccgaactatcctccgtcaatttctaccgaaacggtggtgcaaaagctgatagtggagatggacaaaatacctcctcgtggagttcaccaccgacgagctcactccgacacaactttccgtttcgatgatcttctcctcttcgacccttccgacctcgatctttcctcccttgacctcccggcttcctcctccaatcccactcctccacctgtcgtccccgttccgcccacgcgtccggacgattcttcctccaacgggcatcatcctcgctcctcccacagtaaccctaggcaaatctcttcccacctccgtagtctctctgttgactcggattttttcgacggactcggcttgactggaccggctatttcaggaggagctggagatgagaaatttggcgggaaaggagtggcgggagagaagatagttcaccacaggaatagtaactcgatggatggtacggcgtcgtttgaggttgagtctttgatggccgttgacggtgttaagaaggctattgctcctgatagactcgccgagcttgctcttattgatcccaagagagctaaaaggattctggctaacaggcaatccgcggcgcgatcgaaggagaggaagattcgatacaccagtgagctggagaggaaagttcagactcttcaaacagaagctaccaatctctccgcgcaggtcacaatattacagagagacactactgggttgactactgagaataaggaactcaaactacgggtacaggccatggagcaaccaagcgcagctagagatgcttaaatgaaagcgtgagagaaga

SEQ ID NO: 19113 - DNA, 493 bp, Gossypium hirsutum
  Clone ID: LIB3585-027-P1-K1-G10
ctcggacctcgatctttcctgccttgaccttccggattcctcttccaatcccagtctgccacctgtcgcacccgtacctgctgaatcctccgatgactcctcatgcaacggccctcctcgctccaccctcaataaccctaggcatatccgtagcctttctgttgactctgatttctttgatggactcgggttgactggacccgcgatctccggaggagctggggatgagaaatttggcgggaaaagaggtgcaggagagaagagggttcaccatagacatagtaactcgatggatggttcgactacggcatcgtttgacgttgagtccttgatggccgttgatggtgttaagaaaactatggctcctgatagacttgctgagcttgcccttatcgatcccaagagagctaaaaggattctggctaacaggcaatcagctgcgcgttcaaaggagaggaagattcgatacacgaatgaactagagaagaggttc

SEQ ID NO: 19114 - DNA, 905 bp, Gossypium hirsutum
  Clone ID: GOSHI-09MAY01-C4948_2
cccagcgtccgccccgcgtccggcgttatccttcacctacttggtttaaatgttagaatcttgattgattccactttcttaactcattattcccttcaaagtatatatattctcctttgttgactaattgggtttctttttctttctaagattaatggatttcagcaatgaatcacgggtgttgcatcgctgttctgctcaaatcggaaatcttctccttcgatcattgtggcatctcgtacattttattatcagcatatgcaactttacattggatattgctaatgtgcttgaaagctatcttatctcttcggcactgctgggtagatacaaatccctccatatagccaagctcccctcgcggccgcccgcgcgtccgagcgaaggagcttatcaaacttcgaaaattatcgagcttttgcaatggctggaagctgttggtgtcaaacatgtttgcctttatgataaggaaggaatactgaagaaatcaaaggacttcatcttggaaaacttggatggtgcaatattgtttcaggatgctcatgaaaataatgtgctattagaccaacaacatatgactctggagtttgtgtcattttctgatgggaaagaagcagttgccaaagcagccaatgtactttttatgaagtactcaaaatcaggtgtgactgaccaaaatcagaaagagaaaatcttcactgaatctcaaatgagcgaggcactcaaaaccgttgggagcggagggccagaaccggatcttatattagtatatggacctgccaggtgtcacttaggtttccctgcctggaggattaaatacactgagattgtacatatgggtcccttgaagtccatgaattatgggtcactaaattatgctatttacaaattcacaatggtgcgac

SEQ ID NO: 19115 - DNA, 941 bp, Gossypium hirsutum
  Clone ID: GOSHI-09MAY01-C4948_1
ttttaccgtttctctgcaccaagcccagttgggaacctgcttcctctctactttccgtcctcccctcccgtccccaaaatttattttaatctgttcttcttctttttggtctttttctttttttaatttctcgaaaccccttttttctcgattatgtttaaatagatcaatggatttcgccaagctaaagcggatgttgtgttactggattcatcaaattgtgaatatcctacttcggttaacctggcatctcttacattttactatccacttattctactttgcgatcaatattgcaaatgcgctcgaaagccatcttatatccaagggattacttaggagatacaaatccctccatatatccaagctccagtatctggctattgtgatagaaagcgaagattgccgaacttcgaatgttatcgagcttttgcaatggctggcagatcttggtgtcaaacatgtttgcctttatgatatggaaggaatactgaagaaatcaaaggacttcatcttggagaagttcgatggtgcaacattatttcaggaaaatgatgtgctactagatcaaccacttatgactctggagtttgcatcgctttccgatgggaaagaagcggtggcaaaagcagctaatgtactttttatgaagtacttgaaatcaggttccaccagctcatatcagggagagcaaatcttcaccgaatctcaaatgggggaggcgctcaaaactgttggcggcaacgggccagaacctgatcttttattagtatatggacctgccaggtgccacttaggtttccctgcctggagaatcccatacaccgagattcaccttatgggacccttgaggtctatgaaaatatgggcccctatttaaggcagtttacaattccccattgtgtgccccaaacttacggcaattaaaaggttgcatttac

SEQ ID NO: 19116 - DNA, 406 bp, Gossypium hirsutum
  unsure (1)..(406): unsure at all n locations
  Clone ID: LIB3148-038-Q1-K1-G1
gtttgatcttatttctatataatatgtaattattaatctatatctttaactttataagtagaggtttttgctaataaatcaagtggagagatttcttaagcctaccattacttctgaactatagagtttgcatcgctttccgatgggaaagaagcggtggcaaaaagcagctaatgtactttttatgaagtacttgaaatcaggttccaccagctcatatcagggagagcaaatcttcaccgaatctcaaatgggggaggcgctcaaaactgttggcggcaacgggccagaacctgatcttttattagtatatggacctgccaagtgccacttangtttccctgcctggagaattcgatacaccgagattcaacatatgggacccttgagtctatgaaatatgggt

SEQ ID NO: 19117 - DNA, 382 bp, Gossypium hirsutum
  Clone ID: LIB3272-050-P1-K1-D11
ctttttggtttttttttttaaatttctcgaaaccccttttttctcgattatgtttaaatagatcaatggatttcgccaagctaaagcggaggttgtattactggattcatcaagtacgtgatgtctgatattgtgaatatcctacttcgattaatgtggcatctcttacatgtcactatccacttatgctactttgcgatcaatattgcaaatgcgctcgaaagccatcttatatccaagggattacttaggagatacaaatccctccatatatccaagctccagtatctggctattgtgatagaaagcgaagattgccgaacttcgaatgttattgagcttttgcaatggctggcagatcttggtgtcaaacatgtttgcc

SEQ ID NO: 19118 - DNA, 528 bp, Gossypium hirsutum
  Clone ID: GOSHI-09MAY01-C4968_3
caagtggttatgagtgggcacgggttaacaaagatacaggaagcaaccctcatggttacctcccaacgcattatgagaaggtgcagatgctcctaagtgatcggttccttggattttatatgatacctgacaatggtccgtggaattacaatttcatgggagtgaagcatacagtgagcatgacatacggggtgaagctggggacaccgaaagagtactacaatgaggagcaggggccgacacatttcctggagttcagcaacttggaagaaggtgatactgcgcaaggagatcgggaggatacttttacttaaatccctaaatctgtttttaccaaagactccaaatcctacaatgtatgaaatgaacgaaaaagaatatttgccccgcatcctcgctttagtgctgaacccgcaacatggatagaggaggcttaaagcttgtttgttgaatagttgcatgtactaaatcccaattgtaagaatgctttttggagttgtaaatatgagtaagaactaggatttgaat

SEQ ID NO: 19119 - DNA, 2020 bp, Gossypium hirsutum
  Clone ID: GOSHI-09MAY01-C4968_1
tccgcggccgcgtggggaataagatcatgaagtcaaatccagctttatatgtcttaagggagaggataaggaaaggtttgcagttatattcttctgagcctactgagccgtatctgtcatcccagaactatggggagatcttcagcaaccagatcatttggtttgttgatgacaccaatgtgtatcgtgtgacaatacataagacatttgaagggaatctcacgacaaaacccattaatggtgccatctttattttcaatccacggactggacagttgttcctaaaggtaattcacactagtgtctgggcaggtcaaaagcgtcttggtcagcttgccaaatggaaaactgctgaagaagttgctgctcttgtgcggtctttgcctgttgaagaacaaccaaagcagatcattgttacacgaaagggaatgcttgatcctttggaggttcacttactggatttccctaacatagttatcaagggaagtgagctgcggctcccattccaggcttgcttgaaaattgagaaatttggtgatctaattctgaaagctacagagccacaaatggttttgttcaacatctatgatgactggttgaagagtatctcatcatacactgcattctcccgactcattctgatccttcgtgcgcttcacgtgaacaatgagaaggctaagatgttactgaaacctgataagacaatcgttactgagcctcaccatatttggccttctctaactgatgatcaatggatgaaggtcgaagttgctttaagagatctgatactttccgactatgccaaaaagaacaatgtgaatacatcagccctgacacagtctgagattcgtgacatcatccttggagctgagattactccaccctctcaacagaggcagcagatagcagagattgagaaacaggcgaaggaggcaagccagctaacagctgtgacaactaggactacaaacgtgcatggagatgagctcattgtcaccaccacaagtccctatgaacaagcagcatttgggtccaagacggattggcgtgttagagcaatatcagctactaatctttatcttcgagtgaatcatatatatgtgaactcagaggacataaaggaaactgggtacacatatatcatgccaaagaacattttaaagaagttcatctgtatagcagatctcaggactcaaattgctggatacttgtatggaataagccctcctgataatccccaggttaaggaaatccgatgcattgccatgccaccgcaatggggtactcatcagcaagtcaatcttccatcagctcttcctgaacatgatttcttgaatgatctggagcctttgggatggctccacacacagccaaatgagcttcctcaattatcgccacaggatgtgacatcccattctcggatattagagaacaacaaacagtgggatggagagaagtgcataatcttgacatgcagtttcactcccggttcttgctcattaacagcctacaagcttaccccaagtggttatgagtggggacgggttaacaaagatacaggaagcaaccctcatggttaccttccaacgcattatgagaaggtgcagatgctcctaagtgatcggttccttgggttttatatgatacctgacaatggtccgtggaattacaatttcatgggagtgaagcatacagtgagcatgaaatacggggtgaagctggggacacctaaagagtactacaacgaggaccacaggccgactcatttccttgagttcagcaacttggaggaaggtgagactgcagaaggagatcgggaggatacattcacctaagtctgggttcatgtcaaccttgttcgttgttgtttctgtagcttacgcctgttaacactttgtgcccgaaatattagtagaggcctgacgtttttgtttgaatagctgcgtgtactttatataccatttgtaacaatgctgggagttgtaattatacgagcaaaacccttctgattatgccctct

SEQ ID NO: 19120 - DNA, 543 bp, Gossypium hirsutum
  Clone ID: LIB3825-019-Q1-N6-H7
gaggtgatcgtattcaaatcctagttcttactcgtatttacaactccaaaaaacattcttacgattgggatttagtacatgcaactatgcaatgcaagtatttttttcccttcattccatacatagtagaatttggagtctttggtaaaaacagatttagggatttaagtaaaagtatcctcccgatctccttccacagtttcaccttcttccaagttgctgaactccaggaaatgtgtcggcctatgctcctcattgtagtactctttcggcgtccccagcttcaccccgtatttcatgctcactgtatgcttcactcccatgaaattgtaattccacggaccattgtcaggtatcatataaaatccaaggaaccgatcacttaggagcatctgcaccttctcataatgcgttgggaggtaaccatgagggttgcttcctgtatctttgttaacccgtccccactcataaccacttggggtaagcttgtaggctgttaatgagcaagaaccgggagtgaaactgcatgtcaagattatgcac

SEQ ID NO: 19121 - DNA, 1042 bp, Gossypium hirsutum
  Clone ID: GOSHI-09MAY01-C4938_1
tggaatctgacgctcccgccctcccgtcccgttttaatttgtattccaataagaacctggcaagccaatccaacaaaatacacatcgaataaatgccttggtcttcacaaaaaagaagaagaagaagaggctgagcatctggtagctttctctttgttcctccaaactgtgtgcttagatttgaagacctagtccctgtgatcaaatcttgttgttcatttctgggtttaatttctcaagaaaaagaagatgacaaaagataggcaaatcggtgtagcaatggatttctccaagggaagcaaagcagctcttaaatggacaatcgacaatctggtagacaaaggggataccctttacctcatccacgtcaaacccaatcagagcgacgagtctcgtaaccttctttggtccaccagtggctcacctttgattccattatcggagttcagagagaaggaagtgatgaaacattatgaggtggaacctgatcctgaggttttagacttggttgatacggcttcaaggcagaaagaggtgaatattgtcacaaagatttactggggtgatgccagggataaaatatgtgaatctgttgcagatttgaagcttgattgtttggtaatgggcagcagaggccttggcaccattcaaagggtactgattggaagtgtgagcaaccatgtgatggtaaatgcaacttgtccagtaacaattgttaaaggatcctagtgctcatggattttgatctcagtattctgcaaaagtaatgttctttgaaaataatcgatgttccttgtttctatttctatgtgggtgatttatgtatgtatgtatggacatcttggttctggggttgtactcagatcctgagggtgcttagttaggatcagttccagtgctgtttccataaataaacaaaactttgtatggacatggacattgttcatggttcgcatttaagtaacaatgtttcactttcttttattgtttttaggggtttttttttttttttttattttttttttttttttttttaattttt

SEQ ID NO: 19122 - DNA, 303 bp, Gossypium hirsutum
  Clone ID: LIB3148-027-Q1-K1-A7
acaaagatttactggggtgatgccagggataaaatatgtgaatctgttgcagagttgaagcttgattgtttggtaatgggcagcataggccttgccaccttccaaagggtcctgatgggaagggggaccaccattttgttggtaattccacctggccaagtaccattggttaaggatcccagtgcccatggattttgatctcagaattctgcaaaagtaatgttctttgaaaataatcgatgttccctgtttctatttctatgtgggggatttatgtatgtatgtatggacaccttggttctg

SEQ ID NO: 19123 - DNA, 779 bp, Gossypium hirsutum
  Clone ID: GOSHI-09MAY01-C4888_1
cccacgcgtccgcccacgcgtccgcagacgcgtgttctccgactgtgcacagggatgtcaaggggggggtatcttattggagtggtgactttgccgctagagtggcggatttcggagttgccaaggtggttgatgcggctggaaaggttgctaagtctatgtctgtcattgccggatcttgtggttacattgctccagagtatgcgtatacgcttcgggtgaacgagaagagtgacatatacagttttggagtagtaatacttgagttagtcacaggcagactcccaattgacccggagtttggcgagaaggacctcgtaaagtgggtctgcaccactctagatcaaaaaggagtggactatgtcctcgattccaaactcaatccatgtttcaaagaggaaatgtgtaaggtcctcaacatcggtctcctttgtacaagtccactcccgatcaaccgaccgtcgatgagaagggtggttaagtttctgcaagaagccggtgccgagaaccagctgaaggctgccaaaaaggacgggaaattaactccttattactacgaagacggctcggatcaaggaagtgtagcttgacaaaaaaatattttttcacccccatagcttgttgcaaaaacaaggtcacaaagtgagacacacagccactaattgtttttgctgtcaaggttttgcctttcattgttaccctacttgatgttttgcttttacaggcttggtttagtggggaagaaaaaagagttggggatgaaattttcacagtgaaaa

SEQ ID NO: 19124 - DNA, 437 bp, Gossypium hirsutum
  Clone ID: uC-gsflmaxxa088e08b1
tttttgtcgcgtgggcagctgcaaaagtcgttgggtgggttggccgacgaggtacattgattataccggatgcagccgagggactttcatatttgcatcatgattgtctgcctccgattgtgcatagagatgtcaagtccaataatatcttattggatggtgactttggcgctagagtggcggatttcggagttgccaaggtggttgatgctgctggaaaggtcgctaagtctatgtctgtcattgccggatcttgtggttacattgctccagagtatgcgtatacgctacgggtgaacgagaagagtgacatatacagctttggagtcgtaatacttgagttagtcacaggcagactcccaattgacctggagtttggcgagaaggaccttctaaagggggtttgcactactttagatcaaaaggtgtggacttat

SEQ ID NO: 19125 - DNA, 817 bp, Gossypium hirsutum
  Clone ID: GOSHI-09MAY01-C4858_1
atttttggttttacgggaaatggcctcatccactgtcttcaccggtgtcagcctcttcaagtccaaaaactccactaaactcatcacttcaactcggttctccgactccaagcaacaactcagcctcaactcagtgaaatgttgctcaaaaacaaccgccgcaacaacggaggaggcgactggtcgtctagtcacggtgaagaacgggaacgattcgctcgaaatatgtcgagtccttaacggcatgtggcagaccagtggaggttggggcagaatcgaccgagacgccgccgttgaagccatgcttcgctacgctgacgccggtctctccaccttcgacatggccgaccactacgggcctgcagaagatctttatggcatctttatcaatagagttcgtcgggagcgtccaccagagtacttggaaaaagtcagaggtctcactaaatgggtacctccaccagtaaagatgacaagtggctatgtcagggagaacattgatgtctcacgcaagaggatggatgtgccttcattggatatgcttcagtttcactggtgggattattcgaatcctggctaccttgatgctctaaaaaaccttactgatctggaagaggaagggtaaattaaaactggtgctttgacaaattttgatacggaaaggctgcaaataatactagagaatggaattcctgttggtagtaatccaggtgccacattcaattgttgacatgcgccccccagcagaaaatgccagggctctgtcagcttacaggagttaaattgataacgttctctctctctctctctctatata

SEQ ID NO: 19126 - DNA, 573 bp, Gossypium hirsutum
  unsure (1)..(573): unsure at all n locations
  Clone ID: LIB3583-058-P1-K1-B3
cgggaaatggcctcatccactgtcttcaccggtgtcagcctcttcaagtccaaaaactccactaaacgtggtgacttcaactcggttctccgactccaagcaacaactcagcctcaactcagtgaaatgttgctcaaaaacaaccgccgcaacaacggaggaggcgactggtcgtctagtcacggtgaagaacgggaacgattcgctcgaaatatgtcgagtccttaacggcatgtggcagaccagtggaggttggggcagaatcgaccgagacgccgccgttgaagccatgcttcgctacgctgacgccggtctctccaccttcgacatggccgaccactcttctatggtttcgcagacgggcctgcagaagatctttatggcatctttatcaatagagttcgtcgggagcgtccaccagagtacttggaaaaagtcagaggtctcactaaatgggtacctncaccagtaaagatgacaagtggctatgtcagggagaacattgatgtctcacgcaagaggatggatgtgccttcattggatatgctttagtttcactggtgggattattca

SEQ ID NO: 19127 - DNA, 369 bp, Gossypium hirsutum
  Clone ID: LIB3166-030-P1-K1-F1
cccacgcgtccgcccacgcgtccggctggacttaccacttttgatatggctgatatgtacgggcctgcagaagatctttatggcatctttatcaatagagtgcgtcgggagcgtccaccagagtacttggaaaaagtcagaggtctcactaaatgggtacctccaccagtaaagatgacaagtggctatgtcagggagaacattgatgtctcacgcaagaggatggatgtgccttcattggatatgcttcagtttcactggtgggattattcgaatcctggctaccttgatgctctaaaaaaccttactgatctgaaagaggaaggtaaaattaaaacttgtgctttgacaaattttgatacggaaagg

SEQ ID NO: 19128 - DNA, 1000 bp, Gossypium hirsutum
  Clone ID: GOSHI-09MAY01-C4848_1
ccgccctttttttttttttttgatcactggaattggcatcagccatcaaataaatatcagttatggttttacggctacatttgccatcaaattatgttaaaacagaaactaattgggtaatccttactgcttagcctcaaatacaactcaagcagattcgttctaagcttcagaccgtgaaaaacatgaaattgggaactaaactaatatggattatacctacgccgtcctcggctactgtcattgctgctccgccttccaccactcgaactgctaccactagcaccacctcggctgctatggggctgtggtggaggggtgtgcggttgcactccaggctgttgcaagacatatccaatccttccatcaggtaaaagcattggcatcattgccattcctgcaggggttggaccttgaccgtagatcaatggctgtccaaagccagcaggaccaaatcctgccccaagaccaccatatgctcccccaactaaaccatatccgagaagaggtgggaagcttgaatctagagatgacttctgggagccagatgctccagacttctgatccgcttgtggttttgcaagagagcactccaatacgtgaccaccaatctcatatttttcagtgttcttcaatgctttcatggcacttgacctctccgcaaaatgcacaaaaccatatctgctgttctcctttccaactttcgcaggtggaactacaactttcaagatctttccatgatgttcaaacagcttccttaggcaatcctgagttatatcttttggcaaattcttaacatacaaagccttaacctgagtattggaaaaagattctgcacttcttgggtccgcccaactcacggttggagcattatcatcaagcttaaatgttggcttcatcattttctgtcttgagtattcagcacatgcatggttatagtactctatgaaaacaaatccaggtttcggtaggttcatggtcctcacattcaaacattgac

SEQ ID NO: 19129 - DNA, 646 bp, Gossypium hirsutum
  Clone ID: GOSHI-09MAY01-C4868_1
cgcacgggggttgcccgggttctcccctctgctgttgtgtctcgtgcctctttacttttttaccctttctgctttccattatttacttcatatacgctgcggcggacgggatggatgcattatcccacatcatcatcaccaactcggaataagctgtcgaagcaattgatcttcaaccacttgcaaacctcaaacccaaggtattttttacgtattcaaaacaaaattttagtttaaaaaatagacatttgctagtgatcatgccagtcaatttaccattaactttgacaaatatgcacctaactatccttgggttaacaggataagacggataaggatgagaatcgtatatgccttaaatatagatatattctagatttttggtacttgtctttatttttaaaaacggggtctattattttcaaataacggttttgataacaacttttaaattaaattgatttttcctggcagaccgtgttctttcactatatatttttaggagtttaattatattaccaaataagttttttaaaaattgttaaaataagctattcaatttttaaacttttcatggtcttaaaattttaagatttaattttaatatgttcattttaatagctagttgatctaataagaacaagag

SEQ ID NO: 19130 - DNA, 597 bp, Gossypium hirsutum
  Clone ID: GOSHI-09MAY01-C104803_1
ggggataggacccaagagcacggcttgtttattcaaagaagcggtttgcgtaggagagaggacaattaacaatgaagattgtttcatactcaggcttgaaactgcttcaaacgtcctcaaagaacaaagctcggctcgggacggggataatccatcacaccttctggggatatttcagcctatgaagtgggcttcttatgaaattcgtggaccgaaagctggtgatgatgaatccacccttccggaaagaccgtgttttttgggagacctctgtggaatcagtggttcatgactacgagcgaatcggtggcgttgatgttgcccattgtgggatttccatgacgacgctttactggtatggcgagtcccttactctcgtggaggaagattgctgaaccatggtggattggtgagggtggtttcattatttgtggcttgtctgatgaaactttcctgcctccagctcatcttatgcagagagctgctttgattaagttggatttttctttctccttttttgggtagaagttaaaatacaaagaaattaagttgaagaagaatgggtgtacagatatatagaggaaagaatagttttac

SEQ ID NO: 19131 - DNA, 676 bp, Gossypium hirsutum
  Clone ID: GOSHI-09MAY01-C104813_1
cctgggtcgtcccagcgttcgggcaagaacataattagaacctggggggggggggggggcatagacaaaatcaaaacctcagtttgcttatttatttgtaaatagagccgcagagaatacattttttttaagcaaaaagaaaaagcagagctttgaatatctaaccaaaatggcagcagaggaaggtcaagtaatcgggggccccacccttgattcatggaaggagcaacttcaaaagggaggccaatccaaaaagctggtggtggttgatttcactgcttcatggtgtggaccctgccgttttatttcaccctttctggctgaactggccaagaagtttcctaatgttatgtttcttaaggtggatgtggatgaactgaaggaggttgctgctgaatgggatgtggatgctatgccaactttcttgttcctgaaggaaggaaaggctgttgaaaaagtggttggtgcaaagaaagaagagcttcagcaggctgtgacaaaacatatggctactagtaggacttctgcttgatggtgataattattagtgctcccttatcatgtttttgaggaactttttatcatgtacctcatatttgatttcctgggacctagctaaacatctttatgttaaaccctcagtttattcctttatattgagggattttatttcctc

SEQ ID NO: 19132 - DNA, 733 bp, Gossypium hirsutum
  Clone ID: GOSHI-09MAY01-C4588_1
gaaatttatttccgtttttaactataatccaacaaattttccccctccaaacatacaagacatcactatttccaaatccttcactctcatccaaatctcctcttttgtttcctgcgattaatttcctctcccccccatggcttccgtaacggttgctttctctccgattaccaccgctgcttctgccccttattcttcggtttccgatcggagaatatccgttagattaccgggatttcgtggtctcaagagtaaatcgacgtcggcgtcggtggttccgttgttccgatcggtgatccgggagccgcttatacgcggtcgaggtggccgtgtagtatgtgaagcccaggagaccgctgttgatgtgtcagcagtgaaggaagatgcatggcaatcacttgttcttgattgtgaattgcctgtgctggttgagttttgggctccatggtgtggaccttgccgtatgatacaccccgtagttgacgagctgtcgaaggattacgccgggaagctcaagtgttacaaagttaacaccgacgagtgccccaacattgcaactcaatacggaattcgaagcattccgactggtatgatctttaagaatggggaaaagaaagatgcagtgattggtgctgttcccaaatccaccttgataacctgcattgagagattcttgtagaagtggtaagcaaatatcacttctcttctcttctgtaatttaagctatttctag

SEQ ID NO: 19133 - DNA, 848 bp, Gossypium hirsutum
  Clone ID: GOSHI-09MAY01-C4558_1
tgcccgtccatttgtaacccatcacaatgaattaaatatgaagctctatatgcgtattgcacccgagttatatcttaaggagcttgcagttggtggactggatcgtgtgtatgagattggaaaacagtttagaaatgagggcattgatttgactcacaatcctgaattcactacctgcgagttctatatggcttttgctgactataatgacctgatggagctcactgaaaaaatgttgagtgggatggtcaaggaacttacaggcagctataaaattaaataccatgcaaatggccttgacagtgctccaattgagattgatttcactccacctttcaggaggcttgacatggtagaggagttggagaagatggctaacctcaacatacccaagcccttttccagtgatgaaactaacaagtatttggcagatgcatgtgaaaagctcgagattaaatgcccccctcctcaaactacagcacgtttgttggataaacttgttgggcattttctagaagagacgtgtgtgaatcctactttcatcatcaaccatcctgaaataatgagtcctttggcaaaatggcataggtcaaaaccagggctgactgaacgtttcgagctgtttatcaacaaacatgaactttgcaatgcatacactgagttgaatgatcctgttgtacaacgtcaacgatttgctgaacaactgaaggatcgacaatctggtgatgatgaagctatggctctagatgaaacattctgtactgcacttgagtatggattgccgccaactggtggttggggattgggtatcgatcggctagctatgctattaacagattcacagaata

SEQ ID NO: 19134 - DNA, 1171 bp, Gossypium hirsutum
  Clone ID: GOSHI-09MAY01-C4518_1
caagcggctagctcacagcgcaagacatttggggattttgaggaagcagttgcgaaagatgccaccaaaaccgcagttcttgatggaactgtccatcctttgactagctatgtgataaattatgtgaagtttctattcgactacaaaacaacactggagcaactctttcaagagtttgaggagagtgatacggaagctcagttgaagactttaactacaaggataatggatgccctacagactaaccttgatgggaaatccaagcagtataaggaccctgcactgacacaactattctgatgaacaacatgcactacatagtgagatctgtgcgaaggtcagaagccaaggatttgttgggagatgattgggttcaaatccacagacggattgttcagcagcatgcaaatcagtataaaaggatttctttgggcaaaggtccttcagtgtgtcaccattcaaggggttgcaccaactggtggtggtggaatattgggaggtgattccggcagtggaatatcaagagcaatggtgaaagacaggtttaagaatttcaatgcccagtttgaggatcttcatatgaggcagtgccaatggaatgtcccagacagtgaattgcgcgagtccttgaggcttgctgttgcagaagtactcttgcctgcctatagatccttccataaacgtttcgggcctatggccgagagtgggaaaagcccttgcaagtatattaaatacaagcccgaggaccttgaacgaatgctaagcgagttctttgaaggtaagacatgcgtcgaacaaaagcgataaaaaacaaaaagccaaatgctggtgagaatctgttaagaaatttagatactgatgaaatggagctttcaactaatcattgtagaatgacgaggttgtgtgtgcttttttctgccaggcttgccttgttcttcttgtgtctttttcatctgagtgagttttgtacagttctgtgaaggggattcggatttcatgattctgagagtttgattttaaatttcaatattgagttaataaatgtccagataaattaaaaaggttgtgcatcttagtcacagatattctgttttttttttttgttcacattccaagtgttttttggtgtagcgtcattaatgaaaaatgtagtgatatattatccctaacc

SEQ ID NO: 19135 - DNA, 1587 bp, Gossypium hirsutum
  Clone ID: GOSHI-09MAY01-C4498_1
cccagcgtccgcccagcgtccggatacgtgtgaacgttctttgccctgagtttgttcaaacagagagggagaaaaagcaggcgccaaatatattaccctactgggtggctatgtgcagatggaaaatgtggtgaaaggtgctttcgaccttatcatggatgagagcagagctggttcttgcctatggattacaaaccgcagaggcatggagtattggcccggtccagcagaagaagcaaaatacctggtgctttcttcttcaagttccaggagaaaaatctcattccgagctcctctaggcgcccaacttcctcagaggtccgagaaagtagttgtgcataaattgactcacaattttcgtgatgctacccacatagtacgtacaccattgaaactaccaattgaatcagggcacgtccttctgaaaatcatttatgctggggtaaacgcaagtgatgtgaactttagctcaggcaggtatttcctaggaaacaggaaagatctgagttcccttcttccatttgatgctggatttgaggctgtgggaataattgccgcagttggagattctgtaagtaatttggaagttggaactcctgctgcaatcatggtttatggaggttatgctgaattcatgacggtcccgtcaaagcacatacttcccattgggagacctagttccagaatgttgttgctatgcttacttcaggatttacagcatcaatcgcgttggaaaaggtcggtcagatggaatctgggcaacttgtccttgtaactgctgctgctggagggaccggacaatttgcagtccagcttgcagaactggcaggaaacaaagttgttgccacttgtggaggaaaagagaaggccaggcttttgaaagatttgggggttgatcgagtcatagactacaaaactgaagacatcaaaaccgttctgaaaaacgagtttcctaaaggagttgacattgtctacgaatctgttggtggtgacatgtttgatttgtgtttgaatgctttggctatccgtggacggctcattgtgataggaatgatctctcagtatcaaggggagcatgggtggaagccaaaaaattatcctggtcttgtcgagaagcttttaaccaaaagccaatctgtggctggctttttcctgccccaatattacctatttatggaaagaacacctggctagacaatttgatctttactcttcggggaagcttaagggtgcaatagatccaaaaagatttttaggcttgcattctgttccagatgctgttgagcatcttcattcgggtaaaagtagtggcaaggtggtggtttgcatcgattcaacctttgaacagcaaatggctaagttatgatgtgaagatgatgaaaccatcctcaaacataataagttccatgaaaatggttacatggtttgaataaaggtttagacaattactgttaattgcattgctaatggtaagatgataatcttatatttttttatcacccttaggtagcaaataccatacaaaatcatcagctaaatgtctgcatattttttttaactgaaaacaaaagatatcagtactgtctc

SEQ ID NO: 19136 - DNA, 624 bp, Gossypium hirsutum
  Clone ID: GOSHI-09MAY01-C4458_1
cccacgcgtccgcggacgcgtgggcttatccctattgttgttgctctggtcccaaatcttcccacgcgtccgcatatttctgtgcttataaatccttaatctacgccaccccttcattccttgtttttatctttcccttctttaaacctctatagatggaagtgctgatgggacctaccttcgccatcgacgttgccgcatcggcagcggcctacactagagaccgttctaaggatacgatttcgtctccttgcttgtttatcaaggacgatgaagcttgtcccggctcggatcccaggtctccggatctatcctccgatagttcctcctcgatcggctcccccggagacagcgacgttgaagaagaagacgacggtgtcgtttcatccggggaaagtaaagggttgtctttcgactccttagaggactctcttcccatcaagagaggattatcgaatcactacgtgggaaaatcaaaatcattcgcaaatctatctgacataaactcagtgaaagagctgcaaacagtggagagtcccttcaacaagaggaggagattactgcttgcaaataaatggtcaacgaggtccaggaaatcatctctctattcatggcaaaacccca

SEQ ID NO: 19137 - DNA, 801 bp, Gossypium hirsutum
  Clone ID: GOSHI-09MAY01-C4418_2
tcccacgcgcccccagagagagaaaaaaaagaaagaaaaaatggttctgctagacaaaatgtgggacgatgtagtagctgggcctcaacctgaacgtggtctcggcaggcttaggaagatcaccacccagcctttgtccatcaaagatgaaggagaaaagaaaaagtaccagaggtcgttgtcgctgccgaatagtccagtgtcaggtccgacacccgtgacaccgacgactccgacggcgcgtaaggagaacgtgtggaggagtgtgttccatccgggtagcaacctagccaccaaaagtataggttctgatgttttcgacaagccacaacccaactctcctaccgtctatgactggctttacagtggggagaccaggagcaagcatcgctgagagggtggcgactgacaggcggctagcaggctgctctagtgagccagggttgcatgtaaatagtgtgttctcttttcttttcttttttttcaatgtgctattttgtctctgtctttgtctcttgatgctatttgatgtctcgagtaaccgtagaaggtgttttaagagctgacagctaaagctttagtttgcccttgtttttttgtaagtaatgttggccaagggtgcgctagcccacggtggctattgatgctttgtcattcaagctgccaccgtgagcggcggatatattacataaataaataaagagattaatggggtatgtgtaatgatgtgcataagtatgttattttaatttaatcaaagcattaataatatttaattaattttggggttcatctccattt

SEQ ID NO: 19138 - DNA, 760 bp, Gossypium hirsutum
  Clone ID: GOSHI-09MAY01-C4418_1
cccacgcgtcccgaaaccagagagagaaaaaaaagaaagaaaaaatggttctgctagacaaaatgtgggacgatgtagtagctgggcctcaacctgaacgtggtctcggcaggcttaggaagatcaccacccagcctttgtccatcaaagatgaaggagaaaagaaaaagtaccagaggtcgttgtcgctgccgaatagtccagtgtcaggtccgacacccgtgacaccgacgactccgacggcgcgtaaggagaacgtgtggaggagtgtgttccatccgggtagcaacctagccaccaaaagtataggttctgatgttttcgacaagccacaacccaactctcctaccgtctatgactggctttacagtggggaggtgcgtatacctcgtaccatgcatgcatggattttgtctggctgctacttctttagccacttggttttttggtttttgggctttgatcattcactaatctatctatttggttgcttgaggaaattgaattttaattaatcatggcaagggtgatagcaacggttaaccagataatcactaaatataaatatataatgaaatcaagatattttagaacacaagcctcaaggattttcctatttttttgttttttttttctaacgttttctcagcaaccaaacggaggctcagagacagagcatgaaggaaaacttggctatttgtttggtcgctgcgtggaaataattccttttgatcagtatacactcttatacgcatttatg

SEQ ID NO: 19139 - DNA, 422 bp, Gossypium hirsutum
  Clone ID: LIB3083-027-Q1-L1-B7
gaaaaaatggttctgctagacaaaatgtgggacgatgtgttagctgggcctgaaggctggcgtggtctcggcaggcttaggaagatcaccacccagcctttgtccatcaaagatgaaggagaaaagaaaaagtaccagaggtcgttgtcgctgccgaatagtccagtgtcaggtccgacacccgtgacaccgacgactccgactgcgcgtaaggagaacgtgtggaggagtgtgttccatccgggtagcaacctagccaccaaaagtataggttctgatgttttcgacaagccacaacccaactctcctaccgtctatgactgcaaccaaacggaggctcagagacagagcatgaaggaaaacttggctatttgtttggtcgctgcgtggaaataattccttttgatcagtatacactctta

SEQ ID NO: 19140 - DNA, 1235 bp, Gossypium hirsutum
  Clone ID: GOSHI-09MAY01-C4758_1
cattttagtagtcattgttgccgtgtatttatttatcagagttcatggagccaaacatgaggtgatttcttggactggcattttacccccttccaaaagctaaacttctctgtgaatgacatattgacgagtctgtctgattcaaacatcattggaaagggttgttctggtgtggtttatcgtgttgagacaaccacaaagcaggtggttgcagtgaagaaactatggccaatcaagaacggtgagtttccggagagggatttgttttctgcagaagttcagacccttggatccataaggcataaaaatatagtgaggctactgggatgttgtgacaatggaaaaaccagactactgttgtttgattacatcagtaatgggagcttagctggattgctacatgagaagaacatgttcttggactgggatgcaagatataagatcatacttggagcagctcaaggtttagcttatcttcaccatgactgtattccaccgatagttcatcgtgatatcaaatccaacaacatcttagttggtccacagtttgaagctttcttggcagactttggtctggcaaagctgattgatgtttcagagagtccaagagcctccaacattattgcaggttcttatggatatattgctccagagtatggatacaacatgaggatcacagagaaaagtgatgtatacagctttggtgtagttctccttgaagttttaacaggcatggaaccaacagacaagagtattccagacggcgtccacattataacttggatcaacactgacgttcgtgaaaagaggaaagattacacaacaattattgaccagatgctcctcataagatcaagcacacaaatccaagagatgcttcaagtgctgggggtggctttcttatgtgtcaatccgtgtcccgaagaacgacccaccatgaaagatgtaacagcaatgttgaaagagatcaggaacgagaatgatgattctgagaaaccaaatcttctttgtaaaagaataacagacgccgccaaactacagttcaatgttctagtttctctagatcatctgaacctctcattagttcaccttcatagtttatgtgctttagtttcaatggtatttgcttcttaacagccatttgtattggtctgaatccggataatttgtagcaaaagtaagcctcaaactgctacttcattaatctgatatgaactccttagtattgttttttt

SEQ ID NO: 19141 - DNA, 589 bp, Gossypium hirsutum
  Clone ID: GOSHI-09MAY01-C4778_2
gtgccgtagtcccaagtacgaaacccggaaaggtagagagaaaagcaaagcaagttggcgcaaggcaaagcaataatggggtccggccgaagatgggccgttgatttctccgataattccactgctcctccttctcgtgacatccccgatcctcccggcttcactcgtgcctctgtggatcaggacgattcgactgtaagtcgtcaaaagaaggatgctgaatccaatgggaaagctcagaaagcttgggaggtggcacaagcacctttcaagaatttgctaatgatgggcttcatgatgtggatggctggaaatactgtgcatctctttagcattggtataactttttctgcactttggcagcctatcagtgctcttcaaggggttgggaagggtaagtgtcctcttactactaaattttctcttatcctgtattattaccttatttttgtttcttcctatatttctccatgatttgttttatttattttgagtggctaaattttcaaaaaaggaaagaataaggtcggtaagataccctaaccaagaatgaaataattaaccctttatgactacaaagtactaatga

SEQ ID NO: 19142 - DNA, 770 bp, Gossypium hirsutum
  Clone ID: GOSHI-09MAY01-C4778_1
caagtacgaaacccggaaaggtagagagaaaacaaaagaaagatggagaagggaaaaggagtaatgggtgccggccgaagatgggccgtcgatttctctgataattccaccgctccttcatcgcgtgacatccccgatccccccggcttcactcgtgcttccgtcgatcaggacgattcggctgtgagtcgccaaaagaaggatgctgaagccaattggaaagctcagaaagcatgggaagttgcacaagcacctttcaagaatttgctaatgatgggcttcatgatgtggatggctggcagtacagtgcatctcttcagcattggtatcactttttcagcactttggcaacctattagtgctcttcaaggggttgggaaggtttttgaaccgtataaagacaataaagtagatcttcttggacctaagttgcttttcattgctcttaatttgggtggtttagcacttggtgtttggaagcttaatacattgggactccttcctacacatgcatccgactgggtgtcatccttgtccccagctcaggaggttgaatattcaggtgggggtattcctctgtaatatcgtcttcgtgcgtctgattctcagacaaatttctggtgccagtgaggggaagttgcaaagataggtagaaagaatttggatgtttatacctatgtcttttggagatgttgaagaggaagacactatgattttcattccccccgcccccccttccctcttaaaatttgatgaaccatgtgagctgc

SEQ ID NO: 19143 - DNA, 1015 bp, Gossypium hirsutum
  unsure (1)..(1015): unsure at all n locations
  Clone ID: uC-gsronu33B156a08b1
gtcctaagtacgaaacccggaaaggtagagagaaacgaaaagaaagatggagaaaggcaaaggaataatggggtccggccgaagatgggccgttgatttctccgataattccactgctccttcttctcgtgacattcccgatcctcccggcttcgctcgtgcctctgtggatcaggacgattcgactgtaagtcgtcaaaagaaggatgctgaatccaattggaaagctcagaaagcttgggaggtggcacaagcacctttcaagaatttgctaatgatgggcttcatgatgtggatggctggaaatactgtgcatctctttagcattggtataactttttctgcactttgtcagcctatcagtgctcttaaggggttgtgaaggtttttgagccttattatacattaatgttatctttttggtcttattttctttttattgtctctattttgtgtgttttattacttgttttttgtatttttatactttgggtttttttctctctttatcttatttgttcattcatttctttttattttctttttttatattttttttatttattaccgttattttatctatttattttattttattttacttattttctttatatttttattttatactttttattatatttttatttttttttttattttattcttctttcttcttttttatattttcttttttttttctatttatttattttttctctttttattttatttttttttatattatcttcttatttttttcttctttttttttctctttttgctttattttttcttttattcttccattttttttttatcttttttataatanttttnantattnaattatttttttttttttttttttttattttccccccatannaanttcatacacttcttctctttcattttctttaaaattaatttatatttatctatagtttttttgttttttgtantatttttntncttctccccccccccccctaattcattttttattttattc

SEQ ID NO: 19144 - DNA, 395 bp, Gossypium hirsutum
  Clone ID: LIB3148-043-Q1-K1-C3
gtgctcttcaaggggttgggaaggtttttgagccttataaagacaataaagtagatcttcttgggcctaagttgcttttcattgcccttaatttgggtggcttagcacttggtgtttggaagcttaacacgttggggcttcttcctacacatgcatcagactgggtgtcatccttaccccctgctcaggaggtagagtattcgggtggaggtattcctctataataacgtgtttgttagtctttggttatctgatcaatttctggaggtgtgagttgacttatggaaggccggtcgaaatttcttgtgaagatggagaacaacaccaccttagatttttatgttaaattttatgaaacatgtagttgtagtatgggacgacatgattaagaacat

SEQ ID NO: 19145 - DNA, 657 bp, Gossypium hirsutum
  Clone ID: GOSHI-09MAY01-C4718_3
tgcatatcatatctaagattgcatatcctcaaaaattatgtttccatatgtgagcccgggctaaaattgggtattacactatccatacttctattgtaacagggcactctcgaaataggtggtccattgtttcagctcttgcttcacatcgggggcagcttgtgcttgctgatagcttcctgtgttgtaaattcacttttgtaggcaaaaagttccatgatagtctccatattgtaatctttatctttgttggtagattcaggccccaaagttttttgtagaatttcctgtagttggtttgtaaagcataagctctaagattttcatccgaattctataatagtttataggcacttcggaccgtgaattcacccgatgattctcctccccaaataaggaaatcctcatgaggagtacgtgccagagggattcgaagaattcttgcagcgtcttcttctgtgaaggttgtattactgtgcattcctggagatcatgccctagctttccacagccaaaacagaatttcggtagcttttcgtacttaaaaggaatccaatatctattcccattgtctcttaaaacaaatatacccctacgaagggggtttttgtacgtttaatttaattctaaggtgacataactcaccactgattttag

SEQ ID NO: 19146 - DNA, 590 bp, Gossypium hirsutum
  Clone ID: GOSHI-09MAY01-C4718_2
cacgcgtccgacggaatctccttcacagatgactgactgccatcccctatcaactcctatttgaatcgctctccagcaagctattgcttccgccgcaaacgcagagggcactctcgaaataggtggtccattgtttcagctcttgcttcacatcgggggcagcttgtactagttgatagctgcctgtgttgtaaattcacttttgtaggcaaaaagttccatgatattctccatattgtaatttttatttttgttggtagattcaggccccaaagttttttgtaaaatttcctatagataaattgtaacgcataagcgctaggatttttatctgagctctgtaatagtttataggcacttcggactgtgaactcacccaacaattcacctccccaaatgaggaaatcctcatgaggcgttcgtgccagagggattcgaaggattcttacagcgtcttctcctgtgaaggttagggtgttacaactagagatccacttgacgactcccatgatttcctaatcttttcttcaatcgactcctctgcaatccaccatgcctcaaattaaatcttggagttcctttgatactat

SEQ ID NO: 19147 - DNA, 702 bp, Gossypium hirsutum
  Clone ID: GOSHI-09MAY01-C4718_1
gttcacacaccctatcattttttctttgttattcggcgtactcagggacctccatttccagctactacttccgcagcaaacgcagaggtgatatcgttgtggatctttgaataagataacagaactctgccttcatcatctctggccacaatacctgaggctgagtatttctggctttctttgtatgctccgtcgaagtttatctttatgaaatcgcgattgcgcagtagaataaacaactttgccaatggttgagctattctaacacccagggcattctcgaaataggtggtccattgtttaagctctttcaccacatctggggcagtttgtgtttgctgataatttcctgtgttgtaaattcacttttgtaggcaaaaagttccatgatagtctccatattgtaatctttatctttgttggtaaattcaggctccaaagttttttgtagaatttcctgtagttggtttgtaaagcataagctctaggattttcatccgaattctgtaatagtttataggcacttcggaccgtgaattcacccgatgattctcctccccaaataaggaaatcctcatgaggagtacgtgccagagggatttgaagaattcttgcagcgtcttcttctgtgaaggtattgttaatcagctccctcttccaaagccttttattactatcaattagctcattaactttaagatc

SEQ ID NO: 19148 - DNA, 255 bp, Gossypium hirsutum
  Clone ID: LIB3149-040-Q1-K1-G4
ctaatcgcgagcgccgccctttttttttttttttttgataatttagaacttgtaatcaatagaaccagctatttgattatcatactaatacaacattgccactgtcaaaacagaatttcggtagcttttcgtacttaaaaggaatccaatatctattcccattgtctcttaaaacaaatatacccctacgaagggggtttttgtacgtttaatttaattctaaggtgacataactcaccactgattttagatatg

SEQ ID NO: 19149 - DNA, 1459 bp, Gossypium hirsutum
  Clone ID: GOSHI-09MAY01-C4738_2
gttcacgttataattgttgctgtttcgctcgaatttgcgtcgagtaagcacactgcaaaaggtagccgaaacttgaaacttgggacattgggaagccttatgagcaagctgctaaggattgagataccgatggttgtgcgaatgttccgacggtcgcccgggtgggcggacaagattcatggattcacagttccagctgatggacaacatcatgttcaaacactgcatgaaccgtatggtgtatgtgggctgatcattccatggaattttcctcttttattgtattcctggaaagttggtccggcattagcttgcggtaacacggttgttctgaagacagcagagcagacaccgctgtcggctatctatgtttccaagctttttcatgaggctggacttcctcctggtgttctaaatgtggtctctggatttggtcctacagctggtgcagcactttcaagtcacatgaatgtcaacaagttatcatttacaggttccactgctacaggcaagattgtactcgcactcgctgcaaaaagcaaccttaaaccggtaacattggaactcggaggaaaatctccgttcattgtgtgcaaagatgctgacgttgacaaggctgttgagcttgcacattcagccttgttctttaaccagggtcagtgttgttgtgccggttctcgcactttggtacacgaaagcgtgtatgatgagttcgtagagaaagcaaaggctcgagcactgaaacgagtagtcggggatcctttcaagacggggatcgaacaaggccctcagattgataatgagcaattcaagaagatcctcaggtacataaggcctgccatggaaggtggacctcctctggattctggaggtgaacaatttggctccaaaggctactatattcaacccactgttttctccaatgttcaggatgacatgttgatagctaaagatgagatatttggtccagtacaatccatctcaaagttcaaggatcttgaagaggtggtacaaagggcaaatgcatcttcatatggattggctgccggagttttcactcagaatatcgaaaccgccaacaccttgactcgagcattgcgagtcgggacggtatggattaactgctacgacatatttgatgctgcagtcccatttggcgggttcaagatgagtggtcaaggaagagagaaagggatttatggcctttcaagttacttgcaagtcaaggcagttgtcactcctttgaagaacccagcatggttgtaatgtttgtttgtttgttttcttacaaattgccatgaatctaaacttgaactaataagctgccagttttttaaattttgaatgatcagcgtatggtaggatcattcctgaactgataatttgctcatatttggatgagtatggggcataatgttttaaatatatgaataagaaaaaaggcttaaaataatatttt

SEQ ID NO: 19150 - DNA, 981 bp, Gossypium hirsutum
  Clone ID: GOSHI-09MAY01-C4738_1
ccccgcgtccgccccccgtccgccccgcccccggccaaaacattcacaaagctttgataatggctgccagaaggatttcctctctcttatcttcttctgcaacttctttgggaaggttttcaagttggggaagaagaattaatagctttagtactgctgctgctgcgattgatgaacctatacatccatctattcaagtagatcatactcagcttctcatcaatggacaatttattgatgctgcatcaggaagaaccttccctacagttgatcctaggacaggagatgtaattgctcgagttgcagaaggagatctcgaagatgtaaatcgtgcggttgctgcagctcgtaaagctttcgacgaaggaccatggcctaagatgactgcttatgaaaggtcgcgtataatgttgcgtttcgccgatttgctcgagaagcacactgaagaggtagcgaaacttgaaacttgggacaatgggaagccttatgagcaagctgctaagattgagataccgatggttgtgcgaatgttccgatattatgccgggtgggcggacaagattcatggattcacagttccagctgatggacaacatcatgttcaaacactgcatgaaccatatggtgtatgtgggctgatcattccatggaattttcctcttttattgtattcctggaaagttggtccggcattagcttgcggtaacacggttggtctgaagacagcagagcagccaccgctgtcggctatctatgtttccaagctttttcatgaggctggacttcctccgggtgttctaaatgtggtctctggatttgggcctacagctggtgcagcactttcaagtcacatgaatgtcaacaaagtatcattacaagttccactgctacgcaagatgtactcgactcctgcaaaagcaacttaaaccgtacattggaactcgagaaatttcgtcatgtggcaaaatctgcgtgacagct

SEQ ID NO: 19151 - DNA, 460 bp, Gossypium hirsutum
  unsure (1)..(460): unsure at all n locations
  Clone ID: LIB3584-055-P1-K2-G3
cggacgcgtgggatgacatgttgatagctaaagatgagatatttggtccagtacaatccatctcaaagttcaaggatcttgaagaggtggtacaaagggcaaatgcatcttcatatggattggctgccggagttttcactcagaatatcgaaaccgccaacaccttgactcgagcattgcgagtcgggacggtatggattaactgctacgacatatttgatgctgcagtcccatntggcgggttcaagatgagtggtcaaggaagagagaaagggatttatggcctttaagttacttgcaagtcaagcagttgtcactccttgaagacccacatggtgtatgttgttgttgtttctacaaatgcatgaattaactgactatagctgcagtttaaattgatgaccgatggagacatccgactgtattgctaattgatgattgggctatgttaatttgatag

SEQ ID NO: 19152 - DNA, 552 bp, Gossypium hirsutum
  Clone ID: GOSHI-09MAY01-C4728_3
gtccgatgaccttctcgaggaaatcattgacaaaacatttgatgatgcacacgcggacaaggatggtaaaataaacaaagaagaatggaaagcatttgtgcttcgtaatcccaacctcttgaggaacatgactcttccgcatttaaagtccgtgatgaactactatttccagtgcattactaccttctttcccagtttcgtttacaacactggagttgaagacttctaaccccaagtgatgttaggctaaaaatgccacaaagatacgatgcgattcaagggtaaaagtcaatgatttcacccgcacatccgcccgcgcgcttgggtgctttgattcaggtcccattgcgggcgatgaagtgaatatagtgtgtccggtccgtgcgaacactgcttgacagtgacagcaaccaaatcattttgattaagctctccaactgtatatgtgtctatgtgatccgcagctaattttgaaggctcatgtcccatacatcatatgataattgtgaagtacagtacacatatgtgaaattgagtgcattcactactgtt

SEQ ID NO: 19153 - DNA, 950 bp, Gossypium hirsutum
  Clone ID: GOSHI-09MAY01-C4728_1
ctcaagctgttgattgagctgtcgatctgtcgttgaagcaacaatactgggaaaggagagtccaaggacataaggatcttcgtctctgatgtgtgattgtttgaagctatggattcaactggcaaaacccaattctttcggtcgagttccctaacggcgggagaacggatctgtgcatctgctttcttaccggtccttatagtgatcgatttcttgatttatgcaacgtctaattgctttggatgccggccccgacccaagaaatgcatctatgagttcactgatcttacccggctcgctcatgaatcccgattttcggtgaatgaagtcgaggcattgtacgaactcttcaagaagctgagtagctcaataatcgatgatggattaattcacaaggaagagcttcagttagccttgttccagacacccataggcagcaatctctttcttgacagggtttttgatctttttgatgaaaagagaaatggtgtcatcgaatttgaggaatttgtccatgcactgaacgtgtttcatccatgtgcccctttagaagataaaattgattttgcatttagattgtatgacctgagacaaacaggttttattgagcgagaagaagttaagcaaatgatgattgccattttgatggaatctgaaatgaatttgtccgatgaccttctcgaggaaatcattgacaaaacatttgatgatgcagacgcggacaaggatggtaaaataaacaaagaagaatggaaagcatttgtgcttcgtaatcccaacctcttgaggaacatgactcttccgcatttaaagtccgtgaagaactcctatttccagtattgcactcccaatctagtcttttgattgaccccttggccctttcctatctccgttttcgttacaacactggagttgaagacttctaaccgaagtgatgttaggctaaaatg

SEQ ID NO: 19154 - DNA, 659 bp, Gossypium hirsutum
  Clone ID: AI055655.1
ggagagtctaaggacataaggatcttcgtctctgatgtgtgattgtttgaagctatggattcaactggcaaaacccaattctttcggtcgagttccctaacggcgggagaacggatctgtgcatctgctttcttaccggtccttatagtgatcgatttcttgatttatgcaacgtctaattgctttggatgccggccccgacccatgatatgcatctatgagttcactgatcttacccggctcgctcatgaatcccgattttcggtgaatgaaatctaagcattgtactaaccttttcagtaatcttgagtacttcatatttcatgatggattaattccacacagatcaatctttaattatcctttttctctaatacccttagtgcaccaatatctttccttaccttgctttcataacctttattcgtataaattatcacatgtcgtctattctttttgtatgtatatcgtctctattcctttaacctagtttcaatcaatttacactttaaaactcttattaatcttctcatcattctcaatatttttctcttccttcctaggctttacttatccattaaacattatcttctcttgcctttgcctttatttctccatcttgtattctaatcacatttcctttacgctaaaattatacg

SEQ ID NO: 19155 - DNA, 604 bp, Gossypium hirsutum
  Clone ID: GOSHI-09MAY01-C4688_1
gaaggttttgcagcatgatcttttcacaaatgatgtcctttactctgaagttgtttttgatatgagttcactgaagcaagaacttcttcctctagtaccattgttttgtcaatcattactagagatgggtacaaaagacttgacctttgtgcaacttaatcagttgattggaagaaaaacaggcggaatatcagtttatccatttacgtcatctatacgaggcaaggaagatcccagtagccatatcattgtccgaggcaaatcaatggctgggcgtgctgatgacctatttaatctgattaattgtgttcttcaagaagtacagtttacagaccaacaacggttcaagcagtttgtgtcccaaagcaaagccagaatggagaaccggttgagaggtggaggtcatggaattgccgcagctaggatggatgcgaagttaaatgttgctggctggatttctgagcaaatgggtggagtcagttacctggagtttcttcaagcactggaagaaaaagtggataatgactgggcaggaatttcatcatctctcgaggagatccgtaaatccttactttccaaggaaggttgcttggtaaacatgact

SEQ ID NO: 19156 - DNA, 425 bp, Gossypium hirsutum
  unsure (1)..(425): unsure at all n locations
  Clone ID: LIB3584-054-P1-K2-F11
acgtggcatatataattgcttaaactaagctgccctgcgtgtttctacctcacgagcattgcactttgtttcagtcaaaatctatctggagcacatataagacgacggacacctgtgcgctcgtggaagtatattgcatttggagccaatagaaaccttttttccccctttgggttgtagttaaacatattccaggggattactttgccagatgcaccaaaatttgggaaggtctttggaggacagtttngtggacaggcactggctgcagcatcaaaaactgttgattctcttaaaattgtccatagtttgcactcttattttcttatggttggggattttaatataccaataatattttcaagttaatcgtctacgtgatggtagaaactttgctacccgtagagtagatgcaatacaagaag

SEQ ID NO: 19157 - DNA, 334 bp, Gossypium hirsutum
  Clone ID: LIB3585-018-P1-K1-G3
tgttaatcctgaatcagttcatgtggcagatataattgccttaactaagctgacctgcctgtttctagctcacgagcattgcactttgcttcagtcaaaatctatctggagcacagataagacaacggagacctgttcgctcgtggaaagtatattgcatttggagccaatagaattaaacatattccaggggattactttgccagatgcaccaaaatttgggaaggtctttggaggacagtttgttggacaggcactggctgcagcatcaaatactgttgatcttttaatattgtcatagtttgcacttttattttcttatggttggggattt

SEQ ID NO: 19158 - DNA, 1353 bp, Gossypium hirsutum
  Clone ID: GOSHI-09MAY01-C4678_1
gacccacgcgtccgctactcaggatctgaaaggtcccttcgtccggcagtttcaaggggaagagggcggggatgccggtggactgtctagagaatggtatcagttactctcaagggtcatatttgataaaggtgcattactttttactactgtggggagcaatgcaactttccagccaaatcccaattctgtttaccagaccgagcatctttcttacttcaaattcgttggtcgcgtggttgcaaaggcactatttgatggtcaacttttggatgtttattttactcgatccttctacaagcacattcttggtgttaaggtgacctaccatgatatagaggcagttgatcctgattattacaagaatctgaagtggatgctggagaatgatgtaagcgacattcctgacctgactttcagcatggatgctgatgaagaaaagcacatactttatgaaaaaactgaggtcactgattatgagctcaaacctggaggaagaaacaccagagttactgaagaaacaaaacatgaatatgtagaccttgttgctgatcatatcttgacaaatgctatccgtcctcaaatcaattccttccttgagggatttaatgaattggtgccacgtgaacttatttcaatttttaatgataaagagctcgagttactaatcagtggacttcctgaaattgatttggatgatctaaaggccaacactgagtataccggctatacggctgcatctcctgttattcaatggttttgggaagttgttaaagcttttagtaaagaggacatggcaagattgcttcagtttgtaactggaacatcaaaggtgccattggagggttttaaggcactgcagggtatctctggtccacaaaaatttcagattcacaaggcttttggagctcctgagcggctgccttctgcccatacatgctttaatcagttagatcttcctgagtattcatcaaaggaacagcttcaggaacgtctgctgctggctatccatgaagctagtgaagggtttggctttggatgaacagagtttgtattacgatgaagtcaatgtccctgcaatgccggcagtccatttaaagatctatattgaatataagctttttcattagatttcggttggcgaagagaacgtagtaatgccgacaatgggatatggcatgctcaaaacgatgtacaaatggaggggaaggttggttgtgctgcctttataatttcaaaagtggagagcttatattctacacaaacactgaagaggataaaagatgatatttttttgtagttgattgaatgagggttctttctcctatggttaatattttgatctaatcttgg

SEQ ID NO: 19159 - DNA, 452 bp, Gossypium hirsutum
  Clone ID: LIB3828-010-Q1-N6-H5
ggacccaaaaagagaaatataggcagcaattttcaagaattagataaaaattttaacaatagaagaaagaaccatcattcaatcaactacaaaaaaatatcatcttttatcctcttcagggtttggctagaatataagctctccacttttcaaattataaagggggcacaaccaacctttccctccatttttacatcatttggggcatgccatatcccattgttaacattactaccttcttttcaccaaccaaaatctaatgaaaaagcttctgcacacggaatcagaaaaatgaacactttttagacgggccattgaaatttgacacaatgaaaaggggaaatgttgatgaagggtcttctacttacatattcaatatagatctttaaatggaccgccggcattgcagggacattgacatcatcgtaatacaaactttgttcatccaaagc

SEQ ID NO: 19160 - DNA, 762 bp, Gossypium hirsutum
  Clone ID: GOSHI-09MAY01-C4668_1
attgtggtactaaataaacaaagaaagaaagataatataatctataggaatccggatcaatcggaagagaaaggtgagaatgggggaagcagtagtggcagcgcacaacgtattcgtatatggaagcctattagcagatgatgtggtccgtgtcctgttgaatcgagtccccacttcctccgctgctcttctcaacggcttccatagatttagcattaaaggacgggtttatccggcaattctcccagtccgaaaccgtcatgttagtggcagggtgttaatgggaataacggatcctgaattgcatattttggatgaatttgaggacgttgagtaccaaaggactcgcgttgaggtctcgttgctggaaagttctgacaaattacaagcccacgcttatgtgtggagcaacgctagtgatcccaacttgtacggcgattgggattttgaggaatggaaacaagtgcacaaggaaagtttcataaagatgacgatgggatttatggaagaacaagagctgcctggatcaaagccaagagtcgccacttacgaatccttctatcagcaagatgttgctgaaaagtgaggaatcaatcatgcttccttctgttcttttcattttattatcaaaatctatgtaaataattagaatgctcgatcgtcgtttggttattagtagtatgttttggtatttgccttgcctgaatgaattgcagacaaactttactgtaataagatcacgattcatgaatgatgattaat

SEQ ID NO: 19161 - DNA, 193 bp, Gossypium hirsutum
  Clone ID: LIB3083-111-Q1-L1-D9
agtggcagcgcacaacgtattcgtatatggaagcctatgagcagatgatgtggtccgagaactgaaaaattagtccccacttacttcaatactcttatcaacggctttcatagatttaaccaaaaaggacgtgtttaatgcggggggataccattccgaaaccgccatgttaaaggcagggggttaatgtgaa

SEQ ID NO: 19162 - DNA, 1430 bp, Gossypium hirsutum
  Clone ID: GOSHI-09MAY01-C4618_1
cccacgcgtccgcggacgcgtgggtgacagccttacgtaaaatttgtcctatggtcagcagtgaaatcacatcggaggcatcagcagctgaggttgagggatacggtgcttccaagctcactgttgactctgctggtaagtacctacaacttgccaataaacttttctctcaagctgaactctatcatttctgggcaagcattttggaactcgttattccagtttataagagcagaagagcatatggacaactggctaaatgtcatacattgctcacaaacatctatgaatcaatccttgagcaggagtcaagccctatccctttcactgatgctacttactatagggttggattttatggtgagagatttggtaagctggaccggaaagaatatgtttaccgagaacctcgtgatgtgcgcttgggtgatataatggaaaaacttagtcatatatatgaatctaggatggatggtaatcatacattgcacattattcctgattccagacaggtgaaggcagaggagttgcagcctggagtctgttacctgcagataacagctgttgatccagtcatggaagatgaagatttgggaagcagaagggagagaatcttttctctttctactggaactgtccgtgctcgtgtttttgaccgcttcttatttgacactccattcacgaaaaatggcaagacccaaggtggattggaagaccaatggaaaaggaggactgttcttcagactgagggctcattccctgcacttgtcaataggctcttggtgataaaatctgaatcacttgaattttctccggttgagaatgcgattggaatgattgaaactcgaacagcagccctacgaaatgagttggaagagcctcgtagttccgaaggagaccaactgcctcgtcttcagagcctgcaaagaattcttcaaggcagtgttgcagttcaagtgaatagtggtgttctgagtgtgtgcacagccttcttgtctggtgaacctgccacaaggttgcgttctcaggagctacagcaacttattgctgcactccttgaatttatggctgtttgcaagcgggcaattcgtgtacacttcagactaataggagaagaagaccaagatttccacacacaactagtgaatggatttcaatctctcacagcagagctatctcattacatccctgcaattctatcagagctctgataatgttgtaagcattacttgctccgatatatctttctggtgcaagctgttcataaagattgtgacacattctttttgtagatctgtgctcaaatgatgattgttgatgtatgtaataaccaatttgtttgtgtgcaatggtggattacttattgaagcttgatgttaaaaccaccaatcctactgtacgcggcaaccaacaagagctcgtctataaaa

SEQ ID NO: 19163 - DNA, 840 bp, Gossypium hirsutum
  Clone ID: GOSHI-09MAY01-C4628_1
cggacgcgtgggcggacgcgtgggaaaacagtaaacctaactagtaccatcgaacacaaagaagacagagctacccatgaaattgtttgatgctcattgccaccttcaagatcccagaattctcaacaaagcccccaaactcatttccactgctttggattctggtctccttaattttgctgttaatggtgtttctgagaaagattggcatttggtcaaagaaatgggagacaactatccttctgttattccatgctttggagttcatccttggtatgttcctcagagaagtccaaattggtttactactctcaaggaattctttgaaaccactccttctgctgctgttggagagattggcttggacaaaggttcaaaaggaagggagattgattttaatgatcagattgaagtctttaggcaacagctacagcttgcaaaagagctgaaaaaaccagcatcagtccattgtgttcgtgcatttggcgacctccttcatatagtgaaggacattgggcctttcccagatggtctcctcccccattcttacttaggctctgcggagatggttcctgaatttgtcaaatccggtgcttacttctcattacccgggtacatcatgccctggaaagtgcagaaggccaagaaaatgttggagacgatacctttggaaaggatcctcttggagtccgatgctccggatgcattgccacatttagagttaagctctctgtttttggtcgacgaagatccttcctttccacaggaaatttgctcatgggagaactgctgcctcaaatgtacacttcttgatctcagaacctatcatgcaaaactgct

SEQ ID NO: 19164 - DNA, 876 bp, Gossypium hirsutum
  Clone ID: GOSHI-09MAY01-C4198_2
cccacgcgtccgcccacgcgtccggcttgaaagaaacgggttttcaatgaacggtgaagcaggcatggttaacccagcttcaagacagatctacttgactttcccagctgatagcactttcagagaggaggatgtgtcaaattacttcagtacatatggtccggttcaagatgtgaggataccataccaacagaagagaatgtttggatttgtcacttttgtttatcctgagaccgtgaagatcatcctggctaaagggaatcctcattttgtttgcgatgcgcgggttctggtgaagccttacaaagagaaaggcaaagttccggacaagtacaggcattctctctcactttaaagtcttaattttggatgccctgcttacttggtctagatctgttaaacctgctgtgttatctcgcaggaaacagcagcaacagcaagtggaaagaggagagttctccccttgtggtactccaactggccttgattctagagatccatttgaccttctgctagggtcaaggatgttttacaatacccaggacttgttatggaggagaaagttggaggagcaagctgatctccagcaagcccttgagcttcaaaatagaaggttgatgggcctgcaactccttaatgtgaagaagcatcaccatcacagggctctttctagtggaagtcccattccatcacctacccactcaccaaacccgttcagccagtcacttgtacttactcaatttcacttcaatcagaaccaccactcaaccgttacttgtaatcatcgtcaatactatacttactaccatacaaaatgcgtacataaaaggcagtgaaggaagtggttcatccattcctttatttttgttgaaatat

SEQ ID NO: 19165 - DNA, 2004 bp, Gossypium hirsutum
  Clone ID: GOSHI-09MAY01-C4198_1
catgagctgtgaagcagcagccaacctttgttgctgagcggatttagatctaagtaactcatgggttctgcttcttttccttactccccaaagggcatgaattcgttccttcaacagcaacaaaatgatactcagagggctgcagccgctgctgctttaatgatgggtgacgatatgaacaagtttaaccgttccaggcttgaaagaaacgggttttcaatgaacggtgaagcaggcatggttaacccagcttcaagacagatctacttgactttcccagctgatagcactttcagagaggaggatgtgtcaaattacttcagtacatatggtccggttcaagatgtgaggataccataccaacagaagagaatgtttggatttgtcacttttgtttatcctgagaccgtgaagatcatcctggctaaagggaatcctcattttgtttgcgatgcgcgggttctggtgaagccttacaaagagaaaggcaaagttccggacaagtacaggaaacagcagcaacagcaagtggaaagaggagagttctccccttgtggtactccaactggccttgattctagagatccatttgaccttctgctagggtcaaggatgttttacaatacccaggacttgttatggaggagaaagttggaggagcaagctgatctccagcaagcccttcagcttcaaaatagaaggttgatgggcctgcaactccttaatgtgaagaagcatcaccatcacagggctctttctagtggaagtcccattccatcacctacccactcaccaaacccgttcagccagtcacttgtacttactcaatttcacaacagtcaagaagctccacaagagaattgttctaaccctgtgctggctgtatctgccactgcttccgagaagcaagcagcgagtactactgcggttcctaaagaatcggccagtgttgaagaaaatggtactagcaaggagagccctaattgtgaagatgctaatctgccagaaagtttggagcacaaccttcctgataatcctttcgcatctcctaccaaagcatccggggagttcttgtctgcattctccaatgctgaagcagatcgggatgtttcagtctcggcttcttctgtcaacagtaactgggtctcttcaactctacttcctgcaaataatgctttagagattgcatccttcaactctttcaactgtcaaatgcccaggttctcgtctggacatggtaccattggtatgtatgccggcacaggcggcccgacttgccctgttggtatttagcttcctatgctgaggaagactgaaggtataaatcaaacacaaaatttcacatcggagatcagagatctatagagagccaccaccaccaccgcactacaatcagaaccaccactcaaccgttactcgtaatcatcgtcaatactatacttactaccatacaaaatgcgtacataaaaggcagtgaaggaagtgggtcagccattcctttattttgttgtaatattgttatctattgtttcagtagtttggaccacaggtaaaagcatagaagaagaaagaaaaaaaaaggatcacacagtcaatgtgtagttgtaactccccttggaactggaatttctttcccttatttttccagcagtgatggtttccctggaagaaacaaggaaaaaaaacccccttattttagtttgttcaatttttttcctagccttgttagttcatgtttgttagggtgtaatcaaaatcctcttctgtacagagcatctgcactcaaaagaagggaaacaacactcgaagaggtagaaatagtaaaaacatgcatatatggtattgtagggggaagacatctatcgagggaatcatacatctcagttcaaagttgtaccttgatcatgatctactgttatgagatagagaattcactagtaaaaagcatcagaatttctaacaaaaaaaaaaaaaataaaaaataataaaataaacctttaagct

SEQ ID NO: 19166 - DNA, 1137 bp, Gossypium hirsutum
  Clone ID: GOSHI-09MAY01-C4188_1
gtggctgtgactggagatggtaccaatgatgctcctgcacttcatgaggcagacataggtctgtctatgggcattcaagggactgaagtcgcaaaagaaagttcagatatcgttatattaggatgataattttgcttcagttgtgaaggttgttcgctggggtcgttctgtgtatgccaatattcagaagtttatacaattccagcttactgtgaatgttgcagcccttgtaatcaatgttgcggcagcaatatcctctggtgatgttcctttaaattcggtgcagttactatgggttaacctgatcatggatacacttggagcacttgcattggccactgaacctccaacagacaaccttatgcataggtcgccagttggccgaagagaacctctaattacaaacatcatgtggaggaacttactaatacaggctttatatcaagtcactgtcctccttgtgctcaacttcagaggcatgaccattcttcagttggaggatgatggtaacagggaacatgcctataaagtgaagaattctttgatattcaatgcatttgtcatgtgtcaaatcttcaatgagtttaatgctagaaagcctgaagaagtcaattgcttcaaaggagtgactaaaaactacctctttatgggaataattggattcactttcatacttcagataatcatcatcgagttccttggaaagtttacctcaacagtgagacttgattggcaactgtggcttgtatcccttggcattggcattatcagctggcctcttgcaattgtgggaaagctgattccggttcccaagacaccggttgcctcgtacttcataaagccatttcaacaatgcaaaagatccagggatgcatgaatttgttatttctgttgttccttgctatttaagtaaaattgacaatctgagaattgctgaagcttgtgtatagaaagggttgtctaaccgcaaagcggttgattgcatcctaacttaaaaaggcaaaacagaacagaagaaaatatgcttgcctgagtgtaatcaaggcaactgattctgaaagatcatttatgtattttgtacaaggtttaagtgaagggtaaattacagatatggtttaaattatgttttgatcatcg

SEQ ID NO: 19167 - DNA, 685 bp, Gossypium hirsutum
  Clone ID: GOSHI-09MAY01-C4178_5
cggacgcgtgggttctgttcgatttctcggggaaccaagtttaacttaaaaccacaacttctgtagaaatataaatatgatagactcaactcaaatattgagctgctttagctggtttcctcgactgtagacgatttaagttgcgatttatcaactgctgtgctcgttttatcgccgtctcgagaggcatggccaccaagcagccaaatacaggcctttttgtaggactaaacaagggccatgttgtaaccaagaaggaattggctccacgtccatctaacagaaaaggaaaaactagcaaaagagtccattttgtgaggaacttgataagggaagttgctggttttgcaccgtatgagaagaggattacggagcttttgaaggttggtaaggacaagcgagctctcaaggtagctaaaagaaaattgggaactcacaagagagccaagaagaagcgtgaagagatgtcgagtgttctccgcaagatgagggctcatcatcctggaggtggagacaagaagaagtgaagcttttatttttgttgatttatggacaagcttgaaggtttgatttagtagctgttagagattttgtttagcactttgtttgagactgaaaatcatgcactcaaatttgctgctttacatgaattactgcaagttttttttttttttaaaatttaaaa

SEQ ID NO: 19168 - DNA, 839 bp, Gossypium hirsutum
  Clone ID: GOSHI-09MAY01-C4178_4
cccacgcgtccgcccacgcgtccgctctttctgaatgttttcttctgttcgatttctcggggaacgaagtttaacttaaaaccacaacttctgtagaaatataaatatgatagactcaactcaaatattgagctgctttagctggtttcctcgactgtagacgatttaagttgcgatttatcaactgctgtgctcttatatccccgtctccgctggcatggctaccaagcagccaaatactggcctctttgtaggactgaacaagggccatgttgtaacaaagaaggagttggcaccacgcccctctaatcgtaaaggaaaaacgagcaaaagagtccatttcgtgaggaacttgatcagggaagttgctggttttgcaccgtatgagaagaggatcactgagcttttgaaagtcggtaaggacaagcgagctctcaaggtagctaaaagaaagttgggaactcacaaaagggcaaagaagaagcgtgaagagatgtccagcgttctccgcaagatgagagcccacggtggaggtgcagaaaagaagaaataaagctttattttcttggtttcttactgttgtcgtgctcgagtttcttgtttaggagcagctagaggtttgtttagcatatgtttcatttttgttgttttgagactgaaatcagtgctttggaacttttgtttatttgagttagagatgagaaattggaagaagtaataacttttaaattttatgtttcttgaattatatttaacgccattactattctacgtgcaaattttggggataccatgttcaatctaattaagggtcatagaatttaattttcaaatgaatg

SEQ ID NO: 19169 - DNA, 644 bp, Gossypium hirsutum
  Clone ID: GOSHI-09MAY01-C4178_3
cagaatttttttttttttaaaccccttgcttttagtccgcctcagatctccccgtctccacaggaatggctaccaagcagccaaatactggcctctttgtgggactgaacaagggccatgttgtaaccaagaaggagttggctccacgtccctctaatcggaaaggaaaaactagcaaaagagtccattttgtgaggaacttgattagggaagttgctggttttgcaccatatgagaagaggattactgagcttctgaaagttggtaaggacaaacgagcgctcaaggttgctaaaagaaagttgggaactcacaaaagggcaaagaagaagcgtgaggagatgtctagtgtgctccgcaagatgagggctcaccctggaggtggagaaaagaagaagtgaagctctctggtgacaagtcaccttgatgatttcattagagaactttgtttagcatatgttttaacgtattggtttgagactgaaaactatgcactgaatctcgtttgtttaattttataatgtatgctaaatttttgtgtttagttgcatgtccttgacatgttgggtattgccttgttttcttagccgtatggatttggaagttcatcattgagtcaagagagcatctttcgtcgtttattt

SEQ ID NO: 19170 - DNA, 1076 bp, Gossypium hirsutum
  Clone ID: GOSHI-09MAY01-C4178_1
atcagggtgaaatccgctttgatgtagaaattcgagagcagcatggcaaaagaaaccaaaccgctgtgcatcatttccgcgaccataaacacaccctgtcgagaagaatccattttgtggatcgagaaagtaaactgaaagcccctccactttaccgaaccaaacttcaatttcagtgccaccccaagaataacatctttggtaatgaaagtctgtcacatgttcaaatttcaagcagtcatatttcggaaaaacgatattcacattgtggttcagatcttgaacagcacgggagagactagtaacgatatctccaaggcctccaacctttgcaataggggccatctcaacagcaatatgcacaacgtgcattggtggctctttcacgattcctccaacaacaggtatatggtaatccctaccaccattgttgtcaaaatttccaccatcttccctctcagagaatacgaagtccatcatatatgcatccaatggaaccttgacagtagcttttacatgaaagccattatctacaggcaagattctttgaggtggcaatggacctatactgtgagtccaacgattaaatgaacatctaaaccatacttcgggttttccattgaggacagtgttagcaggattataaaaaatcgtcaccatgcttcctgcgtgaatatcaagtggctcggtataaactacattcttctgggaaagcagaaacctcttcaaagttctttccttcatttcacccttcatttgtgttgttttttcagcctttgcatgaatggcctcctctcttaggttcctctccttttgaagcttctcaaatattcggtgttcctcctcaacccagaactgctcttcaggaatgcttttctggacaatagcatggaagtcttgacgattattgttatcatagagagtggcagccttaggtggtccattggcaaagacccaatccaacacaagggctccatcaggtataacaacttctgcataccaccaatcaccaccctctttctctgatttgacaagcttttcagcaattgttaatccatcgttccaattattatgac

SEQ ID NO: 19171 - DNA, 499 bp, Gossypium hirsutum
  Clone ID: LIB3583-009-P1-K1-H2
cccacgcgtccgcccacgcgtacgaccacgcgtacggttttgttctgttcgatttctcgggggaccgagtgtaacttaaaaccacaacttctgtagaaatataaatatgatagactcaactcaaatattgagctgctttagctggtttcctcgactgtagacgatttaagttgcgatttatcaactgctgtgcttcggttggtgggttttttggatgatatgatactatatagattttttttattctatttctgcttacaagctatggttactagttgttattctgcaaattaaatgatcgggtatatatatacatgtgtttcagttccatattgcaagtttatgcttttaggctttgaagcccatttttcatttcatgtgtgctgattatacatatttgattgagaggcttataaaggaaagaacgattaattgagggtttgagtcctgagttaagtcttttattcttttatttatcaaccatgtctgaagcaggagc

SEQ ID NO: 19172 - DNA, 441 bp, Gossypium hirsutum
  Clone ID: uC-gsronu33B113e03b1
cccacgcgtacgcccacgcgtccgcccacgcgtccgcaaaaccctaattttaactccgcctcagatatccccgtctccacaggcatggctaccaagcagccaaatactggcctctttgtaggactgaacaagggccatgttgtaacaaagaaggagttggtggcatctgatgcggcgctaaaggccctagctgttagggttttgcttaggtgatttgggccattgggtttagtgggttttgggccatattaggccattttaatggactatttgatttattttgattttgggtgttttgctggtatgggcccgggcaaaaatgggctcttacaacttaaatgttaagttatcttggtataacttttttctacatgctttaatatactatgataatggtgtacgtatttttttaagtataaggtaattaaaaataggcttgat

SEQ ID NO: 19173 - DNA, 568 bp, Gossypium hirsutum
  Clone ID: LIB3829-029-Q6-N6-E12
aaacacaaaaatttagcatacattataaaattaaacaaacgagattcagtgcatagttttcagtctcaaaccaataagttgaaatatatgctaaacaaagttctctaatgaaatcatcaaggtgacttgtcaccagagagcttcacttcttcttttctccacctccagggtgagccctcatcttgcggagcacactagacatctcctcacgcttcttctttgcccttttgtgagttcccaactttcttttagcaaccttgagcgctcgtttgtccttaccaactttcagaagttcagtaatcctcttctcatatggtgcaaaaccagcaacttccctaatcaagttcctcacaaaatggactcttttgctagtttttcctttccgattagagggacgtggagccaactccttcttggttacaacatggcccttgttcagtcccacaaagaggccagtatttggcggccattcatgcaaaggctgaaaaaacaacacaaatgaaaggtgaaatgaaggaaagaactttgaagaggtttctgctttcccaaaagaatgtagtttataccg

SEQ ID NO: 19174 - DNA, 447 bp, Gossypium hirsutum
  Clone ID: uC-gsronu33B143g08b1
agtcacgcgtccggtatgagaagaggatcaccgggctttttttggaaggaagggcgggccagcccccaagggagctaaaagaaagttgggaactcacaaaagggcaaagaagaagcgcgaagagatgtccagcgttctccgcaagatgagagcccacggcggaggtgcagaaaagaagaaataaagctctattctcttggattcttactgttgccgtgctcgagtttcttgtctaggagcagctagaggcttgtctagcatatgtttcatttttgatgttatgagactgaaatcagggctttggaactcttggctattcgagttagagatgagaaattggaagaagtaataactatcaaattttatgttgcttgaattatatttaacgccattactatgctacgcgcaaaagaaagagaaccaccaggggaagagctggattgaaac

SEQ ID NO: 19175 - DNA, 438 bp, Gossypium hirsutum
  unsure (1)..(438): unsure at all n locations
  Clone ID: LIB3135-002-Q1-K1-F7
cccacgcgtccgcccacgcgtccgagcaatattatcacaagcagcagctaaaaaaaaaggcaagaagaaaaatggcgtcagagcaatatcaagctatgaggaatgcaccacaagaggatcactgagcttttgaaagtcggtaaggacaagcgagctcttaaggtagctaaaagaaagttgggaactcacaaaagggcaaagaagaagcgtgaagagatgtccagcgttctccgcaagatgagagcccacggtggaggtgcagaaaagaagaaataaagctntattttcttggtttctcacccttgtcgtgctcgagtttctggttaggagcagctagagggttgttagcatatgttcaattttggtgtttgaaacttgaatcaggtttggaacctttgttaattgagtagagatgagaaatggaagaagtattacttt

SEQ ID NO: 19176 - DNA, 321 bp, Gossypium hirsutum
  Clone ID: LIB3148-034-Q1-K1-C6
cccacgcgtccgcccacgcgtccgtccactcgtacgaccacgcgtacgaccacgcgtacggccacgcgtgcgcccacgcgtgcgcccacgcgtccgcccacgcgtccggcgtgaggagatgtctagtgtgctccgcaagatgagggctcaccctggaggtggagaaaagaagaagtgaagctctctggtgacaagtcaccttgatgatttcattagaagaactttgttagcatatatttcaacttattggtttgagactgaaaactatgcactgaatcctcgttggttaattttataatgggtgctaaattcttgcggttt

SEQ ID NO: 19177 - DNA, 314 bp, Gossypium hirsutum
  Clone ID: LIB3583-005-P1-K1-H12
ctactttactctttctgaatgttttcttctgttcgatttctcggggaaccaagtttaacttaaaaccacggcttctgtagaaatataaatatgatagactcaactcaaatattgagctgctttagctggtttcctcgactgtagacgatttaagttgcgatttatcaactgcttggctttcggtgggaatggctaccaagcagccaatactggcctttttgtgggactgaacaagggacatggtgtaaccaagaaggaagtggcttaaccgtccttttaatcggaaaggaaaaactagcaaaagagtccatttt

SEQ ID NO: 19178 - DNA, 816 bp, Gossypium hirsutum
  Clone ID: GOSHI-09MAY01-C4118_1
cccacgcgtccgcggccttcttttcgtttgttttttttcaatcaatattttctttcagctctcaagctttcttgttagtgagtaagcatgtctcatcgcaagttcgagcatccgaggcacggttcattgggctttctcccgaggaaaagagcctcccgacatcgaggaaaagtgaaggctttccccaaagatgatcctactaagccatgcagattaactgcattcttgggttataaagctggaatgacccatattgtgagggaagttgaaaagcctggatcgaagcttcacaagaaggaaacttgcgaagcagttaccattgtcgagaccccgcctatggttgttgttggagttgtcggatatgtcaaaactccgcgtggtcttcgtactttaggcaccgtgtgggctcagcatttgagtgaggaggtgaagcgaaggttctataagcactggtgcaagtctaagaagaaagctttcaccaagtattccaagaagtttgaatccgaagatggtaaaaaagatatccagtcacagcttgaaaaactgaagaaatattgcactgtgattcgtgttttggctcacactcagataaggaaaatgaagggtttgaagcaaaagaaggctcatttgatggagattcaagtcaatggtggaactattgctcagaaagttgactttgcttacggtttctttgagaaacaaattccaattgatgccgtgtgccagaaagatgagatgattgatattattggagttaccaaacgtaaacgtttctatcgaagtttgaagtggatttgcatcttacttttgattctc

SEQ ID NO: 19179 - DNA, 927 bp, Gossypium hirsutum
  Clone ID: GOSHI-09MAY01-C4108_2
gaacaatcaaattgcagaagaggggcaatagctactgagacgttcaatgttgcaatggcggctcttaacgaagttgggaagaaggtttctgttgtaaagaaaactgttgcaaaacttgcacctcccgactcactggccactggtgctgcctatgatgacaagaagagctcaacatcagcaccagatacagccccttcgctatggccacagcaagatgaaattacacgtcatttcaatcttaatgacactggtactccagctcaatctgtctcagatttgaatctgccacgcatggcacctgtttcccttcatcgggatgatactcatcctgataacatgccggttcttccttgtttgaagtcaatgagatggttaatggagaacaagaattctaaacctgaaaataggttggcagtcattattttaaagctctcaaggattactttagaacccatgttgaggtcaatggcttatatcagtgaacagctttctaccccagctaacagggttgccgtcatcaatttgaagcttcaagacaccgagactagtacaggagagtcggaggttaaattccaggtgtccagggatacattaggagcaatgttgagatcaatggcatacatccgggagcagctttcgagtgttcagtgcgagccacaagcagagccttcaccaaagaagcataggaaataaaaagggcaatgaagttgggatgagtggtcgtctacatgccatgccatcgtgcgtcagtgatagatagcagcaaggtgatgatgatgatgatgataatgggagtgctactgcttgtgtattgaatggaattttttgccctttctctgtaatttgttcctgtttgggtaagcacgttgtgcaacatacaacatacgtgtagaaaacaagaaaaaaggtgaatcaatcataatgttt

SEQ ID NO: 19180 - DNA, 998 bp, Gossypium hirsutum
  Clone ID: GOSHI-09MAY01-C4108_1
gtccttggcatcaaggtataatagtttgtgtcgggaagcaatcaaatatgcagaagatggggcgggagctgctgagacttacaatgttgcaatggcggctcttaacgaagttgggaagaaggtttctgttgtaaagaaaactgttgcaaaacttgcatctaccgactcactggccactggtgctgtctatgatgacaagaagagctcaacatcagcaccagatacaggcccttcgctatggccgcagcaagatgaaactacacgtcatttcaatcttcatgacactggtactccagctcaatctgtctcagatttgaatctgccacgcatggcacctgtttcccttcatcgggatgatactcatcctgataacatgccggttcttccttgtttgaagtcaatgagatggttaatggagaacaagaattctaaacctagaaataggttggcagtcattattttaaagttgcaagattatagcaatagtccatcagctgaaatggatgttaagtttcagctctcaaggattactttagaacccatgttgaggtcaatggcttatatcagtgaacagctttctaccccagctaacagggttgccgtcatcaatttgaagcttcaagacaccgagactagtacaggagagtcggaggttaaattccagtgtccagggatactttagagcaatgttgagatcaatggcgtacatccgggagcagctttcgagtgtttgcgaaccacaagcagagcctttaccaaagaagcataggaaataaaaagggcaatgaagttggggatgagtggtcgtctacatgccatgccatcgtgcgtcagtgacagatagcaacaaggtgatgatgatgatgatgataatgggagtgctcctgcttgtgtattgaatggaatttttttgccctttctctgtaatttgttcctgtttgggtaagcacgttgtgcaacatacaacatacatgtagaaaacaagaaaaaaggtgaat

SEQ ID NO: 19181 - DNA, 586 bp, Gossypium hirsutum
  Clone ID: LIB3543-035-Q1-K1-D11
gtatatttgatgtagccggttcttccttgtttgaagtcaatgagatggttaatggagaacaagaattctaaacctagaataggttggcagtcattattttaaaggtatatgcatagtagaattctaatagtcagtgagtacataaaatcccgagttgcaacttaattttttacttgtgtcaagccattttcttatgcatatctgatatataattgatacagttgcaagattatagcaatagtccatcagctgaaatggatgttaagtttcagctctcaaggattactttagaacccatgttgaggtcaatggcttatatcagtgaacagctttctaccccagctaacagggttgccgtcatcaatttgaagcttcatttacaccgagactagtacaggagagtcggaggttaaattccaggtgtccagggatactttaggagcaatgttgagatcaatggcgtacatccgggagcagctttcgagtgtttgcgaaccacaagcagagcctttaccaaagaagcataggaaataaaaagggcaatgaagttggggatgagtggtcgtctacatgccatgccatcgtg

SEQ ID NO: 19182 - DNA, 553 bp, Gossypium hirsutum
  Clone ID: LIB3825-023-Q6-N6-F5
gagcaaacctacaaaaatgattttattttttccttcaagaaaaagcctaatcattacaggtatgactaaatccactaaacaaaatgtctaaaccagactacaacatcatgattgaattcacaatttcttttacatgtacatgtacatacataaatataaacaggttacacaaggcactcgcacgagggaaaaaaattacaaaaatccattaatacacgggttgtgtccacaagcaaaggagcattcccatattaccatcatcatcttgctgtaagtgaccaatgaaagatggcatacttaaaaaacccaacttcaatggcttattatctcctatgcttctttggtaatggctctgcttgtgcttcattaacatttgaaagctgctcttgaatgtaggccattgatctcaacattgcacctaatgtatccctcgatacctggaatttaacctctgattctccggtagtagtctcactgtcttgaagcttcaaattgatgacggcaaccctgttagctggggtggaaagctgttcgctaatataagccatagacc

SEQ ID NO: 19183 - DNA, 469 bp, Gossypium hirsutum
  unsure (1)..(469): unsure at all n locations
  Clone ID: LIB3083-100-Q1-L1-H6
gaactagaactagccggatgccctcggacgtagtacgaattcgacgacgagcactatgcttttgtacattgttgatctgagatacacaatgtcttgtacantgtacnatatacagtacatgaaatatnnaaacatgttatacnnaaagaacttgcacaagganagaggaaaaaaaattaccaaaaatctattaatacacaggttgtgtccacaagcgaagtagcattcttatattaccatcatcatcttgctgtaagtgaccaatgaaagatggcatacttaaaatcccaacttcaatggccttagtatctcctatgcttctttggtaatgactctgcttgtgcttcattctaaaaacacacactaaaagattccatgtcaattagagaaaaataaaattttcgtgaaaaaaggtcaaatgatgtatcgagaagtggaaagagacctatcaatantttgagttggatca

SEQ ID NO: 19184 - DNA, 441 bp, Gossypium hirsutum
  Clone ID: GOSHI-09MAY01-C4078_2
cggacgcgtgggtgcagctcctaatgacaggatcttagaagatggagatatggccttgctggacatgggagctgagtacagtttctatggatctgatattacatgcacattccctgtgaatgggaagtttacaagtgaccagagccttatatataacgctgtccttgatgctcacaatgctgttatagctgcaatgaagcctggtgtgagctgggtggatatgctcaaattagccgagaaaatcattctagagtcgctggaaaagggcaacatccttgttggaaaccttgatgatatgatggttgaacgagtgggtgctgtttttatgcctcatggtcttggccatttattgcgtattgattctcatgatcctggtggttatccaaagggcatagaaagaccaaacgaacctggtttgaagtctttgcgtactgctagaca

SEQ ID NO: 19185 - DNA, 705 bp, Gossypium hirsutum
  Clone ID: GOSHI-09MAY01-C4078_1
tttatctgcttatagatttttttctctatgttagtcttacttcactcagtttgttggtagctacaaatttcaatttttcatttcactgcgcttggtccgggtggtctcccgcagggcatagaaagaccaaaagaacctggtttgaagtctttgcgtgctgctagacaactcctggagggaatggtgataacagtggagcctggatgctatttcattgatgcattgttggttccagctatggaaagcgcaaacacttcaaagttcttcaattgtgaaatagtggacaaatttaaaaattttggtggagttcgaatagaaagtgatgtgcttgtaacggccaacggtagcaagaacatgacaaaagttcctcgagaaacatgggagattcaagctgtcatggcagggggaccatggtcactcaacagggcctctggttaatcctaaagtgatggggaagctttagtcaagttttttcaacattgttatgtacctgagaatgtggggaccggaagatctcaccctatcagccaataaaagttgacttgtttgtattattgatatttatatcttatcaatcttaccaaattaaatcattgaaccaactataacgttattgattcaagactcaaccatcacgtggtgaaaggaaaagtggatgggttgtatgtaagctgtgtaccttctgactcgtaatcttatgggcca

SEQ ID NO: 19186 - DNA, 728 bp, Gossypium hirsutum
  Clone ID: GOSHI-09MAY01-C4028_2
tgactgtaaaaatgtgagaaaaaagaaacagaggaagctgattgtgtaggttgctatggtcgttggtggtattgcgctatttgtcgtgttttgttgcggttacatttacagtcttctacggtggtggaagaggtggatgaccgaagagaagaagcggagtacgggtagtgctagttcgggagcagatcaaagtcatggaagttcaacttcttttcgttgaagttcaacttcgctgattcagtaaattttgagaatattagacctcctgtaatggaaggcttagatacatgaatcatgagaaagacacaatcttcaaaggccagcaggccacgtggccttgaaagcaatggttgttcttcaaatcaaacatcacctgcatctcaatggttttcttcaaaagcagcaaagaaggataggagcaaatggtttagagaactcgtaaacactcctctatcactcctaaaccagttggttaaattatttgcatagcctactctgattgctgttatttgtgggaaaattagtctacattctttaagctgatcttcaactgcttcctacattgttttagccttgggaagaaagttcgcgagatgcacacgagtttggaaaacttgttctgttttagaacttggatccagcttactcttcagcagaagtggagggtcatcctgaagaattaggatcacttgttgaagttttaaagagtggaatggttacaagtgatt

SEQ ID NO: 19187 - DNA, 765 bp, Gossypium hirsutum
  Clone ID: GOSHI-09MAY01-C4028_1
cccacgcgtccgcccacgcgtccgcccacgcgtccgcagttttctacggtggtggaagaggtggatgaccggagagaagaagcggagtacgggtagtgctagttcaggagcagatcaaagtcgtggaagttcaacttccggtcgcgggggttcaacttcgctgattcagtagactttgagaatattagacctcctgtaatggaaggcttagatacattaatcatggtatgtggcttcttacttttaccttcttaaactctatgttccatatgcttagtgtctggaatttcttatcattttgcttgatttattcaaagaaagaaaaaatcttcaaagtcaagtagccttgaaggcaatggtatgactttcttgttgtaacctttgatgattagtttactccgatttcactatcatatgttatttttacaagttgggggcttgcaggtagttcttcaaatcaaacatcacctgcatctcaatggttttcttcaaaatcatcaaagaagaacaaatatctttgtcctttgtgacttcaattatagatggcttaaagagattgtaccttcagaagttgaagcctttagaagttacatatcattttaatgattttgtatccccattgatgacaaatagggattttgatgccaaaccaatggttatgctttggggtcaatattccactgggaaaacaaccttcattaaacatttgcttaagaactagttatctaggagctcacattggaccttgatcaacacccaacagat

SEQ ID NO: 19188 - DNA, 1370 bp, Gossypium hirsutum
  Clone ID: GOSHI-09MAY01-C4388_1
accgtcccaaaacccagaacgacaaaaggatcaagacctataatctatctgaaaacatatgcatataagtttgtgtggaattggtggtgggagaaggagagagtgaatatgattggtgaagcaaaagttgggaatgaagacttgaacttatgctttgagaagctgatgatggttgcagctgggaatagtgagggagttaagatgaatggtgtggggatcactgagtggaaagatatccctgtggagctgctgttgagaatcgtttcactactcgatgatcagactgctatcgttgcttccagtgtctgtagtgggtggagggatgccgtttgcttgggtctcacacaactctgtctctcatggtgtagaaagaacatgaacaatttggttctatctcttgcacctaaattcaccagactgcaaactctgatattgcgccaagagaatccacagctcgaggacaatgctgtcgagactatttcaaagttttgtcacgatctgcaggacctggacctcagcaaaagtttcaagcttagtgatcgctccttgtatgcattggctcgcggttgtcctaaccttaaaaagcttaacatcagtggctgcacatcattcagcgatgaagctctcgcgtatttgactaatttttgtcgaaaactaaaaatattaaatctgtgcggatgtgttaaagctgcaactgaccatgcactgcaggctattggacgaaactgcaatatgttgcaatctttgaatctgggatggtgtgacaatgttggtgatctcggagtcatgagtttagcatacggatgccatgatctccgatgcctggacctgtgtggttgtgttcgtataacagatgatagcgtgattgctttagcaaacgagtgcctccatttgaggtcgctcggactgtactattgccgtaacatcacggacagggcgatgtactcattggctcacagccgagtgaagaacaaaggttcgacgtgggagtcgtcgatgaaaggtagatatgaagatgatggtctaaaaagtctgaatataagccagtgtacggcactgactccatcagcagttcaggctttatgtgacacattccctgcacttcatacctgctctggaaggcactcccttgttatgagtggttgcttgaacttaacctccgtgcattgtgcttgtgcggttcaagctcaccggaccttcaacactattaaaaaaacagctcattgaaggatatgttcaacgttcatatctataaatattaatttttacatataaaagaatgcagagaaacttttaaactcatggtaataatcattgtcgttgtaaatatttttattatttataaaaaatattaaaaagtattatttgac

SEQ ID NO: 19189 - DNA, 791 bp, Gossypium hirsutum
  Clone ID: GOSHI-09MAY01-C4348_1
aaagagagctgatgaagtgtctatggctttaacaagtagcatagcttctgaggcattgcatggggatatatctcaacatcagagggagagaacattgaatggatttcggcaaggaaaattcactgtgcttgttgccactgatgttgcatctcgtggacttgatattccaaatgttgatttagttatccactatgagcttcccaatgatgcagagacttttgtgcatcgctctgagtcgttctaggtcgagcagggtaggaagagttctgcaatgtttaatgtatactaactgccaaagagaggtctagtcttatctcttgaacgtgatgttggatgttggtttgagttcattagtcccccatctatggaagaagttctagagtcatctgctgagcaaataatcgcaactctaaatggtgttcatcctgagtctataaagttctttaccccaactgctcaaagtattatcgttgagctagggtctagtgctcttgctgctgcgatagcacacctaagtggattttcctctcctccttcgtcccgatctcttattagccatgtgctgggatatgtatcactgctattgacaagagattccacttattctagaaaggtcctgactgctaagtctgtcactgggtttctttctgatgtctaccctgcggctgctgatgaagtagggaatatacatctaattgctgatgagaaggttctaggagctgtatttgatctgcctgaagagatagctagagagttgctggattaagatacaccaccgggtaacaccatca

SEQ ID NO: 19190 - DNA, 753 bp, Gossypium hirsutum
  Clone ID: GOSHI-09MAY01-C4328_1
gccattttacgccaaagaaacccaaacccaaacattctgaaacttacccttcaagttagctacattgtttactgtaactctttcttgttctcaagtttaaagagtggtgctgtttttgttgtgagtggagggtttttcttattacccagctgaactttccctagatactttcaactccaccccattccatccttagattggatcatgatcctcttttatttagttcgaaattctcgtttcatactgatggtaagaaccgcatcttgtgactttgagctgcttagcaaagctcaatcggttcttttacattcttccaccactctgttttaccctgctcttatccgtagaggatcatgctttgtatcccctcgtatccagcatccttacaatgcctaaccgaaatcccacttctttctcctcctatgttgccctatgcttcatgattttctccaatgtagctttggtaatcttcaaaatcaaccatcgtaccctgttctaactccgattcctgcaacgccttgctgggatacaatctctacactgatttgaaagtggcggaggttgcttccctcttccaggttgaccccatttccatcctaacagctaacgccatcgatatctcttaccctgacgtcgaaaaccacatccttccttccaacctcttcctcaagatacctatcctctgttcctgcgttgatggaattcgaaaatccgtttccactaagtacaaaactcgcccacaggacacaactt

SEQ ID NO: 19191 - DNA, 1024 bp, Gossypium hirsutum
  Clone ID: GOSHI-09MAY01-C5998_1
cccacgcgtccggaaaaaggctttggttttggtgtgccagctgctactttctgctcaaggttagtcaatcgcgagttgtttcgacagataaacaaaatggctttgaagaaaaacgggttcattccaagttctgcacctgaagaactgaagaaggttttggtagcagtggcgtcggtttggggagatacgatagaagatatggaagaatttcatgtatttccactcaagggagctatgactaacgaggtttttcagataaactggcctacaaatcatggtgatctgcatcagaaagtgttggtccgggcggacgcctgggcggtcgcgggggttttcaatagggatgatgagattaggacttttgagtgcatgtccgagctaggtcaaggacctacgcttcttgggcggttttcagatggaaggattgaggagttcattcatgccaggacactctctgttgctgacctccgtgaccctgaaatatcatctcttatagcagcaaaattgagagagttcaacaatcttgacatgcctggtccgaagaatgtacttctctgggagcgattgagaacttggcttagtcaagccaaaagattctgttccccaagcacagctaaagaatttgccttggatggcctcgaagaagaaatcagcatccttgagaaagagttaacacagggctatcaagagattgggttttgtcacaatgatttgcaatacggtaacataatgatggacgaagagacaagagtaattaccttaatcgactatgagtatgcaagttacaatccagttgcttatgaccttgcaaatcacttctgtgagatggccgcaaattatcattctgagacaccccatattttggactacagcatttaccctgatctggaggagcgccaaagattcatctctgcgtatctggcatcttcgggaaatgaatacagtgatgccgaagtggagcagctacttagcgatgccgagaaatacactcttgctaatcatctggtttggggcttatggggaa

SEQ ID NO: 19192 - DNA, 656 bp, Gossypium hirsutum
  Clone ID: LIB3831-002-Q1-K6-D9
gtttctttctgggtgaaattcagtgttctttgccgtctttttctgaatgggttgtttgattaaggagttcctcctattacatgcatggtgttggttgacatgctgaactccttttaagggtctatttaaagattgggatttgattaaagtatgaaaagctttgacccttttagcttttgtcgacattcttgtatcctggtgttcctttctttctgggtgtttgattgttatcttgaattctagaagctcaaggttagtcaatctcgagttgtttcgacagataaacaaaatggctttgaagaaaaacgggttcattccaagttctgcacctgaagaactgaagaaggttttggtagcagtggcgtcggtttggggagatacgatagaagatatggaagaatttcatgtatttccactcaagggagctatgactaacgaggtttttcagataaactggcctacaaatcatggtgatctgcatcagaaagtgttggtccgggtttatggcaaaggtgtggaagtgtttttcaatagggatgatgagattaggacttttgagtgcatgtccgagctaggtcaaggacctaggcttcttgggcggttttcagatggaaaggattgagagttcattcatgccaggacactctctgttgctg

SEQ ID NO: 19193 - DNA, 653 bp, Gossypium hirsutum
  Clone ID: GOSHI-09MAY01-C5918_1
cccagcgtccgcccagcgtccggaggaactcaggatctatttccttttcttcgatagatcaggttatggagacagtgatccaaatccatcacgctcagtgaagagtgagagcatatgatgttcaagaactagctgacaagttgcagattggttctaagttttatgtgattgggatctcaatgggagcataccctgtttacagttgcttaaaatacatacctcatagattggcaggagcttctcttgtagttccctttgttaactactggtggccttgtcttcctgcaaatttatcaaatgatgcattcagtaggttgcttgcacaagaccaatggtcattccgagttgcgcattacacccctttgttgttctactggtggatgtcccagaaatggttcccttcactaagcattctggctggaaatatggcgattttcagccaaagtgatttggagatcttgaagaagtggtccgaagctccaagtgtcggtcaggagaagattcagcagcaaggtgtttacgagtcgctgcatcgagatataatggtcagttatggaaaatgggaatttgatcccatggatctaattaatccttttccaaataatgagggttcggtccatatttggcaaggttatgaagacagaatcattcca

SEQ ID NO: 19194 - DNA, 529 bp, Gossypium hirsutum
  Clone ID: GOSHI-09MAY01-C5938_1
cccacgcgtgcgctccaaactaatatctttatttgagggcttgttaggaccaaatccagctataagggcggtaaacacagatggtgctcaaaagattatttatcaagtgggccaaaagcgaggtaggttgaccattgatgaagaggatgatcaacccaagaagaaggttcgtcttggtgtgcctgctacacagtggatttcagtctacaatgccagacttccaatgaagcagaggtatcattacaatgtggcagatgcaaggttggcccaacacgtggagaaaggaatggcagatggtctgctaataagctgtgtggcatcttgtaccaatctttgggcattgatcatggatgctgggactggtttcacaagccaagtttatgagctttcaccttccttcttacacaaggagtggatcatggatcagtgggagaagaactattacatccggtctattgctggttcaaacagtggaaattcccctggtggtatgtccaaaggtacccaatacactcaacaatcttataaa

SEQ ID NO: 19195 - DNA, 829 bp, Gossypium hirsutum
  Clone ID: GOSHI-09MAY01-C5888_2
cggcgcgtgggcggacgcgtgggcggacgcgtgggcggacgcgtgggcggacgcgtgggtttttagaagacaggcttaaacctttctacaagtcggaaccaattcctgaaacaaacaatggggatgtgaaagtagtggttggcaataactttgatgaaatcgtattagatgagtcaaaggatgtccttcttgagatctatgcaccttggtgtggccattgccaagcacttgagccgacatacaacaagcttgccaaacatctccgcggcattgactctttggttattgctaaaatggatggtacaacaaatgaacatcctagggcaaagtccgatgggttcccgacaattctgttcttcccggcaggaaacaagagttttgatcccataactgtggacactgatcgaactgtcgtggcattttataagttcctaaagaaacatgcatcaatcccattcaagctccaaaaaccagtgtcagcacccaaagctgaagcagcatcaaccccagaaacaaaggttgaggagtcgaaggagagtgataagagcagcaatggtggcttgaaggatgagttgtgatctcacagtgacgttatattatatgaatagataagagtaaagaatagtgagtagaaacgaggaatccgaaaattgtgagggttcctagtgtttggtgtatgagtttttttttcttagaggacagcaattggctttttagacgttgaagaataaatggcccattgttctcttgctatcatgccacctcatctaaacaacttctttccttcccttttacctattaattttgattccacattgcattcgggggc

SEQ ID NO: 19196 - DNA, 1849 bp, Gossypium hirsutum
  Clone ID: GOSHI-09MAY01-C5888_1
cggacgcgtgcgatcatctccgatctcttctcgaaatggcgtcgtttcggttcttaatagctatctccctcgtttctctcatcctcatttcaacgctcactccttcaatctccaagaccgccaaaaacgacgacgtcgagcttgacgacgacgaggatctccgttttctcgaagaaacggagggaaaaaaagacgccgctccttctcattcccactacaaagaagaagacggcggcgacgacgagtaccccgacctggacgacgaggacttcgggaactatcacgatttcgatgactccgattcggatccgtacaaggaacccgaagtcgacgacaaggacgtcgtcgttttgaaggaagggaacttcagtgatttcattgagaaaaacaagttcgtgatggttgagttctacgcgccgtggtgtggccattgccaggcgttggctccggagtacgctgcggcggcgacggaattgaagggagaagaagtggtgttggccaaggtggacgccacggaggagaatgaactggcgcaagagtatgacgtgcagggtttccctactgtttacttctttgttgatggaaagcataaaccttaccctggtgctagaaataaggaggccatagtgacctggatcaagaagaagatagggcctggtatttccaacattaccaccatcgacgaggctgaacgcatattgacctcagaatctaaagttgctttgggttacttgaactctttggtgggtcctgagagtgaggagattgctgccgcatcacgactccaagatgatgtcagcttctatcaaactgtgaatcctgatgttgcgaagcttttccacctagatcctcaagttaaacgccctgcattggtcttagttaaaatggaggctgaaaaaataaactactttgatggccggtttgttaagactgcgatatccgagtttgtattttccaacaagcttcctttgattacaatttttactaggggaaagtgctccttcaatttttgaaagcgatattaagaaacagattttgatgtttgctgcatcaaacatttctgagaagtatttaccatcattccaagaagcagcgaaatctttcaagggaaagcttatctttgtttatgtgcaagtcgataatgaagattttggaagacctgttgcagattattttggtgtcagtggagacggtcccaaactccttgcatacactggaaatgacgatgctaggaagttcgtctttgatggagaagtgacgttggataaaattaaggcttttggggaagattttttagaagacaggcttaaacctttctacaagtcggatccaattcctgaaacaaacgatggggatgtgaaagtagtggttggcaataactttgatgaaatcgtattagatgagtcaaaggatgtccttcttgagatctatgcaccttggtgtggccattgccaagcacttgagctgacatacaacaagcttgccaaacatctccgcggcattgactctttggttattgctaaaatggatggtacaacaaatgaacatcctagggcaaagtccgatgggttcccgacaattctgttcttcccggcaggaaacaagagttttgatcccataactgtggacactgatcgaactgtcgtggcattttataagttcctaaagaaacatgcatcaatcccattccagctccaaaaaccagtgtccgcaccccaagctgaagcagcatccaccccgaaaccaaggggtgagagttccaaggagactgatcaaccccttgttgtttgaaggaagaattggtatctcccctgtaggttgtgtttttttgattgaagaattcaaaata

SEQ ID NO: 19197 - DNA, 531 bp, Gossypium hirsutum
  unsure (1)..(531): unsure at all n locations
  Clone ID: LIB3829-021-Q6-K6-F9
ctcattcaactctcctccttcatctccagaccgccaaaagcgacgacgtcgagcttgacgacgacgaggatctccgttttcntcgaataatctgtgggtaaaaaaagacgccgctccttctgggggggggggcaacgaagaagatgacggcgacgacgagtaccccgacctggacgacgaggagttcgggaactaccacgatttcgatgactccgattcggatccgtacaaggaacccgaaatcgacgacaaggacgtcgtcgttttgaaggaagggaacttcagtgatttcattgagaaaaacaagttcgtgatggttgagttctacgcgccgtggtgtggccattgccaggcgttggctccggagtacgctgcggcggcgacggaattgaagggagaagaagtggtgttggccaaggtggacgccacggaggagaatgagctggcgcaagagtatgacgtgcagggtttccctactgtttacttctttgttgatggagagcataagccttaccctggagctagaaataa

SEQ ID NO: 19198 - DNA, 287 bp, Gossypium hirsutum
  Clone ID: uC-gsronu33B027g07b1
tcgttcacgcgttcgcccacgcgtccgcccacgcgttcggaggaattcgaatattgtgagggttcctagtgtttggtgtatgagtttttttttcttagaggacagcaattggctttttagacgttgaagaataaatggcccattgttctcttgctatcatgccacctcatctaaacatcttctttccttcccttttacctattaattttgattccacattgcattcgggggcacaattacttttcaataccataagtaatgtaatgctaaatacttcacttttgatt

SEQ ID NO: 19199 - DNA, 732 bp, Gossypium hirsutum
  Clone ID: GOSHI-09MAY01-C5878_1
gactttctccgttcatgttcaagtccaagggtgtacctgtctaccgctgtatccaatatcctagggagtttgttctggttttcccaggagcctatcattcaacatttgattgtgggtttaatgttgctgaggcagttacttttgctcctcttgattggttacctcatgggcagaatgctgtagcactctatcaatcacagggaaggaaaacatcaatttcctttgataaattgttgattggagcagcaagagaagcagtgaaggcacaatgggaactcattctgttaaagaagaatactattgataatttaaggtggaaaggttactgtggaaagaatgggatcttaactgaaacactcaagtcacgtgtcaagcaggaaggtatgagaagggaatacctctgtagcacctttcagacaaagaggaaggacaaaaacttcaattctactagcaaaagggaatgtagcatatgttactttgatttgcacctctcagcagtgcactgttcatgttcttctcatagatatttgtgtttaaatcatgcaaagcggctttgttcttgcacatggacagaaaagattttcctctacaagtacgaaatcagcgaattaaatatgcttcgtgaagcagtggaaggaacattgagtgcggtgcatgcatgggctagagaggacctgaatttgggtcttcgtcactacactccaaagaaaaatcattcagagaagatgaagg

SEQ ID NO: 19200 - DNA, 590 bp, Gossypium hirsutum
  Clone ID: GOSHI-09MAY01-C5818_1
ttctagttgaaccttgatttctcacgaggttgagccgattttcttacatgatatgatagatacttcattgtcgaaaaagaaagatccagatcagccggagattagcttgcccacgctcaaatcacagcgcaccaaaatgggcaaatccgaagacagtgaaaagaagaagaagatcaaagatgttgaaataagtgttcctatcgtatatggtaatgctgcattttggcttggtaaaaaggcaagcgggtttcaatcgcccagatggactgggtttgttcggggggcaacgaatgaggatcttagtgtggttgtaaagcggcctgtttttcagttgcattccagtttcaataacccaccaagggttgtggagtctgctccatttgagttatcagaatcagggtggggcgaatttgagattgccattacactattcttccataacgatgtttgtgagaagcccttgaacttatatcatcatctgaagttatacccagaagatgaatctggccccatgtcgaccaaaaaacctgttgttgtggaatcctatgatgaggttgtattcacagaactgtcagagagttttttagctc

SEQ ID NO: 19201 - DNA, 285 bp, Gossypium hirsutum
  Clone ID: GOSHI-09MAY01-C5548_1
cccacgcgtccgcccacgcgtccgccacgattgcaaaagcaaaaaaaaaatgaagaacagtaacagtaataccaagctaatcctcctccatccttatatccaaaaacaaggcagctctagcagattatggcttcttgccttcatttcctttttcactattgccttccttttaactctcatatacacccgagagtctgtttccggtagaactacagcagccgtaaggacaaccgtgagaggccccggctcatctgtgtccgcctttggtggtggtggtggtggtgg

SEQ ID NO: 19202 - DNA, 927 bp, Gossypium hirsutum
  Clone ID: GOSHI-09MAY01-C5568_1
taacaaccaaaagttttagatatagaattacgaaagctcatctctctctctctctctctctctctctagatttcaccccttaggtttctctttcctcacagagacagagagagaatcagaggagcttaatcgagatttgatattcctcaccacagatggatcagatattgaacaaggtgggctcctattggctcggccagaaggccaacaaggagatcgattccgtcggcgacgacctcaactcattatccaccagtattgaagggggagccaaatggttggttaataaaatcaaaggaaaaatgcaaaagccgttgccagagctgttaagagagtataacctgccaataggaatcttccctcgtgatgccacaaattatgaattcaatgaagagactgggaagctcactgtttttattccagcaatatgtgaagtgggatacaaggactcatctgttctgcgcttcttcaccactgtgactgggtatctggagaaaggaaagctggctgatatagagggtatgaagacaaaggtgatgatatgggtaaaagtaaccagtatcacttgtgaaggatcgaagatctatgtcacggccggaatgaagaaaagcaggaatagagaggcgtacgaggtttccagggatggagtaagtgtagataagttttaaagtggttaggatgccttggagatcctatttcttttaacttttaactctgaaccttcatacttttgtgtccataataagttttaggattcaagtgcaaagaccggtcaactttatggtttctattgtgataaggcttttattctgttctactatgttgaaggtgtctggccaaatatatatataatgaaggtggcaatgcatgaaccttgtgattaagatattataaattgtatggaaggtgctttagaggatctgcagt

SEQ ID NO: 19203 - DNA, 472 bp, Gossypium hirsutum
  unsure (1)..(472): unsure at all n locations
  Clone ID: uC-gsronu33B160b05b1
ccactcgtccgcccacgcgtccgcccacgcgtccggggtaacttgccaataggaatcttccctcgtgatgccacaaattatgaattcaatgaagagactgggaagctcactgtttttattccagcaatatgtgaagtgggatacaaggactcatctgttctgcgcttcttcaccactgtgactgggtatctggagaaaggaaagctggctgatatagagggtatgaagacaaaggtgatgatatgggtaaaagtaaccagtatcacttgtgaaggatcgaagatctatgtcacagccggaatgaagaaaagcaggaatagagaggcgtacgaggtttccagggatggagtaagtgtagataagttttaaagtggttaggatgccttggagatcctatttcttttaactattaactctgaaccttcatacttttgtgtccataataagttttaggattcaangtgcaagactg

SEQ ID NO: 19204 - DNA, 511 bp, Gossypium hirsutum
  Clone ID: GOSHI-09MAY01-C5538_1
cccacgcgtccgaaataaaagagactggaaattgaatccctaaaaaacccgaaggaatttgaggaagagaaatcgagatgaaggagccgttgcgcaaaacgaaagtggtgataaggcatctaccaccgtccgtcaccgaaccctctattatttctcaaatcgacgatcgtttctccgatcgctataattggttctctttccgtctcggcaagtccagccataagcaacagagttactcccgagcctacatcaacttcaataggcctgaagatgtctttgagtttgctgagttctttgatgggcatatatttgttaatgagaagggtactcaatttaaggccgttgttgaatatgctccttcacagcgtgtacccaagcccagctctaaaaaggatggtcgggaagggaccattttcaaagatcctgattatctggaatttctcaaattgattgcaaaaccctgttgagaatcttcccagggctgagattcagttggagagaaaagaagcag

SEQ ID NO: 19205 - DNA, 743 bp, Gossypium hirsutum
  Clone ID: GOSHI-09MAY01-C5498_1
cttttctccgattagggttccttcattattctatttaggaaattttaattttcaacttgttttcgtttattctcttcgattttgggttaaaccctagaaggctcctcgcgaaaacgtcagatggcaactttagctgattcattccttgcggaccttgatgaattatcagacaacgaagccgatgttctggaggaagaaaataatgatgtcgcaaacatggaagaagatattgatggtgacctcgcggatatcgaaacgcttaactacgatgatctggacagtgtttccaaattgcaaaaaagtcagagatacattgatattatgcagaaagtggaagatgcgctcgagaagggttctcatatatcaaatcagggcatggtactggaagatgatcctgagtatcagctgattgtggactgtaatggactatcagttgatatcgagaatgagattgttattatccataattttatacgtgataagtaccgattgaagtttcctgagcttgaatcgcttgtgcatcatccaattgattatgctcgtgtggcgaaaaagattggcaatgagatggatttaacccttgtggatttggaagggcttctgccttcagctatcattatggttggttcagttacagcatcaactaccaagggcaagccactttctgaagatgttttccaaaaaactgttgatgcgtgtgatcgagctctggctcttgatacttgcaaaaaaaaaggtttttt

SEQ ID NO: 19206 - DNA, 500 bp, Gossypium hirsutum
  Clone ID: LIB3585-014-P1-K1-C9
gttacagcatcaactaccagtggcaagccacttcctgaagatgttctccagaaaactgttgatgcgtgtgatcgtgctctggctctggatactgcaaagaagatcctgagtatcagctgattgtggactgtaatggactatcagttgatatcgagaatgagattgttattatccataattttatacgtgataagtaccgattgaagtttcctgagcttgaatcgcttgtgcatcatccaattgattatgctcgtgtggtgaaaaagattggcaatgagatggatttaacccttgtggatttggaagggcttttgccttcagctatcattatggttgtttcagttacagcatcaactaccagtggcaagccacttcctgaagatgttctccagaaaactgttgatgcgtgtgatcgtgctctggctctggatactgcaaagaagaaggttcttgagtttgtagaaagtagaatgggatatattgcaccaaatctttctact

SEQ ID NO: 19207 - DNA, 581 bp, Gossypium hirsutum
  Clone ID: GOSHI-09MAY01-C5488_1
gaccacgcgtccgcccacgcgtccgtgcaaattatttgtgaattctacaattgtttcaattatggcagtcgtagttgcacttgctttcgtctttctcgttatggttccggctccatctcttgtcagagcacttagctcaaactactatgaccacacatgtcctcatctcgagtccattgtcgcaagtgcagtcaagaaagcaatgtcaaatgataaaactgttccagccgcgctacttcgaatgcactttcatgattgcttcatcagaggctgcgatgcttctgtgttgctgaactccaaagggaaaaacaaggcagagaaagacggaccgcctaacatttcattgcacggattttatgtgatcgacgaggcaaagaaagctttggaaacttcgtgtcctggcgtcgtttcttgtgctgatatcttggccttggctgccagggatgcagtttttctgtctggcggtccgacatgggatgtgcccaaaggaaggaaagatggaagaatttccttggcaactgagactaggcagttaccagctcccacttttaatatatcacagcttaaacagaacttttctt

SEQ ID NO: 19208 - DNA, 537 bp, Gossypium hirsutum
  Clone ID: GOSHI-09MAY01-C5458_1
ctgtgggcatcttaagactagctatgtatgtctaagaagtttgggggcatgggtttttggaatccctatagtttcaacttggcaatgcttggaaagtaaaggtggtgtttcgtgcttaacctggattctcttctctgtcgcattttcaaagccagatattttcccgagtgcaggttccttgaatctgtagatggtaataacccattgtttgtttggaggagcatacatgcggccaggctactgttgttgaaagggatttggtgaaggttttggtacgggtcatagcattagagttttctcgaaccctttgcttccgaatgaaacaaatttttatgtcgagttgattcgattctgtttgatggcatggatgatctttgggtgagtgatcttttaaacacttggggtgacagttggatgttaagctggtaggatgtcttttggctccgtatgatgctaaaagaatcttgcaacttcctattgcgcaaataagctgactgatcagtttctggggcactatacatgttcaaggatttatga

SEQ ID NO: 19209 - DNA, 519 bp, Gossypium hirsutum
  Clone ID: GOSHI-09MAY01-C5448_3
ttatcttttacattccactcgattttatcaagtttttcatccgatacgccctcagtggaaaagcgggggagctcgtcatcgaacaagggatcgcttttcacaaggaagaaaagacttcgggaaagaagaacgtgaactgaaatgggcgcatgctcagaggacactccatggattgcagccaccggacaccaagatgtttggcgaccgaactagttacaatgaacttaatcaaatggctgaagaggcaaagagacgagctgaaattgcaaggttgagggaactgactacactaaaagggcacgtcgaatcagtagttagactgaagggtcttgacatagacacaattcagcaagcgtacactgtctgaaaaagacataatacatttcggctctacttattgtacatatactgctgggagtaataatgacctataatatgtcatcttaatgcagtaactgctttcttatacgtttaaatcctccatcttcttcataaaaaaacaaaaaaaaaaaacaaaac

SEQ ID NO: 19210 - DNA, 764 bp, Gossypium hirsutum
  Clone ID: GOSHI-09MAY01-C5448_2
tttccctccattcatggtcctgattagtgctatccttaatgatggcaccattaggactatatccatggctagagtgaaaccatctccactgccagacagttggaagttagcagaaatctttgcaactggaatcattcttggtggttacttagccatgatgactgtcattttcttttgggcagcatacaagacagacttcttccctagtacatttggggttaaaagccttcagaaaaccgaccgcaaggacataaaaatgcttgcttcggcagtatacctgcaagtgagcattatcagtcaagctctcatatttgtaacacgagcaaggagttggtctttcctcgagcgtcccggtcttttactggttttggcttttgtcgtagctcacctgattgctacattaatagcagtatatgcaaactggggttttgctgcaattgaaggaattggatggggttgggcacgtgtgatatggctttacaaccttatctttacattccactcgattttatcaagttcttatccgatcgcctcagtgaaaactggatctcgtcatgaacaaggatcgctttacaagaagaagactcgggaagagaacggactgaatggcgctctagagacctcatgatgcagcccgaaccagagttgcgacgactgtacatgacttatcatgtaagcaaaacaacttattcagttagactgctcctaaagcgtaataattaacgaggtgcttacctaaggtccttgaaaaaaattcgtttttt

SEQ ID NO: 19211 - DNA, 761 bp, Gossypium hirsutum
  Clone ID: GOSHI-09MAY01-C5448_1
caaggacataaaaatgcttgcttcggcagtatacctgcaagtgagcattatcagtcaagctctcatatttgtaacacgagcaagaagttggtctttccttgagcgtcccggttttttactggttttggcttttgtcgtagctctgctgtctcccgcccgcccacccgtccgtgcaaactggggttttgctgcaattgaaggaattggatggggttgggcaggtgtgatatggctttacaaccttatcttttacattccactcgattttatcaagttcttcatccgatacgccctcagtggaaaagcttgggatctcgtcatcgaacaaaggatcgctttcacaaggaagaaagacttcgggaaagaagaacgtgaactgaaatgggcgcatgctcagaggacactccatggattgcagccaccggacaccaagatgtttggcgaccgaactagttacaatgaacttaatcaaatggctgaagaggcaaagagacgagctgaaattgcaaggttgagggaactgactacgctaaaagggcacgtcgaatcagtaggtagacttgaagggtcttgacatatatcacattcagccagcgtacactgtctgaaaagacataatacatttcggctctacttattgacatatacggcgggggtttgtctactatagaatttatgaggacatgttcttatcgctaaatccttattttcataaaaccgttggaggtcaagaatttctccggtacattcttctaaaaaaa

SEQ ID NO: 19212 - DNA, 691 bp, Gossypium hirsutum
  Clone ID: GOSHI-09MAY01-C5478_2
cggacgcgtgggcggacgcgtgggcggacgcgtgggcggacgcgtgggcggacgcgtgggctcaggtaacccaaatattcgttcctcgttcgctctcaatcctcgccactaaattttacttcttaaatttcattttcttttgaaatatttcaatcttcttactgatctaattgctttactggttagacttgtaagagttttcgatagatccgtcgagtaaattaagaaaaaatgggaggaggagaacatggagggcatggagcagaggatttcaggacgaaggtgtggagcatgtctggtggcccatattgccggcccaagcactggcgtcgcaatactgcgattgctatgttcggcgttttcctcatttgtatcccgatcgccatgaaatccgccgagctcgagcaaaggcctcatcagcccgttcgtccaattccttcacagctgtggtgcaagaactttggaaacaaagattatagatgaagcagcaatgatagttcagacaaacctacgggtggcagttcagttgtgtatttgcagtggatttggtaacatgccctatgatttgaatttgagactctgatcggtttagatttctatatgatcaataagttgggaccgtaactttgccggtcaccttcacaaaatcttaaaactggcttttgtaagggtttcatggttttggtatggg

SEQ ID NO: 19213 - DNA, 594 bp, Gossypium hirsutum
  Clone ID: GOSHI-09MAY01-C5478_1
atcactgtcacctcagctgatccttgttcttgacctgccattactcaaagatttcttagtgattcaatccgtcgatcaaattagggggaaaaaatgggagggggagagcatgggcatgggcatgggcatggagttcaagatttcagggagaaggtgtggagcatgtcggggggtccgtactgccggcccaagcactggcgccgcaacactgccattgccatgttcggcgttttcctcatttgcatccccattgccatgaaatcaaccgagctcgagcaacgacctcatcagcctgtccgtccgattccttcacagctttggtgcaagaacttcggaaacaaagattattgaagtctgcctggggctgttggagtaccgatggcatatcagagcagcctatgatctgtatttgagaccctttcaccgatttagctttcttcgtgatcaataagttgtgcttgttttgccttcactgtgttattgacaaattttgaagttgatttttttttcaaactgaatcaacttaatatctgtttattccatccgttaaagtggattaaatcattttttttccaaaaaaaaaaaaagggcggg

SEQ ID NO: 19214 - DNA, 546 bp, Gossypium hirsutum
  Clone ID: GOSHI-09MAY01-C5418_2
atgggctcctaatgttcccaccttacttttggcaagacttttggatggattagggattggattggctgtaactctgatcccgatttatatatccgagacagcaccaccagaaataaggggattcttgaatacccttccgctgttttctggttgccttgggatgtttctttcatattgcatggtttttggaatgtcgttaacgacattaccattttggagattgatgcttggagctctttctattccttccctcgtatacttagcattaactgtattcttcttgcctgaatcaccaagatggctagtaaggaaaggtcgaatgagcgaggcaaggaaagttttgcaaaggatacgtggcacggaagatgtttctggtgagatggctttgctagttgaggggcttggagttggaggtgaaacatcaatagaggagtacctcattagtcccatcaggcgggattctaaatatcctgatactgccggaaaagatagaatcaagttatatggacctgaaagaggtctttcctggacggccaaacctgtcac

SEQ ID NO: 19215 - DNA, 736 bp, Gossypium hirsutum
  Clone ID: GOSHI-09MAY01-C5418_1
ttcaatggaaatgttatatcatatggcatggttttaggaatgtcgatgcgaaccgccgtgggggttggtgcttggagttctttctattccttccctcgcatattttgggttaactgtattctacttgcctgaatcaccaagatggctagtaagtaaagggcgaatgaatgaggcgaaagcagttttgcaaaggctacgtggcagggaagacgttgctggtgagatggctttgttagttgagggactgggtgttggaggtgaaacatcaatagaggagtacataattggcccagcaaatgacgacattgaagacgaagatatatctgctgataaagatagaatcaagttatatggacctgaagcaggtcagtcctgggtggccagaccagtcactggacatggtagcagtataggccttgcgtctcggcatggaagtgtagttagccagagtgctcagcgtcttgtggatcctcttgtcactctctttggaagtatccatgagaaggtccctgaacaaggaagcacactttttccacactttggcagcatgttcagcgtgggaggcaatcaacctcgacatgaagaatgggatgaagaaggtggtgctaccatgggaggaagactatgcactgatggccccggtaatgaatccgatgacaacttgcatagtcctttgatctcaaggcagcaaccagcatggataaggacattgttccaaatgcccatggaagccttc

SEQ ID NO: 19216 - DNA, 469 bp, Gossypium hirsutum
  Clone ID: GOSHI-09MAY01-C5408_4
cccacgcgtccgcccacgcgtccgctgtatttgtggacacttacggtactggaaagatcccagacaaggaaattctcaagattgtgaaggagacctttgacttcagaccaggaatgattgccatcaatcttgatcttaagagagggggcaatagcaggttcttgaagactgctgcgtatggtcattttggtcgggatgaccaagatttcacttgggaggttgtcaagccactcaagtgggacaaggtccaggcttaattggagcttcatcacattggttctatgtctgatttatttgatctgctgtctgctaccatatgaggctgcttttcttacaatttcctttaatttcttttttgggtttgaaatttgattaaaatttatatttatgcatatgatatgatatgagcgataatgaatgttattattattacaatttgaaagataataacagaaaatgaattaaagca

SEQ ID NO: 19217 - DNA, 1593 bp, Gossypium hirsutum
  Clone ID: GOSHI-09MAY01-C5408_1
cgcccgccggcccccatctctcctctcatacttcactctaacgttccctttgaggttttaggaaaacagcagagaaattaaggaatggagaccttcctatttacctcggagtctgtgaacgagggacatcccgacaagctgtgtgatcagatctctgatgcagtcctcgatgcctgtttggcacaggatcctgagagcaaggtggcttgcgagacctgcagcaagacaaacatggtgatggtgtttggtgagatcactaccaaagccgacgtagactacgagaagattgtgcgtgacacctgccgtggcatcggtttcacatctgacgatgtgggtctggatgccgacaactgcaaagtgctggttaacatagagcaacaaagccctgatattgcccaaggtgtccatggccatctcagtaagcgtcccgaggaaatcggtgctggtgaccagggccatatgtttggttacgccacagatgaaacccctgaattgatgcctttgacgcatgttttggcaaccaggcttggtgctcgcctcactgaagttcgcaagaacggaacttgcccttggctcaggcctgatggcaagactcaagtcaccgtcgagtattacaacgacaagggtgccatggtgcctgttcgtgtccacaccgtgctcatctccactcaacatgacgagaccgtgactaacgatgagatagctgctgatttgaaggagcatgtcatcaagccggttatacccgagaagtaccttgatgagaaaaccattttccaccttaacccgtcaggccgtttcgtcattggaggtccccatggtgatgctggtctcactggtcgcaagattatcattgatacttatggaggatggggtgctcatggtggtggggctttctctggtaaagaccctaccaaggtggatagaagcggggcttacattgtgaggcaggctgcgaagagcattgttgctaatggactagctaggaggtgcatcgtgcaagtctcctacgccattggtgtacctgaaccattgtctgtatttgtggacacttacggtactggaaagatcccagacaaggaaattctcaagattgtgaaggagacctttgacttcagaccaggaatgattgccatcaatcttgatcttaagagagggggcaatagcaggttcttgaagactgctgcgtatggtcattttggtcgggatgaccaagatttcacttgggaggttgtcaagccactcaagtgggacaaggtccaggcttaattggagcttcatcacattgattctatgtctggtttatctgatctgctgtctgctaccatatgaggctgcttttcttacaatttcctttaatttctttttttgggtttgaaatttgattaaatttatatatatgcatatgcatatgatatgagaggtaatgaatgaaatagcaatgagaaaggatgtactgccatgttattattattacaatttgaaatataataacagaaaatgaattaaagcacaccaaaaaaaaaaaaaaaaaaaaaaaaaaaaaggtcgaaagtagttttgatttatgggaaaaagactcctttttttagtaaa

SEQ ID NO: 19218 - DNA, 457 bp, Gossypium hirsutum
  Clone ID: LIB3149-001-P1-K1-G11
attatattatgcctcctactttcattcttatatttcttaattaattgtgctataatatgtagaaatattttatatttaaaatagtaaaaataatttaaaagtctatataaaaatttgtatataaaaaaaaaaaaaagccggttatacccgagaagtaccttgatgagaaaaccattttccaccttaacccgtcaggccgtttcgtcattggaggtccccatggtgatgctggtctcactggtcgcaagattatcattgatacttatggaggatggggtgctcatggtggtggggctttctctggtaaagaccctaccaaggtggatagaagcggggcttacattgtgaggcaagctgcgaagagcattgttgctaatggactagctaggaagtgcatcgtgcaagtctcctacgccattggtgtacctgagccattgtctgtatttgtggacactta

SEQ ID NO: 19219 - DNA, 596 bp, Gossypium hirsutum
  unsure (1)..(596): unsure at all n locations
  Clone ID: LIB3585-045-Q6-K1-B2
tcccggaacggcagggccgaaccaagccttgcgaacattgagggatgtgggtctggatgctgacaactgcaaagtgctggttaacatagagcaacaaagccctgatattgcccaaggtgtccatggccatctcagtaagcgtcccgaggaaatcggtgctggtgaccagggccatatgtttggttacgccacagatgaaacccctgaattgatgcctttgacgcatgttttggcaaccaggcttggtgctcgcctcactgaagttcgcaagaacggaacttgcccttggctcangcctgatggcaagactcaagtcaccgtcgagtattacaacgataagggtgccatggtgcctgttcgtgtccacaccgtgctcatctccactcaacatgacgagaccgtgactaacgatgagatagctgctgatttgaaggagcatgtcatcaagccggttatacccgagaagtaccttgatgagaaaaccattttccaccttaacccgtcaggccgtttcgtcattggaggtccccatggtgatgctggtctcactggtcgcaagattatcattgatacttatggaggatggggtgctcatg

SEQ ID NO: 19220 - DNA, 720 bp, Gossypium hirsutum
  Clone ID: GOSHI-09MAY01-C5438_1
gcagcatcgacgcctactccgctgcagttgttaaagttggtccctgtagcttacgtggatctcgagtaggaggttttggcagtcaagttatacttcccctggctcatactgtcgaacatgaagagttcttagaggtcattaaattggagggaattgcacaatctcctgaagatgcactaatgccaagagatgttttcctcctgcaactatgcagtggaatggatgaaaatgctgtgggcacctgtgccgagcttatatttgctccgatcgatgcttcttttgctgatgatgcacctcttttgccttctggttttcgtataattcctctcgattctgggaaggaagcctctagtcccaatcggactcttgaccttgcttctgctcttgagattgggccagctggaaataaagcatctaatgattactctgctgctggtggctgtatgagatctgtgatgaccatagcatttgagtttgcatttgagagccacctgcaagaacatgttgcgtctatggcccgacaatatgtgcgtagcattatatcttcagttcagagggtggcattggcactttctccttcatattcaggttcacgtgctggtctccgcaccccgttaggtactcctgaagcacagactcttgctcgttggatctgccagagttatagggtctacatgggtgtagagttgctcaaatctggcactgaagggggtgaatctg

SEQ ID NO: 19221 - DNA, 653 bp, Gossypium hirsutum
  unsure (1)..(653): unsure at all n locations
  Clone ID: AI055355.1
ctctttttctcttaatttattgtcatttttttcttctaaatttcatctcaatttttgcaaaacttaactaatgaacaaatttccctcataattggcaaagaaatcttttccaattcccccccccccgcaagatgcgttgcagttatggattgacagcgataccggggacagacgcccggttcttttcgccggaaacttccttcctccagttacgtagaacgttccaaccgacccggattaaatttgggttgttcaaaatcaaggcgaaaatcgacgaagcgaggaaagagatgagtttttatgagttactggggatatcagaaaggggtacttcgttggagataaaacaagcgtataagcagctagctaggaagtaccacccggatgtttcgccgccggatcgggtcgaggagtatacggagccgtttatacgggtccaggaagcttatgagactttgtcngatcccaaagagagggctttgtatgataaggatttnagcttggggattcaccttgctttctctgctagacgaacgtatcaatacgatgaggatctagaagatccgagcgagtggaaaatanatggcatctcactatagaactgagagaagagccngaacaggatgccgaagaacttgtatgggagctcaatn

SEQ ID NO: 19222 - DNA, 367 bp, Gossypium hirsutum
  Clone ID: LIB3585-045-Q6-K1-D12
caatttttgcaaaacttaactaatgaacaaatttccctcataattggctaagaaatcctttccagtgccggccccaagatgcgttgcagttatggattgacagcgataccggggacagacgcccgattcttttcgccggaaacttccttcctcaagttacgtagaacgttccaaccgacccggattaaatttgggtcgttcaaaatcaaggcgaaaatcgatgaagcgaggaaagagatgagttgttatgagttactggggatatcaaaaacgggtacttcgttggagataaaacaagcgtataagcagatagattggaggacggggcgggatgtttcctcgaatgatctgataaaggagaatacaa

SEQ ID NO: 19223 - DNA, 1256 bp, Gossypium hirsutum
  Clone ID: GOSHI-09MAY01-C5788_1
cggacgcgtgggactgttttgagatcatagatttttcctctcgctttctgctcagagcaaaaaaaaaaatggcgttgcgacccatagataatgcactccccatcgtaccagacggtctcagacccaagaaacaagccaaagtgtcgattcaaccccagaaaaaagcttccgagatcagcgtaaacgatgagaacaaagctcctttaccgcaacccatagatgcctccgttgattatgtcgcttccgaggatctcaaaccctttcaagacccagaatcaaacatccaaggctttcctgttggactagtttctttttaaaaaatgaagtaaaaccctgtttgcaatttcacgattctgattcggtttgatgttttcagagcttagttgaagggttagattcggacgcgtgggtgaaggtttgtcagtcgttgaacgatgccaggcgtttctctttatatcacccaggtctactgcttccagtcctagagaaggtaatgttggtagtggtaaagtcaatgaagaacccgagaagtgctctttgcaagacttcgattatggctgcttcagatatcttcaatgcctacggcgaaaaattgcttgactcaactgattctagtgcatttgatcagctgttactgcagttgttactgaaagcctctcaggacaagaagtttgtgtgtgaagaagccgataagtcgctgacagcaatggttaactccattgctgctttacccctgcttcaaaagctccgcggatttgttaaccatggcaaccttagagtcagagccaaagctgcagtttccatttccaattctgtttacaaaatgggatcagaagaaatcaaagagttcgggtcagttaccttgcttcaaatggcttcggatttgctaaacgataggctgccagaggccagagaagcagcaagaagcattgtactttcagtatacgaggcatttacagaaaacgaaaagctggatccggtggaggattggcaaagcttttgccagtcaaatttatcaatgattcaagctcagttgatgatcaaagtcgtttcttcccagtaagagttcaaagtagaagctttagagaagcagcacatatagtagaatcacactatgggattggacttctgtcatgtaaatgctgctttcacatggtttctaagtagtctgctatttgctatagaactcttgtttccctacactttgttctttttcaatgatggaaataaacacaagctttcaagcagttccaacc

SEQ ID NO: 19224 - DNA, 587 bp, Gossypium hirsutum
  Clone ID: GOSHI-09MAY01-C5188_2
cggcccccccccccgcgcgcgcggcttgaattctactagttttcttctcttccaagcctagccatggttctcgaggcgactatgatatgcattgataactcagaatggatgcgaaacggcgattattcaccctctcgatttcaagcacaagctgacgccgttagtcttatttgtggagctaaaacccagtctaatccggagaatacggttgggattttgactatggcgggcaaaggtgtacgtgtattgactactcctactagtgatctcggcaaaatcttggcttgcatgcacggtcttgaaatggggggtgagatgaacctagcagctggaattgagattgctcagctggcccttaagcatcgccaaaacaaacttcaacatcaaaggattatagtttttgccggaagtcccattaagtatgaaaagaaggtcctggagatgataggaaagaaactgaaaaagaacagtgtagctcttgatattgttgactttggtgaggatgaagatggaaagccagacaagttggaggcttttcttgcatctgttaataataatgacagtagtcatatagttcatgttcctcc

SEQ ID NO: 19225 - DNA, 1480 bp, Gossypium hirsutum
  Clone ID: GOSHI-09MAY01-C5188_1
attttctactgcttttcttctcttccaagcctactttctcttctgtgtctttcgtcgcttttgcagccatggttctcgaggctactatgatatgcattgataactcagagtggatgcgaaacggcgattattctccgtctcgatttcaagcccaagctgatgctgttagtcttatctgtggagctaaaacccagtctaatccggagaatacggtggggattttgactatggcgggcaaaggagtacgtgtattggctactcctactagcgatcttggaaaaatcttgtcttgcatgcacggtcttgaaatggggggtgagatgaacctagcagctggaattcagattgctcagttggctctaaagcatcgccaaaacaaaaatcagcagcaaaggattatagtttttgctggaagtcctattaagcatgaaaaaaaggcattggagatgattgggaagaagctgaaaaagaatagcgtagctcttgatattgtcgattttggtgaggacgaagatggaaagccagaaaaattggaggctcttctcgcatctgttaataataatgatactagtcacatagttcatgttcctgctggtcaaaatgcactttcagatgtccttatcagcacgcctgtgttcaccgggggatggggaaggagggagcggctttgctgctgctgctgctgcagctgcagcgggtggggtttctgactttgattttggtgtggatcctaacatagatcctgagctggctcttgctctaagggtttccatggaagaggagaggtcaaggcaagaagctgctgccaagagagctgctgaggaagccactagacaagaaaaaggagaggaagcacaaccacagtccgattctcagaatgcaacaatgaatgctactgaaaaagcttctgacccaatggatgaggatgacgctttgctaaagcaggcccttgcattgtcgatgaatatccccggatctgattcttctgcaggtgatgctcaaatgtcagaggcaactaatgacgaccaggaattcgccttggcacttcagatgtctatgcaggacggttcaaaagattcgtcagctcaatcagatgtcagcaaggtgttgggggatcagtcttttatgtcatccattctttcatcgcttccgggagttgacccgaacgatccaaaagtaaaagatttgctagcatctttgcccagccaatctgagccgcaagaaaagaaagaagaagatgaacaacccaaagatgacaagtgaagatctacattccttctaacaatcgatgtgtgagccgatttctagccgagttaagttcttttttctccagagacttgagaaatgtgtcaaaactgtgctgaattgtgggctcggtagaaacattttcgtttttcgatttgaatgtacgagattaggacgatatcattccgtgtctgaacttttatttgcataggaaaagcaggacctgtcggtgttt

SEQ ID NO: 19226 - DNA, 1217 bp, Gossypium hirsutum
  Clone ID: GOSHI-09MAY01-C5158_1
attgaatcaacattttccttggatgttaattcgaaattggattgggaatcaattggcaaaattcttgcacgaggtcatagtcgtatccccgtttatgctgggaatccaaaaaatatcatcgggttgttactggtgaaaagtcttctcacggtacgaccagagaccgagactccagtcagtgctgtttccatcaggagaatgcctagggtcccagcacatatgcctttgtatgatatcctcaatgaatttcaaaagggcagcagtcatatggcagctgtagtgaaggttaaaggaaagaccgaagaccctcaattttttgttgatggacagaaatttgacaagcacaaagttaccaatggaaattctcaactaaccgcccctttgctgaccaaacatgactctgttttagtcgatgtcgagaaatcttcagccgtcaaggaaactatgaatactttgcaacgcttttcagaggataccgaagacggggaagtcattggtatcattaccctcgaagatgtttttgaagaacttctccaagaggaaattgttgatgagaccgatgtatatgttgacgtacataaaaggatacgcgtgcctgctgctgcttgcgctgcttcatctgttgctcggagctccatccgatcctagattgattggtcaaaagccttcaagtgtccaaagcaagcaagggcaaatgacaaggaaaccaatggatgacgaatcacaaatagggagatctttggctaacccaggggaacgtcttcccagcagtatcgaacgatcttaaccgcgcaaagcaaagaatcaaatttgtgcattttactctccttgtcatctattggaaattctcaaattaggttgggtatattgcagcttgtgcatgtaattcaaagtgagaaaactagggttgtttactgtaaaaataaaaatcagggcaaattttgttaatggtagttaaagttccactagcaaaccagctatgttaggcatgaatcttagatatggtaggtaacaatggtgctttcttaggataattttactgtaaaatgtcttgattaaaaaaattacgaacacagttttttggttagagcattttgcttagtgtcaaactcatccttttcatgtaaagagcatcttgatgatgtaaaaatgctactaatgtatcatctgctatggtggcatatgaatgtatcgtgcactgcatgatttttgtgata

SEQ ID NO: 19227 - DNA, 483 bp, Gossypium hirsutum
  Clone ID: LIB3584-034-P1-K1-C1
gtcttctcacggtacgaccagagaccgagactccagtcagtgctgtttccatcaggagaatgcctagggtccgagcacatatgcctttgtatgatatcctcaatgaatttcaaaagggcagcagtcatatggcagctgtagtgaaggttaaaggaaagaccgaagaccctcaattttttgttgatggacagaaatttgacaagcacaaagttaccaatggaaattctcaactaaccacccctttgctgaccaaatatgacactaaaccagatagtgttgttgttgatgttgagaaaccttcaaggcctaccactttcaaggcaactcctgtagctaatggtgtcacagccaatagcttgcaacagttttcagaggatactgaagacggggaagtcattggtatcattacactcgaagatgtttttgaagaacttctccaagaagaaattgttgatgagaccgatgtatatattgacgtacata

SEQ ID NO: 19228 - DNA, 293 bp, Gossypium hirsutum
  unsure (1)..(293): unsure at all n locations
  Clone ID: LIB3146-052-Q1-K1-D1
cccactcttccggttctttcttaaccacgcaaagcaaaggagcaattttgtgcattttactctcattgncatctattgtaaattctcaaattacgttgggtatattgcagcttgtgcatgttgttcaaagtgagaaaactagggttgtttactgtaaaaataaaaatcatggcaaattttgttaatggtcgttaaaaattccacttgtgaaaataaacaataaaaaataaaaaattgttgtttaaaaaaaaacgaaaggtttcaaaaaaaaaatatcaatctttttccaaaaa

SEQ ID NO: 19229 - DNA, 548 bp, Gossypium hirsutum
  Clone ID: GOSHI-09MAY01-C5178_4
actctaaacaagcaattaatatgttttgttattattattactcaactccccaggtcacttctatactcattatctggatccctgctccgtttgcggcaaatcgcttcataattccgatattttcatgtacagagggaatacaccgttttgcagcaaagagtgtagacaagaacagatggagatcgatgaagccagagaaaagaaattgaaatctggccgatctcttagaaaatcggattcaaagagctctacaccaaacaaaactgttcggacgggcattgttacggtgtcgtaattacatctttgcttcttctttttttttctttttatatatgataattgtatcatcatcaattttgaaaaaaaaaacgaaaaaacaagatcgggacaagaagggaaaaagaaaaaggaaaccttcaatggaattttgtattttcgttttattattgggtatgatgtttgagaggagtggatgtttataaggggggggggaatcggatgtgcagttttcattaatggaaaatgtgcaaagatttataatttctggt

SEQ ID NO: 19230 - DNA, 574 bp, Gossypium hirsutum
  Clone ID: GOSHI-09MAY01-C5178_3
cccacgcgtccgcggaccccacgcgtccgcatagccactcttccttgtttttcctttgtgttgatagcagcgagtcatgtcgggttattattattacgatggtcaggcggatcagtacgaggcgcactatctcgatgcctgctctctttgtcgcaaatcgcttcgcgattccgatattttcatgtacagagggaatacgccgttttgcagcaaagagtgtagacaagaacagatggagatggatgaagcaagagaaaagaactggaaatcgggtagatctcttagaaaatcagatgcccagaactccactcctaacaaagctgtacggaccggcacggttgctgtggcctaatcccatcatcttgctttttttagcagactgatgtatcaattttgagttagacaaaaagaagaagaaaacttcgacggagttttgtattttcaggcctactttttcttttctggggttgatggttgaggcctggatgtttataaaggagatgggttatcggattgtgcagtttaatggaaaaaaaaaaggtgttaaaagatttatcatttgtgttaaaaaaaa

SEQ ID NO: 19231 - DNA, 549 bp, Gossypium hirsutum
  Clone ID: GOSHI-09MAY01-C5178_2
cccagcgtgcgcaaccctctcttccaacctttttcagttccggccactctaaacaagcgactaatgtgtcgggttattattattactcagggtgcccagatcactacgaggctcattatctggatgcctgctccgtttgcggcaaatcgcttcataattccgatattttcatgtacagagggaatacaccgttttgcagcaaagagtgtagacaagaacagatggagatcgatgaagccagagaaaagaaattgaaatctggccgatctcttagaaaatcggattcaaagagctctacacccaacaaaactgttcggacgggcattgttacggtgtcgtaattacatcttctttttttctttaaatgataattgtatcatcatcaattttgaaaaaaaaaaacgaaaagacatgatcgggaccagaatgggaaaaaaataagaaaccttcaatggaattttgtattttcgttttattattgggtatgatgtttgagaggagtggatgtttataaggggagggtatcggatgtgcagttttcattaatgg

SEQ ID NO: 19232 - DNA, 850 bp, Gossypium hirsutum
  Clone ID: GOSHI-09MAY01-C5178_1
cggccgcgtcgacgaaattttaacacctgccaccaagtggtgggatttagcgtttacataatagagcgggtagtacttgatttccccaagtcaaagctttcccattttaaaagtctcgaagctccgtgtactttaaatatagcaaccaagcttcaattgctccccccccccccgcaggcatagccactcttccttgtttttccttcgcgttgatagcggcgaggcatgtcgggttattattattacgctggtcaagcggatcggtacgaggcgcactatctcgatgcctgctctctttgtcgcaaaccgcttcgcgattccgatattttcatgtacagagggaatacgccgttttgcagcaaagagtgtagacaagaacagatggagatggatgaagcaagagaaaagaactggaaatcgggtagatctcttagaaaatcagatgcccagaactccactcctaacaaagctgtacggaccggcacggttgctgtggcctaatcccatcatcttgctttttgagtgaaaaaaaaagatgttcaaaagatttatcatgtgttaatgctgaagttttgatggagtgaagtttccaaggcacttctttcggtacccgtgcctgttttctaagatcaaaaagggggaaagggcaaagtacttgaacgattgattagagtgtggaactaatacataacaatatatgctaaacctaatcaggatgaatgtgaacatgtatgaaggatatattcagtgttgaggtgtgcctgctttattttatttaactcattagtcttgtattcccagagtagggtagggaccaagggtaagagatgaaagcacttaatatgtggga

SEQ ID NO: 19233 - DNA, 537 bp, Gossypium hirsutum
  Clone ID: LIB3585-054-P1-K1-F7
ctcttccaccctttttcagctaccagcgccgccctcagctcaggccctactttacgaaattcaacaagtagcgggcggttaatatgtcgggatattattattactcagggtgcccagatcagtacggggctcactatctggatgcctgctccgtttgcggcgaatcgcttcataattccgatattttcatgtacagagggaatacaccgttttgcagtacagagtgtagacaagaacagatggagatggatgaagccagagaaaagaaattgaaatttggtagatcacataggaaatcggattccaagacctctacacccaacaaaactgttcggacgggaactattacggtgtcgtagtacatatttgcttatctttttctgagtagggtgataatggtatcataaattttgcaaaaagaaaacgagaaataagataaggaaaaagaaaaccttgaatggaattttgtaatatcgttttttattggggttgagggttgataagggaggaagggggaggtttataattgttaatttt

SEQ ID NO: 19234 - DNA, 415 bp, Gossypium hirsutum
  Clone ID: GOSHI-09MAY01-C5128_1
ataaattttacaccttccataaataaaatttaataaatttcacatatatatcacaagacaacgtcttctaagaagcagccatcttcaacagaagctgaatatagaactgtggcttgtactgtttctgaattgatatggattgaataattgttagttgagcttggaattgagttcagtactttggtgtgaaaacacaagtgctgttgccatgtccagtaatcctgttttgcatggtcgatccgaacatgtggagcttaactaacattttgtaagagatcatgtagccgatgggaagcttgagatcaactatgtaccagcagaggagccaattgcagtctgtttaagtgtgtttgtaactaaacagcagttgtaactaagtttgttaacctcagccttctatgcattatgctcattg

SEQ ID NO: 19235 - DNA, 661 bp, Gossypium hirsutum
  Clone ID: GOSHI-09MAY01-C5088_3
gtgacaggttatgcattgcactatgtgctgaactaaaggagatgcaagacaggatggcaaaccgtcgagtttacgagtcatctggtagggcttatgtgttgtcgggtttgagctcgcattcctggcaaagagcaactgcacgtggtgattccaccaatagtacaagccttgttcaagcatatcagacccctacaatgacagacatggtgacgcgttctcagaccatgttctttggcaaccctccacaacgaaagcttcgacaaactcagtcatttccagcccatccagaggcaaggtaaatcatcagcaaaatgttcaaaaaccatccctcgaccctacattcaatatctttttgcttttgtgaacttttttgtttttcatttttatggcatggggtagtaaggtataaaacgggagtaagagatagtggtgggtatatgttgttgttctgagatgtaaattaataaaaactgcaggtaattgaaatgtctgatcaaagaggagataaaatgcaggtgacagaaaggagttaggtgtttacatatgttgataatgggggcattgttaaagaaggtataggcatgtaattgtggaaaacttggcatgaattcttcacttaaatatatgataatggaatggtataatcctgcttttgaagcca

SEQ ID NO: 19236 - DNA, 890 bp, Gossypium hirsutum
  Clone ID: GOSHI-09MAY01-C5088_2
cccacgcgtccgatatcctgaagtttctgccattccaagagcaacctgtcacaataattttgccatattaatccatctgaaggctccccatccaagtgggggaagaaatgaaactatgttttcccctacaactcaaaattctcgggcaccagttgaccttgtcacagttcttgatgttagtggaagcatggctggtaccaagattgcgttactaaagcgagctatggggtttgttatacagcatcttgggccatctgaccggctctctgttattgcattctcctccacagcccgtcgcctctttcctcttcgccggatgactgaaacaggccaacaggaagcattgcaggctgtaaattctcttacttcaaatggtgggactaatattgctgaagggcttaggaaagctgccaaggtaataggagaccgaaagtggaagaacccagttggaagcattatttcgttatcagatgggcaggatacctataccgtcacaagtcctagcggagctcattcccgaacagattacagatcacttctccctgcaggtccctgtatccctgtgcatgcctttgggtttggtgctgatcacgatgcttcttcaatgcattcgatttctgatatatctgggggtacattttcttttattgaagctgaaggtgtgatccaagatgcttttgcacgatgcattggagggcttctaagtgtggtagtgcaggaggcgtgtcttaaattccagtgcactcacccaaatttggtaattaattcgataaaggcagggagttatcgaactagcatggcagctgatgccaaaacaggttctattgatgcaggagacttgtatgctgaagaagaaagagattttttggtgacggtcaatgttccaattg

SEQ ID NO: 19237 - DNA, 1795 bp, Gossypium hirsutum
  Clone ID: GOSHI-09MAY01-C5088_1
acagcaccttggaccctccgaccgtctgtctgtaatagcattctcttccacagcccgtcgcctctttcctcttcgtcggatgactgagactggacggcaggaagcgttgcaagctgttaactctcttacttcaaatggtgggacaaatattgctgaagggcttaggaaaggtgcgaagttgatagtggatcggaaatggaagaacccggttggaagcatcatactgttatcggatgggcaggatacttatactgtctcaagtcctagcggatctcattcccggactgattataaatcacttattcctccctcaattcagcgcaatggtgggacgggtctccgtgtccctgtgcacaccttcgggtttggtgcagatcatgatgctgcttcaatgcattcgatttctgaaatatctgggggtaccttttctttcatagaagctgagggtgtcatccaagatgcttttgctcaatgcattggggggcttttaagtgtggtagtgcaggaggcatgcgttaaactggagtgtgctcacccaaacttgctaatcaattcgataaaggctgggagttatcgaaccagtgtgatggctgatgctaaagcaggttctattgatgtaggagacttgtatgctgaagaagaaagagactttttggtgacggtcaatgttccagttgatgaatcctgtgatgagatgtcattgctgaaggttagatgtatttacagagaccccatatcaaaagaaatggtgtccttggaagaagacaatgaagtaaagatccagaggccaacagtaataggacaaccaatagtgtcaatggaggtagacaggcagcgaaacaggctccgtgctgctgaggctatggctgaggctagagccgctgctgagcatggtgatctaactgctgctgtctctctgctagagagttgccgcagggctttatcggaaaccatttctgcacgggctggtgacaggctatgcgttgcactgtgtgctgagctaaaggagatgcaagaaaggatggcaaaccgtcgtgtgtatgagtcatctggaagggcttatgttttgtcaggtttgagctcacattcctggcaaagagcgactgcacgtggtgattccaccgatagtacaagccttgttcaagcttaccagacccctaccatgacagacatggtgactcgttctcagaccatgttctttgggaacccaccgcagcgaaagcttcgacaagctcagtcattcccagcccgtccacacccacggtaaacgtaagcttctttgacaagctcagctcagtccattcccatcatgtccacagccaaggtaaatcattggcgaagtcttggaaaattatcctcaacctatcatttcctatatccaataacctttttgtgttgtggaaaatttgcattttaatttttgtggcttggggaaagcagggtgtaaactggagtaatagaaagaaacgaggctcggtgtctttttcaactggtgggtatattttcttgttctgatatgtgaagtaataaaaacttgtagaccattgaaatgactggttcgggattgggagattaatggaggtgagaaaaagggagaatctgggagtttagttgtttacctattttgataatggagcattgtacatagggagcaatggtttcctttgtcctcaaaacaaggtatagccatgtaattgtgggatactttggggtgaattcttcactaaatatatatgatatggtggtggtatatctcgttttttaaaaaaaaaaaaaaaaaaactcgctcgtgccg

SEQ ID NO: 19238 - DNA, 1028 bp, Gossypium hirsutum
  Clone ID: GOSHI-09MAY01-C5048_1
ttcacgcgtccgctccatttcccgtccgcttgatttccatcagacggtgataaccatgccgatccgaaacatagccgtgggccgacccgaagaggcgactcaaccggacgcactcaaagcagctttggctgagttcatctccacactcatcttcgttttcgccgggtcaggctccggcatggcctttaacaagttgaccgacaacggagccaccactccggccggtcttgttgccgcttctatagctcacggcttaggacttttcgtcgctgtatccgtcggcgctaacatctccggcggtcacgtcaatcccgccgtcactttcggcgctttcgtcggcgggaacatcagtcttttacgcggcatcctctattggatcgctcaactacttggctcaaccgtcgcttgcctcttgctcaagttcgctactagtgacatgaccgtaccggctttcggactttcatcgggagtaggtgtgtggaacgccgtcgtttttgagatcgtgatgactttcggattggtctacacggtttacgccacggccatcgatcctaaaaagggagacctaggagtgatcgcaccgttggcgatcggttttattgtgggagccaatatcttggccggtggtgcctttgatggagcttcgatgaacccggccgtttcgttcgggccggctttggtcagctggtcctgggacaaccactggatctattggctcggaccgcttatcggtggcggtctggctggtctcatttacgagttcgccttcattaaccaaagccatgaacaactccctcccaccgattattgaaacctgtttaatttatcatgaaaacgggtttttccttttcttttcctggtgtatgtattttggtgagctcttcttttgtgtttaacttgtgaccgttgatcatgcttactttatcatgatcatcatccaatggcggatgttgtttgcgaatttgtgttaatgctcctctgtctctataattgtatttttaaagtttatatttaatatattgtcaaca

SEQ ID NO: 19239 - DNA, 557 bp, Gossypium hirsutum
  Clone ID: GOSHI-09MAY01-C5028_4
cggacgcgtgggtttgaaaaactctgttttcctttttttccttttcatcaaaagctcgggtgtctttggcttcttttttgcgccatgttgctgaaagctgttccaactttttcttcgttaaatcctcaactggaaaatcagggtgccctgttttcctctttttcttcttcgattaatcatcagctatcttctctaagaaatggacctgggtctcttgtagtttgtgcagccaaaggagccaaccacaagccactaagtggtgttgttttccagccctttgtggaagtgaaaaaggaacttgatcttgtcccctccgtgcctcaactttctctggctcgccaaaagtttactgatgactgtgaagcttccatcaacgaacaaatcaatgtcggctacaatgtttcctatgtgtatcatgctatgtttgcttacttcgatagggacaacgttgcactcaagggtcttgccaagttcttcaaggaatcgagtttagaagagagagaacatgctgagaaatttatggaataccagaacaaacgaagtggaaaagtgaagct

SEQ ID NO: 19240 - DNA, 1195 bp, Gossypium hirsutum
  Clone ID: GOSHI-09MAY01-C5028_2
ccgatatgaataacgcggtcgccccacgcgttccctgtcgcgggtgtaagctcatctacagttcctgcggaatgtggatgttaataaaaatgaagatcttctttggaaaccactttctgcaagcaactcacaaactgcacgagtttgggttgcacatttaaaaattccatcttcagatcttctttctactgttgaagttagtgttggacattctaagggaatcatttcaacaagagggtttgaatatagccatccttcaatgttttcatttaaagtacgtgtacagcctatggaaagagatttctctcaagtttctgttgcagaaagtatttcattgagagaagaaagttttaagatctatggaacacaatcggaggaatcaattattaactcttttaatcaactaagtatcaagtatggtcatgaatcaactgcatctaactggcgctctgaggctttagctaaagagattgaatgcttccgtgaactgttatcgttgatggactgtaaaattggaaagctcacacttgctagattactgatggcttatgatgtaatgtcatatccatttgctaacaaactggtgcattcagaagaagttcttgagctgtatagtgatttgatgaaattggatccaacacattaccagttctacaaggatgaacatagcatggtcttgctacagaaggtgacttctagtaaagagtctttacttcaacattgctttcagtataaggactcagtttcatcagccatatgtggtcctatctgtctccggctgaacaacttatcgctatcacggatgggagcttttgagaaattattgtgggttcaaatgttagatctcagccacaatgaactacaatcaattgaaggattggaagctatgcagctcctctcttgtttgagtttgagaaacaataaactgagaagtttaactgctctggagcctctgagaaagctcacgttattaagagtactggatatttcatacaaccagattggcgatcattctattgacacaacaaggtacttgtgctcttctcctttgtctcattcagttggaggtgaatcgaacaaggatgaaaccgtgaccagggatggtgctcttattgacaattgggagggcttttatttttttaaagaccttaacttggatcaattagaagtaggtggggaacacaattgctgatta

SEQ ID NO: 19241 - DNA, 1202 bp, Gossypium hirsutum
  Clone ID: GOSHI-09MAY01-C5028_1
cccacgctcaatctttatctccttcaattgtttgtttttgggttagaaagctctgtttttttattacccttttcatcaaaaagcttcaatctttcaaccatgttgcttaaagcttcccctgctttttctttgttgaagaatccccaagttgaaactcgggttcctctgttttcaagaaacggttctggggttgggtctggggctgttgttgtttgtgctaccaaaggagccaataataagccattaacaggtgtgatttttgagccttttgaggaagttaagaaggaacttaatcttgtcccaactgtgcctcaaatgtccttggctcgtcaaaagtttgctgatgagtgtgaagctgccatcaacgaacaaatcaatgtggagtacaatgtttcatatgtctaccatgctatgtttgcctattttgatagggacaacgttgctctcaagggtcttgccaagttcttcaaggaatcaagcttagaagagagagagcatgctgagaaattgatggaataccagaacaaaagaggtggacaagtgaagctgcaatccataataatgcccctctctgagtttgatcatgcagagaaaggggatgctttatatgcaatggagcttgccttgtctctcgagaaactaacaaacgaaaagctcttgaacttgcacaacgtggctgagcgaaaccatgattcgcagttgaccgatttcatcgaaggcgagttcttagctgagcaggtcgaatccatcaagaaaatatcggaatacgtggctcagctgagaagagttggcaaaggacatggggtgtggcactttgatcaaatgcttctccacgagggagctgttgcatgaaaacttgaccagagaaaccgccgcttgcttctgataccagcgatccttcttttaagttcccgtgttagtagttgttgagagattaagttttgcaagttgtatggctagtttagaaaactttgtgttgatgatataagaagattgagagactcaaaagggataatttgtaagtcctcttgatcatagctatagattttcatggtttttgacttttcgtatcgacatttttcgactgttttttcttcggttaaatgctctgcatagttagcagataaaataatacaagtagggatcattttgcagtttcgattgtgtttctatgaatgaaaaaaacgaagctaatatgggtt

SEQ ID NO: 19242 - DNA, 682 bp, Gossypium hirsutum
  unsure (1)..(682): unsure at all n locations
  Clone ID: LIB3584-030-P1-K1-C2
cggaatnnnccgggtccgacctcacgcctgtcctgcccacgcctgtcctgcccactgtgtcgcgcttctcttttcaatctttaatcttcttnntcaattgntcttcgtttttggcgttaagaggagcgtcgttgtttttttaattagcccgttttcaatcaaaaaagctttctaatcttttcaactcanttgttgcttannaagcttctcctgcttttttctttttgttgaagaaatcctctcaagttgaaacttcgggttccttctgttttcaagaaaacggttctttggggttgggtcttggggctttgttgttgtttggtgctactcaaaggagctcaataataagctcattaaccaggtgtgatttttgagctcttttgaggaagttaagaaggaacttaatcttgtcccaactgtgcctcaaatgtccttggctcgtcaaaagtttgctgatgagtgtgaagctgccatcaacgaacaaatcaatgtggagtacaatgtttcatatgtctaccatgctatgtttgcctattttgatagggacaacgttgctctcaagggtcttgccaagttcttcaaggaatcaagcttagaagagagagagcatgctgagaaattgatggaataccagaacaaaagaggtggacaagtgaagctgcaatccataataatgcccctt

SEQ ID NO: 19243 - DNA, 503 bp, Gossypium hirsutum
  Clone ID: LIB3582-009-P1-K1-H12
gaaaaactctgttttccttttttttccttttcatcaaaagcttgggtttctttttcttcttttttgcgcgccatgttgctgaaagctgctccagctttttcttcgttaaatcctcaactggaaaatcagggtgccctgttttcccctttttcttcttcgattaatcatcagctatcttctccaagaaatggacctgggtctcttgtagtttgtgcagccaaaggagccaaccacaagccactaactggtgttgttttccagccctttgtggaagtgaaaaaggaactcgatcttgtcccctccgtgcctcaactttctctggctcgccaaaagttcactgatgactgactgtgaagcttccatcaacgaacaaatcaagtgggatcttttctttttagatttttaagaatgaattctgaatgatttcgtgattgtgtcgatatttactaatgtctggtgcatttgacagtgtcgaatacagtgtttcctatgtgtatcatgct

SEQ ID NO: 19244 - DNA, 467 bp, Gossypium hirsutum
  Clone ID: LIB3582-008-P1-K1-D2
gatttcatcgaaggcgagttcttagctgagcaggtgcgaatccatcaagaaaatatcggagtacgtggctcagctgagaagagttggcaaaggacatggggtgtggcactttgatcaaatgcttctccacgagggagctgtggcatgaaaacttgaccagagaaaccgccggttgcttgtgataccagcgatccttcttttaagttcccgtgttagtagtagttgagagattaagttatgcaagttgtttggctagaataaaaaactttgtgctgatgatataagacgattgctagactcataggggctatctgaactgctctcgatcatagctatagatattgatgggctttgacttgctgtattactgatggcttatgatgtaatgtcatatccatttgctaacaaactggtgcattcagaagaagttcttgagctgtatagtgatttgatgaaattggatccaa

SEQ ID NO: 19245 - DNA, 852 bp, Gossypium hirsutum
  Clone ID: GOSHI-09MAY01-C5348_1
ctttcttttactccccccaattttgcttcgctgccgtctttcaactctatatctccggtctccgtgtcgggaatgtcaatttcatcagccccaagcttcaacctctcaactttctccaatggcggagctaactgtacaactacgaataaggtgatagggactagagctttcgcttgtcttaaatatattaatagcatcgaatctcggttgaaattaacttcaccggtatcagttcatacgctcgttttaactttcacgaaccgcgacctttcggttcgctgcgttaggccggattctaccgggaacactattaggggttcactggaaggggaaaaaggtaattttgatgatgaatctagggttgcagagattggaagcggtgatcgacagatagatgacttcggcggcggcggagataatggaggcggtggttcattcggtggcggcgatggcggtgaaggtgacagtgaagatgaaagagagtttgggccaatattgaagtttgaggatgtgatgaaggaagtggaagctagaggagtggagctgcctccagacatgatggaagctgcggaaaggaatggaatccggaaaatggtcctttttcgttacttggatttgcaggaatcagtttggccacttggctttttaataaaatactgctctatgctccggaaccgaatgctagctgatgcttcattttttttaaaagttggaaccgagatagtaatggattttggctgcgcaacatatgcggaaatgaagaaaaggggaaaggatttttgggcagagtttgagttgtactttgccgatcttttggtcggtatagtggttgacattgctttggttagtatg

SEQ ID NO: 19246 - DNA, 799 bp, Gossypium hirsutum
  Clone ID: GOSHI-09MAY01-C5298_3
gacattttatggatgttggggtgcactgctagtacgcagcttcttaggaagcacttagtatgaaaaattagtgggaaaataatggatggaagaaccctacatgaaaaaattccgatttatgttgtatatttggccgatagaaacctatctagttctatgtggatcgattcttcttttctggcatcggtcgatgtaatggactattcattacttgttggggtggatgaggagcgcaaagagctggttttgggaattatcgatttcatgagacaatatacttgggacaaccacttggagacatggggtccggcatcaggggatactaggtggccccgcgaatgcctccccaacaattttttctcctaaacagtacaagtaaaggttccaaaaggcgatgtcttcttttttctaaccatacccgatcaatggagttcatgacctgtttcatcattgattcattggttcattaataacggcataagaaactgtaattgcctgctaaatttgaagcgagctcgctctccctctcccttagggtattcttcaattcgacccccggtttttctgtcaacaaattattttggttgtggttagtaaataagcctacaactaaaaaatgtagactatggggagagagggggggacattgttttctttttgaggactccttttaatgacctctgaagaaagggaagagtttaggcgccgtgttgtgtatactgtagatgagcccgaaaaatgtgacccttgagtttttcttctcaagattatccgcccttcacgtggattcaaacaaaca

SEQ ID NO: 19247 - DNA, 1330 bp, Gossypium hirsutum
  Clone ID: GOSHI-09MAY01-C5298_2
ccgtccggttcaggaaagccctacttgccttgcgaaattcttggcatttatcaggtctctgtaaacacctgaaggtggcaaagaacaaaatggatcttacagtgatggagaacctatttttcaggagaagtatctcaacagtttatgatcttaagggttccataagatcacgatacaatccggatacatcagggacaaacaaagtactgttagatatgaatctgttggaaacgctgcgaacagagcctatttttctcggaagcaaggcaaagagaaacctcgagagagctatttggaatgatacatcttttctggcatcggtcgatgtcatggactattcattactcgttggggtggatgaggagcgcaaagagctggttttgggaattatcgatttcatgagacaatatacttgggacaagcgcttggggacatcggttaaggcatcagggatactaggtggcccaaagaatgcatccccaacaataatttctccgaaacagtacaagaaaagattccgaaaggcgatgactacatattttctaaccatacccgatcaatggagttcatgacctgtttcatcattgattcattggttgattaataacggcataagaaactgtaattgcctgctaaatttgaagcgagctcgctctccctctccctctcccttcgggtattcttctattcgatccttgtgtttttctgtcaacaaattcttttggttgtggttagtaaataggcccacaactaaaaaatgtaccctatggggagagaggggggggggacattgttttctttttgaggaccccttttaatgacctctgaagaaagggaagaatttagggccctcgggggatattttgttgggcatgggctaaaggactttgttttttattttattttttccctccttaacattaattaattaggagttatggactctgtgggaaaacagcatgcgaacaaaacttttgtaccgtaagttgtaaatttgtaagcagtggttgagatggaaaggctatttaattttccgtttaaaaaaaaaaaaaaaaaaaaaaaaaaaaaaaaaaaaaaaaaaaaaaaaaaaaaaaaaaaaaaaaaaaaaaaaaaaaaaaaaaaaaaaaaaaaaaaaaaaaaaaaaaaaaaaaaaaaaaaaaaaaaaaaaaaaaaaaaaaaaaaaaaaaaaaaaaaaaaaaaaaaaaaaaaaaaaaaaaagaaaaaattgaattaaaaacaacaaatgaagtaaataccaagcacggatactattgattattagccataagggtgagggggtgttcccccttttttttttttttttccaaaa

SEQ ID NO: 19248 - DNA, 692 bp, Gossypium hirsutum
  Clone ID: AI055742.1
gatggtgttagttcaggaagccctacttgccttgcgaaaattcttggcatttatcaggtctctgtaaaacacctgaaaggtggcaaagaaacaaaaatggatcttacagtgatggagaacctatttttcaggagaagtatctcaacagtttatgatcttaagggttccataagatcacgatacaatccggatacatcagggacaaacaaagtactgttagatatgaatctgttggaaacgctgcgaacagagcctatttttctcggaagcaacgcaaagagaaacctcgagagagctatttggaaagataccttcttttctggcatccggccaattccatggcctttttctttctctctgggggtgattatgagctccctaaaacctccttttcgaatttactcaatcctcttaaaacattttattgtggtaaagcctttagaacatctgggtaagcgcttcaggaatcctatgggcccaaaaaatgcctcccaaacattttttttccaacacgtcatcaattatcccaaaggcgctatccacatcttctataccatcccgcacatgggcctacaaacctgtcataacttatccatgctgattatacccctcttaaatttaatccccccaacttgaacgattattttcctaccttcctctgattcttttaacacttgtgctttgacaaaact

SEQ ID NO: 19249 - DNA, 643 bp, Gossypium hirsutum
  Clone ID: GOSHI-09MAY01-C5268_1
tgaaattcaaaaaatacccccagattttgattttggggattattatcaacaaagttcaattcaaaatcaaaacagcttctttcagatcctcacttcactccccccccccaaatcaatcagataatccttagaatgcagaacagtgaaggcagctgtttgtcttacatggcggcgtggttgggaagcagcgtggcccaagctttcttcgcgtctctcgagcgttgctcttgcattaacctttccacctccgatgatgccgatgattccgaggctcatgatctccctctcatgttcactaattgttcctccatctcttcatcatcagtcacctctatccctaacaacaacaacaacactccttcaaacgacgtcgttaatctccctgtttaggtcatggatcgcgtattgtttctagggtttcgaattttttgtctttagttctttttagtactttgaattttgatgtaagcttttttctggttgtttgactcttttttttcttagtttggatgtctatgaaattctcaccgctaaataattttatcggaggaatgtgaatctccggtatgttgttcgctaagattggtaaatcttaactgaaattcattcgaaagctttgcaaaaccaaaaaaaaccctttaat

SEQ ID NO: 19250 - DNA, 454 bp, Gossypium hirsutum
  Clone ID: uC-gsronu33B106f11b2
cttcttcctcttttcttcttccttcttcttcttcaaagtctagcctccaccaccgcttgcgccgccgctacctcctccgacgccggtactctttcttttcttctcctctttctcttttcttctcttttcttcttttttccttcatctcttcatcatcagtcacctctatccctaacaacaacaacaacactccttcaaacgacgtcgttaatctccctgtttaggtcatggatcgcgtattgtttctagggtttcgaattttttgtctttagttctttttagtactttgaattttgatgtaagcttttttctggttgtttgactcttttttttcttagtttggatgtctatgaaattctcaccgctaaataattttatcggaggaatgtgaatctccggtatgttgttcgctaagattggtaaatcttaactgaaattcattcgaaagctctgc

SEQ ID NO: 19251 - DNA, 1097 bp, Gossypium hirsutum
  Clone ID: GOSHI-09MAY01-C6918_1
atttctaccaccaaaaacaaacaaataattccacaatctcactccacccatccgcccacgcctccgctgtcatcttctttttccttcataccaaacacttcacgagaaaaacagagaaagagtactttcttttttcttcttcttttggttctgtttcactgccatggcgaaaacgcaaacaccccatatagcgattcttcctagtcctgggatgggtcatcttattccactcgttgagttcgctaagcgatttgtacagcaacacaatttcactgtcacttttgttatccccaccgctgattctccttcgaaagctcaaatatcaaccctggattcccttcccagctctatagattatgttttccttcctcctgttgacttgagtgacctccctcaagacgcaaagattgaaaccgtgatttctttaacggtggctcgctctctgtcgttccttcgggatgctttgaagtcgctggctgcaaagacaaaactcgtcggtttggtggttgatctttttgggacagacgcatttgatgtccccggagaattcaacctctcgccgtacatatttttcccctccacggccatggccttgtctctgtttcattacctgccgaagcttgaccaaatggtttcgtgcgagtacagggacttgcctgaagtgaggattccaggctgcatacctattcgcggcaaagaaatgctggacccggctcaagacaggaaaaacgacgcttacaaatggctgcttcatcatgcaaagaggtatagattggctgaaggcataatggtgaacagtttcgtggagttggaagcaggagcaacgaaggcgttgcaagagaaagaacccgataagcccccagtttacccggttggtccacttgttaacgttgatgcgagtaacaaaggcaaagctgatgggacggattgcctgaagtggctagataagcagccacatggctcggttttgtatgtgtcttttgggagcggtgggaccctgtcttccaaccagctaaacgagttggcggtggggttggagatgagtgagcaccgattcttgtgggttgtaagaagcccaaacgataaggttgctaacg

SEQ ID NO: 19252 - DNA, 1115 bp, Gossypium hirsutum
  Clone ID: GOSHI-09MAY01-C6928_1
cagaggctaaaaactacccccgtgaaccagctgcacatgtggctataaggactgttcgccgattgcttgaaaagcagaaagataaaataactgctgttgtcttttgtactagcacatcggctggtactgagatctataagagattacttccactttaccttcctcgagataagcatgaggaggcggtggccatatctaagcttcctgctgatgttggggatgaaaatggtgagactatcaatcatgagcgtaaaatcagaataaagccattgcccaaaaaggtcatcccaaagccttcccaatctccagctgaagtccctgctagtgatgtaggtttggtacaaagaaactcaagttacttagatacatatttggatcctgctttcatgtccctgatgaaagatccagaccagagacgccaggaacaatgggaaaaaactgctcaagcccaaggtggttggaattgtgctaagatgcttggttttggtgacataggtgggcctccattatctgctgcagaagaatactcacttcactccagatgtcttgctaaggcaaattctcttaatctttctgaaattgcagagatgaaaattctttatcgcgggggagtggacagtgaaggtcgccctgttatggttgttgttggagcacatttcctgctgcggtgtcttgagcttgagcgcttcgttctctatgttgtaaaggaatttgaacccttgatacagaagccttatactattgtatacttccactctgcagcttctttacaagtccaaccggacttgggatggatgagaagattacagcaaatactcggtcggaagcaccaacgtaacctgcatgcaatatatgttctccatcctacctttcacttgaaggccgcaatttttgctctgcaagtgttcgcggacaaggtggtgtggaagaaagtggtatatgtcgacaggcttctgcagctattcagatacgttcctcgtgagcaattgaccatccccgattttgtgtttcagcacgatttaaaagtgaatggtggaaagggtcttatagtggatccccggacgaagtatgtatatcaacgaccgtagacacgaaatatacggtatcaccagttc

SEQ ID NO: 19253 - DNA, 763 bp, Gossypium hirsutum
  Clone ID: GOSHI-09MAY01-C6888_1
cacgcgtccgctttgttctccttaaggctggagcagggaataagttcatgtggtgtcacactgtcccttgatgtggcatattttagcatttaagcaaatttgtctctactctatacctctcttatccatctgcagcctcagcctcagcctcccaaatgacaccaaagtgaatcaaccctcaatatcaagcccctcaaatcttctcaatttgaagcacatcatagaactgctcgcccttggttccactcttctgttactgttgaagggtcatgttgaataagctagccttgccagaatccagcactttcccaggaaagccaatgccacccacagctgaatgctggtttgatgatgcatgcatccttgacatggactactttgtgaagaccatctcaggcataaaggccaagggtgttcgtcccgacttagtaggctcaatcattgcacattatgcatcaaaatggctacctgatctatccggcaatgacaccgaaaagggtcctatgagtctccaagagtcatcgccggagagtgtcacagtttcatggatgaaaaagaggttctttgttgaaaccttggtgggaatcttgccacctgagagagattccatcccctgcaacttcctcctacgccttctccggacggccaacatggttggggtggagccttcctacagagcagagctggagaaaagaatttcgtggcagcttgaccaagcatcactgaaagagctcatgattccatcgtttagtcacacttgtgg

SEQ ID NO: 19254 - DNA, 1199 bp, Gossypium hirsutum
  Clone ID: GOSHI-09MAY01-C106593_1
gtccttctctatcataatcttttggcctttctttgtcaaaataaagaaaacccatttctttcatacccttaaaaatctggaaattcgtaagaaatctcctttctctcttaactacttcttcttgtgacatcacaactgcttttgctttgttctctttttttttccctttattttctctttgggaggggggctgtagtttgtagctgaatcttgggcttggtcctttgagctgtgatcctttgcttagatttgacaaatatatatatattttttttaattttggaagagtaagactcggaagaggaaatggagatttggggatgggtttttattggaattctttttcttgccgattttgttgtcaaaattgagcctttcaagctgggtcgtagtcaacctactgagagaatttcaggcagtgctggtgatgtcttggaagataatccagttggaaggttgaaagtctttgtttatgaacttcctagcaaatacaacaagaagatattgcagaaggacccaagatgcctcaaccacatgtttgctgctgagatctacatgcataggtttcttttatcaagtcctgtccgaaccctcaaccctgaggaggctgattggttttacactcctgtatacactacatgtgaccttacaccaaatggccttcctttgccatttaagtcgccacgaatgatgagaagtgcaattcagcttatttcttcgaattggccttattggaaccggacagaaggagctgatcacttctttctagtgccacatgactttggagcatgcttccattatcaagaggagaaagctattgaaagggggattcttcccttactccaacgagccacattggtccaaacttttggacaacggaatcatgtttgcctgaaagagggctcaattacaattccaccatatgctcctccccagaaaatgcaaacacacctgattcctgacaaaactcctaggtccatttttgtttacttccgtggactgttttatgatgttggaaatgaccctgaaaggggttactatgcaaggggggctaaaacacatatgggagaacttcaaggacaacccactttttgacatttcaaccgagcacccaactacctactatgaagacatgcaacgagctgtatttgtttgtgttcacttggatgggcaccttggagccctaaattggttgaacc

SEQ ID NO: 19255 - DNA, 1229 bp, Gossypium hirsutum
  Clone ID: GOSHI-09MAY01-C6548_1
attttgtgaatttcagccactgccatttttgaactataagaagactattgcatggggtaattgaacaagacacatttccattgctattattagaattgaacacttaaagggagatcaagttcaaaaactgggatggcttttgtaacgtcggaggaattgctggccactttggtgccaattgctgtttattggatatactcaggtatgtatgtgatgtttgagtcaaggtttgagaagtacaagttgcactccaagaaagaagaggaggagaagaatttggtttccagaaaggaagtcttcaaagccgttctttgccatcaagtcatgtcaattgctattaacctcttcacgtatgcggtaacaagagaaaaagatggtgaggcatctccaaagaaatcactaaccttgcttcttctagccaagcaattggtgatagcaatggtggtgatagatacatggtcgttttttgtgcattggtacttgcatcagaacaagtttttatacaaacaccttcatgttccgcatcaccggctggttgttccctattcatttggaggacagtatatgcatccaattgaggggttcttggacaccatgggcggaacattagctgtactcctcttcggcatgtctcctcggactgccatgtttttctcctcctttaccatccttaaattagtggatgatcattgcgggatgaagcttcccggaaaccccttttacctcttttttaacaacaatgcggcataccatgatgtccaccatcagctttatggtaccaaatacaacttctctgtctactttgacatatgggacagaattctaggaacctatatgccttattcacttgagaagagacctgatggcggccttgaagtacgacgtgctgatcaagaacacaagaaggattgattgattaattacttaattaatcagtcaattatgataactagtgagcacggattgatgaatgttccattaggttttatatatgtatctaatgtgtatgtattatgtgtactactatgcttcactaggagtaaaggcaaatctggtgtgaaactaagtcaattatgatgactagtgagcatggatattgatgaatgttccattagtttttatatataatatctatatgtattctatatatttctctgcttcactgggaataaaggcaaatctggtattgaacaaaatattatgaataaaactagaagcttatattcttc

SEQ ID NO: 19256 - DNA, 808 bp, Gossypium hirsutum
  Clone ID: GOSHI-09MAY01-C6518_1
tgccggaaccgccgcggacaatccaggcccacgcgtccgcccacgcgtccggcctttgaattgaaaccctcaaaattccactaaaaaatggcctccacagcttccctctccaccgccgtagccaccacctctttcctccgcggccatccggcgccgaaaaccctaaactcccttcctttcaaccaatctcttttcgggctaaaaccccaacgaaatggccgtctcaccatggcagcatacaaggtgacactgttaacacccgaaggaccccaagaattcgtgtgccccgacgacgtatacatcgttgaccaagctgaggaagaaggcattgatcttccgttctcgtgtagggctgggtcttgttcttcgtgtgccggagtgattaagcaaggctccgtcgatcaatccgacggtaatttccttgatgatgaccagattgctgcaggttttgtcctcacttgtgttgcttaccctcagagtgatgttgttattgagacccacaaggaggaacagcttaccgcttgattatatatgatactatataatataatcatcaactagaccaagatttaatcatctttttcctgtctgtttgatttatgtttgttcagtttggtcggagggatgatgttcatgtccctgcttgtgggagcctttaatgagttcatttgtaatggcatttcatgctttattttttaaggctttttcttcatttgtagtagtaataaatcaacattgttgctaaccctttttttatttttttttgttatttttttttttattttttttttttttatttttctaattt

SEQ ID NO: 19257 - DNA, 399 bp, Gossypium hirsutum
  Clone ID: LIB3165-023-P1-K1-C2
cgggggggcgcaggcgtccgtggaattgaaaccctaaaaattccactaaaattttgtcttcaaaggtttccttttcagggggggtggcaacaacttttttcttcgcgggcaccccgccccgaaaaccctaaggttcctttctttcaaccaatcttttttcgggcttaaaccccaacgaaatgggcggctcaacatggctggatacaaaggggcacttgtaacacccggaggaccccaagaattcggggggcccgacgacgtttacatcgttgaccaagctgaggaagaaggcattgatcttccgttctcgggtagggctgggtcttggtcttcgtgtgccggaatgattaagccagggctccgtcgatcaatcccgacgggtaatttccttgatgatga

SEQ ID NO: 19258 - DNA, 331 bp, Gossypium hirsutum
  unsure (1)..(331): unsure at all n locations
  Clone ID: LIB3165-023-P1-K1-C3
aaaccttaatcacccttccttttaaccaaatttcttttctncctaaaaccccaacaaaatgcccctcttaccattccttcatacaaaattacacttttaacaccctaaggaccccaaaaatttcttttccccaacatactttacatccttcaccaaacttataaataaagcattgatcttccgttctcgtgtagggcgggggggggctacttctgtcccggaatgattaaccaaggctccgtcgtacaatccgacggtaatttgccttgatgatgaccagattgttgcaggttttgtcctcacttgtgttgctaaccctcagagtgatgtt

SEQ ID NO: 19259 - DNA, 582 bp, Gossypium hirsutum
  Clone ID: GOSHI-09MAY01-C6508_1
tttccctccaaatagggaaataccatcgctttgcatttgcaaagcctttcactgactcaaaaataacaatgacgtcctcttcatcgtccaccgccggcggttacgacgtgccttgggtagaaaaatacaggccgagcaaagtctcggacatcgtcggcaacgaagatgccgtgtctcgactccaagtcattgctcgcgatggcaacatgcccaatctcatcttatccggtcctcctggaactggtaaaacaactagtattttggctcttgcacatgagcttttggggccagtctataaggaggctgttttggagcttaatgcatcagatgacaggggtatagatgtcgttcggaacaagattaagatgtttgctcaaaagaaagtaactttacctcctggacggcacaagataattattttggatgaagctgacagcatgacatctggtgcacaacaaggccttgaggaggacgatggaaatatactcaaactctactcgttttgctcttgcttgcaatacatcatcaaaaatcattgaacctattcagagtagatgtgcccttgttcgattttcaaggtta

SEQ ID NO: 19260 - DNA, 372 bp, Gossypium hirsutum
  Clone ID: LIB3165-005-P1-K1-A4
tccgcccacccttccggggaaataccatcgttttgcatttgcaaagcctttcactgactcaaaaataacaagccttgaggaggacgatggaaatatactcaaactctactcgttttgctcttgcttgcaatacatcatcaaaaatcattgaacctattcagagtagatgtgcccttgttcgattttcaaggttatctgatcaggagattcttggccgtctcatggtggtagtagatgcagagcaggtaccgtatgttccggaaggtcttgaagccatcattttcacagctgatggtgatatgagacaggcgttgaaccaacttgcaggctacatacagtggattccgttttgtcaatcaagaaaatgttttc

SEQ ID NO: 19261 - DNA, 394 bp, Gossypium hirsutum
  Clone ID: GOSHI-09MAY01-C6538_1
cccacgcgtccgattcaagcttaaagtctctctctttccttccttcagatacaatttcacatggctggtcttcagtataattttttccccacagatttcttctaccctcgtccgccacagcctgctcctgtcctcgactctactcctccctccacggggccgatccaaaagagagaggttgttgttgatggtaataatgacggtaagcagcggcagcctggaactccggttgttcaccgccgcaacaacaagactagcgtttcgatgaggaggaggcaaggcgaaaaggtcggtagtactagtattgacgttcaaaatccaggcgatcagcgagttaagttgccgcgaaactcgttttcttccttgattttggttcctgaacaagacgattccg

SEQ ID NO: 19262 - DNA, 1145 bp, Gossypium hirsutum
  Clone ID: GOSHI-09MAY01-C6478_1
caacagcttcgcgtctcacctacccactccttttcctccttcaaaccaatgtttctccccaatccttcccctaactaacaaacaataaaccagacaaccccccccccctttctcatctatggcctgcgccactaacgctatctctctttctctctcttccaaccccaactccaaattgtcctctgacttcatccccaagcttaataagcccgtcaatgtttctcttcgcgcttccacttccgctgagttgaatcccggacgactttttctctccagacccattggactcagtcgcaggaattgcgccaatgcaactccggtgatggatcagtcagttggtgaaaggagctcttcggtccccactattgttgaggtggatttgggtaatcggagttatccgatctacatcggctccgggttgcttgatcagcatgagcttcttcaaaagcatgttcatgggaagaaagttcttgtggtaactaacactacaattgctcctttgtatttggataaagtcgttgatgcgttaacaaagggaaacccgaatgtttctgttgaaaatgtgatactacctgatggtgagaagtacaaaaacatggagactctcatgaaagtttttgacaaggccatcgagtcccgattggaccggagatgtacatttgttgctcttggcggtggtgtgattggtgacatgtgtggttttgctgctgctgcttttcttcgcggtgttaattttatccagattcctactactgttatggcgcaggtggattcttctgttgggggtaaaactggcataaaccatcctcttgggaagaacttgattggtgctttctaccaacctcaatgtgtgcgcatagacactgacacattgaacacactgccagatagggaactggcttcaggtctggcagaggttataaagtatgggctcatcagagatgccgagttttttgagtggcaggacaagaatatggagaaattgatggcaagggatcctgatgcgtttgcttatgctataaagcgatcatgtgaaaacaaggctgaggttgtgtcactagatgagaaggaaagtggattgggggcctcccctgaacttggggtcatccattgggccatgcaatagaacctgggttttggatatg

SEQ ID NO: 19263 - DNA, 477 bp, Gossypium hirsutum
  Clone ID: LIB3543-022-Q1-K1-A4
cccacgcgttcgaccactcgtccggccacgcgtccggacaaacccccccccccttttctcatctatggcctgcgccactaacgctatctctctttctctctcttccaaccccaactccaaattgtcctctgacttcatccccaagcttaataggcccgtcaatgtttctcttcgcgcttccacttccgctgagttggatcccggacgactttttctctccagacccattggactcagtcgcaggatttgcgccaatgcaactccggtgatggatcagtcggttggtgaaaggagctcttcagtgcccactattgttgaggtggatttgggtaatcggagttacccgatctacatcggctccgggttgcttgatcagcatgagcttcttcaaaagcatgttcatgggaagaaagttcttgtggtaactaacactacaattgctcctttgtatttggataaagtcgttgatgcgttaac

SEQ ID NO: 19264 - DNA, 536 bp, Gossypium hirsutum
  Clone ID: GOSHI-09MAY01-C6468_1
aataatcggaccaaacattataaaaaaatataatcccacatttggatacttacctcatttttgcaagacatttgggttgcaatggcacaagcaatggcatcgatgactggtttacgtggctcttcacaagctgtgttggaaggtagtctccaactcagcggccaaacccggttgaacgttgctagcaccaacagggtggctgtggctagacctggttttaccgttagagctcaacaggtccctgccgagcctgaaactggacgcagagctgtgctgggtcttgttgctgctggtttggctactggctcctttgttcaagctgtgcttgctgatgcacgaagcatcaaggttggcccgccttcaccaccctccggtggattgcccggaactttgaattccgatgagccaagagaccttgatctggcgtacaaagatcggtttttcctccaaccattgactccggcacaagcggctcagagggcaaaggaatcagccaaagacatccttggtggcaagaccttgatcgacaaaaagca

SEQ ID NO: 19265 - DNA, 486 bp, Gossypium hirsutum
  Clone ID: LIB3120-004-Q1-K1-D6
atttttgtgaaaatgatactagcttatgatatttatactgtcaaactttgaaatacagaagctgtgttgtatggtagggtggaactcaacgaacaaacccggttgaacgttgctagcaccaacagggtggctgtggctagacctggttttaccgttagagcttaacatgttcctgccgagcctgaaactggacgcagagctgtgctgggtcttgttgctgctggtataagctactggctccttagttcaagctgtgcttgctgatgcacgaaacatcaaggttggcccgtcttcaccaccctccggaggattgccctgaactttgaatttcgatgagccaagataccttgatctggcgtacaaagatcggtttttcctccaaccatttactccttcacaagcgtgttacaaggcaaatgaataagtcaaatacattcttggtttgaaaatcttgatcgacaaaaaagcatagtcctatgttatgaa

SEQ ID NO: 19266 - DNA, 255 bp, Gossypium hirsutum
  Clone ID: LIB3120-054-P1-K1-D7
cccacgcgtccgggcacaagcaatggcatctatgactggtttacgtggctcttcacaagctgggttggagggtattctccaactcagtggccaaacttcgttgaacgtttttagcaccaacagattggctgtggctagaccctttttaaccgttagagctaaacaggtccttctcttactcttaactgaacacatagctttcctgggttttgttttttttacatttggcttactgttttctttttttaaaaactg

SEQ ID NO: 19267 - DNA, 1036 bp, Gossypium hirsutum
  Clone ID: GOSHI-09MAY01-C6418_1
aaaataaagacaaaaacgaagaattcaaagcaaagaatgggttggaaaaaagagagggaagaacaaagtatgtgcggattcaaaaaaatctagtggataggacctaaaaaaaagatgtcgaaatagttctgacggttcaataatcttctcacttccattcggagttcttagttacttcggcaggttgaatcttagcgatggaataatataattaagtcaaaattcattggatgattgtatcattaaccatttctttattttggtgcgaggaacttatcatgaatccactgatttctgccgcttccgttattgcgtgcggggttggctgtcgggcttgcttctattggacctggagttggtcaaggtactgctgcgggccaagctgtagaaggtattcgcgagacaactctcgaggcggaggggaaaaatacgacggtacctttattcggcttagtttggcttttatggaacgctttaacaatttatcgggctggttgtagcattggcactcttatttgcgaatccctttgtttaatcctataaacatgagaattttgtatttttttttcttattttatggcttgggacttactcctcgctttttcgaattctatcaagatttcacccctacaattaattattcgttgggacaataatccatgggaaggattaatttgaggatgaggaattatcacaccgactcgctttcttccttccccttcttagttcaagagaaccccttatttctcatttattgtttaaaggagtattgcaacgaatgaggtattttgccattgacatgaaacctgccccctaattctaataagaattattattattgggaattttcaattgaaaaaaaaatacatttctagctaactagataaatagaatatatttttgactccgtttagacataggtaaatgaaaattcattatttatgaataattttataaaaaatttaataatttattaaaacaaaaaagaaatacatagaattagaataattagaataatataaatatgatagaatag

SEQ ID NO: 19268 - DNA, 245 bp, Gossypium hirsutum
  unsure (1)..(245): unsure at all n locations
  Clone ID: LIB3165-050-Q1-K1-A5
gaggaacttatcatgaatccactgatttctgccgctttcgntattgctgctgggttggctgtcgggcttgcttctattggccctggagttggtcaaggtactgctgcgggccaagctgtaaaaggttgggagacaaccgggcgggggaaaatacagacttatgtaantgcttatgacttacatatgctggtgacatgccttattgaatcttgttatcttaactaaattgatttttttattatgtg

SEQ ID NO: 19269 - DNA, 936 bp, Gossypium hirsutum
  Clone ID: GOSHI-09MAY01-C6408_1
cccacgcgtccgcgattcccttcgttgtttcctcaactttcagtgtttatttattattatttttatttttttggtttagtgtgttgcaatggccgaggagccgacaccaaagcgccaaagagaagaaacccagagctcaaacgaagaacatgttgaagaaacaaaacgccataagtcttacaatcacatactctctttgcttgaagtcgaagaggatgagcccagccaagacttgtcccccctaatcaccactttacagcaacagctctcctcggactccgttttggatgcccctttccctctttgtgaaccagcaacaccatcgccctcgaacccagacaaggaaaccgccaccaccgtcctcagcttagaagactgcacatcagcaacttgttccttgaaagaagatgatgatgatgatgataaagtgcaagtcataagacatttgcttgaagcctctgatgatgagctggggattccaaatagagaagatggcgatggagatggtagcggtggtggtagtgatgttggctttgaagtttttgagttggaagaaggtttcaacaatggcggaaatgggtttgcattgtgtgatgggttatgggaacttgaagatgaggctgctaattactatactttgttacagtctgaactcttcatgtagcttcatggccggagaaactacgaagcagaaagaaatggtaggggtaaagaaggggaaaaacagggagtgaggtggggaatatgaaaaatgaaggcgattatttttttggggattaattcattttggaaccccccaacttctttgaaaatatcaggactttccccttgtttctttgttcaatattaaaactaaattgttgaaaggagggatatgctttagcaatggaacattttcttgaaaaaaaaagggtgttaatttttcacgtggaaatt

SEQ ID NO: 19270 - DNA, 404 bp, Gossypium hirsutum
  Clone ID: LIB3148-043-Q1-K1-B12
cccacgcgtccggttatgggaacttgaagatgaggctgctaattactatactttgttacagtctgaactcttcatgtagcttcatggccggagaaactacgaagcagaaagaaatggtaggggtaaaaattagagaaggggaaaaaaagggagtgcggggggaaatatgaaaaatgaaggcgattattttttttgggactaattcattttggaaccccccaacttctttgaaaatatcaggactttccccttgtttctttgttcaatattaaaattaaaatgttaaaaggaggaatatgctttatattttgtcccatatttcctaattattttatcccttcccattcttgctccaaacgtttttaagatgaagggttgaaaaataattattttattttggtaaa

SEQ ID NO: 19271 - DNA, 804 bp, Gossypium hirsutum
  Clone ID: GOSHI-09MAY01-C106693_1
gcatttcagagaaccaaagtcctaaccgatcacctcctccaatcacctccttcttcgtcctttcaaaccccttctctttcttcaaacgcctgtttgaactactctccgcccgaactttccgaaaaatatgcattcgacatcaacgatatgcggaagctaatggacgggcacgacctggaggagcgggatcggctgtttgggatgatcacgcagagcaaggtgttcaatcccagagtgaggggagggaaggtgtttgtgtcgccggactataaccattccatggagcagcagcgggagatgacgtggaaacgcatcgagtatttgttcgagaggggagtgttccaagggtggttaacgggggaaggagaagaagttgagatgagaaggttcgcttgctttgaggttttgggtctcttccatcgttccatctccattacgcttggagttcacttcttcttgtggggtggtgccgtccaatttttccggtaccaagcaccaccatgacaagtggctgagggaccctgaaaattacttggtccatggtggctttgctatgactgagttggggcatggaagtaatgttcccggcatggaggccatgacgacattttgactctgacgcggcggggagtttgtctctaatactccttgtgaatcagcacaaaagtattggattggcggagcagccaaccatgcaacacacacaattgttttttcacagctcaatatcaatggaaccaatcaaggggttcatgcacttatagcccagatcagggatgctgatggtaatgtatgtccaaacat

SEQ ID NO: 19272 - DNA, 521 bp, Gossypium hirsutum
  Clone ID: GOSHI-09MAY01-C6608_1
gtaagatccaaaggttcttgagccagcctttccacgtggcagaagtgttcactggtgcccctggcaagtatgtggagttgaaggagagcatcaccagcttccagggagtgttggatggaacgtatgatgacctgccagagcagtcattttacatggttggaggtattgaggaagtgattgccaaggcagataagattgccaaggagtctgcagcttaattaatttcaatgttgatgcctttgtttactccccgataatgttgaaaataattagaggcggtgttggcgttgccaacaacaacaggactgttcattttttgggatatttttcctattcaagttttaatgatgttattcaagagtgagaaagaggaatagaacttgggcccctttttacttgtttaataagggaaataaaaaccggatatgtacatttttggttggagaactacggatgctaaacttttctctgttttcagttaaacaaatgcagctctagttgacggctgtttattatttaag

SEQ ID NO: 19273 - DNA, 555 bp, Gossypium hirsutum
  Clone ID: GOSHI-09MAY01-C6198_1
cgctctgtatattgttttgtcgtgatgacgcgttttaatggcggctaaaccttcaattcttcttcttcttcttcttcttctgccatagttttcctttttatcttttaaacagacaaaaaaaaaaaagagtttatatataacattccttttcctttcttttccttccatatttttactgtgctttgctcctatcctttccaaatgtttttcttcttctttctcctttctttcgtcctctctttcttattcttattcttttcttttcactataaaaaactccataaacaacaacaactacaagaagaaggcaacccccagaatgattctgcccttttgaactgctgttttcccgatattgttgatacgagggcacaaacccggggaaacgactctactcatttgccccatactcttcttttacagattatgccttccgattctgcaaaatgggctggtttgtttaccggggagaaccaacaaaaaggggatgccagtcgggtcgggtcggatcgagatagggagcggtgtgaatcaggtggtgaggatcaaaggact

SEQ ID NO: 19274 - DNA, 397 bp, Gossypium hirsutum
  Clone ID: GOSHI-09MAY01-C6188_9
catcaaccttgacattccagtttctcttatcttgctcctcaatgtttgctcaaagaaagggccttatggcttccaatgctaatttaagtcaatcattttcccctacattctttctcaacttctctatggtttgtgtctggtttttttcaagttatgataccataacttcattgttttaatgtgcaataaattagtgttttcatttctaattttgttgttttaatttcttcgtgggggatagatatagaataagtttaatacttatcttcaagtgttgtttgaagtttttttatatctccaaagaacatggaaagacttgtattatttaagctcgttaatttattcccttgtttatttatcagtttattaatatgagccccatttcatatttgtacca

SEQ ID NO: 19275 - DNA, 747 bp, Gossypium hirsutum
  Clone ID: GOSHI-09MAY01-C6188_7
ttctcgcgtccgcccacgcgtccgcccacgcgtccgcccacgcgtccgagcttccatggtcctccttttggcactcaacattctctttttttccctagtcagtgcttgtggctcttgctcttcacccacccctaaaccaaggccaaacccaaaccccaacacccccactcctactccatctgcacgaggcaggtgccctagggatgccctcaaattaggtgtatgtgccaatgtgcttaacctagtcaatgtcaccattggttcacccccagtgatgccatgctgttcccttctcaatggccttgtcgacctcgaagccgctgcatgcctttgcaccgctatcagagctaacattttaggcatcaaccttaacatcccagtttcccttagcttgctcctcaacgtttgttcaaggaacgttcctactggcttccaatgctaaatcatcactgttccctacattttttatcgtctttcttatggtgtttgtgtttgattttagaaagttatgatttctattatttactgtgtgttttcatttgtaactttgttgtttaaatttccttgtggggattggtatagaataagtctaatacttttcttcagatgtttttcttagggaactttagtatctttaagggacatgaaaagacttgtattattcagcttgttttatttccgtacttcttgtttcgttatcactttatttataaaatctctgcatctagctatggcaataatttttat

SEQ ID NO: 19276 - DNA, 598 bp, Gossypium hirsutum
  Clone ID: GOSHI-09MAY01-C6188_6
gaatcgcagtttcggcctcgacctacgcgtgcgctcaaactccaacacccccactcctactccatctgcacgaggcacgtgccctacggatgccctcaaattaggtgtatgtgccaatgtgcttaacctagtcaatgtcaccgttggttcacccccagtgatgccatgctgttcccttcatcaatggtcttggcgacctcgaagctgctgcatgcctttgcaccgctatcagagctaacattttaggcatcaaccttaacatcccagtttcccttagcttgctcctcaacgtttgttcaaggaacgttcctactggcttccaatgctaaaccatcactgttccctacactttttatcgtctttcttatggtgtttgtgtttgattttagaaagctattatttacagagtgttttcagttgtaactttccttgcgggattgatatagaataagtctaatacttttcttcaaatgttttcttagggaactttagtatctctaagggacgcgaaaagacttgcattattcaccttgttttatttccttacttcttgtttccttaccaacttatttataaaatctctgcatctagttatggc

SEQ ID NO: 19277 - DNA, 597 bp, Gossypium hirsutum
  Clone ID: GOSHI-09MAY01-C6188_5
gaatcggagggtcgacctagaccctaccggccatgctgaaggccttcttgatggcctcccccccctcgaagctgctgtttgcctttgcaccgctatcaaagctaacatcttaggcatcaaccttaacattccagtttcccttagcttgctcctcaacgtttgctcaaagaatgttccttccaacttccaatgctaagtcttcactgttcccaacattctttctagttttccttattgtgtttggttattgaaagttacggtttccgacatttgcagtaaatcagtggtttttcatttgtaactttattatttcaatttccttgtgagggatggatactgaataaatttaatacttctcttcaagtgtttttcttttggggttttttgtatctccaaaagacatgaaaaagacttgtattattcccttgcttttgtttctctatccatttactaatggattttgtatgtgaaccaatctagtttgaacgaataataaatctttattcgtatttttattcttaaaaaaaaaaaaaaaaataaaaaaaaaaaaaaaaaaaaaaaaaaaaaattaaaaaaaaaaaaaaaaaagggggcggc

SEQ ID NO: 19278 - DNA, 872 bp, Gossypium hirsutum
  Clone ID: GOSHI-09MAY01-C6188_4
ttccctccgacttttagctctaagccaagaaagcaggccactaacatcaaaatggcttcaaaacaatcaggttccatggccctccttttggcactcaacattctcttcttttccttggttagtgctactgccccatcccctcccaccaaacctaaccataaaccaaaggcaaaccccaaccccagcaccccatcttcacaaggcaagtgccctagagatgcccttaaattaggtgtatgtgctaatgtgcttggcctagtcaagcccgtcattggttcacccccagtgatgccatgctgttcccttctcgatggcctcgtcgatcttgaagctgctgtttgcctttgcaccgctatcaaagctaacatcttaggcatcaaccttgacattccagtttctcttagcttgctcctcaatgtttgctcaaagaaagttccttatggcttccaatgctagtttaagtcaatcatttttcccctacattctttctcaacttctttatggtttgcgtttggctttttttcgagttatgatgccataacttcattgttttaatgtggtttcatttgtaactttaatttccttcgtgggggatagatatagaataaggttaatacttttcttcaagtgttgctctttgggggttttttgtatctccaaaagacatgaaaaagacttgtattattcccttgcttttgtttctctatccatttactaatggattttgtatgtgaaccaatctagtttgaacgaataataaatctttattcgtatttttattcttaaaaagcaagaaaccaaacaagaaaatatttgtagtggcttttttggcaaataagcctaataaaacaattgctgctttgtatttctac

SEQ ID NO: 19279 - DNA, 625 bp, Gossypium hirsutum
  Clone ID: GOSHI-09MAY01-C6188_3
cctcatctctaaagccaagaaagcaagccattaaggttttgagaaaagatcaaaatggattcaaaaagatcagcttccacagccctccttttagccctcaacattcttttcttttccctagtcagtgctaattggatcttgttcttcttctggctctaacccaaggccaactcccacccctactccatctgcacgaggtaggtgccctagggatgccctcaaattaggtgtatgtgccaatgtgcttaacttagtcaatgtcaccgttggttcacccccggtgatgccatgttgttcccttctcaacggtcttgtggacctcgaagccgctgcttgcctttgcaccgctatcagagctaacatcttaggcatcaaccttaacatcccagtttcccttagcttgcttctcaacgtttgctcaaggaatgttcctactggtttccaatgctaagtcatcattgttcctacattctttctcatctttcttatcgtgttcgtgtttgtgtttgtgtttggtttttaaaattatgattcagtatttacggtacatcaatattatcattagatactttgttgtttaaattttcttatggagattgatataaaataagtctaatactttttt

SEQ ID NO: 19280 - DNA, 986 bp, Gossypium hirsutum
  Clone ID: GOSHI-09MAY01-C6188_2
cggacgcgtgggcggccgcgcggccgcccgcgcgcccgcccgcgcgtcttgtacctttttaactctaaagccaagaaagcaagccactaaggttttaagagaagatcaaaatggcttctaaaagatcagcttccatggtcctccttttggcactcaacattctcttcttttccctagtcagtgcttgtggctcttgctcttcacccacccctaaaccaaggccaaacccaaaccccaacacccccacccctactccatctgcacgaggcaggtgccctagagatgccctcaaattaggtgtatgtgccaatgtgcttaacttagtcaatgtcaccgttggttcacccccagtgatgccatgctgttcccttctcaatggccttgtcgacctcgaagctgctgcttgcctttgcaccgctatcagagctaacatcttaggcatcaaccttaacatcccagtttcccttagcttgctcctcaacgtttgttcaaggaatgttccaactggcttccaatgctaattaagtcatcacttttccctacattctttctcgacttccttatggtgttttgtgtttggttttttataaagttatgatgtcataacttcattgttttaatttgtatcattcttgctttaatttcattgggagaattgatacagaataatatttttcttaaagtgtttttctttgagtgtgtattgtatctctaaaggacatgaaaaagcttgtattattcaatcctttctaaaaaaaaaagaggccaaaaaaaaaaaaaaaaaaaaaaaaaaaaaaaaaaaaaaaaaaaaaaaaaaaaaaaaaaaaaaaaaaaaaaaaaaaaaaaaaaaggggggggcccttttaagggacccaagtttacttccccgggcttgcaacgcaaaagtttttttatagggccaccaaaattaaattcacgggccgcgtttttacaactctggaattggaaaaaccttggggtacccc

SEQ ID NO: 19281 - DNA, 927 bp, Gossypium hirsutum
  Clone ID: GOSHI-09MAY01-C6188_1
cttacgcgtgccccgccgcccccgcttttttaactctaaagccaagaaagcaagccattaaggttttgagaaaagatcaaaatggattcaaaaagatcagcttccacagccctccttttagccctcaacattctcttcttttccctagtcagtgctaattgtggatcttgttcttcttctggctctaacccaaggccaactcccacccctactccatctgcacgaggtaggtgccctagggatgccctcaaattaggtgtatgtgccaatgtgcttaacttagtcaatgtcaccgttggttcacccccggtgatgccatgttgttcccttctcaacggtcttgtggacctcgaagccgctgcttgcctttgcaccgctatcagagctaacatcttaggcatcaaccttaacatcccagtttcccttagcttgcttctcaacgtttgctcaaggaatgttcctactggcttccaatgctaattttagtcatcactctccctacattctttttcatctttctatttgtgtttggtttttgaaagttatggttttcccttatttgcattaaatcaatggctttatttggatttttttggtggtttaattttccttgtgggagattgatattgaatatgtctaatacttttcttcaggagggtttcttagggaactttagtatctttaagggacatgaaaagacttgtattattcagcttgttttatttccgtacttcttgtttcgttatcactttatttataaaatctctgcatctagctatggcaataaattttatataattttataatgtttgtacttactttttcatatttaggcaaaaaatgcctaccacttttatatttgttatttgggtataagttctattagtatgatacttagaacttatcaatcaacttttataaatgtat

SEQ ID NO: 19282 - DNA, 308 bp, Gossypium hirsutum
  Clone ID: uC-gsflnu33B088a05b1
gctcactcggctggaaaaacactggctgaaaaccttcttctgtttccatcaatgtagatgacgatgattccacatcagggtcatccccaatagcctgaaactgatacaaagcatgattgccaaactctgaagctgcaaatagaaaaccagttttcaacacacacattgaagacgtaactggaattgtatcaaaatacttaatcttcaattccgaaactccttcattttcaggtaggtgccctagggatgccctcaaattaggggtatgtgccaatgtgcttaacttagtcaatgtcaccgttggttca

SEQ ID NO: 19283 - DNA, 427 bp, Gossypium hirsutum
  Clone ID: uC-gsflnu33B036e02b1
atcatcatccatggccctctttaaggcactcaacagggacttctattccctggtcagtgcttgaggttctcgctatacacccacccctaaaccaaagccaaacccaaaaccccaacctgaccgccactctatcttcacaaggcaaatgccctacagatgcccctaatataaggtgtatgtgctaatgtgcttggcttaaccaagcccgtcattggttcacccccagagatgccatgcagcaccctttttgatggccccgccgatctctaagctgctgtatgcctgagcaccgctatcaaagctaacatcttacgcatcaaccttaacattccaatttcccttagcttgctcctcatcgcttgctcaaagaaagtttcttccaacttacaatgctaagtctttattgttcccaccattctatctagtt

SEQ ID NO: 19284 - DNA, 357 bp, Gossypium hirsutum
  Clone ID: LIB3149-051-Q1-K1-C2
gaccgggcccgaaatcccggggcgaaccaagccgtccgttaaaataaggggaatgtgccaatgggcttaacctagtcaatggcgaccattggttcacccccagtgatgccatgctgttcccttctcaatggccttgtcgacctcgaagccgctgcatgcctttgcaccgctatcagagctaacattttaggcatcaaccttaacatcccagtttcccttagcttgctcctcaacgtttgttcaaggaacgttcctactggcttccaatgctaaaccatcactgttccctacactttttatcgtctttcttatggtgtttgtgtttgattttagaaagttattatttacagagtgttt

SEQ ID NO: 19285 - DNA, 373 bp, Gossypium hirsutum
  Clone ID: LIB3585-048-Q6-K1-E11
taactctaaagccaagaaagcaagccattaaggttttgagaaaagatcaaaatggattcaaaaaggtcagcttccacagccctccttttagccctcaacattctcttcttttccctagtcagtgctaattgtggatcttgttcttcttctggctctaacccaaggccaactcccacccctactccatctgcacgaggtaggtgccctaaggatgccctgaacttatgtgtttgagccaatgtgctcaacttaatcaattggaccgtccattctcccccgatgcccccatggtgttccctactcaacagtattgtcttcctggcggtggccgcttactacatccctggcaatatggttatgcttccatctatcg

SEQ ID NO: 19286 - DNA, 265 bp, Gossypium hirsutum
  Clone ID: LIB3147-034-Q1-K1-E1
cccacgcgtacgcccacgcgtccgtaaaaattatatttttaaccaaaagaccaaaaatcaagagctaagatcttatgcatcaaaccttaaccttccaaattcccttaacttgctcctcaacgttagctcaaagaatgttccttccaacttccaatgctaaatcttcactgttcccaatagcctttctagatcttacttatcgagtttggttatcgaaagttacagatacccactttttcttcaaaccactaatttttcatttgta

SEQ ID NO: 19287 - DNA, 526 bp, Gossypium hirsutum
  unsure (1)..(526): unsure at all n locations
  Clone ID: LIB3272-035-P1-K1-E5
ccgtccgcatacatttcttcttcttttccctaagtcagtggcgttggtggnnctcttgggctcttcacnnccacccgtgaaacggcaaggccataactccaataaccntctaacatcccccacctccttacctggctatccgcaccgagtgcnnaggtgcccnnntagagatgccnnnctcaaattagnnngtgtatggctgccaatggtgctnnntaacttnnagtcaatggtcaccnnngttggttcacncnntccagtgnnntgccatgctgtnntcccttctcaaatgggcctnntgtcgacctcnngaagctgctgggcttgcnnctttgtacctggctnnntcagagctannacatcttnnaggcatcanacnncttaaccatcnnccagtttctttcttaagctttgggctcctcaaaacgtttggttcaaagggaatggggttccaactgggcnnttccaatgggctaattannagtcatcanncttttccctccaattctttcttcaaaacttcctt

SEQ ID NO: 19288 - DNA, 359 bp, Gossypium hirsutum
  Clone ID: LIB3149-002-P1-K2-E1
cgtccaccacttctacttttagctctaagcttagaaagcaagccactagggttttaggataggattaaaatggcttcaaaacaatcagcttccatggctctacttttggcacttaacattctcttcttttctttggtcagtgctactgccccgtgccctcccaccaaacctaaccataaaccaaagccaaaccccaaccccagcaccccatcttcacagggcaagtgccctagagatgcccttaaattaggtatatgtgctaatgtgcttggcctagtcaagcccgtcattggttcacccccagtgatgccatgctgttcccttctcgatggcctcgtcgatcttgaaacttctgtttg

SEQ ID NO: 19289 - DNA, 324 bp, Gossypium hirsutum
  unsure (1)..(324): unsure at all n locations
  Clone ID: LIB3272-019-P1-K1-G8
gggggcgacccacgcnnncgacttgtacctttttaactctaaagccaaaaaagtaagccactaacgttggctgttaagatcaaaatttcttctaaaatatcagcttccatggtcctccttttggcactcaacattctctttttttccctagtctgtgcttgatgcttttgctcttcacccacccctaaaccaaggccaaacccaaatcccaacacccacactcctacttcattttgctcgaggcatgtgcccatattgatgccctttaattaaatgtatgtaccaattctcctaataaaaccaatttcatcattgttttacccc

SEQ ID NO: 19290 - DNA, 235 bp, Gossypium hirsutum
  Clone ID: LIB3147-008-Q1-K1-C12
cccacgcgtccggtttttcttttggggttttttgtatctccaaaagacatgaaaaagagttgtattattcccttgcttttgtttctctatccatttactaatggattttgcatgtgaaccaatctagtttgaacgaataataaatctttattcgtatttttattcttaaactgtaacacaatatcagtttaagttggaatttctatggattatggctggcactggtaaaactaag

SEQ ID NO: 19291 - DNA, 1065 bp, Gossypium hirsutum
  Clone ID: GOSHI-09MAY01-C6148_1
gcttgttctttatgtcaaaaagtgcaacaaagcttggtttctgctgcttctggacatgttttggccaaggatgatgattctcctgttactattgcagactggagcgtccaagcaactgttagttggctgctttccgaattcttggagggttggagtgtgtccattgttgctgaagaagatgtccaaacactctccaagcctgaagcggctagtttactttcagctgttgtcaatactgtgaatgaatgcttagctgaagcaccaaagtatggtcttcagtgtccaaagaaagttctcgggacttcacaaatccttgaggctatcagtcggtgtaactcaactgggggcccaactggaagacattgggtgcttgaccctgttgatgggacattgggatttgtacgtggtgaccagtatgctgtagcactaggcttgattgaggatgggaagctagttcttggagttcttgggtgtcctaattaccctatgagaaaggaattgttgacgtccacgcgtccgcgcacccgtgggaagccgacgagtccaccatcttcagatatttggcaaaaaggatgtgtgatgtatgcaagtagaggaactggtcaggcatggatgcaacctttgatccttggggatacaaaatttgaatggccaaattctgctacattgctacaggcttctcctgttgatgatccatcgctggcaactttttgtgaacctgtggaaaaggcaaattcaaaccacttgtttaccgaggggcttgctaacagcataggtctcaaaaaccgacctatgcgagtccatagcatggtaaaatatgcagcaatagctcggggtgatgctgaagtttatattaagtttgcaagatctgggtacaaagagaagatatgggatcacgctgctggtgttgtcattgtagaagaggctggtggggttgtaacggatgcaggaggtcgccccttggacttcagtaggggactgtacttagaaggtcttgaccggggattgttgcttgctctggccccatactgcatgataaaatcattggggctggatatgcaagct

SEQ ID NO: 19292 - DNA, 721 bp, Gossypium hirsutum
  Clone ID: GOSHI-09MAY01-C6168_1
gaaaaaaaaaaaggggagggggtttctctctagggcttccttctctggcgatcggaccaccgtcggtggtggccagagaggcacccgaagctgaatctaggcctcttttctcgcttagaaataggcttaagacctagaaacccctgaaccaaccccgaaacccttaaaacaacaaagaacttccgaccattggtcttctccgccgtgacttcaagcggatccccaaggatccgacaatttttggactagagaagcaagcaccgaggccaccaacaccaaatacgggtttatgagggaagtcaacgggcaaaggctcccattttggtgcaaagggacaaaaggagacgagccccgggcgttggacatgccgacgaggcacgtgaggtgtgcggcgctagggggaaactagggtttccaggtctgccgaaattggcttgggttttgggccatcgggctatcaaaaattgggtttttcgggtttggttttaattgtaaaatgggttaaatgtgatttgggctatccgggcttttgtaaatggattttaataattttggacttgttaatttttgggttttattattactgttgggttttctaacgggccgggcaaatttgggcccgtacagtatttgattgctgctataatatttttttatgtaaaataaacaaaagaatttaacgaaattatctagaaatattatgcggacatgttgtaagcct

SEQ ID NO: 19293 - DNA, 569 bp, Gossypium hirsutum
  Clone ID: GOSHI-09MAY01-C6108_2
cccacgcgtccgtttttttggacagagtagacaaaccactctttttttcttttgatattgcgggaccgctgaaacgaatatctcgaaattggatatgtaaaaacaaagaatcaaaaatttctgattatacagaaaaaaagatcgagaaaaaagacgaggccaaaagagaaaaatacaaaagagaagagaaaatgaggatagaaatagcagaagcttgggatagtcttttacttgctcaagtaataaggggctccgtgttaataacccaatcaattcttagaaaatatattatattaccttcactgataatagttaaaaacattgcccgtatgttattatttcaatttcctgagtggtctgaggatttaacggattggaatcgagaaatgcatgttaaatgcacttataatggtgttcaattatccgaaaccgaatttccaaaaaactggttaacagacggtattcagataaagatcctatttcctttttgcctgaaaccttggcacagatttaaactacaaccctctcataaagatccaatgaaaaaaaagaaaggtcaaaagaatgat

SEQ ID NO: 19294 - DNA, 730 bp, Gossypium hirsutum
  Clone ID: GOSHI-09MAY01-C6108_1
gatatgtaaaaacaaagaatcaaaaatttctgattatacagaaaaaaagatcgagaaaaaacccggccccgcccgcgccgtccgcaaaagagtaagagaaaatgagtgatagtaaatagcagtaagtcttgcggatagtcttttaccttgctcaagtaataaggggctccgtgttaataacccaatcaattcttagaaaatatattatattaccttcactgataatagttaaaaacattgcccgtatgttattatttcaatttcctgagtggtctgaggatttaacggattggaatcgagaaatgcatgttaaatgcacttataatggtgttcaattatccgaaaccgaatttccaaaaaactggttaacagacggtattcagataaagatcctatttcctttttgcctgaaaccttggcacagatttaaactacaaccctctcataaagatccaatgaaaaaaaagaaaggtcaaaagaatgatttttgctttttaacagtttggggaatggaaactgaactacctttcggctctcctcgaaaacggcgttcgttttttgagcctatttttaaagaactaaaaaaaaaaataaaaaagggcggcccggacgcgtgggcggccgcgtcggttttaaaagaaaaaactaaattgtttcgaaaagcttcaaaagaaacaaaaaaatggatcactcaaagcattctatttctaaaaggaataataaaagaact

SEQ ID NO: 19295 - DNA, 412 bp, Gossypium hirsutum
  Clone ID: LIB3135-026-Q1-K1-B8
cccacgcgtccgcccacgcgtccgcttggcacagatttaaactacaaccctctcataaagatccaatgaaaaaaaagaaaggtcaaaagaatgatttttgctttttaacagtttggggaatggaaactgaactacctttcggctctcctcgaaaacggcgttcgttttttgagcctatttttaaagaactaaaaaaaaaaataaaaaaatggaaaacgaaatgttttatagctttaacaattttaaaagaaaaaactaaattgtttcgaaaagcttcaaaagaaacaaaaaaatggatcactcaaagcattctatttctaaaaggaataataaaagaacttttaaaaataaatccaattccattttttgggttgagaagaccatatgaattgggcgaaacttaaaaggattc

SEQ ID NO: 19296 - DNA, 735 bp, Gossypium hirsutum
  Clone ID: GOSHI-09MAY01-C6098_1
cgtttgtataaatttagatgaagacgttaatgcattggtgtggatggatagaaaactttgcctacggtttgggtttttgagagacatctgaaactgagaaggaacagagatttttattacagagagattaaaaaaaaaaaagaaaaaagaaaaaagagaagagagtgaaaggtcaaactttatcaatggcgtgggtcaacggtgtgataaccctctttctctcctttttttttttaaatctctaaattctctctctttctttagctatctttgaatttcatttgaagggttcttaaaaaaattatttgataaaaaagtagcttctttttattgggaattctggatattctttctcaagtttgctgagagagaaagaaatggcacaacgatctcatgtacccaagtttggcaattgggagggtgaagaagatgttccttacacagcttattttgacaaggctcgtaagggccgaaccggagggaagattgtgaatccgaatgatccccaagagaatccagacttgcgtcgtgattatgtggctccaaataaagctcctccggcgtcgagaacgaatccggaagcaaatgaactggtaggagatggacctgttagaaggggacatgagtgtggaaagagcagggatgaagttgacttcaaacagtatgccgactctccggtacgccatgacaatggcaaccgtagagctttgggggacagtacacctacacgttatg

SEQ ID NO: 19297 - DNA, 1058 bp, Gossypium hirsutum
  Clone ID: GOSHI-09MAY01-C6088_1
atcgattcagacctttcctctttccccttaaaaagccccgccgcctgccccgcctcgtcgcacgccgcgtgaaatcgtggcaaaacaaatggtgagcatggctgccatcggtgatttgaggttgccttctacagcttcgttcaatgcttcttcagtttgttcgagccgtaagtcatcggctcctcggagcttgtcgttctcggcgtctgctctgtccggtgataaacttgttttcaaaatagccactggttgtagccgaacggaacggactgcttcaattgtttcaccgaaagcagtttcagattccaagaactcgcagacatgtcttgaccccgacgctagtcgaagtgttttggggattattttgggaggtggagcagggacaaggctatacccactaacaaagaagagagctaagccggctgttccattaggagcaaactataggctaatcgacatccctgttagcaattgtttgaacagtaacatatcaaaaatctacgttctgactcaattcaattctgcttctctgaaccgccacctttcccgcgcttatgctagcaacatgggtggctacaagaacgaagggttcgtcgaggttcttgctgctcagcagagtcctgagaacccgaactggttccaggggacagcggatgcggtgaggcagtatttgtggttgtttgaggagcataatgttttggaattcttggttcttgctggggaccatttgtatagaatggattatgaaaggtttatccaggcgcacagagagactgatgccgacatcactgtagctgcattgcccatggatgaaaaacgggctactgcgttcggtctgatgaagattgatgaagaagggcgtataattgaatttgctgagaaaccgaaaggggaccaacttaaagctatgaaggttgatacaacaatattaggtcttgatgatgtgagggcaaaagagatgccttacattgctagtatgggcatatatgttgttagtaagaatgtgatgttggatcttcttagagaaaacgcttccggtgccaatgattttggaagtg

SEQ ID NO: 19298 - DNA, 607 bp, Gossypium hirsutum
  unsure (1)..(607): unsure at all n locations
  Clone ID: LIB3543-044-Q6-K6-B12
ngactgctttngaaatgattactactactaagtcctcttcctcatccaatgctgcttcaatttctccctctagcggtatattcttggctcctcgaaccttgtcattctcggcttctgctctatcaggtgataagcttgtttccaaaactgttacttcttcccggcaaatgaaacgaactcctttcatcatttcaccgaaagcagtttccgattctcaaaactctcaaacatgtttggaccccgacgctagtagaagtgttttggggattattttgggaggtggagcaggggcaaggctttacccactaacaaagaagagagctaagccggctgttccattaggagcaaattataggctaattgatattccggttagcaattgcttgaacagtaatgtatcaaaaatctacgttctcactcagttcaattctgcttctctcaatcgtcacctttcccgtgcatatgctagtaacatgggtggttacaagaacgaagggttcgtcgaagttcttgctgctcagcagagtcctgagaacccaaattggttccaggggacagcagatgcggtgaggcagtatttatggttgtttgaggagcataatgtttt

SEQ ID NO: 19299 - DNA, 592 bp, Gossypium hirsutum
  Clone ID: LIB3585-047-Q6-K1-C8
ccacctcgacccacgcgtacgcaaaaatttaacattacgtgacagcatcaacatcttaagttgagcctatctatcatccaaaatcgcagggtcactcatacaccttcgtacaacatttataaagtcagatctatctcataaatcatcgcactcctcataaacatttcgcatctcggcaatctcctctctccaaagataaacttattttcaaaatagccactgattgtagcccaacggaacggactgcttcaattgtttcaccgaaagcagtttcagattccaagaactcgcatacatgttttgacccctactctagtctaactgtatagtagattattttgggaggtggagcaataacaatgctatacctactaacaaacaagatagctaaaccttctgttctcattaaaacatactatagaatcaaggtcattcattttaaataattgaatctaaacataatcttactcaataaatgtttcatataacttcaatttcaattattatattctctttaatccttatatttttttttactcttatttcatattaaacaatttttctaatactatatactataattatttcttat

SEQ ID NO: 19300 - DNA, 803 bp, Gossypium hirsutum
  Clone ID: GOSHI-09MAY01-C106003_1
ccctttgcacacaaaacagaaaacaaaaaacgaaactcaggtagagggagaaaggctacagttacggtcacagtcatagacagctctgctaggaaattgaaactgattggaattttcatttgttgtttttaaaataaacaaaatttagtattctagaagatggtgaggataattcccatggcgtcgtcctcaatacgaccttcgttatctccgtttaggtgctccggcggtgtttcttcatcgcggtttggtgtttccctttctccggttcaccttcaccggcacctcggtttctctaatctcggcagcgttgttccgcagtcgcaattctttggtttcaaagcctctaagatgtcgagaactgaagaaactaagctagggaagcctctggttggaaatgtggtacgagcaagcaccgctgctgcacaagaaaccgaggccctacagtgggttgaaaaggacaaacgaagaatgctccatgtcgtttatcgagttggggatttggataggaccatcaaattctatactgagtgtctggggatgaagctgttgaggaaacgggacataccagaggagagatacacgaacgcctttcttggatatgggccatgaagattctcacttcgttattgaactcacttataattatggagttgacaaatatgacattggaactgcatttggtcatttcggtattgctgttgaggatgttgccaagaccgtggagctcgtaaaggccaagggtggaaaagtaacccgagaacctggtcccgtgaaaggtggttctactgtaattgcattta

SEQ ID NO: 19301 - DNA, 710 bp, Gossypium hirsutum
  Clone ID: GOSHI-09MAY01-C6038_1
tggacgcgtgggcggaaagattcccaggaaagggcgaataaaagctggttggaacggagtgccgagtctttagaattagtagttgagaattacgatagtgaggaggaacgagtgaagaatttcaagcaaaagaaagccagctctaatcacttaaagaagttacaacaggagctcaatggattgctttcacgaccactgcgcccgaaaacattttcacatcgctatccaactgcagccggtgttacacagcttaggcagcatcagtttgaagaattggctaaccaaaatggagatgacaacttggttttgggtgaaaacaagagacggaagatggtggttatcggtcaagattgcgtggaaccactccaggcacttcggagtgctggtcgcgaggtgcacatggatgtaaaagagagggtggaaaaacgaagaaatgccgaaagtttgagaagaaaaaggaaagaggagaagaaacgtttacgcgaccagcgcagaaagcagaagaaacaatctcaagggagagagtaaggtaatgttactcgggctcgaattgaatgccggattcgagtatgtatcaaacacggttacatttacaattttctatgttgttcttatatatttatagaaccagatctccgtaccaggtctgtggaatgtgtcaaacatgggtacggagaaagaattttgattagttaaactcgaggtgaatg

SEQ ID NO: 19302 - DNA, 435 bp, Gossypium hirsutum
  Clone ID: GOSHI-09MAY01-C6338_1
ccttaatttccatcaacctctttgtaaaaaagaaactcctttcccattcttttgctagaaaagctgtgcaacttccttttatttctatggtcttcagtttaaaattcttaatatttccacttttttttacaaaaaaaaaatttatttaaaggtttaatgctgagaaataaaggcaaattgaaatggtttctctacagattctgaaccctgtcttctcttccatttcgatttcccagtcaagttgtcctggaaaatctgatttcaggaagaaaattctcaactttaatagctgtagaagcttcaggtccttgcataggcaaagatctagaatctattgtgctactcaagaaggtgacaacaaaagcaatggggaagagcctcctgagtcgctggttatgaaggagttgaagaggaaggggatgacgcccacttcac

SEQ ID NO: 19303 - DNA, 497 bp, Gossypium hirsutum
  Clone ID: GOSHI-09MAY01-C6328_1
cccacgcgtccgctccaacctaagcgcttaagagcgaaaagttcttatcctcatcccccctttcttccctcctttcttaggtggttgacaagccaagaccaagttctctactttaaacacctaaaaaatccatcacccatttctactttgaaatggcagcgtccttttcttccactacccttttcaggcccaatcttaatcctcccaagtctttcctcactcattcagattgtgcccaggagggattcggtcgcgtgaagtgtcatttcatcaatgttagtgcgcactcgtggagctcggctgcgaactacgccagtattcgtcacgtcgccgttaaatcatccggcaaacgcgtcgttgttaaacatttgctacgtaagagagttggactcgtgaagtgcgcaactattgaagaaatccaagcacagaaatcttccattgtgaaagatggtaaagaaagaatggaggagaccatttgagactcctaacgcgaattt

SEQ ID NO: 19304 - DNA, 899 bp, Gossypium hirsutum
  Clone ID: GOSHI-09MAY01-C6298_2
cccacgcgtccgccaccgtccgaaaagagagtattaaaataaaatccaaaaagaaaaatcatacgatcaaagatcgtctttctcgtctggatttctccgattatcatacataaaactcttcgattaaggggattagagaagatggagtctcacgatgagacagggtgccaagccccagaaggccccattctttgtatcaacaactgtggcttcttcggcagtgcagctaccatgaatatgtgctccaagtgtcacaaagcgatgatcctgaagcaggaacaggcgcaacttgcagcatcatcaatcggaagcatcgtgaatggcagctcaactgggaacggtaaggaaccagccgtggctactgctttggatgtacaatctggaaacgccgacaccaaaatggtctcaacagagctacccattgacccatccggaacgacttcatgtgggatgaaaatgaaagagggtcctaacaggtgtaccaaatgctgtaaacgtgttggtttgacaggatttaactgcaggtgtcgtaccctcttctgtgcagctcatcgttactccgacaaacatgactgccctttcgattaccgagctgctgctcgcaatgctattgctaaagccaacccacttgttcgggcagagaagctcgataaaatctgagaacaacccgggtcaagatgaagatatgtggatggcttatgtaagttggttactcgtctcatcaaatgtccccttgattgatattaaatgttgggagaccaacatagggagggacatgatttgcattggaaggctatatttttccgtttgtaagtgattttaattgtgcttgtttgatggacattgataagaacaaacttgaatgcttcttccttgggggatgcaattctacttctttt

SEQ ID NO: 19305 - DNA, 945 bp, Gossypium hirsutum
  Clone ID: GOSHI-09MAY01-C6298_1
gaaaaatcatacgatcaaagatcgtctttctcgtctggatttctccgattatcatacataaaactcttcgattaagtgatcactgggttcgattttgttagacaagatcggccgattaggatttcaggggattagagaagatggagtctcacgatgagacagggtgccaagccccagaaggccccattctttgtatcaacaactgtggcttcttcggcagtgcagctaccatgaatatgtgctccaagtgtcacaaagcgatgatcctgaagcaggaacaggcgcaacttgcagcatcatcaatcggaagcatcgtgaatggcagctcaactgggaacggtaaggaaccagccgtggctactgctttggatgtacaatctggaaacgccgacaccaaaatggtctcaacagagctacccattgacccatccggaacgacttcatgtgggatgaaaatgaaagagggtcctaacaggtgtaccaaatgctgtaaacgtgttggtttgacaggatttaactgcaggtgtggaaacctcttctgtgcagctcatcgttactccgacaaacatgactgccctttcgattaccgagctgctgctcgcgatgctattgctaaagccaacccagttgttcgggcagagaagctcgataaaatctgagaacaacccggatcaagatgaagatatgtggatggtttatgtaagttggttacttgtctcatcaagtgtccccttgattgatattaaatgttgggagtccatcatagggaatgttgggagtccatcatagggagggacatgatttgcattgtaagtctatattttcccctgtttgtaagtgtttttatttgtgcttgtttgatggacattgatatgatcaacttgtaatgcttcttctttgtggtatgcattttttttctactttttaagttgccttttaagtttg

SEQ ID NO: 19306 - DNA, 1452 bp, Gossypium hirsutum
  Clone ID: GOSHI-09MAY01-C6248_1
attcaaactaactggattcgacccttcttgatgagcttgttgggaatatcgctacacttgcttgtgtctatcacaaacctcctgatggttttgtaactcgtgcaaagactgcaacacagaaaactgaagacgatgactaccctgatggaaatgaaactaggtattctgaaacactttccaatgctgctaatggtggtgcatcaccacccagttctagtagtgtcccacatgctgcagctaggcagccagctcctgccccagctgctcctgcacctgctgcagtgcctgacctcttaagtgatctgattggccttgataacaatcaaattgtccccgctgatcagcctgccacatcttctggcccccctttgcctattttattaccagcaggaagtggacagggtttgcaaatcagtgcacaattagttcgacaggatgcccaaatattttacagtttactgtttgagaataacacacagatcacactcgatggatttatgattcagtttaacaagaattcattcggtctggcagctgctggacctcttcaggttcccccattggcacctggagcatcagcaagaacattgctgcccatggtattgttccagaatacgtctactggtcctccaaacactcttctgcaggttgctgttaaaaatagtcagcaaccagtctggtacttcaatgacaaaatcttgttgcacgtgttctttaccgaggatgggagaatggagcgaactagttttcttgagacatggaggtcactacccgattcaaatgaggtcttgaaagaattcccaggcatcatggtgactagtgctgaagcaacccttgatcgactagctgcatcaaacatgttctttatagcgaagcgcaaacatgccaatcaagatgtattctacttctcagccaagatcccccggggtcttcctgtcgtgattgaacttacaacaataattggaaacccgggtgtgatgtgtgcgatcaagaccccaaatccagagatggcgccactgtttttcgaagctattgaaacactcctgaaggcatgatgttcttttaccctttgttatttttgaactcggttataaaaatgttaaaatgcatgtaaaattcatcttcgagcaacccagtttttggcttcacattaaaaaaaaaaaaaaaaaaaaaaaaaaaaaaaaaaaaaaaaaaaaaaaaaacaaaaaaaaaacaaaaaaaataaaaaaaaaaaaaaaaaaaaaaaaaacaaaaaaaaaaaaaatacaaaaatagaaaaaacaatggagggcgggcccccttaaaaaagaacaagttttatgccccggcaggtctgaaggaaacaccttttttttgggacccccaattgaaatacctgggccactctttttaaaagcatttctgggaaaaacccttggcgtcccaaaattaataagtgcgagagaaaaaccc

SEQ ID NO: 19307 - DNA, 788 bp, Gossypium hirsutum
  Clone ID: GOSHI-09MAY01-C6278_1
cgggcgggccagccgtccgaccacgcgtcccattcatttcaatggctgctcttgcttcttcttcgtcctcctctctcctcttctcatctccacctaccaagttcccttcaccttctctatatcctcctctacgcttgtctcttcccacttcttcttttctctcttcttctctttcactttctccttccttccatgcctaccccaccagctctagacgatactctgcttcttctttcactatcagggcctctgctgcagagaagaagaaggtccttatagttaatacaaacagtggcggccatgcagttatcggtttctactttgccaaagagctgctgggttctggccatgaggttaccatcttcactgttggagaagagggctctgataaaatgaagaagccccccttcaacagattctctgaaattacgagtgctggagggaagacggtgtggggagaccctgcagatgttggcaaggttgttgcaggggcaacctttgatgtggtgttggataacaatggcaaggacttggacactgtcaggccggtggtagattgggcaaagagctctggagtgaagcaattcttgttcatcagtagtgcaggaatctataagccaaccgacgagcctcctcatgttgaaggggatgttgttaaagctgatgctggccatgttggagtcgagaaatatgttgcagaagttttcagtagttgggctgtattccggccacaatacatgattggatccggtaacaacaaagactgcgaggagtggttctttgatcga

SEQ ID NO: 19308 - DNA, 968 bp, Gossypium hirsutum
  Clone ID: GOSHI-09MAY01-C6268_1
atatatctgcaacggtattggttggtttttgttattgcttcgaagaatatgacccaaggacagtctttgcgagaaatttgtcaagaaggcgctcgtttaggtgtgggattgatagggatgataaaggttggacaatgctccacatcggagcccgtaaaggtgacctcattcaggtcaagcaactgctcaacgaaggtgtggatgtaaatgtggctgcatggggccccaaatcccaaggtgtcaccccactccatcttgctgctgagggtggccaccttgaagttatggatgaactgcttgaacgtggtgctaatattgatgcaagaactaaaggtgcttgtgggtggacgccacttcacacagcagctaaagaacgaaagagggaagcagtgaagttcctgatagagaatggggcatttttgccagatgacatcaatgattgtagatttaatccaccgctccattactgccctggccttgaatgggcatatgaggagatgaagcgtcttcaaagagatggctcttcttcagcaggggagacatcttatagctctgaaaattgatattcaatcatatcaaaccgctcttgtttgttcctcctcccgtgtttggtgcttcaatttaatctctttaataaacactagtgggcttgtgacgtgtgttgctatatattttattttgaagaatgttgtttgcatatgaatatgatggcccgacgcctaggaataaattagtactctcatctcatcacatcacatcacatcacatccctgcgcttgcacgtgatatgataggattgatgatgtgcaataatttaaatattgtgtttttctttctcaaaaaaaaaacaaaaaaaaaaaaaaagaaccttctaaccaaatgcatcaaaaacaaataagaaatcttgtctccctcaataggtactatgtatattaaatccaaaaggaagttaatctacatttgggggg

SEQ ID NO: 19309 - DNA, 995 bp, Gossypium hirsutum
  Clone ID: GOSHI-09MAY01-C6208_1
tttccctcgcctcccattgccttgcatttcggtactcaaaaagctttctcatggctatcatctactttcttttataagggtcacaagtttttgactaattagttctgttttctcttcacaaacttcttcaatattgaaagtgccaagatgccaagatcaaggggctcggacatgccacaaaggcaatctcctcgagggacgcatcaggttaggtcatcgatttctgattcagaccctttgcatcatcgatccattactgatcgtagtagtcctaagcttggagatcgtcgttcaccaagaggtgctccacaatctgatccattgaaccaaaagaagcttggcactcgtattgcggatttagaatctcaactggggcaagcacaaggagagctgaagaatctcaaagaccagttggcttcagcagaagctgcaaagaaagaagcgcaacaagagctggaaaataagaccaagaagcctaaagctcgggaagctgttgaagttaatgagaaggtttctccgaaaagaactcgagattctaagaaatctgattgtagcatcagagaagaagtttctgaagataaccaacaagaaactgatgtgtttgaagtcacagtggaaaaaacagcaattgagcctaaggtggaaaccgaagaagtcgatcaaggagatgagaaaaccaatgcaatagagatatcgagtgcaccaccagcagaatccaagctggagaaacaatttttccaagacttggctttgaaaaacgatgagatcaatatgctgaagtccaagctagaagaaaaagaaaaggagcttggtgtgttcactcaagaaaataaggacctgaaaaagcagctcaatgaagcgaacttgaacatttcaagtgctaaagttaaggaagaagaaatggcattgaagttgggccaagtaggggaggagctggaagcaagcaaaacaaatacaactcaattgaaggaaaagcttcaatcagtggaagaaca

SEQ ID NO: 19310 - DNA, 617 bp, Gossypium hirsutum
  Clone ID: GOSHI-09MAY01-C6238_1
cccacgcgtccggaagaagatgacgagttcatcagcaaccttaagcttctcttcattttcttcaacctcagccctatctttatctaaagtcagattcaaatttccctccttttcacgaacctcctctctctcatctcgcgccaagccattcaccgcttcttcttccaccaccacccacaacatctcaggagaaattcgccattgcagtttgagtaggaggagagggctggcttttactgcaacgctaccggttcttcttcctctgcatgaatttgtagactctgttgccgctaaggcagttgagtcaggttcaggtcaaagcgagtatatgcgtataaaggaagagataattaaagtagtaacaaagggaaaggctgctggtgttcttcgtttggtatttcatgatgctggaacctatgaaatggatgaaaattcaggtggtatgaatggttccatagtttatgaactcgaaagacctgaaaatgcgggcctcaagaagtctctgaaggttctagagaaagccaagaaagaaatcgaagctatacaatcagtatcatgggcagacatgattgctgttggtggagctgaagctgtttccgtttgcgaggtccgaaaat

SEQ ID NO: 19311 - DNA, 422 bp, Gossypium hirsutum
  Clone ID: LIB3165-023-P1-K1-H6
tccgtgaaattcggccactttccaaagggtgccttcctgcatgttctgttgtctaggcgccatggccattctcaaatttccttcttaagacccttatattattcttccaatggatctttgcatctgcttttctcctccttttatcatgtcacgtaatttacccgttgaagagacaagggaactgtgctgctcagcagcttcagcacttgttactaaactgtcctatgcaatcttcatctttttatttgcagtggtaggagcaacattaggagccctgactggagcttttgttgggacgaaaacaaagatgggttgtcttcatggagccatggttggagccataaaaggcagctttttctccatcaatctcttcaaaatttcactcaaaatttgcagttccgaaatccgtgtctcaaaatcat

SEQ ID NO: 19312 - DNA, 411 bp, Gossypium hirsutum
  Clone ID: LIB3165-023-P1-K1-H7
gtgctctgcaaacaatccatcaacatcggcgttttatcttctgtcgattgctcggggcgcactttacacactaatatagaatgaaaaagaaactcatattataccaccactggaaatgtgtatgacctttattgctgctatgatgatggaacgtaatttaccgaattgaagagacagggcaactgtgctggtaaacaagttcagcacttgttactaaactgtgctatgcaatcttcatgtgcttatttgcagtggtaggagcaacattaggagccctgactggagcttttgttgggacgaaaacaaagatgggttgtcttcatggagccatggttggagccataaagggcagttttttttccatcaatctcttcaaaatttcactcagaatttgcagtttcgaaatccgtg

SEQ ID NO: 19313 - DNA, 453 bp, Gossypium hirsutum
  Clone ID: GOSHI-09MAY01-C107963_1
gaaataaaaatatttcaagagtttacttttttaggaccactagtaagataatccactgctctatacgtacataccattattgcatgataaagatagctataaattcattcaacatttgcatttattgtaactgacgttgcagatgcaataaaatccttcaagaccaaaaacagtgcgttggccttatcaggctgcataaaatccactccatgatgatcccccatacgaaaatggctcactacctttacacccttttcttccattgattttacgagctccacctgacggtcgattaaagggtcgccgtcacagccggtcaccaacactttccatcctactgcagcgaccttctccataaggtttgtccccttggttgttgttggattacaggactcgtggtcacggccaactccgattggcaacgccagttcccacatcaagtcccccacacca

SEQ ID NO: 19314 - DNA, 457 bp, Gossypium hirsutum
  Clone ID: GOSHI-09MAY01-C7938_1
tctcacgatactttccccattctcaatcgtcatctactcctcacctcacctttctcctccgctgcatggccacttccgccgctgccggtcccattaacccatccaacactcgccttggatggattgggactggcgtcatgggtcgatccatgtgtgctcatctgatcaacgctggctactctctcaccgtcttcaaccgtaccctttccaaagcccaacccctcgttgacatgggtgcccgcctagcccaaacacctcacgacctcgctgcccaatccgatgtcgttttctccatcgtcggttacccttccgacgtcctccaggtcctactcgatccctttaacggagccctctctggcctccgtcccggcggcatactcgttgacatgacaacatcggagccttctctcgccgtcgaaatatccaccgccgcatcttccaagaactgctcctcaat

SEQ ID NO: 19315 - DNA, 1557 bp, Gossypium hirsutum
  Clone ID: GOSHI-09MAY01-C7868_1
cccacgcccccgctaagctgccacctcagcttccgacgccaaaagaaaaaaaaactgaaaaattacaactcgtccttgttgactcggttccccgcctttttttgttgtctcgaatcggtctcgagtttttggaactcagttcgtgcttggatctggtaagacttttaaggtaaatcagaaactgtatcagaatgaaggcacttattcttgttggaggatttggaactcgattgaggccattgactctcagtgttccgaagccacttgtcgaatttgctaataaacccatgatcctgcatcagattgaggctctcaaggctgttggtgtaagtgaagttgtattggctattaactaccaacctgaggtgatgttgaacttcttgaaggaattcgaaactaaactcgggatcacgatcacgtgttctcaagagactgagccgcttggcactgctggtcctcttgctttggctagggacaaactcgttgacgagtccggtgagccgttttttgtccttaacagtgacgttatcagtgagtatccattcaaagaaatgattgaattccacaaagctcatggtggagaagcttccataatggtaaccaaggtggatgaaccatcgaaatatggtgtggtggtgatggaagaatcaacaggacaagtggacaaattcgtggaaaaacctaaattgttcgttggaaacaaaatcaatgctgggatttatctgctgaacccttctgttcttgatagaatcgaactgagaccaacctcgattgaaaaagaggtcttcccgaagattgcagccgagaagaagctgtatgcaatggtcctaccagggttttggatggacatcggtcaaccaagggactatattaccggactaagactctatctagactcccttcgaaagaaagcttcacctaagttggccagtggtccaaacattgtaggaaacgttttggttcatgagactgccaaaatcggagaaggatgtttgatcggaccagacgtggcaattggtccaggctgcgttgtcgagtccggagtcagactttctcgttgcacggtgatgcgtggagtgcgcatcaagaaacacgcatgcatatccagcagtatcatcggatggcattccaccattggtcaatgggctagagtagaaaacatgaccatccttggagaagacgttcacgtatgtgacgaaatttacagcaacggcggcgtggttttgcctcacaaagagatcaaatcgagcatcttgaagccggaaatcgtcatgtgatgatgttttttcgttttccaggtaaaattaaagaatgtatttgttcttttttttattaattccttctttttcactccaacaagaagtattgaatcccagttttctgctaagtctctagggtcatttcctgtttgtcaattgcttaagttaatcattggtgtgaaatgtgtaactttaatgtgtatattacaaataaacattacatctgttggttttatccgggatttttttttaacttattagcaataatttgtttatttttgtaaaaaaaaaaaacaac

SEQ ID NO: 19316 - DNA, 450 bp, Gossypium hirsutum
  Clone ID: LIB3146-018-Q1-K1-B8
acgctagaataatctatatgcaacggccttaccatggttttggatggacatcggtcaaccaagggggtattttaccggactaaaactctctctagactccgttataaagaaagcttaacctaagtgggccactggtacaaacgttgaacgaaacgttctggttcatgagactgacaaaatcggataaagatgtttggtctgaccacatgtggcaatcggaccaagctgcggagctaagactggagtaccactctctcggtgcacgatgatgcctggattgcgcattaagaaacacgcatgcatattcagcagtatcatcggaaggcattacacagatgctcaatgggctatagtagaaaacatgaccattcttggagaagacggtcacgtttgtgacgaaatttacagcaacggcggagtggttttgcctcacaaagagatcaaatcgag

SEQ ID NO: 19317 - DNA, 397 bp, Gossypium hirsutum
  Clone ID: LIB3272-034-P1-K1-H5
ctccaaaccatgccacatttctcttctccacctttctgggcgggatcgctatcgatgcacatagactgtcagcgttccgaagccacttgtcgaattcgctaataaacccatgatcctgcatcagattgaggctctcaaggctgttggtgtaactgaagttgtgttggctattaattaccaacctgaggtgatgttgaacttcttgaaggagttcgaaactaaactcgggatcacgatcacgtgttctcaagagactgagccgctcggcactgctggtcctcttgctttggctagggacaaacttgttgacgagtccggcgaaccgttttttgtccttaacagtgacgttatcagtgagtatcccattaaagaaatgattgaattccacaaagctcat

SEQ ID NO: 19318 - DNA, 700 bp, Gossypium hirsutum
  Clone ID: GOSHI-09MAY01-C7818_1
gtccttgttccagacctatttcgtggttacttttgggaaaagggccaaccaaaaccaatgtttgaacaatggctggctagccaagaccttcagagggttgcaaatgacatagcaacctcaacaaaatggatggttgatgaatttagagctgcaggaatttcaaagaaacttggtatcattggattttgctttggcggtggccgtgtgatcgatgttttagccgctgaccagggtgcttgttttagcactgctgtctcattctatgggaccaggatggatccgacaccggcatctaaaataaaggtgcctgtgttgttcatttcaggggatgatgacccgctctgtcctattggtgttttgagcaagttcgagaagatcattggcaacggctctagggttgtaatcttcaaaggaagaggtcatgcctttgcccatcgaccgggatctacagaagaggatgcagatgctgagcaggcatttaccttgatgaggaattggcttcatgatggcctactcgtaaacagttgagcgcatctatgttcattggttatcttatagggtgcttaaggtagaattggtgcatctttctggcaatactctgaacaagcaatttgttcttgacgatgctcatgcccattgatgtatatacgctaattaatgtcggttttcatctcttttatattacaaagaatttcaggat

SEQ ID NO: 19319 - DNA, 684 bp, Gossypium hirsutum
  Clone ID: GOSHI-09MAY01-C7598_1
atcatgcgtagaacattatctgctgctttacttatttgtggggaagaggaaactgcacggtcgctgttatgcaagttcaaatggggtcatcccttcctgtcccttaacagggaacttttgaaggcatattctgaatgtgaaaatagtgctgacatcatatcagtccaaaattcttggctttcccaacaaaggcaggtccctaaggttccaccagatgcagcagaaggtgcatccaatgattcagaagatgaggagggttcttccaatgattctgaagatgggctacctcctctagaaaggaacatgaaccatttgagtttgcaggaaagtgatgatgaaagtgagtaagtagtatccagcaatagtttcattcacaagtaagcaccattagtaagtagaaagagggaaatatgttatgggcccgtttcttatatgctgcacatctcttaccctgattccttcagacttccatttcctataggtgaaatgaaatattaaatctaacgtaggtagaaaatggtttttcctacttctcaaggattactatttgactgttttgtatctgttcggagggaggtggggctgactgggcttaacatatattactttctaattgcttaacatcttatttcaatgtttcaaaagattataatttatttttagattaaatatataatttttatg

SEQ ID NO: 19320 - DNA, 451 bp, Gossypium hirsutum
  Clone ID: GOSHI-09MAY01-C7578_1
attggaacagtcgatttctttttatttcatatttatttggactccacaagaatgcggcgagatttccgattcaatcgtcttggtcctaggaataaattaatattctattcctttcgagataaagagaaacatttatttcaagttacaacctaagagcctttttcaacatcttatctttctttgattccagaacacaacaagatccatttctatctatatattctatctattctataatagatagaaacctaaatcaaatcatgtcttcacatatcaaatatttccatatcgatacatatgacacttttgttctgccaatgtgatggagagtgagtgcgaaaaagaaactttcattttgagtctcctattatttaatttaatattattaaatattgtattagattgaggtataggagcttcgaatctttttctgatacaccgaacgcgtggg

SEQ ID NO: 19321 - DNA, 700 bp, Gossypium hirsutum
  Clone ID: GOSHI-09MAY01-C7508_1
ggaaatttctcaaggattctcattgcttttcttaggcaaatcccaaagccataacagatgcaatctctcgtacccaaccgcccaccgcccaccgccaccaatggttccgccgccgtctacgccgccgcctgacccccaacaaatccaacaattcctctcctccgtcctctcccaacgcggcccttccgccctcccttactccgaagactccaaatggctgatccgccaacacctcctttccctcacctcccgctacccttccctccaacccaagaccgccacttttacccacaacgacggccgctccgtcaacctcctccaagccgacggcaccatccccatgcctttccaaggcgtcacttacaacatccccatcattatctggctcatcgaatcttaccctcgttaccctcccgttgtctacgtgaatcccacgcgcgacatgatcatcaaacgcccccatccccacgtttctccctcggggttagtttcgatcccttatttgcagaattggatttacccaagctctaattttgttgatttggtcattaatttaggctctgctttttctcatgatcccccgctttattcccaacgtcgctccaatcctaaccctaacccgcctaattacgggcagcagcagcagccaccgccactgaaggttgctgccgcgggttatccgccttcgccttatggcagg

SEQ ID NO: 19322 - DNA, 756 bp, Gossypium hirsutum
  Clone ID: GOSHI-09MAY01-C7448_3
gctgtttatcccttcgcgccgctcttcatttttcttcgctctaaggaaagctaaatccggggtcccgatttcagctcaaaaatgtcgggagaggaagttgcagttgccccaactgaggttgctgctgccattggtgagccaatggacatcaacgcagccttgcctcttgtgattaggaagtccaaagctcatggtgggcttgcacgtggtttacacgaagctgccaaggcaattgaaaagcacaatgcacatctttgtgttttagctgatgattgtgaccagccagattatgttaaactggtcaaggcactctgtgccgatcacaatgttaaagtgctacgtgcacctagtgcaaaaactctgggcgagtgggctggtttgtgtaagatcgattctgagggaaaggcaaggaaggtagttggctgttcttgtgtagttgtcaaggattatggtgagcaacatgaggctgtcgaagttgttcagcagcacaaggattaagcaaatcagaggatggttgccttggtatgctgagtttttttgttatttaacgagttcttgatagtgaacaacaaaagattattttcttttgaagttgttgcgattctctggaactgcttggtgtttctttaagtatgctacactcttttttcatttaaattttacgtggttagttcatggccccccattatatgttgaaatcatatcttttcgcccctttggcctattttgatgccgataatagaaaaaatcgggcgg

SEQ ID NO: 19323 - DNA, 702 bp, Gossypium hirsutum
  Clone ID: GOSHI-09MAY01-C7448_2
aaaccctaacattcctccgccacccaacagatcaattcgttgagggctccccgctcttcattttctttactctcagaagccccgatcccatcttcaactccaaaaatgtcgggagaagaggttgccgttgcccaaccagaggcacccgctactcttggtgagccaatggacatcaacacagccttgcctcttgtggtgaggaagtcccaagctcatggtgggcttgctcgtggcttacatgaagctgccaaggcaattgaaaagcacaatgcacatctttgtgttttggccgatgactgtgaccaacctgattttgttaagctggtcaaggcactctgcgctgaccataatgttaaggtgctacgtgcacctagtgcaaaagctcttggcgagtgggctggtttgtgtaagatagattctgaagggaaagcacggaaagtagttggttgctcttgcgtagttgtgaaggattacggtgaacaacacgagggtgtcgaagttgttcagcagcacaaggattaagtaaagaggatggtttctttggtagaatcagagtttaattttggccattcatgatatttgcttaagtaattttgttttttcaaaggcagaacttcttggtgtttcttatgtatgctacctttctcattttaaattactggcaaaccattttggaaatccaacaatttttaatcttgtttc

SEQ ID NO: 19324 - DNA, 862 bp, Gossypium hirsutum
  Clone ID: GOSHI-09MAY01-C7448_1
tttcacgcgtccgcccacgcgtccgccccttcgccacccagctgctgcatatctctctcgaaacagtacctccggttccaacttcagctcaaaaatatgtcaggggaagaagttgcggttgcccaacccgaggcggcgcctgcactcggtgagccaatggacatcaacacagccttgccccttgtggttaggaagtcacgagctcacggtgggctcgcacggggattacatgaagctgctaaggcaattgaaaagcacaatgcacatctttgcgttatagctgatgactgtgaccagccggattatgttaagctggtcaaggcactttgtgctgatcataatgttaaagtgctacgtgccccgagcgcaaaatcacttggcgagtgggctggtttgtgtaagatagactctgagggtaaagcacgaaaggtagttggttgttcctgcgtagttgtgaaggattatggtgaacaacatgaggccgtcgaagttgttcagcagcacaaggactaggtgaccggaggatggtttctttggtaaaatcatagctatttttctgggccatttatatttgtttgatagtgaactgtggattaatatgcctcagaatttcgttttctttttccgaagttgttgcaatgctgaactgttcggtgtttcttaaatatgctaggcattttttccctttactaaattatgtgtttagtaggagcaaaccatttggaaatccaacaattttatcagatgttttgtcttctatttatgaaaaaccagttcaagtttgcgttgttcataaagaaaaatacttaacaaagaaaaaaaagtaacaaagaaaaaaccttaaaattataaagccaaaacc

SEQ ID NO: 19325 - DNA, 488 bp, Gossypium hirsutum
  Clone ID: LIB3829-036-Q1-N6-B7
gaacctaaatctctcccttcaattgatttggctactttcactgccccaccatagaaaagcaaattcaatagtcaagcatggaaccaagtccatgaaccaataacaatgttataaccggacagacaatttggatcgagcttagctaggtcctagccccattaacaacgcaaacttgaactggtttttcataaatagaagacaaaacatctgataaaattgttggatttccaaagggtttgctcctactaaacacataatttagtaaagggaaaaaatgcctagcatatttaagaaacaccgaacagttcagcattgcaacaacttcggaaaaagaaaacgaaattctgaggcatattaatccacagttcactatcaaacaaatataaatggcccaaaaaaatagctatgattttaccaaagaaaccatcctccggtcacctagtccttgggctgctgaacaacttcgacggcctcatgttgttcaccat

SEQ ID NO: 19326 - DNA, 448 bp, Gossypium hirsutum
  Clone ID: LIB3272-052-P1-K1-G11
gcccgcggcacacggtccggaattgaccgacgcgtccacacatacgggccaacgctgaaaattatatcatcgaaacaataccttcggctccaacttcagctcaaaaatatgtcaggggacgaagtggcggctgcccaacccgaggcggcgcctgcactcggtgagccaatggacatcaacacagccttgccccttgtggttaggaagtcacgagctcacggtgggctcgcacggggcttgcatgaagctgccaaggcaattgaaaagcacaatgcgcatctttgcgttatagctgatgactgcgaccagccggactatgttaagctggtcaaggcactttgtgctgatcataatgttaaagtgctacgtgccccgagcgcaaaaacactccgcgagtgggctggtttgtgtaagatagactctgaaggtaaagcacgaaaggtagttg

SEQ ID NO: 19327 - DNA, 402 bp, Gossypium hirsutum
  Clone ID: uC-gsflnu33B140c09b1
tcccacgcgtccggacaccacagatgatgaatttaatatttacaaaacggtatactacgaatccaacttcagctgaaaaatatgtcaggggaagaaggtgcgggtgcccaacccgaggcggcgcctgcactcggtgagccaatggacattaacacagacttgctccttgtggttaggaagtcacgtgctcacggtgggctcgcacggggattacatgaagctgctaaggtaattgaattgcacaatgcacatatttgggttatagctgatgactgtgaccaggcggattatgctaagctggacaaggcacttagtgctgatcataatgttaaagtgctacgagccaagagtgcaaaataacttgttgagtgatctggattgtgtaagatagactttgagggt

SEQ ID NO: 19328 - DNA, 675 bp, Gossypium hirsutum
  Clone ID: GOSHI-09MAY01-C7418_1
tagtttttcaccccccttttatttgtcacagatttaacatccaaacacaaacaccaccacagaagcaccatcaccaaagaaaaaagaaagagagaatgcttttgagaagttcttcaacaccagttcttggatctctggtatcttccatagctgctgatagtcctagcaacaacaatcattactatgaaaccagcagcccctttaggcattacccatcgagctcttttcatggtcacacccaccataacaggctctcgtttcattcttctccaggctccgtccacctatctactgtagtttcttgtggctcttccccggtatctccttctgttgatcagttttctgattttgagcttacagggtttcgtcgggctcaatctgaagggaacttggaagggctcgcccatgctgcttgcgatggcaatgatgaattctacaagcggaaccaacctaagaagttttctgcaaggcacaacaagaagtgcttgatgttgcaaaccatcccttccttttcgttttataaatcgggcgcaaggtgtgaggaagaagatgatgaagaagaagggagtgatttcgaggaagaggaagaagtgttgaacgaaaatgaagaaagggtaatggctgtcagtggtagccatggattcaaccctatcagcatggagaatatactgttga

SEQ ID NO: 19329 - DNA, 506 bp, Gossypium hirsutum
  Clone ID: GOSHI-09MAY01-C7798_1
gaaatttgcctatccccccaacttcatcctcttcatggctcaaattacatttcttgctgctgtttgtgctcttcttctatcacattcctttatatcaggagtgcaaggaacaagctttaccatagtaaacaaatgcaattacgtggtatggcctggagttctctcaaacgcgggcgtttccacaatttccaccacaggtttcactctccgaagaggtgaatccaaaaccattagcgccccggcatcatggggaggtcgtttttggggaaggacccattgctccctagattccgccggtaaattctcatgtttgacgggcgattgtgcttccgggaagctagaatgttcagggaacggcgctgctccgcctgccactttggctgaatctaccttggacggtgccgggggtcttgattttttcgatgtgagtctggttgacggttacaacgtccctatgctggtggttccccagggcggcacaggccaatactgtacctacactggct

SEQ ID NO: 19330 - DNA, 474 bp, Gossypium hirsutum
  Clone ID: GOSHI-09MAY01-C7768_1
cggacgcgtgggctattatttaatttaatattattaaatattgtattagattgaaaaataggaacttcgaatctttttctgatatacataaagtaaatagaaaaagattcgaagtggatttctcgacccgtgaaatgaaaaaatagcctctggagtttttttgttttatattcatctgaaggaaatatgagaaagaaaacaataaataaaagaaataaaatgaaggaaatatatcagactatagtaatttaatacacatagaaattagaaaaatacataaaaaggttgggttttatcaatttcacgaacaagatccaagaataagattagttgatggagggggaggggtagatctggggatcaaccagtagcgagagaagggatcgcttcttccttgaattgaagagttcgttcaaaaaattcatctctctgattgatgagccataagacaattcatggttcagacgactcgtc

SEQ ID NO: 19331 - DNA, 612 bp, Gossypium hirsutum
  Clone ID: GOSHI-09MAY01-C7648_2
cccacgcgtccgcccaaacagagagaagctttccaatccctatgtcaaggcttccccctcaggttgctcaaagcatccaagcaggtgctgccagacctgggaaagtagttggatcagtattgcgatacaacaattgtggggcagtagccgcaggtgaggctcttgaacagcgaaggatggctcggaatccttcagttccaactcagtatactgccacaaattgctcatatccacggagaaatcccgtctgtaaagatgatgaagaaaatgaattgcagccaaaaccccagtacatggctaggaaagttgctgctgcccaaggtggatcaagaagtcagtggtattgacctaatatcaactacaaatggccaacaaaaaatgccggtgaggatttagtcccaaattgctcttcctactgctggttgaggaaaagctcagacaagttacaagtgaagctatgcattgtaatttatagcactaatttcaaagagatgaaactgtgccttcctatccttcataagatatgtgaaagttagagacttgaggaaaaggcaaaagtgaactctgttaacttatgaagttggttctctactttatttattctttattaac

SEQ ID NO: 19332 - DNA, 1188 bp, Gossypium hirsutum
  Clone ID: GOSHI-09MAY01-C7648_1
atttgaccccagacactaccaattttttctttatcagcttcttcggggcctgaaatcattcacacagctaatgtttttcatcgggatctaaagcccaaaaatatcttagccaatgctgattgcaaactgaagatctgtgattttgggcttgcaagagtagcttttaatgacacccccactgcaatattctggacggactatgttgcaacaagatggtacagggctccggaattgtgtggatcctttttctccaagtataccccagcaatagatatatggagcattgggtgcatctttgctgaacttctaacagggaaacctctgtttcctggaaaaaatgttgtccatcaattggatctgatgactgatcttttgggaacaccatctgctgaagccattgctagggtgcgtaatgagaaagctcggagatacttgagcagcatgcgaaagaaaaagccaattcctctctcccacaagttccctaatgcagatcctcttgctgttcgtttgttagaaaggatgcttgcttttgaacccaaggatcgacctagtgctgaagaggccctagctgatccatatttcaagggcttggccaaagttgaaagggagccttccgcacaaccagttaccaagatggaatttgagtttgagagacgtaggattacaaaggaagatgttagggagctcatataccgtgaaattcttgagtatcatcctaaaatgttgaaagagtatctggaaggatcagagccaactggcttcatgtatccaagtgcggttgaccatttcaagaagcagtttgccttccttgaggagcactatggaaatggtacgactgcagctccacttgagagacaacatgcatctttgccaaggccatgtgtgttatattcagattattcagtacaaaactcaacagatgtgacagataacttatctaaatgttccatcagggaaactgagaaaccccaaacagagagaagctttccaatccctatgtcaagggcttccccctcaagttcctcaaagcatccaagggtgctgccagacctgggaaagtagttggatagtattggatccaacaattgtgggcatactgcagtaagtcttgacgcaagatgctcggaacctatcactatactgccaaatggttttcccggaatccgttgtaagatagaatgatgtcct

SEQ ID NO: 19333 - DNA, 525 bp, Gossypium hirsutum
  Clone ID: GOSHI-09MAY01-C7668_1
cccacgcgtccgcaattatcaactgttgcgatttcttttcttcgcctctcctgtttcttgctcctaaaacatatagtcgcctgcttcgaacttagttgagaaagatagatgcttaggttaaatgtttattgttctctaaatattcctattccggaacatattaagcttgggagtagtgatggttcaggcttacctaagttccgtggtggacccaagctgcctcgtcgggtttcagtcagggcgttaaaagatgagatggacggtggtatgagcggcggctttcaaggccggagctgggaacctggcttggaaattgaggtcccttttgaacaaagaccggtgaatgagtactcgtctctgaaagatggacctctgtattcatggggcgaactgggaccaggccaatttttccttcgactaggaggactctggctggtaactttcacggttcttggagtcccaatagcagctgcaggctttaatccttcaagagaacctttaagatttgtgcttgcagctggaaca

SEQ ID NO: 19334 - DNA, 457 bp, Gossypium hirsutum
  Clone ID: GOSHI-09MAY01-C7638_1
aaacccggaaaggtaacaattagtggatatgcattatcaggagggggccgaggaatcgagagagttgatatatctattgatggcggtaaaacctggttggaagcatcattgttctctgaaaaccggtgccccttacatagcggagcgtgtaagcagtggcagatgggcatgggtgctttttgaggtcacagttgatatcccatacagtactgagatcgttgccaaagcggtggattcggctgcaaatgtgcaacctgaaaacgtgcaagatttttggaacctaagaggtattctcaacacttcatggcatcgagttcaagttcgcgtcgggcactcaaatatgttaatggaacagttaaataacttgattagcaatgctgaaatatgtggctgaactttctttaccattgtgttttttgagaaaataatatcacccgctttaacaatgatgtttttg

SEQ ID NO: 19335 - DNA, 498 bp, Gossypium hirsutum
  Clone ID: GOSHI-09MAY01-C7198_3
gtacactatgatggaatggtcatatctatggactcagacataagacagacagggatgaaaacgcattcaatgtctctttacaaactcaaacaaaccttttacttctcaactctctcaaattcaccatggctgacaagtgcggcaactgcgactgctctgacaagagccagtgtgtgaagaaaggaaacgccttggtcattgagactgagaaaagctacatcagcactgtagtggtcgaggctgtggcagagaacgatggcaagtgcaagtgtggaactagctgcagctgcacaaactgcacatgtggcaatcattaagcagacatatatagaactgcacgatgttttagtccataattaaattaagttgaataattggtggcgtgttgcatgtttgtctccgcctcattgtataccatgatagaatggccatgtctatggactttgtctgattaatgaatgattattagcacaaaaaaaaaaaatgtaaaataatttg

SEQ ID NO: 19336 - DNA, 491 bp, Gossypium hirsutum
  Clone ID: GOSHI-09MAY01-C7198_2
cccacgcggccgcgcgccttcgaaactcaaacaaaccttttacttctcaactctttcaaattcatcatgtctgacaagtgcggcaactgcgactgctctgacaagagccagtgcgtgaagaaaggaaatagcttggtcattgagactgaaaagagctacatcagcactgtagtggtcgaggctgtggcagagaacgatggcaagtgcaagtgtggagatagctgcagctgcacagactgcacatgtggcactcattaagcagacatagaaccatgatgttttagtccatagcaatattaggacctaaaaataatgaaattgagttgaataaattggtgttttgttgttgtagtttgagacattgaatgcgttttcatgcctgtctgtcttatgtctgagtcctcattgtacacaatgatggaatggccatatctatggacattgtatgattaatgaattattatcagtataaatcttctctttatattcat

SEQ ID NO: 19337 - DNA, 524 bp, Gossypium hirsutum
  Clone ID: GOSHI-09MAY01-C7198_1
ccccccagccacctgctttagaaactcaaacaaactttttagttctcaactctctcaaattcaccatggctgacaagtgtggcaactgcgattgcgctgacaagagccagtgtgtgaagaaaggaaacagcttggtcattgagactgaggagagctacatcagcaccgtagtggtcgagcctctggcagagaacgatggcaagtgcaagtgcggaactagctgcagctgcacaaactgcacatgtggcagtcactaagcagacatatagaatgatgaagtttgggacctaaaaagaataaaagttgggttgaataatttgtgtcttttgttgtagtttgagtgtgttttcttgtctatctgtccgatgattgtctatgtctctcattttatacaatgatggaatgaccatgtcaatggcctttgtctgattaatgaactattattagtataaaaaaaaaaacatggataaatttattgacttccaaaatttctccccaatttaataaataatggggcggccgtt

SEQ ID NO: 19338 - DNA, 466 bp, Gossypium hirsutum
  Clone ID: uC-gsflnu33B035d02b1
tctttactttttaggtgtcaactgtctgaaattcaccatggctgacatgtgtggcaactgccattgcgctgactggagcctgggtgtgaagaacggtgacagcgtggtcactgagactgaggagagctacattagcaccgtagatgtctagcctcttgcaaaaaacgatggcacgtgcaagtgcggaactagctgcagctgtacaaactgcacatgtggcagtcactatgaagacatatagaatgatgaagttagggacctaataagatttaaagttgggttgactaatccgtgtcttttgttgtacttagagtgtgtgatcttgtatattctgtccgatgattgtctatgtctctgattctatacaaagatggaatgaccatgttaatggccgttgcctgactaatgaaccattattagtttaagcatcgagactccccaagagataatttgaacaatctttaca

SEQ ID NO: 19339 - DNA, 380 bp, Gossypium hirsutum
  Clone ID: LIB3166-024-P1-K1-D1
ctcgaacaaaacttttacttctcaactctctcaaattcaccatggctgacaaggggggcaactgcgactgctctgacaagagccaatgtgtttaagtaatccataatcatccatccatgatggagcttgccagtagtttctagtcttgtgtgtgattttgagatcatcatgctgtttttgttgtgcatgtgcattttactacgtatatgtcaccattaagctggaccaaagctttttcaaaagcatttatgaacccatgtttcctcaaggatgttacccagtacgcgagtgtaggatatagatatgtgtcaaccggaggatcatattcttatactcttgctcgaatatcagataccagtattgctaatcttgttacaact

SEQ ID NO: 19340 - DNA, 327 bp, Gossypium hirsutum
  Clone ID: uC-gsflmaxxa039a04b1
cttatatttttacttctcaactctctcaaattcaccatggctgacaagtgcggcaactgcgactgctctgacaagagccaatgtgtttaagtaatccataatcatccatccatgatggagcttgccagaagaaaggaaacgccttggtcattgagactgagaaaagctacatcagcactgtagtggtcgaggctatggcagagaacgatggcaagtgcaagtgtggagctagctgcagctgcacaaactgcacatgtggcaatcattaagcagacatatagaaccatgatgtttagtactccataattaaattaagttgaataattg

SEQ ID NO: 19341 - DNA, 1427 bp, Gossypium hirsutum
  Clone ID: GOSHI-09MAY01-C7188_2
aagaaatcaagaaccagaatgcaaaattcagaaaaaagaagaagaaagaagccctttcttcctctcttttggtcactcaattttccgtagtattcttttgcatggcagtgaggttattgtcacatgagttgtctgacttgtgtcttggcaagccagcgctgaggtcactttctgtaacatccaccattgctgaggctcttgaggtcttgaaaacctcggatgataacttcgttagtgtgtggagttgcgatcataaggctaaaaccagttcagggtttgagtcggctgctggtttttgcgacaattatgatgatgatgattgtagatgtgtaggcaaagtttgtatggtggatgtgatttgttatctttgcaaagatgaaaacttggtgtcaccttctgttgctttgaaggagcctgtttcagtgcttttgcctaagattcctggccttgttttgcatgtggaaccgtcttgcagcttgttagaagcaatagatcttatacttgaaggagctcaaaaccttgtggtgccaatcaaaaccaagctcagcaacaagagaaaacagcaccagaagccatcaccgacggtcactgtccacaaaggccgtgaattctgctggttaactcaagaagatgtgattagattcctactcagctcaattggcctcttttcacctgtccctgctttctccatcgacactcttggcatcatcagctctgaaatcctcaccattgagtaccactcccctgcttctgcagccataggagccatttctcgaacccttgtggaccaaacttcagtggctgtggttgacagtgaaggctgtttgattggagaaatttctcccttcaccttggcctgctgcgacgagacggtggcagcagccgtcaagaccttgtcctccggggatctaatggcctacatcgactgcggaggtccaccggaagaccttgttcgggtcgtttcatcaaggttgaaggagagaaacttgaatggaatgcttgaacatttcagtatgtcaatgtcatgtggtggattctcatcatcgtcatctgatgaagaatccatggcagcctcaccattgccaaggtccggaagatatagtaggtcaatgagttattcagccaggatggtgagaacagctgaggcaattgtgtgccatcccaagagttcattagttgcagtgatgatccaagccatttctcatagagttaactatgtttgggttatagaagatgattgtcgtttggtcggaattgtcacattttctgacatgttaaaaggtttcagggaacatttggaaaccatagcttaacaaaaaatgatgagaaaagcttttgtttaaaacttttgctaatcccttaacttaaaagtttggcaaaagatttcacctttaatttcatgaatctgtttaaagattcttctcatt

SEQ ID NO: 19342 - DNA, 660 bp, Gossypium hirsutum
  Clone ID: GOSHI-09MAY01-C7188_1
tcgcctttgcgtccaaaccagcaaaagaaagaaagaagaagcatccctttataccccactttaagttactcaaaatttccgtacttttattttttgcatggcagtaagtctattgtcacatgagttgtctgacctgtgtcttgggaagccagcactaaggtcactttccatcacatccaccattgctgaagctcttgaggtcttgaaaacctctgatgacaactttgttagtatctggaattgtgatgatgttgagtgttgtagtagatgtgtaggcaaagtttgcattgtggatgtgatttgttatctttgcaaagatgaaaatttggtatcaccttcaattgctttgaaacaaccagtttctgtacttttacctaagatccctggtcttattatccatgtggaaccatcttgcagcttgttagaagcaattgatcttatacttgaaggagcacaaaaccttgtggtaccaatcaaaaccaaggtgttcaacaacaagagatcaaaacagcaacagaagccattttgttggttaacacaagaagatattatcagattcttattaagctccattggtcttttttccccaatctcttctttctccattgacacacttaacataatcagccccaataccctcaccattgagtatcactctcc

SEQ ID NO: 19343 - DNA, 411 bp, Gossypium hirsutum
  Clone ID: LIB3493-021-P1-M1-A10
tgttcttccaaaaaaaagaaaaaacccaccagctagattgatgagactagatttcacaagatatgggatttatcagacacagattagaaagaaagatcattcataactctggtctatctaatagttggaagacacggtgaagagcttcacatttgggccccattttatcacttttgagctgctccttaagctgttctcaccatcctggctgaataactcattgacctactatatcttccggaccttggcaatggtgaggctgccatggattcttcatcagatgatgatgatgagaatccaccacatgacattgacatactgaaatgttcaagcattccattcaagtttctctccttcaaccttgatgaaacgacccgaacaaggtcttctggtggacctccgcagtcgatg

SEQ ID NO: 19344 - DNA, 606 bp, Gossypium hirsutum
  unsure (1)..(606): unsure at all n locations
  Clone ID: LIB3829-019-Q6-K6-D6
ccccgcgtccggnaagagcatccctttataccccactttaagttactcaaaatttccgtacttttattttttgcatggcagtaagtctattgtcacatgagttgtctgacctgtgtcttgggaagccagcactaaggtcactttccatcacatccaccattgctgaagctcttgaggtcttgaaaacctctgatgacaactttgttagtatctggaattgtgatgatgttgagtgttgtagtagatgtgtaggcaaagtttgcattgtggatgtgatttgttatctttgcaaagatgaaaatttggtatcaccttcaattgctttgaaacaaccagtttctgtacttttacctaagatccctggtcttattatccatgtggaaccatcttgcaggtatatttatatacacacatgatttctagcttttttttcttcaatgttttatttaagttttgttttatcaattttcataattttcagcttgttagaagcaattgatcttatacttgaaggagcacaaaaccttgtggtaccaatcaaaaccaaggtgttcaacaacaagagatcaaaacagcaacagaagccattttgttggttaacacaag

SEQ ID NO: 19345 - DNA, 395 bp, Gossypium hirsutum
  Clone ID: LIB3493-021-P1-M1-B10
cccagtttttgttttatctttggggctgtcaattgatggaatccaattcatttcaagtgattaatcataattatttctctttttgttttcagcttgttagaagcaatagatcttatacttgaaggagctcaaaaccttgtggtgccaatcaaaaccaagctcagcaacaagagaaaacagcaccagaagccatcaccgacggtcactgtccacaaaggccgtgaattctgctggttaactcaagaagatgtgattagattcctactcagctcaattggcctcttttcacctgtccctgctttctccatcgacactcttggcatcatcagctctgaaatcctcaccattgagtaccacttccctgcttctgcagccataggagccatttctcgaac

SEQ ID NO: 19346 - DNA, 336 bp, Gossypium hirsutum
  Clone ID: LIB3197-022-Q1-M1-G4
aaagaaagaaagaagaagcatccctttataccccactttaagttactcaaaatttccgtacttttattttttgcatggcagtaagtctattgtcacatgagttgtctgacctgtgtcttgggaagccagcactaaggtcactttccatcacatccaccattgctgaagctcttgaggtcttgaaaacctctgatgacaactttcttaacatctggaattgggatgatgtctagtgtcaccttatatatgtaagcaaagctgggaagcacgtacctagtgccgtatctctggatcttgaacccactgttattgatgaagtgagaactggtgcttacc

SEQ ID NO: 19347 - DNA, 422 bp, Gossypium hirsutum
  Clone ID: GOSHI-09MAY01-C7118_1
cccacgcgtccgattaggccaaccagcgctattaaaatttgctatcccaaatcggtgatgatcttaatctcaaactcgatctctctgcttgtattttcttttttgttagttcatattaatctcagcaccaaggaaccaactatgttcgtggacctaaatggttgtgaagttgctgtcgatcaagtctttttcatcatctatctcaaccattatgtatttttttttgttcattttgtagcctttgaattagaccctatagttcttgatgtatcacaaataatattcctagtagcgttgacttttgtcatatttcgatttggacatagtacttttgcagctgatgatgtttttgtatcattgctggttggaacatatcgatgttatgatgtcgatgactagcttccttgatccattgtatttca

SEQ ID NO: 19348 - DNA, 600 bp, Gossypium hirsutum
  Clone ID: GOSHI-09MAY01-C7128_1
cgcgtttcatttactcacacgctcatcctctttcagcctcaagttctttcactcttcttcgttttggctttgcttttaagcttttgaagagcgccataatcgttaaaatacaaaagaaaaataaaccaacatatataatcctccatggatgttctcaaagcttctcctaccattgtttattcaccatacattccaacaacaacaagaaacaaaacccagttttctaaacccatctttcacaatttgaacttacaattaccatgttttacaagaaatggatcgaaatccaggttgtttacgaccttatcatcgtccccaatatcaacaacggagtctattgagccacctatgccggaagttgaggctgaggtcggtaaagagagattcgattggtactcacagtggtatccggtgatgcctgtatgtgatttggataagagggtgccacatggtaagaaagtattaggacttgatctagtggtgtggtgggataagaacgagaatgaatggaaagtgttcgatgatacttgtcctcatagattagctcctctatctgatggaagaattgatcaatgggggaggttacaatgtgtgtaccat

SEQ ID NO: 19349 - DNA, 735 bp, Gossypium hirsutum
  Clone ID: GOSHI-09MAY01-C7088_1
atccccacgcgtccgcccacgcgtccgctttgccaaacatggagactagtgtcacgtgctacgctcgtgggattgttcttcctggtgtctcttctaagcactcctcggcattagtctcccctccatccatatctccttccttcagctctaagagccttaaaacaagttcactatttggagaatcattaagggttgttccaaggtcatcattgaaggtttcaaaggcaaagaacactacttcactagtgacaaaatgtgaaattggagagtctttggaagagtttctcacaaaggcaacaacagataaggcattgattagaataatgatgtgtatgggtgaagcattaagaacaattgcttttaaagttagaacagcttcatgtggtggtactgcttgtgttaattcctttggtgatgaacaacttgctgttgatctacttgccaacaagcttctttttgaggctttgacatactcgcacttttgcaaatacgcgtgctccgaagaaattcccgagcttcaagacatgggaggacctgctgaaggtggattcagtgttgctttcgatccgctcgatggttccagcattgtcgatacaaatttcaccgtaagtaccatctttggtgtttggcctggtgataagttaaccggtgtatcggggcgagaccaagtggctgccccgatgacaattttcggctctaacacaacatatgttcttgcacttaaggacatacttg

SEQ ID NO: 19350 - DNA, 319 bp, Gossypium hirsutum
  Clone ID: LIB3120-044-P1-K1-D12
gtcgaattccgcgcgcccctgcgacgatggatctcaccaagaccacatggggcctactgcacgtgctacgctcgagggagtgtggttcctggtgtctcttataagcactcctcgccattagtctcccctccatccatatctccttccttcgagctctaagagccttaaaacaagctcactatttggagaatcatgaagggttgtgccaaggtcatcattgaaggttccaaaggcaaagaacactacttcactagagacaaaccgtgaaactggagagactttggaggagtttcttccaaaggcaccaccagataaggca

SEQ ID NO: 19351 - DNA, 328 bp, Gossypium hirsutum
  unsure (1)..(328): unsure at all n locations
  Clone ID: LIB3120-021-Q1-K1-H2
cgccacgcgtgctaagaataaaacccactttgccaaacatggtgactagtgtcacgtgctacgctcgtgggattcggaacgcagtggcctccataaagcaactctcattcttaatctaccctccatccacatattcttcgctcatctttatcagccttaacacaaatgcactattcagcgaatcatataaggaagttccaaggaactgatggtctcatgcaaaaggggaatacactacttcactagtgacaaaatgtgaaattggagagtctttggaagagtttctcacaaaggcaacaacagataangcattgattagattaatgat

SEQ ID NO: 19352 - DNA, 261 bp, Gossypium hirsutum
  unsure (1)..(261): unsure at all n locations
  Clone ID: LIB3120-021-Q1-K1-H4
acttttccaaacatggagactagtgtcacgtgctacggctcctggattgttcttcctggtgtctcttctaagcactcctcggcattagtctcccctccatccacatctccttccttcagctctaagagccttaaaacacgttcactatttgntgaatccttaaggccatgcgcccggtcatcattgaacgtttcaaaggcaaagcacactacgtgacttccaacttactggagcagagaaagtctttgaagagtttctcac

SEQ ID NO: 19353 - DNA, 690 bp, Gossypium hirsutum
  Clone ID: GOSHI-09MAY01-C7058_1
gatttattcatgttttgcaacagttgttggtcagaagatagtataaaatcaaaacagatgcaaaacttgagtgaggaggctcatgtatatgattgttatagctctcaggaattttccaatgatgaagactacaaggaagagcaaaggaggaggaagataggactggcaaataaagggagggttccatggaacaaaggccggaagcatagtgctggcagagacacgtttacgaatcaaacaaagaacaatagaagccttgaatgatccccaggttaggaagaagatggctgaacatccccgcactcatagtgaggaaagcaaggcaagatttgcgtcttcagacgaagtatacgctttagggcgacatatatgtatgtctgctcacaaagcacgaagaattattgatcagattcgtggacgttcctacgaagaaacacttatgatactagaactcatgccctatcgagcatgttttcccattttaaaaattggtttttcctgcagcagcaaatgctcgtcacaataggggtttcaatgaagcgagtttaatcattagtcaagtcgcagtaaatgagggaactactctgaaaagactaaaacctcgagctcgaggacggagttatctgataaaaagacccacttgtcatataactattgcattgaaagatcttgaatttgaaccacttgaca

SEQ ID NO: 19354 - DNA, 425 bp, Gossypium hirsutum
  Clone ID: LIB3120-010-Q1-K1-G5
aaaaaatagagattaattaatgaattcattagtgagaggtaaactttatgataaagataaagaaacacaggaggaacccatatacaacttcagacgaagtatacgctttaggtcaacatatatgtatgtctgctcacaaagcacgaagaataattgatcagattcgtggacgttcctacgaagaaacacttatgatactagaactcatgccttatcgagcatgttatcccattttaaaattggtttattctgcagcagcaaatgctcgtcacaataggggtttcaatgaagcgagtttaatcattagtcaagtcgcagtaaatgagggaactactctgaaaagactaaaacctcgagctcgaggactgagttatctgataaaaagacccacttgtcatataactattgcattgaaagatcttgaa

SEQ ID NO: 19355 - DNA, 431 bp, Gossypium hirsutum
  Clone ID: GOSHI-09MAY01-C7008_2
gtttcttaattttcattcgatatcgaagatgtcgggaaggggaaagggaggcaagggacttggcaagggaggagcgaagcgccaccgtaaggtcctccgtgacaacatccagggcatcacgaagccggcgattcgacgcttggcccgtaggggaggagtgaagcgtatcagtggcttaatctacgaggaaacccgtggagtcctcaagatcttcttggagaacgtcattcgcgatgctgtcacctacaccgaacacgccaggaggaagacggtgaccgccatggatgtggtttatgctctgaagaggcagggcaggactttgtatggatttggcggttagtcgatttaaggtttaggtttgtaattaggggagccctggtatggcttagtcgaaactacaggttgggtcttggtgttcgatgttatgattt

SEQ ID NO: 19356 - DNA, 518 bp, Gossypium hirsutum
  Clone ID: GOSHI-09MAY01-C7008_1
ctcaaatttccgattttatcatccaaatcgttcgtctcttaattttggttggatatcgaagatgtcaggaagaggaaagggaggcaagggtcttggcaagggaggagctaagcgccaccgtaaggtcctccgcgacaacatccagggcatcacaaagccggcaattcgacgccttgcccgtaggggaggagtgaagcgtatcagcggcttaatctacgaggaaacccgtggagttctcaagatcttcttggagaacgtcattcgcgatgcggtcacatacaccgaacacgccaggagaaagacggtgactgccatggatgtggtttatgcactgaagaggcagggtaggactttgtatggatttggcggttagttgatttagggtctagattttaaaatagaggaaaaattgtaggactcagttaaagttacaaggtgggttttgttgttcgctgttataatttctaattcgcatcatcaattgcatatttttattgaaatttgaaggtcattttgtc

SEQ ID NO: 19357 - DNA, 600 bp, Gossypium hirsutum
  unsure (1)..(600): unsure at all n locations
  Clone ID: LIB3543-040-Q1-K6-B10
cccagcgtccgcggncgcgtgggggggggcgggggacacaatgtctgtgcttctcaaatccttccttatcctctcctttcgcgccagagctctccctgttttcccttccattctaactccaaaatcgcttccaaggaaccgtcgaacccgaaccctttcctctatttctgcgggcgcgggggaatctcctcctccttccatttcccctgaaactcccacccgcataccccctctctctgactctctccattgggtctcttgtaccgcttgttgtggtgatttgtctaatcaagatgtgggttttcgggtccgtctttgcggctgggtcgctctccaccgggtccatggcggccttaccttttttaatctcagagaccacaccggcattgtccagaggaagcgaaaaagagaatatactctgtttgtacaacgaggtatactgggtttcgtgctattttttctaaggatttggtcgaagaacttagaggaaactataaaagtaatggttttctcaaagtttcatgcaatgggggcttgaatcaaatgcgtgctgcgatctgtgacatggtaatcgttgctcgacttttaaatctcactttg

SEQ ID NO: 19358 - DNA, 505 bp, Gossypium hirsutum
  Clone ID: AI727907.1
aagttcttcgaccaaatccttagaggtaatttcatttttctaaggatttggtcgaagaacttagagaaatgaaattacctctaagttcttcgaccaaatccttagaggtaatttcatttctcatttactagggtttagggtttacatggttttccctttttctagtgtaattggaagaagaaatgggtttctgaaacaatgggttttcagaaagaaaaaataataaacattggtaccttgtatgtgtccctgaattttattgaaggaaatatttttgctttctcagtttgatcttttggtagaagtaagaccttcattcttttgcatttgcattttgcaggaaactataaaagtaatggttttctcaaagtttcatgcaatgggggcttgaatcaaatgcgtgctgcggtctatgtctttcctctagctcatcttttccttgttcttctattcaacattatgttattaatttaagctgattaagcctttttagatctgtgacatc

SEQ ID NO: 19359 - DNA, 413 bp, Gossypium hirsutum
  Clone ID: LIB3165-013-P1-K1-E7
tgaagctgagtaagtctcttctttctcctgtcgtttcaagattgaacgctggaaaaagctggcttttcttcaagctgattgaacgcaggcatccagccgcttaactccttcatatagtgagaatcagatcaccatgaacgcttcagcagcttccctatctgcgtgtattgctatcaccagcactaatgaagagctctttatcggtctcaacaaattgactagtggttctcctctaccgtgcaatgttatcgaagtaaatccttacagcttcaagcccgaatacttaccagatggtatgtggtttttgactagctcaaatgataacactgatatggaacatggcctctggaaggtcaaagaggaggcccgtgaagtcttctcaaactctgatattatcggttggagaaccactc

SEQ ID NO: 19360 - DNA, 378 bp, Gossypium hirsutum
  Clone ID: LIB3272-040-P1-K1-F3
tgggtgttctttttttcagtagtgtacgttaagtcaaccaaagtcgctgggttagggaactcggaagctaaaatatactgatcttttttttctcccccctcccccttcactttgttgaaaaaccaaacaaaggaatcaatcatagcttgcaggtgatcaattttgttcctttgatttttcttttagctgattgaacgcaggcatccagccgcccaactccttcatacagtgagaatcagatcatcatgatcgcttcagcagcttccctatctgcgtgtattgctatcaccagcaccaatgaagagctctttatcgggctcgacaaattgactaggggttcttctctaccgtgcaatgttatcgaagtaaatccttaca

SEQ ID NO: 19361 - DNA, 758 bp, Gossypium hirsutum
  Clone ID: GOSHI-09MAY01-C7218_1
gcgcttgctcctgttgttattggtgtatccatggcatcactgactgagctgtcattcaattgggcgggtttgattaacgcaatgatttccaacatctccttcacttacaggagtatctattccaagaaagccatgacggatatggacagtacaaatgtctatgcttatatttccatcattgctctcttcgtctgtattcccccagccctcatttttgagggtcctcaattgttgaagcatggtttcaatgatgctattgctaaagtgggtatgactaagttcatctcacatcttttctgggtgggaatgttttaccatctctataatcagttggctaccaatactctggagcgggtggcaccactgacccatgcagtgggcaacgtgctgaaacgtgtatttgtcattggcttctcaatcattgtctttggaaacaagatttcaactcagactggtataggaacagtcattgcaattgctggagtggccgcctactctttcatcaaggccaagatggaagaagagaaacgacaaatgaaagcagcatgagaagaaaaatggaggcaaggaaattggaggaagtcctgatgaagaccaaatttgattttaccttgctgttattgtgaagtttttatttttccctctttcttctcttatcatttcattttattttttcttttaaaattcagagaacaacctatttataactgtggatcagccagtgttgactctgaaataatgtgtactgctattactta

SEQ ID NO: 19362 - DNA, 494 bp, Gossypium hirsutum
  Clone ID: GOSHI-09MAY01-C7228_1
agcatgacatgattagcaagctgaaattaaccctactaaaggaacacaagctggagctcacggtgcgctctagaactagtggatcccgggctgcaggaattggcagagctcttcttcatcttattagagcaagcaaggggaaatcaataaattagaaaagaaagagagaatcaaagatgtgcttggtattcgtatgtgatgaggatgaaagggtgatatcggaggcagtcggcaccaggagcctgtcccctactgcggtgggatggtgcaagccatggatgttgaaagccagtggaggttctgctttttgcctttgtattttaagaccaggggggggtcctctgcagctttcgcaggcgcttggttgttcattgatttcaagttttgcttgttatcatcctgcccgatctcccctcttctctatacctatctctttccatcttcgcttgtacatgtaaagttttgataataaaaaagagttcctctatttcttt

SEQ ID NO: 19363 - DNA, 400 bp, Gossypium hirsutum
  Clone ID: LIB3165-012-P1-K1-G12
gctttaagcacaattttcttgctctagctattcttcttcccttccagactaacctatactgttccagatccaaactatgcaattaccgaattgccgtctataaatatcttagcaaaaggcttttgacaaacaatcttctttctggctgattttaaagagagactattcacaagaactcttcttcgtcttattagagcaagcaaattcaaaacaataaattagaaaagaaagagagaatcaaagatgtgcttggtgttcgtatgtgatgaggatgaaagggtgatatcgaggcagccggcaccaggagcctgtccctactgcggtgggatggtgcaagccatggatgttgaaagccagtggaggttctgctttttgcctttgtattttaagaccaaaagga

SEQ ID NO: 19364 - DNA, 551 bp, Gossypium hirsutum
  Clone ID: GOSHI-09MAY01-C100503_1
ctacagttcccggcgttcatgacgcagttcccgtcgacgatgactattccgtcgtcacttttgcttccttctcaatggccccaaccccacaacgaagagctcctcctcgccatggaagaatctaatctcgaagacaagttgaacgaaatcagtgatactaacagaaatttggttgtgattgggaagacaactgctgataatgataaagaagacgataatgatgcggatgatgatgatgctgacaatgcagaagaatctgagggtgaggagtttgagcaagaaactggttgaaaactatactctctccggttgtcttgcttacctcttatttaaaaatcccagtcgttagtctctgtaaaaggtctagtaaagacttgagaattaagataaccattaatgctatgttatgttcccacaaagccagtttcaggcatgtagttcttgcaagcttcaatcagagtattcgatttagattttcaatttacacatattttgaacccttttttagtcatggaaaacgattttaatctctattataatttgattatccg

SEQ ID NO: 19365 - DNA, 822 bp, Gossypium hirsutum
  Clone ID: GOSHI-09MAY01-C100493_1
cccacgcgtgcgcaaatactagaactttgtcttctccttccttcgattgccaaagtatgggccgctctattgaccagtcggggaacaaaaagagaatccctttccacaaccaagcaccggaaacccattctaaaagcaaagagcaaagccctttcacatgcccttgcttcagccacgaacgcgtggacaacgtcctcaaatagataagttgctgctcctacaatttctcctttagaacctatagccaaaattgttgttgtaaaagttctagagtcactttgaaaggttgtgttaaaatttaatttgataaaacccaaatctggaggactccaaaattctttcggaagagatctacaagaaactcccagctcttggcatagacttatttcttgaccatagcctcgaatgaaacctaacagatcctgcaaagaaaatttaacaccttcatgaatcaacttatttcttctgtaccatagagcccataggaaaattgcaataagttgtttattctgttcatctgctgcaaagaaagtattaacaaaatgatttttgcagtttaaagtgctatcgattggagcaattctgatttgaagggacgcccagacactctgtagtataccataggaccacagaagatgattagtatcttctggagcttccttacaaagatgacaatcaacttcatctgtaacgcccctaacccgaattcgtcaccggaataaagttacggagcattaccggagttaccgatttatttattagatattttatttcatcgaacgttcatatttgaacaaattaaaatcaatcatattgtgcctt

SEQ ID NO: 19366 - DNA, 748 bp, Gossypium hirsutum
  Clone ID: GOSHI-09MAY01-C100763_1
atgatttccactggattagcatcatcttcagctgcctctgaatttggtgacggtgaacaactgtctaagggctctcagactgttctatctgtcaaagataaagaagcagaaattgacagataaagaagcagaaattgacaatcttgttggacttgctgaagacctggaaaagaagcttgaagatctagagcagctgatctccgacccaacgttgattattgcagaaatccagggaatggcatctggcaaggcaaggggcggtgagaataatgcatctcctgctgcagtgaactcttcacatatgtctcctgctaacagcaatgtagatcattttgactctccaactgtttccactgctcacacaaatggggccgcggctgtcacacatcttggcatcgtaggaagaggagtgaagtgtgttttgatgagtgcaggtgccgtagaattgagctcaataaagaaacctgcaatccacccatgtttctggaactgatagatcaccagcatcaccctaataataaataaatttagtggtttacaccctttgtcttgttactagtgttattacctgatattgtttaccatatcgaagagctgttgtagcaatatagtgagtgagtaggagagtatactgttattagcgtgtaacattgtgatatttgacattttaacgctggttttctattcatgttgtcccatgagctgatacagtaaaccctatttataataataacattcccttttcatc

SEQ ID NO: 19367 - DNA, 219 bp, Gossypium hirsutum
  Clone ID: GOSHI-09MAY01-C100723_1
ctaaatagttaatctttgaggttatttgtatctgaacaaaactgtatgagcagttaaagttagagactacacatatctataatcatttcaggtaggtctaggtgtttaccaatcattattagggtattgagtgtttccgaactaaaaattgggcttgccccaatttctctgggatatgctatttttatgtttttttaaatgatgatgatagtatttagt

SEQ ID NO: 19368 - DNA, 892 bp, Gossypium hirsutum
  Clone ID: GOSHI-09MAY01-C100073_1
tttgtaaattggagtcttgttactaaaggagtaacagatgagcagaaaaagatgaatgctacctacataattagtattgcgaggaagcttggatgctcaatatttttgcttcctgaagacataactgaggtaaaccaaaagatgatcctcacattgactgcaagtatcatgtactggttcttgaaacaacctgttgaagccgtcccgcctcctacagcagatggggaaaacggaagccaagtggaaacgatctctaattcaacaaccgacgactcagcatccgagtcatcagtagagtagaataagaatgtataagtaagtgctgaaaacattgttttccttttcttttctttttttatgttttctcttcatagcacttcccgttatggattcgaatttgattgcaaagattgttgtatgacattacagaaatgggggtgttcatgcaaatcttgcaaaaaaaaaaaaaatgcaaatgcctatgtgaatagcgaatttcccttctttttttaatccccttttctgctcttctgacaatctgtaactatgtggttctcatataaagtgattgtaaggcaatgccatctccttattgtaactatgtattaactaaatagagcagtgtttgtggagctatgttattgaaacgcggatgagcgtagaaaatatcttgactgggggacagctaatccgctcctcatttgacttttcatgccaggctccaaaaagaagcgaggaaaacaacggtggtcccctaccaaatttctcaaagtagctttagaccttcttcagctcaatttaattttatattattattttatttacgattgactttcttcttgactttcatgaattttaaaaatatatattcttagtgcgctctattgacatc

SEQ ID NO: 19369 - DNA, 525 bp, Gossypium hirsutum
  Clone ID: uC-gsflnu33B018b06b1
tggacgcgtgggttccttgagcttcttagtgctgttcaacctagatccgtaaattggagtcttgttacggaaggagtaaccgatgagcagaaaaagatgaatgccacctacatcatcagtattgccaggaagcttgggtgctcaatatttctgcttcctgaagacataattgaggtaaatcaaaagatgatcctcacattgactgcaagtatcatgtattggttcttgaaacaacctgttgaagagaaaccagcagcaacttcagatagtgaaaatggaagccaactggagactctctctaattctactactgatgactcagcatctgaatcatctgttgagtagagaccgaagctggaatgtataatcaagtgccttaaacttgtttctcctccctctctgcatagacacccagttttggattaaatttcatttgcaaagattgttggtcttgcatttacatgaataggggtgtctcaaataaatgattttgcttttgttgaatatgtttgccctcatgtattg

SEQ ID NO: 19370 - DNA, 956 bp, Gossypium hirsutum
  Clone ID: GOSHI-09MAY01-C100363_1
ggagataagaaggtcattgagcaattggtttctgcatacaaccaagattttaatgcctccataccagagggtgtgaatccaattgatgtagcagctctagccaaatattatattgctagtcttcctgagccattgaccacctttgagctttatgatgagatcaaaagtgcccgttctagcatacatgctatgaggaatgtactgaaaatgcttcctagtgtaaattacatgactcttgagttcatcactgcattgctgcttcgtgttagccagaaatcagtccttaacaagatggatgcacgaagccttgccttggaaatggcccctgttattatgtggcagaaggatagaaaaccagaatcttataggaaatactggagtcatccactcaaaagtccttctaagggtagcatggattcaacccctacttatagtgcatgggacatgcttgaagatggagaagatatggatgcttcctcccacattcctttggatgatggtatcccggttgattttggtgccattgaggtcattcaatgcctcatagaacaacacaatcccatatttacagacgctaatgagacagtctggagatgaccgagactagatgattccttgtgggcagccaagtcaatcatatccgggaaaaagacgaggacagagtaaatatataaattctttgaaggtctatttgccacctgttttgtaacttttaacagaaataaaggcaaattggcaatagtgaatattttcacatgaacaagttgacacttacaagaatcctctgcaaatgcgtttcacatgaagttttaaattgcatcactcttgcttattctcatatttgggtttgacatagtgtaatggcaagtaatgctactttgactgaggtgtaattataggacttgtaaatgtgtaattataaattttaattttctattaaaaaaagtaatttggct

SEQ ID NO: 19371 - DNA, 275 bp, Gossypium hirsutum
  Clone ID: GOSHI-09MAY01-C100343_1
gggaaattcaggtaagtttatggtaatgttttgttgactctaatttgttatggttttcgttgatcgaatcaattatagatcatcggatttgggattcaacaaagtacaagtaggacgtgtgcaaaggacattgacagagagtttgagggtctgaatttgttgttaagtcttaaactagtaatggattttccttttgcctgagttctttgataacttaattattgtaaaatggatgtgaacttatatgagaagttgctgctgttagccctttccat

SEQ ID NO: 19372 - DNA, 838 bp, Gossypium hirsutum
  Clone ID: GOSHI-09MAY01-C100253_1
ctactaataagccgaagttggttatctcacaaactggtcttgaagcacctaacactcacactacgtggaaacaagaagctgccacccaagaaccttgtcaagccaagttggtaaccgatagtaatgtggatgagggtggtttagaaaccacccaaaccataaaaccctccgaggagaatgcagcttctgtttctaataggccaaaatctgttaaattgcgagcaggacaggagccacctaatacttatagcacccaaaaacaagattctgctgcactagaatcttctcaaggtaagtcggtaactgagagtagcgtgaatgatagtagttcccaaagtgtgaacccccatgaatgtggcaatccgggcagtaaagttaacgatacatgcaataagccaacttcttctggaaacattagctcagataaactggaagatgagaccaaggatggttcacaatttcaacaaaagacaatgtctgtaatgcggggtggggaaatggtacaggtgagttaccaggtctatattccgaagcgtgcccctgctttggctaggagacaactcaagcgctgagcttcgctgttacctattggattgatttggatgacccgagaactgcagcagttaactacaattttggctgctattgcaatgctattgatagttgtagaagactaaattatgataatggacctaatgatttatgattcatctctagtgcagcacccatagcttgttagaagaattgaagtaattgatggcagtatgttatggtcgcatcgttgtcattgtaatattttagctcacttgcttaaatattagatgccctttctggggat

SEQ ID NO: 19373 - DNA, 604 bp, Gossypium hirsutum
  Clone ID: LIB3828-030-Q6-K6-G7
caaaattggggttaagttcttacctatggaatgcactcccttttatggcaatgattacagtggaatgcacagatgtgggtatatcagtgataagtaaagcagctttgagtaaaggaatgagcaacgttgtttcagttacttatttcaatgctttgggtactttgatccttcttccatacttcatcttttgcagaagctcaggacagattatatttcttactggagtcaaattcagctcccctactctctcatcagctttagtaaaccttatccccattttcactttcctgcttgcagtcatatttaggatggaaaagttagaaatgagaaaatcaagcagtcaagctaaattgttgggtgccattgtagctgtaacaggagcattcgtagtgactctctataagggtcctctagttttaatgtcttcatctcacccttttgattcaaagcaatctaagtggattattggaggcctttcagagcaatctaagtggattattggaggctttcttcttttattggtttgcctttcatctgcaacatggaatgttcttcaggcagccactgttaaggaatatacagataaaatgacgattgtcttctt

SEQ ID NO: 19374 - DNA, 525 bp, Gossypium hirsutum
  Clone ID: uC-gsronu33B158b07b2
ttctgcttttgcaggttttgcagttagtcaaaatatggggttaagttcttacctatggaatgcactcccttttatggcaacgattacagtggaatgcacagatgtgggtatatcagtgataagtaaagcagctttgagtaaaggaatgagcaacgttgtttcagttacttatttcaatgctttgggtactttgatccttcttccatactacatttttttcagagataagcaagctcctttgactttctcactgctttggagattcttcctcttaggcttgatagggtttaatttcatataactataattattttttaatttcttcaggaattttgtttcctatttttgagaaataaatttgtgacagctgacatatttgttcattaattttcagaagctcaggacagattatatttcttactggagtcaaattcagctcccctactctctcatcagctttagtaaaccttatccccatttttactttcctgcttgcggtcatattaggatggaaaagttagaaat

SEQ ID NO: 19375 - DNA, 632 bp, Gossypium hirsutum
  Clone ID: GOSHI-09MAY01-C1958_1
ctctgggaaaaatatatactttgaaactaccatgggtgcttcagcgaaatgggtgaaatctcttattggtctcaagaaaactgtgaaagatgacaaagaaaagatgagtggcaagagcaagaaatggaagctatggaggagttcttcaggggatggaatagggtcctcatggaagggttctaaaggaaagtttaaagctgattacgaaggatctgattcttcaccaaggtctgaagctgtctctgctgccatggctgctgggggtcgagctcctcctaaagatttcagggttgtaaggcaagaatgggctgctatccgcattcaaactgctttccgaggcttcttggcaagaagggctttaagggctttaaagggaatcgtgaggatccaagcctttgttcgcggtcgacaggtgaggaaacaggctgctgtgacactccggtgcatgcaagctctcgttcgtgtccaagctcgtgttagagctcgtcgtgtccgaatgtccatgagggccaggcagttcaaaagatactcgatgaacaccgcagcaaggccgaactcttgaaacaagctgtggagggctggcgtgatagtaaaggaacattggttgatgttaaaaataagctacaactgag

SEQ ID NO: 19376 - DNA, 727 bp, Gossypium hirsutum
  Clone ID: GOSHI-09MAY01-C1908_1
accatttcttgcttcctccgactccggcattcctccccttcatccaaggtcaggtgaacattttttggctatcgccatcttcatcttcatctttcttctagttgaacctccttatttacatctcccaaatcactctaccctgatttgctcttctttcgccaaacaaacgcgagatttgtagatttatttctcgtctatctgcctctgaatcaatgggataatgataaattttgcaatcattatcgacctgggcaactagatacaaaaagttatggtgagcaatatgctagtaaaggagaaggtgcaggccttgctttgcttcctgagcagacacctttctacaaagatcttgtatctttcatttgaattttgtattatctcatcccagtcatgtggattgggaaatgtagcattgacaaatgttacaggctgctgtagctattcaagcaggtgtatgcgtggacatttttgctgttacaaatgagtatacagatttggcatctcttaaatttattagcatagaaagtggtggctctttgttcttatatgcaaatacagatgattcaacactttctcaggacatgttgtactataagttcctctaatttattcttttttaaagatgataaagtatatgtttatatggatacttcatatctacttgagttaattatatggatattccatttgagtgctgttattgatcttactttgcaggtcccgaatg

SEQ ID NO: 19377 - DNA, 412 bp, Gossypium hirsutum
  Clone ID: LIB3147-051-Q1-K1-C7
cttctttcgccaaacaaacgcgagatttgtagatttatttctcgtctatctgcctccgaatcgatgattttgcaatcattatggacctgggcaactagatacaagaaggtatggtgagcaatatgctagtaaaggagaagatgtagattgtgctttgcttcctgagcagacacctttctacaaagatctggctgctgtggctattcaagcaagtgtatgcgtggacatttttgctgttacaaatgagtatacagatttggcatctcttaaatttcttagcatagaaagtggtggctctttgttcttatatgcaaatacagatgattcaacaattcctcaggacatgtaccgaatgctaagtcgaccatatgcttttacttgcgtactaagattgaagacatctactgaattc

SEQ ID NO: 19378 - DNA, 454 bp, Gossypium hirsutum
  Clone ID: GOSHI-09MAY01-C101893_1
gtcaacatttctacaacaagttgaagctgatacatggcaatcaggtggatggcctcagaaatttaccgactacgctgtatctaaacttgctgttaatctttacagtatgctaatggctaaacaactctctgaacgaccagaaggtgaaaagatatatataaattgttattgtccgggatgggtgcagaactgctatgacaagttggtccggtaatgtctcggcagagcatgccgcggataccggcgtctggcttgctttgcttcccaacgaggccgtcacggggaaactttttgctgagagacgggaattgaaagtgtgagacaatgaaaaaaaaaaggttacatattgtagggtttaaagaagatttgttgagtttaaaaagtttgaaggaaatttgttttaacttgtgcttgtgaaagcttttgcttttattcatggaaactggattgtgcc

SEQ ID NO: 19379 - DNA, 900 bp, Gossypium hirsutum
  Clone ID: GOSHI-09MAY01-C1858_1
cggaatcccggtcgcccacgcgtcgacttaagctagagataagaagcatgtccgatcttattggaggtacagtgaccctcgcaacctgcgctggtctatccgtggctcgtcggaaaacgccctcgctccgactacgttgtctctggtggccatgagctctctggttattattcacgggacgatgataaaagaacaatgcgggcaaccagagatagtgactccatcggagaatcttatgatcgttaccttcgcagcacgcaactgtcatcatatagtaggagtcagtctggtagaccaatgagtggtggaatgcccggctgtgctgttgatgatcctcgaatggtgggtattggtggtcttgatcctggacaaacaataaaagataggactataggatttggtagtggaaggcccgaacctcgccttcctcctgatgcatccagtactctttttgttgagggtttgcctcctgattgtacacgccgagaagcttctcatatttttcgcccatttgttgggtacaaggaagtgagacttgtaaccaaggaaccaagatatgctggaggagatccaataaaactttgttttgttgattttttaagcccatctcatgctgctacttcaatggatgctttacaaggtactatatctactgaagttcgcccactgtgaatgttgtttttttaaagtttcagctacagaggcttcataggcggttaagaaaacacgggaatagggttgaagagtaactagatggagtttaatgctgagttgtctgcatgtgaagtgctatagaatttaatgcactcacactgactgatggtgtctttttttacttttgtggagctaccttacattaacgagccaataaatttttttatacaatgtttagaactattc

SEQ ID NO: 19380 - DNA, 554 bp, Gossypium hirsutum
  Clone ID: GOSHI-09MAY01-C1818_1
cccacgcgtccgctgagttgtttggttctgatttcgggtcttgtttttctcctgcaggtcaaggttcacctatgagtcctaacaagaatatgttgaggttcaaaactgaacattcagggcctaactcaccttattctccttcaattttggggcatgatagtggtttctctagcgaagcatctacacctcctaaaccacctaggaaagtccctaagacaccccataaggttcttgatgctccatcacttcaagatgatttctatttgaaccttgttgattggtcatctcaaaatgtacttgctgttgggttgggtacttgtgtttatttatggactgcatccaatagtaaagtaacaaagttgtgtgatttgggaccaaatgatagtgtttgtgctgttcaatggacccgggaaggttcttacatatcgattggtacaaatctcggtcaagttcaggtttgggatggaactcagtgtaagaaagtccgaaccatgggtggacatcaaacaagaaccggtgtcttggcttggaatttcgcgatactgtcatctgga

SEQ ID NO: 19381 - DNA, 1365 bp, Gossypium hirsutum
  Clone ID: GOSHI-09MAY01-C1808_2
ttttgaaaacccacgacattaacttctcgtacaggccagccatggaagttcccagggtctacacctacgatttcaccaacatcgcctttgcaccctacgggaactactggagataccttcgcaaactgtgcaacacggagctgttgaccgcctcgagggtccagtcctttcggtctataagagaagcagaggttttaaatctggtgaaaacgatacatgagagcaagggggaggcggtgaaccttagcgacatgattttctcaatgacatatgggatagttgccagagcggcctttgggaaaaaatgcaaggatcaacagacttacattgacagcataaccgaactcacaaagttgctttctggcttcagtttgtctgatttttatccttccattaaaccgcttcagctttttagtggtatgaagaccaaagttgagaagatgcataaggagaatgataagatcatcgcgaacatcattgcggaacatagagagagaagggccagagaaaagagcggacaagcagaagctgaacaagaagatctcgttgatgtgctcttaaggattcaggaggagaatgagttccccttggctgacaagaacatcaaatcagtcattgtggacgtttttggtgcgggaagtgaaacatcatccacaacccgtggagtgggcactctccgaaatgataaaaaatccatgggtgatgaaggaggcccaagctgaagtaaggcgagttttcggaccaaaaggaaacgttgacgaaacaggccttcatgaactcaaatacttgaaagcagtcattagggaaaccttccgaatccgcccatccgggccattgttgctcccaagagaatgtcaccaagcttgcgaaattaatggctaccattgtcccggaaaaaaccagagtcctcattaacgcatgggccctcggaagagaccctaattacgggaacgaacccgacaaatttaaccctgaaaggttcctcaatggttcagtcgattacacgggaacagattacgaattcatcccatttggggctggaagaaggatgtgcccagggatcacctgtgccacacccaacctcgagctgcctgtggcccatctggtgttccattctgactggaagctacctaatggaatgaaaggggaagacctggatatgagtgaggtgtttggcatgactgtcaagaggaaaactgaacttgttcttattccaactccatatcatggatctaaaattgttcattagaaccacaaagacatttggttggtttcctttcagtatcatatgtcctagttgccatgttgtaacttatacccctaaaacataatacttgttcctgtcaggtctttggtaaaacacaa

SEQ ID NO: 19382 - DNA, 960 bp, Gossypium hirsutum
  Clone ID: GOSHI-09MAY01-C1808_1
cccacttcttccgctggtctttgctttccagttatggagcttcaactcccttcattccaggtcctcctcagcatcctccttgtttccttcttcatattcagaagtttaaagaaatcaaaacccaaaaatcccgaccttaagccaattccagggccgagaaaatacccggtgatcgggaatttgcaccaaatcgctagcccatcaccccacaagaccttgagagacttggccctgaaacatggaccactgatgcatctccagctgggggagatatcgacggtgatagtatcttcaccggaagtggctaaagaggtgacgaaaacccacgacattaacttctcgtacaggccagccatggaagttcccagggtctacacctacgatttcaccaacatcgcctttgcaccctacgggaactactggagataccttcgcaaactgtgcaacacggacctgttgaccgcctcaagggtccagtcctttcgcctatagaagaccaaaggttttaatcttggggaaaccaatccttagaaccagggggaagccgggaaccttatagacatgaatttctcaatgacatatgggatatattccaaagagggcctttggaaaaaatgccaggagcaacagacttacattgacagcataaacgaactcacaaaaatgctttctggcgtcagattgtctgaaatttatacttccattataccggtttagctttttaatggtatgaagaccacagttgagaagatgcctatgagaatgatagatcatcgcgaacatcattggggacatatagagagaaggtcatagaaaaaacggacaacagaactgaccagaaaactcgtgagtgcccttaagatctgagggaataattccctggttcaagacataatcaccatgggaccttttggccgaatgaaatttcccacccgagaggccgtccaagaaaaaactggg

SEQ ID NO: 19383 - DNA, 261 bp, Gossypium hirsutum
  Clone ID: uC-gsronu33B103b03b1
gtttgtcattatctgtcaagaggaaaactgacctggttcttattccaactccatatcatggatctaaaattgttcattagaaccacaaagatcatttggttggtttcctctcagtatcatattaatagtacttgttcctgtcatgtctttggtaaaacacaataagcttacgccgcctatttctttttgttaatgttaatgaaacatggaataaccggagttgaaccggtgcttggccctaaaaataaacaaaacttaaaa

SEQ ID NO: 19384 - DNA, 802 bp, Gossypium hirsutum
  Clone ID: GOSHI-09MAY01-C1838_2
tttttgcatttcaatgcaggaattgaatatataatatccgatagattgtttgaagctctgcctcaagaagagcaaaaactttggcattcccatgcttatgaggtctctgttgtttaatcccttttcttcttagtgtttacgtagtaaattatagtactaatgaagatgataagcgtggaatttgtcgcagataaaatcagggctctgggttaatcccagaataccagaaacgatagggaaacctgaattggaaaatctggcaaaaacctatggcaagttttggtgcacatggcaagttgacagaggtatatatacaagttaatttataagtacctacaaaatccttgcaaccgccgccctttagacccgagtttgtttcgttcttaccaaaaatttgcacaccaactttgggctccaacagtcaacggtcgacctgctcaattttttttatttaatatctaaataattattattattttgaaaaatttttaaatattatttaatatctcaatttttgtcatgtgattgacgtataattttaacaattttttatcttgaatctcgaatagaatctcaaattcataaccttgtatctttgaacaaaaatttgtaaaactctaaaattgaactttgaacccaactcaaaatctgaattcaaacttcaaattttgaagtcaagctttaaagtttaagcttcaaatttaagtttttttgaagtcaagctttaaaagttgtaagcttcaaattaagttttgaagtttggattaggggtaatggtaaaataatatattttttttaaatg

SEQ ID NO: 19385 - DNA, 1015 bp, Gossypium hirsutum
  Clone ID: GOSHI-09MAY01-C1838_1
ccctccacaaattcttttcaatgtcttccagtgacaagttcccggctccgacaccggctaaaggtgcggaggcaacgccaccagggcaacccatgtcgatgggtcagcatgtggtggacaagggagcatcaatgctgcaggcattgaccccagtgaagcaaatcagccaacatgtctgcacctttgccttgtatagccatgatatgcaccgtcaaatcgagactcaccactatgttagcaggctcaaccaggactttctccagtgtcctgtttatgattccgatgactccaatgcccgcctcattggaattgaatatataatatccgatagtttctttgaagctctgcctcaagaagagcaaaaactttggcattcccatgcttatgagataaaatcagggctctgggttaatcccagaacaccagaaatgatagggaaacctgaactggaaaatcttgcaaaaacctatggcaagttttggtgcacatggcaggttgacagaggtgacagacttccacttggagcaccagcattgatgatgtcaccacagggggtgaacctggggaaaatcgagccagagctagtgaagaagagggatgacaaatacagcatctcaaccgaagcaattatgcagtcaagggtggaaattgaagaacctgaatggatcaatccacaggctgattactggaaacagcatgccaagggtttcgccattgacatcgagaaaactgaaatgaagttgagagctcccatcccttagaacttgcctttgcctataaccacaaaatattgtgcctaatcactgctagtcttgtgttgctcttcaattgtgtgtggggtaggttttttgcaataatctgtagaaatgatgtggtactatctatcacatttttacttttaagtcaaagttgtttttctttatgccaaaattacaaaaaggagccttgtaaattttcttcggaaattttttttggtaccggtgatgacaaaaaatttttaagttaccgccttttc

SEQ ID NO: 19386 - DNA, 407 bp, Gossypium hirsutum
  unsure (1)..(407): unsure at all n locations
  Clone ID: LIB3582-037-P1-K1-C3
gtgaagaagagggatgacaaatccagcatctcaaccgaagcaattatgcagtcaagggtggaaattgaagaccctgaatggatcaatctacaggctgattactggaaccagcatgccaagggtttcgccattgacatcgaaaaaactgaaatgaagttgagacctcccatcctttaaaacttgcctttgcctataaccacaaaatattgtgcctaatcactgctagtcttgtgttgctcttcaattgtgtgtggtgtacgttttttgcaataatctgtagaaatgatgtggtactatctatcacatttttacttttaagtcaaagttgtttttctttaagcanattacagaagagcttgtaatttctcgtaatttttttggacagtgagacaaaaatttagttacgc

SEQ ID NO: 19387 - DNA, 652 bp, Gossypium hirsutum
  Clone ID: GOSHI-09MAY01-C1588_1
tttagctcataaattacatcattctctaactaatcccccgattgcattagccatgaggcgcgattcgcacgccatttggctctttgcctttctctttgcactcttttccatcctaatctctctgtatacgctccctcctccttcccaagcaaccatctccatgaaatttgaaacttccttcctcaagaaagttgtgagccaaagcggtgaattcatatctttgctaacgaggatggtgtctggacatcatcatcatcgtcgtcatcgacgtcgtcaccatcatcaccatcataggagggggcgtgagcacaaatgtgatcatatcaaatggaggtcgagcttgagcactagcaaccttatttatcaatacaaagtgtcacttgtattaacagttgacttagagggttgcggcaacttcagcaatgcgcagaaggcaatcgatgctgttcctgattccagcccctccaagaccctgatcattatttattctggtacatacagggagaaggtagtggtccatgcaagcaaatccaacttgataattcaaggtgagggttttctcaacacagttatagaatggaatgacactgcaaattccactggaggaacagtgtacagctcttcggttgccatctttgcttctaacttcaca

SEQ ID NO: 19388 - DNA, 822 bp, Gossypium hirsutum
  Clone ID: GOSHI-09MAY01-C1518_11
ctactacgactgagtctatggcgacgctggcacgcgtgcatgtgccggtatggaatagaggggccgacctacgcgttcggtcaacccaaacacatatgtccaaggaaaaagaaaaagcttgagcgaacactaaagtggccgatcagcttaccgacgatcatatctctgaattcaaggcggcctttagtctgttctacaaggctggagatggctgcattactaccaaggtgttgggaactgtgatgcgatcactctggctgaaccctactgaggcagaactgcaagatatgattaatgaaggcgatgctgatggaaatgggaccattgactttgctgaattccttaacctgatggcaggaaaaatgaaggatacagactctgaggaggagcttaaagaggcatccaaggtgttagacaaggatcagagtgggttcatttatgcacccgagctgccccatgtcatgccaaaccttggtgaaaagcttacaaataaggaagtccccaaaataacccccaaacctaatttttatggttatggccagatcaactccgaggagttcgtcaaagtcatgatggccaagtaaaggccccccccccctaaacccaggttttaaaattggggtttaaaaaaaaaggaaaaaaggacccgggcagataagtttgctaagatatctattaatgaataggccccctttgtttttttgttccaagcttttgttggagggttctttgtttcaggtttgcattatttggtggccccacccttagaattaggcttgtttgccccgctttttgtccagaagggctgggttgttaccgccc

SEQ ID NO: 19389 - DNA, 687 bp, Gossypium hirsutum
  Clone ID: GOSHI-09MAY01-C1518_10
ctcatcagtttccttccgccgggggggggggggggggcacaaaaaaaccaaaaaagaaaagcttgagccaaagaggggggcgatcagcttaccgacgatcagatctctgaattcaaggaggcctttagcctgttctttttttttttttatggtgcatacttcttttgggggggggggggtatcacacttcaaaccccactgaggcagaaaagaaagatatgattaatgaagtcgatgctgatggaaatgggaccattgattttcctgaattccttaacctgctggcgcgaaaaatgaaggatacagactctgaggaggagcttaaagaggcattcacggcgtttgtctttgtccagtatgggttcatatctgctgccgagctgcgccctgtcttgacaaaccttggtgcacggcttacagatgaggaagtcgacgagatgatccgcgaagctgatgttgatggtgatgggcagatcaactacgaggagttcgtcaaagtcaatgatggtcaagtttaggacctttccatctataaccaggattcaaaattgggtgtctaataatatggaagtttgtaacaggtcatataattttgttttgatttcatttatctatttggacactttcttttttttatctctccttcttttttcctcttcatttctcctttctctttcacattttttc

SEQ ID NO: 19390 - DNA, 575 bp, Gossypium hirsutum
  Clone ID: GOSHI-09MAY01-C1518_9
ttgttttttcgtccgcccacgcgtccgcccacgcgtccgctgaattccttaacctgatggcaagaaaaatgaaggatacagactctgaggaggagcttaaagaggcattcagggtgtttgacaaggatcagaatgggttcatttctgcagccgagctgcgccatgtcatgacaaaccttggtgaaaagcttacagatgaggaagtcgacgagatgatccgcgaagctcgatgttgatggtgatgggcagatcaactacgaggagttcgtcaaagtcatgatggccaagtaaaggacctctccaactataaccaggatttaaaattggggtctaaaaaaaaaggaagaaaggaacagggcagataagtttgctaagatatctattaatgaataggaacatctatgcttttatgttacaagcttttgttggatggctctttggttcatgtttgcattatttggtggaccggaccttagtattatgcttgtttgctctgcttttttgttcagtagtgctgggttgttaacgtcataaaaaaaaaaaaaaaaaaaaaaaaaaaaaaaaaaaaaaaaaat

SEQ ID NO: 19391 - DNA, 574 bp, Gossypium hirsutum
  Clone ID: GOSHI-09MAY01-C1518_8
tcttttcacgcgtccgcccacgcgtccgaggggatggaattcatctatgatgggaaaacatgtatagtttttttgtgtaattacttgtatggtatttattatctaatctgtgatttatcgagcttggatgttcatgccgtgaaacttatcagtggttagattctggtaatttgataaattagattaaattcatcgatgctttcctttggcacatagaaaaccggtttaccatcctcttcatttcttgtttggctgtttaagtctttctgaattatcttttaacgtgaaatcttactgctatgttgctcaaattttttcgttttttcttgaagtatccatgtccggtgctcatattttgactcatatgtgtacatgggtatgtggatatgaccttctactaatcccgtcctggccaaatgtagttagtggtgttggttgtttaccaatatcacagtattcgtttgttgcatttattcttatccttgctgcagggtgcattactaccaaggagctgggaaccgtgatgcgatcacttgggcagaacccaactgaagcagaacttcaagatatgatt

SEQ ID NO: 19392 - DNA, 500 bp, Gossypium hirsutum
  Clone ID: GOSHI-09MAY01-C1518_7
cgaaaaagcactctgctttattatcaatttttctttttgcatttttttccactgaaaaaattctattcgttggaattgaaaacggggacggaatttataggctaactatctttttattaacatggaagttgacgccgatggaaatgggaccattgatgtccccgaattccttaacctgatggcaagaaagatgaaagataccgactcagaagaggaacttaaagaagcattcagggtgttcgacaaggaccagaatggtttcatatccgctgccgagctccgtcatgtcatgacaaatcttggtgaaaagcttacagatgaggaagttgatgagatgatccgtgaagctgatgttgatggtgatgggcagatcaactacgatgagttcgtcaaggtcatgatggccaagtaagaacctctctctctaaccataatcgagccaaaaccggtgaaaacccaaaaaaaaaaaaaaaaaaaaattctgcgggtcgacgcggccg

SEQ ID NO: 19393 - DNA, 769 bp, Gossypium hirsutum
  Clone ID: GOSHI-09MAY01-C1518_6
gtatttgatcgcgagcgccgccctctttccaaacacgggggtttttttgaaaaaatgggctcatgagagaagaccatggccgatcaacttacggacgatcagatctctgagttcaaggaggctttcagcctctttgacaaggatggcgatggttgcattactaccaaggagctggggactgtgatgcggtcacttggtcagaaccctactgaggcagaacttcaaggtaggacctatggagctgtcgcgggtgggactgggaccattgattttcctgaattccttaacctaatggcaaggaagatgaaggatactgattccgaggaagaacttaaagaggctttcagggtgtttgacaaggaccagaatggtttcatatctgctgctgagcttcgccatgtcatgacatatctcggtgagaagcttacagatgaggaagttgatgagatgatccgtgaagctgatgttgatggtgatgggcagatcaactatgaggagttcgtcaaagtcatgatggccaagtaaggataaaaaatgggtaaaaaggggaacagggcagataagtttgctaagatctctatttatatcaatagggcatctatgtttttatgttactaccttttgttggattgttgactgtttctttgtacgcattatttcgtggactagaccctaatatctacctgtttgctctgttttttgttcattagtctgggttgttagtgtcttaaaaaaaaaaaaaaaaaaaaaaaaaaaaaaaaaacccccc

SEQ ID NO: 19394 - DNA, 1107 bp, Gossypium hirsutum
  Clone ID: GOSHI-09MAY01-C1518_5
cccacgcgtccgattttctctctccccaaataccataatctttccgagaaaaaataaaaagctcaagagaaaaagaccatggccgatcagcttaccgacgatcagatctctgagttcaaggaggctttcagcctcttcgacaaggatggcgatgggtgcattactaccaaggagctggggaccgtgatgcggtcacttgggcagaaccctactgaggcagaactccaagatatgatcaacgaagttgacgccgatggaaatgggtccattgatttcccggaattccttaacctgatggcaaggaagatgaaggatactgactccgaggaggaacttaaagaggctttcagggtgttcgacaaggaccagaatggtttcatatccgctgccgagctccgccatgtcatgacaaatctcggtgagaagcttacagatgaggaagttgatgagatgatccgtgaagcttgatgttgatggtgatgggcagatcaactacgaggagttcgtcaaggtcatgatggccaaatggagagagttgcatagtcacaagcccagcagtccaaagttggagaaaaagaaacgcaaagcaaagcgtcgaaagagagacagggttcgtgactgcgttttcctctaaatatgttttctttttccttttttttttcctcattttttacccatccaaaatcaaataaccttgattttcatcattaataattcaacataatattctctaatattatgttgtaaccctttcattctttttttttccccaaatctggatctgttttctttttctttttctttcccccccttgtttaaaatcaaaatcttgttttattgattttggtttttgaacaaaaaaggaagaagggaattttagttcttcttcttcttcttttttttaaattatatatttatcatcatgaagggagagcattttgtactgtgtaaaattgtttattttacattttttttcaatttcgtttacgattgttttgtttttgttttttttgaaacatagattggttatttaacaaagtggtggttatataaataattgcacttattgtaaaatgtaaagttttaaatggaatcaatatttttgtt

SEQ ID NO: 19395 - DNA, 923 bp, Gossypium hirsutum
  Clone ID: GOSHI-09MAY01-C1518_4
ccctcgcgcccgcggccgcgcgatcttttctctccccaaacacctcattttcctgagaaaaaaaaaacaaaaaagaagcgtaagtgaagaaggagaagaagaaaaagaaaatggcggaccagcttaccgatgaccagatctctgagttcaaggaggcctttagcctctttgacaaggatggcgatggttgcattactaccaaggaactgggaactgtgatgcggtcactcggacagaaccctactgaggcagaactccaagatatgattaatgaagttgacgccgatggaaatgggaccatcgatttccctgaatttctcaacctgatggcaaggaaaatgaaagatactgattctgaggaggaacttaaagaagctttcagggtgttcgataaggatcagaacggtttcatatctgctgccgagcttcgtcacgttatgacaaatcttggcgagaagcttaccgacgaggaagtcgatgagatgatccgtgaagccgatgttgatggtgacggccagatcaactacgatgaattcgtcaaagtcatgatggccaagtaaggatctctccaaccaaaaaaaaaaaaaagaacagagtagataagtttgcaaagatttcaatctcgtaattggttcgtgggtcgttcgtttatcgtttgcattatttcgtcgaccggcttggttgctcttgttttttcctttttagtagtctgggtttttatttttcttatatttggtttttgttttttttgctttctattcttggctcctttgaaacctttagaacaatttgcaaccaatgtttttttttttttttttttgcatatgggtgactaattttactattttaaaattttaaaagtgctttattttccaaaaaaaaaaaaaaaaaaggggaagaaaaaaaaaaaaaaaaaaaagggg

SEQ ID NO: 19396 - DNA, 991 bp, Gossypium hirsutum
  Clone ID: GOSHI-09MAY01-C1518_3
cccacgcgtccgcccacgcgtccgcatttttattccgctattttctctctccccaaacacccttttaagccaaaaagaagacaatggccgatcagctcaccgatgatcagatctctgagttcaaggaggcctttagcctattcgacaaggacggcgatggctgcattactaccaaggagctcgggactgtgatgcgatcacttgggcagaaccctactgaggcagaacttcaagatatgattaatgaagttgatgctgatggaaatgggaccatcgattttcctgaattccttaacctgatggcgaggaagatgaaggatactgattctgaggaggaacttaaagaggctttcagggtttttgacaaggatcagaatggtttcatatcagctgctgagctgcgccatgtcatgacaaatctcggtgagaagcttacagatgaggaggttgatgaaatgatccgtgaagccgatgttgatggtgacgggcagatcaactatgaggagtttgttaaagtcatgatggccaagtaactttctcaccaaccataaagatgaaccaaacattgatattaaagggaacagggcagataggttcgctaagacttatatctctgaataggaacatccatgtttttaaattattagcttttgttgttgatttgtatctgttttcgtttgaattattgcggaaccttagtgtcatacccatttgctctgttttttgttcagtagtccgggttggcagtgcttacactattttttttttctttttttaaaaaaaaaaaaaaaaaaaaaaaaaaaaaaaaaaaaagggaaaaaaaaaaaaaaaaaaaaaaaaaaataaaaaaaaaaaaaaataaaaaaaagaaaaaaaaaaaaaaaaaaaaaaggggggggccgcttttggggggcccaggtttactcccgggggctggcaacgtaatattttttttttggggcccccaaattaaattccccgggcgggggtt

SEQ ID NO: 19397 - DNA, 897 bp, Gossypium hirsutum
  Clone ID: GOSHI-09MAY01-C1518_2
cccacgcgtccgcccacgcgtccgcacgctctcatcattttccttctgctaccttctctcaacccaaacacatatttcccaggaaaaagaaaaagcttgagcgaacaagaaaatggccgatcagcttaccgacgatcagatctctgaattcaaggaggcctttagcctgttcgacaaggatggagatggttgcattactaccaaggagttgggaactgtgatgcgatcacttgggcagaaccccactgaggcagaactgcaagatatgattaatgaagtcgatgctgatggaaatgggaccattgattttcctgaattccttaacctgatggcaagaaaaatgaaggatacagactctgaggaggagcttaaagaggcattcagggtgtttgacaaggatcagaatgggttcatttctgcagccgagctgcgccatgtcatgacaaaccttggtgaaaagcttacagatgaggaagtcgacgagatgatccgcgaagccgatgttgatggtgatgggcagatcaactacgaggagttcgtcaaagtcatgatggccaagtaaaggacctctccaactataaccaggattaaaaaatggggtttaaaaaaaaggaagaaagtaacagggcagataagtttgctaaaatatctattaatgaataggacatcaatgtttttaagttacaagcttttgttggatggttctttgtttcatgtttgcattttttggtggaccgaaccttagtattatgcttgtttgctctgcttttttgttcagtagtgctgggttgttaacgtcaatatttttatgctttgtgctttctttcgaacaaactggaagattcgatgttatttttgctttttctgattgactaattttttaggaaaaataaacaa

SEQ ID NO: 19398 - DNA, 856 bp, Gossypium hirsutum
  Clone ID: GOSHI-09MAY01-C1518_1
cggccgcccgcgcatttcaacctcgcagctcgcacgctctcatcattttcctccgggaccgtcagtcttcccaaacaccttctttccgagaaaaaaaaaagctcaagagagaagaccatggccgatcaacttacggacgatcagatctctgagttcaaggaggctttcagcctgtttgacaaggatggcgatggttgcattactaccaaggagctggggactgtgatgcgatcacttggtcagaaccctactgaggcagaactccaagatatgatcaatgaagttgatgctgatggaaatgggaccattgattttcctgaattccttaacctaatggcaaggaagatgaaggatactgattccgaggaagaacttaaagaggctttcagggtgtttgacaaggaccagaatggtttcatatctgctgctgagcttcgccatgtcatgacaaatctcggtgagaagcttacagatgaggaagttgatgagatgatccgtgaagctgatgttgatggtgatgggcagatcaactatgaggagttcgtcaaagtcatgatggccaagtaaggataaaaaatgggtaaaaaggggaacagggcagataagtttgctaagatctctatttatatcaatagggcatctatgtttttatgttactaccttttgttggattgttgactgtttctttgtacgcattatttcgtggactagaccctaatatctacctgtttgctctgttttttgttcattagtctgggttgttagtgtcttatttatctttctcaatttggtgttttctttctattcttgttgccatgaaacctaaaacaatttggaaagattctatgttttgctt

SEQ ID NO: 19399 - DNA, 361 bp, Gossypium hirsutum
  Clone ID: LIB3083-116-Q1-L1-D8
tggccgatctgtttaccgacgatcagatctctgaattcaaggaggcctttagcctgttcgacaaggatggagatggttgcattactaccatggagttgggaactgttattcgatcactttttcatattcttatttattcataatttttttattttattatttttttttttttctattaaataattttttctttttatattttttttttttttttttttttctatgattatttttttttttttttacttattttcttttttttttttttaatatattttattattttttattttttcattttattaatataattttttttttttttctttattttatttttttttttattattttctttttt

SEQ ID NO: 19400 - DNA, 381 bp, Gossypium hirsutum
  Clone ID: uC-gsronu33B139f05b1
ttttaattttaaaagaagcgtaagtgaagaaggagaagatgaaaaaagaaaatggcggaccagcttaccgatgagcagatctctgagttcaaggaggcctttagcctctttgacaaggatggctatggttgcattactaccaaggaactgggtactgtaatgcggtcactcggacagaaccctactgaggcagaactccaagatatgattaatgaagttgacgctgacggaaatgggaccatttatttgcctgaattgttcaaccttatggataggaaaatgaaagacaccggtagtgacaaataacatgcaggatctatactgaagtttgttagtgggttccatggtacaatatccagtgataaacgtatgaacgttttg

SEQ ID NO: 19401 - DNA, 416 bp, Gossypium hirsutum
  Clone ID: LIB3147-028-Q1-K1-D10
cggacgcgtgggctcgatttctctctctccccatttccgagaaaatagtacaaagaaaagagaatggccgatcagcttaccgacgaacagatctctgagttcaaggaggcctttagcctcttcgacaaggatggcgatgggtgcattactaccaaggagctgggaaccgtgatgcgatcacttgggcagaacccaactgaggcagaacttcaagatatgataaacgaagttgacgccgatggaaatgggaccattgatttcccggaattccttaacctgatggcaagaaagatgaaagataccgactcagaagaggaacttaaagaagcattcaaggtgttcgacaaggaccagaatggtttcatatctgctgccgagctccgtcatgtcatgacaaattttggtgaaaagcctac

SEQ ID NO: 19402 - DNA, 241 bp, Gossypium hirsutum
  Clone ID: LIB3146-036-P1-K1-G8
aagaaaaagattgagccaaaagaaaatggtcgatcagcttaccgacgatcagatgtatgcggtcaaggaggcctttagcctgttcgacacggacggagatggttgcattactaccaaggagttgggaactgtgatttgaatactggcggaaaaccccattttgggcatattgaaagtattaagaattgacgtacatgctaatggtaatggtgacattattaacactgaatcacttatactg

SEQ ID NO: 19403 - DNA, 221 bp, Gossypium hirsutum
  Clone ID: LIB3148-039-Q1-K1-B3
ttttttttttttttttttatgaaattggttaacttgtggagaatgaagggagagtatttttgtactgtgtaaaattgtttattttacatttttttttcaatttcgtttacgattgttttttttattttatacaaattggttatttaacaaagtggcggatatatatataattgcacttattgtaaaatgtaaagttttaaatggaatcaatatttttgttt

SEQ ID NO: 19404 - DNA, 194 bp, Gossypium hirsutum
  Clone ID: LIB3148-045-Q1-K1-D4
gcagtgaagaaagatgatttaaaattggggtttataaaaaaaggaagaaaggaacagggcggatgagtttgctaagatatctattaatgaataggacatctatgtttttatgttacaagcttttgcaagatggtttcttcatttaaattttctcggttctgaaatacaacgtgttttctttttttttcttaaaa

SEQ ID NO: 19405 - DNA, 600 bp, Gossypium hirsutum
  Clone ID: GOSHI-09MAY01-C1508_1
cggacgcgtgggaaattttatacttccatttttccactttccgacactttctgggcagccaaacacactaaaccctcaagtatatcgtaaaatggcgaagaagaacacggagaggaaagtaaacgtgtcgggtaaacctaagcactcgctagacgtgaaccggagcgatggcaagaacaattcaagaaccgccgccacggtgcgccgccttaagatgtacaacacacggcccaagcgtaacgctaaagggaaaatcttgagtcatgagtttcagtctaaagacctaccgaatacacgtatccaacctgatcgccgatggttcgggaatactcgagttgtgaatcaaaaggagctagaattttttcgagaagagctccaaagccggatgtcaagcaattacaatgtcattttgaaggagaagaaattgcccttatctctcttaaaggaccatgctaagcaagctagagctcatcttctggacacagagcctttcgagaatgcatttggacctaagacaaagaggaagcgcccaaagctcctagctgtagattatgagtctttacttaagaaagcagatggttctcaagatgcatttgagca

SEQ ID NO: 19406 - DNA, 707 bp, Gossypium hirsutum
  Clone ID: GOSHI-09MAY01-C101503_1
cggccgcgtgggcggcgcgtgggtttagaaaaaaaacctatgctcccaaatctctttcccttttctctccaccgaaaagcttgttcaagctttcaaccgcccgcttgtaccggcgaagtaaggccctccaatggtgcgagcacgacgcgcgataagtttattctcctctctctgatccttcgcatgtgttgtggatccaaatgaaaaaaagaaaaaagaggaaaaatagaataaaattgcagtaaataatcaccttagaagtattcttggttgcttttctactaattttcatatgtattttgtattatcactcgtccgtcaaaaaaaacaaatgaaaattcgtggccttttatagccatttttacatctgtttcttctccactagttgcaggtatggcgaacgtggttcgaagtgcaaggatgtggggcgggcaatacgcgagtcaaggggtcgtgtgtggggcgtgcgttggtggctgctggtggctgcggcgcaaggcaaatagaaccctagagcttgctatttctgaaaacgatttggggcattgggcttgtgtaatcaagtattgggccattgcaaagttttgggcctagtgtaactatatttgggattgttttttttgttttattttttctgtataatgtatgggctcgggctaaaaattgagtctacaacagtgatataaaagtttttcaaagtttgtttt

SEQ ID NO: 19407 - DNA, 1147 bp, Gossypium hirsutum
  Clone ID: GOSHI-09MAY01-C1488_1
tccgggttaaaaaacaaattccgttttttcgttaatttcctcccaacgctgatccgatcacagttgccgacatgtcttgttcttcatcatcgggctcggaggaagatgacgagggaatcgactcttacaggaaaggaggatatcatgccgtccggatcggcgatccattcgccgctggtcgttacatcgctcaaaggaagctgggttggggtcagttctccactgtttggctcgcttatgatacccaatcctctaaatatgttgctctaaagatccagaaaagcgcacaacaatttgcacaagctgcacttcatgaaattgatgtcctttcatctattgctgacggagacccctcaaactcgaagtgtgtggtgcgcctgattgaccactttaagcacagtggtccaaatggccaacatctatgcatggtcctcgaattcctcggtgatagcttacttcaattaatcaggtttaaccgttacaaagggcttgaattgaataaagttagggagatctgcaaatgcattttgatagccctggattacttgcatagggaggttggtataatccacacggatttaaagcctgaaaatattcttctcttttccactattgatccagccaaggatccagttagatctcgtcttactccaattcttgaaaggcctgaggggggcaccctaaaatggtggatctaccatgaacatcattgagaaaaaattgaaacggagggccagaagagcagttgctaatataggtgttagaagagattcaatgggagtagaagctccaaaacctgcaagatgtcttgatgggattgatatgaggtgcaaggttgtggactttggaaacgcatgttgggctgacaaacgatttgcagaagagattcaaacaaggcagtatagagctcctgaggtcatacttctatctgggtataccttttccgttgatatgtggtcatttgcttgcatagcctttgagctcgctactggtgacatgatgtttgctcccaaaacgggacaaggcttcagcgaagacgaggatcaccttgctctcatgatggaacttcttggaaagatgcctcggaagattgctgttggaggagctcgatcaaaggatttttttgacaggcatggggatctgaaga

SEQ ID NO: 19408 - DNA, 625 bp, Gossypium hirsutum
  Clone ID: GOSHI-09MAY01-C1458_6
cccacgcgtccgcttcgcccttctgtaaatttcccttcaaagaaaagaagaagaaaataccaacaactatcagctaacgatgagttattacaatcagcaacagcctcccgttggcgttcctcctcctcaaggttatccaccggaaggttatcctccaaaggatgcttatccaccaccggggtatcccccacaaggatatcctcaaggttatcctcaacagggataccctccgcagggatatcctcctcaatatgctcagcctcctcctcctcagcaaaagcagagttcgggtttcgtagaaggctgtttggctgctctttgctgttgctgtcttctggatgcttgtttttgacgaccttttctccaatggcagcttagaaaaatattgaattgataggaggagagttgaattcaattaccattttcaaacttcaatttcaaatgttcttctttcccttcatcgctttttttctgcttaataattgaacccttcattggatttgaactcttgtttacatacactgtaatattaggatctttttcctttgttctatatatttttggatttttattgtttttcatggccggctgattgattttactgttttatacttggaagcattga

SEQ ID NO: 19409 - DNA, 646 bp, Gossypium hirsutum
  Clone ID: GOSHI-09MAY01-C1458_5
tccacgcgtccgcccacgcgtccgcccaccccacgcgtccgctctcttccaaaaagctttccccagggagtggaaaggaacaaaaaatcttctactcaaagaaaaggaaagagagaaagatcttccttagcgaaactatttgcaggaaaatcacatagaacagcgatgagttattacaaccaacaacagcctccagttggtgttcctcctcctcaaggttatccaccggaaggatatccgaaggatgcttatccaccaccgggatatcctccacaaggatatcctcaaggttatcctcctcaaggatatcctcctccttacgcccctcaatatcctgctcagcctcctcctcagcaacagcaaagtactggtttcttagaaggctgtttggctgctctgtgctgttgttgcctgctggatgcttgcttttgagaatccaactctgccaaaagcctcaaatgttgaaaaatcaaatgttcttaccgtctcgccttttttttttgtttattttctttaaataattgaattggacctttgtttggaattaaactaaactattgtgctattttatattaattcctagttcatggtttttatctgtatatatatttgttctgccgttactcttcctagtaaaggaatattt

SEQ ID NO: 19410 - DNA, 568 bp, Gossypium hirsutum
  Clone ID: GOSHI-09MAY01-C1458_4
tcccactgagccgcatgctgtacaaggcaccttctgacggcaagtggggcgagcatgaacttgattacctcctattcattgtccgagatgttaacgttcatccaaaccctgatgaggtagcagaggctaaatacgtgaaccgtgaccaactgaaggagttactgcgtaaagctgatgctggtgaagatggtttgaaactgtcaccatggttcagactcgtcgtggataatttcttgttcaagtggtgggatcatgtcgagaaagggaccctgaaggaagtaagtgacatggaaaccattcataagctgtgatttaagattttagaagcaaaaaggacatgaaacaaagtttgtcaatgggtacttccagaaagaaaaagaaaaggttttaattccaataaattgcaggtttgaaatagttcttaaacatgctggtttcttaatgtttgtaagatcatgttgctgctaaattttgacttaaatgttgcaaactataagggcatgtattttagatttcagttcaataaaatcaaaggctatttctttatataaaaaaaaaaaaacaaaac

SEQ ID NO: 19411 - DNA, 1497 bp, Gossypium hirsutum
  Clone ID: GOSHI-09MAY01-C1458_3
cggattgaataccttcttctttgtttgccacagagtattgagaaaaatcgctttgtttcactcccttatttgctaatatgtcgcttcttacagatcttgttaaccttaatctctccgactgcactgacaaaatcattgctgaatacatatggatcggtggatctgggatggacctcagaagcaaagcaaggacactttctggtcctgtaagtgacccttcaaagctacccaaatggaattatgacggttccagcacaggtcaagcccctggtgaagatagtgaagtcatcctatatcctcaagctatcttcaaagacccattcaggaggggaaacaatattcttgttatgtgcgatgcttacacaccagctggtgagcccatccccacaaacaagagatgcaacgctgccaagatatttagccatcccgatgttgctgctgaagagccctggtatggaattgagcaagagtacaccctgttgcagaaagatgttaagtggccaattggatggcctcttggtggctaccctggacctcagggtccttactattgcggtgttggtgtggacaaagcctatgggcgtgacattgtggattctcattacaaagcatgtttatatgctgggattaatatcagtggcatcaatggagaagtgatgcccggacagtgggaatttcaagttggtccggcggttggcatttctgccggagatgagttgtgggttgcacgttacattttggagaggattacagagattgctggagtggtgctttcctttgatcctaagccaattcagggagactggaatggtgccggcgctcacacaaattacagtacgaagtccatgagaagtgatggaggctacgaggttatcaagaaagcaattgcaaagcttgggctaaggcacaaagaacacattgctgcctatggagaaggcaacgagcgccgtctcaccggccggcatgagactgccgacatcaacactttcttatggggtgttgcaaatcgtggggcatcaattcgtgttgggcgagacacagagaaagccggaaaagggtatttcgaagacaggaggccagcatcgaacatggatccatacgttgtcacatccatgattgcagaaaccaccatcctgtggaaaccatgaggggaagcccatgtttgggatgctgtttccatggtagaaagaaaggaaagagccaaagtgtttgttttgtcccctccagtgggatacactcatttcattgcacttagtaattaggtcatggttgcccttgcttcctcttgtcctagcaaggcgggcgcctgcggctttcttgcaattacggtaatcttgtgttaaataaatgagaatgcttttattattattaataataatgaagggctagattttgagtttcaaaaccaataattttaaatttttattattaatatttaattttttttttttttttaatatttacttattttattttttttaactcttatttaatatt

SEQ ID NO: 19412 - DNA, 1510 bp, Gossypium hirsutum
  Clone ID: GOSHI-09MAY01-C1458_1
cccggaaagaacggccgggtcccccccttcgcccattccattgacagagtagagcatatgcagagagcagcacagaccaacaaatgcttatgcttttaaatactccatacgccctctcactttctcgctcattagcttcttcctctttcccttctcctcccacgcgccgccttctttccctttcttccacttttgcccttcctccccctcgattcccccattcctccctcgtttcctcgagggtatccccgtcttttcgcacccaagcttcagccgccaccgcgaccatgggtgacgctcccgacgttggtatggacgctgtccaaagacgcctcatgtttgaggatgaatgtattttagtggacgagagtgataatgttgttggccatgaatcgaagtacaactgtcatttgtgggaaaagattctaactggaaagatgctgcatagagcattcagtgtatttttgtttaacacaaaatatgagttgctccttcagcaacgatctgcaacaaaggtaacattccctcgtgtctggacaaacacctgttgcagccatcctttatatcgtgaatctgagcttatttcggagaatcatcttggggtgaggaatgctgcccaaaggaagcttttggatgagctcggtattcctcctgaagatgttcctgttgatcagttcgtcccactgagccgcatgctgtacaaggcaccttctgacggcaagtggggcgagcatgaacttgattacctcctattcattgtccgagatgttaacgttcatccaaaccctgatgaggtagcagaggctaaatacgtgaaccgtgaccaactgaaggagttactgcgtaaagctgatgctggtgaagatggtttgaaactgtcaccatggttcagactcgtcgtggataatttcttgttcaagtggtgggatcatgttgagaaagggacccttaaggaagtaagtgacatggaaaccattcataagctgtgatttaagattttagaagcaaaaaggacatgaaacaaagtttgtcaatgggtactttcagaaagaaaaaaaaaaaaggttttaattccaataaattgcagggttgaaatagttcttagacatgctggatgcttgcttttgagaatccaactatgccaaatgcctcaaatgttgaaaaatcaaatgttcttactgtctcgcctgcttaattttttttgcttatgttctttaaataattgaattggacctttgttcggaattaaactaaactattgtgctattttatattaattcctagttcatggtttttatctgtatatatatttgttctgccgttactcttcctagtaaaggaatatttaaattggacaaaaaaaaaaaaaaaaaaaaaaaaaaaaaaaaaaaaaaaaggaaaaaaaaaaaaaaaaaaaaaaaaatggggggggcgtgtttaagaatccaatagttttgttcccgtggaatgaaaatcaaatttttttgcttggggtccccaaatttaattc

SEQ ID NO: 19413 - DNA, 633 bp, Gossypium hirsutum
  unsure (1)..(633): unsure at all n locations
  Clone ID: AI054551.1
aaatgcttatgcttttaaatactccatacgctctctccctttctcgctcattagcttcttcctctttcccttctcctcccacgcgccgccttctttccatttcttccacttttgcccttcctccccctcgattcccccattcctccctcgtttcctcgagggtatccccgtcttttcgcacccaagcttcagccgccaccgcgaccatgggtgacgctcccgacgttggtatggacgctgtccaaagacgcctcatgtttgaggatgaatgtattttattggacgagagtgataatgttgttggccatgaatcgaagtacaactgtcatttgtgggaaaagattctaactggaaagatgctgcatagagcattcagtgtatttttgtttaacacaaaatttgagttgcttcctcagcaacgatctgcaacaaagtnnacattcctcgtgtctggacaacacctgttgcaccatccttatatcgtgatctgagctatttcgagatcatctgggtgaggatgctgcccaagaagctttgatgagctcgtatcctctgagatgtcctgtgaaagtcgtccactgagcgatctgacaagcactttgacgcagtggcagctgactgatactctatatn

SEQ ID NO: 19414 - DNA, 488 bp, Gossypium hirsutum
  Clone ID: uC-gsflnu33B128h09b1
taaaattttccccagggagtgaaaaggaacaaaaaatcttctactcaagaaaagagagaaagatcttccttagcgaaactatttgcaggaaaatcaaaaagaacagggatgagttattacaatcaacaacagcctccagttggtgttcctcctactcaaggttatccaccggaaggatatccgaaggatgcttatccaccaccgggatatcctccacaaggatatcctcaaggttatcctcctcaaggatatcctcctccttacgcccctcaatatcctgctcagcctcctcctcagcaacagcaaagtactggatgcttgcttttgagaatccaactatgccaaatgcctcaaatgttgaaaaatcaaatgttcttactgtctcgcctgcttaattttttttgtttatggtctttaaaaaataaaattgacccttgtttggaataaactaaacccttgtatatttataataagtcctagttcttagt

SEQ ID NO: 19415 - DNA, 435 bp, Gossypium hirsutum
  unsure (1)..(435): unsure at all n locations
  Clone ID: LIB3166-013-P1-K1-F1
tcggccaacccttccggttttttaaccgccaaaaaatttttttttttggatacaatgcatacatgggcctataacctcctagcctttaaatctaaggtagatccgtgcttaagcatgctcgaactaatgtcatctgaattgtggcaatagcaacgatgccaactgagctaatgctcaatcagcaatcaaaaaaagtttggatggaaagttattacagtttacaatttacaaaatatatatttcaatagctggtgttacaattatnttgtatcgatttcttggcccaccaattggcattgtggatattacatgaccctgttcattatttngcagttgattacctcctattcattgtccgagatgttaacgttcatccaaactctgatgaggtagcagaggctaaatacgtgaaccgtgaccaactgaaggagtact

SEQ ID NO: 19416 - DNA, 429 bp, Gossypium hirsutum
  Clone ID: uC-gsronu33B130d11b1
tcgctggatgcttgtttttgacgaccttttctccaatggcacgcttactaaaactattgactttataggaggagagttgaattcaattaccattttcaaacttcaatttcaaatgttcttctttctcttcatcgctctttttctttataataattgaacccttcattggatttgaactcttgatgacatacacagtaatattaggatctttcttctttgttctatatatttatggatttttattgtttttaaaagaagaagcgaacacaaaaaaaagccagaaaagggtatttcgaagacaggaggccagcatcgaacatggatccatacgttgtcacatccatgattgcaagaaccaccatcctgtggaaaccatgaagggaagcccgtgtgggggttgctgttaccatggtgaaagaaaggaacgag

SEQ ID NO: 19417 - DNA, 414 bp, Gossypium hirsutum
  Clone ID: LIB3146-003-P1-K1-H10
actagtcagacccacgcgtccggttgcctgctggatgcttgcttttgagaatccaactatgccaaatgcctcaaatgttgaaagatcaaatgttcttactgtctcgcctgcttaattttttttgtttatgttctttaaataattaaattggacctttgtttggaattaaactaaacctttgttatattttatattaattcctaattcttagtttttatctgtatatatatttgttccaaggttagccatttggacagtgattggtatcttttgctctgcctagtaaatgaatatttaaattatttatttaaaaaaaaatatctaaaaattctagactttatgaaataaaataaactttagaaactccaattatgtctttaaataaaattaacactaacaaaaaaaaggggcggc

SEQ ID NO: 19418 - DNA, 406 bp, Gossypium hirsutum
  unsure (1)..(406): unsure at all n locations
  Clone ID: uC-gsflnu33B075b03b1
tctacgcgtccgggaggctatgagtttatcaagaaagcaattgaaaagcttggggcgagacacactcaacacattactgcctatggagaaggcaatgagcgtcgcctcactggtcgacacgagactgccgacatcaacactttcatatggggtgttgcaaaccgtggcgcatcgattcgtgttggtcgagacacagagaaagctggaaaaggttatttcgaagaccggaggccagcttcaaacatggatccatacgttatcacttccatgattgcagaaaccaccatcctgtggaaaccctgaggcatatatattccttggcttctgtttctctgtggtacaaaggaaagagctatgtttcgttttggtttgcttgctatatcnagccggatcggaccaaagaact

SEQ ID NO: 19419 - DNA, 497 bp, Gossypium hirsutum
  Clone ID: uC-gsronu33B038d03b1
cccactcgtccgctaatttcaatctgttcgttttaaaacttgttttattattcttttgaagaatatgtcacttcttacagatcacgttaaccttaatctctcagactgcactgacaaaatcattgccgaatacatatgggtgggtggatcaggcatcgatctcagaagcaaagcaaggacactttctgggcctgttagcgatccttcaaagcttccaaagtggaattatgacggttccagcactggtcaagcctctggcgaagacagtgaagtcatcttatatcctcaagctatattcaaagatccattcaggaggggcaacaatattcttgttatgtgcgatgcttatactccagctggtgatccaattcccacaaacaagagacgcgctgctgctaagatttttagccatcctgatgttgtcgccgaagaaccctggtatggaatagagcaggagtacaccttgttgcaaaaagatgttaaatggccaattggat

SEQ ID NO: 19420 - DNA, 304 bp, Gossypium hirsutum
  Clone ID: uC-gsronu33B117b08b1
ttcattcgtccgcccacgcgtccgaaaccaccatcctgtggaaaccatgaggggaagcccatgtttgggatgctgtttccatggtagaaagaaaggaaagagccaaagtgtttgttttgtcccctccagtgggatacactcatttcattgcacttagtaattaggtcatggttgcccttgcttggatttgaggtagaaagggttgtttctactgctttcttgcaattacggttaatcttgtgttaaataaatgagaatgcttttattattattaataataatgaagggctagattttgagtttc

SEQ ID NO: 19421 - DNA, 961 bp, Gossypium hirsutum
  Clone ID: GOSHI-09MAY01-C1478_1
cccacgcgtccgcccacgcgtccgcccacgcgtccgcccacgcgtccgggctgctactctttccctttcctctgtttcgctctcacgtcttcaatcatcgtggcaaatttggcagaatatttccaagtaagggtgtttggtggatcactgaaatttagacataaattcaggttcttgccagtttaagcacaattactaggaaagctatttccaaatgctaaattttgccagaggaagaagccagacaaggtcaaccagatctatgccttttgctggcatggaataccatgatcccaaaaggaagagcaattttgtaggaaaaatccttatggctgctgcccttacagccgtttgcatcatcatgctcaagcaatctcccacattcggtactccaagtcagttctcccgacatgaagaaggtgtaactcatgttcttgtaactggtggtgctggctatattggttcacatgctgctttacgacttttgaaggagtcataccgtgtaactattgtggacaatctttcacgtggaaacataggtgccgttaaggttctacaagagttatttccagaaccaggaaggcttcaattcatttatgctgatctgggggatgcaaaagctgtaaataaaatattttcagaaaatgcatttgacgctgtaatacactttgcggctgttgcatatgttggggagagtacacttgatcctctcaagtattatcacaacattacttcaaacaccttggtggtgttagaggcaatggctgctcacggtgttaacactctgatatactctagtacatgtgccacatatggggagcctgaaaagatgccaatcacggaagaaaccccacaggttccaatcaatccatatggacaagctaagaagatggcagaggatatcatcctggattactctaagaactcagacatggcagtaatgatcctaagatacttcaat

SEQ ID NO: 19422 - DNA, 501 bp, Gossypium hirsutum
  unsure (1)..(501): unsure at all n locations
  Clone ID: LIB3585-040-P1-K1-F2
gcggattttctttttaatttttttcttttggctaccttcaaaccatttgaatgttcgttttatttccagtttcaggaaatttggcagaatatgtccaagtaagggtgtttggtggatcactgaaatttagacataaattcaggttcttgccagtttaagcacaattactaggaaagctatttccaaatgctaaattttgccagaggaagaagccagacaaggtcaaccagatctatgccttttgctggcatggaataccatgatcccaaaaggaagagcaattttgtaggaaaaatccttatggctgctgcccttacagccgtttgcatcatcatgctcaagcaatctcccacattcggtactccaagtcagttctcccgacatgaagaaggtgtaactcatgttcttgtaactggtggtgctggctatattggttcacatgctgctntacgactnttgaaggagtcataccgtgtaactattgtggacaatctttcacgt

SEQ ID NO: 19423 - DNA, 496 bp, Gossypium hirsutum
  unsure (1)..(496): unsure at all n locations
  Clone ID: uC-gsflmaxxa096h03b1
ggagggacctgctctgctgccttgcctcgcctcgcctgggcttgccttgcctttttacgtttactctctctctcacgttttcaatcatcatttgccacaaagccatttccaaggaaggctctctgattgatccttgaaattgaaacataaattgtgttcatatcacaagaagttttcttcaaatgctaaattttgcaagagggagaagccagccaaggcctactagatccatgccgttgtccggaatggaatatcctgatcccaagaggaagagcaattttgtaggtaaaatccttatggctgcaacccttacagccttatgcattatcatgctcaagcaatccccaaacttcaatactctaagtcggntctccgaacatgaagaaggtgtaacacatgttcttgtaactggtggtgctggctatattggttcacatgctgctntacgacttctgaaggagtcataccgtgtaactattgtggacaatctttcacg

SEQ ID NO: 19424 - DNA, 776 bp, Gossypium hirsutum
  Clone ID: GOSHI-09MAY01-C1408_1
cccacgcgtccgccaaaaccaaagctctttcgctctgatttgcagagaaaatccgaaggacaaattaaccagcctatagagaaacagagaggaaaaaaaaaatttaaacgaagaaacacgagaacgcgaagaacaacagcaaatcaaaggaacaacaactgaaaaaaaaaaaaaagaaaagaaagagaaaagagacggtgtattaattttttgacggaaagagattcatttcatttttttcttcttcttatccaggcagtagaatttgttaatcttggctgcgttatgttttggggggagaaaataaaattgtggttgttacagtgatttgaaaattcccattgttatttttggggattttcccgtctgaagtcgggagggggtcctaaagagtcatgttggagaaccggtgctgcaagtcctgtttggtgtttgcaagctcttgtcaggaagaaaggaagtgggcttacatgtacaatgggaagcgcccacgggaattctccgaatccgatggttgtcaggaaaccaagttgtcgaagctatcttctgatgattcctcgagtgacgataataattctaatgcttcttctccacaagactcaggtgactttctcttgccaggttctcatgaccaatccggtgacgatagtaagcgatctgattcttcctcggatacagactcttctcttatccaccactgctccattggtctagaccaaaccgatttggttaaccaatcagacagtgacagcctgtcggattcttgtgaggagtca

SEQ ID NO: 19425 - DNA, 821 bp, Gossypium hirsutum
  Clone ID: GOSHI-09MAY01-C1428_1
gatgccaccgatctctgccacttgataaaattttccgcataaattcaaatctttattctttttcaagatccgatagaagaacccgacctggtgatccgaaatggcggcgtatagagcagatgacgactacgactatttgttcaagctagtattgatcggagattcgggggttgggaaatcgaacttgttgtcgagattcacgaaaaacgagtttaatctggagtcaaaatccacaatcggagtagaatttgctacccgaagtattcgggtcgatgataaggtcgttaaggcccagatttgggacaccgctggacaagaaagataccgggcgattacaagtgcgtactaccgaggagctgttggtgcattgcttgtctatgatgtcactcgacacatcacatttgagaatgtcgagagatggttgaaggaactacgggatcacacggactccaatatcgtgattatgctcgttggtaacaaggcagacctacgacacttgcgtgctgtttccaccgaggaagctaaggccttcgccgagagagagaaaacgtactttatggagacatctgccctcgagtccctgaatgtagagaatgcattcactgaagtactaactcgaatataccatgtggtaagtcgaaaagcactcgaagtaggggatgatcccgcagcattgccaaagggacaaaccatcaatgtcggcaaggacgatgtttcagccctcaagaaaatcggctgctgttctgcttaactgtcagatgattttgagtggtgaagtttccccctcaaaatttttatcttatttaggccccccccccccc

SEQ ID NO: 19426 - DNA, 1183 bp, Gossypium hirsutum
  Clone ID: GOSHI-09MAY01-C1788_1
gcggaataatggggcgacccacgacgtccgattttcaagtcctataaagcagtgagaaagagacagccaagacccaacccacttaagcgtgccatcccgcgcgcccgggaaaagctaaagataagaatccacccttctctctatctatccttgcactctgagctgttaaagtacactcttcttttggggctttcttttctcttgctggggttttctctattaaaagggggtgctcttttatatttataatattgtgtttttgctctggcttttccagttgctaaggtgtttgctttaaggtttctaagctggacagttcttccgttgttagccaaggtcttcattttcattgctaaaggcaagttgtatagatttcatgaagtcggtctttattgttttcaacttcggacgagcaactcagtttaaattgtaagtttgctggttcttggtcttccaagatagagggaaaaaaaaggtgatcattttgagttactggatatatcttccatcctgtttaggagatggagaaaggttgctcaaagaatggggaaacatgtcctcaacttcttgatttgatccctcaagaaagagagtggcaatatcccaagaggaaagaggagagaagccatgtagcatcagaagagaagaagctggaactgaggcttggtcccccgggtgatgaagaagataactggtccatcaaggctaccggcaaaaacgacaacagagacagagatgaacctttaatctcacttggctacctctcttcaatgaagaagagtaacggaaaacaggcgcataagcttccatctccagaggaccagcagcagcaccacccgattggctcagttttgtccccttcatggaccaaaaaccaccaccctaaccatcaacagctgacaaaccctccatttcttcagttcccatcaacaccccaacagtgcttgcctgttatagcaaaggaacagtcaccgccctgttgcactaaagtggtagacattcagaatgcagagaaaaaaccattttcacctactgcaaatacagctgtgcctcccaacacttctcagaaaagaactgctccctggccagttgtgggttggcctccaattcgctcttttaggaaaatatagcaaacagcagttcatcgaaactagcttctgaatcatcaccaagtgtgctccct

SEQ ID NO: 19427 - DNA, 856 bp, Gossypium hirsutum
  Clone ID: GOSHI-09MAY01-C1778_1
cccacgcgtccgcccacgcgtccgggaacgtggaggcttccatggctaccgtaaactccccgacaatacctgtgggctgaaggtggcggagatgaacatgagaatgggtgaagccaaccatacgaacagccactcaaactctgatgacaatgagtgcaccgtgagagaacaagaccgtttcatgcccattgctaatgtaataaggatcatgcgcaagatccttcccccacacgccaaaatatctgatgacgccaaggaaacgatccaagaatgtgtgtccgagtacatcagcttcatcaccggcgaagccaacgagcattgccaacgtgagcaacgcaagactatcactgctgaggatgtgctgtgggcaatgagtaagctaggctttgatgattacatcgagcctttgacggtatacctccaccgctaccgagaactggagggtgagcgtggatcaatcagaggtgagccggtggtgaagagagtggttgattatggaactttgggtgttgctgcttttgcacctgcctttcacatggggcatcaccatcaccatggccatgggttcttcgggagtggagccatgggagggtatctcaaggatgagtccagtgcaggctcatcacaggctgcagtggcaaatggggaaccatatgcccagcagcataaatgaggctgcagtctccagctatagtaataaggattaaggagtgcttgttgggttttttcaggggggaaaaaagagtaaatgaatgcttgctggtctaactatgtgacagtactaattaagttagtgaactctttttatatgttgatttgacctgcatggacttctgcttcatttacataaaaaaaa

SEQ ID NO: 19428 - DNA, 570 bp, Gossypium hirsutum
  Clone ID: GOSHI-09MAY01-C1718_1
cccacgcgtccgcttctccaatttctggaattttctccgtcctaaattcgttttggtcgggagctctacctttgagttcgcagccatggcagaagagtccgacttcgccgataaggttcctccctccttttatgaaatgggaaacaagatcatttatgaaactgaagccaaagggttgaacccgggattgatagtgctactagttgttctggggctgctgctgatattccttgtagggaactatgtactttactcgtatgcgcaaaagactcttccacctaggaaaaagaagccagtatccaagaagaagatgaagagagagaggctgaagcaaggagtctcagcgccaggagagtaggacttcgaggtctgatctcttcagctccccatgttaaactgtttgcaacttcctgttccgtgtccagtgagttacattagtcagtcaaactttaacatcttaattagaagttaacatacctttgcgtagatcaggaatgtaaatactggtttttgcttgtctggggcatgtttactccctgctgggtcgactctgtgtactcgtttcggttt

SEQ ID NO: 19429 - DNA, 182 bp, Gossypium hirsutum
  Clone ID: LIB3583-010-P1-K1-C12
agccagtatccaagaagaagatgaaaagagagaggctgaagcaaggagtctcagcaccaggagagtaggacttcgaggtctgatctcttcagctccccatgttaaactgtttgcaacttcctgttccgtgtccagtttacttcttgttgtgtttactcttattatatgtttcgttttaattt

SEQ ID NO: 19430 - DNA, 613 bp, Gossypium hirsutum
  Clone ID: GOSHI-09MAY01-C101703_1
tgcaaagcaaggtcgaagcatgaaagaagatacgaggtttgaagaaaatttacttcagtatccatttaatatgacgagattctgatcccctttcttctccctgttttgatttctgaatcccgttttgttgtcagtcgaactggactgaagaaaagaaacaagctgctgctgatgttctatttcaatattcgaaatttgcaatggcatgcataggaaaccaagttcgtccttgtgacatgaggttgcatttgatgaaggaaatatcagggctcccaacttctcttaagagagtttcatcccaagctgctgcttctcctgattcaatgggcgagtcatcaagctcaggtaccgcaagacttgataagaaggctgataaagttgataaatgaggtgaattgggagcgattctgatatttacttgaagcatcgttttattttatgaaagtttcaatttctatgtaactaggcttcgtattctactagatgcttaatgcaacttagggcattccaaagatgttaattataggaaattatttcgtttgtttgatacacgaagtgtgtctgtgtactctgacttattatttcttaactctgagttcacaaatttcttccc

SEQ ID NO: 19431 - DNA, 743 bp, Gossypium hirsutum
  Clone ID: GOSHI-09MAY01-C101713_1
cggcgcgtgggcggacgcgtgggatgaaatagacgtcactgatgacattgggatggctgatgcaatattagcatctgcatctgaaataaagcagaatccgtggattcgtggggtagcaaagtttcacaagttgccaatgtttgttattaagtcaaataccatggcacaaatggtcaaagcagtgcgcatgattctcgaaagggaatcatatgcctcaaggtcaaggcttctagacagagattcttctgatattgagattgaagatgatgcaccaaaacgaaaacctacattagaagagatcgatgccttagaggaggttcgtctggcgatcgagtatatcgtcattcccggtggtgaaccagtggagcttctcccgagacgttccgaaataatagcccgtcaacttgagcttgtcaaaagctatcagttggatgcagagaactcaggtactgagcttaacccaaggttgcaaattcttcctcatagattgaacaaaaaggtatcatcaaaatccctgaaagctacatcgaatttacgaaacgaaactggctcaaagcccctaactgatagctgcggaggaacaagtgttactaggcttcccttcctgcctgaataacatgatttcaatcatatgaatcattgattgatacaatgctaaaattcctgtacagtttatttgtaggttatgtatctcacgatgtaattattttacattctaaaatgtgaaattgtattataatttt

SEQ ID NO: 19432 - DNA, 426 bp, Gossypium hirsutum
  Clone ID: GOSHI-09MAY01-C1728_8
actgtacactgcagacattccggattaccgacgcgtccacgcatgcgtacaatcaagcgttctcaaaatcagttgcttcacagtggcctctacagccatggctctctcttccccatcattcgccggtaaggcagtgaagttctccccttccacccctgaaatccggggaactggccgtgtttccatgaggaaaaccaccaagcctgttccttctggtagcccatggtacggtcctgaccgagctggtgactatggttgggacactgctggactctcagctgatcccgagacctttgctaggaaccgtgagctcgaagtcattcactgcagatgggccatgttgggagctcttgggtgtgttttccctgagctgttggctaggaacggtgtcaagttcggtgaagccgtatggttcaaggccgggtc

SEQ ID NO: 19433 - DNA, 446 bp, Gossypium hirsutum
  Clone ID: GOSHI-09MAY01-C1728_3
gagcacacaaaattcacattctgctttcattgattgtgcaacaaatttacattcacaccaacaaaatcagttgcttcacaatggcctctacaaccatggctctttcttccccatcattcgccggtaaggcagtgaagttctccccttccacccctgaaatccggggaactggccgtgtttccatgaggaaaaccaccaagcctgttccttctggtagcccatggtacggtcctgaccgagttttgtacttgggtccactttccggtgagccaccatcttacttgaccggtgagttccctggtgactatggttgggacactgctggactctcaaatcttcagtgagggtggacttgactacttgggtaacccaagcttgatccatgctcaaagcattttggccatctgggcttgccaagttatcttgatgggagccgtcgagggtac

SEQ ID NO: 19434 - DNA, 503 bp, Gossypium hirsutum
  Clone ID: GOSHI-09MAY01-C1728_2
cacaatggcctctacaaccatggctctttcttccccatcattcgccggtaaggcagtgaagttctccccttccatccctggtgactatggttgggacactgctggactctcagctgatcccgagacctttgctaggaaccgtgagctcgaagtcattcactgcagatgggccatgttgggagctcttgggtgtgttttcccggagctgttggctaggaacggtggcaagttcggtgaagctgtatggttcaaggccgggtctcaaatcttcactgagggtggacttgactacttgggttacccaagcttgatccatgctcaaagcattttggccatctgggctcgccaagttatcttgatgggagccgtcgtgggctaccgtattgcctgtggaccacttactttattttctgaccaaattttttctttttgcatcttttatccattgggggcttggttttttactttatttacttttttttcattctcaacgattattttta

SEQ ID NO: 19435 - DNA, 1031 bp, Gossypium hirsutum
  Clone ID: GOSHI-09MAY01-C1728_1
cccacgcgtccgcccacgcgtccgcccacgcgtccgcccacgcgctcccaccaccaaaatcagctgcttcacaatggcctctacaaccatggctctttcttccccatcattcgccggtaaggcagtgaagttctccccttccacccctgaaatccggggaactggccgtgtttccatgaggaaaaccaccaagcctgttccttctggtagcccatggtacggtcctgaccgagttttgtacttgggtccactttccggtgagccaccatcttacttgaccggtgagttccctggtgactatggttgggacactgctggactctcagctgatcccgagacctttgctaggaaccgtgagctcgaagtcattcactgcagatgggccatgttgggagctcttgggtgtgttttccctgagctgttggctaggaacggtgtcaagttcggtgaagctgtatggttcaaggccgggtctcaaatcttcagtgagggtggacttgactacttgggtaacccaagcttgatccatgctcaaagcattttggccatctgggcttgccaagttatcttgatgggagccgtcgagggttaccgtattgccggtggaccactcggtgaagtgactgacccattgtacccaggtggcagctttgacccattgggtcttgctgatgacccagaggcattcgctgagctcaaggtgaaagagatcaagaacggtaggttggctatgttctcaatgttcgggttcttcgttcaggccatcgtgaccggaaagggaccattggagaacttggctgaccaccttgctgacccagtcaacaacaatgcttgggcctatgccaccaactttgtccccggaaagtgaacttagagagtgagaagggatttgtcttgtttatgtttttatttgttggtgtgaatttaaatttgttgcacaatcaatgaaagtataatgtgaattttgtgtgctcaaaaaatataactttttctttgtatttatacttatattttttattttttttttgttt

SEQ ID NO: 19436 - DNA, 455 bp, Gossypium hirsutum
  Clone ID: LIB3120-015-Q1-K1-H12
cggacgcgtgggcggacgcgtgggaaaaaattcacctcatgctctcattgatttgcaacaggtttacatgacatcaacagagaaaacttataccacaaactcccatcacccgagatcatctttccccttcagaatggcggctgcaaccatggctctctcttccccatctttcgccggaaaggccgtcaagctctctccttccgcccctaaaatccaaggcaatggccgtgtttccatgaggaaaaccgctaccaaggctgctccctctggaagtccatggtacggtcctgaccgagtcttgtacttgggtccactatctggtgagcctccatcttacttgaccggagaattccctggtgactacggttgggacactgctggactctcggcggacccagagacatttgccaggaaccgtgagctcgaagtcatccactgtaggtgggctatgttgg

SEQ ID NO: 19437 - DNA, 348 bp, Gossypium hirsutum
  Clone ID: LIB3148-059-Q1-K1-E11
cccacgcgtccgcaagaacggtaggttggctatgttctcaatgttcgggttcttcgttcaggccatcgtgaccggaaagggaccattggagaacttggctgaccaccttgctgacccagtcaacaacaatgcttgggcctatgccaccaactttgtccccggaaaatgatgggaacgtgaaccaggagacatctcaatttctactattggcatttacatggcaatggctgctgctggcgccacagttcctaccctttttgtatttgtcttgttcatgtttttatttgttggtgtgaatgtaaatttgttgcacaatcaatgaaagcagaatgtgaattttgtgtgctc

SEQ ID NO: 19438 - DNA, 363 bp, Gossypium hirsutum
  Clone ID: LIB3166-016-P1-K1-D4
cccacgcgtccgcccacgcgtccgcccacgcgttctcccacgcgtccgcccacgcgtccggcgcgcgtccgcacaaactcccatcacccgagatcatctttccccttcagaatggcggctgcaaccatggctctctcttccccatctttcgccggaaaggccgtcaagctctctccttccgcccctaaaatccaaggcaatggccgtgtttccatgaggaaaaccgctaccaaggctgctccctctggaagtccatggtacggtcctgaccgagtcttgtacttgggtccactatctggtgagcctccatcttacttgaccggagaattccctggtgactacggttgggacactgctggactc

SEQ ID NO: 19439 - DNA, 347 bp, Gossypium hirsutum
  Clone ID: LIB3146-011-Q1-K1-H3
cttccccgaccccttggccgaccccttggccggccccgtggggaaaaccgttaccaaggctgctccctctggaagtccatggtacggtcctgaccgagtcttgtacttgggtccactatctggtgagcctccatcttacttgaccggagaattccctggtgactacggttgggacactgctggactctcggcggacccagagacatttgccaggaaccgtgagctcgaagtcatccactgtaggtgggctatgttgggtgctcttgggtgtgttttccctgagcttttggctaggaatggagtcaaattcggtgaggctgtgtggttcaaggccggatctcagatct

SEQ ID NO: 19440 - DNA, 265 bp, Gossypium hirsutum
  Clone ID: LIB3120-039-P1-K1-A4
aggcgtccggtcaaaatgctagcttgcttgtggtagaagagcgcgtcaagcatcttcacgtaaggagtgtatggctactggataaacccaatcttgatacacgctcaaagcatcttggtcatctgggcttgccaagttatcttgatgggagctgttgagggttaccgtattgctggcgggcctctcggtgaggtaaccgaccctttgtacccaggtggcagcttctacccattgggtcttgctgacgacccacaggcattcgctg

SEQ ID NO: 19441 - DNA, 474 bp, Gossypium hirsutum
  Clone ID: LIB3582-036-P1-K1-G10
cggacgcgtgggcggacgcgtgggcggacgcgtgggtgccgaccaaacttcatataaggatatgaagattcaattgccaaattcaaaatttaccatttgtttcatataaggatcctttcatttccatgttcataaccatttacagggagtgcactgaatataaattcatagtatgtaatgttcttattcactgcttctttacaatcatttctatttctttaagttttttcagttaccatgattcaacgctagtcttttagggtaaaatgttgctttttattggtgaaaatggtcttatttagtgcttgaaatcctttttggggtttttttgacaaatatagattgaccattacatgctttcacctctgcttcaaaactttgacttgctagcttcatttgtgttgaacactgatgattattaaaacttggttatagatggttaattttttcaccgaaacctctcatttttgttgc

SEQ ID NO: 19442 - DNA, 449 bp, Gossypium hirsutum
  Clone ID: LIB3582-044-P1-K1-C11
taggcttcctgagttcacaccaggctgaagagatttcattggttggagtggaaaagtacttcagctcacttcccgggctcataattaaacctgaatcttttgttattacttgaataacatacttgagtttaactattacattttttaaatggcctggttttttatttggtgggtctctacttagcaatcatcatttgtgggagtgcctaattgagtctttccaggtgtaaaagcatggttgagctattggtttagacaaatgtgtgcactaagacattaacttatgtggctttctaccattggaaccatgttgcgttagagttctttcatattcatatgccgcccaaactttatataatgatattaagattcaattgccaaattcaaaatttaccatttgtttcatataaggagcctttcatttccatgttgataaccatttacagaga

SEQ ID NO: 19443 - DNA, 781 bp, Gossypium hirsutum
  Clone ID: GOSHI-09MAY01-C1648_2
gtcaaatatcacaggtgatggaggagggagtttctcttcagaaactcatcaccaagaacaacaagtaggaaactttcatggaggctcaaactctttgctttcaactaacagtaatggcggctccactgctcctccaccagctaagaagaaaagaaaccttccaggaactcctgatcccaatgcagaagtgattgctttatcaccaaagacccttttggcgacaaaccgattcgtgtgtgaaatatgcaacaaagggttccaaagagaccaaaaccttcaactccatcgacgaggccataacctaccatggaagctaaagcaaagaaccagcaccgagatccgtaaaagggtttacgtctgccctgaaccatcatgcgttcaccataacccagctcgagccctaggtgatctcaccgggatcaagaaacagttttgtcgtaaacatggggtgaaaaaatggaaatgcgataaatgctacgagaaatacgctgttcaatctgattggaaagctcattcaaacacctgtggcacaaaggaatataaatgcgactgtggcaccattttctccaggttttacatatattcaactatcagtttcatgcactattaactactcttgcatatataactctcttggtaaaagtatagttataggatcacattttatcctttgagtcaattaatttttgtacgataaatcagacaacaaattagacacgtgaaaaattattaacatttttaacaataaaattgatatactctttgatctaacctattaaac

SEQ ID NO: 19444 - DNA, 586 bp, Gossypium hirsutum
  Clone ID: GOSHI-09MAY01-C1648_1
ggaactcctgatcccaatgcagaagtgattgctttatcaccaaacccccgcgtccccccacgccgccgcccgcgcgtccgatgcaacaaagggttccaaagagaccaaaaccttcaactccatcgacgaggccataacctaccatggaagctaaagcaaagaaccagcaccgagatccgtaaaagggtttacgtctgccctgaaccatcatgcgtccaccataacccagctcgagccctaggtgatctcaccgggatcaagaaacatttttgtcgtaaacatggtgagaagaaatggaaatgcgataaatgctccaagaaatacgctgttcaatctgattggaaagctcattcaaaaacctgtggcacaaaggaatataaatgtgactgtggcaccattttctccagaagagacagttttataacgcatagggctttttgtgatgccctaacagaagaaaacaacaaagcaagccgaggacttataaacgtgggatcaaatttacaaggccaagttgttgctgcagatcagctcatctctgcaattcccgtcaataacaaccccaacacgtctgccatcaatatat

SEQ ID NO: 19445 - DNA, 853 bp, Gossypium hirsutum
  Clone ID: GOSHI-09MAY01-C1668_6
cccacgcgtccgattttcaaaactttccttgtagatcgttctattttctttttggtttgaaactttctctcttccattcttcatctcctgaggctttcctagtctggctcgctcaccccatcataccgtgtttgatcctcagcatactcgggaactcccatttccaggtatatttcctctcttcttcttagcgtttctgttgcaagaatatgtgcaagattgtttgcagatcttggtgtatgttgaaatctgatattatttagtccatgtattttctgttggatatcataaatgtatgcccctaccattgatcgatcttgaccctttgtgctacatttcttgattattgcgagggaatctccttcaaagatgagtgactgccatcccttgtcaactccgacttggactgctttccgacaggctattgcttcagcagcaaaagcagatggtacgccatcgtggatttctgaacaggataaaagaatttttccttccgagtctctggccacaacacttgaggctgaccggttctgaatctgattatatgcaccatcaaaattaatctttatggattcccactgtgggtgtgtccatctcttatttcctttcattatttctgagcttctttgttcaagaccagttaactcaatgatgtagttactaacaaaggttgcaacttctatgcccttactaactttgccctcatgtatgtttctgtttctggctctgtctccccatatggcccatagtgcacagcaaaagagtcgactttgatttgggtttaactgctctagcgcccagtcacggaataagtgattcatcgtttcagcttcttctccacatcggggacacc

SEQ ID NO: 19446 - DNA, 533 bp, Gossypium hirsutum
  Clone ID: GOSHI-09MAY01-C1668_5
tgaaaacttcctagtctggttcctttctcatctcatatcggccttgctcctcagcgtgggccgctccccccatatccagaaactgccatcccttcccggctcctatttggactgctttccggctggctattgcttctgcagcaaatgccgataagatattttcatggatttctgtacatgataagaggattttcccttctgaatctcttaccacaactccggaggccgagcggttctggcttttattgaaggccccgccaaaattgatcttaatgaaccctccctgtggccttttccatcttatttttcccccgagtgcacaacacaagagtctactgtgataaaggttaagcttttccagcacccagcaggacaggcaccaaaaagatgattcattgtttcagctcattcaccgcaacggggacaactttggttaactgttaactttcaatgctgaaggttcacctttgtaggaaaatagttccacgataacctccatattgtgacctttatttttgttggtagacttaggc

SEQ ID NO: 19447 - DNA, 1175 bp, Gossypium hirsutum
  Clone ID: GOSHI-09MAY01-C1668_4
cccacgcgttcgcccacgcgtccgcccacgcgtccgattctgaggctttcctttcctccaaccttcctctcctgaaacttcctagtctggctcactcctcccatcgtatcgtgcttgatcctcagcatactcaggaactcccttatccaagtgtatttcttctcctcttcttagcgtttctgtcgctagaatatgtgcaagattattttccgatctcggcgtatgttgaaatctgatattataaagcccatattttgctgctagatatcataaatgtatgcccctaccattgattgatcttgaccctttgtgctacatttcttgataattatgagggaatctccttcaagaatcagaaactgccatcccttcccggttcctatttggactgctctccagcaggttattgcttcagcagcaaaggccgatgagatattagaatgaatctctgaacatgagaagaggatatttcgttccgaatctctggccacaatacccgaagccgaccgattctggcttttatcgtaggcaccatcaaagttgatgttgatgaaactctcctgtgggtacgaccatctctggttctctccgcccaaagtgcacaacagaatattcaactttgataaaggctgagctcctctactacccaggtgatccactgtaaaaaatcctcacattgattcatcaaaatgttctggaacgataatgctctccatacctccattgtaacacggcattcgcgaaataaatggttcattgtttcagctccttctccacatcggggatagcttggattgactgctaacttccggtgctgtaaattcacctttgtaggcagataattccaagataacttccatattgtcacctttattttagtcagtagatttaggctccaaagttttttgtaaaaattcctatagatggtctgtaaagcataagttctaagcacttttagtcaatatttgtaatagttgataggcgcttctgcccgtgaattcacccgcccgttccccaccccagataagaaagtcttcacgatgtgtttgtgccagaggaattctgaggattttggtggcatcctcttcccgaaaaggtactggtaatcaaccctttttccaacttctgtaatgactgtcaatcaactcatcaactttagcatcgcgcatagaatt

SEQ ID NO: 19448 - DNA, 1132 bp, Gossypium hirsutum
  Clone ID: GOSHI-09MAY01-C1668_3
attccattttcaatgtatgcccagtaaatcgattcattcctgttctgaggcttaccaaaccttcaaccttcctcccctgaaaacttcctagtctggttcccttctcatctcatatcggccttgctcctcagcgtattccgaaacacccatatccagggaatctccttcaaaaatcagaaactaccatcccttctcggttcctatttggactgctttccggcaggctattgcttctgcagcaaatgccgataagatattttcatggatttctgtacatgataagaggattttcccttctgaatctcttaccactactccggaggccgagcggttctggcttttattgaaggccccgtcaaaattgatcttaatgaacccttcctgtggccttttccatcttatttttcccctgagtgcacaatagaagagtctactgtgataaaggttaagcttctccagcacccagtaggacagtcacgaaaaagatgattcattgtttcaacttcttcaccgcaacggggacaactttggttaactgttaactttcgatgctgaaggttcacctttgtaggcagatagttccacgatagccgccatattgtgatctttatttttgttggtatattcaggctccaaagtgttttgtaaaattttctgtagaggttttatacagcataagctctaggattatcagtcgatctctgtaatagttgataggcacttcgtaccgtgaattcacccgagttctcccctccccaaataagaaaatcttcatgcggtgatcgtgccagcgggatcctgagaattctttcagcatctgcttcagtgaaggtgtaaacagtcttggagaccatgccccagttttccacatccaaaaccgaagatctgatcactccaccgaacgtgacccctacagcatgcagaagatcctttttatcaaactctggtaaacagggtccacttttaatccaaaacagagatgaaacaagcgtaatttgtctactcgttgtcggcttaaaaatccggtcaaaaaataattaaattcttcctaaacaaccatggttggccttccatcacagattataaatcatcctctgtttcaaacgttataaaaaaaagattttgccccacc

SEQ ID NO: 19449 - DNA, 715 bp, Gossypium hirsutum
  Clone ID: GOSHI-09MAY01-C1668_2
cccacgcgtccgcccacgcgtccgcaaaatatgccaagaaaatcgatccgtttcctttactgttctgaggcttcctttctccactcttcctctcctgaaaacttctaatctggtcctcttctcctatcgtaccgagcttgatccatagcatactcaggaactcccctatccaggtaaatttcttctcctctttttaacgtttctgttgctaagatatgtgcaagattatttgcagacctaggtgtatgttgaaatctgatattatcaaatccatatattttctgttgaatgttataaatgtatgcccctaccatcgatctgtcttgaccctttgaattgcatttttgatgattgcgagggaatctccttcaagaatcagaaactgccatcccttcccggttcctatttggactgctctccagcaggttattgcttcagcagcaaaggccgatgagatattagaatgaatctctgaacatgagaagaggatatttcgttccgaatctctggccacaatacccgaagccgaccgattctggcttttatcgtaggcaccatcaaagttgatgttgatgaaactctcctgtgggtacgaccatctctggttctctccgcccaaagtgcacaacagaatattcaactttgataaaggctgagctcctctactacccagctccttctccacatcggggacagcttggattgactgctaact

SEQ ID NO: 19450 - DNA, 1167 bp, Gossypium hirsutum
  Clone ID: GOSHI-09MAY01-C1668_1
cggacgcctgttccttaattgctctgaaaaccttctctcttccaaactccaaactccatctctcaaggcttccctaatctggttcgctcagctcatcatgccgtgcttgggtctctgcataatcaggaacgcccatttccaggtaaaattcctctcctcttcttagcgtctctgttgcaaggatatgtgcaaggttgtttgcagatcttggtgtgtgaagaaatctgatatttttaacttctagcattttctgttggatatcgtaaatatatgcccctaccattgatctatcctgatcctttttgttgcatttcttgattattgcgagggaatctccttcaaaaatgagtgcctgccaaccatggtcaactcctacttggactgctttcctacaggcaattgcttcagcagcaaaagcagatggaactccattgtggatttctgagcaggataaaagaatttttccttccgagtctctggtcacaacacctgaggctgaccggttctgaatctgattatatgcaccatcaaaattaatctttatggattcccactgtggtgcacagcaaaagagtcgactttgatttgggtttaactgctctagcgcccagcacagtcacggaataagtgattcatcgtttcagctccttctccacatcggggacaccttgtgttgactgctaatttccggtgttgtagatttacctttgtaggcagatagttccatgatagccgccatattgtgatctttatttttgttggtatattcaggctccaaagtgttttgtaaaattttctgtagaggttttgtaaagcataagctctaggattatcagtcgatctctgtaatagtttgtaggcgcttctgaccgtaaattcacccgacatctcacctccccagaacagaaaatcttcgtgcggtgtttgtgctagagggattctgaggattcttgcagcatcttcttccgtaaaggtgcaatttctgtacaatcatgaagactgtgccccaacattccacacccaaagcaaaaagtcggcagcttttcatacttgaatggaatctaaaatttatttccattccctattgaaacaaaaatacccctgcgaaggggtctctgtacatttaatttcactctaagacggcaaaactcacccagatttcagatc

SEQ ID NO: 19451 - DNA, 542 bp, Gossypium hirsutum
  Clone ID: LIB3583-030-Q6-K1-D12
tttcaaaatatgccaagaaaatcgatccgtttcctttactgttctgaggcttcctttctccactcttcctctcctgaaaacttctaatctggtcctcttctcctatcgtaccgagcttgatccatagcatactcaggaactcccctatccagggaatctccttcaagaatcagaaactgccatcccttcccggttcctatttggactgctctccagcaggttattgcttcagcagcaaaggccgatgagatattagaatgaatctctgaacatgagaagaggatatttcgttccgaatctctggccacaatacccgaagccgaccgattctggcttttatcgtaggcaccatcaaagttgatgttgatgaaactctcctgtgggtacgaccatctctggttctctccgcccaaagtgcacaacagaatattcaactttgataaaggctgagctcctctactacccagctccttctccacatcggggacagcttggattgactgctaacttccggtgctgtaaattcacctttgtaggcagat

SEQ ID NO: 19452 - DNA, 442 bp, Gossypium hirsutum
  unsure (1)..(442): unsure at all n locations
  Clone ID: LIB3146-018-Q1-K1-D8
gccggaancccggtgcgaccacgcgtacgcgttctatactgtaacgcccgcgctcgcgattttaaagttttttgtaaaaatttctgttgatgggttgtaaagcataagctctaggattgtcaatcgatctctgtaatagtttgtgggcgcttatgaccgtaaattcacccgacatataaccttcccagaacagaaaatcttcgtgcggagtttgtgctacagggattctgaggattcttgcagcatctccttccgtaaaggagcaatttctgtacaatcatgaagactgtgccccaacattccacacccaaagcaaaaagtctggggctgtttcatacttgaatggaatctaaaatttatttcccaacaaactattcctaagatcgaatggcaaatctattagctttgttttacaaaccctcttcaaaaattttttcaaaaa

SEQ ID NO: 19453 - DNA, 425 bp, Gossypium hirsutum
  unsure (1)..(425): unsure at all n locations
  Clone ID: LIB3148-029-Q1-K1-D1
gttttttgtaaaaattcctatagatggtctgtaaagcataagttctaagacttttagtcaatatttgtaatagttgataggcgcttctgaccgtgaattcacccgaccgttcgccaccccagataagaaagtcttcatgcggtgtttgtgccagaggaattctgaggattttggtggcatcatcttccgaaaagatctgcagcaattgatgccaaccaagcaccatcttggactcctctcatcatatcactactttgctccctggacaaataatcttcctgatgctttgtaatacctccaacatacgagcattgtggttgtagtttttttgatagagcatntagctttagactctcccttctaaccaacgttgattctgcttttaatgctaaagagaaaggtggatcctctttaattcagttttt

SEQ ID NO: 19454 - DNA, 373 bp, Gossypium hirsutum
  Clone ID: LIB3196-017-P1-M1-D2
cggacgcgtgggcaaaccttcaaccttcctcccctgaaaacttcctagtctggttcctttctcatctcatatcggccttgctcctcagcgtattccggaacacccatatccaggtatatttcttctcctctccttagcgtttctgttgctagaatatgtgctagactatttgccgatcttggtgcatgttggaatcttatcttatcaagcccgtatatttgctgttggatatcataaatgtatgttcctatcattgatctatcttgaccctttatattgcatttcttgatgactgcgagggaatctccttcaaaaatcagaaactgccatcccttcccggttcctatttggactgctttccggcaggctattg

SEQ ID NO: 19455 - DNA, 674 bp, Gossypium hirsutum
  Clone ID: GOSHI-09MAY01-C101623_1
ggaccctctttcaaaaccccaaaaccagacacttttaaactactactactatacaaggccccccctcgacgtaaaacaaagcaagctctcgcttctttctttttgcttgctttgatttctgactttaggggttcaaagaggagggttcttttcttgctgtcttgggtgtgattttggggtattcaagttatgggagaaaattttgagaaaagagtgaaaatttataatataaagctatgtttgagttttgccgttttggtgaatgtattggcgtttgcctgtgtgtttttcctcttcttcttgatgttagatctgcaattctaaatcatcaaaagccaacatccctctcttgtgtatatatatattccccctctaatttcttctcttccttctttgatctctttggttttatcacccctttcctttcccctctttcatccttatatatatatatatattgcccccaagttagtttttaaaatccccgatctaacgtctttcatgtttaacataagaagctgaaagatctcttgcagattagatttggatactttttttctcttcctttaatttctctcgttcaagctttgattagatcctgtttttttcctcttaaatcattatagatcatgtatattaatttctcatataaacaaacaaaagcttatttagat

SEQ ID NO: 19456 - DNA, 1091 bp, Gossypium hirsutum
  Clone ID: GOSHI-09MAY01-C1638_1
cccacgcgtccgtgttttttcatttctcctacaaaagaaaaagcttgtaatcggccatggatttctccaaagaacgtgaaagattcgtttacatcgccaagctcgctgagcaagcagaacgctttgatgatatggtgacttccatgaaaaagctagcggagcttgatgtggaactgaccgtagaagagcggaacctgctctctgttgggtacaaaaacgtgatcggtgctcgaagagcatcgtggaggatcctgtcttcgattgagcaaaaggaagagagcaaagggaatgagcaaaatgttaagaaaatcaaaacgtctaggcagaaagtagaatcggagttgtccaatatttgtaaagatattatgggtgtcattaatgagcatctcattccttcttgctcgggtggagagtctactgggttttattataaaatgaaaggagattattataggtacttggcggagtttaagatgggtgatgagaggaaagaggccgctgatcagtccatgaaagcatatcagtctgcaacaactacagcagaagctgagttgcctcctacgcatccaatccggttgggtttggccttgaacttctctgtcttttattatgtgattttggactctcccggaagggcctgtcaccttgctaagcaagcttttgatgaagctatctctgagttggatactttaagcgaggagtcatacaaagatagcacattgattatgcagcttttaagggacaaccttactttatggacttctgacatcccagaggatggagaagaagccgcaaagcttggtgctgctaaagtgggtgaaggagatgaatgaagctacttaaatggattgggacctgtatcatgaaaggaagtagtacaatctaaaactgttggaaatgccctgttgtcaagagagattcaattgttatgactctttttatgatgtttggactgtggagtgtcaatggcattttacgtttttgtctgtctctttttaacatccttccctctgtgatcaaataaaaactattttcaggattttttttcctgctttatgtgccctaaaaaaaaaaaaaaaaaaaaaaataaa

SEQ ID NO: 19457 - DNA, 518 bp, Gossypium hirsutum
  unsure (1)..(518): unsure at all n locations
  Clone ID: LIB3829-021-Q6-K6-B3
aatctgccatggctttctccaaacacgtgaagggggggggacatcaccaagctcgctgtacaagcacaacgctttcatgatatggtgacttccatttttttttatcgacacttgctgtataactggggggggggagcggaacctgctctctgttgaatacaaaaacgtgatcggagctcaaaccacatcttgcaggatcctgtcttcnattgatcaaaacgaagagagcaaatgtaatgagcaaaatgttaagaaaatcaaaacatctacgcacaaagtataatcggagttgtccaatatttgtaaagatattatgggtgtcattaatgatcatcttattccttcttgctccgttggagactctactgggttttattataaaatgaaacgagattattattggtacttggcggagttttatatgggtgattagaggaaagacgccgctgatcagtccatgaaagcatatcagtcttgaacaactacacccctaatctgagttgcactcctacgcatcc

SEQ ID NO: 19458 - DNA, 375 bp, Gossypium hirsutum
  unsure (1)..(375): unsure at all n locations
  Clone ID: LIB3148-024-Q1-K1-A3
gtgccaagtaggaaatggaggtgaaggagatgaatgaagctacttaaatggattgggacgtgtgtcatgaaaggaagtagtacaatctaaaactgttggaaatgccctgttgtcaagagagattcaattgttatgactctttttatgatgtttggactgtggagtgtcaatggcattttacgtttttgtctgtctctttttaaaaaaaaaaaaaaaaaaaaaaaaaaaaaaaaaaaaaaaaaaaaaaaaaaaaaaaaaaaaaaaaaaaaaaaaaaaaaaaaaaaaaaaaaaaaaaaaaaaaaaaaaccctaaaaaaaaaaaaaaaaataaaaaaaaaaaaaaaaaaaataaaaaaaaaaaaaaaacaaaaaanaa

SEQ ID NO: 19459 - DNA, 597 bp, Gossypium hirsutum
  Clone ID: GOSHI-09MAY01-C1188_3
tggggactgcattgttgtggctgtgattcttccctttggcagtcctcttgctgagcgccgagtcaatctttcaagcattagatgtccaaaaatgggcaatcctcgaagagatgaaaagccaactgcctatgcccgtgaagcaagggaatttttaagaacacgccttgtaggaaaacaggtgagtgtacaaatggaatattccaggaaagtccccatggcagatggagctcctgctgcatctgcagattcaagggtaatggattttggctcagtcttcctcctgtcttccatcaagggtgatggagatgaggtttctgcagcaaacgcatctgcagctggcagccagcagcctggcttgaatgtggccgagttggttgttggacgtggctttggcactgtgataagacatagagattttgaggaaagatcaaactattatgatgcccttctggctgctgaatcccgtgctatttctgggaagaagggaattcattctgcgaaggatcctccggtcatgcacattcaagaccttacaatggcatcagccaagaaagctagggatttcctgccattcctgaatcgtggcaggattccagc

SEQ ID NO: 19460 - DNA, 2046 bp, Gossypium hirsutum
  Clone ID: GOSHI-09MAY01-C1188_1
gaaaagccttctgcttatgcccgggaagcaagagagtttgtgagaacacgcctgattggagaacccggcgtccgcggccgcgtggcggtagaaatggaatattccaggaaggttcccatggcagatggtgctatagctgctgctgcacctgcagattcaagggtaatggatttcggctcagtcttcctaatgtctcctgctaagggtgatggtgatgatgctcctgccgcactcccatccacagctggtagtcagccacctggcttgaatgttgcagagttggtggttggacgtggctttggctcagtgataagacatagggattttgaggaaagatcaaactattatgatgcccttttggcagctgaattacgtgcgatttctgggaagaaaggaatccattctgccaaggatcctccagtcacgcacattcaagacctcacaatggcaccagccaagaaagctagggatttcttgcatttcctgcttcgcggcaggattccagctattgtggaatatgtcctaagtggtcatcgtttcaagttgttgatcccaaaggaaacttgtagcattgccttttcattttctggtgtcagatgtcctggtcgcgaggagccctactcagatgaagccatagctctgatgagacgaaagatcatgcagagagatgtggtggttgaagtggaaactgtcgatagaactggaacatttttgggatctttgtgggagtcaaaaaccaatgtggctgtgacgcttcttgaggctggcctggctaagctacaaacttcatttggtagtgataggattcctgatgctcatcttcttgaacaggctgagctatctgccaagaggaagaagctgaaaatttgggagaactatgttgaaggagaggaagtttccaatggacctgccactgttgaaaacaagcaaaaagaactgctacaggtggtggttacagaaatattgggtggcggaaaattttatgtccagacagtgggagatcagagagtatcagctatccaaaaacagcttgcatctttaactatccaagaagctcctgtgattggtgcctttaaccctaagaagggtgacatcgtccttgctcagtttagtatggataattcctggaatcgtgcaatgattgtcaatgcacctcgaggaggagttcaatctcctactgacaactttgaagtgttttatattgattatgggaatcaagaggaggttccatacagtcaattacgacctcttgatccttcattatcagcgtctcctgggcttgctcagctatgtagtcttgcattccttaaagttccgagcctggatgatgaatttggtaccgaagctgctcagtttttgagtgagcagacaatgggaagctcactgcagtttactgctatgatagaggaaagggatgtttctggcggaaaagtcaagggaaaaggaactggcaccgttctcattgtaactctcgttgctgagaagtcagaccttagcattaatgctgcaatgctccaggagggactagctaggttggagaaaaggaagagatgggaatccaaggatagaaaatcggtgattgacaacttagagaactttcagaaggaggcaaaaactggtaggcgtggaatttggcaatatggagatgtggattcggatgatgatgaggatcttcctacacttgcagcagctgctgctaagaagacgggggctggtcgccgatagatttattaatattaatcacttgaaggtaaactccttcactttgggagttatgattaccccaaatgagtacttttagtagttatataggtagttaaaagagcacctagaagagattctcagcctaaacttgcttaaattttgactgcttttcttttttctttttctttatttaatcctttatttttggtagcgcggctgacatttgttttgaacattgtttaaataaggctgaactgtagcacttctcttttgtttccatgcgaggacgttatagacattttcttttccccgttggaaagagtttatggatgtttttttgtg

SEQ ID NO: 19461 - DNA, 641 bp, Gossypium hirsutum
  unsure (1)..(641): unsure at all n locations
  Clone ID: AW187626.1
cttgaaggtgttgacaaatttagcaatttgattggatcagtttattatcctgaaggtgaaactgtgaaagaccttacattggagcttgtggaaaatgttgtggaggttgttancggggactgcattgttgtggctgatgattctaccccatatggcagtcctcttgcagaacaccgagtcaatcttttaagcattaagtgtccaaaaattggcaatcctcgtaaagatgaaaagccggctgcttatgcccgggaagcaagagagtttttgagaacactccttattgcaaaataggtgactgtagaaatggaatattcaatgaaggttcccatggtagatggcactgattgtcaatgcacctcgaaaatgagttcagtcttcaaatgacaggtttgaagtgttttatctcgattatggagttggttccctatantcaattacggcctattgatgcttcattatcagcaacacctgggcttgctcagttatacagtcttgcatttttgaaagttccaagcctcaatgatgaatttggtactgaggctgcncagtattggagtgagcagacattangaagttcactgcaattcaaggcagtgataaatgatagggatacttctgatggattaatctaaggacct

SEQ ID NO: 19462 - DNA, 583 bp, Gossypium hirsutum
  unsure (1)..(583): unsure at all n locations
  Clone ID: LIB3829-016-Q1-K6-D5
gcattgccttctcattttctggtgtcagnagtcctggtcgtgatgaaccatattcagatgaagccatagcagtaatgagacggaagatcatgcagagagatgtggagattgaagtggaaactgtcgatagaactggaacatttttggggtctttgtgggagtccagaaccaatatggctgtgacactagttgaagctggcctggcaaagctacaaacttcatttggtgctgactggattcctgatgctcatcttctcgaacaggctgaacaatctgccaagaggcagaaactgaaagtaagtagctgatggacttatctttatcacacatattcttttggtgcttaatagaactttttggctttattatctttgaacttctaaatgcagatttgggagaactatgttgaaggggaggaagtttccaatggatctgcccctgtagagaacaaacaaaaggaattgctggaggttgttattactgaagtattgaatggtggaaaattttacgtccaaacagttggagatcagagagtatcttctattcagaaacagcttgcatctttaaatatccaagaggctcc

SEQ ID NO: 19463 - DNA, 414 bp, Gossypium hirsutum
  Clone ID: LIB3048-037-Q1-L1-A12
gagatgaggtttcggctgctggtgcccgggaagcaagagaggttttgataacacggcttattggaaaacaggtgactgtagaaatggaatattcaaggaaggttcccatggcatatggtgctatagctgctgctgcacctgcagattcaagggtaatggatttcggctcagacttcctaatgtctcctgctaagggtgatggtgatgatgctcctgccgcactcccatccacagctggtagtcagccacctggcttgaatgttgcatagttggtggttggacgtggctttggctcagtgataacacataaggattttgaggaaagatcaaactattatgatgcccttttggcagctgaattacgtgcgatttctgggaagaaaggaatccattctgccaaggatcctacagtca

SEQ ID NO: 19464 - DNA, 562 bp, Gossypium hirsutum
  Clone ID: GOSHI-09MAY01-C1158_4
cccacgcgtccgcggccgcgggggcggagagcagtccctagaaacaattaaaaagatgcaaaaaaaaacacacacacacacacacagattaagacagaagcatggccagccagatcgtaggaacaaagaaagcttgtgtcgtgggtggcagcggattcgttgcgtcattgctggtcaagttgttgctcgagaagggttacgccgttaacactacagtcagggaccctgacaaccagaagaagatctctcaccttgtaacactacaagagttgggagacttgaaaatctttcaggcggatttaactgatgaagggagctttgatgcccctattgctggttgtgaccttgtcttccatgttgcgacacccgttaactttggttttgaagatccagagaatgacatgatcaaaccagcgacccaaggagtggtgaacgttttgaaagcttgtgccaaagcaaaaacagttaaacgtgtcgtcttgacatcatctgccgcagctgtgtctatcaacacactgaatgggacagatctggtcatgacagagaaagactggaccgatat

SEQ ID NO: 19465 - DNA, 861 bp, Gossypium hirsutum
  Clone ID: GOSHI-09MAY01-C1158_3
tccttcgggtcgactccatcgcgtccgtttgactgcgttgggcacgactgcgatgggcaagccgaagagaaaccacaggttaagacagaagcatggccagccagctcgtaggaacaaagagagcttgtgtcgtgggtggcagaggattcgttgcctcattgctggtcaagttgttgctcgagaagggttacgccgttaacactacagtcagggaccctgacaaccagaagaggatctctcaccttgtaacactacaagagttgggagacttgaagatctttcaggcggatttaactgatgaagggagctttgatgcccctattgctggttgtgaccttgtcttccatgttgcgacacccgttaactttgcttctgaagatccagagaatgacatgatcaaaccagcgactcaaggagtggtgatcgttttgaaagcttgtgccaaagcaaaaacagttaaacgagtcgtcttgacatcatctgccgcagctgtgtctatcaacacactggatgggacagatctcgtcatgacagagaaagactggaccgatatcgagttcttatcatcagcaaagccaccaacttgggtaacaatttgatgcaaatacaattttttttttatcttatgatcaaacaaaagatagttgttgtaagctttatccatatatatatgcaggggtaccctgcatccaagacgttggctgaaaaggcagcttggaaatttgctgaagaaaaaacattgatctcattacagttatcccttctctcatgactggtccttcccttaccccaattgtccccagcagcataggccttgctacatctttgatttcaggcaatgaattcctcataaatgctttg

SEQ ID NO: 19466 - DNA, 1334 bp, Gossypium hirsutum
  Clone ID: GOSHI-09MAY01-C1158_1
ctcattccacaagtgtttcttcgccccgcgtccgcccagcgtccgcccccgcggagagcagtccctaggaacaattaaaaagaaccgaaaaaaaaaacacagattaagacagaagcatggccagccagctcgtaggaacaaagagagcttgtgtcgtgggtggcagcggattcgttgcctcattgctggtcaagttgttgctcgagaagggttacgccgttaacactacagtcagggaccctgacaaccagaagaagatctctcaccttgtaacactacaagagttgggagacttgaagatctttcaggcggatttaactgatgaagggagctttgatgcccctattgctggttgtgaccttgtcttccatgttgcgacacccgttaactttgcttctgaagatccagagaatgacatgatcaaaccagcgactcaaggagtggtgaacgttttgaaagcttgtgccaaagcaaaaacagttaaacgagtcgtcttgacatcatctgccgcagctgtgtctatcaacacactggatgggacagatctcgtcatgacagagaaagactggaccgatatcgagttcttatcatcagcaaagccaccaacttgggggtaccctgcatccaagacgttggctgaaaaggcagcttggaaatttgctgaagaaaacaacattgatctcattacagttatcccttctctcatgactggtccttcccttaccccaattgtccccagcagcataggccttgctacatctttgatttcaggcaatgaattcctcataaatgctttgaaaggaatgcagatgctgtcaggttcgatctctatcacacatgtggaagacgaatgccgagcccatgtttttctggctgaaaaagaatctgcatcgggtcgatatatatgcagtgctgtcaataccagtgtgccagaactagcaaagttcctcaacaaaagataccctgacttcaaagtccctaccgattttggagatttcccctccaaacccaagttgatcatttcctcagagaagcttattagcgaaggattcagctttaagtatgggatcgaggaaatctacgaccaaaccgtggaatatttgaagtctaaggggctgctcaagtgaagcgctttgacgcttccccaatgattatggtgtttgactgttgtgctattgtgataatattcgaataacttcatgctctacaaatgaaggcaaaaccgtgtggcgtttgtcatctattttgattatgaatttctatcacctcatgtccttcaaatgaagcatgcattttgatcttataactcaacagtaaaacaccttaatttttgg

SEQ ID NO: 19467 - DNA, 600 bp, Gossypium hirsutum
  unsure (1)..(600): unsure at all n locations
  Clone ID: LIB3543-030-Q1-K6-A12
ttgctcganagggttacgccgttggcgggggggggggggggccctgacaaccagaagaagatctctcaccttgtaacactacaagagttgggagacttgaagatctttcaggcggatttaactgatgaagggagctttgatgcccctattgctggttgtgaccttgtcttccatgtgggtacggccggaactttgcttctgaagatccagagaatgacatgatcaaaccagcgactcaaggagtggtgaacgttttgaaagcttgtgccaaagcaaaaacagttaaacgagtcgtcttgacatcatctgccgcagctgtgtctatcaacacactggatgggacagatctcgtcatgacagagaaagactggaccgatatcgagttcttatcatcagcaaagccaccaacttgggggtaccctgcatccaagacgttggctgaaaaggcagcttggaaatttgctgaagaaaacaacattgatctcattacagttatcccttctctcatgactggtccttcccttaccccaattgtccccagcagcataggccttgctacatctttgatttcaggcaatgaattcctcataaatgctttga

SEQ ID NO: 19468 - DNA, 425 bp, Gossypium hirsutum
  unsure (1)..(425): unsure at all n locations
  Clone ID: LIB3146-022-Q1-K1-C3
accgcggacgcccgtgggcggacgccgtgggcaggacttcgtgggccggacgacgatgggggattattgggcgtnttgggccgctcctaaacccgaagtggtggatcactttaccttcagnnagaagctnnntattagcngaaagggattcacgcgtttatagtattgggaatcgacgggaaatctactgaccaanaaccgtcggaatatttgaaagtctaaaggggcgtgctctaaggtgaagcgcgtttgaccgcttcccacaattgattatgggtgtttgactcgttgtgctcattgtgataaaatattcgaataacttcatgctctacaaatgaaggcaaaaccgtgtggcgtttgtcatctattttgattatgaatttctatcacctcatgtcctacaaatgaagcatgcattttgatct

SEQ ID NO: 19469 - DNA, 411 bp, Gossypium hirsutum
  Clone ID: LIB3048-018-Q1-L1-C10
ctcattccacaagtgtttcttcgtcggagtgggagaggagtccctaggaacaattaaaaagaaccgaaaaaaaaacacagattaagacagaagcatggccagccagctcgtaggaacaaagagagcttgtgtcgtgggtggcagcggattcgttgcctcattgctggtcaagttgttgctcgagaagggttacgccgttaacactacagtcagggaccctgacaaccagaagaagatctctcaccttgtaacactacaagagttgggagacttgaagatctttcaagcggatttaactgatgaagggagctttgatgcccctattgctggttgtgaccttgtcttccatgttgcgacacccgttaactttgcttctgaagatccagagaatgacatgatcaaaccagcgac

SEQ ID NO: 19470 - DNA, 1220 bp, Gossypium hirsutum
  Clone ID: GOSHI-09MAY01-C1178_1
cccacgcgtccgcccacgcgtccgcggccctcccatttcttcttttgttggccaaatcatgaccactctcgtgaccggtgtgtttctcctcctactatccgtcgccggcgtcgtatccgccgctagatatatcaccggtgatgttctccggttaccttcggaagcttcaaggttcttccgatggaggagcgatgatgatgaagttggtggcacaagatgggcggtcctgattgctggatctaatggatattggaattacaggcatcaggctgatgtttgtcatgcttatcaactcctaaggaacggtggtttgagagaggaaaatatcattgtctttatgtacgatgatatcgctttcaatgtagaaaaccctaggcctggtgttatcattaacaatcctcatggcgatgatgtttataagggagtcccgaaggactatactggagaagatgttaatgttcacaacttttttgcggctctcctcggaaacaagtctgctatcaccgggggtagcgggaaggttgtcgatagtggccctgatgatcatatcttcttatactacactgaccatgggggtcctggtgtgcttgggatgcctaccttcccttatctttatgctgatgacttgattgatgttttaaagaaaaagcatgcttcagggacttataaaagcatggtattctatcttgaagcttgtgagtcaggtagtatctttgagggtcttcttcctcaggggttgaatatctatgcaaccacagcatcaaatgcggaagagagtagctggggaacctattgtcccggagagtacccaagtcctcccccagaatatgaaacctgcttgggagacttgtacagtgtcgcttggatggaggacagtgacatgcataatctgcggacagagactttgcaccagcaatatgaacttgtgaaaaagaggactatcaatggtaattctgcgtatggctctcatgtcatgcaatatggtgatgtagggcttagcaaggacagtctctttgcatacttgggtacaaaccctgcaaatgataacttcacctttgttgacgagaactccttggtgccacctacaaaagctgttaaccagcgtgatgctgatcttgtccatttttggtataagtatcgcaaggcacctgaaggctctgttaggaagactgaagcccaaaagcagtttgttgaagccatgtctcatagaatgcatatat

SEQ ID NO: 19471 - DNA, 375 bp, Gossypium hirsutum
  unsure (1)..(375): unsure at all n locations
  Clone ID: LIB3120-016-Q1-K1-A3
cggacgcgtccgcccacgcgtccgcccacgcgtccgcccacgcgtccggcttcagggaattataaaagcatggtattctatcttgaagcttgtgagtcaggtagtatctttgagggtcttcttcctcaggggttgaatatctatgcaaccacagcatcaaatgcggaagagagtagctggggaacctattgtcccggagagtacccaagtcctcccccagaatatgaaacctgcttgggagacttgtacagcgtcgcttggatggaggacagtgacatgcataatctgcggacagagactnttgcaccagcatatgaacttgtgaaaagaggactatcaatggtcatcttgatatggctctcatgtcatgcatat

SEQ ID NO: 19472 - DNA, 557 bp, Gossypium hirsutum
  Clone ID: GOSHI-09MAY01-C101153_1
aaaaagaaaaaaatcttattcatagctatatgtttcacatccatagtgatactcatcattacagagccaaagtaagaagataaaaatgtacagttaactaaggaatagggtcacaaacttctcaagtgtgcagaaatctgtatgtttttcattcatgatgataagctgtcttgactcttagctgataaccgttttaagaactcataggtagtgatcatgggtgtggcagacatagacattgatgcccaccttggtcccagtcccctgtaacaagcagacaatccgccttctttaaccaaattccttattgtctgcaaaaccgtcataggtcttcttaccccattgccttctccatccaggacctggaacctggttttgatggtgtcaagcggcatagtgattaaagctgaaacaccactagccatggctgcacttaaaccttggactgccaccacggcccttgaatcaggcttgaaaccagatccttcaatcacaccagcttcatcttttttacccatggagcaaccaataccaccccaaatgagcttgtgagcaag

SEQ ID NO: 19473 - DNA, 1063 bp, Gossypium hirsutum
  Clone ID: GOSHI-09MAY01-C1168_2
cccatgcgtccggaacccttttgggaattacctcatgcagaagttattggaagtgtgtaatgaacaacagagaatgcagattctgttagtggctaccgaagaaccgggtgcaacttgttagaatatctctcaacacgcatggcactcgtgtggggcaaaagctgatcgagactctcaaaaccaggcagcaaatctcgctgggtggatcagctcttgggcccggttttctatctctcatcaaggacctggatggccatcatgtcgtgcagcgttgcttgcaatgtcttagctgtgaagataacaagtttatcttcgttgctgctgcaaagtattgcgttgatattgcaactcatcagcatggctgttgcgttttgcaacgatgcattagccattcaactggtgagtatcgagataagttggttgaagaatattcaccaattgggctctactagaacaggatgcatatggtaattttgttggttaggttatcttgtagttaataattctttcggccattttaactttgtttctctaatttaagtggactattgttcacttctcatttttaaatgttacttattttgtgtataaatgttctttttatttatttttaagtgctggtctatattttctttttctcttttatctcttttatattctctctatatttaatgtattgtttctttttactatataatgcgaaattacattccttatttatacacttttttatgtattttattattcattttatttttatctatattatcgttccatctcttttttcatattagtctatttattttcttaatttttatctattatatattcttattcgtttacttttctctattttatattattattattttttttttttttattatcttatattttttatttattttatttatctatttttatattttttaaataatttatctttatttttgtcttatctttatttttttatatttctacttctttatatatattttttttcttcatatttttttttttctattttactttctaatttctctattatttaatattttatttt

SEQ ID NO: 19474 - DNA, 1268 bp, Gossypium hirsutum
  Clone ID: GOSHI-09MAY01-C1168_1
ccttctttgagtaatggtgagctgattgttcatggttctccccgcccggcccgaaacatgttaaaccaggggctgccattgtccaatggcttggctagacctagagctcattcaagtgttggggcttttagtaatgaggatagtttcattattcaaggagatggtttaaattatgtaatgatcaataaggggcttgattgttcgagagggctaaacaaggcaaaggatattggtgcgagtaagcatcgagaaggaaggttgcaactcgatagttggtctcaattcgcaccagcttgtggaaattctaagaatgctgctaagttatgtacctcgttttctttgccccctaagtataactcaatggctgaagctcgtggatatatatacttgatagtgaaagatcaacatggttgtaggtttttacaacggctattcgatgagggtacccgagaggatgttgaaataatattcaaggagattattgatcatgtagtcgaacttatgatgaacccttttgggaattaccttatgcagaagttattggaagtgtgtaatgaacaacagagaatgcagattctgttagtggctaccgaggaaccgggtgcaacttgttagaatatctctcaacactcatggcactcgtgtagttcaaaagttgatcgagactctcaaaaccaggcagcaaatttcactggttatatcagtacttgagcctgggtttctatctctcatcaaggacctgaacggaaatcatgtcgtgcagcgttgcttgcaatgtcttagcagtgaagataacaagtttatctttgtagctgccgcaaagtattgcgttgatattgcaactcatcagcacggctgttgcgttttgcaacgatgtattagccattcaactggtgagtatcgagaaaagttggttgaagaaatatccaccaatgggcttctactagcacaggatgcatatggaaattatgttgttcagtttatcttggagttaaaaatcccatctgccacttcaactttggtttctcaatttcaagggaactatgtacacctctcatcggcaaaagttcagcagtcatgtggttgaaaagtgtcttgcggtattaaatgacgagagccggtcaagaatcatccgtgaattgctctctgcaacacacttcgaacggttgctacaagatcctcatgcaaactatgttgtgcaaactgctctccgtgtttctgaaggaactctgcacaactctctcatcgaagcaatccagtcccgtatt

SEQ ID NO: 19475 - DNA, 784 bp, Gossypium hirsutum
  Clone ID: GOSHI-09MAY01-C1108_1
caagaactagccaagttttggaagcagcatccagctttagtggaggcagaattgttgatccaagcccagttgactcgtgagtctaaagctctgacaccagctttgttgcgtgattttagacgtatgctagagctttcaccccgccttcttgaggaactagtgaagatggcattgctaccacgtactgctcaagggcatggatggttgagacctgctattggcgtggttgagctttctcagaatatcattcaggctgttccgctaagtgctagaaaggttgctgggggatctagtgaaggtgttgcaccctttctacagttgccgcattttagcgaggccatagtttaaaagatagcacggaagaaagtgcgaacgtttcaagagcttcgtgacatgaccttagaagaccgggttgaactgctgactcaggttgctggattatcttctactgaaaccaaagatgtggagatggttcttgaaatgatgccttccttgacagttgatatcacgtgtgaaacagaaggtgaagaggggatacaagagggtgacgtagtcactatgcatgtttggatcacactcaagcgtgggagtggcctagttgctgctcttccccatgctccttactaccccttcttcaaggaggagagcttttggttactgcttgcggaccctgtctctaatgatgtgtggatctcccaaaaagtgagcttcatggaggaggctgtggccataactgcagcgtccaaagcaattcaagagttgaaggaagtgtcaagggcaagtc

SEQ ID NO: 19476 - DNA, 393 bp, Gossypium hirsutum
  unsure (1)..(393): unsure at all n locations
  Clone ID: LIB3585-019-P1-K1-H12
ncttaatacttcgtcggaaaactgatgctcgcaagtgaaaattctctatcagcattcattggaggctgtaatggtcactatgtaatatatggatacagatggcattgctaccacgtactgctcaagggcatggatggttgagacctgctattggcgtggttgagctttctcagaatatcattcangtatgcctataaactctctgggaggaatctttgaaaaaaagtttggtgctttccttgtgaatgattttatggtgccatattatgttacctccatatatgcgttcatttgcaaaatatcaaaaggaaaatgttaatatgcagcataataaattgnttgctttgcatatgctntgcgtttaagtgagtttaagaagatcaaatttctaat

SEQ ID NO: 19477 - DNA, 264 bp, Gossypium hirsutum
  Clone ID: GOSHI-09MAY01-C101103_1
ggcatattccttagagattcaattttcccttcggccttcaaacttgcagcccccttgtcttaagctagaagaagacattgaaatgtctcgtctttgtatttttagtctcttatatttgacactccattgatgagctctgattgcaacttgtattgatttaagaaacagaacaagctagtttttttttgttcttttgttggatgtcccattaagttggttctctcgacagctttttaatggaaaatatttcaagacattgtgtat

SEQ ID NO: 19478 - DNA, 401 bp, Gossypium hirsutum
  Clone ID: GOSHI-09MAY01-C101113_1
gcgttctgaattaccttcggttctccatttatagtaggttatcatcatcataacgacgaggagaagccatcaatgcttgtgaatcatcataatataagtggaaagaaccaaagccaatggcatgttacagatagaatgagtagtgctgcaatggctcaaataccttcatcaatggcggcatcatcttctagcttttccaacgatgatttcttccctgaggcccattgggatgagctgaaatcagttgtggagtttgctcttgaaccctttcctatgtaaatatatataatatgctttatagggttgcccttttttttttaattttgatgatgagggaatattattaattaataattagttgctaattttatatttaataatggaatattttatagagactg

SEQ ID NO: 19479 - DNA, 465 bp, Gossypium hirsutum
  Clone ID: GOSHI-09MAY01-C1128_7
tcgcccactcgttcgtccacgcgtccgcccacgcgtccgggtcaagcgatagttctccgggggtaatcaacatgaaaattgccaaggctgttggagactggtattatgagcggagcctcatcaaaaagcttgtctgtccttatccttgcaaccctacctgcccaaaagttgactctgattcataactcctatgcatataatcatggcctccagtttatttattagatggatattaggccattgtttatgtctatttatccatctataattctctcttgttgcttactttaacaaagaagcgtatgatcttggcaacacataaagtcgctagagcttgtatcattaccactagattgcacagccatttatatccatcagatgtttccctgacgccaatctgtcttgatacgaattccccaacattgggaagattcacagtggtttcttgaaagctttggggatgca

SEQ ID NO: 19480 - DNA, 667 bp, Gossypium hirsutum
  Clone ID: GOSHI-09MAY01-C1128_6
ccggattaaggttaggtactgcgatggatcatcgttcaccggggatgctgtgtggtcgagtaagttgcttgaattgtttttactatcgagaaattaaacatatacataaattaacacataatggttctgtgatcaggctaataatctctttttcaaaggaaacagcatatgggaatttatcattgctgatctactagcaaaaggaatgataaatgctaaaaatgtaagacgtagtttggcgtgtttaatattttgtaattccttcggtaacctttttccctacttgctcaataactttgtgaatctggttatatgtatatatatatacacacaaaaaaataggctattctttggggctgttccgctggaggattggcttcgatattgcactgtgacaggtttcgagctctccttcccgcttctactaaagtaaagtgcatttcagatgctggcttcttcctccatgcgcaagatgtctcgggagggaagcacatagaagaattctatggcaaagtggctagactacacggatccgttaagaatttgccagcgtcttgcacttcaagaatgggagccagaccagagttggtatgtgtggctattttttgtatgacaaatcatagtcccttcctaattaattactcttgtgcatgtcttcttcattaac

SEQ ID NO: 19481 - DNA, 1439 bp, Gossypium hirsutum
  Clone ID: GOSHI-09MAY01-C1128_2
caaggaattcgataccccgtcattgaaggagaggaagacgaagaaagtcggaagcagcgcggaaaagggaatgtagataggtggctccaaatgctgttagagaacagtcaagaagaattggagcctcaaaatgacaatgtagatgcagaggaagtgagtggaactgatgacatcataaaaaagctagacttgaagtatcccctgaaagagaagaaagaagataataatgttaatgtagaaggaaacaaaacaccaaggagaaatagcgatgctgtcgatcgagctaataatctctttttcaaaggaaacagcatatgggaatttatcattgctgatctactagcaaaaggaatgagaaatgctaaaaatgctattctttctggctgttccgctggtggattggcttcgatattgcactgtgacaggtttcgagctctccttcccgcttctactaaagtaaagtgcatttcagatgctggcttcttcctccatgcgcaagatggctcgggagggaagcacatagaagaattctatggcaaagtggctagactacacggatccgttaagaatttaccagcgtcttgcacttcaagaatgggagccagaccagagttgtgtttcttccctcagtacgtggtgcagactatgcaaacaccaatcttcttcgtaaattcagcttatgactcctggcagattaagaacattttggctcccagtgctgctgacaaaagtaaggcgtggaaaagctgcaagcttgacttgaagaagtgtacagcagcgcagctcaaaaccatccaagatttcaggacgcaattcttaagtgccctgaacagagccggggtggtcaactctccatctaaaggaatgttcatagattcgtgctatgcccactgtcaagtaggaaagcagatacaatggtcaagcgatagttctccggtagtaagcaacatgaaaattgccaaggctgttggagactggtattatgagcggagccccatcaaaaagcttgactgcccttatccttgcaaccctacctgcccaaaagttgactctgattcataaatcctatacatataattatggactacagtttatttattagatggatattagtccattgtttatgtctatttatccatctataaatctctcttgttgttttattttaataaagaagcgtatgatcttggaaacaaataaagttgcttgagcttgtatcattaccactagattgtagtggtatttttatttatgagatgtttccgtaattttcaattccagtgaataagttaatttagattttgtcaaaaaaaaaaaaaaaaaaaaaaaaaaaaaaaaaaaaaataaaaaaaaaaaaaaataaacaaaaaaaaatactatccctcttattatataattaaattttattatttttcttttttaaaaaaggggcgcccttt

SEQ ID NO: 19482 - DNA, 1099 bp, Gossypium hirsutum
  Clone ID: GOSHI-09MAY01-C1128_1
cccacgcgtccgcccaaaacaaagcattatactcgtactaagaagaaactagttgtaggcagctattatatcgtttctcctttctcccttctcttaagagtagaatgattattggaaggttacgccaatggttaagtctactggtctgtgtgcttgctgttatactactcaaatctgaaggcgctagtgtagggattacttatctgcaggatgccgtagcgaaaggagctgtttgtttggatgggagtccaccagcttaccattttgacaagggctctggcgctggacttgataattggattgttcacatggagggtggaggatggtgtgaagatgtgccgacttgcctctctcgtaagaacaccgatttagggtcatcaaagcaaatggtgaagcaatttggcttctctggactcttgagcggccagcaaaaatccaatccagatttctacaattggaaccggattaaggttaggtactgcgatggatcatcgttcaccggggatgctgtcgatcgagctaataatctctttttcaaaggaaacagcatatgggaatttatcattgctgatctactagcaaaaggaatgagaaatgctaaaaatgctattctttctggctgttccgctggaggattggcttcgatattgcactgtgacaggtttcgagctctccttcccgcttctactaaagtaaagtgcatttcagatgctggcttcttcctccatgcgcaagatgtctcgggagggaagcacatagaagaattctatggcaaagtggctagactacacggatccgttaagaatttgccagcgtcttgcacttcaagaatgggagccagaccagagttgtgtttcttcccacagtacgtggtgcagactatgcaaacaccaatcttcttcgtaaattcagcttatgactcctggcagattaagaacattttggctcccagtgctgctgacaaaagtaaggagtggaaaagctgcaagcttgacttgaagaagtgtacagcagccgcagctcaaaatcatccaagatttcatgacgcacttcccgggacactttcatttagatgtcataatctgcttgcaacgcagtg

SEQ ID NO: 19483 - DNA, 374 bp, Gossypium hirsutum
  Clone ID: LIB3166-021-P1-K1-G7
cccacgcgtccgattttgtaattccttcggtaacctttttccccttgctcataactttgttggaatctgtttatatgtatatatatatacacacaaaaaaataggctattctttctggctgttccgctggaggattggcttcgatattgcactgtgacaggtttcgagctctccttcccgcttctactaaagtaaagtgcatttcagatgctggcttcttcctccatgcgcaagatgtctcgggagggaagcacatagaagaattctatggcaaagtggctagactacacgtattgtctctatcgattctttacttgaactttattgaagactttttttaatatatatatgattgtgatctgctccataagaat

SEQ ID NO: 19484 - DNA, 331 bp, Gossypium hirsutum
  Clone ID: uC-gsflnu33B013h12b1
tggccgccctttttttttttttttgattaaaatgtttgttacaattcaattcatggagacaatggcaataaacattaatttaaagccagagttaaatctggtcaatgaagcctttaaaatttttgaaagaagacccaccttcagccacactttttctagcaactcccttgagttgaaatgaatttgcttttatttcatcagaagagagcagtgtattgatcttggaactcagttcattccttgtatcattaccactagattgtagtggcatttttatttatgagatgtttccgtaattttcaattccagtgaataagttaattaagatttt

SEQ ID NO: 19485 - DNA, 393 bp, Gossypium hirsutum
  Clone ID: LIB3272-010-P1-K1-B1
aaagaaacgaaagtcgtcttaccattctgtgcctctgcctgagtttttatagcttttatgtatttactgttattactatctttcctagttcggaaagcgttttcttttactttattgatgaagtaatctcaggatgaagacaataagagattgtgttttttaaccactcgtagttttcagttctttctgttccggcgatttacgagcggtgctgttagctctcctcccattctaagggatcgattattgaatttagaagagaagtagaatgattattggaaggttacgccaatggttaagtctactggtctgtgtgcttgctgttatactactcaaatctgaaggcgctagtgtagggattacttatctgcaggatgccgtagcgaaaggagc

SEQ ID NO: 19486 - DNA, 558 bp, Gossypium hirsutum
  Clone ID: GOSHI-09MAY01-C1088_1
cccacgcgtccgtatcactttaactatggcttcgttcaaacccctcttgtttctcttcctttcttctcttttgctccatgcttccctagctgagattatttgcgaggatttgccaaaggatgtgtgtgcgttttcgatagcaacatctgggaagagatgtttgttggaaacatcggtgaagaaagacggctacgaatgccgaacttcggaggtggtggtggcgtcgttggccgattatatcgaaagcgatgaatgtgtacgtgcttgtggggttgatagaacttccaccggtttttcatccgattcccttctcgagccacaattcactgccaagctttgctccccggcttgctaccaatactgccccaacattgtcgacctttacttcaatttggccgccggtgaaggagtgcttctggcagatctctgtgaggctcagcgcaccgaccctcggcgtacgttgatggagctcttgagctccggtgctgcccctggtccagtttctagtgaatcagggtcattgttcggtgttactcctgcctcagcttctctgtgatc

SEQ ID NO: 19487 - DNA, 1167 bp, Gossypium hirsutum
  Clone ID: GOSHI-09MAY01-C1058_1
ggtttggagattcaaagacaagttttgggagaaactgatcctcgagtgggggagacctgtcgatacgttgctgaagcgcatgtccaagcgttgcaatttgatgaagctgagaggctttgtcaaatagctcttgacatccatagggagaatgctgctcccgcttctattgaagaagctgctgataggagactcatgggactcatctgtgactcaaaaggagattatgaatcggcacttgagcattatgttttagctagcatggcaatggcagccaatggccgtgagctcgatgttgcttcgattgattgtagcattgggcctgcgtgtttggctctagcccgccccgcgcggccggttttggcctaccagaaagcgctcacagtgtttaaatctgctaaaggagagaatcatccaacagttgcttcagtttttgttcgtttggctgatttgtacaataaggtaggaaagttaagggattccagaacttattgcgaaaacgcactccggatttacggaaagccaaatcctggaatcccatcagaagagattgccagtggcctcattgacgttgctgccatatgccaatctatgaatgaattggatcaagcactcaaattacttaaaaaagctttaagtattttcagtgaagccccagggaagcaaagcacaattgcaggcattgaggcacagatgggagtcatgtattacatgatggggagctatgctgactcctacagcaccttcaaaagtgctatctcaaagtttcgagctagtggagataagaagtctgccttgttcggaatcgctctcaatcaaatggggctagcctgcgtacaacgatattcaataaacgaggcagccgatctgtttgaagaagcacgaagcatcttagagaaggaatatggtccttatcaccctgatacattaggggtgtatagcaatctggctggcacctatgatgccatgggaaggttaggtgatgcgattgaaattttggattatgttgttgacatgagagaagagaagcttggaacagcaaatccggatgtcatcgatgagaaaagaaggttgagtgaattattgaaggaagcacgcaaggtccggagcagaaaatcaagagcattagtcaccctgcttgacaccaccactcaaataataaatgatgat

SEQ ID NO: 19488 - DNA, 795 bp, Gossypium hirsutum
  Clone ID: GOSHI-09MAY01-C1078_11
gaaaatttttccttttggaaaatcactccaaaacacgggaaatgcctttttggcgtttatgctccgtttatttttcatttctttttggctgctactgccgctgccatttctgctttcaaatgatggttggttgtggaaagaatgttggcttctgaaggaataaaaagggtagaattgggcagagatgaattagaaaaacgagtttgggagtggaaagagaagtttcgaccccgcattcttattgatgttagcaagattgacatgaccaccactgtcctgggattcaagatttcaatgcctatcatgattgctccgactactatgcagaaaatggctcaccctgaagattcctcacttgagacctgcggaatacaagaggtctagggtacctaggaacaggaggactgtgaaccgtgcctatggtggttttgaagcccgcgcggccgattcagaaaaccatggataatgtgtttcatcaaagaaccagttcaactgggaaaagattcattatgacaggaagtaacaacgttgtttctgatttttgtttttttcttctagttctacgcattttcagatatctcttgtacaaataaacttcataaataaacttcataaatagagaaagaatcaagacaccgcatgttgtatcaatatctttctaaaagggtggctattccagttggcaagaaatagagcagtaaccacataaaatttggcttcctaaaaaaaaatatggtggggttttgtggtttgatctgggtcagctgttttaataaacatatttattttccaaat

SEQ ID NO: 19489 - DNA, 960 bp, Gossypium hirsutum
  Clone ID: GOSHI-09MAY01-C1078_4
cccacgcgtccgcggacgcgtgggatcccccgcgttcggttttccccattttccagtgtttgattggaggaaaatattttccttttggaaaatcaactccaaaacacgggaaaatgccttacaattttgggaaattgtcttaccgattcaatctccgtaagacattttcctaaagctctcatgcattcttctcccttcatccagtaagcttccttcatccattcttctcccttcattccttcaaatttccgttcttgaaagcttcattttggttcagaactggaaaccgctgctgttggttgtggaaagaatgttggcttctgaaggaataaaagggatagaattgggcagagatgaatttgaaaaacgagtttgggagtggaaagagaagtttcgaccccgcattcttattgatgttaacaagattgacatgaccaccactgtcctgggatttaagatttcaatgcctatcatgattgctccgactgctatgcagaaaatggctcaccctgaagattcctcacttgagacctgcggaatacaagaggtctaggttacctaggaacaggaggactgtgaaccgtgcctatggtggttttgaagattcagaaaacaaaggaaaatgtttcatcaaagagccagttcaactgataaaagattcattatgacaggaagtaacaacgttgtttctgatttttgtttttttcttctagttctacgcattttcagacatctcttgtacaagtaaacttcataaataaacttcataaatagagaaagaatcaagacaccgcatgttgtatcaagatattgatacttttatgtggtgtaatattatgcacttggacaatgttgttactatgtggtgtactactaattatgtatttggataatattatttctagtactcattgtggtttcgaagcaatttataattattcaatacttgttttttaacac

SEQ ID NO: 19490 - DNA, 1297 bp, Gossypium hirsutum
  Clone ID: GOSHI-09MAY01-C1078_3
ccccgcgtccggggaaaagaattcctttaggaaaacatttttcaaaacacggtaaaatcaaacccattcctccgaaaattgtcttacgacttcaaaattggtaagacattttccattcttctctaagcagacattttccattctcttctaagcagcagacattttccattcctcaaagcttccgcctctcctcatctctgcctcgccatctctgtctctcagcttcatcttccttctccatctttctgctccatagatctgtcgggctattgagcacccaattttttcagcacttacaagactattgtgtgatctgtattcacttattcctcctcttctagttgcaacgcataagaaactcaagaatgggtaagggcaacaaagaagggacctctaagcaattcaagtggacaaaaccgatggaacatcttttccttgaaattctagcagaggaggcctcgagaaggaaataagccttctaatactttaaaagcaatttctattaatcgagttgccgacgccatttctgaaagattccaagtccaatgcgatgcgaagcatgtggaaaatcatttgaggactgtaaaaaaccagtggcagattatatgcataattcggggtgaaagtggttttggatgggatgataacatgaaaatgatcacatgtgatagagcgacatatgatgcagcagtgatggcacacaagaagtatgaaccatttttgaataaaagcattgatcattatgatgaaatggctttggttgttggcaaagatatggcaacagggagttttgccagaacatttgctgacatagatttggatgatggtaaccaagattcagtgcctgtagactgcgacaatgaagaggctgaagaggtaagaacaaatgtatcttcatctggcacatccaaacgtaaaagaaaaagtgttcaagaaagtgtcgttgatgaacaaattaaatttgtgggtgaacaacttggcaaaattgctaatgctttggaacaatttactgccgataagacaccacatctttacgaacaagtgatgtcgatggaggaagaaggatttgatgatgacttcttgtgttctgtgtttgattatctagtgagtcatgaatccgaggccaaagcttttttagttaaaagtaagaagcataaaaaaatttggcttcaaaaattttctcaaagttgaagatattgatacttttatgtggtgtaatattatgcgcttggacaatgttgttactatgtggtgtactactaattatgtatttggataatattattaatttctagtg

SEQ ID NO: 19491 - DNA, 1638 bp, Gossypium hirsutum
  Clone ID: GOSHI-09MAY01-C1078_2
ggagttccccataccccaaaataggatttggtctcaatttctcacctccaaatgctcatccacttaaacttgtgatttccatataatataatacaaatatatacttacatgtttccctcgcgtcccccctcgcctcacataaaacctttttttttaaatatttttcattgccaatcagtcccttattaataagtagagtatttccataactggtttaattcccttcatgcactgtgctccatagtcttggaacccaaggacagaagactcttttaacatttcaccgcaaagatggagataacaaatgtgagcgagtatcaagaaattgcgaagcaaaagttgccaaagatggtgtatgactactacgcatctggtgctgaggaccaatggacattgcatgagaatagatttgctttcactaagatactgtttcgtcctcgtattctcatcgatgtaagcaagatagacatgaccacaactgtgttgggtttcaagatatcaatgcctatcatgattgccccaactgccatgcaaaaaatggctcatcctgaaggggagtatgcaacagctagggctgcatctgctgctggaactatcatgacattatcctcatgggcaacttctagtgttgaggaggttgcttcgacaggacccggcattcggtttttccaactctatgtatacaaggacaggaatgtagttgcacagctcgttagaagagccgagagggctggtttcaaggcaattgcccttacaggttgatactccgagactcggtcgcagagaagctgatatcaagaacaggttcactttaccaccatttttgacattgaagaactttgaaggtttggaccttggcaagatggataaagctgatgactcgggtcttgcttcgtatgttgccggacaaatcgatcgttcccttagctggaaggatgtgaaatggcttcaaacaatcaccacattgccaattcttgtgaagggtgtactcactgctgaagatgcaaggatagcggtagaggctggagcatccggaatcatcgtcttcaaccacggagctcgccaactcgattatgttcctgccactatcatggccctggaagaggttgtcaaagctgctcaaggtcgggttcctgtcttcttggacggtggtgttcggcgtggaaccgatgtttttaaagctttggcattgggagcctctggtatatttattgggcgaccagtggtgttctcattggctgctgaaggagaagctggcgtgaggaaagtgctttcgatgctgcgtgacgagttcgagctaaccatggcgttgagcggttgtcgttcgcttaaagaaatcactcgtgaccacatcgtgacagaatgggacagtcctcatcctcgtccggccccgagactgtagagccctatatattatgggcgtggaactttagcctagcaaatcgcaagatgaacttagttggagctcaagagatatatatagcatttgcattgcatttatggcataaaattactgtctttttttttctttgggaacaagtttctgtttcattgagttaaaaggttatgtaatgataatgttggctaccgctgccttttcactgtatattcttttcttaaaaacaaatgggtaatatg

SEQ ID NO: 19492 - DNA, 1458 bp, Gossypium hirsutum
  Clone ID: GOSHI-09MAY01-C1078_1
ggttacttctctctccaccattatttccaatccttttcactttatctcctccgctcctctctcggtctcgctttccattgttggacgtagccaaggtctgttctttgctctttataatgttctgtccgctcgcggccgcctcgtcgtaccccaagattaccttgcgattgcaaaaattatctgtaaggaaaaaaatggagataactaatgtcactgaatatgaggccattgcaaaaaagaagttacccaagatggtttatgactactatgcatcaggtgcagaggaccagtggactctcaaggagaatcgaaatgcattttccaggattttgtttcgaccccgcattcttattgatgttagcaagattgacatgaccaccactgtcctgggattcaagatttcaatgcctatcatgattgctccgactgctatgcagaaaatggctcaccctgaaggagaatacgcgacagcccgagcagcttcagctgcaggaacaattatgacactatcctcgtgggctacttccagcgttgaggaggttgcttcaacgggacctggcattcgctttttccaactctatgtatacaaagacaggaatgtggttgcacagctcgtgagaagagccgaaagggctggtttcaaggcgattgcccttacggtggacactccaagacttggccgcagggaagctgatatcaagaacaggtttactttgccaccatttctgactttgaaaaactttgagggtttaaaccttggcaaaatggataagaccgatgactctggactagcttcttatgttgctggccaaattgataggtcactgagctggaaagatgtaaagtggctccagacgataacatcgttgcctattctagttaagggtgttcttactgctgaggatgcaaggctagccatacaagctggagcagcaggaatcattgtatccaatcatggcgctcgccagcttgattatgtgcctgcaactattatggctttggaaagaggttgttaaagctgcacagggcagagttcctgtttttcttgatgaaggggttcggggtggaaccgatgtcttcaaggcattagctctgggtgcatcgggaatatttattggaaggccagtagtgttttcattggctgcggaaggggaagttggtgttaggaaagtgcttcagatgctacgcgatgaatttgagctgactatggcattaagtggttgccgctcactaaaggagatcacacgaaaccacattgttgccgattgggacgaacctcgtgttgtacccaggttgtaaaggtgatgatggcttctttcaaatggtcaaaagttctaagagtatatttccattaaaataaacttggtgcccgatttgatacaagtgctcaaactttagcttatgttttgacaatagaaagcaatcattttatcagtatattgctcctttttcttgctt

SEQ ID NO: 19493 - DNA, 695 bp, Gossypium hirsutum
  unsure (1)..(695): unsure at all n locations
  Clone ID: LIB3583-052-P1-K6-D5
gngacactgattcagagtgctgaggagctcaccattaattttcagttacctgatatcgagttttctcaaggctgttctttgtgtctaaccagctgctctgcaggaaatgaagcaaatactttgaagtaaggcaggcagctcatagagagaaaagtcatgacaattttgtgtactgcccgaatgtaatgcagttggaagacaatagcattcagcattttcaaactcattggatgcgaggtgaacctgttattgttagaaatgtccttgaattaggaagcgattatctgtatgttttacatttcctgttagctctagatttgagtattttacttttactaggctatgacaagcaagttgacataaagatctaagccaaagttactatttactgtttcttctctctggttcagtgtctgcctcttctggctcgaagttgggggctactatcccttcatccttagcatgtggttcttttagtgttctttttttttggttgttgttgttggccaaaaacactttcattcatttcatgacagaaaaaacagtcgtcaaaatcaaccacaaccaagatgtccaagcattagacagaaacgagaataagagctgcgaaactggaattatacgtatagcactccaatcatgtataatgncattttattntcattttcattttttattatctttgcaaatatttt

SEQ ID NO: 19494 - DNA, 479 bp, Gossypium hirsutum
  Clone ID: LIB3585-020-P1-K1-G10
cccacgcgtccgctttctcttctaagcaaattttcttcgacatcctcatctccgttcatcacctcccctaccatctccgtctgtcatctccgtcgatcgtcggccttgcttctattttgaagaaaccctaaaaaattggcaggcacagttaagaaaagaaaacccagaagcagtggttctctctctgtcatcaacagattcaatgcttgtaaactgcgacagtgaagaggctgaagaggtaagaacaaatgtatcttcatctggcacatccaaacgtaaaagaaaaagtgttcaagaaagtttcgttgatgaacaaattaaatttgtgggtgaacaacttggcaaaattgctaatgctttggaaaaatttactgccgataagacatcacaactttacgaacaagtgatgtcgatggaggaagaaggatttgatgatgacttcttgtgttctgtgtttgattatctagtgagtcatgaat

SEQ ID NO: 19495 - DNA, 505 bp, Gossypium hirsutum
  Clone ID: uC-gsflnu33B126f04b1
tccattcgtccgcccacgcgtccgcggacgcgtgggtttttggttacttctctctccaccattatttccaatccttttcactttatctccccccccccctcctctctctctcactccccattgttggacgtagccaagattacattgggatagcaaaaattatctgtacggaaaaaacatggacataactaatgtcactgaatatgaggccattgcaaaaaagaagttacccaagatggtttatgactactatgcatcaggtgcagaggaccagtggactctcaaggagaatcgaaatgcattttccaggattttgtttcgaccccgcattcttattgatgttagcaagattgacatgaccaccactgtcctgggattcaagatttcaatgcctatcatgattgctccgactgctatgcagaaaatggctcaccctgaaggagaatacgcgacagcccgagcagcttcagctgcaggaacaattatgacactatcctcgtgggct

SEQ ID NO: 19496 - DNA, 444 bp, Gossypium hirsutum
  Clone ID: uC-gsflnu33B070a09b1
tggcacacaagaagtatgaaccatttttgaataaaagcattgatcattatgatgaaatgacttttgttgttggcaaagatatggcaatagggagttttgccaaaacattttctgacaatgaagagactgaagaggtaagaacaaaagtatcttcatctggcacatccaaatgtaaaagaaaaaatgttcaataaagtgtcgttgatgacaaaattaaatttgtgggtgaacaacttggcaaaattgctaatgctttggaacaatttactgcggataagacaccacatctttacgaagaagtgatgccgatggaggaagaaggatttgatgatgacttcctgtgttctgtgtttgattatctagatagtcatgaatctgaagccaaatcttttttagttttaaaggtagaagcataaaaaaaatttggcttcgaaaattttctaa

SEQ ID NO: 19497 - DNA, 667 bp, Gossypium hirsutum
  unsure (1)..(667): unsure at all n locations
  Clone ID: AI055577.1
ccttggtgggaatgaaaaaaagccaatacctctatcacaaaataaggcaaagactatattaagggtttgtttgatagggggaaaatattttccggaattgattttccccattttccagtgtttgattggagtaaaatattttccttttggaaaatcaactacaaaacacgggaaaatgccttacaatttttgggaaattgtcttaccgattcaatctccgtaagacattttcctaaagctctcaggcattcttctccctaagctcccttcatccattcttctcccttccttattccttcaaatttccgttattgaaagcttcattttgggtcaaactggaaaccgctgctggntatgttgcaattccattttcatttttcgacggttacttcgtttatttttcatttctttttggcttttatgctccgtttatttttcatttctttttggctgctactgccgttgccatttctgctntcaaatgatgggtaagctntcttcttctttaatcttcgtcgggttgtaatgctggaagccatctttctaattccactcttcttcttctctacaccatgctaccactcgactgctagtnagaactgcttaaaacattangattttgaggtgtggtgctagtcctggagcttctttgaccctgaagaaaccn

SEQ ID NO: 19498 - DNA, 593 bp, Gossypium hirsutum
  Clone ID: LIB3828-009-Q1-K6-C6
gttactttgtacatatcatctattgtgttttatttgcttggggggttctccacaacttcaataaattctacttcttctccttccaaatactgattcttatggagttttattgctttaacccgttgcttaatttctggtgtttattgttcatatttgaccatacttccaagttttctggcaatcttttttctttgtgcattatatagtagttttagttttatcttttcatttaattattatggttcatttattttatgataggtttcgaccccgcattcttattgatgttaacaagattgacatgaccaccactgtcctgggattcaagatttcaatgcctatcatgattgctccgactgctatgcagaaaatggctcaccctgaaggtatgaatgttctggttttttagtacccttgttatgagattgtttgagcaactaatgttcacatatcaaattgagcacagtcgtctttggttgctgagtatgcttagacttgcatgatgatttacattgcaactctggatatttcctgaaacagaacaaatttgtatacgaatgatttccagatgcgaaggagtgaataaaatgtaa

SEQ ID NO: 19499 - DNA, 504 bp, Gossypium hirsutum
  Clone ID: LIB3585-019-P1-K1-E4
cggacgcgtgggcggacgcgtgggaaaaaaagttggagaaaagtgataaaaacactcctaattgccttttgctgggactttttggccttgaaaaaaaaaaagtagtactctacagatctcttttgattctgccatcctggccactctagtattggagttttaggcaggggtttagattgcgattaccttgcgatagcaaaaattatctgtaaggaaaaaatggagataactaatatcactgaatatgaggccattgcaaaagagaagttacccaagatggtttatgactactatgcatcaggtgcagaggaccagtggactctcaaggagaatcgaaatgcattttctaggattttgtttcgaccccgcattcttattgatgttagcaagattgacatgaccaccactgtcctgggattcaagatttcaatgcctatcatgattgctccgactgctatgcagaaaatggctcaccctgaaggagaatacgcgacagcccgagca

SEQ ID NO: 19500 - DNA, 528 bp, Gossypium hirsutum
  Clone ID: LIB3543-052-Q1-K1-F2
atttttcaaaacacggtaaaatcaaacccattcctccgaaaattgtcttacgacttcaaaattggtaagacattttccattcttctctaagcagacattttccattctcttctaagcagcagacattttccattcctcaaagcttccgcctctcctcatctctgcctcgccatctctgtctctcagcttcatcttccttctccatctttctgctccatagatctgtcggtgagtcacccaaaagcttcaagttttttatgaaattggtggttttttgctggattttccagaaatcggaagaaggatgaaaactcatcctcttcttccctacaccactcgacccccaattcttcactaaagggctattgagcacccaattttttcagcacttacaagactattgtgtgatctgtattcacttattcctcctcttctagttgcaacgcataagaaactcaagaatgggtaagggcaacaaagaagggacctctaagcaattcaagtggacaaaaccgatggaacatgttt

SEQ ID NO: 19501 - DNA, 425 bp, Gossypium hirsutum
  unsure (1)..(425): unsure at all n locations
  Clone ID: LIB3825-002-Q1-K6-A11
gtcaattttgtgtactgcccngatgtaatgcagttgngaagacaatagcattcagcattttcaaactcattggatgcgaggtgaacctgttattgttagaaatgtccttgaaaaagttctggtcttagttgggaaccattggttatgtggagagcttttataggtgcanaaaaagatattaaaagaggaggctaatagggtaaatcaattgattgcttggactggtgtgaggtactttttntggattaagaagcctcacaaaaatttggcttcaaaaattttctcagggttgaagatattgatacttttatgtggtgtaatattatgcacttggacaatgttgttattatgtggtgtactactaattatgtatttggataatattatttctagtactcattatggtttcgaagcaatttataatt

SEQ ID NO: 19502 - DNA, 416 bp, Gossypium hirsutum
  unsure (1)..(416): unsure at all n locations
  Clone ID: LIB3829-021-Q6-N6-G1
aatactangaaataataatattatccaaatgcataattaatactaatacaacataataacaacaacattgtccaagtgcataactaatattacaccacataaaggtatcaatatcttcaaccttgagaaaatttttgaagccaaatttttttatgcttcttacttttaactaaaaaagctttggcctcggattcatgactcactagataatcaaacacagaacacaagacgtcatcatcaaatccttcttcctccatcgacatcacttgttcgtaaagccgtggtgtcttatctcttcagcctcttcattgtcgcagtctacaggcactgaatcttggttactgtcatccaaatctatgtcagcaaatgttctggcaaaactccctgttgccatatctttgccaacaaccaaagcc

SEQ ID NO: 19503 - DNA, 422 bp, Gossypium hirsutum
  Clone ID: LIB3165-016-P1-K1-H2
atcggttccacgccgaacaccaccgtccaagattacaggaacccgatgtttttaaagctggggcgattgggagcctctggtatatttattgggcgaccagtggtgttctcattagctgctgaaggagaagctggcgtgaggaaagtgctttcgatgctgcgtgaggagtttgagctaaccatggcgttgagcggttgtcgttctcttaaagaaatcactcgtgaccacatcatgacagaatgggacagtcctcatcctcgtccggccccgagactgtagagccttatatattatgggctggaactttagcctagcaaatcgcaagatgaacttagtcggagctcaagagatatatatagcatttgcattgcattaatggcataaaattactgttttttttcttctttgggaacatgttactg

SEQ ID NO: 19504 - DNA, 342 bp, Gossypium hirsutum
  Clone ID: LIB3272-030-P1-K1-G11
accattatttccaatccttttcactttatcttctcccctcctatctctatctcgctgtccattgttggacgtagccatgattaccttgcgatagcaaaaattatctgtgaggaaaaaacggagataactaatatcactgaatatgaggccattgcaaaagagaagttacccaagatggtttatgactactatgcatcaggtgcagaggaccagtggactctcaaggagaatcgaaacgcattttctaggattttggttcgaccccacattcttattgatgctagcaagattgacatgaccaccactggcctgggatccatgatttcaatgcctatcatgatt

SEQ ID NO: 19505 - DNA, 319 bp, Gossypium hirsutum
  unsure (1)..(319): unsure at all n locations
  Clone ID: LIB3829-021-Q6-K6-G1
tttggntgntggcanaattctgggggggggggagggttgccaaaacatttgctgacatagatttggatgacagtaacggggggggagtgcctgtagactgcgacaatgaagaggctgaagagataagacaccacggctttttttttttttttgtcganggaggaagaaggtgtggggggggggggttnnnttctgngtttnattatttagtgagtcatgaatgcgaggccaaagcttttttagttaaaagtaagaagcataaaaaaatgggggttgaaaaatggggtgangggggaagatatgggtgcgtggatggggg

SEQ ID NO: 19506 - DNA, 398 bp, Gossypium hirsutum
  Clone ID: LIB3165-032-P1-K1-H1
cacgcgtccgtcaatttctacctccaaatgctttttcacttaaacttgtaatttaatataatgggtataaatatatactcgtgacttgttttaatatggatcccatttttttaatataaaaccttttttttttaaatatttttcattgccaatcagtcccttattaataagtagagtatttgcataactggtttaattcccttcatgcactgtgctccatagtcttggaacccaaggacagaagactcttttagcatttcaccgcaaagatggagataacaaatgtgagcgagtatcaagaaattgctaagcaaaagttgccaaagatggtgtatgactactacgcatctggtgctgaggaccaatggacattgcatgagaatagatttgctttcacc

SEQ ID NO: 19507 - DNA, 290 bp, Gossypium hirsutum
  unsure (1)..(290): unsure at all n locations
  Clone ID: LIB3165-058-P1-K1-C1
gcccacgcgnncgnccactcgtccgcccacgcgtccgtttatgggcctggaactttagccaagcaaagcgcattatgatacttacccggagctcaagagatatatatagcatccgcattgcatttatggcataaaattactctgttttttttctgtgggaacatgtttctgtttcattgagttaaaaggttatgtaatgataatgttggctactgctgccttttcactgtatattcttttcttaaaaacgatttgctgatatgagtcttcataaatgaacattaatcaat

SEQ ID NO: 19508 - DNA, 769 bp, Gossypium hirsutum
  Clone ID: GOSHI-09MAY01-C1068_2
ctctaaaaagagaaagctttctaaaggagaatccattttgcggccgcccgcgcggagagatatatgcaaatgctctctaaagcttcatctgctatggcctcctttccttgttcaagggtgaggagtgggctttgtgtttggccaggcttgaggcaattttgcataagaaagggtctcgagtatggcttgcgcttattatcgatgcccctcaaaaccttgcgcggggcaagtcgttctctcagggtcgcggagttttgtagtgtcaccaacgtgtcttcctcattgcaaatcgaattggtaccatgtcttagagacaactatgcatatcttttacacgacgtggacacaggcacggttggagtcgttgatccttcaatagctatgcccattatcgatgctttgagtcggaaaaactggaacttgacttatatattgaatacccatcaccatcacgatcatactggtgggaatgcagagctgaaagcaaggtatggagcaaaggttatcggttcgggaatagacaaggataggattcctggaattgatattgttctaaatgatggggacaagtggatgtttgcaggtcatgaagtgcatgtcattgaaactcctggtcatacccgaggccatatcagcttctattttcctggttctccagcaatatttaccggggacacattgttcggcttatcatgtgagccggcttttcgtttacattttaatgccgttgggcggtggtaattgggtgaaaatttatgattttttgcgg

SEQ ID NO: 19509 - DNA, 1115 bp, Gossypium hirsutum
  Clone ID: GOSHI-09MAY01-C1068_1
cggccgcgtggccaccaccacggcccctccccgcctccaaaaaaactcaaaaaaaagtaaacccattttagagagaggaagtgttaattgaatgctctctaaaacttcacctgatatggcctcctttccttgttccagggtgtcatgtcttggagacaactatgcatatcttttacatgatgtggacacaggcacagttggagttgttgatccttcagaagctgtgccaattattgatgctttgagtcgaagaaactggaacttgacttatatattgaatacccaccaccatcacgaccacactggtgggaacgcagagttaaaagcaaggtatggtgcacaggtgattggttctggaatagacaaggataggattcctggaattgatattgttctaaatgatggggaaaagtggatgtttgcaggtcatgaagtgcatgtcatggagacccctggttatacccgaggccatattagcttctattttccgggttctcgagcaatttttaccggagacactttgttcagcttatcatgtggcaagcttttagaaggcactccggagcagatgctttcttcccttcagcggatcatgtcactacctgatgatacgaatatctactgtggtcacgaatatactttgagtaattcgaaatttgctttgtcgatagatcccaagaatgatgcacttcagtcgtatgcagcgcatgtaactcaccttcgcaacaaagggttgcctacgattccaactacactgaaaaaagagaaggcgtgtaatccgttccttcgaacatcgagctcagaaatcaggcaggcattaaatattccgggccaatgcaaatgcggctgaagcactgggtgtcattcgtcaagcaaaggataatttctagggcttggttagacatcatttctgtatgtgtataggtgatgttagctcttccatatgtgaaataaaaaaccacaaatgtttaccaatgttcatatgctttgatttttctttttggttctttcgaaattctcttgagctaatctcaaaatattattttgcttatttcctcataacaattttttattcctttgcctcttatatatatgtaattgtttaacattaaaat

SEQ ID NO: 19510 - DNA, 565 bp, Gossypium hirsutum
  Clone ID: LIB3583-030-Q6-K1-H6
acgactttctctcactacagagtaaactttctggaaaaggagaacccattttagagagagaaactgatatgcaaatgctctgtaaggcttcttctgctgtcgcctcctttccttgttccagggtgaggagtggacagtgtttgtggccaggcatgagacagctttgccttaggaagggtcttgtgtatggctttatgcggttattatcaacacccttcaaaaccttgcgtggagcaagtcggtctcttagggttgcagagttttgcagtgtttcaaacatgtcttcctctttacaaattgaactggtaccatgtctcagagacaattatgcatatcttttacatgatgcggaaacaggcactgttggagttgttgatccttcagaagctgtgccaattattgatactttgagtcggaaaaactggaatttgacttatatattgaatacccaccaccatcatgatcacactggtgggaacgcagagttaaaagcaaggtatggtgcaaaggtgattggttcaggaatagacaaagataggattcctggaatcgatattgttctaaa

SEQ ID NO: 19511 - DNA, 460 bp, Gossypium hirsutum
  Clone ID: uC-gsronu33B168a07b1
ctaaaaaaactcaaaaaaaagtaaacccagtgttagagagaggaagtgttaattgaatgctctctaaaacttcacctgatatggcctcctttccttgttccagggtgaggagtgggctttgtgtctggccaggtaataggcaactttgcattagaaagggtcttgtgtatggctttatgcacttactatcaattccctttaaaaccttgtgtggagcgagtcgatctcttagggttgcagagttttgcagtgtttccaatatgtcttcctcattacaaattgaattggtgtcatgtcttggagacaactatgcatatcttttacatgatgtggacacaggcacagttggagttgttgatccttcagaagctgtgccaattattgatgctttaagtcgaagaaactggaacttgacttatatattgaatacccaccaccatcacgaccacactggtgggaa

SEQ ID NO: 19512 - DNA, 392 bp, Gossypium hirsutum
  Clone ID: LIB3146-037-P1-K1-E6
acggttcctagtacattaaagatggagaaggaatgcaatccattcctccggacatcaaatgcagaaatccggaaagcattaaaaattccggtgacagcgaatgaggcagaagccttgggtatcatacgcagagcaaaggataatttctaggattacttacatacatagatacatatatgatacttcattcctgtttgtgtatagctgaagtcatggttgctattccatttctgaaatgatcaaacagcaccaatgtttactacttccatgtccatatgcttcattttttccccttaatttttccaagttttttgaaaattaaatctgttaatcaaatctctacttttttgctttttggtaaaaaaaaaataaaaccccttttttattaccaa

SEQ ID NO: 19513 - DNA, 543 bp, Gossypium hirsutum
  Clone ID: GOSHI-09MAY01-C1028_2
attctgtcttcacaaatgagaaaaggattcaacagagattagctttgtatcaaggagtatgtcccatatatatggagttctcggatgatgctgaagaaacctttaaaactgctttagctttgttgcagaagcaaggaatggcgaaggaaggacaagaggcagctcttgttcagagcgggagacagccgatctggcgattccagtccacacacaatattcaggtacgcaaagtgtagcagttgaagaaagacaaagaggagcccatttgacccagttttatacttcttcccgagagtttctgagaagagtattcaggttaggtttgggatactccctcacgtcatgttagtcataggatctatggctgtatgtcccctattagtttggtttgcttgagatatattggtatatgcaaccactagttattgttttcttttctttttaaaagtttccccccaaacaagatattttagaggatcctaattttgtatccaaagattggcggagcatgacaatatgatatattgagcttgtgttacttgt

SEQ ID NO: 19514 - DNA, 1970 bp, Gossypium hirsutum
  Clone ID: GOSHI-09MAY01-C1028_1
cgcgttcagacacacacgtgcgcggagcgcgtccgatttctccaatctccaatttccttcattagaagccaataaaaaaggaaatccctcgccatttcgctaccttcctcttccgttacacgtttccgttgcctctcttatctctctcatttttagaaaatggctcaagtggtggccactacatcgatccacggctcattcttgtgccagggcactggatccgttcaagagcgagctgtcaagcttaagcctgcgagcttcggttctaaagtgctggcactggacgagaagaagaacaagagagtcgtgctcgggaagaactctcggattaccgctaagagagccgtacgcgccgaacctgaaattattcccgtatcgccggaggatgtgcctgagagggaggagcaatatgagcaattaagggggattcagcaagtaggtgacacatcggtggctatgtggtccaaacctgttgttagacgtaaaacgaagattgtttgcactattggtccttcaacaaacacaagagaaatgatatggaaattggccgagactggaatgaatgttgctcgtttgaatatgtctcatggagaccatgcatctcatcagaaagttattgatttagtgaaggaatataatgcacaatccaaagacaacaccattgcaatcatgcttgacaccaagggtcctgaggttaggagtggcgacttgcctcaaccaggcacattaacaactgggcaggaattcacttttacaattcggagaggggttgggacacctgattgtgtcagtgtcaactatgatgattttgttaatgatgtagaagtgggtgacatgcttcttgttgacggtggtatgatgtcattggtggtgaagtcgaagacagaggattcagtgcggtcgcgtggggttgatggtggtgagctcaagtctaggaggcatttaaatgtccgaggaaaaagtgctacactgccttctattactgaaaaggactgggatgacataaaatttggagtagacaacaaagttgacttttatgctgtttcgtttgttaaagatgctcaggttgttcatgagttgaagaattatctgcagagttgtgatgcagacattcatgttatcgttaaaattgaaagtgcagactctattccaaatttgcattcaattataacagcatcggatggggcaatggttgcaagaggagatcttggtgcagagcttcctatcgaggaggttcctttgttgcaggaagagataattagaacatgtcgaagcatggggaaagctgttattgtggcaaccaatatgcttgaaagcatgattgttcatccaacaccaactagagcagaggtatctgacattgccattgctgttcgagagggtgctgatgctgtcatgctttctggagaaacagctcatggaaagttcccattgaaagctgttaaagtgatgcatacagttgctctacgaactgaagcaaccatatctggtggtgaaatgccacctaatctcggtcaagcttttaagaaccatatgagtgagatgtttgcatatcatgcaactatgatgtcaaacactcttggaatctccactgttgtcttcactagaactggcttcatggctatattacttagccattatcgtccttctggcactatttttgccttcactaacgagaaaaggattcaacagagattggctttgtatcaaggagtatgccctatatacatggagttctctgattgatgccgaggaaccctttaagattgctttagatttactgcagaagcaaggaatggtgaagaagggagaagaggtggcacttgttcaaagtggcagacagcccatctggcgattccagtccactcacaacattcaggtctgcaaagtgtaagaggctgaagattaatgggagagaatccattcgactgatcatcttcgtgccaaatattagtattcaagcgatcaca

SEQ ID NO: 19515 - DNA, 445 bp, Gossypium hirsutum
  Clone ID: GOSHI-09MAY01-C1398_2
tttatctctaaggaccgacattgccaaatctctttagggcgtttctcataacagagcaaccatgagctccatcattcaaagctttcaaaagaacagctccctccccgtctcccaaactgaatcaaaagaccactttccaccaccaggaggcccagggctgctgcgaagaaggctttcatctctgtctctaaaactacaacccacttcttcaccggcgacgtcatggacattccccagatccaagtccttgtcttccatgggagaatacgccggtagctccatcaggaaatggtgggactggggttggtcttgggttctctccaaaaagccctcgttcgctaaagacattgaaatgaacgaagaagaaaccaggatccttgggtgccacaacaaaggcagttggaggcatgtgttttataaagtcagatctgagatcagaaacccg

SEQ ID NO: 19516 - DNA, 779 bp, Gossypium hirsutum
  Clone ID: GOSHI-09MAY01-C1398_1
gaatcaccctcttttcttcttcttttcttctcatttcacctcaatcccgtcgggtgctttcttcttgttgttgttagagagtcaccaatgagctccattatgcagagctttcaaaagagccgatcactccccctctctcaaactcaatccaaagagcaagcgccattgccagccctacgaagaaggctttcctctttgtctcttaaattacatccttccatctcttcgccatcagcgccgtcatgggccttccccagatccaagtctttgtcttccatgggagactatgctggtagctccatcaggaaatggtgggactggggatggtcttgggttctttccagaaaacccatgtttgctcaagaccttgaaatgaatgaagaagaaacgagggttctaggttgccacaacaaaggcagctggaggcatgttttctacaagctaagatccgagatcaagaaacgcatgggatctgacaaagttggcctcccacaaacttgcaggtacgattctttatcctactccaagaattttggggttggaaaccaaatctaccgttgatggtttggatttttggaatgctccaatggaggtgttcgaagaaagtccttaacgggaaattaaataagcaatgcagtgcttccaggttcagatcatcacttcatcagagtctagatttatatattccttcccgcccccgcccccctctggccccttgttttcttcctcctcgagttgtcgcctttccctttttcttatcataatccaagtgattggtg

SEQ ID NO: 19517 - DNA, 238 bp, Gossypium hirsutum
  Clone ID: uC-gsronu33B055g03b1
cccactcgttctgtctcccaaactgaatcaaaagaccactttccaccaccagctggcccagggcggctgcgaagaaggctttcatctctgtctctaaaactacaacccacttcttcaccggcgacgtcatggacatctcccagatccaagaccttgtctttcctggcagaatatgcctgtcgcctcatcatgaaacggcgggactgccccataccctctccttctttacctccccttt

SEQ ID NO: 19518 - DNA, 541 bp, Gossypium hirsutum
  Clone ID: GOSHI-09MAY01-C1388_2
cccacgcgtccgcccacgcgtccgaggaagaagaagaagaagaagaagattgaactcccccattaatggatttgcaaagtctttgcaaagtaatcttagtatcagctctaatttcacttgtctgtcacccatgttccgtcaccgccggtgatatagtacacgacgatgattcagctcccaagaagcctggttgtgagaacgacttcgttcttgtcaaagttcaaacttgggttaatggcatagaggatgcggagtttgttggtgttggtgctagatttggtactgctatagtgtcaaaggagaaaaatgcaaatcaaagacgcctcgttctttccgaccctcgtgattgttgtagccacccgaagaataagcttgataatgatgtcattatggtggaccgaggtcactgcaaattcactaccaaggcaaataatgcacaggcagctaatgcttctgctctcctcattataaataaccaaaaagaactttataagatggtatgtgatcctgatgaaactgatctagatatacacatacctac

SEQ ID NO: 19519 - DNA, 946 bp, Gossypium hirsutum
  Clone ID: GOSHI-09MAY01-C1388_1
aagattctgaatgcgtaaacaagggacttcaaacagtccctgaactagaagaagtagaacggaaaccccatcaatggatttgcagtttttttgcagggtattcttaattacagccctgatttcacttgtctgtcaagtatgctctgttacagccggtgatatagtgcacgacgatgatttagctccaaagaagccgggttgtgagaacgatttcgttctggtcaaagttcaaacttgggtcgatggcatagaggatgccgagtttgtcggtgtaggtgccagatttggtactactatagtatcgaaggagaaaaatgcaaatcaaagacgcctcattctttctgaccctcgcgattgttgtagtgccccgaagaataagcttgctaatgatgtcattatggtggaccgaggtcactgcaaattcacaaccaaggcaaaccatgcacaggcagctcatgcttcagctattctcattataaataaccaaaaggaactctacaagatggtatgtgagcctgatgaaactgatctagatatacatatacctgctgtcatgctcccacaagatgctggggcaaagcttggggaaaatgctgattagtaattcatcagtgtctgtacagctttactctccgacacgaccgctagttgacatagctgaagtgtttttatggttgatggctgttggtaccatattgtgtgcttcatattggtccgcatggagtgcaagagaaaccgcaattgagcaggacaaactattaaaggatgccttggatgaaattccaaacaccaaaactgtaagttctggtggaattgtggacatcaacactacatcaaccatcttaattgttgttgttgcttcctgcttcctggttatgctttacaacttatgtcatattgggttgttgagctcctggtggttctttctgcataagtggtgttgaga

SEQ ID NO: 19520 - DNA, 720 bp, Gossypium hirsutum
  Clone ID: GOSHI-09MAY01-C1348_2
accggtgtgcttgctttaaacagaacccttgcgaaaccttgcctttcagatattgagcaagtcttggaaggccagggtgctagcgatgatctcaagcaggtctgcttgattcatccatcaaaccttactgaagcatcgtgcccagtaaaagatgttgatgaatttgagaacactgtaaattcttctgagcttcttgcttcacccgcgcggccccccccgcggccggaatgttgtgaccaagtttgtcaaggtgccatatcagatgctgcaacaaggattgcattgaaatcttctgatcctttgagcatggatggaacccatgttttaccggagtactcgacaagagtaaatgattgtaaaaccgttgtccttcggtggttggcaagtaaactcaacccttatcgtgcaaaggaagttcttagaggactaaccaattgcaatgttaacaaagtttgccctcttgttttccccaatatgaggcatgtggcaaatagctgtggaaatggaataagtagccagactgcttgttgtgatgctatggatagctatgtctctcatttgcaaaagcagaccctcatcaccaacttacaagctttggattgtgctaccgcactggggttgaagctacagacatataatatcaccaaaaatgtttatagcctatgtcatataagcctcaaggatttctctcttcaagttggaagtcaggtatctggatgt

SEQ ID NO: 19521 - DNA, 1329 bp, Gossypium hirsutum
  Clone ID: GOSHI-09MAY01-C1348_1
cccacgcgtccgctctttctctcatgtcttccaacttatccccttccttaatcacattctctcacttttaatcccttaactctttaacatctattttctagttacaactgtttatcttcattagaggaaagaaagagatgaatgctggcgtgtctcttgagcacaatttcagcatgttgctgcttaagctgtttgtggttcttgcctgcttccatgaatgtttatccgatcctcaagttcatcataaaggttatatgttaaccggtagagcaactggtgattttgtacctaaaattactccaacggcatctcctcaaccatttcttcctctacttgcaccttctcctctatcaaccttcacaaatagcacttctcctaaattatcgggactctgtatgttaaatttcactgctgctcaaagcttgataagcattacgtcaattgattggtgggctgcatttgctccactattggcaaatgtaatatgttgtccacaactacatgctactcttgtgattcttgttggtcaattgagtaaagaaactggtgtgctcgctctaaacagaacccttgccaagccttgtttatcagatattgagcaagtcttggctggccagggtgctggtgacggtctcaatcaagtttgttcgattcattcatcaaaccttactgaagcatcttgtcccgtaaaagatgttgatgaatttgagaacatggtaaactcttctgagcttcttgcttcatgtgaaaagattgatcctgttaaagaatgttgtgaccaagtttgtcaaggtgcaatatctgatgctgcaacaagacttgcattgaaagcttctgatcctctaagcatggatggacctcatgttttacctcagcacacaacaaggataaatgattgtaaaaccgttgtgcttcgatggttggcaagtaaacttgacccttatcatgcaaaggaagttcttagaggattaaccaattgcaatgttaacaaagtttgccctctcgtttttcccaacatgaagcatgtggcaaatagctgtggaaacggaataagtgaccaaacagcttgttgtgatgctatgaatagctatgtctctcacttacaaaagcagaccctaatcaccaacttacaagctttggactgtgctacctcgttagggttgaagctccagacatacaatatcaccaaagatgtttatagcctatgtcacataagcctcatggatttctctcttcaaggcggaaggcaggtatctggatgcctcctgcccagcttgccctctgatgcgacattcgacaaagttttctgggatcaggttcatttgcgat

SEQ ID NO: 19522 - DNA, 325 bp, Gossypium hirsutum
  Clone ID: LIB3166-025-P1-K1-E1
accaggctgtattttgaacctatcttctccgttttgggtttctttcgattccagccagccctctcgtttgtcccaacatgaagcatgtggcaaatagctgtggaaacggaataagtgaccaaacagcttgttgtgatgctatgaatagctatgtctctcacttacaaaagcagaccctaatcaccaacttacaagctttggactgtgctacctcgttagggttgaagctccaaaaatacaatatcaccaaagatgtttatagcctatgtcacataagccttaaggatttctctcttcaagtcggaagtcaagaatctggatgtct

SEQ ID NO: 19523 - DNA, 464 bp, Gossypium hirsutum
  Clone ID: GOSHI-09MAY01-C1368_3
gagatcaaagatttcaatggtaaggaaaaggttaatcgcctagcccctgcccttaattcgagtttctttaaggttattgaattaaaacgcgagatctgagcaatggcgacagattcatcaaatggggaacaaaagacaacctcaaagccaccacctttgccatctccattgcgcttttctaagttttatcagtccaacatgaggatcctggttactggaggagctggttttattggttctcacttagttgacaaattgatggaaaatgagaaaaatgaggtgattgttgctgataactacttcaccggatccaaggacaatcttagaaagtggattggccatcctagatttgagcttattcgtcacgatgttactcagccgttgttggttgaggttgatcagatttaccaccttgcctgtcctgcttctccaattttctacaaatacaatcctgtgaagacaat

SEQ ID NO: 19524 - DNA, 460 bp, Gossypium hirsutum
  Clone ID: GOSHI-09MAY01-C1368_2
cccacgcgtccgcccacgcgtccgcggacgcgtgggcttcaccggatccaaggacaatcttgggagggggattggccatcctagatttgagcttattcgtcatgatgttactcagccgttgttggttgaggttgatcagatttaccaccttgcgtgtccagcttctccaattttctacaaatacaatcctgtgaagacaataaagacgaatgtcattggcacactaaacatgctgggacttgccaagcgagtcggagcaaggatcttgctcacgtcaacttctgaagtatacggagatccccttatccatccacaacccgagacatactggggtaatgttaatccaatcggggttcggagctgctatgatgaaggaaagcgtgtggctgagacactaatgtttgattatcacagacagcatggcataaagattccgattgctataatcttcaatacgtac

SEQ ID NO: 19525 - DNA, 1031 bp, Gossypium hirsutum
  Clone ID: GOSHI-09MAY01-C1368_1
ggtctgtagtttttggtattgttatcgaggagctatcattgaaacctctcacttttcgtaaatttgaaggctccccaatttaatttttttattttttattttggaaatttgtttggtggaacaaagtttcggtttttagaaccattttttcgaagctataaataacgctattcgatcccaggttttcccgcgcccacgcgtccggatcaatctcgcaaattttgaatcaggtttttgagtttaagtggcgagatctgagcaatggcagcaaattcatcaaatggggaacaacaaacaccctcaaagccaccacctttgccatctccattgcgtttttccaagtttttccagtccaacatgaggattttggttactggaggagctggttttatcggctcccacttagttgacaaattgatggaaaacgagaaaaatgaggtgattgttgttgataactacttcactggatccaaggacaatcttagaaaatggatcggtcatcctagatttgagcttattcgtcatgatgttactgagccattgttggtcgaggtcgatcagatttaccaccttgcatgtccagcttctccaattttctacaaacacaaccctgtgaagacaataaagacaaatgtcattggcacactgaacatgctgggacttgcgaagcgagttggagcaaggatcttgctcacatcaacttcggaagtgtatggagatcctcttatccatccacaacccgaaacatattggggcaatgtgaacccaatcggggttcggagttgctatgatgaagggaagcgtgtggctgagacgctaatgtttgattaccataggcagcatgggatagagatccgcattgctagaatcttcaacacatatgggccacggatgaacattgatgatgggcgtgttgtaagcaatttcattgctcaagcactgcgtggtgaaccactgacagttcaaaaacccgggacacaaactcgcagtttttgttttgtctctgacatggttgatggtcttattcgtct

SEQ ID NO: 19526 - DNA, 452 bp, Gossypium hirsutum
  Clone ID: LIB3585-040-P1-K1-H7
aagagatcaatctcgcaaatttcgaatcatgtttccttttttgtttctcaaatccttgagccaaactttataccctgttttgaaaaacactcaataagtccctcttctctgctacgtttttacagtttaagtcgcgagatctgagcaacggcagcaaattcatcaaatggggaacaacaaacaccctcaaagccaccacctttgccatctccattgcgtttttccaagtttttccagtccaacatgaggatttcggttactggaagagctggttttatcggctcccacttagttgacacatttatcgaaaacgagaaaaatgaagtactcgctgctgataactactacactggatccaaggacaatcttagaaaatggatcagtcatcctagatttgagcttattcgtcatgatgttactgagccattgttggtcgaattcaatcaaattta

SEQ ID NO: 19527 - DNA, 808 bp, Gossypium hirsutum
  Clone ID: GOSHI-09MAY01-C101323_1
ggaaatgaattataaatattatacgaatatgacaaactttatactattgtatagaatttgttatgtaagcataaatcttaaacttttttcttccccaaaacatttgtgtatataatgaaaagaataaatgaggagaagagattagcttcgtactcgtttgtgcttctgagcaactccttacaaatggtttctccattcgattggtttagtagaaatgcctactttgttgatgatacggaccatggtaatccgactctggcgccatgttatttgataacaaagaactctgcaaagtccttccctctggttcttgaaggaataacttgtcttccaagtaacattgaatcttggacgtaatcggcctcaggtccggatcatcttgggacctcaaggcatttagaaagttctctgagatgaagttcagcattttcatgaactgggatcggtattttccgaagagagcaaaccctgccatttgcaggaatgcgtacaaagccacagcggtatacatattggcagggagtgcatttagaaacctagcaagccaagcccaaccttcctttagaccatgaacattttggcaaccagcaacctcagtttgaaccagtgccccatacagcttcatgtaagattccaaccgtaccaaataatccgtagtactttcaatcttcccatcatcctctttgtatccaataaccttccaataagcttctttggattcaaatgctgacttggtgtatgatatatgctttgggacagtgtaaatgcaagctctatgtatctcagcaagaacaagatccatcgcttg

SEQ ID NO: 19528 - DNA, 408 bp, Gossypium hirsutum
  Clone ID: GOSHI-09MAY01-C1318_1
aaaaccaacaaaaagaaacccccaaactcaattctgctttgacttcaaagagttgggtttctttttgggggttcgaaaattttgcacgattcaagctttgggtcattctgttttcaatcagatctggttatgttgaagttccaatattgatttgacacctggaaaattttgcaataaaaatcatccctttgttctttattttgtttttcagtttttagtaatggatttggatgatttcagatcggtacttgaaacagctggtgttgatgtttggactttcattgatacagcaatccttgtagcttctttggattatggtcaagagttgaagcaaaggacggatgggattgttgaaaggctttatgctacttccatggttaccaagtgtcaaagctgcgattttggtga

SEQ ID NO: 19529 - DNA, 968 bp, Gossypium hirsutum
  Clone ID: GOSHI-09MAY01-C1328_1
agagaaaagccgtagattccaaagctttagcgaaatcggaaaactcaccggaaattcaccatgtgtacgttggagaaacgcggcaacctctttattttaacgtttaccggcgaagaccagcaccggtttaatcccaatgtcatcggctcccttctcagccttctctctcaggtcaaggctgaagccactcgtggctcagctcttattacccaagcccaaggtaagttcttctccaacggcttcgatctcgactgggctcaagccgccggatctgaacaaggagccgcggaacggttacaccacatggtggatttgtttaggcccgtcatcgcggctcttctgtccctcccgatgcccaccgtcgccgccatcaccggtcacgccgctgccggtggatttgccctcgcgttgtctcacgattacctcattatgaggaaagaccgaggggttctttacatgtccgaggtggacatagcgctgacaatccccgattacttcaacgcgttgtttagggaaaagatcggcgacgcgtcggtccgccgcgattttttgctgcgagggctgaagatgaagggagacgaggcggagaagagaggggttgtggaagcggcgtacggcggcgaagcggaagtgagagaagcgagcgtacgtttggcggagaatttgggtaaaaggaagtggaacggggaggtttatgccgagataaggaaaggattataccctcagctctctgctatactgggattaacccacaaagcatacaccattgccaggctttgatttaaaccatgaatcctaaggtgtgagtttactcattactgtttgatttggtttttaatttgagtaatccaatgctattgttgttgctttggatgtatttgaagaacatttgaatatttgtgttgttcttgtggtgtaatacaattaattaaatatcaatacacaacaaagtatttgaatgaccatag

SEQ ID NO: 19530 - DNA, 435 bp, Gossypium hirsutum
  Clone ID: LIB3272-035-P1-K1-F2
ctcaggtcaaggctgaagccactcgtggctcaacttttattacccaagcccaagggaaggtcttctccaacggcttttatctctactgggctcaaaccgccggatctcaacacggagccgcggaacgcgtacaccacatattggctctgtgtaaacccccgaccgcgggtcttttgtgcctctccatacgcacagcgtccgccatatcaccggacacgcctgtcgctgtatatttcttctcgcggtgtcacacgatcacctgctcatgaggagagaccggggttctttacacatgtccgaggtgcacatagcgctcacaatcccggatcactataacgcgttgttaagggaaaagatcggacacgcgtcggtccgcccggatttgttgctgcgagggttgaagatgaagggagacgaggcggataagagaggggt

SEQ ID NO: 19531 - DNA, 691 bp, Gossypium hirsutum
  Clone ID: GOSHI-09MAY01-C1288_1
attttcaaatcgttgacaaggttttttactcttttttgattcctcaaattgtgatttcaggtatttacgttaatcctcaatttccataatttttttccctgttttatattttaattattaaccaatcggcccatcgaaaataatgatcaaatctccaattttcgatccctgccgttacttctagggttcctttcccccaattctcccgagatgcacaactacatccaccaaatgatcacaaacgcttcaattcctcagccttccacctctgaaatcaacggccaagacggtcaaaacgatcggcaatgccatgggttctggtacgacgccgttctggtggttcccgcgtttctgttcgtggtgtacctggcggtgaacgctaagaagaacgttgagaagctgagaaatggaaggtcgtatgttgtgatttcatattatgcccttctctggcttgctagtggacttaacctcgcttggtgttctcttcagacatggcaatgtgctaatggaaaggaggttgcttggaatcttctgtcgctgtttaccacctctgggttgttatgtttagagatcagtttagtgggcttcttacttcaggagagttacacaagtgggcgggaagctttagcacgtatttttaccatctcagggatcattgctggtgatgatatgcttctcaaggcaatctaca

SEQ ID NO: 19532 - DNA, 373 bp, Gossypium hirsutum
  Clone ID: GOSHI-09MAY01-C1248_5
tcgtgttgtcggacgacgatgcgagaggaaaatggagtatgggatctcacactctcgctgaagcttgttacctaactacatagatgtgtctgcttgagcatcgctaacactgtattggagatactgcagtaggctttgcaggttagttgtaaaagaatgcaaaccacaaactaagattgttgacatttgcgagaagggtgatgcatttatcacagagcaaacaggctgtatgtgtaagaatgctaagaggaagattgagagaggcgtcgcctttcccacttgcctttctgttaataacatcgtttgtcatttctcttccacttgctagtgacaccttcgagctgcaagaaggtgatccggggaagagtgacat

SEQ ID NO: 19533 - DNA, 634 bp, Gossypium hirsutum
  Clone ID: GOSHI-09MAY01-C1248_3
attttcagcgagataaatcagagattccccatcctgccattcactactcgcgccttggaagagaaaagggctcgtctaggtttagttgaatgtgtgaatcacgatctcttgcagccataccctgttctgtatgagaagcctggcgatcatgttgctcatatcaaatttacagtattgctaatgccaaatggatcagatcggattacatcccatcccctgcaagaactgcagtcaaccaagacgatagatgatcctgaaatcaaggcctggttggctttgggaacaaagacaaagaagaaaggtggtgggaagaagaagaaaggtaagaagggtgataaagctgagggtggagctgagggtgaggccatggatgcatcgacaaatggtggtgcatcataaggaaacaataataaaaatgtttttgcgcatattttctaatctgcccttttatatattatgatgattgccaaaatttttgatactgtgttcacttgtagcttgttggttatgagttcaaattttaatgcgagtagtttttttattttatggcatgacatccacttggagtctgtgttggtgtgatgccacttataggaattaatggtctttcttaaaaaaaaaaggcgccgttaag

SEQ ID NO: 19534 - DNA, 741 bp, Gossypium hirsutum
  Clone ID: GOSHI-09MAY01-C1248_2
ctctacttcactactcaccacccgcccttcctattttagtttatatactccctccaaaaccctagcgctttcactcgccgccgccaatttcaacactcgcccagcgtcccctggtaagactcgaaagcgatgtcagacgacgagagagaggagaaggagctggatctcagctcctctgaagttgttacaaaatacaagggcgctgctgagattgttaacaaagctttacaattagttgtaaaagaatgtaagccgaaagctaagattgttgacatttgtgagaagggtgatgcatttataagagagcaaacaggtaacatgtacaagaattctaagaagaagattgagaggggtgttgccttccctacttgtctctctgtaaacaacacagtctgccatttctctccacttgctagtgacacctcggagttggaagaaggtgatatggtcaagattgacatgggttgccacattgatgggtttattgcggtagttgctcatactcatgttgttcagagcgggccaatcactggtaagcaggctgatgttgttgctgctgcaaatactgctgctgaagtggccttgaggcttgtaaggcctggaaaaaagaacaagatgtatctgatgcaattcagaaggtagctgcggcttatgattgcaaaatgttgaaggtgttcttagccatcaactgaagcagtttgtgatagacgggaacaagtcatactaagcgtcttcaatcca

SEQ ID NO: 19535 - DNA, 1399 bp, Gossypium hirsutum
  Clone ID: GOSHI-09MAY01-C1248_1
gtaaggcccacgcccccggccacccttccctgatttcatttcttctgtactcacagtaatcacctctccaaaaccctagctctttcactcactgccgccaatttcaaccaattatttgcttataagcgtcgaaaacgatgtcggacgacgagcgagaggagaaggagttggatctcacctcccctgaagttgttactaaatacaagagtgctgctgagatcgttaacaaggctttgcagttagttgtaaaagaatgcaaaccaaaaactaagattgttgacatttgcgagaagggtgatgcatttatcagagagcaaacaggcaatatgtataagaatgctaagaggaagattgagaggggtgttgccttccccacttgtctttctgttaacaacactgtttgtcatttctctccacttgctagtgacacctccgagctgcaagaaggtgatatggtgaagattgacatgggttgccacattgatgggtttattgctgtagttgcgcacacccatgttgtccaggaaggactagtcaatgacaggaaggctgatgttattgctgctgcaaataccgccgcagaagttgcattgaggcttgttaggcctgggaagaagaataaagatgtaacagatgcaattcagaaggtagctgcagcttatgactgcaaaattgttgaaggtgttcttagccatcaactgaagcagtttgtgatagatggaaacaaagtcatactcagtgtctccaacccggatacaagagttgatgatgcggagtttgaggagaatgaagtttatgcagtagatatagttgcttcaactggtgaaggcaagccaaaactattggatgagaagcaaaccactatttataagagagcagttgacaagaattatcatttaaagatgaaggcctctagatttattttcagcgagataaatcagagattccccatcctgccattcactgctcgcgccttggaagagaaacgggctcgtctaggtttagtcgaatgcgtgaatcacgatctcttgcagccataccccgttctctatgagaagcctggtgattatgttgctcatatcaaatttacagtattgctaatgccaaatggatcagaccggatcacaccccatcccctgcaggagctgcagccaaccaagacgatagacgatcctgaaatcaaggcctggttggctttgggaacgaagacgaagaagaaaggtggtgggaagaagaagaaaggtaagaagaatgagggtgataaagctgatgcagagcctatggatgcatcaaaaactgatgccgctgcatcttaagaaacaaactcctattcttctactcgaccttttttctttttaaatttcaattttggtactttgttcactttgtatctgtttgt

SEQ ID NO: 19536 - DNA, 364 bp, Gossypium hirsutum
  Clone ID: LIB3135-024-Q1-K1-G3
gcgcccacgcgtccgatcataaggaaacaataatgaaaatgtttttgcgcatattttctaatctgccctgtatatattatgatgattgccaaaatttttgatactgtgttcacttgtagcttgttggttatgagttaaaattttaatagagtagttttttattttatggcatgacatccacttggagtcttgtgtttgtgtgtgatgtgcaacttaataggaaattcaattttcttcatttctcttaaaaaaaaaaaattaaaaaccaatttaaaaaaacttcttattttcaaaataatttttttttcttcctctataaagagaggggggtctttctctttgatttttggggtggttttttttg

SEQ ID NO: 19537 - DNA, 652 bp, Gossypium hirsutum
  Clone ID: GOSHI-09MAY01-C1268_1
ccccgcgtccgcccacgcgtccggtacatatcttgtattaagtgctggtttttttatgttctcttctttgtgttctctgcaatagttgcaagaaaatggcggatgaaatcagattctttgaactaaacacgggagctaagatcccctctgttgggctcggcacttatgctgttactagaaatactgtcgctactgccgtcaaagttgggtatagacacctagattgcgcttctatctatgggaatgagaaggagattggttttgctttaaaggagttatttgatgatggtgtagtaaagcgtgaggacttatttatcacctccaagctctggtgcacccatcacttgcctgaggatgtaccggaggctttaaataaaactttggaagacttgcagctcgactatgttgatctctacctgatacactggccagccagtttgaaaaagggttccgttgaagttctgcccgaaaacttaactcaacctgacatatccggtacatggagagcaatggaagcactgtatgattctggtaaggctcgggctgttggtgtgagtaatttctctgcgaagaactcggagatctgttggaagtagcacacgtagttcctgccgtcaatcaagtggaacttcaccctgtatggcagcagcct

SEQ ID NO: 19538 - DNA, 505 bp, Gossypium hirsutum
  Clone ID: GOSHI-09MAY01-C1238_1
taaggattagattcattaaagaaaaaaaaaatccaagcttcgaacttgaaagtaatctggcaaaaccggcaacattgtatttccgacgaagagaggaaacaggaaacgatgtcgtctccggacattgcttcaatcttggaaaactcgagggaactcgatcggttaaggaaagaacaagaagaggtgcttgtcgaaatcaacaagcttcacaagaagcttcaagctactcctgaggtagttgagaaacccggcgattcttcattatcgaggctgaaaagtttatatattcaagctagagatctttcggaaagagaagtaacgatgtcgaacttgttactaagtcaacttgatgctttcttgccatctggacctccgggacaacaacgaagaaagatggatggtaatgatcagaaaaggaaaagagtgaagtctgattcggatatttctcgcctttctccttcaatgcggagtcatatcgaggcatttgttagtctcaaagatgagc

SEQ ID NO: 19539 - DNA, 671 bp, Gossypium hirsutum
  Clone ID: GOSHI-09MAY01-C1228_1
gaaaatatcatcataatattaagtcgtcgccagggtcaatctcattctccctcagatcaatttgagtactgtttcttgttctctcttctctggcatcccctgcaatggcgtctgatcttgagaccaaagccaaagaagccttcatcgatgaccacttcgagcttgcgctccatctctactctcaagccatccaacttaatcctaaacacgccgagctctatgctgaccgtgctcaagccaacatcaaactcaataatctcactgaggctgtggcggatgcgaacaaagcgattgagttggatccttccatgtctaaagcttatctgcgtaaagccactgcctgcatgaagcttgaagagtatcaaactgctaagtctgcactggagactggcgctgctttggcacctgcagagtcaagattttccaagttgataaaagaatgtgaagagcgaattgcagaagaaactggtgatgtatcaatgcagacgccagaagcattggctaaaaatgatgtacctgcaaaagaaattgagctggacaaggatcagcctaatctagaaaattgaggctgcgcctccccaacccgcgtacagggctgaatttttacccgaaaccagagggagttggttgtctccatatttgctaaagggactccccctcgattgtgttcc

SEQ ID NO: 19540 - DNA, 412 bp, Gossypium hirsutum
  Clone ID: LIB3145-057-Q1-K1-E12
ctccgaaatcaaaatcccctctcggtcactgttcgagaggcttctgtgtcttcttcttcttccctttcttctctcgctttgcccttgctatggcttctgatttggagaccaaagccaaagaagccttcatcgatgatcactttgaactcgcgctcgatctttactctcaagccattcaacttaaccctaaaaatgctgaactctacgctgaccgcgctcaagccaacatcaaactcaataatctcactgaggctgtcgcggatgcaaacaaagcaattgagttggatccttccatgtctaaagcttacttgcgtaaagctacggcatgtatgaagcttgaggagtatcaaactgctaaggctgcgttggagactggtgccactttggcaccgggagagttgagattttctaa

SEQ ID NO: 19541 - DNA, 382 bp, Gossypium hirsutum
  Clone ID: LIB3166-025-P1-K1-A7
cggacgcgtgggcaaagtcatattattttctcccacgcttctccgaaatcgaaagcccctctcggtcactgttcgagaggcttctgtgtcttcttcttcttccctttcttctctcgctttgcccttgctatggcttctgatttggagaccaaagccaaagaagccttcatcgatgatcactttgaactcgcgctcgatctttactctcaagccattcaacttaaccctaaaaatgctgaactctacgctgaccgcgctcaagccaacatcaaactcaataatctcactggcatctcctcttttttccccacttaatcttttaaatatgtatgtttttaaaatgattaattggtaattctttgttatttttgtactttttggt

SEQ ID NO: 19542 - DNA, 270 bp, Gossypium hirsutum
  Clone ID: LIB3189-022-P1-K1-B8
gtccatttacttcaagcaagcatttcccttttttggtgtttaaccaacaaaggcatctgagtgggagactttagccaaagaggggggcatcgataaccacttcgagctcgcgctccatctttactctcaagccatccaacttaatcctaaacacgctgtgctttatgctgaccgtgctcaagccaacatcaaactcaataatctcactgatgctgtggcggatgcgaacaaagcgattgttttggatcctttcatgtctaaagcttatct

SEQ ID NO: 19543 - DNA, 620 bp, Gossypium hirsutum
  Clone ID: GOSHI-09MAY01-C2998_1
tagctgtatcccgtgcttttggcgacactcgatttaaaacgaagaagaatgaaatgctgaagaagggagttgaagaaaagagatggtctgaaaaatttatttcacgtgtagtgttcaatgatgacttggtcatagcatctccagacacttttaaagtagctcttggatcagatgcagaatttgtcctgttggcatctgatggtttatgggattacataaacagttcggacgcagttgcttttgttcgaaatcaattacgagaacatggagatgttcaggtagcatgtgatgcacttgcacaagccgctctggataaaggctcagaagacaatgtcagcattatcatagctgatttcgggtatgcagctttccctaccagtaataattgctgctatgcttttgtagagtttaagctgagctgacaggataatatttggatcaacctctactagaaaaccaacgattagttttcttttttccctccttattgaataattaatgcgtagttatgatattagtctttaaactaaccattaccaatactttcccttcttaaagtctttattgcagccagtcagccaccagctaaattacatgagcagttactatgaatcaaaatc

SEQ ID NO: 19544 - DNA, 391 bp, Gossypium hirsutum
  Clone ID: LIB3120-046-P1-K1-H12
gtgcttttggcgacactcgatttaaaacgaagaagaatgaaatgctgaagaagggagttggggaaaagagatggtctgaaaaatttatttcacgtgtagcgttcaatgatgacttggtcatagcatcttcagacacttttaaagtagctattggatcagatgcagaatttgtcctgttggcatctgatggcttatgggattacataaacagttcggacgcagttgcttttgttcgaaatcaattacgagaacatggagatgttcatgtagcatgtgatgcacttgcacaagccgctctggataaaggctcacaagacaatgtcagcattatcatagctgatttcgggcatactgaatggcagaaattgccagttgagcaacagaattttct

SEQ ID NO: 19545 - DNA, 735 bp, Gossypium hirsutum
  Clone ID: GOSHI-09MAY01-C2948_1
aagaaaatcaaattgttcaatttcctgaaatgcttcaagaacaccaccaccaccaggaccgccaccaccatcaacaactcctttctatccaatttcgatcgatagggagaaacaaaaagaaatcttaatcttctaaaattattttcattccttttctttttaagattcgagatcgatcgattgaatcggagttctttttagtttttttgttttcagatttgaatttgtatataaatttaaaaggtaggaggggattggagaggggagaacaagtccggaaaagaagaggccgtgagagcaggcaatttggctgaaacatgtctgccatagtttcagggaagagatctttctttgaggaattgagtgcgccacctcccgttgctaagagaatccgttgttcttctcgttttgcttcttcttcttccttctccccttcttcgccgcctcctttgtttgtgaccgatcaattgattgctattttccctgaaatggataaacaggttctcgagagagtacttgaagaatgcggtgacgatttggattcagctattagacgtttgaatgaacttcgtttaggatcggctgggagaaatgcagcaattgccgctgacgataaaactggtgtggaattaaaagaacttcaagctcaaggtgtagcagccaatggagatgtggctaaggaaccgacaggtgcagaagctatggatggtttttattgggtggacctttcttgat

SEQ ID NO: 19546 - DNA, 1214 bp, Gossypium hirsutum
  Clone ID: GOSHI-09MAY01-C2978_1
gttcactctctctttatcttgatctcaaaggcttctgttttgagctggaaattaagtagatcggagagtgataagtggttgccgtgttgtttacagatgaaatgagggaaaaactggaaacatgaatgcaggtcttgaattgtagtacaagttaaggttataaaatgagaacggagaggaaaccgcatttgataaagaagcctgcgctggccaaacgtcaaagggttgatgaatcccttggccctggcttgaaagatgaagcaactgaggttgagcatttacttgtggaacccaaaagtgaacatgtctcggtagacagagtcttttgttttgggaaggagaatatagaaaaacacttgaaaatggaggacttctcttgtgcttttgattatggctggaaaattggttctggtgggctggattctatccacggtcaaggaggagatgatttgaagcttgaagttcttgatggattgctggatgaagttgatgaagtggatgatattcaagcagcacatgatctctccagtgcatgtgaagattttcttttggatattgaatttccagaaaagttctctgaattggactgtggcctttacgaaggatcaaatttgcgtaactcaagttctgaaagtcattcacctggtggaagtagtaatagtgttggtggcatgtcagaatcatcgattgtaactgttcaagaatccaacagcaagaatggtgtgcttgggaagatggtcaattgtgataaacatcataccattaggagcgaatgtgggtgtcaggctccagttatggaaaccatttgtcctagtaaagaacatgggcaagattttgtcgagtctgatgatgaaaaacctttagtaagttttatagtgtctaataagaaagtaaaaagctctgttaaagtaacaaaaggtggcactcttctccgacagaagagacttcggaaacctactaagaggtatattgaggaattttctagaaattctactacttctgggaagaacaagtgccttaaagtcagatcacaagaagaattttcacaaatcccatctgaatcccaaccaagaagaggacgtcccaagaaaattatgccaaaaatggagtttgaatctgattgtgagctttcagcatctgaatctgaagatgagtgtagagaaccaaaagatccaaaacggctttgtgataggaggaaacatcaaaagatgtgg

SEQ ID NO: 19547 - DNA, 631 bp, Gossypium hirsutum
  unsure (1)..(631): unsure at all n locations
  Clone ID: LIB3543-050-Q6-K6-D9
gttctgcacatgcacaagcgacatatattgtgctttgaactggttaaaataaatgcttcgagggttattgagctttttatctctaaattgattgaactaattaatcctgcttagtatatgtttttattaattttatccaattagttggtctggataactcaaaagttagcattaattggttaaagtccagaaagttctgagttgtgccaggacagtcttggactagatgttctaagacttgatttgaagtaatgaatggtcataatcatctcaggacatgaaagcttatgagtcaccggcagagtagcattccaagatttggtgcttatttgctgttagacatatgtttctcaaatattgcactgaagtatgtgagaatgaactagtagaaactagacactaactctatattcctttgtcgaacacaagaaatgctgttgttcagctttttattttctgagttgttcttctgatgctgttaaaacttttctgcttgataaggtgggctggattctatccacggtcaaggaggagatgatttgaagcttgaagttcttgatggattgctggatgaagtggatgatattcaagcagcacatgatctctccagtgcatgtgaagattntctttt

SEQ ID NO: 19548 - DNA, 461 bp, Gossypium hirsutum
  unsure (1)..(461): unsure at all n locations
  Clone ID: LIB3825-018-Q1-K6-A9
ccgtccggttttgnagctggnaaattaagtagatcggtgagtgataagtggttgccgtgttgtttacagatgaaatgagggaaaaactggaaacatgaatgcaggatgttgaattgtagtacaagttaaggttataaaatgagaacggagaggaaaccgcatttgataaagaagcctgctgatgcgaaacgtcaaagtgttgatgaatcccttggccctggcttgaaagatgaagcaactgaggttgagcatttactcgtggaacctaaaagtgaacgtgtctcggtagacagagtcttttgtttcgggaaggagaatatagaaaaacacttgaaaatggaggacttctcttgtgcttttgattatggctggaaaattggttctggacatgaaagcttatgagtcaccggcagagtagcattccaagatttggtgcttatttgctgttagacatatgtttc

SEQ ID NO: 19549 - DNA, 877 bp, Gossypium hirsutum
  Clone ID: GOSHI-09MAY01-C102953_1
cggccgcgtgggtctcattccaggaagagctattcctcccttattacatgcaaggctgtaatagctattctttaatggaccataagaatggttattatgggtgtcaccaaataataaaagaaaagttatacacaattttatccccacttaaaatagtgaacaaacccaacataaaatcatggaggaaattagaaataaaagaaggagcaaccgaaaatagcaatgccagagcacaacttgtcggaaaaataaaaaaaaaaacttaacgagccatttcgagtccttaaaaaagcccaattgcagaatccatatttatgttgtcgatgttttgacttctttccaagccgagttaataggcctaaacactttctttcctaagacaggaaggaaagtcttgatcaaataggcaagacaggatggcaacagttccattgccagttggagttttagtggaaattactctttcttaccttacaaaatcagctttcaatccaacaggaatagcaggttacaaggtaatctctcctgtgagcaaacaaagaagaccataaaatcagcatcttcctcaaacacaaacatgcaatcatcaaaaaacggtcgattatctccagtagagacataaaagtgaaaagttgggatttttatttattttttctctttaaaattagatttgctattttagaggttgatttaggagaaattaattagagtatcaaagagagaagatgaaggtctatttctgatagtttttggaaagtgaaagaagttggtcggcgacaacaaataatgatgaactcgtcggaaaattgatcggaaaactaggtttgtaaaagtttctgaaaagagagaagaaaaagatgtggaaagggctaagaac

SEQ ID NO: 19550 - DNA, 494 bp, Gossypium hirsutum
  Clone ID: GOSHI-09MAY01-C2938_2
cccacgcgtccgcttttgttttatgctgataccatgatgtttatttgatggttaccccatttagtttgaggattttcaaatgaagtgggcctttaaaactctgaaacgctatcgggaaaggttttgcatgtttaatgatgacgtacagggaactgctggagttgcacttgctggattgttaggaactgtaagagcacaaggtcgatctttggatgattttccaaaccacaagattgttgcggtgggagctggaagtgcagggcttggtgttcttagcatggctgttcaagctgttgtaaggatgacaggaaatgcagatacagctgcacagaacttcctacttgataaagatgtaccattttgtacctcctttctagcttttttcatcctatttgtgccaagccttttatgttcttttagatatgtaatgtcctttctcttgtgtaatgaagatgtggattttatgaactaatcatgtaaaaatgttttgctag

SEQ ID NO: 19551 - DNA, 511 bp, Gossypium hirsutum
  Clone ID: GOSHI-09MAY01-C2938_1
gccttcaccatggagatggagaaaaggcttctcttttcacttcttgtattctagctgcttcttcttttggattcctcttcagctcagatgcaagatttaggactaagacaaccaaggatagaaggggaagaatatttatcaattatcgatgagttcatcgaagcggtcttaacacgttggcctgaggctattgtacagtttgaggattctcaaatgaagtgggcctttacaactctgaaacgctatcgggaaaggtctcgcatgtttaatgatgacgtacacggaactgctggagtcgcacttgctggattgttaggaactgtaagagcacaacgtccatctttggctgattttccaaaccacaagattgttgtgggggagctggaagtgcagggcttggtgttcttagcatggctgttcatcctatttgtgcaaagccttttatgttcttttagatatgtaatgtcctttctcttgtataatgaagatgtagattttatgaactaatcat

SEQ ID NO: 19552 - DNA, 339 bp, Gossypium hirsutum
  Clone ID: LIB3166-029-P1-K1-B4
cccacgcgtccgggaagcagtttttactcgttggcctaaggctattgtgcagtttgaagattttcaaatgaagtgggcctttgaaaccttggaccgctatcggaaaaagttttgcatgtttaatgatgacatacagggaactgctggagttgcgcttgctggattgttaggaactgtaagagcacaaggtcgaacattggctgactttccagaccagaaaatagttgtggtgggagctgggagtgcagggcttggtgtccttagcatggctgtgcaagctggtgcgggagtgtcaggtaaaaattgaaactgttgcacaaaaactttttcttacttgat

SEQ ID NO: 19553 - DNA, 184 bp, Gossypium hirsutum
  Clone ID: LIB3120-039-P1-K1-B7
cgtccgagacggggaagaataataatcaatcatcgatgtggtcattgaaaccgatttaaaacactttgcggcggaggttttggacacggttgaggattttcaaatgaagtgagcctttaaaactctgaaacgctatcgggaaagggtttgcctgtttaatgatgacgtacagggaactgctgga

SEQ ID NO: 19554 - DNA, 519 bp, Gossypium hirsutum
  Clone ID: GOSHI-09MAY01-C2898_2
aggcccgacccacgcgaccgggcaaacccagtgaggatttgaccagcaagccaaagtatcttgtcacatttactgttggttatgatcaacgaaagaatatggatgctgcagttaaaaagttttcagggaattttactatccttctctttcattatgatggtcgaacaactgagtgggatgagtttgagtggtcaaagcaggcaatacatgtgagtgttcggaggcagactaaatggtggtatgccaagaggtttttgcaccctgacatcgtcgctccctatgactacatattcatctgggatgaggacttgggggttgagcatttcaatgcggaagaatacattaaactggtgaggaagcacggactggagatttcacagcctggtctggaaccgaataaagggttaacctggcaaatgacaaagaggagaggtgatcgcgaaggtcacaagggaacggaggagaaaccgggctggtgcaatcatccacatgttcctccttgtgcagcgtttgtggaga

SEQ ID NO: 19555 - DNA, 496 bp, Gossypium hirsutum
  Clone ID: LIB3584-013-P1-K1-E9
ctaagttgggcccctcagctcaaccgtgtgtcccatccagttggtaataatggtagctgtgctaacgtcacattaaagaagagttgggtcccatcaaatcctcgaggtgcagaaagactaccaccaggaattgttagagctgagtcagatttatacttacgcagattatggggcaaacccagtgaggatttgaccagcaagccaaagtatcttgtcacatttactgttggttatgatcaacgaaagaatattgatgctgcagttaaaaagggaattttaccgtccttctctttcattatgatggtcgaacaactgaatgggatgagtttgagtggtcaaagaaggcaatacatgtggtatgccaagaggtttttgcaccctgacattgtcgcaacctatgactacatatttatctgggatgaggatttgggggttgagcatttcaatgctgaagaatatattaaactggtgaggaagcatggactggagatttcac

SEQ ID NO: 19556 - DNA, 662 bp, Gossypium hirsutum
  Clone ID: GOSHI-09MAY01-C2848_1
atagatgcaaattgcgctaatctggatcaggctgtatatatagcgaacgcggtgtcatgtattgattctgagaacattccatggaggctccaaaaggcccaactttatagactttcgaatgcagatgctacagccgcatgctcaccgattatggtctgaagtggttcttataacaggacaagattcagatccttcctcggttatagtgaatgaattggggctgcactgacaattgacaaatcacgggtaagctgctttttggtggttttccttgttggtaagtggcatttttcaaatgggtttttcagtgatgaagagttaagagaaggactgaagtggttggccgataaatcacctctacaacctgttcttagcagtgtgaagatgcgcgaacttgtcatgtctcacctgagtccagtgttggaggaacttgataaaatgggtgattatgaagtaggtccgaatcactgcatttcagtcttcaatgaagcattggattggtcatttggagaaattactgctgctattaaagcaaatcctaccaattggccttgtccagaggctatgctgctaaaagactttagtgacgaatttttagctgcgaagatgttcctgccaagtgtggggtggagctcgccagcaaaaactgcaccactcgaaca

SEQ ID NO: 19557 - DNA, 693 bp, Gossypium hirsutum
  Clone ID: GOSHI-09MAY01-C2878_1
ctcatatttatttgcctttggatatgatgatgattgtcaagtgtttttactggcggttgcgtggtaaccagttggttttcttgaattcgtatttatatgattatttaaatttctgactgaattagtttcacaagtgaatcgggagaaattgtggaagtatttttccttaattaaaataaattagcactgtctttcgctctgggcttctctcgctcgctctctgcattctttcaaagctcacatatcgtttatcttgaagctcaaatcattcctcgacccaagatggaagaaaacaaggaaggatccacaaaattggaagcccgggatgagactaggaagcgaccatccattttcatcattggatgtcccaacgtcggcaagcgcaccctgatctcccggcttgccactgtggagttcgaagaagaagaagaagaagatagctcccaagtggttgtccgtcgctggactatcaataccaaatactacactgctgatgtttctctgtgtatggctcatcttcaagatggattttcagctcgaaccctccctatatttaaccattcaactgccttggtcatggtttttgatatgtctaatttgtcaactctttctgctcttcgggattgggtatcttacactgatatccaaaactttgagattttactctgcattggaaacaaaattgatcgaatt

SEQ ID NO: 19558 - DNA, 647 bp, Gossypium hirsutum
  Clone ID: LIB3585-033-P1-K1-E5
cccacgcgtccgcattttcttaactttctttcttcacctcatctaattttatggttttctaatcaattgattcgcttccttgagaaaaaaggattgctcaactgttaattcacaactgttttgtcctttttttcatattcacacgcacacaaagttaaatataatatggatgtgtaggaggagttgattagattcaagatttgaaatggagagggtgaaaatttcaaattagggtttgtagatgcttgtttttggttactaattgttctatcaacaaatggaagaaaacaaggaaggatccacaaaattgaaagcccaggatgagactaggaaccgaccctccatttttgtcattggatgtcccaacgtcggcaagagcaccctgatctcccggcttgcttctgtggagttcgaagaagaagatagctcccaagtggtagtccatggctggactatcaatacgaaatactacactgctgatgtttctctgtgtatggctcatcttcaagatggattttcagctcaaacccttcctatatttaaccattcaacccgcttgggcattgtttttgatatgtctcatctgccaactttttctgctcttcaagattggatatcttacactgatatccaaaacttggagattt

SEQ ID NO: 19559 - DNA, 481 bp, Gossypium hirsutum
  Clone ID: GOSHI-09MAY01-C2838_5
cccactcgtccgcccacgcgtccggcgagaagtgagaaactattgtaaacctctcataatattctgagcttttttctctttttgtttcctataattttgatctgagccaaggttgataatcgagtttttataagcggttgatcctggcattccaaaatttgaattgtgtggctgaatgatctatggagactaagggagggaaaaagaagtctagtagtagtaagtcattattctacgaagctcctctcggttacagcattgaagacgttcgaccaaacggtggaatcaagaagttcagatctgctgcttactccaactgcgctcgcaaaccatcctgatattcgtaacgcaagtgcccccttctgaccactgttaaagtggtcaatttatttttatttgctttattacttagtattaatatctatcttcggccggctttctccccctctctccttgcaactgttttctttggatctaccat

SEQ ID NO: 19560 - DNA, 600 bp, Gossypium hirsutum
  Clone ID: GOSHI-09MAY01-C2838_4
cggccgcgtgggcggacgcgtgggcggacgcgtgggtgcgagagtgagaaactattgatctgagccagggttgataatcgagtttctataagcggttgatcctggcattccaaaatttgaattgtgtggctgaatgatctatggagactaagggagggagaaagaagtctagtagtagtaagtcattattctacgaagctcctctcggttacagcattgaagacgttcgaccaaacggtggaatcaagaagttcagatctgctgcttactccaactgcgctcgcaaaccatcctgatattcgtaacgcaagtgcgcccttctgaccactgttaaagtggtcaatttatttttatttgctttattacttagtattagtatctatcttcggccggcttcctcccccgctctccttgcaactgttttctttttatctacgatctcctcacttggcgcctgtctactttctttgtttctaagaaaccctgttctggtatttccttgggcgacttcacaatggcggtatctgtaattggatttgagggttatgaaaagaggctcgagatttcattttttgagcctggtgccttggttgaccctga

SEQ ID NO: 19561 - DNA, 1221 bp, Gossypium hirsutum
  Clone ID: GOSHI-09MAY01-C2838_3
tttttaggatgctcgtgtcaattgttggaacttgagccaggcagcaatgagacatgagactgagacctgtttcgtttatgctgatcagttgaagcaaagatgtgtggagacagttcaaagaagggactttggggattgaacagcttgccgctgttgatgggttatgcgacttagtttctaaagtggttgatgcatctgaacctgctaggacataccatgtcaatctttcgattttcacttcgatccctgatttttggagtattggtcagatttttcccatagtccccattcatcgattggatgaaaggcctgaagtgagggggattttgtctgatttaacctgtgacagtgatgggaagattgataagttcatcggaggtgaaacaagcttgcctttacatgggttggaaggtaatggtggtggtagcagtggtggtgctaatgggcggtactatttggggatgttcttgggtggggcttaccaggaatccctcggtggagttcacaacctctttggtggcccaagtgttgttagcgtgtcgcagagtgatggtccatatagctttgcggttacgcgggcggcgcctggtccgtcatgtggggatgtcctccgagtgatgcagcacgagcccgagctaatgtttgagaccctcaagcaccgtgcggaagaattttgtggacaggaccatggcaatgaaggcacccatgctgctttagttagcaccattgctcgttctttccacaacatgccttatcttgtagtggcatccccttgttcgttgactgccatgaataacaatggcttctactattgcaatgaggaagattacaatgctgctgtcgattctggggctagtgaggacgagcagtggtcctattgctacgcctgaggcagtgttctactatttgctttattgcatggtttgccagtccttgaatgtctagttattttagttttttgttccctttttaatgttcttcttttactgttaatttccatcgcttgtaagcagtgattgttagcatgcatacaaggtgtttagcaccttgtcgggtagaagggatgagaaccgaatccatccttttctgtaaatccgggattttatgccctctccatgcttcttttaagccgactttattagttttttttctattttgagttgactgtggtggatgttactctattcttcattgtttttaagctttatgctttttaccatc

SEQ ID NO: 19562 - DNA, 1136 bp, Gossypium hirsutum
  Clone ID: GOSHI-09MAY01-C2838_2
acattttccttgccttgctagcaagggagctcgcgtccgagtaccctgtgtttgttcttgcggcccacgcgtgcggtggatttggttattgaaataagcaagaaactttatgttcgacccgtgattggagtccgagccaagctgagaaccaaacactcgggtcatttcggatccacctcgggtgagaaaggtaagttcgggttgacaacgatccagattttaagggttgttaaaaagcttcaggattcggggatgcttgattgtctgcaattgctacacttccatattggatcccaaatcccttcaacagctttgcttcaagctggtgtcgtcgaagctgctcaaatctattccgaattagcccgtcttggtgctgacatgaaagttattgacattggaggcggccttggaatcgattacgacgggtcaaaatccggtaattctgatctctctgtttcttatggccttcaggaatatgcttcagctgttgttaatgctgttcggtttgtctgtgaccgtaaatctatcaagcatccaattatctgtagtgaaagtggtagagctattgtttcccatcattctattttgatatttgaggctatttctgctactgctcctactaccccagcaatgaaccaagttgaccttccatttattttggagggtctctcggaggatgctcgtgtcaattgttggaacttgagccaggcagcaatgagacatgagactgagacctgtttcgtttatgctgatcagttgaagcaaagatgtgtggaacagttcaaagaagggactttggggattgaacagcttgccgctgttgatgggttatgcgacttagtttctaaagtggttgatgcatctgaacctgctaggacataccatgttaatctttcgattttcacttcgatccctgatttttggagtattggtcagatttttcccatagtccccattcatcgattggatgaaaggcctgaagtgagggggatttttgtctgatttaacccggacatgatggagattgtagttcatagagtaacaacttgctttcatggttgaaagaaaagggtgggcacaggtgcaggcgccattaagttttggtgctacagaacctttgggtcaccttgggccag

SEQ ID NO: 19563 - DNA, 1864 bp, Gossypium hirsutum
  Clone ID: GOSHI-09MAY01-C2838_1
gtaattcccaccgagcggcgggtataatcctttgcagacgaatcgaagcggcggagggctgaatctccggccccccccgcccgaattgcgtgagccgctatagttacgagtccctccaccctagattcttataattgtgcttcccctctgcaaaggctttattcttcattcgcttcgttgaatttctatcttcttttgatctgaacggagtttggtaatccagttttcgtcttctgttgattcaggaaatcttagtttttgaattgcgtgactgaatgatctaatggagtctaaaggtgggaaaaagaagtccagtagtagtaagtctttattctacgaagctcctctcggttacagcattgaagacgttcgaccaaacggtggaatcaagaagttcagatctgctgcttactccaactgcgctcgcaagccatcctgatatactcacaagcgtgccgtctgaccactagtagtggttaataaaactgttatttgctttgttagttagttttagattatttccccgaccaacttcttcctcttctctcttcgtggctggtttctttacattgcgttctcctgatttggcgactttgtaattcggataaagtttgcagtccttggttgaatcacaatggcagtgtctgcaattggatttgagggttatgaaaaaaggcttgaaatttccttttttgagcctggcatctttgctgatcctgaaggaaagggtcttcgggcacttaccaaagcccagttggatgagattctaggtccagctgaatgcaccattgtttcttcattatctaacaagcaagtggactcctatgtcctttctgagtctagcctctttgtctatccatacaagattataatcaaaacctgtgggacaactaagttgcttcttgctatcccacccatcttgaaattggctggcagtctatcccttgctgtaaaatctgttaggtatactcgtgggagttttatattccctggtgctcagccatttcctcaccgaaacttctctgaagaggttgctgttcttgataactatttcgggaagcttggcgctggtagcaaggcttgtgtaatgggtgggctggataaacagaaatggcatgtgtactctgcatctgcagaacctgtgaccgccactggcccggtttacactctagaaatgtgcttgactggtttggacagggataaggcgtcggttttctacaaagaccaatcaggctccgcagctgtgatgaccattaattctggcataaggaagatccttccagagtctgagatatgtgattttgagtttggaccctgtggttactcgatgaatgcgattgaaggtgctgcaatttctactattcatgttaccccagaagatggatttagctatgcaagctttgaagctgtgggatataatctgaaagataagaatctgaagcagttggtcgggagggtgttgaaatgcttcaaaccgagtgacttttctgtagcagttcacgttgatgttggtggtggtcagtcacttgagcagagctgcctgctggacgtaaaagaatactgttgcggagagatgggcattgaagggcttgcaagtggaggttccatgatgtaccagaaatttaagagcactggtggctgtggatcaccaagatcaactctgaaatgctgctggaaagaggaagaagaggaagaagagtagttgaaaatctcttttatggttttatgtttttgttttctattataaataaattgctcctggttaggatgcatggcgtttgggtattttatcttttaattcgtgtcattatgacttggtatgaaatagttttattatatataagctggacctcttttatatctt

SEQ ID NO: 19564 - DNA, 588 bp, Gossypium hirsutum
  Clone ID: AI729247.1
acctaaattctcataattgtgtttcccctctgcaaaggctttattcttcattcgcttcgttgaatttctatcttcttttgatctgaacggagtttggtaatccagttttcgtcttctgttgattcaggaaatcttagtttttgaattgcgtgactgaatgatctaatggagtctaaaggtgggaaaaagaagtccagtagtagtaagtctttattctacgaagctcctctcggttacagcattgaagacgttcgaccaaacggtggaatcaagaagttcatatctgctgcttactccaactgcgctcgcaagccatcctgatatactcacaagcgtgccgtctgaccactattattggttaataaaactgttatttgctttgttagttatttttagattatttccccgaccaacttcttcctcttctctcttcgtggctggtttctttacattgcgttctcctgatttggcgactttgttattcggataaagtttgcattccttggttcgcgggtccttgtgtcatttttcatcttccttttatttttttctcttgtctgttttctttattcctctctctttgtgttc

SEQ ID NO: 19565 - DNA, 642 bp, Gossypium hirsutum
  Clone ID: AI055661.1
ctcgtgtcaattgttggaacttgagccaggcagcaatgagacatgagactgagacctgtttcgtttatgctgatcagttgaagcaaagatgtgtggaacagttcaaagaagggactttggggattgaacagcttgccgctgttgatgggttatgcgacttagtttctaaagtggttgatgcatctgaacctgctaggacataccatgttaatctttcgattttcacttcgatccctgatttttggagtattggtcagatttttcccatagtccccattcatcgattggatgaaaggcctgaagtgagggggattttgtctgatttaacctgtgacagtgatgggaagattgataagttcatcggaaggtgaaacagcttgcctttacatgggttggaaaggtaatggtggtggtacaattggtggtgctaatgggccgtccttttgggggatgttttgggtgggggctacaggaatccctcggggggattaacaacttttttggtggccaaaatgtggttagcgtgtctaaatggatggacctataactttgaggttactcggcggttctggtccgaatgtggggattatctttattgattttattactccatctatgtttgaaatctatatccgtgttgag

SEQ ID NO: 19566 - DNA, 387 bp, Gossypium hirsutum
  Clone ID: LIB3083-086-Q1-L1-F1
agaactagagcatcccccccctggagaattcagtccagccgagcttttttctctatctgtatcctataattttgatctgagccaaggcatgataatcgagtttttataagcggacgatcctggcattcccaaatttgaattgtgtggctgaatgatctatggagactaagggagggaaaaagaaatctagtagaagtaagtcattattctacgaagctcctctccgttacagcattgaagacgttcgaccaaacggtggaatcaagaagttcagatctggtggttactacaactgcgctcgcaaacacatactgatattcgtaacgcaagtgcccccttctgaccactggtaaagagggcaatttatttgtatttgctttattactt

SEQ ID NO: 19567 - DNA, 307 bp, Gossypium hirsutum
  Clone ID: uC-gsflnu33B028h09b1
ttgatttttggagtattggtcagatttttcccatagtccccattcatcgattggatgaaaggcctgaagtgagggggattttgtctgatttaacctgtgacagtgatgggaagattgataagctcatcggaggtgaaacaagcttgcctttacatgggttggaaggtaatggctggtggtagcagctgggggtgctgatgggcctgactatacagagatggcatgtggtactctgcatctgcagaacctgtgaccgccactggaccggtttacactctagaaatgtgcttggctggtttggacaggg

SEQ ID NO: 19568 - DNA, 266 bp, Gossypium hirsutum
  unsure (1)..(266): unsure at all n locations
  Clone ID: uC-gsflnu33B083a11b1
aagctgcacgcctgccngaccggtcctccattgccgacccaagcgacccgttacgtttccggaaacaagcttgcctttacatgggttggaaggtaatggtggtggtagcagtggtggtgcttatggccggacctattcgaggatgttttgggctggacatcacaatcatccatcggaggcgttcacaacctttttggtgaaccaaatgatgatagcgaagaacatagtgatgatccatatagctatgctaaggcataagcaacgcc

SEQ ID NO: 19569 - DNA, 762 bp, Gossypium hirsutum
  Clone ID: GOSHI-09MAY01-C2828_1
gagtgatgaaggtggagatgaacttggacaacgattccaataatctggttcaagctccgacaaacggcgactctgagaagctttcgccctccactttatcttctcttttgggttctaaagatcgtgattatcttctctgctccactgcagcagctgctgaaactgatcacgtgaaaatttcggatctagagggcaaggtgatcggaatttacttctcagctaactggtacccaccatgtagaaatttcaaccgagtattgattggtgtgtatgagcagctgaagagcaatggatctaactttgagattgtatttgtgtcatctgatgaagacttggatgccttcaacagctaccgtgaaaacatgccatggctttcgattcccttttctgatttggagacaaagaaggccttgaatcgaaaatatgacgtggaaagcattccttgcttagttattttgcagcctgacaacaccaaggatgatgatacttactatgatggcgtagaactcatttaccggtctggggttgatgccttcccatttaccaaagaaaagttggatgaattgcgaagggaagagaagaggaagcatgacagccagaccgttaccaatttattaacaaaccctgaaagagactatctcttggatcaaaccataactagaaaggtgccggttgattccttgaaaggtaagacagttgggctgtacctctcagtgcaatggtgcatgccttgtgttgagttcactccaaaactgatatcca

SEQ ID NO: 19570 - DNA, 583 bp, Gossypium hirsutum
  Clone ID: GOSHI-09MAY01-C2588_1
ggaaaacccgggcggataagtaaccaccaacgcttggcggatcaaagtcaaccgttcagaccgctttttttttttctttgtgtttgtttatttatttccacgattttgcggtcagtggtgaaaggggggaattgggtgatcggacggtggaggaacaaggatgccgtctcagggagatctggatcgtcagatcgagcacctgatggagtgtaagccgctgtctgaggcggaggtgaaggcgttatgcgagcaggcacgagcaatactagtggaggaatggaacgtacagcctgtgaagtgtccggtaacggtttgtggagatattcatggacagttttacgatctaatagagctgtttccgatacgagggaatgcgcctgatacaaattatctcttcctgggagattatgtagatcgtgggtcctactcagttgagactgtcacactcttggtggccctcaaagtccgttatagagatagaatcaccatccttagaggaaatcacgagagccgtccgattaccccagtgtatggtttttatgatgaatgcttgagaacatacggaaatgctaatgtatggaac

SEQ ID NO: 19571 - DNA, 731 bp, Gossypium hirsutum
  Clone ID: GOSHI-09MAY01-C2558_1
ccccgcgtccgccccgcgtccgccccgcgtccgccccgcgtccgatcaaatcgtaaaatccgacgaaattgccgtgaaggaagaatgggaaggtggagtcaattcgtggttgcggtgactattctggcggtgggcctcctttcggcatcagccaccgctagaccctgcaagacattcttcgtcgcctcctattctttctcttttgaaaaccctaacgacccttcttcctccaccggattcgtcaccgtcttcaccgagatcggtcaattgaacgtcgtaccaccaagacccaagccctccgatgtcttgagctctctccgtgagcgcagtaaggacatccttagcgtggtcgtcgctcttctcttcggcgtcggtagcggcgctctcacggcggctaccctctacttggtctggaccctcttctcggcccggtctgattatcatcgtgcttgtttggaggatgatgagagcgacggagaacttagccctaagaagattgggtatgtaaccattcccaccgttaacgttaaggaagtcaattgatcaaattatgtgttttaagtctttaatatgaaataagaatcatgtataaattgttgtgcatttgggcgaactcatgtctatgtttatgtattttatttaaagatctttgataaaaatgtattctaatgatattactggatttgctacttcaaatgctatatacttgctttggtctaatggtgcttttc

SEQ ID NO: 19572 - DNA, 303 bp, Gossypium hirsutum
  Clone ID: LIB3493-047-P1-M1-D11
gttttagggggtgcggaattagactcgattcgtaatttgcaatcaaatcgtagagggcgactaaattgccgtgaaggaagaatgggaaggtggagtcaattcttggttgcgggactattctgagcggtgggcactcctttcggcatcagccaccgctagaccctgcaagacattcttcgtcgcctcctattctttctcttttgaaaaccctaacgacctttcttcctccaccggattcgtcgccgtcttcaccgagatcggtcaattgaacgtcgtaccaccaagacccaagccctccgatgt

SEQ ID NO: 19573 - DNA, 447 bp, Gossypium hirsutum
  Clone ID: GOSHI-09MAY01-C2548_2
tcgttcgggctgactggaagtccggagtagcgccggaaaatcgttctgggatttcaaattgacctaaaagctttttaaaagaagaatggataggctatcgaatgcgttttcgttgctggatattgatgtggacgatcatcatcccccaccggcttcatcatctgcttccaaaccttcaggtaagagcaaaaacaatgggaagggcccaactgaactgaaaccggcattgctttcggaaaactacaagttaccccttgtttggattgacttggaaatgactggtttgaatattgagactgatagaatattggagatagcttgtataattacagatggctatctcaccaaatcattggagggtcctggtctggttttccatcaatctaaagagtgtttagatagaatgggggaatggtgtcaaaatcatcatgcagctagtggattgac

SEQ ID NO: 19574 - DNA, 651 bp, Gossypium hirsutum
  Clone ID: GOSHI-09MAY01-C2548_1
gacatttttcattttccggtctcaaactgaaacctcagtccgacgccggaaaaccgttttcaaatcggtaaaccagtctcagattgcttgaaagcctaaatagaatggacggcctctcaaatgcgttttcagtgctggagattgacgtcgacgaccatcttccgctatccaccgcttccacaatttcagggtcggccaccctactctctttcaatgacccaggtaagagcaaaagtaatgaaaagggttcaattgaagataaacagagtgaagcggattcatcgttgctttcagagaactacaagttacctcttgtatggattgacatggaaatgactggtttagacattgaagttgataggatcctagagatagcttgtataatcaccgatggcaagctcaccaaatcagtggagggtcctgatctggttatccatcaatctaaagaatgtttagatagaatgggggaatggtgtcaaaatcatcacggagctagtggattgacacagaaagtgcttgaaagtacagttagtgaaagagaagctgaaaaacaggtcattgaaatttgtgaagagaaatgttggtacatacagacctcatatagctggaaattctatttacatggacttcttttcttaaagaatacatgcc

SEQ ID NO: 19575 - DNA, 677 bp, Gossypium hirsutum
  Clone ID: GOSHI-09MAY01-C2508_1
ggccccaaccctttttaacctaatatttcattataaaattaatcaagttttctaagcccaataccacctgcttctttcgagacacacacatccttccacgcacaccaatgaatccccttcttcccctgattttcccccaccagaattctagctattatgccggccagacgcggtacatagggacttaggaagtaagaaacacgccatagaataggttggaatggactgtaatactgccttaatgaaaacctcttttccaccttgagaaggatacttaacactccaattgtcaattctttgttttaatctggccggcggactttgaaaagctgctttcttgcctctacccactaaatttggaagtcctaaatacctttctggattattcgagctacgaacaccaagcatccgaacaattacccttttttcttcctcctgcgtatttgtacttgaaaaaaattgtggatttgttataattaacgcattgacccgaacttagctcataatcctttaaatactcttcaacgcagtagctcctctctctgtgacttctccaaacaaaatgcaatcatccgtaaataacaaatgtgaaatttgcggaccatttctactaaccttcactcctcgaattaaatttccttccgttgcttgccttaaggactagaacggccttttcc

SEQ ID NO: 19576 - DNA, 700 bp, Gossypium hirsutum
  Clone ID: GOSHI-09MAY01-C2538_1
aaatttcagaaccctaaatccatcccctttcattcctttttcaatcccagttcacaaatttccctttgaattttgattttgtggagccttttaggacgcggtggaatcaggcgtaccggaaaatcgacgatgcggaggcaggagcaaggcccctgtaccccatgatgttagagccgccggagatgagatgggcttttatccggaaaatttactcaatcgtcgccattcaattgttagccacaatcgcggtggccgccacggtggttactgtccatccgattgctcttttcttcgtcagcactggaactggatttgcactttacatagtcctaatcatcacgcctttcatcactctttgtcctttgtattactatcaccagaggcatcctgttaattatcttcttcttggggtttttacggtttctttggcgtttgctgttggattgacgtgcgcttttaccagtgggaaagttattttggaatctgtggttcttacggctgtagtggttgtggctctcactctctacactttctgggctgcaggagaggccatgatttccacttccttggtcctttcttgtttggtgctgtcttgctctcatggttttttctttttttccggggtcttcccctcggcccccctctcggcgcctgttctctggggggcttatcctcgttcttttttttgcggtttttttcg

SEQ ID NO: 19577 - DNA, 763 bp, Gossypium hirsutum
  Clone ID: GOSHI-09MAY01-C2498_1
atttttgctcccctcaatcgaaccttgaccctccatctgccatgtcaatcctccgcgatgaacggagatcggcctgttcgagtctccaggtggttttctttccgccttccactcccctcggaccccgatttcaacgaagcagaggagatctcacggcgtatttacgaggtaagatttcattccctctcccttttatacacccaaaacgcaaaataacaaaagaaattccaggaagaatgaaactaagccaagaagaaaaggaaaaatctcagaaattttgaatcggatcaccttcttgcaattgctttttgaatttttttccagtatctgtttagtatgcgtgtattgcatattgtgtattcattcctaaacgtgtgtacccgattacaagattcaaatctggctttatagccgaaaaagaaagaggaaaaattaacgaaaataaataaaaatacaataaattccttttgtttgcacttgttgttgtttttgtttgtcttcttgcaggcacgggtgcgcgctggcgtgtgtacgggagccatgctggcttatggaggcttggcgtggttgctggaggcgtcgtacgaagcaaggctgggggttgtacggcgcctggaggctgcggtactagggttgctgaagtcttttgggccatttgggcctcgtgactttggataactaggctaggggtttaattgactagtgggctgtttgggtctttgggcttgtaataagacattaattaatggactttggtttattt

SEQ ID NO: 19578 - DNA, 1059 bp, Gossypium hirsutum
  Clone ID: GOSHI-09MAY01-C2488_1
cccacgcgtccgcccacgcctgagctgatttgagcagcagcagctaaagcagatcccaaaatgaagtttaatatcgcaaatccgactactggttgccagaagaagctcgagatcgatgacgaccagaagcttcgggcatttttcgacaagcggatctcgcaggaggttgctggagatgctttaggcgaggaattcaagggctatgttttcaagatcatgggaggttgcgacaagcaaggattcccgatgaagcagggtgttctgactcctggtcgtgttcggctcttgcttcatagaggtaccccatgcttccgtggatatggaagacgtaatggtgagcgtagaaggaagtctgttcgtggatgcattgttagccaagacctttctgttttgaacttggttattgtgaagaagggtgagaatgatttgcctgggctaacggacactgaaaaacctaggatgagaggtccaaagagggcctccaagattagaaagctctttaacctttcaaaggaagatgatgtccggaagtatgtcaacacttacaggaggactttcaccacaaaatctggcaagaaggtgagcaaagccccaaaaatccagaggctggtgactccattgacactgcagaggaagcgggctagaattgctgacaagaagaaaagaatggccaaggccaagtcagaggcagctgagtaccagaaactgcttgccacaaggttgaaggagcagcgggagcgccgtaccgagagtttagcgaagaggaggtccaagctctctgctgcttctaagccttctgtttcagcttagataagttttgataaaccaaaaggggtcttggtgagtacccagttttttgcagtgccatatgctgtcataatttatcgcttagtatccaatgtggtaatgttatttttccatctactatgttaggtcatctttttgacaattatcaataactaaattgcttcatctaatgcaaaatcaacaaaataaataaattattccaatttcaataaaatttcatcctgtttcattgaattaacagaaaataacatt

SEQ ID NO: 19579 - DNA, 575 bp, Gossypium hirsutum
  Clone ID: LIB3584-010-P1-K1-H10
tgcttcttggtgcttggggggggggggggtgaccaaaatgaagttatatcgcgaatccaactactggttgccagaagaagcttgagatcgatgacgatcagaagcttcgggcgttttttgacaagaggatctctcaggaggttgctggagatgctttgggcgagggggggggggggttttttttcaagatcatgggaggttgtgataagcaaggatttccaatgaagcagggtgttctaactcctggccgtgttcgtctcttgcttcatagaggtactccatgtttccgtgggtatggaagacgtaatggagagcgcagaaggaagtcagtccgtggatgcatcgttagtcaagacctctctgttttgaacttggttatagtgaagaagggtgagaatgatttgcctggtctgactgacactgaaaaaccaaggatgagaggtccaaagagggcatccaagattagaaagctcttcaacctttccaaggaagatgatgtccggaagtacgtcaacacttaccggaggactttcacaacaaaatctgggcagaaggtcagttaagctccaaaaatc

SEQ ID NO: 19580 - DNA, 362 bp, Gossypium hirsutum
  Clone ID: LIB3272-057-P1-N1-C3
ggggaccgggtccgcttgggatatatatgatatatatattcagaggctggcattttcagagtatgaatatagtgtaaaatcttggcttacacataggaattaaccaaactctaaacctatggttctcaaagattgcatgcatttaataaaacagaaacaactataaagagtttgcattagatgaagcaatttagttaatgataattgtcaaaaagatgacctaacatagtagatggaaaaataacattaccaaattggatactaagcaataaattatgacagcatatggcactgcaaaaaactgggtactgaccaagatcccttttggtttatcaaaacttatctaagctgaaacagaaagc

SEQ ID NO: 19581 - DNA, 335 bp, Gossypium hirsutum
  Clone ID: LIB3135-013-Q1-K1-C10
cggacgcgtgggtggtaatgttatttttccatctactatgttaggtcatctttttgacaattatcaataactaaattgcttcatctaatgcatactctttatagttgtttctgttttattaaatgcatgcaatctttgagaaaaaaaaaaaaaaaaaaaaaaaaaaaaaaaaaaaaaaaaaaaaaaaaaaaaaaaaaaaaataataaaaaaaaaaatataataattaaaaatataaaataattatttaaattattgggggggcctttttaaagaatcaaattttacttacccgttctttcaaattaaaatttttttttttgtgtcctctaaaatt

SEQ ID NO: 19582 - DNA, 753 bp, Gossypium hirsutum
  Clone ID: GOSHI-09MAY01-C2478_2
accgaatcgcagtgtcgacccagacccacgcgtccgcgtacgcctgcgctcaagtgaacatagcagaatatgcttttacagcactggccaacctagtgagtaatttcgtctgctccaaggaccttttcgacaactcaatgcctgaaggaagacaaatgaaagagaggttctgggagttgataaaggtgattgggaccccgaatttttctgatctcattccatttgttaaaccatttgatccacaaggcttgaagagaaaaatcaacaagatcttcggccagttggatgctttctatgagaagttaattgaggagaggtttgctgagaagggaaaagctcaacttgatgggacgataccctacaaacggaaaatggatatgttagatgttctgttgagttatgagagtaatgataaacaaaatggtttggacagtttaccaaaatctatcgtcaaaggaatgctttctgaaatgtttattgcaggaactgagacaacctcaagcactgtggagtggggcatggcagaaatcctaagaaaacctagtgtagtcaagaaactgctactggaactggatcaagttgtagggaaggacagatttgtggtggaaagcgatatcccgaagctgacataccttcaggcagttgtgaaagaagttttcagactgcaccctggcgttccactcatcatccctcgtccaccaactatgcatgcgaggtagctggctaccatatccccaagcactacatccttta

SEQ ID NO: 19583 - DNA, 2066 bp, Gossypium hirsutum
  Clone ID: GOSHI-09MAY01-C2478_1
cggacgcgtgggatcgctgaatcatattttctatgcatcaaaatgtaaatttaaattgttggatattcagttctcttcattgtgtataaatatgtagacacagagatccaatatattttcactttcacagcaaccttcttctccactcctccatctatatatatagttagaggcggaagggaggaagtgacattggcaatatggctttgctgcattcttacttcttaagcgctggtgagtgtgtttcagggtccatggtcttggcagtggcaatgtccattgcttcctattttctgatccctatggtgtttggtggtcgacataaaaactggaagaatgcaccaccaggccctgttggttggcctatccttggcagccttccacacctctccaatcgtctccatgaagatttctttcacatggccaagatctacggtccccttttcagtctaaacttgggaataaagccggccatagtggtgtcatcaccggaaatggcagcccaagttttgaaggaaaaggaagggatgttctccagtcggaccataaccgagaccattcgagtcatctcttatgatgcccattccatcattttctcgccctatggtcccaggtggaaggttcttcgaaggatcttgatcaccgaactactttctcctaaggcctttgaacaatttgagccacttcgtacctcacaggttcatggtttgctcaagtatttgtacttggtctcaaagtccaacactcaagtgaacatagcagaatatgcttttacagcactggccaacctagtgagtaatttcgtctgctccaaagaccttttcgacaactcaatgcctgaaggaagaaaaatgaaagagaggttctgggagttgataaaggtgattgggaccccgaatttttctgatctcatcccaattgttaaaccatttgatccacaaggcttgaagagaaaaatcaacaagatcttcggtcagttggatgctttctatgagaagttaattgaggagaggttgactgagaagggaaaagctcaacttgatgggacgataccctacaaacggaaaatggatatgttagatgtcctgttgagttatgagagtaatgataaagaaaatggtttggaccgtttaccaaaatctatcgtcaaaggaatgctttctgaaatgtttattgcaggaactgagacaacctcaagcactgtggagtggggcatggcagaaatcctaaggaaacccagtgtactcaagaaactgctactggaactggatcaagttgtagggaaggacagatttgtggtggaaagcgatatcccgaagttggcataccttcaggcagttgtgaaagaagttttcagactgcaccccggcgttccgctcatcatccctcgtcgcaccaacgaggcatgcgaggtagctggctaccatatccccaagcactgcatcgtttacgtgaacgtttggggaatggcaagggatcctaatgtgtgggaagatccactggagttcaagccggagaggttcatagggtcaagcgtggatgtgaagggccaagactttaacctcttgccgtttgggacggggagaaggtcgtgcgtgggatggccactggctcatcgcatggtgcactattacttggctgctctgctccatgctttccagtgggagtcacctccagatgtcctgaatgatctgggggagagagtggggcttactattcagaaaggtaagagcttgcttagcactcccaagcctcgactgccagcctctgtttatgagcgttagaacggcaccatccaagtataagttaaagtagagtgtgcctgtaatgttcctatgttatgttcttatgtttaatacataatgcgaagggtgctcaaatgaaagtttggtggcaatcttgcctaccaacatttatgtatcgcggcattatattcaaactaatgtgttacccttcctcttttgtttgtttctttttttccctgtctcctctgttttggccgccctttttttgggctctctgctttcgttcccctgcctttctcctttccttgtcttttttttttt

SEQ ID NO: 19584 - DNA, 584 bp, Gossypium hirsutum
  Clone ID: LIB3543-036-Q1-K1-F10
cccagcgtccgcccagcgtccgcccagcgtccgcccacgcgtccgcccacgcgtccgcccacgcgtccgcggacgcgtgggcgctggtgagtatgtttcagggtccacggtcttggcagtggcaatgtccattgcttcctattttctgatccctatggtgtttggtggtcgccataaaaactggaagaatgcaccaccaggccctgttggttggcctatccttggcagccttccacacctctccaatcgtctccatgaagatttctttgacatggccaagatctacggtccccttttcagtctaaacttgggaataaagccggccatagtggtgtcatcaccggaaatggcagcccaagttttgaaggaaaaggaagggatgttctccagtcggaccataaccgagaccattcgagtcatctcttatgatgcccattccatcattttctcgccctatggtcccaggtggaaggttcttcgaaggatcttgatcaccgaactactttctcctaaggcctttgaacaatttgagccacttcgtacctcacaggttcatggtttgctcaagtatttgtacttggtct

SEQ ID NO: 19585 - DNA, 574 bp, Gossypium hirsutum
  unsure (1)..(574): unsure at all n locations
  Clone ID: LIB3584-003-P1-K1-F1
cccacgcgtccgcccacgcgtccgcccacgcgtccgcccacgcgtccgggatgctttctatgagaaggtaattgaggagaggttgactgagaagggaaaagctcaacttgatgggacgataccctacaaacggaaaatggatatgttagatgtcctgttgagttatgagagtaatgataaagaaaatggtttggaccgtttaccaaaatctatcgtcaaaggaatgctttctgaaatgtttattgcaggaactgagacaacctcaagcactgtggagtggggcatggcagaaatcctaaggaaacccagtgtactcaagaaactgctactggaactggatcaagttgtagggaaggacagatttgtggtggaaagcgatatcccgaagttggcataccttcaggcagttgtgaaagaagttttcagactgcaccccggcgttccgctcatcatccctcgtcgcaccaacgaggcatgcgaggtagctggctaccatatccncaagcactgcatcgtttacgtgaacgtttggggaatggcaagggatcctaatgtgtgggaagatccactggag

SEQ ID NO: 19586 - DNA, 517 bp, Gossypium hirsutum
  Clone ID: LIB3543-007-Q1-K6-A5
cggccgcgtgggggaagatccactggagttcaagccggaaggttcatagggtcaagcgtggatgtgaagggccaagactttaacctcttaccgtttgggacggggagaaggtcgtgcgtgggatggccactggctcatcgcatggtgcactattacttggcagctctgctccatgctttccagtgggagtcacctccagatgtcctgaatgatctgggggagagagtggggcttactattcagaaaggtaagagcttgcttagcactcccaagcctcgactgccagcctctgtttatgagcgttagaacggcaccatccaagtataagttagagtgtgcctgtaatgttcctatgttatgttcttatgtttaatacataatgcgaagggtgctcaaatgaaagtttggtggcaatcttgtctaccaacattcatgtatcgcggcattataataaaaataatatgttacccttagtttttttatttattgaatatagagtgaaaaataattaatacaa

SEQ ID NO: 19587 - DNA, 534 bp, Gossypium hirsutum
  Clone ID: GOSHI-09MAY01-C2418_3
cccacgcgtccggtaaaacggaaaaaaaatatgttagatatccgtcaacggaccaacgcctagcggctaaaagcctcgtccctctgcttttgtgagaggccaaagctgtaaatggccataaggcctttgaatttcacgacaatctctcttcaccaccaccgcccccgtctcagcgctcgctctcctcttctccccttcaccaatctcctccgctcttgcgtcgaccctttccttcctccgcggaatcgcctccaaaacatcatactccgccgtttctcaacagcaacagcagcagcagcaacaaaagctgaggaaagagcttttgctgaaggagctggaagaaaccgaaaccctggcgcaaaagatagggaaagccattaggcaccctggctttccttctaagtctagggtttacgccgatgtcaatgttattcgtcctaaagagtactgggattacgagtcccttattgtccaatggggggaacaagatgattacagggtggttaggaaaagtggaagagggaaatacagtga

SEQ ID NO: 19588 - DNA, 1610 bp, Gossypium hirsutum
  Clone ID: GOSHI-09MAY01-C2418_2
ctcttgccaccatcatcaccaccaccacaccaccaccgccaccaccgtcttagcctctctctcctttcctccttaacttccgctctctctcttccctctccctatcttctccgtggaatcgtctccaaaacctcatactttcccttctctcaacaacaacagcaacacaaaaaggcctgtgtttagagcttttgctgaaggagctgaaagaagccgaaaccctggcgcaaaagatcgggaaagccattaggcgccctggcgccccttctaagtctagggtttacgccgatgtcaacgttattcgtcctaaagaatattgggactacgagctcctcactgttcaatggggcgaacaagatgattacgaggtggtgaggaaagtcggacgagggaaatacagtgaggttttcgagggcgttcattgtactgataatgagaaatgtattatcaagattctcaaacctgtaaagaagaagaagattaagagggagattaaaattctgcagaatctttgtggagggccgaatattgtgaagttgctcgatatagttagggatcagcagtcgaagactccaagtcttatatttgaatacgtgaataatacggattttaaagtgctttatccgacactctcagattatgatattagatattatatctatgaacttttgaaggcattggattattgccactcacaaggtattatgcaccgagatgtgaagccccataatgtgatgattgatcacgagctgcggaaacttcgtcttattgattggggccttgctgagttctatcatcccgggacagaatacaatgttcgtgttgcttccagatattttaaaggtcctgagcttcttgtcgatttgcaagactatgattactctttagacttgtggagccttggttgtatgtttgctggaatgatattccgggaggagccattcttttatgggcgtgataattatgatcaactggccaagatagccaaggttcttgggacagatgaattaaatgcttatctgaataagtaccgcatagaattggatcccccccttgcggcccttgttggcaggcacagtcgaaaaccttggacaaagttcattagtgccgagaatcaacatttggcactacctgaggccattgacttccttgataagttgcttcgatatgatcatcaggaaaggccaactgcaaaagaagcaatggctcatccttatttcaacccagttaggaatgcggaaagcagtagaactcgtccctagcatgccaaatttgtgaggctgtcaagacatggcattttatcttctttgtgctgggctgggtaaggatcctgcctgtgtagtctgactgaagattatgtgtatgtggtgctttagcttttgaagttgagaattctttcaaaaatgttttatttgatttcctggtgtcccccaacggaaactttagttcttatttcagactttcatatttcccggaatattgctgattaatcttttgagttcttcagatgggaacagttcctaaatctgatttcagtgtgctccttactagtaaactgtacatctcatctttggcctcagatatgatactatattatttcttttcatttc

SEQ ID NO: 19589 - DNA, 1294 bp, Gossypium hirsutum
  Clone ID: GOSHI-09MAY01-C2418_1
aatatattgtgtgtaatattcactctgccatggcaggggatgcgtcattttatatttaacaactcaaaatatattcctcgtgtctcgagttgaggtgctcaaaattatattaaataatctttgtgtgtgagggcgtcttgtagactctgtcatgtagttgtaaagatatgcactcatgtgtgtgtgtcacctacttatatgtgtgactactatgctgactctttgtgatgatgagatttatttgcagtgcagcaacactgcttggtgattgaatcacagcatcgtctgaaatttagtctgatgtttcttgcatgttcattttgccatggcattccaaaatattaattatctctcgattccattgattatatcttacaatgtaaattttgatattttcctctgttctttggaaagaaaaagatggttcacttgtttgaatatcgtgagtctttatttttgaacttttgaaggcattggattattgccactcacacggtattatgcaccgagatgtgaagccccataatgtcatgattgatcacgagcagcgtaaacttcgtcttattgattggggccttgctgagttctatcatccagggaaagaatacaatgttcgtgttgcttcgagatattttaaaggtcctgagcttcttgttgatttgcaagactatgattactctttagacttgtggagtcttggttgtatgtttgctggaatgatattccggaaggagccattcttttacgggcatgataattatgatcaactagtcaagatagccaaggttcttgggacagatgaattaaatgcttatctaaataagtacggtatcgaattggatccccatcttttatttcttgttgggaggcatagtcgcaaaccttggacaaagttcattaatgctgagaatcaacatctggcattacctgaggccatcgacttcctcgataagttgcttcgatatgatcatctggaaaggctaactgcaaaagaagcaatggcccatccttatttttacccgattagaaatgcggaaagcagcagaactcggacctagcatgccaacttcacggaaatgatgatgtcaaggcatggcatcttcttctttcttcatatgcatggttagatcctcttccctttgtagaatgacagaagatgaaagaagcccttttttctttatcttttttttccttgtgattttcttgtctcccccaagggaaatgtttatgtttcattttgaattatatcatatttgtgtctgtttttgaaaaaaaaaaaaaaaaaaaatcgcga

SEQ ID NO: 19590 - DNA, 527 bp, Gossypium hirsutum
  Clone ID: LIB3543-052-Q1-K1-H7
ataaagcgattgaataagaaagtctggtaattaaaattacaagggaaaatctcttcctttgttgctgctaccctggggttcctccgcgcgcgtcgctctgcatagcatcatactccgacgtttctcaacagcatcagcggctacgttagctgaggcaagagcttttgtcgctggagctgaaagaaaccgcaaccctggcgcatgagatcgggatagccattaggcgccctggcgttccttctaagtctagggttcacgccgatgtcaacgttattcgtcctaaagagtactgggattactagtccctaactatccaatggggggaacaagatgattacgacgtggttaggaaagctggaagagggaactacagcgaggttttctaaggcgttcattgtactgataatgagaaatgtattatcaagattctcaaacctgttaagaagaagaagattaagagggagattaaaatactacagaatctttgtggagggccaaatattgtgaagttgcttgatatagttagg

SEQ ID NO: 19591 - DNA, 416 bp, Gossypium hirsutum
  Clone ID: LIB3135-026-Q1-K1-E4
tcaacacaaaaaaggcctttgtttaaaggagctaaaagaagccgaaaccctggctcaaaagatcggaaaatccaatatgcgccctgtcgccccatctaaatctatggtttacgccgatgtcaacgttattctccctaaaaattattggaactacaacctcctaactgttcaatgggccgaacaagatgattactaggttgtgaggaaagtcgggcgagggaaatacagttaggttttcgagggggttcatattactgataacgagaaatgtgttatcaagattctcaaaccggtcaataagaataagattaagagggtaattaaaatactgcataatcttttctgatggcccaatattgtgaagttgctgtatatagtttgtgatcatcattctaagactccaattcttatatttt

SEQ ID NO: 19592 - DNA, 344 bp, Gossypium hirsutum
  unsure (1)..(344): unsure at all n locations
  Clone ID: LIB3148-022-Q1-K1-E6
gaaaatagcccactctttattacttttgtttgcataggcacaaaccttggacagagttgagttatgctgataatcaacatctggcattaccngnaccattgatttcctcgataaggtgcttcgatatgatcatttggaaaggctaactgcataagaagcaatggctcatccttatttttacccgattagaaatgcggaaagcagcagaactcggacctagcatgccaacttcacggtgatgatgttaaggcatggcatcttctgctttcttcatatgcatggtcagatcctcatccctttttagaatgacataagattaaagtctctcttattttttcttttga

SEQ ID NO: 19593 - DNA, 518 bp, Gossypium hirsutum
  Clone ID: GOSHI-09MAY01-C2438_2
agcaaagcaaaaaagccgctgattttattttattttttctccaaaaaaatttcctaattgttcatcttttttaacttacaccacatgatctgatctgggtttttgcccctctgtttctcattcagatcatagttcaaaaaataaaaacgaaaaaatgagaagcttccgttttgtcctttaatggccttcacatttgaaaaaagaatccattgaaagaaagagcaaaaaacccaactttttttattggggatttagttgcttcattgatttatacaatgggatttggttcaaagatgcagatcattgatctatatttcaagaaaacgtagggaaatagaacgaggattccaaatccaggaaattttcatttcttattgatttcaaaaggggcaaaatctgtggatggatgaatcatttaggattttctcttctggtttagaaaccttgttaattcgtttgaaattgcttcggaaagtgattaattcgtacaatgagatggggtcgaggaaaagttaaga

SEQ ID NO: 19594 - DNA, 930 bp, Gossypium hirsutum
  Clone ID: GOSHI-09MAY01-C2438_1
caaaaaagccgctgattttattttattttttctccaaaaaaatttcctaattgttcatctttgggagcttacaccacatgagctgatctgggtttttgcccctctgtttctcattcagatcatagttcaaaaaataaaaagaaaaaaagagaagcttccgttttgtcctttaatggccttcacatttgaaaaaagaatccattgaaagaaagagcaaaaaacccaactttttttattggggatttagttgcttcattgatttatacaatgggatttgtttcaaagatgcagatcattgatctatatttcaagaaaatgtaccttgttaatttgtttgaaattgctttggaaagtgattaatttgtacaatgagaaggggtagaggaaaagtaaagaagcaggctgttgttgtttcgtctcatgaagatcccgagagtggtgacgatgaaatcatcgaggaactcaaagtggagaagacagaagaagatagtggcgatgtaaaaggttcggttccaatcaaggagatgaaaaatcaagctgtcacggagaacgggcggaaacggaaaaggtcaatgcaggcgaaagaaaatgggattacgacaaagttaagcaccaatgattcgattaaacctgtggggtatcgacaaaatggtagcaggcgcaaaaacaaacctcaacgggctgccgaagctattgttgagtgcaaatgacgaggttttgaataaccgtcaccgtgtcttttaccttattttttcgtactaaaagtaatgcttgtttgcttgctcgtgtatggattccgttttttccattttgtcacatttgattcgtttgtgtagtctcggaattcaacttcggggtttttcgatttgatgatgttactaatgttttctattatacaaaaaaccgagaacgtgtgtgtttttgcacagt

SEQ ID NO: 19595 - DNA, 643 bp, Gossypium hirsutum
  Clone ID: GOSHI-09MAY01-C2428_2
tgctattttcccctttttacccttccaccactactacaacaaagccgccatttcagtcgctgacccaaccacaccgacgaaaccataatcaatggctgccgcgttacaattacaaacacacccttgcttccatggcacgtgccaactctcacctccgccacgaccttccgtttccttcccttcttcctcccgctcgtttccatctagcagacgttccctgtccgcgcatgtgaaggcggcggcgtcgtctttgtccaccaccaccttgcaggaagggatagcggagttttacgatgagtcgtcggggatttgggaagacatatggggtgaccatatgcaccatggatattacgagccgggttccgatatttcgggttcagatcatcgtgccgctcagattcgaatggtcgaagaatcgctccgttttgctggaatatcagaggacccagcaaacaggcccaagagaatagttgatgttgggtgtgggataggaggcagttctaggtatctagcaaggaaatatggggcaaaatgccaaggcattactttgagccctgttcaagctggaagagccaatgctcttgctaatgctcaaggactagcagaacaggtttgttgtgaagttgcagatgccttgaaccaa

SEQ ID NO: 19596 - DNA, 1436 bp, Gossypium hirsutum
  Clone ID: GOSHI-09MAY01-C2428_1
cccacgcgtccgttcatacgcaattttggggacaagaagagcacgcgtcttggagattatatctacaaatcattaagcctcgctctgcaatttccccctttttacccttccaccactactacaacaaagccgccatttcagtcgctgacccaaccacaccgacgaaaccataatcaatggctgccgcgttacaattacaaacacacccttgcttccatggctcgtgccaactctcacctccgccacgaccttccgtttccttcccttcttcctcccgctcgtttccatctagcagacgttccctgtccgcgcatgtgaaggcggcggcgtcgtctttgtccaccaccaccttgcaggaagggatagcggtcgtcccccgcgtccccccacgcgtccgggaagacatatggggtgaccatatgcaccatggatattacgacccgggttccgatgtttcgggttcagatcatcgtgccgctcagattcgaatgatcgaagaatcgctccgtttcgctggaatatcggatgacccagcaaacagacccaagagaatagttgatgttgggtgtgggataggaggcagttctaggtatctagcaaggaaatatggagcaaaatgccaaggcattactttgagccctgttcaagctggaagagccaatgctcttgctaatgctcaagtactagcagaccaggtttgttttgaagttgcagatgccttgaaccaaccattccctgatgaccaatttgatcttgtttggtctatggaaagcggagaacacatgcctgacaaacccaagtttgttgaagagctggtgcgagtggcagctccaggaggcacaataatagtagtgacatggtgccatagggatcttggtccatctgaagagtctttgcagccatgggagcaaaagcttttaaacagaatatgtgatgcttactatttaccagagtggtgttctacttctgattatgtcaaattatttcagtccctatctctccaggatataaaggcaggagattggactgagaatgtagcacccttttggccagcagtaatacgttcagcattgacatggaagggcttcacatcgctgctacgaagtggattaaaaaccataaaaggtgcactggtgatgccattgatgatcgaaggtttccagaaaggggtgataaagttcgccatcattgcttgccggaagccagctgagtaggccataacccaaatcttaatttctactgtaattcatccgctcaaatctgtgtcaatggtgaagctcctatatgacattgctttaaacatcccttatggtgtaagggaaaatgagcaaataaagttgaatacaaaactgatgccactgcaatacgtatggagttttgaaaaaaaaaaaaaaaaaaaaaaaaaaaaaaaaaaaaaaaaaaaaaaaaaaaaaggg

SEQ ID NO: 19597 - DNA, 403 bp, Gossypium hirsutum
  unsure (1)..(403): unsure at all n locations
  Clone ID: LIB3584-003-P1-K1-A12-F19g
actgggctgcgaatgtggcacccttttggccagcagtggtgcgttcagcattgacatggaagggcttcacatcgctgctacgaagtggcttaaaaacaataaaaggtgcactggtgatgccattgatgatcgattgtttccagaaaggggtgataaagtggggggggattgcttgccggatgccagctgngtnggccataacccaaatcttaatttctaccgtnattcatccgctcaaatctgtgtcantggtgacgattctatattacattgctttaaacatcccttatggtgtaagggaaaatgagcaaataaagttgtctgcaaaactgatgccactgcnntacgtatggagttttgaataanttgtttgttccatttctaactcttnnnttnnnnnant

SEQ ID NO: 19598 - DNA, 546 bp, Gossypium hirsutum
  Clone ID: GOSHI-09MAY01-C2798_1
cgcattcagaatgcattcagggcgcactccttgaaaatacgaactaaagcaattgagtcttccactccagaggatgaagcacgaagtatagttgcagctatgaagattcaacatgcctttcgcaactttgagaccaaaagaaagatggctgctgctgcccggattcaatataggttccgaacttggaaaattcgtaaagagttccttaatttgcgccaccaggctaccaaaatccaagcggctttccggggcctcctagtaaggaggcagtaccgcaagattacctggtcagttggtgtgcttgagaaagcaattctgcggtggcgattaaagagaagaggtttgcgtgggctacaaattaacacagttgacacggtcacagagcaaaggccggaaagtgacactgaagaggacttctacagaaccagcagaagacaagctgagcaacgcgtcgagaaagctgttgttcgagttcaagctatgttccgctcaaagaaagcacaagaagactatcggagaatgaagttggcttgtgatcaagcaatg

SEQ ID NO: 19599 - DNA, 757 bp, Gossypium hirsutum
  Clone ID: GOSHI-09MAY01-C2768_2
caatgcccagccaccaccatcaccaccgctctactccgctgctgtccgccacggcagcttcctcctctggctcccaatccttcgtctctaagctcctgctcctcttaacactcctccctctctctttagctgccttagctttcgtcctccagtggcgcggagggggtgtatccgatcccaccatcgccacatccgccgcctattcccgatgggcaccacgtgggtcccaccacgagatcttccctggcatggagactttctcatctctctctcccaaatcgcattcttcttcggattgcatcaatctcggtcgtacctcttctcattctctcccttactatggggactggaaatttggttttgaagctaatttaaagccaaagatttgtattacaacaagtacatcagctggcttggagcagattttaccatggatgttctatcatagagttcttggtgtcacaaactttttcctctttgtggaagggcatgctgcttctcctaatgtttctaaagttttggagtctcttcccggagtaaaagttgtatacagaacaaaagagcttgaggagcagcaggctaaaagccggatctggaatgaaacatggttgtcgagtttcttttacaagccttgcaattatgaactatttgtgaagcagtctctcaatatggaaatggccattgtcatggcaagggatgctggaatggagtggatactgcatcttgatactgatgagctaatacacccagctggtgc

SEQ ID NO: 19600 - DNA, 1377 bp, Gossypium hirsutum
  Clone ID: GOSHI-09MAY01-C2768_1
tcggttcggatctggaatgaaacatggttgtcgagtttcttttacaagccttgcaattatgaactatttgtgaagcagtctctcaatatggaaatggccattgtcccgcccggccgccctcgcgtccggtggatactgcatcttgatactgatgagctaatacacccagctggtgcaagtgaatattctttgaggcagttgctacttaatgtacctagcaatgttgatatggtcatatttcctaactatgagagcagcgttgaacgagatgatatcaaggatccttttactgaggtgtcaatgttcaagaggaactatgaccatctaccaaaggacacatactttggcatgtataaagaatcaactcgtggtaatccaaattatttcttgacttatgggaatgggaaagcagctgcccgcattcaggatcatcttcgtccaaatggtgctcacagatggcacaattatatgaaaaccccaaatgaaatcaaattggaggaggctgctgttctacactacacatatgccaaattttcggaccttacatctagacgtgaccggtgtggctgcaagcctaccaaggatgacgtcaagagatgcttcatgttggaatttgatagagctgcatttataattgcttcaacacaaacagaggaagagatgcttaactggtatcgtgaacgtgtcgtgtggggtgacaaagacctaaggcttaaactcttgagaaaggggattttaactcgcatatatgctccaatggccataatccaggggctaagagagtccggtgtcttcagctctgttattgctaacgcccccactactatttcaaaggacaagtttttagcatccattgatagtagtaactcatcaagagtcgtttcccccacgactcacgcttcaagaaagattggtagaagcagacagcaacaaacatctgctaggaaggtgctggaaattgaaactaatgcaactgatgaagcagcagctgttccgccattgtcaccccctgcgtggacaatgactaccttcgagcaatgatggagtggctgatttcgatgactctttacaatctcttacttcagacggtttattatatcttttgcttcaaacgcaaggaatcactgacacaagcaaaagagcaggtacgcaatgtcttgtttgttgtgtatagttaatagttctacagatttctgctctgccattgaatgtttgaagtgagaattggtagcaaaatattctgtaattcatgatattgttgttttgactgatactgcagaattacaagtcatttataataatatatataaatagatttcagcttctaaaaaaaaaaaaaataaaaaaaaaaaaaaaaaaaaaaagggggggggatat

SEQ ID NO: 19601 - DNA, 968 bp, Gossypium hirsutum
  Clone ID: GOSHI-09MAY01-C2718_1
gttgttttcttgggattatgctcaagccgagttgcagtgcttactccacaaaatttaaaggtaccaaccatggcagaaatggtagatatgtggaagaaaaagcataacatgttcggtatcctttatagctggtttcttgctaaggttgccagcaggcttgaggttttccctgggtctgaatttcgtgtggctggtcgcgtggcgatgaagtatggtggcgaggggggttcttggtgatcgtcctgtgcaggttacgttgcgcagaacctgggggaaaatgccactttggcataagattaagttactgtattccttactttttcaagctgtcttcttgcccagccctgaagagcttaacaaaatgctgaagggagcgagggatgatgttgacatgctgacccttgtgattcaagaaatgagcaaggaattccctactctaatggaaactcttgtacatgaacgagaccagttcatgtcatccacgttactaagaacagcgagtgagcatagttcagtcgttgcggtggtcggtaaaggccacttgcaaggaattaagaaatattggaagcagcctgttttgatagatgatctcatgacagttccttcaaagaaaccgacagttccaaccggcaaaattctggtatcgctgggcattgcggctgccggtgtggctatcgcatcaggcatctatcttgcaggcaagaaataatccacttataacattattgtttgggcttaactagaatttttgtggaaaatcctgccataagccctataaccagtttctttcacaactaaaattgggacccatcgaaaaacaggtgctatatacatgtttttttttttggcatagatatatttttcaaggcaattttattattttgtatccatgtttatattcataaatttcgtttttagtcttcattatattctaactacttttctatattttaatactatttgttatt

SEQ ID NO: 19602 - DNA, 820 bp, Gossypium hirsutum
  Clone ID: GOSHI-09MAY01-C2738_1
acccacgcggcgcctaccgtactagacgcgtgggaaaaaatatgaaggtccttgtcttagaaactgctctcatcccccccgccgccgcaccacctttcacccacgatcacaccctccccctctctcacctagataatgaccactccctcaacgtcaccttccgttacctgcgagcttacgtcaacagcgacaccaccggtcgtgaccctttccaggtcatctcctccgccatctccgccgctctccaccactattatcctctggctggatctctcggccgttccagcaacggtaggtatgagcttttctgtcggttggaccaaagcctaccgctcgtaagtgccagcgtggactgcacattggagtctgtaaatcaccttgatgaccctgatatgaattcggttgaacagctggttcccgacccaagcccggaagaaacgttggtcaacccctgtactttacagctaacggtgttcaaatgtggtgggtttactcttggggcggctatacacaatgctttatgcgatgggcttggcgcgacccagttgttctgtatggcagctgatttcgcacgtggggtggacgaagtagaatatcagccggttgggacgatccactctattgggtccaagaaaccccccgatagttgatgcccctgttcttgagttcctaagcttggagaaaggtttaatccttacaaacaggatatcggtcttgtgaatgggagtgctcttatgtgttagatgttttctaggaccactcaaggctttgttttttttacaaagggctgggtttaaccacttttgaaatcttaggtgca

SEQ ID NO: 19603 - DNA, 946 bp, Gossypium hirsutum
  Clone ID: GOSHI-09MAY01-C2698_1
cccggcccgaccctcgcggccgcccgcccgtccggaagaagagaaggaggaagatgatttcccagagattatactaaaagttgatatgcactgtgaagcttgtgctagaaaagttgcaagaaccctcaaaggatttgaaggagtgggggatgttgcgactgatagcaaggcaaataaggtggtggtgaaaggaaagacggccaaccccgtcaaggttcacgaaaggctattaaagaaatacggtagaaaagtggagttagtctcgccgttgccggaaccaccgccgccggaagagaacaaggaagaaaacaaagaagctaaacccaaagaagaagaacagaaacaagagcctcctgcagtgataacggtagtattgaaggtcggcatgcattgtgaagcatgcgctcaagcattgcgtaagcgaataaggaagatccaaggcgtagagacagtggaaaccgatgtgggaaatgataaagtaaccgtaaaaggcaccgtagatcctacaaagctggttgattatgtttacaagagaaccggcaagcaagcgtccatagtgaaaggcgaagaaaagaaggaagaacaacaactacaagaagcagagaaaaaaccagcagaagaggccaacaaagaaaccaaaccagaagaagaagacgacagaaagagtgatgatgtaataaagcgaagtgaatacttacaatccaagtattttctcggagctggaatatcctcctcagtttttcagtgatgacaacccaaaggcgggggctcttatgtaatttttattcccatgattgatgacccatgcaattttccaagaaagaatgtatgtaataaggtgctgccaatgcttggttgtgacaatctcgtatgctcggttttagaaccatgtatggggagacagattagttggtcgtaatattgattatacccaactttttggttt

SEQ ID NO: 19604 - DNA, 433 bp, Gossypium hirsutum
  Clone ID: GOSHI-09MAY01-C2688_18
gggccgacccacgcgtgcggtttttcagtattaaagtgcaatttacagttgttaaaccaacggaagggaaacagcaaggtgttatattgggagctaacaagttctcacaaaggcatctattgggacagcagctcagtcccaagatgatatagattacactgtgccacccccagcacccttctttgagcctagtgagttgacctcatggtcgttttaccgagctgggatcgctgagttcgttgctactttccttttcttgtacatctcggtgcttgaccgacattggagttgactagggcaattgcaacggtactactattgggagacaaggtattgcttggaaaggtgttggtctttccgttaaactagtttactataaaggcttctaaattgggcggcctgatccctgatttcatgtgccaaggaggtgatt

SEQ ID NO: 19605 - DNA, 364 bp, Gossypium hirsutum
  Clone ID: GOSHI-09MAY01-C2688_9
cccagctcgtagccttggtgcggccatcattttcaacaaggacaagggctgggatgaccattggattttctgggtgggtccgttcattggggcagcactagcagcactttaccaccttcttgtcatcagagccattcctttcaaatcaaaatgatctacatcaatggtcatgatcatatgatttcaagaaagtgaaagttccactcatgcaccctttcagtttgtttttccatttttttttgtttgcatgccttttgtatttggatgtaagaatctgtaatatattgctccaaatttaagtaaagtccaatataaatgtgctctctttccaagggggaggggaaaaaaaaaaaaaaaaaaactc

SEQ ID NO: 19606 - DNA, 864 bp, Gossypium hirsutum
  Clone ID: GOSHI-09MAY01-C2688_7
ttttctttcttttagaattagcgggggtcttctttgggacttgtaatggtgattttcataggctaagtgcccaactgttgggattcaaggaattgcttgggcttttggtggtatgatctttgctcttgtttactgcactgctggcatttcaggtggccatatcaacccggcagtgacttttggactgttcttggcgaggaagctgtcgttgacgagggcaattttctacatggtgatgcagtgtttgggcgccatatgcggggcgggtgtggtgaaaggtttcatggggaagactcattacggtatgttgggcggcggagctaactcggtggctcatggctacacaaaaggtgatggccttggtgctgaaattgtcggcacctttgttcttgtttacactggcttctcagccactgacgccaagcgcagcgcccgagactctcatgtccctattctggcaccattgccaattgggttcgcagtgttcttggtacacttagccaccatcccaatcactggaactggtattaacccggctcgtagtcttggtgcagccatcatcttcaacaaggacaagggctgggatgaccattggattttctgggtgggaccattcattggtgcagcactagcagcactctaccacgttgttgtgatcagagccattcctttcaaatcaaagtgatgagattaagatcaagagtcatgattccatgattatgagcttaagttaaacgttaaaaaccaaatctaaaacatggaagaagagaatccctacaaccctattaagtttctttgatttgtttgatgcttgtgttttctattgtaagaaaattattcttatgcctatgttttttatttatt

SEQ ID NO: 19607 - DNA, 537 bp, Gossypium hirsutum
  Clone ID: GOSHI-09MAY01-C2688_6
tgtaagcatcccatacttcataataaaatctaattacggattaagttatgtatgttgttacaaacggatgaatttatttttgtatggctagattctggcaccattgccaattgggttcccagggttcttggtccacttagccaccaatcccaatcactggaactggcattaacccggctcgtagtcttggtgcagccatcatcttcaacaaggacaagggctgggatgaccattggattttctgggtggcaccattcattggtgcagcactagcagcactctaccacgttgttgtgatcagagccattcctttcaaatcaaagtgattaggtcaagatcaagagtcatgattgtatgattatgggcaatatcccccattaggaaaagatagaaatggagggggtttggtttgttatatatagaacccctccccctttggttgtatcatcccaaaatcttctcctttgtaatattttctagaggaaatattaatttggtagtgcccgaggacgtaagctaaattggccgaacctcgtt

SEQ ID NO: 19608 - DNA, 566 bp, Gossypium hirsutum
  Clone ID: GOSHI-09MAY01-C2688_4
gtattaacccagctcgtagtcttggtgcagccatcattttcaacaaggacaagggctgggatgaccattggattttctgggtgggtccattcattggagcagcactagcagcactctaccacgttgttgttatcagggccattcctttcaagtcaaaatgatcaaaatcgacggtccaaatgatcatatgatctcaaaaaaatgaaaaatttcacccatgcaccctttcagtttgtgtatttcccatttgatccttttgtttttgtatatgtaagaatgtgtgtaatatatattatttacttcaatggggggagagcctttgtgtcctttttttacttgctttttttttttaagctaaaaaaaggagagggtgctgatggcaaatattggacccatttgtaatttgtatggctatgatttgtgaaaaaaaacatgtcattttcataataacaccgaccaatacctactttcaatggctttttgttgtaaattatggatttgacttggcaaatacaaaaaaaaaaaaaaatataaaaaaaatataattaaaaaaaaaaatataaaaa

SEQ ID NO: 19609 - DNA, 1065 bp, Gossypium hirsutum
  Clone ID: GOSHI-09MAY01-C2688_3
cccggaataacccgggtcgaccccacgccgtccgagttggtccaacgtgttggcattttgaagactggattaccattattctggtgttccagatacatgtgcttgagatgaatcactgaacaagctggcgttgttctcttcccttgggatcctaagccaatagagggtgggacttggaatggtgcctggatgcctgttgaatattggcaatatcccacattagtgaaaatgatagaaatggagggggtttggtttgttatatatagaacccctccccctttggttgtatcatcccaaaatcttctcctttgtaatatttctagaggaaatattaatttggtagtgtccgaggacgtaagctaaattggccgaacctcgttaaaactctggtattttatttcttatttgtttgcttttatttaatagctttatgttggttatatttatttagttattattgctataaatatctaagtgtgttttgtctaattgtagtcttctcatcagttccatttttattctttcttcttttcttttaaaatttttattatatttttttgttattatttctttttaactttctttttcatttctttatttctttcatctttctgtttgttctttttttatctttttattttttttctctttttttttcattatctttttctctttatttcacatttttattttattcttttttctttctatctttttttcctacattcttctttctttattttacttagttttcttctttcaattcttctcttctcctacttttcatttattttttattcttttctcattattttatactcatttttccatttttttctttctttttactactctattcttttttttttatttttcatttcttaatccttttaatttttcttctattttatatttatctttttttttcttctttttcctgctttcatatattcattctttccttttctcttctcttatttcttaattatcttcttattatttttttatctctcttctttcatttttttccttctcttttcttttattatctctttttttatttta

SEQ ID NO: 19610 - DNA, 854 bp, Gossypium hirsutum
  Clone ID: GOSHI-09MAY01-C2688_2
cccacgcgtccgacttttaacccctgccgacactctcaccattttctcagcaaacttagcctatgaaaatcaccattacaagtcccaaagaagacccccgctaattctaaaagaaagaaccagagttttctttctctttagtttacgtttattgtccttttggaatttttgatactaaaaaaaggaagcaacgaagaagggaaatggagggcaaagaagaggatgttagattgggagccaacaagttcacagagaggcaaccaattgggaccgcggctcagagtcaagatgacgggaaagactacactgaaccaccaccggctccatttttcgagcctggcgagttaacctcatggtctttttatagggctgggattgccgagtttgtggcgactttccttttcttgtatatcactattttgactgttatgggagttgttaaggaaaaaactaagtgcccaactgttgggattcaaggaattgcttgggcttttggtggtatgatctttgctcttgtttactgcactgctggcatttcaggtggccatatcaacccggcagtgacttttggactgttcttggcgaggaagctgtcgttgacgagggcaattttctacatggtgatgcagtgtttgggcgccatatgcggggcgggtgtggtgaaaggtttcatggggaagactcagtacggtatgttgggcggcgagctaactcggtggtcatggtacacaaagtgatggctggtgctgaatgtcgaccttgtctgttacctgctctagcactgcgcagccacgccgacttatgtctattgacatgcaatggtcaggtctgtcatacacatccatatgactgat

SEQ ID NO: 19611 - DNA, 1157 bp, Gossypium hirsutum
  Clone ID: GOSHI-09MAY01-C2688_1
tccacccgtccctcccgtttcttttagcttacagcttccattgtttttcagtagtgaagagctaaaaaagaagggaaatcaatggaagggaaagaagaagatgttagattgggagctaacaagttctcagagaggcaacctattgggacagcagctcagtcccaagatgataaggattacactgagccacccccagcacccttgtttgagcctagtgagttgacttcatggtcgttttaccgagctggaatcgctgagttcgttgctactttcctattcttgtacatctcggtgttgactgtgatgggagtccttaaggacaaaaccaagtgtacaactgttgggattcaagggattgcttgggcttttggtggtatgatctttgctcttgtttactgcactgctggtatctcaggtggtcatatcaatccagcggtgacatttgggctgttcttgggaaggaaattgtcgttgacaagggcaatatactacatggtgatgcagtgcttgggagccatatgtggggctggtgtggttaaagggttcatggggaagacaaggtatggtgctttgggtggtggagctaactctgtgaatcatggctacaccaagggagatgggcttggtgctgaaattgttggcacctttgtgcttgtttacactgtgttctcagccactgatgccaagcgcagtgccagagactctcacgtccctattctggcaccattgccaattgggttcgcagtgttcttggtgcacttagccaccatcccaatcacaggaaccggtattaacccagctcgtagtcttggtgcagccatcattttcaacaaggacaagggctgggatgaccattggattttctgggtgggtccattcattggagcagcactagcagcactctaccacgttgttgtgatcagagccattcctttcaaatcaaaatgatcaaaatcaacggtccatatgatcatatgatctcaaaaaagtgaaaaattccactcatgcaccctttgagtttgtgtatttcccaatttatccttttggttttgcatgccctttgtgattttgtatatgtaagaatgtgtgtaatatatattatttacatcaatggtgggagagcctttgtgtccctttttacttgttttttttttagc

SEQ ID NO: 19612 - DNA, 382 bp, Gossypium hirsutum
  Clone ID: uC-gsronu33B037g11b1
aaatatttcacccatgcaccctttcagtttgtgtatttcccatttgatccttttgtttttgtatatgtaagaatgtgtgtaatatatattatttacttcaatggggggagagcctttgtgtcctttttttacttgctttttttttttaagctaaaaaaaggagagggtgctgatggcaaatattggacccatttgtaatttgtatggctatgatttgtgaaaaaaaacatgtcattttcataataacaccgaccaatacctactttcaatggctttttgttgtaaattatggatttgacttggcatgatttttgtgttccttgtattatatttgctgcactgaggtgtgacaaagatataattatatggtaataattgagat

SEQ ID NO: 19613 - DNA, 563 bp, Gossypium hirsutum
  Clone ID: LIB3825-001-Q1-N6-B5
aaataaaagcaaacaaataagaaataaaataccagagttttaacgaggttcggccaatttagcttacgtcctcggacactaccaaattaatatttcctctagaaatattacaaaggagaagattttgggatgatacaaccaaagggggaggggttttttttttaacaaaccaaaccccctccctttctatcttttcctaatgtgggatattgccaatattcaacaaatctccaccttggcgatattccacatcttcgaacatcttctcataacactaacttcaatagtgtcttcaaatttgcaaccaatcgccttcttcccttttggtagttgtgccagcttccacgtcttgtttttctctagagattgcatttcctcttccattgcacctaaccatctattattctctaaactctgaatggcttcggtgtaagtggatggaatattatcaacaactggaagtgcataagctaccatgtcagtgaaacgagctggtttctgaatttctcgtctctgccttctgactgcaattggctctgattgctgttgaggttcttgggtag

SEQ ID NO: 19614 - DNA, 391 bp, Gossypium hirsutum
  unsure (1)..(391): unsure at all n locations
  Clone ID: LIB3272-009-P1-K1-B1
ctggtttcttttagcttacagcttccattgtttttcagtagtgaagagctaaaaaagaagggaaaccaatggaggggaaagaagaagatgttagattgggagcgaacaagttctcagagaggcaacctattggtacagcagcccagtcccaagatgatatggattacacttagccaccctcagcacccttgtttgagcccagtgagttgacttcatggtcgttttaccgagctggaatcgatgatttcgcttctacttttctattattgtacatattttttttagcgtgaacgtggtattaccattgattttgccctgtggaagtttgagaccaccaaatttttttngtgttgtttttttctttattttgcatctcttttttattattaaa

SEQ ID NO: 19615 - DNA, 319 bp, Gossypium hirsutum
  Clone ID: uC-gsronu33B127g06b1
tttgatctcaaaaaaatgaaaaatttcacccatgcaggcttttagtttgtgtatttgccatttgacccttttgtttttgtatatgtaagaatgtgtgtaatatatattatttacttcaatggggggagagcctttgtgtcctttttttacttgctttttttttttaagctaaataaaggagagggtgctgatggcaaatattggacccatttgtaatttgtatggctatgatttgtgaaaaaaaacatgtcattttcataaaataaaataaaaacggaaaaatatataaaaccggatttttaaaaattgtcctgggacg

SEQ ID NO: 19616 - DNA, 475 bp, Gossypium hirsutum
  unsure (1)..(475): unsure at all n locations
  Clone ID: LIB3543-013-Q1-K6-D5
ccccgcgtccgggatcaggttcctngaagacagagtggatgggactggcctgaaggattgttaccaactactggtttggtgaaatctagttcaaccgtgcccaaaatatctattacttctcacgtggctaatccaattggttcatcgcaagctttgtcaagtttgcttgatgttgctgatggccggagaatggagtgtgctttctctaagagttcaacgatgtcaacatttggtggtagggattcagctaatggttgtcagtctgtgtccacctggattgattctatattgtgttgaatattggcaatatcccacattaggaaaagatagaaatggagggggtttggtttgttatatatagaacccctccccctttggttgtatcatcccaaaatcttctcctttgtaatatttctagaggaaatattaatttggtagtgtccgaggacgtaagctaaattggccgaacctcgtt

SEQ ID NO: 19617 - DNA, 406 bp, Gossypium hirsutum
  Clone ID: LIB3146-012-Q1-K1-E8
acgctgacgcgttgtcgaacgcgcgggctgactcgtggggtgggaccattcattggggcagcactagcagcactctaccacgttgttgtgatcagagccattcctttcaaatcaaagtgatgagattaagatcaagagtcatgattccatgattatgagcttaagttaaacaaaaaaaaaaaaaaggagaaacccaacaacccttttaagtttctttgtatttttcttttgtttgtatgcttgtgtttttgtatgtaaagaagatacaatcatatgcctctgttttttatttattaaacttgaaaaaggggggttggtaatgagcaatgacccatctaaaaagtaagtgggcattcgtatttgtatggctatgatttgtgaatgagaaatgtcattttcatgccct

SEQ ID NO: 19618 - DNA, 297 bp, Gossypium hirsutum
  unsure (1)..(297): unsure at all n locations
  Clone ID: uC-gsronu33B137b08b1
tcggctgggatgaccattggattttctgggtgggtccattcattggagcagcactagcagcactctaccacgttgttgttatcagggccattcctttcaagtcaaaatgatcaaaatcgacggtccaaatgatcatatgatctcaaaaaaatgaaaaatttcacccatgcaccctttcagtttgtgtatttcccatttgatccttttgtttttgtatatgtaagaatgtgtgtaatatatattatttacttcaaanaaaaaaaaaaaaaaaaaaaaaaatttaaaacccaaattaag

SEQ ID NO: 19619 - DNA, 291 bp, Gossypium hirsutum
  unsure (1)..(291): unsure at all n locations
  Clone ID: uC-gsronu33B157d05b1
cccacgtgnccgctggtatctcaggtggtcatatcaatccagcggtgacatttgggctgttcttgggaaggaaattgtcgttgacaagggcaatatactacatggtgatgcagtgcttgggagccatatgtggggctggtgtggttaaagggttcatggggaagacaaggtatggtgcttttgcttatttatcgacttatctgtatatttatgtataattataatgtaattcattttcttattttttttatttttagcttatattatttatatttttacttatttttattt

SEQ ID NO: 19620 - DNA, 370 bp, Gossypium hirsutum
  Clone ID: uC-gsflnu33B023a01b1
tctatgcgtccgcccacgcgtccggtttcattgtttatcagagcaagaaaaagaagggaaaatggaagggaaagaagaagatgttagattgggagctaacaagttctcagaaaggcaacctattgggacagcagctcagtcccaagatgataaggattacactgagccacccccagcacccttgtttgagcctagtgagttgacttcatggtcgttttaccgagctggaatcgctgagttcgttgctactttcctattcttgtacatctcggtgttgactgtgatgggagtccttaaggacaaaacccagtgctcaactgatgggattccaaaggattggcttgggccttttggagggaataaactttgc

SEQ ID NO: 19621 - DNA, 368 bp, Gossypium hirsutum
  Clone ID: LIB3166-028-P1-K1-G9
tcttagcaaactttgtctatgataatcatcatggcaaggaccatagaataccggcggtcatactaaaacaaagaaccataggaaccttatctttatttcacgtttattgatcttttgaaatttctgatcctaaaataatgatgtaacgctcaacgtgaatgattggcaaacaagacgcatgttaatggagagccatcatgttcacagtgaggcaaccaattgggaccgcggctcagagtcaagatgacggtaaagactacactgaaccaccaccggctccatttttcgagcctggcgagttaaccttatggtccttttatagggctgggattgcctagtttgtggcgactttacttttattgtatatc

SEQ ID NO: 19622 - DNA, 311 bp, Gossypium hirsutum
  Clone ID: LIB3147-005-Q1-K1-A7
aattgacggacggatccacgcgtactaccactcgttccttcacgcgtgagcaacgcttgcgatcaatatgtcggattgggagtagtgaaagggttcatggggaatacatagtatggtgctatgggtgggggagctaactctacgaatcatggctacacaattggagatggacgtggtgctgaaatagatgcacctttgtgcttgtttacactgtgttctcagacactgatgccaagcgcagtgccagagactttcacgttcatattctggcaccattgccaattgggttctcagtgttcttggagcactta

SEQ ID NO: 19623 - DNA, 192 bp, Gossypium hirsutum
  Clone ID: LIB3493-042-P1-M1-E6
ctgccggtaccgggctccaattcccaattccacccacgcctcacggtgtgagctaacatgttcacacagaggccaccaaatgggaccgcaggtcatgactcaaggagacagccaacactagtttgaaccaccaccgtctccatttttcgagcctggcgagataacctcatggtccttttatagggctgggat

SEQ ID NO: 19624 - DNA, 931 bp, Gossypium hirsutum
  Clone ID: GOSHI-09MAY01-C2658_1
gattttatggtgatcaccatcgacgaccccccagaaaactgtttagatttcagtgtgttatcagaggcaaatgagaatgagatccctcaagttaccattcaccccgatgaccctgttgctttgcccttctcttcgggaacaacagggttacccaaaggagtcgttttaacgcacaaaagcttgatcacaagcgtcgctcagcaagtggatggagagaacccaaatctttatttaacacatgaagatgttgtcttgtgtgtcttgcctttattccacatttactcactcaacagcgtgctcttgtgttccttgagggctggagctgcggttctgttaatgcagaagtttgagatagggacgttattggagctgatacagaggcataaagtttcggtggcagcggtggtgccgccgttggtgttgttgttggctaagaatccggtggtcgcccagtttgatttgagctcaatcagggtggtgctttcaggggccgccccgctcggaaaagagctcgaagaggctctcaggggaagggttcctcaagccgttttgggtcagggatatggaatgacagaggcaggaccagttctatcaatgtgcctgggatttgcgaagcagccctttcctacaaagtcaggttcatgtgggacagtggttaggaatgcagagcttaaggtcattgaccctgaaactggctgctcccttggttacaatcaacctggcgagatttgcattcgtggatctcaaatcatgaaaggttacttgaacgatagtgtcgccacagcagctaccatagatgtggaaggttggcttcatacaggtgatataggttacgtggatgaagatgatgagattttcattgttgatagagtaaggaaatcatcaaattcaaaggctttcatgtgcccccagctgagcttgtgtcccttct

SEQ ID NO: 19625 - DNA, 907 bp, Gossypium hirsutum
  Clone ID: GOSHI-09MAY01-C2648_1
cccacgcgtccgcccacgcgtccgggtttttttcactttctctaaaacctctttttagtgttattgttttctaagccatttttttataatcaagaactggctaacacaaaggatagcattctggaggaaaccaacaagagccaacaagtggttctcgtcctctatgaggccataaacactcgagacgtccaaaccgttcatcaaatccttgcccctgaccttgaatggtggttccatggtcctccagcccaccagtttatgatgcgcctcctcacgggagcttcatcggaccaaactttcattttcgacgttgaccctctttcggtcaccacttttgggtccaccgtcatcgttgaaggctgtgatcataaacgttcaatctcttgggttcatgcttggactgtaagtactgatgggataataacagaagtgagagagtatttcaatacttctctcactgttactcgtcttgtgaactctagccaaacaccaccattcaactacaactcatcatcgtcatcgtcatcaccgtcgcccgatcctctgattcttcatcaacggctgagattactcctgtgcattgcttttccgtttgggagagcagcttttccaatagagttgggaagtctgtgccgggccttgtcctggcaatttagtcatttccttatccctttccatgatcaggtgcagccgaatgtaggacaatataaaataaataaaaagaacttgttatgatcagttatgataaaaaaaaaaaaaaaaaaaaaaaaaaaaaaaaataaaataaaaaaaaaaaattaaaaaaaaaaaaaaaaaaaaaaaaataaaaataaaaataaaaaaaatttatttattttttataattgggggggccctttttaggggatcaaagtttccttcccctttt

SEQ ID NO: 19626 - DNA, 377 bp, Gossypium hirsutum
  Clone ID: LIB3493-020-P1-M1-E7
gcttttccaatagagttgggaagtctgtgccgggccttgtcctggcaatttagtcatttccttatccctttctatgatcaggtgcagccgaatgtaggacaatataaaataaataaaaagaacttgttatgatcagttatgataatagtataaatgataatatttgaggttaaattagctaaaaatgtggtttttaaaagatatttgagtgaataaatcgatttctggtatatttatcaaaacagtttaattttgaaaaagaggatatgaaaacgtaattattaacctaattattgatataacatcattttatatttatatattgcatacataaattattatttttttaaattaatgattgaagtaatcatcaatga

SEQ ID NO: 19627 - DNA, 838 bp, Gossypium hirsutum
  Clone ID: GOSHI-09MAY01-C2678_1
ctttactcaggttttgttacaccaagtactttgcaatttttttccatcactggattctaaagttctgaattcatacctttggaaaaaggtgctttgaggatttgaaattatacctggcaaagaattctgattgcatgcgcttgcgagcttcaatggaaggctatctggatgcttataatcccaaaacctgtgttactcctgctggaatttttgttagtcgggtagaggaaatcgggtttgaatgtgttccaacatctctcatggaacaagtgatcaactttctgaatgatgtgagggaagatctgagatgttcgatggcgaaggatattgtcacaatcaagaatgagagtctaaatatggctgcaggttctggatcgactgaagaagtatctagcgcttgtgaagagaaattggagttgcctaaagatgctcatttggacttccagaaaaagattactttctctaaacatgagaagccagacttgggttccagttccttattgtgcaagggagaagtgtacacgcaacttcttgtaatggaaaaggaagatgatcttcttgctcagttgtggaagtctagaagcttggctctggagagggtaagaggaaatcggcagcatattatcctagtagcatcattgattgatcgcatacccaaccttgctggattggcacgtacctgtgaggtttttaaaacacaggggttagctgttgcagatgcaaaaatagtacaggacaaacagtttcaactcatcagtgtgacagcagagaaatgggttcctattatagaggtccctgtaaatagtgtgaaacaattcttggagaaaaagaagcggga

SEQ ID NO: 19628 - DNA, 1231 bp, Gossypium hirsutum
  Clone ID: GOSHI-09MAY01-C2618_1
cccacgcgtccgctctttccttgtttttcatcgccgcttggcggacttctccacgttctttctttccctatttatactgtttccctcactttctttccttccaaacactcttctttccttaatctaacatggccttaactacccaaacttgtttccttcaaaatccattccttccttcgccttctctttcccagccttctgcatttcctgctccggcggctcttccttctcgaaaactccgccccatttctgtccagtgctccctggcttccgccccctctgtggcggtgacggcgtccaaggagtgcaaggtgaaatcggtcaaggctaggcagatcattgacagcaggggtaatcccacggtcgaggttgatttgatcaccgacggtctttatcgatcagccgttcctagtggcgcatctaccgggatctatgaggcccttgagctcagagatggtgacaagagtgtctatggcggcaaaggtgtgctctttgccgtccaaaacatcaatgaaattttgggtcctaagcttattggcattgatgtcagaaatcaagcggatgtagatgctgtaatgctggaaatcgatggtactccaaacaagtcaaagcttggagctaatgcaatattgggagtgtcattgagtgtatgcagagccggcgcaggggcgaaagggatgccattgtataagcatatccaggagttgtcaagaacaaaggaactcgttatgccagttccagcttttaatgtcatcaatggaggaagtcatgcaggaaataatttggctatgcaagaattcatgatactaccggtcggtgcagcctcgtttgctgaggcacttcgaatggggagtgaagtttatcacacactggggggtattatcaaagcaaaatacggacaggatgcttgcaatgttggagatgaaggtggatttgctcccaacgttcaggacaatagagagggattggttttgctaatggatgctattgagaaggccggttacactggaatgatcaaaataggaatggatgttgcagcttcggaattctacacaaaagatgggaaatatgacctaaactttaagaaacaaccaaatgatggagcgcatgtgcgttcacctcagagcttgggtgaactctaccaagagttcgtcaaagatttcccttttgtgtcatttgaaggtcccttccccccaagagggctggggctcatgggctttgcttcagtctt

SEQ ID NO: 19629 - DNA, 656 bp, Gossypium hirsutum
  Clone ID: GOSHI-09MAY01-C2608_1
gaaaatttctcaacattttctgatatttgttttacccggaactaggggtgattttcttctatccatccttaggttttgagttcatttctttgtgtctttcttttttaattcaagaatggcgaaattgagacattctcgattgcaagcgaagaaattgtcgacagtaacgcttgtattatcgatgttgtttatgttaacggtagttttattgatgcttttaggactagggattttctctcttcccattaacggcgatgattctccgcccaatgatcttacttcctatagacgcatggcttccgaaagaggaaaaggcttggggaaaagaggggagcagtggactgaagtcctttcatgggagcctagagctttcctttatcataatttcttgtccagggaagaatgtgaatacctgataaatcttgctaaaccttacatgaagaagtccactgttgttgatagcaaaacagggcaaagtaaagatagcagggtgcgtacaagttcgggtatgtttctgagaagagggcaagataaaatcatcatggacatagaaaaaaggatagccgactacactttcatacctgtgagaatggagaaggtcttcaagttctccactttgaaagtgacagaaatttgatgcacactttgcttgcttc

SEQ ID NO: 19630 - DNA, 1678 bp, Gossypium hirsutum
  Clone ID: GOSHI-09MAY01-C2638_1
gctctagggtttttctttgttttcagttcttaatactttgtttcatttcatcaaaaaaaatcccatcatgagagaaatcctccacgttcaagccggtcagtgtggaaaccaaatcggaggcaaattctgggaagttgttagcgacgaacatggaattgatcccaaagggaactacgtcggtacttctcgtgttcagcttgagagggttaatgtttactacaacgaagctagtggtggtcgttacgtacccagagctgttttaatggaccttgaaccaggaaccatggatagcttgcgtactggtccgcacggacaactttttagacctgataacttcatttttggtcaaaatggagctgggaataactgggctaagggtcattacactgaaggagctgaattgattgattcggttcttgatgttgttcgaaaagaagctgagaattgtgcttgcttacaaggcttccagatttgtcattctttgggaggtggaactggttcagggatggggacactgttgatatcaaagatcaaggaagaataccctgatcggatgatgctgactttctcggtttttccgtcgcccaaagtgtctgatacggtggttgagccctataatgcgactctatcagtgcaccagcttgtggaaaatggtgatgaatgcatggtgcttgataatgaagctctctatgatatctgttttagaactctcaagctcactaatcccagctttggtgatttgaatcatttgatttcaacaactatgagtggagctacatgctgccttcgtttcccgggccaactcaactccgatctccgaaaactagccgtaaacttgatcccattcccacgcctgcattttttcatggttggttttgcacccttgacatcccgtagctcgcaacagtaccgagccttaacgatccccgagctaactcaacaaatgtgggatgctagaaacatgatgtgcgctgctgatccccgccacggaaggtacttgacggcgtcagctatgttcagaggcaagatgagcactaaagaagttgatgaacaaatgataaatgtgcagaacaagaactcatcgtatttcgtagagtggattcccaacaatgttaaatcaagtgtttgtgacatcccacccaccgggttaacaatgtcatcaacattcatggggaattcgacgtcgattcaagagatgttccggcgtgtttcggaacaattcaccgttatgttccgtaggaaggcgtttttgcactggtatacaggggaaggaatggatgaaatggagtttacggaagcggaaagtaacatgaatgatctggtttcggagtatcagcaatatcaagatgctgttgcagatgacaatgatgaagattatgaagatgaggcaatggaaaattaaggtgattttttttataaaattcaacttcaaagaaaaaagaaaaaaaaagccaatggtgtttttggggactacttggtgatttgtcatttgatgcttaacgagccatgtgtgatttgtgttgtgaatttgatgcattttgtgaagaattttgattgaaaatatgtgattgattgtatgtaaatttggattgtaaattttccttatttgtgtgtttatttatataacaagttcactttggcttgtttatttgactataattatctatgcatttgtaat

SEQ ID NO: 19631 - DNA, 407 bp, Gossypium hirsutum
  Clone ID: LIB3083-018-Q1-L1-E3
tctcaggttttcacacgatatacttgatttgttttttaaaaaaaatcataatcaccgtaattggtccattgtctcatcttcataatctctatcaatgtcatctgcaacaccatcttcatattgctgatactcctaaaccagatcattcatgttacttttccccttccgtaaactccatttcatccattccttcccctgtataccaattcaaaaattcctttctacttaacataactcttaattcttcacaaacactccttaacatctcttgaatctactttcaattccccattaattgtgataacttttttaacccttattattggatttcacaaacactttattttacattctatgaaatccactctactaatctcaataacttctttttcttaacatttatcatt

SEQ ID NO: 19632 - DNA, 309 bp, Gossypium hirsutum
  unsure (1)..(309): unsure at all n locations
  Clone ID: LIB3083-015-Q1-L1-B9
tttttgttttttttttttttttttttttttttttttttgtnttgtttttattgtttgtttgtttttttgaaattgaatttttttaaaaaaatccccttaattttccattgcctcattttcataatcttcatcattggcatttgcaacagcattttgatattgctgatactccgaaaccagatcattcatgttactttccgcttctgtaaactccattttatccattccttcccctgtttaccagtgcaaaaacccctttttacggaacataacggggaatttttccgaaacaccccggaacatcttttg

SEQ ID NO: 19633 - DNA, 1003 bp, Gossypium hirsutum
  Clone ID: GOSHI-09MAY01-C2628_3
cccacgcgtccgcccacgcgtccgcccacgcgtccgcccacgcgtccgggaagatgctcagattgctgaaaacattgaacaatgcctcaccaacactttatggcctcaaggaaacataagtttcagtaaaactctggcgtctttcactcaactagcatccgagttacagaagaaaattttgaagatgattttggagagttttggacttgagaaatacatggatgagctcattgacgccgtaagctatgaactgaggatcatgaaatatgaaaagccaaaaaccaatgattcaacccatgtgttagctgcgcactgtgactctaatacgatgacccttttgtatcaaaacgaggttaatggactacagattcaaagcaaagatggtgaatggatcaatatgaagccttcacccaactctttcatagtcttgattggagagtcccttagcgtatggttaaatggtcgattgccttcgccttctcatcgtgtcattatgaagggtaacgaagataggtatagctggggactgtttacaaggccaagagaaggctacgtagtaaaggttccaaatgagcttgtggatgacaacaagcccatccttttcaaacctcatgactacgaagaatatttgaaattttattactccgaaatcactcaagcagctgttaaatctggaggttcagctgttcaatctgagggttatataactcgtcttaaagcttattgtagtgtctaagatttggccatcaataattattatattgtagccaattgtttggggtctttctataaatatggctaaaaataattgtttttttctacaatattaagggtaagatattaggttaatacagtttgaatatgtgtcaaatgagtgtctaataataggtttaatcacctctccatataagtcaagacctaaataactagtgtggtagaatttcatgttatgtattggactgcaaattctttttggagcattatataaaaaagtatttttttt

SEQ ID NO: 19634 - DNA, 692 bp, Gossypium hirsutum
  Clone ID: GOSHI-09MAY01-C2628_1
gtcgacaacgcgttcgccacgcgtacggccgcgcgcgcggcccagcgttcagctcaacaactccggcaatggttccagttatagatttctcaaaccaaaacctgaaaccgggcagccctgaatgggatttagtgaaatcccaagttcgagaagcattgggggagtacggttgtttcgaggcattgtttgatccaatcctggagcttcgaaaggcagtgtttggggctttgcaagagacctttgacttgcctttacaaaccaagaaactgtgtgtttccgataagccctttcgtggctatttcaatccttcatctggaccgtttcaaagcttggcgatggaagatgctcagattgctgaaaacattgaacaatgcctcaccaacactttatggcctcaaggaaacataagtttcagtaaaactctggcgtctttcactcaactagcatccgagttacagaagaaaattttgaagatgattttggagagttttggacttgagaaatacatggatgagctcattgacgccgtaagctatgaactgaggatcatgaaatatgaaaagccaaaaaccaatgattcaacccatgtgttagctgcgcactgtgactctaatacgatgacccttttgtatcaaaacgaggttaatggactacagatttaaagcaaagatggtgaatggatcaatatgaag

SEQ ID NO: 19635 - DNA, 610 bp, Gossypium hirsutum
  unsure (1)..(610): unsure at all n locations
  Clone ID: LIB3584-005-P1-K1-F12
cggttccggttttttgtttttgtcccacgcctcgngctcatgncgccgtaagctatggagggggggggggggaatatgaaaagccaaaaacgcaatgattcaacccatgtgttagctgcgcactgtgactctaatacgatgacccttttgtatcaaaacgaggttaatggactacagattcaaagcaaagatggtgaatggatcaatatggatcgttcgggcaactctttcatagtcttgattggagagtcccttagcgtatggttaaatggtcgattgccttcgccttctcatcgtgtcattatgaagggtaacgaagataggtatagcttgggactgtttacaaggccaagagaaggctacgtagtaaaggttccaaatgagcttgtggatgacaacaagcccatccttttcaaacctcatgactacgaagaatatttgaaattttattactccgaactcactcaagcagctgttaaatctggaggttcagctgttcaatctgggggttctctaactcgtcttatagctttttgttgtgtcttatatttggtccttctttcttttttttttgtttccctttgtttggggtctttttttgtttttggct

SEQ ID NO: 19636 - DNA, 590 bp, Gossypium hirsutum
  Clone ID: LIB3583-025-P1-K1-C1
cccacccgtccgttcccaattttctttttcaaattcctaaaaagaaaggaacaccctgtttttattatattcaggccagccaaaaaataaaaatcaattgctcatcaaccactctctcataaaattcattttctattttccatttactttttttcattttgctttttcttctaatttttccttattttcaataactttctctttgttgaaaactagggtttgcgctaatggtgggttttgtctgttgaaattagggtatttttgggataaatattcaattctcctgtaagggaagtgtggttgtagtggcttcccaaatatataggccttaggtttgaaggtgagtttgggttggaaaagatgtcatcaaaatatcaaatacttgacaatagaccaattgatcaatggaaggttacagagttgaaagaagaacttaagaggcggaaactgacaattcggggcttgaaagaggagttggtaagacgtttggatgaggcccttagattggaaagggaaaatgctgaaactgaggaagataatggttttaattctgatccccagcctacagatgagggagggattgaaaaggc

SEQ ID NO: 19637 - DNA, 372 bp, Gossypium hirsutum
  Clone ID: LIB3197-049-Q1-M1-H9
agctttttaaaaccctaatttcacccttgtcttttagtttctccccattttctctctcaaaatcctaaaagaaaagaccaaccagattatattgtattcaaaacagagaaaaaagaatcaattgctcatcaaccactctctcataaaaagcgttttctattttccatttacttttttttattttgtttttccttctaatttttccttgttttcgatataaaactagggtttgcgctaatggtgggttttgtctgttgaaattagggtatttttggttttcgattcttctgtaagggaagtgtggttgtagtggcttcccaaatatataagcctggtttgaagggtgaagttgggttggaaaagatggcatca

SEQ ID NO: 19638 - DNA, 694 bp, Gossypium hirsutum
  Clone ID: GOSHI-09MAY01-C102123_1
accgcacctaaccactcactcttcccggggaaggagagcattcattgctcgaagatctgcagaacaaaactcttctatttcatttttggcattagcaaaaaaagcctatcttaaatcaaagcgatggccgaccccatagaaccatcaacgtcatcgagcgacccgaattcgattccaaggccggccgctatcttacacccgcgacgcgagcctttcgagcacggtctcctaacaatccagaagctcatattcaacgaccccgtccaagcactaacccctctaaagcaaaaattcgcatccccctcaactcaacgagtcgactcggcggccctcgctgaattgctacagatctcattcgaccattcgcgtctcgtccttgaaactctcgcttctgtcctccactcggaacccgacccgctcgtaaccgccctgccggatgatgtcgactccattggtgccgatttgcgtgatctgatcctgtttttgtatattcaatcgtataagaggcttttgccgcgctcgcacaaggactccgctgcggttgccgatgtctggccttccatgtcagcattcgatggttacttgtcggccctttcgcctttgcagcttgtccgcagcaacagccgccgatttatgccatcacaggctgatgaagaggtccaccagctatcctatctacaaaagcacttggcta

SEQ ID NO: 19639 - DNA, 654 bp, Gossypium hirsutum
  Clone ID: LIB3583-022-P1-K1-D9
cccacgcgtccgcggacgcgtgggtgccattttttaataactgagcaagaatctccccttatcatgactgagcgaaggtccaacgatattcctaactttacagcctgtagtcctgcataggcttcaactgtgaaaggcgatggaacatttgagtgtaatacagtttttgatgccaaaagttcccccgaacagtcctaagccaccaaacctgaagctgatttaaagtttcttttatcgaaggctgcgttaaacttgatttccgccctagtattaatttcttgactgctatgatttttgtctatggtcaagcctgtttctcaagttccagatgagccatattccacagcagaccattcggcactgttcagaaaagaaactcttaaagatctaggtaagccagtcccttatacttagatttgtgctatgtagtacccacgagaagtctaaccttttccatacctctgttgttataggacattaccaaaaaacgtgaatactgtcttcctctttgttttcgcatcgaggacacactacattaaccggtactcatttagatcttaggctgacaagaatagaaatataattccaagaaatacgccatattgtgattgtaatcttcgtaggcatctatagaatccaaagttttttttttgt

SEQ ID NO: 19640 - DNA, 525 bp, Gossypium hirsutum
  unsure (1)..(525): unsure at all n locations
  Clone ID: LIB3585-028-P1-K1-E8
cccacgcgtccgcccacgcgtccgcccacgcgtccgatctccccttatcatgactgagcgaaggtccaacgatattcctaactttacagcctgtagtcctgcataggcttcaactgtgaaaggcgatggaacatttgagtgtaatacagtttttgatgccaaaagttcccccgaacagtcctaagccaccaaacctgaagctgatttaaagtttcttttatcgaaggctgcgttaaacttgatttccgccctagtattaatttcttgactgctatgatttttgtctatggtcaagcctgtttctcaagttccagatgagccatattccacagcagaccattcggcactgttcagaaaagaaactcttaaagatctaggacattaccaaaaaacgtgaatactgtcttcctctttgttttcgcatcgaggacacactacattaaccgttactcatttagatcttaggctgacaagaatagaaatataattccaagaaatacgccatatngtgattgtaatcttcgt

SEQ ID NO: 19641 - DNA, 823 bp, Gossypium hirsutum
  Clone ID: GOSHI-09MAY01-C102113_1
ctacaagcaccattatgagaaccaaggggtggggggatcttctgagggcactgctttggaagagaatttgcttgagtcggttctatcaacgttgatttctaaagatgaagttatgtgtggacgagcattcttggaggcaaataattcacttgaaccatgtcaaaagatgcttaaactggggggtaggttgaggccttcaactcgaaaaattttgtcactggctgtggaagtaaagacccttgagaaagacaaagaacatctcagaatgaacctttgtaaagctgaagatgaggtcaaagttctgtttgaagaaaacaacatattggatgaagcgaacaaaagattattgaggcaataccacaaagaaaaaaacctccatggttctgatgggaagcattctggtagcgcatctacgaagacaaacaagcgaaaatcaagtcccaagatatgcagtccaattgagaagaagattgatttcactgatccagattcagcaaggaagcctctctcacccttgcggcataactcccctgacttaagaatgcacaagtgaatacttaaaatctcgtgcatgataggatctaatctctttgcaacaatgatgatgtagaagtagatttacatatagcttttctgaagctgagatgtttgtagttgtgagagatagctcccaagcaccggaaggaaatccctcctccccctttttttattaaaggtgtaagtaactctttcatcttctgcttttctttagtcctgactaatctgatatcatagaatggataatagctcaagtagtgctgtagagagaaattttagcaattct

SEQ ID NO: 19642 - DNA, 1538 bp, Gossypium hirsutum
  Clone ID: GOSHI-09MAY01-C2128_1
tctggttaattttgccggctgaaaccatctagtgataataaaacaaaaaaccgagcgggtctgttttaagcaagagattcttttgcagatagagccatttggtgggtttatttattttgtgaattgggtgattgtatttattgcaggattttgtttaaagagagatccaaaaatggcagggaaaatatcggctgcatcagctcgggctcacactagaaaatctaagcaaaacacttccttcaagcttctctcagggatattcacaaagacactattggtcttgtttgtgggagctttggcatgggcttatcaggccattcagccgccgccgcccaagacttgtggctctcctgatggtccacccgtcaccgcgtctagaataaagctcagggatggacggcacttggcctacaaagagcatggtgttccactaggggcagcaaagtataaaatcgtcaaagtccatggatttgattcttgtaggcttgatgctgttcctctgtccccggaactcgttgaaaggttagggatctattttgtgtctttcgacagaccaggttacggagagagtgatcctaatccaaaacgaacagtgaagagtatggctttagatattgaagagctcgccgatcaattgagactaggatccaagttttatgtaatcggaatttctatggggggacaggtgatttggagctgcctcaagtacatccctcataggttagcaggggcgacattggtggctccagcggttaactactggtggtccggttttcctacaaacttatcgaaccaagcatatcagcaaatgttaccacaagaccaatgggtgcttcgtgtgtctcactatgctccatggcttacctactggtggaacactcaaaatggttccctagttctagtgttattgccaacagtatcgatattttttctagtgaggaccgaaaactcttgatgaagatctcgtctactaggaaccaggcggcacaagtaagacagcaaggggaatacgagtccctgcatcgtgacctgatagtcggatttggagcatgggaattctctcccttggaactggacaacccatttcctaacaatgaaggctcggtgcatgtgtggcatggagatgaggataggtttgtaccgattacgttgcagcgctacattgctgaacaactcccgtggattcgctaccacgaactacctggtgccggacatttgtttatggttgcagatgggatgtgggataatatagtgaagacacttttggtgggagaaaagtagtcttctgttcatttatggattttgccgtttgtcccattatcccccattacaaccgaacttgatgcccgcaatatttagatgagaaatgctggggttgtagtcattgagttttaaagaggagggcttattcaatagttgagatcttaaacaattggtagttacccttcaatatatttgtgtttagcatgcttgctgatggttgactgagacttaaacacatctgttagactcagttccatgaatttagatcaatttac

SEQ ID NO: 19643 - DNA, 428 bp, Gossypium hirsutum
  Clone ID: uC-gsronu33B141e08b1
ggcatttggcctacaaagagcatggcgttccactagaggcagcaaagtataaaatcgtcaaagtccatggatttgattcttgtaggcttgatgctgttcctctgtccccggaactcgttgaaaggttagggatctatggtgcgtctttcgacagaccacgctactgagagagtgatcctactccgaaacgaacagtgatgagtatggctatagatattgaagagcgcgccgatctatccagactcggatccaagaacgatgcgaccctccatcttatgctgcgacaggagagttggtgctgcctcatggtcatgactttgaggggagcgggggcgactttggttgctgaaaggttggactcctgtggttccgtgtgagccaccctcttagccaaccaatgatatccgccagtgcagccacaggaccaa

SEQ ID NO: 19644 - DNA, 933 bp, Gossypium hirsutum
  Clone ID: GOSHI-09MAY01-C2088_3
gtgttgcatcttttgataattgcgagggaatcgccttcaaaaatgagtgactgccatcccttgtcaatacctattttgactgcggtccaacatgccatggcttcaacagcaaaaggagacgaaacgtcatcgtgaattttttagtaggataaaagggcatttccttccgaatctctacccacaatacctgaagctgaccgattttgggtttctttatatgcaccgtcaaagttgatcttgacaaactccctctcccaaagtgcgcagtagaaaatctgaccctcgcgtccgcccacccgctcttccgcccggcacattcccgaaagacatgattcattgtttcagctctttgaccacattgaggacaacttgtattggctgctagtttcctgtgttgtaaatttacctttgtaggcagatagttccatgacagtctccatatagtagcatttactttagatggtagatttagactccagagttgtttgtaaaattttgtttagatggtttgtaaagcatacgctctaggattttcatccattctctataattgtttataagctcttcggactgtgaattcacccgacggctcgcctccccaaataagaaaatcttcatgaggtgtccgtgccagaggaatttggagtattcgtgctgcatcaacttctgcgaaggaattatttctgtacattcatggagaccacccacccctccgccacactcgaagcagaacgtcggtaacttttcatacttgaatgggatccaacatttatgacctgtaccagtcgaaacaaatatacccctgcgaaggggtttctgcacatttaattttattctaaggcgacagaattcacccataaaaaaaaaaaaattaaaaaaataaaaaaaatttaataaaagtttattaattattttttaatttaagttttttgg

SEQ ID NO: 19645 - DNA, 977 bp, Gossypium hirsutum
  Clone ID: GOSHI-09MAY01-C2088_2
atctgatattattcaggccaaaaatcgggttctgaatatcatagacgggggttcctaccattgatcgatcttgtccttttgagatgcatctttcgataattgcgagggactcgccttcaaaaatgagtgactgccagcccttgtcaatacctattttgactgcggtccagcatgccatggcttcagcagcaaaaggagacgaaacgccatcctgaatttttgagtaagataaaagggcctttccttccgaatctcgacccacaatgcctgaagctgaccggttctgggtttctttatatgcacctgccaacgctgatcttgacaaactccctctgtggcccaaagtgtgtagtagaaaatctgaccttgacgagggttgagctgctctaccgcccaggtaagccactgtacaaagtcctcacattgattcgtcaaaatattctgaaatgataatgctctccatatatcaactgtgacaggacattcccgaaagacatgattcattttttcagctctttggccacatcggggacaacttgtattggcagctagtttcctgtgttgtaaatttaccttcgtaggcagatagttccataacagtctccatatagtaacctttactttagatggtagatttagactccagagttgtttataaaattttttatagatggtttgtaaagcataagctctaggattttcaaccattctctgtaatagtttataagcacttcggactgtgaaatcacccgacggctcgcctccccaaataagaaaatcttcatgaggtgtccgtgctagaggaattcagagaattcgtgctgcatcaacttctgcgaaggtactcataatcagctcttttttccatcttctttcattactgtcaattagctcacttacttttgacacgctcatagaagttaactctgatgaaattttaaaatcaactgaatctggaatccaagcatcgttaatgg

SEQ ID NO: 19646 - DNA, 1146 bp, Gossypium hirsutum
  Clone ID: GOSHI-09MAY01-C2088_1
cccacactttctctctcaccatttcgtcctctgagacttctagtttggctccctcatcctatcttgcgcgtgcgggatcttcaccgtattcgcgactcccatcttcaggtaaacttcctctccacttcttagcgttgccgttgctagaatatgagcaagattgttcgcagatcgtgatctatgttggaatctgatattattcaggccaaaaattttcttctgaatatcatagatgtatgttcctaccattgatcgatcttgtcctttggggtcgcatcttttgataattgcgagggaatcgccttcaaaaatgagtgactgccatccgttgtcaatacctattttgactgctgtccagcatgctatggcttcagcagcaaaaggagacgaaacaccatcgtgaatttttgagtaagataaaaggaccttttctttcgaatctcgaaccacaatgcctgaagctgaccgtttctggttttcttttttcttttgcttccttccttattttttcttgtttttctttcttttttatctttcaattatgtttcttctccttatttttcctttactttttttcatcttttttttttcttcttcttttcatttctctattttcatattcttattctatctttattgttttatttcattattctttcatctcttatttttctttcttactattttttttcttatttattttcttcttctttatttttttcttcgttttttttaactttatttcctttttatacctttttttcatttttttttttttctttatacatcctctatatactattcctataactttttacttcttttataatttctttttatttttctcacctatttctctttattttttatatattttctacttctcttatattctcttttcctttaattttacttctcttcatttctatcttttttatttttattttctcttctctaattttatattctctatttattttctctctattatctttttttttttccttacattcttttattttctttattcttttctatcttttccttaatttttctttcattttttttatatcatttcatcatttactctatttctatttatctactttatttattttttctcatttttctcacccatttttttta

SEQ ID NO: 19647 - DNA, 561 bp, Gossypium hirsutum
  Clone ID: LIB3828-033-Q6-N6-C3
aaccacactaattttatattaattttttataaatatatttgttagataaaattttcatccaagtgtactataatctaagattatataaaattaagaaaaaaaccctagaagccaagagtgctatccctggtatcctagcgagaacagtggctgctgcggcttgggatgaaagaaagtggtggcaacgacgggtttgggggagacgagatctccctattagcagaggaactcattcaactgtcggtcaaaagctcgatgttggaaccaaaaggtaaaacatctctgatttgttcgacgttctgcttcgagtgtggtagagcgggacatggtctccatgaatgtacagaaataattccttcgcagaagttgatgcagcacgaatactccaaattcctctggcacggacacctcatgaagattttcttatttggggaggcgagccgtcgggtgatttcacagtccgaagtgcttataaactattatagagaatggatgaaaatcctagagcttatgctttacaaaccatctatacaaaattttacaaacaactctggagtctaa

SEQ ID NO: 19648 - DNA, 414 bp, Gossypium hirsutum
  Clone ID: LIB3148-052-Q1-K1-F12
cccacgcgtccgctttactttagatggtagatttagactccagagttgtttataaaattttttatagatggtttgtaaagcataagctctaggattttcaaccattctctgtaatagtttataagcacttcggactgtgaaatcacccgacggctcgcctccccaaataagaaaatcttcatgaggtgtccgtgctagaggaattcagagaattcgtgctgcatcaacttctgcgaagagcaaatcagagatgttttaccttttggttctaccatcgagcttttgaccgataactgaatgagttcctctgctaacaaggagatctcatctcccccaaacccatcgttgccaccactttccttcatcccaagccgcagcagccactgttttcgctaggataccagggatagcact

SEQ ID NO: 19649 - DNA, 358 bp, Gossypium hirsutum
  Clone ID: LIB3145-042-Q1-K1-A10
aatcgccttcaaaaatgagtgactgccagccgttgtcaatacctattttgactgctgtccagcatgctatggcttcagcagcaaaaggagacgaaacaccatcgtgaatttttgagtaagataaaaggacctttccttccgaatctcgaaccacaatgcctgaagctgaccggttctgggtttctttatatgcactgtcaaagttgatcttgacaaactccctctgtggcccaaagtgtgtagtagaaaatctgaccttgacgagggttgagctgctctaccgcccaagacattcccgaaagacatgattcattttttcagctctttggccacatcggggacaacttgtattggcagc

SEQ ID NO: 19650 - DNA, 357 bp, Gossypium hirsutum
  Clone ID: LIB3145-054-Q1-K1-B6
cccacgcgtccggtgacaggacattcccgaaagacatgattcattgtttcagctctttgaccacattgaggacaacttgtattggctgctagtttcctgtgttgtaaatttacctttgtaggcagatagttccatgacagtctccatatagtagcatttactttagatggtagatttagactccaaagttgtttgtaaaattttgtatagatggtttgtaaagcataagctctaggattttcatccattctctatcttacatgttaaactctaatacattttttaaataattaaaattataattatgtgtattattatattaatgggcggccgttttaaaagatccaagctttcgta

SEQ ID NO: 19651 - DNA, 851 bp, Gossypium hirsutum
  Clone ID: GOSHI-09MAY01-C102083_2
gttggatctgtccgtgtatccggtcctgcaagaaacatgcctgatggtccaccaccagctgctacaatagggcctggctactctggtggatttgaatctttcaggggtggtggtgcacatgtgtatgactatgaacctcagaatttttctgttcctccagctgctgctagatacttaaatatgaactgtgctgttgaagctaaagttccggaaactgtgtcaagttctgcagtaggcaccagaggaagtactgtttttattagtagtgaggtttcaagggcaatcctaaagcttgatgatcctcaaactggtggctttgaagagttccctcgatcttctgagcatacaagtgctcagagcatttttcagtcgttcatggcttcttctggacaaagcatgaatgcacaacaggattcatatccaaatacgaacatccaccaaagttcctatcagaaaatgagtgctcaatatagcccctatcaaaatgtgagtgctcaacagaactattcaaacaggcaagctcatcaaggcccatatcataatttgactgtgcagcaaatcccctatccacttaattctcagcaagggccttacgccaacttcaatgctccaccaagtgcttaccacaattacagtgcacagcaaggctctaacccgtattaaattcaataggctcatttttgtactatatttcaactttccgaatattagagattacataggccgtcacattactggatacttttgattcaattgttaagtgaaagacgtattggtgaagttgtaaacttagacctgttcttgctatgtttggacttgtgtgtagataaatcaaatgatgattgtttgac

SEQ ID NO: 19652 - DNA, 643 bp, Gossypium hirsutum
  unsure (1)..(643): unsure at all n locations
  Clone ID: AI055313.1
gaaaatgagtgctcaatatagcccctatcaagatgtgagtgctcaacagaactattcaaacaggcaagctcatcaaggcccatatcataatttgactgtgcagcaaagcccctatccactaaattctcagcaagggccttacgccaacttcaatgctccaccaagtgcttaccacaattacagtgcacagcaaggctctaacccgtattagattcaataggctcatttttgtactattggactgtggttnggtgtttgactcacgtttgaggatattggaatctgattattttgttgaagcaattagatctcttttcaattcatatagatattgttaagatagtgacattngttatcctattttttgtttccttccctagactcaaaattggtattgcatttgtcccgtgtcaaataggcaaaaaggttaataatggtaaaatcccatcaaaaaccgatatagcatatatgttatggcactgggagaaaagaaagggttgaccttttaatatttgtgcttttcttcatttgtacaggggtagtacatgtcataaatcataaaagctatctataatatgggaccaaaatgatagctagactaccatctgatatactttgctatctcatgagaagggtctcactt

SEQ ID NO: 19653 - DNA, 1147 bp, Gossypium hirsutum
  Clone ID: GOSHI-09MAY01-C2058_1
cgtcgttctaaacgccggcgcctccaccacccgtgccgaccgaaagcattacaagaaaacgcacagcttttaaaccatgacgctaggcttcagcttttctttgcctgtaatggttgtcgtttcggccatcgcgttcgtctatttctgtacggtctttgttttcattgatcgctggtttggtctaatgacctctcccggtatcatgaacgccgtcgctttcaccggtgtcgccgtcatgtgcgtgttaaattacgtctttgctatcttcatggatccaggtcgggtcccatctaatttcttgcccgacattgaagattccaaggttcctatccatgagatcaaacgcaagggaggggacttgagatattgccaaaagtgttctcattttaaacctcctcgtgcacatcattgtcgtgtttgcaagatatgcgttttgagaatggatcaccattgcacttggataaataattgcgtcggccatgccaactacaaggtcttcttcgtctgtgtcgtatatgcagtaattgcttgcatctattctctggttttactcgtgggcagtctaactaatgattcccaaaacgacaagcagcaaagtgcagactctttcagaatcttatacgttatttccggattgttgcttgtccccttgagtatggccttaagtggtctcttaggttggcatatctacctcattttgcaaaataagacgacaattgaggggtgagagccacatggcttcaagagagagcagggaacgtctataagcatccatatgatctcggtgcctacgataatctaacaacggtattgggttcaaatatcatttgctggatatgccctacatcaaggcacataggtaatggtctccgtttccgaacagcctatgatggcttaccagttgcatcaacatcaaaatgaagtttgcgtgttacttgtggtaacatgagggcttcaaatatccccagttttcaagttgtagcctataataccgtcacctcctggtagtccaggacaaagaagccccggtggcgccagcaagtgataatggaggaggatctgaaaaaggacctatagcaaggctgtttcaaaaagtaatttagaaataggattaatggggttttttactaatatgtcataacaatgt

SEQ ID NO: 19654 - DNA, 476 bp, Gossypium hirsutum
  Clone ID: GOSHI-09MAY01-C102073_1
cggtctcgtgggcggacgcgtgggaaaaaaaatatatagcaaaagacacttcactcaaaaaaacagaagacaaaggcgaaaccaaaagtcgagatccccaaattttggttacagtgaaatccgaagatccatcggttcaatggcgcaacttgaagaaatagatgaatcgaagaataagaacaataagcagcagaaacgaaatcatggatcaaccatgtttttcgtaatggtggactaccttttcctgctcatcttcttcggtttcctcgttttcattctctttaagatacttcatttcttctgattattcttcttcaggttactcttttatttcttttatcaattacccttgtttttcgccatttcaattcaacaaaaaatgtattgtacttcttttcgtgatctttttgcctgcacattcaattaactgcaactctttcactctttcaaaatctgagacattgatttttttctat

SEQ ID NO: 19655 - DNA, 408 bp, Gossypium hirsutum
  Clone ID: GOSHI-09MAY01-C2048_7
gggacttgcaattacatttgtctcatcaacatcagactctgatgtccttaatcaggttcaggaaaggtttgaggtggatataaaggagcttcctgagcaaattgatacttcgacatacatgccatcatgatagaagttgttgctgctagacatccaagcacctttttggctggctgatttcgattcggagatgaaagggctttgccagaactgagaattgttgtatactatagggtgtttttataaagtcttgatgttaataggtgagaaacatctgctcaaattatcatttttgttctacgtactactgattattttaattgttgcaattaagactgaatctgtagtgtacttggtggattgaaattggattggggttactctcctaattttgggaattttcttatc

SEQ ID NO: 19656 - DNA, 452 bp, Gossypium hirsutum
  Clone ID: GOSHI-09MAY01-C2048_6
cttccttgccccttggtttaaaattttccaattttaggtttgcatattaagatctaaccttttcaggtgcagacgcactctcagatcccagctctagaacttcaattctctccctaaaagtttggagacaaatgggagaaacacgagacaacgatgcctacgaggaagagctcctcgattacgaggaagaagaagagaaagcccctgactctggcactgctaaagtcaatggcgaggccggcaagaagggctatgttgggattcacagctctggattcagagacttccttttgaaaccagagcttcttcggccattgtcgattctggattcgagcacccttccgaagtgcaacatgaatgtattccccaagctatactggatttggatgttatttgccaagctaaatcaggaatggggaagactgcagtttttgttctatcttcattacagc

SEQ ID NO: 19657 - DNA, 557 bp, Gossypium hirsutum
  Clone ID: GOSHI-09MAY01-C2048_5
cccacgcgtccgggaggggcataaaataattctagtggccacagatttggttggagggggaattgacattgaacgtgttttcttgccctccaactccgataggccagattctgctgagacataccggcccagggttggtagggctggtaggtttggtaccaagggtctcgcaattacatttgtttcatctgcttcagattctgatgtgctcaaccaggtccaggagaggttcgaggtggatataaaggagcttcctgagcagattgatacatctacatacatgccatcataatgaagttgcttacagtcggcaatactggagtcacaggcctaaatttgcggggtttccggaggccatgtggcttctgactgctgcttaaaagagtgttgtagcctattagtaggatttgatgtcaatcaatctgtaagggtaaattacctttttgaggacatctttttgccgctattccagagaattgcatgtcataagatataatttggagcataactgtcttttaaatctgtttccttatatgtagtggtagtaattgtggagt

SEQ ID NO: 19658 - DNA, 1044 bp, Gossypium hirsutum
  Clone ID: GOSHI-09MAY01-C2048_4
cccacgcgttcgcccacgcgttcgcccacgcgttcgcgagtactcaaaatatatatatattggtcacatttaaagagctaacccttttttgctttgcagacaccgcaaaccctagccctagtaccttcaattttctccctgctttagttaagttcaaagataaatgggagaaacaagggacaacgatgcttacgaggaggagcttcttgattacgaggaagaagaagagaaagcccctgactctgtcactgctaaagtcaacggcgagggcggcaagaagggctatgttggcattcacagttcacgattcagagacttccttctgaaaccagagcttcttcgggccatggtcgactctggatttgagcacccttctgaagtgcaacatgaatgcattccccaagccatattgggtatggatgtcatttgccaagctaaatcagggatggggaagactgcagtttttgttctatcaacactacaacaaattgaacctagtccaggacaagttattgcccttgttttatgccatacaagggagttagcttaccaaatttgtcacgagtttgagagggtcagtacttatctgcctgatattaaggttgttgtcttctatgggaagtgtaacattaaagttcacaaagatctgctgaaaaatgaatgcccccacattgttgttgggacacctggaagggtgattggctctggctagagacaaggacctttcattgaagaatgtcaggcatttcattcttgatgaatgtgacaagatgcttgaatcactcgacatgaggagagatgtgcaggaaattttcaagatgaccccccatgataagcaagttatgatgttttctgctacgctcagcaaagaaattcgccccgtttgcaagaaatttatgcaagatgtaatattccgtggccaatactacttgaatttagaaagtatctttttaattcattcccagctttcaacaagagttatgtaaaattttaatcttggtaggtccatcactatatgcttgctactggtgttgcttgggtgca

SEQ ID NO: 19659 - DNA, 623 bp, Gossypium hirsutum
  Clone ID: GOSHI-09MAY01-C2048_3
aaagaattcttgtggcaacagatttggttggaaggggaatcgacattgaacgaggttggtttgtcatcaactatgacatgccagattctgctgatacatacctgcacagggttggtagagctggtcggtttggcaccaagggtcttgcaattacatttgtttcatccgcttcagattctgatgtgctcaatcaggtccaagagaggtttgaggttgatataaaggagcttcctgagcagattgatacatctacgtacatgccatcataaatgaaggttcattcaacaataccagtctcgggccccaaatcatgaatcggttagtgtggttgcggatgtgtatctgtttgtaaactaatgtgtaacgccttttaaatcagttgcttgggagggagcggcagatgcactatcacgtggttttgaactgctgcttaaaagagtattgtagccttataaaaactcaattgaggatttagctatatcgataggtaaaacttcccttttaaggacatttgttttttcacaattctttagagttgcatgttatattatcttttatattgaatttggagcatggcctcttaaatctaatttttggtcaaatatttgagccatgatttactc

SEQ ID NO: 19660 - DNA, 662 bp, Gossypium hirsutum
  Clone ID: GOSHI-09MAY01-C2048_2
gttttaaggaggggcataaaagaattcttgtggccacagatttggttggaaggggaattgacattgaacgtccattgtcatcaactatgacatgcctgattctgctgatacatacctgcacagggttggcagagctggtaggtttggcaccaagggtcttgcaattacgtttgtttcttctgcttcagattctgatgtgctcaaccaggtccaagagaggtttgaggtggatataaaggagcttcctgagcagattgatacatctacatacatgccgtcataaaggaagttcgttctgcagaagcctagttttctagtcgaaatcaggaattgattgtgtggtttgctggaggccacgtgttgttctcagatatggaatgcttttaaatcagttgcttgggaggagcagcagatgcaatgccggtcggttttaactttcttattgtagccttgttaagaacttaaattggtattcagctttatcttttgggaaaattttcccttttgaggacattgttttcactatgctagagttgcatgctatattttagtatctgttatagtttggagatagtaactacctatctgtattaattagattagaagctcattatgatttactaattacaaaaatgatgatcacgggttttgttttggatgtt

SEQ ID NO: 19661 - DNA, 1417 bp, Gossypium hirsutum
  Clone ID: GOSHI-09MAY01-C2048_1
tctctttgacttaacctaaccccaaattccctcctctttcaattaacttctcagaagaagggagaaacgagggacaacgatgcttacgaggaagagcttctcgactacgaggaagaagaagagaaagcacctgactccgtcactgctaaagtcaacggcgaggccgggaagaagggctatgttgggattcacagttcaggattcagagacttccttttgaagccagagcttcttcgggcaattgttgactctgggtttgagcacccttccgaagtgcaacatgaatgcattccccaagctatactgggtatggatgtcatttgccaagctaaatcagggatggggaagactgcggtttttgttctatcaacattacagcagattgagcctactccaggacaagttattgcccttgttttatgccatacaagggagttagcttaccagatttgtcatgagtttgagaggttcagtacttatctgcctgatattaaggttgctgtcttctatggtggtgtcaacatcaaagttcacaaagatctactgaaaaatgaatgcccccacattgttgttgggacacctggaaggatattggctctgactagagacaaggacctttctttgaagaatgtcaggcatttcattcttgatgaatgtgacaagatgcttgaatcacttgacatgaggagagatgtgcaggagattttcaagatgaccccacatgataagcaagttatgatgttttcagctacactcagcaaagaaattcgccctgtgtgcaagaaatttatgcaagatcccatggaaatttatgttgatgatgaggccaagttgacccttcatggtcttgtgcagcactacatcaaattgagtgagctggagaaaaatcgcaagttgaatgaccttcttgatgccttggacttcaaccaagttgttatctttgtcaaaagtgtgaaccgagcagctgagttgaacaagttacttgtggagtgcaattttccttccatatgcatccactctggcatgtcccaggaagaaaggttaactcgctacaagggtttcaaggaggggcataaaagaattcttgtggccacagatttggttggaaggggaattgacattgaacgtgttaacattgtcatcaactatgacatgcctgattctgctgatacatacctgcacagggttggcagagctggtaggtttggcaccaagggtcttgcaattacgtttgtttcttctgcttcagattctgatgtgctcaaccaggtccaagagaggtttgaggtggatataaaggagcttcctgagcagattgatacatctacatacatgccgtcataaaggaagttcgtgctgctagacagcctagcactctttttggctggctttttctagtcgaaatcaggaattgatt

SEQ ID NO: 19662 - DNA, 323 bp, Gossypium hirsutum
  Clone ID: LIB3146-018-Q1-K1-E5
accagatcggccatgacgtggacaggtggagtacttatatagccaatattaacgtggttgtgtgctttcaggaggtgaataatcagggaccgaatgtgtcaccgaaccacgagagtccttgcattgagaaactggcaccaataatgagatgggctattgcatggatcatataactaaaccagtagatgtaaaggaaccatactaaaagaacttgacgaggtgcctatgtaccaggcatgcaggcaggggtgcgccgagatcttcaagatgactccacatgataagcaagttatgatgtttacagctacactaagcagggaaat

SEQ ID NO: 19663 - DNA, 508 bp, Gossypium hirsutum
  Clone ID: uC-gsflnu33B061d07b1
gttttcgtttgcagtagtgactctccaaaccctaaccctataaacctactagttctgcccctcttttaattaatttctctgaaaaaatgggagaaacaagggacaacgacgcttatgaggaagagcttctcgactacgaagaagaagaagagaaagcccctgactctgtcactgctaaagtcaatggcgatgctggcaagaagggctatgttgggattcacagttccggattcagagatttccttttgaagccagagctgcttcgagccattgtggactctggatttgagcacccttccgaagttcaacatgagtgcattccccaagctatactgggatgggatgttatttgtcaagctaaatcagggatggggaagactgcggtttttgttctatcaacattacaacagattgaacccacaccaggacaagttgttgcccttgttttgtgccatactagggagttagcttaccagatttgtcacgagttcgagaggttcagtactta

SEQ ID NO: 19664 - DNA, 368 bp, Gossypium hirsutum
  Clone ID: LIB3196-028-P1-M1-G12
cggacgcgtggggtgctaacctttttcctttgcagactctctttgaacttaatcctaaaccccaaaattccctcctctttcaattaacttctcagaatgggagaaacgagggacaacgatgcttacgaggaagagcttctcgactacgaggaagaagaagagaaagcacctgactccgtgactgctaaagtcaacggcgaggccgggaagaagggctatgttgggattcacagttcaggattcagagacttccttttgaagccagagcttcttcgggcaattgttgactctgggtttgagcacccttccgaagtgcaacatgaatgtattccccaagccatactgggtatggatgtcatttgccaagc

SEQ ID NO: 19665 - DNA, 387 bp, Gossypium hirsutum
  Clone ID: LIB3166-024-P1-K1-B4
ggtttggcttaagcttggggccttttttaaggggttggatgtttccttgtttggagcctgtgttgttttgtaatagaatcattgcttttgaggggaatagcacgtacttgctgtgattaagtaatgaatctgcaaggaggcaagtcagatggaccataatctcaaatcaagcgatgtgcatccataattcatttcgtactggattccatttgcttgaggaagctcgctaatatgacttactgtcacatttgttcctttcagccaatggaaatttatgtggacgacgaggccaagttgacccttcatggtcttgtgcagcactacatcaaattgagtgagctggagaaaaaccgcaagttgaatgacctccttgatgcattggacttc

SEQ ID NO: 19666 - DNA, 325 bp, Gossypium hirsutum
  Clone ID: uC-gsflmaxxa028c05b1
tttgactcgtgggctttgtttaaaaattttcaaatttatttttgcatattaagatctaaccttttcatttgcagacgcactctcagatcccagctctagaacttcaattctctccctaaagtaaacctcccaaatatctctgttttttttgtttgaaaaccctaaaaccctaattgtttcgagttgctatcctatttaaaaccctaatattttctgcttgatgtagagtttgtagacaaatgggagaaacaagagacaacgatgtctacgaggaagatctcctcgatttcgatgaaaaagaagagaaagcccctgactctgtcac

SEQ ID NO: 19667 - DNA, 539 bp, Gossypium hirsutum
  Clone ID: GOSHI-09MAY01-C2398_1
ctcacgcgtccgagcctcctatttccccaacctcagcgcaagctactcatcgtgcgcaatacaaaccaccatcgtcactgaccgcgatcggcgtcaattcgattttaaaggcaaggagagatgtgggtattttacctgatctcgttgcctttaaccctaggcatggttgttttcaccttgaggtacttcgctggccctgatgtccctcgttatgttctttttaccgtcggatacgcttggttctgttctctctccatcatcattcttgtgcccgccgatatttggacgacgatatcgaagccgggaaattataatgaaaatggaggaatttcattcttttggagttggtcttattggggtacctttctcctcacctgggctgtagtgccccttattcagggttttgaagatgctggagacttctctgtgactgaaaggttgaagactagtgtgcatgtcaacttagtcttctattcagtcgtgggttctataggcctttggggacttattctcctcattacaatgaacaggaactggag

SEQ ID NO: 19668 - DNA, 532 bp, Gossypium hirsutum
  Clone ID: LIB3583-061-P1-K1-F6
cccacgcgtccgcccacgcgtccggatatcgaacccagataatgatattgaaaatggaggaatctcgtttttttagagttggtcttattggggtacttttctccttacatgggttttgaagatgctggagacttctctgtgactgaaagattgaagactagtgtgcgtgtcaatttagtcttctattcagtcgtgtgttctattggccttgtaggacttattctcctcatcttgatgaataggaactggttgcccaagcaacatccaatcagatgtccaagcgtgatcctttgagaccatacatggatgttattgataatatgttagctcaaatgtttagggaagacctgtcttttaagccacaaggtggtctgctaggagaaaacgatatggactatgattcagatgagaaatctatggcaacactcagacgtcatcttcggctagctcgagaagagtattattggtataaaagtgagtacatgacttatgttatagaggcccttcagcttgaagatacagtaaaaaacta

SEQ ID NO: 19669 - DNA, 652 bp, Gossypium hirsutum
  Clone ID: GOSHI-09MAY01-C2388_1
cggaaaacccgggccgagcggcacgacgtccggttctaggtgttcttcccagcaaacctttatcagggaaagggcgtgcagagggcagaacgccgcgccgagttgataaggtctagttgatcgttgctgttttatatgcatcgatgctgccttacctgtgctggaccagtatgtggaacacagggtagactgcatgatagatgctggtttgctcgatgaagtgtatgacatttacaatccaaatgcaaattatactctgggtttgcgacaggccataggtgttcgagaatttgagaattttcttcaggcttacttttctgacagcttggatgatgagacgagtgattcttctgatggaactcttctaaagctgtcaacaaggattgatgataaattgttcaaagaaaatactaggggaatactaatttcctcttgtgataacccccaaaaagttatgttagaagaagccattgacaaagtaaaagcaaacacccggagacttgttcgtcgtcaaaaaaggagggtcaatcaacttcagacattgtttggatggaatattagttatgttgatgcaacagaatatatatcaaagaaatcagatgagtgttgggcagtgcaagtggttggatctgctgtgaaaaatgatagatca

SEQ ID NO: 19670 - DNA, 1003 bp, Gossypium hirsutum
  Clone ID: GOSHI-09MAY01-C2358_1
gtccaagaacccgtcttttgtaagttacaaagatgagagagcttggtatcataattattctgcaagcaagttaaatatgattgttttcccatttgtggttaaacaaaatcaaaatctttaagcaaggaatcagttcgaaggtggtggaaaaattatattcgacaaaagcttttcccgcaaaggtttgattcttatagataagtttcaatgcccaacaacaagtctaaacccagaccaagccgaatgtctgtttacctttacattcccaatattattgggtatataagaattctgttgaattgctatgcttttgctatatggttttccagcaaaagactttttgctgctctgtattttctaagctttgtttgtgatgctgtggatggttggtgtgctcgcaaattcaaccaagcttcaacatttggagctgtcctggacatggtaacggataggattagcactgcttgtctactggttatactttctcaagtgtataggcctagcttggttttcttgtcattactagccctagatattgctagtcactggctgcagatgtacagttcatttctagttggtaaggctagtcataaagatgtaaaggacagctccaattggcttttcaagctttactatgggaaccggatgtttatgggttattgttgtgtggcttgtgaggttctttacatagccttatttcttatctcgagtaaacatactgaaaatttgatgggatgttgtagtgacgaccctgaaacagggttcacctctttctcttcttgttgctataagcttattgggatgctcaatcaagcaggtcatcaatattatacagatgaagacagccgcagatgcatgtgtgctttacgacactgaaaaaaagcagaagcgataactgattcgagtttcgaagagcagagttttgtttctggcatcgactgcttaaatattaaggtatagatgttgacactgatgaatcacattcccaataaatattttgttc

SEQ ID NO: 19671 - DNA, 297 bp, Gossypium hirsutum
  Clone ID: LIB3166-047-P1-K1-C10
gcattttcttcatagaaatccacgctccacctattaaaacttcaacttttggcggttccaggtttgattcttatagataagtttcaatgcccaacaacaagtctaaacccggaccaagccgaatgtctgtttacctttacattcccaatattatttgggtatataagaattctgttgaattgctatgcttttgctttatgcttttccagctaaagtctttttgctgctctgtattttctaagctttgtttgtgatgctttggatggttggagttcttcgcaaatttaactcaagctt

SEQ ID NO: 19672 - DNA, 517 bp, Gossypium hirsutum
  Clone ID: GOSHI-09MAY01-C2348_1
tactaaccaaaaaatccaacgacatagataaacacttcactttttccgatcgtcaccctttcttcgtctccgccgtctcctgaacttgacgtcatcatcgccgccatgggtgccactgaacatgtggtggtggaaggcgaaaataaggaaggaaggaaagaagatggaaaagaaagggtggatgaggtggtcgagcacgagaaggagggagagaaattggacttggagaaaggaccagttggagctgttgttgtcgaagacagcaagggcttagagagatttgaagacgaaagagaccattttcatgtctcaatgttgcagaggttgcaccctacaaatcctttaaggattgtcagtaatggtggtactagagtcgctacgccttccccttctcagtcttctcgggttcagcctactccttcttctctcgttcttagcctcgttcgacaccgaccccacaaccatcagtgacaacactgaactcaagaagattcaccaacaaactagccctattact

SEQ ID NO: 19673 - DNA, 606 bp, Gossypium hirsutum
  Clone ID: GOSHI-09MAY01-C102313_1
cgatacccaattactagggtttcggccaagtagccctcctccatccaatccggccattcaaccatcagttcaccattaaaattggtggatgatgcagaggcgccccttatttccctcaaatctaaactcatggcatgttttcactctgaaatccccatttcaaactccgatttcaacgaaggaaacaaggatctcgttggtgcatctaggttcgaccgtacagaggaacgaggggaggcgcgcgtgaaggaggccgtgcggggaaccgctcatgggactcccgaccctttggtactattctggcatattccagaagtttcttggctgctgagtttctttgggttctgttgggtttcggatttggctattagaatcgggtctgggtattgagtggattgcttgggttttaatttaagcccaaaattctgtacatgggttaggattattgggttatttgggctaggtttattgggttaaggattttggatataattgttaggctattaagtttgggttaatcggtttgggtttaatttaggcccagaattttgtaaatggacgttggcctcataaacactttagtttatttatttctatttgatacac

SEQ ID NO: 19674 - DNA, 825 bp, Gossypium hirsutum
  Clone ID: GOSHI-09MAY01-C2328_2
cggacgcgtgggatctcattgttgatgttcctgtttttgggaggttaactttacctcttgagaaaactggagagatcctataccttacaagccggatatcgatatggagaagatacactttgagagattctcttgggaggaaactatagcagttcttcatttgaaattggagaatatgaatgactttgacttgggactcaatgcccttgactacgtcggccgcccgtccgccctcgcctccggatctgcagaacttgaaaaatctgcaaagataggcaaaaacggaatcagttatattgagattcctatctctttcaggcctaaggatttcggatctgctctgtgggacatgattaggggaaaaggaacaggttactctatgaaaggtcacatcaacgttgacactccgtttggagctatgaaattacccatcagcaaggagggtggcacaacccgccttaagaagaatagggaagacggtggtgatgatgatgatgatgatgaggattaaagcaaaagatcaacagggatggtccccttgagcttcttttgttttgttacagagttcattgcaataatatactaatggtgtgtggaatttaatgtttagattgtgacggtaacatgtactacaattatggaaaagttggtacctataattatgcatattatgtattatgtatgtatgcatgaatgggatgctgtgaccctggtttttattttgtctagcagcaccccccccccctcttagcgaacctcttgaatttgcagttgaataaactgttattttgcttttaaaaaaaaaaaaaaaaaaaaaagggcggc

SEQ ID NO: 19675 - DNA, 1821 bp, Gossypium hirsutum
  Clone ID: GOSHI-09MAY01-C2328_1
tgaggatttattaattactttgcgtttatatgggcccacgcgtccggttgaaaaggagaggtggataattttctctttcatttccccaatcttatataacccccctggccagtgtccgctctcttcttatcacaaaacatataacaagatcagaataagaaaaacgctgcttgcaggtatgtcatcatccgataagccagaattagttgaaagggatgttaaggacaaggtggatgacaaagaagacaacagtggatttatagacaaggtcaagggtttcattcatgacattggtgagaagatcgaggaaacaatcggctttggcaagcctactgcagatgtagctgagattcacctcccttgtatcaatcttgagaaagcagaaattgtcgttgatgtcctcataaagaacccaaaccctgttccaatccccctcgtcgacattgactacctcattgaaagtgatggtagaaaactcctttcaggcttgattccagatgctggaaccatccatgctcatggtgaggagactgtcaaaataccagttactttgatatatgatgatatcaaaagtacatatgatgacattaagcctggcagcatcattccatataggctgaaagttgatctcattgttgatgttcctgtttttgggaggttaactttacctcttgagaaaactggagagatccctataccttacaagccggatatcgatatggagaagatacactttgagagattctcttgggaggaaactatagcagttcttcatttgaaattggagaatatgaatgactttgacttgggactcaatgcccttgactatgaggtctggctatctgaggtcagcattggatctgcagaacttgaaaaatctgcaaagataggcaaaaacggaatcagttatattgagattcctatctctttcaggcctaaggatttcggatctgctctgtgggacatgattaggggaaaaggaacaggttactctatgaaaggtcacatcaacgttgacactccgtttggagctatgaaattacccatcagcaaggagggtggcacaacccgccttaagaagaatagggaagacggtggtgatgatgatgatgatgatgatgaggtatgttaattactcctgacttgtcctttttgaagtttgaaacttgctatacgaatagaatcctatgttttcttatttcattcttgttttgggttaggatgttactcttatgttcgatttgattcttcttttaaatacaagaggatggtctttatgattctttagtatctttcatattggtttcttccccttgctatttgcttgtctttttgctttgaaaagaaaaaagtaagaggaatgtttgaatgtaaaagcaagctatgttgatgaagaactaataattcatgtaaagtttctttagaacgagatacatgatttactttactgtaaattgatcatgttagaattggttgtctaacaagtattttgtttatttttaaattattatgatttgcttttatcatttgatttttactttaggcgcctttttggagcaaaagcaatagcatatataacaaaccaacaggcctagtaaattttgagattgttgatgacttgagagtctattggatattacatgtattgaaatctagaagtagagttctggtaacattgtaagagcactcttgaaagcatgcccccttttggtacatacatatctatatacatggctctaaggagttcagattccaaaatatgtgtgcctcttttttataagggctatcgggttgtcaattgtggacccgttaaatttctcg

SEQ ID NO: 19676 - DNA, 476 bp, Gossypium hirsutum
  Clone ID: uC-gsflmaxxa097d11b1
acgcgtggggatcagaataagaaaaggggggcttttttagaatgtcatgggggcttaagccagaattagttgaaagggatgttaaggacaaggtggatgacaaagaagacaacagtggatttatagacaaggtcaagggtttcattcatgacattggtgagaagatcgaggaaacaatcggctttggcaagcctactgcagatgtagctgagattcacctcccttgtatcaatcttgagaaagcagaaattgtcgttgatgtcctcataaagaacccaaaccctggtccaatccccctcgtcgacattgactaccttattgaaagggatgggagaaaactcctttcaggcttgattccatatgcttgaaccatccatgctcatggtgaggagactggcaaaataccagttactttgatatatgatgatatcaaaaggccattttatgacatttagccctggagcattatttcatat

SEQ ID NO: 19677 - DNA, 421 bp, Gossypium hirsutum
  unsure (1)..(421): unsure at all n locations
  Clone ID: LIB3149-015-Q1-K1-D2
gaaaaacgctgcttgcagctttgctattaaggtatgtcatcatccgataagccagaattagttgaaagggatgttaaggacaaggtggatgacaaagaagacaacagtggatttatagacaaggtcaagggtttcattcatgacattggtgagaagatcgaggaaacaatcggctttggcaagcctactgcagatgtagctgagattcacctcccttgtatcaatcttgagaaagcagaaattgtcgttgatgtcctcataaagaacccaaaccctgttccaatccccctcgtcgacattgactacctcattgaaagtgatggtagaaaactcctttcaggcttgattccagatgctggaaccatccatgctcatggtgaggagactgtcaaaataccagntactttgatatatgatgata

SEQ ID NO: 19678 - DNA, 610 bp, Gossypium hirsutum
  Clone ID: GOSHI-09MAY01-C2288_1
ggcaaagagacagagaccgatcattatactactacccaaagcaagacacgcactgaaactggaagacagcagacgatatgagggtgctacaagttttggcagtttccaagattctcacctcacacttgtctcgcacgcaccgcccctctgcctctcgtcagatgagtactgctgcttcttcgcttaaaaaatcccccatatttcgaaccctgggtctaataggagggaaatggattgacgcttatgatgccaaaactattcaggttaacaatccatccactggggaaattatagcagaggttccctttatgggcactctggagaccaatgatgccatttcttctgcgtctgatgcttttaattcttggagtaaactcactgctgctgagaggagcaaataccttagaaaatggtatgatcttataatggcccacatggaagagcttgggctactaatcacatttgagcaaggtaggccttcaaaagaagccctgggtgaggttaactatggggccagttctattgagttctttgctgacgaagccaaccgcatctacggagatataattccagctactctaggtgatcgtcgtctgtttgttctaaagca

SEQ ID NO: 19679 - DNA, 323 bp, Gossypium hirsutum
  Clone ID: GOSHI-09MAY01-C2268_3
gttatccactgcggccttatgggttttggacatttgagcgccacaatgctcagctccgttgggatcctcagattagccaagtccccggccgcagggatccttatgatgaccttcttcaagacagttatgcgtcctccaccaaacgaaactgaggaatcagaagccattagcagatggtttggagcttgatctacaaatgggaagtggacattgaaaccttttttactgttggtttgaattaaaagattctgcttgttttgtagtgtacttttgaacatttcagttgggacactggtttatgaatgaaaataaattttccatgt

SEQ ID NO: 19680 - DNA, 540 bp, Gossypium hirsutum
  Clone ID: GOSHI-09MAY01-C2268_2
cccacgcgtccgctgcatcagaggttttcccgatctttgctttcgactaattgaagaccttggctctgctaatcgccacttgagatcttcaaacaggaagaaaatggggttcattatggaatttgcagagaatctggtgttgaggttaatggaggacccaaaagagagggatagaaaattcagagaacacgtttactctatgaaggatcgatgcgcaaaaaccaaggagatgtggagttatccactgcggccttatgggttttggacatttgagcgccacaatgctcagctccgttgggatcctcagattagccaagtccccggccgcagggatccttatgatgaccttcttcaagacagttatgcgtcttcctccaaacgaaactgaggaatcagaagccattagcagatggtttggagcttgatctacaaatgggaagtggacattgaaaccctttttactgttgggttgaatttattgtcaattgtgctacaaaaagattctgcttgttttgtagtgtacttttgaacatttcagtt

SEQ ID NO: 19681 - DNA, 615 bp, Gossypium hirsutum
  Clone ID: GOSHI-09MAY01-C2268_1
cccacgcccgtccgggagggttcaaattatggaatttgcagagaatctggtgttgaggttaatggaggacccaaaagagagggatagaaaattcagagaacacgtttactctatgaaggatcgatgcgcaaaaaccaaggagatgtggagttatccactgcggccttatgggttttggacatttgagcgccacaatgctcagctccgttgggatcctcagattagccaagtccccggccgcagggatccttatgatgaccttcttcaagacagttatgcgtcttcctccaaacgaaactgaggaatcagaagccattagcagatggtttggagcttgatctacaaatgggaagtggacattgaaaccctttttactgtttgtttgaatttattttcaattgtgctacaaaaagattctgcttgttttgtagtctacttttgaacatttgagttgggacactggtttatgaatgaaaataaattgtccatgtaactcaatgggtaagacttgtaagggttataaagactctgtgttggtgaaaaaaataatataatataattttcaataataaaaaaaataaaaaaaaaaaaattatttataaattaatttataat

SEQ ID NO: 19682 - DNA, 240 bp, Gossypium hirsutum
  Clone ID: LIB3189-034-P1-K1-A9
ccaatctttgctttcgacaaattgaagaccttggctctgttaatcgccacttgagatcgtgaaacaggaataaaatggggttcattatggaatttgcagagaatcttgtgttgatgttaatttcttttcccttctttcttttttctcttttattctactcttatagttttatttgtgtttgttttttctttatcatatagtcttctttttttttctttttttatctctttttctttttct

SEQ ID NO: 19683 - DNA, 913 bp, Gossypium hirsutum
  Clone ID: GOSHI-09MAY01-C2228_1
cccacgcgtccggagcacaatctgaaaatcctcttgcccagtcagttcccaacttttctgatctcagaaaagaaaatacaaagccctcttctggagctggcaaggtgacgagccatttccaagcgagaaactatgctcgtagcaagagtaataatgaagagattgctcttggcaaggatgaacagtctcgacggtctcagtcccataggaaaagcttcgctggtcctgtagatgtttcagatgtgccagccttgaactctgatgacataggtttggcacctttgaaatttgataaagagcagatgggccagagcttcaatgacaaatctctgaagaatgaggaagcaaagcctttcctctggaaaggtaatggtgttggtcctggtgctggagtaaaaactgcaaagttcaaagcatcagagacatttgcgactccaaatggcgaagaatccgatgagccagaatttgaagcagatgattctatggatatggccaatgaagacgaagaggacgagcttgaaactatggctgttgatgattctgctgacatggaaaatggaagatcaagactgagccaggaatcagataaattagataattcggggtcggagatttgtgattccttgaggtctccttctcaggttgaccctgcatcagttgccgaactgcctgctccaatgctcactacattccatactgcagtatccctgcaggagtcaccaggagaaagtcccgtgtcctggaattcacgcatgcacaatacatattcttatccccaggagacttcagatattgatgcctccatggattccccagttgggagccctgcatcttggaattctcaccctcttgctcaaacagggatggatgctgctcgaatgagaaagaaatggggaagtgctcagaaaccatt

SEQ ID NO: 19684 - DNA, 689 bp, Gossypium hirsutum
  Clone ID: GOSHI-09MAY01-C3948_3
gcatgttgttggttggtatagtaccggccctttgttgcgggaaaatgacctagacattcatagattgttccacaactatgtcccgaatcctgtcttggtcatcatcgatgtccaacctaaggagttgggtatccctactaaggcctactatgatgttgaagaggttaaggagaatgccactcaaaagagccaaaagattttcgttcatgttccttcagaaattgctgctcatgaagttgaagagatcggagttgagcacttgcttagggatgtaaaagatacaaccattagtacactcgcaactgaggtaactggaaaactcacagctttgaagggtttagatgcaaggttaaaagagatacgttcttaccttgacctttgtatcgatgagaagcttccactgaatcatgaaatactgtaccatttacaggatgtgttcaacttgctgccaaacctaaacgtaaatgacctaatcaaggcttttgcagtaaaaaccaatgatatgatgttggttatatatctgtcatctctcatccgaagtgtcattgcgctccataatttgatcaataacaagatgttaaacaaggaacatgagaaggcttgaagatgctaagccaacaactgtccaggctacaagttgaatccgaacataaagtcctaatcatgtcaaaaacttgagcatagggcgc

SEQ ID NO: 19685 - DNA, 1277 bp, Gossypium hirsutum
  Clone ID: GOSHI-09MAY01-C3948_1
ctccgccccacgcgtccgcatcagtctcttaaaagagcactacgaaaccaaaagcaaagaagcaaagtctcacacttaggcagagaaaaaacaaaaccaaaaacctaaaaacccaaaattcataatggatgtaattaaaacccagcaaatttcatctcgacccatagagaaggtaatagttcatcctttggttcttttaagtatcgtcgataactacaatcgcgtcgcgaaagacacgcgcaagcgcgtcgtcggagtcctccttggttcttccttcaaaggcaccgtcgatgtctccaacagctacgcagtgcctttcgaggaagatgagaaggacccgagcatatggtttctcgaccacaactaccatgaatcaatgttttcgatgttcaagaggattaatgccaaggagcatgttgttggttggtatagtaccggcccaaagttgcgggaaaatgacctagacattcatagattgttccacaactatgtcccgaatcctgtcttggtcatcatcgatgtccaacctaaggagttgggtatccctactaaggcctactatgatgttgaagaggttaaggagaatgccactcaaaagagccaaaagattttcgttcatgttccttcagaaattgctgctcatgaagttgaagagatcggagttgagcacttgctaagggatgtaaaagatacaaccattattacactcgcaactgaggttactggaaaactcacagctttgaagggtttagatgcaaggttaaaagagatacgttccccacgcgtccgcccacgcgtccggaagcttccactgaatcatgaaatactgtaccatttacaggatgtgttcaacttgctgccaaacctaaacgtaaatgacctaatcaaggcttttgcagtaaaaaccaatgatatgatgttggttatatatctgtcatctctcatccgaagtgtcattgcgctccataatttgatcaataacaagatgttaaacaaagaacatgagaaggctgaagatgctaagccaacaactgtccaggctacgagttgaatccgaacataaagtcctaatcatgtcaaaaacttgagcatagggtgctattaacttccataggatcctctattcttgagattttgtattcttcatagctcaatcagaagatatcagtaggcttaaaaaatttgagagtttttctctttgttttccatacactatagactctattaatgaagtgcatctccattaagcatcatgttatgctgaactaatcatttga

SEQ ID NO: 19686 - DNA, 443 bp, Gossypium hirsutum
  Clone ID: uC-gsronu33B147b09b1
ctcctttttctggctgctaggcaaggcaaaaaggggggctttataaccttttttttgttatcaaccacaagcttccactgaatcatgaaatactgtaccatttacaggatgtgttcaacttgctgcccaacctaaacgtaaatgacctaatcaaggcttttgcagtaaaaaccaatgatatgatgccggttatatatctgtcatctctcatccgaagtgtcattgcgctccataatttgatcaataacaagatgttaaacaaagaacatgagaaggctgaagatgcttagccaacaactgtccaggctacgagttgaatccgaacataaagtcctaatcatgtcaaaaaccttgagcatagggtgcttttaacatccataggatcctctattcttgagattctgtattcttcatagctcaatcaaaagatattcagtcggctt

SEQ ID NO: 19687 - DNA, 591 bp, Gossypium hirsutum
  Clone ID: GOSHI-09MAY01-C3908_1
aagccaggtagcgaaagagatgactggaggaggtgcggattattgctttgaatgtgttggattagcatccttggtacaagaagcctatgcaagctgtcgaaagtttggggaaagactatagttttaggagtgcagaagccagggtctcagttgagcttaagctcatttgaagttcttcattcagggaaaaccctcactggacccttgtgtggaggggtcaaagccaagtctgaccttccacttctgttaaaacgttacacagacaacgagttgcaggtagacgaatttgtgactcacgaggtaaagttccaagacatcaacagagcctttgaattacttatgggagggaagtgcatccgatgtgtgatatggatggacaaatgagtgatttacacacctgcccctttattctcatcaagttaaggagtttgcaatactctctatgcgtgtgtgctgcattaatttatgtttaaattaataatttgttttaaataataagctgggatccattaggggaaacatcaaacgtcaaatcaaaaactacttggaaaaaaaaacccataaattcactagaaaaaaccataaatctac

SEQ ID NO: 19688 - DNA, 511 bp, Gossypium hirsutum
  Clone ID: GOSHI-09MAY01-C3898_6
ttgtacgcgtgggcggacgcgtgggcggacgcgtgggcggacgcgtgggcggacgcgtggggccgttcgatctcctgggttcacgcttggactgttcgtgatgggataatcaccccggtcgcgggggatttcaacacttctctcaccgttactcgccttggagactctccaccgtcagcttgcagttcttcgacggcggggattgcgccggtgcattgcccttacggttgggagaggtgtctttccaaccgggtggggaaatcgggtccgggtcttggtcttgcaatttagtttcctcctcccacgtgtggctaagataacagatgggagttccatgagttgagtttgggctggtggtaaaaattattgtgtcagaactgtcaatttggtaacttatattgttgttgtgtgtgagtgttgttttccatgcaatggatttagtgaaaaaaaaaaaaaaaaaaaaaaaaaaaaaaaaaaaaaaaaaaaaaaaaaaaaaaaaaaaaaaaaaaaa

SEQ ID NO: 19689 - DNA, 975 bp, Gossypium hirsutum
  Clone ID: GOSHI-09MAY01-C3898_3
cccacgcgtccgcccacgcgtccgcccacgcgtctcttttgattgcacaaaaccaaatcttctttgctttgctattttggttcgttttgctaagaactggctaacgcacagcaaaaaaccgtggaggaaaccaacaagaaccaagcggtggttcttgccctctatgaagccttaaacacacgagacgtcaacaccgttcaccaaatccttgctcccgacctagagtggtggttccacggtccacccactcaccagtttttgatgcgcttactcaccggcgcttcatccgacgatcctttccgtttcgaggtcgaccctgtctcagtcaccacctttggatccaccgtcatcgttgaaggctgtgataacagccgttcgatctcctgggttcacgcttggactgttcgtgatgggataatcacccaagtgagggagtatttcaacacttctctcaccgttactcgccttagagactctccaccgtcagcttgcagttcttcgacggcggagattgcgccagtgtattgcccttacgtttgggagagtagtctttccaaccgggtggggaaatcggttccaggtcttgttcttgcaatttagtttcctcctcccacgtgtggctaagataacagatgttagttccatgagttgagtttggtctggtgttaaaaattattgtgtctggactgtcaatttggtaacttattagtattgttgtgtttcaagtgttgtcttccaatgcaattggatttagtgaagtgtgtggggtccggtatgagaagagttcctccacctcctcattttcagtgtttccattgtgtaataaaaatctgctatcttcttcaaaaaaaatataaccaaaaaaaaaaaataaaaatatgaaataaaaaaaaaaaaccaatatctggtatttaaaaaacaaaaaaaaaattaaactggacccaggcaattttgggggggccgttttaagggatc

SEQ ID NO: 19690 - DNA, 687 bp, Gossypium hirsutum
  Clone ID: GOSHI-09MAY01-C3898_2
cgtccggcagaattccgcaccagggaaacaccatacagacaaataaaatatgaagagttcattgctagtatctgttgtaatcagcttggtaatagttgcttcagccgccaactttaaccaagacatcgacgttacttggggagatgggaggggcaagattctcgaaaacggaaaccttctcactctcaccctcgacaaattctccgggtctggttttcaatccaagaaccaatatctgtttgggaagatcgatatgaacattaagctggttccaggcaactctgctggcactgttaccacttactatgtaagttttatcatcatacttgtctcttattaacattagaactctgtgttgatatgtggggtgacaattgcagcttcgttcggaagggtcgacatgggatgaaattgacttcgaattcttggggaacctaagcggagacccatacatagtccacaccaatgtatatacacaaggcaaggtgacaaagaacagcagttctacctttggttcgatcctaccaaagactttcataacctactccttctttggaaccttcacgtattatgtacgtcttcttttacaatcccattttctaaaacgtttcagttcgatatgttcatttgttaattgggatcttttgatgttacagctttctgtgatgaccccaattgagagttaag

SEQ ID NO: 19691 - DNA, 1050 bp, Gossypium hirsutum
  Clone ID: GOSHI-09MAY01-C3898_1
gaaacactttccagtccaagcccaccaaaaaaaatgaccacttcattgcttctatctgttttaatcagctttgtaatacttgcttcagccgccaactttaaccaagacatcgacgttacttggggtgatggcaggggcaagattctcgaaaacggaaaccttctcactctcaccctcgacaaattctccggctctggttttcaatccaagaaccaatatctgtttgggaagatcgatatgaacattaaactggtcccaggcaactctgctggcactgttaccacttactatcttcgttcggaagggtcgacatgggatgaaatcgacttcgagttcttggggaacctaagcggagacccatacatagtccacaccaatgtatatacacaaggcaaaggtgacaaagagcaacagttctacctttggttcgatcccaccaaagacttccacacctactcccttctttggaaccctcaacgtattatcttctctggttgatgggactccgatcagggagttcaagaacttggaatcgatgggcgttgcgttcccaaagagccagccgatgagagtgtattcgagtctttggaacgccgataattgggccactcgaggtggcgttgttaagacagattggagcaaagctcctttcactgctgcttacaggaattacaaggctgatgcatgtgtctgggcctccgggaaatcatcatgttcctccacctcgccctctcaaaattcatggctatcgcaagaactggatataacgagccaacaaaggctaaaatgggttcagaaaaattacatgatttacaattactgcactgacaccaagcgattccctcagggacttcccaaagaatgcagtgttcattaacagggattctaaatttgttatagcagagattttattggttaaatttatgaatgttctttaaatctttgttcactagtaagtcatatacttaaagacagatatcgtgtgtaatttgttctatgttctgtaacgtgtaatataagttcaataataaatgttatcattcgttttat

SEQ ID NO: 19692 - DNA, 457 bp, Gossypium hirsutum
  Clone ID: uC-gsronu33B110a12b1
gtcaatttggtaacttattagtattgttgtgtttcaagtgttgtcttccaatgcatttggttagattggtaatacttgcttcagctgccaactttaaccaagacatcgaagttacttggggtgatggcaggggcaagattctcgaaaacggaaaccttctcactctcaccctcgacaaattctccggctctggttttcaatccaagaaccagtatctgtttgggaagatcgatatgaacattaaactggtcccaggcaactctgctggcactgttaccacttattatcttcgttcggaagggtcgacatgggatgaaatcgacttcgagttcttggggaacctaagcggagacccatacatagtccacaccaatgtatatacacaaggcaaaggtgacaaagagcaacagttctacctttggttcgatcccaccatagactttcacacctactccct

SEQ ID NO: 19693 - DNA, 449 bp, Gossypium hirsutum
  Clone ID: LIB3166-011-P1-K1-B1
ccggtacggaccggccgggacgaaccacgcgtccaaacgttccgaaacccaccaaaccaatgcccattttttggctccaatctctttaatccagctgggtaatactggcttaagctgccaactttaaccaagacatcgaagttccttggggtgatggcagggccaagattctcgaaaccggaaaccttttaactctaaccctcgacaaattctccggctctggttttcaatccaagaaccagtatctgtttgggaagatcgatatgaacattaaactggtcccaggcaactctgctggcactgttaccacttattatcttcgttcggaagggtcgacatgggatgaaatcgacttcgagttcttggggaacctaagcggagacccatacatagtccacaccaatgtatatacacaaggcaaaggtgacaaagagcaacagttctacctt

SEQ ID NO: 19694 - DNA, 416 bp, Gossypium hirsutum
  Clone ID: LIB3585-067-P1-K1-F12
gatagcacaaaaccaaatcatctatgctttgctattgaggagggggttgctgagaactgactaacgcacagcaaaaaatcgtggaggaaaccaacaagaaccaagcggtgtgttcttgccctatatgaagccttaaacacacgatacgtcaacaccgtatcaccaaatccttgctgctgatctagagtgtgggttccaggttccacccactcaccaaccatagatgcgcttactaaccggatctacatccgacaatccttttcttctataggtactgcctgaagtacacaccgcactttggattcatcgctatcgcattaggctgtgaccacagccgatcaatctggtgagtacactcttggactgttcttgatgggacaatcacgcaagtgagggagtatctcaacacttatgtc

SEQ ID NO: 19695 - DNA, 383 bp, Gossypium hirsutum
  Clone ID: LIB3145-020-Q1-K1-H4
tgcttgctacacatgacaatatctgcgttgctgttgtggttcagagccctcccaacaggagagcggactgtaaagaaatactggaggaaaccaccatgaaccaagcggagatcgtcgcactttttgctgccctgaacacacaatacggaacgacggggaccaaagtcttgcttactgtacttagtgtatgttaaacggatctccctctcatcagtttttgatgcgcttactcaccggcgcttcatccgacgatccttttctttttgaggtcaaccctgttttagtcaccgcctttggatccaccgacattgtcgaaggctgtgacaacagccagtcgatctcctgggttcacgcttggactgttcgtgatgggacaatcaccc

SEQ ID NO: 19696 - DNA, 394 bp, Gossypium hirsutum
  Clone ID: GOSHI-09MAY01-C3848_5
tcggtttctggatttgagggacgacgcacgcgttcgcccacgcgtccgcccacgcgtccgattccctctgacagtacccgtagaaagggaggcagacgtgggagaaggctgtgattctttgcttcgtatctgttgctcactgttgctgctcctccaatatgcgtggaatttcttttttaaacaatctttggtttagattgaagcttgttttgccctgttatgttgctgcacattggttccagaatggattttgatacggaatttacatgtggtactcttggtagttaagctttttattgactgcgattttcccttggagtcaaaatactatattgggaatcaattacatctgaaactcattttatttaattaagtcctgcttttatctgatctt

SEQ ID NO: 19697 - DNA, 800 bp, Gossypium hirsutum
  Clone ID: GOSHI-09MAY01-C3848_4
gccgctccggaactgccgggaccgaccacgcgtccgactcactcgttcgatcgcgagaggccaaagcatcggcggaagctttcacaaaaccctagtctctaactacttcgttttgcctaagccatgtcgagaaggaaggttagagagcccaaggaggagaatgctaacctaggacctgctgatgcagagggcgagcatgtacttggggtggctcacatctttgcttcatttaatgacacattcattcatgtgactgatttgtctggaagggaaacaatggttcgcattactggtggcatgaaggtgaaagctgatagggatgagtcttccccttatgcagccatgcttgcagcccaagatgtttctcatcgctgcaaggagttgggtattactgcccttcatataaagcttagagctactggagggaataagacccggactcctggtcctggtgcccagtcagcacttagagcccgggctcgttctggcatgtttggtggacgcatacaggatgttacccccattcccaccgacagtacccgtagaaagggtggcagacgcggaaggaggctgtgattctttgcttcatatctgctactcagccgctgctggtggcggcttgacattaggaattctcttttgcttttgaaacaattttctgattagattcacgtttgcttgggtctgatcttatgttgcacacttggagctcctgaatggattgtgatccttgaatcttaataggcacaaaatgtcgtggaactttactgaacaaacattcatttgaactggagaataac

SEQ ID NO: 19698 - DNA, 760 bp, Gossypium hirsutum
  Clone ID: GOSHI-09MAY01-C3848_3
cgggcccctggaggctgaagctcagtcaaagtgctgtcttaaaaccctagttttcgagctctctttcagttttccggaatccatgtcaaggagaaaggttagggagcccaaggaggagaatactaaccttggacctgctgttcgagagggtgagcatgtttttggggtggctcacatttttgcttcattcaatgacacatttattcacgtgactgatttgtctggaagggaaacaatggttcgaatcactggtggtatgaaggtgaaagctgatagggatgagtcttccccttatgcggccatgcttgcggcacaagatgtttctcaacgctgcaaggagttgggtattactgcccttcatataaagctccgagctactggaggaaacaagacgaagacccctggtcctggtgctcagtcagcacttagagcccttgctcgttcaggcatgaaaattggtcgaatagaggatgttactcccattcccactgatagtacccgtagaaagggtggcagacgtggaagaaggctctgattctttgctttatatcaattactcactcagctactactgctgtggtgcttggagttttctttgttaaacagttttctttatattcaagtgtgttttgctcggttctcttgctgcacatttagttttttggaaatggattttagatcttttatctagacaggaaaaagttgtggaactatttaatgcagcttcaaagttaagcttttatattattgaggtttttat

SEQ ID NO: 19699 - DNA, 765 bp, Gossypium hirsutum
  Clone ID: GOSHI-09MAY01-C3848_2
cggacgcgtggccgccgccggggattggaaaagccctaatttgacagctctctcagtctctcattttgcctgaaaaccatgtcgaggagaaaggttagggagcccaaggaggagaatactacccttgggccggctgtacgagacggcgaacatgttttcggggtggctcacatttttgcttcatttaatgacacatttattcatgtaacagatttgtctggaagggaaacaatggttcgcattacgggtggtatgaaggtgaaagctgatagggatgagtcttccccttatgccgccatgcttgcagcacaagatgtttctcaacgctgcaaggagttgggtattacagcccttcatataaagcttcgagctactggagggaacaaaaccaagacacctggtcctggtgcccagtcagcacttagagccctcgctcgttctggcatgaaaattggacgcatagaggatgtcacccccattcccaccgatagtactcgtagaaagggtggcagacgcggaagaaggctgtgattctttgcttcatatctgctactcagccgctgctgctggcggtttgacattaggaattctctttgcttttgaaacaattttctgattagattcaagtatgctttgctctgttcttatgttgcacacttgtagttcctgaatggattttgatccttgaatcttaaattggacaaaatgttgtggaactcttcaattttttggctaaagggggtatataagccctcaactttgact

SEQ ID NO: 19700 - DNA, 855 bp, Gossypium hirsutum
  Clone ID: GOSHI-09MAY01-C3848_1
attaagccagggtcgaaaacctactataaaatggtggctgctgatttagtagcctctcttcgaagctagagtcgtcggaggccaaagcatcaacgaaagctttcacaaaaccctagtctctaactacttctttgttttgcctaagccatgtcgaggagaaaggttagagagcccaaggaggagaatactaacctaggacctgctgttcgagagggcgagcatgtttttggggtggctcacatctttgcttcatttaatgacacattcattcatgtgactgatttgtctggaagggaaacaatggttcgcattactggtggcatgaaggtgaaagctgatagggatgagtcttccccttatgcagccatgcttgcagcccaagatgtttctcaacgctgcaaggagttgggtattactgcccttcatataaagcttagagctactggagggaataagaccaagacaccaggtcctggtgcacagtcagcacttagagcccttgctcgttcaggcatgaaaattggacgcatagaggatgttactcccattcccactgacagtacccgtagaaagggaggcagacgtgggagaaggctgtgattctttgcttcgtatctgttgctcactgttgctgctcctccaatatgcgtggaatttcttttttaaacaatttttggtttagattgaagcttgttttgccctgttatgttgttgcacattagttccagaatggattttgatcgtaatttacatgtggaactcttggaagttatcctttttttggttttggttttcccattggagtcagtaatgaagttatgacagataagaatgaattccctgcatgttttgaat

SEQ ID NO: 19701 - DNA, 380 bp, Gossypium hirsutum
  Clone ID: LIB3135-014-Q1-K1-A10
accgcacacgggcgttctttcgatgtcccagcgtcaacgaaagctttgacgctaccatagtcgttgaggacttcggttactgtaagccatgtggtgaaggaaagccagagagcccaagggggacaatgctaaccgaggacctgatgcaagagagggcgagcatgtaaagggggtggctcacatcttcgctacatttaatgacattgattcatgtgactgatttgtgtggaagggaaacaatggatcgcattactggtggcatgaaggtgaaagctgatagggatgaggctttcccttatgcaagcatgcttgcagaccatgatgtttctcatcgctgcaaggagacggctattactgccctttatataaagcatagagct

SEQ ID NO: 19702 - DNA, 248 bp, Gossypium hirsutum
  Clone ID: LIB3828-030-Q6-K6-C8
cttgttttgccctgttatgttgttgcacattagttccagaatggattttgatcgtaatttaacatgtggaaaaaaaaaaaaaaaaaaaaaaaaaaaaaaaaaaaaaaaaaaaaaaaaaaaaaaaaaaaaaaaaaaaaaaaaaaaaaaaaaaaaaaaaaaaaaaaaagcaaaaaaaaaaccatattgtataagggacagctaaattaaattaaactggcctttaattttaaaacctctggaaatgacac

SEQ ID NO: 19703 - DNA, 1270 bp, Gossypium hirsutum
  Clone ID: GOSHI-09MAY01-C3868_1
cccacgcgtacgatctcattgtcggatttttacctcccatttcagcataccaacatcctcccctggaaatgagtgaaatgaaaacgatgtcatcttatcaaagctgctgaaggtttcagttatgaacctaggaatggcttctctggctcgatctccttctgccatgtccattactagaattcctcagggtcattccaaaatcctacaattgttaaaagcttcaaaggtgccttatgtgctccctttccgtcgcgtccacatcagaaggtcccctgtttgctgcacgaaatttcctcagtgggaaccttcaccggccacatatgctctaactgagaaagctggtgataagttcttggataaatcatctgaattatttgaaactctgcgttctgagtcttctgacagcaaagatgaggcttcaattactaaagctgaagatcgtacagatacaaccaatcaaccagttgcacagcttcagtttcttaaatggccattgtggctgcttggcccttctgttctcctcggcacgggcatggtacccactctatggttaccgatatccaccatattcattggcccaaatgtggtgagccttctttccttgattggacttgattgcatcttcaatctgggttgcaccctttttctcctcatggcagattactgtgccaagtcaaagaacctgggacaagcttccaagagcaaacctcctgtgagttaccagttctggaatttggttgcaactttgactggacttgcaatccccttgatgatgctgtttggatcccaaaagggctacctccaacctcagctgcctttcatcccatatgcagttctattgggtccctacatcctgcttctgtcggtacaaatgctgactgagatgttgacgtggcattgggagtcaccaatctggttggtgaccccagttgtgtacgaagcttaccgtgtgctacagctaatgaggggattgaaactcggggttgaactcagtgcaccagcatggatgatgcacactatcaggggcctggtctgttggtgggtactgatccttggtgtgcaactcatgagggttgcttggtttgctggttttacagctcgagctcaacgacagcaatcttctgcttctgccgatgcttaatactaatagcatctaaagtataaaaatcaaataaaatgtcgatatgtggtttctagtacatttattgagccgtccgttgacatacgtgttagaaatgttgtttatagtttcatgagcttactggaatgt

SEQ ID NO: 19704 - DNA, 319 bp, Gossypium hirsutum
  unsure (1)..(319): unsure at all n locations
  Clone ID: LIB3135-046-Q1-K1-G8
cccacgcgtncgatggaatgttacttatttgaatgaaactataaacaacatttcttacacgtatgtcaactaactcctcaataaatgtactataaaccacatatcgacattttatttgatttttatactttagatgctattagtattaagcatcggcagaagcagaagattgctgactgagatgttgacgtggcattgggagtcaccaatctggttggtgaccccagttgtgtacgaggcttaccgggtgctacagctaatgatgggattgaaactgggagatgcactcagtgcaccatcatggatgatgcacactatc

SEQ ID NO: 19705 - DNA, 1028 bp, Gossypium hirsutum
  Clone ID: GOSHI-09MAY01-C3808_1
tggccccctttggatctgtttcagaacaattttatggttcacaagatacttctcctgctggagataatagataccgtgttgtaaggcccttgcagcatgacaagtggtccaaagggaaggatggttttcttatcactgatatttggggtgtggatgctggtagatcagatgtaaccactccaatagtttggctacagcatacggaggagaggatgtatctatgtgcttatcagtacaaaagccttacgttgatccttcttatccctctttcttctatccttaatggggagcaaggtgtttcaactgtgaaacagcaacttcttgaaaatgcctcactgaagattttgaaagttgaagaaaagttgtcaaagggatggggtggagagaatgcctatcatgtcagtgggtatcgctacttgatagtggatggtaacagagacatatccagggcttcacccccagcaaaggttacaacattaacaaaggaatcttttcttgccttaaataggcttagagaagaagtagatgctgaaaagagtcgatcaaaatgggataatccaggtcgtgacaaagatttggaagtgtctattagagcgaaaaataatgcttgggccattgctcgtattattggagggaaggaactttatatggttttagagaaagctaatgaaactctcctctatgcgtcagatgctgttgagaaattcagtaacagatattgcagtggagcattttctttggactagttaaaaagtgtcgaggcaactgtattagtatagcaataatgaaatatttatgtgctgtataaacgtttttttcactagctttggcaaccctagcagatcctccacggtttgctcagttttcactactgatttttgtggcaaaaaatacaaaaataaagctaatcatctatcagttgcatgcaaaaaatgcaattggtgagttgaagcatgtaatgcaaggttgtttattgatttatttaaaaaaaaaccccaaagcccggccgctcgcgatctagaactagt

SEQ ID NO: 19706 - DNA, 603 bp, Gossypium hirsutum
  Clone ID: AI054857.1
ttttcttatcactgatatttggggtgtggatgttggtggctcagatgtaaccactccaatagtttggctacagcatacggaggagaggatgtatctatgtgcttatcagtacaaaagccttacgttgatccttcttatccctctttcttctatacttaatggggagcaaggtgtttcagctgtgaaacagcaacttcttgaaaatgcctcactgaagattttgaaagttgaagaaaagttgtcaaagggatggggtggagagaatgcttatcatgtcagtgggtatcgctacttgatagtggatggtaacatagacatatccagtgcttcacccccatcaaaggttacaacatttactaaggaatctttacttgccttaaataggcttagagataaagttaatcttaaaagagttcattctaatgggataatccagtcgtgactaagattgcgattgtcccatttttagcgaataaattgtttgggctttgattgattctgtacgaatgatcttatagagttttaaatattcaattaacattcttttagctatttatttgtgagatatattacctcattgtatggactattctatgtacataa

SEQ ID NO: 19707 - DNA, 254 bp, Gossypium hirsutum
  unsure (1)..(254): unsure at all n locations
  Clone ID: LIB3146-022-Q1-K1-H6
cccacgcgtccgcccacgcgtncgcccactctttcggcaataatgaaatatttatgtgctgtataaacgtttttttcactagctttggcaaccctagcagatgttacaaggtttgctcagttttcactactgatttttgtggcaaaaaatacaaaaataaagctaatcatttatcagttgcatgcaaaaaatgcaattggtgagttgaaccatgtaatgcacggtggnttattgattaattaatttttctggag

SEQ ID NO: 19708 - DNA, 587 bp, Gossypium hirsutum
  Clone ID: GOSHI-09MAY01-C3508_1
cccacgctccgcccagcgtccgcttcggtaggagggtggaaaactcccatcaacacccactcttttgttttacctcctttcctctttctccctggtttagcttatctgtttttctatatgaattcctctgactttgatagttttcttttattggttatgaggtgtaagtgagtactaatggaaagtaagcttcaacgccctcagtcttttcgtttaaaccgtagaggagaccgtaataatcaacgcccttttgctaaagatgatgaaagtggcttgttttcttcaatgaggttgccacaagataatccaatcaagattgtgtggaagcaggggtttattcgattggttcttgtagcaggcattctatggatgctacttattcttattgtattgctatttcatgtttggtcatgccaatcttcaatttctttcttgtcagctatgtgtaacaaagagggcaaggtgttcatcgcaatggacttgcttggattggctccaaaaccagaacatcgttgtccaattccagtagctgatgaccctgacaaatagttattccagagggaagaacacctgatgcaattgttaaa

SEQ ID NO: 19709 - DNA, 685 bp, Gossypium hirsutum
  Clone ID: GOSHI-09MAY01-C3538_1
gcgtatcaactccaaaaagacggccaaagtaaagtccgggagtgtccttttttgacacgcttcaaggtgtgtccggtacgtatccggccgtgtcggcggcgtgtccgtgacggtgcttcctagtcatgtatgtattatcgggagactggtctatcatatcttcaccttcgccaaagccataccctcataagcctcccaagtgctccaattgtgctcctcttttcatgaagacaactgctgtgcttgttcgccatcatggtatatacgtatggggtgactcatggatcagtgctaaaactcaggctgaatgttatcattacctctttgatgctgctgctatcaaactccatcatctaggcttagactggtctactccagatcatggccccattcagaatgttaaaggattttcaagcatcaatagcgtgataaaaagggtggctacgaaggctgggacagtggattcggattttaaactccagccatatccacgctgcgttgtgcttgacattgaaggaactaccactcctatttcatttgtaacagatgttctctttccctatgcccgagacattgttgggaggcatttgtccccaacttacgatagtgctgtaacttcaagaggtttttaagttgttacgttctcaagttgaagatgacttgaagcaaggtgttctttgtgctg

SEQ ID NO: 19710 - DNA, 627 bp, Gossypium hirsutum
  Clone ID: GOSHI-09MAY01-C3478_2
agacagtgcagcccaacttaatggcagcggaaatggggcttcccatgccaatggtactgccactcaaagtgacattttcaatagccagagcttggtcacattgagcaggactggaattgagaatttggcgagattggagaaccgaaaagagccgtggcttgttgtgctctatgccccatggtgccgtttttgccaggcaatggaagaatcttatgttgaactggcggagaagctggcaggctccggggtgaaggtagctaaattcacagctgatggtgaacaaaaggagtatgcaaaaacagagttgcagttgggaagcttcccaaccatacttttcttccccaaacactcgtctaagccgataaagtatgcatcggagaagagagatgtagattcattgatggcctttattaatgccctccgatgacgggaatcaaaaagtcatttgtctgaatttagctgatcatcagtcccgcgcgctggaatgatgctgcttgtgcttaggtctttccactccaatacccttgttttccagattcaagtgagggtgtaaaacccagattttgccatgctctggttcttttgtatattcagcacatacttccgtattctatctgaggttttttt

SEQ ID NO: 19711 - DNA, 1677 bp, Gossypium hirsutum
  Clone ID: GOSHI-09MAY01-C3478_1
gggaaaacaaagattaccttttttttttttttgggggtttgagaatggcgtttgctgttacttcatcgtcttcttcaactgcgatttctggttctagctttcctcgttcaagtgcctcccctgatcccaaagttccacaaattggtgcagtccggtttgcagatcgtcatgcaacggtgaatctgtctcgaagacgttgcgcagtgaagcccgtaaatgcggagccaaagcgtaatgattccatcgttcctttagcagcaaccatcgctgctccagaaatatcggaaaaaatagaggcggaggatttcgagcaattggctaaagaacttgacaacgcttcttcacttgaaattatggataaggctttagagaaatttggaaacgacattgccatcgctttcagtggagcggaggatgttgctttgattgagtatgcaaaattgactggtaggccatttagggtgttcagccttgatactggcaggctgaacccagaaacctaccgattctttgatgaggttgagaagcattatgggatccgtatggagtacatgtttcctgatgctgttgaagttcaggccttggtgaggagcaaagggttgttttcattttacgaggatgggcaccaagaatgctgccgtgttaggaaagtgaggcctttgaggagagcactcaaggggttgcgtgcctggattactggtcaaaggaaagatcagtctccgggaactaggtcggaggttcctgttgttcaagtggatcctgttttcgaaggtttggatggtgggtatggtagcttgctgaagtggaacccggttgccaatgttgatggtaaagacatttggaatttcctccgggcgatgaatgtgcccgtcaattctttgcatgcccaaggatttgtgtccattggttgcgagccttgcacgagaccagtattaccaggacaacatgagagggaaggtaggtggtggtgggaggatgccaaggccaaggagtgtggtcttcataaagggaacctgaaagaagacggtgcagctcaagttaatggaaatggggctaccactgaaagtgacattttcaatagccagagcttggtcacactgagtaggactggaattgaaaatttggcaaaattggagagtcggaaagaatcatggattgttgtgctctatgctccatggtgccctttttgccaggcaatggaagcatcgtatgttgaattggctgagaagctggcaggttctggtgtgaaagttgcaaaattcagagctgatggtgaacaaaaggaatactcgaagaacgagttgcagttgggaagcttccccactatacttttcttccccaaacactcagctaagccaataaagtatgcctctgagaagagggatgttgattcattgatggccttcgttaatgccctccgatgaagggattcataaattatttgtcgagttaacaaaaaatcaacttttgagcggtgattcatgctggtttacaatctcataaactaactcatgaacccggagtttgtcatgcttccatcgcccgtagcatcataatgaactcgggtgtttttgtatactgaacacaatgttccatattttgacatatatgtgtgaaattgatgagttctttattaaaaaaaaaccaccccccccccccccgatcgcgtctagaact

SEQ ID NO: 19712 - DNA, 626 bp, Gossypium hirsutum
  Clone ID: GOSHI-09MAY01-C3418_1
gccattttcttcgagaaaaccatcttctccagagtcccacccgccaccttatctctcaatcttccttcttatgttctgaaaattttcacagcatattgtgggggatttgattcctcaattattttgaagaaaccataggagagacatggaagctgttctaaaaaccacagggcttctttcattaccaccaaatccgaccagagccagaagccttttgaacccatcacaaggcttaaagcagaggctctttgcttcgaaacccttaggccttaatgggttatcggtgtcttataaaagagttccaagcgttgtagcaaaaccaaatgggttattcccggaacagaagagcttcatttgcaaggccgaggctgccgctgcaggcgatgggcagcctttgattggagaaactgagaagaagccaaagttcttgggtattgagcttgtgactcttaagaagattatcccactcgggttaatgttcttttgtatcctcttcaattacacaatactcacggacacaaaggacgtcttggttgtgacagctaaaggaagcagtgctgagattataccctttttgaaaactgggttaatttgcctatggcagttgggttcatgttgttatacac

SEQ ID NO: 19713 - DNA, 465 bp, Gossypium hirsutum
  Clone ID: uC-gsronu33B158b04b2
ctcttattttccttcctctctttttcttttaatttttaggtctcatgttctgaaaaattgcaaatcttttttttggggattgatttctcaattcttttgaaggaaccttaagagggacatggaagctgttttacaaaccagagggctactttcattgccacctcatccgaccagagttagaagccttttgaacccatcacaaggcttaaagcacaggctttttgcctcaaaacccttaggccttaatgggttatctctgtcttataaaagagttccaagcgtcgtagcaaaaccaaatggtttatcccctaaagaaaagagctttatttgcaaggctgaggctgctgctgcagctgatgggcagcctttgttcggtgaaatcccgacgccaaagttcttggggactgagcttgtgactctcaagaagattatcccacttgggttaatgtctttttgcatcccttt

SEQ ID NO: 19714 - DNA, 428 bp, Gossypium hirsutum
  Clone ID: uC-gsflmaxxa006c10b1
tcgattttcttcgagaaaaccatcttctccagaatctaaccctctcaccttatctctcaatcttccttcttatgttctgaaaattttcacagcatattgtgggggattcgtccccttcctctcccctcttcctctctcctcctcttctctccccttattctcctctctcccctcttctccctctcttctcctcctcctctctccttcctctctcactcctctctccttctttcttctccctcttcttcttttcttccctcatatctctctctcactccccttcccctcttttcccttctaatccatcttttcctctcctttttactctcattctctcttctactcttttcctctttccccttctacttcctttctcttcttctctcttcttcttttttcttttttttttctcctctttcctctctttt

SEQ ID NO: 19715 - DNA, 858 bp, Gossypium hirsutum
  Clone ID: GOSHI-09MAY01-C3438_1
ggttggaagccctcgtaaatttgacttccctgtcaaggatcaccttcaactcggaaaggaactaaatctctttgattttgatgctgctgcagaggtaagtggttcaaaattctattacctaaagaatgaagcagtgatgctggaaatggcccttgtcaactggacactgacagaagtcatgaaaaggggctttacaccattgacaacaccagagggtgtcaggtcatctgttgtcgaaaaatgtggattccagccccgtggagaaaatacgcaggtttattccattgaggacagtgaccagtgcctcattggcactgcagagattcctgtagggggaattcatatggactctattgttgctgagtctgcattacccttaaaatatgtggcattttctcattgttttcgtactgaagctggtgctgctggtacagcaaccaggggtctctatagggtacaccaatttagcaaggtggaaatgtttattttatgcagacaagaagaaagtgatatgtaccatgaggaacttattaaaattgaagaggacctcttttcgtctctaggattgcatttcaagattttagatatggctacaggtgacctgggtgctcctgcttatcgtaaatttgatgtcgaggcatggatgccaggtttagaacgctatggcgagatatcaagtgcatcgaattgtaccgactatcagagccgccggcttggcattcgttatcgtccatcggaatcaccctcaacaacttccaagaagggtaaaacaaacgtggctgcaaccaaaattgttcatacattaaatgcaacagcttgtgcagttccaaggatgcttgtttgtttgctggagaattt

SEQ ID NO: 19716 - DNA, 540 bp, Gossypium hirsutum
  Clone ID: GOSHI-09MAY01-C3428_2
cccacgccgtccgaagaagtcatggacaaggcctccaattcagatggaatttcaggttccaatgtttacagcctccggtttacgtgtccggtttcttaaggtctgggaaaagagtgggtataacacagttgaatgggttcgctatattacaaaggctggttcatatgagatcaggtgctagaaaacatgggatcgctactccgagattgtatgagagaatgagaatattaacaagcacgagtttggatttccttccttaaggatgcagctaccgttatactttcatgaattattaggcattttgttttccccttcatagtggagtttttgttaatatgattacgtgagtatttggtgggttattttctattgtaaaggctagcccttttttcacaaagctgtattatttgtttgcaaattgcatattgtcgcacgttttgttgtaacggttacatggtcggttttaaaacaagtatgaatgggacagctgaaatctggaagtttgcattttggaatgaattgggttgatctgattctgat

SEQ ID NO: 19717 - DNA, 1995 bp, Gossypium hirsutum
  Clone ID: GOSHI-09MAY01-C3428_1
cccagcgtccgcggacgcgtgggcggccgcttcaccgcgactttggccaccaaaaccaaaaatcgaacacgaaattcctctttttccccagatctgggcccgtcgccggtcttagcaacctccgatccaatcatttcacctattcatttcaattcattaaacgtgtgacgcgacccactggatcgaagatgccggtggccgcttctgccatctacttcttgaatcttcgcggcgatgtcctcatcaatcgtctctaccgagacgatgtcgggggaaacatggtggatgccttccggatgcacattatgcaaacaaaagaactcggaacttgtcccgtcagacagattggaggttgctctttcttttacatgagaatcagcaacgtatacatcgtaattgttgtcagcagtaatgctaatgtagcttgtgctttcaagttcgtcgttgaggctgttgccttgtttaaatcatattttggtggcgcttttgatgaagatgctattcgtaataattttgttctgatttatgaattgttggatgagatcatggactttggctacccacaaaatctttctcctgaaattgtaaagctttacattactcaggaaggagttcggtccccattttcatccaagccttcagataagcctgttccaaatgcaactttacaagtcactggtgctgttggctggcgaagagagggacttgtttataaaaagaatgaggtgtttctggacattgtggaaagtgtaaacctactaatgtcttcaaaaggcagtgttctccgttgtgatgttacgggcaagattcttatgaagtgcttcctttctggaatgcctgatctgaaattgggcttgaatgataaaattgggcttgagaaagaatcacaactgaaatcccgtcctgctaaaagtggcaagactattgagctggacgatgttactttccatcaatgtgtaaatcttacaagattcaactctgaaaagactgttagttttgtgccaccagatggtgaatttgaattaatgaagtaccgtatcactgagggagttaatcttccttttcgggtattaccaacaatcaaggaacttggtcgaacacggatggaagtaaatgttaaggttaaaagtgtctttggagcaaaaatgtttgctcttggagttgttgtcaaaattcctgtccctaaacaaacagcaaagacaagtttccaagtaacatcaggtcgagcaaagtacaatgcggctattgattgcttggtatggaagataagaaaattccccggacaaacagagccaaccttgagtgcagaagttgagttaatttccaccatggcagaaaagaagtcttggacaaagccaccaattcagatggaatttcaggttccgatgtttacagcctctggcttacgggtccggtttcttaaagtgtgggagaagagtgggtataacacagtcgagtgggttcgctatattaccaaggctggctcatatgagatcaggtgctagaaacacaggattccccgttggctcgtatcagcaaacttgaatagtgaagagtgtgttcgcttgctaccgattgcgcgttcgcgccgcgcccgtccggggaataagcctacaatttccaacttaaagcatgcagccatccttttgctctggtttctggaattatttggcatttttttcgccttgtagtgtttttgttaatatgtttatttcaagtgactatttggtttatgttgttttcttgtaaaggctaaccttatttagaacaaaatgtgccattatagtacaatgctttattgtttgcatattggaacacacattttgttctaaatgatacgtcattgtttttaaatggcatatttgctattggaaaacactgacgtaaatttcatgtaaactcatatcgatgaggggattgatgaactgctcaccaaaaactactcctgtgatactgctctaccacttattaacaaaaactggcctttttgggggg

SEQ ID NO: 19718 - DNA, 585 bp, Gossypium hirsutum
  Clone ID: GOSHI-09MAY01-C3798_1
ctacattctcaaacaagccacaaatcatctctctctagtttttttttcctccaaagctcaaaaatctctctaacccttttctcctgcactctcactgttgaatttcccggtggtggcttgttgtaacttgacttgctttttgttgtttttatggagttttagcaactctctgtcaaataacattgttaatttatatattctttcaaagcaaagatgggagaaatgtcaagcttccaattgggagttataggggccctgtttctttctgttgcatcatctgtctctattgtcatatgcaacaaagctttgatgagcaatcttggcttcccctttgctaccacactcactagttggcatctcatggtaacattttgcacccttcatgctgcccaaagattcaatctgtttgagaataaatcaattgacatcaagactgtgatgctttttggcatcctcaatggtgtttctattggatttcttaacttgagccttggatttaactccattggtttctatcagatgaccaaacttgcaattataccattcactgtattattggaaactgtcttcctcaaaaagcaattc

SEQ ID NO: 19719 - DNA, 847 bp, Gossypium hirsutum
  Clone ID: GOSHI-09MAY01-C3788_1
tcctcgcgtccgcaataatcttcctttacaccaaatctgcaaccaaacccaggagctgaattattgaattccctcccttgaaagcgatcatggatctagcgccggaggagcttcagttcttgtcgttgacagatatcctgagggaatccgttgcaatccctaaaagatcccccaaaaccttctatcttataaccttagctctcattttccctctctcttttgccattttagctcactcgcttttcacccatcctatcttaaatcaactcgcttccgatccgctggcagacccgtcccagacccgccacgagtggactctcctcttaaccttccagttctgttacctaattttcctctttgccttctctcttttatcaacggctgcagttgtatttacggttgcatctctctacacgtcgaagccagtctctttcacttccacgatctcagccatacccaaggtttttaagcgtctttttataaccttcacatgggtttctctcttgatgtttgtttacaatgccttgttgatcggtttcctggtcttgtttgtcattgccgttgattcccggaatgcctttttgtccttcttctcttttatggtgatcttggtgctgtttttgggcgttcatgtttacatcacggcgctttggcatttggccagtgtggtgtcggtgcttgagccgatttacggccttgcagctatgaagaagagctacgagttgttgaaagggagggcgaagatggctttcattttggtttttggatatttggcaatttgcggggtgattgggggtattttcggaagtgtggtggtacatggacgagttcgatatggggttcttct

SEQ ID NO: 19720 - DNA, 760 bp, Gossypium hirsutum
  Clone ID: GOSHI-09MAY01-C3748_1
cggtcgcgtgggcggccaccgcccctcttgtgaggttgggacttctctcgaactggtttaagatctcatctcagtgaacaatggctagtctttacagaggggcatcaagggaaagacaagcagaagggaagacaccatggattaagccagcagaagaggcaagagattaaggaagcatttgaactgtttgacactgatggctcaggtaccattgatgccaaagagctgaatgttgctatgagggctcttggtttcgaaatgacagaagagcaaatcaatcaaatgattgcggatgttgacaaggatggcagtggtgccattgactttgatgaatttgttcacatgatgactgccaagatcggggagagggacactaaagaagagcttatgaaagcattccaaatcattgatcaagataacaatggaaagatatctgctgacgacgttaaacgcattgcaaaggagcttggtgaacacttctccgaaaaagaattcaggacatgattgaagaagcagaccgagatcatgacggggaggtaagtattgaagagttcatgaggatgatgaagaaaactacatatggctactagaagtttgacttatggccggagggagtgtttgatcgcagccatgcggtagctgtagctgcagctgtagcattgttgtataaataaactaaaaaaaacatgttgtgtatggatatatgtaatgggattgaatgtttctcccatgacttttagttatgttgttcttctctatt

SEQ ID NO: 19721 - DNA, 563 bp, Gossypium hirsutum
  Clone ID: LIB3584-038-P1-K1-F7
cccacgcgtccgaatcttcaaaatcaagtctttgcaattgcttttcttttgaagttgggacttctctcgaactggtttaagatctcatctcagtgaacaatggcttgctgaatttggaaatatctatgtttctccggatcttcattttgcttgaagtatcagtgcctgaaacctttgtccaacacatttttggataagaatcttggctagtctttacagaggggcatcaaggaaagacaagcagaagggaagacaccatggattaagccaacagaagaggcaagagattaaggaagcatttgaactgtttgacactgatggctcaggtaccatcgatgccaaagagctgaatgttgccatgagggctcttggtttcgaaatgacagaagagcaaatcaatcaaatgattgcggatgttgacaaggatggcagtggtgccattgactttgatgaatttgttcacatgatgactgccaagatcggggagagggacactaaagaagagcttatgaaagcattccaaatcattgatcaagataacaatggaaagatatctgctgatg

SEQ ID NO: 19722 - DNA, 338 bp, Gossypium hirsutum
  unsure (1)..(338): unsure at all n locations
  Clone ID: LIB3166-030-P1-K1-A12
gggacttttctggaactggtttaagatctcatctcagtgaacaatggctagtcgttacagaggggcatcaaggaaagacaagcanaagggaagacaccatggattaagccagcagaagaggcaagagattaaggaagcatttgaactgtttgacactgatggctcaggtaccattgatgccaaagagctgaatgttgctatgaggtatgagtatttatgcgtgatatttcttgtttttaaatagattttttagttgatatcttcacattgtcactgaaagttttagcattacagggctcttggtttcgaaatgacagaagagcaaatcaatcaaatga

SEQ ID NO: 19723 - DNA, 715 bp, Gossypium hirsutum
  Clone ID: GOSHI-09MAY01-C3778_1
gacacgaaaacccctaattttttcccctaaaatcagtatcctcaaaacaccccaaatctcccccctctgttgcccttttcaataaagaaactctccaacagcagcgtctccgttgtctgggtgtctcttgcttccctggcgccggaggaagaggtgtggctgctctccggccgattagcaaaggagagttgcttcttagatttccaaaatctgccttaatcacaactgactctcttctttcaagagatgaaactttgtctcttgcacacaaatcccatccttctcactcttctacccaagtttgcttttgtgtttcagtattcgatatatgttttaatctgcgtttcaaccaaacaaaacgactggactaaagcaatttgcctattttcatttgcaaggcggtggattatgccatctgggctgctcaaaaagctgtcacaaaagctaaatacgagtgggaacaagccttcactctcatgaaggaacttaagcttaagcctccacttctcactttcagggcttggatttgggctactgggactgttagttcacagtgtttatgcttctctgggtttttctttttcaggttttatttatgttggacagcttcaacttgactgtatgcacattcacaccatgcatatgataaatgctggtaaacaagcaacatggtcctaatacttctcggctctaatacatttcctactatatgctt

SEQ ID NO: 19724 - DNA, 1066 bp, Gossypium hirsutum
  Clone ID: GOSHI-09MAY01-C3738_3
ggccgttgcaacttcttcttcaagagacggcttttttttttcttttcttttcttgtctttctgggttttcgtttttgttcctttcactgtcccctcgccagaaggccggttgagttatttacacggttgggagcttttggaggattcttcctcatctttaaggctttttgttttcggtcaatggaggtaattttgtcattgctggcgatggatagcggaatctatgtgaaggtgccatcttatgctcgtttcctactagggatttcccataggttgcaaagtggttcaaccatactccgagtatgacatgtatcattgctgacttcagacggcaaccagctttgatggggtgaagaaaccaatggtgaacatccttctgtttggctggttgcagaaatgagttaatgatgtcgactttctcagcggtaatagacatttataactgcaaatggagttaatagttgcccaaaaccatgaagaactgagatggccagttatggacttgtgagaatcagatactgcttaccagaaggcttatttgtctggctgacaattatggggagtttagtttagccggtgaagtggatcttgtttagctgaattgaaacattcatgttctggtcccacaatggtgtctgttacattgtttgctcatccatgttgatcattgccaacaagttctagtcttggcttaatgacaaaattgcaattctggttcaggtttgagtctcatttgcgggttcttgtttaggttaattttgatcatagactggaaatctgttggttatgtttttgtaatgtttgattatttttattattaaaaatattaattatcatttgaagttaagctgggcatatttgtatttttggccctttgctaaagaagcaaaattatgcttttcactttgtgtatctgatttcacaaattttatgcaaagagctaatcgagtatgctaaatagggactcgttcggaattaaacgtcaacattgtacttcttttttatcaaaaaataaaagaaaattacctcccaaaatagaaagaacggaaacatcagcgggcggccg

SEQ ID NO: 19725 - DNA, 670 bp, Gossypium hirsutum
  Clone ID: GOSHI-09MAY01-C3738_2
gcttcttcttcaagagacagctctttttttttttccttttcttttcttgtctttctgggttttcgtttttgttcctttcactgtcccctcgccagaaggccggttgagttatttacacggttgggagcttttggaggattcttcatcatctttaaggctttttgttttcggtcaatggaggtatacggcaaaaccatggctgttgcccctgcaaatgttatttatttgtctactattctgggccgtgatggtcctatccctgttcacaaatgcgattggaaatgtcaaaacgaacatgtttgtggcaacatgtatcgctgcaaactaactggaattacacacatctgtgacaagaactgtaaccagcgaatcttgtatgataaccatagttccctctgccgggcgagcggccaggtctttcccctcactcaagtcgaggaacaggcggtcagaggcgtccggaggaagtttgatgccgacaattcctcgtcctctgatagctgtggttttaagcgcagacgcgatgcacagttccatccttctccgttcgaaagatctttctctgctgtgagtccgatcttcagccaagtcggagatggcatggatactagctagattagaaatttacgtttcttatatttatagatcctaatattaccataaaaagact

SEQ ID NO: 19726 - DNA, 681 bp, Gossypium hirsutum
  Clone ID: GOSHI-09MAY01-C3738_1
tttttttttttttttttttttttttttttttttttttttttttttcttaccctttctctttcttttttaggttgttgcagcttcttcttcaagagacggctctttttttttttccttttcttttcttgtctttctgggttgtcgtttttgttcctttcactgtcccctcgccagaaggccggttgagttatttacacggttgggagcttttggaggattcttcatcatctttaaggctttttgttttcggtcaatggaggtatacggcaaaaccatggctgttgcccctgcaaatgttatttatttgtctactattctgggccgtgatggtcctatccctgttcacaaatgcgattggaaatgtcaaaacgaacatgtttgtggcaacatgtatcgctgcaaactaactggaattacacacatctgtgacaagaactgtaaccagcgaatcttgtatgataaccatagttccctctgccgggcgaacgggcaagtctttcccctcactccattttaagaaaaaggggttcaaagggttccgaagaattttgaatcccaacaatccccctcctccgaattacttgtgtttaaaccgcaaaaccaatgcaatttccttccttctcgtttcaagaaattttctctggtttaattccaatttggacccaattcggaaaagggatt

SEQ ID NO: 19727 - DNA, 413 bp, Gossypium hirsutum
  unsure (1)..(413): unsure at all n locations
  Clone ID: LIB3148-019-Q1-K1-F8
cccacgcgtccggttctggtcccactattggtgtctgntacattgtttgctcatccgtgtgggtcattttcaacggggtctagtcttgncttaatgacaaaattgcaattctggttcaggtttgagtctcatatgcgggttcttgtttaggtgaattctgatcttttattttaaatccgttgactatgactacatcttattatattttttctagtttttatattcttgtttatttattttttttttatttttttgtttttttattttatttatttttttttttatatctgtttttttttctttcttttttttattttcctatttttcatgatttcttatttttttttttcttattttttttatattattaattttaatttattatttttttttttttaatacttaagtttctt

SEQ ID NO: 19728 - DNA, 344 bp, Gossypium hirsutum
  Clone ID: LIB3135-058-Q1-K1-A1
cgggggaagcacttgtacacgctgatgcatgtgagttgccatgttcttgcagctttgatgggggggaaaaaccaatggtgaacatccttctgtttggctggttgcagaaatgagttaatgatgtcgactttctcagcggtaatagacatttataactgcaaatggagttaatagttgcccaaaaccatgaagaactgagatggccagttatggactctgtgagaatcagatactgcttaccagaaagcttatttgtctggctgacaattatggggagtttagtttagccggtgaagtggatcttgtttagctgacatgaaacattcatgttctggtcccacaat

SEQ ID NO: 19729 - DNA, 1153 bp, Gossypium hirsutum
  Clone ID: GOSHI-09MAY01-C3728_1
gtttagtgccatattgcctttgttgaaacttttgtctcttacggtcataggattatttcttgcacatcccaaaactcaaatcattccaagagccacatttaagctcctaagcaagcttgttttcgccctattcttgccctgcctaatttttaccgaactcggtgaaagtattaccattgatagcattgctcggtggtggttcattccggtcaatgtgttaatcagtacttttgttggttgcttgccccacgcgtccgcccacgcgtccggtcgtccgccacctgagtacaagcgatttaccatcgttatgactggctttggcaatacgggaaatctatgtcttgctattgttggatctgtgtgtcacacttcgaattccccgtttgggcctcattgccactcgaggggtgtggcctatgtctctttcgcacaatgggttgctgttattcttgtctataccctggtttatcacatgatggaaccgccgttgcagttctatgaagttcttgaagaagggactgaaattgaggaacaaaggccggtcaatgatatcagcaggcctcttcttatacaagctgaatggccaggcattgaagataaagagaccgaacattctaagacaccattcattgccaggattttcaacagcatctctagtcgttcaacatccacttttcctgacattgatatcaatggtgacactagcgggagcagtcccatgtccattcggtgcttggctgaacctagagtagtcaggaagattcgaattgttgctgaacaaactcctatacagcatatacttcagccccctacaattgcatctttgctagcaatcattgttggcaccgtgcctcaattaaaatcctatgtctttggatatgatgctcccctgtctttcataacagacagcttgcagattgtagcaggtgcaatggttccttctgtgatgctcattctcgggggtatgctagctgagggtccaaatgattctaagcttggactcagaaccaccatcggcataattgtggcaaggctgttggtgcttcctttgctaggaatagggattgtgacacttgctagcaagttggatcttcttgtagctgatgatgcaatgtacagattcgtgctcttgttgcaatacactacaccaagt

SEQ ID NO: 19730 - DNA, 435 bp, Gossypium hirsutum
  Clone ID: LIB3583-015-P1-K1-A2
agcagttctgatccgtagaacttttaaaatagttatttgatattcgagatctaggtagagtagtccttagaagtaccgatatttagctgaattttataaaaatagatatgaaatctaatagagtagatctgtttagtgccatattgcctttgttgttacttttgtctcttacggtcataagattatttcttgcacatcccaaaactcaaatcattccaagagccacatttaagctcctaagcaagcttgttttcgccctattcttgccctgcctaatttttaccgaactcggagatagtattaccatagatagcattgctcggaggtggttcattccggtcaatgtgttaatcagtacttttgtaggttgcttgctggggttgtaggtggtcattatatgtcgtccgccacctgagtacaagcgatttaccatcg

SEQ ID NO: 19731 - DNA, 867 bp, Gossypium hirsutum
  Clone ID: GOSHI-09MAY01-C3658_1
tgacgacactgctgacagcatgactcattgctcaggtaccaattaattagagtgcaagcaagaggctttggagaaaattgcaagtggctagagatgtttgaagatgttgggatggtcatcttctgtgtttcattgagtgactatgaccagtactcggctgatgggactaataagatgctactgagcaagaaattctttgaaaccattgttactcatccaacatttgagcagatggacttccttttaatactaaacaagtttgatatattcgaggaaaaggtagaacgggtaccattgactcgatgcgagtggtttgatgattttcatcccctgatcagtcgtcatcgtacaaatacaaatagcaacagcattaataataaccctaccctgggacagttagctttccattatgttgctgtcaagttcaagagactttattcttcactcactggccggaagttgtatgtttcacacgtgaagggactggaacccaacagcgttgatgctgcacttaaatttgcaagggagattctaaaatgggatgaagagagaatcaacttcagcttaagtgaacactcattttacagcaccgaagcaagctccttctctcattgatgtctaatcaccgggtcagaaaaggtctgttttgtggttcatcaatgccagtgtacagtgtcatgactcatgctatggtgctttattagggtgtcagaatacaaattatgacggaatatatagtgaatctccatttcttatacagagagaccagatgtatttttgtcaaacgctacggctagttgcttcctctgtgcacaagttcatacattcatttgcaatatatgatggaaatgcatggctcagggattt

SEQ ID NO: 19732 - DNA, 699 bp, Gossypium hirsutum
  Clone ID: GOSHI-09MAY01-C3648_1
gctgctataggcgaaacttatgtttgctcaattctcggaaacttgttaacgatttctacaacaacggtctcccatctaacctctccggtggtccaaacccaagtcttgattatggtttcaagggcagccgaaattgcaatggcttcctattgttctgagctccaacacttggctaatccagtcacgaaccacgttcaaagtgccgagcagcacaaccaagatgtgaactcattggggttaatctcatctcggaaaaccgccgaggccgttgatatcttaaagcttatgtcctccacatacttggtggcgctttgccaagctatcgatttaagacatttagaagaaaacttaaagaacacggtaaagaacatcgtgagccaagtcgctaagaagaccctcacgaccggtcccaacggcgagcttcacccttcgcgggtctgcgaaaaggacttactcaaagccgtggaccacgaatatgttttctcatacattgacgacccttgcagcgctacgtatccgttgatgcaaaagctaagacaagtcctcgttgaccacgcgttgagcaacggcaacaacgagaacaacgctagcacttcgatcttccaaaagattgcagctttccggaagattgaagacctattgcgaagaagtcagaacttagttcatcagaacggaactcacatcccaacagatccgaat

SEQ ID NO: 19733 - DNA, 904 bp, Gossypium hirsutum
  Clone ID: GOSHI-09MAY01-C3678_1
cttacatttaaccctcgctcccctgtttctgcactaagagctactgctctaatgtctaatgaagtgaaacctgagcaattcgcggttctcgttagagacttgccgaatgccacttcaggtcaaactcgaaaacagcaggttgatacatacttcaaatctatatatcctgagacattctacagatcaatggtggtcactaacaacaaagaggttgataaaatctggggagagttggaagggttcaagaagaagcttgcgcgcgcagaagccatatatgcactgtcccagggaaatggtcaaggcacgagaccaaccaacagaaccggcttccttggtctctgtggtaaaaaagtagacagcatagagtactacaatgaaaagattaaggaattgacacaaaaattggaagctgaacaaaaggtcaccctccgagaaaagcagcaaggttctgctttggttttctttaccagtagggtgactgcagccctggctgctcaaagcctacatgctcagatggttgacaattggaccgttactgaagcgcccgaacctcgtcaactcatatggagcaacctgaccatcaagttttacaataggataatacgacaatatgtcgtttatattgtcgtgtttctgaccatagttttttatatgattcccattgcttttatctctgcagtcacaacccttaagaatctgagaaaacttctgccattcttgaagcctattgttgatatagctgcactaaagacggtattggaggcatatcttcctcagcttgcactcatcatatttttggcattattgcccaagttcctctttttcctctctaaaaccgagggaatccctatgggagccatgtcataagggctgcatctgggaaatacttttatttcatcgtgtc

SEQ ID NO: 19734 - DNA, 790 bp, Gossypium hirsutum
  Clone ID: GOSHI-09MAY01-C103603_1
aaaaaaaagcatcttgtatgtttccagtttgcattattcagatcataagctaacatcaaatgtacatgcgagcctgcatgcatctctaaggcatacagtcatccaaaacaaaaacataggaagtacaaaaaagaaggggaaaagaaacagtagggcaaagctaaggctacatactgcacgaaagaaggaaaacgtcgcgcaatgagatgtctccacgtgtgaatcaaaaaccctcacatctgtaagaaacgagctagctgggtcgggttgacgataccaggtatatgggctccatcagtcttgagcaaactcgccacttccacgtacctttgatgattatcctccctcggcttcgactcgaagtcgcctgctctggatctgtcgcttggctcggcgtcttctttgattcctctcctggaatcagtggctggttgttgcagttgggccgggtcccacggttggccgaacagtgtttcacgagtgaggaactcgtcggccgcgtggccagctaggagttggttggagagaaccgggcgtgcggctttctgagaagcggctaagggagcagccggcttgggtaattttgcgggtggagggcgaaggtgtaagtgttggaggtcaaaatcgtctctctcttttcgcttgacgttgttgctgggcatgaaaacccgacggggcgggagacgcatcgttttggtgttcattattgcgcccttttaggtgcatccacgtcagcaccaatctaccacaccaattaaaaaaaaaaaaaaaaaaacacgaacggcacgag

SEQ ID NO: 19735 - DNA, 899 bp, Gossypium hirsutum
  Clone ID: GOSHI-09MAY01-C3188_1
cagtggcatacaaatgcaggcaaagatcaccgtgacggagacatggctgaggaagcaccgccacttgtacgacggagccaccagacatccttttatccgcagcattcgagatgggaacatcgatatctccgccttcaaaacatggctggggcaggattacatatttgttagagcttttgtgccgtttgtagcaagtgttttgactaaagcttataaaggatcagatgatggtaacggtgatgtagaagtgatattaggaggtgtagctgctttacatgatgagatttcctggtttaagaaagaagcttttaagtggggtgttcagctctcaagtattgttcctcagaaagcaaatcaagaatactgccgatttcttgagagcttaataagcccagaagtcgaatacaccgtcgcggctgtagctttttgggcgatcgaaaccatctatcaggagagtttcgcacactgcttagaagatgacagtaaaacccctccagaactcaaggaaacttgccaaagatggggcaatgaaagcttcggagagtactgtaattccctccggaatattgtcgatcgacagctagaaaaagcgtccgatgatgtcatcacaaaagctgaagcgacactcctgcgtgttcttgaacacgaagttgatttctggaacatgagccatagaagaacctgaatctacgagactgagctgcatggtttacctttcgcagaacttgatatatcataagcaccaatattaccaaagttgcgtgcctattattgttaaatcaatggtttggtatatacataaacgtacctagaagttatggactctgtttctcttccgcctatatatgaagttgtatatatggtgatggtttttcagaattggatcaggtaaccttacc

SEQ ID NO: 19736 - DNA, 575 bp, Gossypium hirsutum
  Clone ID: LIB3583-016-P1-K1-C2
cagtggcatacaaatgcaggcaaagatcaccgtgacggagacatggctgaggaagcaccgccacttgtacgacggagccaccagacatccttttatccgcagcattcgagatgggaacatcgatatctccgccttcaaaacatggctggttcttgttttctgatcctaaatttcttgctattttatgcttaaattgcttgtagctccagaaatattttgggtttttttatatgaaaacttgattgttttggattcatataatttcaggggcaggattacatatttgttagagcttttgtgccgtttgtagcaagtgttttgactaaagcttataaaggatcagatgatggtaacggtgatgtagaagtgatattaggaggtgtagctgctttacatgatgagatttcctggtttaagaaagaagcttttaagtggggtgttcagctctcaagtattgttcctcagaaagcaaatcaagaatactgccggtaatttcatgtgtgtgtttaccaagtgtttgttgttttgattgcctcaagaatgtggatgattgggacctatgttgttcttgattt

SEQ ID NO: 19737 - DNA, 688 bp, Gossypium hirsutum
  Clone ID: GOSHI-09MAY01-C3148_1
gttgtttttgttcttggtttatctctatatctttcattccatagctttttttctggtaaaaggccatggatgggaatggaagagttcacccagattgtcctaatgctgcaaatccctaccatgaatgtggtggactctgcttagagaagattgctgaaggcaaaggaccaaaggcaaaagaaactaaaaagtcattaagttcaaaatttcttgatgcttccagaagctttggccggaaaaagaagggatccgactctctgctgagatcccctaaagcactcgagactacccctgcaataggtgcagtttatcctggtggccctaggtcacctcgttctcatttttctagaaagaaaatggaagcagaaaacggtgagtcgtattcatcttccgagcaacactctggcgagatatattcccaagatcaatcattcgagaaggcgccaattcagtactctcagccactgcatatgtctgggaaaatcacgcctcctgccgatacaccgaccaaatttacacaaacagagaaggtaaaagattccccgaagatgagttccgatgcaaatatgaacgatgagaaagtaaatgccattagctcggcttttagtttcttaatcggccaagatcacgaagagagcgacgatgaggcggcagaagtcgatccgtatctcgatcagtgtatcgtcga

SEQ ID NO: 19738 - DNA, 509 bp, Gossypium hirsutum
  Clone ID: LIB3583-014-P1-K1-D8
aaaagtctctaaatttgcttcttcagtcatgaaagagataattcagtgtgtataaaattatggatatccgtgtgcctctatcactggccaagctagcataacaacatctaggcttatcaaaaagagatacgctacccagtatcaaggctgtgacattccacatgtcaagtactttcactgttgatgttcaatattctgatgttagtgatttgcaggcccactctaacatcagtacacacacgattgggccttttccgacaataagaagtgaacggccaaaattgaaggtcaaagttcgtctgaatttgcatgggattgtatccgttgagtcagcaacactcttggaagaggaagaagttgaagttccagtttcaaaagagcctgaaaaagacaattctaagatggagactgatgaagcacctggtggtactgcagctcccagtgccaatgagacagatgtcaacatgcaagatgctaagggtacagcagatgcaacaggggctgacaat

SEQ ID NO: 19739 - DNA, 503 bp, Gossypium hirsutum
  unsure (1)..(503): unsure at all n locations
  Clone ID: LIB3583-014-P1-K1-D7
cccacgcgtccgcccacgcgtccgngagagcttccctttcccagtcttactatcatnggaaaaggcgcgggccctatatcactaggccagagctgagcanaacaacaacttgtatatgaaaaaggaatatgcccataatttttatcagcttacatccttactgctgcattaattctaagccaaaactgacacgaaaagtttggcccactaattatcaactntaacaaatatataccatataaccttattataagttactaattctgggaaatcctttttttacagtctgttctactttaaagagaaataaagcgttaagcgaagaaagtaacagtactacgtcgttagcatgcgtagtggaatcaactttccttttgcatgttgtaatttcaatgtttccatctgttagaaatgggattcttctctagatttggcttataggtcttatgaagctcttaattttactttggttcgaaaagcatttagaatttatatatattata

SEQ ID NO: 19740 - DNA, 425 bp, Gossypium hirsutum
  Clone ID: LIB3583-014-P1-K1-D2
acgaaaagtctctaaatttgcttcttcagtcatgaaagagataattcagtgtgtataaaattatggatatccgtgtgcctctatcacttgccaagctatggtaatcatatatatgtatatgaaaaaggtatatgcccatagtttctctcagcttacttccttactgctgcattaattctaagccaaagctgacacgaagaggttggcccactgcttgtcaactctaacatcagtacacactctatcgtgcctattccgaccttattctgggaaatcctttttttacagtctgttctactttaaagagaaataaagcgttaagcgaagaaagtaacactactacgtcgttagcatgcgtagtggaatcaactttcctttagcatgttgtaatcacaatgtttccatctgctgaagaagcacctgtt

SEQ ID NO: 19741 - DNA, 681 bp, Gossypium hirsutum
  Clone ID: GOSHI-09MAY01-C3078_2
cccacgcgtccggtacaaggatacagggcaacacttcaatggtgagttctcgatggcagtggggcaggccaataatttacttgaggatcagagccagcttgagtctggttgtttgagttcacatgagtgcggtccctatggtacttttgttggtgtatatgatgggcatggaggccctgagacttcacgttacatcaatgatcatctctttcaacatctcaagcggttcacctcagagcaacagacaatgtcagttgacgtaatacaaaaagcttatcaagcaacagaagaaggttttttgtctctcgttaccagacaatggcctatgaacccacaaattgctgctgttggatcctgctgcctggccggtgttatctgtggtggaaccctttatgttgccaacctcggtgattcccgtgctgttctagggagagctgtgaaagccacaggaaaggttctagccgttcagctctcagctgagcataatgcgtgtatagaatctgtgagacaggagctgcaatcattacacccggatgactcgcaaattgtagttttgaagcacaatgtgtggcgtgtaaaaggtctcatacagatatccaaatctattggtgatgtatatttaaaaaaggctgagttcaacagggagcctttgtaccctagattccgcctccgtgaaccttt

SEQ ID NO: 19742 - DNA, 871 bp, Gossypium hirsutum
  Clone ID: GOSHI-09MAY01-C3078_1
cccacgcgtccggtggcacgaacctttatgtcgccaaccttggtgattcacgtgctgttttggggagagccataaaggaaaccgaagagcatctagccattcagttgtcagccgagcataacgcttgcatagaatctgtaaggcaggagctgcagttgttgcacccggatgactcgcaaattgttgttttgaagcacaatgtatggcgtgtaaaaggtctcatacagatttcccgatccattggcgatgtatatttgaagaaggccgagttcaacagggagcctttatatcccaagtttcgactccgcgaaccttttaaaaagccaatattgagtgcagacccgtctatatcagtgcacaagctgctaccacacgataaatttgcgatctttgcatccgatgggctctgggagcacttaaccaatcaagaagccgttgacatagttcaaaagcattcacgaaccggaagtgcaaggaggctcgtaaaaacagctctacaagaagcagcaaaaaagagagaaatgcgatattccgacttgaagaagatagaccgtggcgtacgtcggcatttccacgatgacatcacggtaatcgtgctgttccttgactcgaacctcatcagcaaggctagctccgtgaagggtccgaacatatcggttagagggggcggaataaacttcccttctaatacattagctccttgtactacaccgaccgagactactggataacaaaaccgagagcctgcaatttaactgcaaactatgtatatcttgtagtgaaacttgttcttttttaacacttctgcaattaggtatcgaaattgtaagtacaactatctggtgcttgagcttttaatggcttttttttt

SEQ ID NO: 19743 - DNA, 738 bp, Gossypium hirsutum
  Clone ID: GOSHI-09MAY01-C3008_6
cgggaacgaccggagcgaccgacgcggccgaagcgcgaggcgacagagacatgacgagaggggcgggaagaatgcatgaacaaggagaaaaaggggagagcatgagagggaagccagctccaacgaggaggccagcatagtgctctggagagacaacctagcgaggcaggagcacaaacagacaaagactacaaggagccaacaccggcaccaaccgacgagcctggagagcacgaagcaaggcatactacagagccaagaatcgctgactacgagctacctactcgttcctttacatcactgacaagactgtcatgggagtctctcaatctaagaccaaatgtactactgaaggagaacaaggcaccgaatgggcctccggaggcaagatctttgcacacgcccagtggtccgccggcatttcaggtggtcagattaaccctgctgtgacctttgggttgcttctggcaaggaagctggcccttacaagggcagtgttctacatgatcatgcagtgcctgggggctatctgtggagctggtgtggtgaagggattccaaggagacaaccgatatgagatgttgggtggagtatttcttgtatatacataacatcttctttattcttaaatctctttttcttcttatcccactttatttttctcttttcctatttactcatcaccaatatattttttcttcatttattctactttctctcatctctcttctaattttc

SEQ ID NO: 19744 - DNA, 1150 bp, Gossypium hirsutum
  Clone ID: GOSHI-09MAY01-C3008_2
ccccaggttgggttgcacttgagggaaagaaaaaaaaagaagaagaagcttgaatctatttttttgaagatggagggtaaagaagaagatgttaagctaggagcaaacaagttctcagagagacaacctattgggacatcagcccagacagacaaggactacaaggagccaccagcagcacccttctttgagcctggtgaactcaaatcatggtctttttacagagctggtattgccgagtttgtagccaccttcttgttcctttacatcaccgtcttgactgtcatgggtgtgtctcagtctaaaaccaaatgtgcaaccgttggtattcaaggcattgcttgggcttttggtggcatgatctttgcccttgtttactgtactgccggcatttcaggtggtcatattaaccctgctgtgacctttggattgtttctagcaaggaaactgtcacttacaagggcattgttctatatgatcatgcagtgcctgggtgctatctgtggagctggtgtggtgaagggattccaaggagataaccgatatgagatgttgggtggtggagccaatgttgtgaaccatggctacaccaagggtgatggtcttggtgctgaaatcattggcacttttgttcttgtctacactgttttctctgctactgatgccaagagaaatgccagagactctcacgttcctattttggctcccctacctatagggtttgcagtgttcttggttcatttggccaccattcccatcactggaactggtattaacccagcaaggagtcttggagctgccattatatataacaaagaccatgcatgggatgatcattggattttctgggttggacccttcattggagctgctcttgctgcaatttaccaccagataatcatcagggccattcctttcaagaccagagcttgaaaatgatctaatcattattttgcatcttttcatagtttccttctacatgttgtccttttgtggatctacttcactgatgtgtctctcaactctttgtttcacttaatttggattatgttttatggtgttaattaatgtgtgtaaattatcctagagatatatgcttgtatttagttatcaatgaaggattcttttttatctccatatgttcccctct

SEQ ID NO: 19745 - DNA, 1102 bp, Gossypium hirsutum
  Clone ID: GOSHI-09MAY01-C3008_1
ctcgggttttttgtgaggaaaaagaagcttcaatctttggttgttaagtgggtgaaacaaaaaaaaaaaatggagggcaaagaggaggatgttaagctaggagccaacaagttctctgagagacaacctattgggacatcagctcaaacagacaaggactacaaggagccaccaccagcaccattgtttgagcctggtgagctcaagtcatggtctttctacagagccggaattgctgagtttgttgctaccttcttgttcctttacatcactgtcttgactgtcatgggtgtgtctcaatctaagaccaaatgtactactgttggtattcaaggcattgcttgggcctttggtggcatgatctttgctcttgtttattgtactgctggcatttcaggtggccatattaacccagctgtgacctttgggttgttactggcaaggaagctgtcccttacaagggcagtgttctacatgatcatgcaatgccttggtgctatctgtggagctggtgtagtgaaaggattcgaaggagacagtagatatgagatgttgggtggtggagccaatgttgtgaaccatggctacaccaaaggtgatggtcttggtgctgaaatcattggcacttttgtgcttgtctacactgttttctctgctactgatgctaagagaaatgccagagactcccatgttcctatcttggctccacttccgattgggtttgcagtgttcttggttcatttggccaccattcccatcactggaactggtattaacccagcaaggagtcttggagctgccatcatatacaacaaagaccatgcttgggatgaccattgggtgttctgggttggacccttcattggagctgcacttgctgcagtttaccaccagataatcattagagctattccattcaagaccagagattgaaatgattaaatctgtgtgtgtgtgtgtgttgggatcttcatctactttttgtgttcctactagtcctttgttgtgttgaactgcattttgaattatggtgttaatgtgtgtaaattatccctagagttgtgctgtattcagcttttattaatggaggattcttttatgg

SEQ ID NO: 19746 - DNA, 607 bp, Gossypium hirsutum
  unsure (1)..(607): unsure at all n locations
  Clone ID: AI728189.1
gggaaagaaaaaaaaagaagaagaagcttgaatctatttttttgaagatggagggtaaagaagaagatgttaagctaggagcaaacaagttctcagagagacaacctattgggacatcagcccagacagacaaggactacaaggagccaccagcagcacccttctttgagcctggtgaactcaaatcatggtctttttacagagctggtattgccgagtttgtagccaccttcttgttcctttacatcaccgtcttgactgtcatgggtgacaactattttatgaatatgcttattattattattattatcgccataaatttttatgtctgtcatgttgacatccatatatttgagtattaagtttgttgtcttgaatggctgtaaatttgttgtttcattcaaacatggttttggttttccacccttggtaatgttttttttttctttttcaatttattttacatcaaagagacaagttgattgggaaagtggacccttgaaagggccattgccagcataaaatgtggaccaatgctttagttggcaagcatggctcctcttacattttttgtttggatgtaactaaggtgttgtntttgtcaatc

SEQ ID NO: 19747 - DNA, 598 bp, Gossypium hirsutum
  Clone ID: LIB3584-033-P1-K1-F8
cggacgcgtgggtgggtggtggagctaatgttgtgaaccatggctacactaagggtgatggtcttggtgctgagataattgggacttttgtgcttgtttacactgttttctctgctactgatgctaagagaaatgccagagactcccatgttcctgtatgtactattttctacttgccataactcgattttgcaggaactattattattacttaatgtagttgatctaactatatatatgcctatattagaggtgtcaagtggaagggaacttttaggtgtctaaccactacatatcatatataaattggcttaaaagtaaatagtatttagtattcaaaagggttttagtttaggttcaacaccaaatcatgttattgagacgcttcttttgggggggggatgaaagagaaagtgttaaataagactcgagcaaagtcctttgcttcacaaaagatttgagaagcttggagaacaagagatacataaattgggcattcttgaagtgaaaagtaacatggagggtttttgggcaattttggttcctttattaaaaaatggaacaattagttttagcatgaaatttttatgggaaaaat

SEQ ID NO: 19748 - DNA, 535 bp, Gossypium hirsutum
  unsure (1)..(535): unsure at all n locations
  Clone ID: LIB3146-003-P1-K1-G7
actgacgtactcggtctcggacattcccgggntcgactccacgccgtctcgcgttttcttctgcttactgatgcctaagagtaaatgctcagagacctcccatgnnttcctatctgtggctcgcacttccgcattgggctttgcacgtgttcttcggttcactttggccaccacttcccatcacttggaacctggtattaaccccagcataggcagtcttggagcctgccatcatatactaatcaaagaccatgccttgggatgaccacttgcggtgttctgggtntggaccccttcatntggagctgcaccttgctgcacgtttaccaacctagataatcacttagagcttattccattcaagaccagagattgaaatgattaaatctgtgtgtgtgtgtgtgttgggatcttcatctactttttgtgttcctactagtcctttgttgtgttgaactgcattttgaattatggtgttaatgtgtgtaaattatccctagagttgtgctgtattcagcttttattaatggaggat

SEQ ID NO: 19749 - DNA, 451 bp, Gossypium hirsutum
  Clone ID: LIB3197-054-Q1-M1-D3
cccacgcgtccgcccacgcgtccgcccacgcgtccgcccacgcgtccggagcaaacaagttctcagagagacaacctattgggacatcagcccagacagacaaggactacaaggagccaccagcagcacccttctttgagcctggtgaactcaaatcatggtctttttacagagctggtattgccgagtttgtagccaccttcttgttcctttacatcaccgtcttgactgtcatgggtgtgtctcagtctaaaaccaaatgtgcaaccgttggtattcaaggcattgcttgggcttttggtggcatgatctttgcccttgtttactgtactgccggcatttcaggtggtcatattaaccctgctgtgacctttggattgtttctagcaaggaaactgtcacttacaagggcattgttctatatgatcatgcagtgcctgggtgctatctg

SEQ ID NO: 19750 - DNA, 245 bp, Gossypium hirsutum
  Clone ID: LIB3120-043-P1-K1-C3
ctttgagcctggtgaactcaaatcatggtctttgtatctgatcccgaagatgactcatagggcggccttcttgttcctttacatcaccgtcttgactgtcatgggtgtgtctcagtctaaaaccaaatgtgcaaccgttggtattcaaggcattgcttgggcttttggtggcatgatctttgcccttgtttactgtactgccggcatttcaggtggtcatattaaccctgctgtgacctttggat

SEQ ID NO: 19751 - DNA, 216 bp, Gossypium hirsutum
  Clone ID: uC-gsronu33B074b09b1
cttattctcgtgatcggaggcggggcacggcccctctttttggacccttcattggagctgcacttgctgcagtttaccaccagataatcattagagctattccattcaagaccagagattgaaatgattaaatctgtgtgtgtgtgagtttcgttttatttctctttatatcctttaatattttttttttatatattttacttattttttattatt

SEQ ID NO: 19752 - DNA, 553 bp, Gossypium hirsutum
  Clone ID: GOSHI-09MAY01-C3028_2
cccacgcgtccgcccacgcgtccgcccacgcgtccgattgttgtcaagttatcgctgccggcccacacctccttcctcaattcattttatcactgcagcaacaggtaactaccacctcatcaacatgtcgtctcaccacctctctgagttggactccaccaccgattccgtcgcgtcctctccacgctccgagcaccatgctcctcatgatgcccgtgtacggttcatgtgcagtttcggcggaaagatccttccacgtccacatgataatcagctccgttatgccggtggtgatacccgcatcgttgccgtccatcgttccacctccttcgcagccatcctcaccaagctctctaaactctcaggaattgccaacgtgagtgttaagtatcagcttccgaacgaggatcttgacgcgttgatttcagtgatgaccgatgaggatctcgagaacatgatggaagaatatgatcggctagcacagaatcataaccctcggttgcggattgttcttttctccaaaggcgatgactctcgaaccagtagcatcagc

SEQ ID NO: 19753 - DNA, 1572 bp, Gossypium hirsutum
  Clone ID: GOSHI-09MAY01-C3028_1
ttggagaatccatcgcactccgtctcacttttcttttatccgtggtgcttatagcagcaacaggtaactaccacctcatcaacatgtcgtctcaccacctctctgagttggactccaccaccgattccgtcgcgtcctctccacgctccgagcaccatgctcctcatgatgcccgtgtacggttcatgtgcagtttcggcggaaagatccttccacgtccacatgataatcagctccgttatgccggtggtgatacccgcatcgttgccgtccatcgttccacctccttcgcagccatcctcaccaagctctctaaactctcaggaattgccaacgtgagtgttaagtatcagcttccgaacgaggatcttgacgcgttgatttcagtgacgaccgatgaggatctcgagaacatgatggaagaatatgatcggctagcacagaatcataactctcggttagctcggttgcggatttttcttttctccaaaggcgatgactctcgaaccagtagcatcagctcacttttggacggttcggttaatcgtgagcactggttcttagacgctcttaacagtggagccaatgcatctgggctcgaacgcggccgttccgaggtttcctcgtttgtatcggaggtacccgattatttattcgggttggataactccgatgaggcccaaccccgtggcccgaatttaagtacacgtcagctcttgcatgagaatgtctcggtttcggacccgggttcgccggccccggttgtttcttcatcgcccttttgttccacctcatcagctccagttgttgtaccttcaatgccagatctgccaccggttaagactaaaccagataaccccgaaccgggttttgagtcaaagcagaatcaaacagagagcttggtggagcaacccgttttgcagccaacgacatattcgggtagtcctatgtggcactatattccgggttctcattactctgtacctcccgctcaacaaatacctgtatattatgttccgggtccagttcaatccgggaaatccgcaggttcaacctgttcaaatccggccacagtatgtccagcagtatccaatgtcaacgggtcaaataccggttgggtatcatcggccggttgctggtgtgggtcaaggatacaggccagtaacgcacgtggacccttatgatcccgcattaagagtggctcctgatggtgtgaaacaacctatatattatggagttagaaatgcgggtgcagtgccagtttactcaggaattgtggtaccgggtggggaggaattgggtagaagcgggtcggattcaacacggggtcgggtctcgcaataaggccggaagtgagcgtgtgttaaataatggcaaggtaatttcgttttagtatggttggtttgatgattatcgtgaactgggttttaataaatgctagtttgtataggctggttttggaagttttttgtgattaaaactgtgaatggcttctgattttgaaacaaaatgtatagaaagtcagaaggttttctctaaatatgtagatataatagtgttttctttgcaact

SEQ ID NO: 19754 - DNA, 220 bp, Gossypium hirsutum
  unsure (1)..(220): unsure at all n locations
  Clone ID: LIB3148-054-Q1-K1-G10
agttagaggaaaaccggggacaggggtattttaggcgctatggtatagacgcaaaatgaaggtattcacgtgtgtgtaactgtgaatggcttctgattttgaaacaaaatgtatagaaagtcagaaggttttctctaaatatgtagatataatagtgttttctttgcgcaaaaacaaaaatgatggaaaaaaggataaaaaattnggggggggccccttt

SEQ ID NO: 19755 - DNA, 1399 bp, Gossypium hirsutum
  Clone ID: GOSHI-09MAY01-C3348_1
tcgcccacgcgtccgcttttccatccatttcttactcactctgtctctcccaactttgggccatgctagatctgccccttctttcaatatttgaaaaccaagaaactaattttaatttgaatcatgttgcggtacgactccacctcgtcatcagcgggaagtagcagtggcagcttatcatcctcctcctcctcgtccaagccaccgcagcaagatattgatggactactcgccggtgctggttataaagtccggtcgtcggagttacgacaagtagctcaacgactggaacgactcgaaaccgccatgggtaattcgcctgcagatttctctcaacttgcctccgatgctatactctataacccttctgatctggcctgctgggtcgactcgctgctaactgagttcgctgagcctcctcccacttgctcctccgacttcatcgtggatcccgtaaacaatcaaacggtggtaaacagcgcgtggaccaccgccgaacctcatacaccgcaggtgcaccagaatattacttacgacgagcaacagagtttggataatcagttgacggttgtcacggccatggaagaagattcgggtataaggctggtccacatgttgatgacttgtgctgagtgcgtccaaagtggagacctctcattggctacttcattgatcggcgacatgcaagggttactgactcatgtcaacaccgtttgcggtatcggttaagttgccggccattttatcgacgctttaagccgccgtattttccaaggaagggcggtggctctgtcaacggtggctcggcttttgagaacgagattttgcatcatcatttttacgaagcttgtccgtacttgaaattcgctcacttcacggccaatcaggcgatcctcgaagctttcgacggtcacgattgcgtccacgtggtggatttcaatttgatgcacggcctacaatggccagctttgatacaagccctggccttacgtcccggcggaccccctttgctccggctcaccggcattggaccgccatcaccagatggccgtgactcgcttcgcgagatcgggttgcgactcgccgagttggctcggtccgtcaacgtccgcttcgccttccgtggagtcgcggcttccaggctggaagacgttaagccttggatgcttcaggtgaatccaaaagaagcggtggcagttaactccatcatgcagcttcaccgcttactcgggtctgatccgaatcggaattcccctatcgaaacggttttaagttggatccggagcttaaacccgaaaatcatgacagtcgttgaacaagaagcaaaccacaaccagcccggttttctagaccgatttaccgaagctcttcattattattcaaccatgttcgattcttt

SEQ ID NO: 19756 - DNA, 427 bp, Gossypium hirsutum
  Clone ID: GOSHI-09MAY01-C3378_2
atggttttgagggttttttaatagttgattggtggatatagagtagtgggtagcggtgagatggataaaaccgcacaagaaaaggagcctaaaacacttcctgctagtagttctcaggagccatcttcaaccactaattcagctggtccagcaaatgcagactggtcaggatttcagcaggcatattctcccattcctccacatgggttcttggcatcgagtcctcaagctcccccatatatgtggggggttcagcatattatgcctccatatggtaccccaccacatccttatgttgcaatgtatcctcatggtggaatatatgcgcatccatccattcctccaggatcctatccttttagtccttttgctatgccttctcctaacggcattgttgaggcttctggaaatactcctggaaacatgg

SEQ ID NO: 19757 - DNA, 468 bp, Gossypium hirsutum
  Clone ID: LIB3583-050-P1-K6-D10
ttcatttggtttgttcttcgcatgttgtagggaggggtgaggggcttttagaagttggttgctggatatagagaatgggcagcagtgagatggataaagctgcaaaagagaaggagccaaagacgccgcctgctattaccgcgcaggagtcgtcatcgaccactaactcgggttcagtaaatgccgagtggtctgggtttcaggcatattctcccattcctccacatgggttcttggcgtcaagtccccaagctcccccatatatgtggggagttcagcatattatgcctccctatggtaccccaccacatccttatgttgcaatgtatcctcacggtggaatatatgctcatccatcccttcctccaggatcttatccttttagtccttttgctatgccttctccaaatggcattgctgaggcttctggaaatactcccgggtgcttggaattgtatggcaagcctc

SEQ ID NO: 19758 - DNA, 701 bp, Gossypium hirsutum
  Clone ID: GOSHI-09MAY01-C103323_1
aaatcaaaatattatttgattgatctgaaaaatattgtaataaatacgttgatggaaccataatccaatctgatatgatccctaacttaattgtatttccattccataattcgaaggacctgtttcattctttataaacatgggtgacttcctttaattagaagaaaagctcattgcttggactaatctaatcactatttcagtccacaaatcccttaaataaaaacttaaagcttttcaagatatgtaaaccgagagtatgaacactaatacaacactcgattcgagtctgaaagaccaaagagtgcccaaaaccggagagtttgatgttgcctaagatggagccccgaggtatgaagcaagccgcaaaatgtcactgaatattccaccggctgttacttgggcaccagcacctggaccacggactatcagtggctgctccttgtacctcttagttgtgaaagctatgatgttgtcggatcctgagagttgagcaaatgggtgacttttgctgtatcttcgtagctccacaactcccttttggttaatggcatccactacaccgacatatcttaggacttcccctgattcctcagcatcctgtctctccttagccaagtctttgtcaaactcaggtaattgcttcataaactcttcagcagatgcagtcgcacgtagtggttccggaaccagagtctgaa

SEQ ID NO: 19759 - DNA, 739 bp, Gossypium hirsutum
  Clone ID: GOSHI-09MAY01-C3338_1
cccacgcgtcgcggacgcgtgggctttcctaagccatatttgtttcttttcttttagctaattccatacttctctttcaagaaatcagtaattctttaaacccttctaatggcttcacgtgatgccactgttgagccaattacaagctcggtttccgatacaatgctcccgtctgaaaccggagaaaccaagcttccggtgaagaaaatcccaggtgattatgggttacctttcattggtccaatcaaagaccggctcgattatttctacaaccaaggtcgggacaaatttttcaaatccaaaattcaaaaataccaatcgacagtaatccgaaccaacatgccaccaggtccattcatcgcttcgaaccctaaagttattgctttacttgacggaaagagctttccaatccttttcgacgtatcaaaagtcgaaaaagaaaaccttttcactggtacttacatgccatcaaccaacctcaccggcgggtatcggattttatcctatcttgatccgtcggaacccacacacactatgctcaaacaactacttttttttctcttgaaatcgagtagtaaccgagttttccctgagtttgaagcgtgttacactgagttattcaaaacggtcgaaaatgaactcaatgaaaaaggccaaagtagttttgagaaacctaatgaacaagctgcatttaatttcttaggtagagcttatttcggttcaaaacccggttgatact

SEQ ID NO: 19760 - DNA, 453 bp, Gossypium hirsutum
  Clone ID: GOSHI-09MAY01-C3298_7
gcgccctctcgtgcgcccacgcgtgcgcccacgcgtgggcccacgcgtgcgcccacgcgtcctcggacgcgtgggtgacgagccaatgactccaggtcagtgcaacatgattgtggacaggcttggtgattatctcatagaccagggtctttgatcactttggtgcaaccctaattgttgcaagttcttcctggcttcttctatacaaaagtgcatctaccaccacctcttgtaatggttggctgcaattaaataatagtattactagtattaaagtcgtgtggaaccttttccagaaacaataggcttggtgtttgtaatagtgatatatgcttgtgatccttttgctttgtttctgtgcttgcttgatggatggtattgtcaagattgtggagtgaggtactttgtctaaattttacaatgaattgttctagttgatttggtaaatccatg

SEQ ID NO: 19761 - DNA, 799 bp, Gossypium hirsutum
  Clone ID: GOSHI-09MAY01-C3298_5
gtcaaacatttttctcacttatttattctttcatttatttatttgtaaaaactcacacaagtttaggaagaagaagaagatgtcgtggcaaacgtatgttgatgatcacctgttgtgtgatatcgaaggcaaccatctctctgccgctgctatcatcggccaagacggcagcgtttgggctcagagctccaatttccctcagtttaagcaagaagaaatcaatggcatcatgaatgacttttctgaacccggatcacttgccccaaccggattgtaccttggtggcactaaatacatggtgattcaaggtgaaccaggagctgttattcgagggaagaagggacctggaggtgttactgttaaaaagaccaatcaggccttgatcatcggcatctatgatgagccaatgactcccgggcagtgcaacatggttgtggaaaggctgggtgattatctcattgatcagggtctttgatctctttggtgtaaccttaattgttgcaattcttcctggcttcttctatacaaaagtgcatctaccaccacctcttgtaatggttggctgcaattaaataatagtattactagtattaaagtcgtgtggaaccttttccagaaacaataggcttggtgtttgtaatagtgataatgcttgtgatccaaaaaaaaaaaaaaaaaaaaaaaaaaaaaaaaaaaaaaaaaaaaaaaaaaaaaaaaaaaaaattaataaaaaaaaaaaataaaaaaatataataattattttataggtttggaaaaaaaaaaaataaaaaataggggg

SEQ ID NO: 19762 - DNA, 684 bp, Gossypium hirsutum
  Clone ID: GOSHI-09MAY01-C3298_4
ccgggtcgcccaacgccttccgaccattttcctcctttttatctttattacacgcacccaaaaaataaaacccttgggaaaccaaagaaggaagaagaagatgtcgtggcaagcttacgtagatgatcacttgatgtgtgaaatcgaaggaaaccatctctctgccgccgctatcatcgcccacgacggcagcgtttgggcccaaagcgccagtttccctcagctcaagcccgaagaaattagtgccatcatgaatgactttaatgaaccgggttcgctcgctcccaccgggttgcacctcggtggcacgaaatacatggtgatccaaggcgaaccgggagctgttatccgagggaagaagggacccggaggtgttactgttaaaaagaccaatatggccttgattatcggaatctatgatgaaccaatgacacccggccaatgcaacatgatcgtcgagaggctcggcgattatctcctcgaacagggtttatgattctcttcagtgtgtgtccttatttgaatgcatttcttctcgggtcttttttctatatgaaaaaaagatacatgcatcgtacgtctccgtattactcgtatttaaatgttaatagtttggtggggtggtatgatttcggtttgttgtccacatgttatatccaactctttgtctagaacaagtgtact

SEQ ID NO: 19763 - DNA, 906 bp, Gossypium hirsutum
  Clone ID: GOSHI-09MAY01-C3298_3
ttttagcgctatatgcctatatccccgtgtctgtcactccgctcagcttcgcccctttacagccaaattcctttctcgagcgtttcttttttaactctccagttctcaacgaatccatagaatttcaccaagaagaagaagaagatgtcgtggcaaacatatgtagatgagcacttgatgtgcgaaatcgatggcaaccatctctcctccgccgccatcgtcggccacgatggcagcatttgggcccagagctccaatttccctcagttcaaacaagaagagattaatgccatcatgaatgactttgctgaacctgggtcacttgctccaactggattgtaccttggtggcacaaaatatatggtgatccaaggcgaacccggatatgttattcgagggaaaaagggatccggaggtattactattaaaaagtccaatatggctttgctcatcggaatctacgatgagccaatggctcccggccaatgcaatatggttgtggaaaggcttggtgattatctcattgatcagggtttttgatcttgctgctgtggcctattttgtttcaattcttctctatttctatacaaaactcgtatccaccacctcttatagtgatggttgggtgcagttgaataatagtattaccagttactagtgtgaaactcatagagaactcaacgaaaagctcagtgtttgtaatggcgatgttattgatcgcttacttggtatttgtgccttgtttgatgtatggtatcatgaagattgttgaggtccaattgcctaccttaacaattctggattttttttcttttggtggtctttcttattaattatattatttttaattttcaattgttattttttttttttaatttttatttttttttttatttttttttttgg

SEQ ID NO: 19764 - DNA, 800 bp, Gossypium hirsutum
  Clone ID: GOSHI-09MAY01-C3298_2
ccttttcgtacgcccacgcgttcgcggacgcgtgggaacattttctcctttttatctttaaaacacgcacccaaaaaataaaaccctttgaaaaccaaagaaggaagaagaagatgtcgtggcaagcttatgtagatgatcacttgatgtgtgaaatcgaaggaaaccatctctctgccgccgctatcatcggccaggacggcagcgtttgggcccaaagcgccagtttccctcagctcaagcctgaagaaattagtgccatcatgaatgactttaatgaaccgggttcactcgctccgaccgggttgcacctcggtggcacaaaatacatggtgatccaaggcgaaccgggagctgttatccgagggaagaagggacccggaggtgttactgttaagaagaccaatatggccttgattatcggaatctatgatgaaccaatgacacccggccaatgcaacatgatcgtcgagaggctcggcgattatctcctcgatcagggttattgattctcttcggtgtgtgtccttatttgaatgcatttcttcttgggtttttttctatacgaaaaaaagaaacatgcatcgaagcgtctccgtattactcgtatttacatggaaaaagtttgtaatggttatgttttatgatctctttgctttgtttttatgtattttgtttgatggatactatgaaggttgtggagtgaggtacttttggtttttcttcttttacatttacagtggataattctactggatttgtttaatttaattgaccttttgtttcggtttaaaaaaaaa

SEQ ID NO: 19765 - DNA, 887 bp, Gossypium hirsutum
  Clone ID: GOSHI-09MAY01-C3298_1
cccacgcgtccgcccacgcgtccgcccacccccccgcccgcgcaaatactttcttggtcttcatttgttttcctccaaaaggaacaacagagaagaaaacttcatcaaacaaggaaaaaacttgaagtaaaacaattgagagaagatgtcgtggcaagcgtatgtcgatgatcacttgatgtgtgatatcgagggcaaccatctctctgccgccgctatcattggccaagacggcagcgtttgggcccagagctccaatttccctcagttcaagccagaagaaatcactggcatcatgaatgactttgctgaacctggatcgcttgctccgactggattgtaccttggtggcacaaaatacatggtgatccaaggtgaacccggagctgttattcgagggaaaaagggccccggaggtgttactgttaaaaagaccaacctggccttgatcattgggatctatgacgagccaatgactccaggccagtgcaacatgattgtggaaaggcttggtgattatctcatagaccagggtctttgatcactttggtgtaaccttaattgttgcaattcttcctggcttcttctatacaaaagtgcatctaccaccacctcttgtaatggttggctgcaattaaataatagtattactagtattaaagtcgtgtggaaccttttccagaaacaataggcttggtgtttgtaatagtgataatgcttgtgatccttttgctttgtttctgtgcttgcttgatggatggtattgtcaagattgtggagtgaggtactttgtctaaattttacaatgaattgttctagttgatttggtaaatcaattccaagctttttgtctaaaaaataaagataaaaataaaaaaaaataatac

SEQ ID NO: 19766 - DNA, 507 bp, Gossypium hirsutum
  Clone ID: LIB3584-016-P1-K1-G9
cccacgcgtccgcccacgcgtccgcccacgcgtccgcccacgcgtccgagaaaacttcatcaaacaagggagaaacttgaagtaaaacaattgagagaagatgtcgtggcaagcgtatgtcgatgatcacttgatgtgtgatatcgagggcaaccatctctctgccgccgctatcattggccaagacggcagcgtttgggcccagagctccaatttccctcagttcaagccagaagaaatcactggcatcatgaatgactttgctgaacctggatcgcttgctccgactggattgtaccttggtggcacaaaatacatggtgatccaaggtgaacccggagctgttattcgagggaaaaagggccccggaggtgttactgttaaaaagaccaacctggccttgatcattgggatctatgacgagccaatgactccaggccagggcaacatgattggggaaaggcttggtgattatctcatagaccagggtctttgatcactttggtg

SEQ ID NO: 19767 - DNA, 493 bp, Gossypium hirsutum
  unsure (1)..(493): unsure at all n locations
  Clone ID: LIB3585-038-P1-K1-A1
cccacgcgtccgcccacgcgtccgcccacccgtccgtttggttttcttccaaagggaccaccagagaggaaaacttcatcaaacaaggaaaaaacttgaagtaaaacaattgagagaagatgtcgtggcaagcgtatgtcgatgatcacttgatgtgtgatatcgagggcaaccatctctctgccgccgctatcattggccaagacggcagcgtttgggcccagagctccaatttccctcagttcaagccagaagaaatcactggcatcatgaatgactttgctgaacctggatcgcttgctccgactggattgtaccttggtggcacaaaatacatggtgatccaaggtgaacccggagctgttattcgagggaaaaagggccccggaggtgttactgttaaaaagaccaacctggccttgatcattgngatctatgacgagccaatgactccaggccagtgcaacatgattgtggaaaggcttggtgatta

SEQ ID NO: 19768 - DNA, 488 bp, Gossypium hirsutum
  unsure (1)..(488): unsure at all n locations
  Clone ID: LIB3584-010-P1-K1-B12
accctggggggggggggggggggcctctactacactcacttctgtccttgagtcaaacatttttctcacttatttattctttcatttatttatttgtaaaaactcacacaagtttaggaagaagaagaatatgtcttggcaaacgtatgtaaataatcacgggggggggggggtttaatcctttcatcnctctnccnctnctatcatcngccaagacggcagcgtttgggctcagagctccaatttccctcagtttaagcaagaagaaatcaatggcatcatgaatgacttttctgaacccggatcacttgccccaaccggattgtaccttggtggccctgaatacatggtgattcaaggtgaaccaggagctgttattcgnggganggagggacctggaggtgttactgttaaaaagaccaatcaggccttggtcatcggcatctttgatgagccattgactcccgggccgtgcaacttggttgtgg

SEQ ID NO: 19769 - DNA, 387 bp, Gossypium hirsutum
  unsure (1)..(387): unsure at all n locations
  Clone ID: uC-gsronu33B002h02b1
atttgttctttttagaagaaaactncatcacagggggggggaactttaagtaaagcaattgagagaagatgtccgggcaagcggctgtcaatgatcactgtgtcagtgacttcggagacaaccatctctctgccgtcgatatattggacacgacggcagcgtttgggcccatagcgtccaatctgccctcacttcaagccagaagaaatcactggcatcatgaatgactttgctgaacctggatcgcttgctccgactggattgtaccttggtggcacaaaatacatggtgatccaaggcgaacccggagctgatattcgagggaaaaagggccccggaggtggtactggtcaaaagaccaacctgggcttgatcattgggatctat

SEQ ID NO: 19770 - DNA, 292 bp, Gossypium hirsutum
  Clone ID: uC-gsflnu33B064e03b1
ttcatctttaaaacacgcacccaaaaaataaaaccctttgaaaaccaaagaaggaagaagaagatgtcgtggcaagcttatgtagatgatcacttgatgtgtgaaatcgaaggaaaccatctctctgccgtcgctatcatcggtcaggacggcagcgtttgggcccaaagcgccagcttccctcagctcaagcctgaagaaatgagggccatcatgaatgactttaatgaaccgctttcactcattactaccgaggtgtacgatgagggggcactctacatggtgatccaag

SEQ ID NO: 19771 - DNA, 1845 bp, Gossypium hirsutum
  Clone ID: GOSHI-09MAY01-C3288_1
aaaaatcagagcgagagcgactaatgagagggaaaggagagagaaagagaggcgacgaaaagaccgaattgacctcggctttcttttgaaattaccctttcttcttcttcttcctcgtcggcgtcgtcgccggcgttgttctcgtcgtcttcggcatcaactccgatctctctctctcgctcgccgtagattccttttcatttcttaaacatgaacgagaaggccagcgttaccaaggagctcaacgccagacaccgaaagattattgaaagtcttcttaaattgccggagaatagggaatgcgccgactgcaaagccaaaggtccgagatgggcaagtgtgaatttaggtatctttatatgcatgcaatgttctgggatccacagaagtcttggggtacacatatcgaaggttcgatctgctacactagacacatggcttcctgagcaggttgcttttattcaatcaatggggaatgaaaaggcaaacagttactgggaagctgagttaccccctaattatgatagagttggaattgagaacttcatccgtgcaaagtatgaggaaaaaagatgggttcctagagatggaaaatccaaatcaccatctagaaggttggacgaaagggctccctcacattggcagagacctactgaaacagtggtcatgggcaccttagtaattccgagaattcatttgaggaaaggaggaacaaacaagcacttggtcagaaagaaaatcttcctgcaacaagagttagtcttcctgttcctcctaagggacctgatcaggttccacccgtacagaagcctgaaccagttgttgcgccagctgaggcaacaaagccagccgtagagactgctcccgtagccattgctcctaaagtcgatcccgcgcctccccttttcaacatgctgtccttggatgatggtccaagtgagaatggttctgaggcaacttctactgatgattgggcaggcttccagtctgctgccggaggggcctccacaactgacgagcccaatccaccaaaacctgctgaaagtaataccaagtctactagtggaattgaggatttatttagtgatttacctccattaacaaccaaccaagtcccagagaagcctcaaaaagatgttaaaaatgatattatgagcctctttgaaaagtccaatatggtgtcaccttttgctatgcatcaacaacaactagctatgctagcacaacaacagtcccttctcatggctgctgcagctaaatctgctcctggaaatgctcaacagcctccatctaacggcacaaacataccctctcaagcttggccaaacattggctaccaattccctggaatgatgatgcccgttgctgggcaggctgatctgcagaaacttatgcaggctatgaatatgggacagacgcaaacggcgaactcatctgcgtatccatcatccagcttttatggattgggacaagttgccccatcaaatgctgttgcaacgaccggagcaagcaagcctcaatcagcttccccagctccgtccccaaatccttcgcaaacaggtaacgattacgatttttcatccttgacgcaagggatgttcacaaaacactgattcaggtctggtttccgatgaccaatggctttgtcctacttactatacccaaaaagttattttcacaggaatttagagctttggaagggtttttacagggaatttgattgtaaaccatgtgtagatgcagtttcagttattttttttgtttttcttttcatatttgagtgatgtatgagtagatttatatgccaatactttaataaaagatagtttaggttgaattggattg

SEQ ID NO: 19772 - DNA, 355 bp, Gossypium hirsutum
  unsure (1)..(355): unsure at all n locations
  Clone ID: LIB3135-003-Q1-K1-F8
nncnnttttcttctttctttctttttttggctttctcanaaccnaaactaaaaaacatcgcgggcaggtaaggattacgatttttcatcattgacgcaagggatgttcacaaaacactgattcaggtctggtttccgatgaccaatggctttgtcataattactatacccaaaaannnnntttcacaggaatttatagctaattaagggcccctacagggaatttgattgtaaaccatgtgtagatgcagtttcagttggggnnnnncgccnnncttttcatatttgagtgatgtatgagtagatttatatgccaatactttaataaaagatagtttaggttgaattggctttct

SEQ ID NO: 19773 - DNA, 950 bp, Gossypium hirsutum
  Clone ID: GOSHI-09MAY01-C3248_1
gttcaattctccccctcttgtatcttctctttcctttttttttttcaattcaaaacccagctccaggccaagccaagggttcaacctgcagttgggtctttaaggttgttccttggaataaagacggaacctgagaaggtgattggtggtgttggtgaggctgaaatggatggttcaaaaccagttatggaggaaacagaaactgagggtcaagtcccaatggaggccgagactggagctgctgaagttaaagaccaagttcaagttgaagaagatgtgagattggaggctgatcagctggttggtgacaacccagattcagtagcacaacaggccattgaagatactagcaaagctctcattgttgttggtgctcaaaatgaagaaaaaatgaagcctgaagagagtgttggtgttgaagacaaatctttagctgaaactgataccgggatgggtgttgttgaccatgacgatgagggtggtgacggtggtgttggtggtggccccattcattcacatgataatggtctttatggaagccccaactctgacatgaaaccccaagatgatgaccatggcattgacaatggggaacagttaaaggacttgtctactgaaagggaaatgaatatgcaattagcaactgaacttggtgataaaaaccctaatctatgctttgataactcagggtcagacactgaggaagaacaagcagcttttgtgaaggaggttgaagccttttacaaggagaagaacctggaattcaagcaccctaagttttacaaggaggatctaaatttacttaagttatggagagctgtcattaaattaggtggctatgaacaggtgacctcatgcaaattgtggaggcaagtgggcgaatcatttaaccctccgaagacctgtactactgtatcgtggacattccgtatcttttatgagaaggcact

SEQ ID NO: 19774 - DNA, 945 bp, Gossypium hirsutum
  Clone ID: GOSHI-09MAY01-C3268_1
cccacgcgtccgcccacgcgtccgattttgaaactctcccactgacttcattcttttgatttctacagtccggctgtggtacactctcactactcatcatgccttctgtacatctcttctctcctcttaagcgattctgttgctaaaatgtgggttagaccattcgctgatcatgggatatattcaaatcttaactttctggctctggacttcatctcgtgaatatcattttgcccttcgacaagcgatagcttctgcgacaaaagaagaagccacccctctatgaaattctgtacaagagatgagaaaatggtctttgctgtctctgaccacgatccctgacgccggttggtggttcctctcgtcttaagccccattaaaatttatttttactacctacccaggtgggtgattccatttaacatcaaccttaggatcattatgggtatttttaccagtcccatcaagttcatgtaaaaaactttgaatatattttgctgtctcgtgacctgatctatttgtgttttcatgtattcgagcgttacgatctccccaaatggcccaaagcacaccaaaaaagattctgcactgatctcgagagagaaaatcaaagactttggtggtccattgtttctgcttccacaccacatcgagggcatgttgagttatttgctagtctcctaattaacatgtttgcccgagtaggcagatagttccaagcgattttggagattgtaattttaatcttagtaggtagatctatgcaccagagtttttttgtaaaaatccctatagacgttttgtacaatgtaagctctaggatcaccactttgtaatagtttgtaggcactccgaactgaaaaatctcccgaatgttctctgttccaagccaaaaagtctgtttgaggttccatcgccaagggtatacgaaggatcaattcagct

SEQ ID NO: 19775 - DNA, 528 bp, Gossypium hirsutum
  Clone ID: LIB3825-013-Q1-K6-B3
gtacactctcacttctcatcatgccttctgtacatctcttctctcctctaaagcgattctgttgctaaaatgtgggttagaccattcgctgttcatgggatatattgcaaatcttaactttgtggctctggactccatctcgtgaatatcattaagccctttgacacacgatggctactgcgacaaagaaaaaaaccacccctctgtgacaaactgtacacacacatgacaaagagatgcttttggctatgtgtataccaccatccctgtacgcccccagaggcccgccttttactgtcaggcacccatagcaaggcattttgactacctacccacagatccattagcataaaacaatgacctcaagaaacatgatgtatgcgtagagaccacacccctggcgaggatgtgtgacgactaaatctatatttcccgaccgtcaaaagctgatcaaagcttatcttcaatgcgatgaacccttcaatctccctagatcatcccctactggcggctatgcagatatgcaaa

SEQ ID NO: 19776 - DNA, 1691 bp, Gossypium hirsutum
  Clone ID: GOSHI-09MAY01-C3218_1
gtttcttgacaacctcacaaatatatatgtgagattcaaccgtaagagacttaaaggccgtactggagaggaagactgccgtatggcactctctactctttataatgtgcttctgccttcatgtaaggttatggccccctttacaccattcttcactgaggttctttatcaaaacatgcgaaaaatctgtgatggagcagaggaaagcatccattattgtagtttccctcaagaagaaggaaagaggggggagcgaattgaagaaagtgtggctagaatgatgaagataattgaccttgcccgcaacattcgcgagcgtcacaacaagcctctcaaaacacctctgagggagatggtagttgttcatccggatgaggactttcttggtgacatagttggcaaattaagagagtatgtactggaggagctcaatataaggtctcttgttacatgtaaagacactttgaagtatgcatccattcgtgcagagcctgattttagcgtattaggtaagcgactaggaaaagctatgggagctgttgccaaggaaatcaaagccatgtctcaggaagatatcttagctcttacgaaagctggagaggtgactattgctacacactgtttgaagctgactgaaattaagcttgtgcgggaatttaaacatcctgatggcatgacagataaagagatggatgcagctggagatggtgatgttttggtggttttggatatacgtcctgatgagtcattgtttgaagctggtgttgcacgtgaggtggttaatagaattcaaaaatcacgaaagaaagctggccttgagccgacagatatggtggaggtctactttgagtcattggatgaagacaagtcagtcatccagcaagttttaaactcacaggaaaactacattaaggatgcaattggatctccattgctttcctctgacattatgccgctccatgcagtggtgcttagcgaagagattttccatggcatctataacatgtcatttaaaataagcttggtcagaccagcccttgttttcaaggcaaattctattctcgccttatatgcaggaaattctaaatttgcacaaggcctgcagatttaccttctgtcaagggaccattcctgtttgaagtcggagtttcagcttggacgtggcaagataaaggttgattgcattgagaacttgcccgcagtggaagtgaagctgggagaacatgtcttcttgacagtgggtgattactatttgacagaacggaagagccattgattatatgttttaataatctgtgcctccgactgagcacagaggataaaatccaatttacagaaaatcaaagagtcaagagctggacagatatgatacttacagatgagatagttaagagaggaaaatgtttcatattttaaaaaaactagcaatctttttggcatctaactgttgtgaagaaatctagattcagttttctatttatagccatttgggagtatggttgctcaattctgtagaaaaattttgttacaattatcattatgtttacggtttgtttttgtgaaaaaaaaaaaaaaaaaataaaatatatacataaataataaattaaataatatataaattaaatatatataaaaattaatatttaattaattttatttcataaattattattttttttatctcttttttt

SEQ ID NO: 19777 - DNA, 333 bp, Gossypium hirsutum
  Clone ID: LIB3147-031-Q1-K1-D7
cggaagagccatcgattatatgtattaatattctgtgcctccgactgagcacagaggatgagatccaatttacagaaaatcaaagagtcaagagctgggcatatatgatacttaccgatgagattgttatgagaggaaaacgtttcatattttaaaaaaactagcaatctttttggcatctaactgtggtgaagaaatctagatctcagttctatttatagccatttgggagtatggttgctcaattctgtcaatataaaagaattgttgcattaatagatattcccattttcagataataaatttatgatgatataatgattttatggttgt

SEQ ID NO: 19778 - DNA, 549 bp, Gossypium hirsutum
  Clone ID: LIB3582-032-P1-K1-G4
cacttctttgctttcttttagcgtttgcttgcttgttctcttccatggctgctgtgctcagatagatctcgtcactaaccatcaccaggatccaccttgggggcagcctcagcaacctcagccacgtcaccaatcccaatgccaactccagaacttgaatgctcttcagcctaagcaccggtttaggtcagaggctggtgaaactgagttctgggaccaaaatgaggatcaattccagtgtgctggtgttgctttcctacgtcataagatccagcgcaaaggacttttattgcctgctggagtagctcactggattttcaacaatgggcggtctcaacttgtgttggtcgcacttgttgatgttggcaatgatgccaaccagctcgatgagaacttcaggaaattcttccttgctggtagtccacaaggaggtgtggtaagaggaggtcaaagcagagaccgaaaccaaaggcaaagcagaacccagagaggggaacgggaggaggaagagtcgcaagagagcggcggaaacaatgtgctcagtggctt

SEQ ID NO: 19779 - DNA, 540 bp, Gossypium hirsutum
  unsure (1)..(540): unsure at all n locations
  Clone ID: LIB3583-015-P1-K1-E11
ccctcgcgnccgggctntctcttctttgctttcttttagcgtttgctagctagttctcttccaaggcagaggagctctgatagatctcgtctctttccttctcctggttcctcctagagggctgcctctgcttcctctgcctcgtctcctttccctaagcctactcctgttctagtttgctcttctgcctttgctccggttttagtctgtgagctaggtgtttctgtgttctgggtcctttttagtggttcttttcctgtgagctggtgttgctttcctacgtcattagttcctgcgcttagagtcttttattgccttcatttacctgtgctcctatgcttttctatgttgttcttggagagggtattcatggggcggtcttcccaggttgtcccgagacatatcaatctcagtcgcttcattatatacatgattggcctctaagagatctgctccataagctcagacggttgtagagaaggcgatgtggttgccttgcctgctggagtagctcactggattttcaacaatgggcggtct

SEQ ID NO: 19780 - DNA, 521 bp, Gossypium hirsutum
  unsure (1)..(521): unsure at all n locations
  Clone ID: LIB3583-015-P1-K1-C11
cggacgcgagggncncttaaggctctcatcttcttagctttcttttagcgttagctagctagttctgttggatggctgctgagctctgattgttctcgtctctttccttctcctggatcctcctagggggctgcctctgcttcctctgcctcgtctcctttccctaagccttctcctgttctagtatgctcttctgcctatgctccggttttagtctgaggctggtgtttctgtgttctgggtccttttagtggttcttttcctgagtgctggtgttgctttcctacgtcatatgatcctgcgcttaggtcttttattgccttcatttacctgtgctcctatgcttttctatgttgtactaggggagggtattcttggggcggtcttcccaggttgtcccgagtcttatctttcactgtcgcatctttttattctagttaggcctctaagagttctgcacctatagctcagtcggttgtaggagggcgttgaggttgccttgcctgctggagtagctcact

SEQ ID NO: 19781 - DNA, 550 bp, Gossypium hirsutum
  Clone ID: LIB3583-015-P1-K1-D1
ccctcgcgtccgccctcgcgtccgggcttactcttcttagctttcttttagcgttagctagctagttctcttccaaggctgctgagctctgatagatctcgtctctatccatctcctggatcctcctagggggctgcctctgcaacctcagcctcgtctcctatccctaagccatctccagttctagtatgctcttcagcctatgcaccggttttgagtctgagagctaggtgttactgagttctgggtcctataagtggatctattcctgagagctggtgtagctttcctacgtcataagatcctgcgcttaggtcttttattgccttcatttaccagagctcctatgcttttctatgttgtacaaggggagggtattcatggagcggtcttcccaggttgtcccgagacatatcaatcacagtcgcttctttatatacttgataggcctcatagagttctgcaccaatagctcagacggttgtaggagggcgatgtggttgccttgcctgctggagtagctcactggattttcaacaatgggcggtct

SEQ ID NO: 19782 - DNA, 481 bp, Gossypium hirsutum
  unsure (1)..(481): unsure at all n locations
  Clone ID: LIB3583-015-P1-K1-H10
gctnnctttnagcgttagctagctagttctcttccaaggctgctgagctctgatagttctcgtcactaagcatctcctggttcctccttgggggctgcctctgcttcctctgcctcgtctcctatccctaagccttctcctgatcttgtatgctcttctgcctatgctccggttttagtctgtggctggtgtttctgtgttctgggtcctttaagtggttctattcctgtgtgctggtgttgctttcctacgtcatatgttcctgcgcttaggtcttttattgccttcattttcctgagctcctatgcttttctatgttgatcttggggagggttttcttggggcggtcttccctggttgtcccgagacttatctatctctgtcgcttctattttttcttgataggcctcttagagatctgctcctttagctctgacagttgtaggagggcgttgtggttgccttgcctgctggagtagct

SEQ ID NO: 19783 - DNA, 559 bp, Gossypium hirsutum
  Clone ID: LIB3583-026-P1-K1-H6
ccctcgcgttcgtccacgcgttcgtacagtcagctagctcagctctcttccaggctagctaagctctgataggtctcgtctctaaccatcaccaggatcctcctagagagagctgcctctgcttcctctgccacgtcaccaatcccaaagcctactccagatctagaatagctcttctgcctatgctccggttttagtctgtgagctgagtgtatctgtgttctagaaccataaagaagttctattcctgagtgctgagagtactttcctacgtcataagatccagcgcttaagtcttttattgccttcatttaccaatgctcctatgcttgtctatgtcgatcaaagagagggtattcatggtacagtcttcccaggtagtcccgagacatatctatcacagtcgcaacttaatatacttaataagccacaaagagatcagcaccaaaagctctgacggttgaataaaggcgatgtggttgccttgcctgctggagtagctcactggattttctacaatgggcggtctcaacttgtgtagatcgctcttgttgatgtt

SEQ ID NO: 19784 - DNA, 468 bp, Gossypium hirsutum
  Clone ID: GOSHI-09MAY01-C18_7
gttttctctacttccccttctccttctgctctccaatggctaactgacaaatacgagtccccacccattccaccaaacatgtttatcttgtctttcagaacaaaagaaacaacaccaccagcctaagcctaaacagatccgagctttctattttggctaaaccaagactatatcttgttctatattgttggtgggtctgtttgtttccaaagataacttcactgcattttctttgctttttccaaatggatgttttctagcttccttcttttggagatcttaatgtgatttgagcaagatcaaaaggaaacagaagatgcttgtagatttgcggaacaaaatgcagctgcacagagatattttgttgaagtgcttcaggcttgattggggcatgtttatgtattctatatatcaacttctatagcagaagcttaagtcttttgtttgagcacgaacacatgccctatg

SEQ ID NO: 19785 - DNA, 569 bp, Gossypium hirsutum
  Clone ID: GOSHI-09MAY01-C18_8
ttatgttcttagaaatggagaagatctgctgcatcggtgctggttatgctggtgggccaacaatggctgtcatttcattgaagtgccctgaaattgaagtggctgtcgtgggattagattaatgtaagtcaagttgaattgataataggctacatcttactcaaaatgttgtagggttaaaggtcgagttgtgcaggttgctggaagagaaaagatcagctgatctaagctcatggacatgagcttcctcgctatggactcgaagttggccttacaaattatgcagcagctgattgtgttggactccttttggctcgccgaacactgaagcaagctggagatggatgctgaatacgagggcaatgttggggtatgcatttgccctggtttctgaggtgtggagatggactcctattttttcatgctttttgcattatataaacacccctgtttcaatgtctaatttgaagttatagaagcaataaacccatgtagtaaaagggaatgtagtaacccattttaagctaatttcaaggggttttttaattaaaaaaaaaaaaaaagggccg

SEQ ID NO: 19786 - DNA, 928 bp, Gossypium hirsutum
  Clone ID: GOSHI-09MAY01-C18_9
ctttgcggttaccacctcatcttcttcaccttcctgttgatgaggctattaagtcagagttggaaacccttttcttagataaggttattgcaaaattaggactctgtatttcagtatatgatatcaggtcaattaaaggtggctttatctttcccggggatggtgcttctacttatacggttgagttcagattgattgtgtttcgtccatttattggtgagattattgttgccaaacttaaagaatctgatgctagcggcttgcgcttgtcacttggattttttgatgacatttacatacctgtccaccttttgccgaccccgtcccgctttgaagctatccctaatactagaaatcaaggcagatggatatgggacttcggagatgcagaagaagcacagtccgaagaaccacgatttgttattgatgggtcagatccgattaaatttcgagttgatagtgttatttatccttcgattccccttgaacaaccagagaattcgaaaccatttgccccgatggtgattactggaacaataaactacgatggtttggggccggtttcgtggtgggaggaagctgaaatgattcaggaggatgaataggctcgctaacatttagtcctagtcgtttatagttctcaacacaaggcttgacaaatattttttcacctgtgggtgtttatatcatgcttctccctaactaccagagtacatgagctccatttgcttggagattaatccactcaaccgtaaccagctaacaaaaatgcttaaagtcgaggatccaagttgtagtctattggttgactgtttacttttcttaaaaatagtttgtgttcgaatctatcaacgtatcaaaaaaaaaaattgttaacacaatttttgttgttacatcttttatctttctatcttcacactcttttcct

SEQ ID NO: 19787 - DNA, 917 bp, Gossypium hirsutum
  Clone ID: GOSHI-09MAY01-C18_10
ttcccattggccttatctctgtctgttgcttttctctctctttgttaatctgtccaatggggggggggggggtggtgcctgaactgaagccttttaggaaatttgaaagttgtttgtaatttggttatccctagacccaagcttcaattttacaaatagactaggaaactaaataatgttgagttaagattgattgtgtttcgtccatttattggcgagattattgttgccaaacttaaagaatatgacgctagcggcttgcgctagccacaagactcggctgcttaaaaaagccagagtgaaagccatgcctttcgttaaagctcaaaagaccaaggcttatttcaagagatatcaagttaagttcaagagaaggcgagagggcaagatggattatcaggccaagagtcgtcttattaatcaggacaagaacaaatacaacaccccaaaatattgtttggttgcacgatttaccaacaaggatataattgcacaaatcatacatgctagtatttctggtgatatagttcttgcagcagcttatggacatgagcttcctcactatggacttgaagttggccttacaaattatgcagcagcttattgtgttggactccttttggctcgccgaacactgaagcagctggagatggatgctgaatatgagggcaatgttgaggcaactggggaggactacagtgttgaaccacgagagagcaggaggcctttccgatctctcctaaatgttggtcttgtcagaacaaccactggtaatcgtgtttttggttgtgttcaagggagcctttggatggaggaattgatattcctcatattgagaaaaagtttgctggatttaacaaggacagtaagcaacttgatcctgaagttcatcgcaaatacatttatggtggccatgt

SEQ ID NO: 19788 - DNA, 870 bp, Gossypium hirsutum
  Clone ID: GOSHI-09MAY01-C18_11
tgagcgtccggctcagtgagaacttcaagaaattcttccttaggaggtagtcctcaagagagagtgtggttagaggaagtcaaagctgagtccgtaaccaaagagcaaagctgatccctgagaggggttcgggaggtggttgagtcgctagagatcggcggttacaatgtgctctgaggctttcgcgacaatctcctggcgcaagctttcggaattgatacctggctagcaagagatgctacttttcgaaagagatttctagggtgccattgtttgaatggagcatggattagagaggcccagagagtagaggctgagagcgtctagagtcgtgtagagagaaggagttgttgttagagttccgttaaggctgagagcgtctagatagtcttgatgagggatctgaggttgttgttagagttgttcgtggttgaggttagtgttgagtctagtttcagcttagatgaaacattctgctcaatgtgactgtaactctagtcccctgcttcctctgctgatgttttcaacccacgaagaggtcgcatcaccacagttaacagtttcaatcttcccattctccaatacctccaactcagcgccgagaggagagtcctttacaataatgctatctacgctcctcactggaacatgtatgcccactgcattgttttcatctctaggggttatggttagattcttattgtgtcggtttatggagaggcgttattcgttgtgctagttgagaggggtctggtcatatccgtaccccagtatcatgctgtggtgtttttagctagtaagcgagggtttgaatggatagcattctagacaaatgccaatgctaagatttgtcagattgctggacgtgtc

SEQ ID NO: 19789 - DNA, 615 bp, Gossypium hirsutum
  Clone ID: GOSHI-09MAY01-C18_12
ggcttacacttcttagctttcttttagcgttagctagcttgttctcttccatggctgctgagctcagatagatctcgtctctaaccatcaccaggatcctcctaggggagctgcctctgcaacctcagccacgtctccaatcccaaagccttctccagaacttgaaagctcttcagcctaagcaccggtttaagtctgagagctggtgaaactgagttctgggaccaataagaggatctattcctgtgagctggtgtagctttcctacgtcatatgatccagcgcaaaggacttttattgccttcatttaccagagctcctatgcttttctatgttgaacaaagggagggttttcatggggcggtcttcccaagttgtcccgagacatatcaatcactgtcgcaacttaatatacatgattggccacaaagagatctgcaccaaaagctcagacggttgtaggaaggcgatgtggttgccttgcctgctggagtagctcactggattttcaacaatgggcggtctcaacttgagttggtcgcacttgttgatgttggcaatgatgccaaccagctcgatgagaacttcaagaaattcttccttgctggtagtcca

SEQ ID NO: 19790 - DNA, 629 bp, Gossypium hirsutum
  Clone ID: GOSHI-09MAY01-C18_13
cggacgcgtgggcggacgcgtgggcggcctctctgcttcatctatcttttatctaatagctcaagaccgagaggggatatcgaacaatggtgaagatctgttgcatcggagccgggtatgttggtgggccaacaatggctgtcattgcactaaaatgcccagaaattcaagtagctgttgtggatatttcagtgccaagaattagtgcctggaatagtgatactctccccatatacgagccagggctcgacgaggtggtgaagaaatgcagaggaaagaaccttttgtttagcagtgatgtggagaagtatgtttctgaggctgatatagtgtttgtttcggttaacacacccaccaaaactcaaggccttggtgctgggaaagcggctgatctcacctactgggagagtgcggctcgtatgattgccgatgtatccaaatccaacaagattgtggttgagaagtcgaccgtccctgttaaaactgccgaggcaattgagaaaattttgacacacaacagcaaaggcatcaactttcagattctctccaaccctgaattccttgctgagggaactgcaatccaggacctatttgaacctgaccgtgttctcataggaggaagagagacc

SEQ ID NO: 19791 - DNA, 1055 bp, Gossypium hirsutum
  Clone ID: GOSHI-09MAY01-C18_14
cccacgcgtccgcggacgcgtgggttaaaataaaataacaaaagataaacaatagcggggtttgcgttgttttccccaaatttccccgcctgaaatctccaaaaggatctcctctaccaaagcggataaggaaagggagatgaagaaaaagaagaaaaagggggaagaaaaatgctgcaactatgggtaatttatcgcgactttaccctacttttgaaaccatggtatgagataggctggtctcccaatatttccttaatcgaagggaggaaaaccctaattttgtctctcccaagagatgaaaggaagggaaaaatggtgttttacttcaaagcccgggcagaagctagcgattacaatatggcttcatcgaagatatatgttcattggcagggaagaggaaagtaaagttctataaatactggagcaatacaatttagctttggcagtatcatctatatcttacatcccccaaccgtcgaagttcactgaattgatatgcacacaagattggctgcagatgcaatcggatggtttgattgtggcatgtttatgttaaaatatatcgacttctatagcagaggcttaagtctttgttttgagcaggaacacatgccctattttcgtttaaggaccgccaagaaaattctgaaactgaaagctgattgatcggatgtgtatgctggctttcatcaactactttcgagggccttactaggaattgaaatggtgtgcaaagagattgcttctcctgatttgatttttcaatataaatactggacaaagtatggatatttcttgtcatttgcatttactactgttagtaaaataggattctcttcttaggatcttagtttcttcacttgtattagactcaacaatggcttgcattgcattggtgttgattttacctaaatttcgaggtttacaatttttaatttttattaattatttacgttttctcacttttattaattattattatttaagcttcctttatttgccttcttttatcatttttttcatgttgtttttagcttcgaagatctagtcta

SEQ ID NO: 19792 - DNA, 1172 bp, Gossypium hirsutum
  Clone ID: GOSHI-09MAY01-C18_15
tgctaacccctgtgctcaaagctatgccttacgtgaaagctcaaaagtcaaaggcatacttcaaaagatatcaagttaagttcaagagaagacgagagggcaagactgactaccgggccaggaaccgtcttatcaatcaggataaaagcaagtacaataccccaaaatatcgtttcgttgcaagatttaccaataaggatatagttgcacaaattatacatgctagtatttctggtgatatagttcttgcagcagcttatgctcatgaacttccccgctatggacttgaagtgggccttaccaattatgctgcagcttattgtgttggactcctcttggctcgccgaacactgaagcaactggagatggatgctgagtatgagggaaatgttgaggcaactggggaggacttcactgttgaaccagcagagaccaggaggcctttccgtgcgctccttgatgttggtcttatcagaactactactggtaaccgtgtttttggtgttctcaagggtgctctggatgggggaattgatattcctcacggtgacaagaggtttgctggatttaacaaggacagtaagcaacttgatcctgaagttcaccgcaaatacatttacggtggccatgttgctgcatacatgaggactttaatggaagatgagccagagaagtaccagtctcacttcagtgagtacattaagagaagcattgagcctgacaccatagagggaatgtacaagaaggttcataccgccattcgtgcaagtccagaagcaaagaaatccaagaagggctcctcccaaggaacacaaaaggtacaacctgaagaagctgtcttacgaggaaaggaaggcgaagttgattgataggttgaaggctttgaattcagctgccggagttgataatgattctgatgaggatgattgatcaagccgctgaagttgatgctacggttgaggaaaacactgggtgaattcagcatcggaatttttgtttttgttctttttttttccttctaaaacttcatccttttgctgctagaatttaagaaaaaaaaaagactgaaggctttgcttctttattaggtatacgaggaactggcatttttgcctgctgcttccgttatttgatagtttaattttataagtactattctattcgtggcttct

SEQ ID NO: 19793 - DNA, 642 bp, Gossypium hirsutum
  Clone ID: GOSHI-09MAY01-C18_16
attacttacaactaaggatgcgggagatgcagttactttactacaatcattagctagctcaacatttgacagcagtcaactcgtattgtcagcttgtatgggttacgaaaatgtaaatgaacaagtattacttgagttaagggagaagcaccggtcagttgtaaaagctgcagttgatgaaagattaagggggcttcaaatttggagggaatcacagggccgggcatctaagctatatggttttaagcatgattctatgtcagcgcttaggaaaacaagtaagacaggagaattggttgattcaaaaactaatggagatctttcacgttccaagtccgaatcaatgaatgaggatgaaaatcttctttgtctgacaggagatgctaagtcggattctgttccagatcttcaacagcaggttgtagggttaaaggtcgagttgtgcaggttgctggaagagaaaagatcagctgttctcagatctgatgaactggagacagcattgatggagatggttaagcaggacaatcgacgccaattatgtgctagggtagagcaattagagcaagaagttggtgagcttcgtaaggcactgtttgagaagactgaacaagaaactgcaatgcttcagatcctaatgcg

SEQ ID NO: 19794 - DNA, 1814 bp, Gossypium hirsutum
  Clone ID: GOSHI-09MAY01-C18_17
agcaaagatccttttttcctgtttctctcctttttcccattgttcttcttcttcacccagattctgtttctttttctttgatctaacaactcaacacccaccaaggatatcagaaatggtgaagatctgttgcatcggtgctggttatgtcggtgggccgacaatggctgtcattgcattgaagtgccctgaaattgaagtggctgttgtggatatttctgtctcaagaattactgcctggaacagtgatacacttccgatctatgagcctggacttgacgaggtggtgaagaagtgcagagggaagaaccttttctttagcagtgatgttgagaagcatgtttccgaggccgatattgtgtttgtttcggttaacaccccgacgaaaacccaaggtctgggagctgggaaagccgctgatctgacctactgggagagtgctgcccgtatgattgctgatgtatcgaaatctaacaagatcgtggtcgagaaatcaactgtccctgttaaaacagctgaggcaattgagaaaattttgacccacaacagcaaaggcatcgactttcagattctctccaaccctgaattccttgccgagggaactgcgattcaggaccttttcaatccggaccgtgttcttattggaggcagggaaacaccagaaggtcaaaaggcaatcgcagcattgagagatgtgtatgcgcattgggtccctgtggaccggatcatatgctccaacctctggtctgccgagctatcaaaacttgctgccaatgccttcttgggcgcagagaatctcttcggttaatgctatgtccgcattgtgtgaggccaccggtgctgatgtgagccaagtggctcatgctgttgggaaagacacaagaattggacccaagttcttgaatgcgagtgtgggtttcggtggatcgtgtttccaaaaggatattttgaacctggtctacatctgtgagtgcaatggcctcccagaggttgcaaactactggaaacaagtcattaagattaatgactaccagaaaactcggtttgtgaaccggattgtttcctcaatgtttaacacagtttcagggaagaagattgccattctcgggtttgctttcaagaaggataccggtgacactcgggagaccccagcgatcgatgtatgcaaagggctgttgggcgacaaggctctgctgagcatatatgaccctcaagtcaatgaggagcagattcagagggatcttgcaatgaaaaagttcgactgggaccatccggttcatcttcagccgatgagccctacttcgatcaagcaagttaatgttgtctgggatgcctatgcagcaacgaaggatgcccatgggggtttgcattctgacagagtgggatgagttcaaaaccctcgattaccagaggatttacgataatatgcggaagcccgcgttcatcttcgatggccgtaacgttgtagatgaagccaagctgagggcaatcgggtttatcgtctactccattggcaagccattggatcaatggcctcaaggacatgccagctgtggcatatgagcatcattttgagaggcgtataatccgattacacagttttcattgcattacattttatttcttctagttttaagatcctgcttccgacttgtattgagttattacatgacacagtagtgtctgaatctgtcatcaacgggtaggatatatttgattttgttattggcttattgtaataaaacctttaccagtggattttattccatgtatgttatgcatgaaacatggagatgacatgcttatagaagcag

SEQ ID NO: 19795 - DNA, 2592 bp, Gossypium hirsutum
  Clone ID: GOSHI-09MAY01-C18_18
ccggaacgacccacgcgtccgcccacgcgtccgcccacgcgtccgatggcttacacttctttgctttcttttagcgtttgcttgcttgttctcttccatggctgctgtgctcgagatagatctcgtcactaaccatcaccaggatccaccttgggggcagcctcagcaacctcagccacgtcaccaatcccaatgccaactccagaacttgaatgctcttcagcctaagccaccggtttaggtcagaggctggtgaaactgagttctgggaccaaaatgaggatcaattccagtgtgctggtgttgctttcctacgtcataagatccagcgcaaaggacttttattgccttcatttaccagggctcctatgcttttctatgttgaacaaggggagggtattcatggggcggtcttcccaggttgtcccgagacatatcaatcacagtcgcaacaaaatatacaagatagggccacaaagagatcagcaccaaaagctcagacggttgaaggagggcgatgtggttgcccttgcctgctggagtagctcactggattttcaacaatgggcggtctcaacttgtgttgggtcgcacttgttgatgttggcaatgatgccaaccagctcgatgagaactttcaggaaattcttccttgctggtagtccacaaggaggtgtggtaagaggaggtcaaagcagagaccgaaaccaaaggcaaagcagaacccatagagggggaacgggaggaggaagagtcgcaagagagcggccggaaacaatgtgctcagtggctttcgcgacaatctcctggcgcaggctttcggaattgataccaggctagcaaggaagctacaaaacgaaagagataacaggggagccattgttagaatggagcatggatttgagtgggcccgaggaagggcagaggcgacaaggacgtgaagaggagggagaagaagaaagagaaccgaaatggcagaggcgacaagaaagtcaagaagagggatctgaggaagaagaaagagaagaacgaggaagaggaaggagaaggtcaggaaacggcttagaagaaacattctgctcaatgagactggaaacacaggacccctgcttcctctgctgatgttttcaacccacgaggtggtcgcatcacgcacagttaacagtttcaatcttcccattctccaatacctccaactcagcgcccgagagggggagtccctttacaataatgctatctacgctcctcactggaacatgaatgcccacagcattgtttacatcacaaggggaaatggaaggattcaaattgtgtcggaaaatggagaggcgatattcgatgagcaggttgagaggggtcaggtcataaccgtaccccagaatcatgcagtggtgaaaaaaagcaggaaggcgagggtttgaatggatagcattcaagacaaatgccaatgctaagattagtcagattgctggacgtgtctccattatgcgaggattgccggtggacgtgctggccaactcctttggtatatcccgggaggaggccatgaggttgaagcataacagacaggaggtgtcggtttttagcccaaggcaaggctcgcaacagtagatcaaacaactaatctaggtgtacgtacgtacgtaattgcatcaacaataaaacccaaatccccaatatctggattcggaataaatatatatataaataaaataaaacatggccttaacaggcatgcaactctagtttctactctacaacttgcatgtatttatatatgtgcgggagcaatgttttgtaatccagcttaaattaaataaaagtaatagtaaacaaggtttttcttcttaaaaaacaaaaatgactgaataagaagaaagaaaaaaaaaataagcaggtgcagcctgatcagatgcatgcatatcggtgggcagcgaaggaagctacttcactgtctaatagttagagggctcagacaatggtggaaaatgggcatacaacaaaacgggtgatgcaagataatatacgccttactgatcctgctgctcactcttttgctatccaacaacctatcaatactagtgctggcggtatgtactacagtcagaaaaaagtgccagaaactgtgatcccatctggaattgatacaattgtgtcgtctagagttgctgctgatgctttggcttctaaaactacctcagcttcacaagttgggatgcataataatccagttaatggtgctgttaggcatcttggccccccaccaggttttggccctgttcctccaaagccaccaagtgaagaaacccctgtgatggatgattatagttggttggatggatatcggttggcatcatcattgaaaggctctgggcttgatagttctctcaattatgcgtctcatgcagattccctgtatgtcaataatagcagcagtggcttgactggaacaataagctttcctttccctggaaaacaggtctcaccggtgcaatttcaaatggaaaagcagaatagctggcaggattacaatacccttgatcataaaaaatttcaacatgaacagaagctgcagcaacatcaattcatgaa

SEQ ID NO: 19796 - DNA, 543 bp, Gossypium hirsutum
  Clone ID: GOSHI-09MAY01-C98_3
tcggtcgccacgcgcacacatgtgacagcgaactgactgcctgaccgacagcgaagggaacagacaccatgaattgactgaaagctacataacactgtggatggatgtcagtgaacatgcaggcaaggcgactgctgcagtgacagactgcacctgggccactaagccaacatacaatggtcatgcttcaggtcatggcatatatagggttcccgtgcatgaatttaacgttgaataagtcggctggtggaggttgtgtggtgtcttatatctggcagttaacctttggatccggtactatgatgtaatggctatgcttatgtgccttatctgggtaatgaaggatccttactataaaaaaaaaaaaaaaaaaaaaaaaaaaaaaaataaaataaaaaaaaaaaaaaaaaataaataaaaaaaaaaaaaaaaaataattataaataatattatataaaaaaataaaataaaatataataatattaaataaataaaaaatagggttgtcctttttaaagatccatagttttctttctcttactt

SEQ ID NO: 19797 - DNA, 558 bp, Gossypium hirsutum
  Clone ID: GOSHI-09MAY01-C98_2
aggaccgtccggaattccggtcgccacgcgtttgcggtcgtgtgggctttcaaaaaacttcccacattcaccatgtcgtggcacgtgcggcaactgtgactgcgctgaccgcagccaatgcacgaagaagggaaacagcaacaccatgatcgttgagactgagaagagctacatcaacaatgttgagatggatgctccagctgagaacgatggcaagtgcaattgcggtactggctgcagctgcacagactgcacctgtggccactaagccaacatacaatggtcatgcttcagatcatggcatatatagggatctaaataatgaatttaaggttgaataatttgtgtctgctgtagtttgtgtggtgacttatatctgtcagtttactcatttctctcctttactttgatgttatggctatgcttatggccttatctgggtaatgttgttttctacttaatattataaatttaggtctttttttttttagatttatgtttttgatatttttattcattcattttcatattttttctatccctatattttttactttt

SEQ ID NO: 19798 - DNA, 543 bp, Gossypium hirsutum
  Clone ID: GOSHI-09MAY01-C98_1
aggaccggcccgacccacgcgtccgcccacgcgtccggctaccttaacacaagttaccaactcaaaaaccccaagttttcactttcaaaaaacttcccacattcaccatgtctggcacgtgcggcaactgtgactgcgctgaccgcagccaatgcacgaagaagggaaacagcaacaccatgatcgttgagactgagaagagctacatcaacactgctgagatggatgctccagctgagaacgatggcaagtgcaattgcggtactggctgcagctgcacagactgcacctgtggccactaagccaacatacaatggtcatgcttcagatcatggcatatatagggatctaaataatgaatttaaggttgaataatttgtctgttgtagtttgtgtggtgacttatatctgtcagttaacctttctatcctttactatgatgtaatggctatgcttatggccttatctggttaatgaagtatccttactatgtattagacttgtgatgagtgtagcagctacctacatggtcaacggcaagct

SEQ ID NO: 19799 - DNA, 246 bp, Gossypium hirsutum
  Clone ID: uC-gsflnu33B094f05b1
gtgggatcagcaacacatgctttctttggttggagggggacaggctggaatatggagaatcgcccccaataaagcagcaggggggcgggcggcaactgcgactgcgctgaccgcagccaatgcacgaagaagggaaacagcaacaccatgatcggcgagactgagaagagctacatcaacaatgttgagatggatgctccacctgagaaccaaggcgagtgccaatgccggaccgggtggagctgc

SEQ ID NO: 19800 - DNA, 202 bp, Gossypium hirsutum
  Clone ID: uC-gsronu33B061h02b1
cgtactcgtccgcccacgcgtcacaaagcgtggggggttatttatagaataataggcacatattaccatgcagagttggggcagcaactgagacctgtcttccctgtagtctatgtacgaagggaaacagcgagaccatgatcattgagactgagaagagctacatcaacactgctgtgatggatgcttcacctgagaacga

SEQ ID NO: 19801 - DNA, 518 bp, Gossypium hirsutum
  Clone ID: GOSHI-09MAY01-C88_1
caaaattagttttttttttttttcccttatagctttttatagccatttttgtttcaaaatttcatccttttataattttgttcttatccttccactttgaacctcaaaatctcaaacccccagaagcagatctttgttgggttatttgcaaaaacccgatgctactctaaagtaagcaactttatttctaattccaccagcaatggcctctcgtttgcagtcaactactttattattcatcttcttcattacattgattcttatcccaactagacacgctattcccttcatcgtattgcacggcattggtgataaatgcagtaaccgaggaatctccgagtttaccgaggttttaagcgactggtctaaatctcaaggctactgtgttgaaattggagatggatcctgggattcatggacaatgcccctttcagaacagacatcgattgtttgtgagaaggtgaaaaaaatgagcgaacttagcaacggttacaacatatttggactctctcagggta

SEQ ID NO: 19802 - DNA, 248 bp, Gossypium hirsutum
  Clone ID: AF056204
agggatctccgagtttaccgaggttttaagcgactggtctaaatctcaaggctactgtgttgaaattggagatggatcctgggattcatggacaatacccctttcagaacaggtgaaaaaaatgagcgaacttagcaacggttacaacatagttggactctctcagggtaacttgattggtcgaggggttattgaattttgtgatggaggaccccctgtcaagaatttcatatcattgggagatccct

SEQ ID NO: 19803 - DNA, 820 bp, Gossypium hirsutum
  Clone ID: GOSHI-09MAY01-C48_1
ccgggtggaccggtccgtcgccgcccgctcgtccccgcgtccacaaatcctcctataaaaaccaaactcctaaaccctcatactccactccactcatcttcggtctctccgccgtttcgcatttcgtctttctctctccaatggcttctattgctggttcatccatctccatgcaacctcgcccctttgctaaaggcagtgtttctgggttgaaattgggttcatttatgaaccagggaagaagcaccctctcatttacgatgcgtccaatgcctgctcgcttgcagatctgctgtgctgccaaacaagagaccgtggataaggtatgtgaagtagtaaagagacaattagctttagacaatgacaaaccaatcaccggtgaatcaacatttcttgatcttggagctgattctcttgatacggttgagattgtgatgggacttgaggaagaattcggaatcacggtggaagaggacaatgcacaatccatcacaactgttcaagatgctgcagaacttattgagaagctgtgcagtgagaaaagtgcctagaaaacaaggatcgcagttggttggtttatttgccgatatttgatattcacatactagaccgcaaacttgggggaaatcatgtgtgaacttttattatgttgaatatgtaggaaatttcgtaataaagttgttgggattcttagttaaattgtggaacttaaaatgtgtcatttcgttttaccgtagtggtttatgtagaagttttttgtttaatcaagctgcatatctcggttgagggttctatttctgctaaaacacccccacacatt

SEQ ID NO: 19804 - DNA, 308 bp, Gossypium hirsutum
  Clone ID: LIB3146-022-Q1-K1-D12
agaaaagtgcctagaaaacaaggatcgcagttggttggtttatttgccgatatttggtatggacatactagaccgcaaacttgggggaaatcatgtgtgaacttttattatgttgaatatgtaggaaatttcgtaataaagttgttgggattcttagtttaaaaaaaaaaaaaaaaaaaaaaaaaaaaaaaaaaaaaaaaaaaaaaaaaaaaaaaaaaaaaaggggggtcaatattaaaaatacaaaatttattaaagggggcgggcgactacaaaaaaccatttttatgtccccttaattaaaaata

SEQ ID NO: 19805 - DNA, 376 bp, Gossypium hirsutum
  Clone ID: GOSHI-09MAY01-C68_2
cggacgcgtgggcggacctgaacccgcacatgcccatgtttgtaatgtcagagcctaaagactagtggcaaattaaacccgactaccatgttccagccctgtcccaaaaaccctaagtgccaccgtttaaaccataccaacagattcagtgcaatagtaattaatatatttattcatattacataaaaacagatctttttcattttaaaaaaaattaaaaaaaaaaaaaaaaaaaaaaaaaaaaaaaaaaaaaagaagaaaaaaaaaaaaaaaaaaaaaaaaaaaaaaaaaaaaaataaaaaagaaataatatattatataataaaatctaaaaaacaataaactggtccgtacattttacaacaatgggaactgc

SEQ ID NO: 19806 - DNA, 1682 bp, Gossypium hirsutum
  Clone ID: GOSHI-09MAY01-C68_1
cccacgcgtccgtcggccgcgtggttcaaaaccaaataaaaacatggcaccacaccttaatattgttccttccatgtttgtgcttttattattattcatttcagcctctaaagttcaatcaggcgctattgatgttgttgccaagtttggcgcaaaagctgacgggaaaacggatctgagtaagccatttttggatgcttggaaagaagcatgtgcctctgtaaccccatcaacagttgtgattcctaaagggacatatttattatcaaaagtaaacttagaaggtccatgcaaggctcctattgagattaatgttcagggcactataaaggctccggctgatcctggtgctttcaaggaccctaattgggttagattctatagtattgaaaatttcaaaatgtccggcggaggaattttcgatggtcagggaagcattgcttatgagaagaataaagatccccacaatcgtgcatttcgtgtcaaactccccgttaatataaggtttgactttgtgaccaacgcattgatacaagatataactagcaaagacagtaaactattccacgttaatgtttttgcatgcaaaaacattaccctcgaacgtttcacggtagaggcaccggcagatagcccaaacacagatgggattcacatgggcaaatcagacggcgtaaatattattggatgtgagattaaaactggtgatgattgtatttctatcggagatggcactaaaaatttggacataaaagatataacttgtggaccaggacatggtataagtatcggtagtcttggaaagtacccaaatgaagagccagttgagggagttaaagtcacaaactgcaccatcactaatacttcgaatggagctcgaatcaaaacttggccaggcgaatctcctgggatagtatcagatgtacattttgaggatattatcgtgaataatgtctcttcccctatcctaattgatcaaaaatattgcccatggagtaaatgcaagataaatgaagaatcgaaagttaaactaagcaacattagcttcaagaacatccgtggcacatctgcgcttccagaagctgtcaagtttatttgcagcggttcttcgccatgtcaaaatgtggaacttgcagacattgatattaagcacaccggacctgaacccgcaacatcccaatgtttgaatgtcaagcctaaaactagtggcaaattaaacccgactccatgttccagccctgtcccaaaaaccctaagtgccaccgcttaaaccataccaacagattcagtgcaattgtaattaatatatttattcatattacataaaaacagttctttttcattttactaatagagaataagctatcaaatagatacaaaagaatacttttcatatgtggaggagcatttaatgatttggagaaaaccatttcagaaaggcggcaagattcttctatcggctttggagcacctgtccgagaaaatatgaggacgagtcccttgattactgctgcagttgcatcatcattgttggaatctgttgaaagtgatgatcttattgcatatggattgattcctgaatttattggccgctttcctattttagttggcttgacagctctggatgaggaccaacttgttgaggtcctcatgaaaccaaagaagctcttggtaagcagtac

SEQ ID NO: 19807 - DNA, 522 bp, Gossypium hirsutum
  unsure (1)..(522): unsure at all n locations
  Clone ID: LIB3828-026-Q6-K6-E12
cccgggtcgcccagcgtttctttttcaaagtnacttacagggggtgcggggggctttganattaatgttcagggcactataaagctccggctgtcctggtgctttcaagaccctattgggttagttctttgtnttgaaatttcaaaatgtccggtggtggattttcgtggtcagggaagcggggggtttgagagaataagtccccacatcgtgcatttcgtgtcaaactccccgttatataaggtttgactttgtgaccaacgctttgntcctgaaatatctagcnnngaccgtnaactattccacgttaatgtttttgcatgcccaatctttnccctcgaacgtttcccggttgaggctccggctgtttgcccctcctcagatggggattcacatgggccattccgacgggggttttttttttgggtgttggggtttaaaccttttttttgtttgttttttcttttcggggcttggcccttaaaaatttggaccctctcgggttttaacctttgggggccc

SEQ ID NO: 19808 - DNA, 639 bp, Gossypium hirsutum
  unsure (1)..(639): unsure at all n locations
  Clone ID: LIB3828-021-Q1-K6-D3
cacgcattgtgaatgtaccgtttgtcattgccgatgcaacaagtttaacacaggcaggttatgttggagaagacgtagaatcaatattgtataagctacttgtggaagcaaagtttgatgttgaagcagctcaacatgngaattgtatatattgatgaagttgataagataactaagaaggctgagagttcgaatatggggagggatgtgtctggagagggtgttcaacaagcattgttaaaaatgctggaaggaacaatagtgaacattcccatgcctgataaaggagctcgaaggaatcctcatggtgatagctttcagatagatacaaaagatatacttttcatatgtggtggagcatttaatgatttggagaaaaccatttcagaaaggcggcaagattcttctatcggctttggagcacctgtccgtgaaaatatgaggacgagtcccttgattactgctgcagttgcatcatcattgttggaatctgttgaaagtgatgatcttattgcatatggattgattcctgaatttattggccgctttcctattttagttggcttgtcagctttggatgaggaccaacttgttgaggtcctcatgaaaccaaagaatgctcttggtaagcagtacaag

SEQ ID NO: 19809 - DNA, 342 bp, Gossypium hirsutum
  unsure (1)..(342): unsure at all n locations
  Clone ID: LIB3828-028-Q6-K6-A9
cgcacatcccaagtttngaagtcaagcctaaactagtggcaaattaaacccgactccatgttccagccctgtcccaaaaaccctaagtgccaccgcttaaaccataccaacagattcagtgcaattgtaattaatatatttattcatattacataaaaacagttctttttcattttaaaaaaaaaaaaaaaaaaaaaaaaaaaaaaaaaaaaaaaaaaaaaaaaaaaaaaaaaaaaaagaaaaaaaaaaaaaaaaaaaaaaaaaaaaaaaaaaaaaaagaaaaaaaataaaaaaaaaaaaaaaaaaaaaaaaaaaaagaaaataaaaagaaataaaaagagg

SEQ ID NO: 19810 - DNA, 724 bp, Gossypium hirsutum
  Clone ID: GOSHI-09MAY01-C38_8
actcactgtagggctggctcgcccgccggcaccggccgcgacttactggctcgaccgacgcacgcgtacggtgcttagacacttacagcaccctcgtcttgcctttatgtccaagagtgaggtatatcatcttgtcaatggttatgccgggcgaagacatgggcagccggctcacactgacagagaggccgctagtagatcatgatcatgggctgatcgattgagctcgtcgagcccgagatcctacggttcaaggccggcgagccgatccttctcctcgtgccgccaccggttcgccggcgtcgacatgaggatccgtgtcaaaggcggaggtcacacttctcagatctacgctatccgtcaaagcatagcgaaagccctcgttgccttctaccaaaagtatgtcgacgagcaaagcaagaaggatattaaggatgttttggtgacgtacgaccggactttgctggtggctgatccaaggaggtgtgagccgaagaaattcggtggaagaggtgctagggcaaggttccagaagagttaccgttgatgaaatttcagggtttgtttggccaaataaactggattttcgtttttttctcataaatatctatgattttaagatgttactgagctctcagaattttgaatttttgtttaatatgaatatttaaattaattgcttgaatcttttgaaattggccttaaccagaaaaataaataaact

SEQ ID NO: 19811 - DNA, 733 bp, Gossypium hirsutum
  Clone ID: GOSHI-09MAY01-C38_6
cccccgcgtccgcccacgcgtccgcggacgcgtgggtcagatttcagcaaagagtaaacgcctcgtttccgcaaaaaccctagagagaacaaaatggcggaaagagctccaatcgagtccgtacaatgtttcggtcggaagaagacagcggtagccgtaacctattgcaagagaggccgcggtctgatcaagatcaacggttgtcccatcgagttagttgagccggagatcctccgtttcaaggccgtggagcctatccttctcctcggtcgccaacgtttcgccggcgtcgacatgaggattcgagtcaaaggtggaggtcacacatctcagatctacgctatccgtcaaagcattgccaaagccctcgttgctttttaccagaagtacgttgacgagcaaagcaagaaggagattaaggatattttggtcaggtacgataggactttgctggtggctgatccgaggaggtgcgaaccgaagaagttcggtgggagaggtgctagggcaaggttccagaagagttacccctgaagaaattctacggtttgttttcagaaatctctgtttttgtaccttttttttcaagatttgatatggatatgatgttggttgtgattaattaactgttcctgctgtcagaaatttgaatgtttgtggtgtattaaacttaatgtagacattgtgattgaatctatacatgtgctatgcaaagatgattgtaggctctttt

SEQ ID NO: 19812 - DNA, 658 bp, Gossypium hirsutum
  Clone ID: GOSHI-09MAY01-C38_5
ctcacgcgtccgcggaccccccacgcgtccgcaaaaaatggcggaaagagcaccgatcgaatccgtacaatgcttcggccgcaagaagacggcggtggcggttacccactgcaagcgaggccgtgggcttatcaagattaacggttgtcctatcgagcttgttgagcccgaaatcctccgtttcaaggccgtcgagccaattcttctcctcggccgccagcgttttgccggcgtggacatgaggatccgtgttaaaggcggaggccacacttctcagatctacgccatccgtcaaagcattgctaaggccctcgtcgctttctaccagaagtacgtcgatgagcaaagcaagaaggagattaaggatatcttagtcgggtacgataggactttgctggtggctgatccgaggaggtgcgagcccaagaaattcggtggaagaggtgctagggcaaggttccagaagagttaccgttgaagaagttttatggtttgttcgcgaaacttcgttttgttttacaagagatactatgtttatgttcattttgaattaagttttgctatgttcgtggattaaaattagctcatgactgaggttcagacttcaaatgtttggttttgcttttatctttaatttaagactcattcccttaagatt

SEQ ID NO: 19813 - DNA, 874 bp, Gossypium hirsutum
  Clone ID: GOSHI-09MAY01-C38_4
aagtaaagagaaatgggtccgcctggggaacgttgggatgatgtagtggccggtcctcaaccggaacgtggccttggccggctgaggaagatcaccaccaccccacccttgtccaccaaagatgaggcttcatcaatggcgatgccgacgagtccgacgacacctgggacaccatcgacgccggtgtcggctcgtagggacaacgtgtggaggagcgtgttcaatccaggtagcaaccttgcaaccaaaggtattggcgctgaagttttcgacaagcctcaacctaactctcctactgtctatgactgcaaccaaacggaggctcagagacagatcatgccggataacttggctctttgtttggtagctgcgtggaaataacagctttacagcggggagacccggagcaagcatcaccgttgattaggcggtggctgacggcggcggatggtagcaaaaccactagcagaaggttgcagctactgaaggagcaggatttgcatgtaaatatatatatcgtcctttttaaaagttcttcaatgggtcaattaagtagtagtagtagtaagtaagatgtttaaaagagtaagcggcagcgcagggtggtcgatgaccttatgtcattcaagattccggccgtgagcggcggcagctgctgctatattaaattattatttaataaagggaaggggttttgtacgaatgatgttgcgttagtatgtgatttgaaacatcaatttattaattaattttggggttcttaaaaaaaaataaaatcctattttctagtacttacttttcctggcgctaattttatattattatctataactttttgggccgtccttttttgtggggcccccgttttatttaa

SEQ ID NO: 19814 - DNA, 580 bp, Gossypium hirsutum
  Clone ID: GOSHI-09MAY01-C38_3
attgaaagaaaagaaaaatggttctgctagagaaactttgggatgatgtagtggccggtcctcaaccggaacgtggccttggccggctgaggaagatcaccaccaccccacccttgtccaccaaagatgaggcttcatcaatggcgatgccgacgagtccgacgacacctgggacaccatcgacgccggtgtcggctcgtagggacaacgtgtggaggagcgtgttcaatccaggtagcaaccttgcaaccaaaggctttacagcggggagacccggagcaagcatcaccgttgattaggcggtggctgacggcggcggatggtagcaaaaccactagcagaaggttgcagctactgaaggagcaggatttgcatgtaaatatatatatcgtcctttttaaaagttcttcaatgggtcaattaagtagtagtagtaagtaagatgtttaaaagagtaagcggcagcgcagggtggtcgatgaccttatgtcattcaagatcccggccgtgagcggcggcagctgctgctatattaaataattattaaataaagggaaggggtattgtatgaaaaaaaaaa

SEQ ID NO: 19815 - DNA, 1103 bp, Gossypium hirsutum
  Clone ID: GOSHI-09MAY01-C38_2
ttcgaggtttttttttttttttgttttgcaccatctaaatatgaacactcccttttaataatgatgataataatagtaatataataataacaaaatttgatcctaatttatcttaagcatgcaagtgccatgcattatgccttaccctacgcgtcccccccccccacaaacagagaagagatataattgaaagaaaagaaaaatggttctgctagagaaactttgggatgatgtagtggccggtcctcaaccggaacgtggccttggccggctgaggaagatcaccaccaccccacccttgtccaccaaagatgaggcttcatcaatggcgatgccgacgagtccgacgacacctgggacaccatcgacgccggtgtcggctcgtagggacaacgtgtggaggagcgtgttcaatccaggtagcaaccttgcaaccaaaggtattggcgctgaagttttcgacaagcctcaacctaactctcctactgtttatgactggctttacagcggggagacccggagcaagcatcaccgttgattaggcggtggctgacggcggcggatggtagcaaaaccactagcagaaggttgcagctactgaaggagcaggatttgcatgtaaatatatatatcgtcctttttaaaagtttttcaatgggtcaattaagtagtagtagtaagtaagatgtttaaaagagtaagcggcagcgcagggtggtcgatgaccttatgtcattcaagatcccggccgtgagcggcggcagctgctgctatattaaataattattaaataaagggaaggggtattgtatgaatgatgttgcgttagtatgtgattggaacatcaacttattaattaattttgggtttttaacttgatgtgagcacttttgtggagtgcattatttaggtaagaaaagtggataaggattaacgtggtgtggtgaggtggcagggatctatttgcttacccatttcatcacaacctttgaaaattcaccaaattaataatgcatacaatttatatattaactcaatattaaaacttcaaattcatgttatttagtagtaaatattatctgaatcaatattatgatatatcc

SEQ ID NO: 19816 - DNA, 739 bp, Gossypium hirsutum
  Clone ID: GOSHI-09MAY01-C38_1
gcgtccgtcaccccttcgcccacgcgcccgggtttttgcttcaaggtaagagtcgattgattcttcgaaaaccataaacgaaaccaaatatggcggagaaagcaatcgagtcggttcaatgctttggccggaagaagacggcggtagccgtaacacactgcaagagaggccgtggtttgatcaagatcaatggttgtcccattgagcttgtcgagcccgagatcctccgtttcaaggccgtcgagccaatccttctcctcggccgtcagcgttttgccggcgttgacatgaggatccgagtcaaaggtggaggtcacacttctcagatctacgctatccgtcaaagcatcgctaaagcccttgtcgctttttaccagaagtacgttgatgagcagagcaagaaggagattaaggatattttggtcgggtacgataggactttgctggtcgctgatcccaggaggtgcgagcctaagaagtttggtggaagaggtgccagggcaaggttccagaagagttaccgttgaagaactgtcatggttcgttttgatgttgttcttagtgaaatgatatggttatgcttgttttgaattaaggttttattatatggatttaaattagctgtgactgagtttctgaatttttggatgtttgttttggttgcttaaatttatagataaatgcttaagactgttattgccttttttatttgcaaaaaaacaacaccacaaaaaaaaaa

SEQ ID NO: 19817 - DNA, 494 bp, Gossypium hirsutum
  unsure (1)..(494): unsure at all n locations
  Clone ID: uC-gsronu33B007d05b1
aattaaatggcggaaagagcaccgatcgaatccgtacaatgcttcggccgcaagaagacggcggtggcccttacccactgacagcgaggccgtggccttatcaagactattggtcttgctatctcgctttgtgtgctcagcagcctacttcacgtggcatccttgcaaccaaaggtattggcgctgaagttttcgacaagcctcaacctaactctcctactgtttatgactngccttttcagcggtgagacccggagcatgtatcaccgttgattatgcggtggctgacggcggcggatggatccaaaaccactagcagaaggttgcagctactgaaggagcaggatttgcatgtaaatatatatatcgtcctttttaaaagttcttcaatgggtcaattaagtagtagtagtaagtaagatgtttaaaagagtaagcggcagcgcagggtggtcgatgaccttatgtcattcaagatcccgcccgtgagcgcg

SEQ ID NO: 19818 - DNA, 455 bp, Gossypium hirsutum
  Clone ID: uC-gsflnu33B008f04b1
ctcacgcgtccggattcttcgaaaaccataaacgaaaccaaatatggcggagaaagcaatcgagtcggttcaatgctttggccggaagaagacggcggtagccgtaacacactgcaagagaggccgtggtttgatcaagatcaatggttgtcccattgagcttgtcgagcccgagatcctccgtttcaaggccgtcgagccaatccttctcctcggccgtcagcgttttgccggcgttgacatgaggatccgagtcaaaggtggaggtcacacttctcagatctaacgctatccgacaaagcattgctaaagcccttgtcgctttttaccagaagtcctttgatgagcacagcatgaatgcgattaatgatattttggtctttactactatacctcttctgtcccctttattcttcttgttcttctcttttacctttttctactcattttttttt

SEQ ID NO: 19819 - DNA, 391 bp, Gossypium hirsutum
  Clone ID: uC-gsronu33B108b08b1
cttttttaaacaaagccagtaattttgttgtggtgggtgctgtttaataattaaaacgtgttggaataactccagaaatgttgttgtgggcaaggtccaagttttgaagaaattgaagatcacaaattttatgaggaatatgtcaatcaaagttatttgatcgaaggcttagaatcacaagatttgagagcttatcaccaatccatgctggtacacttccactgaaacgattttcactaagatcaaacataatgaaatgatatggttatgcttgttttgaattaaggttttattatatggatttaaattagctgtgactgagtttctgaatttttggatgtttgttttggttgcttaaatttatagataaatgcttaagactgttattgcc

SEQ ID NO: 19820 - DNA, 375 bp, Gossypium hirsutum
  unsure (1)..(375): unsure at all n locations
  Clone ID: AI729708.1
acgagaagaaggtgtacgccatccgtcaaagcattgctaaggccctcgtcgctttctaccagaagtacgtcgatgagcaaagcaagaaggagattaaggatatcttagtcgggtacgataggactttgctggtggctgatccgaggcggtgcgagcccaagaaattcggtggaagaggtgctagggcaaggttccanaaaagttatcgttgaataagatttatggtttgttcgcgaaacttcgttttgttttacaagagatactatgtttatgttcattttgaattaagttttgcgacattgagctcctttcatcaatgacttggaatgcaatttttcggcaaaacnaaaaaaaaaaaaaaaaaaaaaaaaaaat

SEQ ID NO: 19821 - DNA, 387 bp, Gossypium hirsutum
  Clone ID: LIB3196-010-P1-M1-H3
gaaagaaaagaaaaatggttctgctagagaaactttgggatgatgtagtggccggtcctcaaccggaacgtggccttggccggctgaggaagatcaccaccaccccacccttgtccaccaaaggtaaaaacaattagcttttgcattacatcatttgtattgtggacatttaagtttcactctgaaattgaatcttttcattagatgaggcttcatcaatggcgatgccgacgagtccgacgacacctgggacaccatcgacgccggtgtaggttcgtagggacaacgtgtggaggagcgtgttcaatccaggtagcaaccttgcaaccaaaggtattggcgctgaagttttcgacaagccttaacctaactatactactgattatg

SEQ ID NO: 19822 - DNA, 320 bp, Gossypium hirsutum
  Clone ID: LIB3272-011-P1-K1-D4
acagaaaatagacaacagtctctggtgagaagtaacacttacgtatgatgtaggcgctccggacgtagaacttaacgtggtctacgcccggtgaagaagataaacacgcaccccacccttgtgcaccaaagatgaggcttcatcaatggccatgccgacgagtccgacgccacctgggacaccatcgacgccggtgtcggctcgtagggacaacgtgtggaggagcgtgttcaatccaggtagcaaccttgcaaccaaaggtattggcgctgaagttttttacaagccttaagtcagctcttcaacaagaaatgtgtggc

SEQ ID NO: 19823 - DNA, 912 bp, Gossypium hirsutum
  Clone ID: GOSHI-09MAY01-C28_2
tttttggtaagcagtaactggcacatgcattatgaacaatgacttggttacggtgccgagctacgagctcaggtgcaggaatgatcctcaatggtgaattagtcgaaccataaccgtgacagacaccaactattgtacacctaactatgctttatctagtgacaatggcgggtggtgcaatcccacacaagaacactttgatttggccgaaccggcattcttgccgatagcataatattgagctggaatcttacctgatatgtatacaacggtgttatgtgttaagaaaggaagcatcaagtacaccatgaatggacattcgtacttcaacatggtgttgataaccaacgtgggaggggcaggggatataacgtcagtgtccatcaagggttccaaaacaggatggctacctatgtccagaaattggggccaaaactggcagagcaatgcttaccttaacggccaaagcctctctttcaaagtgactgccagcgatagcaggactatcacaaactacaatgtagtgcccgctggttggcaattcggacaaacttttgaaggaggccagttttaagacaatattatagtgtccgtctaatattaaaactggaattgacatattacttatataaggcacatgagcgttttatgccgaggtagcaaagtggcgcccgctggctttatgtgtgaaataggcgagcaagtgccattagcctataatatacacatttcctatagtgaaccaaactattaagtttgaactctagaggtgatatccataatgtctgaaatttgattgttgatgattgaccatgatatttatggttttcattattgaaatacttttttattataatttataaaaaaaaaaaaaaaaaaaattctgccgccgccacccgcggtggaatctca

SEQ ID NO: 19824 - DNA, 1232 bp, Gossypium hirsutum
  Clone ID: GOSHI-09MAY01-C28_1
atctgggtatcgggcccccctcaaggtctatggtatcatacgcttgatatccccacccgcgcgttaggtcagccaattgtttgagctagctagctcttactcaaatggcaaccaaaacgatgatgttgcaaatattttcacttttcttctttttgttcagtatctgcaactccattttccttggtgctaatggagatgacaatggtggttggcaaactgcccatgccaccttctacggtggtgctgatgctaccggcacaatggggggagcttgtggttatggaaacctgtacagtcaagggtatggaacgagcacagcagctttgagcactgcacttttcaacaatggcttgagctgcggtgcctgctacgagctccggtgcaacaatgatcctcaatggtgcattagtcgaaccataaccgtgacagccaccaacttttgtccccctaactatgctttatctagtgacaatggcgggtggtgcaatcccccacgagaacactttgatttggccgaaccggcattcttgcggatagcggaatatcgagctgggatcgtccctgttatgttcagaagggtgtcatgtgtgaagaaaggaggcatcaggtacaccatgaatggacattcgtacttcaacatggtgttgataaccaacgtgggaggggcaggggatataacgtcagtgtccatcaagggttccaaaacaggatggctacctatgtccagaaattggggccaaaactggcagagcaatgcttaccttaacggccaaagcctctctttcaaagtgactgccagcgatagcaggactatcacaaactacaatgtagtgcccgctggttggcaattcggacaaacttttgaaggaggccagttttaagacaatattatagtgtccgtctaatattaaaactggaattgacatattacttatataaggcacatgagcgttttatgccgaggtagcaaagtggcgcccgctggctttatgtgtgaaataggcgagcaagtgccattagcctataatatacacatttcctatagtgaaccaaactattaagtttgaactctagaggtgatatccataatgtctgaaatttgtttgttgatgattgaccatgatatttatggttttcattattgaaatacttttttattataatttataaataatgagtcatttatttttacaaaaaaaaaaaaaaaaaggcgacgaggccgtacttgaggg

SEQ ID NO: 19825 - DNA, 388 bp, Gossypium hirsutum
  Clone ID: LIB3197-041-Q1-M1-H9
cggacgcgtgggcggacgcgtgggcggacgcgtgggcggacgcgtggggccaattgtttgagctagctagctcttactcaaatggcaaccaaaacgatgatgttgcaaatatttccacttttcttctttttgttcagtgtctgcaactccattttccttggtgctaatggagatgacaatggtggttggcaaactgcccatgccaccttctacggtggtgctgatgctaccggcacaatggggggagcttgtggttatggaaacctgtacagtcaagggtatggaacgagcacagcagctttgagcactgcacttttcaacaatggcttgagctgcggtgcctgctacgagctccggtgcaacaatgatcctcaatggtgcattagtc

SEQ ID NO: 19826 - DNA, 373 bp, Gossypium hirsutum
  Clone ID: LIB3197-016-P1-M1-A7
acggacgcgtgggcggtctccctagccggcgaagtgaatcgacaaacggccgaacttgagtggatcgtggcagcaaggccactctgccgccaattgtttgagctagctagctcttactcaaatggcaaccaaaacgatgacgttgcaaatatttccacttttcttctttttgttcagtgtctgcaactccattttccttggtgctaatggagatgacaatggtggttggcaaactgaccatgccaccttctacagtggtgctgatgctaccggcacaatggggggagcttgtggttatggaaacctgtacagtcaatggtatggaacgagcacagcacctcttagcactgcacttttcaacaatggcttgagc

SEQ ID NO: 19827 - DNA, 1036 bp, Gossypium hirsutum
  Clone ID: GOSHI-09MAY01-C948_1
caacaaggtgagataccatctcccagggctggtcatacaggtgtgactgttggggagagggggttgattgtcggcggtggagacaataaaagcggtgcatcagaaactgttgtccttaacatgtcaactcttgtttggtcagttgtcacatcagttgaaggacgtgttcctcttgctagtgagggtttaagtctggttgtgggctccatttctggtgaagatatacttgtatcttttggagggtataatgggcgttacaacaatgaggttaatgttctcaagccaagtcacaagtcgactttgcaatcaaagataatggaagcccctgttcctgatagtgtttctgctgtgcaaaatgcgacaaatcctaccagagatttggaatctgactttgaagttggtcaagaaggaaaaatacgagaaattgttatggataacactgactcagagcacatgaaatccaaaggtgaggagactagtgagctcattatagcaacactaaaggcagagaaggaagaactagaatcatcactcaacaaggataaattgcagtctctccagctgaaggaagaactaacccaagctgagactcgaaacacggatctgtacaaggagctccaatccatacgtggtcaacttgctgccgagcagtcgagatgtttcaaattagaggttgatgttgccgagctgcgacagaagcttcagactatggaaacactacaaaaggaactcgaactcctgcaacgacaaaaagctgcatccgaacaagcttccttgaatgcaaagcaaaggcaagggtcaggtggtgtatggggttggcttgcaggaagccctccacaaaacgctgatgatgcctgaaaagccgaattaaacagtaatttctacatttattcaaattgatcaaattttagtgaaatacatacatttttctagttaatcaaagttctttctatgatgggaataagatatctagttttgcccaaatgacccattgggggtttttttgcatgaatacatgtctccgtagattctagtt

SEQ ID NO: 19828 - DNA, 621 bp, Gossypium hirsutum
  Clone ID: GOSHI-09MAY01-C908_2
gtcaaacaaagatatttcgacagtgctggttggcatgaactcggttaaacaggttcgggttcatcatttgaactttatgaaatctattttatgcctgataatagaattttgttactaaatcttcatacctgtcaaaacatgtttgcattttttttcacgagcttgctgcttcggctgttagtaatgccggggttgtaaataactaggttgaagagaatgttgccgctgcaacagaacttgtactgttcgggaaagatcatgaaactctagctgaggtggaagcaatcctgaagccagtgaagaatcagacatggccgagcggaattcaacaaagctgagcaacaatatcgacccgtatttttattattgtatgcatatgttctcccacatggaatgggggcaaccattctgttgttatgagactagtatttagatgacaaaaatttccgtccctgtccaagtaaacttgctactgtccgattaaggagtatgattgaaataatgaggagtctgtctcattgaatatctaagtgtttgggcttgaaattgttgtgttgttaatcaccccacattagttgagtctcattcaagcttggtgaaaacatgaatttacaatgcatt

SEQ ID NO: 19829 - DNA, 1356 bp, Gossypium hirsutum
  Clone ID: GOSHI-09MAY01-C908_1
caaattttgctccttttcttgtgtttgtgtttcttctgcaggaggaggaaaatcccatccccttatttgctctttattttcgcatcttacttcttaaggagaaaaacaaacacgatcattgtcggctacactcccaaacactcaatctccttcctctcatatacagtttttccccaattcttcaagaaaaagaaaccctagctaaacatggctgttcccaaactagaaatgagacctctcggaaacaccggcctcaagctcagcagcgtgggcttcggagcttcccctctcggcagcgtcttcggttccgtttccgaaagcgacgctgtcgcctccgtcctcgaagccttccgcctcggaatcaacttcttcgacacctccccgtattatggagcgacattgtcagagaagatgcttggtaagggacttaaagctcttggagttcctagaagtgaatatatagtttcgacaaaatgtgggagatatcgtgaaggttttgatttcagtgctgagagagtaactaaaagcattgatgaaagcttggagaggttgcaacttgattatgttgatatatttcaatgccatgacattgaattcggctctcttgatcaggttgtgaatgagacgattccggcacttcaaaaactgaaggaagcagggaagattcgtttcattggtatcaccgggttgcccttggaaatttttacttatgtgcttgatagggttccaccaggcactgttgatgtaatattatcatatggccattatagcattaatgattcaacattggaggatttattgccttacttgaaaaccaaaggtgttggcgtaatcagtgcatctccacttgctatgggacttcttactgagtttggtccaccggagtggcatccggcatctcccgaactcaagtctgcctgccaagctgctgctgtatattgtaaagagaaaggaaagaatatttcgaagttagctatgcaatacagcttgtcaaacaaagatatttcgacagtgctggttggcatgaactcggttaaacaggttgaagagaatgttgccgctgcaacagaacttgcactatgcgggaaagatcatgaaactctagctgaggtggaagcaatactgaagccagtgaagaatcagacatggccgagcggaattcaacgaagctgagcaacaatatcgacccgtatttttattattgtatgcatatattctcccacatggaatgggggcaaccattctgttgttatgatactagtatttagatgacataaatttccgtccctgtccaagtaaacttgctactgtccgattaacgagtatgattgaaataataagcagtctgtctcattg

SEQ ID NO: 19830 - DNA, 590 bp, Gossypium hirsutum
  unsure (1)..(590): unsure at all n locations
  Clone ID: LIB3543-030-Q1-K6-H7
aaatttgctcctaaaaatgcgggcggtggggggggggnaaaatcccatacccttatttgctctttattttcgcatcttacttcttaagggagaaaaacaaacacgatcattgtcggctacactcccaaacactcaactctccttcctctcataaacaatttttgcccaattcttcgaggggaagaaaccctttttaaacatggctgttcccaaactagaaatgagacctctcggaaacacgggcctcaagctcagcagcgtgggcttcggagcttctcctctcggcagcgtcttcggttccgtttccgaaagcgacgctgtcgcctccgtcctcgaagccttccgcctcggaatcaacttcttcgacacctctccgtaattctaaatttcttcactttaactaactgggttcttgtcttatatttaatttgatgaattatatgtatgtatatatgtatgtatgtatgtatgtttgttttgttaataatttgaaggtattatggagcgacattgtcagagaagatgctgggtaagggacttaaagctcttggagttcctagaagtgaatatatagtttcgacaaaatgtgg

SEQ ID NO: 19831 - DNA, 570 bp, Gossypium hirsutum
  unsure (1)..(570): unsure at all n locations
  Clone ID: LIB3825-012-Q1-K6-C6
cccgggctcgcacccacgcgtcccgcaatagacaacaagattttgactccttatggcttgtgttatctcacagaaaggaaagaaaaatcccatccccttcatttgcttctttatttgtcgcattcttactttcttaaggcagaaaaacaaacacgatcattgccggctacactcccaaacactcaactctccttcctctcataaacaatttttgcccaattcttcaagaaaaagaaaccctagctaaacatggactgctcccaaactagaaatgagacctctcggaaacacgggcctaaagctcagtagcgtgggcttcggagcttctcctctcggcagcgtcttcggttccgtttccgaaagcgacgctgtcgcctccgtcctcgaaaccttccgcctctgaatcaacttcttcgacacctcttcgtaattctaaatttcttcacttnaactaactgggttcttggcttatatttaattngatgaatcatatgttngtatattatgtatgcatgcatgcatttttctgtctctttaataatttggaaggttctatgggatcggacattg

SEQ ID NO: 19832 - DNA, 484 bp, Gossypium hirsutum
  Clone ID: LIB3825-013-Q1-K6-E6
caatagacaacaaattttgctccttttcttgtgtttcttcacaaggaagaaaatcccatcccttatttgctctttattttcgcatcttacttcttaaggagaaaaacaaacacgatcattgtcggctacactcccaaacactcaactctgcttcctgtcataaacaatttgtgcccaattcttcaagaaaaagaaaccctatctaaacatggctgttcccaaactagaaatgaggacctctcggaaacacgggcctcaagctcagcagcgtgggcttcggagcttctcctctcggcagcgtcttcagttccgttgccgaaagcgacgctgtcgcctccgtcctggaagcctatcggctcggaatcaacttcttcgacacctctacgtggttgtaaatttctttgctttaactaactgggttcatggcagatatataatgataggaattatgtctggggactatatggggtctatggatgatatg

SEQ ID NO: 19833 - DNA, 463 bp, Gossypium hirsutum
  Clone ID: LIB3083-050-Q1-L1-E5
aaattttgctccttttcttgtgtttcttcagaaggaagaagatcccatcccttatttgctctttattttcgcatcttacttcttaaggagaaaaacaaacacgatcattgtcggctacactcccaaacactcaactctccttcctctcataaacaatttttgcccaattcttcaagaaaaagaaaccctagctaaacatggctgttcccaaactagaaatgagacctctcggaaacacgggcctcaagctcagcagcgtgggcttcggagcttctcctctcggcagcgtcttcggttccgtttccgaaagcgacgctgtcgccttcgtcctcgaagccttccgcctcggaatcaacttcttcgacacctctccgtattatggagcgacattgtcagagaagatgctgggtaaaggaacttaaagctcttggagttcctagaagtgaatatatagtttcgacaa

SEQ ID NO: 19834 - DNA, 398 bp, Gossypium hirsutum
  Clone ID: LIB3145-039-Q1-K1-E6
cccacgcgtccgcccacgcgtccgcccacgcgtccggtgggttcggttggggatgacttgtgtagatttcttcattactaacacataggaatacgtggggtttcatggttaagattattattaataattttctctctagtgtaggacttgaaaataactagcctttcatttttgtttttcttatttaaccacttggaaaacctaaatgacatggatactgtgttacaagagatcaagttgaactgttcgggaaagatcatgaaaactctaactgaggtggaagcaatcctgaagccagtgaagaatcaaacatggccgagcggaattcaacaaagctgagcaacaatttcgacccgcatttttattattggatgcatatgttctcccacatggggggg

SEQ ID NO: 19835 - DNA, 533 bp, Gossypium hirsutum
  Clone ID: GOSHI-09MAY01-C938_3
tcagtcattagtcgtgtgggcaatctcggaaggaaggcaagctgctgcacaagtcgccaaatacctgcctaaggaagacaaggacccaagtgtagagggtgagaaccaagattccgtcaagcggcaccaagaccttccccaaaagcagcaaactgtcatgaaatagatgatccatcagattgttattgtttgcgacattgagctgaaatggaacccgaatccaatacattccgaaggaaattggtatttacatggatgaccagagtgggaattaaagcatgaatcttttgcggttaaaccagcaagggggatatatgctttaatctcccaacaaagaacctacaagcaaaaatcaataaacattcatggggctgagctgatatttagtagatttagggatattttgtcttttctcatgtctttgttatctttatttatagtttttattcaggttcagctctcatcgttttcttgaaaggtacaataatgtatagttttgtctcttaaatcgtttggtttagaggagaagttcc

SEQ ID NO: 19836 - DNA, 1210 bp, Gossypium hirsutum
  Clone ID: GOSHI-09MAY01-C938_2
caaaacccaggaccttcctgtaccaggacgagattatctggtgttcattttgcaatggaattcctacatgcaaatactaaaagcttgcttgatagtgatctccaagatggtaactacatatcagctaagggcaagaaagtagtagtcatcggtggaggtgacactggtacagattgcattgggacagctatccggcatggatgtagcagcattgtaaatcttgagttgcttcctcagccaccgcagacaagagctcctggcaatccttggccacagtggcctcgcatattccgtgtagactatgggcaccaagaagctgctaccaaatttggaaaagacccaagatcctatgaggttttgactaagaggtttataggagatgataatggaactgtgaaaggacttgaggtggttcgtgtgcgttgggagaaggatgccagtgggaggttccaattcaaggaagttgagggctcagaggaaataatcgaggctgaccttgtcctgctagccatggggttccttggccctgagtcgacactggcggaaaaattaggtgtggagcaagacaatcgatcaaacttaaaggcagagtatggccgcttcacgaccaatgtggatggagtctttgcagctggagattgtcgacgcggtcagtcgttagtcgtgtgggcaatctcagaaggaaggcaagctgctgcacaagtcgacaaatacctgactaaggaagataaggacacaagtgtagagggtgagaaccaagattccgtcaagcggcaccaagaccttccccaaaagcagcaaactgtcatgaaatagatgatccatcagattgttattgtttgcgacattgggctgaaatggaacccgaatccaatacattccgaaggaaattggtatttacatggatgaccagagtgggaattaaagcatgaatcttttgtggttaaaccagcaagggggatatatgctttaatctcccattaaagaacctataagcaaaaatcaataaacattcatggggctgagctgatatttagtagatttagggatattttgtcttttctcatgtctggttatctttatttattgtttttattcagctttgtttgtaaggttcagctctcatggttttcttgaaaggtacaataatgtatagttttgtttcttaaatcgtttggtttagaaaaaaaaaaaaaaaaaaaaaaaaaag

SEQ ID NO: 19837 - DNA, 2325 bp, Gossypium hirsutum
  Clone ID: GOSHI-09MAY01-C938_1
cagacctgctgctgatattcgccctgaagctgctcaatattgtattcaaaaacaggatcatggcttggatatggctttggaccaaaaactcattaaactatctactgctgctctagagaaaggtcttcctgtatacattgaaacacctatatgcaatgtgaaccgtgcagttggaacaatgctgagccatgaagtgactaagcgctaccaccttgcagggcttccagctggtacaattcatatcaaactctcaggaagtgcagggcagagcttgggagctttcctgtgccctggcatcatgctggagcttgaaggtgatagcaatgactatgttggaaaaggattatcaggtggaaaaattgtagtttatcctcctaaaggaagccggtttgatcctaaggaaaacatagtaattggtaatgtggctctctatggagctacttccggggaagcggatgcctttcgtggggcgccgcgaagattttgtgttcgtaattcaggtgctaaagcagttgtagaaggcgttggtgatcatggttgtgagtacatgactggtgggactgttgttgtacttggaaaaactggcaggaattttgctgcaggtatgagtggtggtattggttatgtgcttgatgtggatggaaaatttcaatctcggtgcaatcctgagctggtggaccttgataaaattgaagaagaggaggatattgtcactctgaagatgatgattcagcagcatcagcgccataccaacagccagttagctagtgaagtacttgctgactttgagagccttctgcccaaattcataaaagtattccccagagattacaaacgtgttctggcaaagatgaaagaccaggaagcatctgaacgtgctgcaaaagaagctgaggagcaagatgaggtagagctgatggagaaagatgcttttgaagagctcaagaagttggcagctgcatcttcgaatgagaaatcaagtctgacagtcgaagctgaaccagtcaagaggcctactcaggtttctgatgctgtgaaacatcgtggttttgttgcttatgagcgtgaaggtgttcaatatagagatcctaatgttcggatgcatgactggaaggaggtcatggaggaatcaaaacctggcccacttttaaagacacagtctgctcgctgcatggactgtggtactcctttctgccatcaggagaactctggatgtcctctcggaaacaaaatacctgaattcaatgaactggtttaccaaaataggtggcgtgaagcactagatcgtcttctagagacaaataacttcccagagttcactggccgagtgtgccctgcaccatgtgaagggtcttgtgtgcttggtattattgagaatcctgtgtccatcaaaagcattgaatgtgctatcatagacaagggatttgaggaagggtggatggtgccacgacctcctctcaagagaacagggaaaagcattgctgttattggaagtggaccatctgggttggctgctgctgatcaactaaatagaatgggtcactctgtgactgtgtatgagcgtgctgatagaattggagggcttatgatgtatggagtccctaacatgaagactgacaaggtagatgtagttcagcgacgtgttaaccttatggctgaggaaggagttaaatttgtcgtcaatgcaaatattggaaaagacccgtcctactcccttgaccggcttcgagaggaaaatgatgccattgttttggcaattggagccacaaaacccagggaccttcctgtaccaggacgagatttatctggtgttcattttgcaatggaattcctacatgcaaatactaaaagcttgcttgatagtgatctccaagatggtaactacatatcagctaagggcaagaaagtagtagtcatcggtggaggtgacactggtacagattgcattgggacatctatccggcatggatgtagcagcattgtaaatcttgagttgcttcctcagccaccgcagacaagagctcctggcaatccttggccacagtggcctcgcatattccgtgtagactatgggcaccaagaagctgctaccaaatttggaaaagacccaagatcctatgaggttttgactaagaggtttataggagatgataatggaactgtgaaaggacttgaggtggttcgtgtgcgttgggagaaggatgccagtgggaggttccaattcaaggaagttgagggctcagaagaaataatcgaggttgacttgtctgctacctggggtctttgccttatcacctgcggaaaatagtgtgacaaacatcatat

SEQ ID NO: 19838 - DNA, 502 bp, Gossypium hirsutum
  Clone ID: LIB3583-056-P1-K1-A2
gcgctctttacttcattactcctctacagctgctctagagaaaggtcttcctgtatacgttgaaacacctatatgcaatgtaaaccgtgcagttggaacaatgctgagccatgaagtaactaagcgctaccaccttgcagggcttccagctggtacaattcatatcaaactctcaggaagtgcagggcagagcttgggagctttcctgtgccctggcatcatgctggagcttgaaggtgatagcaatgactatgttggaaaaggattatcaggtggaaaaattgtagtttatcctcctaaaggaagtcggtttgatcctaaggaaaacatagtaattggtaatgtggctctctatggagctacttccggggaagcatatttcaatggaatggcagcagaaagattttgtgttcgtaattcaagtgccagagcaagtgtagaaggcgttggtgatcatggctgtgagtacatgactggtgggactgttggtgggcttggaaaa

SEQ ID NO: 19839 - DNA, 502 bp, Gossypium hirsutum
  Clone ID: uC-gsflnu33B013g10b1
tttttaaaccagcaagggggatatatgctttaatctcccattaaagaacctataagcaaaaatcaataaacattcatggggctgagctgatatttaggagattgagggacatgctgactttgctcatgtctggtgatcagtatggacaagcaactattcatctctgaagactaggttgagatgcactgggtatctactcaggaccatgacagggtacggatgtctcttggcaaactcctgggtgttcttcggattatttggacagatgtgcttctaatggatgaagtgttaagtgaggctgctctacctggcttttatctggaggctgcccaagttgctcttaacagtatgttgccagcacgtttagttaccttttaacggacatatcagatgccctttgagagtaaatgttagttcaaaagaggcagcagaggagctcccctgcaagttgctttggaagccagcaaaaagctgtgctccagggcagcatggatgtcttact

SEQ ID NO: 19840 - DNA, 362 bp, Gossypium hirsutum
  Clone ID: uC-gsronu33B125g02b1
ccctttcgtccggaatacttaatttgtatgtatagagggtctagcatacttttcttggaaatagtattgataaggattttatttatgtggaacagctaagagaatcattttccttatgtaggattgtattttccagccttttaagcttcagatgctgttagtatctgcagttctgtgaaccactctggtatacaatgatagttctcaggtctttgtgttagctgatatttagtagatttagggatattttgtcttttctcatgtctggttatctttatttattgtttttattcacctttgtttgtaaggttcagctttcatggttttcttggggggggcaattatgtatagtttatgttttt

SEQ ID NO: 19841 - DNA, 282 bp, Gossypium hirsutum
  Clone ID: uC-gsflnu33B013g05b1
tttgtgtaaaccggcatgggggatatatgctttaatctcccattaaagaacctataagcaaaaatcaataaacattcatggggctgagctgatatttagtagattgagggatattctgtcttttctcatgtctggttatctttatttattgcttttattcagctttgattgtaaggttcagctctcatggttttcttgaaaggtacaataatgtatagttttgtttcttagaaaactactgggtgctaattcggaaaatttggaaagaagagctactaatgg

SEQ ID NO: 19842 - DNA, 615 bp, Gossypium hirsutum
  Clone ID: GOSHI-09MAY01-C928_1
ttctatcgcgtccgaacaaattttgagagagaggtagatccgatggggaggtcgagaaggaaatacaaacaatctcgtgccaaggtcaaagtcggtctccccaggaaaaaccctcacgtctttaagccatgcttcactcttcctcccaagctccgttcactcgccaacgtcgacgatgccctctccaagtgggacgacaaagccagcgtcatccaaaactacaagtcctttggggtcgtttctaaccctaactacctcggcgttcgttctcgtacttcccacatcgtggagagcgattcactccaagtccctcattctccgccttccgatgaaccggctgatgaattcgagcccattgattcgggcagcgatctcgaagaggatgacttaaaaacagcactggggaagaagcgaagagatggaaaaagcacacatttacagccactgaccaccatgcaacgtctttacattggccagctgattgagaaatacggcgatgactaccaggcaatgttcatggatgtaaaattaaataagatgcagcattcggttgcgaatctggagaagctatgcaaaaggtatcatatgtttggagataagaatcctttgatatta

SEQ ID NO: 19843 - DNA, 463 bp, Gossypium hirsutum
  Clone ID: GOSHI-09MAY01-C848_2
caaaatcttagagatggatatttgatagatttccctttcatctccttttctctttaaagaaaaattggttttcgattccattttcaatttatatattttggattagattcggttggtcttagggaaaaacaaaggaaagggcaatgtcaaccccagcaaggaagaggctgatgagagacttcaagagactacagcaagatccacctgctggtattagtggggctcctcaagataataatatcatgttttggaacgctgtcatttttgggcctgatgatactccttgggatggcggtacgttcaagctgactttgcagttcatggaggattatccaaataagcctccaaccgttcggtttgtctcacggatgtttcatccaaatatctatgcagatgggagtatttgtctcgatattttacaaaatcagtggagtcctacatatgatgttgccgctatactcac

SEQ ID NO: 19844 - DNA, 804 bp, Gossypium hirsutum
  Clone ID: GOSHI-09MAY01-C848_1
cccacgcgtccgcccacgcgtccgcccacgcgtccgaaggaaaacaagggaaaaagaaaaccctagctttacctttttgttctttgtgaaacatcaaatcgcagagatggatctttcatagatttcgcctcagatctctttctctttgtaaaagaaaattgggtttacttatttatttggatcggattgggttggtttggttttagaaaagaaggaaggcgatgtcaaccccagcaaggaagaggctgatgagagacttcaagaggttacagcaggatccacctgctggtattagtggggctcctcaagataataatatcatgctttggaacgctgttatttttgggcctgacgatactccttgggatggaggcacgttcaagttgactttgcagtttacagaggattatccaaataagcctccaactgtccgtttcgtctcacgaatgtttcatccgaatatctatgcagatgggagcatttgtctggatattttacaaaatcagtggagtcctatatatgatgttgcagctatactcacctcgatccagtctcttctttgtgatccgaacccgaactctccagcaaactcggaagcagctcgtatgtttagtgagaataagcgggaatacaaccgaagagtccgcgaaattgtggagcagagctggactgccgactgaactgcagtgttagcaacggtaacctgccatcactctgaaaaataagaaatgccatactggcagtgctgctgctgtcaccgccactgctgccagtgccggtggtggcgaactcaaaaaccgtttc

SEQ ID NO: 19845 - DNA, 610 bp, Gossypium hirsutum
  Clone ID: GOSHI-09MAY01-C808_3
catgatggctgtgctatccctgcacgaacagagagcagaacctgaccaatgtcaactctggcacatgttccttgaggttttccaaaagcacccctcattccggtttgaagcctatcagcaccggcacatgaaagcatcttgttgatacgcagaacatggggatttaccaagtacaaccgtgctgattatctgaagtggaagtctgagaacaggatcatgccagacggtgtcaatgcaaagcttcttggatgtcatggtcctttggctaatcgtcaaccggggggagctttcctctctggatcagcctagactctcaactatccagcaaatttttaagttctctccaaaagctttctgttgaactcgtttctggtttatcattacagttgtgttgcagatcttcccttagtggattttcaggtttaaaatatttggtttaatgaattgttagtcacaccactattatggaatttaattttattgttagtattatttccatgttgtttccttgggaaaaaaaaaaaaaaaaacaaaaaataaaaaaaaaaaagggaaaaaaaaaaaaaaaaaaaaaaaaataaaaggggacaaataagaaaaatataaataa

SEQ ID NO: 19846 - DNA, 986 bp, Gossypium hirsutum
  Clone ID: GOSHI-09MAY01-C808_1
cccacgcgtccgcggatttggctgttgctgttccttaatctcaaatctcatctgcaccagccgacgacatggggaggagacctgcaaggtgttatcgccaaatcaagaataagccataccccaaatctcgatactgccgtggtgtcccagatcctaagatcagaatttatgatgttgggatgaagaaaaaaggtgttgatgagtttcctttctgtgtccatcttgtgagttgggagaaggagaacgtctcaagtgaggcattggaagctgcccgtattgcctgcaacaagtacatggccaagtttgcagggaaggatgctttccatttgagagtgcgggttcatcccttccatgttctgcgtatcaacaagatgctttcatgtgccggtgctgataggcttcagaccggaatgaggggtgcttttgggaaacctcaaggaacatgtgccagagttgacattggtcaggttctgctctctgttcgttgcaaggacagcaacagccatcatgcacaggaggccctccgtcgtgcaaagttcaagtttcctggtcgtcaaaagattattgttagcaggaagtggggatttaccaagtacaaccgtgctgattatctgaagtggaagtctgagaacaggatcatgccagacggtgtcaatgcaaagcttcttggatgtcatggtcctttggctaatcgtcaacctggaagagctttcctctctggatcagcctagactctcaactatccagcaaatttttaagttctctccaaaagctttctgttgaactcatttctggtttatcattacagttgtgttgcagatcttcctttagtggattttcaggtttaaaatatttggtttaatgaattgttagtcacaccattattatggaatttaattttattgttattattatttccatgttggtgccttggggcaaagtctgtcttatgccctttttatttcctttttccgatctttcttttt

SEQ ID NO: 19847 - DNA, 472 bp, Gossypium hirsutum
  unsure (1)..(472): unsure at all n locations
  Clone ID: LIB3582-054-P1-K1-E8
cccagcgtccgctagttctagatcgcgagcggccgtcctttttttttttttttttttggaaataatactaacaataaaattaaattccataataatggtgtgactaacaattcattaaaccaaatattttaaacctgaaaatccactaaaggaagatctgcaacacaactgtaatgataaaccagaaatgagttcaacagaaagcttttggagagaacttaaaaatttgctggatagttgagagtctaggctgatccagagaggaaagctcttccaggttgacgattagccaaaggaccatgacatccaagaagctttgcattgacaccgtctggcatgatcctgttctcagacttccacttcagataatcagcacggttgtacttggtaaatccccacttcctgctaacaataatcttttggaaaacctcaaggaacatgtgccanagttgacattggtcaagttctgctc

SEQ ID NO: 19848 - DNA, 398 bp, Gossypium hirsutum
  Clone ID: LIB3148-056-Q1-K1-F9
gcggaatatgtttgggtgttttagtggttcaagttcttctcctaggttggattcaaggataaggagaagtagtagatcattttccctttttagtcctccttcaaggagaagaggttgggctcttgaacttgataatgcaagatctagaagtaggagaagaagaaggtaatggcttatgattttgaacataattcacacaatgtaccaagagccatagaaagtggttccattgaatgggatgttttttcttatcattgtaaattattgttagcaggaagtggggattcaccaagtacaaccgcgctgattatctgaagtggaagtctgagaacaggattatgccagatggtgtgaatgcaaagcttcttggatgccatggacctttggcaaatcgtcag

SEQ ID NO: 19849 - DNA, 685 bp, Gossypium hirsutum
  Clone ID: GOSHI-09MAY01-C558_1
cgtactttgcctaagcagaataaaaaggggggtctcacggggtggggggggggggtcctacactcttcaaaatcttaaaccctgccccaagactctcttccttcaaataccccccccccaaaacaaaaaaaaatggcgccggtagctacaaccaccacatcgacggcggcgacaactgaaactttcaagcccgacactcttgcccaaaccctagccgtccataaaaacgccctctcatccgtcaaattctcctccgacggcagcctcctcgcctcctcctccgccgacaaaaccctccgtacctattctctctcccccaccgcttccactctcactcctatccatgaatactccggccacgaccaaggcgtctccgacgtcgccttctcctcccactcccggttccttgtttctgcttccgacgacaaaacgctccgtctctgggacgttcccactggttctttgatcaaaaccctccacggccacactaactatgtcttctgcgtcaactttaatcctcaatctaacatgattgtctcgggttctttcgatgaaacagtgcgtgtttgggacgtcaaaactggaaaatgcctgaaagttttgcctgctcattctgatccagtgacagcagttgatttcaatcgagatggttccctcattgtctcgagtagttatgacgggcttt

SEQ ID NO: 19850 - DNA, 782 bp, Gossypium hirsutum
  Clone ID: GOSHI-09MAY01-C548_1
gtgaaaccttgggaatctcctccaatctctaccgtaaagcttgtaaaaagctttggaaaaccagaatcagcattggaaatcctccggccctgaaaatggaccccaacctgaaaagctacccgctcctctcctatgttttgtcccgccttccttccatctcatccaggctccagtcctcaccctcctctgatacccccttcgacctcgaacaaccaccgcctatcgacgccgcctcttcctccactgctccgccaccaatagtcgaccagatgccccacctttcccatcccaaagtcctcgcttccatgacccatgccatctacgacgtcgcccaaacccgctctgtcctccaaaccctcggcccccgacccgaccacgagtccgtcgacatggctcaccacaagctcgccgagatcgattccaacctctccaaatccctggaagaactcgtcctctctcctcgacccgagggtgtggatcaagccgaatggcgtgccaacttggccgacaaagagcaacagattcgacaacaagctgagcaggaaaaatctatgtacaagtcgatactgcaattggacgaaatgcacgaggcgtacgggaagctcgtgaagcaacccgaggagaggttggttaacatttatgagaaggcgggagaagtggcggacgattcggagccagttgaggagaccaatccggaggttggtgggatactggaggaagcgcaaggcaaaggattggaaagggttgatttgtgtggaaggaagctcagtatttgcccgaag

SEQ ID NO: 19851 - DNA, 466 bp, Gossypium hirsutum
  Clone ID: GOSHI-09MAY01-C578_8
accactcgtactattcttttcaaaagatcccacagccatctcataatctgagccgagtgtcggaggcctgaaaacgaaccctaaacgatgggtcagggaacaccgggcggtatgaataggcaaggtttcccaggggaccggaaacccgatggctctgataagaaggataagaaatttgagccagcggcgcccccagccagggtggggcgcaagcaacgaaaacagaaaggacctgaggccgcggctcggcttccgactgtaacgccgctgacgaagtgtaagctgcggttgctaaagctggagcgggtcaaggattatttactgatggaagaagagtttgtggctaaccaggaaaggctcaagcctcaggaagagaaagccgaggaggatcgatctaaagtcgatgatttgagagggtcgccgatgagtgtcggtaacttggaggagcttatcgatgagaaccatg

SEQ ID NO: 19852 - DNA, 743 bp, Gossypium hirsutum
  Clone ID: GOSHI-09MAY01-C578_6
tttttaatcctcaaaatcttgttcaaaggggggggcgtgggtgatgggaaaaagaaacaccgggtggtctgaaccgacaaggcttggggggggatcggaaacaggatggtgccgataagaaggagaagaatttgagccggcggcacctttttttttttttgggccgtaagcaacaattttgggggggggggggcccccttctacttacccatactaagtgtaagctccggctgctgaagctggagcgggtcaaggactatttactgatggaagaagagtttgtggctaaccaggaacggctcaagccgcaggaagagaaagccgaggaggatcgatctaaagtcgatgatttgagagggtcgccgatgagtgtcggtaacttggaggagctgatcgatgagaaccaggctattgcttcgtcgtcggttgggccggagtattacgtggggattttatcgttcgttgtttaggatcagttggagcctggacgctcttttgcggtgcgcgtctttggttttatttgttgttgggcttctgcaagatgaagttgatcccatggtatcagtgatgaaggttgaaaaggctccattggaatcctatgctgatataggaggtttggattctcagatacaggatcatagactacgcacccgatgcttagtatgactaacactgaattttatgaggacattggtatcaaacctccagaaggagttatcttgtatggagagcctggacaggca

SEQ ID NO: 19853 - DNA, 569 bp, Gossypium hirsutum
  Clone ID: GOSHI-09MAY01-C578_4
cttcgattcaagaggagatgtcaaagtaattcttgcaacaaataggattgaaagtcttgatccagctttgcttcgccctggtcgaattgataggaaaattgaatttcccctacctgacatcaaaacaagaaggcgcattttccagatacatacatcaaggatgactttggctgatgatgtgaacttggaagaatttgttatgacaaaagatgagttctccggagctgatataaaggcaatatgtactgaggctggcttgcttgctttaagggagaggcgcatgaaggtgacgcatgcggactttaagaaggccaaggaaaaggtgatgttcaaaaagaaagaaggcgtcccagaagggactttatatgtagtagaatttcaagagatccctggtattccctaattccgggtttcaattgttgtacacaaagattttattttttgcccccctattcttctgcctcattatgatttacgaaaccattgacatgatttcttgcctattttgaaggtcttccaatgctaaactttacccaatttgctaattgcgaaaagaaactccgttctcg

SEQ ID NO: 19854 - DNA, 631 bp, Gossypium hirsutum
  Clone ID: GOSHI-09MAY01-C578_3
gcgttcgcccagcgtccagggtgcccattctggtggtgaacgtgaaattcagaggaccatgttggagttgctgaaccaactagatggatttgattcaagaggagatgtcaaagtgattcttgcaacaaatcgaattgaaagtcttgatccagctttacttcgccctggtcgaattgataggaagattgaatttcctctccctgacatcaaaaccaggaggcgcattttccagatacatacctcaaggatgacattggctgatgatgtcaacttggaagaatttgttatgaccaaagatgagttctctggagctgatataaaggcaatatgtactgaagctggtctacttgctttaagggagcgccgcatgaaggtgacacatgcagattttcaaaaggccaaggagaaggtgatgttcaagaagaaagaaggggttccggagggtctttatatgtagaaaaacttgttatatttatatatattccagcgatattcatgttatgtatttctgaatccagtttgctctaagcatttttttttgtcttacgaacaatgtggtatggtatatacgtttcttgtatttcctagcaagcgcctacacttttgcagcaatattatgaagcagtttggg

SEQ ID NO: 19855 - DNA, 616 bp, Gossypium hirsutum
  Clone ID: GOSHI-09MAY01-C578_2
ctggtggtgaacgtgaaattcagaggaccatgttggagttgctgaaccaattggatggctttgattcgagaggagacgtcaaagtgattcttgcaacaaaccgaattgaaagtcttgatccagctttgcttcgtcctggccgtattgataggaaaattgagttcccccttcctgacatcaaaacaaggaggcgcatttttcagatacacacatcaaggatgacattggctgatgatgtgaacttggaagaatttgtgatgacaaaagatgagttctctggagctgatataaaggcaatatgtactgaggctggtttgcttgctttaagagagcgacgcatgaaggtgacacatgcagactttaagaaggccaaggaaaaggtgatgtttaagaagaaagaaggggttccagaaggactttatatgtagaaaaaccttttaagttctcaattaagctttccttggttctattgtaattctggattcaagttgttcccaaatttgtcttctgtatttcatggcaagctcatacagtctagtagcaatatgaagcatgaaaaaattgttaaatcctttttatggcatttacaataacacttgttttagtaatttgcttg

SEQ ID NO: 19856 - DNA, 1570 bp, Gossypium hirsutum
  Clone ID: GOSHI-09MAY01-C578_1
cccacgcgtccgaaagaattagtaataaattaaaacacttcgcccgcctccgcgtacgcggccgtaatttcgaaaatcctcaaatatcttgttcaaaaagaaaccctaaatcatgggtcagggaacaccgggtggtctgaaccgacaaggctttccaggggatcggaaacaggatggttccgataagaaggagaagaaatttgagccggcggcaccaccggccagggtgggccgtaagcaacgaaaacaaaaaggaccggaagcggcggcccggcttcctactgtgacgccgcatactaagtgtaagctccggctgttgaagctggagcgggtcaaggactatttactgatggaagaagaattcgttgctaatcaggaacggctcaagccgcaggaagagaaagccgaggaagatcgatctaaagtcgatgatttgagagggtcgccaatgagtgtgggtaatttggaggagttgatcgatgagaatcatgcgattgtttcgtcgtcggttgggccggagtattacgttgggattttatcgtttgtggataaggatcagttggagcctggatgcgctattttgatgcacaacaaggttctttctgttgttggccttctgcaagatgaagttgatcccatggtatcagttatgaaggttgaaaaggctccattggaatcttatgccgatataggaggtttggatgctcaaatacaggagattaaagaggcagttgagctccctctgactcatcctgaactgtatgaggacatcggtatcaaacctccaaaaggagttatcttgtatggagaacctggcactggcaagaccttgcttgcaaaggcggtggctaattctacatcagcaactttcttacgtgttgttggcagtgaattgattcagaagtacttgggagatggtcccaagttagttagggaactcttcagagttgctgatgacctttccccttcaatcgtcttcattgatgaaattgatgcagttggtactaagaggtatgatgcccattctggtggtgaacgtgaaattcagaggaccatgttggagttgctgaaccaattggatggctttgattcgagaggagacgtcaaagtgattcttgcaacaaaccggattgaaagtcttgatccagctttgcttcgtcctggtcgtattgataggaagattgagttcccccttcctgacatcaaaacaaggaggcgcatttttcagatacacacatcaaggatgacattggctgatgatgtaaactggaagaattgtgatgacaaagatagttctctggagctgatataaaggccatatgtcctgaagctgattgctgtttaagagaccacgcttgaagtgcacatgcgacttaagagccagaaaaggatgttaaagaaaaggttcacaggcctttttgaaaacttagtttatcattcctggcttgatcggtaaggtccaattctttattaggacttctttctaaaaatagtaaatatgtaattgggtttatttatttaaaataaaattggggtgcttttagttttagttatcctaagaacataataa

SEQ ID NO: 19857 - DNA, 546 bp, Gossypium hirsutum
  Clone ID: LIB3048-031-Q1-L1-B1-F2
ttaggtgacactatagaagatctgtgtaccggggccgccctagacttttgtttttttttttttaggggggcaaatatttaaaaatctttgtaataaacaagttaagacactatattagtgaataacatggatatcttgaaatcctactacatataaagttcttgtggaacgccttctttcttaccgagaagacgcaatggtaccactttaccgacatcgcggatgcctgaccttcatgcgcctctccgttaaagcaagcaagccagccttaatacatattgcgttgatatctccttccggtttctaatgatgaatgctaacaaagtcaatcaatttcacatcatcagccaaagtcatccttgatgtatgtatctggaaaatgcgccttcttgttttgatgtcaagatagggaaattcaattttcctatcaattcgaccagggcgaagcaaagctggatcaagactttcaatcctatttgtcgcaagaaatactttgacatctcctcttgaatcaaagccgtctaactggttcagtaactccaacat

SEQ ID NO: 19858 - DNA, 521 bp, Gossypium hirsutum
  unsure (1)..(521): unsure at all n locations
  Clone ID: LIB3829-024-Q6-K6-E3
attaaaaacaaccgaatggggggggggggggggggtgagaaaacataaacacccagtgtggtggaccaacagggtttgggggggtctggcacantattttgctccctcattggtggtaaaatttttgctggagaaaccttcttttttttcgtccannaccaacccctcttttgggggggggggtctctncccttcttccttctttnactccncatactaagaataagttccagttgtttaanctggtgcgggtcaggttctatttacttatggatgaataattcgttgcttatcatgaacggttcaagccgtcagatgataatgccgatgaagatcgatgtatagttgatgatttgagatgtttgccaatgagtgtgggtaatttggaggagttgatcgatgataattatgctattgtttcgtcctcgtttgcgccggatttttacgtttggattttattttttgcggattcggatctttcggagcctgtatgcgcttttttgttgccctactcggttctt

SEQ ID NO: 19859 - DNA, 890 bp, Gossypium hirsutum
  Clone ID: GOSHI-09MAY01-C518_1
cccactctttcgcccacgcgtccgggacagtacaagagccacagtaaaggaggagttacttaccctgcctacacggatgacaagaccgtgcccaaagatagtttgaccccaacttttgcagccgctgccttgttcatagacaatgcacgatgggatggggtgccttttcttatgaaagccggaaaagcattacataataagagggcggagataagggtacaattcaggcacgtgcctggcaatttatataaccgaaattttggaactgatcttgatcaagctacgaatgagcttgtcattagagtgcagccagatgaagctatttatttgaagatcaataacaaggtccctggactcgggatgagattggactgcagtaacctaaaccttcattatgctgccagatattcgaaagagatcccggatgcgtacgagaggcttctgctggatgcaattgaaggtgagagaagattgtttatccgaagtgacgagctcgatgcagcctggtcactcttcactcccgttttggcagagctggaagagaaaaaaataatgcccgaatactacccttatggaagccgtggccctgtcggggctcattatcttgcggccagatacaatgttcggtggggtgatcttggcttagaccaatcggcctaagactacactttgacattgctgtcatcgtcaatatagatttatcgacacggaaagctttgctacagatctttgtaagaagggctggaaatatttttaatctttacaaaggtttgcttaagaaaatttaggttttgtttatcaacatggtggcctaatttggtaagagcatgcactttgtgtagaaacaaatttaatgaacataagaagagctggatttgcctttgctcctc

SEQ ID NO: 19860 - DNA, 572 bp, Gossypium hirsutum
  Clone ID: GOSHI-09MAY01-C508_4
cccacgcgtccgctcttcggatttccggtattcttaggtgccttttatatttttcccctccacttttccgtcactttcccgagaaaatgagagaaatccttcacgtccaaggtggccaatgcggcaaccagattggagccaagttctgggaagtcgtctgcgccgaacatggcatcgactcaacgggtcgatacggcggcgactcggagctccagctggagcgtatcaacgtttactacaacgaagccagttccggccgctttgttccccgcgccgtcttaatggatctggaacccggtaccatggacggcgtaagatccggcccgttcggacaaattttccgacccgataacttcgttttcgggcagtccggtgcgggaaacaattgggccaagggtcattacactgaaggagcggagcttatcgattccgttctcgacgtggttagaaaggaagccgagaattgcgattgcttgcaaggttatcatttgcaattctatttttaaaaatttgaaggttcctttggttattaggtgttaactatggtctactgctaatcataaattggggct

SEQ ID NO: 19861 - DNA, 881 bp, Gossypium hirsutum
  Clone ID: GOSHI-09MAY01-C508_3
ggacctaaatatttttaatcatttaatgagaaggccaagccgagaaagcttggttcatggcaaagtatgatatatgttatcatatatacataagatagccttgaaactataattctacaactttttgactagcttcccaaaacaggacataaggagcatcctataaaaatgtaagctgtcaatgaacgagactacatataagacaagactcaaaaatcttctttttttttttggtacaaaagaagccatccttgacctgcaaaataccaatgccaaccgaactaaactcaaggttcgagactacactttataaaagcctattttcatttgagacgtgcatgctatggtactaatgaaagccatcataagtggttttgtttgtgggatatgaacatgctaacaaatgaaactgaatgtagcaaaagggaccccaaaaacatttatgaattggttaaaacaagcaaccttggatttggtagaataatcagtttccaattttaatatctatgtatggaatgataatcgtgtgaggaagagaaagggatcatcactaccttgacctttaaaccggttgcattggagctacttggtgcacttcatcacagctcgagactccacaagctaacagccatggtcagcattatctgttcgagaaagacgatcgctgatagcttggacataaaactattgccatggaactccagggttacttgtcatagctttagcttcagacagagatacagccatagccagcatcatctgctcttcataactttccggaacaatgggtcggggcacatttagaaagctaccccttacttcatcctgttgttgtattgcttgttgattcatcttataagtaatttctagtacaccttaag

SEQ ID NO: 19862 - DNA, 1664 bp, Gossypium hirsutum
  Clone ID: GOSHI-09MAY01-C508_2
cccacgcgcccgtcactcttcagtccagtattctaaggtgcattttttttcccttctactttccgtcacgttcccgagaaaatgagagaaatcgttcacgttcaaggtggtcaatgcggcaaccaaattggagccaagttttgggaagttatctgcaccgaacatggaatcgactcaacgggtcgatacaacggcgactcggagcttcagctggagcgtatcaacgtttactataacgaaacaagttccggccgctttgttccccgcgccatcttaatggatctggaacccggtactatggacggcgtaagatccggcccgtttggacaaattttccgacccgataacttcgttttcgggcaatccggtgctggaaataattgggccaagggtcattacaccgaaggagccgagcttattgattctgttctagacgtcgtcagaaaagaagccgagaattgtgattgcttacaagggtttcaggtatgccattctttgggaggaggaactggatctggaatgggaacattgctgatatccaagatcagggaagagtacccggatcgaacgatgcttacgttttcggtattcccatctcctaaggtttctgatactgtggttgagccgtacaatgcaacactctcggttcatcagctggtggaaaatgcggatgaatgtatggttcttgataatgaagctctctatgatatatgtttccgtaccctcaagctcactacacccagttttggagacctccgcaagcttgctgtaaacctcgttccgtttccccggctgcatttcttcatggtcggatttgcacctctcacatctcgtggttcccagcagtacaaagccttaactgtcccggaactaacacagcaaatgtgggatgccaagaacatgatgtgcgctgctgatcctcgacatggtcgatacctcacagcatcagctgtgtttcgtggcaagatgggtccagatcgcgtgcgtgctcggacgatcaatgtgcaaaacaagaactcatcatactttgtcgaatggattccgaacaatgtgaaatccacagtttgtgacattcctccgagtggattgaaaatggcatccacgtttatagggaactctacttcaatccaggagatgttccggagggtgagcgagcaattcactgccatgttccgaagaaaagctttcttgcattggtacactggagaagggatggatgaaatggagttcacagaagctgagagcaacatgaatgatttggtttcggagtaccaacaataccaggatgccactgcagaagacgaggagtacgaggaatatgaggaatacgaggaagaggcttaaaggatgctccttgttctttttatcatgtaggacattcggttgtgcaatctcggctttgctggttttcagcatttggatcgcttattgctgctgtctttgtgatttacagactagtattgctgctttgttttttatcaataattttcagcagtcagattcgtttctctcacaaatgtagcttacaattgtgagagcaaatgttaggctgcgaatccatttattaaagtatgcctcttgttctttttatcatgtgggatatttggttgtgtgtatgtgaactctgttgatgcaatcttagtattgcctgttgtgtttgtatc

SEQ ID NO: 19863 - DNA, 1682 bp, Gossypium hirsutum
  Clone ID: GOSHI-09MAY01-C508_1
cttcactcttaagatttccggaattcttattccttttatatttttcctctccaattttccgtcactttcccgagaaaatgagagaaatccttcacatccaaggtggccaatgcggcaatcagataggagccaagttctgggaagtcgtatgtgccgaacatggcatcgattcaacgggtcgatatggtggtgactcggagctccagcttgagcgaatcaatgtttactacaacgaagccagttgtggccgttttgttccccgcgcagttttaatggatctggaacccggaaccatggatagcgtaagatccggtccttacggacaaattttccgacccgataacttcgttttcggacagtccggtgcgggaaacaattgggctaagggacattacactgaaggagcggagcttatcgattccgttctcgacgtagttagaaaggaagccgagaattgcgattgcttgcaagggtttcaggtatgccattctttgggaggaggaacgggttccggaatgggaacgttgttgatatcgaagatacgagaggagtatccggaccgaatgatgcttacgttttcggtgtttccatctcccaaggtttctgatactgttgttgagccttacaacgcgacactctcagttcatcagcttgtggaaaatgctgatgagtgtatggttcttgataacgaagctctctacgatatctgtttccgtaccctcaagctcactactccaagttttggagatctcaaccatctaatttctgccaccatgagtggtgtaacatgctgccttcgcttccctggtcagcttaactcagatctccgcaaacttgctgtaaaccttattccattccctcgactacatttcttcatggtgggatttgcgcctctcacctcacgcggttcccaacagtacagagccctcactgtccctgaacttacacagcaaatgtgggatgccaagaacatgatgtgtgcagctgatcctcgacacggtcgatacctcacagcatcagcggtcttccgtgggaagatgagcacgaaagaggttgatgagcagatgatcaatgtgcaaaacaagaactcatcttactttgttgaatggatcccgaacaatgtgaagtccactgtttgtgacatccctccaatcggcttaaagatggcatccacatttatcgggaactctacttcaatccaagagatgttcaggagggtgagtgaacaattcactgccatgttccgtaggaaagctttcttgcattggtatactggagaagggatggatgagatggagttcacagaagcggagagtaacatgaatgacttggtttctgagtaccaacaataccaggatgcaactgcagatgatgaagagtacgaggaagaggaggaatacgaggcagaggcttaaaatctaatggaataatttggatgttttttgttgtgttttggattgggcttgtggagtgtgttggtgcaatttctcactgcctgttttgggtctttggatcactgtgttgttgattgtgtcgactttagttttgtcctcacagcttacagagtatatgttgttgtattgcttgttgattcatcttataagtaatttcaagtacaccttaagtaaaaggttttttaaaacttaaaaaaaaaaaaaaaaaaaaaaaagtcgacgcggccg

SEQ ID NO: 19864 - DNA, 372 bp, Gossypium hirsutum
  Clone ID: LIB3148-012-Q1-K1-F2
gcgctttggcatacaagatcaactgctctgggtggaattgcttagagattaatgttattggattgcacagtcccagagtacatcatgatatgaatgtaacattaaatgcaacaaccccatgtatcgcattaacaaaaaccatagccctcatcttacaaatgattccatgttaaagcataaaggatgctccttgttctttatatcatgtaaagaacattcggttgtgcaatctcagctttgctggttttcagcatttggatcgcttattgctgctgtctttgtgatttacagactagtattgctgctttgttttttatcagtcgtttttaggagtcagattcgtttctctcacaaatgtaacttacaattgtt

SEQ ID NO: 19865 - DNA, 548 bp, Gossypium hirsutum
  Clone ID: LIB3585-041-P1-K1-E2
cccacgcgtccgcccacgcgtccgcccccctctccaattttccgtcactttcccgagaaaatgagagaaatcgtccacgtgcgaggtggtcaatgcggcaaccaaataggagccaagttttgggaggttgtttgcgccgaacatggcatcgactcaacgggtcggtaccaaggtgattcggagcttcaactagagcggatcaacgtttactataacgaagcaagttgcggtcgctttgttcctcgcgctgttttaatggatctagaacctggtactatggatagcgttagatccgggccgtacggacagattttccgacccgataacttcgttttcgggcaatccggagccggaaacaattgggctaaggggcattacactgaaggagccgagcttattgattccgttcttgacgtggtcagaaaagaatccgagaactgtgattgcttacaagggtttcaagtatgccattccttgggaggaggaacgggttctggaatgggaacattgttgatatccaagatcagggaagagtatccggatcgaac

SEQ ID NO: 19866 - DNA, 315 bp, Gossypium hirsutum
  Clone ID: uC-gsronu33B016a04b1
cccactcgttcgcccacgcgtccgcagcatctgaatcgcttattgctgctatctttgcgatttacagactagtattgctgctttgttttttatcaataattttcagcagtcaggttcgcttctctcacacatttagcttacaaatgtgggagcaaatgttaggctgcgaatctatttattaaagtatgcctcttgtactttttatcatgtgggatatttggttgtgtgtatgtgaactctgttgatgcaaaaaaaaaaaaaaaattggttaaatgctttgctcccttgagtcaaacaaaggggaacttttctatg

SEQ ID NO: 19867 - DNA, 574 bp, Gossypium hirsutum
  Clone ID: GOSHI-09MAY01-C538_1
cccacgcgtccgcccacgcgtccgcccacgcgtccgcccacgcgtccggaaaatcacacccctgaaatgaaattgctagggtttcctttgctagcagccgaaccaccatgattttggtgatcaacagcatgcaaacagtacctgatctcaccgttgaaggcactcgataatgctttaaaaggatttggtaagtattttcctccttttcttctttgtttgaaaggaaactcaagtctcatgctattttttttaaacatagaaaaattcataaaacaaagaaaacttcaacactattcgactcctcacccttacctctgattcctgaagtatttgggctctcattggtgtcgattcatatcctgcgagtcccagccaataaaataaataaaaaaaatcaaaagagaaaaaattaacacttgaaatcacctttgctaaaactactttttctctcttctctatgcgtgtgtatatattcgtaatcccttttgcaggtacaatcatcgtcttttatagccaaatttacagattaaaaataaataaaaaataaaaatacatttttattgctgtcatttgc

SEQ ID NO: 19868 - DNA, 1221 bp, Gossypium hirsutum
  Clone ID: GOSHI-09MAY01-C498_1
cggggcgaaccaacccgtcggaaccaaaaaggaaaaccatacaaacaaatcctaaaagactctctctttacaacgtaaagagcaaaatgccccaacagcaaaacgtgtagtaataaggcaaaaacacggtagggaagcaaggttgttaatatatacatataaaagttataacggaagaaaggtcgaacgattcaaaaaaacccaacgatggctatgatgttacggtcgctcgctaggccgcttgaacgttgccttgggttaagggccggtggggatggtctcatgtggcacactgatcttaaacctcatgcttccggcgattactctatcgccgtcgttcaagccaataaaaaccttgaagatcaaagccaagtctttacatctcctttgggtacctatgttggtgtttatgatggtcatggcggacccgaagcttccagatttgtaaacaagcatcttttcccatttctccacaaatttgctacagagcaagggggattatctgcagacgtgataaagaaggcgttcaatgctactgaagaagagtttttacatttggtgaagcaatcattgcccgtaaggcctcaaattgcttcagttggatcatgttgccttgttggtgcgatatccaacgatgtgttgtatgtggcgaatctcggcgactcgagagcagttcttggcaaaagagtttcggaggataagaaaaacaaggttgtggcagagaggctatcaacagatcacaatgttggagttgaggaagtgaggaaagaggttgaggctcttcatcctgatgattcgcatgtcgtggtttacactcgcggagtttggaggattaaaggcataatccaggtgtcaagatctattggtgatgtttacttgaagaaacccgatttttatagagatccaatctttcaacgattcggaaaccctgttccccttaaaagaccagttatcacggcagaaccctccatccttattagaaagcttaagccccaagacttatttctgatatttgcatcagatggcctatgggaacagttgagcgatgaaaccgcggtagacattgttttcagaaacccccgagctggtattgctaagagactggtaagtgccgcacttagagaagttgcaaagaaaagagagatgagatacggcgatattaagaaaatcgagaagggaataagacggcatttccatgacgatataaccgtgatcgtcatt

SEQ ID NO: 19869 - DNA, 584 bp, Gossypium hirsutum
  Clone ID: LIB3543-036-Q1-K1-G7
tcgcccacgcgtccgcccacgcgtccgctttctttccagaaattgcttgtatgtttatagagagagtacatttacaaaacaactatgcattgtgcatcctctgaatcataatgctaagcttatgcgactatatggagtcttctctcttttctttttcgggttttttgggttccttttgttggtttctttcccctttaacttcagcagttaaatggttctctgtaatggataatgttggtctaagcattgaacttatttttttattcaggtgtcaagatctataggtgatgtttacttgaagaaaccggatttttatagagatccaatctttcaacgattcggaaaccctgttccccttaaaagaccagttatcacggcagaaccctccatccttattagaaagcttaagccgcaagacttatttctgatctttgcatcagatggcctatgggaacagttgagcgatgaaaatgccgtagacattgttttcagaaacccccgagccgtgagtattcacctttgtcttattggttaatttagtcttcattagcagctggactgaatgacagagtattgattttcaa

SEQ ID NO: 19870 - DNA, 432 bp, Gossypium hirsutum
  unsure (1)..(432): unsure at all n locations
  Clone ID: LIB3166-029-P1-K1-E5
aaatccccggccgccccacccgtccgcccacccgtccggaaaaacaaggngtggtcggagaggctatcaacagatcacaatgtttgagttgaggaagtaaggaaagaggntnangctcttcatcctgatgattcgcatgtcgtggtttacactctcggagtttgtaggattaatgtctttatccatgtttcttagatctatccgtgtcgttttttttcatctacctcttttctttatcttttccaattttcttctacttttttataattttctttcttttcttatttttttcttctttttttttctatttcttcttggggggggtgtgggttttcatcttttctttttcctttcctactcttttatctactctttttttttctttattcttcttttctctatctctctttctcattctcttcttttttatct

SEQ ID NO: 19871 - DNA, 409 bp, Gossypium hirsutum
  Clone ID: LIB3048-034-Q1-L1-E5
aggcgttcaatgctactgaagaagagtttttacatttggtgaagcaatcattgcccgtaaggcctcaaattgcttcagttggatcatgttgccttgttggtgcgatatccaacgatgtgttgtatgtggcgaatctcggcgactcgagagcagatcttggcaaaagagtttcggaggataagaaaaacaaggttgtggcggagaggctatcaacagatcacaatgttggagttgaggaagtaaggaaagaggttgaggctcttcatcctgatgattcgcatgtcgtggtttacactcgcggagtttggaggattaatggcataatccatgtacttaacaaaatctgttggcaaacccaattataagagttgtaagttgaatcagccaggctgaagaacaatttatgttt

SEQ ID NO: 19872 - DNA, 1416 bp, Gossypium hirsutum
  Clone ID: GOSHI-09MAY01-C448_1
cccacgcgtccgcccacgcgtccgcgagaacaacaaaaagaaaaggaggttccgggaataaatgaagtgaaagaggaggaatatgtgagagataaacagccaatagaggagacctgcaatgttgtgattgagtttgtggaagatgagaagaatggcaacaataaggagaacgaaaaacaatttctgatggaaaaggtagatgtccctcgcgcccgccctcccgtccgcccacgcgtccgagagttagtaagggagactaggggattattagaaaaaatccgggaccagggggaaagagcttatatggatgctaagccgagtacagaaaaagtgcatgttggtactgagaaagatgataagcaaattttgcaaatttctgcaaatgccgtcgctgattacgggatggaaatgccaactagtgaatctgaaactgaagtagaaaaaaataaagctgatagcaaagagcaaatgaagggatctgtggaaatggatattcagaaaagggagcaaccagtagggccagtgagtgaaactgcgaatgatgatagcattacaaaggggcttacagtcgaaattgctgcatcgattgtaggacaagcaaaagatgaaaacattgtagatccaagctatcaactgaataaggagaagaaagatgtggttttttccaatgaagatgaaagagagatcagtgaggaacaagggcttgacctttcagaaaatttaagttcagttagtctgcaggggtcccctcaagaagtgaacactgaagaaaggtggccttcatctagttactcacttcaccaagacgcttctgattcttcagatcttcctgtttctacaaaagctcaggaagcagataacactaaaattcctgtagaaaatgccacggatgccccatccaatgaggcaatacactgtgaggagaagatttgggaacaaatgaatgctctgagaacaatagtggggtataaagccgcccgaagagagacatgcatagaagaattgaaagctctgtatgtgttcactggaattgagccccctgcatccttgaaggacacgtgtgatcctgcagaagtcgatgcgaagcttgggtttctcaaatctgtagttggagttcaataggaatgtggttcattatggacttgcttttaggtacttggtcgaactttacttatttatagttttatagtttgtgacgttagagacattagatttaagagtagagaagcttggagtgcaggatattgaatgaattctgtgttgtgtcttggagtgagaactctgcaggcctttcccttgcggtaatagttctccagctcttttctgtttttacagaaaattcatattagtaaatttctttgttcctttcccattttttccttaatccacatgggaacttaaactctacgttttctc

SEQ ID NO: 19873 - DNA, 854 bp, Gossypium hirsutum
  Clone ID: GOSHI-09MAY01-C468_9
caaaacccatagaccagaagcccaaaactcaaggaagcgactttggcactcattcatgaacaaggaagcgactttcaacactcatacatacaacctgacaaccctagagtgaggaattagatccagctgcctctttgtcacttgtcagtacaacgctcctctcaacctccatttcccatcatggcatcggagaagaagctgtcgaacccaatgagggagattaaagttcaaaaacttgtcctcaacatctccgtcggtgaaagcggcgatcgtctcacccgtgccgccaaggtcttggaacaactcagtggtcaaacccccgtcttctccaaagctaggtacactgtgagatctttcggaattcggcgtaatgagaagattgcttgctacgtgactgtgaggggagagaaagctatgcagcttcttgagagtgggttgaaggttaaggagtatgaacttttgaagaggaacttcagtgataccggctgcttcggattcggtatccagaacacattgatcttggcatcaagtacgatccttcaactggtatctaccgcatggacttctacgttgttctggaacgagctggttatcgcgttggccgtcgtcgccgatgcaagtcacgtgttggtattcagcacagagttactaaggaagatgccatgaagtggttccaggtcaaatatgaaggtgtcatccttaacaagtcccaaaatattggagcttaagaaatagcagtaacgagctcagtttgagttgttttcagttttggctacttgattttgactagtttgtgtatcagtttctctctttttcctgaatagatttatgcttgagactttcctgttggtttt

SEQ ID NO: 19874 - DNA, 687 bp, Gossypium hirsutum
  Clone ID: GOSHI-09MAY01-C468_7
cccacgcgtccgtgaaccctaaaaaccctaatcctaattagtaaatttcagtatattaatttgttagatctgtctcagctgctctccaagtctttcaagtcgccatggcatcagagaagaaattgtcgaacccaatgagggaaatcaaagttcaaaagctcgtcctcaatatctccgtcggcgaaagtggcgatcgtctcacacgcgccgccaaggtcttggaacaactcagtggtcaaacccctgttttctctaaggcgagatataccgtgagatctttcggaattaggcgtaatgagaaaattgcttgctgcgtgacggtgaggggagagaaggctatgcagcttctcgagagcgggttgaaggtcaaggaatacgagcttttgaggaggaacctcagcgattctggctgcttcgggatttttatgttactcgttttgagacttaattttattgattttttgctgttttctctggaacctaaccattatgtttctgtggactacctgttttatgcttgggccttggtgcattgtcgatgtggtttcatttaccataacctagaggtttgatgctttgatgcatatgtgaatgtagcaggatgaagtgtctttttcatgttgagctcatgttatctgttactgattcttgttcttgtgtgtggtttactgatgaatttgattttgc

SEQ ID NO: 19875 - DNA, 842 bp, Gossypium hirsutum
  Clone ID: GOSHI-09MAY01-C468_5
agataaaaccctagaaagccctaaattcttccctgcgtccccccccgcgtccgcgcccctgccattttcgtaactctaccaccgctgctctcaatcccttccgcttcgccatggcatcagagaagaagctttcgaacccaatgagggagatcaaagtccagaaacttgtcctcaacatctccgtcggtgagagcggcgatcgtcttacacgtgccgccaaggtcttggaacagctcagtggtcaaaccccagtcttctccaaggctagatacactgtgagatcttttggaattcggcgtaatgagaagattgcttgttatgtgactgtgaggggggagaaagctatgcagcttcttgagagtggtttgaaggttaaggaatatgagcttttgaggaggaacttcagtgatactggctgctttggattcggtatccaagagcacattgatcttggtatcaagtatgacccttcaactggtatctatggtatggacttctatgttgttctcgaacgagctgggtaccgtgtgggtcgtcgtcgcaggtgcaagtcacgtgtcggtattcagcaccgagtcaccaaggaggattccatgaagtggttccaagtcaaatatgaaggtgttatccttaacaagtctcaaaatatcggggcataggaatagccaggtaaacaagatcaatcgagttgtttttaagatttttgctacttgatattggttttaagtttgtgtatcagttgtagtttggctgaagagatttgtgaaatgctaaagtaattttgctgttggattaaatggcttcatttaatatagcacttggaaaacacaatgtcttttctt

SEQ ID NO: 19876 - DNA, 583 bp, Gossypium hirsutum
  Clone ID: GOSHI-09MAY01-C468_4
cccacgcgtccgcccacgcgtccgcccacgcgtccgcggacgcgtgggcggaatcaggcgccctcgcgtccgtgcttgctacgtgacagtgaggggagagaaggctatgcagcttcttgagagcggtttgaaggtcaaggaatatgagcttttgaggaggaacttcagtgatactggctgctttggattcggcatccaggagcacatcgatcttggaatcaagtatgacccttcgaccggtatctacggtatggatttctatgttgttcttgaacgagctgggtaccgtgttggccgtcgtcgcagatgcaagtcacgtgttggtattcagcacagagttacaaaggaggatgccatgaagtggttccaggtcaaatatgaaggtgtcatccttaacaagtcccaaaatattggagcttagaagtagcagtatgagattgtttttagttttgagtacctgattttggctagtttatatttatcagatcgtattttcctgaacaaatttattttatgttttagggtggaatcctaagtttttcttttggttggcctaagtttataatatatttacaatcggaag

SEQ ID NO: 19877 - DNA, 641 bp, Gossypium hirsutum
  Clone ID: GOSHI-09MAY01-C468_2
aattgaggtacttcatggttgactgctgtgaaaagggcttgtagatcttctactaaagatagcccatgatgatgaaaagaagagagataaacggaggtggatctttaggaaacaagatacaagtcctgtgaagagtgtaggtaataatggtggtggtggtggtggtgcaagtacggcagcagcggagaaaaggcatgctattgctgtggcggtggctaaagcagcggaagctgaagctgcggtggcgactgcagaagcagctttacaagctgctcgggtgactaaacctagttatggcaggaaacatcactttgctgctattgttattcagacagcttttagaggctacctggccaggagagctctacgtgcgttaaaagggctagtgaagttacaagctttagtgagaggtcacaacgtgagaaagcaagccaagatgacgcttcgttgcatgcaagcactggttaaagttcagtctcgtgttttagaccaaagaatgaggctctcgcacgatggttgcagccggaaatcagcatttagcgacacctggaatcacggtatcttcaagatatatcggatagaagatcattatcgagaggaggaagtagcatagcaaatgattgggacgaaaggccacacac

SEQ ID NO: 19878 - DNA, 872 bp, Gossypium hirsutum
  Clone ID: GOSHI-09MAY01-C468_1
caccgctgctctcaatcccttccacttcgccatggtagctctcattctctctttttcaatctagtctcttcattcaaacgtcatttctcttacgttaattcatgcttcagtaacttttttcccttccacttccccatggcatcagagaagaagctgtcgaacccaatgagggagatcaaagtccagaaacttgtcctcaacatctccgtcggtgagagcggcgatcgtctcacacgtgccgccaaggtcttggaacagctcagtggtcaaaccccagtcttctccaaggctagatacactgtgagatcttttggaattcggcgtaatgagaagattgcttgttatgtgactgtgaggggggagaaagctatgcagcttcttgagagtggtttgaaggttaaggaatatgagcttttgaggaggaacttcagtgatactggctgctttggatttggtatccaagagcacattgatcttggtatcaagtatgacccttcaactggtatctatggtatggacttctatgttgttctcgaacgagctgggtaccgtgtgggtcgtcgtcgcaggtgcaagtcacgtgtcggtattcagcacagagtcacaaaggaggatgccatgaaatggttccaggtcaaatatgaaggtgtcatccttaacaagtctcaaaacatcggagcttaggggtagcaaggtttcaagttcagttgagttgtttgaagttttggttatttgattttgactatttactggatctggttttttgttttaccggagagatatatgattgccttgaaattccaaaggcccttcccttgttggtttattccattatcaatatttatacaattggagaatgcctttttttgttc

SEQ ID NO: 19879 - DNA, 518 bp, Gossypium hirsutum
  Clone ID: uC-gsflmaxxa096d03b1
cttgttgaaatatatttttatatatatatcattaagggatcttgttctgtatgtctttctctggcaattcaacaagaatccatattacaatcagaatcttttttatcttcacagtgttggtgtcttggctccttcttcaaagcttcttttagctgtaaatgtagcttggtttaaccctatccttttgaatggggatgaaaggagggacttcatggttgactgctgtgaaaagggcttttagatctcctactaaagatacccatgaagatgaaaagagagataaacggaggtggatctttaggaaacaaaatacaagtcctgtgaagagtgtaggtaataatggcggtggtggtgcaagtacggcagcagcggagcaaagacatgctattgctgtggcggtggctaatgcagcttcttgagagcggcttgaaggtcaaggaatatgagcctttgaggaggaacttcagtgatactggctgctttggatcggcattcaggagcacatcgatcttggaatc

SEQ ID NO: 19880 - DNA, 474 bp, Gossypium hirsutum
  Clone ID: uC-gsflnu33B056d03b1
tctatgcgttcgtccacgcgttcgggaaaagtgcatgccagaattctcggtgaatattggactcccttcatttaagggatccagttgtttttttgacacagttatttatttagttaattgaacttgtgaaagttctgatgcgtctttaattgaacctaacataccttaagtggcatttcaaagtccataaacttgttgtctacatatacatgggggagagcgatgaccggcttactcttgcggccaaggtctcggtacaggttagaggtcaaaccccattcttatccaaggatagatacactgtgagaggttttggactatggcgtaatgagaagattgcttgttatgtgactgtgaggggggagaaagctatgcgacatattgagagtggatggcaggtaaagaatatgaacttatgagggaggacttaagtgatactgtctgcttggatttggattcaagacacattgtctt

SEQ ID NO: 19881 - DNA, 445 bp, Gossypium hirsutum
  Clone ID: LIB3145-007-Q1-K1-B8
cccacgcgtccgcccacgcgtccgattcacgcagctgccccttcatcactctgccaccggtgtattcaacctccgtcgcctcgccatggcatcagagaagaagctgtcgaacccaatgagggaaattaaagttcaaaagcttgtcctcaatatctctgttggtgaaagtggtgatcgtctcacccgtgctgccaaggttttggaacaactcagtggtcaaacccctgtcttctccaaagctaggtacactgtgagatctttcggaatcaggcgtaatgagaagattgcttgctacgtgacagtgaggggagagaaggctatgcagcttcttgagagcggtttgaaggtcaaggaatatgagcttttgaggaggaacttcagtgatactggctgctttggattcggcatccaggagcacatcgatcttggaatcaagtatgaccct

SEQ ID NO: 19882 - DNA, 364 bp, Gossypium hirsutum
  Clone ID: LIB3189-021-P1-K1-E4
cattctatagaagtcattttcactgattaccctgtataatctatgtctattgggaggactctttctactgaatgtcacccgctagatgcggtgtgcatcgtcgtcacaggtgcaagtcacgtgtctgtattcaacaccgagtcaccaaggaggatttcatgaagtggttccaagtcaaatatgaaggtgttatccttaacaagtctcaaaatatcggggcataagaatagccaggtaaacaagatcaatcgagttgtttttaaagatttttgctacttgatattggttttaagtttgagtatcagttgtagattggctgaagagatttgttaaaatgctaaagttatttttgctgttggattta

SEQ ID NO: 19883 - DNA, 634 bp, Gossypium hirsutum
  unsure (1)..(634): unsure at all n locations
  Clone ID: LIB3543-065-Q6-K6-D6
tggnatnncttcaatgttgnagcaagttgcatgtggattgtgaatgnagcaaagnnaaatgcctcttcgaagctgtagggttcctacctctacaacttcgagttcagggatgtcgagaaagccatctgtatctgatgtttcagagtcaatctttcctggtgaggaagaatcatttggagcttcaatggtgaatgagattgttaattgtgatgatgaaattccatctgttgttcaatctgatgtttcttctgccactttagttcagggtgaccaaaacgaaagaaaagataaaaatgatcgtgcaggtgtctctgactgtgtctcagatgcttcaggtgatgttacttcttataaaatgacctcttcaggcattcgctctgaggaagttatggcagaggttggagtcgtttctccttgtggttcagtattaaaggaaatttattttccggagaagaattcgcttgaacattcacctgcaaaagctttaatttctcatgaccccattaacgtggctgaattgacagtacccatctcgtctggcaatgacttgtccatggcatctcctggttaacaacttgttcttacgttatgataagcatatattttctctcttgcggaattgattttcatcttg

SEQ ID NO: 19884 - DNA, 407 bp, Gossypium hirsutum
  unsure (1)..(407): unsure at all n locations
  Clone ID: LIB3582-026-P1-K1-E12
aaaaaatgatcgagcaggngtctctgactgtgtctcagatgctacaggtgatgttactacgtatgagaggacctgttcaggcatgcgctctgaggaagttatggcagaagatgcagtcgattctcctcgcggttcagtattaaaggaaatttatttctcggagaagaatacgcttgaacattcacctgcaaaagctataatttctcatgaccccattaacgtcgctgaattgacaggacccatctcgtctggcaatgacttgtccatggcctctcctgaaaatgatgcctacagaactgctaatagtgccaagatcctgactggaatatcaggaagcaaaaatggttactttggtggagaacctgctcaaaatcaggctttaatcgtatctaatattggacctataa

SEQ ID NO: 19885 - DNA, 1121 bp, Gossypium hirsutum
  Clone ID: GOSHI-09MAY01-C408_2
cggacgcgtgggcggacgcgtgggcggacgcgtgggcaattttgagctcctaaagaagctggtccttcctgatggatcagttctccgcacccaattgcctggcaggcctactgttgactgtcttttcgctgatccggctagagacgggattagcttactcaagatttggaatgtaaacaagtgctccggtgtggtgggtctttcacgcgtccggttttcaactgccaaggtgctggttggtgcaaggtcaccaagaaaacccgaattcatgatgcatcacctggtacacttacaggttctgtttgtgccaacgatgttgatttgatcgctcaggttgccggtgcggactggaatggggagagtgtggtttatgctcatagatcaggtacattttgtctgcttagatgtcaggtgaagagtgccaattggatttattttgatgtaaaatgttaaaaaaatgcctttttgagtttcaggagagctggtacggttacctaaaggtgcttcagtgtcggtaacacttaaggttctcgagtatgaactattccacttctgtccctgtaaggatagtttcttttccttccttttaggctacttttttgtatttgactacggtggcttattgcgcgctttttcctttgggtgcagggaaatggcccacacgcatttcatttgcaccaatcggcgcttctgtgacatgggttcaacagcagcggtgccgtggagaatgttcgaagtacccaaatgacatccaatgagaaactgcagttcttttgatggcgaggttttccttcggagttgaccaacttcacttcatggggcgggcgcgggaatccaacagcagcgatcaagtctttcaaagtccggggttgtgggaggggtttggtgcatactttcatctcagcattctcgttgaagtgggttgtgtggaccaatgccgacactcactttcaactattgactcagccaccggagttggtgacacttacattgccagtgccatcggtggagatgttcagatggctcgtttgaaattcaggtctaagtttagcttcggttcttttattaggccctcctcttcaaagtcattattgttttgtgggggatttcttggcctttct

SEQ ID NO: 19886 - DNA, 2378 bp, Gossypium hirsutum
  Clone ID: GOSHI-09MAY01-C408_1
cccacgcgtccgcatatataacatttgtgcgaggagaaataagttgaaaaggatggagttcgaaagaaccgaaacgacttcttttcggtgtgatttggttttgcaggtgataacactgttgaaacaaatcgaggcctttaccttgtctacatgcatgctgggaccaatccatttggaggtggcggccaggctgtaaaggctttggagaagcacatgcaaactttccttcatcgagagaagaagaagttgccttcatttcttgattggtttggctggtgcacctgggatgctttctacactgatgtcactgcagagggtgttaaggaaggcctcaaaagtctatcggagggagggactccacctcgatttttgatcatagatgatggttggcagcagattgaaagtaagcccaaggagagtgattgtgttgtacaagaaggggcgcagtttgcgagtaggttgactgggattaaagagaatgcaaagttcaaaaagaatgaccaaaacaacgaacagatctctggcctaaaacatgttgtagacgaggccaagcagcatcataatgtgaagaatgtgtatgtgtggcatgctttggctggctattggggtggagtcaaacctgcagctgctggtatggaacattatgatacagcattggcatatcctgttcagtccccaggtgtgatgggcaaccagccggatatagttatggacagccttgctgttcatggccttggtttggtgcatccgaagaaggttttcaacttctacaatgagcttcatgcctacctggcttcatgtggagttgatggtgtgaaggtcgatgtgcaaaacatcatcgagacacttggtgctggacacggtggtagagtatctcttacccgcagttacgttcaggcccttgaagcgtcaatttcccgaaacttcccggacaatggatgcatagcatgcatgtgccataacactgatggaatctacagcaccaagcagaccgctgttgttagagcttctgatgacttttatcctcgtgaccctgcttcacatactatccacatttcctcagtggcttacaacactcttttcctcggagaatttatgcaacctgattgggatatgttccatagcttacacccagctgcagattaccatgctgctgctcgtgctgttggtggatgtgctatctatgtcagtgataagcctggcaaccacaatttcgagctcctgaagaagctggtccttcctgatggatcagttctccgcacccaattgcctggcaggcctaccgttgactgtcttttcgctgatccggctagagacgggattagcttactcaagatttggaatgtaaacaagtgttccggtgtggttggtgcttttaactgccaaggtgctggttggtgcaaggtcaccaagaaaacccgaattcatgatgcatcacctggtacacttacaggttctgtttgtgccaacgatgttgattcgatcgctcaggttgccggtgcggactggaacggggagagtgtggtttatgctcatagatcaggagagctggtacggttacctaaaggtgcttcagtgccggtaacacttaaggttctcgagtatgaactattccacttctgtcccgtcaaggaaatttccaacaccatttcatttgcaccaatcggccttcttgacatgttcaacagcagcggtgccgtggagaagttcgaagtacaaatgacatccaatgagaaactgcagttctttgatggcgaggtttcctcggagttgacaacttcactcagcaacaaccggaatccaacagcagcgatcagtctcaaagtccggggttgtgggaggtttggtgcatactcatctcagcatccgttgaagtgttgtgtggacaatgccgacactcacttcaactatgactcagccaccggattggtgacacttacattgccagtgccatcggaggagatgtacagatggcacgtagaaattcaagtctaagtttagcttcaggttattttattaggccatcatattaaaagtcattattgtattgagggagatttcatggctttctagtctagtctagtctagtggtaatacgtaattggggtcctctaccgtgctgtagctactttctcttaaataaaattgcctctctctcgaaaattcgttgtgttctttgtcttaaactatgaaaaaaaaaaaacaatcatgacagaatatgatgcaaaaacaacaataggtctaatgttagatgtaaaaggtccgattttagtgcaaaaccctcgcttcatctttcatggtcttcttccctgcagtcttacttcctgtaaatttttgttggtacttattaattaaatcattgatgtagttggcagtct

SEQ ID NO: 19887 - DNA, 298 bp, Gossypium hirsutum
  Clone ID: uC-gsflnu33B145a06b1
tctttcacgcgtccggccgtggagaagttcgaaggacaactgacatccaatgagaaactgcagttcttcgatggcgaggtatgctcgtagttgacaacttcactcagtaacaaccggaatgcaacagcagcgatcagtctgaaagatccggggctgtgggatgcctggtgcatactcatctgagcatgcagtgaagtgtattggggacaatgccgatactaacttacactgtgactcaatcgccggcatggctgcacttacataggactggacctcggatgaaatttacaaatggcac

SEQ ID NO: 19888 - DNA, 492 bp, Gossypium hirsutum
  Clone ID: LIB3582-026-P1-K1-G6
ggccgctcgcgatctagaaccggacgcgtgggaaaaaaacccttaaatctcgtaaacaggccgacgccgacgccgacgccgacgcggctcaggcgctcactcacctacagcatctcccttgaaatcgttgactatgagctcagacacatgcggcggagggtcgccggcgcagggatctaatgagaaaggtagctcgacatcgtcggtggacaagcaaagggataaggcgagggtgagtaggacttcgctgatcctatggcatgctcatcagaacgatgccgccgctgtccgtaagcttctcgaggaggatcgctctttggttcaggctagggactatgacaaccgtactcctctccacgttgcttcgctccacggttggatcgacgttgccaagtgcctcatcgattatggcgccgatgtcaacgcccaagatcgctggaagaatacgcctttagctgatgcagaaggagctacgaagcataatatgattga

SEQ ID NO: 19889 - DNA, 310 bp, Gossypium hirsutum
  Clone ID: uC-gsflnu33B011g07b1
tcatgatcttgtcggaccaaaataaaaaaaacggttaattctcgtaaacaggccgacgccgacgcctactccgacgcggctcaggcgctcactcacctacagcatctcccttgaagtagtagtcccacagtggatatattctaattgcatttgattagtgatttctgcagactccaattccaactatatatataataaacatttcgaggtctatatatacctatatatacgaacagatcgatgactatgagctgagacacatgctgcggagggtcgccggtgcacggagctaacgagaaaggtagcttgt

SEQ ID NO: 19890 - DNA, 801 bp, Gossypium hirsutum
  Clone ID: GOSHI-09MAY01-C758_1
caacagccttgctctgtgaaggctcctttcatcgcgcagccactaaccttcatccgtttgatggctaatggtccggataatggccggatcttacccatggaggccgcaattttggagatccggtaaccccactcccttttcctctttttttcttaaaaaaatatgcgaatcttatgatattctttcaaaaaaaaaaaggagataaattccaaagatttaaacaaaattttagtattgctcgatcctcgcccacatctacgcatgtatgttttgggctatcatcggtatcgagggttcctcttcatgtatttgtgcctaattcgcaaactaattaaaggaaaataaaggaaaaaaaaatctggaaaatcacctttcaaaacctttttggcttgatcttttaatatctagtgtgaatgtgtagtatgcgtacagtatccgtaaaaatttgtggattacatcactggcttttatagccaaatttttaaaataaataaaaacttaaaaatcctattttcctactgtcatttgctgtgaaatctgttactggctccttctggtgtattcttttgcaggtacggagaagatgacccggggatctcacgtgagaagtcgttcctctggtgcccttccagtacattccaggagcttctgaaattcttgactgctggaattctttttgggctctttcgggtttgggctagatttagggtatgggtttattagaattaggttttgggatgggtcaaatttatgtaacttgggtaagtttatattaatggatttgggtaagtactacttttg

SEQ ID NO: 19891 - DNA, 891 bp, Gossypium hirsutum
  Clone ID: GOSHI-09MAY01-C748_3
gtgcaatctgaagagcagtcgagaaggcaggcctggtatggcaggggcgtgcacattgtggtcttgatgatgccaaaaacacagctcgcttgcttgccctcttgatgcgccagggttttaagttcgctatcacaaactcactgatgtggcaggctagcgatggtccagtgacatggaatccgatccctgagaacacgggtttctctctgcatcacccccacaagctaaaagatcaacaaatgcccctattccagtaccacccttattgtttctgtggcgttaagagcagcaaaggaatggttcggaaacctgggccaaagcaaggaagcgtcttctttggctgtgggaactggactgtcaccagaggtgctcgctgccattacttcgagtgggcttctccctaactcgaaaaatcgctaaagggcttgtccatctttcttgatggcatcttaaaccctacttaggtgtcatgtaagaaagaaaatgtattaattgtttgtaatttgtatcgaaaaatattaggagcattaaaagcaatggtaatgggttgtctcctcgttgaagcacacataccttaagttgcttaactgcttgctgatgcttcttgttggtggaaaacaccgtagttgtgatcggcttatgaccgtgtacgaaagtaaacattgggtcttccgatgaatcgaagcttcaaacatgttaagctgacttgtttgacaggagaacaaatcggtaatgtgaggatttggcttagttaggattgatgcatttacatgcttaaaaaacatgctaaattatcatataataatcttatgagatagagacagcttgatttcctatgcttttctaatgggactaagcactgtttgctttcctatttatttctttgctttt

SEQ ID NO: 19892 - DNA, 664 bp, Gossypium hirsutum
  Clone ID: GOSHI-09MAY01-C748_2
cccacgcgtccgcccacgcgtccgatcagacaaggtgagggaaaaaacaagaggatctgatgtacttgcctgtggatcttaattatagacaagatcatgatggcccttgaaaataaagaaacaatgcagaactgtgaggcaaccttaaaatgcctccagacaaaggggttcccgtacaacctgcaatgtaacaggaattcagttgaaggcattccagagcttaaacatgaattcggtactcatccgggcagagatgttgtagaaccagtttgctctttgagtggagagtttgtggaacttccgaatgaattttaccacaaacctacactccaccacgaatgtggctcatggtcgaccttctatcctgactctcataagttgcaggcataccagttgaatgcttttgggggccaagtttaccactttcctgtggataaccgatttcattatgccccatttaatgtgatcactcatggatacccttgtgaattccagttccaagattttcagtactttgtggtcatagattttgaggctacctgtgacaaggagagaaacccacatccacaggagataatcgagtttccatctgttattgtgagtagtgttactgggcagctggaagcttgttttcagacatacgtccgaccaacttgcaaccaac

SEQ ID NO: 19893 - DNA, 1455 bp, Gossypium hirsutum
  Clone ID: GOSHI-09MAY01-C748_1
ctcttctttgcattttttttcttctttttttctcactttcgttttttgtttgaaaattttctttttctctccctttccctctgtcgttcgctctaccctcaacaggtgagggaaaaaagagaaggatctgatgtacctgccggttgatcttaattatacacaagatcatgatggcccttgaaaataaagaaactatgcagaactgcgaggcaaccttaaaatgcctccagacgaaggggttcccgtacaacctgcaatgtactgggaactcaattgaaggccgtccagagcttaaagatgaaatttgtactcacccaggtggggatgttgtagaacctgtttgctctttaaatgggcagtttatggaataccacaaacctacccttcggcatgagtctggctcttggtcgaccttctatcctgacacccacaagttgcagccatacccaccaaatgcttttggggggcagttttaccactttcccatggataaccgatttcattatgccccattcaatatggtcacacatggatacccgtatgaattccagttccaagactttcagtactttgtggtaattgactttgaggctacctgtgacaaggagagaaatcctcatccacaagagataatcgagtttccttctgtcattgtgagtagtgttactggccagctggaagcatgttttcagacatatgtacggccaacttgcaatcagctcctgagtgatttctgcaaggatctgactggcatccagcaaattcaggtagatagaggtgttactctgagtgaggctctccttaggcatgataaatggcttcgagaagaagggcataaagaacactaattttgctgtggtgacatggtcaaactgggattgtcgagtaatgctggaatctgagtgccagtttaagaagatccggaagcctccttactttaaccggtggataaacttaaaagttccgttccgtgaggttttcggtggtgtgaggtgcaatctgaaggaggcagtcgagatggccggcctggcctggcagggccgtgcccattgcggcctcgatgatgccaaaaacactgctcacttacttaccctcatgatgcgcaaaggttttaaatttgcgatcacgaactcactgatgtggcaggctagcgatggtccattgacatggaacccggtccccgagaacacggccttctttccacatcacccccacaagccaaaggatcagcaaatgcccctattccagtaccacccttattgtttctgtggggtgaagagtagcaaaggaatggttcggaagcccggaccgaagcaaggaagtgtgttctttggttgtggaaactggactgtcaaccgaggtgcccgctgccactacttcgagtgggcttcgtcctgaaactgaatttgcaacagcatatccatctctcatgatggcatcttaaacccttaatgt

SEQ ID NO: 19894 - DNA, 403 bp, Gossypium hirsutum
  Clone ID: uC-gsflnu33B138b05b1
cttacgtgtccggaaaatgaaaaaaaagaaaaaaagaggaaaagaaaaaaaaaagagtattaaaagcaatggcaatgggttgtctcctcgttgaagcacacataccttaagttgcttaactgcttgctgacgcttcttgttgttggaaaacaccgtagtagtgatcggcttaggaccgcgtacgaaagtaaacattgggtcttccgatgaatcgaagcttcaaacatgtaaagctgacttgtttgacaggagaacaaatcggtaatgtgaggatttggcttagttaggattgatgcatttacatgcttaaaaaacatgctaaattatcatataacactcttatgagatacttacagcttgagttgctagtgtttcctaatgggactaagcactggttgctttc

SEQ ID NO: 19895 - DNA, 899 bp, Gossypium hirsutum
  Clone ID: GOSHI-09MAY01-C778_1
aaaaagtgtaaatcagtgaaaaagaaaaaacgcgtttggttatatgataagtttctggagctgtgagtatgaactgaaggagatttagtggcagagatgaatgtaagccatgcttcggttcacccagcggagtatccaccgaccacggacgcaggcgaaggcggaggcggtggcggtggcggaaacatcgaggtgccgagagtaaggatgaaggattttcaggggatgcccggtacccaaggagggcttgcgttgcggatatgtcagtttgtttttgccgctgtgggactttgtattatggcacccgcccgtgattttccatccgttaccgccttttgctaccttgttgctgctactggcttgcagagttgatggagcttatcactagctattattgacatttatgctcttctagtgatgcgttcactgcagaattatcgagttgttactttctttaccattggtgatgggatcgcatccactttgacatttgccgcagcttgttcttctgctggcataaccgttcttattgacaatgatcttgatatctgttcgcagaaccattgtgtgcagtttgaaactgctactgcaatggccttcattagctggtttactgcattaccttcatttctcttcaacctttggtcactggcatcccgatagaaggttacacagaaaaaatcggtgtaaatgatgcattttattatgccaagtaccattttcttgtaacattctcgggtgccttgaaaacaaaaacttgtttgtgtgattttaaaagttgtatggtttggtctataactattatcaaattgaatcaacagcatcccctatttaaaacatactgtattgtatttattacaattcgatgagccccaatattgcaggccattcatgatgtt

SEQ ID NO: 19896 - DNA, 646 bp, Gossypium hirsutum
  Clone ID: LIB3543-040-Q1-K6-E8
gttttgaaagtctcttttttttttctttttttttaatttccgtttgattacagtgtaaatcagtgaaaaagaaaaacgcgtttggttatatgataagtttctggagctgtgagtatgaactgaaggagatttagtggcagagatgaatgtaagccatgcttcggttcacccagcgggagtatccaccgaccacggacgcaggcgaaggcggaggcggtggcggtggcggaaacatcgaggtgccgagagtaaggatgaaggattttcaggggatgcccggtacccaaggagggcttgcgttgcggatatgtcagtttgtttttgccgctgtgggactttgtattatggcaacaactagtgattttccatccgttacggccttttgctaccttgttgctgctactggcttgcagagtttatggagcttatcactagctattattgacatttatgctcttctagtgatgcgttcactgcagaattatcgagttgttactttctttaccattggtgatggggtaagacgtttaccttttgcagttacgagtgaagctagaaggctgaagaacatgtgatgtcctatcaatttctgttgaagcacatatatgtctctagcttgcatgtctgcctttctcataatcatgta

SEQ ID NO: 19897 - DNA, 629 bp, Gossypium hirsutum
  Clone ID: GOSHI-09MAY01-C718_1
cggaatatggagtatacccttaatctctgcagctatttagcgctgtttgtctgagacagataggagtagagttttatggcatatcatttgcttcagcttcatgtgggtttttgacgatttccttttcaatgtataggagctgttggttatcttggttctaatttgtttgtaaggaggatctacagaaacattaagtgtgactagccctcgcctccgggatattagaaccagcagcgcttccacaagcattttcggttgtcgaggcaataaacatggagaggtagcttcttgtcaggtatgaggaaccaagcaaagcctcaagatgaaactggaagccctgagatttttgttttgccttcgattttactcgcctgtaattggaagccctgatttagaatatagaaggtagctaaaatattaaacaactgtcattgttatacttctgttatacttttgtccttgatccctttgcatatagatgtgttcaatgtaagaatttatgttaaatttccgttggatttgttttgttctttgtttcggggataaggaacttaaatcaaggaaatcgttctcaatacttgggacatcttttccttctatactataaaatattatattttttatatttt

SEQ ID NO: 19898 - DNA, 557 bp, Gossypium hirsutum
  Clone ID: LIB3825-017-Q1-N6-F3
acacagaaagcatatctatgtatgcaaatagtatataacaaaatgaggggagttttaattttttttttaagctagcttttgaattataaaacaatgatctgaatttctaaatcagggcttcctattacaaacccgggtgaaaaaaggaaaaaggcgaaacaaaaatcgtggggtttaccgtggtccatggaaccgagagtccatacctactgttaaaccctgtgatttcgtttgaaggctttgatggggtctctataccttaaagcttcctctcgatgtttattgcctcgacaactagaaaaaaaaagaaaaagaaaagctcatggaagcaccgatggttctagtttctgacaacaaaaggtttaatcacacttgatgtttctgtagatcctccttacgaacaagttcgaaccgagaaaaccaatggctccacagaggattcccaaaccaagacaaaacatcaaagtgtatccgaagtagaagctggtctggaagaagcctgacatcttggttttcacggagtagtagtatacggagtacaaatacacgtaaatagc

SEQ ID NO: 19899 - DNA, 439 bp, Gossypium hirsutum
  Clone ID: LIB3135-037-Q1-K1-F5
atttttctctgctgcctagacagctttgtaatcgtatatgtactctgtatactactactatgtgaaaaccaagatgtcaggcttcttccagaccaggttctacttcggatacactttgatgttttgtcttggtttgggaatcctttgcggagctgttggttatcttggatctaatttgtttgtaaggaggatctacagaaacattaagtgtgactagaactttgctaatggatattagaaccagcagcgcttccacaagcattttcagttgtcgaggcaataatcatggataggtagcttcttgtcacgtatgaggaaccaagcaaagcctcaagatgaaactggaagccctgagatttttgttttgccttcgattttactcgcctgtaattggaagccctgatttagaatatagaaagtaactaaaatattaaacaac

SEQ ID NO: 19900 - DNA, 322 bp, Gossypium hirsutum
  Clone ID: LIB3148-050-Q1-K1-G2
aaaatattaaacaactgtcattgttatacttctgttatacttttgtccttgatccctttgcatatagatgtgttcaatgtaagaatttatgttaaatttccgttggatttgttttgttctttgtttcggggataaggaacttaaatcaaggaaatcgttaaatgggtgtgtttcttgttttttttttttaaaaaaaaaaaattaaataaaaataattatattttttaatataattttatttaaaatatatattttaaaatttatttaatattattttttattttcttatttttttttattttttatatttttattttttttt

SEQ ID NO: 19901 - DNA, 224 bp, Gossypium hirsutum
  Clone ID: LIB3083-120-Q1-L1-H10
ttttttttttttttttttaagaaaaacaaatccaaagggaatttaaccgatcatcacaggttcaattcttacacagaaagcatatctatgtatgcaaagggatcaatgacaaatagtatataacaaaatggggggagctttaaaatttttttttagctagcttttgaattataaaacaatgatctgaatttctaaatcagggctttctattacaaacccgggtg

SEQ ID NO: 19902 - DNA, 708 bp, Gossypium hirsutum
  Clone ID: GOSHI-09MAY01-C738_2
gcagctagggattccttctctggcgtggtggaggaggctggaacaacaaaacaaaaggacccactggcgtccggtaaattggcggatcaaccatttccctggtctgttggttttttggtgttttttagaggtaacatcgagtctcagtgcctctcgtattttcttgggcgaccccagtgccaacatttcctgtcgggatttaccagaaaaaggagggggcggcggggaggagtgtctccatgtcactttgccattttaccagggttgcatttggttcaaagttgcttttgcttatggggctgtattatacgcgttgattaaaaaaagggggtgcttttcctttcctgatcaccatcatcaactcttttttggatggtgttgtttgagacctttatttatattatatctatgttctgggtgcttatgcgcttcaaagaaattagcagggatgtcggcttatttgaaacctttttatttatcaatgatgaacctggggctttcttcttcttttcatattctcacatcctcacacactttctctgctgaaaaagctttcgattcgcattccaagagctcttggcttggatttgtgcgttgccatcttctctgtattccgtctttgccagcaccctttaaccattatggccaagagttgttccgaaccaaacagcggctgagtttcatgcccttttcacccttatcattttt

SEQ ID NO: 19903 - DNA, 1408 bp, Gossypium hirsutum
  Clone ID: GOSHI-09MAY01-C738_1
cccccgccgcccacgcgcaaaagcctctaagctagagagtgtgtgtgagaaaatagcagctagggttcctctctccctctcaaaaactaaacaacaaaacaaaagagagatggcagtaatggcggatcaccattccctggctgttgtttttggtatattaggtaacatcatctcagtcctcgtatttctggcaccagtgccaacattctgtcggatttacaaaaagaaatcgactgagagtttccagtcactgccataccaggttgcattgttcagttgcatgctatggctgtattacgcgttgattaaaaagggtgctttccttctgatcaccatcaactcttttggatgtgttgttgagactatttatatatctatgttctgggcttatgcttcaaagaatagcaggatgtcggctatgaaactttttatatcaatgaacctggggctcttctctttcattctcatcctcacacactttctgctgaaaagctcgattcgcgtccaagttcttggctggatttgtgttgccatctctgtatccgtctttgcagcacccttaaacattatggcaagagttgtacgaacaaagagcgttgagttcatgcctttcaccttatcatttttcctcacattgagtgcagtaatgtggtttgcttatggactatttattaaggacctctgtgtagctctccctaacgtactaggcttcatcttggggatgctccagatgcttctctacgccatttacagacacagtgaaaaggttaacatagaagaaaagaagctaccagctgaacaaatgaaaagcatcaatgtcgtccttaccacattaggtgcctctgaagttcaccccgtagttttggatattcacactgatgatacaaaggaagaagataataaaaacaacgaacccacaggggagcctgataaacaaactgatgtgaaaatggaagacgcaaatgaaagtccagtttgaatggacacacacacaagagttctatgatttgttgagaaattaagatccagctctgatatgtcatggatgcctggcctgaaaccccaccaccatacacctcctgagcctttgtgcaaaggaagaaactagccaggacctagtaaaagaacatgactacatatataatatattatatatgaataatattgtatttcagtttttaaccatgttgaataatcatgtatgtcattgatccaggacatgtagtttatttattttgaaatacaacaatgactccttttctccaaaaaaaaaaaaaaaagaacccgcaaaaaaaaaaaaaaaaaaaaaaaaaaaaaaaaaaaaaaaaaaaaaaaaaaaaaaaaaaaaaaaaaaaaaaaaaaaaaaaaaaaaaaaaaaggggggggccgttttagaggatcaaagttt

SEQ ID NO: 19904 - DNA, 547 bp, Gossypium hirsutum
  Clone ID: LIB3585-039-P1-K1-G4
gagaaaaagcctctaaaccggacagtgtatatgatccaaccgcccctacgcttccatgctacatctacaaaagcgtaaacaacaaaacaaaggagcaatggcagtaatggcggatcaccatgcctggctgacgttatcgggatattacgtaacatcatctcaggcctcgtatttctggcaccagtgccaacattctgaccgatttacaaaaagaaatcgactgagagtatccagtcactgccataccaggctgaattgaccagctgcatgctatggctgtattacgcgttgatgaaaaagggtgctttacttctgatcactatcaactcttttggatgtgttgctgagactattgatatatctattgtctgggcttatgcttcaaagaatagcaggatgtcggctatgaaactttttatatcaatgaacctggggctcttctctttcattctcatcctcacacactttctgctgaaaaggtcgattcacatccaagctcttggctggatttgagttgccatctctgtattcgactttgcagcaccct

SEQ ID NO: 19905 - DNA, 532 bp, Gossypium hirsutum
  Clone ID: LIB3585-053-P1-K1-D2
aaagcctctaagctagagagtgtgtgtgagaaaatagcagctagggttcctctctccctctcaaaaaaacaaaacaaaagagagatggcagtaatggcggatcaccattccctggctgttgtttttggtatattaggtaatatactactaggatgctcacaagctagcttccttttttcttcctccttctctttcatttcataactctttgcatattggagtgatggtcatacagagacagtttcagggttcccttgtgttgcaagttatttcagtttcatattacacgctagggtctggtttaggttcttcattattttggtttggtacatatattaaacaagtgtctttgttagaagtggctccaatttttattacctaatagtacattgattaatgcttggttatttgtagtttttctgtttaacaaaaaagtagaataaattatttcgctttaaaaaatttagtgttgtcacctaaatgatattgatccaccttccccaaccatacagtacctatgtatatgcatgaa

SEQ ID NO: 19906 - DNA, 803 bp, Gossypium hirsutum
  Clone ID: GOSHI-09MAY01-C728_1
cttcccttagtattcccttcttgacaaaaaaaattattcaaaaataaaattccggcgagaatggcttcgggtttgacgacggctgattcgacggcgaagcttctctccgacctcaaaatcgacgccggagattggcctcctagtcttgacaagaatgtccacctcctttctccggatcagatccaattggggaagatgttgttggagatgggacagagtcatttgtttcagcattgggcagagcctggcgtcgatgacgaccaaaagaaagctttcttcactcagttatctaagctgaattcgagctatcctgggggtttggcatcatatattaaaaccgctagggagcctcttagccgactcgaaagctgggaagaacccatatgatggcttcacaccttcggtcccaactggagaagttctctctcttggtgatgacaatttcatcaaatttgaggatgttggtgtcaaagaagccaaaaacgcagcatttgttcttgttgcgggtgggcttggtgaacgtctaggatacaatggaattaaggtggcacttcctgcagagaccacaactggaacatgtttcttacaactctacattgagtccattctggctcttcaagaagctagcagtcgtctcacacaaggtacatgtcaaaaggagattccttttgttatcatgacatcagatgacacacatacctctacggtggacctttagcatcaaattcttattttgggatgaaaccttcacaagttaaacttcttaagcaggaaaaaggtgcatgcttagatgataatgatgc

SEQ ID NO: 19907 - DNA, 462 bp, Gossypium hirsutum
  Clone ID: GOSHI-09MAY01-C648_3
tttttctacttattttttgtgcagggtagtgatgccttgtcaatggctgaaggacaaaatgaaatgcaaaagcttttcaaggaatatggcgtgactccatttactctgctgaaagggatttttattcagggtcccatctttgtgtctgagtcacaaaaaagactacctacagaagataaaagtggtgctggtatcagaattcatgataacaatgaaggagacgcccccgcggccgggggaagtgtcactgggagatttaatatggctcaaactccttggggaaacatggtggcctgcagtggtatgcctattgctgtggttgtttgatctagcaactagttctctttttcggccttttaaagattaattagcatttggagcagacttatgtagttctgtggattttatttgtcgatattgtttcaggttgtattattaattgtgttattaatttattatttt

SEQ ID NO: 19908 - DNA, 1185 bp, Gossypium hirsutum
  Clone ID: GOSHI-09MAY01-C648_2
aaatgttcatcttctccttctttctttttttacccttttcacttgcatcgaatccatttgtctttcatcatgcacctattttccatcttagctaagacgattgtgtctgagtcacaaaaaactacctgcagaagataaaagtggtgctggtatcagaattcatgataacaatggaggagaggaatctgcggctgtgcgatttgaaggggaagtgtcactgggagatttaatatggctcaaactccttgggaagacatggtggcctgcagtggttgttgatgagagaggtgttagtaagagcagtaaacctggaaaaaaatcaaagggggaggtgctcgtgcgtctatacgggagccatgagtactcatatgcagaccctatgaaatatcgttccgagtttaaaacgattctagagcagaataacggtagttattacgacattcttgaaaaaggtttggagcagttccgctctcgcctgaaatctagtaaaccaaagggccaaggatctaaggctacagcaaacacaagagctgaagagaaagagaccgcaaaaaagaaaaatccccagcgaaaaggatcgaatgtcgaggagaaagctagtaagaaactcaagcgaaagagccctagtaccgataaacagggtaagaaaaaagccgatgagcaagaggggcccctaaagaaacaaaagaaaaataaccaaactgtggagccaaatagtcgaagtgccaaggcaaagcctaaaagttcaacttccaaggaacagaaaaagagcaaagcttcgaagcaaggcaaggaacagaaaaagccgaagcaaaataagccgaactccattgacacaaagagcagaacatccaaagagaaaaagctgttagaggagactgatgaccaaagttctgaaggatcttcacccggagaatctcccaagtccggcgctcgacgaactagagtgatgcaaggtttgggtttgatcgcacctcccggttcaccattccataagaatggactcatataagccaagtttgtcataacaagttttgccaaaacttgctccatggcatgatattattccagtcaatttgtgatgtggcttaaatgaaattagctacaaaattaagttcatccatgaacaaagacagatttgcaatagtagcagctaatccacactttcctaaaatcttttgtagc

SEQ ID NO: 19909 - DNA, 553 bp, Gossypium hirsutum
  Clone ID: LIB3585-062-P1-K2-F1
cggacgcgtggggtggccttccatagtagtgacaacgcttttgattcgaagtgcaactgttccactttggataaatcaacttaaagctaccacaaaaatgacgctaatgaggccacgcttggaggaagtcaaggagcggatgtcaagcaagggtagtgatgccttgtcaatggctgaaggtcaaaatgaaatgcaaaagcttttcaaggaatatggcgtgactccatttacaccactgaaagggatttttattcagggtcccatctttgtcagctttttcttggctatttcaacaatggctgagaaaatggaatcatttaaatccggtggagcatattggtttactgatctctctactccagatagtttatacatctttccggttatgacagcgctaacttttttgttaactgtggagtgtaacatgcaagaaggcatggaagggaatcctgctgctgcaactataaaaaatgtttctcgggtctttgctgttcttacagttccgtttaccatgagtttcccaaaggccatattttgttattggatcacatcg

SEQ ID NO: 19910 - DNA, 237 bp, Gossypium hirsutum
  Clone ID: LIB3145-016-Q1-K1-C2
cgatcatactgtgttttgaaagtacatagtgttttaccttcaacttacactatctgcagaagataaaagtggtgctggtatcagaattcatgataacaatggaggagaggaatctgcggctgtgcgatttgaaggggaagtgtcactgggagatttaatggggctccgacttcttgggaagacattgcggcctgcagcgggcgatgattagagaattgttagtgagaccaatatacc

SEQ ID NO: 19911 - DNA, 1982 bp, Gossypium hirsutum
  Clone ID: GOSHI-09MAY01-C618_1
cccccgcgtccggtttctctcactttctctctcttctctcagctccgattcttcaaaccctaagacccccccttctctaatttcatctgatcgatcagttctttaagcttcacaatcccaatcccaatcccatcctgcttctttcccttttctcctaatattttctttcccgggaaaactggagaatccgagacatttctttgtttggaagaagtcacataagaatcgaggaggagaaaggaggaggaggagctgtagatagaagatttgtgaaaaaatggcctcgaccacaacgagttcggtttacatcaacgtcatcgaagacgtcatcaacaaggttcgcgaagagttcatcaacaacggtggacctggcgaagctgtcctcaacgaactccaaggaatttgggaagcgaagatgatgcaagcgggagtaatattgggtccgatagagaggtcttcgcagaagcagcctactcccggtagcgcaattactcctgtgcacgatcttaatgttccttatgaagggacggaggaatacgaaactcctacagctgatatgcttttccctccgactccattgcaaacaccagttcctacaccactgccgggtagtgcggatggttctatgtataacatccctactggaggtagtgattatcctactcccgtgaatgataatggcagtaatgctgacataaaaggtggaaggccaagcccgtatatgcaatctccttctccttggtcaaatcaaaggaccccactaagtgttgatgttaatgttgcttatgtggaagggcgggaggaggtggacaggggaacctctaatcaacccctgcctccgcgcccctttatgatgtcatctggaaagagaaaacgtgaggattttgcacaataccaaaatggtggatatataccccaacaagatggagctggagatgctacatctgaagttgcaaaggcagagggaagtaggggtggtaatttcctggatagacgtcactcaacaaccactgcaaaaagcaagatcttggcagagttatctaagtcatcatcaaagattcctcaactggatggtccaattcctgatccgtacgaagacatgctttctactcccaatatatacaattatcaaggagttgttaatgaggactacaatgtggtgaacacaccagctccaaatgaccttcaggcttcaacacctgcccctgctccccaaaatgatatagtagatgatgacgatgatgaaccattgaatgaagatgatgatgatgaagatgatttggatgatgtggaccagggagaggagctgaacacacaacatctagttttggctcaatttgacaaggtgactcgtacaaagagcagatggaagtgcacacttaaggatggcatcatgcatataaacaataaagacattctctttaataaggcaacaggcgaatttgatttctgattttgttagataaaactgtagtcgccatcgtattgcagcagttgccttaaaagagcaagtcaaggggtgttattctgtgtttcgtaatttgtcttttaattattattagagtgaaaggttgattgaggggcatgggatatgctttattttaatgtcttccttaagacttgggttcgatggttgtcgtattgtacataaaggaagagagcattttcggccttagaatggatgactacttgagacagcttcttgcagttctaaaaacttctgcaatggaatatgtaatttcatttataccatatacttagacattttggttaaatttaattacgagtcccttggttttctttaaaaaaaaaaaaaaaaaaaaaaaaaataaaaaaaataaaaaaaaaaaaaaaaaaaaaaaataaaaaaaaaaaaaaaataagggggggcccttttaaaggacccaagtttacttccccgggcttgcaacgaaaaagcttttttttgggggcccctaaattaaattcccgggccggggttt

SEQ ID NO: 19912 - DNA, 567 bp, Gossypium hirsutum
  unsure (1)..(567): unsure at all n locations
  Clone ID: AI730044.1
cttttctcgtccgcccctttctttctatccgttctttctgttaagctccgattcattctccaaagtccaaaccctagcttccctttctctaatttcactccttccttcaaattccattcacatgcttctcttctttttctcctaaatcattttcctataaaataaatccagcaattatttctttgttccaataattgaagaaaaaaaggaaaccgaggagctagatagaagattcgagaaaatatgacgtcgtcaacaacgagcgcggtttacatccacgtcatcgaagacgtcattaacaaggttcgcgacgagttcatcaacaacggtggaccaggcgaagctgtcctcaatgaactccaaggaatttgggagacgaagatgatgcaagcgggggcaatatgtggtcctataaagaggtctacgggtcagaagcaacccactgctggtggcccaattacgccagtgcacgatctcaatgtcccttacgaagggactgangagtacgaaactcctacggctgatatgncttttcctccgactccgtttgccaacactgctcctatt

SEQ ID NO: 19913 - DNA, 1336 bp, Gossypium hirsutum
  Clone ID: GOSHI-09MAY01-C608_1
aaatcctatgcgcgtatatatatgttttcgcgttcgcttatttcctcaagagtcttgcctactgtactttcttggtatccaaacaaaacccaagttattagaaacctttttccgaggaaccagagaaaatcaccagttagattgttagatatcagaatggcttctgatgggcagcaacagcaggtacctcctcagaaacaggatgcacaacctggaaaagaacatgtcatgaatcctatccctgagtactacagctccaactaccagccttccaacaagcttcaagggaaggtggcattagttactggaggtgattcggggattggccgagcagtttgccacagctttgccctcgagggagcaacggtggcctttacgtacgtgaagtctcaagaggagaaggacgcacaagacagtctggagatactgaggaaggctaagacctcagacgccaaggacccgctggctgtatctgctgatttggggtacgataagaactgcaaacaagtcgttgatgaggtcgtaaaagcatttggtcggatcgatattctggttaacaatgcggctgaacagtacaaggctagcagtgtggaggagattgatgaggagaggcttgatagggtgtttaggaccaacatctattcccaattcttcctgtccaggcatgctctgaagtacatgaaagaaggcagctccataatcaatactacatccgtaaatgcatataaagggaatgacaagctacttgattacacagcaaccaagggtgcaattgtggctttcactagaggcctttcacaacagctggtgaaccgaggcgtacgtgtgaataccgtagcacccgggcccatatggactccattgataccagcatcatttgatgaagaggaaaccgctcagtttggagctcaagttccaatgaaaagacctgggcagcccagcgaggttgcaccatgctttgtgttccttgcatgtaaccactgctcctcctacatgactggccaaaccctccatccaaatggtggtaccgttgtgaatggttgatatgcgccatacagagtttactcaagcttctgcttttcgtttctttttatgtttatataaatacggtgtgggtgttttgagtcttgctgcatgcaagagtggcaatagtaaacagtcttatctatttccaactgtatgtataactccaggcaaggcagtctcaaggatactaggaggagcctaagcccaactagtgcggtttgtgtaaaaaacaactatgaaactttgggtcttttataagaagcaagaaagtataataatggaacaaagcaggagccatctttacgacttt

SEQ ID NO: 19914 - DNA, 528 bp, Gossypium hirsutum
  Clone ID: LIB3583-023-P1-K1-G2
ctcgtatatatacgttttcgctttcgcttatttcctcaagagtcttgcctactatactttcttggtatccaaacaaaacccaagttatgagaaacctttttcagaggaaccagagaaaattaccttttcccattcactacatgccgtgtaagcattgctagctgttttagcagagagcaatgcatgtgaagaaggaaaagagaagatagaagaaaaagctacagatatttttaacttgattgttggcactttcaatgtttgagcgacaccgatggtccatcatttagaaggatagttgtaattctagagactcttgcgaaatatagatcacgtgttgtgatgttggatcttgaatgtgatgatttggttaatgaaatgttcagtacatttttttctattgtaagggatgatcatccagaaagtttttttatcaactatgcaaacaatcatgattgtggtgttagaagagagtgaagatgttcaagattgtcttttacttgttatattgtctgcattaggtcgtaataa

SEQ ID NO: 19915 - DNA, 521 bp, Gossypium hirsutum
  Clone ID: LIB3583-010-P1-K1-E1
ctctactctttctctcccacttgttactataaccccgaaacaagtaaagtaaggatccatttgtttattttcacgcgaatagtcttttttcttattctgtctaaagtggctttttcctttttttatctctttatggatgagcttcaccgggaagtggctccatttcttactgcgttgagggcatccacagtggagttaatccaccaccaggccggcccttctggaagctacccttggctagtctctaaatgcttgcccgatagttgtttgataaaattcctaagaaaggttgcttgctgaatgagtttagttttgggattttggttcgtgggtattgtagatttggccttgctaataaagggttggagcttttggatttgatgagaagttctgagattttgcctaacaggatatttttaacttgattgttgccactttcaatggtttgagcgacaccgatggtccatcatttagaaggatagttgtaattttggagactcttgcgaaatatagatcatgtg

SEQ ID NO: 19916 - DNA, 3149 bp, Gossypium hirsutum
  Clone ID: GOSHI-09MAY01-C638_1
tccggaggcagcctcagacgggtgccttgatcttcacttttctctttcaagttttagggtttctatccttgttttctctctaaatttcagctgtcctcaagaatacgcttattttgctgcagatcgtctaattttctaggacatggactcgtttgagcaggatggaaatggggcggcacctgactctctgcctccacccccacctgtgcctcctgatgtggtgcctatcaaagcagaacctgaacctgcaaagaagaaggttgtgcgagtcccaatggccaggcgtggtcttggatctaaagggcagaagataactcttctcaccaatcacttcaaagtgaatgttggaagctctgatggacacttcttccattactgtgtttctctttattatgaagatggccgtccagttgatggtaagggtgttggaagaaaagtgatagagagggtgcaagagacctatggcaatgaattggctggaaaggactttgcttatgatgggggagaaaagtttatttactgttggtgctcttccaaataacaagcatgagtttacagttgtacttgaggatgttacatctaacagaaacaacgggaatgcaagccctgatgtccatgatgactcaaatgggcaagacaggaagaggattaaacggccttatcagtcaaagacctttaaagtggagatcagctttgctgcaaagattcccatgcaagccattcaaaatgctctgcgtggacaggaatcagaaaactcacaagaagccctaagggtgttggatatcattttacggcagcatgctgcaaaacagggatgtctacttgttcgccagtcattctttcaaaataatcctgataattttacagacattggaggtggtgtcctaggctgcaggggtttccattctagcttcagagcctctcaagggggcctttccctgaatattgatgtctcaactaccatgataattcgtcctggtccggttgtggactttttgcttgccaatcagaatgccagagatccgtactccctggactggaccaaggctaaacgaacccttaagaacctgaggataaaggtcagtccatccaatcaggagtacaagatcactggattgagcgagcagttgtgcaaagatcagttgttttcattgaagcagaaaagcatgaagaatgataatggtgaagctgagaatctagagattactgtttatgattattttgtcaaccatcgcaacatacagttgcgctattctgcagacctgccatgcattaatgtcggaaagccaaaacggccgacatatattcctttggagctctgttccctggtgtctttgcaacgttacaccaaagcgttaaccactttccagagagcttctttggttgaaaaatcaagacagaagcctcaggaaagaatgacagtcttatccagtgctttacagaggagcaactatggtgctgagccaatgctgcgttcttgtggtatttctatcagcactaatttcacccaagtcgaaggtcgtgttctgccagcgccaaggttaaaagtggggaatggtgaagatttctttcctcggaacgggagatggaattttaataacaagaaattagtggagccaactaagattgaaagatgggctgttgtcaacttctctgcacgatgtgatacgaatagccttgtccgggatctgattagatgtggagacatgaaaggaattcggatagaccctccatttgatgtgttccaagagtccaatcagaacagacgttgctctcctttggttagagtcgagaaaatgtttgaggatatccaatctaaactgcctggagctccacagtttcttctttgtcttttacctgataggaaaaattctgatctttatggtccatggaagaagaagaatctttctgagtttggcatagtcactcagtgcatggctccaactagggtcaatgatcagtaccttacaaacctgcttctaaaaatcaatgcaaagcttggaggactgaattccatgctagcaattgagcaaacaccttcaattccagttgtttcaaaggttccaaccatcatccttggcatggatgtgtctcatggctctcctgggcagtctgatattccatcaattgctgcggtggtcagctccaggcagtggcctttgatttcccgctatagagcatctgttcgtacacaatctcctaagcttgaaatgatagattctctattcaaaaaagtgtctgacaaggaggatgaaggtatcatgagggaggttctcttggacttctatacaagttcaggaaagaggaagcctgatcaaattatcatattcagggatggagttagcgagtcgcagttcaatcaagtattgaacattgaactggatcaagtaattgaggcttgcaaatttcttgatgagagttggaaccccaagtttgtggtcattgtggcacagaaaaaccatcatactaagtttttccagcagggatctcctgacaatgtcccgcctggaaccgttatagacaacaaaatctgtcatcctaagaacaatgacttctatctttgtgcccatgctggaatgattggaaccacgaggcctactcattatcatgttctcttagatcagattgggttttcagctgatgatctgcaggaactagtccattctctgtcgtatgtgtatcaaaggagcaccactgccatatctgtagttgctcctatttgctatgcacatttggcagcctcacaggtgggtacattcatgaagtttgaagatacctcagagacatactcgagccatggtggagttactgcacccggagccatttctgtccctcagctgccgaggttgaaggagaacgtctgcaattccatgttcttctgctgagcccccatgttttgtataggcttttggttgttaccaaaacgactgaaacgtttttaagttatatgaaagttgaaaaaaaaagtagggttataattgatgatgtgatggtggttgaaacatcatcccatttgggtgttttgccctactgtatgtaggatatatgaaggtatgtttgactagcacttgttaaatggctttcgcctctgtagcacctgtaatcctgtttggtgataatcaatgcatagcctcagctatcgtcacctt

SEQ ID NO: 19917 - DNA, 537 bp, Gossypium hirsutum
  Clone ID: LIB3582-032-P1-K1-D11
aatgtcccgcctggtgagtctcagtcatgatttggtgcatgtcattcggtaccttggttatagttttcacaatttatcctgttttccattatgcaggaaccgttatcgacaacaaaatctgtcatcctaagaacaatgacttctatctttgtgcccatgctggaatgattgtaagttcttcgagaatttagttttcttgattactgattctgtagttatgcttttttgtccctttatacgaagttgagtctccttttaaaattgaatcaaggctctgatttctgttcttttgacttttttcaataagcttgtagttgaataatcagagaaattgctattctgttctaaaccttgatggcctcctgttccttgtaatgttcatttctttatataatttgtgtttgcttttcagggaaccacgaggcctactcattatcatgttctcttagatcagattgggttttcggctgatgatctgcaggaactagtccactctctgtcgtatgtgtaagtgttcaatcatgtatagtaattgct

SEQ ID NO: 19918 - DNA, 388 bp, Gossypium hirsutum
  Clone ID: LIB3166-034-P1-K1-E8
caagcatgagtttacagttgtacttgaggatgttacatctaacagaaacaacgggaatgcaagccctgatgtccatgatgactcaaatgggcaagacaggaagagaattaaacggccttatcagtcaaagacctttaaagtggagatcagctttgctgcaaagattcccatgcaagcgattcaaaatgctctgcgtggacaggaatcagaaaactcacaagaggccctaagggtgttggatatcattttacggcagcatgctgcaaaacagtgagttaaaaatatcagcctgggatgtctactcgttcgccaatcattctttcaaaataatcctgataattttacagacattggaggtggggtcctgggctgaagggcttccattcta

SEQ ID NO: 19919 - DNA, 713 bp, Gossypium hirsutum
  Clone ID: GOSHI-09MAY01-C198_1
ccgtccgaatcccggtcgaccacgcgccgtttaaataaaataggtgccaggaaattgagtcgtaattccttccttactaatttgttggccgccctcgcgtccgatggatttaggggagctgtgggcgatctttggtcctggcgtcgcgggcgccgtgttcggtaccggctggtggttttgggttgacgccgtcgtttgtagctccgtcaatgtctctttcgtccactatctacctggtataccataatttcttttttttttccatatattttttatccatgttttgtggctggttatttcttttttaggaatatttgcatctttagcggctgtgatgttcaattgtgttaaaaaagacgacattgattactctccttatgacgatggcgaatggaggttgtatgctctggctttccgttgcttatgtggtatcctttgtttcattggctgcttcagtaggcttattgatacaagattctctggtgaaatctggtccttcagtgtggaccggtactgcaggtgtcttacagtgcgtgtttgtcttaataagtgggctgatatattggacttctcattctgagtaatattaatccctcaaatctggcgcctagacttgggaacctggaagctggatccaccagtaaggccacaccccgagcatggctcaactcaaccggtgctcaaatcgcgacgacagctcggatttaacaaaa

SEQ ID NO: 19920 - DNA, 903 bp, Gossypium hirsutum
  Clone ID: GOSHI-09MAY01-C158_1
gttaagagccgcgaggaagagcagcagaaccagatatctgttctggcgttgctttcagctgctttgaggaagtccatgctgtcttgccgtgttgattcccgggatgaagtaatctcttccacccttcaacatatggaaatcgggtggccaaccaacgtaagacacattacccatgttacctttgatcgtttcaatggcttcttgggtcttcccgtcgagttccaagttgaaatccccagtcgggttccaagtgccagtgctaatgtgtttggggtctcagcggaatcaatgctaatgctgcattcgattcctaaagggaatagcgtccccactatactgttgttgatgcaggagcggctttattcacaagggggattaaaggcggaggggattttccggataaatcctgagaatggccaagaggagcatgtaagggatcaacttaacaagggcattgtgctggataatatcgatgtccattgtcttgcaggccttataaaggcctggtttcgagagcttccttcaggtgttctcgatggactttcccctgagcaggttctccgatgcaatacggaagaagaatcggtcaacctcgtgaagcagttgaagccaactgaagcggcactgctcaattgggctgttggtcttatggcggatgttatggaggaagaggaatcaaacaaaatgaatgcgagaaatattgctatggtttttgctccgaatatgactcggatgtctgatccattgacggctctgatgcatgccgttcaagtgatgaacttgctcaagaccttgatcataaaacgctacggaaacgtgaagagacggaaatgggagggtattcaccgatgtcgtctaattcatgtgactgccctacagatgaggagtttgatagtcagccag

SEQ ID NO: 19921 - DNA, 586 bp, Gossypium hirsutum
  unsure (1)..(586): unsure at all n locations
  Clone ID: LIB3828-009-Q1-K6-E4
cagggtgctnagaggactttcccctgaacggttctccanatgcaataccgaanaagaatctgtcgatcttgtgaagcaactaaagccaactgaagctgcattgctcaattgggctgttgatcttatggcggatgttgttgaggaagaggaatcgaacaaaatgaatgcgagaaatatcgcaatggtttttgctccgaatatgactcagatgtctgatccattgacggctctgatgcatgctgttcaagtaatgaacttgctcaagaccttgatcatgaggacactgcaggagcatgaagagagcgcaacaggagggagatgttcaccaatgtcgtctcactcttgcaatggccctaccgatgaggagtttgatagtaaccgagagatggaaacgagctgcgagctgaaaggaccaacatcagaatacgataatgccctttacaatagctacagcggagacgaagatgaagttcagtcattagatgaaatagaggaatgcttcttgaggcaactagatgagaataataagacggtcaccaatagtctttttggaggaaccagctaacgaattacaaagtgatcattc

SEQ ID NO: 19922 - DNA, 496 bp, Gossypium hirsutum
  Clone ID: GOSHI-09MAY01-C148_3
aggagataaaggaacagtgtgtctgactggaggtactggcttcataggttcatggctcagcaagaggcttcttcaggagggttattctgtccgtaccactgtcagggctgatccagaaaacaaaagagaccttactttcctcactagtctgcctggagcagccgaaatgctgaaaatcttgagtgcagatcttaatgaccccaacagtttcgatgcacccattgaaggaagcaaggcagggctccatgtcgccactcccttgagtctcgatggtaaagaatctctggaagcggtaacacagacgtcaaccagtggagcactaggcatcttgaaggcatgcttaagatcaaaaacagtgaagcgcgttgtgtatacttcaagtgcagccactgttatttacaatggccaagacacggacatgatggatgagagtttctggactgatgtggatttcgttacgcacaaatttaacccacaaacacatccttaccttatt

SEQ ID NO: 19923 - DNA, 806 bp, Gossypium hirsutum
  Clone ID: GOSHI-09MAY01-C148_2
cggacgcgtgggtgaagtcattactttgatgataatgattgaaaatacacagttttttactgagaaagtgcagtgcactaagacgaggaagctgaataatggtcctagggaaccaatctgaatatagtctccttctgaatgcatcgatggtgcatgttgatgacttggcaagggcacatatattcctgcttgaatatccagaagcaaaaggaagatacaattgttcttccgacaccataagccttgagaagttgtctgaatttcttggtggcaagtacccagagttcccaattccatcaccagaatccttgggagaaatcaaaggtatgaaatggcctggtgtgtcatcaaagaaactgttggacacaggtttcgattttaattgtggggtggaggaaatgtttgatggagccattcagtgctgcaaggaaagaggatatctctagttacccaaatttaccatctctactatgcaaataatgcagggagcaagggcctggaagatgattggatcgaatcagttgaaagacgaataaattagttcccttgtctcgatgatgcaatgctataataatgtaattctaattttaaaaaaaacaaatcaatgtatgttgttgtttttaatgtctccaaactagtttttgtgaagacaggaactgcactatgtatggtttcctctgtatacaaattgatgtttccgtcgcagtgcgcaactttgatcccttatcctcactactttctattgttgcttcttttgttcctgtttgtttccctggaatttcaaattttattcgatttttttactt

SEQ ID NO: 19924 - DNA, 1152 bp, Gossypium hirsutum
  Clone ID: GOSHI-09MAY01-C148_1
cggacgcgtgggttttcgtgcaaactctattgggtggagagatatggaaggagataaaggaacagtgtgtgtgactggaggtactgggttcatagcttcatgggtcatcaacagccttcttcaggagggttactctgttcgtacaactgttagggctgatccagaaaacagaagggaccttagtttcctcacaagtctaccaggagcagccgaaaagctgaaaatcctgagtgcagatcttagtgaccctaacagtttcgatgcagccattgaaggaagcaaggcagtgctccatgttgccactcctgtcgatttccaaaacaaagaatctgaagaagcaataactgagaggtcaataaatggagcagtaggcatcttgaaggcatgcttaagatcaaaaacagtgaagagagttgtatatacttcaagtgcatccactgttgttttcaatggccaagaaatggacatgatggatgagagtttctggactgatgtggatttcgttagacaaaaattaagcccaaacgcacattcttacattatttctaagacatggacagaaagggcggcccttgaatttggtgcacaacatggattggatgtggtgacagtgattcctagtttggttgttggccctttcatatgccccaagttccctggctcagtgcgctcatcattggctctggtcttagggaaccaatctgaatatagtttccttctgaatttttcaatggtgcatgttgatgacgtggcaagggcacatatattcctgcttgaatatccagatgcaaaaggaagatacaattgttcttccgacaccataagccttgagaagttgtctgaatttcttggtggcaagtacccagagttcccaattccatcaccagaatccttgggagaaatcaaaggtatgaaatggcctggtgtgtcatcaaagaaactgttggacacaggtttcgatttcaagtgtggggtggaggaaatgtttgatggagccattcagtgctgcaaggaaagaggatatctctagttacccaaatttaccatctctactatgcaaataatgcagggattaatatattttgttcatgagttaggattttgatttcgggtatgggtttgtgtgtttaatatatttatgtttttttctct

SEQ ID NO: 19925 - DNA, 1034 bp, Gossypium hirsutum
  Clone ID: GOSHI-09MAY01-C168_2
ggatccggcattaccattggaagagttcaacgaccaagtgaaggagctgagagaacgcatggcagagctgccggatgattatttcgtggtgttggtcggagatatgataacggaggaggcattaccgacgtatcagacgatgatcaatacgttggatggggtgaaggatgagacaggggctagctctagtccgtgggctgtttggacacgggcttggacggcggaggagaaccggcacggcgatttgttgaggaattatctgtatttgtcagggagagttaatatgttcatgattgagcggactctgcaatatctgatcggcgctggaatggaccctggaaccgaaaacaacccatacttgggcttcgtctacacctcattccaagagcgagctacctttgtatcccacggcaacaccgctcgtttagccaaggaaggtggcgacccagtcttggcacgcatatgcggcaccattgcggccgacgagaaacgccacgaaatggcctactcaaagatagtcggcaaactactcgaaatcgacccaactggagcaatgctagcaatcggcgatatgatgaagaaaaagataacaatgccagctcacttgatgttcgacggcgaagacccacggttgtttgagcacttcgccgccgtggcacagcggataggagtgtatacatcggatgattacgctgatatagtggaggcattgaatgaaaggtggggattggagaagttggaagggttgagggatgaagggaggcgagcgcaggaatttgtgtgcaacttagcgcctaggattaggaaattacaagaacgagcagaggagagggctaagaaaatggggcctcaagcagtgaagtttagctggattttcagtagggagattacattgtagaatgaaccaagcactcaacttcactcttattctttctttatttcctttctttcttgtctgtttagggtgcaattaataggtaaaaatgtagagtatgtttttgtttggcttatatctcacaaatgaataatatatg

SEQ ID NO: 19926 - DNA, 698 bp, Gossypium hirsutum
  Clone ID: GOSHI-09MAY01-C168_1
atccctgacccggtaaacactatcgccagtttgtcaccatgcaactcactcactgccttcctaccaaaaacctctcatggacgccacgtgtccatcaccgtcgccattctccaccaacctccgccgtcagattcgccccgatctttcccgccgttacggtatctcctccgaaacatcaaaagactcactcaatgccacccgaaaagcaagaagtgttcaaatcaatggaaaactgggccaccgaaaatgtattacctctgctcaaaccagtcaaagattgctggcaaccgcagacctttttgccggatccggcattaccattggaagagttcaacgaccaagtgaaggagctgagagaacgcatggcagagctgccggatgattatttcgtggtgttggtcggagatatgataacggaggaggcattgccgacgtatcagacgatgatcaatacgttggatggggtgaaggatgagacaggggctagctctagtccgtgggctgtttggacacgggcttggacggcggaggagaaccggcacggcgatttgttgaggaattatctgtatttgtcagggagagttaatatgttcatgattgagcggactctgcaatatctggtcggcgctggaatggtaacattttcatcactgtttcattaacttacaatttttttttgtttatttttaaaatttaat

SEQ ID NO: 19927 - DNA, 220 bp, Gossypium hirsutum
  unsure (1)..(220): unsure at all n locations
  Clone ID: LIB3583-033-Q6-K7-D11
cggtccgccttcccggtcgaccccgcgtccggnaaacgctaacgctattgtcaccatgcaactcacttactgccttcctaccaaaacctctcatggacgccacgtgtccaccaccgtcgccattctccaccaacctccgccgtcaggttcgccccgatatcagccgccgttacggtttttccttcntaccatnaaaatattttggggggggggggggggg

SEQ ID NO: 19928 - DNA, 479 bp, Gossypium hirsutum
  Clone ID: GOSHI-09MAY01-C118_10
ctattctcgttttttttttttttttttttaaatgagaaattgggcaagtcactgttgctctcgatgcgacttacagaagatcacacaaaaatgagatgggatgggtaacttcactctccctctctacatcaccataacttcagagtgatttctaatatatttatagtaccaaattccatagttaccaaaaagcaacatcccatacaaaaccatatgcatccgtacgagtctagtatctatctactgatgtaaagatgttcgtaaacaaaaaaacataagccaggaaaccacatttctaacacccaaaccaggaattcaggttgaaagaacagaaaaaaaaaatccaaatcgttaagaaagcaaacagtaagaaacacacaccactcctattcctggagatcctcctccgcatcctcccccgcttattcatacgcctcatcacagcgaataatccccggacgcgtgggcggacgcgtggg

SEQ ID NO: 19929 - DNA, 919 bp, Gossypium hirsutum
  Clone ID: GOSHI-09MAY01-C118_9
gaaaatatagaattaatatattttaaacttaattaaacaacaatgtctttaatcatggaagaccttattagcagaggttattaagtaaaaccgataatacttatgttgaatatagtctggaaagagcaaacagcataatcctgaacctgggaaatacagagtttaacaaaaacacaccaatagccacacagtattacataagcatgtaaaagtcgcaaatatgtaataataattgcccaaatatttcaaggctcctagttctcttccacaccttcctccccctcgtactcgccctcttcctcgacagtggcgtcctggtattgctgatattcagccaccaagtcgttcatgttactttccgcttcggtgaattccatctcatccatcccctcaccggtataccaatgcaaaaaggccttgcgacggaacatcgctgtgaattgctcacttaccctcctaaacatctcctggatcgatgtcgagcgcaccccgggagtcgatgccatctgtaggttttttggtggaatatcacaaacactagacttcacattattgggaatccactccacgaagtaagatgaattcttgttctgaacgttgatcatatgatcaggaatctgtttagtactcatcttgcctcggaacatagctgaggctgttaggtagcgaccatggtgagggtcagcagcacacatcatgttcttggcattccacatctattgtgtcgaataaggaacagtgatagtaatgtattgctagagatcggggtcagttgattgtgagcattcatttataaagaagtgaagacgtgggaattggattaggttcacagaaaacctccggcgcgtgtgagatcatctgtccaggaaaaaataatcaggatgtttcaccggtcagttttccagaaatgtgggcggaa

SEQ ID NO: 19930 - DNA, 553 bp, Gossypium hirsutum
  Clone ID: GOSHI-09MAY01-C118_8
gaatgtcatcatcatcctatctggatattcctctcgaattttcgatattaggagagttcccatgcctgagcctgtacctcctccaagtgaatggcatacctggaagccttgcaagcaatcacaattctcagcctctttacgaacaacatcaagaacagaatcaatcaactcagctccttcggtataatgacctttagcccagttgttacccggcaccggattgtccaaacacgaaattatcgggcctaaagatctgtccatagggaccggatctgatactatccatagtaccaggttcaaggtccatgagaacagcacgaggaacgtacctcccaccagaagcctcattgtaatacacattgatccgttccaactgtagatcagaggacgacgattcatctccagtgtaacttccggtgggatcgacgccgtgctcgtcgcagatcacttcccaaaacttggaaccgatttggtcccgcattggccaccttgaacgtgaaggatttctctcatggtttggattgggagaggaatggaagggcggacgcgtggg

SEQ ID NO: 19931 - DNA, 1080 bp, Gossypium hirsutum
  Clone ID: GOSHI-09MAY01-C118_4
gaagttccagaaagaaccaagaagagccctggaggtccctggacattttgtgggctgttgcctttatttgatcctccaagacatgatagtgccgagaccatccgtagggccttaaaccttggagttgatgtaaagatgattacaggtgaccagttggccatcgcgaaggagacaggaagaagacttggtatggggacacccacgcgtccgccgtcgcctgggttgggtcgtgaaaaggatgagagtgaagctcttccagcagatgaactcattgagaaggcagatggctttgctggcgtattccctgaacacaagtatgaaatcgtaaagattttacaagaaaagaagcatgttgtgggaatgacccgagatggggtgaacgatgcacctgctttgaagaaagcagacattggaatagcagtggcagatgctacagatgctgcaaggagtgctgcagatatagtcttaactgagcctggcttaagtgtgataatcagtgctgtgttgacaagcagagctatattccaaaggatgaaaaactatacgatatatgctgtttccataaccattcgtttgctgcttggttttgtgcttctagctctgatatgggaatatgatttcccacctttcatggttttgatggtggcaatccttaatgatggaactatcatgaccatttccaaagaccgagtcaagccatctccgaccccagacagttggaagcttaatgagatatttgcaaccggcgttgtcattggaacctatcttgctttggttactgtcctgttttactggattgtaattgatactgatttctttgagactcacttcaacgtaaggtctatatccgacaacaccgagcaaatttcctctgcagtatatttgcaagtcagcatcattagtcaggctctcatctgtgttactccgagtcgaagttggtcattcgttgaaaggcctggtgttctcttgatgtgtgcattcgtggttgctcaactggtgaagttctcagaaaaaaaactctatttaagaataagaatcaatggcaaatcagactaaattttatatccctttcttaatctg

SEQ ID NO: 19932 - DNA, 1354 bp, Gossypium hirsutum
  Clone ID: GOSHI-09MAY01-C118_3
cggccgcgtcgactggaagaattcgcggccgcagaattttttttttttttttttaaaactgaaactgatcgtttctttatttgaatgtctgaagaaaaccaaacatcatcattgtcggaatacaaaggaacgaacagagcagaaaatttagacacacacagatagccacacagcagtatataactaggcaaaagttgcgatgaactcattgagaaggcagatggctttgctggcgtattccctgaacacaagtatgaaatcgtaaagattttacaagaaaagaagcatgttgtgggaatgaccggagatggggtgaacgatgcacctgctttgaagaaagcagacattggaatagcagtggcagatgctacagatgctgcaaggagtgctgcagatatagtcttaactgagcctggcttaagtgtgataatcagtgctgtgttgacaagcagagctatattccaaaggatgaaaaactatacgatatatgctgtttccataaccattcgtattggtcttggttttgtgcttctagctctgatatgggaatatgatttcccacctttcatggttttgataattgcaatccttaatgatggaactatcatgaccatttccaaagaccgagtcaagccatctccgaccccagacagttggaagcttaatgagatatttgcaaccggcgttgtcattggaacctatcttgctttggttactgtcctgttttactggattgtaattgatactgatttctttgagactcacttcaacgtaaggtctatatccgacgacaccgagcaaatttcctctgcagtatatttgcaagtcagcatcattagtcaggctctcatctttgttactcggagtcgaagttggtcattcgttgaaaggcctggtgttctcttgatgtgtgcattcgtggtcgctcaactggtggctaccttaattgcagtatatgcacatattagctttgctgatatcagtggcattggatggggatgggctggtgttatatggttatacagtttagttttctatgttcccctggatatcatcaagttcacagttcgatacgcattgagtggagaagcctggaacctcctattcgacagaaagactgcgtttacttcgaagaaagactacgggaaagatgaccgggcagcccaatggattctgtgctcagaggagcctacagggcttgatggctgcagacttggatttcaatggaagaagatcgagaacttctttgatagccgatcaggctaggcggcgtgctgaaatagccagacttggggagctacacactttaagaggtcatgtagaatcagttatgaggctaaagaatttggaccgc

SEQ ID NO: 19933 - DNA, 1724 bp, Gossypium hirsutum
  Clone ID: GOSHI-09MAY01-C118_2
gggattgtaaaactgaaactgatcgtttcttttatttgaatgtctgaagaaaaccaaacatcatcattgtcggaatacaaaggaacgaacagagcagaaaatttagacacacacagatagccacacagcagtatataactaggcaaaagttgctgctattctctaacttcacgcaggttttgatatatggtaattgccaacgcattttaggtctcatagttctcatccagaccctcttccccctcgtactcttcctcatcttccacagttgcgtcctgatattgttgatactctgcaaccaagtcattcatgttgctctctgcttctgtgaactccatctcatccattccctcaccagtataccaatgcaaaaaggccttgcgacggaacatcgctgtgaattgctcgcttaccctcctaaacatctcctggattgacgtggagttccctatgaaagtagaggacatcttcagaccccttggtgggatatcacaaacactggacttcacattattgggaatccactccacgaagtaagatgaattcttgttctggacattcatcatctgttcatcaacctctttggtgctcatcttgcctcggaacatggctgacgctgtcaggtagcgaccatggcgagggtcagcagcacacatcatgttcttggcatcccacatctgttgagtcagctctgggacagtgagagaaacgtactgctgagaaccacgggatgtaagtggtgcaaatccaaccataaagaagtgaagacgtgggaacgggatcaggttcacagccaactttcggaggtcagagttcagctgtccggggaaccttaggcagcatgttacaccgctcatagtagcagaaatcaagtggtttagatctccaaagcttggagtagtgagcttcagagttcggaagcaaatatcataaagtgcctcattgtcaagaaccatgcattcatcagcattctctaccagctggtgcacagagagggtggcattgtaaggctccacaacagtgtcagacaccttaggggaagggaacacagagaaagtgagcatcattcggtctgggtattcttctcggatcttggaaatcaaaagtgttcccatgcccgatccagttcctcctcccaatgaatggcatacttgaaatccttgcaagcagtcacagttttcggcttctttcctcaccacatctagcactgagtcgatcaactcggccccttccgtgtaatgacccttggcccagttattccctgcaccggactggccgaaaacaaagttgtcaggcctgaaaatctgcccgtacggcccggatctaacactatccatagtgccaggctccaagtccataaggacggctcgtggaacgaacctcccgcaactcgcttcattgtagtaaacgttaacgcgctccagttgcaaatcattgtccccttgatagcgtcccgttgaatctatgccgtgctcggcgcaaaccacctcccaaaacttggcaccgatctggttgccgcactgccctgcctgaatatgaagaatctcacgcatctttcctaggactcggatttcagagaaagtccaaagaaaatgaattttcacggacggtttttttttcctctgaccccgcaagacggaaacagaagaattatatagggaggagatgacagaaggtggtgcttgccgttagggttgacggaggtgcgtgacggctgacgaggc

SEQ ID NO: 19934 - DNA, 1750 bp, Gossypium hirsutum
  Clone ID: GOSHI-09MAY01-C118_1
tctagttttttttttttttttttttttttttttggtctgctccttgttttcagagtaatttctaatatatttatagtaccaaattccatagttaccaaaaagcaacatcccatacaaaaccatatgcatccgtacgagtctagtatctatctactgatgtaaagatgttcgtaaacaaaaaaacataagccaggaaaccacatttctaacacccaaaccaggaattcaggttgaaagaacagaaaagaaaaatccaaatcgttaagaaagcaaacagtaagaaacacacactactactattcctggagatcctcctccgcatcctcctcctcataatcatactcctcatcagctgttgcatcttgatattgttggtactctgaaaccagatcgttcatgttgctctcagcctccgtaaactccatctcatccattccctccccagtataccagtgcaagaaagccttcctgcgaaacatggcagtgaactgctcacttactctgcggaacatttcctgaatagatgtcgagtttccaatgaacgttgaggccatcttcaagcctattggaggaatatcacaaacagtagacttcacattattggggatccactccacaaagtatgatgagttcttattctgcacattaatcatttgttcatcgacttccttggtgctcatcttgccacggaacatggctgaagcagtcaagtatcgcccatggcgaggatcagcagcacacatcatgtttttggcatcccacatttgttgagtgagctcgggaacagtaagagccctgtattgctgtgaccctcgagaagtaagtggagcaaagccaaccataaagaaatgcaggcgagggaatggaatgagattgacggcaagcttgcgtagatctgagtttaattgaccagggaaacgaaggcagcatgtcacaccactcatggtggcagaaatcaagtggttcaagtctccaaagcttggagtagtgagcttcagagtacggaagcaaatatcatataaagcttcattgtccaaaaccatacattcatcagcattctcaacaagctggtgaacagagagagtagcattgtaaggttcgacaacagtgtcagacaccttgggtgaagggaaaacagaaaatgtcatcatcattctgtctggatactcctccctgatttttgatatcaggagagttcccatgccagagcctgtgcctcctccgagtgaatggcatacctggaagccttgcaggcaatcacaattctcggcctctttacgaacaacatcaagaacagcatcaatcaactcagctccttcagtgtaatgacctttggcccagttgtttccggcaccggattgtccaaacacgaaattatcaggtctaaagatctggccaatgggaccggatctgatactatccatggtaccgggttcaagatccatgagtaccgcacgagggacgtaccttccaccggaagcctcgttgtaatacacatcgatccgctccaattgaatatcggatgatccatctccactgtactttccggtaggatcaacaccgtgctcgtcgcagatcacttcccaaaacttggatccgatttggttcccgcattggcctccttgcacgtgaaggatttccctcattgttatttcgtcgaaaatgaaacgaaaagaaaaaggcaaagaggtttaagggttttcttcaatcttgtcccgagtggagagaaggaaacgaacgctgtggacga

SEQ ID NO: 19935 - DNA, 439 bp, Gossypium hirsutum
  Clone ID: LIB3083-013-Q1-L1-A11
attcattttctttggactttctctgaaatccgagtcctgggaaagatgcgtgtgattctggatattcatgcaggtcattgcggcaaccagatcggtgccaagttttgggaggtggtttgcgcctagcactgtatagattcaactgtactctatcaacgggacaaagatttgcacactggagcgcgttaacgtttactacaatgaatcgtgttgcagtaggttcgtttcaatagcctgttttatggacttgcatcctgtcactattgatatgtgttgatccgtgccttactgtctgtttttttatcttgatatcttttttattttttttaatttttatcttttatttcttttctttttttctatatactttaatcttttatttttttatttattttattatttttttttgttttttttctttattttttttatttctttt

SEQ ID NO: 19936 - DNA, 643 bp, Gossypium hirsutum
  Clone ID: LIB3830-002-Q1-K6-D3
ctttaaataggtaggacggcgcggctgcttcgttgagccgcgccacggaatcgagagctccaagtgggccatttttggtaagctaactcagcagatgtgggatgcgaagaacatgatgtgtgctgctgaccctcgccatggtcgctacctgacagcgtcagccatgttccgaggcaagatgagcaccaaagaggtttttttacagatgatgaatgtccagaacaagaattcatcttacttcgtggagtggattcccaataatgtgaaatccagtgtttgtgatatcccaccaaggggtctgaagatgtcctctactttcatagggaactccacgtcaatccaggagatgtttaggagggtaagcgagcaattcacagcgatgttccgtcgcaaggcctttttgcattggtatactggtgagggaatggatgagatggagttcacagaagcagagagcaacatgaatgacttggttgcagagtatcaacaatatcaggacgcaactgtggaagatgaggaagagtacgagggggaagagggtcttgatgagaactatgagacctaaaatgcgttgggcattaccatatatcaaaacctgcgtgaagttcgagaatagcagcaacttttgcctagttatatactg

SEQ ID NO: 19937 - DNA, 426 bp, Gossypium hirsutum
  Clone ID: LIB3083-011-Q1-L1-A9
tgaaaattcattttctttggactttactctccgaaatccgagtcctaggaaggatgcgtttgattcttcatattcagggagggcagttcggcaactatatcggttccttgttttgtttgtttatttattttttattttttttatctttttttttattttttttttttttatttattattttctttttttttattttttttcttttttcttttttttttttttttttatttgtttttatttttttctttttttttatttttttttatttttttttttctttatttttttttatttatctttctttttatttcttttttttttctttttttttttttttttttttttttcttttctcatttatttctttatcttatttttttttttcttttattatttatatttttttttacttattttttatttttt

SEQ ID NO: 19938 - DNA, 391 bp, Gossypium hirsutum
  Clone ID: LIB3493-053-P1-M1-D11
gggatgtaagtggtgcgaacccggccataaagaagtgcagacgtgggaatgggattaagttcacagccaactttcggagatcagaggtcaactgtccggggaaccttaggcagcatgttacaccgctcattgctgcagaaattaagtggttcagatctccaactgcaaattacaaatgtagcgttagggtcagaattttaaattgttttaacactatatagcaaactttccatcaaaatgaaaagattatatcactcacagcttggagtggtgagctttagggtcctgaagcaaatatcataaagtgcctcattgtcaaggaccatgcattcatcagcagtctctaccaactggtgcacagagagggtggcattataaggctccacgactg

SEQ ID NO: 19939 - DNA, 328 bp, Gossypium hirsutum
  Clone ID: LIB3083-050-Q1-L1-D6
ctcgtgccgtatcggcacgaggtttttttttttttggtttgttataaaaccatatgcatccgtacgagtctagtatctactgatgtaaagatgttcgtaaacaaaaatacataagccaggaaacaacatttctaacacccaaacaaggtattcaggttgaaagaacagaaacattttccaaaacgttaagaaagcaaacagtaagaaacacacactactactattcctggagttcctcctcctcatcctcctcctcctcataatcatactcctcatcagctgttgcatcttgatattgttggtactctgaaaccagatcgttcatgtt

SEQ ID NO: 19940 - DNA, 310 bp, Gossypium hirsutum
  unsure (1)..(310): unsure at all n locations
  Clone ID: LIB3584-061-P1-K1-F10
cggacgcgtgggcggacgcgtgggcggacgcgtgggcggacgcgtgggcggacgcgtgggtgaatgcagttggagacttgaaccacttgatttctgccaccatgagtggtgtgacatgctgccttcgtttccctggtcaattaaactcagatctacgcaagcttgccgtcaatctcattccattccctcgcctgcatttctttatggttggctttgctccccttacttctcgagggtcacagcaatacagggctcttactgttcccgagctcactcaacanatgtgggatgccaaaaacatgatgggtgc

SEQ ID NO: 19941 - DNA, 4057 bp, Gossypium hirsutum
  Clone ID: GOSHI-09MAY01-C108_1
cacgaagtcaaaacggcacctagtaaaatcacgaattgttttttttttctgcaaaattggttcaaaatgcatttgatccttgagtttggtggaggcttagagcttttatgtgtgagtaataaagttcacaatgtgaattttgatctgcctaaaggaactgataagttaagcatgaaggattaagtagcttggattcgtaccaatttgatcaaggagagacctgaaatgctcatgaaaggggagtctgtgtgagtgttttaaaagtttagtctttgaattaggattgtaattctccgttgaaagtttagtcttggaattagtatttcacttgaattccccgttgaaagtttgaaactgagaaacacagttgagtttgggttccttttttttgttatatgtatgaagaacaaagtttccttggttttttctgttgtttacttgatttcataccgtctaatttgatataagaaatggataataacccacaccaaaatccttacccttatcaccatggataccctcctccaaatcaagatccatatgcgcctccgccatatcaatacccttataactctccccaataccctcctgcactgcatatgtatccacccccagtccatgcccttgctgcagctcccattgactatggacattctcattcttattctggaccaattccttatcaatattcacacccaatacctccaaattcttcccaacctgctccccaatatcatggtagttttcagtatggttcaacttttaatccttaccagcaatccctatctggtcattacccacctccaaaaagtaacccgcaatcatcctccacttatcagcagccttcacaatatcctcctcaatcatcctcctcttatcaacaacctgcacaatatactcctcctgaaagtaattctgagctcctctccacacacattagcttctctggtcataaccggcaagacagtacaagttccttagcagcaaatacgggaagtgcttcacctctttacccgcatttggatcatcagttgagtaattccgagctcctctccacacacaatagcttctctggtcataacaggcaagacagtacaagttccttagcagcaaattcgggaagtgcctcacctgcttacccacttttagatcatcaattgagtaatatgcatttgtctggtagccatccatcagctcctgcatcacctctggcacctttggggcctccattgcctgctgctacttcaacacctgattatgcaagtgaatctagtaattgggaggggcttagtttaggccgagctgattcggctaatcactctacttttcccataatgattcatttaatggatcacaaaaagggcagggtatgcagattgtacctttccagaaaggttcattgagagttttgcttctacatggaaatttagatatttgggttcttgaagcaaataatcttcccaacatggatatgttccataggactttaggcgatatgtttgcgaatttttcttcaaatatctcaaaaaaggttggagggcgctcggacgagaagattacaagtgatccttatgtcacaattgcagttgctggtgctgttataggaaggacttttgtgatcagcaataatgaaaaccctgtctggatgcaacatttcaatgtccctgtcgcacatcatgccgtgaagtgcaatttgttgttaaagacagtgatattttggggtcagatattataggagttgtagcaattccagttgagcagatatacgcagggggaaagattgagggaacctacccggttctgaatgctgctggaaagccctgtaagcctggagcggttttgaaattatcaattcaatacacaccaatggagaaattgagcttctatcatcagggtgttggagcaggtcctgaatatgtgggggttcctggtacatattttcctcttcggaaggggggtaaagtgactctttatcaagatgcccatgttcctgatgggtgtcttccaaacataaaactcgatcaggggatacactttgtgcaaggaaagtgttggactgacatatttgatgctattcgtcaagccaggcgcttggtttacattacagggtggtcagtttggcataaagttaggctggtacgcgatgttgctcctgcttcagattgcactttgggtgatattcttaggtcgaagtcccaggagggagttagagtgctacttttgttatgggatgatcctacttcaagaagcatattggggtacaaaacggaaggaataatggctacccatgatgaggaaacacgcagttttttcaaacactcttcggtgcaagtgttactttgtcctcgcattgctggaaaaaaacatagttgggtcaaacaaaaggaagttggaacgatttatacacatcatcagaaaactgtaattgtggatgctgatgctgggaacaatcatagaaaaattattgcttttgttggtggccttgacttatgtgatggtcggtatgataatccagatcatgctttatttaggacacttcaaacatatcataaggatgactatcataacccaacatatacgggttctacggttggttgtccaagagaaccttggcatgatatgcacagtaaaattgatggcccagctgcatatgatgttctggtcaactttgaggaacgttggttgaaggcagccaagcctcacggacttaaaaaattaaaaaagccctttgatgatgctttgctgcggatagcaagaattcctgacattatgggagtttctgattttactgagaatgagaatgatccagaacgttggcatgttcagatttttcgctcgattgattcaaattctgttaaaggctttccaaaggatccaaaagatgcaacaagcaagaatttggtgtgcggtaagaacgtccttattgatatgagcatacatacagcatatgtgaaggccattcgtgctgcccagcatttcatttatatagagaatcagtatttccttggatcctcttacaattggagctcttataaaaatttaggtgctgacaacttaattccaatggaaattgctcttaagatagccagtaaaattaaagcaaatgagaggtttgctgcatatgttgttattccaatgtggccagagggtgttccaacaggcgctgccactcaaaggattttatattggcagaacaaaaccatgtcaatgatgtatgagactatttacagggctttggtagaggctgccctcgcgtccgcttgcgtgccagaggactttcttaatttctattgtcttggcagtcgtgagcttgatggatatcaacctcctattgacgaaagtcctaaggctgccaatactcctgaggctcttagtcgaaaaagtcgaagatttatgatctatgtccattcaaaaggtatgatagttgatgatgagtttataatagtgggatctgcaaacatcaatcaacgctccatggagggtaccagagacacggagattgcaatgggagcttaccaacctcaacatacttgggcagcaaaacgttctagtccccttggacagatctatgggtataggatgtcattatgggcagaacatattggagtagtcgaggactgcttcgctcgaccagagagccttgagtgcgtaagacggattaatcaaatggctaaactgaattggagacaatttgcggcagaggaagtgacagagatgagagggcatttgctaaagtacccggttgaagtggaccccaagggtaaggtcaggccccttcctggatctgaaactttccctgatactggaggaagcgttggcggctcatttcttggcatacacgaaaatcttacaatttaaccaaatttgttactatatctactatacaaataaagtttcgatactataaatgaaatatttatttatactctatagttttaaaagtccgttttatacaaatttgtatagtcaaatccataacaaattttgtacttgcctatattcatcgtttcaaatagaaataatctttgttcttttgttaaaaaaaaaaaaaaaaaaa

SEQ ID NO: 19942 - DNA, 330 bp, Gossypium hirsutum
  unsure (1)..(330): unsure at all n locations
  Clone ID: LIB3083-014-Q1-L1-G7
gcacctcgttaaatcacgattaggttttcttgagtttctgcgaaattttgttcaaaatgcatttgacccttgaattcggtggaggcttagagcttttatgtaaatctgttaaatttcataatgtgaacgttgatctgccaaaaggagcagataagttaagcatgagggatttactagcctgggttcgtaccaatttgatcaaggagagacctgaaatgttcatgaaaggggagtctgtgagacctggtgttcttgtccttgtaaatgactgcgattgggagttgagtggccagcttgatactaccttagaagagaangatgtggtagttt

SEQ ID NO: 19943 - DNA, 509 bp, Gossypium hirsutum
  Clone ID: GOSHI-09MAY01-C138_27
atccaagcatcaacagcaatgggagcatttgtcttgatatcctaaaagaacagtggagccctgcactgaccatttccaaggttctgctttctatttgctcgttgttgacggatccaaaccctgaccctcccctccgtccggagattgctcacatgtacaagactgatcgggccaagtacgaagctactgcccgcagctggacccagaagtatgcaatgggttgatgatgatgatggtggtggttagtgtgtaatatacctatgggttttgtatgtcgtcaaatgttttacctttagcaggcatgttttcttgaagggaacttgtcattgtgttttcatactttggatcagtgttgaaatattgtcttcggtccactctactcctaaagtgcgtactgaatggtctgactattgttataagagatatatgccaccgttcctttgcttcttttatccaagcatttcgtctaaaaaccaaaaaaaaaaaaaaaaaaaaaacccacgcgtacg

SEQ ID NO: 19944 - DNA, 461 bp, Gossypium hirsutum
  Clone ID: GOSHI-09MAY01-C138_26
gtggatacctaggcacccagagacgaggaagggcgtagtaagcgacgaaatgcttcggggaggttagaccctccggcccggcccgcgcgtacggactcggtcgattttgcgtggaggatgcatgtgaacgatgacaaggtgaaggtggtggatgggaggatggggtcactggttaacttggagcaagccattcgagctttggacattgggctgctttgtacgttaaatgagtctaagggtaggcctaaaatggaagaagtggtggagtttctcagcatggacaaacaaattcctgagctgcctgcttgtagacccgtctcattgttcccttacaacagtgccacacgtctttgcactggttattcttgcggcccattcaagtgaatccagctgtttgcctgcttgtattaaactttcaagatcggtttattatttgtacaaaaaatgttggtcagtcaagc

SEQ ID NO: 19945 - DNA, 608 bp, Gossypium hirsutum
  Clone ID: GOSHI-09MAY01-C138_25
cccacgcgtccggcttcggggagttgaaaataagcgtagatccggagattcccgaataggtcaacagatgtcatcacaaaaagactattccatggcaacagcagatgtggtggatgcagaggtaagggatttagtagagactgcatacacaagggcaaagcagataatcacaactcacattgacattctccacaagcttgcccctctcctccgggagaaagaaacttgttgatggagaagagttcatgagcctcttcattggtggaaaagctgagcctatatgtttcttagatcgtacattatatagtccccattcagtccttgggtaactatgaccctcaaatggtcagattcatctgtggatgctttcataaagatagggaaaaaaatctcaatactttttcttcctgtaattgagaaaacctatgatgtggccatgaaaattgaaaatggaacacaattacagttttttgtctaacaaaatgattcacataacacaaaaaaaagaatagtaacataaaaaagtttgaattgttaaaaaataccactactatgagagctcacagtgatcgtataaatcccaaataaatttccatagggggggggcc

SEQ ID NO: 19946 - DNA, 359 bp, Gossypium hirsutum
  Clone ID: GOSHI-09MAY01-C138_21
gggcgggccacgcgtccgcccacgcgtccgcccacgcgtccggaagagttcatgagcctcttcattgatggaaaagctctgcctatatgtttcttagatcgtacattatatagtccccattcagtccttgtataactatgaccctcatatgttcagattcatctgtgtatgctttcataagatagggaaaaaaatctcaatactttttcttcctgtaattgagaaaacctatgatgtggccatgaaaattgaaaatggaacacaattacagttttttgtcttaaaaatttagaatgattactttgcctgttattatcttggcttttttattatcttttatttttttttatatatttttt

SEQ ID NO: 19947 - DNA, 476 bp, Gossypium hirsutum
  Clone ID: GOSHI-09MAY01-C138_19
ccgcctcccgggcccggtccggacctcccgggccgacccgccccacccgtccgtcgtggactgaatctagggacttgcgggtggagatgtcgagagctcatctctctgcttcaaagctcctgtccaggtagaattctcttcttcctttgcgttgtgttctttgtagttcagtccccacggctccaaagcggattttgaaggaactcacggatttgcagaaagatccacccacttcttgcagtgctggtccagtacctgaagacatgtggcattggcaagcaacaagcatgggaccctcagatagcccttatgctggaggcgggctctccgtttcaattccttgttccctccccttcctttcttgtatgtctatctaaatttatttattttttcttattatctttttttatattttttaatatttttcttttattattatttttattttagtattgtatatatatattttatatttt

SEQ ID NO: 19948 - DNA, 373 bp, Gossypium hirsutum
  Clone ID: GOSHI-09MAY01-C138_18
ccctgatgacccactggttctggagatggcccccatgtataagactgatcgggcaaagtatgaagctacagcacgtggctggacccagaagtatgccatgggatgatggtggttagtgggtaatacgtattggcttttgtacgatgccatgtatgtgttaaaaccttcatatattttggtttgggaaggaacttgtgattgtgcttagatttggatttgaattatgtggacatcttatatcaaaggtgggtctatggttgtaagagagaatgccattccattccatgtctttttatagcttgttatatgatgaagcatttcctaaaactttcatgcttattagtggaggattatggtctgaaaaataactact

SEQ ID NO: 19949 - DNA, 652 bp, Gossypium hirsutum
  Clone ID: GOSHI-09MAY01-C138_17
ctagatcgcgagcggccgccctacgcgttcggttttaaaaggaataccttaggtcccagagacgaggaagggcgtagtaagcgacgaaatgcttcggggagttgaaaaataagcgtagatccggagattcccgaataggtcaaccctttcgaacctgaggctgaatccagggctaaaaccattgatctctgcaacaattcaatgtcaaccagaaagatttatgactaccctagaagaataggttctgagtggacagatcttgactctgaggctagaaaattcactgccaaaatattaggtgatgaactggaaaaccctgatccactaccatcaccattatcatcatcacctgagacttcttctaatgaccaatcaacggacgatctagaatcaaaggcagagttgtgaaacttttggattaggaaaaaactagtttttgatactcaattttgccaaaaaaccatgataacatttcctgagctgaaactaaagctttttaccatagggaagagaacttccaagctttgctaactttgggcattttaatggcaattattatatatgtagactgatacttttaagatctagaagggaaagaagaaaaaaaaaataatgatattttgatagaatagttcatacatggaatttggtt

SEQ ID NO: 19950 - DNA, 624 bp, Gossypium hirsutum
  Clone ID: GOSHI-09MAY01-C138_16
tgcacccagagacgaggaagggcgtagtaagcgacgaattgcttcggggagttgaaaataagcgtagatccggagatttccgaataggtcaacccgccgtctccaaatccgcctcctccttcgtctccgtaatcatcttcaaggaaaggagggtgtatttgggccaattttggtgatcaaaccaccagtgagagtggaggggtttgattgttttgcactggcttagaacccatttctatccacaaaagagttcatagataaaacaagaggagctacccaaacaaagaagggaattttgaaattgtaagtgactgaagagaaaaaagcaaagaaccctttgttagtgtaaaaatatggataaagggttgtttgtatgtaatgaaaaaagaacttggtgtcttgtaagtatgtgagagtaagttgaataaaaataaggaaaaaggagcgtaggttaatgtttagaaaatggcttgggggttttttctttgtttttgggttttgtaaagagtctcaagtcaagaagggaatttgttgtgtatttagtggagtgatttaaataaaaccctggaacagtgtatataaatccaactgctgtttgcttatgaatcacgccaatgtggctgg

SEQ ID NO: 19951 - DNA, 554 bp, Gossypium hirsutum
  Clone ID: GOSHI-09MAY01-C138_15
ccattaatacaggatgctcgatttggggatgagaagatggtcaacccgccgtctccaaatccgcctcctccttcgtctccgtcatcatcttcaaggaaaggagggtgtattcgggccaattttggtaccaaaccaccagtgagagtggaggggtttgattgttttgcactggcttagaacccatttcaatcaccaaaagagtccatagataaaacaccagagaagggaattttgaaattgtaagcgcctgaagagaaaaaagcaaagacccctttgttagtgtaaatatatggataaagggttgtttgtatgtaatgaaaaaagaacttggtgtcttgtaagtataggagagtaagttgaatagaaataaggagagaggagaggagaggagcgtaggttaatgtttagataatggcttgggtgttttttctttggtttctgggttttgtaaaagagttctccaagtcaagaagggaatttgttgtgtatttagtggagtgatttaagtaaaaccctggaacagtgtatataaatacaactgctgtttgcttatg

SEQ ID NO: 19952 - DNA, 800 bp, Gossypium hirsutum
  Clone ID: GOSHI-09MAY01-C138_9
tgcactcatgcctgaatatgatcctgtggcaaagatttctatcattcctcgtggtcaagctggtggccttaccttttttgctccaagtgaggagaggcttgaatctggtctctacagccgaagttacctacagaaccagatggctgttgcactcggtggaaggattgccgaagaagtaattttcggggaggaaaatgtgacaacaggagcatcgaatgactttatgcaagtctcacgagtggcaaggcagatggttgaaagatttggattcagcaaaaagattggacaagttgccattggtggaggtggtggcaatcctttcttaggtcaacagatgtcatcacaaaaagactactccatggcaacagcagatgtggtggatgcagaggtaagggatctagtagagactgcatacacaagggcaaagcagataatcacaactcacattgacattctccacaagcttgctcaacttctgatggagaaagaaactgttgatggagaagagttcatgagcctcttcattgatggaaaagctgagctatatgtttcttagattgtacattatatagtccccatacagtccttgtataactatgacccttaaatgttcagattcatctgtgtatgctttcataagctagggaaaaaaatctcaaaaatctatctttttcttcctgtaattgagaaaacctatgatgtggccatgaaaattgaaaatggaacactattacagtttttggcctaaaaaaatagatgattacttggcctgttataaacattaaattaaaattgggtgt

SEQ ID NO: 19953 - DNA, 863 bp, Gossypium hirsutum
  Clone ID: GOSHI-09MAY01-C138_8
cggaaaaaccgggccggacgaacccttcctcggacccttggccggacccttcgttgttacccgtgggcggacgcgtggccggacgcgggggctgacgcgtggagctgcaagtgctgaaatctagggatttgcgggtggagaagacgagagcccatctctctgcttcaaagctcctgtccaggtagaattctcttcttcccttgcgttgtgttctttgctgttcagtcagccatggcttcaaagcggattttgaaggaactcaaggatttgcagaaagatccacccacttcttgcagtgctggtccagtacctgaagacatgtttcattggcaagcaacaatcatgggaccctcagatagcccttatgctggaggtgtgtttttagttactatccatttccctccagattatcctttcaagcctcctaaggtcgcgtttaggaccaaggtcttccatcccaacatcaacaagcaatggaagcatttgtcttgatatcctcaaagaacaatggagccctgcactaaccattttcaaggttctgctctcaatctgctcgttgctgaccgatccaaaccctgatgacccttttgttccggagattgctcacatgtataagaccgatcggtccaagtatgaagccactgcttcgtgctggacccagaagtatgccatgggatgacagtggttggtgctgtaatacctatcagctttcttatgtgaatttgggaaggaggatggtcatttctattttatattcttccttcatctacatatctttatactcttattctatttatctcttacttacattttcatatatttgttactttttgtttatcctctcttactaatttttttttttt

SEQ ID NO: 19954 - DNA, 934 bp, Gossypium hirsutum
  Clone ID: GOSHI-09MAY01-C138_7
tcgcctaatttacttcattttgcgggtctgcggttgatattttactacctactccaacagtttctcaacgcagctgtacagtgtggaaacaaagggatactaattgttaataatataaaaaaaaaacgtcaaagggaaaaagatgaagctgcgtgctcatccaacagaacgctattggaggcggcgggggggagttgcagagctctatttcggtttcagttatggttacggatcggagagagactatggtctgcccaaaaccacgtcgtttgggtctcttaaacgcctctttcaacgaccagccagttcggtccctcagatggcaacttagccatcaaactgagctttgtgattcgaaagcagggagtgatattttggatatgattcttacaaagggtggttgtagagcagaacaagtagcgtcgtcgcccccatttttttgtgggtcgccgccgagtagagtagctaacccattaatacaggatgctcgatttggggatgagaagatggtcaacccgccgtctccaaatccgcctcctccttcgtctccgtcatcatcttcaaggaaaggagggtgtattcgggccaattttggtaacaaaccagcagtgagagtggaggggtttgattgttttgcactggcttagaacccatttctatcaacaaaagagtacatagataaaacaagaggagctaccaaaacagagaagggaattttgaaattgtaagtgactgaagagaaaaaagcaaagaaccctttgttagtgtaaatatatggataaagggttgtttgtatgtaatgaaaaaagaacttggtgtcttgtaagtatgcgcgagttagttgacttcaaatatgggggaggctctccattaatctcttaatttgtcttgcctgttttttttttacttctactttcaaaaacttattttttta

SEQ ID NO: 19955 - DNA, 495 bp, Gossypium hirsutum
  Clone ID: GOSHI-09MAY01-C138_6
cagctatgaccatgcataagccaagctcgaaattaaccctcactaaaggaacaaaagctggagctcacggtgcggccgctctagaactagtggatcccccgggctgcagtgaccctcttgttccggagattgctcacatgtataagtccgttcgggccaagtatgaagccactgctcgtagctggacccagaagtatgccatggggatgacagtggttggtgtgtaatacctatcagctttcttatgtgttttggggaaggcaaggaggtgttttttcttaaagtaacttgccattgtgctttggatatgggaaagatatggaacattctttttatttatttcgtgctttataacttgtgtgaaacccttgtttcgttcaatttcaaagtcgctgtgaaaccctttgtttcggtcaaatgtaacaaaaaagtctttagttctaaaccaactgaagtcaaaaccgcaaaggctgctgaatcagctaaataatcagc

SEQ ID NO: 19956 - DNA, 661 bp, Gossypium hirsutum
  Clone ID: GOSHI-09MAY01-C138_5
cccacgcgtccgcggacgcgtcgattttaaaaaaaatcagatctgcagaaatggcaacttttgggtttctcaccattgcttttttcttagtttttgaactcaccttcgccacagattcgccggcgcctgctccctcgctcggtgcagacacatcaccgctacttgctcctactccggttacgggatctccggactcggcaccgttaatctcaccggtgatgcctgcttcgcctccggcgccaatcgcgccgtccccatcagatctggcagaaggagagtcatcgccttcaagttctcctgctccttcaccgggcgatgcgagtgatatcaaccacagcaacatcaatgcagaggaaagcgaaaacaagactggtggtggcggaggactgaacggaggaaaaaaaagcaggaatcgtggtggcggtggtggcagcggcgtgtttgggtggcttcggtggattgatttacaggaagagacaggcctatatcaggagatctcagtacggatatgccgcgaggagagaaatcctgtgaagaagattagacgattgcagatttaaaaaatgattataagcggttatacattattacatgcattcggttttaatttgttgtagaaatgattacttgacaattgaaatttattatctttgattctttg

SEQ ID NO: 19957 - DNA, 593 bp, Gossypium hirsutum
  Clone ID: GOSHI-09MAY01-C138_4
tttttctcccacgcgcgagctttgaagtgcagaatcaagggattgtgggtggagaagaagcggtgacggatctaacttggaactccgttttctcttcttaccgctattcccgacctatctctaaccccctcaatttctctcaggtagatattccttgtgttcaagcgtcttcatggcttcaaagcggattttgaaagaacttaaggatttgcagaaggatccaccaacttcctgtagtgcaggtcctgtagcggaagacatgtttcattggcaagcaacaattatgggcccctccgatagcccttttgcaggaggtgtgtttttggttaatattcattttcctccggattatccattcaagcctcctaaggttgcatttaggaccaaggtcttccatccaaacatcaacagcaatgggagcatttgtcttgatatcctaaaagaacagtggagccctgcactgaccatttccaaggttctgctttctatttgctcgttgctgacggatccaaaccctgatgatcgttgtcggaatgctaattcaaactgtggccagtcaactctgccgagtgaccaaaatcatggtgtatata

SEQ ID NO: 19958 - DNA, 782 bp, Gossypium hirsutum
  Clone ID: GOSHI-09MAY01-C138_3
cgtccaatcaagggattgccggtggagacgacgcgctcgttgagggccaaggaaggaaggaagaagagagagagagagataaaaaggagaatctgcttcaaagtttcaaactttcccgtctcatatctaatccccaatttctctcttctgctctaggttccttcctgtcctcttaggattcttgtggtctgttcaaagcgtcatggcctcgaagcggattttgaaggaactcaaggatttgcaaaaggatccacccacttcttgcagtgcaggacctgtagctgaagacatgtttcattggcaagcaacaatcatgggcccttccgatagcccttatgcgggaggtgtatttttagttagtattcattttcctccagattatcctttcaagccccctaaggttgcatttaggaccaaggttttccatccaaacatcaatagcaatgggagcatttgtcttgatatcctaaaagaacagtggagtccagccctaaccatttccaaggttctgctctcgatctgctcgttgttgactgatccaaaccctgatgacccacttgttccggagattgcacacatgtataagactgatcgggcaaagtacgaagcgacagcatgtggctggacccagaagtatgccatgggatgatggtggttagtgtgtaatacgtattggctttggtacgatgccatatatgtgttaaaaccttcatatattttgatttggatttgaattacgtggacatcttatatgaaaggcatttcctaaaactttcatgctt

SEQ ID NO: 19959 - DNA, 952 bp, Gossypium hirsutum
  Clone ID: GOSHI-09MAY01-C138_2
gttttgaatctagggatttgcgggtggagaagacgagagctcatctctctgcttcaaagtttgttcctttattcctttcaaaccctttcctttttttaacttgatttcattttctcagatttgttctttttctctctctctctctctctccaggctcctgtccaggtagaattctcttcttcctttgcgttgtgttctttgttgttcagtcgccgtcgcgtcggagcggattttgaaggaactcaagggatttgcagaaagatccacccacttcttgcagtgctggtccagtagctgaagacatgtttcattggcaagcaacaatcatgggaccctcagatagcccttatgctggaggtctgtttttagttactatccatttccctccagattatcctttcaagcctcctaaggtcgcgtttaggaccaaggtcttccatcccaacatcaacagcaatggaagcatttgtcttgatatcctcaaagaacaatggagccctgcactaaccatttccaaggttctgctctcaatctgctcgttgctgaccgatccaaaccctgatgaccctcttgttccggagattgctcacatgtataagactgatcgggcaaagtatgaagccactgctcgtagctggacccagaagtatgccatgggatgacagttgttggtgtgtaatatgtatcagctttcttatgttgccaactgtgtcgaaccattttatgttttcttttggggaagggagggggtgttttttcttaaaggaatttgtcattgtgctttggatatgggaagatatggacattctttttatttattccgcgctttataacttgtgtgaaacccttgtttcgttctcgaagtcgctgtgaaaccctttgtttcgttcaatgtaacaaaaaagtctttggttctttcgctctacttaattctgggtattgaactttgtgc

SEQ ID NO: 19960 - DNA, 914 bp, Gossypium hirsutum
  Clone ID: GOSHI-09MAY01-C138_1
cccacgcgtccgaagatccccacccctccccccccccccccctgagttggaagctgagttttgaatctagggatttgcgggtggagaagacgagagctcatctctctgcttcaaagctcctgtccaggtagaattctcttcttcctttgcgttgtgttctttgttgttcaatcgccatggcttcaaagcggattttgaaggaactcaaggatttgcagaaagatccacccacttcttgcagtgctggtccagtagctgaagacatgtttcattggcaagcaacaatcatgggaccctcagatagcccttatgctggaggtgtgtttttagttactatccatttccctccagattatcctttcaagcctcctaaggtcgcgtttaggaccaaggtcttccatcccaacatcaacagcaatggaagcatttgtcttgatatcctcaaagaacaatggagccctgcactaaccatttccaaggttctgctctcaatctgctcgttgctgaccgatccaaaccctgatgaccctcttgttccggagattgctcacatgtataagactgatcgggccaagtatgaagccactgctcgtagctggacccagaagtatgccatgggatgacagtggttggtgtgtaatacctatcagctttcttatgtgttttggggaaggaagggggtgttttttcttaaagtaacttgtcattgtgctttggatatgggaaagatatggaacattctttttatttatttcgtgctttataacttgtgtgaaacccttgtttcgttcaatgtcaaagttgctgtggaaccctttgtttcgttcaatgtaacaaaaaagtctttagttctccttataaacattaatctccctccctattcaaattttttataaaactgggccggccgcttt

SEQ ID NO: 19961 - DNA, 519 bp, Gossypium hirsutum
  Clone ID: uC-gsflnu33B019d08b1
ctcacgcgtccgcccacgcgtccgcccacgcgtccgggcttacggtggatacctaggcacccagagacgaggaagggcgtagtaagcgacgaaatgcttcggggagttgaaaataagcgtagatccggagattcccgaataggtcaacctttcgaactgctgctgaatccagggctaaaaccattgatctctgcaacaatccaatgacaaaagaaccaaaacttcagggtgctagaagaatagtttctgagtggacagatcttgactttgaggctagaaaattcactgccaaaatattaggtgatgaactggttagtgtgtaatatacctatgggttttgtatgtcgtcaaatgttttacctttagcaggcatgttttcttgaagggaacttgtcattgtgttttcatactttggatcagtgttgaaatattgtctttggtccactctactttctaagtgcgtactgaatgggctgacttattgtataagagatatatgccacgttcttttgttttttt

SEQ ID NO: 19962 - DNA, 445 bp, Gossypium hirsutum
  unsure (1)..(445): unsure at all n locations
  Clone ID: uC-gsflmaxxa060e12b1
ggacacctaagcaaaacaaaatgttcgagaaggctctggctgaatttgaccaggacactcctgagcgctggattaatattgctaaagctgtgggtggaaagtcagctgaggaagtcaagcagcactatgagatcctagtcagggatgtcaaagagatcgagtctggacggtacccttatccatatccaagtgggagcagcaactaaagcagtgagttatcagcttaccgtatccaaagggtaatgtgctagtgactttgtaccactcagtacccaacctaataaataatcagctaatatccaaaaccactttatatgatcattcacagctctattcacttgtgtgaaacccttgtttcgttcaatttcaaagtcgctgtgaaaccctttgtttcgttcaatgtaacanaaaagtctttagttctaaaaaaaaaaaaaccaaattt

SEQ ID NO: 19963 - DNA, 684 bp, Gossypium hirsutum
  Clone ID: AI054602.1
gaaagaacttaaggatttgcagaaggatccaccaacttcctgtagtgcaggtcctgtagcagaagacatgtttcattggcaagcaacaattatgggcccctccgatagcccttttgcaggaggtgtgtttttggttaatattcattttcctccggattatccattcaagcctcctaaggtaatatattgcacccctttgtgatatgtgtgaaaaaatgctgtttttagttatgatatactcttataatggataatgctggataatgctgattctgttgtctaagttgtatttatgatctatgtcttccattcaaacatcaattgtaatgagagcatttgtcttgatatcctataataacatttgagccctgcactgaccattcttaggtttgaccattcctaatatatttattggtattctatacattttacattttaaattcatgtttggctgtctatggattgttttctttcatgcatgtacttaacttttacttaattgttctgtataaaatatgttttttattcatcaatttattctatatatttattatgttatatatcttgtaatcttattttatcttaatgtgttattatacttcacatatataatcaaattatttattattattaaatatttacattttataattttttgtagataaatatgtatatatctctatt

SEQ ID NO: 19964 - DNA, 407 bp, Gossypium hirsutum
  Clone ID: LIB3166-017-P1-K1-E4
aaaggcttacggtggatacctaggcacccagagtacgaggaagggcgtagtaagcgacgaaatgcttcggggagttgaaaataagcgtagatccggagattcccgaataagtcatcgccttcaagttctcctgctccttcaccgggcgatgcgagtgatatcaaccacagcaacatcaatgcagaggaaagcgaaaacaagactggtggtggcggaggactgaacggaggaaaaaaagcaggaatcgtggtggcggtggtggcagcggcgtgtttggttggcttcggtggattgatttacaagaagagacaagacaatatcaggagatctcagtacggatatgccgcgaggagagaaatcctgtgaagaagattagacgattgcagatttaaaaaatgattataagc

SEQ ID NO: 19965 - DNA, 421 bp, Gossypium hirsutum
  Clone ID: LIB3493-015-P1-M1-H7
cggacgcgtgggtctagatatcctcaaagaacaatggagccctgcactaaccatttacaaggttctgctctcaatctgctcactgctgaccgagccaaaccctgatgaccctcttggtccggagatggctcacatgtataagaccgatcggtccatgtatgaagccactgcttcgtgctggacccagaagtatgcgatgggatgacagttggtggcgtgtcatacgtatcgtctggctcatgttgtcaacatgatcgaaccattgcatgttatcttttgaggaagggagctttggttcacatggaagcagaaaaaaagagggcaattgttgaagccaaacaaagagaacatgttttcaaggctggggaaatggctgcaaaataccgtgcaacccgacaaacctccaaaaaaggtcttgggt

SEQ ID NO: 19966 - DNA, 428 bp, Gossypium hirsutum
  Clone ID: LIB3120-001-Q1-K1-F11
gcttacggtggatacctatgcacccagagactaggaatggcgtagtaagcgactaaatgctgcagcgggttgaaaataagcgtagatccggagattcccgaataggtcaacctttcgaactgctgctgaatccatgggcagacaagagacttgtgttataggatttttgatagacaggattcgacaaatggacttagtcataacataaataacatataaatggattgtgcaaaaatccatagtggtttttttattatttattctagttattctagtaaaataaaaaataaatggaaataaaaagaaataggaagaaagaaaaagaatacaataatattttgattctatatcataggaacggaaataggacttcttccgcttctgattgttgattcaatgcaataacaagattattttgttacaacaag

SEQ ID NO: 19967 - DNA, 485 bp, Gossypium hirsutum
  Clone ID: LIB3584-048-P1-K2-E11
attttcgattcgcattctttagacctaactttgtcatgtgatgctctattatgtcactaacctcgggatgcttgcacttttttttttgtgataggacctgtagctgaagacatgtttcattggcaagcaacaatcatgggcccttccgatagcccttatgcgggaggtgtatttttagttagtattcattttcctccagattatcctttcaagccccctaaggtagtttgcttcacctggatcgttttattatcccttttctctgtgtgtgaaatgttgtttgagtggtacgtcctcttttcatggataatgctgccatcatgtttaggttgcatttaggaccaaggttttccatccaaacatcaatagcaatgggagcatttgtcttgatatcctaaaagaacagtggagtccagccctaaccatttccaaggtttgaccttactcctgttaaccttatggtatttcatacacatgcagaatct

SEQ ID NO: 19968 - DNA, 569 bp, Gossypium hirsutum
  unsure (1)..(569): unsure at all n locations
  Clone ID: LIB3543-010-Q1-K6-A5
ctttacttcattttctttctctgtttatattttactacctactccaacagtttctcaacgcagctgtacagttagaaacaaaggaatttaatgttatgaaatacaccggnaagaaggctacggttgaattttggtttctgttcaattaagtttctgttttatgttaaatagggatattaattgttaataatattaaaaaaaacgtcaaagggggaaaagatgaagcagcgtgccatccaacagaacgctattggaagcagctgtgaggagttgcagagctctatttcggtttcagttatggttacggatcggagagagactatggtctgcccaaaaccacgtcgtttgggtctcttaaacgcctctttcaacgaccagccagttcggtccctcagatggcaacttagccatcaaactgagctttgtgattcgaaagcagggagtgatattttggatatgattcttacaaaggatgctcgatttggggatgagaagatggtcaacccgccgtctccaaatccgcctcctccttcgtctccgtcatcatcttcaaggaaaggagggtgtat

SEQ ID NO: 19969 - DNA, 385 bp, Gossypium hirsutum
  Clone ID: uC-gsflnu33B082a12b1
gtttcaagtgctaaaatctagggatttgcgggtggagaagacgagagcccatctctctgcttcaaagctcctgtccaggtagaattctcttcttcccttgcgttgcgttctttgctgatcaatcgccacggctacacagcggattctgtgagaccaccatgttcctccacttcgcatacacaccatttcagcccttttttcgcactacttggatacgagttctatatattacaactcattttcaacccaagcctacgaaaatatcctatatagcagagattctctccctgaaaatccccatatctatgatttctcagacatatgctcggccaccaataacttccggtcgaactggttttcatcttcttcggctttcgtcttcatg

SEQ ID NO: 19970 - DNA, 336 bp, Gossypium hirsutum
  Clone ID: uC-gsflnu33B035h02b1
ctcggcccgcctgcacgttccggtcacttacttgctggatcgacccacgcgtttttttacacgtacggatttgcggatggagaagacgagagctcatctctatgcttcaaagctcctgtccaggttgaattcttttacttccttgcgttgtgttctttgttgctcagtgctcatggcttcaaagcggattttgaaggaactcaaggatccgcataaagatccacccacttcttgcagtgctggtccagtagctgtagacatgtttcattgtgaagcaacaatcatgggaccctcagatagcccttatgctggaggtgtgtttttagataccaccca

SEQ ID NO: 19971 - DNA, 321 bp, Gossypium hirsutum
  Clone ID: LIB3272-007-P1-K1-A6
ggcggaatcacccgctgagtgtaatctttttaataatccgaaaaaaaaaagggggccatgattcccctggggacggtcaccccaccccgaaaagctcttcgttggaaaatcgccatggcttcaaagcggattttgaaggaactcaaggatttgcagaaagatccacccacttcttgtagtgctggtccagtagctgaagacatgtttcattggcaagcaacaatcatgggaccctcagatagcccttatgctggaggtgtgtttttagttactatccatttccctccagattatcctttcaagccttctaaggttgcgttt

SEQ ID NO: 19972 - DNA, 303 bp, Gossypium hirsutum
  Clone ID: LIB3493-013-P1-M1-E9
acgagagaacataaggtgaagaatagaggcggcaactgaattggagataaggtgagctcggtgagtagaacgtattaagatcgcgaagagcatttgaccggcaagaagaaaggattcaaagcgggtgttgaaggaactcacggatttgcagaaagatccacccacttgttggagtgctggtccagtagctgaagacatgtttcattggcaagcaacaatcatgggaccctcagatagcccttatgctggagggtgtttttagatactatccatttccctccagattatcctttcaagcctcct

SEQ ID NO: 19973 - DNA, 161 bp, Gossypium hirsutum
  Clone ID: uC-gsflmaxxa061f02b1
ggaaactgttgatggagaagagtttatgagcctcttcattgatggaaaagctgagctatatgtttcttagattaaagattgcacatttttggcttaagtctctattgagtcttttgtgctagtactagtatcaattcaaatcccatacctttttcttctgt

SEQ ID NO: 19974 - DNA, 643 bp, Gossypium hirsutum
  Clone ID: GOSHI-09MAY01-C128_3
gattctctctctttctttcgggcaatgtctttgatgtcttccagttttacttagtccttcatcttcttcttcatttcagtgtttttgggtttgttttttttcctactgttttggacaataattgaagcaagagataaccttgggggcggcggcggagggagaggaacatctctgaaattactttcacttttgccggtgggtgtaaaatgagtgcatcaaggttcatcaaatgtgtcactgttggtgacggtgccgtcggcaagacttgcatgctcatctcctacaccagcaatactttccctactgattatgtgccaactgtctttgacaactttagcgcaaatgtggttgtggacggcaacactgttaatcttggattgtgggatactgctggccaggaagactacaatagattaagacctttgagctatcgtggagcagatgtcttcttgttggcattctctctcattagcaaagccagctacgaaaatgtttctaagaaatggattccggagttgaggcattatgcacctggtgttccaattattcttgttggggactaagcttgatcttcgggatgataagcagttcttcgtagatcaccctggagcagtgcccattaccacagcccagggggaggaat

SEQ ID NO: 19975 - DNA, 997 bp, Gossypium hirsutum
  Clone ID: GOSHI-09MAY01-C128_2
aagcagatatctgtccaagagctgtctttcctttccctaatgattctctctctttctttcgggcaatgtctttgatgtcttccagttttacttagtccttcatcttcttcttcatttcagtgtttttgggtttgttttttttcctactgttttggacaataattgaagcaagagataaccttgggggcggcggcggagggataggaacatctctgaaattactttcacttttgccggtgggtgtaaaatgagtgcatcaaggttcatcaaatgtgtcactgttggtgacagtgccgtccgcaatacttgcatgctcatctcctacaccagcaatactttcccctacttgattatgttgctactgtctttgacaactttaacgcaaatgtggttgtggatggcacaaaatttacactttgattgtgggatatcgctggccacgattattatctatcattatcaactttaacctaatcgtggagcaaaattcttcttgttagcatttcctctcattaccaaatccatctatcaaaatttttctaacaaattgattccggaattgatgcattacgctcccggtgttccaattattcttgttgggactaagcttgatcttcgggatgattagcagttcttcatagatcaccctggtgcggtgcccattaccacagcacagggtgaggaattgagaaagctaattggagcgcctttttacattgagtgtagttcaaaaacacaacagaatgtgaaagcggtctttgatgcggccatcaaagtagttctccagcctccaaagaagaagaagaaaaagaagagaaaggcacaaaaagcttgctcaatattgtgatcatgcaaagaagtgatattggtgccagataccatgaacaattagccatttaatctgttagtctctcaccatatctattatctcttctctctgagaaaatagctccttttggtatgttatctgaactgacagaactagggaactttctac

SEQ ID NO: 19976 - DNA, 1079 bp, Gossypium hirsutum
  Clone ID: GOSHI-09MAY01-C128_1
cacgcgtggcgtaagtatgagtgcttccaggttcataaaatgcgtcacggtcggtgacggtgccgtcggcaagacttgtctgctcatttcctacactagcaatactttccctaccgattatgtgccaactgtctttgacaactttagtgctaatgtggttgtggatgggaacactgttaatctgggattgtgggatactgctgccaggaagaagacgaatacgattaaaccattgggctatccggcccccgcggccgccctccccgcccgctctctcattagcaaagccagctacgaaaatgttgctaagaaatggattccggagttgaggcattatgcacccggtgttccaattattcttgttgggactaagcttgatcttcgggatgataagcagttcttcgtagatcaccctggagcagtgcccattaccacagcccagggggaggaattaaggaagctgattggagcccctgtttacattgaatgtagttcaaagacacaacagaatgtgaaagcggtctttgatgcggccatcaaagtggttctccagccaccaaagcagaagaagaaaaagaagagaaagtcacaaaaagcctgctcgatattgtgatcacgtgatgaacagttatggatgccggggtggatatcatggcccatttagccacataaatctgttagtctctcaccatgtctatcatctctttctcaccttgagaaaatagctccttttggtttgtagtctgaactaacagaactaggatctttcctattatcatctaaatttgtgctttttcttttctcttcttttctttttttctctcatggattgtcttttgaatttgtatattgatggcccttttggtgttctcacactttccttcagttactttgggtttagatatgtttgatctgttaactgaaacatggagaaattgtttcctattgtttcttgtgatgtaatctgatctagtatgttttaatgaactaaaaaaaaaaaaataaaaatattaaaaaaataataaaaaaaaatacaaaattttaaacaattaaccccatatatttacattttttatcac

SEQ ID NO: 19977 - DNA, 523 bp, Gossypium hirsutum
  Clone ID: LIB3585-050-P1-K1-A7
gtttctttcggacaatgtctttgatgtcttccagttttacttagtacttcgtcttcttcttcttctttcttcatctggatcttcatcttcatttcagtgtttttgggtttgtttttttcctattgtttgggacaataattgaagcaagagataaccttggggggggggcggcggagggagaggaacatctctgaaattactttcacttttgccggcgggtgcaaaatgagtgcatcaaggttcatcaaatgtgtcactgttggtgacggtgccgtcggcaagacttgcatgctcatctcctacaccagcaatactttccctactgattatgtgccaactgtctttgacaactttagcgcaaatgtggttgtggacggcaacactgttaatcttggattgtgggatactgctggccaggaagactacaatagattaagacctttgagctatcgtggagcagatgtcttcttgttggcattctctctcattagcaaagcccgctacgaaaacgtttctaagaaat

SEQ ID NO: 19978 - DNA, 373 bp, Gossypium hirsutum
  Clone ID: LIB3197-029-Q1-M1-D7
cccacgcgtccgtctgtctgggtttagacaacaaagagcggaagagaaatagcggactcaacttctgcggatcacgcgtggcgtaagtatgagtgcttccaggttcataaaatgcgtcacggtcggtgacggtgccgtcggcaagacttgtctgctcatttcctacactagcaatactttccctaccgattatgtgccaactgtctttgacaactttagtgctaatgtggttgtggatgggaacactgttaatctgggattgtgggatactgctggacaggaagattacaatagattaagaccattgagctatcgtggagcagatgtcttcttgctggcattttctctcattagcaaagctagctatgaaaat

SEQ ID NO: 19979 - DNA, 364 bp, Gossypium hirsutum
  Clone ID: LIB3146-022-Q1-K1-C2
cccacgcgtccgcccacgcgtccgcccacgcgtccgctcaccatttttatcatctcttggtcggcgttgagaaaatagctccttttggtttgtagtctgtactaacggaactaggatctttcctataatcatctaaatttgtgctttttcttttctttttttctctcatggattgtcttttgaatttgtatattgatggccctttgtgttctcacactttccttcaactactttggatttagatatgtttgatctgttaactgaaacatggagaaattgcttcctattgtttcttgtgatgtaatctgatctagtatgttttaatgaactaatattatatttgtggttttggagttaaacaaaa

SEQ ID NO: 19980 - DNA, 790 bp, Gossypium hirsutum
  Clone ID: GOSHI-09MAY01-C348_1
tgccgccgccccgcgcccgcccaagagctgttctttttcaaaccctagcctgtatctgggagccctttccaatggcttcgcgtcgactcctctcttctctcctccgctccacttctcgccgatctctctccaaatctcccagccctacccctcgcctcccttccccttcccccacgcgccgcccttttccttgcccctactttctctcacgcgatgctgagtactctacatctgcggctgctgccgcttctgctccatcgcagcctcctcccgctaagaagggcggaaaaggtaagatcactgatgagttcactggtgctggagccatcggtcaggtttgtcaagtgatcggtgccgtcgtcgatgttagattcgatgaaggtttgcctccgattttgacggcgcttgaagtgatggaccactcgatccggcttgtgttggaagtggctcagcacttgggtgaaaacatggttaggaccattgctatggatggaacggagggactcgtcagagggcagccggttctcaacaccggatctcctatcactgtgcctgtcggtagagctactcttggtcgtatcataaatgtcattggagagcctattgacgagaaaggcgaactcaaaaccgaccacttcttgcccattcacagagaagcaccagcctttgtcgatcaagctactgaacaacagatccttgtcactggtattaagggtgtggatctccttgcaccatatcaaagaggagggaagattggactttttggtggtgctggtgtaaggaagacagt

SEQ ID NO: 19981 - DNA, 425 bp, Gossypium hirsutum
  Clone ID: LIB3197-041-Q1-M1-A3
tcggacacccgtacgatgggttcagcgggcgtaagagtcatctcgtatcgtgcgtggagttcgtgtgcgcatctgtctgcaaatgaaaaagcggtagacctagtgtcgcttgcgcttggtcgaactgataaccttatcatggccctatacgttgaatatcacgcgaggctagaggacaatacatgcgcggctggtgccgattatgcttcatcgcagcctgctacaggtaagaatggcaggacaggtcacagcagtgataagttcaatggcgctggatccatgcgccaggtttgagcaagtgatcgcggccgaggtcgatcgttagattcaatgaaggttggcctccgattatgacggcgcttgaagcgatggaccactcgatccggattgagctggaagtggctcagcacttgggtgaaaacatg

SEQ ID NO: 19982 - DNA, 388 bp, Gossypium hirsutum
  Clone ID: uC-gsflmaxxa106a07b1
gtgcaatccttggtcgtatcataaatgacattggagagcctattgtcgagaaaggcgaactcaaaaccgaccacttttcgcccagacacagagaagcaccagcctttgtcgaacatgctactgaacaacagatccttgtcactggtattaaggctggggcagtgctggaaccatatgacggaggtgcgatccttaaaaacgtcaagtagaaaacgtcaactcatgaagtgatttataccccacgctcactacttaaagtaacctatcggctaaactcaaaatgatgtgacgcgacgtcgatccgatacctaacctaacacaaaatcttgtagatagactggtccaacattaataagctttggttcaaattctcggaccaaaacagacc

SEQ ID NO: 19983 - DNA, 696 bp, Gossypium hirsutum
  Clone ID: GOSHI-09MAY01-C338_1
gtaaaagtcatctggaaggagactacctcaggatattcaaagctcttgtctctgctccaggtctttctattcataaggttcttgataagtggcttgaggggaaggaaaaaatctaagcagagctgagatttcatcagcaacgctcaatcttcgcaagcgccgaatgtatgggagggcattgcagctctctgagtggctggagatgaagcagcagcttgaatttaatgagaaagattatgcttctcgtcttgatttgattgccaaaatacgaggtctccagaaggcagaagactacattcagactatcccaaaatctttcagaggagagataatctacagaaccctgctggctaactgtgttgtatctaacaatctcaagaaagcagaagaggtctttaacaaaatgaaggacctagaattcccgagtactgcttttgcttgcaaccagctgttgctcctctataagaggcttgacaagaaaaaaatagctgacgtgctgttgttaatggagaaagaaaatgtcaaacctacgctctttacttatagaatcttaattgacacgaaaggtttatgtaatgacatatatgggatggatcaaattgttgagacaatgaaagctgaaggtattgaaccagacgtccagatacaatctggcctggctaagcactttgcctcatcaggccaaattgaaaaagc

SEQ ID NO: 19984 - DNA, 499 bp, Gossypium hirsutum
  Clone ID: GOSHI-09MAY01-C328_2
cccacgcgtccgcccacgcgtccgcccacgcgtccgcccacgcgtccgctcaattacacccaaacaagcaaagaagtccaagatagatatcatgggccgtggagttagcagcggtgggggacagagttctttgggttacctttttgggagtggagaatcccccaaacccaccccgaaacatgtcagtcctagcactggcaccgtcaatgaagttcctcagacacagaatgaggttgtcaaggaaaccccaccaccagctgttgtccctaaggatattcctgcaggcattcctgggaacaatgcaaacaattatttccgtgctgatggccagaactgtggcaactttcttacggatcggcctcccattcagatgatgttaacaaagctgtcacatagaaacattgatgaagaattgttttatacatgatttatctgaaggatcggcctacaacaaaggttcatgcagcacctggcggaggatcttccctggaataccttt

SEQ ID NO: 19985 - DNA, 685 bp, Gossypium hirsutum
  Clone ID: GOSHI-09MAY01-C328_1
ctgacagcgagataatgtcattcctatgactggagaaaagcctctgcccttcgcttcggaggctgagatctgatctcaattacacccaaacaagcaaagaagtccaagatagatatcatgggccgtggagttagcagcggtgggggacagagttctttgggttacctttttgggagtggagaatcccccaaacccaccccgaaacatgtcagtcctagcactggcaccgtcaatgaagttcctcagacacagaatgaggttgtcaaggaaaccccaccaccagctgttgtccctaaggatattcctgcaggcattcctgggaacaatgcaaacaattatttccgtgctgatggccagaactgtggcaactttcttacggatcggcctacaacaaaggttcatgcagcacctggcggaggatcttccctggattacctgtttggcggcaaccctaagtgaggcattgaatcttaaatcttggaactgcttataattgttgacctaatgccccagaagtttataggataagtaatattaccctctattgttgaatgtgaagacatttagttttagtgcagtgtaatagtgctgggcaaatctcttactttgtcctatgtgggtcttcgcaaaataagcaactgcttactgtcaattggacaaacaaacttatgctatactgattaaa

SEQ ID NO: 19986 - DNA, 675 bp, Gossypium hirsutum
  Clone ID: GOSHI-09MAY01-C288_1
tttaaagtctgtcatagtgtcttcagtcttcccatccggtcgacgtcatccttgaaaaaaaaaagttcaatctagggaacacttctttgcaacctatcgacgtcatccttgaaaaaaaaaaaggatcggtgttgccttctgctcgtgcaataggcgggtttgattagtgccgcttttctgtggattactatgagcttcaccggtccttcggttggccctggtggtagaactgctagaagggcacttgagtttggaagaacctatgtggtcaggccaaaagtaggcaccaagctaccatagtttggctacatggtcttggtgataatggttcgagctggtcccagctcctggagacgctccctcttccaaatattaaatggatatgtccaactgcgcctactcaaccaataagcatatttggtggctttccatcaactgcttggttcaatgtcggcgagctttcagaagatgctcctgatgatatagagggtttggatgctgttgcagcacatgttgcaaacttgctggcagcggagcctgctgacattaaacttggtgttggaggcttcagtatggggtgcagctacctcactatactctgcaacctgttttgctcatggaaaatacggaaatggaaacacatatcctgccaatttgagcgcagttgtaggactt

SEQ ID NO: 19987 - DNA, 571 bp, Gossypium hirsutum
  Clone ID: LIB3582-023-P1-K1-H4
cttgtcgacgtatcacttgaaaaggatcagttcagccttgtgctactgcaatagccgggtttagtcagtgctccttttgggtgggcgaccatgagcttcacaggttcttctgttggtcctggtggtggaaccgttagaagagcacttgaatttggaagaacctatgtggtcaggcccaaagctggtcccagctcctggagactctccctcttccaaatattaaatggatatgcccaactgcccctactcagccaataactatttttggtggattcccgtcaactgcttggtttgatgtgggagacatttcagaagatgctgctgatgatattgagggtttggatgctgctgcagcacatgttgcaaatttattgtcaacagagcctgctgacattaaacttggtgttggaggcttcagcatgggtgcagctacctccttatactctgcaacttgttttactcatggaaaatatgaaaatggcaatccatatcctgccaaattgagtgcagttgtaggacttagcggatggcttccatgttcaaagactttgaaaaacaaaataggacagga

SEQ ID NO: 19988 - DNA, 529 bp, Gossypium hirsutum
  Clone ID: LIB3585-056-P1-K1-A10
cccacgcgtccggaggatttatcgatgaaagaaagagaaaaaaagaaacccaaaaagttcggccttttggaaattggaaccaaaaacaggagaattttttaaataaataattgtttatctatagctttcggagtcttcactcttcacatcttgtcgacgtatcacttgaaaaggatcagttcagccttgagctactgcaatagccgggtttaatcagtgctccttttgggtgggcgaccatgagcttcacaggttcttctgttggtcctggtggtggaaccgttagaagagcacttgaatttggaagaacctatgtggtcaggtccaaagggaggcatcaggcgacaatagtttggctacatggccttggtgataatggttcgagctggtcccagctcctggagactcttcctcttccaaatattaaatggatatgcccaactgcccctactcaacctataactgtttttggtggattcctgtcaactggttggtttgatgtgggaaacattttaaaagatgctgttga

SEQ ID NO: 19989 - DNA, 537 bp, Gossypium hirsutum
  Clone ID: GOSHI-09MAY01-C248_2
ggttggtataactattgctgctcgcaagtatgattttaacaccgcaatgcccttccatacatcagatatcttgaatctccaacctgtagtgaagcattcagttcccgtatgttcagaagccaaagatcttgtagagatgggaaaggtccaactagttgaaggcatgcttactgaagcgtacacaatgttttcagaggctttttcaatacttcaacaggtcactggaccaatgcaccgggaggttgccaattgttgtcggtaccttgctatggttctgtatcatgcaggagatatggctggggcgataatgcaacagcacaaagaactaattataaatgaacgttgcttgggtttggaccaccctgatactgctcatagttatggcaatatggcccttttctaccatggcctgaaccagacagagctagctctacgacacatgtccagggcactgcttttgctaagcctatcttctggcccagatcatcctgatgttgctgcaactttcataaatgttgctatgatgtatcaagatat

SEQ ID NO: 19990 - DNA, 1300 bp, Gossypium hirsutum
  Clone ID: GOSHI-09MAY01-C248_1
cccacgcgtccgatgggatctttgttctaatgagattgttgtccggtcagcaaagcacatcttgaaggatgttctgagagatacagaagatcacgatctgggtcctgcaatctcacattttttgagcggtttcgttggaagttgccaatctgttgctgcaaaattgacttctagctcacagtccaaaaaccataagaaagagcaagcaagtcatcactcatcaggcaagacgtctaagggacatgctagatggaagggtaaaacatctgcgaggaagaatatttcctcttatatgaatgtcagctctgaaagtttatggtctgaaattcagaaatttgcaaagctgaaatatcagtttgagttaccagaggatgcaagattacgggtgaagaaaatttctgtcttacgcaatatgtgtcaaaaggttggtataactattgctgctcgcaagtatgattttaacaccgcaatgcccttccatacatcagatatcttgaatctccaacctgtagtgaagcattcagttcccgtatgttcagaagccaaagatcttgtagagatgggaaaggtccaactagttgaagtaagcattttaaaatcagaaacagaccctatcaagctaaagggcatgcttactgaagcgtacaccgcgtccgcggacgcgtgggcaatacgtcaacaggtcactggaccagggcaccgggaggttgccaattgttgtcggtaccttgctatggttctgtatcatgcaggagatatggctggggccataatgcagcagcacaaagaactaattataaatgaacgttgcttgggtttggaccaccctgatactgctcatagttatggcaatatggcccttttctaccatggcctgaaccagactgagctagcactacgacacatgtccagggcactgcttttgctaagcctatcttctggcccagatcatcctgatgttgctgcaactttcataaatgttgctatgatgtatcaagatattgggaagatgaatacagcacttcgttatctgcaagaggccttgaaaaagaatgaaaggttgcttggtgaggaacatattcaaacagctgtgtgctatcatgcgcttgcaattgcgttcaattgtatgggtgccttcaaactttcacaccagcatgaaaagaaaacatatgacattctcgtaaaacagcttggtgaggaggacacaagaacaagagactcccagaactggatgaagacatttaagatgcgtgaacttcagttgaatgctcaaaagcaaaaaggtcaagctttaaatgct

SEQ ID NO: 19991 - DNA, 1426 bp, Gossypium hirsutum
  Clone ID: GOSHI-09MAY01-C278_1
cccattcgtccgtttcagttttggcgggaggatgggggagagtgatctctgcgaagaatccatggcgggcgattcagagatgaacccagagcaggtagaagaagagttcagcgtatggaagaagaacacccctttcctctacgatctcgtcatttctcaccctctcgaatggccttctttgactgtccattgggttccttcttctcccactccttacggacctgaccctacttttaacgttcacaaactcgtcctcggaactcacaccagcggcggcgcccccgattttctaatgatcgccgacgcagttctccccactctcgcctctgaatccaatatcgctgctaaaaatgatgacccagttatccctaaggttgagataacacagaaaatgcgtgttgatggggaagtcaacagggctagatgtatgcctcaaaacccggttattatcggcgcaaagaccagtggctccgacgtttttcgtgtttgattatgccaagcaggctgcagctaaagagcaggagggtgactgtgttgctgatttgaggttgaggggtcatgaaaaggaagggtatggattatcatggagtccatttaaggagggttatcttttgagtggttcacaagaccataagatatgcctttgggacttgtcttcttggcctcaagataaggttcttgatgcaacccatgtttatgaggcccatgagagtgtggttgaagatgtgtcatggcatttgaagaatgagaatatatttggttcttctggtgatgattgtatgttaatgatctgggacttgcgcaccaaccaacccgcgcgtccggttaaagctcacgacagagagatcaattatttgtcgttcaatccttataatgagtgggttctggctacagcatcgtccgactccaccgtaggtttgtttgatgtacgaaagctgactgtacctttgcatgttttaagcagccacagtggagaggtcttccaggtagaatgggatcctaatcacgagacagtgctggcatcttctggtgatgataggagattgatgatttgggaccttaacaggattggagaagagcaattagaaatcgaattagatgccgatgatggccctcctgaacttctcttttctcatggaggccataaagctaagatttcagatttctcgtggaacaaaaatgagccatgggtgatttctagtgtagctgaagacaacacacttcaggtgtggcaattggcagagagtatatatcgagacgaggatgacactcaaactgccgaagaccatccatagtccatagaagttggatttagagttttaaggatatgacctttttaagtaagatcattgtgagtttataataatgttttgtatgtggacacgctttatgagtcttttaacatgtaacttaatatttcaaacct

SEQ ID NO: 19992 - DNA, 540 bp, Gossypium hirsutum
  unsure (1)..(540): unsure at all n locations
  Clone ID: LIB3582-023-P1-K1-F1
aaccccatgggcactctcagcaaactcaaattggcagaacactttctcaaacttttacatgtggttttcccaaaacctaacccacgacctcaatcctcctcttgttttgagccatcgcttccaccgcaccaggagggcccatattggacagtttccggatgatcgttcgagaatcaccttcaacctcaatctccctcaacccaagtggtaacctcagcttcagtacctgaagacacgctactgcttctgcagaaaaaacagacggtatgttcaagttcatctccgttttacaacagataatctctgctttactattacaaatcactaccccagagcacgactctttggtgtggttgttgaaagctgtgtcaaagttcactttcaatctggatccatcggcgcagaccatctgtcaacacagatcccgtcttcaggtatagcactttttagatcatcaagttcctttaaatatacttgcacaaaactngcaatctgactgccagtttagtttaccccatcatgaatgaatttgttccgagc

SEQ ID NO: 19993 - DNA, 434 bp, Gossypium hirsutum
  Clone ID: LIB3135-018-Q1-K1-E4
tcgcccactcgttcgaccacgcgtccgatctcttcttacccaaacctcacccacgacctccatcctcctcctgtcttcagccatcgcctccaccgcaccaagaggtaccatatttgtcagtttcctgatgatcgttcgagaatcaccttcaacctcaatctccctcaacccaagttgtaacctcagcttcagtacctgaagacacgctactgcttctgcagaaaaaacagacgagcacgactctttggtgtggttgttgaaagctgtgtcaaagttcactttcaatctggatccatcggcgcagaccatctgtcaacacagatccgtcttccaggtatagcactttttagatcatcaagttcctttaaatatacttgcacaaaacttgcaatctgactgccagtttagtttaccccatcatgaatgaatttgtt

SEQ ID NO: 19994 - DNA, 358 bp, Gossypium hirsutum
  Clone ID: LIB3196-018-P1-M1-H5
tctcagcaaaatcaaaattgcagaaaactttctccaacttcttcatctcttcttccccaaacctcacccacgacctccatcctcctcctgtcttcagccatcgcctccaccgcaccagcaggtaccatatttgtcagtttcctgatgatccttcgagaatcaccttcaacctcaatctccctccacccaagctgtaaccccagcttcagtgcctgaagacacgctactgcttctgcagaaaaaacagacgctacgtcaaagttcactttcaatctggatcctatcggcgcagaccatctgtcaacacagatccgtcttccagcgcagacaatcattctatagaaagccatgggtctac

SEQ ID NO: 19995 - DNA, 979 bp, Gossypium hirsutum
  Clone ID: GOSHI-09MAY01-C218_1
ctcacgcccattcgttttccatcgtctgtcttgcgtggctcggaacatcgtcttccaggtaagaagcttctccagaactcaaacattcctttgctaaaagatgggctaattgattttccgagcgattgatatgttggattcgaatgaaagaaaacctgttcatctcctgtttaatgttgcgtatataagcgcttatttcagatctgtcatgtatgttggtgttgcatttctttactattgaaagggagtctcccactatgattatttctgaaaaacccatttctgaacttgtttttattgcccataaacacgcgagtgcttctgctgcaaacgcggtacccacctcagcatgcaggatcgtccatgaaaataagacttttccttgattgcttttagcaacaattcccgtttccgatctggaattcccctcatcaaaggccgcgtcaaaattgattttgattcttccttcgcttggcggctcccctctccctccccctcttctcctccacagtgccacacagagaactcgtcttctaggagcggaacagccgttgaaagcccgccacgaaagactggtcaacattctcgacatcaatactgcatcttggacataatagatttgacacaagtcgtttataatacaaatttgaaaaaataggaatatagttctttgaaattcgccaaattgttttagccaggagttctgaactccaaagtttcttgtagaaatctttagctttggtttgtaattcgtttaaagtagtaggattatcattttgtaatagtttgtaggcgctccgcacagggaaatcccccgaaggttcccccctctatatcaacatatcctcatgaggagtactggccaaagttattcgcaaaattctgtctgcatcagcacgcgaaaaggtatccagaatttgatcccttctccattctctagtcttactattaattaagggttagttctttattacttttg

SEQ ID NO: 19996 - DNA, 367 bp, Gossypium hirsutum
  Clone ID: LIB3197-019-Q1-M1-B5
cttgtttttattgcccataaacacgcgagtgcgttctgctggaaacgcggtacccacctcagcatgcaggatcgtccatgaaaataagacttttccttgattgcttttagcaacaattcccgtttccgatctggaattcccctcatcaaaggccgcgtcaaaattgattttgattcttccttcgcttggcgtctccacagtgccacacagagaactcgtcttctaggagcggaacagccgttgaaagcccgggcagccacgaaagactggtcaacattctcgacatcaatactggatcttggacataatagatttgacacaagtcgtttataatacaaatttgaaaaaataggaatatagttctttg

SEQ ID NO: 19997 - DNA, 640 bp, Gossypium hirsutum
  Clone ID: GOSHI-09MAY01-C208_1
cccacgcgtccgttacaatctcagttgtttatcattaccagagattcccacaggctgagaacaaattgcagaatctagttgatttagtaatgtggagagatgtatcgaaatcagcactggtgtttgggatgggaacatgcatcattatctcatcctcttacacccaagacctcaacatcagctttatttctgcaatgtcctatgtgtgtcttgtctaccttgccgccatattcctctacagatcaataatctgcaggggagttatggacgtagatgaattaagctatgtggttggagaagaagaagcattttggttacttaaattggttcttccttacttgaatgagttcctaataaaactcaaggcacttttttctggtgatcctgcaacaacaatgaagctggcagtactactgttagttttggccaggtgtggcagctctataaccatctggaaaatgactaaattgggtttttttggcgttttcattgtcccaaaagtctgctctgcttattcacaccagttaactgcgtacggaaaattttggattcgacggtttcgagatgcgtgggaatcgtgcacccataaaaatgccgtggcaatggccatcttcacactggtttggaaccaatgttcctt

SEQ ID NO: 19998 - DNA, 580 bp, Gossypium hirsutum
  Clone ID: LIB3582-047-P1-K1-D6
acaatctcagaacaaattgcagaatctagttgatttagtaatgtggagagatgtatcgaaatcagcactggtgtttgggatgggaacattcatcattatctcatcctcttacacccaagacctcaacatcagctttatttctgcaatgtcctatgtgtgtcttgtctaccttgccgccatattcctctacagatcaataatctgcaggggagttatggacgtagatgaattaagctatgtggttggagaagaagaagcattttggttacttaaattggttcttccttacttgaatgagttcctaataaaactcaaggcacttttttctggtgatcctgcaacaacaatgaagctggcagtactactgttagttttggccaggtgtggcagctctataaccatctggaaaatgactaaattgggtttttttggcgttttcattgtcccaaaagtctgctctgcttattcacaccagttaactgcgtacggtaaaatcccattcctcccatgcgataataataaatatattttgtctctatgctacattcatttcattttttaattacaattaatttctaca

SEQ ID NO: 19999 - DNA, 1209 bp, Gossypium hirsutum
  Clone ID: GOSHI-09MAY01-C228_1
tggctacttattcttttttctgtccgaattttagatccgaatctaattccacgattttctttagagttttaaatttgatctttctcttccaaaatcaattccaaaaagagagaaaatcccaccaaaaaaatggcgaattctaatgacaacaacaacgacgagcaccatgaatcgagtcctcttttgagcaaacaagtggcagaccaagatttgaaggaaaaacctagtggtaaaaaggcaaaagaagctgccgccgaggtgccagctcatccggtagttgctaccggagatgggtttgggtggacggctgatgggttgccgttggtccaccggagtgtcgtcggagaacccttgggtcgatctcaatggaactcatctctccttgcttgtcttggccgtaacgatgaattttgcagcagcgacattgaagtctgtctccttggaagcttggtcccttgtgtgctatatggaaccaatgtcgaaagacttggatctgatcccgggacatttgcaaatcactgcttgccatactcagttctttacctaatcggtaattcattttttggctggaattgccttgcaccatggttttcgtaccctactcgtactgccattcggcgaaagtttaatctcgagggaagctgcgaggcactccataggtcatgtggatgttgtggaagctgcgtagaagatgagttgcaacgtgaacaatgtgaattaacctgtgacttagcaacccatgtcttgtgccatccttgtgccgtttgtcaggaaggtcgtgagattcgtcgaaggttgcaccatccagggttcaatgctcaacctgtcttcaccatggtccctcctggcgagcaaaccatggcccgtggagcctaatttcatgttctgcccattccctaccttataactaaaggtaatctagtagctagctcaacaacattttgttgcgtgatgtctatgttgtgaaaaatatattgcgtgtaatgtgttgtggaaataaagttaaaaagcagctttatgttacattttctagtatgaaagttgattgctctgttatgggcagatcatatacattttgtgtataaatatattatgttttaaatattttatttgggtcaatttgtaaggatggtttctgttttgtgtgaattcagtctgtataatttggttaataaatggtcctcgtaaattttgaaatgttaattttca

SEQ ID NO: 20000 - DNA, 656 bp, Gossypium hirsutum
  Clone ID: AI725510.1
cggactcgtgtttgatttgaaaaataaaaaaagagtctaaaaagttgcttgttacccagcaatgatcaacgccacatatttacgtttcaagtttagatgtcaatgtttatagcttatattatggtgttgccttctgaccttctatgtcttggagtcctgggatttgggcacatgacgcagagaatgtagtaaagggatgtctaaatctctggaatcttttgctgatacaagattttcaagcttgcagtcttcaattcacaacaatatcaagttgagaaaagaaaggcagcattaagagtcagattatagacaaatccgacattaagagagaagaatgagactcatctcaggttctgcggatgaccgagacgccgaatcactgttccgcgccaaacccatctccgaaatccgcaatgtggaatccgccaccaacaaacagattcaagacaagaaggaggagctccggcagctggttggcacccgctatcgtgatctgattgactcggctgactccatcctccaaatgaaatcggcatccgaatctatttcctccaacatctcttccatccatcattctatccgctccctctctatctccgtcttggaagcgccatccccgaaactccaaaccccccctaaccctactactcgcctct

SEQ ID NO: 20001 - DNA, 623 bp, Gossypium hirsutum
  unsure (1)..(623): unsure at all n locations
  Clone ID: AI725659.1
gtataccacactttctaagtacttccagacttaaatgaattgcacggactctaaaaaattgcacccagcaatgatcaacgccacatatttacgtttcaagtttagatatcaatgtttatagcttatattatgttgttgccttctcaccttctatgtcttggagtcctgggatttgggcacatttcgcagagaatgtattaaagggatgtctaaatctctggaatattttgctgataaaagattttcaagcttgcagtcctcaattcacaacaatatcaagttgagaaaagaaaggcagcattaagagtcagattatagacaaatccgacattaagagagaagaatgagactcatatcaggttctgcggatgaccgagacgccgaatcactgttccgcgccaaacccatctccgaaatccgcaatgtggaatccgccaccaacnaacagattccagacnagaaggaagagcctccgcagctgggtgggcaccgctatcgtgaattgaatgaatccgctgactccctcctcccaatgaaatccgcatcccaatctatttcctccaacatctccttcatcccacaatcttatcggccccctccctaactcggtcctggaaagccct

SEQ ID NO: 20002 - DNA, 632 bp, Gossypium hirsutum
  Clone ID: GOSHI-09MAY01-C134973_1
ttttttttatactcaaacgtggttcttgtgtagatttaatgttgccaaaaactgcacaaattaaaaatttattacaccctacacatagatctcttgaaagtagtgtcaagaaatacagaaattacaaaatacacacctacacttctattgatatttaccaagggacattacagcaccagatctttcctcatctgatggtcgggaatgtgacattagaatatatatgacccaaacgtgaaggcaaatgaggtataccaaagaccaaacttttgctgttgcatttcttcttaagaatattgcacctgccaaaaatatagcatccaactgcttaatcgttgatccaagttgccgttttccggaacgaattttgtctttgagaacaggattcaactttgaacttgagagaccccatgttcctaattccaaatcacttgatgtggcattattcatattcgtggacttgccctcttccagtatccttgaaactgcctcaattctaaatgacaatgtcgccttttccgaggatagtgcctcaacctgagcttgtttctgaattaaatgatcagtcagcagtccaagccttcgtttcagctcaacttctacttctgttgggtcctccacagctttccttg

SEQ ID NO: 20003 - DNA, 650 bp, Gossypium hirsutum
  unsure (1)..(650): unsure at all n locations
  Clone ID: AI727517.1
gttcaagaccgttgaccagcttccaatgaatgtcggtgatccacattatgaccctctctttccctttggctttggttcaagaccgttgaccagcttccaatgaatgtcggtgatccacattatgaccctctctttccctttggctttggtttgactactaaaccaacccaccagaattaatatcattgtagagactgagtttgctgctttatattaggcatttccccttgcatggtagaaactttaaattatttttcctctacattagaggtatttatgaaccggggccaggttgggcctaaggcatcacatatcagcattttactatactgctttaattctacgaatttcttgaanaaaaaaaaaaaaaaaaaaaaaaaaaaaaaaaaaaaaaaaaaaaaaaaaaaaaaaaaaaaaaaaaaaaaaaaaaaaaaaaaaaaaaaaattttctggggccccccccccggggaacccccattcccccctaaattaattctttttacccccccccctgggccgcctttttaaaacttcttaacgggaaaacccctggttttccccaatttattccctttggagcaatcccccttttccccagtggggttattaccaaaaaggccccccccattccccctccccaccattggcca

SEQ ID NO: 20004 - DNA, 422 bp, Gossypium hirsutum
  unsure (1)..(422): unsure at all n locations
  Clone ID: AI731113.1
gaaatgtgttgttgttgtcatctctggtcggccggttgttgtacagccatttgtctcgtcgattgatgcacttgtanctgcttggcttccggggaccgagggccaaggtgttgctgatgtcttgtttggtgactacgggttcactggcaagctcgcaaggacatggttcaagaccgttgaccagcttccaatgaatgtcggtgatccacattatgaccctctctttccctttggctttggtttgactactaaacctacccaccagaattaatatcattgtagagactgagtttgttgctttatattaggcattttcccttacatggtagaaactttaaattatttttcctctacattagaggtatttatgaaccggggccaggttaggcctaaggtttcataaaaaaaaaaaaaaaaaaaaa

SEQ ID NO: 20005 - DNA, 620 bp, Gossypium hirsutum
  Clone ID: GOSHI-09MAY01-C132763_1
aatggtttgaaggtgaatcttataattacggattactccatgcccggaatgactggatatgaactcctcaagaaaatcaagcgatcatcaacctttagagaaattcctgtggtgatcatgtcctccgagaacatcctcacccgtattgatagctgtttggaggaaggggcggaggagtttctagttaagcccgtgaaactggcggatgtgaaacgggtgatgaatgattgcataatgagaggagaaacagagggaaacaaaaggagaagagttgacaaaagaaagtttgaagacgataaccatgcttcatcatcgtcgtcatcatcatcatcatcaataccatcatctccgtcatcaccattaccatcctcaccatcgactgcagcaacctcatcacctctgcattcattgaagagggcaaaattgcgcgaccataactagttcccctcatccgttttttcgatggtaaatttttttttgtcaatatcctcgcaatttccctcatatggataacttgtgttaatggcacttatccaggcctctttaaagctgataaccattaattaagggcctgaaacagaaaaatggagatacagttggtggtattttttgttccgttt

SEQ ID NO: 20006 - DNA, 566 bp, Gossypium hirsutum
  Clone ID: GOSHI-09MAY01-C132213_1
caaagtttttttgagacgccaaagggaaggaggaaaaataatggctgacgaccaagaagagccacctcttgctattcgtattgaccaaacggtggaggaaccttcccaatccgatcaagagaaacatcaaaacgactacgtttcagttggggtaacagtcatcactggctacctcggtgctggcaaatccactcttgttaattatatattgaatgcccaacatgggaaaaggattgctgtgattttgaatgagtttggtgaagagattggagttgaaagggctatgataaacgaaggagaaagtggtgcccttgttgaagaatgggttgaactactaatgggtgtgtttgttgcactgttaaacatagtttggttccagcacgggaaccacttggttccattgaagaaaaaacttgatcttattctgtgtgagaaccacagggttaccaaaccctgctcctcttggcatccgttctttggctggatgatcaactgggaatcttcagtcaagccttgattctatagttactgttgttgaatgccaaaaacctgcggtttcagctaac

SEQ ID NO: 20007 - DNA, 703 bp, Gossypium hirsutum
  Clone ID: GOSHI-09MAY01-C133473_1
atttattttatcatcctttcaaaaaaaaaaaaaaacaaagaaaaaagaaaattggaaaagcctgataaaaaaagaaaagctctaacatcggagatcgatctggcattgtcgccggtatgggagtgccgagcgacgacgccgttttgatccagaaaggaaacaagcaaggagagcctcatgtaatcaccgttaattgtcctgataagcacggcctaggatgcgatatttgccatataattctcgatttcggtctttacatcgccaaaggagatgtttcaacggatggaatttggtgctatatggtgttttgggtggttcctcattcgagctcacctgttgtgaggtggccaagcttgaagaaccgccttcaatccttatgtccttcttgttcggtgacattttacttgaatgatcaaccttccaactccccggcttctccggtttacttgttgaagttcttttgccttgacccgaaaggattgctacatgatgttacacaggttctctgtgagcttgagctcacaattcaaaaggttaaagttacaacaaccccagatggcagagtcctcgacctcttctttataactgataacatggagcttttacacaccgaagaacggcaacatcacttatgtaaacaattagatgccgtgttgggtgattcatgcatcagttgtaaactaaggttgggctggtcaaagtc

SEQ ID NO: 20008 - DNA, 634 bp, Gossypium hirsutum
  Clone ID: GOSHI-09MAY01-C133063_1
ctacttgagacctgatatcaaaagaggaaagttcagtttacaagaagaacagaccattattcaactccatgcccttcttggaaacaggtggtctgccatagctactcatttgccgaaaagaacagacaatgagatcaagaactactggaacacacatctaaagaaaaggctaaccaaaatggggatcgatcctgtcacccacaagcctaaaaccgatgcactcggttccaccactggtaaccctaaagatgctgctaaccttagtcacatggctcaatgggagagtgctcgtttagaagctgaagctagactggttcgtgagtccaagctagttccctcaaaccctcctcaaagcaaccacttcactgccgttgcgccttcgccgactccggcaactagaccgcaatgcctcgacgtactcaaagcatggcaaggtgtcgtctgcgggttattcactttcaacatggacaataacaacttacagtcccctacgtcaacgttgaacttcatggagaacaccacaacattgcctatgtcatcatcatcgtctgttaatggaatgtttaatgaaaactttggttggaactcatcgattaatccatgtgaaagtggggatattttgaaagttgaatat

SEQ ID NO: 20009 - DNA, 926 bp, Gossypium hirsutum
  Clone ID: GOSHI-09MAY01-C129633_1
cgaaaggaagaaaacaaagctcataatatgagcgagacctttttggcatctgatgcgccggagctggttgtatttattcaagagagtgattatcagtcaatcaaggatattttcatagacagggaagttccttcgcggaatcgattaaagtataagggtatctattccaagtataatacagatgtgaatggtgatagtgaagaacctggaaaatctcttagtataatgtcatctatttccaatgagagtgaacaagatgttcagaattatgcaaggaaaaggcatgctcttgaggacttaatgaaggatgatgatgctgaagattccgatggaagagacgttcactcgcatgataagactaccatgagcaacctagaggaatttttacaaggttcaaagtgtcaacagcctcataaaaccgaaggcttaccgagaaacctaacaggtccgagtcaaaacatcattaacgaaatggcttctggtgattgtggttccattgcagcgagtccgataccatgttccggtagcatgtctctgcggtcaagtagtagcactgccagctctcattcatttgcttttcccatattgccaacggaatggaacggcagcccggtaagaatggcagaagctgacccgagacggccgaagaagcaccaaagttggaaaacctgttttctctgctgattctaaaaacatcatgattttcaacaatggtgtcatattagaaagataaaattagcaatgacgtttgtcaattgtcatacagagtgttcttttaccttccaacattatcattcaacaaattgtgaagtctgttgggtgcaaaaacaaataagacaaagcttgtctctttttctttctttatactgtctatgactggtacaaaaaaaaaatttaatatttatacaagtcagttctgttttttg

SEQ ID NO: 20010 - DNA, 738 bp, Gossypium hirsutum
  Clone ID: GOSHI-09MAY01-C129243_1
cagctgatattgaacattcaaggcatgttaggccagctgtgaagctagctatgtctatccttataagtggcagtgcagttcttgtactactggctatctacatgttagttcgtgcccggtttgctaacaatggcctcatggaggatgataattgggaagtgaccctgtaccagaagctcgacttatcaattgatgatatcgtccacaatttaacttcagctaatgtgattggcactgggagctctggggtcgtatacagggtaataattccaaatggtgaaaccttagcagttaagaagatgtggtcatcagaagagtctggtgcattcacttctgagattgagacgcttggctcaatcaggcacagaaacattgttcggcttcttggttggggttcaaacaggaatctgaaactgctgttttacaattatcttccaaatggaagcttgagttcactccttcatggtgctggcaaaggaggagcagaatgggaagctagatatgatgttatgctgggtgtggcacatgcccttgcatacttgcaccatgactgtgtgcctgcaatcttgcatggggatgtgaaagctatgaatgtcttattaggtgctgctatgagcctttccttgctgactttgggttagctcgtgttattaaaagcaatgaagatgataaatttttcaaattaagtccaaaccacacctacaggtcttatggatacatggctccagaacatgcaca

SEQ ID NO: 20011 - DNA, 382 bp, Gossypium hirsutum
  Clone ID: uC-gsronu33B130b09b1
ttttccacgcgtgcgatccccttctcataaattctctctcttgatggaagagacgcgatgtgcagtttgactgatacaagttccttcccaacgttcaattaaaaccctaccctctaccttttgctcctatcggagggggggggaaaggaaaaaagattaatttggaatttagctccaactgatcatggattttgggaattctggtttcttttccttaaatcagtgatgatcatttggttcatctgattatgcttgctttaattcgtcttcaaggccgcatatgttgtgttttacaattggaagtagttatgtagattctaagcattcgtacttacactcagtactgagctccagatgtggcagtgcaattttgcttagcata

SEQ ID NO: 20012 - DNA, 300 bp, Gossypium hirsutum
  Clone ID: uC-gsronu33B130b03b1
aaggaggtagaaggaggagtactttgccttccaatcttctctacctcctccttggcttgtaaattccaaatttgtaccaaccctttttctcctttgttaggcacaacttacattttagacaattgggaaaaaaaggaaaaggaaaaaaaattaatttggaatttagctccaactgatcatggattttgggaattctggtttcttttccttaaatcagtgttgttcatttggttcatctgattatgcttgctttaattcgtcttcaaggccgtatatgtttgtgttttacatttggaagta

SEQ ID NO: 20013 - DNA, 729 bp, Gossypium hirsutum
  Clone ID: GOSHI-09MAY01-C125693_1
gcattttgagaaatatggtgagatccttgaagctgtcattatttctgataaaatcactggcagatccaaaggttatggattcgttacttttaaggatgctgaagctgcaaagaaggcttgcgaggacgctgctcctatcattaacggccgtcgtgccaactgtaacatcgcctccctcggtgctcgccgcccgaggtccgcctcctctgctcctccgccgcaacaagggtcaaacgttggaccgagggccacgccagttgctccagccaatcaggggcaggggttttacccggctggggcagcagcaccgccgtttcaccatcagcaccatcaggccgttcctttttacgggtactctcctgcctacgttgccacaaacatcagctacaaccataagctaggctacaatggaggatcctacatgaatgggcatttgtctcaagtatatccagcggggcaagctattgtaggtgccaacacattgatgccagtgtaccctttttatcactaccatcaatcacaaacattgggatttccatcatcaccagcatcagccgctctcaccttcccatcaccaacagcatggcccatcagcaattgctcctagttcaggtacaattggaggagctggtgactgttttaagaaggttgggtgaagaaagatggaaatctggcagcgacattattctctgatttttttttcccttttttttcaatatgtatctaagt

SEQ ID NO: 20014 - DNA, 1007 bp, Gossypium hirsutum
  Clone ID: GOSHI-09MAY01-C126753_1
accaatcacaaatcctctccattcgatactcgcttctcaaccgtcacctcagtgctgtggaactgacccattcctacctgaaccgtctcaaacaaacggagccccatatcaactgtttccttcacatctctgaccctgacaaggtcctgaaacaggcgcaggatattgacgacaagataaaaaggaatgaagaagtgggtccccttgctggtgtcctcgtcgctatcaaagacaacatttgtactgctgatatgccttccactggtggctcttacatcctggaaggctaccgtcctccgttcgatgccactgccgtgaagaggttgaaggacttgggcgccattgttgttggaaagaccaacttggatgagtttggttgggggagtactactgaagcttctgcatttaaggtgacagcgaacccatgggacctttctcgggtgccagggggatcttccggtggctctgctgcatctgtatctgccaggcaatgtgttgtgtcacttgggagtgacactggtggaagtgtgaggcaaccagcatcattttgcggtgtagttggtttgaagccaacttatggacgtgtttcaagatttggacttatggcatatgcgtcatcccttgatgttatcggatgttttggttcctctgttgcccacaccgggattcttcttcatgcaatttctggtcatgattcacttgatgctactagcagtaaacgagaggtgcctgacttcacttctcagttcacttctgcaagttctttgaaatccagaccattagaggggtctaagggtcggtcttatccgtgaaactgttgatgcctggtgttgattctggaagttaaatcagcaattcaggggtgctgcagctcatctggagcaattaggatgtgttttgaaaaaggtttcattgccatccttctctcttggtttgccagcttactatattcttgcatcaccagaatcaccttcaaatttatcaagatatcattgtgttacatatcc

SEQ ID NO: 20015 - DNA, 630 bp, Gossypium hirsutum
  Clone ID: GOSHI-09MAY01-C127233_1
ccctcctgcctaattttatgataggcccgccaagcagggggtcagtcagggtcatgtactcgacctttttgcatccgcacttgaacagggtggagtctgctgaaatgaaagctgcagttgaaaggacaggtggccttgctgttctagcagaaagttttggtcattctgtattcaaagactctctcaagcgtgtgctttaaggatggggagcagactcttggcctatgttttaatggcacactcgagatcaaccgttctaaagatgtcaagattcagggggtcatcgggcctcgcacttctttggagaagaaaggacctagccgtgctgacacagtcatcggggaggggaacactacagcatggaaaatgtgtggtcttgacaagagtacttgctttacggttttatttgatgtttcatccactgacaaattaaatgctcttggagttgcaaatccacagctctatttgcagcttcttacaagctatcaagaccctgagggtaaaacaatgctccgagttactactgtgactagacaatgggtagacagtgctgttagttctgaggaattaatacaaggcttcgatcaaaagactgcggctgatgtaatggcaagaataacttccctgaaa

SEQ ID NO: 20016 - DNA, 690 bp, Gossypium hirsutum
  Clone ID: GOSHI-09MAY01-C120503_1
gtgctcaatacaagatagctgtaatgcttcttcaggaaattacaaggctgcagaaagtccaaggcccaagagcactcagcgcaaaagatgagatggctagactatctagacatctaggttctttgcctctgcaggcaaagcaccgaataaattgcattcgcactgccataaaacgaaatatggatgttcagaactatgcttatgcgaagcagatgcttgaacttctcctatctaaggcacctccaggtaagcaagaggaattgaggagcctgattgacatttgtgttcagaggggtttaaccaacaagtctatcgatccactagaggatccctctcagttctgtgctgccacgctcagccgtctgtctactattggatatgatgtttgtgatctttgtggggccaaattttccgctctctctgctcctggatgcatcatctgtggcatgggaagtattaaaagatcagatgcacttgggggggcaggaccagttccttctccatttggctgaaatcacaatctaccatttctctaatcttgcaagctctcctggtcaggtaggctttctcccattctaagctacaggcctctgcctacaaaaatctccattttgggacactgatatttcatttcaaagttgagttccttcaccatcaagaatctagctggttccgccatgtatatctatc

SEQ ID NO: 20017 - DNA, 921 bp, Gossypium hirsutum
  Clone ID: GOSHI-09MAY01-C120433_1
tttttgaattaccgaccagcttcacttcaatctccatttccatggcggaaagaaatccaagcctttcaaacgccggattctgttacgaaacgagaatttacagtagcttaaggcagcccgtccctctcccgccagctgatcagcctctttccgtcgcggaatattgtctctccatcttctcttccatttccaccagcggcgccacccctttcgccgtcaatgcaaccaccggccaaacgctgagttactctcaattcgtttctcaggtccagctcagtaaaccggttattgcctttgctacttcacaaacctctcataagattccatctctcaaacacgaaactatcctcttggactcgcccgagtttctatctttcttaactcagtccaatatcgacggtaacgtcattaaacgaatcaaggtaaatcagtccgattcggcagcgattttatattcttccggaaccaccgggcgggtaaagggcgtgatgatgtctcaacgtaacttaatcgcaatgatggcggcgattcatcaccacaacactatcgaagctgacggtagcgacaatccacgcgatcggtgacattcttcaccgtgccactgttccacgtgttcggtttcttatgttgttagggcggtttttgtcggcggataccgtagttttgacgaaaaggtttgattgcggagatgctgagagccatcgagaagtacaggggtacttcatgccggtatcgccgccgcttgtgctggcgttgtcaaatcgaattgctaaaagttcgacttgagctcatttcaggtgccttgctgcgtggccgccgcttggtcggaaggtagctcgggctgtcacgagaagtccccatgtgtattgctacgggatatggctgactgaactgaagaggagaactatgtgtagggctgag

SEQ ID NO: 20018 - DNA, 1130 bp, Gossypium hirsutum
  Clone ID: GOSHI-09MAY01-C121903_1
gcgcttttcaaggatgggaaacgtacccgactttcttatcccttagaaaatttccactcagatgtatctggcaggagcttccacaatggacgtttcatacagaggatgcgggagaaagcagcttctcttcccaatgtacgtttagagcaaggtgtagttacttctctacttgaagaaaaagggactatcagaggagtgcagtataaaacaaaagatggccgtgaattgacagcatttgcacccctaaccattgtttgtgatggctgtttttcgaacttacgtcgctccctttgcaaccctcaggtagatgtaccctcatgttttgtcggattggtactggagaattgctatcttccttacgcaaatcacgggcatgttatactagcagatccttcccccattttgttctatcctattagcagcacagagattcgttgtctcgttgatgtacctggtcaaaaggttccttctattgccaatggggagatggcaaattatttgaagacagttgtggctcctcaggttccaccggaaatttacgattcatttgtagcagctgttgataagggaaatattaggacaatgccaaacagaagcatgccggcttctccttatcccactcctggagccctattaatgggagatgcatttaacatgcgccatccattaactggcggaggaatgactgtggctttatctgattttgttgttcttcgtgatctactgaagcctctgcgtgacctcaatgattgcaccaacactctgtaaatatctagaatcattttacaccctgcgtaagcctgtggcttctacaatcaatacattgggcggtgcattgtaccgagtgttttgcgcatcacctgatcaagccggaagaaatgcgacaggcttgttcgatatctaagccccttgagggtcctcacagtccaatatgtgcttctagttaaacctgcccttggactgtctgcattttttgcggaatacgggtgcgtatgtgcatccttacttacaatgatgactgactttgagctagattatcctctaggccagatagcagtttcaacatcgtttcaagctcgcaatttcgatattctccaaatagagaatttatggtcctttttagtgagaaa

SEQ ID NO: 20019 - DNA, 547 bp, Gossypium hirsutum
  Clone ID: GOSHI-09MAY01-C121673_1
tttccctctttctataaattttctgtgctaggggttctcaacccatcatcgtcgtcgccataatcgccgtggctccatcgtggacggtggtcggagccacacgaaggccagattttcaaccctttttaagagagtccgaaagcaaagccctccaaactcggaaaatgcgaaagaaaaggcctctccccctcccttttaagtccgattttgacgacggggaatagatccgttgatgtgacgtgggattatccagtgaggcttcttctcttattttgtgtaaaataaatctgtaatagaaagatgaaaaaacataaaaggtcaaaacctaaagaaactgcaatgaaacgaaaatgaaagattgaaacaggcaaccttctttttttttgctttttgattgctcaatatgctggtgtgtaccctttacaacattttgtttctgggcttatattgcagaaaaaaaatacacttgatttaacgtattactattggctatgcctttgtggttctttgtttctttttgctttggggcttggttgttctttttttt

SEQ ID NO: 20020 - DNA, 664 bp, Gossypium hirsutum
  Clone ID: GOSHI-09MAY01-C121303_1
gaattttgaactaccattactgcttgtagcaagaggggaatccagagcttagtgtgaataataatggccattgttttgatgggagcgaagtagaagatgatatcggcagcgagagagttggtcgatcccctagccgtgtccatgccaggtgatggtcagtgtgtacaaccatgagaaatacccatacatattgtttaaaattctacaagatttaacatttggaggacgaaggacgtatcgagatcattattctaatatccatgtaaagctaattagatttgtttactgctgtgtaattcaccatcttttgtattattaggtaaaaccaggtggatggtaaaacatgtttcttccccaaattctacacggtgagttgttgtgaaactagctgctttgaaatggtgaaaaagctttgtcaattgaaaactagagttcagcgtatcacccttgattcttttttcccaattggaatgaatttgtttttgacataaaaaaaaaaaaaaaaaaaaaaaaaaaaaaaaaaaaaaaaaaaaaaaaaaaaaaaaaaaaaaaaaaaaaaaaaaaaaaaaaaaaaaaaaaaaaaaaaaaaaaataaaaaaaaagggggcgccccttttaggggacccaagttttcctccgcgggctggcaaggttaaattttttt

SEQ ID NO: 20021 - DNA, 665 bp, Gossypium hirsutum
  Clone ID: GOSHI-09MAY01-C122423_1
ttgttgggcgctggcgctggagggtacggagacgggggcgatgtagctgctgaggcgttggcaccatgcaggatctagaggctgcagagggttgcggcgcaaacgagggagggatgacctagggttgctgaaaccttttgggccatttgggctcactttcagtattgggccatcagatttgggctagagggactgttttgggtatttgggtttgtaataggacattattggccatgtaatttttttggggtttttaattatatttatttatttacttggtttgtttgtaacgggcctaggcatatttggcccactatacccccttctaacatttttcccttatcggtaaacttcctttcgtcttcctttgagtcagtctgggaatcctttattcaatcatcgctactgtggtttcttggttcttcaatcggctggtgaaggttatgaggcggagaattgcactccaacagattgtgtttctaaaggctcgggatatgttttcgcattcaatcgaaataagtgtgcactttctacacgaaaaaatctagcttatgagaaagtcgtataagcattctgtctacgccacacggacagttggctgaccttgttactgttttcgtgataacactcgatttttatatcttagggcttccctgtactactag

SEQ ID NO: 20022 - DNA, 593 bp, Gossypium hirsutum
  Clone ID: AI729154.1
gaagcgaagtaggttcccccgaccaccacgcagtccagatgacagaatcgtctccatcctcccgcggtgtcaaccttgacaagttcttcgacgatgtggagtccatcaaagacgagctgaaagagctggagaggctgaacgacgacctttcctcgtctcatgagcagagcaagacattgcacaacgcgaaagccgtgagagatttaagagccaaaatggatggggacgtggccatggcgttgaaaaaggccaagcttatcaaagttaggctggaagcgcttgatcggtccaacgccgctaacaggagcttgcctgggtgtggaccgggcacttcatcggaccggacgaggacgtcggtcgtgaacgggttgagaaagaagttgaaggattctatggaaagctttaacgagttgagagagaggatctcgtccgagtatacaggaactgttcacacaaaatattttacggttacgggggaaaaccctgatgacaagactcttgatcttatgttttctttgtgttattttgttattgtgaatttgaagtagtcctaatcacccttccttgccagaaaaaaaaaaaaaaaaaaaatc

SEQ ID NO: 20023 - DNA, 469 bp, Gossypium hirsutum
  Clone ID: uC-gsflnu33B066e06b1
gacgttgcacagcgcgaaagccgtgagagatttaatgagccaagatggatggggacgtggccatggcgttgaaaaaggccaagcttatcaaagttaggctggaagcgcttgaccggtccaacgccgctaacaggagcttgcctgggtgtggaccgggctcttcatcggaccggacgaggacgtcggtcgtgaacgggttgagaaagaagttgaaggattctatggaaagttttaacgagttgagagagaggatctcgtccgagtatagagaaactgttcagagaagatattttacggttacgggggaaaattctgatgacaagactcttgatcttttgatttcaactggagagagtgagacttttttgcaaaaagccattcaagaacaagggaggtgaagaattttggacccaatctatgggattcaagataggcatgatgctgggacggatttggagaggcattttag

SEQ ID NO: 20024 - DNA, 460 bp, Gossypium hirsutum
  Clone ID: uC-gsronu33B111f04b1
cttcacatctgattccagctgctccaagtcctctttagaggtaggctccgattcagctcgtcgactgtcgatgcaggtcttaaaggcgacggtttgaaattgcttgttttgtctttcttttggaaggacgttagggttttgtaatttgagaactcgaatcgagcttagacgaaagtcttgtcaattttagaggctaaggctgcatgtgttctgattgatctatgttgtggtgtgctagccccttggataactcaggtcattgcaaaggttgatttaacggtggaactcatggaggaccttttgggtataatccagggagcctgccactcaacagctcgtgctcgtgctcgtgctgcacttaagtacatagtgataggtctgtctagtcacatggatgatatacttgggaagtattatgtgctagattatccttttcttactgtgtatttgacatgtgttt

SEQ ID NO: 20025 - DNA, 411 bp, Gossypium hirsutum
  unsure (1)..(411): unsure at all n locations
  Clone ID: uC-gsflnu33B036h07b1
agtttgtaatcagatttccccgatttcatttttcccaattcagaattagatttccccaatttcctaacttctttccgcgattttcttcacatctgattcaagctcctccaagtcctattcggagttaggctccgattcagttcgtcgactgttgatgcaggtctcaaaggcgacggtttgaaatttcttgttttgtttttcttctggaatgacgttagggttttgaaatttgagaactcgagtcgagcttagacggaagtcttgtcaattttagaggctaaggctgcatgtgttctgattgatctatgttgtggtgtgctagccccttggataacttatgtcattgcaaaggttggtctgaagcatgtcttcgtattataatctatggntgatttaacggtggaactcatg

SEQ ID NO: 20026 - DNA, 543 bp, Gossypium hirsutum
  Clone ID: GOSHI-09MAY01-C119912_1
agggtcctttcccgaactccgaattcagggctggtcgatccctgcaacgatgaagaaaatgttcaatctatcgtccaacttcttgactcatagagatgcttgggccggcacttgcgaacgcctggtcggagagctatcctctcctagaactgattgcccagagaagttaccggaggcagcaccactgacgacaacagcagcaaacgaagacgctggtctctctgaatttcagagcgaggtggttcaactagccagggcgcttaatggtgaccacttcttgagcggctttgccgaggagatgcgcacaaagatgagcgtaaaaggagctcatgagtacgtgaaaggcgccgtttcaaggtttataagagccagcaaagaggccataaagttgggagccgatgaatctgccatatgtgatatgagatcatcgcttacaactcgatcttcttcgatccacaactagtttatctattacaggttttacaaatgtcttgtaatatgtactaaaactaactttttgtgaaagaattgtctctgaatcat

SEQ ID NO: 20027 - DNA, 547 bp, Gossypium hirsutum
  Clone ID: GOSHI-09MAY01-C119552_1
actcggtatagtgctatggtatgccgtcacaaattacaggacctggatctttgttcttctctatggctactccatgggagtggaattgtcaactgataatgtcattgctgaatacttgtacgacaggtttaatctcaaactacacacagcagggataattgccgccacctttggcatggcaaaccttgttgctcgtccctttggtggttacgcttcagacaaagcagcccaattatttggcatgagaggcaggctttgggtcctatggagcttacaaactttaggagggggcttctgtatctggctaggccgtgccaattctcttcccattgctgtcctggcaatgatcctcttctccatcggagctcaagccgcatgcggcgccacgttcggcatcatccccttcatttcacgacgatccttggaatcatttcgggtctaaccggtgccggtgggaacttcgggttcggattgacacaattaattttcttctcaacatcgagattttcgaccgcatctggtctttcatggatgggagccatgatag

SEQ ID NO: 20028 - DNA, 552 bp, Gossypium hirsutum
  Clone ID: GOSHI-09MAY01-C119462_1
tggaatatttacaaggctttggcaatgcctcaggaggctattgtctgttatcagcgagctgttcagactcggcctaactatccagtagctttggggaatctggctagtacatactatgagcgaggacagctggatttggcaatccaccattataagcaagctattgcctatgatcaaagatttgtggaagcttacaacaatttgggaaatgcattgaaagatgtgggtcgtgttgatgaggcaattcaatgctataatcaatgtctcacattgcaacccaaccatccgcaagcacttaccaacttagggaacatatatatggaatggaacatggttggtgctgctgcttcttactataaggctacattgactgtgacgacggggttgtctgctccattcaataaccttgctgtaatctataaacaacagggaaatcacatggaagctataacttgttacaatgaggttttacggattgatccattggcagctgatggacttgtacataggggtaacactttacaggagatggtagagtgagtgaagcaattc

SEQ ID NO: 20029 - DNA, 400 bp, Gossypium hirsutum
  Clone ID: GOSHI-09MAY01-C119772_1
gcctttctttggacgcgtggggtgtatgtgatatatacataggataaaaggtcgtccggatatgttggaattgcagcagaaagaactaagaaaatggggttccaagaaaggtggaaattgatcttatagcaaatggcatttttagttactaaagtcggactgtcatccttggtttaatctgcaaaattacattaccttgcatttgcattttcatgctttggaattttaactggttggatttatagctctaagctcagagaggatttttactacccaaccagaggtcaacattcaataaataaaaaggggctaaatgaccgagggaggacctgaaaaggctaaaggacagtagcttttagctgcatttttattcatttgcttgcagctgacaggttttcca

SEQ ID NO: 20030 - DNA, 447 bp, Gossypium hirsutum
  Clone ID: GOSHI-09MAY01-C119162_1
tccacttgtactaaacaagctgggagagtcaatgatcaaggactgaataaagggaatcctgctcacttcactatattccctggtgatggcaattgttcaggggatggtcaatattccccggccgtcatatctctgcaatcagctccatcagaacagcattctcgctttgaactaggatttggtcagccgcccatggtctgtgcaaaatatccttacatggatcaatgctatggagttttctcaacttatggaccttcagtttcgggtcgtgttatgctgccattaaacatagcatcagaggatggaccgatatatgtaaatgccaagcagtacaatggaatccttaggcgtcggcaatctcgtgcaaaggctgttcttgagaataaactcactaaagctcgaaagccatatatgcattactcttgccatctgcacgcttatgcgtcg

SEQ ID NO: 20031 - DNA, 635 bp, Gossypium hirsutum
  Clone ID: GOSHI-09MAY01-C114802_1
gggaaattcgctaagatcattcgagctcgtggatgaagggaaggagccgcggaagaagggttgtccgggcgtggtatctggggcggagttcctaataagggccgccagagatgatgttgcgctcgcagggggacccgactgggtggcggggctaggaagaaaagtcagctcgacacccagtcaagaggattccgacaacataatgccaagcccaagagctaacgcaacttctctcatcgatctcttcaccaaattcaatctatccgtcaaggatctggtagccctctcaggctcacactccattggagaagcaaggtgtttctcaatcatgttcaggctctacaaccaatcaggctccggcaagcctgaccctgccatcgaaccagggtttagagaaaagcttgacaagctttgcccacttggtggagatgagaatgtgaccggagatctggatgcaacacccacgctgttcgataaccagtatttcaaggacttggttgcagggagaggggttctgaattccgatcaaaccctgttcacattcccacagaccagagagtatgtgaagcttttgggcttggcattatgttgtcggaatcctcttgatggctgtcaagctatttttttcctagtct

SEQ ID NO: 20032 - DNA, 555 bp, Gossypium hirsutum
  Clone ID: uC-gsronu33B154a12b2
gtgatgtctccaagctttctagaggcctcgaaaacatgggtgacgtcctacggttaaacgaaacaatggggttggacgagagcaaagagaaattttcggaatcaatgaaccagtttatgaaaatggctgaacaggaaatcccaaggattcaagcacatgaaaggctagcactatcactagtcaaggagattactgaatacttccatgggaattcagcaaaggaagaaactcatccctttagaatcttcatggtggtgagggatttccttacggttctcgatcgagtctgtaaggaagtcgggacgataaacgaacgaaccattgttagttctgcgcataaatttccagtcccagtgaacccaatgatgcaacaaacattcccagttccagtaaatccaatgatgcaacaagcttttcctggatttcaagggaacccacactatgattctgatgatgacactgcaccatcctagtcttttgcagcttataatcaggtcaaatacgaactatgacacgtgatttttctatgtcagtcacgaatatttctagaaaaag

SEQ ID NO: 20033 - DNA, 308 bp, Gossypium hirsutum
  Clone ID: uC-gsronu33B154a06b2
ttcttgttatcctctctcatctgtcaaactaaaaccaaccggggaaccctaatacggctaccagggcctttcgccttagacgcgagctaagagaaatcctcagcatcattgcaccagtttatgaaaatggctgaacaggaaatcccaaggattcaagcacatgaaaggctagcactatcactaggcaaggagattactgaatacttccatgggaattcagcaaaggaagaaactcatccctttagaatcttcatgggggtgagggatttccttacggttctcgatcgagtctgtaaggaagtcgggac

SEQ ID NO: 20034 - DNA, 701 bp, Gossypium hirsutum
  Clone ID: GOSHI-09MAY01-C115142_1
ctttctctttctctttctatttattttaaaaaataaagcttttttcatcttctacgactagccattaaaagaaaccctaattctctttctctctgcaaactctttggagttcacagagataaaaagaaggtaaacaaaaaaaaaggagggcaataggtggaatcaagttgggatatgtccttcaatcaatctaggtcggataaaagcgagcaacaataccgaaaatccgggcgatcagccagttttaatcaacagcggtcctcctcaggcgtttacagtaagggcgctggcggcggccctgccccctcgcggtctccttcatcttcttcttcttctttatcttccaatcgaagtcttaagaagtctaacaatgcacaaggagggcaataccggttaaattcactggccgcgaactctaccgagtctagtaatacttctgctgcccgcaccaaacaaaatggcgctcatttacaaccccagctacagggagcatcagatgcatcgattgcaagcaatgctgcccagcctgttcaatcacccatcatccagaatagcactcgagctgtttcgaaagctccaacttctcaaccacccaccataagttccgacagtggtctccctacaaccgctggaaaggaagatccttccaaagcattctctttacagtttggggtcataactcctggtttcatgaatggaag

SEQ ID NO: 20035 - DNA, 618 bp, Gossypium hirsutum
  Clone ID: GOSHI-09MAY01-C115152_1
tcatcgcgtccggtcaatactcaagcaagtgaggttactctttcaagcagaggacaagcctggacagagttccgagaaattacagagcaatggaagccatggcagcagcgaaaccagtgatcaaagtagctgccctttgtgggtctttaagggaaggctcttacaatagaggcttacttcgttatgcaatggagctaactaaggaagagattgatgggattcagattgattacattgacatttcgccgcttcctatgctcaacactgacctcgaggttaatggaaagtatccgcctgttgtcgaggctttcaggcagaggattttggcggctgatagcatcctatttgcttcccctgagtacaactactctgttactggacccctgaagaatgcaattgactgggcttctcgatcgccaaatgtttttgccaataaagctgctgccatcgcaagtgtcgcaggaagcttaggtggggcgcgagcccaatatcattatctgccagattggcgtttatcttgatcttcattttataaacaaacccgagtttttcttgaatgcatatgattctccacgaagtttgatagtgatggcaaccttattgatccagcatctaaga

SEQ ID NO: 20036 - DNA, 490 bp, Gossypium hirsutum
  Clone ID: uC-gsflmaxxa006a04b1
gagaatttgaacatggggagataaatagactggaagcactcttggctgagggccgaatcttctgtgatatgccagccttagctgatagagacagcattcttttaaaggatacccatcttgaaaatgccctgatctgccaaccacagcagcgcaacattcatggtcgaatttttggaggttttttaatgcatcgagcttttgagttagctttctcaacagcttatgcatttgctggactagtaccttgctttttggaagttgatcatgttgatttcttaaggcctgttgacgtaggggatttccttcgtctaaatcatgtgttctgtacacggaacttgagaaccctgatcaaccactaaataatgtgaaagttgctgctcatgttacaaggccggagatcagaacaagtgaggtatcgaatacattttatttcacattctccgtacggccagaggcaaaggccaccaagaatggatttaagattcgaaat

SEQ ID NO: 20037 - DNA, 602 bp, Gossypium hirsutum
  Clone ID: AI731748.1
gtttctatttgaagaagctgaagctagaagcaaattaagaaaaagaaaaagagtagatagaagagaatttgaacatggggagataaatagactggaagcactcttggctgagggccgaatcttctgtgatatgccagccttagctgatagagacagcattcttttaaaggatacccatcttgaaaatgccctgatctgccaaccacagcagcgcaacattcatggtcgaatttttggaggttttttaatgcatcgagcttttgagttagctttctcaacagcttatgcatttgctggactagtaccttgctttttggaagttgatcatgttgatttcttaaggcctgtaagtatcttcctgctttttgtagagcttttagcatcaacttgtatatctatctacatatttatctttcatgctcggtgttgttcgagattattcgagcattcaacctcattttatttggccttcaatcattattttatgcatatcgccgtgaaatagaagaccagaagaaactgtgacatgcaatattaaccgtccttgaattcttagagtgccatgtttcagcatctttgatttgcattcctgttttgatttc

SEQ ID NO: 20038 - DNA, 488 bp, Gossypium hirsutum
  unsure (1)..(488): unsure at all n locations
  Clone ID: uC-gsflmaxxa006a10b1
cccacgcgtccggatcgcgagtggccgccctttctttttttttttttccaaancccttgcgatatgccattcttagctgatagagacagcattcttataaaggatacccatcttgaaacagccgtgatctgccaaccacagaagagcaacattcatggtcgaatctttggaggttgtttaatgcatcgagctgtcgagttagctttctcaacagcttatgcatgtgctggactagtacctcgctttcgggaagttgaccatgttgatttcttaaggcctgttgacgcaggggatgtccttcgtctagaatcatgtgttctgtacacggaacttgagaaccctgatcaaccactaattaatgttgaagttgctgctcatgttacaaggccggagatcaaaacaagtgaggtatcgaataccatttattttacattcttcgtacggccagagggcaaggccaccaagaatggatttaagattcgaaatgt

SEQ ID NO: 20039 - DNA, 554 bp, Gossypium hirsutum
  Clone ID: GOSHI-09MAY01-C116962_1
tttcttcgttctgctaaaccctccaacctggtttaaaatttagttaaaacgaggaaaaaatgccactgggattgatattagggattggaaggacgtttcgaaggaagcgtacctcatcgctcgatattctctcgtctaaacgagcaccaagagattattacaaggggaaaaattgcaagtctactggtttccacactcgcaaaggtggatatgttgtgatgcaggagaagttgccaaactatgtggttcctgatttgactgacttcaagctcaaaccatatgtatcccagtgcccaactgaagtcaaaaccgcagaggctgctgaatcagctaaataatcagcagatggagtgagtataggttgtttgatcatgtctttcatcatctaaccgcagccttgttaaactagaacatagtcttttggggtgcactgccttaggtcaaggtcttgcgagttctttatttttggcctacattctaaactattaacaattgcctgtaatgtctgaggtctgattgcttaaatgtacaacacctttacctgattagctgat

SEQ ID NO: 20040 - DNA, 412 bp, Gossypium hirsutum
  Clone ID: uC-gsflnu33B093a09b1
gcgcttattcatgcttctaaacactgctagctgggggacactttagtgagaactaggaagacatgccactgggattgatattagggataggaaggacgtttcgaaggaagagtacctcatcgttcgattttctgtcgcctaaacgagcaccaagagattattacaaggggaaaaattgcaagtctactggtttccacactcacaaaggtggatatcttgtgatgcaggagaagttgccaaactatgtgcttcctgatttgactgactttacactcaatccaatgtgtcccaatgcccaactggagtctaaaccacataggttgctaaatcagcttaaaggacaggatatgagggctgatcacggggtctcatgtctttatcatctaatcgcagccatgtgaaactagagcat

SEQ ID NO: 20041 - DNA, 684 bp, Gossypium hirsutum
  Clone ID: GOSHI-09MAY01-C116182_1
tttgaaaacaggtatagctcgtataatagtgcagccatcgacgaagcgcatccatcacgattccctctacgaggatgttggttgtcacatatcagatgacttatcagaatgtggtcttattttgggtatcaagcaaccaaagttagacatgattcttcctaatagagcttatgccttcttctcacatactcacaaagctcagaaggagaatatgccattattggataagatcctcgcggagagggtatcgttgtatgactatgagcttattgttggggacaatggtaaaaggttacttgcatttggcaaatatgctggcagagcaggaatgatcgatttattacgcggattgggacagcggtatttgagtcttggatattcaacaccattcctgtctctgggtgcatcatatatgtatccttccttggctgctgcaaaggctgcatgatcaccgtggggtgaagagatagcttctcagggactgccttcagggatatgtcctgtaatcttcgtatcacgggttccgaaatgtttctgttggtgctcaagagatattaaactacttctcaggttttgttgaaccagagacttcagactcttggaaagttttaaccatctcagggagaatgtcatcaagaggtcttcagttatggtgatctgactatgcgactgttacacagatct

SEQ ID NO: 20042 - DNA, 565 bp, Gossypium hirsutum
  Clone ID: GOSHI-09MAY01-C117192_1
gttacaagtcgtacgattcacgctcttccggggggtccatttaatccgatgcgggctcatccatagacctcagcacttcctcttctgggaaacctaaatcctctttctctcgagcccttgtgaaatcgaaccccttggatgtcgaccagggttgccggagcaagagcaaggccaccaccactcaccacaacttcaccagcatggttaagcgatttgtggacaatcaatccaaaaccaaggcaatgggtcatgctcagcttctcattccatctgatgtcctagccgaggacctcaagaagacggcaagaaagggagctgctttaaccgtcttgcagaggaagctgttcgggaatggctctgccggtaaggacaggggcaaaatggaggtgaaagccttgactgaggttaaagggaacactaggaccttgcctatgggtttgagaagtgagacggagctgttgagtgcaaataaagagctccagatggagattgccgagctcaagcttcagtttcagacaagaacacaaggttgagaagctgaaagatttgtgtttgaaacaaaaag

SEQ ID NO: 20043 - DNA, 780 bp, Gossypium hirsutum
  Clone ID: GOSHI-09MAY01-C117012_1
cccacgcttgcgattcatcccccattccatcttatctcgtgaaagccattctccaccagaaccaaagaatagcaatgcagaacctccaccaaataaaataaaaaaaaagcataaccttccattcttgtgcttgaccactctgcctcagcaaacatttcaagccaccacaccccatccctatctcctcgttcaaggatgagctattaatctgtaatttcaccaagaaaaagaaaatagggataggggagatgaggaaatcgttcaaggattctctcaaggctcttgaagctaacaatcatttcaccaataccttattgcaagggatttcaatttcagggtgggattggatctattaagacctacaatatttttctattcgctaatggctctatcaaggcatcagggattcccctttggatttttctcttgattgggggtttcttttgttgggtgttcttatttcaaaaggttgcagtgtaatgttgctggaacgccgcaagttcactcgtggattgtaccctgttgaaaccaacttaattattggtaaatcaagtatgcatctcatgtgttttgacctcttgaattcttgtttaaagtaagagcagcaattaagggtgaaggcataatgtgtaaatcgattttttctgctctatggctgtggatattctagacttagtataatggttccggcttaaagtttttttttcctctttatggaaagagttactggctggtcctatatgacctggttctaccttaatcaattgcaaattaaataag

SEQ ID NO: 20044 - DNA, 283 bp, Gossypium hirsutum
  Clone ID: uC-gsronu33B021a05b1
ttttatacgaaaggtttattatagagctgagggggacttttatgataagatgttgttatggggaaaagtagctatttttttaagtactgatatgggattgctttaactagacaacttaatactgtcaattaaatcatgtcagtatttcatgtaatagttttgatcattgggtttggtcgtacaatgagaatcaccttcaacatgtgattgttgccaatgttgaatttaaaatttgaatatttatattattaataaaaattttatttcaaaaggaagaactaag

SEQ ID NO: 20045 - DNA, 267 bp, Gossypium hirsutum
  Clone ID: uC-gsronu33B021c04b1
tgttgtaattgagtattctctatttattttgggacgacatattaatcatgagattcgtttatggagaattaactatttttttaagtactgatattgtattgatttaacttgacaacttagtactgtcaattaaatcatgtcagtatttcatgtaatagttttgatcattgggtttgtttgtacaatgagaatcaccttcaacatgtgatttttgtaaattttgaatttaaaatttgaatatttatattattaataaaaattttattt

SEQ ID NO: 20046 - DNA, 517 bp, Gossypium hirsutum
  Clone ID: GOSHI-09MAY01-C110092_1
ccaaaatgaagccactgtttcttttagtttgtgttctctgagcttcctctttctttattcccatttccgccatgcctatccaggaccagcccttgggtggtgaacgcaaaggaaatgaatgtggtcgtggaatcaaatgcataccaaagccaacgccacggcctactaagtgtaaaagaaacaatccttactgcaggcctccctgaatgtggtaaaaaataaagctatgggcctatggacgatatggatatgggtgaagttatgctagtaataaattaacaaataaacaaagtttccccccatgcttcatgacccatggcaattaccaatgaagttcttgtaatgatcatatcattactttcatgactactagtttgtatgtgttatgtttatgtttaataaattatggagtggttttatgttgaaaaatatcaagtactactttgattgtgatagggttatatgtttatgtttgaggaaattatttcaaaaatgaacatcacataaaccatgattt

SEQ ID NO: 20047 - DNA, 766 bp, Gossypium hirsutum
  Clone ID: GOSHI-09MAY01-C110232_1
gcgtccattcgtccggtttttctttttttctttatttttaagtgtcaaaccccacaattgttgtggtaaacattgtgaagaaaaatggaaaaacaaatgatatttgcatgggcaatgatattttgccttgccatggcaccagtgtatggccaatactactccagaactgttaaggcaggtcctcgggtggaaaagattacccacctccacttctactaccacgacattcgcagtggcaataaccctactgcattcctgatagccagtctcaacatcacccaggacccgccctcatatggcaccttgtttgcaatggatgatcctctaactacagagtttgaactaacatccacgctcgtcggaaatgcccaagggctctacttagcattgagtcgagaccttaccaagttttctgcagtcttttacgctgactttacgtttaccactggcaggtacaacggcagctccttcagtttattctcacgatttccccccacagatgttgttcctgcccctggcacaattcgtgaaatggcaatagtgggagggacaggtaaatttaggatggccacaggctttgccctcctgcgacccacttcttcaagcgacacggtcggggatgctcatgtcgaattcaatgttactttgtaccattattaaacccaattacaaaatattgaaatccaacgaataagatcaataaaatgttgctttcctaaagattatatttaatgtattgtcagtaatcaataaatcataattcatc

SEQ ID NO: 20048 - DNA, 470 bp, Gossypium hirsutum
  Clone ID: uC-gsronu33B082c08b1
cgcagtaacccattggcctggtgttggatatatctgaaaagcatttgacaactttaagaaattagatgcagaaaaagagcatgtgttcaatggaagagccaaaaaacaggacatgcgttcttcatcagctgacctgtccatgattttggctctctttttcggcagagcacagcatatattacaagaagcagaggccatactttcaactacgattttttcatctgccaaaaatattccaactcaagaaaaatggtaatatatggttcccatgccattgacagattttcttggagtcgtgttggagagagcttactgctgcataaaacctgaaacatacatgaaatgtcagatatccaagtgatttaaacatgattcagtcatattcacttgtaaaatactaggattcggtcatagtagccgggtgagaccttgcagatttttccttgagaagtttcataggcttgtttatc

SEQ ID NO: 20049 - DNA, 375 bp, Gossypium hirsutum
  Clone ID: uC-gsflnu33B135b03b1
tctattctacgttgaagcagaggccatactttcaactacgattttttcatccgccaaaaatattccaactcaagaaaaatggtaatatatgagttgaaaatggccaaccatgctgctgttatgtttttgttaaaatgcatggtaccatgatgattttgttgagtgcatacagcttgtatgcatgctgcagcatttgtgcatgtttcagcaacatattttctgttttagttgcaatgtaattaagtttggttgagaatgaactttgatgctgatgttttgatgggcctgattgagctgataagtcagcttatccatgtgtacaagcaatgtttatcaagttactaggctacttagtggtagtaggtagtatttggt

SEQ ID NO: 20050 - DNA, 613 bp, Gossypium hirsutum
  Clone ID: GOSHI-09MAY01-C111682_1
cttctgttttccttgttctcttctacattcagcgaaggggtgctctgagatcacataccaaaatggtgaaggccgttgccgtccttggcagcagagaagcagttccgcacagaggtcagcacaattgggacgatccagcatgttaatctagtgcggcttcgagggttctgctctgaaggtataaggaagctgttggtgtatgattacatgccaaatgggtctttggatgcccatcttttccatgaagagaaatctaaagctctaacgtggaaaacaaggtaccagattgcacttggtacggctagaggcttagcttatcttcatgagaagtgcagagattgtattattcactgtgacatcaagccagagaatattctcttggatgctgaactctgtcccaaagtcgcagattttggcttggcaaagcttatcgggcgggacttcagcagggtcctgacaactatgagagggacaaggggctatcttgcacccgagtggatttcaggagtcccggttacagctaaagctgatgtctacagctacgggatgatgttgtttgagtctgtgtcaggaaggagaaactctgaacaatctgaagatggaaaagttagat

SEQ ID NO: 20051 - DNA, 454 bp, Gossypium hirsutum
  Clone ID: GOSHI-09MAY01-C111192_1
atgttcaggattatcaaaatcctcccttctcattttcttccatgaagccccactctcgctcgtaaaggtctaaattcctgggtgttgaagcctccaaattgttgatcaatggctgaatccttgggtccacgactgtacagctgctataattgtggaaatcatgtttctctccacgacgatatcatttccaagtcttttcagggaagaagtgggcgagcatttttgttttcgcatgcaatgaatataagagtaggagcaaaagcagacaggcatctaataacgggtctccacacagttgcggatatttactgtggtgattgcggtgagttgttaggttggaaatacaagcgagcctacgaggcgtcgcataagtacaaggaaggtaaaattatacttgagaaggccaaagattgcttcggagaattggttgtagcattcattcctctacaaatgg

SEQ ID NO: 20052 - DNA, 869 bp, Gossypium hirsutum
  Clone ID: GOSHI-09MAY01-C112582_1
tcgctttgaacccagatcattgatgaaatcttgcaatcttttaaatctattcggcctcggtcccgcccccggattgtgtatgatcttcttctttcctacacccttcagagttccgacccaatccctctttcacttgccgtgctgcaatgcactcttcgttctggctgtctccctgctccccaaataaaactcctcctatctgaagcgtggcttaacttccgtggccattcacagccggtgtcagacagccttctggagatgcaagacattgggtttttccctgactctatgacatgtaattaccttatatcttctctttgtgctgtgatcagttggaggaggcagctaaaatcttgaagggtatgagcggagctggctgccctcctgatctggagagttttgctggtttaattactgcaatgtgcacatttagaaggaccggtgatgcaatagagttagtgaagcaaatggtgcaaaaagcttgattgacaccaaggcagggaacagtgaaaaaagttgtggcaactttgcgggcaaatagagagatatggaaagctgttgagttgattgaattcttggagaggaaaggtatccctgttggctttgagagctatgagctagttgttgaaggatgcttggaatgttgtgaatatgttttggctggaaaggtagttgtagcaatgactgagaggggctttataccatatattagggtccggcaaaaggttgttgagggcttagttagagtcaatgagttgaaacttgcctatttagtaagggaaagattttcagaattggggtcttaggctcttcgctgcttttagctcggcatgagtcacctaagtgaagaaaatcagtcattgtcgtga

SEQ ID NO: 20053 - DNA, 542 bp, Gossypium hirsutum
  unsure (1)..(542): unsure at all n locations
  Clone ID: uC-gsronu33B098b11b1
ctataggtatgctggacgcccgtggtggtgccgttccattactcccgggacgtcccacgcctccgctttcttttccgcccacacgcgcgcataaacaannggtacttttataaaacttttgcgtgttttaaacatcccgtttgtgcacatgctaaatcatcaaaataacatcctgatgtatgagcatctaattgcttagcgttgctattggtgacatgctcatgcctctagctaactttatttagatgaagatgctaggtccccttcctatcttaattaatggaagcttgctcttaatttcattttttgagtataatctcaattttcagacataattaaaagaaatgtatcaaagttatttactgcctgtaatgatgctccacagatgggaccatagcgacatatttgggctttgcacatcaatggctattattcttgacttggctttattttgaattgcacactaattttatcttgcattgcccttataatttccagaatacccaggcgaggtttcttcccaggctttgcaccctgttggc

SEQ ID NO: 20054 - DNA, 493 bp, Gossypium hirsutum
  Clone ID: uC-gsronu33B106b11b2
cccactcgtccgcccacgcgtccgcgtatacatggcttacatcatttggccttctacatagcggagtcatagtgtatgtgcacatgcgaaatcattaaaataacatcctgatgtatgagcatttaattgcttagtgttgctattggtgacatgctcatgcctctagttaactttttttagatgaagatgcttggtttcctttctatcttaattaatggaagcttgcttttaattttattttttgagtataatttcaattttcagacataattaaaagaaatgtatcaaagttatttactgtatgtaatgatgtttcaaagatgggaccatagcgacatatttgtgctttgtacatcaatggctattatttttgacttggctttattttgaattgcacaataattttattttggcattgacctataatttcaagataccagtgtgaggtatctcccaggcttctgcacctgtgtccctcaagagtgtagtgact

SEQ ID NO: 20055 - DNA, 541 bp, Gossypium hirsutum
  Clone ID: GOSHI-09MAY01-C113712_1
tacttcgtccggcaattcctgttcttgagcgctcgatcgagattccagtggttgtggatggccaaactcatgcacttgctaaatttgctggatgcatgcagttaggtgatacctatgcaatgcagggccaaatcgagaactcaatattgtgttatacagcaggtttggagatccaaagacaagttcttggagaaactgatcctcgagtaggcgagacatgtcggtatgtggctgaagcacacggacaagcactgcagtttgatgaggctgagaagctttgtcaaatagctcttgacatccacggtgagaatggtgcaccggcttctatcgaagaagctgctgatagaaaactcatgggactcatttgtgactcaaaaggagactacgaatcagccctcgagcactatgttttagctagcatggccatggcagcaaatggcaatgaagtggatgttgcttcaattgattgtagtatcggagatgcatatttatcgttggctcggtacgatgaggcaatttggctcatcaaaaagcactcaca

SEQ ID NO: 20056 - DNA, 468 bp, Gossypium hirsutum
  Clone ID: GOSHI-09MAY01-C113672_1
gctgaatatgcagcattgaaagaaagaaacaagtccatggaagattaattgaagtatatgcgagatcggtattccgagataagcctcaattcgcagaggtggaaggtgaacgacaacggcttctgatgacggtacgtaaaataaagaatgccaagaagagctgaaaggtattcatttcttcgtatacaagttactacaatgtatagttgaagtagcagctggatttgtacccacacggaaattgcaggtgagacagtttcctctttagaatgaaaaagaaattaagttgtacaaaaaaatcaaaaacgcattcacctcacctagtagtttccatatatagtttattttttataaaaaattttactttgcatgttttgcatgtttggttcttgctcttatattaaagattgtcatgaacatttccacaaatatatatatattgacaaagcataaactagctcttctttt

SEQ ID NO: 20057 - DNA, 811 bp, Gossypium hirsutum
  Clone ID: GOSHI-09MAY01-C113172_1
agaaattcctacttctccttcagcaaacaagggttttaaattgaccaagcaaagtatgtggagatccgcaccaaattggcttgctgtttcagctaatcggcatccttcttctgctgctcatttcatgtctaatcaacaaagccttgggctccaacttgcacagcttagtcgagatgcatctgctgctggtgctgctcgccgcatatctgcgcaaaggcagaatgtggaagtagagtcggttggggctattaaatcagatacaaataaagtgaaaaagtactttcgactggagtttataaataaagaacaggaagaagcagaagagtatttggatttcaaggcccttgacaacggatttgttgcagtaactcccttctcactttgtcctcaggtcgaggtggacattcaaaccgccgcatcagattggatctccggtgcacttcaggtggagcaatagaaccctgggaaggccaacaaaaaaaatcttaaatcaatcaatttgtatacatccgcaggaggcattacatttagtcatcaattgagtttgtgcttctattaatttccattgaaatgcttgttctgtattttccctgttcattttttcttctaggggttcccaaaatatcattaactcgggtgtctgtcttttgttctagctgtttgttgatacaaggaaatagcatggtctaaattaaatatgaccatggtctttctgcaaattcttcatgttgttgttgtgggggcttttcatgtaatatggtcttttgatttgtttaaatttatgtgaatgtttctaggcctaaaaaataaa

SEQ ID NO: 20058 - DNA, 554 bp, Gossypium hirsutum
  Clone ID: GOSHI-09MAY01-C113012_1
acgcggggtaatttacctgatgagcctgaagctgtcgcgatgcataagcgaccaccttgccctcttgcatcagtacgcaacctaaccccacatgcgacgcatcagctgtatacagtaaagtccttcccagacaccggttgaatcaacactggcgcttcggtcaatacctttgtcaaccgatcaaaagctttttgctgtttctcggtccagacaaatggtactcctttccttatgagttttgtcaagggtgccgccatcaccgagaaaccctccacaaaccttctgtagtaacctgctaaccctagaaaactctgaatttccgataccgacctaggtggcttccattccagaattgcatcaattttacgaggatccaccttaatcccttcggcagagaccacatgccctaggaaggttacctccttcaaccagaattcacacttggtgaatttcgcatagagctccttttcccttaacactcgcagcacaatacggagatgctcatcatgcttcgcctcgttagagtatacctgtgatagcccaaaattgacact

SEQ ID NO: 20059 - DNA, 726 bp, Gossypium hirsutum
  Clone ID: GOSHI-09MAY01-C8949_1
cccacgcgtccgatagatatggcttcggctgtattcattgagccactacctgttatggggtttgttgctcagctactaggcaaggatttattgtcaaggccattgtctgattccgatcgtgtgaagattaaaaaggcactcagaggagtgaaagtcgaggtaacccatagagggaatgtacgtagaaaataccgtgtttcaggattgacttctcagcctactagagagttagtgtttcctgttgatgataattcaaccatgaagtctattgttgaatacttccaagagatgtatggctttacaattcagcatacacatctaccttgtcttcaagttggaaaccaaagaatggcaaattatttacctatggaggcttgcaaaattgttgagggacagcgatacacaaaaagattgaatgaaaggcaaattactgctctcttgaaagtcacatgccaaagaccaagggatcgggagcatgacattttgcagacggttcaacataatgcttacaaccaagatccttcgcaaaggagtttggaataaaattagtgaaaaactcgtttggtcgaggcttgattcttcctgccccttgctgaaattcatgaacttgaaagaaaggattgttgctcagtgggcatggacatgattgacagaatgttacggatgctggagcatggctgtttactctacaacgtcagaatgtgctcaggtttgatgactgctaag

SEQ ID NO: 20060 - DNA, 420 bp, Gossypium hirsutum
  Clone ID: GOSHI-09MAY01-C8939_5
actttgatgccaaaagttcatcaacactccggaggcagatctggaagttcgcttgtcgaacgcagcgtcgaaatatatcttaatcattgttgtcttcctatgataaatatccgttcatgtactagccgatttctggagtaccatattagccatagagcatagcaaaagagtcgactctgctccttagttccctgcagaagtacccaggtaagccaatcccgaaactcaggtattgagttgttggtaacccatgaaaggtttaacatctgccaagcttctaaacttgtaagacattgtctaaatatgtgcgagcagtctttatcccccaaacaaccgcgggggcagcaagcatttatgagcacccttctgctcctaaggtttacaagtgtgtggcaaataattccaaaagatacgccaaat

SEQ ID NO: 20061 - DNA, 953 bp, Gossypium hirsutum
  Clone ID: GOSHI-09MAY01-C8939_4
cttgcccaaaaaataaacattcattgctatcttcataactcttccattcctcatcatcgtcttctagtctggatctcttgcccaacgaccttccgaaggcgagtcatgcaaattcggttctccttgtaccagcgaacggagatggcacattattgtgaaggactgactttgatgccaaaagttcatcaacactccggaggcagatctggaagttcgcttgtcgaacgcagcgtcgaaatatatcttaatcattgttgtcttcctatgataaatatccgttcatgttctagccgatttctggagtaccatattagccatagtgcatagcaaaagagtcgactctgctccttagttccctgcagaagtacccaggtaagccaatcccgaaactcaggtattgagtctttatcccccaaacaaccgcggtggcagcatgcatttatgagcaccctcccgcgcctccggtttacaagtgtgggcaaataattccaaaagatacgccaaattgtatttgtgatttctgtaggaagttgtaggctccaaagtttgctgtaaaaattttttaatccggtctgtaatataatgctactaggatttagcgaagaatcctgtgatagtttatatggcgctccgaacggtgaattccccagattgttcccccttccaaacttgacggtcagcatagttcatttcagcaagagggatctgtaatattctctgaacaacctcattctgaaagttcccactctccagcatagctctctatggagaagtcccttcgaagcccagatgctcttccaggtgagagaaggtagatttcctaacctagcctccataaaatttgactgcggatagtattttgccttcaaaaccttcgctaataatggaattggataattaatcaatcgacaaccttgatttgctaacaacacgatattaaattagcctaactt

SEQ ID NO: 20062 - DNA, 632 bp, Gossypium hirsutum
  Clone ID: GOSHI-09MAY01-C8939_3
gtcttctagtctggatctcttgcccaacgaccttccgaaggcgagtcatgcaaattcggttctccttgtaccaggtaagaggtgactccgctctctaaagcttcttttgcaacccgcgcggccccggtcgcgtcggagcgggggatgtgcttgaactctattgtttgaaaatgaatgcacctcttctgaatatctcgaataattacttctatgactgatttgtctgtttctgttgtttgacacttcctgattactgttattgaatcccctctgatttgtaattcacggaagcccgataaaatctctaaccgaattgcttccaatcctgcatatgtttctgccgcgaacggagatggcacattattgtgaaggactgactttgatgccaaaagttcatcaacactccggaggcagatctggaagttcgcttgtcgaacgcagcgtcgaaatatatcttaatcattggtgtcttcctatgataaatatccgttcatgtactagccgatttctggagtaccatattagccatagagcatagcaaaagagtcgactctgctccttaattccctgcagaagtacccaggatttagtgaagaatcctgtaatagtttatagcgctccgatgtgaattc

SEQ ID NO: 20063 - DNA, 902 bp, Gossypium hirsutum
  Clone ID: GOSHI-09MAY01-C8939_2
gccttgcccaaaaaataaacattcattgctatcttcataactcttccattcctcatcatcgtcttctattctggatctcttgcccaacgaccttccgaaggcgagtcatgcaaattcggttctccttgtaccagacctgcttgtttctgccgcgacggagatggcacattattgtgaaggactgactttgatgccaaaagttcatcaacactccggaggcagatctggaagttcgcttgtcgaacgcagcgtcgaaatatatcttaatcattgttgtcttcctatgataaatatccgttcatgtactagccgatttctggagtaccatattagccatagagcatagcaaaagagtcgactctgctccttagttccctgcagaagtacccaggatttagtgaagaatcctgtaatagtttataggcgctccgaatggtgaattccccagattgttcccccttccaaacttgacggtcagcatagttcatttcagcaagagggatctgtaatattcactgaacaacctcattctgaaagttcccactctccagcatagctctctatggagaagtcccttcgaagcccagatgctcttctaggtgagaaaaggtaacagatctacatgtgactctaaactctcgacacacagtaggatgatgcagtaccaggagcgccgaacagatctagacagaaaacaataaaaccagaataaaacctaaagacgcataccagaggcggcagacagaaacgtgctagggtagcagactttaccattagtctacaactatatttaaaaacaggcttaatgcacattttagttattgaagtatactacttttttcactttagtccttacaatttcttttagtccactttaatatttaacgttatctgatttttcc

SEQ ID NO: 20064 - DNA, 836 bp, Gossypium hirsutum
  Clone ID: GOSHI-09MAY01-C8939_1
cccacgcgtccgttcagtcttatccagcctttcagtcgatagccttgcccaaaaaataaacattcattgctatcttcataactcttccattcctcatcatcgtcttctagtctggatctcttgcccaacgaccttccgaaggcgagtcatgcaaattcggttctccttgtaccaggtaagaggtgactccgctctctaaagcttcttttgcaatctgatgggcacgtatattatctgatcgggggatatgcttgaactctattgtttgaaaatgaatgcacctcttctgaatatctcgaataattacttctatgactgatttgtctgtttctgttgtttgacacttcctgattactgttattgaatcccctctgatttgtaattcacgaaaacccaataaaatctctaaccgaattgcttccaatcctgcatatgtttctgccgcgaacggagatggcacattattgtgaaggactgactttgatgccaaaagttcatcaacactcccgaggcagatctggaagttcgcttgtcgaacgcagcgtcgaaatatatcttaatcattgggtgcttcctatgataaaatccgttcatgtactaccgattctgagtccatatagcataagcatacaaagagtcacttgctctagttctgcgagtaccagcttatcccaacaacgcgggcacaagcttatacctttgtctaggtacaggtgcaatattcaaatcgccattgatggatttgagagtgggctcaatgtgaaattttatcactgatagctccgatagaaaccgaattagccccaggatccatgtcctcaatgtgatagatatta

SEQ ID NO: 20065 - DNA, 448 bp, Gossypium hirsutum
  Clone ID: GOSHI-09MAY01-C8889_1
cccacgcgtccggctaaagagatcccttcagagtttactggtaattctcccagggggatgtgcagaaatggacaagatttccggctcaagaagaatgggtgatgcttctgaagttggagatgatatgagtgacagagtttatactattgattctatccatactggggttccatataagggagcccctgagcccaaacctggagttggagattgtcttgattatgcatacactccaagggatgtacttaatctgcctgatggatgtgatcccaatatcaagaagctctatacaaggcttcaggcccttgaggctgatagggaatcaatgagacaagcaataatatcaatgcgaactgacaatgcacagttggtattattgaaagaaatagctcaacagttgtgcaaggaaatgccccctgaaagacaattgaccgtgaggaagccatct

SEQ ID NO: 20066 - DNA, 761 bp, Gossypium hirsutum
  Clone ID: GOSHI-09MAY01-C8579_1
gttcgctgttcatctcatttttgcttgtttcagaacggggcagcggtcaagcgaagagaaagagacaggaaccgggatagcctggaaactgaagccaaagaccttgacttttggtacgccgttccgtttaacaaagatccgtttcagaatcagtcgtcgtcaagattctctttaagatctgataattctcacctttccagaaacggggcagcggtcaaggcggagaagaaaggagacatggcgaccaaagtatcgaacttttcggatctgatacaacgtgttgcagcttcttgtttattgcacccgctcgccgccggtaggcaagaatccggcgaagctgacgccctgactgacgatgttattgaggaggaccctgatgaagaagaatactacgagtataacaattcgagtgaggatgaagagaaagtaaatggggtgaagggggcggaaaagtcgaggagaatagcgacagtttggaacaataacggagagaaaacgaaggaaatggtgacgttaatggaggaggttttcgaggcggtggcggaaatgaagaaggcttacgtaaggctacaagaggcgcattgtccgtgggacccggagaggatgagggcggctgacgttgcggtggtgggtgagctgaggaggcttggggtgttgaggggaaaggttcaggagaggggcgcgcgctggtgggcggtcgaggggaaagacacgtgggctatgctgaagaagtggtggggcgccatacgaagcgggcggtg

SEQ ID NO: 20067 - DNA, 589 bp, Gossypium hirsutum
  unsure (1)..(589): unsure at all n locations
  Clone ID: LIB3829-027-Q6-K6-H11
ggnacttccttttcttggtatttgatttttgctatcttcagctgatgtggtgttacgttttatcctgcgcatcctcatttaataagaaagtttgcaactttgcttngaaaagactccaaagcttttctcactcactgagttcgctgttcatctcatttttgcttgtttcagaaacggggcagcggtcaaggcgaagaagaaaggagacatggcgaccaaagtatcgaacttttcggatctgatacaacgtgttgcagcttcttgtttattgcacccgctcgccgccggtaggcaagaatccggcgaagctgacgccctgactgacgatattattgaggaggaccctgatgaagaagaatactacgagtataacaattcgagtgaggatgaagagaaagaaaatggggtgaagggggcggaaaagtcgaggagaatagcgacagtttggaacaataacggagagaaaacgaaggaaatggtgacgttaatggaggaggttttcgaggcggtggcggaaatgaagaaggcttacgtaaggttacaagaggcgcattgtccgtgggacccggagaggatgagggcggctgac

SEQ ID NO: 20068 - DNA, 487 bp, Gossypium hirsutum
  Clone ID: GOSHI-09MAY01-C8519_3
cccacgcgcccggtctcttacagctaagcttcaagcaaaatatggggtttgcagtagcaactaaagctgccttgctcctgcacctttcccttttcgtactgagtagcttcacggtgtcttctcagatcttgcctgaggctttgcctcctcattaccatggaatttcgcctgtagtgccacctgctcacccaccaagccaccaccaccaccatcaccatccccatccgcatccgcatccgcatccgcatccgcatccccaccagccaaccccttcccctactaagcccccaactcacccacctgtttaccccccacccaaagcacccaagattgctccagtttatccaccacccaagtcaccaagcaagccgccaacttacgctcctcctcccaagtcacccagcaagccgacaacttacgctccttcacccaagtcacccagcaagccgcaacttacgctcctcgtccaagccaccgaccaagccac

SEQ ID NO: 20069 - DNA, 1297 bp, Gossypium hirsutum
  Clone ID: GOSHI-09MAY01-C8519_2
ttcacgcgtccgcccacgcgtccgcccacgggggcgttttcgcgtccggaccatttccaccatcaccatccccatccgcatccgcatccgcatccgcatccgcatccccaccagccaaccccttcccctactaagcccccaactcacccacctgtttaccccccacccaaagcacccaagattgctccagtttatccaccacccaagtcaccaagcaagccgccaacttacgctcctcctcccaagtcacccagcaagccgccaacttacgctcctccacccaagtcacccagcaagccgccaacttacgctcctccgcccaagccaccgaccaagccaccaacttacgcccctccacccaagccaccagtttatcctccaactaagccgccaactgcgcccccgactaagccaccagtgcatccaccgacatatcctccaccatcgccttctccagctaagccgcctacttatcctaaaccacaaaggagcctagtggctgttcagggcgttgttttttgcaagtcatgcaaatacgctggatccaacaccctgttgggagcaaaacctattttgggcgccactgtaaagctgacatgcaagaacaccaaatacaagcaagaggccactgcgaaaactgacaagaatggctatttcttcctgcaagcaccaaagaccgtcaccagctttggagcccacaaatgcacagtgtctctagtatcatcgccaatggctaaatgcagcaaaccatctaatctccatggtggattgaagggagctaccttgaggcccgagaagccatttactgcgaacaagcttccgtttattctctacaccgttgggccatttgctttcgaacccaaatgctactagaaacttagattccactcttttcctttgttgctcttaatgtgttaccagtgcttacaagttccctagcttattgtaatcgcattttgttcagtgtattgctttgtgtgaaaatagattacagacgaataatcaatcgatttctactttgactaaaaaaaaaaaaaaaaaaaaaaaaaaaaaaaaataaaaaaaaaaataaaagtaaaatataataaatataataaaaaaaaaaataaaatattactatattaaaattattattattttaatatctattaattaattttatattggggtggtcttttatgagtatccaatattttctactttgttttaataaaacatataattttttttttttggcgtctctcaaaatttattttcagcggtcccctttttttcaacactttttttaatgggaaaa

SEQ ID NO: 20070 - DNA, 1237 bp, Gossypium hirsutum
  Clone ID: GOSHI-09MAY01-C8519_1
ctcttacagctaagctttaagcaaaatatgaggtttgcagtagcagctaaagctgccttgctcctgcacctttcccttttcgtactgagtagcttcacggtgtcctctcagatcttgcctgaggctttgcctcctcattaccatggaatttcgcctgtagtgccacctgctcacccaccaagccaccaccatcaccatcaccatccccatccgcatccccacccgccaaccccttcccctactaagcccccaactcacccgcctgtttaccccccgcccaaagcacccaagatggctccaggttatccaccacccaagtcaccaagcaagccgccaacttacgctcctcctcccaagtcacccagcaagccgccaacttacgcccctccacccaagtcaccaccaccatcaccatccccatccgcatccgcatccgcatccgcatccgcatccccaccagccaaccccttcccctactaagcccccaacttacgcccctccacccaagccaccagtttatcctccaactaagccgccaactgcgcccccgactaagccaccagtgcatccaccgacatatcctccaccatcgccttctccacctaagccgcctacttatcctaaaccacaaaggagcctagtggctgttcagggcgttgttttttgcaagtcatgcaaatacgctggatccgacaccctgttgggagcgacgcctattttgggtcagtttgaaacctatcattatacttaaaaaaagagattaaaatttacatcttttcactacacaaaaactttaggtgcaatgcttggttatattcatttgcatcgagaattattagccctagtacgtctatctttttaatggcctaataatttggattaagcatgcatgtgatttccatggttggttgaaaaggggaacttgctttttaaatttgggtcccagaaagagagatatagagagatataaagagaaaagggttcttggatttacctaaaagtgccttggaagtgaccctaaacattggggttttaagtttaacgcggaaacttcactttttacaagtaaggctaatcctgggggtccaacaatagagagtggttgcttctttttaggggaccctcgtaaacttaaacaagggaaacctaatgctttttctttcccttggagattattattaaactatcggagaatcggataaggccctgtggttttttgggccctgaaactactaat

SEQ ID NO: 20071 - DNA, 449 bp, Gossypium hirsutum
  Clone ID: uC-gsflnu33B075f02b1
atgccgccaacttatcctaaaccacaaaggagcctagtggctgttcagggcgttgttttttgcaagtcatgcaaatacgctggatctgacaccctgttgggagcgactcctattttgggtgccactgtaaagctgacatgcaagaacaccaaatacaagcaataggccactgcgaaaactgacaagaatggctatttcttcctgcaagcaccaaagaccgttaccagctttggagcccacaaatgcacagtgtctctagtatcatcgtcaatggctaaatgcagcattccatataatatgcatggaggattgaagggggctaccttgaggccctggaagccatttactgtgaacaagcttttgtttattatatacaccgttgggccttatgctttttaacattaattccattaaatacttaatatttacttttttacttagtcttcttt

SEQ ID NO: 20072 - DNA, 257 bp, Gossypium hirsutum
  Clone ID: LIB3272-055-P1-K1-H3
cttacagctaagcttcaagcaaaatatggggtttgcagtaacaactaaagctgcctggctcctgcacctatcccttttcgtactgagtagcttcacggtgtcttatcaaatcttgcctgagggtatgcctccttataaccatggaatcttgacaagagtgccaactgatcacacatcaagcctctattactagagtcaccatgaacgaccgtattcgtatccgaatccgtattcaggtccttatcacccaaccattt

SEQ ID NO: 20073 - DNA, 568 bp, Gossypium hirsutum
  Clone ID: GOSHI-09MAY01-C8539_1
tccggaattgaccaaaatggagaaattgagagtttgcatagtggtgttagcttgcgtggtggtatcggcggcagcccaaagtgcttccaatgtgagagctacttatcatctttacaatccgcagaacataaactgggacttgactgctgcaagtgctttctgcgccacatgggatgccagtaagcccttagcatggcgtcaaaaatatggatggactgctttttgtggtcctgctggtcctcaaggtcaagctgcttgtggccgatgcttaagggtgaccaacaccgccactggaactcaggcaacggtgagaatcgtggatcaatgtagcaatggagggctggatttggatgttaatgtatttaaccaacttgacacaaatgggattgggaatgctcaaggtcacctcactgtcaactatgaatttgtaaactgtggtgactaaacccactttctagtaattaaaatgagtttcaaccaaataaatgctttgtatcactactaaataaatccattctcgaataaaacttagcagcacttgttgcttgcaagttgctaaatttacttt

SEQ ID NO: 20074 - DNA, 739 bp, Gossypium hirsutum
  Clone ID: GOSHI-09MAY01-C8489_1
accctacttactacccctttaactacctggcttcttcacactctcttcgtgctcccgccgtatttcacttcccctctcttctctcttcttttccttccttccttccttccttctgtcaacaccactctctaatggcttcccttgctggttcatcaatctctatgcaacctcgccagaccctggctacaagcagggtttctgggttgaaattggtttcatttgtgaaccggggaagaagcagcctctcctttaggctgcgtccggatcgcttgcggatttcatgtgctgccaaaccagagacagtggataaggtatgtgaaatagtaaggaaacaactagccctaccaagtgacaaaccagtcacaggtgaatcaaaatttgctgaacttggagccgattctcttgatacggtcgagattgtgatggggcttgaggaagagtttggaatcactgtggaagaggacaatgcccaaagcatatcaactgttcacgatgcagccgagcttatcgacaagctctgcggcgagaaaagtgcctagaaacaaaccaaggacctaagtttgggattcatttgccaatttatttgtgaactcatcatgcctatttatttgttcaaatctagtaaaactcataaagtggttggtattttagttaaattatggatttaacgcttttgtgttgtaagtcaagaaaatactatttgatcttctttttcagtaagttgctagcatatataatt

SEQ ID NO: 20075 - DNA, 422 bp, Gossypium hirsutum
  Clone ID: uC-gsflmaxxa096f07b1
tgaatggctacaagcagggtttctgggttgaaattggtttcatttgtgaaccggggaagaagcagcctctcctttaggttgcgtccagatcgcttgcggatttcatgtgctgtatgtttctcattgaatgatatgatattcgtttctacgcaatgtaacccattagtgaagggcaaaggctatataacagggatttacatttctttttagtgtccattccatcgacaataagggaaataacatggacttgtaaattaaatagagagatgataagataagaatccacttgtggactctcttctaacagtgcatggttttcttatctttgatatttctcgtatgggactgtttgaaatatggctaactgtttgtgctattattttgctaactctaaggagcgcacggaatggttggcaagtcac

SEQ ID NO: 20076 - DNA, 448 bp, Gossypium hirsutum
  Clone ID: LIB3135-058-Q1-K1-A11
ctctctcggtgctcccgtcgtatatgactatccatctcttagatattcttattgtgactgccgtggtatcgtgaagaccgctgggtaagggaacttcttgcttggtcacacatgtgtatgctgcctttccagactttggatacaaagccgtttcttgggttgaagatcgattcacttttgaaccgccaaagaagcagcctcttctttaggctgcgaccggatcgctcgcggattgcatgcgctgccacaccagagacagagggtaaggtatgtgaaataggacagaaacaactagccctacctagtgacaaagcagtcacaggtgaatcaaaatatgctgaacttggagccgattatcttgatacggtctacaccgtgatcgggcttgacgaagagctaggaatcactgtggtagaggacaatggccaaagcatatcaactgtcatga

SEQ ID NO: 20077 - DNA, 381 bp, Gossypium hirsutum
  Clone ID: LIB3146-010-Q1-K1-F8
aaccgcgccggactggcccggacgacccacgcggtacccacgcgtccgcccacgcgttcgcccacgcgtccgctctctaatggcttcccttgctggttcatcaatctctatgcaacctcgccagaccctggctacaagcagggtttctgggttgaaattggtttcatttgtgaaccggggaagaagcagcctctcctttaggttgcgtccagatcgcttgcggatttcatgtgctgccaaaccagagacagtggataaggtatgtgaaatagtaaggaaacaactagccctaccaagtgacaaaccagtcacaggtgaatcaaaatttgctgaacttggagccgattctcttgatacggtcgagattgtaatggggcttga

SEQ ID NO: 20078 - DNA, 654 bp, Gossypium hirsutum
  Clone ID: GOSHI-09MAY01-C8459_1
ggaacaacatgaaaacctccctttttttcttgtacttattatctctctcatatttcaatgtaggaaactaaattccctagtcttgtttttgctctatattgtcttttctacattttcatttgatatacttacattctagactttgttgctttaatttatttatttctatttccaggtggtgcaagtatccggtacaggcagaagcgagggtaaggagaacccatttacagccaaagcctcgttgattcgttactggaacaatcacatttccaacaatcttcccaagccaccatttcttatctccaaagcttccccactaaacgccattgacttggccaagctcactcaacttgccaatcataactctctgtcttcccacattgaatctttttgttccttagccaatcttttctgctcattccaggaggaatcctcgaaactagacgcagttggcaagggtaaaggggatgcaaacttcgcagtgtattccagtaaaaactttaaaggttatggctcgttaagtcgcggagggatcgactccttcaagaactactccgatgggttaaatactcccaatgagtcttttaagaaatacagcaggggatccaatgcccatagtgaagacttcacaagctatgccaaagatgccaacgt

SEQ ID NO: 20079 - DNA, 431 bp, Gossypium hirsutum
  unsure (1)..(431): unsure at all n locations
  Clone ID: LIB3493-039-P1-M1-H5
catgaaaacctccctttttttcttgtacttaggatctgggtcatatttcagtgtggtgctagtatttggtacaggcagaagcgagggtaaggagaacccatttacagccaaagcctcgttgattcgttactggaacaatcacatttccaacaatcttcccaagccaccatttcttatctccaaagcttccccactaaacgccatcgacttggccaagctcactcaactcgccaatcataactctctgtcttcccacattgaatctttttgttccttagccaatcttttctgctcattccaggaggactcctcgaaactagacgcagttgtcaagggtaaaggggatgcanaacttgcagtgtattccagtaaaaactttaaaggttatggctcgttaagacgcggagggatcgactccttcaagaactact

SEQ ID NO: 20080 - DNA, 600 bp, Gossypium hirsutum
  Clone ID: GOSHI-09MAY01-C8479_3
cccacgtgtccgcccacgcgtccgcccacgcgtccgatcattacctgtgaaattctgttctcatttttctttcaagaactaagcgaaaatggcagcagaggaaggccaagtctatggttgccacactattgaatcatggaacgaacagcttcaaaaaggcaacgaatccgaaaaattggtggtggttgatttcactgcttcatggtgtggaccctgccgtttcattgcacctttcctggctgaactagccaagaagttcccttctgttacctttcttaaggtggatgtggatgagttgaaggaagttgctaccgattgggcagtggaggctatgccgactttcatgttcctcaaggaggggaagattgtagacaaagtggtgggagcaaagaaagaagagcttcagcagactctgtcaaagcatatggctgtccccagtactacttcagcttgattttatgataattattagttcaactgtttttaatctttcatgtttggaggaacttgacctcatgattatgtcctgccacatctcttatggtattagaccttaagtttctttatctatggatccttcattttctttaaagcatgcat

SEQ ID NO: 20081 - DNA, 493 bp, Gossypium hirsutum
  Clone ID: GOSHI-09MAY01-C8479_2
ccccgcgtccgccccgcgtccgatcattacctgtgaaattctgttctcatttttctttcaagaactaagcgaaaatggcagcagaggaaggccaagtctatggctgccacactattgaatcatggaacgaacagcttcaaaaaggcaacgaatccgaaaaattggtggtggttgatttcactgcttcatggtgtggaccctgccgtttcattgcaccttttcttggctgaactagccaagaagttcccttctgttacctttcttaaggtggatgtggatgagttgaaggaagttgccactgccaaaatcattgaaatgcagtcggcgagtcagtggagagcccagctagaggcctccaagcaaagtaccaagttgctggtgatagatttctcggcgacctggtgcggaccctgcaaatggatggaaaccgtgattgatgatatgccactatatgatgatgttgagttcatcaagatcgatgttgataccttga

SEQ ID NO: 20082 - DNA, 540 bp, Gossypium hirsutum
  Clone ID: GOSHI-09MAY01-C8479_1
acgcccacgcgtccgcccacgcgtccctgcccgtccctaacatcccaaaaatccaacccaaagtcacttccttccatcgagctacaaccaaaagaaaaagaatgggaaataaagcctccactgccaaaatcattgaaatgcagtcggcgagtcagtggagagcccagctagaggcctccaagcaaagtaacaagttgctggtgatagatttctcggcgacctggtgcggaccctgcaaatggatggaaccggtgattgaagaatatgccaacttatatgatgatgttgagttcatcaagatcgatgttgataccttggaggatgtggctcgtcaattcaaagttgaagcaatgccgaccttcgttcttgttaagaaaggcaaagaaatatgcaggctggtgggtgctaaaaagactgaactccagaagctcattgagaaacacaggtttgataattagcttgtttttgggggggcaaactataaatatggggggtcgaataagcttattgaagggtttcactttcttttttttgtatcca

SEQ ID NO: 20083 - DNA, 482 bp, Gossypium hirsutum
  Clone ID: LIB3584-018-P1-K1-D9
ctgcctctgaaattcatggctcatgaagtttacatgaactacacgaatgtgacagtggacgcatgtcgagaatacagttgccacactgtgcaatcatcgtacacacagttggaggccggggatgtattgcaaaaagaggcggcagtagatagcactgcttcatggtgtggacactgccgttttaatgcacactgttctggctgatactagcctataagttgcctgttggatcctttgttaaggcggatgtagacgagttgaaagaagatgctgccgattgtgcagtggaggctatgccgactttcatgttcctcaaggaggggaagattgtagataaagtggtgggagcaaagaaagaagagcttcagcagactctgtcaaagcatatggctgtccccagtactacttcagcttgattttatgataattattagttcaactgtttttaatctttcatgtttggaggaacttgacctcatgat

SEQ ID NO: 20084 - DNA, 526 bp, Gossypium hirsutum
  Clone ID: GOSHI-09MAY01-C8779_1
tgattccattgatttctacaaacaacaaataaaagaatttgataaaagaatgaaactagagcgccagaaaattctcaaggactccaaatctatcctgcctgttgcttttgtatcattcaaatcacgttggggggctgctgtttgtgcccagacacaacaaagtaaaaaggctacactgtggttaacagattgggctccggaaccccgtgatgtttattggcgaaatctggcaataccatttgtctctttgaccattcggaagctaattatatcattatcagtatttgccttggtatttttctacatgatacccatcgcatttgtgcaatctcttgcaaatttagagggtcttgaaagagttgctcccttccttaggccagttatagaactgaacttcatcaaatctttcttgcaaggttttcttcccggccttgctcttaagatctttttgtatgttcttcctacaattttgatgatcatgtcaaaaattgagggacatatagccatattaactcttgaacgacga

SEQ ID NO: 20085 - DNA, 821 bp, Gossypium hirsutum
  Clone ID: GOSHI-09MAY01-C8769_1
tcggccacgcgttcggggacccctgggggggaaatctcgttccccatcgacgcctctgcttatcgcatcatcagccatgtcgaggagaaaggttagggagccaaaggaagagactacaacccttgggcctgctgtacgagacggagagcatgttttcggtgttgcccacatttttgcatcttttaatgacactttcattcatgtgactgatttgtctggaagagagactatggttcgtattacaggtggtatgaaggtgaaagccgacagggatgaatcttcaccttatgctgctatgcttgcagcacaagatgtttcccagagatgcaaggaacttggaatcacggccctccacatcaaattacgtgctacaggaggtaacaaaaccaagacccctggtccgggtgctcagtcagctctcagggctcttgctcgctccgggatgaaaattggccgtatcgaggatgttacacccattccgactgatagcacccgaagaaagggtggtagaagagggagaaggctataaactagcacattatgttctagcaaatctatcattttaagtgtttttttggtggcattggcatttggttaattggtaataactgttctttatgagccctttttcatagttttatattggtatattttatattggagttgtagatcataatgaaccgtgaatctagtatggtgatatttttattaaaaatttgtgggttttatcattgctgttcatatcataggtagtccctaaacaaaaattgtaacttgtgatgttacttttaccaagtaatgctcatgtggaatttatttat

SEQ ID NO: 20086 - DNA, 437 bp, Gossypium hirsutum
  Clone ID: GOSHI-09MAY01-C8739_1
agttttctgagcagcttatccatcaatggcttcctttaacccaagtgggtacgaaaagtattcaggttcagcagcagaagcaaccaagtttggccaagacgccgccacgactgggattccagttagctcctccaacgcctactacaccgacacttctcaaaacaccaacactcgtcctcagactaaaacgagagtcccttggtcatctggcctctgtggctgcttctctgactggagaaactgttgcataacgtgttggtgcccttgcgtgacttttggccagattgctgagattgtagataaaggatcgtcatcgtgtggggtaaatggagcactttacacactgatagcatgcgtgacggggtgcgcatgttgctattcctgcttttaccgagccaaaatgaggcagcaatacatgttgaagaaacacccttgcg

SEQ ID NO: 20087 - DNA, 2255 bp, Gossypium hirsutum
  Clone ID: GOSHI-09MAY01-C8699_1
cccacgcgtccgcccacgcgtccgtatgaagtgggttgaagatgtttgggtcttgagtatgacctggatcttttcaatgttgtcgctgttcctgatttcaacatgggagccatggaaaacaagagtctgaatattttcaattcaaagcttgttttggcttctcctgaaactgcttcagatgctgattatgctgcaattttgggtgttattggtcacgagtattttcacaattggactggcaacagagtgacttgccgggattggtttcagctcagcttgaaggagggcctcactgtgttccgtgaccaggaattttcatctgacatgggaggccgtccagggaagaggattgccgatgttccaaagcttcggaattttcaattcccacaggatgctggtcccatggctcatccggttaggccacatgcttgcattaagatggacaacttctacacactgacggtttatgaaaagggagctgatgttgtcaggatgtacaaaacactcctaggaactcaagggttccgaaagggtatggatctttactttaaaaggcatgacgggcaagcagtaacttgcgaagacttctttgctgccatgaaagatgcaaatggtgcggattttgctaacttcttgctatggtattcacaagctgggactcctgtagtaaaagttacttcatcctataatgctgaggcccatactttttctttgaagtttagtcaagaggttcccccaactcctgggcaacctgttaaagaaccgatgttcattccagtagctgttggtctactggactcaagtggaaaggacatgattctatcttctgtgtatcacaatgggacattgcagtctgttgcaagcaacaatcaaccagtcctcagcactgttcttcgagtaactaagaaagaagaagaatttgtgttttgtgatatattcgagcggccaattccatctctactgcgaggttatagtgctcctatccgtcttgaatctgatctctccgacagtgacctatttttccttctcgctcatgattcggatgagtttaatcgctgggagtccggacaggtgctggcaaggaagctcatgctcagcttagttgctgatttccaacaaagcaaaccattgaccttgaatcccaaatttgttcaaggtctcaaaagcatactttgtgatccaagcttggataaggaattcatcgcaaaagcaataactctccccggtgaaggggaaataatggatatgatggaagttgctgatcctgatgctgttcatgctgttcgaaccttcattagaaaggagcttgcctcacaactaaaatctgagtttttaagcacagttgagaacaatagaagctcagaggagtatgtatttgaccatcctaatatggcccgacgtgccctcaagaatactgctcttgcatatcttggttcccttgaagattcagagatgacggagcttgcactgcatgagtacaagactgcaacaaatatgacagaccaatttgctgctttgtctgccatttcccagaaaccaggtaaaactcgtgatgacgttttggccgacttctataccaagtggcaacataactacctggttgtaaacaaatggtttgcccttcaagccatgtctaacattcccggtaacgtcgagaatgttcgcaaactcttaaatcatccagcatttgaccttcgtaatccaaacaaggtgtactcacttatcggaggattttgtggatctcctgtgaatttccacgccaaggatggttccggctacaagttcttgggtgaaatagtactacaacttgacaagctaaatcctcaggtggcctctcgcatggtgtcagccttctcaaggtggaggcgtttcgatgaaagccgtcaaacactagccaagcaacaactggagacgataatgtctgccaatggattatcagagaacgtattcgagattgctttaaagagcttagcttagttttatagcttagctgtttaaatggtatcaaataacatttgctgctctgctcattgagttatagacaaagaaatattaaaccaaaaaaaagctgttaattatgtcataaagtgaagagtgtttttgtgtgtgtttttagtattgtggaagtgagagtgaaaggtttttatcttgaacaatttcgttatagattatgatcatatctatttctttacacaatacttaaaattactcatcgtttttttctactcataaataagaaataatatttttagcac

SEQ ID NO: 20088 - DNA, 411 bp, Gossypium hirsutum
  Clone ID: LIB3272-009-P1-K1-C7
ctttactttaaaaggcatgacgggcaagcagtaacttgcgaagacttctttgctgccatgaaagatgcaaatggtgtggattttgctaacttcttgctatgtcaagaagtacccccaactcctgggcaacctgttaaagaaccgatgttcattccagtagctgttggtctactggactcaagtggaaaggacatgattctatcttctgtgtatcacaatgggacattgcagtctgttgcaagcaacaatcaaccagtcctcagcactgttcttcgagtaactaagaaagaagaagaatttgtgttttgtgatatattcgagcggccaattccatctctactgcgaggttatagtgctcctgtccgtcttgaatctgatctctccgacagtgacctatttttccttctcgct

SEQ ID NO: 20089 - DNA, 362 bp, Gossypium hirsutum
  Clone ID: LIB3083-003-Q1-L1-H2
ccaacgggtgtgtttctgtactttaaaacgcatgacaggcgagcaaaagctggcaaaaacttgtttgctgccatcaaagatacaaatggctcggattttgctaactcattgctatggtattcacaagctgggactccagtagtaaaagttactctatcctacaatgctgaagctaatactgggtctataaagcttattcaacaagtacacataactcatgtgcaacctgttaaacaaccgatcttcatttcagcagctaacggtctactggactcaagtggaaaggacatgattctatcttctatgtataacattgcgacattacatactgttgcacgcaacaatcaactagacctgagcac

SEQ ID NO: 20090 - DNA, 1335 bp, Gossypium hirsutum
  Clone ID: GOSHI-09MAY01-C8659_1
cccacgcatccgctgactcctgggcgggaatcgaaaccatctgattcacgccatggagacctctggcattgtttgtaagacagtttcaaggttgccggcggctagggttgattttagcggacggttatccagggagttgaatcatggtgttggagattccagggtttcagttaggccgaggattaaatcttgcaggagattgagttgccagttttctgatttagggcatgtccagtattatgtgtcaccgaggggtggtggtggcgatgccacgaagaaagacaagggaaagagctgtgagattaaacaagtcaagaacaagctgaagcttctcaagcggttgtccaaggacttgtccatgcttcctcagattgctaatggcgaggatactaggattggattggccgctgaagttaaggccacgatcattcatgaagcaagcggtgttttgcaggcccaactgcaaaagttgaaatcagaacaaaaggagttgaagagaaaattgaaagaggaacgagccaagctcaaagccacttttgggaaatcagaatcatcatcttcctctgaatcaagtgacagcgaatgtggggaggtagttgacatgaaagccctgagaaacaatgctttgaaaccttccctagaggcagaaacaccaattggcaatgctttgaaacgacccctagagatagttatagaagctcccccgctcgcccgggaagcaacattagctaactcgctcatggaactagaaaactcagattcaagcccccaaattcgaatacgagttcctcttgctggattggatggtgaatgttgcagttcaaatggcttcaaggatgggcagagcaacatccttgtggaagggacatcaaccaagcagattgaagtttgcatgggtggcaagtgcaagaagatgggagctgcggcgttgttagaagagtttgaaaggaagttgggggaagagggcactgttgtggcgtgcaaatgcatggggaagtgcaagacctctccaaatgtaagggtcttgaactctcaaacggaaactacaacgagaatcaatgaagactctgttagacttgggattaatcctacatgcacgggtgtcgggttgcaagactttgacctcatcgttgcaaatcttttgggcaagaacatagatgatgaatgtctggtgctctcttcttgagtcttcattttgtttcattcttcgattacgatcatgaatttgttaatagtgtgaataggggacatatagtggatgagctattggcatggatgaaactactttaaatctaggctctagcggtctagatgataatgtaaaatgcttttatc

SEQ ID NO: 20091 - DNA, 451 bp, Gossypium hirsutum
  unsure (1)..(451): unsure at all n locations
  Clone ID: uC-gsronu33B008e06b1
tttccatgcgtccggnaagcaacaaaaacngggtggggtttattttaagaaaactcaggttcaagcccccaaattcgaatacgagttcctcttgctggatcggatggtgaatgtggcaattgaaacggcttaaagaatgagcagagcaacatccttgcggaagggtcatgtcccatgcaatatgaatcgacaatgatacgcaagcgcaaagaacatgctaacggaggtcccctctgaagaggttggaaggaattatttaggatacatccactgctgtggcctgcaatatgcatgtgctgttcaagacctctccaaatgtaagggtcttggacttctaaaacaggggctacaacaagaatcaatgaagactctgtgagaactgtgaattatcctactagcactggtgtcgggttgcaagactttaacctcatcgttgcaaatcttttgggca

SEQ ID NO: 20092 - DNA, 529 bp, Gossypium hirsutum
  Clone ID: uC-gsflnu33B062d03b1
agctggtacgcgtgcgggtgccggtccgacttcccggaatgaccccacgcgacccacaacggctccctcgcgggccaggactctgtccatgcttcactcagattgatgatggcgaggatattaggattggattggccgctgaagttaaggccacgacgattcacgaagcaagcggggttttgctggcccaactgcaaaaattgaaatcagaacaaaaggagttgaagagaaaattgaaagaggaacgagccaagctcaaagccacttttgggaaatcagaatcatcatcttcctctgaatcaagtgacagcgaatgtgggaggtagttgacatgaaagccctgagaaacaatgctttgaaaccttccctagagtcagaaacaccaattggcaatgctttggaacgacccgaagagatagttatagaagctccaacggtggcagaggaagcaacattagctaactcgctcatggaactagaaaactcagattcaagcccccaaattcggatacgagttcctcttactgga

SEQ ID NO: 20093 - DNA, 239 bp, Gossypium hirsutum
  Clone ID: uC-gsronu33B008e05b1
gactctcttttgtttggggacggagggactcataactgggtcttgttcaaagagggatgaggttccgcacgcccaatccatttcgactattgcagggcccaagaagccgatatcagtgttaatcacatttctggaaggaggggcagagcaacattcttgtggaagggacatcaaccaagcagattgaagtttacatgggtggcaagtgccacaagatgggagctgcggccttgttagat

SEQ ID NO: 20094 - DNA, 504 bp, Gossypium hirsutum
  unsure (1)..(504): unsure at all n locations
  Clone ID: uC-gsflnu33B057c06b1
tatcccgaaacccttattttcccctaaatcaaaatttcccctaaaccccaaattgtccccaaatcaaacccatttgccgtctccctttctcttttggttcgacagcaagcagaaagattaagggatttcatttcgaaatcaaacccgactgaaggctagcttttgcgagtccaacaaatcaagttggtcaagaattttagatttacgtttgctgcatcgccttcggtagtctttcgcatcgtcatcggcagccttctgctacatttccgtcggcatccctcttctacatctccgtcggcatccctctgctgcttctccagttttctgtcatccaatttgcttagcttcaatccacattgacttaggtaaggctttgggtcctccattgtggtaattgcgatgaccatgactttcttctttcttcttagatagtgcagcagcatgcctgcacttcctccaatgcttgcctcttctaccaatgcatgtnttaatacttgaacacca

SEQ ID NO: 20095 - DNA, 288 bp, Gossypium hirsutum
  Clone ID: LIB3166-004-P1-K1-H1
cgatcgacagcaagcagaaagaataagggatttcattttgaaatcaaacccgattgaaggctacctttggcgagtccatcaaatcaagaattctgggtttacgtctactgcatcgccttcggtagtcttctgcatcatcgtcggcagccctctgctacttctccattggcatccctcttttacatctccgtcggcatccctctgctgcttctctagttttctgccatccaatttgcttagcttcaatccacattgacttagatactgcagcagcatacatgcactttc

SEQ ID NO: 20096 - DNA, 1025 bp, Gossypium hirsutum
  Clone ID: GOSHI-09MAY01-C8669_1
tgtttgcaaacttctctattgttggaatgaatgtgagtttgatggggaattctgggggcttctaccagatagcaaagctgagcatgagtccagtatcttgctttctggaagttgtttttgacaaggttcgctactcaagggatacaaaacttagcattctactagttctccttggagttgctgtctgcactgttactgatgtgagtgtcaacgtcaagggttttttagctgctgtaattgcagtctggagcacagccctgcaacaatattatgtgcattttcttcaacgcaagcattctttaggatcttttgacttattgggacatactgctccggtacaagctgcaagccttgtgttagctggtccttttgtggactattggttaacagagaaaaaggtctacgcctataactacactacggtatcaacgttcttcataatcctatcatgcaccattgccgttggtacaaacctcagccagttcatctgcatcggccggtttactgccgtatcattccaagtgcttggccatatgaagactattcttgtcctgattttaggattccttttcttcggcaaagaaggtcttaatctacatgtaatcctgggtatggtcattgcagttgcaggaatgatctggtatggtaatgcctcctccaagcccggaggaaaggagcgttggatttattcagctccaagcgacaaatcacaaaaaccagacaatttattgggttctactgaaacagacgagaaggtttaaagattcgattacaggtttaacagttaaaaagggtaaagataaaagagacgaaaactgagccatttacacagaggatcggaattattacaaacttttcgttccttttttatttctttcttttgttgcattcataatggttaatcattttcatgttcctttaatttataatccaaggtgaaaattatgctgttgatagaggaagcaaattccctgtaaatccagcatcgttttcctctaataatatttgcttatagtaatttattt

SEQ ID NO: 20097 - DNA, 374 bp, Gossypium hirsutum
  Clone ID: GOSHI-09MAY01-C8389_1
cccacgcgtccgcgaaaaagaagaatccatggcagtaagaacacaaatattttataacaatggtgaaagcatctgtactcaataggattgtacgcatgagggtgccttttagagagatgatccagttattcaggcaatggtaaggtaattttcctctcaagtagaaatacaaccaagacaatcaaagtaaaacaggatttgtggaacacctgacttgatcgctataatctttacgaaatcatcgtaacgtttaacacattaaatttcagggaaaagtgtcatttttcttgttaggttagtttataaatttgtttacttcacactatcttttgcatggtttaacaagcttaatatatttataacatgtttccctt

SEQ ID NO: 20098 - DNA, 962 bp, Gossypium hirsutum
  Clone ID: GOSHI-09MAY01-C8359_1
ctctttatccgattactccctcccacctctgttctctctttcttcccatatttctcctctccaaatttctcgtctctttttttttctcaaagacaaacccacattcccctcgaaatgtcgttcgatgaagaagactctattgaacacaccctcctcgtagttcgcgaagtctccgtcttcaaaatcccgccccgctccacctccggcggttacaaatgcggggagtggctccaatccgacaagatctggtctggtcgattccgggttgtctcctgcaaggaccgttgtgagatccggttagaggatcccaactcgggtgagctttttgccgcttgtttcatccacccgggacagcgcgagagttccgtcgagccggctctcgattcatctcgatacttcgtgctcaagatcgaggatggcaatggaaaacacgcgtttattgggctcggttttaatgaacggaacgaggcgtttgatttcaacgtggcgttgtcagatcacgagaagcatgttagatgagagaacgagaaagagactggcgagacgagtgacagtgattctcatattgatattcatcccgctgttaatcatagattgaaggaaggtgagactatccggattaatgtgaagcacaagccatctagtggaaccggtatgctttcagctgcgggattgtctggtagtggaaagcctaagaccttgagccttgctccaccacccagtggtgctggaaaaataaggtctcctctcccaccccctcccaatgaccctgttgctgctcggcttgcctctactagtcaaggtgttggtcaaagagcacccaaagaaaacatgaaacaaaccaacccatcaacatatttttctcaactagagaggaatcaccttccagcaaccggatcaggatctacgaagaccactgcatcaggatgggcagctttctaaatttgcattatcatttattc

SEQ ID NO: 20099 - DNA, 439 bp, Gossypium hirsutum
  unsure (1)..(439): unsure at all n locations
  Clone ID: LIB3147-040-Q1-K1-A4
cccacgcgtccgcggattaatgtgaagcacatgccatctagtggaaccggtatgctttcagctgcgggattgtctggtagtggaaagcctaagaccttgagccttgctccaccacccagtggtgctggaaaaataaggtctcctctcccaccccctcccaatgaccctgttgctgctcggcttgcctctactagtcaaggtgttggtcaaagagcacccaaagaaaacatgaaacaaaccaacccatcaacatatttttctcaactagaggtatgcctttagcatgtatgatacttaaaccaaatatagatttcgtgtgctctacatacccaaaagatctgcaaattttgattttggttttctcttgaatgtagcattgttagggaattgggtatcataatatgtttaccacatncacattcgttattttcgtagcttt

SEQ ID NO: 20100 - DNA, 417 bp, Gossypium hirsutum
  Clone ID: GOSHI-09MAY01-C8349_1
cccacgcgtccggttgaccaggaggaggaggattactacattttcccctaaatagtaataccaagagagtgcagcgcctgcaaatgcaactgcaaaatcaagaattaatgaaggaagacgaccgccatgcaacttcaacaagaagaagacaatttatacttcacgcgcctcttattgctttttcttttccccaattaattatgtctactgctattgcaatcgcagagattgatgtgccacaagatttccgagtttatactgatgaagtgaataagttcaagatttttattccgcaaggtcagtgactctttcctatatccatttcaatgtttgtaaaatgaaatgattacttgttgctgttgtagattggcaagtgggagctggtgagcccaataatttcaagtccattactgcttt

SEQ ID NO: 20101 - DNA, 612 bp, Gossypium hirsutum
  Clone ID: GOSHI-09MAY01-C8379_1
gtcgccatcatggtcacgggattcaggcagtgagcagtctaagagtgttggtggtggaatggatgagactagaggtagtagtaaggtgcaactgaaggatgttagggatgtgagctcacctacacggtcaagggattctttgggggcaggcagggttgttggggaatcaggggaggaggatttgaagaggagaagctccaagtcgaagtctaagtcaaggtcaccaacatggtcacgggattcaggcagcgaacagtctaagagtgttggtggtggtggtggagaggagaagaagaatgaggaaacaccggtggagaatgggactagtactgagatggaggaacgtgaatttgatcctggtcctcatgctaagtgtgaaactgatttggctactggagctggaaccgggaatgatgggaatgagtcttggcagttagaaatggagaatgttgaaggtgggatgattccaaatgtggaaggtttagaggaggttaatgaagaggtggtgaataaaagagaaaatgatgtgaaggatgatggtgagttgcaagattgtagacagactctaaatggtggaactaatgaggtggtgaatagaagagaaggtgatgt

SEQ ID NO: 20102 - DNA, 267 bp, Gossypium hirsutum
  Clone ID: LIB3166-001-Q1-K3-B6
ctccaagtcgaagtctaagtcaaggtcaccaacatggtcacgggattcaggcagcgaacagtctaaaagtgttgttgttgttgttgaaaagaaaaaaaaaatgaggaaacaccgttggaaattggaattattattaaattgaagaaagtgaattttgttcttaaacttaagcttagtgtgaaactgattttgctacttaagcttgaaccggaaattattggaaagagtcttgtcagatagaaattgagaatttttaaagtgggatta

SEQ ID NO: 20103 - DNA, 327 bp, Gossypium hirsutum
  Clone ID: GOSHI-09MAY01-C8339_1
cccacgcgtccgctgaggcctgggcacgggggtcccaatcaccgaacccgtccgctgacggcacactgttcgagctactcccacggcgagagccgctcatcgtgtgccgacccgcggacggactgggaacggatcactaaccggcctctctcagtcgacgaacacccgactcacaactggttccgacaaagcgaatccgactggccaattaaaacaaaccattgcgacacgtcctggacatgctcactcaatgcgattgatgcccagtgctctgaacgtcaaagagaacaaagtactccaagcgcgcgttaacggcgatagtaacta

SEQ ID NO: 20104 - DNA, 564 bp, Gossypium hirsutum
  Clone ID: GOSHI-09MAY01-C8329_1
gggagagggagagggagcgaagacatgattatgatagaaggtcaaggtacgctgatgaaagtaggcgatacaggagcagaagccgaagtccgagtgtgagcggaaacaggaggagcagaagtcagagtgagcaacgtgggaacagtcattatgatcgacttccaagtccagcaaaagagggaggcaaggcatccagtaatttggcgaagctgaaagatctgtacggtgatgtaagtgatacaaagggagatgatggggggtttgaaaggatagcaaagagggacaacagtggtaaagaggtgattagactaggtggttcttcttggaaataatagggtgggtgggtgcattgcagaacaccaaatcaaatcaaatcaaatcagacccaaaaacaaaacaaactttgtcaacattttcattctccctttctggacaatgctggattgctgatggatagatgcagtcgtggtcacgactggcataacgtgtatactaatgttccattatcttcttaattttaacttcagatgattccaaaattaaacttcaacttattcgaatgcc

SEQ ID NO: 20105 - DNA, 527 bp, Gossypium hirsutum
  unsure (1)..(527): unsure at all n locations
  Clone ID: uC-gsronu33B080b12b1
ggatcaagaccggggttggggtcgggaccgtgagggggatttagatagaagttgggatcgggatcgggatcgggattgggatcgtaatagagaaagaaacagagagagagagagggagagggagcaaagacatgattatgatagaaggtcaaggtacgctgatgaaagtaggcgatacaggagcagaagccgaagtccgagtgtgagcagaaacaggagcagaagtcagagtgagcaaggtgggaacagtcattatgatcgacttccaagtccatcaaaagagggaagcaaggcatccagtaatttggcgaagctgaaagatctgtacggtgatgtaagtgatacaaagggagatgatgctgggttcgaaaggatagcaaagagggacaacagtggtgaagaggtgattagactaggtggttctttttggaaataatagggtggttggttgcattgnagagcatcaattcaatttatgaccagacccaaatacatgacaaactatgtcaacattttattctccctgt

SEQ ID NO: 20106 - DNA, 400 bp, Gossypium hirsutum
  Clone ID: GOSHI-09MAY01-C8289_1
acgcgtccgcccacgcgtccgcaaatttctattttttagaatacaaaaaatgggctgcacttcttccgaaagcagcgtcgccgccgtggatttctaccgtccgccgccgtcaagctttgcggtgttcgacatcaacgccatagatgaaccgtgggttaaggtggaccaaaccccgtcggagaaccaagagaagcccacacatgttcctgctgcgattctcgagaaactcaacgcctttgaaactgctcctcactcatggggtgaagttagcaaagcgcttgaagatcttaaacccaccattaacaacgagaacaagaaaccccaagctccaaattcgcctcaaaaaccaccaaaacaagttactcagctcagcctcgtaagaacttaagttttcatactt

SEQ ID NO: 20107 - DNA, 434 bp, Gossypium hirsutum
  Clone ID: GOSHI-09MAY01-C8249_1
taatcactgattcttttgatctgccattttgaacttcccccctttcttccatctccttccggctttagcctagtcctctctggctgccgcttttcctctggttttgggcttccatgggaccgctttcaatcaggttgcctttctacatgcaatccctttgccagcgaaggcggaaagtcctctgtggtggatctcagtgcatgaaaggagaaggaccccttcgctatttttgacaactacctcgaaagccaattgacgattacgctcattatatgctccattgaagtttattttcactatctgatcagatgggggtttccattttttaatctccttagaaactctggaagtactgttctcaaaaccattcacttcttttaaataactaagaacaaatcttgacatctctgaccagatctgcttgtttatcatgt

SEQ ID NO: 20108 - DNA, 373 bp, Gossypium hirsutum
  Clone ID: LIB3165-027-P1-K1-F2
ctcattcctgctttagtctagctttctcttgctgtcaaatctactgtacgaggtggcatgcatgggaacgctttcaatcatgttgcctttctacatgcaatcgcttgggcagcgaacgcggaaagtactctgtggtggatctcagtgcatgaaaggagacggagcccttcgctatttgcgacaactacctgcaaagccaattgacgattacgctcattatatgctccattgaagtttattttcactatctgatcagatgggtgagtccattgtttaatctgcttagaaactctggaagtactgagctcaaaaccattcacttcttttaaataactaagaacaaatcttgacatctgctgaccagatctgcttg

SEQ ID NO: 20109 - DNA, 719 bp, Gossypium hirsutum
  Clone ID: GOSHI-09MAY01-C8229_1
cccacgcgtccgaattcccatacgtccgctcagcttccattgttttctttcctcttaggtcagtggaggcattgagcttctctcttgatcacaatgactatcctcattgatcaacccgagcttggtgttgaagcaggggttaacaagctcgataatgcagacaatgaactggtgttggatgggggatttgtggtgccacagacaaactcttttggccacacttttagagattatcatgttgaaagtgagaggcaacagggtgtggagaacttctaccggaccaatcatattaatcagacttctgactttgtcaagagaatgagaacagagtatggtaaactgaacaagatggagatgggcatatgggaatgctgtgaacttcttaacgacgtaatcgatgagagtgaccctgacttggatgaacctcagattgaacacttgctgcaaacagctgaggctatcagaaaagactatcctaatgaggactggatgcacctgactggccttatccatgaccttgggaaggtgcttcttcatcctggttttggggagcttcctcagtgggctgttgtaggtgacacatttcctgttggttgtgcttttgacaaatcaattgttcaccacaagtatttcgaggaaaatcctgactatcataactccgattacaacactaaatatggggtgtacttagagggatgtggacttaacaatgtgatgat

SEQ ID NO: 20110 - DNA, 503 bp, Gossypium hirsutum
  Clone ID: LIB3825-009-Q1-N6-B11
aatatcactataaattgttttttcgtttaaatatttggggttcgcttctcttttcattcaagatgaccatcctcattgatcaacctgattttggaattgaagcagggtttaacaaggccgatgatgttgaaaaaaaagcggtgttgaatgggggatttatgatgccacataccaacttttttggccacacctttagagattatcatgttgaaagtgagaggcaacagggtgttgaaaacttttatcgaaccaatcatatcaaccagacatatgactttgtcaagagaatgagagaagagtccggaaatttaaacaaggtggaaatgaccatatgggaatgctgtgagcttcttaatgatgtggttgatgaaagtgaccctgacttggatgagcctcaaattgaacacttgctgcaaacagctgaggctatccgaaaggactatcctgatgaggattggctgcacctcacaggccttatccatgaccttggaaaagtgcttctt

SEQ ID NO: 20111 - DNA, 402 bp, Gossypium hirsutum
  unsure (1)..(402): unsure at all n locations
  Clone ID: LIB3825-002-Q1-K6-H10
ggggtggggtggtcttttcattcaagatgaccatcctcattgatcaacctgattttggaattgaagcagggtttaacaaggccgatgatgttgagaaagaagcggtgttgaatgggggatttatgatgccacataccaactcttttggccagggggggaggagatttttttgtttttttgggagaggcaacagggngnngagaacggggagcgaaccaanccccggacggcgacacangacnnngnnaagagaangagagaagagnacggaanaccagacaagggggagaagagcacacgggaacgccgcgagcgccccaaagacgcggncgangagagcgaccccgacccgggagagccccacaaagaacaccggccgcaaacagccgaggccacccgaaa

SEQ ID NO: 20112 - DNA, 379 bp, Gossypium hirsutum
  unsure (1)..(379): unsure at all n locations
  Clone ID: LIB3149-040-Q1-K1-G7
aaaaccgggccacccacgcgtccgaagagaatanaacagattggttttcttttaaganggagatgggcatatgggggggcggtgaacttcttaacgacgtaatccattagagtgacccccacttggatgaacctcagattgaacacttgctgcaaacagctgaggctatcagaaaagactatcctaatgaggactggatgcacctgactggccttatccatgaccttgggaaggtgcttcttcatcctggttttggagagctttctcagtggtctcgtgtaaagcacacattccctgttggttgtgcttttgacaaatcaattgttcaccacaactatttcgaggaaaattctgactatcataactccgattacaacac

SEQ ID NO: 20113 - DNA, 472 bp, Gossypium hirsutum
  Clone ID: LIB3582-041-P1-K1-B9
cccacgcgtccgcccacgcgtccgcccacgcgtccgcctcatttggattttggttaaatgggaagtgtaggaaaaagtagctgaaagttttgggttttgcttggttgattttctttttgtttcacattttcctactgaccaaacaaagggtaaagatagaatcttattttccagtatctatgaggtttgcatatacaatttacttaattattagggtttatgacattcatcggtaaccccttttttattttttgaagtgacgctttctttaaggatcagcatttcagtgaactctgttggacttgaatttgagatgtgtaaactgtttgagtatttggaaagacagcaacatgcactgaagtttttactctttatttattgtttttaataaaatcccattagatgatctgttaaaatatactatactattggatttgggatatctactttaaggctgatgtttctttttgat

SEQ ID NO: 20114 - DNA, 413 bp, Gossypium hirsutum
  Clone ID: LIB3166-020-P1-K1-G12
cccacgcgtccgcatcggtaaccccttttttattttttgaagtgccgctttcttgggggggagcatttcagtgaactctgttggacttgaatttgagatttgtaaactgtttgagtgtttggaaagacatcaacacgcaccaaagtttctactctttattgtagaaagatgagtctcttccagacagagatcaggactaaaacctcgatttcatacgtcacgatttcatggttctgaggatgcggaagatgatataagtatttttttcctccttttgtgccagtcaatcagatattgatgatgactcattcaatgtatggaacttaaggaaatgcagtgcagcagctcttgatgttctatcaaatgtgttcggggatgaaattcttccaactttgatgcctattatttaggcc

SEQ ID NO: 20115 - DNA, 662 bp, Gossypium hirsutum
  Clone ID: GOSHI-09MAY01-C9969_1
acaagtctcttcaatggtgggtgaagcaaagttgatagaaaatagggtgggaaaaacccgtctccacagatggtttatttcgttttattaaatcagtcatttccgatgaacaacaagaagaaacaggcccattttacgtgctggatttgggtgctacgaggtccctagtcgagacatggttccataatcttcccatggttcaacctttctatgcagtcaaatccaaccctaaccccgctttcctcaaagaaatggcagctctcggcaccggctttgactgtgcaagccttcctgagattgaaaccattttatcgcttggggtttcgcctgatcgaatcgttttcgcaaacacatgcaaacccgagtctcacatcaagtatgcaactaaagttggcgttaacttagccactttcgactccaactgtgagctcgaaaagataaagaagtggcacccgaaatgtgaactgttgatccgaatcaaagtcccggaagccagtggttcagcattcatgttcggttccaaattcagtgcactccctgaggaaattgctccccttctgaaagctgctcaagaagcgaagctccaagttgtcggagtctcgtttcatattgggactggagcaattaacttccattcaatccaaggtgccatcgaagcagct

SEQ ID NO: 20116 - DNA, 612 bp, Gossypium hirsutum
  Clone ID: GOSHI-09MAY01-C9939_1
cccacgcgtccgcccacgcgtccgcggacgcgtttgtttccgtggtccagggaatgcctctgggagaagcctctgaccaatatttttggtttggccgaccccaattagttcttcatctgattcattttgcattatttcaggttttcattagttctacttcaattgattcttgaatataagtgtagcttccctttaacaataaatgaatatgggattaaaatcctaacttcgattgttcttgtttggatacgtaacttaggtgcatgggaacattagtaaagaccatgaaaaaacttcttccttgcttagtttatatatgaggggtcctgattttaataaataacaaaaactaacattgaaggtgtgtgatttccttcttggaggtcaacccagctagaaagtcctttggttaatgcaaatttagcatgagtagggtcccagcctgtgtcattgttgcctgaagtgacagccctcaatatcttattttcttatttgcttgctgatgctggccaatacaaggcctttatgaaacttgcatttactgcaagcaatctcaattttaactgattcactaaggccccgttcttcattgcgtttggggtccaaaagtgc

SEQ ID NO: 20117 - DNA, 882 bp, Gossypium hirsutum
  Clone ID: GOSHI-09MAY01-C9859_1
gacgcaagaaaaaaataaaaagggaaatcccctttctctgctagggttccaggcttagcattggaaccccgccgccgtccctccttcccacttctccgatcgtgccgccgtaatagttgacgggcagagacgaaagacgggcttttaatcccgcttttaagtgtggtgaatgacaccagtgagggggagcctaaagagaaaaaggagaagtctaaccccctttagcccaaccccgacgacgacgaaaggatctccgtcgacggagccacgcggcggtttcaggcgtcagacgcgtggacgaccggtggttggcgagccttgggcggtggcggcgtgcgaggaggtggaacggcgcgcattgttggagcctggcatgcggcgctggggcttagggtttgctccattctgtcgaaattgttaaagtcatttgggccaggtttttttactttgggcccgttgggtgtatttaattttggctttgggctactactgtaatagactgtcttattttggattttgggtttctatttagggcccgggtaaaaatgggctccttccaaaaaaaaaaaaaaaaaaaaaaaaaaaaaaaaaaaaaaaaaaaaaaaaaaaaaaaaaaaaaaaaaaaaaaaaaaaaaaaaaaaaaaaaaaaaaaaaaaaaaaaaaaaaaaaaaaaaaaaaaaaaaaaaaaaaaaaaaaaaaaaagggggggacaatttaaaagtgaaaaaatttatgggggggagggaggaaaaatttatttttttttttatgggggtttaaaaaaaaaaaaataggggcggtttttaaaaaggttggaaagggaaaaaaaacttggggttcccaattaataacctttgggaaaaacccccttttttccaattg

SEQ ID NO: 20118 - DNA, 416 bp, Gossypium hirsutum
  Clone ID: uC-gsflnu33B056f04b1
tccacgcgtccgcggacgcgtggggcgtggacgaccggtggttggcgagccttgggcggtggcggcgtgcgaggaggtggaacggcgcgcattgttggagcctggcatgcggcgctggggcttagggtttgctccattctgtcgaaattgttaaagtcatttgggccaggttttttattttgggcccgttgggtgtatttaattttggctttgggctactactgtaatagactgtcttattttggattttgggtttctatttagggcccgggtaaaaatgggctcttacaaatatgtctcctcaaaggtcttaagaatgccatttttgccaaacatatgcctaacatgaaccatccaggaatgtttgcaaaggtccttaatggcacgccccacaactgaataagtttgctaatctt

SEQ ID NO: 20119 - DNA, 727 bp, Gossypium hirsutum
  Clone ID: GOSHI-09MAY01-C9559_1
acggaaacaccaagctctggacgctgaagaaaacccaaagcgaaacacggactaaggaagagctcgcggcacacatcaagcaattcacaaagagtctgacattcaaggcaagccccatgccaagcttctaccatgagggaccaccaccaaaagttgaactgaaaaagatgccaccaactcgtgcaaagtccccaaagctaggtcgaaggaagagctgcagtggtccactcagttcaagtcacggagacatggtaaaaggtacttctcatcacaaaaatcgtcacagtttgggtagtcaaagagaagccattattgccaccacattctgctcagctaacataacgaatcaaaacaatgtcccgaatggaaactctcctttggaattcaaagatgagtcttcgaaagcacaagagatgtgtgagttggttccacccgacgcaaatggccacattgacttggacataaatttcctatcttgagtttctggtgagttttctaatttaagggaaacacttattcccttatttccttgtgactgcactaaagaatgtttattctgttttcttaaaactgcaaagacttgttgctctttattggtattaagtgtaaattcctgtaagttataacgtggttaatatatatgtataatgctcctgatctggtgtaatatttcacaaagtcaagagactccacttcacttatttgaacatttcaataaatttttctt

SEQ ID NO: 20120 - DNA, 649 bp, Gossypium hirsutum
  Clone ID: GOSHI-09MAY01-C109572_1
tgttcacgcgtccgcccacgcgtccgcccacgcgtccgaggacattgatctccattctccctcacacagcaaaaacctaaggctacaaggaagaagaaaaagctaacagcagcagcatgagtttccaaagagtacctcaagacccttaccctcctcctgggtatgcctctccttatccacccccacccccatctggatacccttctgctccaccttacgaaggctacccaccaccgccgcctccaggttatccaccgtatcctcagccgcaacgccagccttacgagggttaccaagggtattttgctgaagggtatcccccaccaccacctccacctccacctccaggtcatcctcaatatcaccactgccactacgagcatcaccatcaccacaatcattctgatgatggctgtttctctttcttaaaaggctgtttggctgctctatgttgttgctgcatgttggaggaatgctgcttttagtgaagttctactttgcattttgtggaggtcaggtcatatgctatgtattcggttccgtacccatctattattataatctatctactcaaaccttataaaccaaaggttccattataaatacaggctgctctgagttcccgttgtatataaagattttaaaaaaa

SEQ ID NO: 20121 - DNA, 358 bp, Gossypium hirsutum
  Clone ID: LIB3083-102-Q1-L1-G11
tagcatgatttttcaaagagaacctcaagacccttaccctcgggctgggtatgcctctccttatccaccaccaccacctccacctccaggtcatcctcaatatcaccactgccactacgagcatcaccatcaccacaatcattctgatgatggctgtttctctttcttaaaaggctgcttggctgctctatgttgttgctgcatgttggaggaatgctgcttttagtgaagatctactttgcattttgcggaggtcaggtcatatgctatgtattgggttccgtacccatctattattataattgatctactcaaaccttataaaccaaagtttccattataaatacaggctgctctg

SEQ ID NO: 20122 - DNA, 553 bp, Gossypium hirsutum
  Clone ID: GOSHI-09MAY01-C9579_1
ctcatttttttttcttttctttatttgctttttttctgcctttaaaactcttctttgccttcctacttatctcctttatttgccttgttgcctttcgtcaaaacaaaaaccctaacccagaaaatagataaaatacccatcttttttttttcttctcttgcggatctaaactgggtttccaaaacctttctctctctgtttaaagcttgggctagtgaaggtgaattttggggaattttttctgggtataaaatatcgagtactttgagggttttattgtttaaagtacgaggtctgggtctcatgagaattgtcaggggaatgcagagattgtttcgtgaggaggcaaacgtgctgggctggaagaaatccttcagccaagggattggcattaccgcgcccaaggcaagaaaacgagacaaaactatgagtctcggtctctaaatttagggggttttggaaaggaagaattagggctagtgcttctcattgagaataattatcatcaaaagcaatgactcgcattttggttcaacgaggttccactggcagc

SEQ ID NO: 20123 - DNA, 546 bp, Gossypium hirsutum
  Clone ID: AI728106.1
ctttaagtttgattgctgttctttgcttttagcaaaactcctattcttttgttctttcttcttttgttcttttctttttttttttaaatttctgataatgttgtttcacttttagctcttctttttttcctcgtacgattttaattttccacccctcaagatcaaaccgaacagacaagttctaaggatttcaaaaagaaaaaaaacccaacaatggcgccgtcttttgatttatgggcaaaaggcagccataaaggtacaccggttgttgtcaaaatggaaaacccaaactggtcaatgttcgagcttgaaggtccatccgaagaaaatttcctcatcggcaacaccccgaccggttctcgagaaaaagcgcgcggcaaaaacgccaaacaactcacttgggtactcctcttaaaagcccaccgtgctgctggctgcttgacttccattggctccgcatttgtcagtcttggttcaaccatccgtcgtcgggtcgcctccggtcgaaccgacgccgacagtacttcctccaacgaaaacaaaact

SEQ ID NO: 20124 - DNA, 416 bp, Gossypium hirsutum
  Clone ID: LIB3197-004-P1-M1-A10
tatatctctccctcacgcttctctgctcttcttcaaaaccttgttttcccctttaagtttgattgctattctttgcttttagcaaaactcctattcttttgttcttttttttttttaatatctgataatgttgtttcacttttagctcttcttctgttttttcctcgtacgggttaattttcgaccgctcaagatcaaaccgaacagataagttctaagcatttgaaaaagcaaaaaaacccaacaatggcgccgtcttttgatttatgggcaaaaggcagccataaaggtacaccagttgttgtcaaaatggaaaacccaaactggtcaatgttcgagcttgaaggtccatcccaagacgatttcctcatcggcaacaccccgacccggtttttgagaaaaagcgcgcgggaaaa

SEQ ID NO: 20125 - DNA, 274 bp, Gossypium hirsutum
  unsure (1)..(274): unsure at all n locations
  Clone ID: LIB3166-014-P1-K1-G4
tgttgtttcacttttagctcttcttctgtttttttctcgtacggnttaattttcgaccgcgcaagagcaaaccgaacagagaagttctaagcattagaaaaagcaataaaaacccaacaatggcgccgggttttgatttatgggcaaaaggcagccataaaggtacaccagatgtggtcaaaatggaaaaggcacacagcagacagatctatcttaaagggacattctgagacgactgtctcaataactacactcggaccggttctagtgaaaa

SEQ ID NO: 20126 - DNA, 1130 bp, Gossypium hirsutum
  Clone ID: GOSHI-09MAY01-C9419_1
cccacgcgtccgggcaaagaaaataaaatagtataaaaatttacagaaatcagacggaaagaagagagagggcgtggtcactcactggcgagagagatccaaaggccaaaaggaacgcagagaaccatgggagctgctgcactcccaattcaacagcaaataaactcttaacctgctgcaggtcagggattagagatgggaaggagtaaaacagaagtgaattttcaaaggttacttgcagctgcacctcaacaaaggaatcattctaaactcatgcattatgttgcgactttacgagaacttttagaacagttagctgaagagagaacacctgaaggtttacctagagtttcaagtgctgtggtcagtgattattcaaaaaagattgaggaaattgcttcagaattaactgccccactgcccgagattaaggtatcccaggagcccatcacaagaaactcttttaagcagagtcctaaatcggattcagaaaaccacatgccttcctctccaggattaagaaggagagttgtgcctgcctcgaacatcaaagatagaactcatgaaatcactgaggctgatgcatctgcacctatcaaactagatgctgcagcagaagcacacatacagaagcacagaaagcttcaagaggatttaactgatgagatggttggattggcacagcaacttaaagagcgtagtctcatgatgagccggtccttggaggacactgaaaagatacttgattccactgagacagctattgagcagagtcttgctaccaccgggcatactaatgtacgtgcaatgaagatatattccgaaacctctaagactacatgttttcaatggcttctaatgttagccatgatatgtgttttcatcatggttgtgcttctgattcgtgtaacataaaatagttcttgaaaatgactactcatctgggaagactcatgacgtaaatgcttttacctattgaaacgatgcctgccatgattagcgcttcttcattctatcaatgtgttataagtaggctttactggctatacatttgtagaatcgaggtttagtactggcagatgcaccttccgtagtttgttgctgatgatgattaacgttcagttctgtat

SEQ ID NO: 20127 - DNA, 892 bp, Gossypium hirsutum
  Clone ID: GOSHI-09MAY01-C9409_1
gttacccgctcattactccctcttcttctcatcttcgtcgcgccctaaatcccgcaggtaactctcaaaatttggccggaaatttcccatttccagcaacacaagtcaatacacctacaccaatcacacttctttttccttttcatttcttcaaagattttaatctgaagaaatcttagctccgcttttacaacaatggagcgcaaggctattgaactagatcagggatgggattatacgaagattttgattttataagagtataataattgcgctcaagtcgtcaaattcatattttgcggtgggtattgtatagattattatttaaggattggctcgattccgatttcatcaccattttcatatctcaagtgatctctctgtaaccgcttgctggtaaattttatagaagaccccgccaccattactttcccttcatatttgaaggtttaatatattgatagttggaaactaaaaacaaaatgggaaggatattcatgatcactcttgaaggatgcgtttatagctgcaagtactgctttacccatctggctctccttgacgacattatttctaagtctttccactgcgggcatggaaaggcttatctctttgataaggtgcgagtatttcattgctatgcactcttttttttttctccatggagtgttctctaaaaatagtcttatctattttaaaaccatgctcatgatttcactttctatgcatttcaatgtgttgattttggtatggatgtatgatatgtcctttttttttccttctctccttttcatttatctaataaaaaaatgatgatgctgatgatgctgatgatgcttgattgccatttaatcacatgttctagttgtacatatctctgcttctcctgcgc

SEQ ID NO: 20128 - DNA, 440 bp, Gossypium hirsutum
  Clone ID: LIB3585-065-P1-K2-B9
gctcatgctagggttttgttgattgtttgatttttattgttttgtttatgtgcttttacagattgtaatctgaagaaatcttagctccgcttttacaacaatggagcgcaaggctattgaactagatcagggatgggattatacgaagattttgattttataagagtataataattgcgctcaagtcgtcaaattcatattttgcgaaggtttaatatattgatagttggaaactaaaaacaaaacgggaaggatattcatgatcactcttgaaggacgcgtttatagctgcaagcactgctttacccatctggctctcattgacgacattatttctaagtctttccactgcgggcatggaaaggcttatctctttgataaggttgtcagaataacctctcagagctgcaaaagttggtacatattctatcagcatgtta

SEQ ID NO: 20129 - DNA, 403 bp, Gossypium hirsutum
  Clone ID: LIB3166-014-P1-K1-A5
aagatttccgaccccaacctaagaaataactccaatttcggaaattatacgaagattttgtttttataagtgtataataattgcgctcaagtcgtcaaattcatattttgcggtgggtattgtatagattattatttaaggattggctcggttccgatttcatcaccattttcatatctcaaatgatctctctgtaaccccttgctgttaatttttatagaacacacgtccgcattactttcccttcatatttgttggaaactaaaaacaaaatgggaaggatattcatgatcactcttgaaggacgcgtttatagctgcaagcactgctttacccatctggccctccttgacgacattatttctaagtctttccactgcgggcatggaaaggcttatctctt

SEQ ID NO: 20130 - DNA, 1317 bp, Gossypium hirsutum
  Clone ID: GOSHI-09MAY01-C9429_2
agccttccgttcggagaagggaaaattttaaccaaccaactttctcgccatccaaacaccaaaaaggaaaagggctcatatagtattccaaacctctcaacttcccaagacgttgttattaaaaccgagtctaccacctccggttcatcctttagcaggtaaacctagaaagaatcttacggtggtgaaatgttcgtcttcttctttaatcgacggtggagattcctccgtcgctgctctcgagcgatgtttctcggcaccaccggctcctgtggagtccgcttcttcaggttcaggtgaggttggacctgttatgaaaggagggcaatacggtgcgtttggtgcggttaccttggagaaggggaagcttgatttgtctcagaagcagtctacttctagccctgagcttgcaactgggggaggtggtggagatattggaaagaaaattaatcatggaggtggagatgggggtgatgatgatggagatgatgatgattattttgatgactttgatgatgatggtgagggagaggaggggggactatttagaaagcggatgtttcttgaagagctctttgatcgaaaatttgtagatgccgtattaaatgagtggcacaagacgatgatggacttgcctgctggcttccgacaagcttatgaaatgggattggtcagttcagcacaaatggtaaagttcttagcaattaatgccagaccaaccaccagtcgatttatttctcgaactctccctcaagcaatgtctcgggcatttattggcaggatgcttgcagatcctgcctttttatacaggcttcttttagaagaggttgctactattggttcttctgtttggtgggagttgaagaatcgaaaggataggattaagcaagaatgggatctagcacttatgaatgttctcacggtagcagcttgcaatgctcttgtagtttggtctcttgctccttgtcgttcttatggcaataccttccggtttgacttgcaaaacacgttgcagaagcttcccaacaatatatttgaacggagttacccacttagagaatttgacttgcaaaagagaatccattctcttttctacaaggctgcagagttgtgtattggtggattaactgctggagcagtacaaggttctttgtcaaattttttgcccagtaaaaagaaggaaaagttgtctgtgacaattccgtccatgagtaccaatgcgctgggttgtgctgccttccctggtccctatgcaaaccttagatatcagcttttgtgtgggtttgatcaagcaatggtcaaccattttgatgtcat
